United States Patent Application Publication US 2015/0141320 A1 - sequence listing, part 5

SEQ ID NO: 677 - DNA, 4086 bp, Homo sapiens
aaaagaaaacgacactcactgagggtctaccctgtgcagagaaccctgcgagatgccccatccgagttgtcacgtcgtcctcacggttactctttgaggtgggatctttgcctgatctttgcaaaatcaggagcattggatcaaagctatgtgaagatcctgtgaggtgaacagtgaaatctcacagcgacatttgtattcttgggccgtgcccaagagcacgtctcggctagagaggggcacagcctcccagagccaggtctgagcagctttgcctgggagggatctgcaaagaccccaggatttcagaaagaaattgtgcaatgccagaggttccttggcatgcccgggagggcgagtcatcagagaaacaatgacagcaatgtgacttccacacctcctgtccccccgcccaggtcctgttgttggtgaatggagctcagttgtgtggggggaccctgatcaacaccatctgggtggtctccgcggcccactgtttcgacaaaatcaagaactggaggaacctgatcgcggtgctgggtgggtaccactctcccctgtccgaccgcggtgctgggtgggtgccactcttccctgtccgaccgcggtgctgggtgggtgccactctcccctgtccgaccgcggtgctgggtgggtgccactctcccctgtccgaccgcggtgctgggtgggtgccactctccgctgtccgaccgcggtgctgggtgggtaccactctcccctgtctgaccgcagctctcaagtgtctcaggggctgtggctctgggcttcgtgctgtcacttccacagacagacagacatccccaaaaggggagcaaccatgctgggcacgactgctgtggccaccgtgctctcagccactttcccatgcccaaataaaacgataaaagactgggggcttctgcccatcctgcctcacttgaccaagagcccagaagaggatgcgacacccagggcctcatgggaccaccggctggcaggggttctgctcactgggtttatgggtgagacgagcactcccaggagggccactgggccgggaagaactgtggagaatcggggcacgccctgtcctcccagctgccagggcacagcatcccttccccacctcaacacccagaccccagattcaccccagttcacttgtccccacacgagccacaggctgccacctggggcaggctggccccaccttggggttagatgcaggtccccttgccccagaaggagactgcagcccctgcagacctagaaatggccacagcccatccccatgcaccagggggtgaggtggcaggtggtggaaagggcctgaggggggcttcttccttccaggcgagcacgacctcagcgagcacgacggggatgagcagagccggcgggtggcgcaggtcatcatccccagcacgtacgtcccgggcaccaccaaccacgacatcgcgctgctccgcctgcaccagcccgtggtcctcactgaccatgtggtgcccctctgcctgcccgaacggacgttctctgagaggacgctggccttcgtgcgcttctcattggtcagcggctggggccagctgctggaccgtggcgccacggccctggagctcatggtcctcaacgtgccccggctgatgacccaggactgcctgcagcagtcacggaaggtgggagactccccaaatatcacggagtacatgttctgtgccggctactcggatggcagcaaggactcctgcaagggggacagtggaggcccacatgccacccactaccggggcacgtggtacctgacgggcatcgtcagctggggccagggctgcgcaaccgtgggccactttggggtgtacaccagggtctcccagtacatcgagtggctgcaaaagctcatgcgctcagagccacgcccaggagtcctcctgcgagccccatttccctagcccagcagccctggcctgtggagagaaagccaaggctgcgtcgaactgtcctggcaccaaatcccatatattcttctgcagttaatggggtagaggagggcatgggagggagggagaggtggggagggagacagagacagaaacagagagagacagagacagagagagactgagggagagactctgaggacatggagagagactcaaagagactccaagattcaaagagactaatagagacacagagatggaatagaaaagatgagaggcagaggcagacaggcgctggacagaggggcaggggagtgccaaggttgtcctggaggcagacagcccagctgagcctccttacctcccttcagccaagcccacctgcacgtgatctgctggcctcaggctgctgctctgccttcattgctggagacagtagaggcatgaacacacatggatgcacacacacacacgccaatgcacacacacagagatatgcacacacacggatgcacacacagatggtcacacagagatacgcaaacacaccgatgcacacgcacatagagatatgcacacacagatgcacacacagatatacacatggatgcacgcacatgccaatgcacgcacacatcagtgcacacggatgcacagagatatgcacacaccgatgtgcgcacacacagatatgcacacacatggatgagcacacacacaccaatgcgcacacacaccgatgtacacacacagatgcacacacagatgcacacacaccgatgctgactccatgtgtgctgtcctctgaaggcggttgtttagctctcacttttctggttcttatccattatcatcttcacttcagacaattcagaagcatcaccatgcatggtggcgaatgcccccaaactctcccccaaatgtatttctcccttcgctgggtgccgggctgcacagactattccccacctgcttcccagcttcacaataaacggctgcgtctcctccgcacacctgtggtgcctgccacccactgggttgcccatgattcatttttggagcccccggtgctcatcctctgagatgctcttttctttcacaattttcaacatcactgaaatgaaccctcacatggaagctattttttaaaaacaaaagctgtttgatagatgtttgaggctgtagctcccaggatcctgtggaattggatgttctctccctgccacagcccttgtcaatgatatttcacagagaccctgggagcacctgctcaagagtcagggacacacgcatcactaaatgcaagttcccaggccctggctgcagtgggaggacctggcaagctgcactcttgctgagtccccagggtggtggaagaagaatgagaaacacatgaacagagaaatggggaggtgacaaacagtgcccccactcagactccggcaagcacggctcagagagtggactcgatgccatccctgcagggccgtcctgggcaccactggcactcacagcagcaaggtgggcaccattggcactcacagcagcaaggcaggcaccagcaacccacctcgggggcactcaggcatcatctacttcagagcagacagggtctatgaactacagccgtgggctgcttccaaggcaccctgctcttgtaaataaagttttatgggaacacacccatattagtgtccatggagtggccgtggcagagacgtccagccggacagaccagctgacccgccaagcccagcatggttagtgtcaggacctctgctgaagatgcttgctgaccctggccagaccccggttcctaatgccccctaaacgggacgggagccagtggcgggccctgatccaggtcagagctggctctgctttctcttttgtccgagtgaccatgcctcagtttcctcatgtgtaaaacaggagcccaccgtgatgcttatggtgggatgagatcagcatggatggaacaaggccctggaagggcccatgccatggtcatcgacagcaaagccactctgcagacagatgcttcagtgaattggtagaaaattctgcaaccagaatgcccggggctcctgagggcctaagcccagcccagggttctggaagccactctgacttcttgggagtg

SEQ ID NO: 678 - DNA, 4054 bp, Homo sapiens
ggtggggatgagaggacagttcaggagcccacccagacccacaggaggaaactaggggagtcatgcggggtcctggtggagcgccagcctcccttcctgccaatgggaaatgcaggcgcccacctcatggtgctgccggaggagggggcccgggactccccagaggcttcgctgaagggcctgggcgcccccaaaggctacatgtttcatatgggacgtgccacctgccacggctcagctccagctttctgtgagtggcgagatagaatacggggaggccactggccatgggcctgggacagggtgggatgaggcggcaggcttgggccaccaaagccagcatcgccacccagcattgatgacaaagactgcgtgtctgccatgagcatcctgctgttggtgcacacaccgcattggtctctccatacaaacatgcctagaggcgatgtcagagggtggagaccaggagaggcaggagtcagacatctggtgccaccaggaaggcccttctcagaggaccaggctgtgcgtggtgcccgccgtgggaggccagcctggcgttggcatccagcatcatcagtttgtgcagtcgggtggggctcagtgagtgcctcctgtgtgccaggcacaatgacgcacaatgtgtgcacaccaggctcatgtgcaggtggctgcgagacagggcgacccatcaaggcagatgcaccatgaggcagtggccagtgctgtgggtgttaggggcattgctccccggccactacggcatagcaggcagtgatcgccacactggccaagctttagaccatttattccagagaccccagaggcaaaaagcccggctgcacctcccagtgactcccacagccattgagcagagacactcaggaccttgtgatgggaggtttctgcactggagaacgagcccagaagccctctcagcctcggaacagtgtggccagtggtgggcaggtcaggaggggcttcagacacagcctgtccctccagatggtcacgggaaggtcactccccacagaagtacgttttggggccatgcgggcacagaaggtttgggggtgggtggggcaggtgccagcctggcctgtgggaggccatggtgcagatgccaagccccccccgtgacatgagaccacctgataccacccagagagtggctgtgagcggaagggcccgcccagaaacaagcagggccttggggcagaagtcctgggctcagatcccacgctcactgccagcggcctcggctcaggcttctgcgctctctaaacttagttttctcttctggaaaaatgatggggaaaatgatatttgtatgtgaggactgagagttaaatgtaaacatctggaaactacaaaatgagcacgaaatgatgtttttattcttagaacagaaagtccccacacccgcggccctggtgactgatgaggatgaggttctgcggggcctctctggccgcccagctctgcctggggaaggtggggccagagtggatgtgttcccagcgtggtcactcccctgcctcgccagcaggtctcggctccaatcaggaggcctaagccaagtgataagcagccagacaacagccatcccagctggggcgtggactttgctccagcagcctgtcccagtgaggacagggacacagtactcggccacaccatggggcgcccactgcacctcgtcctgctcagtgcctccctggctggcctcctgctgctcggggaaagtcgtaagtgcccctcgcccttcagacccaaaagcagcgccagggagcagggaggggcggcagttggggaaaccctctcatctctgcagcctggacggtgggtgccttgagtgctgccagaggctgggctcggatggctgggcttggcctttccagccaacggcatcctcaaggccagctgtggctccctggggctgagagtcagacgggcggatcagaggtcacagagacaaaaacacaaggacagagtcagagagagaaagggagagggaaggagaaacggagacacagtgagatgggaggccaagaggcagagacagaggtagaaagacggagacagagagagagggaggggttggggcaggcagagacaggacagttagccatctgccaccacagggaggcacaggacgaggggcacagcagaggagctcccagggaggaggaggctgagccgagccagtgccaccactctcggactggctccgtcggggaaggagctgcctaatgcacagctggacaggtgggggcagcagggctgtccaggacccccgggtctgtccaaaagcagaggcccagacaggacagaagccaggcaagcctggggacagcggaggaagaggaggcccctctggtggggacacgagagacagggaccctagacttgtttgcatcctggacaaagtggacaggcaggggcaccaaggggacccaggcctgggaagggaatgtgtgagggagagacggagcagggggagaccctcgtggggtggaaaggggagacccctgggaaggctgagtggatcctcagtgcatcactgacctaaacggcccctccgcctggtgacttggagctccagtcacatcacacgggggtcttctccatcccaccctcaaccccctgccctccccagcctctgtcccctgagccacatcttcctgtctcccacgcggaacgggactcccgtcttcatggggtactgtgtggctccaactcgcccagccttcttcctccccctcaggccacactgccccctgcaggagcccactgtgatgcttgtggtgggatgagatcagcgtgggtggaacaaggccctggaaggacccatgccatcatcatcgacagcaaagctactctgcaaacagacagatgcttccgcgaattggtagaaaattctgcagccggaatgctctaggatcctgaggccctaagcccggcccggggctcccgaggccctaagcccggcccgggactctggaagctgctctggcttattgggaatggaagttggcaggactcctcttcctgggaagaagcagagggtggggatgagaagacaggccaggagcccacccagacccacaggaggaaactaggggagttatgcagagtcctggtggagcgccagcttcccttcctgccaatgggaaatgcaggcgcccacctcgcggacctctgggtccacagggtattggcacccttagctgtgtgatgcgggcctggctcataaccatggcctgtggtgtccccgggggccggcctggaccctgggtggacatggccagccccggagagccagggccaggccatctctctcccctactctgcctcagaggcctcggcagctgcactgtggggtgggtggggctgaacacaggtcccagaaggtcccactcaggaccctgctgtgcacacttttgattttaataaaatcagaatgcgcacagcatctgcagtctagcctttaaacgagcacagctgtcctggcagtcacggaagttcttctggggcggtgggacctcagcattcctttgctggtactgctacaagaaaggacaatggaccaagtagcttaaagcaacagaaacatttctcccacagctctggaggctggaagttcaaaatcaaggcgtcagcggggctggttcctccagaggctgggagagagtctgctctaggcctgtttcctggcctcggggtgccagcggcctcacagcccatggcttgtgggagcattgctcccatcgctgcctccatcatcgcatggggttctcaccatggctgtttttctgtcttcttttctctcagaaggacaccagtcattggatttagggctcactctactcccataaaatgtcttcctaactaaatacatcacaaaagttctatttccaattaaggtcaggttctgaggttctgggaaagacatgaatttggagggacattattcagccctgtcctgccacctgtgagtgttttctgcaatccaactttttattttaataaaatcagaatacgcagagcacct

SEQ ID NO: 679 - DNA, 4044 bp, Homo sapiens
aacagaaaaagtttttggaaatatttaacaaaaagccaacccactcatggccatcatttagcactgggtaggggtaaagagaaagagaaaccctttgaggtatgtggtagcatacaaacatgttcacagtaaccttcctgtattaaccattttctaacaattacaatgccacatcaacacagttagttgttgaaaattctcaacatggctaaatacttagattgcattggtggtgtgcctgtgaaagctatttgggggttgtgtatgtggttctgctcattggaaagacagaagagagaaagggggccggaaaggatactgggagaaaacagaaacaactattcctggtgaaagtgtgtgggcttctgagggcggttgtggcagctgagaagtgctggttatatatagctgggtcacagtgatggggaggtggggatggtggtggatgactgtgtcatgtgcctgtggtgtttagggggtgatcctagtggggagggcctgggagacggctgggtggtggtgtgtgtaccctgtctgagctttgggccggtaacacaatggcaacgtaattatctggctgaaacacgctcaaatggcaaaaagttgcaaaatagatcgacctcccagagaagagacagagctggttacagaggtctgcacccatcatccttttttcaatacattttaaacaagaggatctagcgagtgattctgattcaatacacataatcagtttgcaagtcttatttccatttgaaaacagggccatttgcaatcataagagccggacacgctgaaagatacggagcgcattccgagcagatgatgggtgacagaatctgtaggcaagcactaaatattttcttccagcttcagaccttgtgcatcagtcttctgtcccgaaccattttaaatggaatgttcctgttgaatatataatttaattgcttagaaaatggagactccatggttgggaggaaaaaaccggcaagaaaggtgacagagaaactatgttgattgtgcttctcctcagtactggttaacagtcatttaacgaagagtctacccattgggtagaagacttgatggaaaaaatgaattggtttttaaaggaacaaccgccagaaggggttgccggggctaacattctcaggctggagctgcaaagccctggctgggtgtggccgggactggcggggagtctgcggggccttcagggaagcccagggacaactccgcggcctcccaacgacgccgccaaagacctgggggcccctcgcggcccggctgttccgaattggttgccaaatgtctaaactagaagtgtggacacttgaaatctcgagctgtcttagggtctctcgctacgaaagtttggtttctaggaccaagagaagcagctgtcccaggcccttcgtttcctgtccgcagcctcatcctccccgcaccccccagctctcagtctccccagtcccagtccttaccccgtccacccgcggcctctctcccaacacccagccggcagcctcgctctcggcccccgcccgccccgcgtctccgcgtacccaggtccccgcgccccgccccgccccgcccctgcccaggttctccctcccgttcccgcgctgggaacagcctcggccgcgcgccccctgaggacgcggcccccaacccctcctggagaccacaccggcaagtctggtgtgcggaagagcagaaacttcctcggaatttcgatcccagaatatacaaatattagttcactaggtcacgacgatgatgcaaactctaacttgcagggatttttaaaaaagatcttaacgcacaatctttctttgtacaaataaacgaaaccaaacaaagccagcgaactactgctgtttccctcgtgaattttcttaaggaaaagagagattccttctctccccagatatcaacatctaacgaattttctaggagactgaaactcaacctaataatagtatgtgcttaatgctgattccatttttgtttcaaaggggggtaatttattagcttcctcaaagtggtgcctcgtaggcaggtgttgtattttttgatatccttgtaaagagtttttgcgtctgggaagatctcagaagaaccaataaataaggtgtgtgtatgttggggggtggaggtgggattctgtacagctcatggccctgcttgttcaatttcatgcaaaactcattctaaaagccccagggttctctttaataggggccaaatggcaggaaccccaaagatctaaatatttcactcttcctccctgtacctccctcactgcgccttccacccccagctataaattctagattcccctccccgccccccccccacccatcctgcggataattgagtggctcagaggcactaatctgccctggggtgaggtggggctggcagtggaggtaaggcctcccacaggctccctggttccgcaaaatgggaggacagaactcctacaactggcaggaggtgaagaggacgctgggacccacaggacctagtctgccaggggaaagggaaacaggctcccctgactaaggacacagcctcagaccaggcttggctgggtggacaggaatgtggtgcccaagagcagcagagatccagggtaggaagttgcagccatctgaaaaccccatagagatatattgcccacatgactatttctagaagtggtggttgatcccttcacaccttcccggatccaggatatacagcggctcgctagcccaagtcttcaggtgcaatcccagtcagggagaagaaacttcaccctgccctcctcagggagacccctcctgcctccccagtgtaggtatgtgagaccctcattaggaccccaagatcatgtgcaggaacatcaagcatcttattcttgtatttacaacctggtgtgactttattatctacttttcttctgtttcttcatccttccccattttccatttctttattccaatgccgatgttttctttgctttcttgtccaactccagtcatggctgcaatcctactttataggcaattcggtattgtttatcctaatgtcagtactaaaaggaaaagtagagaaagtggataggctaagtaataaagaatgaaagccagtaaggtccatatgggagaccagttggggagtaagaagaccagagaagagccaaggtcagcctatcaaaggactagggagaaaaacgatagaagcaaagagaagccgcagcctggagaaaatcaattaatgtcagtagatggggaggagggagtacagccgggacccaaggcatatgcctcccctggaggggcatagagagggataagggggaagcagatgtgtgtatggcagtctgtctctgagctgaggggcaaaaactagcaaagcttgccttcccttcttccgggctttaagaagggggactgtcctgccagagcaaattgaaagactgtggagcccaggggtcaggactgggagttcgccagccgaactccagcctgctcctccatcctggatcgctccgggttctgtaccccgtggaggaacatattcaagggaacctgggggcagagggcaaggccaaggggaggggaaatagcttctagaaacttctgtggagacaggcaaaactctttttctgcacacgtgtcccattcctcctccctgtagtttggagagggcattttagaaaaagagtcccttggttccttggttttccccgaacctgaggttggacagcgccccctttattctccgcgagcgcagcctggacaaaggcgtcacttggagggcgccccagctgcctgggaactccgagcggagcccatcccgcttccctaacccgagtcgtttcccaggatggaaggcggatcccggctccccgcgatcaggctaggccgcgggttctggctgggctgcaccccccaggtccccgcccccagcccccaccctctgcccctctggccgggctccgcagggctctcgcagtttcggagcccggggaccccggcgcaggaggaggcctgg

SEQ ID NO: 680 - DNA, 4033 bp, Homo sapiens
actaacattgtgtttaatttgctcttctttttctagtttcttaacatataagctgaggtcattgatttgaggctacactagcttcctatggctgttgtaacaaattaccacaaactcagaggcttaaagatcaggaatgtattctctcacagttatgggagctagaagtctgaaatcaaggtgtccgcagattgtactctctccagaggctctggggagattctgttccttgcttcttccagcttctggaggcttttggcattcattggcttgtgacacatttctccaatctgtctccatttccacatggccttctttgtatgtgtttctctttgtctcttataaagatgctgtgatgacactgaagttccactcagataatccagggtgatctcatctcaagattctcaattatatctgcaaagactctttttccaaataaggtaacattcaaaggttctagtgattaggatgtggacttatctttccagaagccacaattcagtccacacagagacctttcttcttttctaaacaggcatttactactcagaatttccctctaagcactactttagctgcatcccacacatttttataggttatgttttcagtttcattttcaagtcagtgaaaacatgttcaaattccccttttgatgccttctttgactcttgagttatagagacttatgttctttaatttctaaatggtggttttctagagatcttgctgctattggttgctaatttgattctgttgtgatcaaggtacttggtatgacaggaatcctttcaaatttattgaggcttgtttaatggcccagaaaatgatctgtcttggtggatgtatatgcacatttgaaaggaatgcttgctctgctgttgttgagtggagtgtgtataaatgtcaattcggtcaacttgttccatagtgttattcaagtcttccatgcccttcttgttattctgtctacttattgagagagacatgttgaaatcttcatctataattgtgagtttcactattctccttatagttctatcagcttttgcttcatgtattttgaagatctgttactaggttcataaacacttaggattgttatgtcctcttgaattcaatattttatcattatgaaatgatctcttttttatctctgctaatattccatgttctgaagtctttttctgattatttagaccagtttcatttaatatggttattgatatgttgagtttaaatatactatcttgctgtttgtgttctatttgagacttcaactatgtcttccttttcctctttttatgcctttttttggggtattgagtgttttctacaatttcattatatctccttttttgcatattagcaaaacattttcatgtgttgttttagtggttgctttgagatttaatttagcatcacagtctactttcaaattatactataccacctcatgtataatagaagatccttacaactgcacacttttattattttctcttctggtttttgtgctattgtcttatattttacttctaaatatatccacaataaatgtttattatttttgtcttacacagtcagtaatcttttaaagagatgtaaatagtaaaaaaaattcttttatatttcacacatagttactatttctggtgctcttcactcctttgtgtaggttcatatttccatctagtattattttcttacaaagaatttcttttcaacatttcttatagtactggtgtgatgttgattaattctttcagctttgcctgtctttatttcatcctcattttgcaaagatattttcattaggtatagaattataggttcacaatgtttctgggttttctacccccagcactttgaagatgttgtcccagtgttttctggctgaaattgtttccagggacagcacaaaagtgtggagcactgggagggcttcacctctacctcaacagtcttcacaaactctctctaatctctgatatggaaaattaatttttagtaggttgtgtaagtgaagttttatagccctgcttcccatctgcctaaatggcacacaagattgttttccatcgccatatcctcactgtacatggaaattctggaactcccaccaattgcttccagagcagcggcacatgtcagagttagacattctatcatcccaattttgagccctttccaggatataactgccattattaaatggttattttttcttacctaagactttttaaaatgatccatgaagatgtactcttttgaggatgcaaggagagaattacagcatatgtttttaagaggttaccttgtgcttaattgaagttattcattaaagtcttacaaactatgtcttaggagaacatagaatttcagaccaatagtaagaaatgcattagcctgggccttttgagaccaaagcttggggaacactcttagataaaggaatagtcttggctggacccttccttctggcaagatacattccaggcattttggcattcatattacaagagaaaggtaatatattccctatttttatagatgaggaaaccgaagcccagaaaggttaagtaaattgctgaagatcacatggctagtaagtagtagaactaagttttgattgtcaacatgtcatattccaaaccacaagaggagtcattgcctaaataatcagacctttaaagaattgtctacctatcccccattcaacatcttgaaattttatagttattttgacagcaagatagttcaaatatctactcatctgcttggggagtttctttgtattactcccttgtctagctccgtagatgtcaaactttaatgtggacaaaaattattctatcaaagtataatctcaaattttgttaccatttcatcagttttctagggtacttttggtattattaaattttaccttaaggagtgtcatattttaaacgtaacaactaattgttatggaaccacactgtattatttccactatattcaatgcttctctaattttcaacaaatagtttccagtccttttggaaaaatgtagtaataaggaaaacactgtgggtaagagtatatttaccaagtttatatgactttattttagatttcagggagtgtgattaatgaacctgaagagtttaaattcttgttcgtagtgaggaagatgacttctcaaaagacaaagttaagcatggaagtttaatctaagacagcacctgtcaaactttggagtgcataagtataacccaaaaagcttgttttaagtgtatattcttgaatgggtgttctgagtccagtaataaaaagtacattatctgactatgcctttttcagataataatgataaactctggacaatacacacacacacacacacaaacacacacacaattatttgaaggcaccagaaagtggtcaaaagaagaaagaaactgaagaagtttctagtcataaatggaactactcactgggtaagaattaaacttacaaggatattctactgaggacaatactcataccacagagcacagggcaaatagaaggtgagcgaaaaaatccagtgttttttatttgaagtgtgagaggatggagtcaggggctgaaagaatatctgaaagattaaggtagggaactcctagaacagaggaatctagagactctaaaatgtatttttcacaatggcagattaaaataaaaaattactaggcatgtgaagacatagaagataatttccaaaatcagaagagaatgcagtcaatagaagcaaatctccaggtttggaattagcagaaaagtacatttaaagaggtatatatatatatatattcgaagacaaattaaaatatgtcaataactgaacaaattggggaactctatcagagaaatggaagctattttaaaaatgaattgaaaattctctaaagagctatagcgtctgaaatggaaaagaaaaatctctgggatgagctgaaagaagattggcgacagcagaagagccaacttgaatatagaatttatc

SEQ ID NO: 681 - DNA, 4047 bp, Homo sapiens
taggagctgagcttcattcagtgtgtgtgcgttggttgccgatcgtactgccagtagcattgtctgtctgtccggtcttgtttgtacattccattttcaattgttacagatgtgaactttattccttgtcactaattatatttaaaattatttctaggaagtcaaataaatataataaagggttgagccctctactttcttcttgccacctttttgtggcaatattaaagtgaactgctaatagtgtaagtacgtgcacaaaaccactgccagataaccagaggggcctgggaagggagaagaattagtgtatttttttcaaatagtacagtaatttgcctcataagcataggagcattgggaatgagagggaactgtgcccagtatactgttttttttcttcctccaataaaagtggtgtagtgccgaaagtgctaaaatatttagtgcggtattgctctgtgaattcaagttcaacagacttcactttggtcatgtttattaaaccaccagtgacatttaaaaatatatttttagcagtcgtaatgttagtcaccaagggaaggtggtggaatgtctatgtttttgattttactgtgagttaaaaaggcacatttctaccttctattgtttttaaattcaagaatagggaattagttcctggtgttgtttacgagtgtattctcgtgtcaacatacagggatttagacatttaactctctgtgccttgataagaatatcatttagagtgtagatacttttgcctttttaaaaaagccattattttatgagacttagtactcacactgcaaataactagtcagctcagttttaactttataggtttattgagtttcctttgtgtgatccatgtagatgcctcaaaatgtttcttcttcttcttttttttaatcttataagatatttttctaagtatttccagaaacatttgagagtgcccatcattttcaggtctgcagaaccatagcttccacgcacctgaacgagcacagaatgaactgacggtggaagacattatgagctgtgtccaacgttttaaccaaagcgtatcgtaccaacgatctgtgaaaatgcactggaagcttctggtcccggtttcctttgtggtctatgtgggtcttgtcctcattgtaactccgtatagatggtataggtattttaatcctggaagctgttgccttattaatgattatcttaaaatttcctccattggggcagcgtgggccaaattaaaacaaacaaaaccgcaactcctccacagaaacacaaacacagttattccatgaagtttagtatttggttgacatagtgctcttcaaattcatcccattaccctaaaagtaataactttgatgcttgctttaactttagtcccatctctgccactttgatgctatttgggttatgatggggcaagatggcagaggtattgggtttttttgtttttttccattcctctctacttctgtttcctagctttttctttctggagtttaagtacagtgatggttggcttgagtacctttttaaatctagcccagtataaacattagcctgcttaatatttagacatttataggtagaattctgagcactcaactcatgtttggcattttaaagtaaaaacaagtgtgacttcgaggaccaaagaaattgtcagctatacatttatctttatgaactcatttatattcctttttaatgactcgttgttctaacatttcctagaagtgttcttataaaggtctaatgtatccacaggctgttgtcttattagtaaatgcaaagtaatgactttgtctgttttactctagtctttagtacttcaaaattaccttttcatatccatgatcttgagtccatttgggggatttttaagaatttgatgtatttcaatacactgttcaaaattaaattgtttaattttatgtatgagtatgtatgttcctgaaggtggtcctatttaaattattaaactattgtaactttgttcttgtgaaagttgtttctttttcaaccaccactataaatatttaaataacttgattattttggctgtattctgtttcagcaaagacatcataagggcttctcccagccatcaaagctatttgaatactaatctccattatagtacgaagtaaccccaggttctgacagtttctccttggtatttggttggagtcttaccgtcctcactgtcttgaggtaatgggaggaggaggtctgggataagagtcaggaatctgagtggccctcatgtccctgttgtcttaatgcttagtaggtaacttcagccccctgggaactggcactgtttcctacgtgggagctgttggggaaggaagagtaggctggggcagggagtggaaaagggtttccttccctcttctaggaagagcctgcccagggcaaaacttccagttagtgcaaggggttttgtgctgctcttctgtcccatgcccaacaacctcctttccctcttgctaatggtctcctccccattccgtgctgcccacaggcagaggccgcccctgccctcactggtggccagcatgtccaagtactggggcctgctgctccttgtgggaccctgtggaccgttgggtagcaaatcttatcaaagtaggaatgcttactggcataaaacattcctagaaccaccactcataggtgtcaataaaacgatgagctgctcagctaagcccgagttgctgcttctgagttttgtcaccgaagattgattggccaagttccttttcacttagtggaagagcagttgcagacatgaaaggttttcaagaagcctttctgtcaaaacagagcacctggattcatcatcacaggcatgggtcctcctgctgatggagagaagaagaagtctcaagagatcaaggggaagtgtgagtacctgactcctcaccctcccagaggcccttgccttcttttaatttttgttacagaaaatgaaacatgcacatcagtagagagatgagcacatgaacccctgtgtactaatcacccagcttcaagaagtctcaactcaatggcgccatcttgttttcctctatacccatctgaccagattattgcaaagcaaatcccaggcattatttcatccataaatatttcagattatctaaataaagtggaatcaggtaaagaaatatatgatcaaatacatccattatcacactaaaaattagtgtcaattcaaatatctagattttcccctactgttgtgtagtttttagtagtttatttgaatcaaggtacaaacgagatccacacattgcaacaggttgatttaagtctcttaagaatcttatatgttctctttccactccctcctctgttttccttaaaatttatctggtcacttgttttggagaagccccgtgtttattccaggaactgtctggttgctggaatgtctgtggctgtccaaatgaggtcaaactccagctaaacagggaaaagaagggttctttgccacaacacttctccacgtccctaaacccctactcctgggcagcctagcttggtctggttctgtctggcttttaactggaacatagctctccttggctttgtaacttagagccattccccaggtacagaatagaattcattgcttttttctgagtgtgtcctttttgggcaaggcttccattttaaaacatgctgcctttggcttcagcttggtggattccttggctgccaagattttggttaaggtggaaaggttattacagaagtgaaaacaatgaatctcacagtaattggcatcactttgagggcctacccatggggaattccattgggttggacagtaggagtacttgggtttcttccccccggctcctcgacctcatcaattacattttcatgacatcctgagtatgaatatcaggctctggccgacaaagggtggtgaaggaagacacactgcgtcttgcatttaagcagctccctttattccctccctagcagtgcagctatgacttgcttgtgggtcctggtagg

SEQ ID NO: 682 - DNA, 4039 bp, Homo sapiens
gccgagatcgcgcctctgcactccagcctgggtgacagggtgagactctgtcttaaaaaaaaaaaaaaaaaattagtcattccaaagtccaatgtcagacatagattatccgttgttttggatgtaatcctcttcctggaaaactggcacaacccaattacacatgaaatcctttcaactctggtattggaggtatagggaaggactttgttttaggagacccatagtctacctctattgttctaggagttaaaccacgttggtttacatcctgactttgccacctgtcaactcagaccttgggcaaatcaaaggtctgagggaggagtgcaggctcccagcgttcccacgggggtggggacgtgacgtattcatcagttcatgaagttaatgatatgtattgaaaaggtttgttcaaggatttaaataagacgatgaatatattgaattaataatgaatgcaaggccttaaaggtgttttgagggtggtgaaacttgaatctctcatcaactgtgcaatagttatattaacttggatggctatgagttttgcagaggaaagctgggcttaaatcccaatgctagacctggtggctagaccttgattgccaccgggtctagcattgggatttaagcgacctctaaaaaaaaaaaatcacggaatctctctttggccttccttttttgtttctcagcagtctaccaagctacgaagaacctgaaaatcggaggtcgtgtaccttattttttctgagagcttaagctgagagcacagcctccccaggagattagcggcagagatccgcgcgctgggagaaaggctagccccagggcgccctaacttccaactccgggagcaatccaaacccggaggccggcgggggaggggacagctgtagggggcggtggggatgggagtggatgctcccgggtcagctctggcactcgccagctgagcccagcgccagtctaggtgagccccacggcggtgagggacgctcgccagacggcccagaggagttagatgacgtcacctccaggaggactcgctttttcattaatgaaaccggccggcgcgggcgcatgcgcggcaggccgccttccctctcgcttccccctcccctttcccagccgcgctctcaatctctagctcgctcgcgctccctctccccgggccgtggaaaggatcccacttccggtggggtgtcatggcggcgtctcggactgtgatggctgtggggagacggcgctagtggggagagcgaccaagaggccccctcccctccccgggtccccttcccctatccccctccccccagcctccttgccaacgccccctttccctctccccctcccgctcggcgctgaccccccatccccacccccgtgggaacactgggagcctgcactccacagaccctctccttgcctcttccctcacctcagcctccgctccccgccctcttcccggcccagggcgccggcccacccttccctccgccgccccccggccgcggggaggacatggccgcgcacaggccggtggaatgggtccaggccgtggtcagccgcttcgacgagcaggtaaccggcccgtggcgggcgggaggtgggagcggagtgggggtggggacagagtaggtgaggggaggtaggagcggccgcctcccccgcggctgcctcaggctctggaggaaaggaagggaagggaagagaagggaaggggggataagtgggggtggccaaggcgggaggtgaggggtaggaggggacagctgggagcttgggcaccctttccctcctaagtcggggggtggggccttgtccctgaccagcctccgaccctccatcccctttatcccagcccttccgcttggaaatggggatgagtgacctgggggcgcctttaggggcgcgccatctggatttaataattacccccttacttttgtttttgagcagaggtgggtaacgtttaggggttctctcttcctcttccctccgtgaccctcctaactggggacgagcgaaccctaaggcctgtcttatataccctcaataggagaacgataacattccgcccctcccccagtttcttcagcttcctctcctggagggggaagagcagaagaaagcaaggaaggcacaggttttcttactttctgctccatcgtctcatcctgccccgagagcttcaagtgcacactcactgcacatctttgtgatgccctacaacgtcgtcccccatatcctgatgacacagactgccttttttttttattgccgtttgcagtggaaaccgtggttctgaaatatcttccccttccttgataattgcagtctcttccccccccccttttttttttgccagcggtctgaggatgtgatgcattctcgagtgagaatgttggggagtaaaggggagaagggtgaaaggaaagtgagaaactgcttcagagccaccgacaacagagcaaagccagctgggatgtggtcctggagcggatcattctgctagtgtttgtggttgtttttgactctctcctggttgacaagagaactttcattgagaatatttgggatgaaaaaaaagttttgtagcttgaggaggtgactttttatcgcctgagtttcacacaataaatcctggggctgattagaataaatgcacacatagccttttgtcagtggaaattggtttaactttgtgttgctgtaggtagttggggatggtttaagggatgctttctgcagctgtgggtgcagtgggcttcctgtgatgggggaattgtttaagattgagtcaacctattttgtttactggatataatggtaaaacattatgggagctgaaggggtgggggaagagctcttctgttatttgatgcataaacatttctttacgggactcagcgtttcagacctacctggaaaatatcttggaatagacagaggaagttgagaagaagctatgtagataaaatagagttatgaagctgtcagagacttgaaggaattgttttatccattcgtatgcttccagacccaaaggcatctaaactaaactactaatccatctgaagtataatgttactgcatataaaagattacattattgatagagcgttagatttaaaacttggtagaaaagactctgtaattttaagaaaggatttaaaaggcacatagaagacttccaaagctgaaccttgtggacagcagaatctggatgtaggaaattgaaggatccacgccgcaattctccttaaattttaaaaattaaaaatttttttcagttttttcttaattttatttttttacttcttacctgttcatctctaggcttatttgccatattggaaaaagatacttaagagaggaatgattttgggctgggcgcggtggctcacgcctgtaatcccagcactttgggatgccaaggcaggtggatcacctgaggtcaggagtttgagaccagcctgaccaacatggagaaacctcgtctctactaaaaatacaaaaattagctgggcatggtggcgggcgcctgtaatcccagctactcgggaggctgaggcaggagaattgcttgaatccgggaggtggaggttgcagtgagctgagatcacaccactgcactctagcctgggcgacagagcgagactcttgtctccaaaaaaaaaaaaaaaaaaaaaggaggaatgattttgattatatacccagtaaagcaagaaagtgtttctccttctgtccctagctttaaaagaccttaaggcttcgttgtttgttatgcatattgtggaatcaaactcaccaccatctgttaaaaattaaggacattagtttttaaaacagcatttttctgcattccttatgttgtaattaagagaaagatatataggagagattattcctcactttttttttttgagacaaggtcttgctctgtcgcccacgctggagtgcagtagcttgatgtcggttcattgcaacccctgcttcccacattcacgtgattctcctgcttcagtctcccaag

SEQ ID NO: 683 - DNA, 4076 bp, Homo sapiens
tggtattggaggtatagggaaggactttgttttaggagacccatagtctacctctattgttctaggagttaaaccacgttggtttacatcctgactttgccacctgtcaactcagaccttgggcaaatcaaaggtctgagggaggagtgcaggctcccagcgttcccacgggggtggggacgtgacgtattcatcagttcatgaagttaatgatatgtattgaaaaggtttgttcaaggatttaaataagacgatgaatatattgaattaataatgaatgcaaggccttaaaggtgttttgagggtggtgaaacttgaatctctcatcaactgtgcaatagttatattaacttggatggctatgagttttgcagaggaaagctgggcttaaatcccaatgctagacctggtggctagaccttgattgccaccgggtctagcattgggatttaagcgacctctaaaaaaaaaaaatcacggaatctctctttggccttccttttttgtttctcagcagtctaccaagctacgaagaacctgaaaatcggaggtcgtgtaccttattttttctgagagcttaagctgagagcacagcctccccaggagattagcggcagagatccgcgcgctgggagaaaggctagccccagggcgccctaacttccaactccgggagcaatccaaacccggaggccggcgggggaggggacagctgtagggggcggtggggatgggagtggatgctcccgggtcagctctggcactcgccagctgagcccagcgccagtctaggtgagccccacggcggtgagggacgctcgccagacggcccagaggagttagatgacgtcacctccaggaggactcgctttttcattaatgaaaccggccggcgcgggcgcatgcgcggcaggccgccttccctctcgcttccccctcccctttcccagccgcgctctcaatctctagctcgctcgcgctccctctccccgggccgtggaaaggatcccacttccggtggggtgtcatggcggcgtctcggactgtgatggctgtggggagacggcgctagtggggagagcgaccaagaggccccctcccctccccgggtccccttcccctatccccctccccccagcctccttgccaacgccccctttccctctccccctcccgctcggcgctgaccccccatccccacccccgtgggaacactgggagcctgcactccacagaccctctccttgcctcttccctcacctcagcctccgctccccgccctcttcccggcccagggcgccggcccacccttccctccgccgccccccggccgcggggaggacatggccgcgcacaggccggtggaatgggtccaggccgtggtcagccgcttcgacgagcaggtaaccggcccgtggcgggcgggaggtgggagcggagtgggggtggggacagagtaggtgaggggaggtaggagcggccgcctcccccgcggctgcctcaggctctggaggaaaggaagggaagggaagagaagggaaggggggataagtgggggtggccaaggcgggaggtgaggggtaggaggggacagctgggagcttgggcaccctttccctcctaagtcggggggtggggccttgtccctgaccagcctccgaccctccatcccctttatcccagcccttccgcttggaaatggggatgagtgacctgggggcgcctttaggggcgcgccatctggatttaataattacccccttacttttgtttttgagcagaggtgggtaacgtttaggggttctctcttcctcttccctccgtgaccctcctaactggggacgagcgaaccctaaggcctgtcttatataccctcaataggagaacgataacattccgcccctcccccagtttcttcagcttcctctcctggagggggaagagcagaagaaagcaaggaaggcacaggttttcttactttctgctccatcgtctcatcctgccccgagagcttcaagtgcacactcactgcacatctttgtgatgccctacaacgtcgtcccccatatcctgatgacacagactgccttttttttttattgccgtttgcagtggaaaccgtggttctgaaatatcttccccttccttgataattgcagtctcttccccccccccttttttttttgccagcggtctgaggatgtgatgcattctcgagtgagaatgttggggagtaaaggggagaagggtgaaaggaaagtgagaaactgcttcagagccaccgacaacagagcaaagccagctgggatgtggtcctggagcggatcattctgctagtgtttgtggttgtttttgactctctcctggttgacaagagaactttcattgagaatatttgggatgaaaaaaaagttttgtagcttgaggaggtgactttttatcgcctgagtttcacacaataaatcctggggctgattagaataaatgcacacatagccttttgtcagtggaaattggtttaactttgtgttgctgtaggtagttggggatggtttaagggatgctttctgcagctgtgggtgcagtgggcttcctgtgatgggggaattgtttaagattgagtcaacctattttgtttactggatataatggtaaaacattatgggagctgaaggggtgggggaagagctcttctgttatttgatgcataaacatttctttacgggactcagcgtttcagacctacctggaaaatatcttggaatagacagaggaagttgagaagaagctatgtagataaaatagagttatgaagctgtcagagacttgaaggaattgttttatccattcgtatgcttccagacccaaaggcatctaaactaaactactaatccatctgaagtataatgttactgcatataaaagattacattattgatagagcgttagatttaaaacttggtagaaaagactctgtaattttaagaaaggatttaaaaggcacatagaagacttccaaagctgaaccttgtggacagcagaatctggatgtaggaaattgaaggatccacgccgcaattctccttaaattttaaaaattaaaaatttttttcagttttttcttaattttatttttttacttcttacctgttcatctctaggcttatttgccatattggaaaaagatacttaagagaggaatgattttgggctgggcgcggtggctcacgcctgtaatcccagcactttgggatgccaaggcaggtggatcacctgaggtcaggagtttgagaccagcctgaccaacatggagaaacctcgtctctactaaaaatacaaaaattagctgggcatggtggcgggcgcctgtaatcccagctactcgggaggctgaggcaggagaattgcttgaatccgggaggtggaggttgcagtgagctgagatcacaccactgcactctagcctgggcgacagagcgagactcttgtctccaaaaaaaaaaaaaaaaaaaaaggaggaatgattttgattatatacccagtaaagcaagaaagtgtttctccttctgtccctagctttaaaagaccttaaggcttcgttgtttgttatgcatattgtggaatcaaactcaccaccatctgttaaaaattaaggacattagtttttaaaacagcatttttctgcattccttatgttgtaattaagagaaagatatataggagagattattcctcactttttttttttgagacaaggtcttgctctgtcgcccacgctggagtgcagtagcttgatgtcggttcattgcaacccctgcttcccacattcacgtgattctcctgcttcagtctcccaagtagctgggattacaggtgtgcaccatcgtgcctggctaatttttgtatttttagtagagacgggggtttcaccatgttggtcaggctggtcttgaactcctgacctcaggtgatctgccccccaccccctgctcggcctcccgaagtgctgggattacaggcatgagccactgtgcctggcctattcctcacatttttctcttagaaagttaaagtct

SEQ ID NO: 684 - DNA, 4044 bp, Homo sapiens
ttttagtcagaaaactgaggcatgggaaggttaagtgacatagatctaataagagcttcagtatgaaaagtagtgaatgcttgaccatcagggagatacttttcctaagtatcccataaaatttgttctaatccattaaatatatttagaagactttattttattttttttatttttgagacggagtttcatgattcttgcctaggctggagtgcaatgatgcgaccttggcttactgcaacctctgcctcctgggttcaagtgattctcctgcctcagcctcccaagtggctgggattacaggcgcctgccaccactcctggataacatttgttatttttagtagagtgctgagattacaggcgtgagccatcgcttacatttttattgaggggagaaaaagccctgcatgtactgagagatagttgtataagaatcttaagagttggccgggcgcggcggctcacgcctgtgatcccagcactttgggaggccgaggcgggccgatcatgaggtcaggagatcgagaccatcctggctaacacagtgaaaccccatctctactaaaaatacaaaaattagctgggtgtggtggtgggtgcctgtagtcccagctacttgggaggctgaggcaggagaatggcctgaacctgggaggtggagcttgcggtgagccgagattgcgccactgcactccagcctgggtgacagagcgagactccatctcagaaaaaaaaaaaaaaaaaaagaatcttaatagtttcaactgtttataaaacttttgaattttggattatattatctgtactttgctttactgggcccagggggagttaagctttccttcttattacagctaagagtttgcctgttggaccacttaacgcccccagggagcatgtgcatgtctaaagatggcaactctgtttatgattgctgttttggttggatttctaatattcggtgtgattaaagcagaaatgcatttctagccactgctgattacagacatattgcactctgatgggtatcgcttagcaacttagtgcagtagactcagttaaaagaagtggatgtgtgccatattgacattttgagctcacattcttgtgggtaatataaaattccttaacctgataatattgcagctaaacctagtatttagggtctaagttgaatgagtattaccaattttagaagtaatcacctccttggttagggaaatgacagttgcacaggtggacagccagaaagctgaatgttatcagttaaatcttacatctctccttaacctgccttcgtggtgccaaatagcaagtttctaattgaaactgacaaattgtaggtgtgtagcttttttttttttttttttgagacagagtttcgctcttgtctcctaggctggagtgcaatggggagatctcagcatactgcaacctctgcctcctgggttcaagccattctcctgcctcagcctcccaagtagctgggattacaggcgcccaccaccacgcctgcctaatttttgtatttttagtagagacgggggtttcaccgtgttggccaggctggtctccaactcctggcttcaggtgatccacctgccttggcctcccaaagtgctgggattacaggcgtgagccaccacgcccggccatgtgtagcttttaattgtggttcattaacccagtttctaagcaaattagaaccttctgtgtatctcccctagttctgtatgccccactggttcctgtagagctttatttctgaagggaagtatgggaaaactatggatatttgaactaaaaaaaaaaaaaaaagaattaaaaagaactccatcccaaaatgatttgttgtaaatatgttcatttaaagcaattatattttccatatctgatcaagcaaaagtagtacataaaagccaaaaaacccaatttaaagaatatgttatggaataaactctgattttagaggttgtagtagcatatttgttgttctcatacattgagtgttcatctgaatgtacgttgaatatgcggtgagtgattcacagtataaaatgattggcaagtatcttcgaaattacaaaccacatactgattagacaaatagatttgcaaaactgaagctttttggatttaaaaaatatctcctagcctcattcttcaagcctggtgtgtaatttttataaggccttatagtagttgaaaatgagtactcttttatggtgacgaattctttatggtgagtgagaaataatgcttattcttccaattttagtatatgtggtgctgaatcgagcacaataatgcttattctttgcttcggaattttttaatttattattattgttattttaaatttttatttatttatttattttgagatggagtctcactctgtcgcccaggctggagtgcagtggcgcgatctcagctcactgcaacgtctgcctcctgggttcaagcgattctcctgcctcagcctcccaagtagctgggactacaggcgcatgccaccacgcccagctaattttgtatttttagtagagacagggtttcaccgtgctagccaggatgggtctgaatttcttgatgtcgtgatccacctgccttgacttcccaaagtgctgggattacaggcatgagccaccgtgcccggcccggaattcatcctttagaaagatttcttccagctgttcctcagttctctgcactcccttacactttccaccttatctgtctgggaactaatttagtctttatgttggctgctttcttttcacttttcaggctaagatttcctttctcttggaaatcagacgtttacttggtcctgcagctctctctctgtggaccagtcttttttgttgttgttgttgccagatactcaccgcctctactgtttatccacccatttcctttataactctgaaaagtagctcctgcctctgcttgattgctgttttcttgaaagtgattacttctggcaaaacatagtggtcattgcttagttgtaatgccactgtgatgttccactccccccggaaaccaatctcttccagttcccaagacacaatacttttctactgaattggagttccttagcgggggtcttagttttgttctgctattcagtgcctttgtccctatcctagccattagctttcctatagatccttgatttcctcatctgttgaaaaagaaatggctagaaaatcttttagattctttcaagtttaaatattcgatgattttaatattctaacagcatgtctctgtgacccagcagtctattgggagctgaccccacttgatttaccaaactctttcccattatgcctctgcatgcacctatgttccaggcaggtcacctcagtctcttctgtgtgtatcatgcttcttcccacttcttggcctttatttctgccagtctctgcctgaatgctttaattcctcctttgtgcttttctaattcctgtccatccttcaatgttcagctcagatttcattttttttttttccccatgaggttgtttcagactaaactctgctatctcacttcttggtatccttgttacctggagttttacagaaccacacagtaagttttcttcctttaggaggattgtttgaacacagcttggctttgttttctttttttcttgtctttttatcaaatggagtgcatactttctgaaaagcaaagaacgctatttgaattctcttctagtcaccccagtgcccagcacagtcttaaacacacagaacattgatggaatgtttttcatatgattcctggttgaagggtagactggctaaataaaaaaagtggtacttttggctttgttttactgaattttacttccatgtttgcaatagcctaggtctgataagtgatattttaactaggaatgagtaagaaaattagcataaagaaggaatttatacatatttatatttcctcccatagagcaaacatgttttttgaatcaggtttcagatctgatcaactacttttgtaattttggatttgtcacttact

SEQ ID NO: 685 - DNA, 4047 bp, Homo sapiens
agagtttttatcatgaaggggtgttgaattttatcaaaggccttttcttcatctattgagataatcgtgtggtttttgtcattggttctgtttatgtgatggattacatttattgatttacatatgttgagccagccttgcatcccagtgatgaagctgacttgatcatgggggataagctttttggtgtactgctggattcggtttgccacaattttattgaggattttcacagatgctgaatttttttctgggaagaatttactttgactttttcatcctacaaaaattattctggttctgaaggatgcaggtgtttcaatggtgtcccattaatatccccaggcttagcacagttcttgcttggttataataggcaattaagtgttgaatgaatgaaagaattttaactttattctgtgggttcagggagctgttgaagagtattaagcaagtgagtggcatgctcacatgttctgaagagtgtttcctggtagtgatatagaagatggatttgaagggacagtaaaggcaagaataataattaagaaattgttataatagggatgatctgagccagggtactcattataggaaattaggggcaaccttgtcatgagatttgtttaggagatgaaattggaaggcttcagatggatgataggggtaaggaggaaaggaggagatttaagtgaataagagttgaggagagggaggagttgtaaatgacaagtttcttgtttattgttttgaataaaggggaaaattgttttcagttattcataaaggacttaaaaatgggctttgatcccaaaagttgttttgaagttatttcctgctttatctttggagacccttcttcccacccccacatcaaagcaaatgccctcaactgctttagatgcagtcttgcattgaaataggtatcacattgttttattttgcttgaatgggtgctgttggcttaaacatctaattgcatctgctttgtcttctttagttgtgtctacttatgggccaaaagagcatttctacctctgtaatttcatttgcatattggttttcagataaattgaagattaattatatgaagtatatggtttgtaatctcaattgaaggtgaattttttattttcctggttgaatataatggaatcattttggtatggagaagaaatggttaaaaatagaccagtgggtcatctcagtgtgaaagtcaagaggacttctaggcttaagcctggtagctaaatttctgttggctctaccctcttcatgatgagtccaagtttattttgatctgcatctttcttttttttaatgaatgaaattctccttcattcagcctggtaagtaacctggccattagtacgtgactaaatagctgaagcttctggcttgaattaagttataaacttagcacagtggcaggtgcttgaactgccatgttaaaactagcgcatagaatctttgccattcaaaaactgttttctcaatcccatgaaggagatgaagcctacatgggaatcttcactgattgtgctgacttttcttctacaatttttagtttataacatgtatagtttgtcaattgtgctaggatattttgttaatatgttcttaaaaattcaaatcccaggggtaaacatcaaataatttaattgtgcctatttgactttatgggagagttaacaaccatatttatatatatggttaaatgtgtataatcttcattctcaatctttcagaatccttattttccattttcatttttagcattagctgcattatttctttatacaactaggaaaagggattattcagaaatttggttgatggctttttattttgtagagacagggtctgtctctgttacccagcctagtctctaacttctagtctcaagtggtctttccacctcagccttcctagtgttgggattacaggcatgagccaccgcactggccagatggcattttaaagaataatgttaggaaaataattaatttttgcaagtgaagatagttgaaatgttagctaaaatgatgacctagaggcagcttgttttggtaaatatcttagtcagtttaggctgctataacaaaataccatagatttggtagtttataaacaacagaaacttacttctcacaattctaaagtctgggaaatccaagaataacattcctttaagcaaggttgaatgtaccagcttgggcgatagtggcaagtagcctcctattccattttgttctagaaagcattttttctcttttctattatttttgtctctttatatgtttatgtgttagggggagaaggagagagaatatttttatatttttcttttggggggatatttttatttttaaattataaatacttctaatttgcaaaggatcccagaaatagttgaagctgtctttaaacccctctctgatcccattctatcctttctgttaactactattctgaagttaatttgtactctgtccatttttatccttttattacatatgtttgtgttcataaaaaaattacagtttaacatttttacataaaaaatgttcttgtaaatattctgcaatttgcttttttaaattttattttttatttttaatttttttttgcagagccagggccttgccttgttgcctaggctgatctcaaactcctggccccaaggaatcctcttaccttggcctcccaaagtgctgggattataagtgtgaaccaccactcctggccttgcagcttgctttttaaacctattctaagacttgctccctatttatacatgagtattaagttaactcattttaactgcacgtataatattctattatcagtatgtcagtttatccatttctggtatagaggaacacttaatttgttttcagggttttttttttttttgcttgtgtttttgttttattataaacaatgcttcaggaagcatatatttgtattcttgaattttttttttttttttttttttttgagacagggtctcactcttgtcgcccaggctggagtgcagtggtgcgaactcggctcactgcaagctccgcctcccaggtttatgccattctcctgccttagcctcctgagtagctgggactacaggtgcctgccaccatgcgggctaatttttttttgtatttttagtacaggcggtgtttcactgtgttagccaggatggtctcgatctcctggcctcatgatctgtccgccttggcctcccaaagtgctgggattatatgcgtgagccaccgtgcctggccttgaatttttatttgacttaaaacatactgtgaaacttgtaagattatgtgaatcatgtttgtacagtttatacttaaaaaaaaaaaaacatggtgaactcttatcaattcacagagtaaaaaacaacattcccaatgctgtggaaacacctctatggcccaaatcacagttcttttcttaccattccccctaccactatcttgaattgtattttaaaatttcctttcttttctttatgtctccatgaacaatgtattgctttgtttacttattttgattttcatgtaatggaataatactgtaagtattctgatttcttttgtaagcatcatttttcttttgagcgttaatctatggtattgtatgcagttcattcagttttactgctatacattagttcattatttgtatatattgtatatatatatatatctgggctattgatgcacatttggattgtttctagttttttgctattactaagaatgctgcttacgaacattgttattcatgtcttttgtgcacatgcaggaatttgaagtatatgtctgggagcagaatttttcattttatggggtatgggtttgtttagctttactaagtaatgccaaatttttctaatttttaaaaatttttaattaattttttttttgagatggagtttctctcttctcccccaggctggagtgtaatggcacgatctggactcactgcaacctctgcctcctgggttcaagcgattctcctgcctcagcctcctga

SEQ ID NO: 686 - DNA, 4046 bp, Homo sapiens
aataaactagggattgatcaaacatatctcaaaataataagagctatttatgacaaacccacagccaatatcatactgaatgggcaaaaactggaaggattccctttgaaaactggcacaagacaaggatgccctctctcaccactcctattcaaactaatattggaagttctggccagggcaatcaggcaagagaaagaaataaagggtattcggttaggaaaagagaaagtcaaattgcctctgtttgcagatgacatggttgtatgtttagaaaaccccatcgtctcagcccaaaatctccttaagctgataagcaacttcagcaaagtctcaggatacaaaatcaatgtgcaaaaatcacaagcattcctatacaccaataacagacaaacagagagccaaatcatgagtgaactcccattcacaactgctacaaagagaataaaatacctaggaatccaacttacaagggatgtgaaggacctcttcaaggagaactacaaaccactgctctaggaaataagagaggacacaaatggaaaacaattccatgctcatggataggaggaaccaatatcctgtatgtgttttatacttttttttgaaaaagcaagttattaaaagaaaaagctcacaatcattgatgtccaaggcatatttgctgtttatggaatttttctttcctagcagacaactatcgagttttgggtttatgttaggtgtctttacctttcattgcttacagataatattggagcaaaagtaatacgtaaatggaaagttattttgctctgagttgtatttgtgttaacttattctagagttaatttttaaaaattgtgttttttccagaaacagcatttaaatttaaagccctaaagaaggttgcgcagttagcagttataaatagcctggaaaaggtaagttacaacctctctggtattaaaattttgtttttgatgtaaaatttgctgttgttagcatcctgaatcaaaaagttatgacttgagtgatagtttcacattcattttcaggaagaatacattgtaatattattatgaaggaagttagaagtttgtgacattttatttactgtattacaaaaaatcactgtaaagacatgtggttctttatttataggcattttggaactgggtagaaaattatccagatgaatttacaaaactgtaccagatcccacagactgatatggctggtaaggatacgattgattttttttttttttttgtcttttaaatgcctacttgtgacataaaaacctatcatcgttttccaagttatttttgttataaaggtgcttttacatcttctattgtcaactggtgtcaaataggaaatactgtttttctcttacatttctaaattaggcccaaccctcttcctttccttggagcaaacaaagtagtttgaaatgaaggtcagatctttagagctgtgataggatggggtgtttggctctttgttgtagagaagcatgtgctctgaagctttattttgtatttagggagatgtgtataaagtagtaatattctcacctataatgtaagacacaactgcaaggcagagaatacagactcctggagaactttggtaattctttttgggaagctgttcagtctttgttgcttgggtacatcacactttgcataaggcccttcacagtgagactgaatacatgatcatccattctaaaatgtgagcttttccaggatagatcaagatagctcttctaacacatagacagtattacattgcttgtctacttaccagaatgcatttgtgtagttgcttaaatgaagttccatgtttatcttttaaaaatgttgcccttgggtttttacatagtgtcagcttttactttaatgccagggattttgttcctatctaataatgtcatttaatatatttttcatgcagaatgtgcagaaaagctatttgacttggtggatggttttgctgaaagcaccaaacgtaaagcagcagtttggccactacaaatcattctccttatcttgtgtccagaaataatccaggatatatccaaagacgtggttgatgaaaacaacatgaataaggtaaggagggcaaaattatttccattatatctagatgtgaagcagtttattttactcaaggtgtgtattactttaggcttattatttaagcaaagtatttcagggaaccatttaaatgatcattttaggtttctttgtttgatggacttagaagagacatactcatacataattttatttggcagagggaaaataataccaggcaatgaacaaagatttaaaataatcccttagtttcattcttttgtctgagaagactaaacgatacctctgttattattaaacgtagtttctctaatattcactacaaggattgccctacttgagttcatcacttttatagtgtgttatttgcatgtacttagggtatgtgtccatatagtgctactgaaattatctagtaactcattttaagtattttagaacagttttcaaagaattttgccaggaaggtaaggctctcgcatataccatctatagtgaaattggcaccatgacaactggtaattctaggaggctcttaaaatttttttaaatatcacctaggtgattgaaaaaaaaaagaactgagtattaatcctagggttttactgaaatttcaatatgcagtttgttttgcaaatattttttttttcattttttgctgcttttggagaaatactcttagctggctgaacatgagatggtttccttcatggtttgcctgtagatggagatgttcagaatcagctgaatgatttattactttgtagaagtattggaccgggaatttatacattaaagggtaaataaatgaaccaggtaatccttgagagtctgtgattgcgtgttactccacttaggtgtatatctcaacttttccattatgaggacaccatttttcatggtagattgttttggagcccttcaaaatagtaggtttgatgataaatactgagtgtcaacttgattggattgaaggatacaaagtattgatcctgggtgtatctgtgaagttgttgccaaaggagattaacatttgagtcagtgggctgggaaaggcagacccacccttaatctgggtggtgcaccatctaatcagctgccagcatggctggagtataagcaggcagaaaaatgtgaaaagagagacgggcctagcctcccagcctacatctttctcctgtgttggatgcttcctgccctcgaacatcagactccaagttctttagttttggaacttggactggctcttcttgcctcttagcctgcagacggcctattgtgggaccttgtgatcgtgctagttaatagttaatatcccctttatataaatattctattacttctgtccctctagagaaccctaatagagattttggtacaaggagtgtggttctagaggaacggagtattaaggatggagtttcttagtttgtttgggggtttctggagtttgctgcttaatatgattagaccctaaaatattaaggactctacttctaatattgtggagaacactgatagtcgttgctgtgaactgtttagagagtttgcaaaataaatgcatttgacactcctgattcaccgctaatgagaggcaaggagtttagtgaccctatacataataatacctttgaccatatatggagaaccaaggaacataatgaagctggttggttgctcctaaattcagtggacaaagtggtgaaagaaaatgatgggccgggcgcggtggctcacgcctgtaatcccagcactttgggaggccgaggcgggcggatcacgaggtcaggagatcgagaccatcctggctaacacggtgaaaccctgtctctactaaaaatacaaaaaattagccgggcgaggtggcgggcgcctgtagtcccagctactccggaggctgaggcaggagaatggcgtgaaccccagggggcggagcctgcagtgagccgagattgcgccact

SEQ ID NO: 687 - DNA, 4046 bp, Homo sapiens
tctcttttcactctaatttttattattttctttcttctgctagctttggtgtagtttactctttttctagttccttgaggtatatggttaggttattgaatgagaactttcttattttttgatgtcagtgtttacaggtttacatttttcttttagctctgcattcactgcatcctataagttttagtatgttgtgttttcgttttcatttatctcacgttggtttctaatttcctttgtgattttttcctttgatctattagttaacattcacaaattttcacatatttgtgaattttttagtttttttatctgctgttggtttttcatttccattatgatcacaaaacatactttgtatgatttcagtttctttaaatgtattaagacttattttgtagcctaacataggtctgttttggagaatgttccatgtacacttgagaagaatatattgtgctggtgttgggtgagtttagtttttgacatgttacatttgagcattcatttaggagaaaagccaaaggaagacatttgttaatgaactgtaaagaggggttgacatcacaagaataggtaattttttttgagaaacaaatttagagcaacagaacagccttgaatatattcttatttagaaggctgaaggttgaatataacctggagtgttagaaaagggtggaacagtttatcatagaccagagccaagaaagtataatatttagactttaaatatcaaaaagaagatatggtcagctgaattcaaagttgaaggctaggtgtggtggctcatgcctgtaattctagcactttgggaggctgaggcagaaggatcacttgagcccaggggttcaagaccagcttggccaacatggtgaaatcctgtctctactaaaaatacaaaaattagccaggcatggtggcaggcgcctgtaaacccagctactctggaggctgaggcgggagaatcgcttgaccctgggaggcagaggttgcaatgagccaagatcgtgcctttgtactccagcctgggcaacagaggaagacaccatcttgggaaaaaaaaaaaaaagaagttcagaaaacagcttgtttgggaaggactgttttttgtattcctttaataattcaataaagaaaatagaaaaaggattttttttaaatttgagaaacatttaaatgatgaccactacttaaattatgaaattgaaaaccacaaatataaattatgcattctttatagtatgagttttagaggctgttaatttgctataatattagctacatctggaatagaagaaacttcatatattatcttatcgctatatttgaattctgtagaagttatttctggacagtctacgaaaagctcttgctggccatggaggaagtaggcagctgacagaaagtgctgcaattgcctgtgtcaaactgtgtaaagcaagtacttacatcaattgggaagataactctgtcattttcctacttgttcagtccatggtggttgatcttaaggtaacatgcttattctttctctactacaaactttaagaaaattaaatgaattttctagcataagtattatgtcaaagataattgctaacattaaagttctgactcttcgttgataagttcataggacttgcttttgttgttactgtgttcatcagcctaaatggactgagaatatgaagaaaacaccattttcttaaataagcataaatatacagacttgggtttaaaataatgtggcaattagggcctgaaatgaacctatatatggtataggaagaattgtatcagactgatgaaccacagtatgggtgctttgtgcttcttctggcagctggattttactgccatttgtgtgggtaatgtgttgatgttattacatgttagtaaagaaatactgcatgggtatttaaaggcttttgttttctgttggggtttttatagaacctgctttttaatccaagtaagccattctcaagaggcagtcagcctgcagatgtggatctaatgattgactgccttgtttcttgctttcgtataagccctcacaacaaccaacactttaaggtgagagcattggtttttatctaactatatttactgatgctgttatcctttataaacaaaaagactatagagattaataggttcacttttatcggtatttctcactattatgtattgatgttcgtttcaagaccttaaaaacttagtgttttttttttaaactttctatttgctgttctttttggcttcatttgtattactgagtatttttctcatagaaataatctgcttttttttttctttttctatagatctgcctggctcagaattcaccttctacatttcactatgtgctggtaaattcactccatcgaatcatcaccaatgtaagtccaaaaggtattgctaaattactaaaaaaatttttttctttcttttctttgcgtatttctttttaagaaatgcactcttggttttcaaaaaggttctgaatttagatgtatgaaataggaaaatttctccatggtgattctatttgataattgataaatatttgtatttttcatattaagtcttgaccgaagggaccatattaaggaagatggagttaataagatgctttggaaagattaaatctaaaacgttttattcagatcagaagcccttgagaaaaatgtcactgaaaatacagtttaaaattttcatcccgaagcttttcaaacatattatttcagcatttgatacattgacttgccaccttaccatttaagttaaaagtaatagtatttatgttgtagtctagtatagcacattgacaaaatgatgggactatatttgatggtacttttaaatcttttgatcctaaattcattcatagtgtaaaatttcatttttcttaaacaaaatgaaatattaacatactttaaagtaggtattaacaagatacaaaagcatatcagacaaagtaagtgaaatcattaaaaggtacttgcgaaaccttcaactctgtctgatgtggagacattaaatagacagcaaaactatcagatttggactgtggatttttaaaattctgttcttgtaataatgaacaaccctattttgaaagttttcaagtgttattttccattgttccacttttatcaaatgatactcacatttatgggtaaattggttgatgctttccttccttaaaggaggctgtaatcattgataacttagtatatttgacctgtttataatcaaattccattttaagactgtgcctctggtgagttgaaaataacccttcacctcatttgccctggatgttgtatttatttaaaataaatactgcccatattctatccattcctgcagtggaaaattaactattgataaagctatttggtgatacatttaatttttctcagcaggtgtttagtgagcattttgggaggacagtcctttgttgtgcaggatgccttgggcattgcaggacctttaagatcgtctggcctcatttcattaaatgccagttgtgctgcatctccccatccctagtcattatgaacaaataaacatgcctgagggaatgatacctcctcccttagttgagtatcactgagttaaattgtaggtaaaagtaacattgaatatgctttgttccaaaagggaaagtttaatgaagattgtaaataaggtatgtttgtattaaaaacttaaaaaaaatcactgtacttttgtcagcgtaatgagccagggcattgtaccttcaaggtttactttcaaggccattaaaacaaaaagatgatttctcccctcaagtttatgtgtaactcagaaataagtcattattgcttttttccgctgtggctcagaacactaaaaatattcaaagagtggatagctttgcataaatgcttaaaatttgtatacaataaacccaaatatatacttttttgatactttgtggctagttactttaattgtgaaatatttttgtctacaactgactacatagagcactttcaagcatggacttggca

SEQ ID NO: 688 - DNA, 4141 bp, Homo sapiens
aagactatagagattaataggttcacttttatcggtatttctcactattatgtattgatgttcgtttcaagaccttaaaaacttagtgttttttttttaaactttctatttgctgttctttttggcttcatttgtattactgagtatttttctcatagaaataatctgcttttttttttctttttctatagatctgcctggctcagaattcaccttctacatttcactatgtgctggtaaattcactccatcgaatcatcaccaatgtaagtccaaaaggtattgctaaattactaaaaaaatttttttctttcttttctttgcgtatttctttttaagaaatgcactcttggttttcaaaaaggttctgaatttagatgtatgaaataggaaaatttctccatggtgattctatttgataattgataaatatttgtatttttcatattaagtcttgaccgaagggaccatattaaggaagatggagttaataagatgctttggaaagattaaatctaaaacgttttattcagatcagaagcccttgagaaaaatgtcactgaaaatacagtttaaaattttcatcccgaagcttttcaaacatattatttcagcatttgatacattgacttgccaccttaccatttaagttaaaagtaatagtatttatgttgtagtctagtatagcacattgacaaaatgatgggactatatttgatggtacttttaaatcttttgatcctaaattcattcatagtgtaaaatttcatttttcttaaacaaaatgaaatattaacatactttaaagtaggtattaacaagatacaaaagcatatcagacaaagtaagtgaaatcattaaaaggtacttgcgaaaccttcaactctgtctgatgtggagacattaaatagacagcaaaactatcagatttggactgtggatttttaaaattctgttcttgtaataatgaacaaccctattttgaaagttttcaagtgttattttccattgttccacttttatcaaatgatactcacatttatgggtaaattggttgatgctttccttccttaaaggaggctgtaatcattgataacttagtatatttgacctgtttataatcaaattccattttaagactgtgcctctggtgagttgaaaataacccttcacctcatttgccctggatgttgtatttatttaaaataaatactgcccatattctatccattcctgcagtggaaaattaactattgataaagctatttggtgatacatttaatttttctcagcaggtgtttagtgagcattttgggaggacagtcctttgttgtgcaggatgccttgggcattgcaggacctttaagatcgtctggcctcatttcattaaatgccagttgtgctgcatctccccatccctagtcattatgaacaaataaacatgcctgagggaatgatacctcctcccttagttgagtatcactgagttaaattgtaggtaaaagtaacattgaatatgctttgttccaaaagggaaagtttaatgaagattgtaaataaggtatgtttgtattaaaaacttaaaaaaaatcactgtacttttgtcagcgtaatgagccagggcattgtaccttcaaggtttactttcaaggccattaaaacaaaaagatgatttctcccctcaagtttatgtgtaactcagaaataagtcattattgcttttttccgctgtggctcagaacactaaaaatattcaaagagtggatagctttgcataaatgcttaaaatttgtatacaataaacccaaatatatacttttttgatactttgtggctagttactttaattgtgaaatatttttgtctacaactgactacatagagcactttcaagcatggacttggcactgctgtaagtggctgagctgctcctttctgggttccaagcatgcctggagtggtgcttcatgcatgcctcagtgtacttggtgaaagtggctgtgcatcctcttctactctaatgagcactgcatgtgtggagggtggagtgtgtctgtatcagagatcaagttatatgaaaatctgtttttataaagaaaaaaactacattgaataatttttaaacattaagtatcagtaacttttcaatgaaatagcttgaaaaggaacataaatattagttcaaagtatctttttaaattatgctttgggtagtgatactttattattatagatagtgtgggaaattgtttctcgttaggatattttcccccttggtttgaggctaatcgctattgaatctgaagtactcttttggttgaaaaggactatttataaagtgaatatagaaatttatgagattgactattttagagtttcatttgaagacatttattatggcaatatttttgtcttgaaaaatcacatgaaattattcttagatatttggacttctgatcttaaattcattcgtagtgtaaattttttttctaatgattcttggttcaatgtacctcataagttctcttctcccatggttctttagccagtccacacattttttttaaagcatcacattctcaaataagataaaagttttagtgatgtgtattgagggtttgtgtagaagtagtaaggtgtttggagttctacttttgtgaaacatactcatactcagttcataagtactgagtttagatctaaaatattctagtgtttcttcttagaaaatctaaaatatatccactatttgattcttattataatgcaggttcctagcagttactaaaatagtagttgtactgtcatcttttttattatgatgtgccataagagatgaattaatagttgtaagatctatgttatatgcataatcttcatagacttcctttaggttaaattagatatgtaattgggaaatttaaaaagtaatatacacacttatgaaccaattatcttagccatcactggtacatgctatagctggtatattacttatttctgttttttccttacgacaatttatcgtaatttacatatggatagttcacatactgaaaatgagatgattgctttctactgagaggttgtagttgaaaggaattgtttccaaggcatttgaaaattatttaaatctcttaaggaattgccacataatttgttcatattatgtaagtgttgccatttggctataaacatggtattttcaaggaaaaaaagagtaagtctactttaattgactggtgttcaggaagggcacatttagtaactgctcaaaatactaaacttttttgccaaccacatgatgtctagtttttcatacttattttatttgaaaatgtgtattttactttaaaatgaatatattatgaaaaatgaaaactatgaaaattactaaatcttaagcctaaagttattttatgtggtgcacctggtaccacaatacggtttcaaaagctattaaaaaaagacacagtaatttgaataggatgttatatgggatgcctttcttagtttatcagtttctgacaagatcttacgagatgtgttgggtaaggaagacccttcactcaatgtactttgttattattcagctttttgttactttaggctgattaacacaagctgtataatttagtaagtataaggaaatcaagttgcattggttgctttgggcaagtcaaaattgctgagagttggaggaatccattatactatcagactaaaaattgatcatttgtagaaactagattaaataaagtaggagttgagggaaaaatgtaaacaaccatactgtcccaaaaaagcatttcttccctcccagttttgggattcctccctgaatggagttcagtattcaaaatgtgtatcataagttggttttatattttactatccggcgaacaggatttgtaatccacagtttgggttaaggtaatataactcgatgctattcaaaatattctgagaattccaagtgaagaaattaaaatgtcgagacttcaattagcttagttttgaataagaaaaaatctgggactgaaatgtgagagatgtgaggctattcaatccctcttatctacaatttgaatgtattattcttccagattttttaaataaacatctggagtattataaatta

SEQ ID NO: 689 - DNA, 4090 bp, Homo sapiens
ttgaacaagccacacttaaagtgctcaatagccacgtgtggctggctagtggctaccatgttagacagtgcagctctggagtagggatcaggaaacttttctctaaaaggccagatagtaaatattttagggcttgtgggtcatatagtttctgtcataaccattcagttctgcctttggagcatgaaagtggccacagacatgtgaatgaacgggcatggctgtgtttaactaaaactgtatatttacaatagcaagtgataggctaggtttggcctgtggatggtagcttgcagacccccactgtggagcactgggtttataggcagtctctgctgtgcatgtggtttattgtttcttcttatgtctactacaaggatgagatacatggatagaaacactgggagtttaatgaaacatagggggcttatagataaatacttgctttttttctataacctgtagacttatttcctttgattataatgctattgacactttgataactgtttctctaaaaccttacaagaaaaactaagcttctctaaacttgtattcattatgggagaatgccattcttatgtctggttatatctgcattaggttattgatgatgctagtaacaatgaactttatgttactgcagctcacaaatgcttttttacatctgcaagaaattaactagtcatcaaatgcttagtagcacagaaattctcaagtggttgcgggaaatattgatctgcaggaataaatttcttcttaaaaataaggtaagcaaaatgacatatttaaaaaatggaagaatatttggaatggtaatggtgagagattactaaagtgttttatagccaaattaggttctatttcagcttctccttcctcccaatgttctcaaaaggaaatatgtatgcagaggacaatgactggcaaatcagcattttaaaaattattctgaggctttggccttagaaccacactgttgatgaattctagttctagttgagttaaataggtctctatggggcaggcctaggaaaagtgggggctgctataaccagagtagcttgaggagcatattgtatctttactcttaagttcatacataagacataattcatacataaaatttattttaacatatagcttctgtaatttaagaattctattatggcgtagatttgggagtacttgatttaatgggtttttgtccagttctagaatcatagctctgagaaatcgtaaagacctagatctcatggctagactagtccagagaattatctatcaagaagcaaaagggaaacagttgagggtcctcaatctagatttatttcgattcctccaataagggtttcacctcttgaaaatatcaggagactttttcattggggtggagtgaaatgttttgattctgaactattgaaacatggtgaggttgtggaagatagagaagagccttaaatttcttttaacatatagtttctgtaattaatcaatttaggaattctgttatggcctagttttcggagtacttgatttaatgagtttttatctggtactagaagcatagctgtgaaagaccttaaatgtatgaaactcatatccttttcagtatttacagcttgttattaataaattgtctctttagaaatagactaatggtgaagtgggtttattcacatgtgacttatttgatatgttaatgtagtggaatttggcattattccaaagatacagaaagagattagacttcagactttcatggcctcgcctatggtataatctccagaatgtgagtatgaggaatccagtaatgaattcatagtgccctggtaggcatagtcactcttgtgacatacttggtgtatatacataccagagttaattactggtccagaagaacttaatctcaagagccaatttctggttatcccaacatggcacagtataaaatcttatggaaaaaaaatctttgtcattgagatcaaattatagttttcatacagtagatttatattgttgatgttttactcatgtttatgtcagacttaatttatatttgtagaatctactgtttctgatgatttagagaatgggaaactgaaagaaattttaaagaattaagtaaaccttgtttgttctaatgggtttctagtgaatctccttcaagttggggcatagagattgagaggagaggttttttaggagagtctcaaacaggaagacaactcaaataagtgtttattcctcttggttgtcagtgcttcagtaaagcttatttatttatttttttctagcaggcagatagaagttcctgtcactttctccttttttacggggtaggatgtgatattccttctagtggaaataccagtcaaatgtccatggatcatgaagaattactacgtactcctggagcctctctccggaagggaaaagggaactcctctatggtcagcttcttctgtactttttctgtatcattttatgtgctctgtttgttttctgaatgaaatttggtaaatttcatctaggtaatatagtgtaatagtgaaaaactgcttagaatctagttctattactgctctttgtggaactttgggcaagttcttaacatccttgttcctcagttcctcaactttaaaatggggacagtaatagttcctgccccagagttgttaaagagggttaaataaaaggatgtgtaaatagcacttgacacttacaagctatatctgataattataattattataaacctccactccataaaaaacccattcataccacagaagtatagaattcgtaccggctaacaaaggtacagatttacagggataaaaacaaagtattttgcttcatgttaaagataagtgtttctgtgatttgtgtttgtgtgtataatttcttttaaatataaatcatatttcaagtgaaaatatcacatcattacagaagagtttattttccaaaccaaaacttttttcattcctaatttttaatgcaaccttgttaaggaagaaacacctaagcagtatgatatttactaatgtctgttttacttgtagaatttgcatttattttatcaattattttctccatttcgtgtttggagaataagtaattcagaatcaaatgtatcttctacagcaatatttagttcttgtttatgcccttgtttcaatgagtgctgcagtgtacttattttattacttccctatagcaagtagatagaatttcctgttacttcctctttttttgtcatttctaattgactgggaggtacattatattgttactgcagtagatttacgttatggtgtttacctgtccatgttagaatcagtttacatttctggaatctggaataggataatatctatttgatttgaaattgaacagatggtagcattatgttggtccagataatctcatttctcatttggacaagatattttggggtttgaaaaattcctataatgattaaaggaaaaagctcttgtgagttattgtatgcggagacacacacacacacacacacacacacacacacacacacacagtttattgcattgttagattttatacataaaattacccaagttgcaaatatatgtcttccacccttgactctcaggatagtgcagcaggatgcagcggaacccccccgatttgccgacaagcccagaccaaactagaagtggccctgtacatgtttctgtggaaccctgacactgaagctgttctggttgccatgtcctgtttccgccacctctgtgaggaagcagatatccggtgtggggtggatgaagtgtcagtgcataacctcttgcccaactataacacattcatggagtttgcctctgtcagcaatatgatgtcaacaggtaaatgtgaatagtggttttttttactcagtctgcctcaaagcacatggcatctgattttgagaatgtatttaaggtcactactttgtaagtttacaggggaaattcaagtagcttacttgaaatccttttctgaacaaagtaagatgaaaataaaaagcatttgaaataaattgttagtcttccactgagttgttaatatg

SEQ ID NO: 690 - DNA, 4036 bp, Homo sapiens
agaaacactgggagtttaatgaaacatagggggcttatagataaatacttgctttttttctataacctgtagacttatttcctttgattataatgctattgacactttgataactgtttctctaaaaccttacaagaaaaactaagcttctctaaacttgtattcattatgggagaatgccattcttatgtctggttatatctgcattaggttattgatgatgctagtaacaatgaactttatgttactgcagctcacaaatgcttttttacatctgcaagaaattaactagtcatcaaatgcttagtagcacagaaattctcaagtggttgcgggaaatattgatctgcaggaataaatttcttcttaaaaataaggtaagcaaaatgacatatttaaaaaatggaagaatatttggaatggtaatggtgagagattactaaagtgttttatagccaaattaggttctatttcagcttctccttcctcccaatgttctcaaaaggaaatatgtatgcagaggacaatgactggcaaatcagcattttaaaaattattctgaggctttggccttagaaccacactgttgatgaattctagttctagttgagttaaataggtctctatggggcaggcctaggaaaagtgggggctgctataaccagagtagcttgaggagcatattgtatctttactcttaagttcatacataagacataattcatacataaaatttattttaacatatagcttctgtaatttaagaattctattatggcgtagatttgggagtacttgatttaatgggtttttgtccagttctagaatcatagctctgagaaatcgtaaagacctagatctcatggctagactagtccagagaattatctatcaagaagcaaaagggaaacagttgagggtcctcaatctagatttatttcgattcctccaataagggtttcacctcttgaaaatatcaggagactttttcattggggtggagtgaaatgttttgattctgaactattgaaacatggtgaggttgtggaagatagagaagagccttaaatttcttttaacatatagtttctgtaattaatcaatttaggaattctgttatggcctagttttcggagtacttgatttaatgagtttttatctggtactagaagcatagctgtgaaagaccttaaatgtatgaaactcatatccttttcagtatttacagcttgttattaataaattgtctctttagaaatagactaatggtgaagtgggtttattcacatgtgacttatttgatatgttaatgtagtggaatttggcattattccaaagatacagaaagagattagacttcagactttcatggcctcgcctatggtataatctccagaatgtgagtatgaggaatccagtaatgaattcatagtgccctggtaggcatagtcactcttgtgacatacttggtgtatatacataccagagttaattactggtccagaagaacttaatctcaagagccaatttctggttatcccaacatggcacagtataaaatcttatggaaaaaaaatctttgtcattgagatcaaattatagttttcatacagtagatttatattgttgatgttttactcatgtttatgtcagacttaatttatatttgtagaatctactgtttctgatgatttagagaatgggaaactgaaagaaattttaaagaattaagtaaaccttgtttgttctaatgggtttctagtgaatctccttcaagttggggcatagagattgagaggagaggttttttaggagagtctcaaacaggaagacaactcaaataagtgtttattcctcttggttgtcagtgcttcagtaaagcttatttatttatttttttctagcaggcagatagaagttcctgtcactttctccttttttacggggtaggatgtgatattccttctagtggaaataccagtcaaatgtccatggatcatgaagaattactacgtactcctggagcctctctccggaagggaaaagggaactcctctatggtcagcttcttctgtactttttctgtatcattttatgtgctctgtttgttttctgaatgaaatttggtaaatttcatctaggtaatatagtgtaatagtgaaaaactgcttagaatctagttctattactgctctttgtggaactttgggcaagttcttaacatccttgttcctcagttcctcaactttaaaatggggacagtaatagttcctgccccagagttgttaaagagggttaaataaaaggatgtgtaaatagcacttgacacttacaagctatatctgataattataattattataaacctccactccataaaaaacccattcataccacagaagtatagaattcgtaccggctaacaaaggtacagatttacagggataaaaacaaagtattttgcttcatgttaaagataagtgtttctgtgatttgtgtttgtgtgtataatttcttttaaatataaatcatatttcaagtgaaaatatcacatcattacagaagagtttattttccaaaccaaaacttttttcattcctaatttttaatgcaaccttgttaaggaagaaacacctaagcagtatgatatttactaatgtctgttttacttgtagaatttgcatttattttatcaattattttctccatttcgtgtttggagaataagtaattcagaatcaaatgtatcttctacagcaatatttagttcttgtttatgcccttgtttcaatgagtgctgcagtgtacttattttattacttccctatagcaagtagatagaatttcctgttacttcctctttttttgtcatttctaattgactgggaggtacattatattgttactgcagtagatttacgttatggtgtttacctgtccatgttagaatcagtttacatttctggaatctggaataggataatatctatttgatttgaaattgaacagatggtagcattatgttggtccagataatctcatttctcatttggacaagatattttggggtttgaaaaattcctataatgattaaaggaaaaagctcttgtgagttattgtatgcggagacacacacacacacacacacacacacacacacacacacacagtttattgcattgttagattttatacataaaattacccaagttgcaaatatatgtcttccacccttgactctcaggatagtgcagcaggatgcagcggaacccccccgatttgccgacaagcccagaccaaactagaagtggccctgtacatgtttctgtggaaccctgacactgaagctgttctggttgccatgtcctgtttccgccacctctgtgaggaagcagatatccggtgtggggtggatgaagtgtcagtgcataacctcttgcccaactataacacattcatggagtttgcctctgtcagcaatatgatgtcaacaggtaaatgtgaatagtggttttttttactcagtctgcctcaaagcacatggcatctgattttgagaatgtatttaaggtcactactttgtaagtttacaggggaaattcaagtagcttacttgaaatccttttctgaacaaagtaagatgaaaataaaaagcatttgaaataaattgttagtcttccactgagttgttaatatgctatacattttaaaaataactggcagtagatgttactatcagttatgattatgtaatttactctgcctaagttgtagatagtgaagttttacaaacattggcgtatgttttgagtaaattgtaggtgggaatagctattttattctgtggacattgtagagtccaagataagtacctttcctgtgaggttagtgaaaggaagtttttggctttatcatttgaagcatttgctctgctcttcctactccttttgggtggagcttatcaggttctccattggcaggcagggctctaagtgcagtaacttgatttgctgttgtatttgcttaggaagagcag

SEQ ID NO: 691 - DNA, 4047 bp, Homo sapiens
tggtaggcatagtcactcttgtgacatacttggtgtatatacataccagagttaattactggtccagaagaacttaatctcaagagccaatttctggttatcccaacatggcacagtataaaatcttatggaaaaaaaatctttgtcattgagatcaaattatagttttcatacagtagatttatattgttgatgttttactcatgtttatgtcagacttaatttatatttgtagaatctactgtttctgatgatttagagaatgggaaactgaaagaaattttaaagaattaagtaaaccttgtttgttctaatgggtttctagtgaatctccttcaagttggggcatagagattgagaggagaggttttttaggagagtctcaaacaggaagacaactcaaataagtgtttattcctcttggttgtcagtgcttcagtaaagcttatttatttatttttttctagcaggcagatagaagttcctgtcactttctccttttttacggggtaggatgtgatattccttctagtggaaataccagtcaaatgtccatggatcatgaagaattactacgtactcctggagcctctctccggaagggaaaagggaactcctctatggtcagcttcttctgtactttttctgtatcattttatgtgctctgtttgttttctgaatgaaatttggtaaatttcatctaggtaatatagtgtaatagtgaaaaactgcttagaatctagttctattactgctctttgtggaactttgggcaagttcttaacatccttgttcctcagttcctcaactttaaaatggggacagtaatagttcctgccccagagttgttaaagagggttaaataaaaggatgtgtaaatagcacttgacacttacaagctatatctgataattataattattataaacctccactccataaaaaacccattcataccacagaagtatagaattcgtaccggctaacaaaggtacagatttacagggataaaaacaaagtattttgcttcatgttaaagataagtgtttctgtgatttgtgtttgtgtgtataatttcttttaaatataaatcatatttcaagtgaaaatatcacatcattacagaagagtttattttccaaaccaaaacttttttcattcctaatttttaatgcaaccttgttaaggaagaaacacctaagcagtatgatatttactaatgtctgttttacttgtagaatttgcatttattttatcaattattttctccatttcgtgtttggagaataagtaattcagaatcaaatgtatcttctacagcaatatttagttcttgtttatgcccttgtttcaatgagtgctgcagtgtacttattttattacttccctatagcaagtagatagaatttcctgttacttcctctttttttgtcatttctaattgactgggaggtacattatattgttactgcagtagatttacgttatggtgtttacctgtccatgttagaatcagtttacatttctggaatctggaataggataatatctatttgatttgaaattgaacagatggtagcattatgttggtccagataatctcatttctcatttggacaagatattttggggtttgaaaaattcctataatgattaaaggaaaaagctcttgtgagttattgtatgcggagacacacacacacacacacacacacacacacacacacacacagtttattgcattgttagattttatacataaaattacccaagttgcaaatatatgtcttccacccttgactctcaggatagtgcagcaggatgcagcggaacccccccgatttgccgacaagcccagaccaaactagaagtggccctgtacatgtttctgtggaaccctgacactgaagctgttctggttgccatgtcctgtttccgccacctctgtgaggaagcagatatccggtgtggggtggatgaagtgtcagtgcataacctcttgcccaactataacacattcatggagtttgcctctgtcagcaatatgatgtcaacaggtaaatgtgaatagtggttttttttactcagtctgcctcaaagcacatggcatctgattttgagaatgtatttaaggtcactactttgtaagtttacaggggaaattcaagtagcttacttgaaatccttttctgaacaaagtaagatgaaaataaaaagcatttgaaataaattgttagtcttccactgagttgttaatatgctatacattttaaaaataactggcagtagatgttactatcagttatgattatgtaatttactctgcctaagttgtagatagtgaagttttacaaacattggcgtatgttttgagtaaattgtaggtgggaatagctattttattctgtggacattgtagagtccaagataagtacctttcctgtgaggttagtgaaaggaagtttttggctttatcatttgaagcatttgctctgctcttcctactccttttgggtggagcttatcaggttctccattggcaggcagggctctaagtgcagtaacttgatttgctgttgtatttgcttaggaagagcagcacttcagaaaagagtgatggcactgctgaggcgcattgagcatcccactgcaggaaacactgaggtatgcccttagcaacagaaacacccctcccaggcgcccaccctcaatttggaagcctcttgttacatatgtgtgatcaggaatagcttttgaagtaaatccaagatacgtgcatattacaagtataatatctgagtatttaatatacatcaagtttgaaacttggctgtagctgattgatgtttagctctagactaagttgctttcaagtgataattgccttcattttaggcttgggaagatacacatgcaaaatgggaacaagcaacaaagctaatccttaactatccaaaagccaaaatggaagatggccaggtaagtctgtaaagttgacttttgtctgttaactgatctgctaaatatatgtacttcactttgataatctttcaagagtcgctcagtaaagtaaacatatagctgtgtgaagactgatatttagttgtggtttatctagacctgtactttgtaatgtggtagctactagctatgtgtgactatttaacttaaattttaacataattaaaattaaataaaatttagttcctcaatcatatagtaaccacatcgcaagtaccagtagccacatatgacaattacttactctattggacagcagagagagaaaatgttcctgtcatcacagaaatactgggcagcactgctagagactgtttgttgcagagaccatttctttaccttttcttgctctttctcccttcatcagggtgtttcacagaattttcagaaaaggagcaacagaggtagagataaattaacatggaaacaattcattttgctattttgttaggtattctaattaaggaatgtcttaggcagtagattgatcccatagagtaaatgaaattttaaaatgtggacagttcattcaactattactattgactatattatctgttactttggaaattaatgatcagttagtgtttgtgtgtatttgatttgtaatgttcatattgctctcattattaggtgatttataaaaactggttgttcctccatggtgtttttgtcatgcttaattacaataggaaaaagttatatttttacgaagcaaatgtgtgtacctaatacctttatttggaggggacatgtagctttagaatgaaagcttttggggggataactgttttatataattacataccatacagttcacccatttaaagtgtccaattcagtgactgtttttaatgtattcacagagttgtgcaaccatcaccacaatcaagttttagaacaatttcatcaattgagaaaaaaaccccgtaccctttagctatctctgcctctaaccaccccccacccactttcttgcctctcttcccccaacgtctctagccctaggcaaccatgaatctactt

SEQ ID NO: 692 - DNA, 4032 bp, Homo sapiens
agtagatgttactatcagttatgattatgtaatttactctgcctaagttgtagatagtgaagttttacaaacattggcgtatgttttgagtaaattgtaggtgggaatagctattttattctgtggacattgtagagtccaagataagtacctttcctgtgaggttagtgaaaggaagtttttggctttatcatttgaagcatttgctctgctcttcctactccttttgggtggagcttatcaggttctccattggcaggcagggctctaagtgcagtaacttgatttgctgttgtatttgcttaggaagagcagcacttcagaaaagagtgatggcactgctgaggcgcattgagcatcccactgcaggaaacactgaggtatgcccttagcaacagaaacacccctcccaggcgcccaccctcaatttggaagcctcttgttacatatgtgtgatcaggaatagcttttgaagtaaatccaagatacgtgcatattacaagtataatatctgagtatttaatatacatcaagtttgaaacttggctgtagctgattgatgtttagctctagactaagttgctttcaagtgataattgccttcattttaggcttgggaagatacacatgcaaaatgggaacaagcaacaaagctaatccttaactatccaaaagccaaaatggaagatggccaggtaagtctgtaaagttgacttttgtctgttaactgatctgctaaatatatgtacttcactttgataatctttcaagagtcgctcagtaaagtaaacatatagctgtgtgaagactgatatttagttgtggtttatctagacctgtactttgtaatgtggtagctactagctatgtgtgactatttaacttaaattttaacataattaaaattaaataaaatttagttcctcaatcatatagtaaccacatcgcaagtaccagtagccacatatgacaattacttactctattggacagcagagagagaaaatgttcctgtcatcacagaaatactgggcagcactgctagagactgtttgttgcagagaccatttctttaccttttcttgctctttctcccttcatcagggtgtttcacagaattttcagaaaaggagcaacagaggtagagataaattaacatggaaacaattcattttgctattttgttaggtattctaattaaggaatgtcttaggcagtagattgatcccatagagtaaatgaaattttaaaatgtggacagttcattcaactattactattgactatattatctgttactttggaaattaatgatcagttagtgtttgtgtgtatttgatttgtaatgttcatattgctctcattattaggtgatttataaaaactggttgttcctccatggtgtttttgtcatgcttaattacaataggaaaaagttatatttttacgaagcaaatgtgtgtacctaatacctttatttggaggggacatgtagctttagaatgaaagcttttggggggataactgttttatataattacataccatacagttcacccatttaaagtgtccaattcagtgactgtttttaatgtattcacagagttgtgcaaccatcaccacaatcaagttttagaacaatttcatcaattgagaaaaaaaccccgtaccctttagctatctctgcctctaaccaccccccacccactttcttgcctctcttcccccaacgtctctagccctaggcaaccatgaatctactttctgtctttgtagatttgcctattccggatatattctgtaaatggaattatagaatatgtgggcttttgtgattagcttctttcacttagcatgatgtttccaaggttcatccatgtgaaatcaaaactttttaaaagaaatttgacactcggctgattatattagtgtatgataaaaatagatcagtggctctttaaaaatgtatatggtaattttatgggttgattttaatgtatattttacattttttgtacttttgtcatggaagaaatgttggataaagcataatttgtcaagtctcaactaattaaggtttaattcatgctttgcacaaaaattttgtgtttaggctgctgaaagccttcacaagaccattgttaagaggcgaatgtcccatgtgagtggaggaggatccatagatttgtctgacacagactccctacaggaatggatcaacatgactggcttcctttgtgcccttgggggagtgtgcctccagcagagaagcaattctggcctggcaacctatagcccacccatgggtccagtcagtgaacgtaagggttctatgatttcagtgatgtcttcagagggaaacgcagatacacctgtcagcaaatttatggatcggctgttgtccttaatggtgtgtaaccatgagaaagtgggacttcaaatacggaccaatgttaaggatctggtgggtctagaattgagtcctgctctgtatccaatgctatttaacaaattgaagaataccatcagcaagttttttgactcccaaggacaggtaaagtgttctcttatttttcacctttctctatgaatagagtgacttgtttgaaataagcctttttctttcagattatttaaattaggtactcacagtttttaaaaatttccaaaaaattgcagaaagaagagtcatctcaatgtaggggtcagcttgcctcttaggaactctggtgtgtatgtgtgcctaagggtatacgtgccctgtgtatgggtacgagtgtctgcgtatatctgtatgcttatttggctctatgcctgtgggtgcacttactctgtgtgtttagatcagtcagtttcatctctctagggggtctgtcttctgggcattgatggcaaatcattaatgtatttgttctttctttaggttttattgactgataccaatactcaatttgtagaacaaaccatagctataatgaagaacttgctagataatcatactgaaggcagctctgaacatctagggcaagctagcattgaaacaatgatgttaaatctggtcaggtaagcattctactgaaatgtagcagaaacattttaagagataagaaaaacctcttacacactgatactggtagtaattgataaaataactggccattctttactgcacacaaactagggtgtgacagtaaggtagccagaagttgtgtacgttcttttctaaataaatatcttattgttttcaaacttacatttaattcgttttacttgatgactaaagtatttagaatgccttctcttttgtctatatctgataatttttttattgtttctatgtctatataggtatgttcgtgtgcttgggaatatggtccatgcaattcaaataaaaacgaaactgtgtcaattagttgaagtaatgatggcaaggagagatgacctctcattttgccaagagatgaaatttaggtgagttctcaaaagagcaatgtagggtcttgtaaatcttaatatgtccaatgaagtacagaaaaagagtagatatgcggttattggtagaaaggaggacatgaaaagagagcaatttacatgtttgtttttctctacatctcttctcaaatttccctaagctttgtgcctgtgacaatgctccctttttctaaaactgtgctatacttgagctaagaatttgattctatttccaatctgataccataactaagggccatgatggaggataaatatccatgttgcttgttcccttctggcttttatgtctgtgatagcagtatctcttttataaagtcgtcatgtcacttaggttatctggcaaattatttgcactataagaaatcttacgtgactaaaggtgtgtgtgtggcttcaaaaacattgtttgctgtttctcttttctccaccattctataggaataagatggtagaatacctgacagactgggttatgggaacatcaaaccaagcagcagatgatgatgtaaaatgtcttacaaggtaaaaaaagaatgacct

SEQ ID NO: 693 - DNA, 4044 bp, Homo sapiens
ggaaacaattcattttgctattttgttaggtattctaattaaggaatgtcttaggcagtagattgatcccatagagtaaatgaaattttaaaatgtggacagttcattcaactattactattgactatattatctgttactttggaaattaatgatcagttagtgtttgtgtgtatttgatttgtaatgttcatattgctctcattattaggtgatttataaaaactggttgttcctccatggtgtttttgtcatgcttaattacaataggaaaaagttatatttttacgaagcaaatgtgtgtacctaatacctttatttggaggggacatgtagctttagaatgaaagcttttggggggataactgttttatataattacataccatacagttcacccatttaaagtgtccaattcagtgactgtttttaatgtattcacagagttgtgcaaccatcaccacaatcaagttttagaacaatttcatcaattgagaaaaaaaccccgtaccctttagctatctctgcctctaaccaccccccacccactttcttgcctctcttcccccaacgtctctagccctaggcaaccatgaatctactttctgtctttgtagatttgcctattccggatatattctgtaaatggaattatagaatatgtgggcttttgtgattagcttctttcacttagcatgatgtttccaaggttcatccatgtgaaatcaaaactttttaaaagaaatttgacactcggctgattatattagtgtatgataaaaatagatcagtggctctttaaaaatgtatatggtaattttatgggttgattttaatgtatattttacattttttgtacttttgtcatggaagaaatgttggataaagcataatttgtcaagtctcaactaattaaggtttaattcatgctttgcacaaaaattttgtgtttaggctgctgaaagccttcacaagaccattgttaagaggcgaatgtcccatgtgagtggaggaggatccatagatttgtctgacacagactccctacaggaatggatcaacatgactggcttcctttgtgcccttgggggagtgtgcctccagcagagaagcaattctggcctggcaacctatagcccacccatgggtccagtcagtgaacgtaagggttctatgatttcagtgatgtcttcagagggaaacgcagatacacctgtcagcaaatttatggatcggctgttgtccttaatggtgtgtaaccatgagaaagtgggacttcaaatacggaccaatgttaaggatctggtgggtctagaattgagtcctgctctgtatccaatgctatttaacaaattgaagaataccatcagcaagttttttgactcccaaggacaggtaaagtgttctcttatttttcacctttctctatgaatagagtgacttgtttgaaataagcctttttctttcagattatttaaattaggtactcacagtttttaaaaatttccaaaaaattgcagaaagaagagtcatctcaatgtaggggtcagcttgcctcttaggaactctggtgtgtatgtgtgcctaagggtatacgtgccctgtgtatgggtacgagtgtctgcgtatatctgtatgcttatttggctctatgcctgtgggtgcacttactctgtgtgtttagatcagtcagtttcatctctctagggggtctgtcttctgggcattgatggcaaatcattaatgtatttgttctttctttaggttttattgactgataccaatactcaatttgtagaacaaaccatagctataatgaagaacttgctagataatcatactgaaggcagctctgaacatctagggcaagctagcattgaaacaatgatgttaaatctggtcaggtaagcattctactgaaatgtagcagaaacattttaagagataagaaaaacctcttacacactgatactggtagtaattgataaaataactggccattctttactgcacacaaactagggtgtgacagtaaggtagccagaagttgtgtacgttcttttctaaataaatatcttattgttttcaaacttacatttaattcgttttacttgatgactaaagtatttagaatgccttctcttttgtctatatctgataatttttttattgtttctatgtctatataggtatgttcgtgtgcttgggaatatggtccatgcaattcaaataaaaacgaaactgtgtcaattagttgaagtaatgatggcaaggagagatgacctctcattttgccaagagatgaaatttaggtgagttctcaaaagagcaatgtagggtcttgtaaatcttaatatgtccaatgaagtacagaaaaagagtagatatgcggttattggtagaaaggaggacatgaaaagagagcaatttacatgtttgtttttctctacatctcttctcaaatttccctaagctttgtgcctgtgacaatgctccctttttctaaaactgtgctatacttgagctaagaatttgattctatttccaatctgataccataactaagggccatgatggaggataaatatccatgttgcttgttcccttctggcttttatgtctgtgatagcagtatctcttttataaagtcgtcatgtcacttaggttatctggcaaattatttgcactataagaaatcttacgtgactaaaggtgtgtgtgtggcttcaaaaacattgtttgctgtttctcttttctccaccattctataggaataagatggtagaatacctgacagactgggttatgggaacatcaaaccaagcagcagatgatgatgtaaaatgtcttacaaggtaaaaaaagaatgaccttcaagtattagtgggttttactgtgagagttataactacttaattacagctttatacttgtattttgtgtgtatttaaacttttgagatgtcaaacttttgtgtttgaaatatgtaaagatgctaatctttattactgcttttttttgactgatagactttcagtaaaattaaatgtgaaagagtgatatgtttgggaagttagtgttgtcagtttatgaagaatagtctacagttattgggaaataagatacataaagcctcagattgcatttgtgttatgattagatagataaaggtattatttgaggaactcattgtgttgaatctttttaagaaataattgatttcctgattcaagcaccagagacagaaaaaaaaggaagtaatcaagtctgctttaatgatacttattgacacatatcagaaaatgattaaacactatggactgtataataagcattcacatatgtttctttgaccaagcctagctttataatacagtcttctctgtcagggattggttccaagaaccactccccaaacccctgcccacatcttactcccatgaacactaaaatccacagatgctcaagtccctgacttaagatgtcatagtatttgcatataaactatacacatcctcccatatatttttaattatcttcagattacttataatatctaatacaatataaatgttgtataaatatttgttataccatattgtttagggaataacaacaacaaaaaatctgtacatgttgagtacagatgaaaccctccttttttttcccccaaatattttcaatccatgggtggttgaatccatggatatagaactcactgatacagagggcccattgtacatgcttctgatttaaggtagccattttgccaagattactttgtagaaagtaagtattaccttctccccatttgagatgattttgtattctgggatctgcatattaactcaaattatttgggttgtgctaataatttgtttaatgaaataggtagttcctaaggtttatatctgttagtaagaggtttatttgaggggaagtgaaagaacttgaaagattcatggtctctaaattttttttttttttttttttttttttcagagatttggaccaggcaagcatggaagcagtagtttcacttct

SEQ ID NO: 694 - DNA, 4087 bp, Homo sapiens
ataaaaactggttgttcctccatggtgtttttgtcatgcttaattacaataggaaaaagttatatttttacgaagcaaatgtgtgtacctaatacctttatttggaggggacatgtagctttagaatgaaagcttttggggggataactgttttatataattacataccatacagttcacccatttaaagtgtccaattcagtgactgtttttaatgtattcacagagttgtgcaaccatcaccacaatcaagttttagaacaatttcatcaattgagaaaaaaaccccgtaccctttagctatctctgcctctaaccaccccccacccactttcttgcctctcttcccccaacgtctctagccctaggcaaccatgaatctactttctgtctttgtagatttgcctattccggatatattctgtaaatggaattatagaatatgtgggcttttgtgattagcttctttcacttagcatgatgtttccaaggttcatccatgtgaaatcaaaactttttaaaagaaatttgacactcggctgattatattagtgtatgataaaaatagatcagtggctctttaaaaatgtatatggtaattttatgggttgattttaatgtatattttacattttttgtacttttgtcatggaagaaatgttggataaagcataatttgtcaagtctcaactaattaaggtttaattcatgctttgcacaaaaattttgtgtttaggctgctgaaagccttcacaagaccattgttaagaggcgaatgtcccatgtgagtggaggaggatccatagatttgtctgacacagactccctacaggaatggatcaacatgactggcttcctttgtgcccttgggggagtgtgcctccagcagagaagcaattctggcctggcaacctatagcccacccatgggtccagtcagtgaacgtaagggttctatgatttcagtgatgtcttcagagggaaacgcagatacacctgtcagcaaatttatggatcggctgttgtccttaatggtgtgtaaccatgagaaagtgggacttcaaatacggaccaatgttaaggatctggtgggtctagaattgagtcctgctctgtatccaatgctatttaacaaattgaagaataccatcagcaagttttttgactcccaaggacaggtaaagtgttctcttatttttcacctttctctatgaatagagtgacttgtttgaaataagcctttttctttcagattatttaaattaggtactcacagtttttaaaaatttccaaaaaattgcagaaagaagagtcatctcaatgtaggggtcagcttgcctcttaggaactctggtgtgtatgtgtgcctaagggtatacgtgccctgtgtatgggtacgagtgtctgcgtatatctgtatgcttatttggctctatgcctgtgggtgcacttactctgtgtgtttagatcagtcagtttcatctctctagggggtctgtcttctgggcattgatggcaaatcattaatgtatttgttctttctttaggttttattgactgataccaatactcaatttgtagaacaaaccatagctataatgaagaacttgctagataatcatactgaaggcagctctgaacatctagggcaagctagcattgaaacaatgatgttaaatctggtcaggtaagcattctactgaaatgtagcagaaacattttaagagataagaaaaacctcttacacactgatactggtagtaattgataaaataactggccattctttactgcacacaaactagggtgtgacagtaaggtagccagaagttgtgtacgttcttttctaaataaatatcttattgttttcaaacttacatttaattcgttttacttgatgactaaagtatttagaatgccttctcttttgtctatatctgataatttttttattgtttctatgtctatataggtatgttcgtgtgcttgggaatatggtccatgcaattcaaataaaaacgaaactgtgtcaattagttgaagtaatgatggcaaggagagatgacctctcattttgccaagagatgaaatttaggtgagttctcaaaagagcaatgtagggtcttgtaaatcttaatatgtccaatgaagtacagaaaaagagtagatatgcggttattggtagaaaggaggacatgaaaagagagcaatttacatgtttgtttttctctacatctcttctcaaatttccctaagctttgtgcctgtgacaatgctccctttttctaaaactgtgctatacttgagctaagaatttgattctatttccaatctgataccataactaagggccatgatggaggataaatatccatgttgcttgttcccttctggcttttatgtctgtgatagcagtatctcttttataaagtcgtcatgtcacttaggttatctggcaaattatttgcactataagaaatcttacgtgactaaaggtgtgtgtgtggcttcaaaaacattgtttgctgtttctcttttctccaccattctataggaataagatggtagaatacctgacagactgggttatgggaacatcaaaccaagcagcagatgatgatgtaaaatgtcttacaaggtaaaaaaagaatgaccttcaagtattagtgggttttactgtgagagttataactacttaattacagctttatacttgtattttgtgtgtatttaaacttttgagatgtcaaacttttgtgtttgaaatatgtaaagatgctaatctttattactgcttttttttgactgatagactttcagtaaaattaaatgtgaaagagtgatatgtttgggaagttagtgttgtcagtttatgaagaatagtctacagttattgggaaataagatacataaagcctcagattgcatttgtgttatgattagatagataaaggtattatttgaggaactcattgtgttgaatctttttaagaaataattgatttcctgattcaagcaccagagacagaaaaaaaaggaagtaatcaagtctgctttaatgatacttattgacacatatcagaaaatgattaaacactatggactgtataataagcattcacatatgtttctttgaccaagcctagctttataatacagtcttctctgtcagggattggttccaagaaccactccccaaacccctgcccacatcttactcccatgaacactaaaatccacagatgctcaagtccctgacttaagatgtcatagtatttgcatataaactatacacatcctcccatatatttttaattatcttcagattacttataatatctaatacaatataaatgttgtataaatatttgttataccatattgtttagggaataacaacaacaaaaaatctgtacatgttgagtacagatgaaaccctccttttttttcccccaaatattttcaatccatgggtggttgaatccatggatatagaactcactgatacagagggcccattgtacatgcttctgatttaaggtagccattttgccaagattactttgtagaaagtaagtattaccttctccccatttgagatgattttgtattctgggatctgcatattaactcaaattatttgggttgtgctaataatttgtttaatgaaataggtagttcctaaggtttatatctgttagtaagaggtttatttgaggggaagtgaaagaacttgaaagattcatggtctctaaattttttttttttttttttttttttttcagagatttggaccaggcaagcatggaagcagtagtttcacttctagctggtctccctctgcagcctgaagaaggagatggtgtggaattgatggaagccaaatcacagttatttcttaagtaaatttcagtcaccaaaaaacataaagcaaaaagcaaataaagccccccaccacacaaaaaaagcaaagaaataatacccatgacaggactaggataggaaaataactgtgttttgtgatttttttaaagaaagtaatatgatcagtgaaattttgcttataataaaacccagattgcttcatt

SEQ ID NO: 695 - DNA, 4056 bp, Homo sapiens
tgtgagtggaggaggatccatagatttgtctgacacagactccctacaggaatggatcaacatgactggcttcctttgtgcccttgggggagtgtgcctccagcagagaagcaattctggcctggcaacctatagcccacccatgggtccagtcagtgaacgtaagggttctatgatttcagtgatgtcttcagagggaaacgcagatacacctgtcagcaaatttatggatcggctgttgtccttaatggtgtgtaaccatgagaaagtgggacttcaaatacggaccaatgttaaggatctggtgggtctagaattgagtcctgctctgtatccaatgctatttaacaaattgaagaataccatcagcaagttttttgactcccaaggacaggtaaagtgttctcttatttttcacctttctctatgaatagagtgacttgtttgaaataagcctttttctttcagattatttaaattaggtactcacagtttttaaaaatttccaaaaaattgcagaaagaagagtcatctcaatgtaggggtcagcttgcctcttaggaactctggtgtgtatgtgtgcctaagggtatacgtgccctgtgtatgggtacgagtgtctgcgtatatctgtatgcttatttggctctatgcctgtgggtgcacttactctgtgtgtttagatcagtcagtttcatctctctagggggtctgtcttctgggcattgatggcaaatcattaatgtatttgttctttctttaggttttattgactgataccaatactcaatttgtagaacaaaccatagctataatgaagaacttgctagataatcatactgaaggcagctctgaacatctagggcaagctagcattgaaacaatgatgttaaatctggtcaggtaagcattctactgaaatgtagcagaaacattttaagagataagaaaaacctcttacacactgatactggtagtaattgataaaataactggccattctttactgcacacaaactagggtgtgacagtaaggtagccagaagttgtgtacgttcttttctaaataaatatcttattgttttcaaacttacatttaattcgttttacttgatgactaaagtatttagaatgccttctcttttgtctatatctgataatttttttattgtttctatgtctatataggtatgttcgtgtgcttgggaatatggtccatgcaattcaaataaaaacgaaactgtgtcaattagttgaagtaatgatggcaaggagagatgacctctcattttgccaagagatgaaatttaggtgagttctcaaaagagcaatgtagggtcttgtaaatcttaatatgtccaatgaagtacagaaaaagagtagatatgcggttattggtagaaaggaggacatgaaaagagagcaatttacatgtttgtttttctctacatctcttctcaaatttccctaagctttgtgcctgtgacaatgctccctttttctaaaactgtgctatacttgagctaagaatttgattctatttccaatctgataccataactaagggccatgatggaggataaatatccatgttgcttgttcccttctggcttttatgtctgtgatagcagtatctcttttataaagtcgtcatgtcacttaggttatctggcaaattatttgcactataagaaatcttacgtgactaaaggtgtgtgtgtggcttcaaaaacattgtttgctgtttctcttttctccaccattctataggaataagatggtagaatacctgacagactgggttatgggaacatcaaaccaagcagcagatgatgatgtaaaatgtcttacaaggtaaaaaaagaatgaccttcaagtattagtgggttttactgtgagagttataactacttaattacagctttatacttgtattttgtgtgtatttaaacttttgagatgtcaaacttttgtgtttgaaatatgtaaagatgctaatctttattactgcttttttttgactgatagactttcagtaaaattaaatgtgaaagagtgatatgtttgggaagttagtgttgtcagtttatgaagaatagtctacagttattgggaaataagatacataaagcctcagattgcatttgtgttatgattagatagataaaggtattatttgaggaactcattgtgttgaatctttttaagaaataattgatttcctgattcaagcaccagagacagaaaaaaaaggaagtaatcaagtctgctttaatgatacttattgacacatatcagaaaatgattaaacactatggactgtataataagcattcacatatgtttctttgaccaagcctagctttataatacagtcttctctgtcagggattggttccaagaaccactccccaaacccctgcccacatcttactcccatgaacactaaaatccacagatgctcaagtccctgacttaagatgtcatagtatttgcatataaactatacacatcctcccatatatttttaattatcttcagattacttataatatctaatacaatataaatgttgtataaatatttgttataccatattgtttagggaataacaacaacaaaaaatctgtacatgttgagtacagatgaaaccctccttttttttcccccaaatattttcaatccatgggtggttgaatccatggatatagaactcactgatacagagggcccattgtacatgcttctgatttaaggtagccattttgccaagattactttgtagaaagtaagtattaccttctccccatttgagatgattttgtattctgggatctgcatattaactcaaattatttgggttgtgctaataatttgtttaatgaaataggtagttcctaaggtttatatctgttagtaagaggtttatttgaggggaagtgaaagaacttgaaagattcatggtctctaaattttttttttttttttttttttttttcagagatttggaccaggcaagcatggaagcagtagtttcacttctagctggtctccctctgcagcctgaagaaggagatggtgtggaattgatggaagccaaatcacagttatttcttaagtaaatttcagtcaccaaaaaacataaagcaaaaagcaaataaagccccccaccacacaaaaaaagcaaagaaataatacccatgacaggactaggataggaaaataactgtgttttgtgatttttttaaagaaagtaatatgatcagtgaaattttgcttataataaaacccagattgcttcattaagtcatttacaaaagtgacattgtctaagctgtttggaccactaattttatatactaacattaaaagtgacacatttaccaggtaatattgcatctatttgatgctaatgttatgaaaggtatactaggctatatcaggtaaaatcatgtccaacatagcacacttcataataagccaccctggctgattatcgcgagagaggagagaaacagttaacccagggccattcacaccatgcacatatgattgttttggaatgtctggttagctttctagttgatacggccttcactatgtaaaggtcagtctttttatttctcagatacttcacattatttatgaaccttttgaatgactgcagtgaagttgaagatgaaagtgcgcaaacaggtggcaggaaacgtggcatgtctcggaggctggcatcactgaggcactgtacggtccttgcaatgtcaaacttactcaatgccaacgtagacagtggtctcatgcactccataggtgagatcaaatgaaagtttcatatagaaatacaaaacctagagaactggcatgtaagagaagcaaaaattacttcagcaaggccatgttagtaaatttgcatctgtttgtccacattaggcttaggttaccacaaggatctccagacaagagctacatttatggaagttctgacaaaaatccttcaacaaggcacagaatttgacacacttgcagaaacagtattggctgatcggtttgagagat

SEQ ID NO: 696 - DNA, 4046 bp, Homo sapiens
ggtagccagaagttgtgtacgttcttttctaaataaatatcttattgttttcaaacttacatttaattcgttttacttgatgactaaagtatttagaatgccttctcttttgtctatatctgataatttttttattgtttctatgtctatataggtatgttcgtgtgcttgggaatatggtccatgcaattcaaataaaaacgaaactgtgtcaattagttgaagtaatgatggcaaggagagatgacctctcattttgccaagagatgaaatttaggtgagttctcaaaagagcaatgtagggtcttgtaaatcttaatatgtccaatgaagtacagaaaaagagtagatatgcggttattggtagaaaggaggacatgaaaagagagcaatttacatgtttgtttttctctacatctcttctcaaatttccctaagctttgtgcctgtgacaatgctccctttttctaaaactgtgctatacttgagctaagaatttgattctatttccaatctgataccataactaagggccatgatggaggataaatatccatgttgcttgttcccttctggcttttatgtctgtgatagcagtatctcttttataaagtcgtcatgtcacttaggttatctggcaaattatttgcactataagaaatcttacgtgactaaaggtgtgtgtgtggcttcaaaaacattgtttgctgtttctcttttctccaccattctataggaataagatggtagaatacctgacagactgggttatgggaacatcaaaccaagcagcagatgatgatgtaaaatgtcttacaaggtaaaaaaagaatgaccttcaagtattagtgggttttactgtgagagttataactacttaattacagctttatacttgtattttgtgtgtatttaaacttttgagatgtcaaacttttgtgtttgaaatatgtaaagatgctaatctttattactgcttttttttgactgatagactttcagtaaaattaaatgtgaaagagtgatatgtttgggaagttagtgttgtcagtttatgaagaatagtctacagttattgggaaataagatacataaagcctcagattgcatttgtgttatgattagatagataaaggtattatttgaggaactcattgtgttgaatctttttaagaaataattgatttcctgattcaagcaccagagacagaaaaaaaaggaagtaatcaagtctgctttaatgatacttattgacacatatcagaaaatgattaaacactatggactgtataataagcattcacatatgtttctttgaccaagcctagctttataatacagtcttctctgtcagggattggttccaagaaccactccccaaacccctgcccacatcttactcccatgaacactaaaatccacagatgctcaagtccctgacttaagatgtcatagtatttgcatataaactatacacatcctcccatatatttttaattatcttcagattacttataatatctaatacaatataaatgttgtataaatatttgttataccatattgtttagggaataacaacaacaaaaaatctgtacatgttgagtacagatgaaaccctccttttttttcccccaaatattttcaatccatgggtggttgaatccatggatatagaactcactgatacagagggcccattgtacatgcttctgatttaaggtagccattttgccaagattactttgtagaaagtaagtattaccttctccccatttgagatgattttgtattctgggatctgcatattaactcaaattatttgggttgtgctaataatttgtttaatgaaataggtagttcctaaggtttatatctgttagtaagaggtttatttgaggggaagtgaaagaacttgaaagattcatggtctctaaattttttttttttttttttttttttttcagagatttggaccaggcaagcatggaagcagtagtttcacttctagctggtctccctctgcagcctgaagaaggagatggtgtggaattgatggaagccaaatcacagttatttcttaagtaaatttcagtcaccaaaaaacataaagcaaaaagcaaataaagccccccaccacacaaaaaaagcaaagaaataatacccatgacaggactaggataggaaaataactgtgttttgtgatttttttaaagaaagtaatatgatcagtgaaattttgcttataataaaacccagattgcttcattaagtcatttacaaaagtgacattgtctaagctgtttggaccactaattttatatactaacattaaaagtgacacatttaccaggtaatattgcatctatttgatgctaatgttatgaaaggtatactaggctatatcaggtaaaatcatgtccaacatagcacacttcataataagccaccctggctgattatcgcgagagaggagagaaacagttaacccagggccattcacaccatgcacatatgattgttttggaatgtctggttagctttctagttgatacggccttcactatgtaaaggtcagtctttttatttctcagatacttcacattatttatgaaccttttgaatgactgcagtgaagttgaagatgaaagtgcgcaaacaggtggcaggaaacgtggcatgtctcggaggctggcatcactgaggcactgtacggtccttgcaatgtcaaacttactcaatgccaacgtagacagtggtctcatgcactccataggtgagatcaaatgaaagtttcatatagaaatacaaaacctagagaactggcatgtaagagaagcaaaaattacttcagcaaggccatgttagtaaatttgcatctgtttgtccacattaggcttaggttaccacaaggatctccagacaagagctacatttatggaagttctgacaaaaatccttcaacaaggcacagaatttgacacacttgcagaaacagtattggctgatcggtttgagagattggtggaactggtcacaatgatgggtgatcaaggagaactccctatagcgatggctctggccaatgtggttccttgttctcagtgggtaagtgattagagtaagcggggaagaaaagtgcctggcacatagcaaatccttcagaatatatttgttcaataaatgtttgttgaatgaattgataaaatttcagagccagaagaaagatgtttagttaggtgatttttcagctgtagggaagtggttggcaccactagacctgactagtgttctgtatcatttcatcctactaaaaaattccatttaaacgcattaaaaatcactgatctactctggtgtcttcatatatttgataaggtaattaggttaaacctaattttagttagttgttgcaatgctggaattggaatccacgatttgtgcctgtttactacctccagtttgctattcttttccccataatgtctcatacagttttttaaaaatttaagcactatatttgcatttgatattatgatattgtttattttaaaaactgaaagcgtcatatggctatgtctctctcttaatttaatgaaaaattttcctaaaatcacatcattcttaatacatgctaaaacgttgagacgggttgttgttcctttccagtgttaaaaggctatttgctttttagtgtaccaaaactgatttcagttatagtaaattatgactaataaggtaatctgtccttgttaacaagcctgtatttgttatacctgtacttaaagtaaaattcaaactccttaccctgtcctacaaggctctacctgatctgggccctacctcatctctaacatcatcttatgctattttctttcttgttcaccagagccacaccagctacctttctgtccctccttgttagacttatttctgctttagagcacccttgctgctgccaccacctgaaatgcttctcttctggtattttattttggtgagaacacctggcatgagatctaccctctaacagatttttaagtgta

SEQ ID NO: 697 - DNA, 4042 bp, Homo sapiens
ctttattactgcttttttttgactgatagactttcagtaaaattaaatgtgaaagagtgatatgtttgggaagttagtgttgtcagtttatgaagaatagtctacagttattgggaaataagatacataaagcctcagattgcatttgtgttatgattagatagataaaggtattatttgaggaactcattgtgttgaatctttttaagaaataattgatttcctgattcaagcaccagagacagaaaaaaaaggaagtaatcaagtctgctttaatgatacttattgacacatatcagaaaatgattaaacactatggactgtataataagcattcacatatgtttctttgaccaagcctagctttataatacagtcttctctgtcagggattggttccaagaaccactccccaaacccctgcccacatcttactcccatgaacactaaaatccacagatgctcaagtccctgacttaagatgtcatagtatttgcatataaactatacacatcctcccatatatttttaattatcttcagattacttataatatctaatacaatataaatgttgtataaatatttgttataccatattgtttagggaataacaacaacaaaaaatctgtacatgttgagtacagatgaaaccctccttttttttcccccaaatattttcaatccatgggtggttgaatccatggatatagaactcactgatacagagggcccattgtacatgcttctgatttaaggtagccattttgccaagattactttgtagaaagtaagtattaccttctccccatttgagatgattttgtattctgggatctgcatattaactcaaattatttgggttgtgctaataatttgtttaatgaaataggtagttcctaaggtttatatctgttagtaagaggtttatttgaggggaagtgaaagaacttgaaagattcatggtctctaaattttttttttttttttttttttttttcagagatttggaccaggcaagcatggaagcagtagtttcacttctagctggtctccctctgcagcctgaagaaggagatggtgtggaattgatggaagccaaatcacagttatttcttaagtaaatttcagtcaccaaaaaacataaagcaaaaagcaaataaagccccccaccacacaaaaaaagcaaagaaataatacccatgacaggactaggataggaaaataactgtgttttgtgatttttttaaagaaagtaatatgatcagtgaaattttgcttataataaaacccagattgcttcattaagtcatttacaaaagtgacattgtctaagctgtttggaccactaattttatatactaacattaaaagtgacacatttaccaggtaatattgcatctatttgatgctaatgttatgaaaggtatactaggctatatcaggtaaaatcatgtccaacatagcacacttcataataagccaccctggctgattatcgcgagagaggagagaaacagttaacccagggccattcacaccatgcacatatgattgttttggaatgtctggttagctttctagttgatacggccttcactatgtaaaggtcagtctttttatttctcagatacttcacattatttatgaaccttttgaatgactgcagtgaagttgaagatgaaagtgcgcaaacaggtggcaggaaacgtggcatgtctcggaggctggcatcactgaggcactgtacggtccttgcaatgtcaaacttactcaatgccaacgtagacagtggtctcatgcactccataggtgagatcaaatgaaagtttcatatagaaatacaaaacctagagaactggcatgtaagagaagcaaaaattacttcagcaaggccatgttagtaaatttgcatctgtttgtccacattaggcttaggttaccacaaggatctccagacaagagctacatttatggaagttctgacaaaaatccttcaacaaggcacagaatttgacacacttgcagaaacagtattggctgatcggtttgagagattggtggaactggtcacaatgatgggtgatcaaggagaactccctatagcgatggctctggccaatgtggttccttgttctcagtgggtaagtgattagagtaagcggggaagaaaagtgcctggcacatagcaaatccttcagaatatatttgttcaataaatgtttgttgaatgaattgataaaatttcagagccagaagaaagatgtttagttaggtgatttttcagctgtagggaagtggttggcaccactagacctgactagtgttctgtatcatttcatcctactaaaaaattccatttaaacgcattaaaaatcactgatctactctggtgtcttcatatatttgataaggtaattaggttaaacctaattttagttagttgttgcaatgctggaattggaatccacgatttgtgcctgtttactacctccagtttgctattcttttccccataatgtctcatacagttttttaaaaatttaagcactatatttgcatttgatattatgatattgtttattttaaaaactgaaagcgtcatatggctatgtctctctcttaatttaatgaaaaattttcctaaaatcacatcattcttaatacatgctaaaacgttgagacgggttgttgttcctttccagtgttaaaaggctatttgctttttagtgtaccaaaactgatttcagttatagtaaattatgactaataaggtaatctgtccttgttaacaagcctgtatttgttatacctgtacttaaagtaaaattcaaactccttaccctgtcctacaaggctctacctgatctgggccctacctcatctctaacatcatcttatgctattttctttcttgttcaccagagccacaccagctacctttctgtccctccttgttagacttatttctgctttagagcacccttgctgctgccaccacctgaaatgcttctcttctggtattttattttggtgagaacacctggcatgagatctaccctctaacagatttttaagtgtataatacagtattgctgtctgtaggcacaatgctgcacagcagatctctagaacttaccttgtataactgaaattttatactcattgattagcaacagccccaaattattgaaacctccttgaagcctaaatttcagaaatgttcaaatgttttgaaaatggatattctgaattatcttattagcatctacctataattagcactgaaaatagtaattttttaaataaagaatcagttaagggccgggtgtggtcgctcacgcctgtaatcccagcactttgggaggctgaggcgggaggatcacaaggtcgggagatcgagaccatcctggctaacaccgtgaaaccctgtctctactaaaaaaatacaaaaaaatcagctgggcgtggtggcaggtgccaatagtcccagctacttgggaggctgaggcaggagaatggtgtgaacccaggagggttgcagtgagccaagatctcgccactgcactccagcctgggcgacagagcgagactctgtctcaaaaaaaaaaaaaaaaaaaaaaaaaagaatcatttagttcaagtagctttaattcgttgagttttatattaaatgactttgagaaggaattttctgttaggccagatctcacctaccacattattgtaatccttggatcaggcaagaattagagagctatgagccatgatcctggcctttgttgttactgcttgaggattgaggcatctttttatggctacccctattatctataaatttcttcttatcatgtgattaaacagtgatttaccattagatcattttttcttgagtgtaccccaaactgttttactacagagagttataaaggatgtcatttaggtaatagatagaaatttcagccctcatccttgtgaccctagctttgtatgtaaatctggctcatctctgggttctgaatgcccaattccttttcttcctg

SEQ ID NO: 698 - DNA, 4051 bp, Homo sapiens
atttcagttatagtaaattatgactaataaggtaatctgtccttgttaacaagcctgtatttgttatacctgtacttaaagtaaaattcaaactccttaccctgtcctacaaggctctacctgatctgggccctacctcatctctaacatcatcttatgctattttctttcttgttcaccagagccacaccagctacctttctgtccctccttgttagacttatttctgctttagagcacccttgctgctgccaccacctgaaatgcttctcttctggtattttattttggtgagaacacctggcatgagatctaccctctaacagatttttaagtgtataatacagtattgctgtctgtaggcacaatgctgcacagcagatctctagaacttaccttgtataactgaaattttatactcattgattagcaacagccccaaattattgaaacctccttgaagcctaaatttcagaaatgttcaaatgttttgaaaatggatattctgaattatcttattagcatctacctataattagcactgaaaatagtaattttttaaataaagaatcagttaagggccgggtgtggtcgctcacgcctgtaatcccagcactttgggaggctgaggcgggaggatcacaaggtcgggagatcgagaccatcctggctaacaccgtgaaaccctgtctctactaaaaaaatacaaaaaaatcagctgggcgtggtggcaggtgccaatagtcccagctacttgggaggctgaggcaggagaatggtgtgaacccaggagggttgcagtgagccaagatctcgccactgcactccagcctgggcgacagagcgagactctgtctcaaaaaaaaaaaaaaaaaaaaaaaaaagaatcatttagttcaagtagctttaattcgttgagttttatattaaatgactttgagaaggaattttctgttaggccagatctcacctaccacattattgtaatccttggatcaggcaagaattagagagctatgagccatgatcctggcctttgttgttactgcttgaggattgaggcatctttttatggctacccctattatctataaatttcttcttatcatgtgattaaacagtgatttaccattagatcattttttcttgagtgtaccccaaactgttttactacagagagttataaaggatgtcatttaggtaatagatagaaatttcagccctcatccttgtgaccctagctttgtatgtaaatctggctcatctctgggttctgaatgcccaattccttttcttcctggtttctcaaaaatcctatagtctttctgtttttgttgtgtctctgcctagtatatattcagtattcgctgagttccccgactgtatgagaagagagtagaactcttctgatcatcaatcttatttctgctctgtgcaaatgcttgtacaaatcaaactaaattctttgctgtcatcttctgtttctgctctctttcattttgtgatgtaatttgagctgaatcttggagattttgtctcctagtaaagcgtaggcctctcttaatagcttttaccggttaatccttggaattaacagctatcatagacattgtatatagtcatctatcataaacaatgtacactgttaaatctcaggataaatattaatcagtcatcatttgccttaatttagcaagtggttgtcaactttgggtttacatttttgctactctttagcttcctacctaagaataaaaatgggattgtttgcactaacctgattttgttttgttctcaggatgaactagctcgagttctggttactctgtttgattctcggcatttactctaccaactgctctggaacatgttttctaaagaagtagaattggcagactccatgcagactctcttccgaggcaacagcttggccagtaaaataatgacattctgtttcaaggtttgtatcattcattttgtgtgtatgtgtgtgctgaggtatgtcaagtaatgattatgtacagaatgtgcagggctgattgtcttcttttaaggtaaaatatatggagcaggtataataaactcctattcgtgcatttctgtaggtatatggtgctacctatctacaaaaactcctggatcctttattacgaattgtgatcacatcctctgattggcaacatgttagctttgaagtggatcctaccaggtttgtcatcttttcacatagaaccgctgttttttgtttttttttttttgtttgtttgttttactaacactgcatgaagcaaggcaccttctccccttgatcattaaaattagtttttaattataaaagttatatacaaatacacgtttctttaatgatatctgtaatttttttttaaggtatccttttatttgccttagatccagggacaaactagagaaaggtgtctttgacttccacctccagagactgttactagttaagtctgttcccctgtcctttttccatgcatttacatattcatatgcagtcacttgcatgcatactctttttctaactcacttcttctatgatgaggagtgacttaggagaagggaaagaggctaataggtaatgcaggctgcagtttatttatttgtcatttttttaaaaatttgagacagagtctcactctgccattcaggctggggtgcactggcgcagtctcggctcactgcaacctctgcctcccaggttcgtgtgattctcctgcctcagcctcctgagtagctgggattacaggtgtgcgccaccacgcccaggtaattttttttttttttttgtatttttaatagagatggtgtttcaccatcttggccaggctggtctcaaactcctgacctcaggtgatccgcctgccctggcctccaaaaatactgggattacaggtgtgagccaccatgcccagcccagagtgcagtttaaaccaccatttctgtgaagctttctctgcttgttaccaggtactacccacgaacaaagaaatatgctttgttctgtgctgtgcaccaccattgtaacaattgtgacgatttatgagtttctctctcctctagactgtttgctcttttacatttttacatctttatatccttccatgaatatttagcatggtgtctgccttatagtgaacattttataaatatttgttaagtgaatgaattttaacggaatatcttatgcttgctttttctaagccacatgttaagatgttcttgtctgtctttcagttaggactttattttttacttttaagttcagagcttcttgatgattgttcttcctaaataatcattatttagcaactgtgtatcagttgatatttttggctctgcatttgctgaagtatcaactgtaatatctattcagaactccagcactaagccaatttttgttaaaatagttaaaaacttaaaagcaatttttatatttttatttacttcttattttttgaaatggggtctcactctgtcacccaggctggagtgcggtggcaccatctcggctcactgcaaccttcctgtgcaggactcaagcgattctcccatctcagcctcccaagtagctgggattacaggcatgcaccaccatgcaaaatacaaaatttttgtattttggtagagacgaggttttgccttgttgcccaggctggtctcaaactcctagactaaagagatccacatgctgtggcctcccaaagtgctgggattacagatgtgagccaccacgcctggccaaagcaatgttttgtaaagccttgtattttcttgccattaagcactttcagtttttttcttgacaacttctcatgtctactttttttttttttttttgcaattttcaagtgtacataatacattattacggattttatgttaattttgtgccctacaattttactgaatcttattattaagcaattttactttctaaaggttaaagaattacttagagagtgaaccagctgcttcaaataagtttactatacaaagtgctgtggtccagataagagaactagatggc

SEQ ID NO: 699 - DNA, 4027 bp, Homo sapiens
aagatgaagtgaaataatccccattttttccagagttaatctggagtcagcctgtcataatttgtgtcataatttcctgtcataaattatgacaggaaatatttattgaagcattgtgaaaaaaatagctacgtgatattccgcatgtaaatctgggtcccctcccaccaatatcctttgaaatgaaggtttatccttgacatcacagaatattgagtggaatgctacagttttgtagtcactgctactttaaacagcagtttagccgcactaagcaagaatagctgtagagattaaaatgttacattaagtgttctttaaaaatgaacatatatagtatatataaaaatgtaaactgcaaaatataattttcatctatgacatgatttaaagcaggggactctggaaagggatgggagctgaaccagttttatagcactcttcccgagctaaggtacctttttatcttaatgtagaatgttttataaagggaaaatcatccattttaaatattgggttcacattgcttttcaggctggacaaccatttcttgagttcttaaattatttttatttgacagaattataaattgaggtagacataggggttctctcttctggtgagatccttttttcttttaggtccccaagaattcccatccctccatggtttaaataataggtaggttcttgtattataaaggaagctgtgaagaaaaggcactggcagtaacattacttgtaagtaagtttttttttttctcagtaagaatctaatattttattttgtatatggcaagcatttttttcttaaattcaattgtaactggtacacaacaaaatgtaaatatgtactatcaggtataggatgttttgggggtgtgctgttgaaaatttagtttcacgttataaagttgaccacactttcatgtctgttaatcttagtaaattatgatcatctttgtgtgaaaaatttggtctgctttcattactcatcaaacatgcagtataagtgatgatacagtgaagatcttttttcaggtttcttctacccatctcatccatgaggtttttctttcctctgagataccttaattgtactttaatatgatataagactagaattgagaggaaactttattttctcatgttttgggagaagaaaaaaatagaaatatgtcattcatgaggactgattgattcagagtttttatgcaaagtttgacctttgaactctttgttttcatgtctttatattaattcaaaccttatactcaattctcaactccttgtttttaggtggttagccagcgtttccctcagaacagcatcggtgcagtaggaagtgccatgttcctcagatttatcaatcctgccattgtctcaccgtatgaagcagggattttagataaaaagccaccacctagaatcgaaaggggcttgaagttaatgtcaaaggtgaattattttgataatctagctatcttaaattccccttccaactaaattttcagcttttcttacagtacttcctcttacatttatatttgaaataccctatggttttcagttatgtgcttttgttttatttgtttatattacaaaggaattcattagttaggtacctgatggaccttattttcatgataaaacattttattatagcagatgtcttgtgttatgaagatcattttttgcgtaatcattctagacattctgaaacagactagaatgtagactataggattttttattttaaaagtcattaaacatttttaatatgtatttttacatgtaaatataataattatatttgggaaggttagaaacactacctaaaataatttatagaatgaggaatgtttgatttttaagtactagcagaaattatatcaatgagaaaattcatgtttttaaagaatgtcttaatgtatagacttcatacaataaataatctgattatttataaccctgttttattgtgtagatacttcagagtattgccaatcatgttctcttcacaaaagaagaacatatgcggcctttcaatgattttgtgaaaagcaactttgatgcagcacgcaggtaattttcttgccacttactcagttgctctgtttgaatcaaatattttcggtttcacataaatccatgtacctgttttacatgaagttcctgtgtaagtttttttcttttcctgctctaggtcaagacatagcttgtcttattttattttactataaaagacagtcatgaaataaattaatattttttataatttggtagtgattttcatatttgaaaaccaagagggatttttgacatgtctaattaaataaaggatttgaggatggtacaatatgtggacaaggaagaagtaggattctttttatttaaaactaaaaccaaattggtatcaataatacataacaatgtttaataaggtttttttgatgttagagtatttgtgatacttaaatttggaagtgtatctaaactaaaatgttattctttaaaccaagtcaaacaaacacataagattttgtttatgaggaactgaactttatgattttagaaaacttttctgctagatttctataactagttatttcactttatttctctgagttattggtctatctgtaaagtagggataaactctttgcctgagttgtttttagagaaaaaaatgagataattcataagaaagcgctttgtaaatttatgtctggaattctgcttttcatgcagtgtgaatctaattgatcctcatcatctaagctagccttgtacaactctctcttccagtttatcatcattgtagttgttactgactttttttctgttagagaaattggagttgaaaaggtatattgctgaatgacaagccatgttggaaagagagtgaatgtcagcataggattcatattctggcactctgtgtacccatacaaagttaaaaggatcaaagttttaatcctggctctgacctagcaggctatatatctttggggaggtctttcgtctggaccttcatttccttatctgtaaaatactagcctctttccaaagtttcatccatcttaattttgttgttgtttaacttcagagcctactttgaagctgaagccgggtatcagaaatggaaagccaactttctccttgtcctttttgctttgtctaatgtcaagtcacattgtgtgaacaagccctccatatttgtaatcttagttacttcacaaagttacttcttataaatttaattcaaacataagtctgggtgtatctggtgttgaaaattctaatgactttgcatttttgaaggtttttccttgatatagcatctgattgtcctacaagtgatgcagtaaatcatagtctttccttcataagtgacggcaatgtgcttgctttacatcgtctactctggaacaatcaggagaaaattgggcagtatctttccagcaacaggtaagatttcccagtcatggggatagtgaacactctccgtttaaatttagattaatacaattattggtcatgaatagtgctttttactttgcatcttcttggactaagaattatggtttagaaagagaaagattctttttttcaaaaaaatacaaacaaaaggttaagtcatattaaataatcaacaaacctacctaggttccagtggtcattattattatttttttgtcaggttaagaaatcacagatttgctctttgggtttttatggcttgcagattgttatagatccaaagaagttcagattagcgttggcatttgactctgaagaacagccaattcgtaggaattcagtaattaaaatattgtcagtgttttaattctatgataaactcattcgtgatactcttaagtatatgcaaataaagctttatatagaaaataccggcctggcacagtggattacacctataatctcagcactttgggtggctgaggcaggcagatcacctgaggtcaggagttcgagatcaggctggccaacatggtgaaaccctg

SEQ ID NO: 700 - DNA, 4046 bp, Homo sapiens
gaacagcatcggtgcagtaggaagtgccatgttcctcagatttatcaatcctgccattgtctcaccgtatgaagcagggattttagataaaaagccaccacctagaatcgaaaggggcttgaagttaatgtcaaaggtgaattattttgataatctagctatcttaaattccccttccaactaaattttcagcttttcttacagtacttcctcttacatttatatttgaaataccctatggttttcagttatgtgcttttgttttatttgtttatattacaaaggaattcattagttaggtacctgatggaccttattttcatgataaaacattttattatagcagatgtcttgtgttatgaagatcattttttgcgtaatcattctagacattctgaaacagactagaatgtagactataggattttttattttaaaagtcattaaacatttttaatatgtatttttacatgtaaatataataattatatttgggaaggttagaaacactacctaaaataatttatagaatgaggaatgtttgatttttaagtactagcagaaattatatcaatgagaaaattcatgtttttaaagaatgtcttaatgtatagacttcatacaataaataatctgattatttataaccctgttttattgtgtagatacttcagagtattgccaatcatgttctcttcacaaaagaagaacatatgcggcctttcaatgattttgtgaaaagcaactttgatgcagcacgcaggtaattttcttgccacttactcagttgctctgtttgaatcaaatattttcggtttcacataaatccatgtacctgttttacatgaagttcctgtgtaagtttttttcttttcctgctctaggtcaagacatagcttgtcttattttattttactataaaagacagtcatgaaataaattaatattttttataatttggtagtgattttcatatttgaaaaccaagagggatttttgacatgtctaattaaataaaggatttgaggatggtacaatatgtggacaaggaagaagtaggattctttttatttaaaactaaaaccaaattggtatcaataatacataacaatgtttaataaggtttttttgatgttagagtatttgtgatacttaaatttggaagtgtatctaaactaaaatgttattctttaaaccaagtcaaacaaacacataagattttgtttatgaggaactgaactttatgattttagaaaacttttctgctagatttctataactagttatttcactttatttctctgagttattggtctatctgtaaagtagggataaactctttgcctgagttgtttttagagaaaaaaatgagataattcataagaaagcgctttgtaaatttatgtctggaattctgcttttcatgcagtgtgaatctaattgatcctcatcatctaagctagccttgtacaactctctcttccagtttatcatcattgtagttgttactgactttttttctgttagagaaattggagttgaaaaggtatattgctgaatgacaagccatgttggaaagagagtgaatgtcagcataggattcatattctggcactctgtgtacccatacaaagttaaaaggatcaaagttttaatcctggctctgacctagcaggctatatatctttggggaggtctttcgtctggaccttcatttccttatctgtaaaatactagcctctttccaaagtttcatccatcttaattttgttgttgtttaacttcagagcctactttgaagctgaagccgggtatcagaaatggaaagccaactttctccttgtcctttttgctttgtctaatgtcaagtcacattgtgtgaacaagccctccatatttgtaatcttagttacttcacaaagttacttcttataaatttaattcaaacataagtctgggtgtatctggtgttgaaaattctaatgactttgcatttttgaaggtttttccttgatatagcatctgattgtcctacaagtgatgcagtaaatcatagtctttccttcataagtgacggcaatgtgcttgctttacatcgtctactctggaacaatcaggagaaaattgggcagtatctttccagcaacaggtaagatttcccagtcatggggatagtgaacactctccgtttaaatttagattaatacaattattggtcatgaatagtgctttttactttgcatcttcttggactaagaattatggtttagaaagagaaagattctttttttcaaaaaaatacaaacaaaaggttaagtcatattaaataatcaacaaacctacctaggttccagtggtcattattattatttttttgtcaggttaagaaatcacagatttgctctttgggtttttatggcttgcagattgttatagatccaaagaagttcagattagcgttggcatttgactctgaagaacagccaattcgtaggaattcagtaattaaaatattgtcagtgttttaattctatgataaactcattcgtgatactcttaagtatatgcaaataaagctttatatagaaaataccggcctggcacagtggattacacctataatctcagcactttgggtggctgaggcaggcagatcacctgaggtcaggagttcgagatcaggctggccaacatggtgaaaccctgtctctacgaaaaatacaaaaattagctgggcatggtggcaggggcctgtaatcccagctactcgggaggctgagccaggaaaatcgcttgaacccaggaggcagaggttgcagtgatccaagatcgcacaattgtactccagcctgggccacaagagctaaactccatctcagaaattaaaaaaaaaaaaaaaatacttaaaaatcaaaattattaatttgggcattgtttcattagctcttattagtctcttgtgtaacataaattacttgctgtcccatctagttatataaacttgtaaagggaccaaattcctatgtatgaagagttccttacaaaggaagaatgagtccaaattatttttaaatgccaataaaaatgattagcacattcacgggaaaagtagtggactgtgaagctaagggtaagcaattgggagatgggagtttaaatgacagggcattttaatcttttatgaattattaatggattgaagtagacatggtcctgaggtctttttggtgctgtttacaaatcagctgacagtaaaaggaaaagcaaccagttacaagttaaagaaatgtgtagtgctaaatgtgaactgctaattttttttctaagtagtttgctgtatctagggatcataaagctgttggaagacgaccttttgataagatggcaacacttcttgcatacctgggtcctccagagcacaaacctgtggcagatacacactggtccagccttaaccttaccagttcaaagtttgaggaatttatgactaggtaaagtacaaccttgaaatagttgattgctttctttttggttgagaaggagagtttgccaccaggccacttgttagatatgatagaagactatgaggaaagatgtatttaataatcacattgccatgtttggggaatccaactatatattatttatatatatagggtgtgttttattttatatattgattgtcataacaatagtaacaaatcatattttatcatcttgctttcataagttttcacatttaatacttaccagggagtgaagacaacattattttcaaattatagttaaggaaaatgcaactcaatgtgaataattgacttgcctaagattccacacctgattcataggtcttttggttttaagtgcaggacttctctactacactataacatttttcagaaccctcataaaggttaatggttttaaattatttcagattaaggttcagaaaatatagtatacttcagtattgctataaaatttctgtggacatttgtttgaatcccatttagtgggatttagtttgtgaatgaaaagatcctcat

SEQ ID NO: 701 - DNA, 4069 bp, Homo sapiens
tccatctctacaaataataaaatattaaccaggtgtgatggtacgcacctgtggtcccagctacctgggaggctgaggtgggaggattgcttgaggatgcagtgaactgtgattgcaccagtgcatttccagcctaggtgacagaatgagaccttgtctataaataaagaaataagtaaaaatataaataagtaaaaagaaatataagtaaatataaatataaataaatataaatataaaaatgaatgaatcaaaacagtttttaaatttgacatcactgaggacatcctagccatttttctagaaaaatatttttattattccttttttctgagatcctaccttcccttacaaagcaatcttttgtgcttttgaagattaagtaatccaatatatataatatacttagcatagtatctggtacttgtaaagtaattaataaatgttggatcttatttttgttctaaattcccactgatgctcttggagacccattttcttttttttaaaaaaaatgaaggtagctttataatattctcagttatttaaaaaattattaaattacttgatatagaaatctaaagaaagttaaaaaaattaaaaattgtttatcctccctctcagaatacttcacttaacgtttggtgaatagtctcccagtcatttatctatgcacatgtacatttgtttctcctatcaaatgatatctaggttgtttccattaatatttttaaaattctgacctggtaccagcagcatgatgggctgagctaatgcaatctcttcccaagacataaggctcatagaaatactaggtgtaaaagaaaatatgtgtacttaaaaaaatttaggccgagtgcggtgactcacgcctgtaatcccagcattttgggaggccgaggtgggtagatcacctgaggtcaggagttcgaggcaagcctggccagcatggcgaaaccccatctctactaaataaataaatatatatatatgaattagccaggtgtggtggtgggcacttgtaatcccagctacttgggaggccaaggcaggagaatcatttgaacccgggaggcagaggttgcagtgagccgagatcgtgccactgcactccagcctggtcaacaagagcaaaactccatctcaaaaaaaaaaaaaaattaaatttatagctgaagctagtttctaagcaaattacctagcatacagtcagtatagacagataaatggaaaatatgaaagaggttaggagatgcagaagataaaatgaggaggttcaaaatatgtctagtaggtgttccctagaaactgagctcagtgagaatgggaagaagtaatatttgaaaggctaatggatgtatgttttctagagttgatgaatgacatgaatcttgaggttgaagaagcacactgagtcttgagcaaactatataaaaattaaaccaggctttaatacatatgggaacataatatatgctaaagctggtattcagaatcgagattaggatggactttcaataaatggttttgataaaactgagtaatgatttggaaaaatattttcataccatttatgataaacttccataaatcaaaaaaaatgagcaaagcaaggcctttttcatccattcaaaatccataaactagaaaagattgataaaatgaattatttaaaaaatcataaacttctgtctgggacaaaaatgtcatgagtaaaaccaatcctatggttaatattcttgcccagtagttctcttagaatagtcctaaaagtgcttttgtggttcaaagagtaataccttgaaatttttggtgcatgttgccaaattaccctttagaatgcctgttgcttttaaaatattttttcattttagtattttattgtttatccaattatagacttttttacatactcagtagacaacataaagcctcataattactctgttatttttcttttaggcatcaggtacatgaaaaagaagaattcaaggctttgaaaacgttaagtattttctaccaagctgggacttccaaagctgggaatcctattttttattatgttgcacggaggtaagaaatactatgttttgggtctcttaacagaattttttaaattatagcaaatatagagagatggcaagtttggtttttcccagttgacttaacaggaattgaagacaagtttacttgggagcatatagcagggtaaatagcctgcgtttcctaaaatgatggtcggtatctagtagctgcttttcatactacccatttcatattgcttactctgtcctacatcattttttaaaatactgcctgcaatggattaattaccaagagttaaaaacccacaaagaatcttttgttttcaagtatattctgattaaatagtactcacaacatgataactgggaactttttttaaaggaagaaataaaactataagagcctatttctgagaacttttaaaaatatgctgtgtaagacagcatcaggatgatttaaaaaataattcaaaggagtggtgaaaaatctctatgaagatggtgcaaggggtggcctggaaaacggtgcttgttcatgctgccctcagttgaggctagttcctagaaagcctttctggaaatgttgtgagctcttccttaataataggtatgatgcttgccttgctttccctaccattgtcttttcttttttgcttcattttaccttccttttgaaaactcaatctgtgacgttatttggtcagttttactttttcccatttaccatgacatacattcatggtaattgagccttagagacaacatgatacatagagaaaccactgactttggaatctcaaggaccatgtttagacctagttctgctactcattagttatagacttaatctttaccagtttcctgaatttaacagtatttaacatccatgaccattaagttagtagacttacattgttagtcagcttgctggccacaggtggcagtgtgtaggaaacaaatcaaggttgagaaatagtagagagacggtgaaggaagatcagtggaagatgggaaacttgtctaatagggtcattcagatagccttaagaccaagaagtccaaaggactggagtattagggaatcaagaaagtaagaaaattgcattgaacctcccgccacccccctgccctttaacaactctaagtaacccctgctcaccttcccatgaaaggcctctctccagctctcatctcagttgccatttctaaattgcctaagatcattttaattttcgtttgcgtttgagatgaaccatatttgtattctaaccccaacctttaatacaaccaggatatttttacttttccgttgttgtctaagtaaaaagcaaacattggtaagggaggtagaagatgtgtttccccctcttctttaaaatcttattagtttacaaatagcaaagatttctggaaaacaaagctgcgtttttttttttcggaatcagaaactgttatatttgtattccctctctgtggtgatctagaaaaagctaaaggaaagattggacctgctgcagatcccttagtgagattcaatcagtttggtttccatgaaacctattgagtcttgtggcctgagaatgctaagaattctcagctctgctgcttattagctgcataatcttttttttttttttgaaatggagtttcactcttgtcacccaggctggagtgcaatggagcgatctcggctcactgcaacctccacctcctggcttcaagtgattctcctgtcttagcctcccgagtagctgggattgcagacatgtagaaccatgcgtggctgattttgtatttttagtagagatggggtttcaccatattggccaggctggtcttgaactcctgacctcaggtgatctgcctgcctcggcctcccaaagtgctgggaattacaggtgtgagccactgcacctggccttagctgcataatcttagataagtttatttttccaaatctgttgcttcatatgttaaagctggggtatgtgcttataaaaactgtctacctctcctataaagtg

SEQ ID NO: 702 - DNA, 4045 bp, Homo sapiens
ggccagccagttgattactggctgcccctatgtccagtatgtgctcctggcccagcagtcatgtgattcaaaatgtgaccacttggctgggcgcggtggctcatgcctgtaatcccagcactttgggaggctgaggcgggcagatcatgaggtcaggagatcaagaccgtcctggccaacatgatgaaaccccatctctactaaaacacaaaaaattaggcaggcgtggtggcacgtggctgtagtcccagctactcgggaggctgaggcaggggaattgcttgaacccgggaggtggaggttgcagtgaaccaagattgcaccactgcactccagcctggtgacagagcaagactctgtctaaaaaaaaaaaaaaaaaagtgaccacttggtgctgtttcttcatcaggggctgttcttaggtatgtgttttaattttttttgttttgtttttgagacagggtctcactctgttgtctaggctggagtgcagtggcactaccatggctcactgcagcctctagctcccaggctcaaacaatcttcctgcctcatactcccaagtagctgggacaacaggtgtgtgccaccacagctggctaatttattattattattttttttgtagagatgaggttttgctatgttgcgcaggctgggcttgaactcctgggctcaagcaatcctcctgccttggcctcctaaagtgctggaattacagatgtgagccaccacacctggcctaatttttttttttagttggaccttaatggtctaatattactattacgtaccttggcaatgtctttcgaaaccattttcccccactgctttgctggaactctgtgtcttacctatactaatgtagcattattctcctcctccttcatcaccagttgactacttctaggtaatcttaacatttcttctggagccagtttccagtagaaagcttgtctgtcccattgactccctgtataaagtccaagttctgtagtcaaacatgcaaggtaattttggcctaatgtacttttctaatcttttccttctattccatccaatatacttatgctcttgccctgtggtaaggtagcataatacaaggacattgttgcaacattgtttatatagtggcaacaaaaaggaaaacaatagagttgtgtttcaaaaggggaattgttgaataaatgatgatacatttacattagggaataaggcaatgtgttaattttgcttgttacaagtgacagaaatgcaattcaaatttatgtgtgccaaaaaggaatttattgactcatgtacctaagaaaatcaagagatgtattagtttcttgcatgactagctgcagagctttaaacagtatcatctgcagaacatctgtcttctctggctcttaactctactttctttgtgtcggttttattcccaagcagctgctccctagctgtggctggtaatggtttgtgttctcccagcttaacaatcccagaggaaaaacacctctttcccagttttgtggtttcagcaaaagtggttggtcttactggcctggtgtgagtcacatgccattcctaaggcagtcactatggcaagggggatggaatttcttggttatctaggcctggatcatgtgccccttcctggaatgcagtggtaaagccagccctatccaaattgcatgaactaaaaggagggcatgggggcagggttttcacaaaggaaaattgaattgctgttactagaatgaggcaaaatggatactgggcaggcagaagtagcagaagtcctctacatccagctttaaaaaggcccagaaagatgactctgacacttaccttacaaggtacacgacagtgtgtgtgtgcacctgcacatgtgtatgtgtagactgagaaatgtatgaaagtatacatattaactgttcacattgcttatctcagaagtgtgattggaggagatagaggaccaatttaatatttctgttatctatctctatgttgtttggcttgccaggagcatatattgtttttgtaagaataattaaaaatataaaaccccaaagtggccgggcaaggtggctcacacctgtaatcccagcactttgggaggccaaggcggggaaatcacttgggctcaggagtttgagatcagcttgggcagcatggtgaaaccctgtcaccacggaagaatacaaaaatcagccgtacattgtggcatacacctgtagccccagctactcaggaggctgaggtgggaggatcacttgatcctgggaggtcaagactgcattgagccgagatcacaccactgtactccagcctgggcaacagagtgaggccttctctgaaagaatacattaaaacaaaacaaaacaaaaaccccaagttacaaagaagagttttcctcttaggaatattgtgatacctggcaattgctttttgggtggtagtagtaaataatgataatagctaacatttcctaagtgctttctctgcatcaggaaactgtgcatattacataatttctcatttaatctacataataaccttctgagatattattaacaattaattgacgtacgtataaactgaaacccaaacatggctatcagaatgatctggaacattaaaacaaacatatccccagcccccatttccaaaccaaaatctcaggggcagggccttatttatatatttaacaggcactccaagtgtttcatttattactaaagtttgggaatctcactgggtcatgtacttaattcatggtagcacaactagtaagaatcagaattcggtttcaaacctaagccaaagctcttaacaaatgcactattaattacatgcttattactattataattgtatgcttgggtaaatctttgtagatgagcatgaaaacctaaccaacagttatgagatatattactctggggaaaataagttctcgattccaggcatctgatttacaaatggttttttgaaacataagacaagagtgtactcaatataagataatcttgtcattggcgcaatatcattatacattacaaaggttagcagaattggcaccttttcttagcgaaatgacatattactattaacacattcatgaaatatgttaatacagatgaatgtgttattttgtagagcgctttagtttatcagattagcattttttgtctgtttaataaaaaataaaatatagaccgggcatggtggctcacacctgtaatctcagcactttgggaagccaaggcgggtagatcccctgaagtcaggagtttgagaccagcgtggccaacatggtgaaacccctctactaaaaatacaaaaaattaatcgagcgtggtggtgggcatctgtaatcccagctactctgggggctgaggcaggagaattgcttgaacccaggaggtggaggttgcagtgagctgaggtcatgccattgcactccagcctgggcaacaggagtgaaactctgtctcaaaaaaataaaaataaaatacaaaaacaacttcccccataccactccttatcccacacccccatcctctatcccctatcccctatccttcatctctctgtcactgttgctcactcgctctctcactctcatgtgtgtgctctctctcacatacaccacacacacacacacaccccacctacataatttcttctcttacacctttaatataaatatctgagttttggttcagttttgcaaacatttaaaaggcaaacatggtattttgcttgtttcagcatttaataaggtagtgcatacttctttcatatggaaggaaaacatcatattaagttaatatttaaacgtacacaattataatttgcaaaaaaaaatcaagatgataatttcttaaatagtaaattgaaataaatgatattttcctagcatgcttgtcattcagcaataataagaaactgagataagaatgcaggcagttgaagttcacttcagcctgagtgcaagtatacacaaaacagcaaaaatattacatagaaaataaatgttgtccattggatt

SEQ ID NO: 703 - DNA, 4057 bp, Homo sapiens
gaacccaggaggtggaggttgcagtgagctgaggtcatgccattgcactccagcctgggcaacaggagtgaaactctgtctcaaaaaaataaaaataaaatacaaaaacaacttcccccataccactccttatcccacacccccatcctctatcccctatcccctatccttcatctctctgtcactgttgctcactcgctctctcactctcatgtgtgtgctctctctcacatacaccacacacacacacacaccccacctacataatttcttctcttacacctttaatataaatatctgagttttggttcagttttgcaaacatttaaaaggcaaacatggtattttgcttgtttcagcatttaataaggtagtgcatacttctttcatatggaaggaaaacatcatattaagttaatatttaaacgtacacaattataatttgcaaaaaaaaatcaagatgataatttcttaaatagtaaattgaaataaatgatattttcctagcatgcttgtcattcagcaataataagaaactgagataagaatgcaggcagttgaagttcacttcagcctgagtgcaagtatacacaaaacagcaaaaatattacatagaaaataaatgttgtccattggattgagtatggtgctaccatttgtcacagtgttcatattcatagttgtggctatctttggggtcactgctgtattcagacttgtcttggaatttggagtcatctagggatttgaggtcattttgagatttgggcttgtcccaggattggtgctaccatttgtcacagtattcatattcatagttgtggctctttggggtcactgctctattcagacttgtcttggaatttggagtcatcttgggactcgaggtcattttgagatctgggcttatcccaggattggggttcattctgggattggtgctcttcctgggattaggtctggtcccgggattcaggcttgacgcaggattggatactgccatagaatttgaggttgttgatgttgaagtttgtccccggaatgttaacaaacatgaagagcaggccaatcggtgatagcttgaacatcatcctcctctgtttcacaataattatataattttaattgaacacttggatcacaaataggcaagcatatatccttaattgtgtttatcagtacatttgtgttatgtaaatgtttgctttttcactattagtgaacaaattaaaagcttccctttctttgttgtcaacatctgctgacacaagacctattttctattgagggctaccaactgaaggcaaaaacaatcccaagactgaaaaagagcttaattggcatttttctatttaaaaaaggaaaaaaataaaactctagacattcaatgcaataaatatgggggcttgagatcagtatagagtagggtaggggcaaagactgagaggcaatttgggacagtagagcaacaaaagaaataatgaaataaatattggtattttcttgatttctcatgacctttattccaacaatttaaggttttagtttaggtcacaaattaggatattacttctaaatatttacccaaagactaaagaggttaaaccaaagcatttccccagtgctgggatgaggttttcttcattaacaacaacaacaacaacaataacaaactagagaagttcatagttttaagatttagaaatgaacaaaaccaactccttcattttgcaaatgggctcagacaaggggcataacttacctgagggtgcatatctaaaaatgacccaagctagaacttaagtctgtgacttaaagcccaaattttaactgtagaactctaacatatatattaaaagttacatttggctctaatatgtaattgagaacatttcaaattaatgttaccttttgatatttttctttgaagagtaagaattcagtctttctccagcgtctatggggaatctgatttctcactcactgcatgctatttaaatataattagtgaggaagtcatgtgttctaaacttgacctgccatttgctctttggaagtatccaactgagtgtttccagacaactacatataaacagatagactttggcagagattaaagaattcaaataaagttctaaaatctgcttgctaatttaaagaatccagtgaatagcatttgttattcctcttaccatgtatacattaatgaattgcttcactggattgactctaactagatgaatttactattttgcctgctgtgattattatgattttaaaccaagtaagtgtattaaaggtgtctgcgttttccttagaacatctgtacatatgtttatagggcagtttctacccatggttattttgaagtttaaaaaataattcagtaatacaacatttcaggtatttaatttttggtaaataaagtaaccttagaaaagaagttaaacttcattaatatgaaacttaagaaaaggattacatatgaaagtgatactttttcatactgagtttacaaacttttgtgtgtttgtgtatggttttttaatgtattaaaccagtcaccttgaagtgcataaagtaaattttttgaaggaattttgtcttttggtcagccgttttccatgataactagcatatagggaaattgggttgtattctgctaatgttttcatcatattggccagcacactttaaaaattgcaggactgtgaacaatggtgttgacatacaaggaaattgcaacataaatggcagaagtacaagccagtacatgttcctcacttgttttactgtgctgtgaagatcatttttcccctgaatgaataaaccatgaatagaaccatgcttggtaaatcttatttatatggtacatataataacttcacttaactggaggttaatgtggtcagatctaagaagtaaacaaacaaaaaaaaactacttggcaaccagagtagatattatgaatcggagtactgcagtaatttacaggagtttgtcattgtcctctctctgctcacttgctcattctgtggatttctttggggggtatatagttggtaatagtaatagtaatagtaatagtaatagtaatgtttcgaacttgagcaaactgtgacttattctatttttctaatcttgaccttttgagtactacacttacacaactctttattgatgcttcaaacacctcagtctcaacttgtttaaaattcagaagttagtgttttctccttcctatttttgtatctagatatattcttctcataatctcttggttaattgtatcatcacctagccaaatgtttctccaacactggatttctcattatcttctctttcttatttatcttaagctctccaggcctcttcatgatgattaagtaaaatttaaattctatttagtactcaaatgttcccaaacaaacaatagtcaatttgccattattcaggtcttcaaatacccaccaactttgtatctttgtgcagcctccccaacttgcccaaagtgtaataatagccccctcttatcctaagtttcactttccatagtttcagttacccatggtccaccatggtctgaaaatactcaatggaaaattccagaaataaacataagttggatgtatcatgaggttaatagtagcctagcactgtgtcacagtgctgcattagtcaacccacttcatcttatcacataggcattgtgtcatatcacatcatcacaagaagggcgagtatagtacaataagatattttgagagagatgccatgtgcatgtgcttttattgtagtatattgctataacttctattttattattgtttttaatctcttactgtgcctaatttataattaaactttatcacaggtatttctgtataggagaaaaacacagcatatattgggttcaatactgtaattctgtggtttcaggtatccctgaggggtcttggaacatatcccccacagttaagggggtactactgtactttcctcattcaaaattgtgttgtttcttcaagctccactcatgtcagcaccttttatacga

SEQ ID NO: 704 - DNA, 4045 bp, Homo sapiens
tagaaatgcttgaaatgagattctgccttacgtctcacaaattaaataccacatttgtgtctcacccatctcagttatgctgtcttgcattttaatcaatcctgtttcaggacttcttttgctgccttgtggctgtttcttatgtttgtcactaattcataagttggctaacttttatatttgtagagaatttctcagtgattttcttctagttggagttccagtgtggtttgatttggagtgtcaagatctctgtcccatgcctagccttagtcctcagtctgttttactgggttcaccacctggttgtagtaccaaatgcccttttccctttccctctctccttcctcacttcctcagtactgcccaagttcgtcagacccaatgattttattcttaagctaatcttatttttaatttaggtaattctgatttctgatttgtaaaagataaattttcttctccttcatgtagtaggattttaattttgtaaatatttaaattctccattaatggtgtgttaaatctgcactaaaactgcttctttacatgtttttaaattttttcattatgtttttaacacttttcttacatgcaaaaaacacaaccgttaaacttttcttattaaaatgcaaagcctagtgtcttctagctttttgaagagcttttgtccattatataatctgtcaagtagccaagagttcctcagaagcaggacatcatttagatttaaaacaattatggcttgtctgtaaaataatgttgtagcataaccattcatgggatggcagctacgattttacttcagtaaaatatccttggatactaccgccattttatttaccttaaagattttaccaaggtaccctagaacaaaaatggtgaggtcattttgattctgctaaagttggtatgactggaaagccaaatgacacagttatgagcatagaccttttattttccagatgtttgacagtgtaaacatacataaaatacatattaaagtttagatgctttatattttgtgcaataaattgaagccttaaaacatttcattttttttataaaagaaactcattagtttacttaattaagacagtaaaatagcagcaagtaccaagacattgtgcatttcttttatttaagacaagttacttcatttacatcagagttagaaatgttaagactggctttcttgaatacttaaatatagctcgaatcactggttagatatggacatattttcccaactgtacatcagggaggagtgctttcattagtttcagaaaatgcagaccctcagacagccagcatgaccacaacattgagcaataagagaaatgaagcatttactttccaagcatttgccacagaaggtaatggagtctttacatttgtggttgtctcttccctccataagttaagggttgtgctttgttgaggcatttcagagaaattatttggcatgccactagtgatacttagggtcatgggtgttggggatgattttgttgagctagtgaggcttgtgtttgtgaccattccatcttggagatgaatagttagagttgcagctgctgcttcatgtgaattgatagtctctgtggatgtatcttctggatagggcacaaaagccttatcagtgctagtaaaggtggtgtctttgcttagagtggcaccaaacgttgtttcctttgttcgatattgtttgggtattttggtcactttgggttgagttaccacactcagagagttaatggtgtccactgtctgcatcccacttacagtgaataagcttgaggtaaatccagaaggtgtgggatacatgttatgttcctttaaagatgatatttgggtagaacatggagtccctatcacatgggcttttgtttccatcatccacttcagtaagtaagtaatgttttgtttgtggtcacatgaccacctgttattgtaaagggttatctcttgcaactgaaagagttggtcaaaagattggtctggaatgaatgtgaacttattgttgtgcaggtaaagatgtgtgagatttgtcaggtttattaatgtacctggaagaatttgtgtcaaagaattattagacaggtccacgatatgtagtttggagggcatgttggttggaactgtccaaagtttgttactactgaggttgagaacctcgagacttcttagtgtatttttaatgaggacaaccttttccagcatgttcttagaaacatccagatatttaagattccactgataagcagtatcagatttgtcaagaagtttaatgttgttgttagcagcagacatgttccacagagaccgaggtaagtgagcaggcaggctttcaagcctgttgtttgaaatgtccagggtcctcagattggtatattgggttaactggttatgcagatcagtaaagtggttataagacaggtttaaatgtataatattctcttgcagtccagatggtaatgtagacaagtttctgcctgaacagtccacatgcctgtgcctctctgtgcatatacattggagaggacaaatgcataaaataccaggtgtgagaaacagaaggatgaacaggcagagagacattttcaatatctgatattccatcaaagcctagaaacaaacagatacacccttcttttaatatgcaaatacagtttaggcatctgcatgggtcagttagcattaggcaaaattttcaataaacctcgttgttgtcgagtccttttataattgttccagtgattaaactaacaaagctccccttcatttatagtccaaatgcttaatccttcaattgggctatgtggtagagagagactctctccctactctctcctgcattttctcctttattttctctctccctccccccttttctaaccatattctttcttatttatctttctagagccttaatatgataaaatagcattctttgcaaataaatagttgcagttgtaggctattactatttttgatgatatgctttcttactcagatgagaaaaaatggctgtcgtgtcttttttttttaatctctgcagtaatgtaattcaatgtgtgtatatagggtagattttatttagatattaaagcagttcttcgaaattttatctgtatgtttttaggataaatatatctttgtaaaaagcacttgaaaaatccagaccaacacagtacctataaacctcacattttataaagtgatttttttctgtatatttcagtgcccattttaaaggaaaacaatatgtatatttacagagtgactgaatgtataaaaaatatccctcaactgacactgcagcaaatttctggtgcatgcacttgctattgaatatatatttaatcctaacgttgactttttcttaaaagaaaaaggaaaaagattccaaagtcagccttttactgatttaaataacatcttaccgtggtgtcgtcttcaacatcagcatctcattttctctgggaaacttaaaggtcgtcttgttctgtagagtcggaactgtttctggctgtgggctgtgcttgcctgctcagctgcattgtgttgctgtgagctgaagctctgcaaccacctgatcagtaccacataggaggactgcagagctgtcgctggtgctgactcaaatttatggcaagaggtgcacacgcaacaaaatggacaattttttaaaaaatttgtggcatcaagcgtacctatatatctgatttgctataggatgggataccttatgcatgagagttggcccttactcctttctatgtatttgtctgagattgggttccatattttaacatttgcctcattaagaatctgtgaatttttaaaatacctctactctttatcctttttacatgttgaaaataaatttgaccttcctcatggatagttttctatgatattagtcccactattttttaactcctgcctttttatattcctttctaaaattgtataattttcatgtcacttttttaatattataaaaaatctgttttatgacttttatgtcttcccccaacat

SEQ ID NO: 705 - DNA, 4040 bp, Homo sapiens
gatacttagggtcatgggtgttggggatgattttgttgagctagtgaggcttgtgtttgtgaccattccatcttggagatgaatagttagagttgcagctgctgcttcatgtgaattgatagtctctgtggatgtatcttctggatagggcacaaaagccttatcagtgctagtaaaggtggtgtctttgcttagagtggcaccaaacgttgtttcctttgttcgatattgtttgggtattttggtcactttgggttgagttaccacactcagagagttaatggtgtccactgtctgcatcccacttacagtgaataagcttgaggtaaatccagaaggtgtgggatacatgttatgttcctttaaagatgatatttgggtagaacatggagtccctatcacatgggcttttgtttccatcatccacttcagtaagtaagtaatgttttgtttgtggtcacatgaccacctgttattgtaaagggttatctcttgcaactgaaagagttggtcaaaagattggtctggaatgaatgtgaacttattgttgtgcaggtaaagatgtgtgagatttgtcaggtttattaatgtacctggaagaatttgtgtcaaagaattattagacaggtccacgatatgtagtttggagggcatgttggttggaactgtccaaagtttgttactactgaggttgagaacctcgagacttcttagtgtatttttaatgaggacaaccttttccagcatgttcttagaaacatccagatatttaagattccactgataagcagtatcagatttgtcaagaagtttaatgttgttgttagcagcagacatgttccacagagaccgaggtaagtgagcaggcaggctttcaagcctgttgtttgaaatgtccagggtcctcagattggtatattgggttaactggttatgcagatcagtaaagtggttataagacaggtttaaatgtataatattctcttgcagtccagatggtaatgtagacaagtttctgcctgaacagtccacatgcctgtgcctctctgtgcatatacattggagaggacaaatgcataaaataccaggtgtgagaaacagaaggatgaacaggcagagagacattttcaatatctgatattccatcaaagcctagaaacaaacagatacacccttcttttaatatgcaaatacagtttaggcatctgcatgggtcagttagcattaggcaaaattttcaataaacctcgttgttgtcgagtccttttataattgttccagtgattaaactaacaaagctccccttcatttatagtccaaatgcttaatccttcaattgggctatgtggtagagagagactctctccctactctctcctgcattttctcctttattttctctctccctccccccttttctaaccatattctttcttatttatctttctagagccttaatatgataaaatagcattctttgcaaataaatagttgcagttgtaggctattactatttttgatgatatgctttcttactcagatgagaaaaaatggctgtcgtgtcttttttttttaatctctgcagtaatgtaattcaatgtgtgtatatagggtagattttatttagatattaaagcagttcttcgaaattttatctgtatgtttttaggataaatatatctttgtaaaaagcacttgaaaaatccagaccaacacagtacctataaacctcacattttataaagtgatttttttctgtatatttcagtgcccattttaaaggaaaacaatatgtatatttacagagtgactgaatgtataaaaaatatccctcaactgacactgcagcaaatttctggtgcatgcacttgctattgaatatatatttaatcctaacgttgactttttcttaaaagaaaaaggaaaaagattccaaagtcagccttttactgatttaaataacatcttaccgtggtgtcgtcttcaacatcagcatctcattttctctgggaaacttaaaggtcgtcttgttctgtagagtcggaactgtttctggctgtgggctgtgcttgcctgctcagctgcattgtgttgctgtgagctgaagctctgcaaccacctgatcagtaccacataggaggactgcagagctgtcgctggtgctgactcaaatttatggcaagaggtgcacacgcaacaaaatggacaattttttaaaaaatttgtggcatcaagcgtacctatatatctgatttgctataggatgggataccttatgcatgagagttggcccttactcctttctatgtatttgtctgagattgggttccatattttaacatttgcctcattaagaatctgtgaatttttaaaatacctctactctttatcctttttacatgttgaaaataaatttgaccttcctcatggatagttttctatgatattagtcccactattttttaactcctgcctttttatattcctttctaaaattgtataattttcatgtcacttttttaatattataaaaaatctgttttatgacttttatgtcttcccccaacatggtgattattatgtttaatcagcttttcaaatttatcaaccacttaagtgttccgtcttcccttttaggatgtatagaagtactgaaatacgattattttttctttatctttctgatacaatgatcatttgaccaaggctacacacaagccaggatacatttggaaattagcatcttatacttcagattatcagttcctatgtaaaataaacatgttttattttatatatttggagttaaagttttttttctttatgcaaccttgggtggtaagtggatatgagtattgttttttccaaagacatttttggtgctgtatgaatgaccatttatttgattttatgttttaagaatagcagtatcaatttaggtgatttcagagtgttgcacatttcatctttctgggaaagtagtttatagttttaaaattacatgaaatgatataaaaggaaaatttttcatcatgagttttataaagtgagatcagatttatgataaattttgctccactcttcagtggactgcttgtgtaaatctgttaaaacacaaatctgatttccagaatggcaagtttaaagaaagcaaataaagttacggtattttcgttaccaagtggcaccatttaaaaacgagtaatatttagcatgttatgtgtaaggaaagtctctttatgccttgttactaaatcgtttgtttttctctaaattatattagcattatttagattataccacaaatagaatttgttgtattaaaatttgaagtttattttcttacaagagaaactatactctaggagccaccttttgtataaaactaatgttcctcgaaaagtatctgcattttaagagtccgcaacatagaagtttattgttgattgggtgctttattgccactttactttgagggttcagttgaactctcaattggattcttactgtggatttaggaaaccagccatcaatcatagtgcttaaaataatgtgttaaaaatactacattcagcaatattgtggaaatagggaatgcattgacatttagagttctatttaagctcatatatacactgctgcacttctaaagatgtgactgagggtcaatttaccgaccacttaaatctcttaattttaggaaacctcattaagtcagtgtagaagtagagttatgcattttcattacacttaacagtacttttgtttgaaagaaaagacatgttacttcattaatggattcaaatgaatttgggtttaggctgtatcaagtttagtttctgttgtatataatagaaaattccagtgcaatagtagtggcaatgtttctcatttcaagtttgggacataccaaattgcttcatattattcaaagattattgtaaaattctcaaaaagaaaaagggagatcatttcaatatatttgaattctaacaatctcttacactgggtgcagcacaccagcatggcacatgtataca

SEQ ID NO: 706 - DNA, 4039 bp, Homo sapiens
tatgttctactctgaaaatcccagaactatgagtggttctccaagactgggctaccattttattctaagtgcttgtttccccctggagttagatgggactaatgaggaagaatatgtgcttgttgggcaaaggagcacttctgcagacaaaggctggcatccccaaaagtataggctgatgaccactcttgactttgacaaagattgggcccattcctactctaataactcagacttaccaattgtcagataatggataaagatgaaattctgtgtaagaaaggtgacttaagagtggatagcatcagaaagtataagtttagtaaaaagttgagaatcatctgtgttttgatagtctcttttcctgaaaaaaaaatcacccaaagtcacccgtatttagaatgaagccatagtcttcttttccttttttttgctttataaaacttgattttgtttgggtgtttataaagaagaaacttgtaaagatgccagttttaaaatttgtgcccccccaacatggtaggaaaatatttacattttatgatgcatcctcatatttttttcagggtaaatgttcctaacccaacccttcagttgatgttttaacatgtttgttttactctttgcaatgaaaccaagaagaaaatttctctattctcaaacatgcattttaatctcccattcccacaaacttggaatatttatttaatacttgaggtattaatttaaaacttgaagcatatacttagtctcttattcctctccaccctggtctttgaaatggaaacataaaagtttattcaccataattttatacacagcttttcaggggaaaaaaaactgtactgggtaataagtatatgtagattgtttcagagttcttaaattattgaaacataccatttacatatgtaaaatgtactatactttaaagataggtactataattagtaaatagattactgttaaataactttttttaaaaaaaagtttcatctatgcacataggctctgagcagatttcagatagttcctgaataaaaatcaaaattgactatcagttgccattttatatatgttaacatataaagaaaaaagagtcatttgaggatggaagatcagctaaaaagcaagttgtaatatttataacagttctgcaggtggaggtggcagggattcattaagatcttgatcagagttgggaggaatagagaactcctgacactggatctcaaggttggaatcttcttggtttttcataaaatctactggtggcaggggcaagttaagtgagtcaagcggtggaaatgattgtattatctcagatttatgatctccacagtcttgattgagacagtccagagatggagggagactagtagaatcatttggaagaggagatacaattgtcattgtgggtttgtcagattggttactttcctgtccttccaaatccagaaggggaggtggtggaggcagatctgcatcatctgaagaagaaacagcagttccaactgttgaaccatcagcactatcttctgatgtaccatttacttgatcttttattttctctgttttggggttgttggagtcttcaatgttttcacttgattcaaacaacttaatttctaagtcatctgctaaaagtgtgcttttgcttggtttccagggtgtaagtgaaatgattgatgtacgttttgtggatatttcattttctctgatgttatccatacaaatgtcaggggtttctccatcagcaaatggagatctacctgcccaattttgatcatttaaaactggtttccttaagcatttccaaagtacaatgatgattatagctaccaacatagaagtcagaagtacaccaattagtatggcagctattgaattataattgtttttttgtggggtttgtttgttactggtagtatctaagataaatcctggtgtactcctaggtgaatttttgacagttgatgttggttgtgtggatggattatgaacagttatttgttttctagaagggatctggacagatgatgattgttgagtaaaagtatagacaaatgactttggtggttgtgtggtagaagtacgggcagatggtagttgtctggcagaggtgaacacggcttgctgggaggaggtgttggctattggtgttggttgtttggtgttgtaggcaagtggttgtccagcagaagtatgtgcttctggtttttcagaagaggtatagacagctggtgttggttgtccagcagtgactttggcaggtgatattgattgtccagaaaaagtgtcgctgaattgtgttggttgacccaaaggattccctgttgtgttttgagaattagccaatacctgtgacattgatgatgtgaataaggtaggctgtgactgcttctctgttgtaattgtctctgtctttgaaaaaaatgtattgttcaggtgtccacaaaacaaaattaagatgaaatatttgggatccatttcagaatatttcctcgttatctatagcgggtttataatgaaagagaaagacagttaggcgtcattggtgtctagttaaaaatttgacttttcattatgattcctggcataaagtaggtagacattattcctaattagtagtagttgattagtagttattattcctaatttagacttgatacactgtaggtttggtgtaacaactcttggatatactctaacccatcatacagcatttggacctcataagcagtgatctctcttcttttattaatacaagttctgtacttggctctgctgcccctctagcttcattatatttcagtacttcacttagtcatacttctcaaaacgcataggctctatatgctggatccatgtgttctctaccttttttcaccattttctactagaaatatattgattctcctgccttgaagaacaccagtgatcatctgttacctaatctaattgttctttatttcttctctcccctcccctccttgaccacattagacactactgttccttcactaatattcaagtagctttttgtaatcagtcttcctttcatgttactctcactagctctttttcttctgcctcctaaatatggttaattgatattctgtcctcacccttacctacttttctttgttcctgattctgtaagattttagttctcagctttatgccacaattcctaaacctgtacctccagcctacatcttctttgtcctaattctatttgtgtgacttcttggtggatttttccatattttatatatatagatagatagacatagatatagatataaatatctcccactatcagcaaattcaacatatttaaaatggagttcatctttaccctcacaactgacaactgactcttctcccaacttctctgtatctgttaatggtaccactaagtttcttaggcacagagtctattagtaatctttgaagcatccttagtgtctctgtagcgtggtagccttatgttaatattgcatatttttaaagaatttcattcaactcagagtcttaggcttaaaatcctagagtgatctctgaatctggtggagtaaattcaatccagttggtcaagtagtcctgctgctgctttcattcatctattggtaaatgccacatttgtgtggagctctgttctaggtttaggagattaaaaaaaaaaaaaaaagatagtcactgcctttaagtgtttcagattctagtgatagaagcaaacagtaaaggccaggcgtagtggctcattcctgtaatcccagcactttgggaagccaagatgggaggatcgtttgaggccaggagttcaagaacagcatggaccacatagtaagatcccatctctaaataaaaagaagaaagaaaaaaagctaaaaaataattacaataattttttttttttcaagacagtcttactctgtcacccaggctggagtgtagtggcacaatctgggctcactgcaaattccgcttcccaggttcaactgattctcctctctcagcctccaagtagctggga

SEQ ID NO: 707 - DNA, 4046 bp, Homo sapiens
ttcttttaattttctctgacacgtgtttatttatgacccttgattcaaggagtgctttgtgttactcctggatgtactggtgcacaatctcaaattttcaatttttgcacagaatgggaagtctgcccagtttcatttctaatctgggttatttttcccctcaaaagataacctgatttcagtcaccatgactggcatgaatattctcatgctttcctttttactttgttaacacttaactttatctggaataatattgttatgatttctcgtttagagaatagatttgttttttacaaattgctaataaattgataataaaaatgatgctttatttttttcctctcattttaataatagctagacgtttgaatttgatgaccaagagcagttatcaccttgagagttacgtaaaaattaccaatgcttagagttcaccccattccagttgcatcagaaggaagacatgggaattaggcattggtgttttttaaaaactcttcaggtgattctgacatgcagccagggtaagaatcactagcttagaagggagagtaagattgtagtcatacttgggaaaaaacatataaaaaatatttttaaaatggttactatattgcccgaaataaatgcccagtaagggatgagatttttgaaatgtggcctgatcttagccctgtgttaatttcagtagatatttggaaagtctctcaaaccaatttttgtaatatatttaattgaagatgggggggttctcaacttaaatgtaagtcattattttacttgaagccagtttctttaaaggttaaattataacctgaagtatgcagttttccagatttgaacacacacacacacacacacacacacacacacacacccctaataaatcattaggctacttggcatccttgaagtccaaaaattaatcaacctttggtacttgttgttaatgttccagtaagtagtatttatagaaaagatgaatattattaatcataaacagtgaaacatactttgcgtttacacttagcctattggtgtggctataaatcttatttattttagttgtgctctatttcttattgatctttacaatgtgttctctaaagtaataaagtgaatgcaaatatacgtggtcacaggtttattctgagttttaatttattatacaaaagtaaaggttttaatttaatattaatagtagaaaaacactttcttacgtgtgccatatggaaagataaaggatctattctaaaattagctgtgttggttgataagctggtgtggattctgccacatccagcaaggaagataccattaaattacacagtttagctctctctatctatgcattaggaatttgacttccatttgatgttaaagcatatacttggctttaaggacacactaaaactattcaaagtttaattacattcagacaaagatcatctaaccactgttgctacatagggaatatttatttaattatcccttgctatctctattaatcagtttcctcaatttatccttaaaattttcctcaaatgcttagttattttattatttgctttttaaaatattcagtgtcaaaacaaaagtacacagtttaaataattaagcaggcatacttctccctgtctcacctgcttgattctaaattgcaaggtctaccatgtcaaattttagataatcagaacaacactttgggattaaataccaactgacttcatttttactccataagccttctcattgctactttgcatttttcttcactaacctatctgtttgttagtaagtttttcagttccttcttcatcttttctttcccttgtagctgtgagcactccagtagattgcatcactaggttgggtcctgtgagctgttttgttcttttccaagtgtctgattcagcgggccatagaccgcttgccagaaaatcgccattgcttctaggctgacgcttgcctacttgttttgatcgtctgagagaagagactttgtttgccaaaaccacagttgatagaaatagaaaggtacagataagaaaaagcactgcaattataattaagcaaattagcatagccatgttgttgttgttttccgcacagacatcctttttgaaaatttcaccatgacttttgcttgtgttttcaatgctctgtactgttgaaggactgttgctgacgacagaaggtatataaagctcctgttcagatttagaagttaaagctacgatgtgagatgtttcaggcatgtttgtagaattacctttataatctacttcaggagttatagggtttgtgttaatgttttcattttggtttctgcctgtcttgttttgaataactgaatcccaggaagaagtactgttagcccacagacgggtatagtttgcttttgttccaggagacaaagaaaaaactgttgtcatcagaaaggcaagatgtaggtaatgtcctgtgtgttccatgtccgtgggcatgcttggcaatctgttgggatagcaatataatttgttagtttgtgaaagaataatggatcctagttttggtaattgtagttaaaagatagtgttgagatgttacaagtaaactacaagcttatgcctaatattcgctaccctgaattccttctcaactaaatttcttttctattcagctatgtatgaagaagcattttaatttctattaacacttttagatgctagaagttagcattacaaataaatattaatcattttaagtggactatcatggctttatatagttttcttcctttgaagcgtgctagacttctgctttgagtcagttagttctgcttttacttttctgattccttctttaaaaaaaaaaaaaaattaaggatcattcttacagaaactacccaccctctaacctgtcaccaatctttacagaagaaatgtggccttgagcttcttgcttcatgtatgaaataaatgcaaatttttttggtggaaagaggggaagtttggtagcaaccaaaagaaactgaacttcaaatagaaattcaaggtgttctttttttttcttgggtgttcatcttgaagcttagaataaagctggtacttagaaatacatttgtaagtgtatttgtgaacgcaattttactgtggtggttgtctcttttcatttatatttccctggactgactgtgtctttctgaaggcaaaggcataccagttttctcaacctaaaaatctgaagaaaaaaaaaaaaaaacagcaaatttcctctgagtagacttaaaagttcaacaaaagttgctgggttttcttttaaagcatcatttatacctagcattttttctgattttgacataattgtaaaaaaaaatgtgtaataaaatagaaatagagcatcaggatcttgatgatttgggatgaagtggcaggttataagcatctcaacagataattgaaaatgttgaatttccgctttggccctgagcttgctggaaactagtacaaaaaggagacaagttatattatacattttttaaatctaccaaatgattgatttaaatagaaatggcatatcttagaatttaacagttccatgtactgctaacccagcaggaaagatttataatcattattaaggtatcttataataatataccagtttgtcttgagctacttttgaaaggagtattttattgttagcatttatttgaatgaactaaaagcaaaactatattgttctcctgagatttactaaatgaaattgcctggttaagaaccctacgtatgctatagaaattcttctcaaatgtacttaggagtccttttatttaaaaaaaaaaaaaaaaggcagattcttacctagctagtataggtagggcctgaaagtctttgtttccaaaccaactcctaagcaacatggatgccactgctagtcaggcttttgaacatcaaggttttataagaaatggttgttatatgtcattggctgacatttgtatactattaaaatacagaaattgaaaataagaaatgtgatacgttgagttatgcaaacaa

SEQ ID NO: 708 - DNA, 4046 bp, Homo sapiens
gtgattactttctacctcatatcttctatcttgaaatatttgtgttgttttaaaatcatttgacttgtcatatttttatcttattttctcccaacaagattaaaaattctgaggtgaagttttttattgatacatgataatttgtacatattaatggagtatgtgtgatttttttggttttttttgtttttgtttttgttggaatctcgctctatcgcccaggctggagtgcagtggcacaatctcagctcactgcaaactcccctcccaggttcaagcaattctcctgcctcagcctcccaagtagctggggctacaggcacgtgccaccacgcccagctaatttttgtatttttagtagagacagggtttcaccctgttggccaggctagtcttgacctcctgacctcaggtgatctgcccgtcttggcctcccaaagtgctgggattgcaggcgtgagccaccatgccctgcctgtatgtgtgatattttgatacatgcatataatgtgtaatgattaaatcagggtgattaggatatccattgcctcaaagaaaagaaattgtttcgtctagctgttttgaaatatacaatgttattattaactagtcaccttactatgaatagtagaacttgttccttctatctaattctaacaatacatatattatttattttattattatttttttaagacagtctcactgttgcccaggctgaagtgcagtggtacaatctcagctcgctgcagcctctgcctcccaggtccaagtgattctcgtgcctcagcctcccaagtagctgggattacagacatgtaccaccatgcctggctgatttttgtatttttagtagagacagcgttttgccatgttggccaggctggtctcgaactcctggccttatgtaacccacctgcctcagcctcccagagtgctgggaatacaggcgtgagccactgtgcccagccctgattatatttttatatccattaaccaacctctgaggtaaagatttattttaacttacttagtagtattatcaccagaatcatcacatatggaaaactttgggcctaagttaacatagattgttttgatttgaaactttggtaccattacttcagggctttttcatggtcctcactgtggctgctcccatttattagtattcttttggttttaagcaacatatgacctaatatggcttaatcaaaaaatggtatttattggcttatgtaactgagcagtcctgggataaatttgaccccaggagaggctttatctcatacacaaatgatatggccagggttccagtttgtctatttctcagctccttctcttcagtcttttgggaggctcttcttttatatcccaaaatatgagctagcaactcctagggctacgtattcccttgtttataaacaccaggaaagaaatatctcaaatcccaacaatttaagctaaactacctgaactgggcctctttggccctggttgtcctggtttgaataatgtgttcattgctgaatcagtctgtgatcaaggtgggataaatggattggctaaaaccatctcactccagagctccagatgggtcattcctaccagactattcgcctaaggagtttggtgggccctgcaggcaaccaactaattcccactgttttcttcctttcttgactcatgggcaaattttttattgttgtcgtggctcaaaatttttgaattggagatttgtctcttctcttagccttatttctcagtgtccaaaaaacaactgatttaaaaaatgaatccagactttgaagaattgttttatattattctctctagaaaatgaatcataaaataaaattgattagtggcatctgtatatttattttaaacactgctaataatctttgtcttttttgtcattttccttaggttcaaaactggtcaaatcaatggtgatttgctgatataccatgtcttactgactttaaagccatattatgcaaagccatatgaaattgtagtggaccttacccataccgggcctagcaatcgctttaaaacagactttctctctaagtggtttgttgtttttcctggctttgcttacgacaacgtctccgcagtctatatctataactgtaactcctgggtcagggagtacaccaagtatcatgagcggctgctgactggcctcaaaggtagcaaaaggcttgttttcatagactgtcctgggaaactggctgagcacatagagcatgaacaacagaaactacctgctgccaccttggctttagaagaggacctgaaggtattccacaatgctctcaagctagctcacaaagacaccaaagtttctattaaagtaagttccagtctgtgttttgtaaacgattcattgcttttcttgactaactagactatatcctggcctccctaggtgtcctacccctatagtggtgtataaaatgtcacgtaaggctgtcgcggtggctcacgcctgtaatccaagcactttgggatgtcaaggtgggcagatcacgtgaggtcaggagttcaagaccagcctggccaacacggtgaaaccccgtctctactaaaaatacaaacattagccgggtatggtggtgggcacctgtaatctcagctacttggaggctgaggcaggagaatcgcttgaacccgggaggtggaggttgcagtgagccgagattgcgccactgcactccagcctgggcaacagagggacgctctgtctcaaaaaataaaaggttatgtaaatctagatgtaggaagaccaacatttgtgtcatcatggaggtcctgtggaggatatgagacgtatacattttattctagcttaggctggaagtagaagagtgttttggagagggcaatttgttatgtcattcaaattgtaggaatgtgtggagagtagaaattacctaatgagagttctgattattacatgcttttttcagagtgaggaacatgaaccttcaggataaaatcagtacttttctataagattgtttgttttgttttgttttgttttttgatatggagtctcactctgttgcctaggctggagtgcagtggcgtgatctcagagtgcagtggcgtgatctcagagtgcagtggcatgatcttggctcactgcaacctctgcctcccaggttcaagcgattctgctgcctcagcctccccagtagctgggattataggcgcccaccgccacggcaggctagtttttgtaggtttagtagagacaaggttgttggccaggctgatcacgaactcctgacctcaagtgatctgcccacctcggcctcccaaagtgctgggattacagggatgagccactgcacccggccttctataagattcttgacctttttaaaaaggaaaattaaaaaatttttaaatgttttttgtttcttttgagaacatttatcataataattactgaaccatttgaatatacaatggtgggaactcttccttaaatggcatagtgttttgtttggttggttggtttctggagccttttagaattttatgtaaaagagtttaattcttctccacttcaccccgtcaccaccactttccaggttggttctactgctgtccaagtaacttcagcagagcgaacaaaagtcctagggcaatcagtctttctaaatgacatttattatgcttcggaaattgaagaaatctgcctagtagatgagaaccagttcaccttaaccattgcaaaccagggcacgccgctcaccttcatgcaccaggagtgtgaagccattgtccagtctatcattcatatccggacccgctgggaactgtcacagcccgactctatcccccaacacaccaagattcggccaaaagatgtccctgggacactgctcaatatcgcattacttaatttaggcagttctgacccgagtttacggtaggttttttaaaattctcttcagtttgatttggggtttgttgcttttaaaatgagaccatttaatgaattttaaaacagcctctaccttaatatt

SEQ ID NO: 709 - DNA, 4046 bp, Homo sapiens
tctcttctcttagccttatttctcagtgtccaaaaaacaactgatttaaaaaatgaatccagactttgaagaattgttttatattattctctctagaaaatgaatcataaaataaaattgattagtggcatctgtatatttattttaaacactgctaataatctttgtcttttttgtcattttccttaggttcaaaactggtcaaatcaatggtgatttgctgatataccatgtcttactgactttaaagccatattatgcaaagccatatgaaattgtagtggaccttacccataccgggcctagcaatcgctttaaaacagactttctctctaagtggtttgttgtttttcctggctttgcttacgacaacgtctccgcagtctatatctataactgtaactcctgggtcagggagtacaccaagtatcatgagcggctgctgactggcctcaaaggtagcaaaaggcttgttttcatagactgtcctgggaaactggctgagcacatagagcatgaacaacagaaactacctgctgccaccttggctttagaagaggacctgaaggtattccacaatgctctcaagctagctcacaaagacaccaaagtttctattaaagtaagttccagtctgtgttttgtaaacgattcattgcttttcttgactaactagactatatcctggcctccctaggtgtcctacccctatagtggtgtataaaatgtcacgtaaggctgtcgcggtggctcacgcctgtaatccaagcactttgggatgtcaaggtgggcagatcacgtgaggtcaggagttcaagaccagcctggccaacacggtgaaaccccgtctctactaaaaatacaaacattagccgggtatggtggtgggcacctgtaatctcagctacttggaggctgaggcaggagaatcgcttgaacccgggaggtggaggttgcagtgagccgagattgcgccactgcactccagcctgggcaacagagggacgctctgtctcaaaaaataaaaggttatgtaaatctagatgtaggaagaccaacatttgtgtcatcatggaggtcctgtggaggatatgagacgtatacattttattctagcttaggctggaagtagaagagtgttttggagagggcaatttgttatgtcattcaaattgtaggaatgtgtggagagtagaaattacctaatgagagttctgattattacatgcttttttcagagtgaggaacatgaaccttcaggataaaatcagtacttttctataagattgtttgttttgttttgttttgttttttgatatggagtctcactctgttgcctaggctggagtgcagtggcgtgatctcagagtgcagtggcgtgatctcagagtgcagtggcatgatcttggctcactgcaacctctgcctcccaggttcaagcgattctgctgcctcagcctccccagtagctgggattataggcgcccaccgccacggcaggctagtttttgtaggtttagtagagacaaggttgttggccaggctgatcacgaactcctgacctcaagtgatctgcccacctcggcctcccaaagtgctgggattacagggatgagccactgcacccggccttctataagattcttgacctttttaaaaaggaaaattaaaaaatttttaaatgttttttgtttcttttgagaacatttatcataataattactgaaccatttgaatatacaatggtgggaactcttccttaaatggcatagtgttttgtttggttggttggtttctggagccttttagaattttatgtaaaagagtttaattcttctccacttcaccccgtcaccaccactttccaggttggttctactgctgtccaagtaacttcagcagagcgaacaaaagtcctagggcaatcagtctttctaaatgacatttattatgcttcggaaattgaagaaatctgcctagtagatgagaaccagttcaccttaaccattgcaaaccagggcacgccgctcaccttcatgcaccaggagtgtgaagccattgtccagtctatcattcatatccggacccgctgggaactgtcacagcccgactctatcccccaacacaccaagattcggccaaaagatgtccctgggacactgctcaatatcgcattacttaatttaggcagttctgacccgagtttacggtaggttttttaaaattctcttcagtttgatttggggtttgttgcttttaaaatgagaccatttaatgaattttaaaacagcctctaccttaatattgtaaattggaaggtatgcagtgttggttaaccactgtgacctcatcaagttgtggggtattcacatgaactgtggaattccaaacagggtgattcacactaaaccaatatatgtcctttctccatcatgtaaaacaacacgacatagcagatttttttttccaaagtatcctaaattaagtttttcttcctctaagtcctctaatttttttccattttcagaagtatatcactatttagtttaaaagtcaagtcagattattgctttacaaaagaaggcctaatgttcaataacttggtaacattattgcatactttccacctacatcactcttaacaaaattctcaaaataaatcttaagacaaataagtcatctgagcagagtgtaattggttccatttaggcttaataacttgaatatgcatgtggaaagagcatggctgtggagtgagtagatgtggtttgaacagatatgccactttctagctatgtactttgagcaagatactgaagttttcagatatctagtttccttatttgtgaaataaaggtaattgcctttcttatatacccacaaaagcttaaaaaatagtatgtgtagtagtatagtatagcaaactagcaaatagtttatacttagtaagtagtattttcttatcttttccctccctgccagcatctccttgcaccctttctcccttttctcccctctccttaccaagttaggataattctttgtctcaagtaccctgagactttgaagatttttcagatgtaaattcttaacttctgaaaattttccctgaggataacatagcccaggttttatagtgggccttttaggattccaaattctcctttacttaaagggaaaaagaagaaaatcaagatatgtttacttggatgggcttcagaaattgtacataagattttgtgtatgctttgcttcctttatctcataggtgtctgtgacacctgtcctgggttgaggaagtccaattctttataagtgttgaaatacacaggataaaagttttgtcaaaattgtataacttagaattcctgggaattagtaaaagatacaagctgagcactggcactgtagtcccagctactcgggaggctgaggcgggaggacagcttgagctcaggagttcaaggctgcagtgtgctataatcatgtctgtgaatagccaatgcacaccagcctggggaacatagtgagactctgactaaaagttttttaaaaaagaaaaaagatatgtaaacagaaataataacactaattttcacattttaggaaaatggagctataagcctgcctttaatttctaattcaaagatcttcattgaaaaatacaaccttttaacaattattagcctgggtaaacctgtattcttctctagtgacctaaagcaatctctgacagcttctgctttttgctgaagcatgtcatcccagagaaaaagcctttaggcagacttaaattccagtggctttttttccctatatggttgttgcatcaatatagtagcatgataaacattcagaggtaaggaaaacctgacagttactgaacaaactatttcctttactggacaggggagaaaattaaaatttttaaattgagtctgagtcttttaggctgtctcctaaattgcttaaatatattttcagacatttgtaagtgatgtttggtctcaatgaaacctggatattatagtttttttccatattgg

SEQ ID NO: 710 - DNA, 4231 bp, Homo sapiens
gtggcgtgatctcagagtgcagtggcgtgatctcagagtgcagtggcatgatcttggctcactgcaacctctgcctcccaggttcaagcgattctgctgcctcagcctccccagtagctgggattataggcgcccaccgccacggcaggctagtttttgtaggtttagtagagacaaggttgttggccaggctgatcacgaactcctgacctcaagtgatctgcccacctcggcctcccaaagtgctgggattacagggatgagccactgcacccggccttctataagattcttgacctttttaaaaaggaaaattaaaaaatttttaaatgttttttgtttcttttgagaacatttatcataataattactgaaccatttgaatatacaatggtgggaactcttccttaaatggcatagtgttttgtttggttggttggtttctggagccttttagaattttatgtaaaagagtttaattcttctccacttcaccccgtcaccaccactttccaggttggttctactgctgtccaagtaacttcagcagagcgaacaaaagtcctagggcaatcagtctttctaaatgacatttattatgcttcggaaattgaagaaatctgcctagtagatgagaaccagttcaccttaaccattgcaaaccagggcacgccgctcaccttcatgcaccaggagtgtgaagccattgtccagtctatcattcatatccggacccgctgggaactgtcacagcccgactctatcccccaacacaccaagattcggccaaaagatgtccctgggacactgctcaatatcgcattacttaatttaggcagttctgacccgagtttacggtaggttttttaaaattctcttcagtttgatttggggtttgttgcttttaaaatgagaccatttaatgaattttaaaacagcctctaccttaatattgtaaattggaaggtatgcagtgttggttaaccactgtgacctcatcaagttgtggggtattcacatgaactgtggaattccaaacagggtgattcacactaaaccaatatatgtcctttctccatcatgtaaaacaacacgacatagcagatttttttttccaaagtatcctaaattaagtttttcttcctctaagtcctctaatttttttccattttcagaagtatatcactatttagtttaaaagtcaagtcagattattgctttacaaaagaaggcctaatgttcaataacttggtaacattattgcatactttccacctacatcactcttaacaaaattctcaaaataaatcttaagacaaataagtcatctgagcagagtgtaattggttccatttaggcttaataacttgaatatgcatgtggaaagagcatggctgtggagtgagtagatgtggtttgaacagatatgccactttctagctatgtactttgagcaagatactgaagttttcagatatctagtttccttatttgtgaaataaaggtaattgcctttcttatatacccacaaaagcttaaaaaatagtatgtgtagtagtatagtatagcaaactagcaaatagtttatacttagtaagtagtattttcttatcttttccctccctgccagcatctccttgcaccctttctcccttttctcccctctccttaccaagttaggataattctttgtctcaagtaccctgagactttgaagatttttcagatgtaaattcttaacttctgaaaattttccctgaggataacatagcccaggttttatagtgggccttttaggattccaaattctcctttacttaaagggaaaaagaagaaaatcaagatatgtttacttggatgggcttcagaaattgtacataagattttgtgtatgctttgcttcctttatctcataggtgtctgtgacacctgtcctgggttgaggaagtccaattctttataagtgttgaaatacacaggataaaagttttgtcaaaattgtataacttagaattcctgggaattagtaaaagatacaagctgagcactggcactgtagtcccagctactcgggaggctgaggcgggaggacagcttgagctcaggagttcaaggctgcagtgtgctataatcatgtctgtgaatagccaatgcacaccagcctggggaacatagtgagactctgactaaaagttttttaaaaaagaaaaaagatatgtaaacagaaataataacactaattttcacattttaggaaaatggagctataagcctgcctttaatttctaattcaaagatcttcattgaaaaatacaaccttttaacaattattagcctgggtaaacctgtattcttctctagtgacctaaagcaatctctgacagcttctgctttttgctgaagcatgtcatcccagagaaaaagcctttaggcagacttaaattccagtggctttttttccctatatggttgttgcatcaatatagtagcatgataaacattcagaggtaaggaaaacctgacagttactgaacaaactatttcctttactggacaggggagaaaattaaaatttttaaattgagtctgagtcttttaggctgtctcctaaattgcttaaatatattttcagacatttgtaagtgatgtttggtctcaatgaaacctggatattatagtttttttccatattggtggttatatatgatgtaatgaggtcatagagggaaaaatgggaggacttaattataagttaattttgtttttaaccttcagtttgtagggtaacttttaggacacccagaaagaagttcagcagatcctgattaaagattttcacattctaatttgatgaagggaagggccatctgatatctgtccctatgatccccattataactggatctagtgggaaagagaaccagaatttgagttttggctttgctaaaaatgtatggtgtgccttattctgacttaatttctattgatccacattaggaccataagtcctctcatattttatgtctcagtgagatgtattttaggaaagcctataccccgcccctctgtcataggagcctcacagtgctcttatggttatatcaagtgtgtccctttttataaaatccctaaatgattaaggggtattttggttttactgtagaattataacatcttatttctaactgatcataaaatttaaaaatagttgatcatactttgtaacagaatcacaaattgtatgttatgaaaaaattttggaactataaggaaaaatacgttttaaaacaacttcatttgtgttttctcctaggtcagctgcctataatcttctgtgtgccttaacttgtacctttaatttaaaaatcgagggccagttactagagacatcaggtttatgtatccctgccaacaacaccctctttattgtctctattagtaagacactggcagccaatgagccacacctcacgttagaatttttggaagagtgtatttctggatttagcaaatctagtaagtaatgataattttctttaatactaacaattattctaagagaattcaaagaaaaccctttcatttcagaattttccagtgaagactttcacttacatttttactttttttcctcttctgattttatatctgtggtatcctgtaactgaaggaactctgaaggaactttttggtaggccacattgagaaatccaccaaaattctgataataaaagcaaagcggcaagagtttggtactttacacacctctggaccacttacaaagtattttcttcactgttgcagtttaattagcttcagcatttctcttcatagcagaaaagtccacataagtatccatgttgcctccttaattttagagaactagtcattttctcttttctttaggttgactttgaacaatgaatttattgtaaatgtacagttcacggagagcacagtggcacataatacagggcccagagtcagttctgactttgttttaactaagtcttataaatttaatatccactctttatatttgtccatctttatatcctatagttttataaatgttgatcttctcccagcatatttcctgaccttttcttccctttcctttccctgtaatatataaaacttttttttctgcattcaaacacatttcttgacttttatatattagataattaaaagcttcagcaattcactaagactctttgtcaggtaagag

SEQ ID NO: 711 - DNA, 4046 bp, Homo sapiens
gcctgtaatcccacctgctcaggaggatcgctaagcccaggagtttgagaccagcctggacaacatagtgaggcccccatctcaaaaagaatatttatattttaagaaattcactaataaaagccaattgaaagaatagtgagataatcagttatcagcttggcaaagattttttttttaagatccattcctggtggtctgtggaattgtgagtagaggcaatttttctagaaaggcatttggaagtggataacaagaccttaagactattcataccttttggcctcataattctgctttttagcatttatcctaaagaattaatgttaaaatgtttattatagcattatttttatgtagatttttaaattgaggtatatcttgtcatcagtaaagtgcaagatcttaagtcaacagcttgatgaacttctacatgcaaatacatcatgaaagtatctccagatctagacatagaacatttctagcatccagagggatattctcagtaccctcccttcaccaagagtaaacactattatgacctctattgcacagatttattttgcctactttagaacttcatatgacattatttataatagcaaaaaaatgaacaggccaaaagtcaaagaataaggaactgattaaattattggttctccatctgatggaataatatgaagccattgaaaaatggctttgttacagaatttcagtttggaagatgaaaaggttctagagatggatggtggtgatggctgcacaatgatttgaatgtactcagtgccactgaactgtgcccttcaaaatgggtaaagccacggaactgtacatttaaaaatagttaaaatggtaaattttgtgttgtgtatattttaccacaattttaaaaactctttgagactttaggtaaagtgtatagataaatttttgtacaatttttgtcttataaatgtgaagctttttcaagtaagtttaaaagaagtttgcagaatttgtaatgttgaataaataatctcagtataggccaggggtggtggctcacgcctgtaatcccagcactttgggaggccgaggcgggcagatcacgaggtcaggagattgagaccatcctggctaacacagtgaaaccccgtctctactcaaaatatgaaaaaaaatttgccgggcgtggtggtgggcgcctgtagtcccagctactcgggaggctgaggcaggagaatggtgtgaacctgtgaacccgggaggcggaacttgcagtgagccgagatcgctcctctgcactccagcctgggcgacagaggagactccatctcaaaaaaaaaaaaaatgaataatctcagtataatcactgaaaaaaatattcagagcctactgcatgtatagcataatccccgtttttgcgggggagtgggagtgggttatacctgtgtacacacacataaatgtacattaactctacataaatttgaaagcctgaggagagatgagatgatacaccaatgttaatacagttttcattttgtggtgatgctttccttttaccaaactttctatgattaccacatttccttttataatgagaataaaacaactttttaacaagaaaggactaaaatggaggaaaataagacaaaacttttcaaaaattggcttactggcttttaaaattactttcttcaaggactgttctttcttcgcctctacaaaaatatatttgccaagtgtcttttctccaggcctgattctaggtaatagtctttaccttttaccattttttccccgaattctttatgttaaataattgttgatgtgattttcattgaccatcacatgctaatagtgtatttttttccaggtattgaattgaaacacctttgtttggaatacatgactccatggctgtcaaatctagttcgtttttgcaagcataatgatgatgccaaacgacaaagagttactgctattcttgacaagctgataacaatgaccatcaatgaaaaacagatgtacccatctattcaagcaaaaatatggggaagccttgggcaggtattgagtttgctcaaatatttatctagtatctcctttgtgcacatatttatctggtgccacattgggcaaagcactgcgctagacactagggatagagttgtaaaaaacacagtttcctccttcagaaagcatgtagacactcacccagctcttcatctggttcaaaattgtaaatgtctagtgcatgtctcagagccagagaaaagctagttatttgcacagtctccttcaaggcataattatatatatatatatatatataattatgccttgaaggagactgtgcaaataactagattttatatatatattatatagaactgtagaaatctggtgacatttctagtgctttattctagttctctacattccaaaggtgtcagtagatgtttcttcttattgatgctatttgggacatctgctttcatttatagttctacataagaatgccaatattaaaataggatataatgtaaattttatttttatctgacaagaattaggcatatcatttcttcaaagtaatcatttaaggaaataatgccctcactcaaacactgctgctcctcctccaaataattagaaataaccttggagccagtgttgcagccctagaaaacatcctggtacttaatgtcatttcctatattttatttttttttgagactgagtctcgctctgtcacccaggctggagtgcagtggtacagtctcggctcattgcaacctctgcctcccaggctcaagtgacccttccacctcagcctcccaagtagctgggcctacaggtgcacaccaacacacctggctaatttttgtatttttttttttttttttttttagagatagggttttgccatgttgcccaggctggtcttgaactcctggcctcaagcaatccgcccgcctcagcctccccaagtgctgggattacaagcgtgagccactgcacccagctctgtattttcaaattactattttatattgatgctacattactgtcttagaaaagcatagagatactttgcaagtgactgaagatagtattgatagagatttaaaatttttgaataccaatctcttaatctctgaaggagtcaaatgaatatactcatcctttactggatattttataataaattgtatttactgacaggcctgtaaataaaatctagtatttttgaggcctcaggtaaaatagaattttcatattgattaggctgttccaatgaatattttttaattaaaaattaaattggtagagtgattaaaaacatgttattttccttcttcaactagattacagatctgcttgatgttgtactagacagtttcatcaaaaccagtgcaacaggtggcttgggatcaataaaagctgaggtgatggcagatactgctgtagctttggcttctggaaatgtgaaattggtttcaagcaaggtaatcacttttcttttgccttctgtactatagcatatctgttttatcatcaggaggttttttgttttgtaattacttttaaattaaactgaacttttttgtgctaaaactttgagtcccatgtttttttttttaaaaaaaaaaatcctgcttctttacaggttattggaaggatgtgcaaaataattgacaagacatgcttatctccaactcctactttagaacaacatcttatgtgggatgatattgctattttagcacgctacatgctgatgctgtccttcaacaattcccttgatgtggcagctcatcttccctacctcttccacgttgttactttcttagtagccacaggtccgctctcccttagagcttccacacatggactggtcattaatatcattcactctctgtgtacttgttcacagcttcattttagtggtaagttctaggaaaggaatttgtgtttaccagttcctttctccattttacttcacctgatcaatatagattatcttatttatgtttgtgctctaacaccaagttgctaat

SEQ ID NO: 712 - DNA, 4098 bp, Homo sapiens
ttgaaagaatagtgagataatcagttatcagcttggcaaagattttttttttaagatccattcctggtggtctgtggaattgtgagtagaggcaatttttctagaaaggcatttggaagtggataacaagaccttaagactattcataccttttggcctcataattctgctttttagcatttatcctaaagaattaatgttaaaatgtttattatagcattatttttatgtagatttttaaattgaggtatatcttgtcatcagtaaagtgcaagatcttaagtcaacagcttgatgaacttctacatgcaaatacatcatgaaagtatctccagatctagacatagaacatttctagcatccagagggatattctcagtaccctcccttcaccaagagtaaacactattatgacctctattgcacagatttattttgcctactttagaacttcatatgacattatttataatagcaaaaaaatgaacaggccaaaagtcaaagaataaggaactgattaaattattggttctccatctgatggaataatatgaagccattgaaaaatggctttgttacagaatttcagtttggaagatgaaaaggttctagagatggatggtggtgatggctgcacaatgatttgaatgtactcagtgccactgaactgtgcccttcaaaatgggtaaagccacggaactgtacatttaaaaatagttaaaatggtaaattttgtgttgtgtatattttaccacaattttaaaaactctttgagactttaggtaaagtgtatagataaatttttgtacaatttttgtcttataaatgtgaagctttttcaagtaagtttaaaagaagtttgcagaatttgtaatgttgaataaataatctcagtataggccaggggtggtggctcacgcctgtaatcccagcactttgggaggccgaggcgggcagatcacgaggtcaggagattgagaccatcctggctaacacagtgaaaccccgtctctactcaaaatatgaaaaaaaatttgccgggcgtggtggtgggcgcctgtagtcccagctactcgggaggctgaggcaggagaatggtgtgaacctgtgaacccgggaggcggaacttgcagtgagccgagatcgctcctctgcactccagcctgggcgacagaggagactccatctcaaaaaaaaaaaaaatgaataatctcagtataatcactgaaaaaaatattcagagcctactgcatgtatagcataatccccgtttttgcgggggagtgggagtgggttatacctgtgtacacacacataaatgtacattaactctacataaatttgaaagcctgaggagagatgagatgatacaccaatgttaatacagttttcattttgtggtgatgctttccttttaccaaactttctatgattaccacatttccttttataatgagaataaaacaactttttaacaagaaaggactaaaatggaggaaaataagacaaaacttttcaaaaattggcttactggcttttaaaattactttcttcaaggactgttctttcttcgcctctacaaaaatatatttgccaagtgtcttttctccaggcctgattctaggtaatagtctttaccttttaccattttttccccgaattctttatgttaaataattgttgatgtgattttcattgaccatcacatgctaatagtgtatttttttccaggtattgaattgaaacacctttgtttggaatacatgactccatggctgtcaaatctagttcgtttttgcaagcataatgatgatgccaaacgacaaagagttactgctattcttgacaagctgataacaatgaccatcaatgaaaaacagatgtacccatctattcaagcaaaaatatggggaagccttgggcaggtattgagtttgctcaaatatttatctagtatctcctttgtgcacatatttatctggtgccacattgggcaaagcactgcgctagacactagggatagagttgtaaaaaacacagtttcctccttcagaaagcatgtagacactcacccagctcttcatctggttcaaaattgtaaatgtctagtgcatgtctcagagccagagaaaagctagttatttgcacagtctccttcaaggcataattatatatatatatatatatataattatgccttgaaggagactgtgcaaataactagattttatatatatattatatagaactgtagaaatctggtgacatttctagtgctttattctagttctctacattccaaaggtgtcagtagatgtttcttcttattgatgctatttgggacatctgctttcatttatagttctacataagaatgccaatattaaaataggatataatgtaaattttatttttatctgacaagaattaggcatatcatttcttcaaagtaatcatttaaggaaataatgccctcactcaaacactgctgctcctcctccaaataattagaaataaccttggagccagtgttgcagccctagaaaacatcctggtacttaatgtcatttcctatattttatttttttttgagactgagtctcgctctgtcacccaggctggagtgcagtggtacagtctcggctcattgcaacctctgcctcccaggctcaagtgacccttccacctcagcctcccaagtagctgggcctacaggtgcacaccaacacacctggctaatttttgtatttttttttttttttttttttagagatagggttttgccatgttgcccaggctggtcttgaactcctggcctcaagcaatccgcccgcctcagcctccccaagtgctgggattacaagcgtgagccactgcacccagctctgtattttcaaattactattttatattgatgctacattactgtcttagaaaagcatagagatactttgcaagtgactgaagatagtattgatagagatttaaaatttttgaataccaatctcttaatctctgaaggagtcaaatgaatatactcatcctttactggatattttataataaattgtatttactgacaggcctgtaaataaaatctagtatttttgaggcctcaggtaaaatagaattttcatattgattaggctgttccaatgaatattttttaattaaaaattaaattggtagagtgattaaaaacatgttattttccttcttcaactagattacagatctgcttgatgttgtactagacagtttcatcaaaaccagtgcaacaggtggcttgggatcaataaaagctgaggtgatggcagatactgctgtagctttggcttctggaaatgtgaaattggtttcaagcaaggtaatcacttttcttttgccttctgtactatagcatatctgttttatcatcaggaggttttttgttttgtaattacttttaaattaaactgaacttttttgtgctaaaactttgagtcccatgtttttttttttaaaaaaaaaaatcctgcttctttacaggttattggaaggatgtgcaaaataattgacaagacatgcttatctccaactcctactttagaacaacatcttatgtgggatgatattgctattttagcacgctacatgctgatgctgtccttcaacaattcccttgatgtggcagctcatcttccctacctcttccacgttgttactttcttagtagccacaggtccgctctcccttagagcttccacacatggactggtcattaatatcattcactctctgtgtacttgttcacagcttcattttagtggtaagttctaggaaaggaatttgtgtttaccagttcctttctccattttacttcacctgatcaatatagattatcttatttatgtttgtgctctaacaccaagttgctaatttaagcctccagtaatgacatgaaatattaccaaaaagaaaataaattacttccattccatatcaagctatagtaaagattttctatgcatacttgtcatgtagagttatcccataagcggaatactcagtgccagttgaccatgttcagttaccagcactaatttgtagataaatgaa

SEQ ID NO: 713 - DNA, 4045 bp, Homo sapiens
aattgttgatgtgattttcattgaccatcacatgctaatagtgtatttttttccaggtattgaattgaaacacctttgtttggaatacatgactccatggctgtcaaatctagttcgtttttgcaagcataatgatgatgccaaacgacaaagagttactgctattcttgacaagctgataacaatgaccatcaatgaaaaacagatgtacccatctattcaagcaaaaatatggggaagccttgggcaggtattgagtttgctcaaatatttatctagtatctcctttgtgcacatatttatctggtgccacattgggcaaagcactgcgctagacactagggatagagttgtaaaaaacacagtttcctccttcagaaagcatgtagacactcacccagctcttcatctggttcaaaattgtaaatgtctagtgcatgtctcagagccagagaaaagctagttatttgcacagtctccttcaaggcataattatatatatatatatatatataattatgccttgaaggagactgtgcaaataactagattttatatatatattatatagaactgtagaaatctggtgacatttctagtgctttattctagttctctacattccaaaggtgtcagtagatgtttcttcttattgatgctatttgggacatctgctttcatttatagttctacataagaatgccaatattaaaataggatataatgtaaattttatttttatctgacaagaattaggcatatcatttcttcaaagtaatcatttaaggaaataatgccctcactcaaacactgctgctcctcctccaaataattagaaataaccttggagccagtgttgcagccctagaaaacatcctggtacttaatgtcatttcctatattttatttttttttgagactgagtctcgctctgtcacccaggctggagtgcagtggtacagtctcggctcattgcaacctctgcctcccaggctcaagtgacccttccacctcagcctcccaagtagctgggcctacaggtgcacaccaacacacctggctaatttttgtatttttttttttttttttttttagagatagggttttgccatgttgcccaggctggtcttgaactcctggcctcaagcaatccgcccgcctcagcctccccaagtgctgggattacaagcgtgagccactgcacccagctctgtattttcaaattactattttatattgatgctacattactgtcttagaaaagcatagagatactttgcaagtgactgaagatagtattgatagagatttaaaatttttgaataccaatctcttaatctctgaaggagtcaaatgaatatactcatcctttactggatattttataataaattgtatttactgacaggcctgtaaataaaatctagtatttttgaggcctcaggtaaaatagaattttcatattgattaggctgttccaatgaatattttttaattaaaaattaaattggtagagtgattaaaaacatgttattttccttcttcaactagattacagatctgcttgatgttgtactagacagtttcatcaaaaccagtgcaacaggtggcttgggatcaataaaagctgaggtgatggcagatactgctgtagctttggcttctggaaatgtgaaattggtttcaagcaaggtaatcacttttcttttgccttctgtactatagcatatctgttttatcatcaggaggttttttgttttgtaattacttttaaattaaactgaacttttttgtgctaaaactttgagtcccatgtttttttttttaaaaaaaaaaatcctgcttctttacaggttattggaaggatgtgcaaaataattgacaagacatgcttatctccaactcctactttagaacaacatcttatgtgggatgatattgctattttagcacgctacatgctgatgctgtccttcaacaattcccttgatgtggcagctcatcttccctacctcttccacgttgttactttcttagtagccacaggtccgctctcccttagagcttccacacatggactggtcattaatatcattcactctctgtgtacttgttcacagcttcattttagtggtaagttctaggaaaggaatttgtgtttaccagttcctttctccattttacttcacctgatcaatatagattatcttatttatgtttgtgctctaacaccaagttgctaatttaagcctccagtaatgacatgaaatattaccaaaaagaaaataaattacttccattccatatcaagctatagtaaagattttctatgcatacttgtcatgtagagttatcccataagcggaatactcagtgccagttgaccatgttcagttaccagcactaatttgtagataaatgaagcaaggagcattaatacaatgtatctagaggtttgatttagggaacatgattatgtaatttttatatggtattcaaattttctaaattcaaaatgaaacatggaactttagaaattaaaaagtaatattttctgtctttacttgttcctttattctcttacagaagagaccaagcaagttttgagactcagtctgacagagttctcattacccaaattttacttgctgtttggcattagcaaagtcaagtcagctgctgtcattgccttccgttccagttaccgggacaggtcattctctcctggctcctatgagagagagacttttgctttgacatccttggaaacagtcacagaagctttgttggagatcatggaggtatagaagccaaaatgataagaaactaagttaaaatctttttttaaaaatatgttaatactatatagaagaaatattggtttattgtgctattttgtacttaatgcttaaataaaaacacttgcatggactgtgttattggtaacaggtcacttaatgacatcataataaacattatttaaacagttctaaaaacatttatgtacaatatgtattcagagtatccccttttttaggcatgcatgagagatattccaacgtgcaagtggctggaccagtggacagaactagctcaaaggtatgtcctaaattaaatataagttgtaaaaatatgcatattgttgaaaatacagctattactgtatgatcaatgttataatttattatttagtatatataaacacaaaggtttttataagttctgtggatcttttaattgcagatttgcattccaatataatccatccctgcaaccaagagctcttgttgtctttgggtgtattagcaaacgagtgtctcatgggcagataaagcagataatccgtattcttagcaaggtacctgttccgccctcacttctcccaaatatttatggttctcaagttgtaaagcatatctttcatttttctaaaagacgtttaaatttgaggtcaatgaaatatcttatatgttacttattaagcctttaaaatgtattttgattatttattgtaattctttgaagaagtcttctctaaagaagctgtctttatatgtaaactctgattacttcattaaggaagatgtctttaaaataaaatatgttgcctcttttgctaagcaggtacacttagtattttaccagttttcaaagcatttaattatatggtaagactatagccttgcataaaattatttaatttgtaattactataataatgtctgactcttataatgtagaaatgtcaaaaaataagaaaacaaatgtacattaagctagctaccaagatcaccatagcatgagaaatcattctagcatttattaaataagtaaatgttcctgaattcattccgagattcagtttaggagttaatgttttatttcaatgaaagtaaaataaaaaattctgttttcctaaaaggcacttgagagttgcttaaaaggacctgacacttacaacagtcaagttctgatagaagctacagtaatagcactaaccaaattacagccacttcttaataaggtaattactgtatagaaaatg

SEQ ID NO: 714 - DNA, 4084 bp, Homo sapiens
taaagattttctatgcatacttgtcatgtagagttatcccataagcggaatactcagtgccagttgaccatgttcagttaccagcactaatttgtagataaatgaagcaaggagcattaatacaatgtatctagaggtttgatttagggaacatgattatgtaatttttatatggtattcaaattttctaaattcaaaatgaaacatggaactttagaaattaaaaagtaatattttctgtctttacttgttcctttattctcttacagaagagaccaagcaagttttgagactcagtctgacagagttctcattacccaaattttacttgctgtttggcattagcaaagtcaagtcagctgctgtcattgccttccgttccagttaccgggacaggtcattctctcctggctcctatgagagagagacttttgctttgacatccttggaaacagtcacagaagctttgttggagatcatggaggtatagaagccaaaatgataagaaactaagttaaaatctttttttaaaaatatgttaatactatatagaagaaatattggtttattgtgctattttgtacttaatgcttaaataaaaacacttgcatggactgtgttattggtaacaggtcacttaatgacatcataataaacattatttaaacagttctaaaaacatttatgtacaatatgtattcagagtatccccttttttaggcatgcatgagagatattccaacgtgcaagtggctggaccagtggacagaactagctcaaaggtatgtcctaaattaaatataagttgtaaaaatatgcatattgttgaaaatacagctattactgtatgatcaatgttataatttattatttagtatatataaacacaaaggtttttataagttctgtggatcttttaattgcagatttgcattccaatataatccatccctgcaaccaagagctcttgttgtctttgggtgtattagcaaacgagtgtctcatgggcagataaagcagataatccgtattcttagcaaggtacctgttccgccctcacttctcccaaatatttatggttctcaagttgtaaagcatatctttcatttttctaaaagacgtttaaatttgaggtcaatgaaatatcttatatgttacttattaagcctttaaaatgtattttgattatttattgtaattctttgaagaagtcttctctaaagaagctgtctttatatgtaaactctgattacttcattaaggaagatgtctttaaaataaaatatgttgcctcttttgctaagcaggtacacttagtattttaccagttttcaaagcatttaattatatggtaagactatagccttgcataaaattatttaatttgtaattactataataatgtctgactcttataatgtagaaatgtcaaaaaataagaaaacaaatgtacattaagctagctaccaagatcaccatagcatgagaaatcattctagcatttattaaataagtaaatgttcctgaattcattccgagattcagtttaggagttaatgttttatttcaatgaaagtaaaataaaaaattctgttttcctaaaaggcacttgagagttgcttaaaaggacctgacacttacaacagtcaagttctgatagaagctacagtaatagcactaaccaaattacagccacttcttaataaggtaattactgtatagaaaatgagtgcattcattttgggtatcagtgttgaatgttactttctttcaaagagtttagaaaataagatgaattgagaataagttataaagaaaaaactatagttaaagtagaacctcttaaagtttagttgtttgaagtagtcatattagaagaagagtaagtatggatagtatgttctcaagcgcttgtaagtttttggtctcatcagtgctaaaggaaagataggtatatattcttaattattttatcttataactattaattatctgctattgccaagtactgttttaggcgctagagatagagtactaacaaagcccataaaactcactgccttcatggagcttactttctggggtgggtgtggaggttggggagtgaatggataatgaagtaaacaaaatacgtagtatgttagtgattattactatggagaaattaaagctgggagaagtatacttgatcgtcataagagtttgggtgccaaatgaagattatatttaaaaggagtaaaatgaagtggccactgttttaggatggtctgaccttatcccatttttatatttaagatatctggaaatcatgtttttgtattaataaaatgaaaaagattcgataatggcatggtattaccatccagttctaaagtggtttaattctgtgatttgagtacaaaggtatgccagacttgggagaaataacagagaaataatacctgttatattcctggtttgtctacaagcattctaattttgtattatacaaaatggttctctggtccccatcttctaagtgaaaatgagctcagaagggctaaataacttgcccaaagtcacatacctaataaaagaaccatgattctaatgtgatactatttgactctaaagtccatgtattttccctaatatcacagtgctaagtaaagattgccagtaataaatacttttaattcagagcagcaagagattaccatactggttaagagtgacaagaagttgaaaagacagtttaaaataaagttaaagggaaacataggagttaatgtaggtagagagaaagggagagagctgcacaagaatgccaggacaatggagggaaggtgggtagaacattctagttgtaatggagaagcttttcaaaggaatcgagagagggaaagttgtgaggactggatagacctcatctcacattcagcattgttcaaaagagtttggaaatgtacagtttttaagcagacaagtcatacgatgaaagcaggacttagctcctggtggtagtgtgcacagtggattggagtagggagaaactgaagtaaaaagaatccacctttataataaagaaggttggcatgtggtaatgtcattagcaataagaaagaaatgacaaaagatacaaaagagactactctagaagaatcaacaaaccttggtgactggatttagaaatcaaagaacagggagaagtcaaaggaggtgctaagtaacgttctcagtccagctaacagtgtctttagttatacatatggaaaagtgaagagcttactcatatctttatcttccccaaaagagaaaacatgggtaatttaggaagataagctgctttatttttaactgcagtgtgttttgaaagagactatgtcatgattcatcttactagcctcaaacatatcttctttgccaggactcgcctctgcacaaagccctcttttgggtagctgtggctgtgctgcagcttgatgaggtcaacttgtattcagcaggtaccgcacttcttgaacaaaacctgcatactttagatagtctccgtatattcaatgacaaggtaagcaaactttgccttgaggttcctagattactcaaatttagtactcttccatcttttcttgttgctattcttttaaaatcacaagaagtccataacttaagtaggaatttgtataatgtaacttattgtgagtatatttccttaccagctcataaagaactatgtaaacttgaatgcatattttttacataaaaatagcaaaaaaaaaaaaacaaaaaaaaaacagtactggcctaatactagtagaattacagaataaggataaataatacatgatcatccttacagaatgagcataaacaatacatggtaataatattaatagctaccatgccaggccgtatgctaaacactatacatttatttttaattttcataaccttaaggtaaaggttagcattctctgccccccatttcacacgtgaagaaataatctaaaagtaatcttagttttacttaataatgccacttaatgaaaaatacgtataattcatagtagataaggaagttggagagtctaaaggaaacttttgg

SEQ ID NO: 715 - DNA, 4046 bp, Homo sapiens
gaagaaataatctaaaagtaatcttagttttacttaataatgccacttaatgaaaaatacgtataattcatagtagataaggaagttggagagtctaaaggaaacttttgggtacttaattttactagtttttttattctgtctaatcttactttaaaatataccattagtggccaggagtggtggctcatacctgtagtcccagcactttgggaggccaagacaggtggatcagttgagctcaggagttagagaacagcctgggcaacttgcaaaaccccatctctacaaaaaaggcaaaaattagctaggcatggtggcatgcacctacaatcccagctactcgggaggtgaggtaggaggattgcttgagcctgggaggcagaggttgcagtgagctgagatcacgccactgcactccagcttgggcaacagagcaagaccctgtctccaaaaaaaagtgtgtatacatatattacatacacacatatatatgtaatgtatgtgtatatatatatataaagtgtgtgtgtgtgtgtgtgtgtgtgtacacacataaaatatgtaaaatccaactccaattaaggttaataaatgttaggaggggtgctaatggggtgtgtgtgtgtgtgtgcacgtgtgcatgtgtgtgtgtatatatatatgaacatgggcaaattacttcttagttcctttctaatttgtaaaatggagatctaattggggttggattttagttcatagagaatagaggagagaataaaatagtatgaaattacgtcccttttgtctttggataaaaatgggaagggtctaggagaaaagaggggaatgtttttaaaagaatgtgtatatacagtgagatttgcttgaagtgaaattaactgaactgtgggtacaaagaacaggattatggttttaagtgtaaaaagatacttggtctaaacattattagttcagtctaccagatgtagtgtgaacctggaacagatatgggtctgaaaaatatagaagcaaaattttagaggtaagaggtcttatggagtttattaatcagacctccattttgcaaattagaaaggaactaagaagttaagtaacttgcccatgcttgtacatctgttttgggactagaacccctctgtcctaattctcattgccgtttttctaaaactgttttgggacagtggtggtcagcgatatctagttgttggctatttatatgttaagaatatttgcaaattggccgggtgcaatggcgcatgtttgtaattccagcactctgggaggccgagttgggaggatcacttgaggttaggagttcgagaccagcctggccaacatggtgacaccctgtctctactaaaaatacaaaaattagccagggtggcacatgtttgtaactccagcgacctgggaggctgaggtgggaagatctcttgaacccaggaggttgcagtgagccaaggtggtgccactgcactccagcctgggcgacagagtaagactccatctcaaaaaaagaatatttgcaaatggagcattgcaaatggggcatctgcctcggtattttcatcttcaaaacagcccagtagcgggagctaatattgattctagtgccctttggatgctaggcatcagagttaataagcatgttaaaagtcaccgggatgtaaattgacagtcatttattttgtattgtaaataaaagtgatttcatcttccaccatcttcttatttatatgcttgactgtcttgcaccagttaatttgtagtagctaaaatgttctgtggttttctgcagtcaactgaaaataatttctctcaaattgaaaggattacttatcttgtcatactattgaacacaaaattaagtgagcctttaaagaaagctactgtgtgaacctcatcaaccatctcatgattatctttaatagagtccagaggaagtatttatggcaatccggaatcctctggagtggcactgcaagcaaatggatcattttgttggactcaatttcaactctaactttaactttgcattggttggacaccttttaaaaggtaaaaaagccttatttagaatatttttatgaagtactattaagaaaccagaagtaatttgaataagtgattacttgaaataaattgaagtaagttagcccttatgtcttactttaaatgcaaactaggccaggcgtggtggctcacgtctgtaataccaacattttgggaggctgaggcaggaggatcacttgaggctaggagtttgaggccagcctgggcaacatagtgagacttcatctctacagaaaatttaaaaattagccaggcatggtggcacgtgcttgtagtcccagctacttaggaggcatagatggaaggattgcttgagcctgggaagtcgaggctacagtgagccgtgatcacaccactgcactcagccctaggtaacagagtgagactttgtctcaaaaaataaataaataaatgcaaactatatctgtcttaatgagttgtgttttattcaatatgtgttttaagagagcttcatttccaattcaaatatcaaatttgcctgaaaaacaaaagagtttattctggctgggtatggtggctcacacctgtagtcccagcactctgggaggccaaagcagaaggatctcttgagcttaggagttcgagaccagcctgggcaatatggtgaaaccccctttctacaaaaaataaaaacattagccaggtgcggtggcacatgcctatagtgccagctacttgggatgctgaggaaggagaatcacttgagcccaggaggtcaaggctgcagtgggccatgatcgtgccactgcactccagcctgggtgacagagtgagaccctgcctttaaaaaaaaaaaaaaaaaagtgttgattcttacaaaaacctacatactgagtctgataatagctatattaatagtaacaatacctaagtatcttactgattttcaaaatgaaacagactgcaaatcactaagtgttatttgaataatttatattagaaaatgttaagagatttgatcacagattttcttcaacttgtttatagtttattgttgattaatactattattttataccattgtacatcacctttctggcaccctattctcacccctttctatattgcttatagccagtgatctccagctattcctcagagcccgctcattcacttcctaacctggttttactccccgttgctgacttcacagcttgttaactttggttcattaacatggggcagtcatggccagagactgcagttaataagaacagcatgtagtggtgggtcagaagcaaagcaggataaagtaagacctgggataaggagctggcatgaaccccagtggtctcagaagtggatttggccacaatagagattcaagctatagcttgagtcaacaattttgtattaatttaaatcataggcttgagggaccatggagattctcccagtttttatgagagagagagagatatgcatacacccactattgtgaatgtatgcatttgatttcactttcttatgaaatttctacaaaaaatattgacagtgttaatctctaaggtcaatggggatttctcaaaaaatactaccttactaaaggataccaagataagtaattgtaactgggctaataaagtgcttaattattctttatatctaaaagaataccaggctgggtgcagcggctcatgcctgtaatcccaacactttgggaggctgaggcaggtggattgcttgaggccaagagttcaagaccagcctggccaacatggtgaaacccctgcttgaaggcaggagttcaagaccagcctggccaacacggtgaaaccccatctctactaaaaatacaaaaattaggcaggtgaggtggtgcaaacctgtagtttcagccactcaggaggctgaggcacaagaatcgcttgaacctgggaggcagaggttgcagtgagccaagatcctaccactgcactccagcctttgtgacagagtgacactct

SEQ ID NO: 716 - DNA, 4043 bp, Homo sapiens
agaggtacgggaagtggcctgatccctgcttccatacttcactcctccatccatccttccctccctcttcccctccagctaaatggacaattctagccaacattgagtcactcaataagtctcaacagtgggtgtgtttgctgagattgtccagcagttgagcagtttggtctcacctccctcgctagttgagaccaaaaagagacaaataactttttcatggtctttgaaacataatgcttatttcgtggtcaatggctttaaaaaaatctgtttcttgttttcttcaacaaactcactagttttcccttaactgatattgtaaaaattaaagtaatcttgaaaatgttttgacaaaagtaaaattaaagggacatcttttcttaaaaaaaaaaatgtttttgtaaaagaaccctattttcaaatgaaatcttaaggagaattataatacatagatttttttttttaatctctgtgctgctttagggaatagaagatctgaaagactatcatgttttttaattttcctcttcctggagtactgtagagttctagggaatattatattctacacatttttggtacttaatcttatacataattaattattctcattcacatatgcatgttttaccttcccaaatggctattcttggaaagtaggagttatatttcctttccttgcagagttgttagtcagggaagaagacctcagcagatgcttgttcaaaaaattaattcttacttgtttgtttgtttgtttgtttgttttttgtagggtacaggcatccttcacctgctattgttgcaagaacagtcagaattttacatacactactaactctggttaacaaacacagaaattgtgacaaatttgaagtgaatacacagagcgtggcctacttagcaggtaaaaacacaaaataaacaaaattaatcttgctacatctatatataaggatcacccaaaaagtacaaatacctataggttttttggcggttgcgtggcagagcagaaagttcacagtctagtcctttagtggtggttacaattttgagagttttgccagaacatttttctgtaggaaaaaatttaattcccattaaaatctgaaatgtgttcccttggtcatctttggttcaagacactacagtggctctctgttatctgtcataaaatctgaatgcttcagtctagcaccctgggtccttaaatagccctctcagttctgttatctttctctaaatttcatgagcctcattttttattaccactccaaatggatgagctattttaagctaatctacttgccatctcctacaagcaactgcctcttcaatattcattccttatgtcattttatctggagtatctgccctatccccaccattccattaaagcttcctatttgctcttatctgatttttgtttctctactcagcaacacttagcacttatgtacaatacaattcttgaacatagttgtttgatagaaagtgctgattctcagtttcacagacttgtatttgttcaacttttttgtttgaaccgtatcatcttgagcaaatcatttaacatctcagtattttttctcattcagcttaataatacctgccctgcctactttgtgtttgttaaagatcaaatgtatattaaagaacttggaaaataaaagatgcttattaaatctctctgtatatttcacatttatgtagtcttccaaaatatgtgcacatttaacaggtactatgctctttaggagactgtaagaagttcatcctgttttaagtcacacttgtgatttgttaaattttttaacctgccaccgttttccttttagctttacttacagtgtctgaagaagttcgaagtcgctgcagcctaaaacatagaaagtcacttcttcttactgatatttcaatggaaaatgttcctatggatacatatcccattcatcatggtgacccttcctataggtaagtggatttactctcctataattacataatcataatcaagtttcaattttccaactaatggaggcaagcagcagagtaatctagaaggtaacatgggagaaatctagagatggcctaggaagagtaagtgaaactcattttataaatgtgtggtattttatgtgggttagtaggaaagttattcttccagtctgattgtgctaatgttaacattagtttgcctctgaagcacagaccaaatgaacaatgaaaagagatgctcttgaaaatattaggttgcaggggaagggcctggggaaaaaaactaacgcgaaatataaacaacacattacgtgcttggatagagaacgaatctatacagatttgtaaaaatacaggcatgctaacacatttgttgtatttactcatatcacacaagttatttaaaagttttctataatgtagacatagatggtaaaaattatatctgctatacatgggtttgggtagtatatttttcagtataatttagagaaatttcatgaaaatggcatcattgggggatttttctgtattttcaattaaataaaaatatctttaaggtttagggacagtgttgaacacagaaaagttatcttctgttcgcaaaactcgtatcattccatttatcaacatcctgctttttgataaaaagacttcaacaatttccttaagattctaacaatgtacgcaaaaatttttcaaacatggtattcaatagtcttactttcgtcagtcccattattatattactttgagatatgccctttttgttatagaaagggtaaaatagtttgcctgtgttcccctgtcaaagtataaattaatatctgattttcttggtttttaaacaattgcctatttagacttaattttttctgatttaaaaaaaatcagtgcaataagttcaaggtcttttatcaacataactacagttaatgtattttatacttgaaaatagctacgagtagattttaagtattctcaccacaaaagataaatatatgaggtaacacatatgttaatttgcttgatttagccattctacaatgtaaacattttatttatttttatttttctttattaattttttttgagacagagtcttgctctgtcgcccaggctggagtgcagtaacacaatctcggctcactacaacctccgcctcctgggttcaagcgattctcctgcctcatcctcccgagtagctgggattacaggcgcgtgccaccatgcccagctaatttttgtatttttgtagagatggggtttcaccatgttgggcaagctggtcttgaactcctgacctcaggtgatccgcctgcctcggcctcccaaagtgttgggattacaggcgtgagccacagcgcccagccaatgtaaacatattttaaaacatcatgttgtacaccaagcttgctcaacccatggcctgcaggccgcacgcagcccaggatggctttgaatgcagcccaacacaaatttgtaaactttcttaaaacattaagtgattttttggggtttttttttttttttaagctcatcaactgtagttagtgttagtgtattttatatgtggcccagtatattcttctaattccagtgtggcccaggaaagctaagagattggacacccctgttgctatacctttttatttgtcagcttttaaaaattgcagtacagatctttttgttcagcatttggtgagtacctactatgtgcaagatactatggcaagaaagttgataattcctagggatacaccaagagtttgtatcctaaagccctttaaagtgcaattttaaaattaattgattgctgttgttaggaaataggacagccacttggaaggagcaaacgatggttgtatttgtcaccatattaattgatttttctctattgttttcatctttcaggacactaaaggagactcagccatggtcctctcccaaaggttctgaaggataccttgcagccacctatccaactgtcggccagaccagtccccgagccaggaaatccatgagcctggacatggggcaac

SEQ ID NO: 717 - DNA, 4045 bp, Homo sapiens
atttgtaaaaatacaggcatgctaacacatttgttgtatttactcatatcacacaagttatttaaaagttttctataatgtagacatagatggtaaaaattatatctgctatacatgggtttgggtagtatatttttcagtataatttagagaaatttcatgaaaatggcatcattgggggatttttctgtattttcaattaaataaaaatatctttaaggtttagggacagtgttgaacacagaaaagttatcttctgttcgcaaaactcgtatcattccatttatcaacatcctgctttttgataaaaagacttcaacaatttccttaagattctaacaatgtacgcaaaaatttttcaaacatggtattcaatagtcttactttcgtcagtcccattattatattactttgagatatgccctttttgttatagaaagggtaaaatagtttgcctgtgttcccctgtcaaagtataaattaatatctgattttcttggtttttaaacaattgcctatttagacttaattttttctgatttaaaaaaaatcagtgcaataagttcaaggtcttttatcaacataactacagttaatgtattttatacttgaaaatagctacgagtagattttaagtattctcaccacaaaagataaatatatgaggtaacacatatgttaatttgcttgatttagccattctacaatgtaaacattttatttatttttatttttctttattaattttttttgagacagagtcttgctctgtcgcccaggctggagtgcagtaacacaatctcggctcactacaacctccgcctcctgggttcaagcgattctcctgcctcatcctcccgagtagctgggattacaggcgcgtgccaccatgcccagctaatttttgtatttttgtagagatggggtttcaccatgttgggcaagctggtcttgaactcctgacctcaggtgatccgcctgcctcggcctcccaaagtgttgggattacaggcgtgagccacagcgcccagccaatgtaaacatattttaaaacatcatgttgtacaccaagcttgctcaacccatggcctgcaggccgcacgcagcccaggatggctttgaatgcagcccaacacaaatttgtaaactttcttaaaacattaagtgattttttggggtttttttttttttttaagctcatcaactgtagttagtgttagtgtattttatatgtggcccagtatattcttctaattccagtgtggcccaggaaagctaagagattggacacccctgttgctatacctttttatttgtcagcttttaaaaattgcagtacagatctttttgttcagcatttggtgagtacctactatgtgcaagatactatggcaagaaagttgataattcctagggatacaccaagagtttgtatcctaaagccctttaaagtgcaattttaaaattaattgattgctgttgttaggaaataggacagccacttggaaggagcaaacgatggttgtatttgtcaccatattaattgatttttctctattgttttcatctttcaggacactaaaggagactcagccatggtcctctcccaaaggttctgaaggataccttgcagccacctatccaactgtcggccagaccagtccccgagccaggaaatccatgagcctggacatggggcaaccttctcaggccaacactaagaagttgcttggttagtttatctaaattatgtagattttttttattatttaaaaaaatagatatttttactcttggaaaattatttgaaatttcaggattatcaaaattttccatgtcagtgtagcaaagtttttgatgccatttaaaagagagtttgatagatcagttaagcattataagttgagatagagaaatgagaatgggaccttgaaacagttttttctgaatcttatactaaatattgtgactctccttattttgttttgcctttgctggccagcagggaatgggactctgagacatattagataaatacctataagaaaggaagagtcttgctgcactcaggggatttaatgatatactgtaatacttcccaaaattatcatctgagagaatatatgaatatggtatgaagctgtaatagtactatttgccgtgctttctttgaaaagacaaaaagacatgcttctcaattaccgaaagaaaataggattcttttttttcttttttcttttcttgatatgaagtcttgttctgttcacccaggctggagtgcagtggcgcaatctcagctcactgcaacctctgcctcccgggctcaagcaattctcctgcctcatcctccctagtagctgggtttacaggcacacgtcaccacatctggctaacttttgtatttttagtagagacagagtttcaccatgttggccaggctagtcttgaactcctgacctcaggtgatacaccctcctcggcctcccaaagtgctgagattacaggcatgagccaccatgcccggccggaagataggattcttgaaattaagattgctcagttacatcaacatttatagaatttttgtctctgagaagtacacctgaaatgctgcgagactcatttccattttagtaactgaaagtaaatgaatgaaaaaacccactaggccaggtgcagtggctcacgcccataatcccagcactttgagggactcaggtgggaggattgctcgagtccaggagttcaagaccagcctgggcaacatgacaaaacccatctctacaaaaaatacaaaacttagctgggcatggtgacgagcacctctagtcccagctacttgggaagatcacttgagcccaggaggtgggggtagcagtaagccaagattgcaccactgcactccagcctgggtgacagagtgggaccccgactccaaacaaacaaacaaacaaaaacactgatcttacatcgctcctcagaggaaatgcagagatgttcttgcattccattgggtaaaattgtaattgttactggaatacattaggatctgtatttcagtagccagcactgaatggttcaacagatttcagttatccatgcaaacatatttaagtatctttaggtattggaaaaatgtttgtgttcataaggaaattagtgaacaaacaacaaattgtaacataaataacgtgccagtaaaccgtgaaagaaatagaaaccatgaatgtgtcaatcacagttactagccacataggtgtgttactgttgtttgagttcccttctgttagtaccttgccataaataatcatttaggagtttcctggttactttgtgttttgtaattctggattttcatgccaatgaagttgtaaatgaaaaactaacctcagaaaaaaatatattgaattcattcaacccatgtactaagtgaaaaagataaggtaactgccctggaagactttgtaatttgtgtccaagacttataatcagccaatcacaacagcaactccaggtgccattaaaatgatatgtcttgatggagaaagctggagatctggggaaattagaagaaaaaaaactgcagagaggagataacatttgggctgtgtcataaagatttaatatatgcttgcaaaatagcaggataagtaggggcatatgtttaagagcagtggggaatagcaagaataaagaaaaggcaggaaagcaactgatgatacatcatggcatcatggggaatggggtaggaaatgagatgagaagaaggactagaactcgattggaaacgactgtatgccatggtaagatatttacccttatcacacattcagctgaggtatttaagtaggagaagaacatgaccaaattttaatttttgccaagtttttctagcagcaatgtggagagacaggaagagatttttagcaagggaaccatttaataaaattgatatagcagtccaagcaaaaaaaatggtgtgggccccgcactaatgcaggagcaatgggagaatggagaagaaccagcaggtttggagctgggc

SEQ ID NO: 718 - DNA, 4046 bp, Homo sapiens
agactaattacttaactgctcatggcttcatcagtgtacatgtgcatgaaacgaagaagccggactagatccctttggactgttaaattatttggccttggtatttatgactattatgaatagttattcatattcttgaggtaatagactttgtatttctcaagtgttaaattgtcagattttattatattggctttaattctggctttaataaaataatactgttggccgggcatggtggctcatgcctgtaatcccagcactctggggagaccaaggcaggtggattgcttgagcccaggagttcgagaccagcctgggcaacatggagaaaccctgtctctactaaaaatagaaaaatcagctgggtgtggtagtgtgtgcctgtagtcccagctactggggaggctgatgtgggaggatcacctgagcccaggatgtggaggttgcagtgagctgaaatcatatcactgcactccagcctgggccacagagcgagaccctatcaaaagaaaaaaatagtgttaatacatgattacatgattagagaaactaaaagccaaatgggagataatgctacttgctatttttgaagcatctcccagtgtatctggtttttagtattttcaggcatgcatatctttttttcaaagcttaaaaaattaaaatcaaactctgctttcttcctaagcttggaaattactcatgtattaatgagtagttcttggcaccagcagcgtttcttaaactgaaaagactggtcagacatagttgacctttgctactgaataatgcctaccattgcatttattatcagttatcatatttgttgatttacctccagtgtagtttggtttacctccagtgtacagaatacaatctcagtttaatttgcaccagtaaggtgcaacctatcctgaaacagaaagctatgggaacaaaaccctttgagaagatggaaaataaaggaaagaaactgctccagggatgtattagagctttctttgagtcctcagtgaaagcttaaacactttatgtccaaacattttctttttagtgtattcccatttatagacactgtagttaatgaacttgcatattcttaacttttgtttataggaacaaggaaaagttttgatcacttgatatcagacacaaaggctcctaaaaggcaagaaatggaatcagggatcacaacaccccccaaaatgaggagagtagcagaaactgattatgaaatgggtgagaaacaaagtattgatctagatcattgaaaataaggtgggagagtacatgaaagtcatgtttattttccagccatttcttagaatctttagagtgaaatatagaaacgtttgccatttctcaaaagataaactctaccattcaagacagttatcttgaagcttgtgtaaaaattaatcatatatattatatacagcattgtaaataggtagccaaaacttttgtgtaggcgaatagtaattctctatgatgtttatgttagtattttaagtatctactaaagaaagctgttgaattttagaagtaacattgaaatagttaggtgaagtgattatccaggtgtttgatcacgttaattccctatcttgctgcagaaactcagaggatttcctcatcacaacagcacccacatttacgtaaagtttcagtgtctgaatcaaatgttctcttggatgaagaagtacttactgatccgaagatccaggcgctgcttcttactgttctagtaaggatttcccctttttgagtcccccaccctcaaatttttattccagtctacttttaggaggcccttaaatattaaaaacatgaataggatacagtcttctacttctcacccaaacagataacaattcagccacaaagtaaaaatgttgtgtgtttacttttttgcatcttggcaggctacactggtaaaatataccacagatgagtttgatcaacgaattctttatgaatacttagcagaggccagtgttgtgtttcccaaagtctttcctgttgtgtaagtatctccttttgattttaattcaccttcgtgcctgtctttaagttaaatgcttacccagtaatgtgcactggttgcaaagagggcaaaatgagatattgtgatagtgattttagctttgagacagtaggtttaatgagggttaagattagttttgacctactagatctattagaaagtttataaggaaagacttttaaaaaatctggttgatttatttaagtggtttattttgatgatcattgctcattttcctcacttagaagcaaactattagactgctatatctaaatcagcatatctgttttggtttactttttagtagagcttttgtatttatccacagctgagtgaaaacaaaattgaccttctgtttaggaggtgaattgtttactctctcttaaggactaaaaaatattaacctcaaagtgttcaaatttaaatagttcaaataaattcttttcctgatctaggccttctatatcatgtcattattttctttttttaatctcatgttagaattttagagagttagaactcagttatttttattaatggagtgtagccgggttagaaataatttttttcctaagtttcagttggatcatgtatttcactccctctaaactattttgctttccctatttgatctgactcagcattttaaaagcactgattaacattaaatttaatttttttctttttgttttgcacagatcctaaatttagttttaacttcctaagcgcatgtcagtatacaacagatggaaatagtactaaaacatgctaagtagcagacagagccaaccttgtcttaagcaaacatttaccgtatatggttacacatggttatatgacactaccagttgtttgttttcacaatttcttccctggtgactaaaaacaaaagacaaacaaaaacagacacacacacatgttcattgtagaaaatttggaaaatgaagaaatgccccagaaagtaaaaagcactcatctccctttaattttggcacattattctggggaatgtatattatgttttccactacatattttcatttaattttcctctaaaatgttcctctgttgactttttttttcttttaggcataatttgttggactctaagatcaacaccctgttatcattgtgccaagatccaaatttgttaaatccaatccatggaattgtgcagagtgtggtgtaccatgaagaatccccaccacaataccaaacatcttacctgcaaagtaaataaatgtatctggagaaggatggttgatgaacttgctaacatgcgcgctgttgtagaatgcactgactacagaattctttataagggatagacttgttcatacttttatttccatattccatttttttactctctcaactgtatgtccaatgtaactggttgacaactttttatgctgagtatattttaagtaggttttagttgctttgacactcattctaaaaacatgttttcaacatgtacatagggtttatatatcatcagctatatgacttatttaatttctgttacaattaaaagataccttgcttgttataagagtaaaatttgatttgttgcaggttttggttttaatggcttgtggcggtttgcaggaccgttttcaaaggtaagaaaatatatttttctctaacttttggcaaaatgaaggtttctgttcaaattagtatgcctgctttaagaacacacaatgtgctgaaaaccagaaaaataattcacaataaacacatatgttacttttataaaaagtttctcatcacaaggtttttttccaggaggcagcatggtgttggggtgtgtgtattcacttttacaaacaaagtcaacttatgatcaatttttcagaagagtatgataaacctctgtgatacttttctgccacagtcccttgtgtatttgataatcttaatgcacacagttagatatcttatgactagcaaggagcattaccatggttaaaatctatttcatgaaaacatt

SEQ ID NO: 719 - DNA, 4046 bp, Homo sapiens
tcattgtgccaagatccaaatttgttaaatccaatccatggaattgtgcagagtgtggtgtaccatgaagaatccccaccacaataccaaacatcttacctgcaaagtaaataaatgtatctggagaaggatggttgatgaacttgctaacatgcgcgctgttgtagaatgcactgactacagaattctttataagggatagacttgttcatacttttatttccatattccatttttttactctctcaactgtatgtccaatgtaactggttgacaactttttatgctgagtatattttaagtaggttttagttgctttgacactcattctaaaaacatgttttcaacatgtacatagggtttatatatcatcagctatatgacttatttaatttctgttacaattaaaagataccttgcttgttataagagtaaaatttgatttgttgcaggttttggttttaatggcttgtggcggtttgcaggaccgttttcaaaggtaagaaaatatatttttctctaacttttggcaaaatgaaggtttctgttcaaattagtatgcctgctttaagaacacacaatgtgctgaaaaccagaaaaataattcacaataaacacatatgttacttttataaaaagtttctcatcacaaggtttttttccaggaggcagcatggtgttggggtgtgtgtattcacttttacaaacaaagtcaacttatgatcaatttttcagaagagtatgataaacctctgtgatacttttctgccacagtcccttgtgtatttgataatcttaatgcacacagttagatatcttatgactagcaaggagcattaccatggttaaaatctatttcatgaaaacatttttatttccagcctattagattagattaatttctctctggatttgtcctcatttgctcttattcagtttttttgtttgtttgtttgttttgtgagacggagtctcactctgtctccaggctggagtgcagtggcgcaatcttggctcactgcaacctctgcctcccaggttcaagcgattctcctgcctcagtctcccgagtagctgagactacaggcatgcagcaccacgcccagctaatttttgtatttttagtagaaacagggtttcaccatgttggccaggatggtcttgatctcttgacctcgtgatctgcccacctcggcctcccaaagtgctgggattacaggcatgagccaccgcacctggcctcagtttgttttttgattggcattagtttatgtagtgctacataagatgtatatgatcattttctctgtatgtgggctctctccaaattgatcaaagttccttgaagacagggtttctgtttcttccttaaacagttcctggtgcagtgttttagatacagggggtgctaaatcaatatgaattgtataaaccttgttccagtttttaagaattgggtattttatttatttcctttcactattacttgaatatctgtcaacatgcaaaggttgtcacttaaaaaatgggcctgaagttacagaaataagtatatcatacagaagtttttgcatttggattgccagtaaccctctgagccctttacagtgtctagtgagtggaatctaaatggcagctggaatgatgatgctctgctcattttctctgttttggaaaattggctagacatcattcctggtgattgtattgtctcagtattacattcagtctgtcttgtgcatggctttcagaaaatgcaggttcatctggaagctttaagctgaatagaactccctgttgtaagtcctatggtagtctataaatattactccactccccttttttaatgataagtaatacaaaggaagaaaaatagtaaattaagtccaaacaaaattaatatttttggcttcagatggggatttacttaaaaaaaaggaactaaaataatttcctattttccattacagcaaacacaaattccagactatgctgagcttattgttaagtttcttgatgccttgattgacacgtacctgcctggaattgatgaagaaaccagtgaagaatccctcctgactcccacatctccttaccctcctgcactgcagagccagcttagtatcactgccaaccttaacctttctaattccatgacctcacttgcaacttcccagcattccccaggtcagtaaatgtgatctttatatgactttgagcaacaatataagacaccaacattaggaattcccttgtgatcagtttatagcaaattttgctcctttttcttatgagattcaccttacatttcttctttaccttgtaactgacttgacttttgttattctatgaagctttctactttcaaacaagttgtacataagacagtaaaatgttaaaatgtccacatgatattccaaggttgacaagtttgtagagtttgggcaggaagaggaacttaaaacacattattctgtaagtgaacagaactataatttatttactagatatactaacattgccctaagggcctctttctctgtctctgatacagcatactatatcaaaaaaaaaaaaaaaaaaaaaaaaaaagaagaagaagaagaaacacaaaatctattaggtacctcactttcctgctgccagcaataactcaaccatccatagaccatcctgaaaatctggaagtaaataaataatcaaacaaaaaattcatctcaagaaaataacatcttaaagcccataagcatatatataccaattcgtaatgcaacttagatttgaatacactgagaaatactaatagctaatagctccagtgggactgagataaacaaggtgggagaaatggcaaacctacagaactctggacttattcagtgtcatagtgaatggtttcatacaactctggttgaccctggaggtgctattcattatagaacttaaactattgtgtgtgttattatgacagtgagtaatgaaggaaagcttttgttatggttgtgttttctatttagaaagatattcttctaaaatggttaaaaataaaagaaactttagttgtttaacgttccattatctgaaaagttcacttatgaaacacatcattgtataaggaaaagttactatatatagttcttttaagtgttagcataaatttaaaaaaaatccaatgacataactattctgtgatattcaagatcaataaatagaattcccagtttatgatctcagttttgcatgaacatttcaacttatgtaattttgaaggttctgaagaatttggcaatacccaattcatattataaactattatgtaattaactatattctattaaattctgcttaacaacaaagctttggtcagcagaggaaacaaattttatttccacatttgtcagtcgccttacaagtaatccttttttcccccagaagtaagagaagtctaactttttttcccatgtaacaaggtttgtttgccctctgccactaactctctagtacagtgtttctccacgtgtgatcccagaccagcagcatcatttgggagcttgttagaaatgcagatgctgtagtttcacctcagatctgcacaaaaaactcccaagtagagcccagccagcagtcagtgtgttaataaataccccaggcgattcttacacacactagaattggagaagcactgccctggggtctgcttctggtcttgcccattatcagcatttcagctgtgaaggccagggcaaaacttaaaatttactttttttacagatactgcagccactgaattccttcctgcttccccgctgataaaccttttagcattttggagctagggaaccatacaggtaatttagttttaggctcacaatattgtgtacattggggagactgagttttagaagagctgggttaactgctttatacagttcttatctagaaccaaggccaggcccttttgtactacattcattgccttccatggctgttgtctgtttgattatctatctactttcccttctccttctttatttccttgtttttgt

SEQ ID NO: 720 - DNA, 4038 bp, Homo sapiens
aatgtaaacacacttgaaaatccatcatctacatcaagaaacagaacattaccagcatcccaagaagccatcctcatgcccccttaagtcactacttccgcaagggtgaccacagtcctgttacccaatttgtaatctttcctaatgtgatagataaaaataaaaatcttattttagtttctggttacttttctgaagttactgcttagattatttataatattaattggggtggggtgcagtggctcatgcttgtaatcccagaactttgagaggccaagatggaaggattgcttgagaccaggagttcaagaccagccttggcaacatagtgagactctatctctagacagaattttaaaattagctgggcatggtggcatgcacctgtagtcctagctgtttgggaggctgaggcgagaggatagcttgagcctggaagttcaaggttatagtgagctatgatcacaccactgcactgcagcctgtgcaacagggcaagaccctgtctctaaataaataatcaatcattgttaggcccaggttttggaggtttaatctcctcctcaagagaaataaatggcatctgtttaaggttgcagaatgtgaaatgacttggcatagctgaaaagaagcaaagattctacagtatgacctttgtgatatattattttctcagtaaatagtttctttgggataggcactgtgattaaaaaaataaaagcatcttgagttttctttgaagtgacaaatttgctggaaagatcagtactttctgctgctggagagtatattctgtttataaacatgaatgaggatgtgaataaggctagaagatgacctctgctggaagtttctggtatgatttggaggaaggagcactagtcttccctggtggctgctagcctttcatttagttcaagcctgccagcctctagcttttccttgcaacttgtcttttcatttttcttgtgctattttctgctatgatagcaaactttgcataacaaaatgtgaagttttccatgtgacattaacttagtaaacattttagcaattgactattaaaatgaaatgtgcataaacaatttgccaggttgtatcttatcacaaatatagtcatgtgctgcataacaacattgcagtcaacaacagaacacatatagacagtggtcccgaaagattataatactgtatttttactgtaccttttctgtgttagatatacaaatagttagcattgtgttacaactacataaagtacacaatatggtaacctgctgtacaggtttgttgcctgggagaaacaggctataccatatagccttggtgtgtagtaggctatgctatctaagttcatgtaagtacactccacaatatttgcacagacaaaatcgcctaatgattgtttcctagaatgtgtccccgttgttaagcgacacatgactgcaatgaaattcagtcctggaaggaaaagaagaagtaactggctgttctctttttctccaggaatcgacaaggagaacgttgaactctcccctaccactggccactgtaacagtggacgaactcgccacggatccgcaagccaagtgcagaagcaaagaagcgctggcagtttcaaacgtaatagcattaagaagatcgtgtgaagcttgcttgctttcttttttaaaatcaacttaacatgggctcttcactagtgaccccttccctgtccttgccctttccccccatgttgtaatgctgcacttcctgttttataatgaacccatccggtttgccatgttgccagatgatcaactcttcgaagccttgcctaaatttaatgctgccttttctttaactttttttcttctacttttggcgtgtatctggtatatgtaagtgttcagaacaactgcaaagaaagtgggaggtcaggaaacttttaactgagaaatctcaattgtaagagaggatgaattcttgaatactgctactactggccagtgatgaaagccatttgcacagagctctgccttctgtggttttcccttcttcatcctacagagtaaagtgttagtcctatttatacatttttcaagatacaagtttatgagagaaatagtattataaccccagtatgtttaatcttttagctgtggactttttttttaaccgtacaaaactgaaagaaccatagaggtcaagcctcagtgacttgacaccataaagccacagacaaggtacttgggggggagggcagggaaatttcatattttatagtggattcttaagaaatactaacacttgagtattagcaataattacaggaaaataagtgcgaccacatatatcttaacattactgaattaaaactatggcttctaagtccttatccaaactcagtcatccaaactagtttatttttttctccagttgattatcttttaatttttaattttgctaaaggtggtttttttgtgttttgttttttgtaaaccaaaactatactaagtatagtaattatatatatatatatattttttcccctccccctcttctttcctaactaattctgagcagggtaatcagtgaacaaagtgttgaaaattgttcccagaaggtaattttcatagatgtttgcattagctccatagcaaaatggaatggtacgtgacatttagggtagctgatatttttattttgttaaataatttccaagaatagagtatggtgtatattataaatttctttgataagatgtattttgaatgtcttttaatcttcctcctcctctccaaaaaaatcagaaacctctttaagaaaacatgtaggttatatatgctagaattgcatttaatcactgtgaaaagactggtcagcctgcattagtatgacagtaggggggctgttagaattgctgctatactggtggtatggattatcatggcattggaattttcatagtaatgcagatccaatttctttgtggtacctgcagtttacaaaataatttgacttcagtgagcatattggtatctggatgttccaatttagaactaaaccatatttattacaaaaagatattaatccctctactcccaggttccctttatatgttaagatataatggctttgaggggggaaaaaataaacctaggggagaggggagtttcctgtagtgctgtttcattagaggatttcagtaaattaaattccacagctaattcaataaataatggtacatttaagtgttctgattttaataatatatttcacatttatccacacagtaacaatgtaatatgttaatgtaaataaaattggttttgatactcagaaataacaagaatttaattttttaaatttgtttacagtcctgggaaaagtaagaattatttgccaaaataagaggaaagaaaaccttagtattattaatgagtttaccatagaattgttggaaatactgaagacaggtgcaatttactaaacttttgtttttaaactattgtagaggctgcattagaagaaaatgtttataatgacagagcaactatgactatataaaaaagctgaaattagaactgtgtttagaaatagatcagtaacccagtgccaaggatgccaagctgccaccatggtcttggctctcccacaacccagtgtttctggggtaagtttcacagtttctaggccctggaatagcaggcagtgtaagcctttgataactttagttcgatgtttttcttgtttttgtttgttggtttggtgcatatgatagtgggtgttatgctattttgctcttcccatcaaaataaagaaacttccagaggtttactgttaaaaatactgatatttccataaacgggtttaccaagggtgtagtatttcataccgcctgaaatgatcagcattggcacaaatcaaaattcagccgcctttgaaatgcaaaaatacctttgactagtaagtacatcctaggagtttgaaaacttaactaaggtttaaaatttaccttgtttaaagaacttctgacttttgaggaaaatctag

SEQ ID NO: 721 - DNA, 4065 bp, Homo sapiens
ttctggttacttttctgaagttactgcttagattatttataatattaattggggtggggtgcagtggctcatgcttgtaatcccagaactttgagaggccaagatggaaggattgcttgagaccaggagttcaagaccagccttggcaacatagtgagactctatctctagacagaattttaaaattagctgggcatggtggcatgcacctgtagtcctagctgtttgggaggctgaggcgagaggatagcttgagcctggaagttcaaggttatagtgagctatgatcacaccactgcactgcagcctgtgcaacagggcaagaccctgtctctaaataaataatcaatcattgttaggcccaggttttggaggtttaatctcctcctcaagagaaataaatggcatctgtttaaggttgcagaatgtgaaatgacttggcatagctgaaaagaagcaaagattctacagtatgacctttgtgatatattattttctcagtaaatagtttctttgggataggcactgtgattaaaaaaataaaagcatcttgagttttctttgaagtgacaaatttgctggaaagatcagtactttctgctgctggagagtatattctgtttataaacatgaatgaggatgtgaataaggctagaagatgacctctgctggaagtttctggtatgatttggaggaaggagcactagtcttccctggtggctgctagcctttcatttagttcaagcctgccagcctctagcttttccttgcaacttgtcttttcatttttcttgtgctattttctgctatgatagcaaactttgcataacaaaatgtgaagttttccatgtgacattaacttagtaaacattttagcaattgactattaaaatgaaatgtgcataaacaatttgccaggttgtatcttatcacaaatatagtcatgtgctgcataacaacattgcagtcaacaacagaacacatatagacagtggtcccgaaagattataatactgtatttttactgtaccttttctgtgttagatatacaaatagttagcattgtgttacaactacataaagtacacaatatggtaacctgctgtacaggtttgttgcctgggagaaacaggctataccatatagccttggtgtgtagtaggctatgctatctaagttcatgtaagtacactccacaatatttgcacagacaaaatcgcctaatgattgtttcctagaatgtgtccccgttgttaagcgacacatgactgcaatgaaattcagtcctggaaggaaaagaagaagtaactggctgttctctttttctccaggaatcgacaaggagaacgttgaactctcccctaccactggccactgtaacagtggacgaactcgccacggatccgcaagccaagtgcagaagcaaagaagcgctggcagtttcaaacgtaatagcattaagaagatcgtgtgaagcttgcttgctttcttttttaaaatcaacttaacatgggctcttcactagtgaccccttccctgtccttgccctttccccccatgttgtaatgctgcacttcctgttttataatgaacccatccggtttgccatgttgccagatgatcaactcttcgaagccttgcctaaatttaatgctgccttttctttaactttttttcttctacttttggcgtgtatctggtatatgtaagtgttcagaacaactgcaaagaaagtgggaggtcaggaaacttttaactgagaaatctcaattgtaagagaggatgaattcttgaatactgctactactggccagtgatgaaagccatttgcacagagctctgccttctgtggttttcccttcttcatcctacagagtaaagtgttagtcctatttatacatttttcaagatacaagtttatgagagaaatagtattataaccccagtatgtttaatcttttagctgtggactttttttttaaccgtacaaaactgaaagaaccatagaggtcaagcctcagtgacttgacaccataaagccacagacaaggtacttgggggggagggcagggaaatttcatattttatagtggattcttaagaaatactaacacttgagtattagcaataattacaggaaaataagtgcgaccacatatatcttaacattactgaattaaaactatggcttctaagtccttatccaaactcagtcatccaaactagtttatttttttctccagttgattatcttttaatttttaattttgctaaaggtggtttttttgtgttttgttttttgtaaaccaaaactatactaagtatagtaattatatatatatatatattttttcccctccccctcttctttcctaactaattctgagcagggtaatcagtgaacaaagtgttgaaaattgttcccagaaggtaattttcatagatgtttgcattagctccatagcaaaatggaatggtacgtgacatttagggtagctgatatttttattttgttaaataatttccaagaatagagtatggtgtatattataaatttctttgataagatgtattttgaatgtcttttaatcttcctcctcctctccaaaaaaatcagaaacctctttaagaaaacatgtaggttatatatgctagaattgcatttaatcactgtgaaaagactggtcagcctgcattagtatgacagtaggggggctgttagaattgctgctatactggtggtatggattatcatggcattggaattttcatagtaatgcagatccaatttctttgtggtacctgcagtttacaaaataatttgacttcagtgagcatattggtatctggatgttccaatttagaactaaaccatatttattacaaaaagatattaatccctctactcccaggttccctttatatgttaagatataatggctttgaggggggaaaaaataaacctaggggagaggggagtttcctgtagtgctgtttcattagaggatttcagtaaattaaattccacagctaattcaataaataatggtacatttaagtgttctgattttaataatatatttcacatttatccacacagtaacaatgtaatatgttaatgtaaataaaattggttttgatactcagaaataacaagaatttaattttttaaatttgtttacagtcctgggaaaagtaagaattatttgccaaaataagaggaaagaaaaccttagtattattaatgagtttaccatagaattgttggaaatactgaagacaggtgcaatttactaaacttttgtttttaaactattgtagaggctgcattagaagaaaatgtttataatgacagagcaactatgactatataaaaaagctgaaattagaactgtgtttagaaatagatcagtaacccagtgccaaggatgccaagctgccaccatggtcttggctctcccacaacccagtgtttctggggtaagtttcacagtttctaggccctggaatagcaggcagtgtaagcctttgataactttagttcgatgtttttcttgtttttgtttgttggtttggtgcatatgatagtgggtgttatgctattttgctcttcccatcaaaataaagaaacttccagaggtttactgttaaaaatactgatatttccataaacgggtttaccaagggtgtagtatttcataccgcctgaaatgatcagcattggcacaaatcaaaattcagccgcctttgaaatgcaaaaatacctttgactagtaagtacatcctaggagtttgaaaacttaactaaggtttaaaatttaccttgtttaaagaacttctgacttttgaggaaaatctagctttccaagtaactaaaatgtacatgagataaacctctcaccactatgtgtcccttgagaaatgcaacacttttttagtcttcatacttgtaatctataaaagaaattctgaagtttagaccaagttgcccatttctgcgtaattgacataagttctgttaaaaatattataagtaattcgtttcggtttgtagatgtttcccct

SEQ ID NO: 722 - DNA, 4042 bp, Homo sapiens
ctctatctctagacagaattttaaaattagctgggcatggtggcatgcacctgtagtcctagctgtttgggaggctgaggcgagaggatagcttgagcctggaagttcaaggttatagtgagctatgatcacaccactgcactgcagcctgtgcaacagggcaagaccctgtctctaaataaataatcaatcattgttaggcccaggttttggaggtttaatctcctcctcaagagaaataaatggcatctgtttaaggttgcagaatgtgaaatgacttggcatagctgaaaagaagcaaagattctacagtatgacctttgtgatatattattttctcagtaaatagtttctttgggataggcactgtgattaaaaaaataaaagcatcttgagttttctttgaagtgacaaatttgctggaaagatcagtactttctgctgctggagagtatattctgtttataaacatgaatgaggatgtgaataaggctagaagatgacctctgctggaagtttctggtatgatttggaggaaggagcactagtcttccctggtggctgctagcctttcatttagttcaagcctgccagcctctagcttttccttgcaacttgtcttttcatttttcttgtgctattttctgctatgatagcaaactttgcataacaaaatgtgaagttttccatgtgacattaacttagtaaacattttagcaattgactattaaaatgaaatgtgcataaacaatttgccaggttgtatcttatcacaaatatagtcatgtgctgcataacaacattgcagtcaacaacagaacacatatagacagtggtcccgaaagattataatactgtatttttactgtaccttttctgtgttagatatacaaatagttagcattgtgttacaactacataaagtacacaatatggtaacctgctgtacaggtttgttgcctgggagaaacaggctataccatatagccttggtgtgtagtaggctatgctatctaagttcatgtaagtacactccacaatatttgcacagacaaaatcgcctaatgattgtttcctagaatgtgtccccgttgttaagcgacacatgactgcaatgaaattcagtcctggaaggaaaagaagaagtaactggctgttctctttttctccaggaatcgacaaggagaacgttgaactctcccctaccactggccactgtaacagtggacgaactcgccacggatccgcaagccaagtgcagaagcaaagaagcgctggcagtttcaaacgtaatagcattaagaagatcgtgtgaagcttgcttgctttcttttttaaaatcaacttaacatgggctcttcactagtgaccccttccctgtccttgccctttccccccatgttgtaatgctgcacttcctgttttataatgaacccatccggtttgccatgttgccagatgatcaactcttcgaagccttgcctaaatttaatgctgccttttctttaactttttttcttctacttttggcgtgtatctggtatatgtaagtgttcagaacaactgcaaagaaagtgggaggtcaggaaacttttaactgagaaatctcaattgtaagagaggatgaattcttgaatactgctactactggccagtgatgaaagccatttgcacagagctctgccttctgtggttttcccttcttcatcctacagagtaaagtgttagtcctatttatacatttttcaagatacaagtttatgagagaaatagtattataaccccagtatgtttaatcttttagctgtggactttttttttaaccgtacaaaactgaaagaaccatagaggtcaagcctcagtgacttgacaccataaagccacagacaaggtacttgggggggagggcagggaaatttcatattttatagtggattcttaagaaatactaacacttgagtattagcaataattacaggaaaataagtgcgaccacatatatcttaacattactgaattaaaactatggcttctaagtccttatccaaactcagtcatccaaactagtttatttttttctccagttgattatcttttaatttttaattttgctaaaggtggtttttttgtgttttgttttttgtaaaccaaaactatactaagtatagtaattatatatatatatatattttttcccctccccctcttctttcctaactaattctgagcagggtaatcagtgaacaaagtgttgaaaattgttcccagaaggtaattttcatagatgtttgcattagctccatagcaaaatggaatggtacgtgacatttagggtagctgatatttttattttgttaaataatttccaagaatagagtatggtgtatattataaatttctttgataagatgtattttgaatgtcttttaatcttcctcctcctctccaaaaaaatcagaaacctctttaagaaaacatgtaggttatatatgctagaattgcatttaatcactgtgaaaagactggtcagcctgcattagtatgacagtaggggggctgttagaattgctgctatactggtggtatggattatcatggcattggaattttcatagtaatgcagatccaatttctttgtggtacctgcagtttacaaaataatttgacttcagtgagcatattggtatctggatgttccaatttagaactaaaccatatttattacaaaaagatattaatccctctactcccaggttccctttatatgttaagatataatggctttgaggggggaaaaaataaacctaggggagaggggagtttcctgtagtgctgtttcattagaggatttcagtaaattaaattccacagctaattcaataaataatggtacatttaagtgttctgattttaataatatatttcacatttatccacacagtaacaatgtaatatgttaatgtaaataaaattggttttgatactcagaaataacaagaatttaattttttaaatttgtttacagtcctgggaaaagtaagaattatttgccaaaataagaggaaagaaaaccttagtattattaatgagtttaccatagaattgttggaaatactgaagacaggtgcaatttactaaacttttgtttttaaactattgtagaggctgcattagaagaaaatgtttataatgacagagcaactatgactatataaaaaagctgaaattagaactgtgtttagaaatagatcagtaacccagtgccaaggatgccaagctgccaccatggtcttggctctcccacaacccagtgtttctggggtaagtttcacagtttctaggccctggaatagcaggcagtgtaagcctttgataactttagttcgatgtttttcttgtttttgtttgttggtttggtgcatatgatagtgggtgttatgctattttgctcttcccatcaaaataaagaaacttccagaggtttactgttaaaaatactgatatttccataaacgggtttaccaagggtgtagtatttcataccgcctgaaatgatcagcattggcacaaatcaaaattcagccgcctttgaaatgcaaaaatacctttgactagtaagtacatcctaggagtttgaaaacttaactaaggtttaaaatttaccttgtttaaagaacttctgacttttgaggaaaatctagctttccaagtaactaaaatgtacatgagataaacctctcaccactatgtgtcccttgagaaatgcaacacttttttagtcttcatacttgtaatctataaaagaaattctgaagtttagaccaagttgcccatttctgcgtaattgacataagttctgttaaaaatattataagtaattcgtttcggtttgtagatgtttcccctgacttgttaaagaggaaaccaggaactcagtcatgtttttgtcctggataatctacctgttatgccagtactcccatccgaggggcatgcccttagttgcccagatggagatgcagttcagtagatttggggcaaa

SEQ ID NO: 723 - DNA, 4052 bp, Homo sapiens
ggctgaggcgagaggatagcttgagcctggaagttcaaggttatagtgagctatgatcacaccactgcactgcagcctgtgcaacagggcaagaccctgtctctaaataaataatcaatcattgttaggcccaggttttggaggtttaatctcctcctcaagagaaataaatggcatctgtttaaggttgcagaatgtgaaatgacttggcatagctgaaaagaagcaaagattctacagtatgacctttgtgatatattattttctcagtaaatagtttctttgggataggcactgtgattaaaaaaataaaagcatcttgagttttctttgaagtgacaaatttgctggaaagatcagtactttctgctgctggagagtatattctgtttataaacatgaatgaggatgtgaataaggctagaagatgacctctgctggaagtttctggtatgatttggaggaaggagcactagtcttccctggtggctgctagcctttcatttagttcaagcctgccagcctctagcttttccttgcaacttgtcttttcatttttcttgtgctattttctgctatgatagcaaactttgcataacaaaatgtgaagttttccatgtgacattaacttagtaaacattttagcaattgactattaaaatgaaatgtgcataaacaatttgccaggttgtatcttatcacaaatatagtcatgtgctgcataacaacattgcagtcaacaacagaacacatatagacagtggtcccgaaagattataatactgtatttttactgtaccttttctgtgttagatatacaaatagttagcattgtgttacaactacataaagtacacaatatggtaacctgctgtacaggtttgttgcctgggagaaacaggctataccatatagccttggtgtgtagtaggctatgctatctaagttcatgtaagtacactccacaatatttgcacagacaaaatcgcctaatgattgtttcctagaatgtgtccccgttgttaagcgacacatgactgcaatgaaattcagtcctggaaggaaaagaagaagtaactggctgttctctttttctccaggaatcgacaaggagaacgttgaactctcccctaccactggccactgtaacagtggacgaactcgccacggatccgcaagccaagtgcagaagcaaagaagcgctggcagtttcaaacgtaatagcattaagaagatcgtgtgaagcttgcttgctttcttttttaaaatcaacttaacatgggctcttcactagtgaccccttccctgtccttgccctttccccccatgttgtaatgctgcacttcctgttttataatgaacccatccggtttgccatgttgccagatgatcaactcttcgaagccttgcctaaatttaatgctgccttttctttaactttttttcttctacttttggcgtgtatctggtatatgtaagtgttcagaacaactgcaaagaaagtgggaggtcaggaaacttttaactgagaaatctcaattgtaagagaggatgaattcttgaatactgctactactggccagtgatgaaagccatttgcacagagctctgccttctgtggttttcccttcttcatcctacagagtaaagtgttagtcctatttatacatttttcaagatacaagtttatgagagaaatagtattataaccccagtatgtttaatcttttagctgtggactttttttttaaccgtacaaaactgaaagaaccatagaggtcaagcctcagtgacttgacaccataaagccacagacaaggtacttgggggggagggcagggaaatttcatattttatagtggattcttaagaaatactaacacttgagtattagcaataattacaggaaaataagtgcgaccacatatatcttaacattactgaattaaaactatggcttctaagtccttatccaaactcagtcatccaaactagtttatttttttctccagttgattatcttttaatttttaattttgctaaaggtggtttttttgtgttttgttttttgtaaaccaaaactatactaagtatagtaattatatatatatatatattttttcccctccccctcttctttcctaactaattctgagcagggtaatcagtgaacaaagtgttgaaaattgttcccagaaggtaattttcatagatgtttgcattagctccatagcaaaatggaatggtacgtgacatttagggtagctgatatttttattttgttaaataatttccaagaatagagtatggtgtatattataaatttctttgataagatgtattttgaatgtcttttaatcttcctcctcctctccaaaaaaatcagaaacctctttaagaaaacatgtaggttatatatgctagaattgcatttaatcactgtgaaaagactggtcagcctgcattagtatgacagtaggggggctgttagaattgctgctatactggtggtatggattatcatggcattggaattttcatagtaatgcagatccaatttctttgtggtacctgcagtttacaaaataatttgacttcagtgagcatattggtatctggatgttccaatttagaactaaaccatatttattacaaaaagatattaatccctctactcccaggttccctttatatgttaagatataatggctttgaggggggaaaaaataaacctaggggagaggggagtttcctgtagtgctgtttcattagaggatttcagtaaattaaattccacagctaattcaataaataatggtacatttaagtgttctgattttaataatatatttcacatttatccacacagtaacaatgtaatatgttaatgtaaataaaattggttttgatactcagaaataacaagaatttaattttttaaatttgtttacagtcctgggaaaagtaagaattatttgccaaaataagaggaaagaaaaccttagtattattaatgagtttaccatagaattgttggaaatactgaagacaggtgcaatttactaaacttttgtttttaaactattgtagaggctgcattagaagaaaatgtttataatgacagagcaactatgactatataaaaaagctgaaattagaactgtgtttagaaatagatcagtaacccagtgccaaggatgccaagctgccaccatggtcttggctctcccacaacccagtgtttctggggtaagtttcacagtttctaggccctggaatagcaggcagtgtaagcctttgataactttagttcgatgtttttcttgtttttgtttgttggtttggtgcatatgatagtgggtgttatgctattttgctcttcccatcaaaataaagaaacttccagaggtttactgttaaaaatactgatatttccataaacgggtttaccaagggtgtagtatttcataccgcctgaaatgatcagcattggcacaaatcaaaattcagccgcctttgaaatgcaaaaatacctttgactagtaagtacatcctaggagtttgaaaacttaactaaggtttaaaatttaccttgtttaaagaacttctgacttttgaggaaaatctagctttccaagtaactaaaatgtacatgagataaacctctcaccactatgtgtcccttgagaaatgcaacacttttttagtcttcatacttgtaatctataaaagaaattctgaagtttagaccaagttgcccatttctgcgtaattgacataagttctgttaaaaatattataagtaattcgtttcggtttgtagatgtttcccctgacttgttaaagaggaaaccaggaactcagtcatgtttttgtcctggataatctacctgttatgccagtactcccatccgaggggcatgcccttagttgcccagatggagatgcagttcagtagatttggggcaaagtggctacagctctgtcttccattcactcaacacctgttcatgactgagccaggtgcccaggacacatcctaaacagtcagc

SEQ ID NO: 724 - DNA, 4048 bp, Homo sapiens
gaaaagaagcaaagattctacagtatgacctttgtgatatattattttctcagtaaatagtttctttgggataggcactgtgattaaaaaaataaaagcatcttgagttttctttgaagtgacaaatttgctggaaagatcagtactttctgctgctggagagtatattctgtttataaacatgaatgaggatgtgaataaggctagaagatgacctctgctggaagtttctggtatgatttggaggaaggagcactagtcttccctggtggctgctagcctttcatttagttcaagcctgccagcctctagcttttccttgcaacttgtcttttcatttttcttgtgctattttctgctatgatagcaaactttgcataacaaaatgtgaagttttccatgtgacattaacttagtaaacattttagcaattgactattaaaatgaaatgtgcataaacaatttgccaggttgtatcttatcacaaatatagtcatgtgctgcataacaacattgcagtcaacaacagaacacatatagacagtggtcccgaaagattataatactgtatttttactgtaccttttctgtgttagatatacaaatagttagcattgtgttacaactacataaagtacacaatatggtaacctgctgtacaggtttgttgcctgggagaaacaggctataccatatagccttggtgtgtagtaggctatgctatctaagttcatgtaagtacactccacaatatttgcacagacaaaatcgcctaatgattgtttcctagaatgtgtccccgttgttaagcgacacatgactgcaatgaaattcagtcctggaaggaaaagaagaagtaactggctgttctctttttctccaggaatcgacaaggagaacgttgaactctcccctaccactggccactgtaacagtggacgaactcgccacggatccgcaagccaagtgcagaagcaaagaagcgctggcagtttcaaacgtaatagcattaagaagatcgtgtgaagcttgcttgctttcttttttaaaatcaacttaacatgggctcttcactagtgaccccttccctgtccttgccctttccccccatgttgtaatgctgcacttcctgttttataatgaacccatccggtttgccatgttgccagatgatcaactcttcgaagccttgcctaaatttaatgctgccttttctttaactttttttcttctacttttggcgtgtatctggtatatgtaagtgttcagaacaactgcaaagaaagtgggaggtcaggaaacttttaactgagaaatctcaattgtaagagaggatgaattcttgaatactgctactactggccagtgatgaaagccatttgcacagagctctgccttctgtggttttcccttcttcatcctacagagtaaagtgttagtcctatttatacatttttcaagatacaagtttatgagagaaatagtattataaccccagtatgtttaatcttttagctgtggactttttttttaaccgtacaaaactgaaagaaccatagaggtcaagcctcagtgacttgacaccataaagccacagacaaggtacttgggggggagggcagggaaatttcatattttatagtggattcttaagaaatactaacacttgagtattagcaataattacaggaaaataagtgcgaccacatatatcttaacattactgaattaaaactatggcttctaagtccttatccaaactcagtcatccaaactagtttatttttttctccagttgattatcttttaatttttaattttgctaaaggtggtttttttgtgttttgttttttgtaaaccaaaactatactaagtatagtaattatatatatatatatattttttcccctccccctcttctttcctaactaattctgagcagggtaatcagtgaacaaagtgttgaaaattgttcccagaaggtaattttcatagatgtttgcattagctccatagcaaaatggaatggtacgtgacatttagggtagctgatatttttattttgttaaataatttccaagaatagagtatggtgtatattataaatttctttgataagatgtattttgaatgtcttttaatcttcctcctcctctccaaaaaaatcagaaacctctttaagaaaacatgtaggttatatatgctagaattgcatttaatcactgtgaaaagactggtcagcctgcattagtatgacagtaggggggctgttagaattgctgctatactggtggtatggattatcatggcattggaattttcatagtaatgcagatccaatttctttgtggtacctgcagtttacaaaataatttgacttcagtgagcatattggtatctggatgttccaatttagaactaaaccatatttattacaaaaagatattaatccctctactcccaggttccctttatatgttaagatataatggctttgaggggggaaaaaataaacctaggggagaggggagtttcctgtagtgctgtttcattagaggatttcagtaaattaaattccacagctaattcaataaataatggtacatttaagtgttctgattttaataatatatttcacatttatccacacagtaacaatgtaatatgttaatgtaaataaaattggttttgatactcagaaataacaagaatttaattttttaaatttgtttacagtcctgggaaaagtaagaattatttgccaaaataagaggaaagaaaaccttagtattattaatgagtttaccatagaattgttggaaatactgaagacaggtgcaatttactaaacttttgtttttaaactattgtagaggctgcattagaagaaaatgtttataatgacagagcaactatgactatataaaaaagctgaaattagaactgtgtttagaaatagatcagtaacccagtgccaaggatgccaagctgccaccatggtcttggctctcccacaacccagtgtttctggggtaagtttcacagtttctaggccctggaatagcaggcagtgtaagcctttgataactttagttcgatgtttttcttgtttttgtttgttggtttggtgcatatgatagtgggtgttatgctattttgctcttcccatcaaaataaagaaacttccagaggtttactgttaaaaatactgatatttccataaacgggtttaccaagggtgtagtatttcataccgcctgaaatgatcagcattggcacaaatcaaaattcagccgcctttgaaatgcaaaaatacctttgactagtaagtacatcctaggagtttgaaaacttaactaaggtttaaaatttaccttgtttaaagaacttctgacttttgaggaaaatctagctttccaagtaactaaaatgtacatgagataaacctctcaccactatgtgtcccttgagaaatgcaacacttttttagtcttcatacttgtaatctataaaagaaattctgaagtttagaccaagttgcccatttctgcgtaattgacataagttctgttaaaaatattataagtaattcgtttcggtttgtagatgtttcccctgacttgttaaagaggaaaccaggaactcagtcatgtttttgtcctggataatctacctgttatgccagtactcccatccgaggggcatgcccttagttgcccagatggagatgcagttcagtagatttggggcaaagtggctacagctctgtcttccattcactcaacacctgttcatgactgagccaggtgcccaggacacatcctaaacagtcagcttctatcctgtgtcctagttggggagacagagtgccagccagcaaccctcccaggtttgtaggttttaggggttttcagttttgtttgggttttttgttttttgtttttgtttctacatccttccccgactcccaggcataatgaggcatgtcttactcaatgttatgcaatggatttaggcaaaaattcattcttagtgtcagccacacaat

SEQ ID NO: 725 - DNA, 4049 bp, Homo sapiens
tcccagcattttggaagaccgaggtgggcggattgcttgagatcaggagtttgagaccagcctggtcaatatggtgaaacccctctttattaaaaaattagccgggtatggttgtgcatgcctgtagtcccagctactcagaaggctgaggcaggagaatcacttgaacctcggaggcagaggttgcaatgagcctagattgcaccaatgcactctagcctgggcgacagagcaagactccatgtcaaaaaaaaaaaaaaaaaaggaaatatggaaactgagctgagagaggggaagtggactagggactccctcgcagtggccctgaccctacctgtgccctctctccatcctttgcagacctgtactccggctggttggcagcagcccttggtaccaacctgcaggtccagttctggcacaaaactgtaggcatcctgccctctaactgctcggatatctggcaggttctgaatgtgaaccagatagctttccctggaccagccggcccaagcttcaacagcacagaggaccactccaaatggtgcgtgtccccaaaagggccctggacctgcgtgggtgacatgaatcggaaccagggagaggagcaacggggtgggggcacactgtgtgcccagctgccagccctctggaaagccttccagccgctggtgaagaactaccagccctgtaatggcatggccaggaagcccagcagagcttataagatctaacccttatggccaggtgcagtggctcacgtatgtaatcccagcactttgggaagccaaggagggaggatcacttgaactcaggaattcgagaccagcctgggctacatagtgagaccacatctctactagaacttaaaaaaagttagccaggcacggtgataaatgcctgtagtcccagccactgaagccagaggatcgattgaaccagggagatcatggtcacagtgaactatgattacgccaacctgggtcacatagcaagactctgtttcaaaaaaaaagggggggcgggggacgggtgggtgcagtggctcacatctgtaaccccagcactttgggaggctgagatgggcagatcacttgaggtcaggagttcgagaccagcctggccaacatggtgaaaccccatatccattaaaaatatttaaaaattagccagacatggtggcacgcgtctgtggtcctagctcctcgggaggctgaggcaggagaatcgcttgaactcgggaggcagaggttgtcatgagctgagctaacaccacggcacttcagcctgggtgacagaatgagactctgtgtcaaaaaaataaaaaataaaaaatctaagggctcaggaaccagtttggacttgattttgaatcccagttcatccccttcctagctgtatgaccttgattgtgtgccttaaccgctctgtgacacagtctacctgtctgcaaaatgggaaacataatacctgccatcaggattgttgaggagtaaataaatggaaattggtggacgaggctgttaaccttctcttcaggtgggcgctgggacacaagagcatcgcagcttcaattctccccctaaaggtttgggggcagttggtgcagaggtgagaccagaagtgggaccacaggaggtgtctatccaaaattccctccactctccatggtaaccagaactggagtcccacctcccaaaaagcacctgggcatgggggtggggtcgtgtgatgtctcgccttgcctggagaggagtgagccccagaaaactcacgcagcacggacgcactttatttatatgtgtacatatgtatacggaggctgtacagcgcggggccgatgacccccttggctatggtcccgggggtgcgggactggacactccttttttggtcaggcctgctgggggcacagcttcagcagggcaccgggaggtcagccccacttgaggcttggtgcctgagcccaagagggatgcgggtgggactggggtcactgcactgctgggtgcactgcacttcgctggggctagggagggtgtctggggctccggggagagctttggggaggcgggcttggagcgaggaccgctcagcgtggtgcgctcctccaccacctccaacacccagcgctcccggccccggggggcctcgggcacggaaggcgccaggggtgcgggttcctgcaaccccttggagtccgcgcccagaggctgaggcaccacagccttagccccgggccgcgcaggctctacgacaatgggtaccaggggtgtgcccgcctcgccagagctgctgcgccggcctgtctcgtgttcctgcaccgggctcagcgccgccttggccacagccctggccatcccgccagtgccatcctccgtctgcacgctctgatgccgcgtgcagccgacgtcccgctccagggtccggccaccgggggtcgtcgcgcggggtggggtgcacgcctcggcgccccccggggattccttctccttgctcgacactggtggcctggaggcaccctcgggcagcaacgggtccgcgcccaggctcaaaggtgactcctgtcggcccaggcggcggacggcgacctgccggggcgcgccaaggccctcgactgggggcgtctcaccgtcggactcggcaaggctatgcagcgccagctcgccatggaagtccttgcggaaatccgggtggcccacctcgaggctgtgtttgcgcagcgcgcccttcttgtccgcactcaaagaggctcccagcttctcggccgactgcacgcgcttgaggagcggcgagcgagggggctcggcactcttggggcgcgggcgcacgacgggaggcgatgagtgcagtttggccgggaagctctgagtagtgtgcgagctgcccaccgtgtggcccggcagtggcggcggtgacgcctgcgtgggggacggcgtgtgtgccagcggcgatagagggatgttgccggccgacttgcatcgcgcagagcggtactggcgatggagctttggcgacagtccgtgcagcgtgctgggccgaatgtggtgcgacgccgacgacgcaggcgagttgggcgtgctcgaggctggggagctgctctgggatgaggcgcctgcgggagacaggaggtgaagcgagtgagtacagcccaagcaccagccaggccaccccgcgctgctcggtccccgcgcaggtgcaggaggtaatacctaggtaggcggagtcaggcgtggagcggtagctgtgcgtgggcgagcgcgccggcagcccgtgcgtaggcgagcccgggagactatcgctggatgacagcgagcggttcagcgacgacagcgagcggctagtatgcagcaggttcgactgcttcgtgatcttccggaagagggagctgcgcttcttgctgcgggacagggagggggccaagcgtccttgacctggacgccagagctcagggctcctcccatttcacggcctcacaacggtaaccacccaccccttctggcccttccctctccagctacaacccacctatcaagataaagaacttcctttagctcagtgctgcttggctcctcccacttcagtccccacccaccccctttggccactcctagtccaagctagaaacaagcatccaaacaaaaccaacctgttctgccccgcccacctctctagctcctccctcttccactacaatccacctatcaagatagaacttcctttagctcctcctacttcaggccccgcccaactttaggccactcccaattctggctacaaacactcatccaaacaaaaccatttttttttttttttttgagacgaagtttcgctcttgtcgcccaggctggagtgcaatggcacgatctcggctcactgcaacctctacctcccgggttcaagcgattaccgtgcttcagcttcgtgagtagcctcctgagtaggtgggactacaggagtgagccaccactcccagctaatttttgtatttttagtagagatggggtttcaccatgttggtcaggctggtctcaaactcctgacctcag

SEQ ID NO: 726 - DNA, 4045 bp, Homo sapiens
taggaggctgaggcaggaggatcatttgaagacaggcatccaagacaagcctgggaaacatagcaagacctcatctctacaaaattaaaaattagccaagcaacttgggaggctgaggcaggaggataaattgagcccagagtttcagactgcagtgagctataatgactccactgcactccagcctgggtgacagagcaagaccctgtctttatttaaaaataaataaataggctgggcacagtggctcatgcctgtaatcccagcactttgggaggctgaggtgggcagatcacgagctcaggagatcgagaccatcctggctaacacggtgaaaccctgtctctactaaaagtgcaaaaattagccaggcatggtggcgggcacctgtagtcccagttactcgggaggctgaggcaggagaatggcgtgaacccggaaggtggagcttgcagtgagtcaagatagtgccactgcactccagcctgggtgacagagtgagactgtgtctcaaaataaataaataaataaataaatacaaataaataggccaggcacagtggctcacacctgtaatcccagtcgaggcaggaggattgcttgagcccaggagtttgagaccagcctgggcaacacagcgggaccccatctctacaaaaaaaattttaattagtggggcatagtggcacacacgtgtagtccccactactcaggaggctgaggtgggagaacagcttgagcccaggaggtcgaggctgcaagtgagtcatgatcctgccactgcactccagctggggtgtcaaaatgagacccagtctcaaaataaataagttaattaattaaaaacactcagggccggacgcggtggctcacctgtaatccccacattttgggagaccaaggcgggtgggtcacttgagcccaggagttcaagaccagtctggccaacatggtgaaactccatctctactaaaagtacaaaaattatctgggcatggtggagggcgctggctgattacacggtcaggagtttgagaacagcctggccaacatggtggaaccccatctctactaaaagtacaaaaattagccgggtgtggtggcgggcacctgtaatcccagctactcaggaggctgaggcatgagaatcgcttgaaaccaggaggcagaggttgcagtgtgccgagattacaccactgcactccagcctgggcgacagagtgagactctgtctcaaaaacaaatttgggaagggcaattaatattaatgtcatcattcccaggactgggaattgacaactgagctcagaaatatggaaactgtggcagggcgcggtgacacacacctgtagtcccagcattttggaagaccgaggtgggcggattgcttgagatcaggagtttgagaccagcctggtcaatatggtgaaacccctctttattaaaaaattagccgggtatggttgtgcatgcctgtagtcccagctactcagaaggctgaggcaggagaatcacttgaacctcggaggcagaggttgcaatgagcctagattgcaccaatgcactctagcctgggcgacagagcaagactccatgtcaaaaaaaaaaaaaaaaaaggaaatatggaaactgagctgagagaggggaagtggactagggactccctcgcagtggccctgaccctacctgtgccctctctccatcctttgcagacctgtactccggctggttggcagcagcccttggtaccaacctgcaggtccagttctggcacaaaactgtaggcatcctgccctctaactgctcggatatctggcaggttctgaatgtgaaccagatagctttccctggaccagccggcccaagcttcaacagcacagaggaccactccaaatggtgcgtgtccccaaaagggccctggacctgcgtgggtgacatgaatcggaaccagggagaggagcaacggggtgggggcacactgtgtgcccagctgccagccctctggaaagccttccagccgctggtgaagaactaccagccctgtaatggcatggccaggaagcccagcagagcttataagatctaacccttatggccaggtgcagtggctcacgtatgtaatcccagcactttgggaagccaaggagggaggatcacttgaactcaggaattcgagaccagcctgggctacatagtgagaccacatctctactagaacttaaaaaaagttagccaggcacggtgataaatgcctgtagtcccagccactgaagccagaggatcgattgaaccagggagatcatggtcacagtgaactatgattacgccaacctgggtcacatagcaagactctgtttcaaaaaaaaagggggggcgggggacgggtgggtgcagtggctcacatctgtaaccccagcactttgggaggctgagatgggcagatcacttgaggtcaggagttcgagaccagcctggccaacatggtgaaaccccatatccattaaaaatatttaaaaattagccagacatggtggcacgcgtctgtggtcctagctcctcgggaggctgaggcaggagaatcgcttgaactcgggaggcagaggttgtcatgagctgagctaacaccacggcacttcagcctgggtgacagaatgagactctgtgtcaaaaaaataaaaaataaaaaatctaagggctcaggaaccagtttggacttgattttgaatcccagttcatccccttcctagctgtatgaccttgattgtgtgccttaaccgctctgtgacacagtctacctgtctgcaaaatgggaaacataatacctgccatcaggattgttgaggagtaaataaatggaaattggtggacgaggctgttaaccttctcttcaggtgggcgctgggacacaagagcatcgcagcttcaattctccccctaaaggtttgggggcagttggtgcagaggtgagaccagaagtgggaccacaggaggtgtctatccaaaattccctccactctccatggtaaccagaactggagtcccacctcccaaaaagcacctgggcatgggggtggggtcgtgtgatgtctcgccttgcctggagaggagtgagccccagaaaactcacgcagcacggacgcactttatttatatgtgtacatatgtatacggaggctgtacagcgcggggccgatgacccccttggctatggtcccgggggtgcgggactggacactccttttttggtcaggcctgctgggggcacagcttcagcagggcaccgggaggtcagccccacttgaggcttggtgcctgagcccaagagggatgcgggtgggactggggtcactgcactgctgggtgcactgcacttcgctggggctagggagggtgtctggggctccggggagagctttggggaggcgggcttggagcgaggaccgctcagcgtggtgcgctcctccaccacctccaacacccagcgctcccggccccggggggcctcgggcacggaaggcgccaggggtgcgggttcctgcaaccccttggagtccgcgcccagaggctgaggcaccacagccttagccccgggccgcgcaggctctacgacaatgggtaccaggggtgtgcccgcctcgccagagctgctgcgccggcctgtctcgtgttcctgcaccgggctcagcgccgccttggccacagccctggccatcccgccagtgccatcctccgtctgcacgctctgatgccgcgtgcagccgacgtcccgctccagggtccggccaccgggggtcgtcgcgcggggtggggtgcacgcctcggcgccccccggggattccttctccttgctcgacactggtggcctggaggcaccctcgggcagcaacgggtccgcgcccaggctcaaaggtgactcctgtcggcccaggcggcggacggcgacctgccggggcgcgccaaggccctcgactgggggcgtctcaccgtcggactcggcaaggctatgcagcgccagctcgccatggaagtccttgcggaaatccgg

SEQ ID NO: 727 - DNA, 4046 bp, Homo sapiens
gtgaacagacctgggttcaaaccctgggttttgctgtgtgatgtataacttcacctgagccttggtctactcatctgaaaaatggggatactgacatctacttaaaaaattgtgaatgaagtggtacctgtaagtcatttgggtgccagaggtggtgcctcactcctgtaatcccagttacttaggaggctgaggcaggaggatcatttgaagacaggcatccaagacaagcctgggaaacatagcaagacctcatctctacaaaattaaaaattagccaagcaacttgggaggctgaggcaggaggataaattgagcccagagtttcagactgcagtgagctataatgactccactgcactccagcctgggtgacagagcaagaccctgtctttatttaaaaataaataaataggctgggcacagtggctcatgcctgtaatcccagcactttgggaggctgaggtgggcagatcacgagctcaggagatcgagaccatcctggctaacacggtgaaaccctgtctctactaaaagtgcaaaaattagccaggcatggtggcgggcacctgtagtcccagttactcgggaggctgaggcaggagaatggcgtgaacccggaaggtggagcttgcagtgagtcaagatagtgccactgcactccagcctgggtgacagagtgagactgtgtctcaaaataaataaataaataaataaatacaaataaataggccaggcacagtggctcacacctgtaatcccagtcgaggcaggaggattgcttgagcccaggagtttgagaccagcctgggcaacacagcgggaccccatctctacaaaaaaaattttaattagtggggcatagtggcacacacgtgtagtccccactactcaggaggctgaggtgggagaacagcttgagcccaggaggtcgaggctgcaagtgagtcatgatcctgccactgcactccagctggggtgtcaaaatgagacccagtctcaaaataaataagttaattaattaaaaacactcagggccggacgcggtggctcacctgtaatccccacattttgggagaccaaggcgggtgggtcacttgagcccaggagttcaagaccagtctggccaacatggtgaaactccatctctactaaaagtacaaaaattatctgggcatggtggagggcgctggctgattacacggtcaggagtttgagaacagcctggccaacatggtggaaccccatctctactaaaagtacaaaaattagccgggtgtggtggcgggcacctgtaatcccagctactcaggaggctgaggcatgagaatcgcttgaaaccaggaggcagaggttgcagtgtgccgagattacaccactgcactccagcctgggcgacagagtgagactctgtctcaaaaacaaatttgggaagggcaattaatattaatgtcatcattcccaggactgggaattgacaactgagctcagaaatatggaaactgtggcagggcgcggtgacacacacctgtagtcccagcattttggaagaccgaggtgggcggattgcttgagatcaggagtttgagaccagcctggtcaatatggtgaaacccctctttattaaaaaattagccgggtatggttgtgcatgcctgtagtcccagctactcagaaggctgaggcaggagaatcacttgaacctcggaggcagaggttgcaatgagcctagattgcaccaatgcactctagcctgggcgacagagcaagactccatgtcaaaaaaaaaaaaaaaaaaggaaatatggaaactgagctgagagaggggaagtggactagggactccctcgcagtggccctgaccctacctgtgccctctctccatcctttgcagacctgtactccggctggttggcagcagcccttggtaccaacctgcaggtccagttctggcacaaaactgtaggcatcctgccctctaactgctcggatatctggcaggttctgaatgtgaaccagatagctttccctggaccagccggcccaagcttcaacagcacagaggaccactccaaatggtgcgtgtccccaaaagggccctggacctgcgtgggtgacatgaatcggaaccagggagaggagcaacggggtgggggcacactgtgtgcccagctgccagccctctggaaagccttccagccgctggtgaagaactaccagccctgtaatggcatggccaggaagcccagcagagcttataagatctaacccttatggccaggtgcagtggctcacgtatgtaatcccagcactttgggaagccaaggagggaggatcacttgaactcaggaattcgagaccagcctgggctacatagtgagaccacatctctactagaacttaaaaaaagttagccaggcacggtgataaatgcctgtagtcccagccactgaagccagaggatcgattgaaccagggagatcatggtcacagtgaactatgattacgccaacctgggtcacatagcaagactctgtttcaaaaaaaaagggggggcgggggacgggtgggtgcagtggctcacatctgtaaccccagcactttgggaggctgagatgggcagatcacttgaggtcaggagttcgagaccagcctggccaacatggtgaaaccccatatccattaaaaatatttaaaaattagccagacatggtggcacgcgtctgtggtcctagctcctcgggaggctgaggcaggagaatcgcttgaactcgggaggcagaggttgtcatgagctgagctaacaccacggcacttcagcctgggtgacagaatgagactctgtgtcaaaaaaataaaaaataaaaaatctaagggctcaggaaccagtttggacttgattttgaatcccagttcatccccttcctagctgtatgaccttgattgtgtgccttaaccgctctgtgacacagtctacctgtctgcaaaatgggaaacataatacctgccatcaggattgttgaggagtaaataaatggaaattggtggacgaggctgttaaccttctcttcaggtgggcgctgggacacaagagcatcgcagcttcaattctccccctaaaggtttgggggcagttggtgcagaggtgagaccagaagtgggaccacaggaggtgtctatccaaaattccctccactctccatggtaaccagaactggagtcccacctcccaaaaagcacctgggcatgggggtggggtcgtgtgatgtctcgccttgcctggagaggagtgagccccagaaaactcacgcagcacggacgcactttatttatatgtgtacatatgtatacggaggctgtacagcgcggggccgatgacccccttggctatggtcccgggggtgcgggactggacactccttttttggtcaggcctgctgggggcacagcttcagcagggcaccgggaggtcagccccacttgaggcttggtgcctgagcccaagagggatgcgggtgggactggggtcactgcactgctgggtgcactgcacttcgctggggctagggagggtgtctggggctccggggagagctttggggaggcgggcttggagcgaggaccgctcagcgtggtgcgctcctccaccacctccaacacccagcgctcccggccccggggggcctcgggcacggaaggcgccaggggtgcgggttcctgcaaccccttggagtccgcgcccagaggctgaggcaccacagccttagccccgggccgcgcaggctctacgacaatgggtaccaggggtgtgcccgcctcgccagagctgctgcgccggcctgtctcgtgttcctgcaccgggctcagcgccgccttggccacagccctggccatcccgccagtgccatcctccgtctgcacgctctgatgccgcgtgcagccgacgtcccgctccagggtccggccaccgggggtcgtcgcgcggggtggggtgcacgcctcggcgccccccggggattccttctccttgctcgacactggtggcc

SEQ ID NO: 728 - DNA, 4046 bp, Homo sapiens
ctggtattaaaggcgcaccatcacaccaggctaattttcatatttttagtacagacgaggtttcaccatgttggccaggctggtctcgaactcctggtttctacctcaagtgatctacccgccttggcctcccaaagtgctgggattacaggaatgagccaccctgcccagccgagttcctatgcatttttccaagctaacccctgacctccatagtggggtgggagatctcccctgtcagaccttgggcatctatttcccctattttattttcttttagacaaggtctcacccagtcacctaggctggagtgcagtatcacagctcactgcagccttgacctcccagggctcaggtgatcctcctacctcagcctcccaagtactgggcctgccggtaccccccaccacgcctggctttttttttttttttttttttttgcggcactctctctccatcacccaggctggagttcggtggtgcaatctcagctcactgcaatctccatctccccagttcaagcgattcttctgcctcagcctctggagtagctgggattacaggtgtgcgccaccatgcccagctaaatgttgtatgttttagtagagatggggttttaccaggttggacaggctgatattgaactcctgacctcaggtgatccacctgccttggcctcccaaagtgctgggattacaggcgtgagccaccacacctggcctactttttgtatttttgtagagtgggcttttgccatgttgcctaggctggtctctaagtcctggttcaagcaatccacccaccttggcctcttaatgtgctgcgattaccggcatgagccgccacacctggcctgtttccctaccttacattactcttggcgttattctggactataagaatttatgcctgcaaaaactgagctcagctgtggttctaacactgctggcaccctctctaagccccgctgcaaactgagggtgttcctgattgcagatgagcttgctgggaggcctggagcaataccctctaattgccttttttttttttttttttttgagaaggagttttgctcttgctacccaggctggagtgcaatggtgcaatctcggctcactgcaacctccgcctcctgggttcaagtgattctcctgcatcagcctcccgagtagctgggattacaggcatgcaccaccatgcccggctaatgttgtatttttagtagtgatgaggtttctccatgttggccaggctggtcttgaactcccgacctcaggtgatccgccctcctcggcttcccaaagtgctgggattacactgcgtggggcctgccttctttttttaaatttttatttatttatttatttatttatttatttacttacttacttacttatgtttgagatgaaattttgctctgtggcccaggctggagtgcagtggtggatctcagctcactgcaacctccacctcctgggttcaagcgattctcctgcctcagcctcctgagtagctgggattacaggcgtccaccaccacgctcagctaatttttgtatttttagtagagatggggtttcgccatgttggccaggctgatttctaactcctgacctcaggtgatctgtgtgtctcggtctcccaaagtgctgggattacaggcgtgagccactgcgcccgacctcccctaatgccttcttttggtccaggtgtcctgctccttgaccacgatgggggcttctggctggtccacagtgtacctaacttccctccaccggcctcctctgctgcatacagctggcctcatagcgcctgtacctacgggcagaccctgctctgtgtgtcttttcccttcgctcagttctcgaagatgggtaagtcgagtcagggacacaggatgagtcctgggtttactgaccagaacctggaacgatcttgcatttcctcctccccttgtcctccaggcaagcagctgacctacacctacccctgggtctataactaccagctggaagggatctttgcccaggaattccccgacttggagaatgtggtcaagggccaccacgttagccaagaaccctggaacagcagcatcacactcacatcccaggccggggctgttttccagagctttgccaagttcagcaaatttggagatggtgagtctcaaggttgagggttggagagctccttctctgcagacagggtgactggtgtggccatggctgagttcaagtcagcggtagagaccaggtctgtttgggagctataatcacatgatcagtgaacagacctgggttcaaaccctgggttttgctgtgtgatgtataacttcacctgagccttggtctactcatctgaaaaatggggatactgacatctacttaaaaaattgtgaatgaagtggtacctgtaagtcatttgggtgccagaggtggtgcctcactcctgtaatcccagttacttaggaggctgaggcaggaggatcatttgaagacaggcatccaagacaagcctgggaaacatagcaagacctcatctctacaaaattaaaaattagccaagcaacttgggaggctgaggcaggaggataaattgagcccagagtttcagactgcagtgagctataatgactccactgcactccagcctgggtgacagagcaagaccctgtctttatttaaaaataaataaataggctgggcacagtggctcatgcctgtaatcccagcactttgggaggctgaggtgggcagatcacgagctcaggagatcgagaccatcctggctaacacggtgaaaccctgtctctactaaaagtgcaaaaattagccaggcatggtggcgggcacctgtagtcccagttactcgggaggctgaggcaggagaatggcgtgaacccggaaggtggagcttgcagtgagtcaagatagtgccactgcactccagcctgggtgacagagtgagactgtgtctcaaaataaataaataaataaataaatacaaataaataggccaggcacagtggctcacacctgtaatcccagtcgaggcaggaggattgcttgagcccaggagtttgagaccagcctgggcaacacagcgggaccccatctctacaaaaaaaattttaattagtggggcatagtggcacacacgtgtagtccccactactcaggaggctgaggtgggagaacagcttgagcccaggaggtcgaggctgcaagtgagtcatgatcctgccactgcactccagctggggtgtcaaaatgagacccagtctcaaaataaataagttaattaattaaaaacactcagggccggacgcggtggctcacctgtaatccccacattttgggagaccaaggcgggtgggtcacttgagcccaggagttcaagaccagtctggccaacatggtgaaactccatctctactaaaagtacaaaaattatctgggcatggtggagggcgctggctgattacacggtcaggagtttgagaacagcctggccaacatggtggaaccccatctctactaaaagtacaaaaattagccgggtgtggtggcgggcacctgtaatcccagctactcaggaggctgaggcatgagaatcgcttgaaaccaggaggcagaggttgcagtgtgccgagattacaccactgcactccagcctgggcgacagagtgagactctgtctcaaaaacaaatttgggaagggcaattaatattaatgtcatcattcccaggactgggaattgacaactgagctcagaaatatggaaactgtggcagggcgcggtgacacacacctgtagtcccagcattttggaagaccgaggtgggcggattgcttgagatcaggagtttgagaccagcctggtcaatatggtgaaacccctctttattaaaaaattagccgggtatggttgtgcatgcctgtagtcccagctactcagaaggctgaggcaggagaatcacttgaacctcggaggcagaggttgcaatgagcctagattgcaccaatgcactctagcctgggcga

SEQ ID NO: 729 - DNA, 4050 bp, Homo sapiens
aaaaattagctgggcatgtggcgcatgcctgtaatcccagctactcaggaagctgaggcaggaggattgcttgaacctaggaggcggatgttgcagtgagctgagatcacaccactggactccagcctgggcgacagagtgagacaacgtgtcaaaaaaaaaaaaaaagttagcttgaccccactccaggaatgaccaagcaagggcagtttggagattaaaggcaagatggagttggttaggtcagagctctttcactgacataattttctgtcataatttttgcaaaggcagtttcaagccagtactcagattcccatagccctttgccctgccatgatcctttgaggctgaggtgggagaatcacttgaaccccggagttccagagcagcctgggcaacatagtgagaccctcatctctgcaatgaacaattatctgggtgtggtggcacaggcctgtagtaccagctacctgggaagatctcttgagcccagtaggttgaggctgcagtgaactgtgatggagtcactgcattctagcctgggtgagaaaccattatcctgtctcaaaacgacaaaaaacaaacatacagtcacctctttgctagctcaggggatcctggagaaaacgtgcagaatgaaaaaggagagtctgggtggcgtggattacatgcctgtaatcccagcactttgggaggcaagacaggtggatcccttgagctcaggagttcagcctgagccacatggtgaaaccgtgtttcaaaaaaaaaactacaaaaattagctgggcatagtggcatgtgcccgtgatcccagctactcgggaggctgaggtgagaggatcacttgagctggggaggcagaggttgcagtgagccaagattgcgccactgcactccggcctgggcaacagagcgagatattgtccgggaaaaaaaaaaaaaaaaaaggaaggaaaaaaaaaaagaaagaaaaaggggaagatacactggaacacaaatgcttcttaaggggcgcagtggctcacttctgcaatcttggcactttcgggggccgaggctggtggatcacgaggtcaggagttcgagaccagcctagtcaacatggaaaaaccccgtctctactaaaactacaaaaattagccgggcgtggtgtcgggcgcctgtaatcccagctactcgggaggctgaggcaggataatcgctttaatcaggaaggcggaggttgcagtgaaccgagatcgtgccattgcactccagcctgggcgacaagagtgaaactccgtctcaaaaaaaaaaaaaaaaaaaaaaaaaaaaaaagaggaagaacaaaggtcccaagagttggacccaggttgtagggctggaataaaaaataaaatacaaacttgtgcctgatccagaaacccgggcgggagttgggtcagacagaagagcgtgggctgggattagctaccacgaaaaggaacggtggccaggctccaggagacgctggagcgccgggcccgtcgtgggcgtggtctgggcagactcagcgttgccttttgcctctccaaaacgcagcatcgcgtctcgggggaggagtctgtaccctcgtgatgtccccgccccggttcccaggcaagtttagggaagtgaaaggcgccaggtgccagtcctggcctctgatgtaacccagcgccccgcagtcccgacacagattcctggatctcagccccatagcagctatgatcccgctgctgctggcagcgctgctgtgcgtccccgccggggccctgacctgctacggggactccgggcagcctgtagactggtgagtgcgcagcggggggcctaccatcgccccggggtccggctgcggtcactcaaccgggatggctacctcctcggggaaccctggggtgccttctcttccctctctcctatttctgtgcattctccgacctccaggttcgtggtctacaagctgccagctcttagagggtccggggaggcggcgcagagagggctgcagtacaagtatctggacgagagctccggaggctggcgggacggcagggcactcatcaacagcccggagggggccgtgggccgaagcctgcagccgctgtaccggagcaacaccagccaggtgaagggggccccgggccaactaggggcgaaactctagggctgccctgcctgggaggaatttcacgttgcctccgtttatccgcccgcagctcgccttcctgctctacaatgaccaaccgcctcaacccagcaaggctcaggactcttccatgcgtgggcacacgaagggtgaggcctggattgggggctggggagagactcgggtcccatttttccaaggtaacccctgacgtgcatggggtggtcggggagatctgcactgtcagaccctgggcatctattccccccaacttttttttttctttgtttttgagacggtgggagttcgctctgtcacccaagctggagtgcagtggcacaatcttggctcactgcaatctctgcctctggggttgaagcaattctcctgtctcagcctcccaagtagctggtattaaaggcgcaccatcacaccaggctaattttcatatttttagtacagacgaggtttcaccatgttggccaggctggtctcgaactcctggtttctacctcaagtgatctacccgccttggcctcccaaagtgctgggattacaggaatgagccaccctgcccagccgagttcctatgcatttttccaagctaacccctgacctccatagtggggtgggagatctcccctgtcagaccttgggcatctatttcccctattttattttcttttagacaaggtctcacccagtcacctaggctggagtgcagtatcacagctcactgcagccttgacctcccagggctcaggtgatcctcctacctcagcctcccaagtactgggcctgccggtaccccccaccacgcctggctttttttttttttttttttttttgcggcactctctctccatcacccaggctggagttcggtggtgcaatctcagctcactgcaatctccatctccccagttcaagcgattcttctgcctcagcctctggagtagctgggattacaggtgtgcgccaccatgcccagctaaatgttgtatgttttagtagagatggggttttaccaggttggacaggctgatattgaactcctgacctcaggtgatccacctgccttggcctcccaaagtgctgggattacaggcgtgagccaccacacctggcctactttttgtatttttgtagagtgggcttttgccatgttgcctaggctggtctctaagtcctggttcaagcaatccacccaccttggcctcttaatgtgctgcgattaccggcatgagccgccacacctggcctgtttccctaccttacattactcttggcgttattctggactataagaatttatgcctgcaaaaactgagctcagctgtggttctaacactgctggcaccctctctaagccccgctgcaaactgagggtgttcctgattgcagatgagcttgctgggaggcctggagcaataccctctaattgccttttttttttttttttttttgagaaggagttttgctcttgctacccaggctggagtgcaatggtgcaatctcggctcactgcaacctccgcctcctgggttcaagtgattctcctgcatcagcctcccgagtagctgggattacaggcatgcaccaccatgcccggctaatgttgtatttttagtagtgatgaggtttctccatgttggccaggctggtcttgaactcccgacctcaggtgatccgccctcctcggcttcccaaagtgctgggattacactgcgtggggcctgccttctttttttaaatttttatttatttatttatttatttatttatttacttacttacttacttatgtttgagatgaaattttgctctgtggcccaggctggagtgcagtggtggatctcagctcactgcaacctccacctcctgggttcaagcgattc

SEQ ID NO: 730 - DNA, 4053 bp, Homo sapiens
cagagtcttgctttctgtgccccaggctggactgcagtggtgtgattatagttcagtgcagtcccgacctcctgggctcaggcaatcctcccacctcagcctcctgagtagctgggactatgggcatgcaccaccactcacagctttttgttggagagataggttttatgttgcccaggctggtcttgaaatcctggtgtcaagtgatcctcctgcctcagtcttccaatgagtgactatgagttatgtgtctgtaatacgtatccatgtccccttcccaggctcccagggcaccagagtggaggttcctgttgtagaaactcagatcctctcctcatgttgggcagaatcaaggagcagccaggcccagagccagggcactggtctcctgcaggtcaggtactgcctgtggcttgatccaacggtcctatcccacccaggaggagagagggtcacttttcccttggctgcccccatcgcactaaagcagctggcactgaaccagcctccatgcagtcccatgcagtgccacccaagggtccccagtagacaatggtgggccagttgtcaggggcttcctcctgctgcagggctgagaccctgggaggtcccaacccaggcaaattgaacgccaggctaatttgaagacccaactcccagccctccccttcaccggaggacagagctctagctggcctgggcccccacctgatagcagcctccaacgtctggggtgtctgataatgcttggcggggagctcgtgccaagtcccgccatcagcacggttgttgctgtttactggggagggggagggctgtggagcctcaatcagggggacagggggtcccacagcttcttcccagaataccctttctgccttttccaggaaagttaactgagggaagacccccaagtctctccttctttggagacccaatgtctgtttttacccagcacctggaccctcaaaccctgaaccccccaacccttgatatttgacttggctttggacacagggttagtctttaaccccagccccagacaggccaacgtgaagtttgtgccccagaaacagtgcccccccgccgccttgccttgctttgccttatcagaggctgcagccaatcagctaaggacagagaggagccctcgaaggggctatcacagcctcagagttcacgaggcagccgaggaagaggaggcttgaggcccagggtgggcaccagccagccatggccacagccgagaccgccttgccctccatcagcacactgaccgccctgggccccttcccggacacacaggatgacttcctcaaggtggggcctagaaggtggggtctaggtgggctggctggaatccagggccacagtcacagatcttggggtccagacctgcatcttgacctgaaatcaagagacttaaccaggactgaggtacgctcagtccaggagaggagatctcagcttagtctggcagggggtgaggagggtggtctaggggtttgaggttctaagtgtgatctatttcggtaatagaaaacgaaggtagcctgggcaacatggtgaaaccctatctctacaaaaaataccaaaaacattaggccaggcatgggggcgtgtgcctgtagtcccaggtactccgtaggctgatgcaggaggatcattagagcccaggagattaaggatacagtgagctgcaccactgcactccagcctgggcaaaagagtaagaccctatctcaagaaaaaaaaaaaaaaaaaggaacgagatctaggctcacagacaatcttccagatatcagcgggaaatgatgagtgtgtctgggggacatccaaaatttcggaattaatcttgttttgggagacagggaaggagagggatgttctgggggaaaactaagtcaaggctggcatcctctcccccgtcccctgccagttttccatctccagcagctctgctaccccttcccccatccccgagtgtggttccagatagtggaagtcttatctcctgtctccagccagacctgatcggtttctgtccctggagctggggggggagcggggagaggggcggttagaggggcagtgttggggaagtgggacagacagacaggcaaacaagacccctttccaaagcctctgcgtcagagtgtccagcccgcgatgtccctgggcagggcaccccagtgtccaccgaacctcgagctgcctgctccctcccgcagtggtggcgctccgaagaggcgcaggacatgggcccgggtcctcctgaccccacggagccgcccctccacgtgaagtctgaggaccagcccggggaggaagaggacgatgagaggggcgcggacgccacctgggacctggatctcctcctcaccaacttctcgggcccggagcccggtggcgcgccccagacctgcgctctggcgcccagcgaggcctccggggcgcaatatccgccgccgcccgagactctgggcgcatatgctggcggcccggggctggtggctgggcttttgggttcggaggatcactcgggttgggtgcgccctgccctgcgagcccgggctcccgacgccttcgtgggcccagccctggctccagccccggcccccgagcccaaggcgctggcgctgcaaccggtgtacccggggcccggcgccggctcctcgggtggctacttcccgcggaccgggctttcagtgcctgcggcgtcgggcgccccctacgggctactgtccgggtaccccgcgatgtacccggcgcctcagtaccaagggcacttccagctcttccgcgggctccagggacccgcgcccggtcccgccacgtccccctccttcctgagttgtttgggacccgggacggtgggcactggactcggggggactgcagaggatccaggtgtgatagccgagaccgcgccatccaagcgaggccgacgttcgtgggcgcgcaagaggcaggcagcgcacacgtgcgcgcacccgggttgcggcaagagctacaccaagagctcccacctgaaggcgcatctgcgcacgcacacaggtgagggggcggggccccggacatgagaaagggcgcggcgcccgctgtagttacaggggaagaagggttgcagagggcgggacttggacttggctggcctctgagagtgagtgcctccttaaattttgtgccctaggggcctcactttgttcatcctagtcccagcccaggctgagtaaaggggtgtggccagatgcaggggacccggggacatgactgggcagacagtggcgcttatggcttccttgtcccctaggggagaagccatacgcctgcacgtgggaaggctgcggctggagattcgcgcgctcggacgagctgacccgccactaccggaaacacacggggcagcgccccttccgctgccagctctgcccacgtgctttttcgcgctctgaccacctggccttgcacatgaagcgccacctttgagccctgccctggcacttggactctcctagtgactggggatgggacaagaagcctgtttggtggtctcttcacacggacgcgcgtgacacaatgctgggtggttttcccacgaatggaccctctcctggactcgcgttcccaaagatccacccaaatatcaaacacggacccatagacagccctgggggagcctcttacggaaaatccgacaagccttcagccacagggagccacacagagatgtccaaactgtcgtgcaaacccagtgagacagaccgccaaataaacggactcagtggacactcagaccagctcccagatggccctggacagcaggagagggtgtgggatgaggcttcccagagaccctgggtctagaaagcggctcctgaaggtcccttattgtggctgatattaactgtcaatggttatgggtcctataaaaatgcccctcccagataaagcttcagcgttggcctgaatttttgggttttggaggctggaagatggcaggaggctgtaaacctagaggtcatattagagggccttacacaccctcatctc

SEQ ID NO: 731 - DNA, 4045 bp, Homo sapiens
aaatccagcctgaccaatatggtgaaaccccatctctactaaaaatacaaaaaattaggccagtcgaggtggctcacacatgtaatctcagcactttgggaggccaaggcagatggatcacttgaggtctggagttcgagaccagcctggccaacatagtgaaacaccatctctactaaaaatacaaaaattagccaggcacgggtagcaagcacctgcaatcccagctaattgggaggccgaggcacaggaattgcttgaactggggaaccgcaggttgcagtgagccaagattgtaccactgcacttcagcctgggggacggagcgggactttgtctcaaaaaaagaaaaaaaaaattaccctcgcccctgagtcagacctcataactaagttagatctggccctgctttcaagagacaggttaccccaaagtcatgatcacaatgccaagatggggagggggacccagggaatcaggaaggagttggccaaactggaagggtgtgaggagttaagcaggaggaggctgtggggaagagcagtgctgggagagggaacagatgtgtaaagaactggtggtacttctggagaatttcaagtagctaagtctggctgggaggatcacatgagtggccagagatgaggtggaaaggtcagcagaggcctggtcacacagggccttgtgggtttttttttttttttgcgaatctgatcttatttgttactcaaaaaatcttatttctgactggattcagacttagaagtggaagctcgcagagaggacagtctgcgtctcttcacgatttgtccctggtgcttcttagcctccttcattctcttggccaaaagtttagcatattctgcagcctcttctttatttttcttaatatgcggctgcttcagagcaatacgccgctgtttgtgctgcaggacatgtggagtgacaaggcgctgaatcttgggtgctttggtcctaggtttcttaccttctttgtttaagggcttttttacaacatactggcagacatcattttctttagagagactgaaaagtttacggattctgctagctgtactgggccccaggtgacgaggcatcatagtctcagtcagtccaggaatacccttctctccttttttttacaataaccaagttgagaacactcagattggcatccacgatgcaaccatgaactgatcttctctttctttctccagttctccttggtctgtaataggaatgccccttactcagtagcaagtggacacggccatgggtcaagacaccctgtttcaaggggaaaccttgtttattgttcccaccactgattccgaccacgtaacccttccattcttcacccagagcgtcaacagcaacttctgtggccatacgcttctcataaaaagtacaaagtttgcgttcatcgtccacttcaatgagtttctggcagccagtggctgggaaggagatgttcagcttcatcttgaagcagctgaacacctccgagacaccacggaagagggccaacgtccacttagcgcaggtcacataggctctttcctttttttgtttttctaatagacatggggtctccttacgttgcccaggctggtttcgaactcttgggctcaagggatcttctcacttcaccctcccaaagtgctgggattataggtgtgagccactgcaaatggccagcaggaacctggtggactttaaactttgggctggactggggaacacagaaagcatagggagatgacggtggtcacagagggggacagtcaggctggccagggatcagatctccaggtgaagcccagggtctggcgggggtccaggtggccacttatgctatctttgagatagggacagaataggctcaggggacagccccacccttgagttccagacctcagagactgtcttccttccaccaggccccatgggcagccactcacccagctggggcaggtacttctgccgctgttcctcgctgccataggcatagatagggtgcatgacgagggaggactggacactcatcgccgacctgtagccactgtccacccgctccagctctcgggccaggagcccataggccacagacgaaaccccagcacagccatatcctggtggtagtaggaggggaaagcaggacaatagagaacagggccctgcccagctaagacccaagagacagggctgaataaggacacacaaggaggcaggcaccaagctggccctagctgaggtttattcatttcatctccacagccactttcagagggtgggacaacagccccactttacagactgggaaattgtggcttagggaaagaagggggctttcagtaaggcaagaggatcacttgagaacagcctgggcaacacagtgagaccctgtctctaaaaaaagaaacaaaggggccaggcacggtggctcacgtttataatcccagcactttgggaggccgaggtgggtggatcacctgaggtcaggagttcaagaccagcctggccaacatggtgaaatcccatttctactaaaaaatacaaaaattagctgggcgtggtggtgcacccctgtaatcccagctactcagaaggctgaggtggcagaattgcttgaacctaggaggaggaaactgcagtgagccaggatcgcaccactgtaatccagtaatccaggctgggtgacagagcgaaactccatctcaaaaaaaaaaaaaaaagaaaagggccgggcaacggtggctcacacctgtaatcaggaggctgaggcgggtggatcacctgaggtcaggagttcgagactagcctggccaacacggtgaaaccccacctctactaaaaatacaaaaattagccaggcgtggtggcggacgcctgtaatcccagctactcgggagcctgaggcaggataatcacttaaacccgggaggtggaggctgcagtgagccaagattgcatcactgcactccagcctggacaacaagagcgaaactccatctcaaaaagaaggctgaacgtggtggctcatgcctgtaatcccagcactttaggaggctgaggtgggcggatcacctgaggtcaggagtttgagaccagcctggccaacacagtgaaaccctgtctctactaaaaatacaaaaattagccaggcatggtggcacatacctgtaatcccagctactagaggggtggaggcaggagaatcgcttgagcctgggaggcagaatttgcagtgagccaagatcgtgccactgcactccagcctgggcaacagagccagactctgttgggggggaagaagaaaggaaagaaaaggaaaagaaaagaaagagaaggaaggaagaaagggagggagggaaggaggaagaggctttcagaatacagagggttctgcagtgtgtggagagatacttgttcctacctttgatggtggggcccagcacacccaactcccccatctccgaaatgatctcccgatgaaaaactgcaaagggaccagtgcccaaattcaggcccaggcctaggccacaggaagccccagccccaaggacagaggggccttgaggtggggtggctatggctccaggcggaggagcagtctcagggcacccaccagcccgcccaccttcgttgcgattggccaacaggatgcgaggcatgagtctctcctggcagtaggtgcggaaggtgtccctgatgaggatctcatctgtggtcagctgctcctccagcaccagcgggtcctgccagtcaaactcgggacgcgaggctgggaaggggaattcgcctcggtccagtccgcaagatcactgtgccctcccttctcggaccctcatcagccctaccccccaacacccatgtcgccccccggctagtgcgagctgcaagcgagactgatcaggtgacttttctccggccccgcaggcacagcgcactcactgccttagtgcctctgaccctggccacgaccctgccaccccgctcgggcagctctcggattctgggacagagtccacctgcggcagac

SEQ ID NO: 732 - DNA, 4040 bp, Homo sapiens
ccctggatcctgggggccgagagaccccgcatccccttctccagcaggaagccccgaatgcagccatcttcacaccgagcccacactacaaacagatcggccataggcgagttcgtgatcctggggatggaacagtcggtgaggggtctgaccagtgcccctttgcccctgttcaccacctgcccaccacccagaacccttaccaggtcttggtcccattgagggtgtagctcttgttggatgagttgtagtgggctctggtctccatgctgctggggtcacttccgctgttgggctctgtgagcccgaagcagcccaggagctcccccttggctgcaggcacaagacaaagtcacaaggctgcctggtccctgatacatccccttactcaaaaattatcctcgtggcggggtgcagtggctcacgcctgtcatcccagcactttaggaggccaaggcaggtggatcaattgaggtcaggagttccagaccagcctggccaacatggtgaaaccccatctctacttaaaaaaaaaaaaaaaaaaaaatagccagatgtggtggtgggtgcctgtaatcccagctactcaggagactgaggcaggagaatcgcttgaacccgggcaggagaggttgcagtgagccaagatcatgccactgcactacagcctgggcaacagagcaagactccatctcaaaaaagaaaaaaaatccagcctgaccaatatggtgaaaccccatctctactaaaaatacaaaaaattaggccagtcgaggtggctcacacatgtaatctcagcactttgggaggccaaggcagatggatcacttgaggtctggagttcgagaccagcctggccaacatagtgaaacaccatctctactaaaaatacaaaaattagccaggcacgggtagcaagcacctgcaatcccagctaattgggaggccgaggcacaggaattgcttgaactggggaaccgcaggttgcagtgagccaagattgtaccactgcacttcagcctgggggacggagcgggactttgtctcaaaaaaagaaaaaaaaaattaccctcgcccctgagtcagacctcataactaagttagatctggccctgctttcaagagacaggttaccccaaagtcatgatcacaatgccaagatggggagggggacccagggaatcaggaaggagttggccaaactggaagggtgtgaggagttaagcaggaggaggctgtggggaagagcagtgctgggagagggaacagatgtgtaaagaactggtggtacttctggagaatttcaagtagctaagtctggctgggaggatcacatgagtggccagagatgaggtggaaaggtcagcagaggcctggtcacacagggccttgtgggtttttttttttttttgcgaatctgatcttatttgttactcaaaaaatcttatttctgactggattcagacttagaagtggaagctcgcagagaggacagtctgcgtctcttcacgatttgtccctggtgcttcttagcctccttcattctcttggccaaaagtttagcatattctgcagcctcttctttatttttcttaatatgcggctgcttcagagcaatacgccgctgtttgtgctgcaggacatgtggagtgacaaggcgctgaatcttgggtgctttggtcctaggtttcttaccttctttgtttaagggcttttttacaacatactggcagacatcattttctttagagagactgaaaagtttacggattctgctagctgtactgggccccaggtgacgaggcatcatagtctcagtcagtccaggaatacccttctctccttttttttacaataaccaagttgagaacactcagattggcatccacgatgcaaccatgaactgatcttctctttctttctccagttctccttggtctgtaataggaatgccccttactcagtagcaagtggacacggccatgggtcaagacaccctgtttcaaggggaaaccttgtttattgttcccaccactgattccgaccacgtaacccttccattcttcacccagagcgtcaacagcaacttctgtggccatacgcttctcataaaaagtacaaagtttgcgttcatcgtccacttcaatgagtttctggcagccagtggctgggaaggagatgttcagcttcatcttgaagcagctgaacacctccgagacaccacggaagagggccaacgtccacttagcgcaggtcacataggctctttcctttttttgtttttctaatagacatggggtctccttacgttgcccaggctggtttcgaactcttgggctcaagggatcttctcacttcaccctcccaaagtgctgggattataggtgtgagccactgcaaatggccagcaggaacctggtggactttaaactttgggctggactggggaacacagaaagcatagggagatgacggtggtcacagagggggacagtcaggctggccagggatcagatctccaggtgaagcccagggtctggcgggggtccaggtggccacttatgctatctttgagatagggacagaataggctcaggggacagccccacccttgagttccagacctcagagactgtcttccttccaccaggccccatgggcagccactcacccagctggggcaggtacttctgccgctgttcctcgctgccataggcatagatagggtgcatgacgagggaggactggacactcatcgccgacctgtagccactgtccacccgctccagctctcgggccaggagcccataggccacagacgaaaccccagcacagccatatcctggtggtagtaggaggggaaagcaggacaatagagaacagggccctgcccagctaagacccaagagacagggctgaataaggacacacaaggaggcaggcaccaagctggccctagctgaggtttattcatttcatctccacagccactttcagagggtgggacaacagccccactttacagactgggaaattgtggcttagggaaagaagggggctttcagtaaggcaagaggatcacttgagaacagcctgggcaacacagtgagaccctgtctctaaaaaaagaaacaaaggggccaggcacggtggctcacgtttataatcccagcactttgggaggccgaggtgggtggatcacctgaggtcaggagttcaagaccagcctggccaacatggtgaaatcccatttctactaaaaaatacaaaaattagctgggcgtggtggtgcacccctgtaatcccagctactcagaaggctgaggtggcagaattgcttgaacctaggaggaggaaactgcagtgagccaggatcgcaccactgtaatccagtaatccaggctgggtgacagagcgaaactccatctcaaaaaaaaaaaaaaaagaaaagggccgggcaacggtggctcacacctgtaatcaggaggctgaggcgggtggatcacctgaggtcaggagttcgagactagcctggccaacacggtgaaaccccacctctactaaaaatacaaaaattagccaggcgtggtggcggacgcctgtaatcccagctactcgggagcctgaggcaggataatcacttaaacccgggaggtggaggctgcagtgagccaagattgcatcactgcactccagcctggacaacaagagcgaaactccatctcaaaaagaaggctgaacgtggtggctcatgcctgtaatcccagcactttaggaggctgaggtgggcggatcacctgaggtcaggagtttgagaccagcctggccaacacagtgaaaccctgtctctactaaaaatacaaaaattagccaggcatggtggcacatacctgtaatcccagctactagaggggtggaggcaggagaatcgcttgagcctgggaggcagaatttgcagtgagccaagatcgtgccactgcactccagcctgggcaacagagccagactctgttgggggggaagaagaaaggaaagaaaag

SEQ ID NO: 733 - DNA, 4046 bp, Homo sapiens
gagaacttgccctggatcctgggggccgagagaccccgcatccccttctccagcaggaagccccgaatgcagccatcttcacaccgagcccacactacaaacagatcggccataggcgagttcgtgatcctggggatggaacagtcggtgaggggtctgaccagtgcccctttgcccctgttcaccacctgcccaccacccagaacccttaccaggtcttggtcccattgagggtgtagctcttgttggatgagttgtagtgggctctggtctccatgctgctggggtcacttccgctgttgggctctgtgagcccgaagcagcccaggagctcccccttggctgcaggcacaagacaaagtcacaaggctgcctggtccctgatacatccccttactcaaaaattatcctcgtggcggggtgcagtggctcacgcctgtcatcccagcactttaggaggccaaggcaggtggatcaattgaggtcaggagttccagaccagcctggccaacatggtgaaaccccatctctacttaaaaaaaaaaaaaaaaaaaaatagccagatgtggtggtgggtgcctgtaatcccagctactcaggagactgaggcaggagaatcgcttgaacccgggcaggagaggttgcagtgagccaagatcatgccactgcactacagcctgggcaacagagcaagactccatctcaaaaaagaaaaaaaatccagcctgaccaatatggtgaaaccccatctctactaaaaatacaaaaaattaggccagtcgaggtggctcacacatgtaatctcagcactttgggaggccaaggcagatggatcacttgaggtctggagttcgagaccagcctggccaacatagtgaaacaccatctctactaaaaatacaaaaattagccaggcacgggtagcaagcacctgcaatcccagctaattgggaggccgaggcacaggaattgcttgaactggggaaccgcaggttgcagtgagccaagattgtaccactgcacttcagcctgggggacggagcgggactttgtctcaaaaaaagaaaaaaaaaattaccctcgcccctgagtcagacctcataactaagttagatctggccctgctttcaagagacaggttaccccaaagtcatgatcacaatgccaagatggggagggggacccagggaatcaggaaggagttggccaaactggaagggtgtgaggagttaagcaggaggaggctgtggggaagagcagtgctgggagagggaacagatgtgtaaagaactggtggtacttctggagaatttcaagtagctaagtctggctgggaggatcacatgagtggccagagatgaggtggaaaggtcagcagaggcctggtcacacagggccttgtgggtttttttttttttttgcgaatctgatcttatttgttactcaaaaaatcttatttctgactggattcagacttagaagtggaagctcgcagagaggacagtctgcgtctcttcacgatttgtccctggtgcttcttagcctccttcattctcttggccaaaagtttagcatattctgcagcctcttctttatttttcttaatatgcggctgcttcagagcaatacgccgctgtttgtgctgcaggacatgtggagtgacaaggcgctgaatcttgggtgctttggtcctaggtttcttaccttctttgtttaagggcttttttacaacatactggcagacatcattttctttagagagactgaaaagtttacggattctgctagctgtactgggccccaggtgacgaggcatcatagtctcagtcagtccaggaatacccttctctccttttttttacaataaccaagttgagaacactcagattggcatccacgatgcaaccatgaactgatcttctctttctttctccagttctccttggtctgtaataggaatgccccttactcagtagcaagtggacacggccatgggtcaagacaccctgtttcaaggggaaaccttgtttattgttcccaccactgattccgaccacgtaacccttccattcttcacccagagcgtcaacagcaacttctgtggccatacgcttctcataaaaagtacaaagtttgcgttcatcgtccacttcaatgagtttctggcagccagtggctgggaaggagatgttcagcttcatcttgaagcagctgaacacctccgagacaccacggaagagggccaacgtccacttagcgcaggtcacataggctctttcctttttttgtttttctaatagacatggggtctccttacgttgcccaggctggtttcgaactcttgggctcaagggatcttctcacttcaccctcccaaagtgctgggattataggtgtgagccactgcaaatggccagcaggaacctggtggactttaaactttgggctggactggggaacacagaaagcatagggagatgacggtggtcacagagggggacagtcaggctggccagggatcagatctccaggtgaagcccagggtctggcgggggtccaggtggccacttatgctatctttgagatagggacagaataggctcaggggacagccccacccttgagttccagacctcagagactgtcttccttccaccaggccccatgggcagccactcacccagctggggcaggtacttctgccgctgttcctcgctgccataggcatagatagggtgcatgacgagggaggactggacactcatcgccgacctgtagccactgtccacccgctccagctctcgggccaggagcccataggccacagacgaaaccccagcacagccatatcctggtggtagtaggaggggaaagcaggacaatagagaacagggccctgcccagctaagacccaagagacagggctgaataaggacacacaaggaggcaggcaccaagctggccctagctgaggtttattcatttcatctccacagccactttcagagggtgggacaacagccccactttacagactgggaaattgtggcttagggaaagaagggggctttcagtaaggcaagaggatcacttgagaacagcctgggcaacacagtgagaccctgtctctaaaaaaagaaacaaaggggccaggcacggtggctcacgtttataatcccagcactttgggaggccgaggtgggtggatcacctgaggtcaggagttcaagaccagcctggccaacatggtgaaatcccatttctactaaaaaatacaaaaattagctgggcgtggtggtgcacccctgtaatcccagctactcagaaggctgaggtggcagaattgcttgaacctaggaggaggaaactgcagtgagccaggatcgcaccactgtaatccagtaatccaggctgggtgacagagcgaaactccatctcaaaaaaaaaaaaaaaagaaaagggccgggcaacggtggctcacacctgtaatcaggaggctgaggcgggtggatcacctgaggtcaggagttcgagactagcctggccaacacggtgaaaccccacctctactaaaaatacaaaaattagccaggcgtggtggcggacgcctgtaatcccagctactcgggagcctgaggcaggataatcacttaaacccgggaggtggaggctgcagtgagccaagattgcatcactgcactccagcctggacaacaagagcgaaactccatctcaaaaagaaggctgaacgtggtggctcatgcctgtaatcccagcactttaggaggctgaggtgggcggatcacctgaggtcaggagtttgagaccagcctggccaacacagtgaaaccctgtctctactaaaaatacaaaaattagccaggcatggtggcacatacctgtaatcccagctactagaggggtggaggcaggagaatcgcttgagcctgggaggcagaatttgcagtgagccaagatcgtgccactgcactccagcctgggcaacagagccagactctgttgggggggaagaagaaaggaaagaa

SEQ ID NO: 734 - DNA, 4045 bp, Homo sapiens
tggatgcaccagggagcacattctcctctggcacctccacaccgtccatgatgatcatgcctgtggctgaggcccgcagcgagaacttgccctggatcctgggggccgagagaccccgcatccccttctccagcaggaagccccgaatgcagccatcttcacaccgagcccacactacaaacagatcggccataggcgagttcgtgatcctggggatggaacagtcggtgaggggtctgaccagtgcccctttgcccctgttcaccacctgcccaccacccagaacccttaccaggtcttggtcccattgagggtgtagctcttgttggatgagttgtagtgggctctggtctccatgctgctggggtcacttccgctgttgggctctgtgagcccgaagcagcccaggagctcccccttggctgcaggcacaagacaaagtcacaaggctgcctggtccctgatacatccccttactcaaaaattatcctcgtggcggggtgcagtggctcacgcctgtcatcccagcactttaggaggccaaggcaggtggatcaattgaggtcaggagttccagaccagcctggccaacatggtgaaaccccatctctacttaaaaaaaaaaaaaaaaaaaaatagccagatgtggtggtgggtgcctgtaatcccagctactcaggagactgaggcaggagaatcgcttgaacccgggcaggagaggttgcagtgagccaagatcatgccactgcactacagcctgggcaacagagcaagactccatctcaaaaaagaaaaaaaatccagcctgaccaatatggtgaaaccccatctctactaaaaatacaaaaaattaggccagtcgaggtggctcacacatgtaatctcagcactttgggaggccaaggcagatggatcacttgaggtctggagttcgagaccagcctggccaacatagtgaaacaccatctctactaaaaatacaaaaattagccaggcacgggtagcaagcacctgcaatcccagctaattgggaggccgaggcacaggaattgcttgaactggggaaccgcaggttgcagtgagccaagattgtaccactgcacttcagcctgggggacggagcgggactttgtctcaaaaaaagaaaaaaaaaattaccctcgcccctgagtcagacctcataactaagttagatctggccctgctttcaagagacaggttaccccaaagtcatgatcacaatgccaagatggggagggggacccagggaatcaggaaggagttggccaaactggaagggtgtgaggagttaagcaggaggaggctgtggggaagagcagtgctgggagagggaacagatgtgtaaagaactggtggtacttctggagaatttcaagtagctaagtctggctgggaggatcacatgagtggccagagatgaggtggaaaggtcagcagaggcctggtcacacagggccttgtgggtttttttttttttttgcgaatctgatcttatttgttactcaaaaaatcttatttctgactggattcagacttagaagtggaagctcgcagagaggacagtctgcgtctcttcacgatttgtccctggtgcttcttagcctccttcattctcttggccaaaagtttagcatattctgcagcctcttctttatttttcttaatatgcggctgcttcagagcaatacgccgctgtttgtgctgcaggacatgtggagtgacaaggcgctgaatcttgggtgctttggtcctaggtttcttaccttctttgtttaagggcttttttacaacatactggcagacatcattttctttagagagactgaaaagtttacggattctgctagctgtactgggccccaggtgacgaggcatcatagtctcagtcagtccaggaatacccttctctccttttttttacaataaccaagttgagaacactcagattggcatccacgatgcaaccatgaactgatcttctctttctttctccagttctccttggtctgtaataggaatgccccttactcagtagcaagtggacacggccatgggtcaagacaccctgtttcaaggggaaaccttgtttattgttcccaccactgattccgaccacgtaacccttccattcttcacccagagcgtcaacagcaacttctgtggccatacgcttctcataaaaagtacaaagtttgcgttcatcgtccacttcaatgagtttctggcagccagtggctgggaaggagatgttcagcttcatcttgaagcagctgaacacctccgagacaccacggaagagggccaacgtccacttagcgcaggtcacataggctctttcctttttttgtttttctaatagacatggggtctccttacgttgcccaggctggtttcgaactcttgggctcaagggatcttctcacttcaccctcccaaagtgctgggattataggtgtgagccactgcaaatggccagcaggaacctggtggactttaaactttgggctggactggggaacacagaaagcatagggagatgacggtggtcacagagggggacagtcaggctggccagggatcagatctccaggtgaagcccagggtctggcgggggtccaggtggccacttatgctatctttgagatagggacagaataggctcaggggacagccccacccttgagttccagacctcagagactgtcttccttccaccaggccccatgggcagccactcacccagctggggcaggtacttctgccgctgttcctcgctgccataggcatagatagggtgcatgacgagggaggactggacactcatcgccgacctgtagccactgtccacccgctccagctctcgggccaggagcccataggccacagacgaaaccccagcacagccatatcctggtggtagtaggaggggaaagcaggacaatagagaacagggccctgcccagctaagacccaagagacagggctgaataaggacacacaaggaggcaggcaccaagctggccctagctgaggtttattcatttcatctccacagccactttcagagggtgggacaacagccccactttacagactgggaaattgtggcttagggaaagaagggggctttcagtaaggcaagaggatcacttgagaacagcctgggcaacacagtgagaccctgtctctaaaaaaagaaacaaaggggccaggcacggtggctcacgtttataatcccagcactttgggaggccgaggtgggtggatcacctgaggtcaggagttcaagaccagcctggccaacatggtgaaatcccatttctactaaaaaatacaaaaattagctgggcgtggtggtgcacccctgtaatcccagctactcagaaggctgaggtggcagaattgcttgaacctaggaggaggaaactgcagtgagccaggatcgcaccactgtaatccagtaatccaggctgggtgacagagcgaaactccatctcaaaaaaaaaaaaaaaagaaaagggccgggcaacggtggctcacacctgtaatcaggaggctgaggcgggtggatcacctgaggtcaggagttcgagactagcctggccaacacggtgaaaccccacctctactaaaaatacaaaaattagccaggcgtggtggcggacgcctgtaatcccagctactcgggagcctgaggcaggataatcacttaaacccgggaggtggaggctgcagtgagccaagattgcatcactgcactccagcctggacaacaagagcgaaactccatctcaaaaagaaggctgaacgtggtggctcatgcctgtaatcccagcactttaggaggctgaggtgggcggatcacctgaggtcaggagtttgagaccagcctggccaacacagtgaaaccctgtctctactaaaaatacaaaaattagccaggcatggtggcacatacctgtaatcccagctactagaggggtggaggcaggagaatcgcttgagcctgggaggcagaatttgc

SEQ ID NO: 735 - DNA, 4047 bp, Homo sapiens
cacggagcctgcctgacaaagccgcatccgcaggtgacccaacacccattcccaaagtggctgccacttacccccaggctggatgcaccagggagcacattctcctctggcacctccacaccgtccatgatgatcatgcctgtggctgaggcccgcagcgagaacttgccctggatcctgggggccgagagaccccgcatccccttctccagcaggaagccccgaatgcagccatcttcacaccgagcccacactacaaacagatcggccataggcgagttcgtgatcctggggatggaacagtcggtgaggggtctgaccagtgcccctttgcccctgttcaccacctgcccaccacccagaacccttaccaggtcttggtcccattgagggtgtagctcttgttggatgagttgtagtgggctctggtctccatgctgctggggtcacttccgctgttgggctctgtgagcccgaagcagcccaggagctcccccttggctgcaggcacaagacaaagtcacaaggctgcctggtccctgatacatccccttactcaaaaattatcctcgtggcggggtgcagtggctcacgcctgtcatcccagcactttaggaggccaaggcaggtggatcaattgaggtcaggagttccagaccagcctggccaacatggtgaaaccccatctctacttaaaaaaaaaaaaaaaaaaaaatagccagatgtggtggtgggtgcctgtaatcccagctactcaggagactgaggcaggagaatcgcttgaacccgggcaggagaggttgcagtgagccaagatcatgccactgcactacagcctgggcaacagagcaagactccatctcaaaaaagaaaaaaaatccagcctgaccaatatggtgaaaccccatctctactaaaaatacaaaaaattaggccagtcgaggtggctcacacatgtaatctcagcactttgggaggccaaggcagatggatcacttgaggtctggagttcgagaccagcctggccaacatagtgaaacaccatctctactaaaaatacaaaaattagccaggcacgggtagcaagcacctgcaatcccagctaattgggaggccgaggcacaggaattgcttgaactggggaaccgcaggttgcagtgagccaagattgtaccactgcacttcagcctgggggacggagcgggactttgtctcaaaaaaagaaaaaaaaaattaccctcgcccctgagtcagacctcataactaagttagatctggccctgctttcaagagacaggttaccccaaagtcatgatcacaatgccaagatggggagggggacccagggaatcaggaaggagttggccaaactggaagggtgtgaggagttaagcaggaggaggctgtggggaagagcagtgctgggagagggaacagatgtgtaaagaactggtggtacttctggagaatttcaagtagctaagtctggctgggaggatcacatgagtggccagagatgaggtggaaaggtcagcagaggcctggtcacacagggccttgtgggtttttttttttttttgcgaatctgatcttatttgttactcaaaaaatcttatttctgactggattcagacttagaagtggaagctcgcagagaggacagtctgcgtctcttcacgatttgtccctggtgcttcttagcctccttcattctcttggccaaaagtttagcatattctgcagcctcttctttatttttcttaatatgcggctgcttcagagcaatacgccgctgtttgtgctgcaggacatgtggagtgacaaggcgctgaatcttgggtgctttggtcctaggtttcttaccttctttgtttaagggcttttttacaacatactggcagacatcattttctttagagagactgaaaagtttacggattctgctagctgtactgggccccaggtgacgaggcatcatagtctcagtcagtccaggaatacccttctctccttttttttacaataaccaagttgagaacactcagattggcatccacgatgcaaccatgaactgatcttctctttctttctccagttctccttggtctgtaataggaatgccccttactcagtagcaagtggacacggccatgggtcaagacaccctgtttcaaggggaaaccttgtttattgttcccaccactgattccgaccacgtaacccttccattcttcacccagagcgtcaacagcaacttctgtggccatacgcttctcataaaaagtacaaagtttgcgttcatcgtccacttcaatgagtttctggcagccagtggctgggaaggagatgttcagcttcatcttgaagcagctgaacacctccgagacaccacggaagagggccaacgtccacttagcgcaggtcacataggctctttcctttttttgtttttctaatagacatggggtctccttacgttgcccaggctggtttcgaactcttgggctcaagggatcttctcacttcaccctcccaaagtgctgggattataggtgtgagccactgcaaatggccagcaggaacctggtggactttaaactttgggctggactggggaacacagaaagcatagggagatgacggtggtcacagagggggacagtcaggctggccagggatcagatctccaggtgaagcccagggtctggcgggggtccaggtggccacttatgctatctttgagatagggacagaataggctcaggggacagccccacccttgagttccagacctcagagactgtcttccttccaccaggccccatgggcagccactcacccagctggggcaggtacttctgccgctgttcctcgctgccataggcatagatagggtgcatgacgagggaggactggacactcatcgccgacctgtagccactgtccacccgctccagctctcgggccaggagcccataggccacagacgaaaccccagcacagccatatcctggtggtagtaggaggggaaagcaggacaatagagaacagggccctgcccagctaagacccaagagacagggctgaataaggacacacaaggaggcaggcaccaagctggccctagctgaggtttattcatttcatctccacagccactttcagagggtgggacaacagccccactttacagactgggaaattgtggcttagggaaagaagggggctttcagtaaggcaagaggatcacttgagaacagcctgggcaacacagtgagaccctgtctctaaaaaaagaaacaaaggggccaggcacggtggctcacgtttataatcccagcactttgggaggccgaggtgggtggatcacctgaggtcaggagttcaagaccagcctggccaacatggtgaaatcccatttctactaaaaaatacaaaaattagctgggcgtggtggtgcacccctgtaatcccagctactcagaaggctgaggtggcagaattgcttgaacctaggaggaggaaactgcagtgagccaggatcgcaccactgtaatccagtaatccaggctgggtgacagagcgaaactccatctcaaaaaaaaaaaaaaaagaaaagggccgggcaacggtggctcacacctgtaatcaggaggctgaggcgggtggatcacctgaggtcaggagttcgagactagcctggccaacacggtgaaaccccacctctactaaaaatacaaaaattagccaggcgtggtggcggacgcctgtaatcccagctactcgggagcctgaggcaggataatcacttaaacccgggaggtggaggctgcagtgagccaagattgcatcactgcactccagcctggacaacaagagcgaaactccatctcaaaaagaaggctgaacgtggtggctcatgcctgtaatcccagcactttaggaggctgaggtgggcggatcacctgaggtcaggagtttgagaccagcctggccaacacagtgaaaccctgtctctactaaaaatacaaaaattagccaggcatg

SEQ ID NO: 736 - DNA, 4046 bp, Homo sapiens
ctgagtaagaatcaccactgtgtgggctccacaggcacagggagccgcgtccccagcacggagcctgcctgacaaagccgcatccgcaggtgacccaacacccattcccaaagtggctgccacttacccccaggctggatgcaccagggagcacattctcctctggcacctccacaccgtccatgatgatcatgcctgtggctgaggcccgcagcgagaacttgccctggatcctgggggccgagagaccccgcatccccttctccagcaggaagccccgaatgcagccatcttcacaccgagcccacactacaaacagatcggccataggcgagttcgtgatcctggggatggaacagtcggtgaggggtctgaccagtgcccctttgcccctgttcaccacctgcccaccacccagaacccttaccaggtcttggtcccattgagggtgtagctcttgttggatgagttgtagtgggctctggtctccatgctgctggggtcacttccgctgttgggctctgtgagcccgaagcagcccaggagctcccccttggctgcaggcacaagacaaagtcacaaggctgcctggtccctgatacatccccttactcaaaaattatcctcgtggcggggtgcagtggctcacgcctgtcatcccagcactttaggaggccaaggcaggtggatcaattgaggtcaggagttccagaccagcctggccaacatggtgaaaccccatctctacttaaaaaaaaaaaaaaaaaaaaatagccagatgtggtggtgggtgcctgtaatcccagctactcaggagactgaggcaggagaatcgcttgaacccgggcaggagaggttgcagtgagccaagatcatgccactgcactacagcctgggcaacagagcaagactccatctcaaaaaagaaaaaaaatccagcctgaccaatatggtgaaaccccatctctactaaaaatacaaaaaattaggccagtcgaggtggctcacacatgtaatctcagcactttgggaggccaaggcagatggatcacttgaggtctggagttcgagaccagcctggccaacatagtgaaacaccatctctactaaaaatacaaaaattagccaggcacgggtagcaagcacctgcaatcccagctaattgggaggccgaggcacaggaattgcttgaactggggaaccgcaggttgcagtgagccaagattgtaccactgcacttcagcctgggggacggagcgggactttgtctcaaaaaaagaaaaaaaaaattaccctcgcccctgagtcagacctcataactaagttagatctggccctgctttcaagagacaggttaccccaaagtcatgatcacaatgccaagatggggagggggacccagggaatcaggaaggagttggccaaactggaagggtgtgaggagttaagcaggaggaggctgtggggaagagcagtgctgggagagggaacagatgtgtaaagaactggtggtacttctggagaatttcaagtagctaagtctggctgggaggatcacatgagtggccagagatgaggtggaaaggtcagcagaggcctggtcacacagggccttgtgggtttttttttttttttgcgaatctgatcttatttgttactcaaaaaatcttatttctgactggattcagacttagaagtggaagctcgcagagaggacagtctgcgtctcttcacgatttgtccctggtgcttcttagcctccttcattctcttggccaaaagtttagcatattctgcagcctcttctttatttttcttaatatgcggctgcttcagagcaatacgccgctgtttgtgctgcaggacatgtggagtgacaaggcgctgaatcttgggtgctttggtcctaggtttcttaccttctttgtttaagggcttttttacaacatactggcagacatcattttctttagagagactgaaaagtttacggattctgctagctgtactgggccccaggtgacgaggcatcatagtctcagtcagtccaggaatacccttctctccttttttttacaataaccaagttgagaacactcagattggcatccacgatgcaaccatgaactgatcttctctttctttctccagttctccttggtctgtaataggaatgccccttactcagtagcaagtggacacggccatgggtcaagacaccctgtttcaaggggaaaccttgtttattgttcccaccactgattccgaccacgtaacccttccattcttcacccagagcgtcaacagcaacttctgtggccatacgcttctcataaaaagtacaaagtttgcgttcatcgtccacttcaatgagtttctggcagccagtggctgggaaggagatgttcagcttcatcttgaagcagctgaacacctccgagacaccacggaagagggccaacgtccacttagcgcaggtcacataggctctttcctttttttgtttttctaatagacatggggtctccttacgttgcccaggctggtttcgaactcttgggctcaagggatcttctcacttcaccctcccaaagtgctgggattataggtgtgagccactgcaaatggccagcaggaacctggtggactttaaactttgggctggactggggaacacagaaagcatagggagatgacggtggtcacagagggggacagtcaggctggccagggatcagatctccaggtgaagcccagggtctggcgggggtccaggtggccacttatgctatctttgagatagggacagaataggctcaggggacagccccacccttgagttccagacctcagagactgtcttccttccaccaggccccatgggcagccactcacccagctggggcaggtacttctgccgctgttcctcgctgccataggcatagatagggtgcatgacgagggaggactggacactcatcgccgacctgtagccactgtccacccgctccagctctcgggccaggagcccataggccacagacgaaaccccagcacagccatatcctggtggtagtaggaggggaaagcaggacaatagagaacagggccctgcccagctaagacccaagagacagggctgaataaggacacacaaggaggcaggcaccaagctggccctagctgaggtttattcatttcatctccacagccactttcagagggtgggacaacagccccactttacagactgggaaattgtggcttagggaaagaagggggctttcagtaaggcaagaggatcacttgagaacagcctgggcaacacagtgagaccctgtctctaaaaaaagaaacaaaggggccaggcacggtggctcacgtttataatcccagcactttgggaggccgaggtgggtggatcacctgaggtcaggagttcaagaccagcctggccaacatggtgaaatcccatttctactaaaaaatacaaaaattagctgggcgtggtggtgcacccctgtaatcccagctactcagaaggctgaggtggcagaattgcttgaacctaggaggaggaaactgcagtgagccaggatcgcaccactgtaatccagtaatccaggctgggtgacagagcgaaactccatctcaaaaaaaaaaaaaaaagaaaagggccgggcaacggtggctcacacctgtaatcaggaggctgaggcgggtggatcacctgaggtcaggagttcgagactagcctggccaacacggtgaaaccccacctctactaaaaatacaaaaattagccaggcgtggtggcggacgcctgtaatcccagctactcgggagcctgaggcaggataatcacttaaacccgggaggtggaggctgcagtgagccaagattgcatcactgcactccagcctggacaacaagagcgaaactccatctcaaaaagaaggctgaacgtggtggctcatgcctgtaatcccagcactttaggaggctgaggtgggcggatcacctgaggtcaggagtttgagaccagc

SEQ ID NO: 737 - DNA, 4045 bp, Homo sapiens
tgagtaagaatcaccactgtgtgggctccacaggcacagggagccgcgtccccagcacggagcctgcctgacaaagccgcatccgcaggtgacccaacacccattcccaaagtggctgccacttacccccaggctggatgcaccagggagcacattctcctctggcacctccacaccgtccatgatgatcatgcctgtggctgaggcccgcagcgagaacttgccctggatcctgggggccgagagaccccgcatccccttctccagcaggaagccccgaatgcagccatcttcacaccgagcccacactacaaacagatcggccataggcgagttcgtgatcctggggatggaacagtcggtgaggggtctgaccagtgcccctttgcccctgttcaccacctgcccaccacccagaacccttaccaggtcttggtcccattgagggtgtagctcttgttggatgagttgtagtgggctctggtctccatgctgctggggtcacttccgctgttgggctctgtgagcccgaagcagcccaggagctcccccttggctgcaggcacaagacaaagtcacaaggctgcctggtccctgatacatccccttactcaaaaattatcctcgtggcggggtgcagtggctcacgcctgtcatcccagcactttaggaggccaaggcaggtggatcaattgaggtcaggagttccagaccagcctggccaacatggtgaaaccccatctctacttaaaaaaaaaaaaaaaaaaaaatagccagatgtggtggtgggtgcctgtaatcccagctactcaggagactgaggcaggagaatcgcttgaacccgggcaggagaggttgcagtgagccaagatcatgccactgcactacagcctgggcaacagagcaagactccatctcaaaaaagaaaaaaaatccagcctgaccaatatggtgaaaccccatctctactaaaaatacaaaaaattaggccagtcgaggtggctcacacatgtaatctcagcactttgggaggccaaggcagatggatcacttgaggtctggagttcgagaccagcctggccaacatagtgaaacaccatctctactaaaaatacaaaaattagccaggcacgggtagcaagcacctgcaatcccagctaattgggaggccgaggcacaggaattgcttgaactggggaaccgcaggttgcagtgagccaagattgtaccactgcacttcagcctgggggacggagcgggactttgtctcaaaaaaagaaaaaaaaaattaccctcgcccctgagtcagacctcataactaagttagatctggccctgctttcaagagacaggttaccccaaagtcatgatcacaatgccaagatggggagggggacccagggaatcaggaaggagttggccaaactggaagggtgtgaggagttaagcaggaggaggctgtggggaagagcagtgctgggagagggaacagatgtgtaaagaactggtggtacttctggagaatttcaagtagctaagtctggctgggaggatcacatgagtggccagagatgaggtggaaaggtcagcagaggcctggtcacacagggccttgtgggtttttttttttttttgcgaatctgatcttatttgttactcaaaaaatcttatttctgactggattcagacttagaagtggaagctcgcagagaggacagtctgcgtctcttcacgatttgtccctggtgcttcttagcctccttcattctcttggccaaaagtttagcatattctgcagcctcttctttatttttcttaatatgcggctgcttcagagcaatacgccgctgtttgtgctgcaggacatgtggagtgacaaggcgctgaatcttgggtgctttggtcctaggtttcttaccttctttgtttaagggcttttttacaacatactggcagacatcattttctttagagagactgaaaagtttacggattctgctagctgtactgggccccaggtgacgaggcatcatagtctcagtcagtccaggaatacccttctctccttttttttacaataaccaagttgagaacactcagattggcatccacgatgcaaccatgaactgatcttctctttctttctccagttctccttggtctgtaataggaatgccccttactcagtagcaagtggacacggccatgggtcaagacaccctgtttcaaggggaaaccttgtttattgttcccaccactgattccgaccacgtaacccttccattcttcacccagagcgtcaacagcaacttctgtggccatacgcttctcataaaaagtacaaagtttgcgttcatcgtccacttcaatgagtttctggcagccagtggctgggaaggagatgttcagcttcatcttgaagcagctgaacacctccgagacaccacggaagagggccaacgtccacttagcgcaggtcacataggctctttcctttttttgtttttctaatagacatggggtctccttacgttgcccaggctggtttcgaactcttgggctcaagggatcttctcacttcaccctcccaaagtgctgggattataggtgtgagccactgcaaatggccagcaggaacctggtggactttaaactttgggctggactggggaacacagaaagcatagggagatgacggtggtcacagagggggacagtcaggctggccagggatcagatctccaggtgaagcccagggtctggcgggggtccaggtggccacttatgctatctttgagatagggacagaataggctcaggggacagccccacccttgagttccagacctcagagactgtcttccttccaccaggccccatgggcagccactcacccagctggggcaggtacttctgccgctgttcctcgctgccataggcatagatagggtgcatgacgagggaggactggacactcatcgccgacctgtagccactgtccacccgctccagctctcgggccaggagcccataggccacagacgaaaccccagcacagccatatcctggtggtagtaggaggggaaagcaggacaatagagaacagggccctgcccagctaagacccaagagacagggctgaataaggacacacaaggaggcaggcaccaagctggccctagctgaggtttattcatttcatctccacagccactttcagagggtgggacaacagccccactttacagactgggaaattgtggcttagggaaagaagggggctttcagtaaggcaagaggatcacttgagaacagcctgggcaacacagtgagaccctgtctctaaaaaaagaaacaaaggggccaggcacggtggctcacgtttataatcccagcactttgggaggccgaggtgggtggatcacctgaggtcaggagttcaagaccagcctggccaacatggtgaaatcccatttctactaaaaaatacaaaaattagctgggcgtggtggtgcacccctgtaatcccagctactcagaaggctgaggtggcagaattgcttgaacctaggaggaggaaactgcagtgagccaggatcgcaccactgtaatccagtaatccaggctgggtgacagagcgaaactccatctcaaaaaaaaaaaaaaaagaaaagggccgggcaacggtggctcacacctgtaatcaggaggctgaggcgggtggatcacctgaggtcaggagttcgagactagcctggccaacacggtgaaaccccacctctactaaaaatacaaaaattagccaggcgtggtggcggacgcctgtaatcccagctactcgggagcctgaggcaggataatcacttaaacccgggaggtggaggctgcagtgagccaagattgcatcactgcactccagcctggacaacaagagcgaaactccatctcaaaaagaaggctgaacgtggtggctcatgcctgtaatcccagcactttaggaggctgaggtgggcggatcacctgaggtcaggagtttgagaccagc

SEQ ID NO: 738 - DNA, 4071 bp, Homo sapiens
agttttcagcacgtcagcgagtccggctgagtaagaatcaccactgtgtgggctccacaggcacagggagccgcgtccccagcacggagcctgcctgacaaagccgcatccgcaggtgacccaacacccattcccaaagtggctgccacttacccccaggctggatgcaccagggagcacattctcctctggcacctccacaccgtccatgatgatcatgcctgtggctgaggcccgcagcgagaacttgccctggatcctgggggccgagagaccccgcatccccttctccagcaggaagccccgaatgcagccatcttcacaccgagcccacactacaaacagatcggccataggcgagttcgtgatcctggggatggaacagtcggtgaggggtctgaccagtgcccctttgcccctgttcaccacctgcccaccacccagaacccttaccaggtcttggtcccattgagggtgtagctcttgttggatgagttgtagtgggctctggtctccatgctgctggggtcacttccgctgttgggctctgtgagcccgaagcagcccaggagctcccccttggctgcaggcacaagacaaagtcacaaggctgcctggtccctgatacatccccttactcaaaaattatcctcgtggcggggtgcagtggctcacgcctgtcatcccagcactttaggaggccaaggcaggtggatcaattgaggtcaggagttccagaccagcctggccaacatggtgaaaccccatctctacttaaaaaaaaaaaaaaaaaaaaatagccagatgtggtggtgggtgcctgtaatcccagctactcaggagactgaggcaggagaatcgcttgaacccgggcaggagaggttgcagtgagccaagatcatgccactgcactacagcctgggcaacagagcaagactccatctcaaaaaagaaaaaaaatccagcctgaccaatatggtgaaaccccatctctactaaaaatacaaaaaattaggccagtcgaggtggctcacacatgtaatctcagcactttgggaggccaaggcagatggatcacttgaggtctggagttcgagaccagcctggccaacatagtgaaacaccatctctactaaaaatacaaaaattagccaggcacgggtagcaagcacctgcaatcccagctaattgggaggccgaggcacaggaattgcttgaactggggaaccgcaggttgcagtgagccaagattgtaccactgcacttcagcctgggggacggagcgggactttgtctcaaaaaaagaaaaaaaaaattaccctcgcccctgagtcagacctcataactaagttagatctggccctgctttcaagagacaggttaccccaaagtcatgatcacaatgccaagatggggagggggacccagggaatcaggaaggagttggccaaactggaagggtgtgaggagttaagcaggaggaggctgtggggaagagcagtgctgggagagggaacagatgtgtaaagaactggtggtacttctggagaatttcaagtagctaagtctggctgggaggatcacatgagtggccagagatgaggtggaaaggtcagcagaggcctggtcacacagggccttgtgggtttttttttttttttgcgaatctgatcttatttgttactcaaaaaatcttatttctgactggattcagacttagaagtggaagctcgcagagaggacagtctgcgtctcttcacgatttgtccctggtgcttcttagcctccttcattctcttggccaaaagtttagcatattctgcagcctcttctttatttttcttaatatgcggctgcttcagagcaatacgccgctgtttgtgctgcaggacatgtggagtgacaaggcgctgaatcttgggtgctttggtcctaggtttcttaccttctttgtttaagggcttttttacaacatactggcagacatcattttctttagagagactgaaaagtttacggattctgctagctgtactgggccccaggtgacgaggcatcatagtctcagtcagtccaggaatacccttctctccttttttttacaataaccaagttgagaacactcagattggcatccacgatgcaaccatgaactgatcttctctttctttctccagttctccttggtctgtaataggaatgccccttactcagtagcaagtggacacggccatgggtcaagacaccctgtttcaaggggaaaccttgtttattgttcccaccactgattccgaccacgtaacccttccattcttcacccagagcgtcaacagcaacttctgtggccatacgcttctcataaaaagtacaaagtttgcgttcatcgtccacttcaatgagtttctggcagccagtggctgggaaggagatgttcagcttcatcttgaagcagctgaacacctccgagacaccacggaagagggccaacgtccacttagcgcaggtcacataggctctttcctttttttgtttttctaatagacatggggtctccttacgttgcccaggctggtttcgaactcttgggctcaagggatcttctcacttcaccctcccaaagtgctgggattataggtgtgagccactgcaaatggccagcaggaacctggtggactttaaactttgggctggactggggaacacagaaagcatagggagatgacggtggtcacagagggggacagtcaggctggccagggatcagatctccaggtgaagcccagggtctggcgggggtccaggtggccacttatgctatctttgagatagggacagaataggctcaggggacagccccacccttgagttccagacctcagagactgtcttccttccaccaggccccatgggcagccactcacccagctggggcaggtacttctgccgctgttcctcgctgccataggcatagatagggtgcatgacgagggaggactggacactcatcgccgacctgtagccactgtccacccgctccagctctcgggccaggagcccataggccacagacgaaaccccagcacagccatatcctggtggtagtaggaggggaaagcaggacaatagagaacagggccctgcccagctaagacccaagagacagggctgaataaggacacacaaggaggcaggcaccaagctggccctagctgaggtttattcatttcatctccacagccactttcagagggtgggacaacagccccactttacagactgggaaattgtggcttagggaaagaagggggctttcagtaaggcaagaggatcacttgagaacagcctgggcaacacagtgagaccctgtctctaaaaaaagaaacaaaggggccaggcacggtggctcacgtttataatcccagcactttgggaggccgaggtgggtggatcacctgaggtcaggagttcaagaccagcctggccaacatggtgaaatcccatttctactaaaaaatacaaaaattagctgggcgtggtggtgcacccctgtaatcccagctactcagaaggctgaggtggcagaattgcttgaacctaggaggaggaaactgcagtgagccaggatcgcaccactgtaatccagtaatccaggctgggtgacagagcgaaactccatctcaaaaaaaaaaaaaaaagaaaagggccgggcaacggtggctcacacctgtaatcaggaggctgaggcgggtggatcacctgaggtcaggagttcgagactagcctggccaacacggtgaaaccccacctctactaaaaatacaaaaattagccaggcgtggtggcggacgcctgtaatcccagctactcgggagcctgaggcaggataatcacttaaacccgggaggtggaggctgcagtgagccaagattgcatcactgcactccagcctggacaacaagagcgaaactccatctcaaaaagaaggctgaacgtggtggctcatgcctgtaatcccagcactttaggaggctgaggtgggcggatcacctgaggtcaggagtttgagaccag

SEQ ID NO: 739 - DNA, 4071 bp, Homo sapiens
gcagttttcagcacgtcagcgagtccggctgagtaagaatcaccactgtgtgggctccacaggcacagggagccgcgtccccagcacggagcctgcctgacaaagccgcatccgcaggtgacccaacacccattcccaaagtggctgccacttacccccaggctggatgcaccagggagcacattctcctctggcacctccacaccgtccatgatgatcatgcctgtggctgaggcccgcagcgagaacttgccctggatcctgggggccgagagaccccgcatccccttctccagcaggaagccccgaatgcagccatcttcacaccgagcccacactacaaacagatcggccataggcgagttcgtgatcctggggatggaacagtcggtgaggggtctgaccagtgcccctttgcccctgttcaccacctgcccaccacccagaacccttaccaggtcttggtcccattgagggtgtagctcttgttggatgagttgtagtgggctctggtctccatgctgctggggtcacttccgctgttgggctctgtgagcccgaagcagcccaggagctcccccttggctgcaggcacaagacaaagtcacaaggctgcctggtccctgatacatccccttactcaaaaattatcctcgtggcggggtgcagtggctcacgcctgtcatcccagcactttaggaggccaaggcaggtggatcaattgaggtcaggagttccagaccagcctggccaacatggtgaaaccccatctctacttaaaaaaaaaaaaaaaaaaaaatagccagatgtggtggtgggtgcctgtaatcccagctactcaggagactgaggcaggagaatcgcttgaacccgggcaggagaggttgcagtgagccaagatcatgccactgcactacagcctgggcaacagagcaagactccatctcaaaaaagaaaaaaaatccagcctgaccaatatggtgaaaccccatctctactaaaaatacaaaaaattaggccagtcgaggtggctcacacatgtaatctcagcactttgggaggccaaggcagatggatcacttgaggtctggagttcgagaccagcctggccaacatagtgaaacaccatctctactaaaaatacaaaaattagccaggcacgggtagcaagcacctgcaatcccagctaattgggaggccgaggcacaggaattgcttgaactggggaaccgcaggttgcagtgagccaagattgtaccactgcacttcagcctgggggacggagcgggactttgtctcaaaaaaagaaaaaaaaaattaccctcgcccctgagtcagacctcataactaagttagatctggccctgctttcaagagacaggttaccccaaagtcatgatcacaatgccaagatggggagggggacccagggaatcaggaaggagttggccaaactggaagggtgtgaggagttaagcaggaggaggctgtggggaagagcagtgctgggagagggaacagatgtgtaaagaactggtggtacttctggagaatttcaagtagctaagtctggctgggaggatcacatgagtggccagagatgaggtggaaaggtcagcagaggcctggtcacacagggccttgtgggtttttttttttttttgcgaatctgatcttatttgttactcaaaaaatcttatttctgactggattcagacttagaagtggaagctcgcagagaggacagtctgcgtctcttcacgatttgtccctggtgcttcttagcctccttcattctcttggccaaaagtttagcatattctgcagcctcttctttatttttcttaatatgcggctgcttcagagcaatacgccgctgtttgtgctgcaggacatgtggagtgacaaggcgctgaatcttgggtgctttggtcctaggtttcttaccttctttgtttaagggcttttttacaacatactggcagacatcattttctttagagagactgaaaagtttacggattctgctagctgtactgggccccaggtgacgaggcatcatagtctcagtcagtccaggaatacccttctctccttttttttacaataaccaagttgagaacactcagattggcatccacgatgcaaccatgaactgatcttctctttctttctccagttctccttggtctgtaataggaatgccccttactcagtagcaagtggacacggccatgggtcaagacaccctgtttcaaggggaaaccttgtttattgttcccaccactgattccgaccacgtaacccttccattcttcacccagagcgtcaacagcaacttctgtggccatacgcttctcataaaaagtacaaagtttgcgttcatcgtccacttcaatgagtttctggcagccagtggctgggaaggagatgttcagcttcatcttgaagcagctgaacacctccgagacaccacggaagagggccaacgtccacttagcgcaggtcacataggctctttcctttttttgtttttctaatagacatggggtctccttacgttgcccaggctggtttcgaactcttgggctcaagggatcttctcacttcaccctcccaaagtgctgggattataggtgtgagccactgcaaatggccagcaggaacctggtggactttaaactttgggctggactggggaacacagaaagcatagggagatgacggtggtcacagagggggacagtcaggctggccagggatcagatctccaggtgaagcccagggtctggcgggggtccaggtggccacttatgctatctttgagatagggacagaataggctcaggggacagccccacccttgagttccagacctcagagactgtcttccttccaccaggccccatgggcagccactcacccagctggggcaggtacttctgccgctgttcctcgctgccataggcatagatagggtgcatgacgagggaggactggacactcatcgccgacctgtagccactgtccacccgctccagctctcgggccaggagcccataggccacagacgaaaccccagcacagccatatcctggtggtagtaggaggggaaagcaggacaatagagaacagggccctgcccagctaagacccaagagacagggctgaataaggacacacaaggaggcaggcaccaagctggccctagctgaggtttattcatttcatctccacagccactttcagagggtgggacaacagccccactttacagactgggaaattgtggcttagggaaagaagggggctttcagtaaggcaagaggatcacttgagaacagcctgggcaacacagtgagaccctgtctctaaaaaaagaaacaaaggggccaggcacggtggctcacgtttataatcccagcactttgggaggccgaggtgggtggatcacctgaggtcaggagttcaagaccagcctggccaacatggtgaaatcccatttctactaaaaaatacaaaaattagctgggcgtggtggtgcacccctgtaatcccagctactcagaaggctgaggtggcagaattgcttgaacctaggaggaggaaactgcagtgagccaggatcgcaccactgtaatccagtaatccaggctgggtgacagagcgaaactccatctcaaaaaaaaaaaaaaaagaaaagggccgggcaacggtggctcacacctgtaatcaggaggctgaggcgggtggatcacctgaggtcaggagttcgagactagcctggccaacacggtgaaaccccacctctactaaaaatacaaaaattagccaggcgtggtggcggacgcctgtaatcccagctactcgggagcctgaggcaggataatcacttaaacccgggaggtggaggctgcagtgagccaagattgcatcactgcactccagcctggacaacaagagcgaaactccatctcaaaaagaaggctgaacgtggtggctcatgcctgtaatcccagcactttaggaggctgaggtgggcggatcacctgaggtcaggagtttgagacc

SEQ ID NO: 740 - DNA, 4045 bp, Homo sapiens
ggttcaggcccatgtgtcccgggcagagccgggatgagcgagacggtcaccaaatgggggcagttttcagcacgtcagcgagtccggctgagtaagaatcaccactgtgtgggctccacaggcacagggagccgcgtccccagcacggagcctgcctgacaaagccgcatccgcaggtgacccaacacccattcccaaagtggctgccacttacccccaggctggatgcaccagggagcacattctcctctggcacctccacaccgtccatgatgatcatgcctgtggctgaggcccgcagcgagaacttgccctggatcctgggggccgagagaccccgcatccccttctccagcaggaagccccgaatgcagccatcttcacaccgagcccacactacaaacagatcggccataggcgagttcgtgatcctggggatggaacagtcggtgaggggtctgaccagtgcccctttgcccctgttcaccacctgcccaccacccagaacccttaccaggtcttggtcccattgagggtgtagctcttgttggatgagttgtagtgggctctggtctccatgctgctggggtcacttccgctgttgggctctgtgagcccgaagcagcccaggagctcccccttggctgcaggcacaagacaaagtcacaaggctgcctggtccctgatacatccccttactcaaaaattatcctcgtggcggggtgcagtggctcacgcctgtcatcccagcactttaggaggccaaggcaggtggatcaattgaggtcaggagttccagaccagcctggccaacatggtgaaaccccatctctacttaaaaaaaaaaaaaaaaaaaaatagccagatgtggtggtgggtgcctgtaatcccagctactcaggagactgaggcaggagaatcgcttgaacccgggcaggagaggttgcagtgagccaagatcatgccactgcactacagcctgggcaacagagcaagactccatctcaaaaaagaaaaaaaatccagcctgaccaatatggtgaaaccccatctctactaaaaatacaaaaaattaggccagtcgaggtggctcacacatgtaatctcagcactttgggaggccaaggcagatggatcacttgaggtctggagttcgagaccagcctggccaacatagtgaaacaccatctctactaaaaatacaaaaattagccaggcacgggtagcaagcacctgcaatcccagctaattgggaggccgaggcacaggaattgcttgaactggggaaccgcaggttgcagtgagccaagattgtaccactgcacttcagcctgggggacggagcgggactttgtctcaaaaaaagaaaaaaaaaattaccctcgcccctgagtcagacctcataactaagttagatctggccctgctttcaagagacaggttaccccaaagtcatgatcacaatgccaagatggggagggggacccagggaatcaggaaggagttggccaaactggaagggtgtgaggagttaagcaggaggaggctgtggggaagagcagtgctgggagagggaacagatgtgtaaagaactggtggtacttctggagaatttcaagtagctaagtctggctgggaggatcacatgagtggccagagatgaggtggaaaggtcagcagaggcctggtcacacagggccttgtgggtttttttttttttttgcgaatctgatcttatttgttactcaaaaaatcttatttctgactggattcagacttagaagtggaagctcgcagagaggacagtctgcgtctcttcacgatttgtccctggtgcttcttagcctccttcattctcttggccaaaagtttagcatattctgcagcctcttctttatttttcttaatatgcggctgcttcagagcaatacgccgctgtttgtgctgcaggacatgtggagtgacaaggcgctgaatcttgggtgctttggtcctaggtttcttaccttctttgtttaagggcttttttacaacatactggcagacatcattttctttagagagactgaaaagtttacggattctgctagctgtactgggccccaggtgacgaggcatcatagtctcagtcagtccaggaatacccttctctccttttttttacaataaccaagttgagaacactcagattggcatccacgatgcaaccatgaactgatcttctctttctttctccagttctccttggtctgtaataggaatgccccttactcagtagcaagtggacacggccatgggtcaagacaccctgtttcaaggggaaaccttgtttattgttcccaccactgattccgaccacgtaacccttccattcttcacccagagcgtcaacagcaacttctgtggccatacgcttctcataaaaagtacaaagtttgcgttcatcgtccacttcaatgagtttctggcagccagtggctgggaaggagatgttcagcttcatcttgaagcagctgaacacctccgagacaccacggaagagggccaacgtccacttagcgcaggtcacataggctctttcctttttttgtttttctaatagacatggggtctccttacgttgcccaggctggtttcgaactcttgggctcaagggatcttctcacttcaccctcccaaagtgctgggattataggtgtgagccactgcaaatggccagcaggaacctggtggactttaaactttgggctggactggggaacacagaaagcatagggagatgacggtggtcacagagggggacagtcaggctggccagggatcagatctccaggtgaagcccagggtctggcgggggtccaggtggccacttatgctatctttgagatagggacagaataggctcaggggacagccccacccttgagttccagacctcagagactgtcttccttccaccaggccccatgggcagccactcacccagctggggcaggtacttctgccgctgttcctcgctgccataggcatagatagggtgcatgacgagggaggactggacactcatcgccgacctgtagccactgtccacccgctccagctctcgggccaggagcccataggccacagacgaaaccccagcacagccatatcctggtggtagtaggaggggaaagcaggacaatagagaacagggccctgcccagctaagacccaagagacagggctgaataaggacacacaaggaggcaggcaccaagctggccctagctgaggtttattcatttcatctccacagccactttcagagggtgggacaacagccccactttacagactgggaaattgtggcttagggaaagaagggggctttcagtaaggcaagaggatcacttgagaacagcctgggcaacacagtgagaccctgtctctaaaaaaagaaacaaaggggccaggcacggtggctcacgtttataatcccagcactttgggaggccgaggtgggtggatcacctgaggtcaggagttcaagaccagcctggccaacatggtgaaatcccatttctactaaaaaatacaaaaattagctgggcgtggtggtgcacccctgtaatcccagctactcagaaggctgaggtggcagaattgcttgaacctaggaggaggaaactgcagtgagccaggatcgcaccactgtaatccagtaatccaggctgggtgacagagcgaaactccatctcaaaaaaaaaaaaaaaagaaaagggccgggcaacggtggctcacacctgtaatcaggaggctgaggcgggtggatcacctgaggtcaggagttcgagactagcctggccaacacggtgaaaccccacctctactaaaaatacaaaaattagccaggcgtggtggcggacgcctgtaatcccagctactcgggagcctgaggcaggataatcacttaaacccgggaggtggaggctgcagtgagccaagattgcatcactgcactccagcctggacaacaagagcgaaactccatctcaaaaagaag

SEQ ID NO: 741 - DNA, 4043 bp, Homo sapiens
acacagtcccacccagcctggcatctgggttcgatgctcagagccaggaggctgacggatgccagaagatgcactgtgagtcaaatgactgagctggttcaggcccatgtgtcccgggcagagccgggatgagcgagacggtcaccaaatgggggcagttttcagcacgtcagcgagtccggctgagtaagaatcaccactgtgtgggctccacaggcacagggagccgcgtccccagcacggagcctgcctgacaaagccgcatccgcaggtgacccaacacccattcccaaagtggctgccacttacccccaggctggatgcaccagggagcacattctcctctggcacctccacaccgtccatgatgatcatgcctgtggctgaggcccgcagcgagaacttgccctggatcctgggggccgagagaccccgcatccccttctccagcaggaagccccgaatgcagccatcttcacaccgagcccacactacaaacagatcggccataggcgagttcgtgatcctggggatggaacagtcggtgaggggtctgaccagtgcccctttgcccctgttcaccacctgcccaccacccagaacccttaccaggtcttggtcccattgagggtgtagctcttgttggatgagttgtagtgggctctggtctccatgctgctggggtcacttccgctgttgggctctgtgagcccgaagcagcccaggagctcccccttggctgcaggcacaagacaaagtcacaaggctgcctggtccctgatacatccccttactcaaaaattatcctcgtggcggggtgcagtggctcacgcctgtcatcccagcactttaggaggccaaggcaggtggatcaattgaggtcaggagttccagaccagcctggccaacatggtgaaaccccatctctacttaaaaaaaaaaaaaaaaaaaaatagccagatgtggtggtgggtgcctgtaatcccagctactcaggagactgaggcaggagaatcgcttgaacccgggcaggagaggttgcagtgagccaagatcatgccactgcactacagcctgggcaacagagcaagactccatctcaaaaaagaaaaaaaatccagcctgaccaatatggtgaaaccccatctctactaaaaatacaaaaaattaggccagtcgaggtggctcacacatgtaatctcagcactttgggaggccaaggcagatggatcacttgaggtctggagttcgagaccagcctggccaacatagtgaaacaccatctctactaaaaatacaaaaattagccaggcacgggtagcaagcacctgcaatcccagctaattgggaggccgaggcacaggaattgcttgaactggggaaccgcaggttgcagtgagccaagattgtaccactgcacttcagcctgggggacggagcgggactttgtctcaaaaaaagaaaaaaaaaattaccctcgcccctgagtcagacctcataactaagttagatctggccctgctttcaagagacaggttaccccaaagtcatgatcacaatgccaagatggggagggggacccagggaatcaggaaggagttggccaaactggaagggtgtgaggagttaagcaggaggaggctgtggggaagagcagtgctgggagagggaacagatgtgtaaagaactggtggtacttctggagaatttcaagtagctaagtctggctgggaggatcacatgagtggccagagatgaggtggaaaggtcagcagaggcctggtcacacagggccttgtgggtttttttttttttttgcgaatctgatcttatttgttactcaaaaaatcttatttctgactggattcagacttagaagtggaagctcgcagagaggacagtctgcgtctcttcacgatttgtccctggtgcttcttagcctccttcattctcttggccaaaagtttagcatattctgcagcctcttctttatttttcttaatatgcggctgcttcagagcaatacgccgctgtttgtgctgcaggacatgtggagtgacaaggcgctgaatcttgggtgctttggtcctaggtttcttaccttctttgtttaagggcttttttacaacatactggcagacatcattttctttagagagactgaaaagtttacggattctgctagctgtactgggccccaggtgacgaggcatcatagtctcagtcagtccaggaatacccttctctccttttttttacaataaccaagttgagaacactcagattggcatccacgatgcaaccatgaactgatcttctctttctttctccagttctccttggtctgtaataggaatgccccttactcagtagcaagtggacacggccatgggtcaagacaccctgtttcaaggggaaaccttgtttattgttcccaccactgattccgaccacgtaacccttccattcttcacccagagcgtcaacagcaacttctgtggccatacgcttctcataaaaagtacaaagtttgcgttcatcgtccacttcaatgagtttctggcagccagtggctgggaaggagatgttcagcttcatcttgaagcagctgaacacctccgagacaccacggaagagggccaacgtccacttagcgcaggtcacataggctctttcctttttttgtttttctaatagacatggggtctccttacgttgcccaggctggtttcgaactcttgggctcaagggatcttctcacttcaccctcccaaagtgctgggattataggtgtgagccactgcaaatggccagcaggaacctggtggactttaaactttgggctggactggggaacacagaaagcatagggagatgacggtggtcacagagggggacagtcaggctggccagggatcagatctccaggtgaagcccagggtctggcgggggtccaggtggccacttatgctatctttgagatagggacagaataggctcaggggacagccccacccttgagttccagacctcagagactgtcttccttccaccaggccccatgggcagccactcacccagctggggcaggtacttctgccgctgttcctcgctgccataggcatagatagggtgcatgacgagggaggactggacactcatcgccgacctgtagccactgtccacccgctccagctctcgggccaggagcccataggccacagacgaaaccccagcacagccatatcctggtggtagtaggaggggaaagcaggacaatagagaacagggccctgcccagctaagacccaagagacagggctgaataaggacacacaaggaggcaggcaccaagctggccctagctgaggtttattcatttcatctccacagccactttcagagggtgggacaacagccccactttacagactgggaaattgtggcttagggaaagaagggggctttcagtaaggcaagaggatcacttgagaacagcctgggcaacacagtgagaccctgtctctaaaaaaagaaacaaaggggccaggcacggtggctcacgtttataatcccagcactttgggaggccgaggtgggtggatcacctgaggtcaggagttcaagaccagcctggccaacatggtgaaatcccatttctactaaaaaatacaaaaattagctgggcgtggtggtgcacccctgtaatcccagctactcagaaggctgaggtggcagaattgcttgaacctaggaggaggaaactgcagtgagccaggatcgcaccactgtaatccagtaatccaggctgggtgacagagcgaaactccatctcaaaaaaaaaaaaaaaagaaaagggccgggcaacggtggctcacacctgtaatcaggaggctgaggcgggtggatcacctgaggtcaggagttcgagactagcctggccaacacggtgaaaccccacctctactaaaaatacaaaaattagccaggcgtggtggcggacgcctgtaatcccagctactcgggagcctgaggcaggataa

SEQ ID NO: 742 - DNA, 4046 bp, Homo sapiens
tgctcttctctaggcaaaatgaggggaaaacgagggcctcccagccccaaagttttggggttctgcccgtatcccagaatacactcaatccttttccagccttgtacccaactccagcctgtgccctctgcccctgcagaactcctgtgggcctctgctgctcagccatcccccggaagcctcgcccttgtcctggactccggtgcctcctggcccttgggtccctggacactggctgcctccaggcttctccatgccaccaccagtggtgtgccgcctgctgtaccaagaacctgctgtctctctgcctcccttccctggtaagatgataattcaacattcattcaacatatatttgagtgccaatctgccacatattggagagggaagaggaagaaagcataggtggggagagggaggaaagaaactatgaccttggcccctatacactctgcattcttttattcttattaggctttgaccctggcacctccctccagctgcccactcatgggcccttcaccacctgcccaggatctcacccagtactgacagctcctctttctggagagccccaagggccccctagccagccccgcacgtgagtagggagagaaggatgtgtatcataagcctaagcctgtgctgtgtccaaccacagtgctggtgtccaaccacagtggataatgaagatgaaaaggtctctgactaataggcaaggcagagctctcctagtactgccatttcctagctgtgatgctttggacaattatctttacctctctgagcctgtttttctatcagtaaattggagacactattacttacctctctgattgttgtaagaattagcaataatgtatggaatagacctagcacagactctttaatggtagctgttatatctgcttagacagatttgatggggtaagattgcctgctgatatggggggcagagatgatgagagcctcagagacccaggagaggggccagaggccattaggaaaagcttcccaaaggtgagccaagctctccttcaagttctatggtgactggggaactgggggaatgggacccagactctgataggtcagggacagtaatctcagtcttctaggtgtttttttaaaaaccggcatcaggtggggcctggtggctcacacctgtaatcccaacactttgggaggctgaggtgggaggattacttgaggccaagagtttgagaccacctgagtaactgagcgagacttcgtctctacaaaaaaattaaaacagccaggaatggtggtgcacacctgttttcctggctacttaggaggctgaggtgggaagatggtgtaggcccaggagttcaagcttatggtgagccatgatcacaccgccactgcactccagcctaggtgacagagcaagagcctgtctcaaaaaaaaaaaagacactagtgatttcccataatcctcacagtagccctgggaggaaaaactggcaaggatttttactttactgaaaacaaaataagtcaagacacagcttaatggcccagcaggctctcagattcccagatcaaaacatggcaaaatcctgcccctctttcaatgtgtgcatgtctgttcatctgtttaaccaccctggcatcttctctccttgtttctagacactcaactctgatactccagccctgtggcaccccagaccctcttcagctacagccacaggtcctgggaaagaagtgggatctagggccctgggaggaggttgagcctggggaaggaaaaagcaggaaactgaaggaagcaggggctgaggaacacttagagggtgggcagaagcgggggttcccagtctgcttgtctccctttcccttgcaggcctctggagcctcgtgcctggcccggacatctggtccctcagagtggcagctgcagcaagaggcagctgaagccctcgtggggctgaaagattcatcccaggctcctcgtgtgaccccttctgtgccccccaaccctgcctggatctccctgcttcacccctgtggcccaccaggtgggccatgaaaggagaggatggatagggatggctgggaaatggagatcactgaagtacacagggactaaccaaggagatgagggggtcgacaggttgaacgtcttcaggcccaggaccccaagctcctcagcctggcccctgggattgcagttgagagttattcagtgaatccattttatcagtttggcactcgacagcaaatttcttgatatcaaggaaagtggggcactgagaaaggcagggacttgcccaagggcatatagtgagacagtggcagggaacccaatgctctgtctctggacccaggctgcctgctgaagtctgaagtggggtctggcctgggaggaggtctgataagtgccttcaaggagcttacgttctagttagggaaattggatgccttcacaaggctcagtgacaaacctgaagaagattggaggaaccttgaagagtgagaaacacctagggggacagacagggaaagctgcgaattctcttgtccaaatagtggattgggcagactggcctggaggaaatgctagaacagagggaaaggaggctggagaggcttctgatggtggagatctggcatgccaggcttaggtgtctagaacagcaactgtatgtgaaggggagccagggaacgtttctgaactaagcaaggacaaattcagagaccctgagctttagaaagacaagtgggtggctttgatggacggtttggaggaggcaagactggaggtgggaaaattagcaaggaggtctgtgaaataatccaggagaacaatgatgaggcctggattggattcggtaaaaagagggggttgctagaaggaaaaacaggtgtgacctgatcctgccccttccttcttgcctgtagctcctgctggaggaagaggattccagcctgttggcccctgtcttcgacccagcccagccccctctgttgctctgcatattggccgtctggggtccatctccctcctgagctagaaacccagagatggaggctgtcttgctatggcagggaggtgacagcctgctggcactgtatatttagtgtcttacttaaggatttatgcatggaatttaatgtagtacaagcttcgggcttttttgtttgtttgtttgtttgtttgtttaagctttcaggtgcttcattagctttcagttcctttggtagtgtgggcatttccttggctgacagtggatattcttgtacccttcttgggtcctgggatctcttgaaatccccaataaagagagagttgtgctatttaagctgaccagtatctataaacgtgtttgcatgagtttacatcccaggattccatgattctgtaaatgcctatgcattcatgtctgtctccatgcatgtgaaaacaggagagtgttttcattttgtgtctaggtttgtgtgagtaagcaagaaataaacctttgttgttgtaagccactgagatttggagagtgttaccacagcctaacctagtctatcctgactgacagaaaggacttgttcatttcgcttctcaaagtgaaaaatctgttatccaatagctaccatagatgaaaacaaacttggatttttttctttgtccaaataaaaaaaaatgatgtaaagaaataatgggggattcactgattaattgcccgctctgtgccaggcatagacagtttccagctgtctagaggggctacaaatcgaaatgcctacagggctgagcagatcaaataaatgagtaaagaaggccagatggaccctggcaaactgagaatggatgccttgcctaaggagcagcctccttttggccctagcagattactgccaggcgggaatgtggactcagtgttgctccatcttctgattttttaagagaaactggaaaactagatttccatgtaaaacatcttaattttcaaatgttggctcagttttcttctttaaattctatacgtgccaaataaaacatattttcaggctagctttggccagtg

SEQ ID NO: 743 - DNA, 4042 bp, Homo sapiens
atcagtgtggggtaaaattctaatatttgctcttatgttttaaattctcagtctttccaacataagaaaatagctacacacatttcagtgtttcctttttgcaacaagttaacataattttattggaccacgttatttagttgttgggccttgtaaggattaaatgagatcatgcatgtaacactacagtaacagccacatgataaatgtccaaataatatttacctgtgcctggcacagagcaggcactcaaaaaatattttttagagcatgtgacgcgccatgaaccagaggagccactttaaatggacaaacggggatctcatttttttttttttttttaatggtgagacaagccctgagaaggcaaatggactgcctaaagctacacaggtcagcggggcaggtaaatctaaattggcaaagtaagggctgagcgaacagactccgacactagaaggcagagctgaactaacttctgctaaggtcccgcctctgccgctttgtcccgcccttatcttctcccctcctccagcgcctcattcccttttcgctcgccccggccgtgctgaagcaacttccgccctgagaagggtggggcttccgtctcccgctctcgcgactcctggcggtgaaggacggaagatgatagccacatttcttcctcgcccttcccctaggttccctgtcacagttccgcccttactactcccacttccggccagggaacagccacttccacccggaaaaggggttgttccgccgtggggcgccagctgtggcccacccatcctgccccgtactttcgccatcatagtattctccaccactgttccttccagccacgaacgacgcaaacgaagccaagttcccccagctccgaacaggagctctctatcctctctctattacactccgggagaaggaaacgcgggaggaaacccaggcctccacgcgcgaccccttggccctcccctttacctctccacccctcactagacaccctcccctctaggcggggacgaactttcgccctgagagaggcggagcctcagcgtctaccctcgctctcgcgagctttcggaactctcgcgagaccctacgcccgacttgtgcgcccgggaaaccccgtcgttccctttcccctggctggcagcgcggaggccgcacggtaagcgggggctccgagctggaccgggcgcgaggtggcagggccggacgccgaagcctcagagcgcgtgcctgagggccccgaggcgcccggcgcgggcccgtcccgccccctagagccgcggccacgtgcgagcggcaggcccggacatgcccggtcagcgccgtccgggaaccgagcgtgggccccggggggcagcggcggggtgcgtggggcgtccggagtcccggggctggggagtggggtcgcgcaggatcctcacacgcaggggccgggctctgttagtgcgatccagagaggccgtgggcgtcggtgagctccttcagacccgcaggagccggagcccggcgttgaaggggccgtgggaagtaacggggggtaccacggtttaggatgcgctggagcgaaaggattggggtggggtccgtgctcttggcagtcgtctctgccaggcctgtgttcacatgcttgactttctccctcagatgcctggagttactgtaaaagacgtgaaccagcaggagttcgtcagagctctggcagccttcctcaaaaagtgagtttggggactgaggttcaaaacgggtggaggctgtcgccttggcctgcccatctgagccccagtgtttgccggtcctggcaggggaggcttgtttggggcctccgtggctcctttcagcgtgaggcctggcttgtgttccggttccagcctctctttgtactctgggcacagcatagttgtgttgaggggagggcatttgggatatggggtagtttgtggagatgactgaatcgtgcttttcccactgttttggtcttaggtccgggaagctgaaagtccccgaatgggtggataccgtcaagctggccaagcacaaagagcttgctccctacgatgagaactggttctacacgcgagctggtgaggaacttaggtctttggctggagagtggggagctgggtgacccctggcacaaaccatacttccctgtctcctctgagctctttcccgccccaagagggagagaaacccttggttgtgtcaccacttgctttgtgtgatgtgacattcgataacttggtactccaagtttttatgacattctaagagctttgtgagaggaggacctgtggctttgagcctcaggggaaaccagagacagatgaatgttcatattttgcttacaggtggtttaatcctttctatatacacggaggcagactccctgggtttggatccatcttttacatctggctgtgtgtcctctggcaagttggttaacctgcctgtgcactctctcatccccaaaatgggactaattattgtaccagtactagagtattgcaaggattgaatgaatttaaagcagagtgtttagaacgtgtctgttgcacagtagttattcaggaaaaagccagttgtctttactattgctcagatcatcaagttagccttctccatatctctaacaggctgtttctaactaaatggttggagatctggccaggtcagtccctgctttaaatcttgacttctgatcttatggacaccctgcaacctcgtgccagccccgtctcttttcgatcttccaataataatttacgtacagtccctgactagtgttagttctcacgtgtcttaatatttcagtactcactaaatcttcactttcaggaagatgtaacagggtgggcggtggcagtgccgtgttatgtcaaggtgacagccttagcaccgaccttcactaactaaggggcctcggcctctccaatcttaaaccttctctctctgtgaagtggggactccatcctgaccacaacttgtctccagataagaagtaggtgggaagcagggtttggaaatcggcaaagctcctccatgaccctgaaaagagttggccttggtacaggttgcttggcccttcagaatatgaagcattttgtagatttgtggtacacttgtgcctcaaatgtctattggggcccactctttcaggccatggagtgagcacagaggaccagcataactcagccgcggcctctgaggactgaaagatgaacttgctgaggtgggtcgggttgctggcataccacctacccaccgtttgttttagacagaaaatggggcggatgaagagaagctgacttccctgggcgcacagcagtgacaagccctggaagttacatatctcctccacctgtccccccatcttgctttggcagtgcctcaagggtcagttggtcagagcagctttggatctgggattagcctttctcatttgctggggtgaagacacgttctgcacataccaaatacctccaaagtaggactgtatgtgtcttgtacattttttttttttttttaacatggggagggattaacaagagatggcattaagaccttggataataaacctagttgcatctgctggtcatggtagagctgctgtggtcccttgcagcccacagtggccctgcctggaaacctcaagcaggatgtgcatcttctgcctgcctactgatctccatcacttggagtaccccaaaggcctctttttcacctcacttgcccagctgtcctagcggcataggatggttgtgtggtagaccagaggcctgttgtgtatatttttgttgggttatagccacccctgtgtatctacatgcacaagggcagagttgtagttgtggcagaagctgtagcctacaaagcctgaaatatttcctacctgaccctttattatttattttcagggacagggtctaggcctgtcacccaggttggagtgcagtggcacaattatagctcactgcagcttcttgggctcaagtgatcctcctgccccaccctcctaagtagctgggactac

SEQ ID NO: 744 - DNA, 4041 bp, Homo sapiens
cactccaggagttcagccagagcaacatggcaaaaccgggtctcttcagaaattatctgggcgtggtggcttgcacctgtagtcccaactattcaggaggtcaaagctgcagtgagctgttaccactgcactccagcctgggtgacagaatgatgccctgtctccaaaaaaaaaaaaaagtataatatttgcatatatcctatgtagatgttttacttttgagacagagtctcactctgtcacccagtctggagtgcagtggcatgatcttggctaactgcaacctctgcctcccaggttcaagtgattctcctgccctgcctcagcctcccaggtagctggggttacagggggtgtgccaccacacctggctaattttcttgtaatttcagtagagatggggtttcaccatgttggccaggctggtctcaaactcctgacctcaggtgattctcccgcctcagcctcccaaagtggtgggattacaggcgtgagccactgcgcccggcctgatcccatatattttaaatcatctgtagattacttatagattaatacaggccagacatggcacatacttatagtcccagctacttaggaggctgaggcaagaggattgcttaagcccaggagttcgaggctgcagtgagctatgatcacaccacagcactccagcctgggtgacagaatgaggccctttttttgtgttttaagaaaaaagaaaaagcactaatacggtgtaaataattgttacactgttttgaattgtagtttttttcccctaaatatttttgatccacccttggttgagtctgtggatatgaagggctggctgtatctggacctgatctcagggcaggagtgggctgggaacaagcggtgtgtaagaactgtttctgggcagaagcagcccaccccacacagactactgcctggcacttggcagttatggaagaacccccaattcccccacttgatctttagaactagaggaaagaaatcactagagcagactcagaccaacttgctgatctctgggtcccaggaacaaaccagactctgctctgagctccagagctaggcaggaccatgtgatggctgaaatctgggtgcttcctgcatgtgggccccggtgccatcacagtggcaggacagggcagttcctccagagctgtgtgacacggagccagtgagtaccctctggcacctcagtttcactctttaaaggagagtagcacttgacacacctgttgagtcctcagagtaacccggccctcaggtgaagcagggtggagagatcgaaaagcatttggcacagggcctggcagatgtgtgctccagttaatagaagcgtgcaagcgtttctggggaggctggtgtgtcgactggattttacggagctttttttgcaggcaaggaggctggctggggtggaccagggacttgcccaagccagccttccctgtgtctgcagaggggctggtacacattccaagcagggggcacccactgcacagagtgtctgccctgcccttgttatcctgagctctccagactgaggtggcccggagagtggcaataggtcccttcactcctgcttctctggggcccatggagatggtcacagctaggctccacccctacataacctcaggttcaattcaacagcagtgctgctgggatagtaaccactaaagaagttggccctggagatggtgggagtgcccacccagggtgcagggctgtttgtcaaggaagagctagccgggggggtgggtgaggagagggggctgtcagtttctgggtgttagtgtgtgttttcagtttcccttcttataaaacagtgagaattagctgtttacacacaaggaattgtttacctgagaccttgatcaagacccttaaatctccctctcacactacccccagcttccacagcgcggcacctgtacctccggggtggcgctggggttggctccatgaccaagatctatgggggacgtcagagaaacggcgtcatgcccagccacttcagccgaggctccaagagtgtggcccgccgggtcctccaagccctggaggggctgaaaatggtggaaaaggaccaagatgggtaagcagggtagggggggctgcattgatggagtagccttgaggcccggtcatcaattccccaacgaatggtcctgcatagtctgcccagcccctcaggcccctcctatcagaggcaggcaggaggggattctgcagaaaagcaaacagcacggggcctcaccccgacctctctggctgactagcccaggctccaggagggtaatttagcgactatctgctttcattagcctgctcgttaacttttcccaattgatttttcggggcttttgatctaaatgcttgcacaaacaacaccccgtcagctcccaggggggctcccactactgcccccagctcgttagaatgcacctgactagggccctcagtgggacttggctggcggcaggtggcttcttgagaagcctggctcacagccaggagggaaggggctgagaacaggacctgtgctcactggggcctgcatgacccttccctccccacagcggccgcaaactgacacctcagggacaaagagatctggacagaatcgccggacaggtaaggcctgcgtttggggtggggctgggtcccttagtcgctgcccaagcatttccaaagcccatacttcgtcaggtagacttatttccttctctggagggcacagcccagggtgctggtggggtcagaggagggctgcccagagacaggagaaaggacagtcctgtctgacttttcctgttggtgctgcttagaaatttggaggcaggctggctgtggtgtctcacccctgtaatcccagcactttgggatgccgaggcaggcgaattatctgaggtcaggagttcaagaccattctgaccaacatggagaaaccctgtctctactaaaaatacaaaattagccgggtgtggtggcacattcctgtaatctcagctactggggaggctgaggcacaaaaatcacttgaacccgggaggtggaggctgcggtgagccaagatcatgccattgcaccccagcctgggcaacaagagtgaaactccatctcaaaaaaaaaaaaattggagggaactccagcccaggtgccactgggcatctatccacagagcacatagctgtacccgtagatgactccccctccccaggtcagcctgcgatgtttccccttagtcctcatgcgtactgagcatcacatgggctgcttgggagaggtggagataagggaggggggctggttcagaacccaggtctccattcagatcctggctggccaacaccctggggcagagtggccacacccctggtgccacagtctcctgtcttggcctccctgtggccaaaatctacccttggccacctcaagcatggtagtgaggagtcagtgagctatagtacagcaggagcacccagggcctggcatgagctcaattctgtatcactgactcaggcctcctaggagccttggagcatttagtcagtcaagtgtcacaaaagaatggaaagtgtcagccctctaggagttgggggtggtctggaaggagaaagctcttccaggcagagtggggcttggctcacacatcattgctggtggttggatgttggccttctcacatggcagtgggcggaatttggactccactccgccactcccttcttttttttttttttttttttttttttttttgagacagagtcttgctctgtcgcccaggctggagtgcagtggtgcaatgtcagctcactgcaacctctgccacctgggttcaagcaattctcctatctcagcttcccgagtagctgggactacaggcacacaccaccacacctggctagtttttatatttttagtagagacagggtttcaccatattggtcaggctggtctcgaactcttgacctcaggtgatccacctgcctcggccttccagagtgctgggattaaaggtgt

SEQ ID NO: 745 - DNA, 4025 bp, Homo sapiens
tggcttgcacctgtagtcccaactattcaggaggtcaaagctgcagtgagctgttaccactgcactccagcctgggtgacagaatgatgccctgtctccaaaaaaaaaaaaaagtataatatttgcatatatcctatgtagatgttttacttttgagacagagtctcactctgtcacccagtctggagtgcagtggcatgatcttggctaactgcaacctctgcctcccaggttcaagtgattctcctgccctgcctcagcctcccaggtagctggggttacagggggtgtgccaccacacctggctaattttcttgtaatttcagtagagatggggtttcaccatgttggccaggctggtctcaaactcctgacctcaggtgattctcccgcctcagcctcccaaagtggtgggattacaggcgtgagccactgcgcccggcctgatcccatatattttaaatcatctgtagattacttatagattaatacaggccagacatggcacatacttatagtcccagctacttaggaggctgaggcaagaggattgcttaagcccaggagttcgaggctgcagtgagctatgatcacaccacagcactccagcctgggtgacagaatgaggccctttttttgtgttttaagaaaaaagaaaaagcactaatacggtgtaaataattgttacactgttttgaattgtagtttttttcccctaaatatttttgatccacccttggttgagtctgtggatatgaagggctggctgtatctggacctgatctcagggcaggagtgggctgggaacaagcggtgtgtaagaactgtttctgggcagaagcagcccaccccacacagactactgcctggcacttggcagttatggaagaacccccaattcccccacttgatctttagaactagaggaaagaaatcactagagcagactcagaccaacttgctgatctctgggtcccaggaacaaaccagactctgctctgagctccagagctaggcaggaccatgtgatggctgaaatctgggtgcttcctgcatgtgggccccggtgccatcacagtggcaggacagggcagttcctccagagctgtgtgacacggagccagtgagtaccctctggcacctcagtttcactctttaaaggagagtagcacttgacacacctgttgagtcctcagagtaacccggccctcaggtgaagcagggtggagagatcgaaaagcatttggcacagggcctggcagatgtgtgctccagttaatagaagcgtgcaagcgtttctggggaggctggtgtgtcgactggattttacggagctttttttgcaggcaaggaggctggctggggtggaccagggacttgcccaagccagccttccctgtgtctgcagaggggctggtacacattccaagcagggggcacccactgcacagagtgtctgccctgcccttgttatcctgagctctccagactgaggtggcccggagagtggcaataggtcccttcactcctgcttctctggggcccatggagatggtcacagctaggctccacccctacataacctcaggttcaattcaacagcagtgctgctgggatagtaaccactaaagaagttggccctggagatggtgggagtgcccacccagggtgcagggctgtttgtcaaggaagagctagccgggggggtgggtgaggagagggggctgtcagtttctgggtgttagtgtgtgttttcagtttcccttcttataaaacagtgagaattagctgtttacacacaaggaattgtttacctgagaccttgatcaagacccttaaatctccctctcacactacccccagcttccacagcgcggcacctgtacctccggggtggcgctggggttggctccatgaccaagatctatgggggacgtcagagaaacggcgtcatgcccagccacttcagccgaggctccaagagtgtggcccgccgggtcctccaagccctggaggggctgaaaatggtggaaaaggaccaagatgggtaagcagggtagggggggctgcattgatggagtagccttgaggcccggtcatcaattccccaacgaatggtcctgcatagtctgcccagcccctcaggcccctcctatcagaggcaggcaggaggggattctgcagaaaagcaaacagcacggggcctcaccccgacctctctggctgactagcccaggctccaggagggtaatttagcgactatctgctttcattagcctgctcgttaacttttcccaattgatttttcggggcttttgatctaaatgcttgcacaaacaacaccccgtcagctcccaggggggctcccactactgcccccagctcgttagaatgcacctgactagggccctcagtgggacttggctggcggcaggtggcttcttgagaagcctggctcacagccaggagggaaggggctgagaacaggacctgtgctcactggggcctgcatgacccttccctccccacagcggccgcaaactgacacctcagggacaaagagatctggacagaatcgccggacaggtaaggcctgcgtttggggtggggctgggtcccttagtcgctgcccaagcatttccaaagcccatacttcgtcaggtagacttatttccttctctggagggcacagcccagggtgctggtggggtcagaggagggctgcccagagacaggagaaaggacagtcctgtctgacttttcctgttggtgctgcttagaaatttggaggcaggctggctgtggtgtctcacccctgtaatcccagcactttgggatgccgaggcaggcgaattatctgaggtcaggagttcaagaccattctgaccaacatggagaaaccctgtctctactaaaaatacaaaattagccgggtgtggtggcacattcctgtaatctcagctactggggaggctgaggcacaaaaatcacttgaacccgggaggtggaggctgcggtgagccaagatcatgccattgcaccccagcctgggcaacaagagtgaaactccatctcaaaaaaaaaaaaattggagggaactccagcccaggtgccactgggcatctatccacagagcacatagctgtacccgtagatgactccccctccccaggtcagcctgcgatgtttccccttagtcctcatgcgtactgagcatcacatgggctgcttgggagaggtggagataagggaggggggctggttcagaacccaggtctccattcagatcctggctggccaacaccctggggcagagtggccacacccctggtgccacagtctcctgtcttggcctccctgtggccaaaatctacccttggccacctcaagcatggtagtgaggagtcagtgagctatagtacagcaggagcacccagggcctggcatgagctcaattctgtatcactgactcaggcctcctaggagccttggagcatttagtcagtcaagtgtcacaaaagaatggaaagtgtcagccctctaggagttgggggtggtctggaaggagaaagctcttccaggcagagtggggcttggctcacacatcattgctggtggttggatgttggccttctcacatggcagtgggcggaatttggactccactccgccactcccttcttttttttttttttttttttttttttttttgagacagagtcttgctctgtcgcccaggctggagtgcagtggtgcaatgtcagctcactgcaacctctgccacctgggttcaagcaattctcctatctcagcttcccgagtagctgggactacaggcacacaccaccacacctggctagtttttatatttttagtagagacagggtttcaccatattggtcaggctggtctcgaactcttgacctcaggtgatccacctgcctcggccttccagagtgctgggattaaaggtgtgagccactgtgcctggccactcccttgagacccagtttccacgtctgtga

SEQ ID NO: 746 - DNA, 4045 bp, Homo sapiens
agctggggttacagggggtgtgccaccacacctggctaattttcttgtaatttcagtagagatggggtttcaccatgttggccaggctggtctcaaactcctgacctcaggtgattctcccgcctcagcctcccaaagtggtgggattacaggcgtgagccactgcgcccggcctgatcccatatattttaaatcatctgtagattacttatagattaatacaggccagacatggcacatacttatagtcccagctacttaggaggctgaggcaagaggattgcttaagcccaggagttcgaggctgcagtgagctatgatcacaccacagcactccagcctgggtgacagaatgaggccctttttttgtgttttaagaaaaaagaaaaagcactaatacggtgtaaataattgttacactgttttgaattgtagtttttttcccctaaatatttttgatccacccttggttgagtctgtggatatgaagggctggctgtatctggacctgatctcagggcaggagtgggctgggaacaagcggtgtgtaagaactgtttctgggcagaagcagcccaccccacacagactactgcctggcacttggcagttatggaagaacccccaattcccccacttgatctttagaactagaggaaagaaatcactagagcagactcagaccaacttgctgatctctgggtcccaggaacaaaccagactctgctctgagctccagagctaggcaggaccatgtgatggctgaaatctgggtgcttcctgcatgtgggccccggtgccatcacagtggcaggacagggcagttcctccagagctgtgtgacacggagccagtgagtaccctctggcacctcagtttcactctttaaaggagagtagcacttgacacacctgttgagtcctcagagtaacccggccctcaggtgaagcagggtggagagatcgaaaagcatttggcacagggcctggcagatgtgtgctccagttaatagaagcgtgcaagcgtttctggggaggctggtgtgtcgactggattttacggagctttttttgcaggcaaggaggctggctggggtggaccagggacttgcccaagccagccttccctgtgtctgcagaggggctggtacacattccaagcagggggcacccactgcacagagtgtctgccctgcccttgttatcctgagctctccagactgaggtggcccggagagtggcaataggtcccttcactcctgcttctctggggcccatggagatggtcacagctaggctccacccctacataacctcaggttcaattcaacagcagtgctgctgggatagtaaccactaaagaagttggccctggagatggtgggagtgcccacccagggtgcagggctgtttgtcaaggaagagctagccgggggggtgggtgaggagagggggctgtcagtttctgggtgttagtgtgtgttttcagtttcccttcttataaaacagtgagaattagctgtttacacacaaggaattgtttacctgagaccttgatcaagacccttaaatctccctctcacactacccccagcttccacagcgcggcacctgtacctccggggtggcgctggggttggctccatgaccaagatctatgggggacgtcagagaaacggcgtcatgcccagccacttcagccgaggctccaagagtgtggcccgccgggtcctccaagccctggaggggctgaaaatggtggaaaaggaccaagatgggtaagcagggtagggggggctgcattgatggagtagccttgaggcccggtcatcaattccccaacgaatggtcctgcatagtctgcccagcccctcaggcccctcctatcagaggcaggcaggaggggattctgcagaaaagcaaacagcacggggcctcaccccgacctctctggctgactagcccaggctccaggagggtaatttagcgactatctgctttcattagcctgctcgttaacttttcccaattgatttttcggggcttttgatctaaatgcttgcacaaacaacaccccgtcagctcccaggggggctcccactactgcccccagctcgttagaatgcacctgactagggccctcagtgggacttggctggcggcaggtggcttcttgagaagcctggctcacagccaggagggaaggggctgagaacaggacctgtgctcactggggcctgcatgacccttccctccccacagcggccgcaaactgacacctcagggacaaagagatctggacagaatcgccggacaggtaaggcctgcgtttggggtggggctgggtcccttagtcgctgcccaagcatttccaaagcccatacttcgtcaggtagacttatttccttctctggagggcacagcccagggtgctggtggggtcagaggagggctgcccagagacaggagaaaggacagtcctgtctgacttttcctgttggtgctgcttagaaatttggaggcaggctggctgtggtgtctcacccctgtaatcccagcactttgggatgccgaggcaggcgaattatctgaggtcaggagttcaagaccattctgaccaacatggagaaaccctgtctctactaaaaatacaaaattagccgggtgtggtggcacattcctgtaatctcagctactggggaggctgaggcacaaaaatcacttgaacccgggaggtggaggctgcggtgagccaagatcatgccattgcaccccagcctgggcaacaagagtgaaactccatctcaaaaaaaaaaaaattggagggaactccagcccaggtgccactgggcatctatccacagagcacatagctgtacccgtagatgactccccctccccaggtcagcctgcgatgtttccccttagtcctcatgcgtactgagcatcacatgggctgcttgggagaggtggagataagggaggggggctggttcagaacccaggtctccattcagatcctggctggccaacaccctggggcagagtggccacacccctggtgccacagtctcctgtcttggcctccctgtggccaaaatctacccttggccacctcaagcatggtagtgaggagtcagtgagctatagtacagcaggagcacccagggcctggcatgagctcaattctgtatcactgactcaggcctcctaggagccttggagcatttagtcagtcaagtgtcacaaaagaatggaaagtgtcagccctctaggagttgggggtggtctggaaggagaaagctcttccaggcagagtggggcttggctcacacatcattgctggtggttggatgttggccttctcacatggcagtgggcggaatttggactccactccgccactcccttcttttttttttttttttttttttttttttttgagacagagtcttgctctgtcgcccaggctggagtgcagtggtgcaatgtcagctcactgcaacctctgccacctgggttcaagcaattctcctatctcagcttcccgagtagctgggactacaggcacacaccaccacacctggctagtttttatatttttagtagagacagggtttcaccatattggtcaggctggtctcgaactcttgacctcaggtgatccacctgcctcggccttccagagtgctgggattaaaggtgtgagccactgtgcctggccactcccttgagacccagtttccacgtctgtgaaatgggggaatacccacagtgagaattagatgagatagatgcatttgaaaccacaaatcggggtgcccacctgtggtgggtagttaggtagctgttacaaagtgccccagcagagacccccttgactaacttttattcttccatcttttcccacaggtggcagctgccaacaagaagcattagaacaaaccatgctgggttaataaattgcctcattcgtaatcctggtctgggtctcttttttgagtctcttgctctgtcgcccaggctggagtgcagtggcgccatct

SEQ ID NO: 747 - DNA, 4047 bp, Homo sapiens
tttcaccatgttggccaggctggtctcaaactcctgacctcaggtgattctcccgcctcagcctcccaaagtggtgggattacaggcgtgagccactgcgcccggcctgatcccatatattttaaatcatctgtagattacttatagattaatacaggccagacatggcacatacttatagtcccagctacttaggaggctgaggcaagaggattgcttaagcccaggagttcgaggctgcagtgagctatgatcacaccacagcactccagcctgggtgacagaatgaggccctttttttgtgttttaagaaaaaagaaaaagcactaatacggtgtaaataattgttacactgttttgaattgtagtttttttcccctaaatatttttgatccacccttggttgagtctgtggatatgaagggctggctgtatctggacctgatctcagggcaggagtgggctgggaacaagcggtgtgtaagaactgtttctgggcagaagcagcccaccccacacagactactgcctggcacttggcagttatggaagaacccccaattcccccacttgatctttagaactagaggaaagaaatcactagagcagactcagaccaacttgctgatctctgggtcccaggaacaaaccagactctgctctgagctccagagctaggcaggaccatgtgatggctgaaatctgggtgcttcctgcatgtgggccccggtgccatcacagtggcaggacagggcagttcctccagagctgtgtgacacggagccagtgagtaccctctggcacctcagtttcactctttaaaggagagtagcacttgacacacctgttgagtcctcagagtaacccggccctcaggtgaagcagggtggagagatcgaaaagcatttggcacagggcctggcagatgtgtgctccagttaatagaagcgtgcaagcgtttctggggaggctggtgtgtcgactggattttacggagctttttttgcaggcaaggaggctggctggggtggaccagggacttgcccaagccagccttccctgtgtctgcagaggggctggtacacattccaagcagggggcacccactgcacagagtgtctgccctgcccttgttatcctgagctctccagactgaggtggcccggagagtggcaataggtcccttcactcctgcttctctggggcccatggagatggtcacagctaggctccacccctacataacctcaggttcaattcaacagcagtgctgctgggatagtaaccactaaagaagttggccctggagatggtgggagtgcccacccagggtgcagggctgtttgtcaaggaagagctagccgggggggtgggtgaggagagggggctgtcagtttctgggtgttagtgtgtgttttcagtttcccttcttataaaacagtgagaattagctgtttacacacaaggaattgtttacctgagaccttgatcaagacccttaaatctccctctcacactacccccagcttccacagcgcggcacctgtacctccggggtggcgctggggttggctccatgaccaagatctatgggggacgtcagagaaacggcgtcatgcccagccacttcagccgaggctccaagagtgtggcccgccgggtcctccaagccctggaggggctgaaaatggtggaaaaggaccaagatgggtaagcagggtagggggggctgcattgatggagtagccttgaggcccggtcatcaattccccaacgaatggtcctgcatagtctgcccagcccctcaggcccctcctatcagaggcaggcaggaggggattctgcagaaaagcaaacagcacggggcctcaccccgacctctctggctgactagcccaggctccaggagggtaatttagcgactatctgctttcattagcctgctcgttaacttttcccaattgatttttcggggcttttgatctaaatgcttgcacaaacaacaccccgtcagctcccaggggggctcccactactgcccccagctcgttagaatgcacctgactagggccctcagtgggacttggctggcggcaggtggcttcttgagaagcctggctcacagccaggagggaaggggctgagaacaggacctgtgctcactggggcctgcatgacccttccctccccacagcggccgcaaactgacacctcagggacaaagagatctggacagaatcgccggacaggtaaggcctgcgtttggggtggggctgggtcccttagtcgctgcccaagcatttccaaagcccatacttcgtcaggtagacttatttccttctctggagggcacagcccagggtgctggtggggtcagaggagggctgcccagagacaggagaaaggacagtcctgtctgacttttcctgttggtgctgcttagaaatttggaggcaggctggctgtggtgtctcacccctgtaatcccagcactttgggatgccgaggcaggcgaattatctgaggtcaggagttcaagaccattctgaccaacatggagaaaccctgtctctactaaaaatacaaaattagccgggtgtggtggcacattcctgtaatctcagctactggggaggctgaggcacaaaaatcacttgaacccgggaggtggaggctgcggtgagccaagatcatgccattgcaccccagcctgggcaacaagagtgaaactccatctcaaaaaaaaaaaaattggagggaactccagcccaggtgccactgggcatctatccacagagcacatagctgtacccgtagatgactccccctccccaggtcagcctgcgatgtttccccttagtcctcatgcgtactgagcatcacatgggctgcttgggagaggtggagataagggaggggggctggttcagaacccaggtctccattcagatcctggctggccaacaccctggggcagagtggccacacccctggtgccacagtctcctgtcttggcctccctgtggccaaaatctacccttggccacctcaagcatggtagtgaggagtcagtgagctatagtacagcaggagcacccagggcctggcatgagctcaattctgtatcactgactcaggcctcctaggagccttggagcatttagtcagtcaagtgtcacaaaagaatggaaagtgtcagccctctaggagttgggggtggtctggaaggagaaagctcttccaggcagagtggggcttggctcacacatcattgctggtggttggatgttggccttctcacatggcagtgggcggaatttggactccactccgccactcccttcttttttttttttttttttttttttttttttgagacagagtcttgctctgtcgcccaggctggagtgcagtggtgcaatgtcagctcactgcaacctctgccacctgggttcaagcaattctcctatctcagcttcccgagtagctgggactacaggcacacaccaccacacctggctagtttttatatttttagtagagacagggtttcaccatattggtcaggctggtctcgaactcttgacctcaggtgatccacctgcctcggccttccagagtgctgggattaaaggtgtgagccactgtgcctggccactcccttgagacccagtttccacgtctgtgaaatgggggaatacccacagtgagaattagatgagatagatgcatttgaaaccacaaatcggggtgcccacctgtggtgggtagttaggtagctgttacaaagtgccccagcagagacccccttgactaacttttattcttccatcttttcccacaggtggcagctgccaacaagaagcattagaacaaaccatgctgggttaataaattgcctcattcgtaatcctggtctgggtctcttttttgagtctcttgctctgtcgcccaggctggagtgcagtggcgccatctcagctcactgcaatctccgccttctgggttcaaatgattctcctgcctcagcctcccaaagtgctggga

SEQ ID NO: 748 - DNA, 4048 bp, Homo sapiens
ttattttatatatccccttgtatgtgtgtgagggtcccctaactgctcacaaatatctcagcaactccgccctccccactcagacctcatttccctcctaccagacatgctcaaaggaaactgggagcaacacaaagatgactttgaatctctgtccaccacccctagactgtatgacacccgcaagtgacaacctcccctctctggcctcggtttccccctctgtaaaatgggggatggcctaccttgccagtcatggcaggtcaatataaaacaacttctggctgtgcacagtggcacatgcctgtaatcccagcactttgggaagctgaggcaggaggattgcttgaggccaggagttcaagaccagcctgggcaatatagcaagatcccatccctcttaaaaaaaaaaaagaagaaaaatatatgttgttgttgttattattgttattattagagacagagtttcgcttttgtcacccaggctggagtgcaatggtgtgatctcagctcactgcaacctccacctcctgggttcaactgattctcctgcctcagcctcctgagtagctggaataataggcatgtgccacaacatctggctaattttgtatttttagtagagatggggtttcgccatgttggccaggctggtctcaaactcgacctcaggtgattctcctgtctcagcctcccaaagggctgggattacaggcataagccaccatagctggcctgtttttttaaaaaaagaattccagtaaagagctgatcatggttctcactccttgaataccaggaacaccatctcgtatcacataatgagacagggagacattctggtcctcatctcacagatgaaaaatgtcaagcttcgaaggatcaaagtgcccacctagtcacacgggtagtcagccacaggtcagcctgccttatttattcttcatgagtatttatagtgactaacatttactgggcgcctactgtgggccatttctgtgcatgtgacaacccctttaagtccttgtttctaatcccaagaagcaaggaaatggggtcagggaagggacaaggtttgcccaagtccaggcagggggagaggtcaagctcagaaccatcacctgcccatgacacatgcccaggactcaggttccctaggcttccttccaaaggctcagcagtgacgagccagcccttgaaccagcctcttcccccacccaagcagccacctctcaggggaattgtggccaccacaggtgcagggagcagtttctctccactcacagcctgaagcatacccggcaggggctgtccccaggcccaacaagcaaagggcccagtagcgagggccactggagcccatctccggggggctgggcaggaagtagggtggggtttggggtagggatctggtaccctgggactgctgcaactcaaactaaccaacccactgggagaagatgcctgggggtccaggagtcctccaagctctgcctgccaccatcttcctcctcttcctgctgtctgctgtctacctgggtatgtggccaaagggcaggaactggcgggaggtgggggaagctgtggaggctgcagagagggcacaggcagagggaagggggctcagggaaaggggaagaggaggcagaggataggggacccagggaagatgcctatagaaatcgtatctgtgccaagatgggccaaggtggggctggagggagcccagcgaaggagaaggggcgtccacagtctcacacagggaggcaggagcaagagtcacctcccccacctcctgttccccacaggccaaaataaggaactaaagttgctcttgactgagcaccagggctgggggcaggaaggggacttaggggtagcagcattcagcgtctgtcaaggggagaaaaagctttctctgccttaaacctcaggtgcctctctctgttgggagtcccttctcagcactgggggaatgggtgtctcatggactccccctcacctgctcaaggacagctggcaggggctgtggccacgctaacccaggagttcagagaaaaaggttccccacccaaggggacactgggagcaaggattggagttcacgtctgagtcttaagcccgtgacgatgagggtgctcggcccctctccccatctcttcctccttctctcttcctcacctccctcctccacctacctccagaagaggggactggccatgtgggaggcctggctgagagctggggcttcccagaggagcccggattggacactgcagccagcctgagccgcctcgtctcactcagagacacccccagtctccaccccgctctgagccccttcaatcaccagcagcccagcccaaggactgaactcacccctgacccctaggttgacacatacaacttacagagaatgagggccaggcacagggtcacaggccagggcaggccacagactggctcctcagcccaggcagggagaggccagggagccaagagtttgaacccagtgccactcctgactgcctggtgatgctggcaacccgcctgccctcccagagcctcagccatccctcctgtaaaatggggctaaggagagaacctacttctagggttctgtgaatgattacacaagaaaaagcgccaggtgctgggcctggctgaggctggggtgcaaaaatggaccgggaaggctgcgggaggaggggacgcctgcactgcttctggaaggagctgtctggacagcggtcctccagtgcctggaacaaacatccaaaatccagagagttcacagggccagagtacaaagtgcgtatgcgggagggggacaagagatggcgctgcagaggtgagaagggcctcccaggggtcttaccatcccagggagtctcattctcctctcccaggatatcctcacccaccccaaccaggtatgtcctctctccttcccaggggcttcttcactttcccgcatcccccctctccccaggatgtatcagcccctgtcaggggctctctctctccctccccacccaggagagtcctcaccctcttcccaggagtgctggaactgcaggggccagggctggggaaatgtgtcaccatccccagtccctgacccacccaccctgtctctccacaggccctgggtgccaggccctgtggatgcacaaggtcccagcatcattgatggtgagcctgggggaagacgcccacttccaatgcccgcacaatagcagcaacaacgccaacgtcacctggtggcgcgtcctccatggcaactacacgtggccccctgagttcttgggcccgggcgaggaccccaatggtacgctgatcatccagaatgtgaacaagagccatgggggcatatacgtgtgccgggtccaggagggcaacgagtcataccagcagtcctgcggcacctacctccgcgtgcgccgtgagtggcccagccctggcccctactcccactgtcccgctggggacactcggtttatctttgaagtggggatagagccagtaccttcaatgtgggtttcaaaccggcttggacagagggacggacattctcctctgcagagtggggtctctggggggtctggggccttgcaggaggtgggcggggccaggaggctagggagggcaagaggggccagggctctgagccatactacctccttgcagagccgccccccaggcccttcctggacatgggggagggcaccaagaaccgaatcatcacagccgaggggatcatcctcctgttctgcgcggtggtgcctgggacgctgctgctgttcagggtgagccccctcggacctctgagtcagccgggcgagggcctgggccgagggacccccaatacccaggtagccctctagagcctgaggttccccatccaaaacttgggagaatgaaagcacccaccatataggggctgtgggagttaaatgaatgaatataaagaagggacttgaactggcgctgagcccagggggtgtcttcaatttagtttccccttctgggctgtcctcacgtccac

SEQ ID NO: 749 - DNA, 4025 bp, Homo sapiens
taccttgccagtcatggcaggtcaatataaaacaacttctggctgtgcacagtggcacatgcctgtaatcccagcactttgggaagctgaggcaggaggattgcttgaggccaggagttcaagaccagcctgggcaatatagcaagatcccatccctcttaaaaaaaaaaaagaagaaaaatatatgttgttgttgttattattgttattattagagacagagtttcgcttttgtcacccaggctggagtgcaatggtgtgatctcagctcactgcaacctccacctcctgggttcaactgattctcctgcctcagcctcctgagtagctggaataataggcatgtgccacaacatctggctaattttgtatttttagtagagatggggtttcgccatgttggccaggctggtctcaaactcgacctcaggtgattctcctgtctcagcctcccaaagggctgggattacaggcataagccaccatagctggcctgtttttttaaaaaaagaattccagtaaagagctgatcatggttctcactccttgaataccaggaacaccatctcgtatcacataatgagacagggagacattctggtcctcatctcacagatgaaaaatgtcaagcttcgaaggatcaaagtgcccacctagtcacacgggtagtcagccacaggtcagcctgccttatttattcttcatgagtatttatagtgactaacatttactgggcgcctactgtgggccatttctgtgcatgtgacaacccctttaagtccttgtttctaatcccaagaagcaaggaaatggggtcagggaagggacaaggtttgcccaagtccaggcagggggagaggtcaagctcagaaccatcacctgcccatgacacatgcccaggactcaggttccctaggcttccttccaaaggctcagcagtgacgagccagcccttgaaccagcctcttcccccacccaagcagccacctctcaggggaattgtggccaccacaggtgcagggagcagtttctctccactcacagcctgaagcatacccggcaggggctgtccccaggcccaacaagcaaagggcccagtagcgagggccactggagcccatctccggggggctgggcaggaagtagggtggggtttggggtagggatctggtaccctgggactgctgcaactcaaactaaccaacccactgggagaagatgcctgggggtccaggagtcctccaagctctgcctgccaccatcttcctcctcttcctgctgtctgctgtctacctgggtatgtggccaaagggcaggaactggcgggaggtgggggaagctgtggaggctgcagagagggcacaggcagagggaagggggctcagggaaaggggaagaggaggcagaggataggggacccagggaagatgcctatagaaatcgtatctgtgccaagatgggccaaggtggggctggagggagcccagcgaaggagaaggggcgtccacagtctcacacagggaggcaggagcaagagtcacctcccccacctcctgttccccacaggccaaaataaggaactaaagttgctcttgactgagcaccagggctgggggcaggaaggggacttaggggtagcagcattcagcgtctgtcaaggggagaaaaagctttctctgccttaaacctcaggtgcctctctctgttgggagtcccttctcagcactgggggaatgggtgtctcatggactccccctcacctgctcaaggacagctggcaggggctgtggccacgctaacccaggagttcagagaaaaaggttccccacccaaggggacactgggagcaaggattggagttcacgtctgagtcttaagcccgtgacgatgagggtgctcggcccctctccccatctcttcctccttctctcttcctcacctccctcctccacctacctccagaagaggggactggccatgtgggaggcctggctgagagctggggcttcccagaggagcccggattggacactgcagccagcctgagccgcctcgtctcactcagagacacccccagtctccaccccgctctgagccccttcaatcaccagcagcccagcccaaggactgaactcacccctgacccctaggttgacacatacaacttacagagaatgagggccaggcacagggtcacaggccagggcaggccacagactggctcctcagcccaggcagggagaggccagggagccaagagtttgaacccagtgccactcctgactgcctggtgatgctggcaacccgcctgccctcccagagcctcagccatccctcctgtaaaatggggctaaggagagaacctacttctagggttctgtgaatgattacacaagaaaaagcgccaggtgctgggcctggctgaggctggggtgcaaaaatggaccgggaaggctgcgggaggaggggacgcctgcactgcttctggaaggagctgtctggacagcggtcctccagtgcctggaacaaacatccaaaatccagagagttcacagggccagagtacaaagtgcgtatgcgggagggggacaagagatggcgctgcagaggtgagaagggcctcccaggggtcttaccatcccagggagtctcattctcctctcccaggatatcctcacccaccccaaccaggtatgtcctctctccttcccaggggcttcttcactttcccgcatcccccctctccccaggatgtatcagcccctgtcaggggctctctctctccctccccacccaggagagtcctcaccctcttcccaggagtgctggaactgcaggggccagggctggggaaatgtgtcaccatccccagtccctgacccacccaccctgtctctccacaggccctgggtgccaggccctgtggatgcacaaggtcccagcatcattgatggtgagcctgggggaagacgcccacttccaatgcccgcacaatagcagcaacaacgccaacgtcacctggtggcgcgtcctccatggcaactacacgtggccccctgagttcttgggcccgggcgaggaccccaatggtacgctgatcatccagaatgtgaacaagagccatgggggcatatacgtgtgccgggtccaggagggcaacgagtcataccagcagtcctgcggcacctacctccgcgtgcgccgtgagtggcccagccctggcccctactcccactgtcccgctggggacactcggtttatctttgaagtggggatagagccagtaccttcaatgtgggtttcaaaccggcttggacagagggacggacattctcctctgcagagtggggtctctggggggtctggggccttgcaggaggtgggcggggccaggaggctagggagggcaagaggggccagggctctgagccatactacctccttgcagagccgccccccaggcccttcctggacatgggggagggcaccaagaaccgaatcatcacagccgaggggatcatcctcctgttctgcgcggtggtgcctgggacgctgctgctgttcagggtgagccccctcggacctctgagtcagccgggcgagggcctgggccgagggacccccaatacccaggtagccctctagagcctgaggttccccatccaaaacttgggagaatgaaagcacccaccatataggggctgtgggagttaaatgaatgaatataaagaagggacttgaactggcgctgagcccagggggtgtcttcaatttagtttccccttctgggctgtcctcacgtccacctccccccaagaagagtctcattcttctccctaagagtgtcctcactcccctcctgccctcacccaggagtgtggttaccctccaggtgtagccaagaccagggaaggtggggcctggtcctcccagaatctctgatctgtaccagcctctccttaggcactacagaaagtgtgactgttattgttattattcatggagaatagtaagggagtggagac

SEQ ID NO: 750 - DNA, 4042 bp, Homo sapiens
aagccagtgaccaggtgagtgggtgcagggactagctggtgctgccaggggctgctgggcctggaagtccaggtggggccacttgctaattctcatgtgttgctccggcccctccagctgcaggtgggtgtggagtttgaggccagcacaaggatgcaggacaccagcgtctccttcgggtaccagctggacctgcccaaggccaacctcctcttcaaaggtaaaggtctcggttcccctacgcgggaaacaggcaggaggtgactcaactctgagtggatgtgtgggccaccacaggtgctggaggacagtgtgctgccaccctgtgggcctccacattaccagggaacacttgttaaaaggtaggtggggccgggtgcggtggctcacgcctgtaatcccagcactttgggaggccaaggcgggccgaggtaaggagattgagaccatcctggctaacacggtgaaactccgtctctactaaaaatacaaaaacaaaattagccgggtgtggttgcgggtgcctatagtcccaactactgaggctgaggcgggaaaatggtatgaacccaggaggcggagcttgcggtgagccgagatcgtgccaccgcactccagcctgggtgacagagcaagactccatctcaaaaaaaaaaaagtaggtggacaaccctctactatgttttatgcttggaaaaaaaaagtaggtagagcagccaggcgtggtgactcacgcctgtaatcccagcattttgggaggccaagccaggtagaatacttgaggccaggagttggagaccagcctggccaacgtggtgaaatcccctctctactaaaagtacaaaaattagccaggtgtggtagcgtgctgcaactgtagtccccgctacttaggaggctgaggcacaagaatcacttgaacctgggaggcggaggttgcagggagttgagactgcaccactgcactccagcctgggtgacagagtgagactccatctccaaaaaaaataaaatgaaataaataaataaatgttaaaaaaaatctggtggagcatctgatgggtgtttgggccaagctggagctttgtccatcccctcttatttttctgcacttgactctcttatttttctgagactggtctccctctgtcgcccaggctagagtgcagcagtgcaactgcggctcactgcagcctccacctcccgggctcaagcagccttcccacctcagcctcctgagtagctaggaccacaggtgtatgccaccaggcccagctaatttttttgatagttttgggagacatgggggtttcaccatgttgcccaggctggtctcgaactcctggactcaagccttggcctcccaaagtgctgggattataggtgtgagccaccacacccagccagggtagaaggcactttggaagcctcgagcctgccccattcatcttacgttagtggaaactgaggcttccagaggtttcaaggtcacaactaaatccagaacctcatctcaggcacactggtcgtagtcccaatgtccagtcttaagtcttcttggatatctgtggctcacagattttgggtgtttgagcctcctgctgagcactgctggggccacagcggtgaccagccctgtcttcacgggactcagtgagaggaacagattcatccgcagagtgggcaggactaggttgggggaacccaggggtctagagggcttttcagagggcaggggtcactgagcggagagcagaggaggagtgagccatttgctccagcgtgaagttgttggtgtgatggggtttcagggtggcaggagcagtgtggttaaaggtctggaagctgtcggcatgtggctggtatccaaggtggccaggaactctgcatggatatggtgggaagctggcacgcctctcacctcagctcttccctgcaggctctgtggatagcaactggatcgtgggtgccacgctggagaagaagctcccacccctgcccctgacactggcccttggggccttcctgaatcaccgcaagaacaagtttcagtgtggctttggcctcaccatcggctgagccctcctggcccccgccttccacgcccttccgattccacctccacctccacctccccctgccacagaggggagacctgagcccccctcccttccctccccccttgggggtcgggggggacattggaaaggagggaccccgccaccccagcagctgaggaggggattctggaactgaatggcgcttcgggattctgagtagcaggggcagcatgcccagtgggcctggggtcccgggagggattccggaattgaggggcacgcaggattctgagcaccaggggcagaggcggccagacaacctcagggaggagtgtcctggcgtccccatcctccaaagggcctgggcccgccccgagggggcagcgagaggagcttccccatccccggtcagtccaccctgccccgtccactttcccatctcctcggtataaatcatgtttataagttatggaagaaccgggacattttacagaaaaaaaacaaaaaacaacaaaaaatatacgtgggaaaaaaaacgatgggaggcctccgttttctcaagtgtgtctggcctgttttgagcatttcatccggagtctggccgccctgaccttcccccagccgcctgcagggggcgccagagggccggagcacggaaagcagcggatccttgatgctgccttaagtccggctcagaggggcgcagcgtggcctggggtcgctatcttcccatccggaacatctgccctgctgggggacactacgggccttcccttgcctgagggtagggtctcaaggtcacttgcccccagcttgacctggccggagtggctatagaggactttgtccctgcagactgcagcagcagagatgacactgtctctgagtgcagagatgggggcagggagctgggagagggttcaagctactggaacagcttcagaacaactagggtactaggaactgctgtgtcagggagaaggggctcaaggactcgcaggcctgggaggaggggcctaggccagccatgggagttgggtcacctgtgtctgaggacttggtgctgtctggattttgccaacctagggctggggtcagctgatgcccaccacgactcccgagcctccaggaactgaaaccctgtctgcccccagggtctggggaaggaggctgctgagtagaaccaaccccaggttaccaaccccacctcagccaccccttgccagccaaagcaaacaggcccggcccggcactgggggttccttctcgaaccaggagttcagcctcccctgacccgcagaatcttctgatcccacccgctccaggagccaggaatgagtcccagtctctcccagttctcactgtgtggttttgccattcgtcttgctgctgaaccacgggtttctcctctgaaacatctgggatttataacagggcttaggaaagtgacagcgtctgagcgttcactgtggcctgtccattgctagccctaacataggaccgctgtgtgccagggctgtcctccatgctcaatacacgttagcttgtcaccaaacatacccgtgccgctgctttcccagtctgatgagcaaaggaacttgatgctcagagaggacaagtcatttgcccaaggtcacacagctggcaactggcagagccaggattcacgccctggcaatttgactccagaatcctaaccttaacccagaagcacggcttcaagcccctggaaaccacaatacctgtggcagccagggggaggtgctggaatctcatttcacatgtggggagggggctcccctgtgctcaaggtcacaaccaaagaggaagctgtgattaaaacccaggtcccatttgcaaagcctcgacttttagcaggtgcatcatactgttcccacccctcccatcccacttctgtccagccgcctagccccactttcttttttttctttttttgagacagtctccctcttgctgaggct

SEQ ID NO: 751 - DNA, 4040 bp, Homo sapiens
gcctccacattaccagggaacacttgttaaaaggtaggtggggccgggtgcggtggctcacgcctgtaatcccagcactttgggaggccaaggcgggccgaggtaaggagattgagaccatcctggctaacacggtgaaactccgtctctactaaaaatacaaaaacaaaattagccgggtgtggttgcgggtgcctatagtcccaactactgaggctgaggcgggaaaatggtatgaacccaggaggcggagcttgcggtgagccgagatcgtgccaccgcactccagcctgggtgacagagcaagactccatctcaaaaaaaaaaaagtaggtggacaaccctctactatgttttatgcttggaaaaaaaaagtaggtagagcagccaggcgtggtgactcacgcctgtaatcccagcattttgggaggccaagccaggtagaatacttgaggccaggagttggagaccagcctggccaacgtggtgaaatcccctctctactaaaagtacaaaaattagccaggtgtggtagcgtgctgcaactgtagtccccgctacttaggaggctgaggcacaagaatcacttgaacctgggaggcggaggttgcagggagttgagactgcaccactgcactccagcctgggtgacagagtgagactccatctccaaaaaaaataaaatgaaataaataaataaatgttaaaaaaaatctggtggagcatctgatgggtgtttgggccaagctggagctttgtccatcccctcttatttttctgcacttgactctcttatttttctgagactggtctccctctgtcgcccaggctagagtgcagcagtgcaactgcggctcactgcagcctccacctcccgggctcaagcagccttcccacctcagcctcctgagtagctaggaccacaggtgtatgccaccaggcccagctaatttttttgatagttttgggagacatgggggtttcaccatgttgcccaggctggtctcgaactcctggactcaagccttggcctcccaaagtgctgggattataggtgtgagccaccacacccagccagggtagaaggcactttggaagcctcgagcctgccccattcatcttacgttagtggaaactgaggcttccagaggtttcaaggtcacaactaaatccagaacctcatctcaggcacactggtcgtagtcccaatgtccagtcttaagtcttcttggatatctgtggctcacagattttgggtgtttgagcctcctgctgagcactgctggggccacagcggtgaccagccctgtcttcacgggactcagtgagaggaacagattcatccgcagagtgggcaggactaggttgggggaacccaggggtctagagggcttttcagagggcaggggtcactgagcggagagcagaggaggagtgagccatttgctccagcgtgaagttgttggtgtgatggggtttcagggtggcaggagcagtgtggttaaaggtctggaagctgtcggcatgtggctggtatccaaggtggccaggaactctgcatggatatggtgggaagctggcacgcctctcacctcagctcttccctgcaggctctgtggatagcaactggatcgtgggtgccacgctggagaagaagctcccacccctgcccctgacactggcccttggggccttcctgaatcaccgcaagaacaagtttcagtgtggctttggcctcaccatcggctgagccctcctggcccccgccttccacgcccttccgattccacctccacctccacctccccctgccacagaggggagacctgagcccccctcccttccctccccccttgggggtcgggggggacattggaaaggagggaccccgccaccccagcagctgaggaggggattctggaactgaatggcgcttcgggattctgagtagcaggggcagcatgcccagtgggcctggggtcccgggagggattccggaattgaggggcacgcaggattctgagcaccaggggcagaggcggccagacaacctcagggaggagtgtcctggcgtccccatcctccaaagggcctgggcccgccccgagggggcagcgagaggagcttccccatccccggtcagtccaccctgccccgtccactttcccatctcctcggtataaatcatgtttataagttatggaagaaccgggacattttacagaaaaaaaacaaaaaacaacaaaaaatatacgtgggaaaaaaaacgatgggaggcctccgttttctcaagtgtgtctggcctgttttgagcatttcatccggagtctggccgccctgaccttcccccagccgcctgcagggggcgccagagggccggagcacggaaagcagcggatccttgatgctgccttaagtccggctcagaggggcgcagcgtggcctggggtcgctatcttcccatccggaacatctgccctgctgggggacactacgggccttcccttgcctgagggtagggtctcaaggtcacttgcccccagcttgacctggccggagtggctatagaggactttgtccctgcagactgcagcagcagagatgacactgtctctgagtgcagagatgggggcagggagctgggagagggttcaagctactggaacagcttcagaacaactagggtactaggaactgctgtgtcagggagaaggggctcaaggactcgcaggcctgggaggaggggcctaggccagccatgggagttgggtcacctgtgtctgaggacttggtgctgtctggattttgccaacctagggctggggtcagctgatgcccaccacgactcccgagcctccaggaactgaaaccctgtctgcccccagggtctggggaaggaggctgctgagtagaaccaaccccaggttaccaaccccacctcagccaccccttgccagccaaagcaaacaggcccggcccggcactgggggttccttctcgaaccaggagttcagcctcccctgacccgcagaatcttctgatcccacccgctccaggagccaggaatgagtcccagtctctcccagttctcactgtgtggttttgccattcgtcttgctgctgaaccacgggtttctcctctgaaacatctgggatttataacagggcttaggaaagtgacagcgtctgagcgttcactgtggcctgtccattgctagccctaacataggaccgctgtgtgccagggctgtcctccatgctcaatacacgttagcttgtcaccaaacatacccgtgccgctgctttcccagtctgatgagcaaaggaacttgatgctcagagaggacaagtcatttgcccaaggtcacacagctggcaactggcagagccaggattcacgccctggcaatttgactccagaatcctaaccttaacccagaagcacggcttcaagcccctggaaaccacaatacctgtggcagccagggggaggtgctggaatctcatttcacatgtggggagggggctcccctgtgctcaaggtcacaaccaaagaggaagctgtgattaaaacccaggtcccatttgcaaagcctcgacttttagcaggtgcatcatactgttcccacccctcccatcccacttctgtccagccgcctagccccactttcttttttttctttttttgagacagtctccctcttgctgaggctggagtgcagtggcgagatctcggctcactgtaacctccgcctcccgggttcaagcgattctcctgcctcagcctcccaagtagctaggattacaggcgcccgccaccacgcctggctaacttttgtatttttagtagagatggggtttcaccatgttggccaggctggtctcaaactcctgaccttaagtgattcgcccactgtggcctcccaaagtgctgggattacaggcgtgagctaccgcccccagcccctcccatcccacttctgtccagccccctagccctactttctttctgggatccaggagtccagatccccagcccc

SEQ ID NO: 752 - DNA, 4042 bp, Homo sapiens
ggtcgctatcttcccatccggaacatctgccctgctgggggacactacgggccttcccttgcctgagggtagggtctcaaggtcacttgcccccagcttgacctggccggagtggctatagaggactttgtccctgcagactgcagcagcagagatgacactgtctctgagtgcagagatgggggcagggagctgggagagggttcaagctactggaacagcttcagaacaactagggtactaggaactgctgtgtcagggagaaggggctcaaggactcgcaggcctgggaggaggggcctaggccagccatgggagttgggtcacctgtgtctgaggacttggtgctgtctggattttgccaacctagggctggggtcagctgatgcccaccacgactcccgagcctccaggaactgaaaccctgtctgcccccagggtctggggaaggaggctgctgagtagaaccaaccccaggttaccaaccccacctcagccaccccttgccagccaaagcaaacaggcccggcccggcactgggggttccttctcgaaccaggagttcagcctcccctgacccgcagaatcttctgatcccacccgctccaggagccaggaatgagtcccagtctctcccagttctcactgtgtggttttgccattcgtcttgctgctgaaccacgggtttctcctctgaaacatctgggatttataacagggcttaggaaagtgacagcgtctgagcgttcactgtggcctgtccattgctagccctaacataggaccgctgtgtgccagggctgtcctccatgctcaatacacgttagcttgtcaccaaacatacccgtgccgctgctttcccagtctgatgagcaaaggaacttgatgctcagagaggacaagtcatttgcccaaggtcacacagctggcaactggcagagccaggattcacgccctggcaatttgactccagaatcctaaccttaacccagaagcacggcttcaagcccctggaaaccacaatacctgtggcagccagggggaggtgctggaatctcatttcacatgtggggagggggctcccctgtgctcaaggtcacaaccaaagaggaagctgtgattaaaacccaggtcccatttgcaaagcctcgacttttagcaggtgcatcatactgttcccacccctcccatcccacttctgtccagccgcctagccccactttcttttttttctttttttgagacagtctccctcttgctgaggctggagtgcagtggcgagatctcggctcactgtaacctccgcctcccgggttcaagcgattctcctgcctcagcctcccaagtagctaggattacaggcgcccgccaccacgcctggctaacttttgtatttttagtagagatggggtttcaccatgttggccaggctggtctcaaactcctgaccttaagtgattcgcccactgtggcctcccaaagtgctgggattacaggcgtgagctaccgcccccagcccctcccatcccacttctgtccagccccctagccctactttctttctgggatccaggagtccagatccccagccccctctccagattacattcatccaggcacaggaaaggacagggtcaggaaaggaggactctgggcggcagcctccacattccccttccacgcttggcccccagaatggaggagggtgtctgtattactgggcgaggtgtcctcccttcctggggactgtggggggtggtcaaaagacctctatgccccacctccttcctccctctgccctgctgtgcctggggcagggggagaacagcccacctcgtgactgggggctggcccagcccgccctatccctgggggagggggcgggacagggggagccctataattggacaagtctgggatccttgagtcctactcagccccagcggaggtgaaggacgtccttccccaggagccggtgagaagcgcagtcgggggcacggggatgagctcaggggcctctagaaagagctgggaccctgggaacccctggcctccaggtagtctcaggagagctactcggggtcgggcttggggagaggaggagcgggggtgaggcaagcagcaggggactggacctgggaagggctgggcagcagagacgacccgacccgctagaaggtggggtggggagagcagctggactgggatgtaagccatagcaggactccacgagttgtcactatcatttatcgagcacctactgggtgtccccagtgtcctcagatctccataactggggagccaggggcagcgacacggtagctagccgtcgattggagaactttaaaatgaggactgaattagctcataaatggaacacggcgcttaactgtgaggttggagcttagaatgtgaagggagaatgaggaatgcgagactgggactgagatggaaccggcggtggggagggggtggggggatggaatttgaaccccgggagaggaagatggaattttctatggaggccgacctggggatggggagataagagaagaccaggagggagttaaatagggaatgggttgggggcggcttggtaaatgtgctgggattaggctgttgcagataatgcaacaaggcttggaaggctaacctggggtgaggccgggttggggccgggctgggggtgggaggagtcctcactggcggttgattgacagtttctccttccccagactggccaatcacaggcaggaagatgaaggttctgtgggctgcgttgctggtcacattcctggcaggtatgggggcggggcttgctcggttccccccgctcctccccctctcatcctcacctcaacctcctggccccattcaggcagaccctgggccccctcttctgaggcttctgtgctgcttcctggctctgaacagcgatttgacgctctctgggcctcggtttcccccatccttgagataggagttagaagttgttttgttgttgttgtttgttgttgttgttttgtttttttgagatgaagtctcgctctgtcgcccaggctggagtgcagtggcgggatctcggctcactgcaagctccgcctcccaggtccacgccattctcctgcctcagcctcccaagtagctgggactacaggcacatgccaccacacccgactaacttttttgtattttcagtagagacggggtttcaccatgttggccaggctggtctggaactcctgacctcaggtgatctgcccgtttcgatctcccaaagtgctgggattacaggcgtgagccaccgcacctggctgggagttagaggtttctaatgcattgcaggcagatagtgaataccagacacggggcagctgtgatctttattctccatcacccccacacagccctgcctggggcacacaaggacactcaatacatgcttttccgctgggcgcggtggctcacccctgtaatcccagcactttgggaggccaaggtgggaggatcacttgagcccaggagttcaacaccagcctgggcaacatagtgagaccctgtctctactaaaaatacaaaaattagccaggcatggtgccacacacctgtgctctcagctactcaggaggctgaggcaggaggatcgcttgagcccagaaggtcaaggttgcagtgaaccatgttcaggccgctgcactccagcctgggtgacagagcaagaccctgtttataaatacataatgctttccaagtgattaaaccgactcccccctcaccctgcccaccatggctccaaagaagcatttgtggagcaccttctgtgtgcccctaggtactagatgcctggacggggtcagaaggaccctgacccaccttgaacttgttccacacaggatgccaggccaaggtggagcaagcggtggagacagagccggagcccgagctgcgccagcagaccgagtggcagagcggccagcgctgggaactggcactgggtcgcttttgggattacctgcgctgggtgcagacactgtctgagcag

SEQ ID NO: 753 - DNA, 4046 bp, Homo sapiens
tgctgtctggattttgccaacctagggctggggtcagctgatgcccaccacgactcccgagcctccaggaactgaaaccctgtctgcccccagggtctggggaaggaggctgctgagtagaaccaaccccaggttaccaaccccacctcagccaccccttgccagccaaagcaaacaggcccggcccggcactgggggttccttctcgaaccaggagttcagcctcccctgacccgcagaatcttctgatcccacccgctccaggagccaggaatgagtcccagtctctcccagttctcactgtgtggttttgccattcgtcttgctgctgaaccacgggtttctcctctgaaacatctgggatttataacagggcttaggaaagtgacagcgtctgagcgttcactgtggcctgtccattgctagccctaacataggaccgctgtgtgccagggctgtcctccatgctcaatacacgttagcttgtcaccaaacatacccgtgccgctgctttcccagtctgatgagcaaaggaacttgatgctcagagaggacaagtcatttgcccaaggtcacacagctggcaactggcagagccaggattcacgccctggcaatttgactccagaatcctaaccttaacccagaagcacggcttcaagcccctggaaaccacaatacctgtggcagccagggggaggtgctggaatctcatttcacatgtggggagggggctcccctgtgctcaaggtcacaaccaaagaggaagctgtgattaaaacccaggtcccatttgcaaagcctcgacttttagcaggtgcatcatactgttcccacccctcccatcccacttctgtccagccgcctagccccactttcttttttttctttttttgagacagtctccctcttgctgaggctggagtgcagtggcgagatctcggctcactgtaacctccgcctcccgggttcaagcgattctcctgcctcagcctcccaagtagctaggattacaggcgcccgccaccacgcctggctaacttttgtatttttagtagagatggggtttcaccatgttggccaggctggtctcaaactcctgaccttaagtgattcgcccactgtggcctcccaaagtgctgggattacaggcgtgagctaccgcccccagcccctcccatcccacttctgtccagccccctagccctactttctttctgggatccaggagtccagatccccagccccctctccagattacattcatccaggcacaggaaaggacagggtcaggaaaggaggactctgggcggcagcctccacattccccttccacgcttggcccccagaatggaggagggtgtctgtattactgggcgaggtgtcctcccttcctggggactgtggggggtggtcaaaagacctctatgccccacctccttcctccctctgccctgctgtgcctggggcagggggagaacagcccacctcgtgactgggggctggcccagcccgccctatccctgggggagggggcgggacagggggagccctataattggacaagtctgggatccttgagtcctactcagccccagcggaggtgaaggacgtccttccccaggagccggtgagaagcgcagtcgggggcacggggatgagctcaggggcctctagaaagagctgggaccctgggaacccctggcctccaggtagtctcaggagagctactcggggtcgggcttggggagaggaggagcgggggtgaggcaagcagcaggggactggacctgggaagggctgggcagcagagacgacccgacccgctagaaggtggggtggggagagcagctggactgggatgtaagccatagcaggactccacgagttgtcactatcatttatcgagcacctactgggtgtccccagtgtcctcagatctccataactggggagccaggggcagcgacacggtagctagccgtcgattggagaactttaaaatgaggactgaattagctcataaatggaacacggcgcttaactgtgaggttggagcttagaatgtgaagggagaatgaggaatgcgagactgggactgagatggaaccggcggtggggagggggtggggggatggaatttgaaccccgggagaggaagatggaattttctatggaggccgacctggggatggggagataagagaagaccaggagggagttaaatagggaatgggttgggggcggcttggtaaatgtgctgggattaggctgttgcagataatgcaacaaggcttggaaggctaacctggggtgaggccgggttggggccgggctgggggtgggaggagtcctcactggcggttgattgacagtttctccttccccagactggccaatcacaggcaggaagatgaaggttctgtgggctgcgttgctggtcacattcctggcaggtatgggggcggggcttgctcggttccccccgctcctccccctctcatcctcacctcaacctcctggccccattcaggcagaccctgggccccctcttctgaggcttctgtgctgcttcctggctctgaacagcgatttgacgctctctgggcctcggtttcccccatccttgagataggagttagaagttgttttgttgttgttgtttgttgttgttgttttgtttttttgagatgaagtctcgctctgtcgcccaggctggagtgcagtggcgggatctcggctcactgcaagctccgcctcccaggtccacgccattctcctgcctcagcctcccaagtagctgggactacaggcacatgccaccacacccgactaacttttttgtattttcagtagagacggggtttcaccatgttggccaggctggtctggaactcctgacctcaggtgatctgcccgtttcgatctcccaaagtgctgggattacaggcgtgagccaccgcacctggctgggagttagaggtttctaatgcattgcaggcagatagtgaataccagacacggggcagctgtgatctttattctccatcacccccacacagccctgcctggggcacacaaggacactcaatacatgcttttccgctgggcgcggtggctcacccctgtaatcccagcactttgggaggccaaggtgggaggatcacttgagcccaggagttcaacaccagcctgggcaacatagtgagaccctgtctctactaaaaatacaaaaattagccaggcatggtgccacacacctgtgctctcagctactcaggaggctgaggcaggaggatcgcttgagcccagaaggtcaaggttgcagtgaaccatgttcaggccgctgcactccagcctgggtgacagagcaagaccctgtttataaatacataatgctttccaagtgattaaaccgactcccccctcaccctgcccaccatggctccaaagaagcatttgtggagcaccttctgtgtgcccctaggtactagatgcctggacggggtcagaaggaccctgacccaccttgaacttgttccacacaggatgccaggccaaggtggagcaagcggtggagacagagccggagcccgagctgcgccagcagaccgagtggcagagcggccagcgctgggaactggcactgggtcgcttttgggattacctgcgctgggtgcagacactgtctgagcaggtgcaggaggagctgctcagctcccaggtcacccaggaactgaggtgagtgtccccatcctggcccttgaccctcctggtgggcggctatacctccccaggtccaggtttcattctgcccctgtcgctaagtcttggggggcctgggtctctgctggttctagcttcctcttcccatttctgactcctggctttagctctctggaattctctctctcagctttgtctctctctcttcccttctgactcagtctctcacactcgtcctggctctgtctctgtccttccctagctcttttatatagagacagagagatggggtctcactgtgttgcccaggctggtcttga

SEQ ID NO: 754 - DNA, 4046 bp, Homo sapiens
acagggcttaggaaagtgacagcgtctgagcgttcactgtggcctgtccattgctagccctaacataggaccgctgtgtgccagggctgtcctccatgctcaatacacgttagcttgtcaccaaacatacccgtgccgctgctttcccagtctgatgagcaaaggaacttgatgctcagagaggacaagtcatttgcccaaggtcacacagctggcaactggcagagccaggattcacgccctggcaatttgactccagaatcctaaccttaacccagaagcacggcttcaagcccctggaaaccacaatacctgtggcagccagggggaggtgctggaatctcatttcacatgtggggagggggctcccctgtgctcaaggtcacaaccaaagaggaagctgtgattaaaacccaggtcccatttgcaaagcctcgacttttagcaggtgcatcatactgttcccacccctcccatcccacttctgtccagccgcctagccccactttcttttttttctttttttgagacagtctccctcttgctgaggctggagtgcagtggcgagatctcggctcactgtaacctccgcctcccgggttcaagcgattctcctgcctcagcctcccaagtagctaggattacaggcgcccgccaccacgcctggctaacttttgtatttttagtagagatggggtttcaccatgttggccaggctggtctcaaactcctgaccttaagtgattcgcccactgtggcctcccaaagtgctgggattacaggcgtgagctaccgcccccagcccctcccatcccacttctgtccagccccctagccctactttctttctgggatccaggagtccagatccccagccccctctccagattacattcatccaggcacaggaaaggacagggtcaggaaaggaggactctgggcggcagcctccacattccccttccacgcttggcccccagaatggaggagggtgtctgtattactgggcgaggtgtcctcccttcctggggactgtggggggtggtcaaaagacctctatgccccacctccttcctccctctgccctgctgtgcctggggcagggggagaacagcccacctcgtgactgggggctggcccagcccgccctatccctgggggagggggcgggacagggggagccctataattggacaagtctgggatccttgagtcctactcagccccagcggaggtgaaggacgtccttccccaggagccggtgagaagcgcagtcgggggcacggggatgagctcaggggcctctagaaagagctgggaccctgggaacccctggcctccaggtagtctcaggagagctactcggggtcgggcttggggagaggaggagcgggggtgaggcaagcagcaggggactggacctgggaagggctgggcagcagagacgacccgacccgctagaaggtggggtggggagagcagctggactgggatgtaagccatagcaggactccacgagttgtcactatcatttatcgagcacctactgggtgtccccagtgtcctcagatctccataactggggagccaggggcagcgacacggtagctagccgtcgattggagaactttaaaatgaggactgaattagctcataaatggaacacggcgcttaactgtgaggttggagcttagaatgtgaagggagaatgaggaatgcgagactgggactgagatggaaccggcggtggggagggggtggggggatggaatttgaaccccgggagaggaagatggaattttctatggaggccgacctggggatggggagataagagaagaccaggagggagttaaatagggaatgggttgggggcggcttggtaaatgtgctgggattaggctgttgcagataatgcaacaaggcttggaaggctaacctggggtgaggccgggttggggccgggctgggggtgggaggagtcctcactggcggttgattgacagtttctccttccccagactggccaatcacaggcaggaagatgaaggttctgtgggctgcgttgctggtcacattcctggcaggtatgggggcggggcttgctcggttccccccgctcctccccctctcatcctcacctcaacctcctggccccattcaggcagaccctgggccccctcttctgaggcttctgtgctgcttcctggctctgaacagcgatttgacgctctctgggcctcggtttcccccatccttgagataggagttagaagttgttttgttgttgttgtttgttgttgttgttttgtttttttgagatgaagtctcgctctgtcgcccaggctggagtgcagtggcgggatctcggctcactgcaagctccgcctcccaggtccacgccattctcctgcctcagcctcccaagtagctgggactacaggcacatgccaccacacccgactaacttttttgtattttcagtagagacggggtttcaccatgttggccaggctggtctggaactcctgacctcaggtgatctgcccgtttcgatctcccaaagtgctgggattacaggcgtgagccaccgcacctggctgggagttagaggtttctaatgcattgcaggcagatagtgaataccagacacggggcagctgtgatctttattctccatcacccccacacagccctgcctggggcacacaaggacactcaatacatgcttttccgctgggcgcggtggctcacccctgtaatcccagcactttgggaggccaaggtgggaggatcacttgagcccaggagttcaacaccagcctgggcaacatagtgagaccctgtctctactaaaaatacaaaaattagccaggcatggtgccacacacctgtgctctcagctactcaggaggctgaggcaggaggatcgcttgagcccagaaggtcaaggttgcagtgaaccatgttcaggccgctgcactccagcctgggtgacagagcaagaccctgtttataaatacataatgctttccaagtgattaaaccgactcccccctcaccctgcccaccatggctccaaagaagcatttgtggagcaccttctgtgtgcccctaggtactagatgcctggacggggtcagaaggaccctgacccaccttgaacttgttccacacaggatgccaggccaaggtggagcaagcggtggagacagagccggagcccgagctgcgccagcagaccgagtggcagagcggccagcgctgggaactggcactgggtcgcttttgggattacctgcgctgggtgcagacactgtctgagcaggtgcaggaggagctgctcagctcccaggtcacccaggaactgaggtgagtgtccccatcctggcccttgaccctcctggtgggcggctatacctccccaggtccaggtttcattctgcccctgtcgctaagtcttggggggcctgggtctctgctggttctagcttcctcttcccatttctgactcctggctttagctctctggaattctctctctcagctttgtctctctctcttcccttctgactcagtctctcacactcgtcctggctctgtctctgtccttccctagctcttttatatagagacagagagatggggtctcactgtgttgcccaggctggtcttgaacttctgggctcaagcgatcctcccgcctcggcctcccaaagtgctgggattagaggcatgagccaccttgcccggcctcctagctccttcttcgtctctgcctctgccctctgcatctgctctctgcatctgtctctgtctccttctctcggcctctgccccgttccttctctccctcttgggtctctctggctcatccccatctcgcccgccccatcccagcccttctccccgcctcccactgtgcgacaccctcccgccctctcggccgcagggcgctgatggacgagaccatgaaggagttgaaggcctacaaatcggaactggaggaacaactgaccccggtggcggaggagacgcgggcacgg

SEQ ID NO: 755 - DNA, 4045 bp, Homo sapiens
ccctatccctgggggagggggcgggacagggggagccctataattggacaagtctgggatccttgagtcctactcagccccagcggaggtgaaggacgtccttccccaggagccggtgagaagcgcagtcgggggcacggggatgagctcaggggcctctagaaagagctgggaccctgggaacccctggcctccaggtagtctcaggagagctactcggggtcgggcttggggagaggaggagcgggggtgaggcaagcagcaggggactggacctgggaagggctgggcagcagagacgacccgacccgctagaaggtggggtggggagagcagctggactgggatgtaagccatagcaggactccacgagttgtcactatcatttatcgagcacctactgggtgtccccagtgtcctcagatctccataactggggagccaggggcagcgacacggtagctagccgtcgattggagaactttaaaatgaggactgaattagctcataaatggaacacggcgcttaactgtgaggttggagcttagaatgtgaagggagaatgaggaatgcgagactgggactgagatggaaccggcggtggggagggggtggggggatggaatttgaaccccgggagaggaagatggaattttctatggaggccgacctggggatggggagataagagaagaccaggagggagttaaatagggaatgggttgggggcggcttggtaaatgtgctgggattaggctgttgcagataatgcaacaaggcttggaaggctaacctggggtgaggccgggttggggccgggctgggggtgggaggagtcctcactggcggttgattgacagtttctccttccccagactggccaatcacaggcaggaagatgaaggttctgtgggctgcgttgctggtcacattcctggcaggtatgggggcggggcttgctcggttccccccgctcctccccctctcatcctcacctcaacctcctggccccattcaggcagaccctgggccccctcttctgaggcttctgtgctgcttcctggctctgaacagcgatttgacgctctctgggcctcggtttcccccatccttgagataggagttagaagttgttttgttgttgttgtttgttgttgttgttttgtttttttgagatgaagtctcgctctgtcgcccaggctggagtgcagtggcgggatctcggctcactgcaagctccgcctcccaggtccacgccattctcctgcctcagcctcccaagtagctgggactacaggcacatgccaccacacccgactaacttttttgtattttcagtagagacggggtttcaccatgttggccaggctggtctggaactcctgacctcaggtgatctgcccgtttcgatctcccaaagtgctgggattacaggcgtgagccaccgcacctggctgggagttagaggtttctaatgcattgcaggcagatagtgaataccagacacggggcagctgtgatctttattctccatcacccccacacagccctgcctggggcacacaaggacactcaatacatgcttttccgctgggcgcggtggctcacccctgtaatcccagcactttgggaggccaaggtgggaggatcacttgagcccaggagttcaacaccagcctgggcaacatagtgagaccctgtctctactaaaaatacaaaaattagccaggcatggtgccacacacctgtgctctcagctactcaggaggctgaggcaggaggatcgcttgagcccagaaggtcaaggttgcagtgaaccatgttcaggccgctgcactccagcctgggtgacagagcaagaccctgtttataaatacataatgctttccaagtgattaaaccgactcccccctcaccctgcccaccatggctccaaagaagcatttgtggagcaccttctgtgtgcccctaggtactagatgcctggacggggtcagaaggaccctgacccaccttgaacttgttccacacaggatgccaggccaaggtggagcaagcggtggagacagagccggagcccgagctgcgccagcagaccgagtggcagagcggccagcgctgggaactggcactgggtcgcttttgggattacctgcgctgggtgcagacactgtctgagcaggtgcaggaggagctgctcagctcccaggtcacccaggaactgaggtgagtgtccccatcctggcccttgaccctcctggtgggcggctatacctccccaggtccaggtttcattctgcccctgtcgctaagtcttggggggcctgggtctctgctggttctagcttcctcttcccatttctgactcctggctttagctctctggaattctctctctcagctttgtctctctctcttcccttctgactcagtctctcacactcgtcctggctctgtctctgtccttccctagctcttttatatagagacagagagatggggtctcactgtgttgcccaggctggtcttgaacttctgggctcaagcgatcctcccgcctcggcctcccaaagtgctgggattagaggcatgagccaccttgcccggcctcctagctccttcttcgtctctgcctctgccctctgcatctgctctctgcatctgtctctgtctccttctctcggcctctgccccgttccttctctccctcttgggtctctctggctcatccccatctcgcccgccccatcccagcccttctccccgcctcccactgtgcgacaccctcccgccctctcggccgcagggcgctgatggacgagaccatgaaggagttgaaggcctacaaatcggaactggaggaacaactgaccccggtggcggaggagacgcgggcacggctgtccaaggagctgcaggcggcgcaggcccggctgggcgcggacatggaggacgtgtgcggccgcctggtgcagtaccgcggcgaggtgcaggccatgctcggccagagcaccgaggagctgcgggtgcgcctcgcctcccacctgcgcaagctgcgtaagcggctcctccgcgatgccgatgacctgcagaagcgcctggcagtgtaccaggccggggcccgcgagggcgccgagcgcggcctcagcgccatccgcgagcgcctggggcccctggtggaacagggccgcgtgcgggccgccactgtgggctccctggccggccagccgctacaggagcgggcccaggcctggggcgagcggctgcgcgcgcggatggaggagatgggcagccggacccgcgaccgcctggacgaggtgaaggagcaggtggcggaggtgcgcgccaagctggaggagcaggcccagcagatacgcctgcaggccgaggccttccaggcccgcctcaagagctggttcgagcccctggtggaagacatgcagcgccagtgggccgggctggtggagaaggtgcaggctgccgtgggcaccagcgccgcccctgtgcccagcgacaatcactgaacgccgaagcctgcagccatgcgaccccacgccaccccgtgcctcctgcctccgcgcagcctgcagcgggagaccctgtccccgccccagccgtcctcctggggtggaccctagtttaataaagattcaccaagtttcacgcatctgctggcctccccctgtgatttcctctaagccccagcctcagtttctctttctgcccacatactggccacacaattctcagccccctcctctccatctgtgtctgtgtgtatctttctctctgcccttttttttttttttagacggagtctggctctgtcacccaggctagagtgcagtggcacgatcttggctcactgcaacctctgcctcttgggttcaagcgattctgctgcctcagtagctgggattacaggctcacaccaccacacccggctaatttttgtatttttagtagagacgagctttcaccatgttggccaggcaggtctcaaactcctgaccaagtgatccacccgccggcctcccaaagtgct

SEQ ID NO: 756 - DNA, 4041 bp, Homo sapiens
gggttggggccgggctgggggtgggaggagtcctcactggcggttgattgacagtttctccttccccagactggccaatcacaggcaggaagatgaaggttctgtgggctgcgttgctggtcacattcctggcaggtatgggggcggggcttgctcggttccccccgctcctccccctctcatcctcacctcaacctcctggccccattcaggcagaccctgggccccctcttctgaggcttctgtgctgcttcctggctctgaacagcgatttgacgctctctgggcctcggtttcccccatccttgagataggagttagaagttgttttgttgttgttgtttgttgttgttgttttgtttttttgagatgaagtctcgctctgtcgcccaggctggagtgcagtggcgggatctcggctcactgcaagctccgcctcccaggtccacgccattctcctgcctcagcctcccaagtagctgggactacaggcacatgccaccacacccgactaacttttttgtattttcagtagagacggggtttcaccatgttggccaggctggtctggaactcctgacctcaggtgatctgcccgtttcgatctcccaaagtgctgggattacaggcgtgagccaccgcacctggctgggagttagaggtttctaatgcattgcaggcagatagtgaataccagacacggggcagctgtgatctttattctccatcacccccacacagccctgcctggggcacacaaggacactcaatacatgcttttccgctgggcgcggtggctcacccctgtaatcccagcactttgggaggccaaggtgggaggatcacttgagcccaggagttcaacaccagcctgggcaacatagtgagaccctgtctctactaaaaatacaaaaattagccaggcatggtgccacacacctgtgctctcagctactcaggaggctgaggcaggaggatcgcttgagcccagaaggtcaaggttgcagtgaaccatgttcaggccgctgcactccagcctgggtgacagagcaagaccctgtttataaatacataatgctttccaagtgattaaaccgactcccccctcaccctgcccaccatggctccaaagaagcatttgtggagcaccttctgtgtgcccctaggtactagatgcctggacggggtcagaaggaccctgacccaccttgaacttgttccacacaggatgccaggccaaggtggagcaagcggtggagacagagccggagcccgagctgcgccagcagaccgagtggcagagcggccagcgctgggaactggcactgggtcgcttttgggattacctgcgctgggtgcagacactgtctgagcaggtgcaggaggagctgctcagctcccaggtcacccaggaactgaggtgagtgtccccatcctggcccttgaccctcctggtgggcggctatacctccccaggtccaggtttcattctgcccctgtcgctaagtcttggggggcctgggtctctgctggttctagcttcctcttcccatttctgactcctggctttagctctctggaattctctctctcagctttgtctctctctcttcccttctgactcagtctctcacactcgtcctggctctgtctctgtccttccctagctcttttatatagagacagagagatggggtctcactgtgttgcccaggctggtcttgaacttctgggctcaagcgatcctcccgcctcggcctcccaaagtgctgggattagaggcatgagccaccttgcccggcctcctagctccttcttcgtctctgcctctgccctctgcatctgctctctgcatctgtctctgtctccttctctcggcctctgccccgttccttctctccctcttgggtctctctggctcatccccatctcgcccgccccatcccagcccttctccccgcctcccactgtgcgacaccctcccgccctctcggccgcagggcgctgatggacgagaccatgaaggagttgaaggcctacaaatcggaactggaggaacaactgaccccggtggcggaggagacgcgggcacggctgtccaaggagctgcaggcggcgcaggcccggctgggcgcggacatggaggacgtgtgcggccgcctggtgcagtaccgcggcgaggtgcaggccatgctcggccagagcaccgaggagctgcgggtgcgcctcgcctcccacctgcgcaagctgcgtaagcggctcctccgcgatgccgatgacctgcagaagcgcctggcagtgtaccaggccggggcccgcgagggcgccgagcgcggcctcagcgccatccgcgagcgcctggggcccctggtggaacagggccgcgtgcgggccgccactgtgggctccctggccggccagccgctacaggagcgggcccaggcctggggcgagcggctgcgcgcgcggatggaggagatgggcagccggacccgcgaccgcctggacgaggtgaaggagcaggtggcggaggtgcgcgccaagctggaggagcaggcccagcagatacgcctgcaggccgaggccttccaggcccgcctcaagagctggttcgagcccctggtggaagacatgcagcgccagtgggccgggctggtggagaaggtgcaggctgccgtgggcaccagcgccgcccctgtgcccagcgacaatcactgaacgccgaagcctgcagccatgcgaccccacgccaccccgtgcctcctgcctccgcgcagcctgcagcgggagaccctgtccccgccccagccgtcctcctggggtggaccctagtttaataaagattcaccaagtttcacgcatctgctggcctccccctgtgatttcctctaagccccagcctcagtttctctttctgcccacatactggccacacaattctcagccccctcctctccatctgtgtctgtgtgtatctttctctctgcccttttttttttttttagacggagtctggctctgtcacccaggctagagtgcagtggcacgatcttggctcactgcaacctctgcctcttgggttcaagcgattctgctgcctcagtagctgggattacaggctcacaccaccacacccggctaatttttgtatttttagtagagacgagctttcaccatgttggccaggcaggtctcaaactcctgaccaagtgatccacccgccggcctcccaaagtgctgagattacaggcctgagccaccatgcccggcctctgcccctctttcttttttagggggcagggaaaggtctcaccctgtcacccgccatcacagctcactgcagcctccacctcctggactcaagtgataagtgatcctcccgcctcagcctttccagtagctgagactacaggcgcataccactaggattaatttgggggggggggtggtgtgtgtggagatggggtctggctttgttggccaggctgatgtggaattcctgggctcaagcgatactcccaccttggcctcctgagtagctgagactactggctagcaccaccacacccagctttttattattatttgtagagacaaggtctcaatatgttgcccaggctagtctcaaacccctgggctcaagagatcctccgccatcggcctcccaaagtgctgggattccaggcatggggctccgagcccggcctgcccaacttaataatacttgttcctcagagttgcaactccaaatgacctgagattggtgcctttattctaagctattttcattttttttctgctgtcattattctcccccttctctcctccagtcttatctgatatctgcctccttcccacccaccctgcaccccatcccacccctctgtctctccctgttctcctcaggagactctggcttcctgttttcctccacttctatcttttatctctccctcctacggtttcttttctttctccccggcctgcttgtttctcccccaacccccttcatctggatttcttcttctgccattcagtttg

SEQ ID NO: 757 - DNA, 4047 bp, Homo sapiens
cccccgctcctccccctctcatcctcacctcaacctcctggccccattcaggcagaccctgggccccctcttctgaggcttctgtgctgcttcctggctctgaacagcgatttgacgctctctgggcctcggtttcccccatccttgagataggagttagaagttgttttgttgttgttgtttgttgttgttgttttgtttttttgagatgaagtctcgctctgtcgcccaggctggagtgcagtggcgggatctcggctcactgcaagctccgcctcccaggtccacgccattctcctgcctcagcctcccaagtagctgggactacaggcacatgccaccacacccgactaacttttttgtattttcagtagagacggggtttcaccatgttggccaggctggtctggaactcctgacctcaggtgatctgcccgtttcgatctcccaaagtgctgggattacaggcgtgagccaccgcacctggctgggagttagaggtttctaatgcattgcaggcagatagtgaataccagacacggggcagctgtgatctttattctccatcacccccacacagccctgcctggggcacacaaggacactcaatacatgcttttccgctgggcgcggtggctcacccctgtaatcccagcactttgggaggccaaggtgggaggatcacttgagcccaggagttcaacaccagcctgggcaacatagtgagaccctgtctctactaaaaatacaaaaattagccaggcatggtgccacacacctgtgctctcagctactcaggaggctgaggcaggaggatcgcttgagcccagaaggtcaaggttgcagtgaaccatgttcaggccgctgcactccagcctgggtgacagagcaagaccctgtttataaatacataatgctttccaagtgattaaaccgactcccccctcaccctgcccaccatggctccaaagaagcatttgtggagcaccttctgtgtgcccctaggtactagatgcctggacggggtcagaaggaccctgacccaccttgaacttgttccacacaggatgccaggccaaggtggagcaagcggtggagacagagccggagcccgagctgcgccagcagaccgagtggcagagcggccagcgctgggaactggcactgggtcgcttttgggattacctgcgctgggtgcagacactgtctgagcaggtgcaggaggagctgctcagctcccaggtcacccaggaactgaggtgagtgtccccatcctggcccttgaccctcctggtgggcggctatacctccccaggtccaggtttcattctgcccctgtcgctaagtcttggggggcctgggtctctgctggttctagcttcctcttcccatttctgactcctggctttagctctctggaattctctctctcagctttgtctctctctcttcccttctgactcagtctctcacactcgtcctggctctgtctctgtccttccctagctcttttatatagagacagagagatggggtctcactgtgttgcccaggctggtcttgaacttctgggctcaagcgatcctcccgcctcggcctcccaaagtgctgggattagaggcatgagccaccttgcccggcctcctagctccttcttcgtctctgcctctgccctctgcatctgctctctgcatctgtctctgtctccttctctcggcctctgccccgttccttctctccctcttgggtctctctggctcatccccatctcgcccgccccatcccagcccttctccccgcctcccactgtgcgacaccctcccgccctctcggccgcagggcgctgatggacgagaccatgaaggagttgaaggcctacaaatcggaactggaggaacaactgaccccggtggcggaggagacgcgggcacggctgtccaaggagctgcaggcggcgcaggcccggctgggcgcggacatggaggacgtgtgcggccgcctggtgcagtaccgcggcgaggtgcaggccatgctcggccagagcaccgaggagctgcgggtgcgcctcgcctcccacctgcgcaagctgcgtaagcggctcctccgcgatgccgatgacctgcagaagcgcctggcagtgtaccaggccggggcccgcgagggcgccgagcgcggcctcagcgccatccgcgagcgcctggggcccctggtggaacagggccgcgtgcgggccgccactgtgggctccctggccggccagccgctacaggagcgggcccaggcctggggcgagcggctgcgcgcgcggatggaggagatgggcagccggacccgcgaccgcctggacgaggtgaaggagcaggtggcggaggtgcgcgccaagctggaggagcaggcccagcagatacgcctgcaggccgaggccttccaggcccgcctcaagagctggttcgagcccctggtggaagacatgcagcgccagtgggccgggctggtggagaaggtgcaggctgccgtgggcaccagcgccgcccctgtgcccagcgacaatcactgaacgccgaagcctgcagccatgcgaccccacgccaccccgtgcctcctgcctccgcgcagcctgcagcgggagaccctgtccccgccccagccgtcctcctggggtggaccctagtttaataaagattcaccaagtttcacgcatctgctggcctccccctgtgatttcctctaagccccagcctcagtttctctttctgcccacatactggccacacaattctcagccccctcctctccatctgtgtctgtgtgtatctttctctctgcccttttttttttttttagacggagtctggctctgtcacccaggctagagtgcagtggcacgatcttggctcactgcaacctctgcctcttgggttcaagcgattctgctgcctcagtagctgggattacaggctcacaccaccacacccggctaatttttgtatttttagtagagacgagctttcaccatgttggccaggcaggtctcaaactcctgaccaagtgatccacccgccggcctcccaaagtgctgagattacaggcctgagccaccatgcccggcctctgcccctctttcttttttagggggcagggaaaggtctcaccctgtcacccgccatcacagctcactgcagcctccacctcctggactcaagtgataagtgatcctcccgcctcagcctttccagtagctgagactacaggcgcataccactaggattaatttgggggggggggtggtgtgtgtggagatggggtctggctttgttggccaggctgatgtggaattcctgggctcaagcgatactcccaccttggcctcctgagtagctgagactactggctagcaccaccacacccagctttttattattatttgtagagacaaggtctcaatatgttgcccaggctagtctcaaacccctgggctcaagagatcctccgccatcggcctcccaaagtgctgggattccaggcatggggctccgagcccggcctgcccaacttaataatacttgttcctcagagttgcaactccaaatgacctgagattggtgcctttattctaagctattttcattttttttctgctgtcattattctcccccttctctcctccagtcttatctgatatctgcctccttcccacccaccctgcaccccatcccacccctctgtctctccctgttctcctcaggagactctggcttcctgttttcctccacttctatcttttatctctccctcctacggtttcttttctttctccccggcctgcttgtttctcccccaacccccttcatctggatttcttcttctgccattcagtttggtttgagctctctgcttctccggttccctctgagctagctgtcccttcacccactgtgaactgggtttccctgcccaaccctcattctctttctttctttctttttttttttttttttttttttttttttttgagacagagtcttgctctgttgcccagcctggagt

SEQ ID NO: 758 - DNA, 4031 bp, Homo sapiens
cctcggtttcccccatccttgagataggagttagaagttgttttgttgttgttgtttgttgttgttgttttgtttttttgagatgaagtctcgctctgtcgcccaggctggagtgcagtggcgggatctcggctcactgcaagctccgcctcccaggtccacgccattctcctgcctcagcctcccaagtagctgggactacaggcacatgccaccacacccgactaacttttttgtattttcagtagagacggggtttcaccatgttggccaggctggtctggaactcctgacctcaggtgatctgcccgtttcgatctcccaaagtgctgggattacaggcgtgagccaccgcacctggctgggagttagaggtttctaatgcattgcaggcagatagtgaataccagacacggggcagctgtgatctttattctccatcacccccacacagccctgcctggggcacacaaggacactcaatacatgcttttccgctgggcgcggtggctcacccctgtaatcccagcactttgggaggccaaggtgggaggatcacttgagcccaggagttcaacaccagcctgggcaacatagtgagaccctgtctctactaaaaatacaaaaattagccaggcatggtgccacacacctgtgctctcagctactcaggaggctgaggcaggaggatcgcttgagcccagaaggtcaaggttgcagtgaaccatgttcaggccgctgcactccagcctgggtgacagagcaagaccctgtttataaatacataatgctttccaagtgattaaaccgactcccccctcaccctgcccaccatggctccaaagaagcatttgtggagcaccttctgtgtgcccctaggtactagatgcctggacggggtcagaaggaccctgacccaccttgaacttgttccacacaggatgccaggccaaggtggagcaagcggtggagacagagccggagcccgagctgcgccagcagaccgagtggcagagcggccagcgctgggaactggcactgggtcgcttttgggattacctgcgctgggtgcagacactgtctgagcaggtgcaggaggagctgctcagctcccaggtcacccaggaactgaggtgagtgtccccatcctggcccttgaccctcctggtgggcggctatacctccccaggtccaggtttcattctgcccctgtcgctaagtcttggggggcctgggtctctgctggttctagcttcctcttcccatttctgactcctggctttagctctctggaattctctctctcagctttgtctctctctcttcccttctgactcagtctctcacactcgtcctggctctgtctctgtccttccctagctcttttatatagagacagagagatggggtctcactgtgttgcccaggctggtcttgaacttctgggctcaagcgatcctcccgcctcggcctcccaaagtgctgggattagaggcatgagccaccttgcccggcctcctagctccttcttcgtctctgcctctgccctctgcatctgctctctgcatctgtctctgtctccttctctcggcctctgccccgttccttctctccctcttgggtctctctggctcatccccatctcgcccgccccatcccagcccttctccccgcctcccactgtgcgacaccctcccgccctctcggccgcagggcgctgatggacgagaccatgaaggagttgaaggcctacaaatcggaactggaggaacaactgaccccggtggcggaggagacgcgggcacggctgtccaaggagctgcaggcggcgcaggcccggctgggcgcggacatggaggacgtgtgcggccgcctggtgcagtaccgcggcgaggtgcaggccatgctcggccagagcaccgaggagctgcgggtgcgcctcgcctcccacctgcgcaagctgcgtaagcggctcctccgcgatgccgatgacctgcagaagcgcctggcagtgtaccaggccggggcccgcgagggcgccgagcgcggcctcagcgccatccgcgagcgcctggggcccctggtggaacagggccgcgtgcgggccgccactgtgggctccctggccggccagccgctacaggagcgggcccaggcctggggcgagcggctgcgcgcgcggatggaggagatgggcagccggacccgcgaccgcctggacgaggtgaaggagcaggtggcggaggtgcgcgccaagctggaggagcaggcccagcagatacgcctgcaggccgaggccttccaggcccgcctcaagagctggttcgagcccctggtggaagacatgcagcgccagtgggccgggctggtggagaaggtgcaggctgccgtgggcaccagcgccgcccctgtgcccagcgacaatcactgaacgccgaagcctgcagccatgcgaccccacgccaccccgtgcctcctgcctccgcgcagcctgcagcgggagaccctgtccccgccccagccgtcctcctggggtggaccctagtttaataaagattcaccaagtttcacgcatctgctggcctccccctgtgatttcctctaagccccagcctcagtttctctttctgcccacatactggccacacaattctcagccccctcctctccatctgtgtctgtgtgtatctttctctctgcccttttttttttttttagacggagtctggctctgtcacccaggctagagtgcagtggcacgatcttggctcactgcaacctctgcctcttgggttcaagcgattctgctgcctcagtagctgggattacaggctcacaccaccacacccggctaatttttgtatttttagtagagacgagctttcaccatgttggccaggcaggtctcaaactcctgaccaagtgatccacccgccggcctcccaaagtgctgagattacaggcctgagccaccatgcccggcctctgcccctctttcttttttagggggcagggaaaggtctcaccctgtcacccgccatcacagctcactgcagcctccacctcctggactcaagtgataagtgatcctcccgcctcagcctttccagtagctgagactacaggcgcataccactaggattaatttgggggggggggtggtgtgtgtggagatggggtctggctttgttggccaggctgatgtggaattcctgggctcaagcgatactcccaccttggcctcctgagtagctgagactactggctagcaccaccacacccagctttttattattatttgtagagacaaggtctcaatatgttgcccaggctagtctcaaacccctgggctcaagagatcctccgccatcggcctcccaaagtgctgggattccaggcatggggctccgagcccggcctgcccaacttaataatacttgttcctcagagttgcaactccaaatgacctgagattggtgcctttattctaagctattttcattttttttctgctgtcattattctcccccttctctcctccagtcttatctgatatctgcctccttcccacccaccctgcaccccatcccacccctctgtctctccctgttctcctcaggagactctggcttcctgttttcctccacttctatcttttatctctccctcctacggtttcttttctttctccccggcctgcttgtttctcccccaacccccttcatctggatttcttcttctgccattcagtttggtttgagctctctgcttctccggttccctctgagctagctgtcccttcacccactgtgaactgggtttccctgcccaaccctcattctctttctttctttctttttttttttttttttttttttttttttttgagacagagtcttgctctgttgcccagcctggagtgcagtggtgcaatcttggttcactgcaacctccacttcccagattcaagcaattctcctgcctcagcctccagagtagctgggattacaggcgtgtcccaccacacccga

SEQ ID NO: 759 - DNA, 4042 bp, Homo sapiens
cagtggcgggatctcggctcactgcaagctccgcctcccaggtccacgccattctcctgcctcagcctcccaagtagctgggactacaggcacatgccaccacacccgactaacttttttgtattttcagtagagacggggtttcaccatgttggccaggctggtctggaactcctgacctcaggtgatctgcccgtttcgatctcccaaagtgctgggattacaggcgtgagccaccgcacctggctgggagttagaggtttctaatgcattgcaggcagatagtgaataccagacacggggcagctgtgatctttattctccatcacccccacacagccctgcctggggcacacaaggacactcaatacatgcttttccgctgggcgcggtggctcacccctgtaatcccagcactttgggaggccaaggtgggaggatcacttgagcccaggagttcaacaccagcctgggcaacatagtgagaccctgtctctactaaaaatacaaaaattagccaggcatggtgccacacacctgtgctctcagctactcaggaggctgaggcaggaggatcgcttgagcccagaaggtcaaggttgcagtgaaccatgttcaggccgctgcactccagcctgggtgacagagcaagaccctgtttataaatacataatgctttccaagtgattaaaccgactcccccctcaccctgcccaccatggctccaaagaagcatttgtggagcaccttctgtgtgcccctaggtactagatgcctggacggggtcagaaggaccctgacccaccttgaacttgttccacacaggatgccaggccaaggtggagcaagcggtggagacagagccggagcccgagctgcgccagcagaccgagtggcagagcggccagcgctgggaactggcactgggtcgcttttgggattacctgcgctgggtgcagacactgtctgagcaggtgcaggaggagctgctcagctcccaggtcacccaggaactgaggtgagtgtccccatcctggcccttgaccctcctggtgggcggctatacctccccaggtccaggtttcattctgcccctgtcgctaagtcttggggggcctgggtctctgctggttctagcttcctcttcccatttctgactcctggctttagctctctggaattctctctctcagctttgtctctctctcttcccttctgactcagtctctcacactcgtcctggctctgtctctgtccttccctagctcttttatatagagacagagagatggggtctcactgtgttgcccaggctggtcttgaacttctgggctcaagcgatcctcccgcctcggcctcccaaagtgctgggattagaggcatgagccaccttgcccggcctcctagctccttcttcgtctctgcctctgccctctgcatctgctctctgcatctgtctctgtctccttctctcggcctctgccccgttccttctctccctcttgggtctctctggctcatccccatctcgcccgccccatcccagcccttctccccgcctcccactgtgcgacaccctcccgccctctcggccgcagggcgctgatggacgagaccatgaaggagttgaaggcctacaaatcggaactggaggaacaactgaccccggtggcggaggagacgcgggcacggctgtccaaggagctgcaggcggcgcaggcccggctgggcgcggacatggaggacgtgtgcggccgcctggtgcagtaccgcggcgaggtgcaggccatgctcggccagagcaccgaggagctgcgggtgcgcctcgcctcccacctgcgcaagctgcgtaagcggctcctccgcgatgccgatgacctgcagaagcgcctggcagtgtaccaggccggggcccgcgagggcgccgagcgcggcctcagcgccatccgcgagcgcctggggcccctggtggaacagggccgcgtgcgggccgccactgtgggctccctggccggccagccgctacaggagcgggcccaggcctggggcgagcggctgcgcgcgcggatggaggagatgggcagccggacccgcgaccgcctggacgaggtgaaggagcaggtggcggaggtgcgcgccaagctggaggagcaggcccagcagatacgcctgcaggccgaggccttccaggcccgcctcaagagctggttcgagcccctggtggaagacatgcagcgccagtgggccgggctggtggagaaggtgcaggctgccgtgggcaccagcgccgcccctgtgcccagcgacaatcactgaacgccgaagcctgcagccatgcgaccccacgccaccccgtgcctcctgcctccgcgcagcctgcagcgggagaccctgtccccgccccagccgtcctcctggggtggaccctagtttaataaagattcaccaagtttcacgcatctgctggcctccccctgtgatttcctctaagccccagcctcagtttctctttctgcccacatactggccacacaattctcagccccctcctctccatctgtgtctgtgtgtatctttctctctgcccttttttttttttttagacggagtctggctctgtcacccaggctagagtgcagtggcacgatcttggctcactgcaacctctgcctcttgggttcaagcgattctgctgcctcagtagctgggattacaggctcacaccaccacacccggctaatttttgtatttttagtagagacgagctttcaccatgttggccaggcaggtctcaaactcctgaccaagtgatccacccgccggcctcccaaagtgctgagattacaggcctgagccaccatgcccggcctctgcccctctttcttttttagggggcagggaaaggtctcaccctgtcacccgccatcacagctcactgcagcctccacctcctggactcaagtgataagtgatcctcccgcctcagcctttccagtagctgagactacaggcgcataccactaggattaatttgggggggggggtggtgtgtgtggagatggggtctggctttgttggccaggctgatgtggaattcctgggctcaagcgatactcccaccttggcctcctgagtagctgagactactggctagcaccaccacacccagctttttattattatttgtagagacaaggtctcaatatgttgcccaggctagtctcaaacccctgggctcaagagatcctccgccatcggcctcccaaagtgctgggattccaggcatggggctccgagcccggcctgcccaacttaataatacttgttcctcagagttgcaactccaaatgacctgagattggtgcctttattctaagctattttcattttttttctgctgtcattattctcccccttctctcctccagtcttatctgatatctgcctccttcccacccaccctgcaccccatcccacccctctgtctctccctgttctcctcaggagactctggcttcctgttttcctccacttctatcttttatctctccctcctacggtttcttttctttctccccggcctgcttgtttctcccccaacccccttcatctggatttcttcttctgccattcagtttggtttgagctctctgcttctccggttccctctgagctagctgtcccttcacccactgtgaactgggtttccctgcccaaccctcattctctttctttctttctttttttttttttttttttttttttttttttgagacagagtcttgctctgttgcccagcctggagtgcagtggtgcaatcttggttcactgcaacctccacttcccagattcaagcaattctcctgcctcagcctccagagtagctgggattacaggcgtgtcccaccacacccgactaatttttgtatttttggtagagacaaggcttcggcattgttggccaggcaggtctcgaactcctgacctcaagtaatctgcctgcctcaccctcccaaagtgctgggattacaggcatgagcca

SEQ ID NO: 760 - DNA, 4045 bp, Homo sapiens
ccgactaacttttttgtattttcagtagagacggggtttcaccatgttggccaggctggtctggaactcctgacctcaggtgatctgcccgtttcgatctcccaaagtgctgggattacaggcgtgagccaccgcacctggctgggagttagaggtttctaatgcattgcaggcagatagtgaataccagacacggggcagctgtgatctttattctccatcacccccacacagccctgcctggggcacacaaggacactcaatacatgcttttccgctgggcgcggtggctcacccctgtaatcccagcactttgggaggccaaggtgggaggatcacttgagcccaggagttcaacaccagcctgggcaacatagtgagaccctgtctctactaaaaatacaaaaattagccaggcatggtgccacacacctgtgctctcagctactcaggaggctgaggcaggaggatcgcttgagcccagaaggtcaaggttgcagtgaaccatgttcaggccgctgcactccagcctgggtgacagagcaagaccctgtttataaatacataatgctttccaagtgattaaaccgactcccccctcaccctgcccaccatggctccaaagaagcatttgtggagcaccttctgtgtgcccctaggtactagatgcctggacggggtcagaaggaccctgacccaccttgaacttgttccacacaggatgccaggccaaggtggagcaagcggtggagacagagccggagcccgagctgcgccagcagaccgagtggcagagcggccagcgctgggaactggcactgggtcgcttttgggattacctgcgctgggtgcagacactgtctgagcaggtgcaggaggagctgctcagctcccaggtcacccaggaactgaggtgagtgtccccatcctggcccttgaccctcctggtgggcggctatacctccccaggtccaggtttcattctgcccctgtcgctaagtcttggggggcctgggtctctgctggttctagcttcctcttcccatttctgactcctggctttagctctctggaattctctctctcagctttgtctctctctcttcccttctgactcagtctctcacactcgtcctggctctgtctctgtccttccctagctcttttatatagagacagagagatggggtctcactgtgttgcccaggctggtcttgaacttctgggctcaagcgatcctcccgcctcggcctcccaaagtgctgggattagaggcatgagccaccttgcccggcctcctagctccttcttcgtctctgcctctgccctctgcatctgctctctgcatctgtctctgtctccttctctcggcctctgccccgttccttctctccctcttgggtctctctggctcatccccatctcgcccgccccatcccagcccttctccccgcctcccactgtgcgacaccctcccgccctctcggccgcagggcgctgatggacgagaccatgaaggagttgaaggcctacaaatcggaactggaggaacaactgaccccggtggcggaggagacgcgggcacggctgtccaaggagctgcaggcggcgcaggcccggctgggcgcggacatggaggacgtgtgcggccgcctggtgcagtaccgcggcgaggtgcaggccatgctcggccagagcaccgaggagctgcgggtgcgcctcgcctcccacctgcgcaagctgcgtaagcggctcctccgcgatgccgatgacctgcagaagcgcctggcagtgtaccaggccggggcccgcgagggcgccgagcgcggcctcagcgccatccgcgagcgcctggggcccctggtggaacagggccgcgtgcgggccgccactgtgggctccctggccggccagccgctacaggagcgggcccaggcctggggcgagcggctgcgcgcgcggatggaggagatgggcagccggacccgcgaccgcctggacgaggtgaaggagcaggtggcggaggtgcgcgccaagctggaggagcaggcccagcagatacgcctgcaggccgaggccttccaggcccgcctcaagagctggttcgagcccctggtggaagacatgcagcgccagtgggccgggctggtggagaaggtgcaggctgccgtgggcaccagcgccgcccctgtgcccagcgacaatcactgaacgccgaagcctgcagccatgcgaccccacgccaccccgtgcctcctgcctccgcgcagcctgcagcgggagaccctgtccccgccccagccgtcctcctggggtggaccctagtttaataaagattcaccaagtttcacgcatctgctggcctccccctgtgatttcctctaagccccagcctcagtttctctttctgcccacatactggccacacaattctcagccccctcctctccatctgtgtctgtgtgtatctttctctctgcccttttttttttttttagacggagtctggctctgtcacccaggctagagtgcagtggcacgatcttggctcactgcaacctctgcctcttgggttcaagcgattctgctgcctcagtagctgggattacaggctcacaccaccacacccggctaatttttgtatttttagtagagacgagctttcaccatgttggccaggcaggtctcaaactcctgaccaagtgatccacccgccggcctcccaaagtgctgagattacaggcctgagccaccatgcccggcctctgcccctctttcttttttagggggcagggaaaggtctcaccctgtcacccgccatcacagctcactgcagcctccacctcctggactcaagtgataagtgatcctcccgcctcagcctttccagtagctgagactacaggcgcataccactaggattaatttgggggggggggtggtgtgtgtggagatggggtctggctttgttggccaggctgatgtggaattcctgggctcaagcgatactcccaccttggcctcctgagtagctgagactactggctagcaccaccacacccagctttttattattatttgtagagacaaggtctcaatatgttgcccaggctagtctcaaacccctgggctcaagagatcctccgccatcggcctcccaaagtgctgggattccaggcatggggctccgagcccggcctgcccaacttaataatacttgttcctcagagttgcaactccaaatgacctgagattggtgcctttattctaagctattttcattttttttctgctgtcattattctcccccttctctcctccagtcttatctgatatctgcctccttcccacccaccctgcaccccatcccacccctctgtctctccctgttctcctcaggagactctggcttcctgttttcctccacttctatcttttatctctccctcctacggtttcttttctttctccccggcctgcttgtttctcccccaacccccttcatctggatttcttcttctgccattcagtttggtttgagctctctgcttctccggttccctctgagctagctgtcccttcacccactgtgaactgggtttccctgcccaaccctcattctctttctttctttctttttttttttttttttttttttttttttttgagacagagtcttgctctgttgcccagcctggagtgcagtggtgcaatcttggttcactgcaacctccacttcccagattcaagcaattctcctgcctcagcctccagagtagctgggattacaggcgtgtcccaccacacccgactaatttttgtatttttggtagagacaaggcttcggcattgttggccaggcaggtctcgaactcctgacctcaagtaatctgcctgcctcaccctcccaaagtgctgggattacaggcatgagccacctcacccggaccatccctcattctccatcctttcctccagttgtgatgtctacccctcatgtttcccaacaagcctactgggtgctgaatccaggctgggaagagaa

SEQ ID NO: 761 - DNA, 4075 bp, Homo sapiens
caggcgtgagccaccgcacctggctgggagttagaggtttctaatgcattgcaggcagatagtgaataccagacacggggcagctgtgatctttattctccatcacccccacacagccctgcctggggcacacaaggacactcaatacatgcttttccgctgggcgcggtggctcacccctgtaatcccagcactttgggaggccaaggtgggaggatcacttgagcccaggagttcaacaccagcctgggcaacatagtgagaccctgtctctactaaaaatacaaaaattagccaggcatggtgccacacacctgtgctctcagctactcaggaggctgaggcaggaggatcgcttgagcccagaaggtcaaggttgcagtgaaccatgttcaggccgctgcactccagcctgggtgacagagcaagaccctgtttataaatacataatgctttccaagtgattaaaccgactcccccctcaccctgcccaccatggctccaaagaagcatttgtggagcaccttctgtgtgcccctaggtactagatgcctggacggggtcagaaggaccctgacccaccttgaacttgttccacacaggatgccaggccaaggtggagcaagcggtggagacagagccggagcccgagctgcgccagcagaccgagtggcagagcggccagcgctgggaactggcactgggtcgcttttgggattacctgcgctgggtgcagacactgtctgagcaggtgcaggaggagctgctcagctcccaggtcacccaggaactgaggtgagtgtccccatcctggcccttgaccctcctggtgggcggctatacctccccaggtccaggtttcattctgcccctgtcgctaagtcttggggggcctgggtctctgctggttctagcttcctcttcccatttctgactcctggctttagctctctggaattctctctctcagctttgtctctctctcttcccttctgactcagtctctcacactcgtcctggctctgtctctgtccttccctagctcttttatatagagacagagagatggggtctcactgtgttgcccaggctggtcttgaacttctgggctcaagcgatcctcccgcctcggcctcccaaagtgctgggattagaggcatgagccaccttgcccggcctcctagctccttcttcgtctctgcctctgccctctgcatctgctctctgcatctgtctctgtctccttctctcggcctctgccccgttccttctctccctcttgggtctctctggctcatccccatctcgcccgccccatcccagcccttctccccgcctcccactgtgcgacaccctcccgccctctcggccgcagggcgctgatggacgagaccatgaaggagttgaaggcctacaaatcggaactggaggaacaactgaccccggtggcggaggagacgcgggcacggctgtccaaggagctgcaggcggcgcaggcccggctgggcgcggacatggaggacgtgtgcggccgcctggtgcagtaccgcggcgaggtgcaggccatgctcggccagagcaccgaggagctgcgggtgcgcctcgcctcccacctgcgcaagctgcgtaagcggctcctccgcgatgccgatgacctgcagaagcgcctggcagtgtaccaggccggggcccgcgagggcgccgagcgcggcctcagcgccatccgcgagcgcctggggcccctggtggaacagggccgcgtgcgggccgccactgtgggctccctggccggccagccgctacaggagcgggcccaggcctggggcgagcggctgcgcgcgcggatggaggagatgggcagccggacccgcgaccgcctggacgaggtgaaggagcaggtggcggaggtgcgcgccaagctggaggagcaggcccagcagatacgcctgcaggccgaggccttccaggcccgcctcaagagctggttcgagcccctggtggaagacatgcagcgccagtgggccgggctggtggagaaggtgcaggctgccgtgggcaccagcgccgcccctgtgcccagcgacaatcactgaacgccgaagcctgcagccatgcgaccccacgccaccccgtgcctcctgcctccgcgcagcctgcagcgggagaccctgtccccgccccagccgtcctcctggggtggaccctagtttaataaagattcaccaagtttcacgcatctgctggcctccccctgtgatttcctctaagccccagcctcagtttctctttctgcccacatactggccacacaattctcagccccctcctctccatctgtgtctgtgtgtatctttctctctgcccttttttttttttttagacggagtctggctctgtcacccaggctagagtgcagtggcacgatcttggctcactgcaacctctgcctcttgggttcaagcgattctgctgcctcagtagctgggattacaggctcacaccaccacacccggctaatttttgtatttttagtagagacgagctttcaccatgttggccaggcaggtctcaaactcctgaccaagtgatccacccgccggcctcccaaagtgctgagattacaggcctgagccaccatgcccggcctctgcccctctttcttttttagggggcagggaaaggtctcaccctgtcacccgccatcacagctcactgcagcctccacctcctggactcaagtgataagtgatcctcccgcctcagcctttccagtagctgagactacaggcgcataccactaggattaatttgggggggggggtggtgtgtgtggagatggggtctggctttgttggccaggctgatgtggaattcctgggctcaagcgatactcccaccttggcctcctgagtagctgagactactggctagcaccaccacacccagctttttattattatttgtagagacaaggtctcaatatgttgcccaggctagtctcaaacccctgggctcaagagatcctccgccatcggcctcccaaagtgctgggattccaggcatggggctccgagcccggcctgcccaacttaataatacttgttcctcagagttgcaactccaaatgacctgagattggtgcctttattctaagctattttcattttttttctgctgtcattattctcccccttctctcctccagtcttatctgatatctgcctccttcccacccaccctgcaccccatcccacccctctgtctctccctgttctcctcaggagactctggcttcctgttttcctccacttctatcttttatctctccctcctacggtttcttttctttctccccggcctgcttgtttctcccccaacccccttcatctggatttcttcttctgccattcagtttggtttgagctctctgcttctccggttccctctgagctagctgtcccttcacccactgtgaactgggtttccctgcccaaccctcattctctttctttctttctttttttttttttttttttttttttttttttgagacagagtcttgctctgttgcccagcctggagtgcagtggtgcaatcttggttcactgcaacctccacttcccagattcaagcaattctcctgcctcagcctccagagtagctgggattacaggcgtgtcccaccacacccgactaatttttgtatttttggtagagacaaggcttcggcattgttggccaggcaggtctcgaactcctgacctcaagtaatctgcctgcctcaccctcccaaagtgctgggattacaggcatgagccacctcacccggaccatccctcattctccatcctttcctccagttgtgatgtctacccctcatgtttcccaacaagcctactgggtgctgaatccaggctgggaagagaagggagcggctcttctgtcggagtctgcaccaggcccatgctgagacgagagctggcgctcagagaggggaagcttggatggaagcccaggagccgccggcactctcttctcctcccaccccctcagttctcagagacggggaggaggg

SEQ ID NO: 762 - DNA, 4032 bp, Homo sapiens
tctttgcccctcgctgagccctactggatgttcttggttatgcgacagtttccccatctattaaagagaaacccctatagcagaggggaggatgaggttggaaaagcaggagcattgttatgctattcttgtggggtctgggaagcagacatctgggtggatgtttggggggtgctgggcttagttggggaagtaggggggcccctggggctgacagggactggaagctctgagctggccagagggatgttgcaatcctgccagggtcttgtctatgctgtccttttcacaaccatccccctactgccaggctgacacgtggttgcgggggcacaaggccagccaacctagagtctgaggctaggcggaggacaccctccccaccagctgccagggtcactggcggtcaaaggcagctggtggggaaggcattggactccagccttgggggacggatgtagtgatggtgggaagcaggcttggtgccaggaggggcgtcagagggtgaataaaagcagatagagtgtttgggggaggtagccagccaaagggggtgaggcccggtggaagggaagaagggacatacacgcagagctttgcagctgagggttttaattttttgagatggggtctctgtcccaccaggctggagtgcagtggcacaatcacagctcactgcagcctcgaactcctgggctcaagcaatcttcctacctcagcctcttgagtagctgggactacaggcatgcgccaccacgctcggctaatttttgaacttttttgtagagatgaggtctccctatattgcccaggctggtctcgaactcccaggctcaagtgatcctccctcttcagcttcccaaagtgctgggattacaggcatgagccaccatgcctggctaatgcaggtgaggtttttgcagtgtcatccagctaaggcgacccgttcccctcccaaaaaagggagactgagaaccatgaagttaagagcccagagaatatcacggtggtctggggtgcttcaagggctggtctggaataaattggaggtggcacgcagggtaggagcgccgggccaactgggagacccagcaacataaaggaaaagttgttggggctgaggaggcttgctgagagaggggaagtgagggaaagaggtgatctagggacacggtgtgaatgagggggggatgagatcacagggttattactgggagacccctgagggaagatggccacagggacaggacaaggctgtcttcttaagggaggagaccacccctcatattgtcttatgcccaatttctgcctccaaagaaagaaaaagtaaaaactaaaaggcagaaatgaaatccacaagcagacagcccgcgccacaccctgggcctggtggttaaagattgacccctgacctaatccgttaggttatctatagattacagacattgtatagaaaagcactgtgaaaatccctattctgttttgttccgatctaattaccggtgcatgcagcccccagtcacgcatcccctgcttgttcaatcgatcacgaccctctcacgtgcacccacttagagttgtgagcccttaaaaggaacagggattgctcactcggggagctcggctcttgagacaggaatcttgcccattccccgaacgaataaaccccttccttaactcagcgtctgaggaattttgtctgcggctcctcctgctacattctgagtggggaaagggactaaggtggtctgaggaccccacagagtcaggaagattgagaggtgagagtgctgaacggggaggggctttggggctaagggaagtgcccgggaccccacctgaccccaacgctcacgggacaggggcagaggagaaaaacgtgggtggacagagggaggcaggcggtcaggggaaggctcaggaggagggagatcaacatcaacctgccccgccccctccccagcctgataaaggtcctgcgggcaggacaggacctcccaaccaagccctccagcaaggattcaggttggtgctgagtgcctgggagggacacccgcctacactctgcaagaaactcaaaaagggagatgaggggatcgtgggagggaggtagggagggaggagggtgccactgatcccctgaacccctgcctctgcctccagagtgcccctccggcctcgccatgaggctcttcctgtcgctcccggtcctggtggtggttctgtcgatcgtcttggaaggtaaaagtgggatgggagaattgcggagttggagatttggaagagtgaaggtggctacaggcctggggtcccggcttagaggacctctgagagctccggggccccttctgggtcgtggttgcctcatcgtggtcgggtgggtctccaggttctcccaggctcagtcccgcaggcgccaaatctgcgcaggagagcactagcaaccgatgacgtattgaggcccacacctctgggattggctgtcctgcttcgacagccttgaaagtgggtaagctgggtggggggctctgggagaggtcagtgctgagtaaggcaattcccagcagcttgagccccaccaggtcactccagtattcctccccattctttttttttttttttttttttctcttgagacggagtctcgctctgtcgccgaggctggagtgcagtggcgcgatctcggctcactgcaagctccgcctccctggttcacgccattctcctgcctcagcaggactacaggcgcccgccaccgcgcccggctaattttttgtattttcagtagagacagggtttcaccgtggtctcgatctcctgactttgtgatccgcctgcctcgacctcccaaagtgctgggattacaggcgtgagccaccgcgtccggccattcctccccattctaaccacatgatccccaaggatctctatccatcccggtatcccaacctaagggggttccaataacaaatttttggccgggcagggtggctcatgcctgtaatcccagcactttgggaggccgaggcgggcagatcacttgaggtcaggagttcgaaaccagcctggccaacatggtgaaacttcgtctctactaaaaatacaaaaaaattagccaggtgtggaggcacgcgcctgtaggcccagctactcgggaggctgaggcaggagaatcacttgaacccgggaggcggaggttgcagtgagccgagatcataccactgcactccagcctggctgacacagcaagactccgtctcaaaacaaaacaaaacaaaaatagctgggtgtggtggtgcacacctgtaatcccagctacttgggaggctgaggcaggagaactgcttgaacccgggaggtggtggttgcagtaggccgagatcatgccactgcactccagcttgggctacagagcaagactccatctccaaaaaaaaaaaaaaaaaaacaaattttgaacccctgcccatcttcctggcaggcccagccccagcccaggggaccccagacgtctccagtgccttggataagctgaaggagtttggaaacacactggaggacaaggctcgggaactcatcagccgcatcaaacagagtgaactttctgccaagatgcggttagaacccttcccagggcacgggagagctggggtgtgtttttgggtggagccctggcagatggtccaagatgaacagattgaaaaaaaaacaagtcctggagaggctgacaacatccctctggtcacacagctagatctcaaggtgctcagacttcaaggacagtttccctgactcccatccaggccatattttaaaagatggtcttgggctgggcacggtggctcatgcttgcaatcccagcacttagggaggccgaggtgggctgattgcctgaggtcaggagttcgagaccagtctgaccaacatggtgaaaccttgtctctactaaaaatacaaaaaaattaggcaggcatggtggcgtgcacctgtaatcccagctagtcgggaggctgaggcaggggaattgcttga

SEQ ID NO: 763 - DNA, 4046 bp, Homo sapiens
aagcttggccagacctgggtccccaggctggagtagcaccccttcctgtgtgatcttgacagaggggcattactgtgagcctcagtttcctctcctataaactggtggttctacagggaagtaaaggagcaggcctacagggtgtctggtacatgtagatgctcagtatatcatgaaacccacccttgccccctttggcaagttagagagtcattcgttctttcaaaaatatttactgagcatctgctaagtgctggaaactgtttcaatgtggggaataaaacagtgaagaacgtgccgagcacggtggctcacacctgtaaccccaccactttggaaggccgaggtgggtggatcacttgaggtcaggagtgcgagaaccccgtccctaatagaaatgcaaaaaaaattagctgggcatggtggcccatgcctgtagtcccagctccttgggaggctgaggcgagaggattgcttgagcccaggagatctaggctgcagtgcgccatgtttgtgccactgcattccagcctgggtaacagaatgagaccctgtctcaacaaaaaaagaaaagaaaagagaagaaaagagaaaagaaagacagggagggagggaggaaggaagggagggagggagggaaaatagagccaggcataaacttagaaagatcgtttggaggccaggcacaatggctcacacctgtaatcccagcactttgggaggccaaggcaagcagatcacctgaggtcaggagttcgagaccagcctaacatggagaaaccctgtctctactaaaaatacaaaattagccgggcgtggtggtgcattcctgtagtcctagctactcgggagcctgaggcaggagaatcacttgaacccgggaggcggaggttgcagtgagccgagatcatgccactgcactccagcctgggcgacaaggcgagactccatgccaaaaaagaaaaaaaactcctggcgcggtggctcacgccagtaatcccagcactgtgggaggctgagcaggcggatcacgaggtcaggagttcgagactagcctgctcaacataatgaaaccctctctgtactaaaaatacaaaaattagctgggtgtggtggcaggcacctgtagtcccagctactcgggaggctgaggcaggagaatggcttgaacctgggaggcagaggttgcagtgagccgagacagtgccattgcactccagtccaggtgacagagcgaaactccatctcaaaaaaaaaaggaaggcattggtagcaagagatggcaggccttgaaagccaggccagggtgaagtgtttcttttttttttttttttttttttctttttaaatttttttttttgagacggagtctcgctctgtcacccaggctggattgcagtggcctgatctcggctcactgcaagttccgcctcccgggttcatgccattctcctgcctcaccctcccgagtagctgggactacaggcacctgccaccacgccagctaattttttgtattcttagtagaatgtagaatttacttagtagaattttttgtattcttagccagcatggtctcgatctcctgacctggtgatccacccgcctcggcctcccaaagtgctgggattacaggcgtgagccacggcgcccggccttattttttctttttgagatgtacccagactggagtacagtggtgcgatctcggcttactggaacctccacctcccgggttcaggcaattctcctgcctcagcctcatgagtacttggaactacaggtgtgtgacaccacacatggtattttttgtatttttagtgaagatgacatttcaccatgttgcccaggttggtctcgaactcctgacctcaagtgatcagcctacctcggcctcccaaagtgttgggattacaggcgtgagccaaatgcccagccaagggtaaagtgtttagacttcaacgtgctttggtccatctgggaaactgaggcacagaagttggcccacccagcccagcggtcctcctaatcccacagacagtggggatggagattctgcaaggggaagaggtgggagtcaggtagcaggcagaatttggacagcctgggaggtagctgcacacagtgacccccttccttattcctccccacagggagtggttttcagagacatttcagaaagtgaaggagaaactcaagattgactcatgaggacctgaagggtgacatcccaggaggggcctctgaaatttcccacaccccagcgcctgtgctgaggactccctccatgtggccccaggtgccaccaataaaaatcctacagaaaattctctcctgagtgcttctttactctggggaaggggctgcgggagagggtaggggcttccagagagggcagggtctgcaggagagggcaggggctaaaccttaggtactcctcacaagccctccaatgccctatctacttgccctgtgctgaggatgttttaactccatggtctcaaaagagtcttcctaagaaccctgcaaactgggccttattaatcccataagggcattgaggcccagagaggtgaagttacttgtataaggtcacacagccaggaagtagagaactggaactagattgaaccctcagcctagcaatgtcactatgctacacttttcctagtgtggtctacccgagatgaggggctgaggtttttttttgtttttgtttctgttttgaggcagactcactctctcccccaggatggagtacagtggtgcgatctcagctcactgcaacctccacctcccaggttcaagagattatcctgcctcagcctcccaagtagctgggatttacaggtgtgcgccaccacacccagctaatttttgtatttttagtagagacagggtttcatcatgttggccaggctggtctccaactcctgggcttaagcaatcctcctgccttggcctcccaaagtattagaattacaggcgtgagccactgtgcctggctcttatgtaaaattaaaccacatacacatgagaaacaaccctatgtaattaagatttctttctttttttttttttttttaagagatggagtcacccaggctggagtgcagttgcacaatctccattcactgcagccttgcaacctccaccacctgagttcaagggattctcctgcctcagcctcctgagtagctgggattataggcatgtgccaccacgcccagctaatttttttgtatttttagtagagacggaatttccccatgttggccaggctggtctcaaactcctggccttaaatgatccacccgtcctggcctcccaaagtgctgggattacaggtgtgagccaccgcacccagcttaagatttcataagaaaaatatttgtaagccacatatctaataaccggttaatattcaggctgggtgaagtggctcatgcctgtaatcccagcactttgggaagacaaggcgggcggattacctgaagtcaaaagtttgagacctgcctggccaacatggtgaaaccctgtctctactaaaaatacaaaaaaattagccgggtggggtggcacatgcctgtaatcccagctgcttgggaggctgaggcaagagaatcccttgaacccaggagtcgaaggttgcagtgagccaagatggcgccactgccctccagcctgggagacagagtgggactccatctcaaaaaaaaaaaaaattcaaaatgtataatatacaatcctagttgggacatcaaacactgcagccactgtggaaaacagtatggggtttcctcaaaacattaaagatagaactctcaaatgatccttcaatcccacttctgggtatttattcaaaagaattgaaatcaggaccttgaagagatacctgccctcccatgttcactgcaggtctgctcaatacccaagatatggaaacaacctaaatgtttatcaacagatgaatgggtcaaggaaatgtggtctctacatgtaatggaatgtaacgcatccttaaaaaggaaaccctaaggccgggc

SEQ ID NO: 764 - DNA, 4047 bp, Homo sapiens
tcctgcctcaagggagtgaatgcaacagggaactagaacaagtaagacccctgttctttactcatgctgggagaggacaggcagtaaagaagtatgcacattcaaagataagacaatagcagagagtggtaagtaaataaaggaaataaaatagggcaatgtgacagcgactggggtgggagaaagagtctttaaattgggtggtggtggcagtatctctgaggaggtagcatttgagtggagaactgaagaaaagtcagccatacaaatgaggattggaggaggtggggcgtgggaagtaagagcagggagggcattcatggaagagaggcccccaagttggaaaaggctgctgatttaaagaagctgaaacaagcccagtgcaactgaatagagtgaacaaggggcagaggctggaggcatgggaagggcctaccatgcaggacttcaagaccatgtccataaaattcgcttatcttctaaatatggcaaaaagggattttactggttagtctatggaagcacactggaggccaagctagggagtcaaaatccaagaacaggccaggcatggtggctcttgcctgtaatcccaatactttgggaggccaaggtgggcgcgtcacctgagcccaggagttcaagaccagcctgggaaacatggtgaaaacctgtctctactaagaacacaaaaattagccagtcaagatggcatgtgcctgtagtcccagctattcaagaggctgaggtgggaggatcacctgagcccagggtggccgaggctgcagtgagccatgattgcgccactgctctccagcctgggcaacagagtgagaacgtgtctcaaaaaacaaacaaacagaaaaccaagaacagaaggggaagttggcaatctgttgttctttctctttaaaaaaaaaaaatgccctgagctgagtccaaagcaagccctggaaatccagaggtgatttgcgggctccctgaacctgtttggttcactgtccgctgtttgatactctttcgccaaacagtgaagttgtaacctattaaggaagtgactcattgctttatctgttttataatttggggtttcatatattggagtacagagagattgttaaaaaccacataaaaatgttcattgatggccaggcatggtggctcacacctgtaatcccagcactttgggaggccaagtcgggaggatagcttgagcccaggagtttgagacaagcctgggcaaccctgtctctacaaaaaatttaaaaagtagccgggtgtggtggcacatgcctatagtcccagctagtcaggaggctgatatgggaggatggcctaagcccaggagtttgaagatgcagtgagctatgatcacactactgcactctggcctgggtgacagagtgaaaccctgtctctgaaaaaaaaaaaaaaaaaaaaaaaaaaaaagtcaatttattcaaattctacctctttcttaagattgttatatgctcaaataagatgatgactctaaaagtgccctgaaactaaaaaattaaggcatttaaaaattatttcttacctttattagcaacccagtaaggaggtagattacattatactcctcaatagagctaaagtgattgatatggtttggctttatgtccccacccaaatcttatcttgaactgtaatccccatgtgtcgagggacagacctggtgggaagtcattggatcacaggagcattttcccccatgctgttcttgtgatagtgagggagttctcatgagatctgacggttttaaagtggcagtttcccctatgcgctctctcctgccaccatgtaagacatgctttgcttcccctttgccttcaaccatggttgtaagtttcctgaggcctccccagccatttggaactatgaatcaattaaaactcttttctttctaaattacccagtctcaggtattctttatagcggtgtgaaaatggactaatacagtgatgaatttccatcactagttatggacaagggaagaagatgatgctggagtgttctggtagcaggaagaggccctcacttttctctgattaaccagagtggttaaattctagattgggcttgttgctagcagaagaggtgaaattcaggacaacaattgaaagttggtagcatttgaacacatcatttaggaacactcagttttaatcatcatctaccatggatactcaaaagaataccctcggacccccgattggttgactagttgcctggtcttagaaacttaatctttctgcaattcctccacttcttcaactgaaaatgggcatatcaccagtctagtttggtgacggtgacaattatgtaaataaaagtataaaaacacctagtacattgtctcctatattatcttagtaatatataatatataataatattgttaacatatgttatacatttataatattaatacaacatatgtattatatatgtattattatataatggcacatattatataatatctcagtaacaacatgataaataataacaattaaataaattaattaaatatgtattatgttaatatataatatctcagtaatagctcaagaagtagtgattattctcactattattaataaacgtttaatgagtacacatctttggcgtatctctgcaatgttttatctggttgttgttctaagtaaattcaaattaagatacatgcaaactaagaggcacaataaatgtatacatcttcatttgaatttactcataaaacagagcaacaaccagataaaacattgcagagatacgccaaagatgtttatttgaatttacaatttgaattgagttgtgcatcttagtttgagtttacactgtgtcccttttgtatttcactccagaaacccatcattgactgcatgtcagaagatggttacaagttggatcgaatcaagggtgaaattgaattccataatgtgaccttccattatccttccagaccagaggtgaaggtgagtgctggtctgttccccagaatagtaaatgttttcttcttcgatgatttatttgcataaccacaaattgctcattttctgaagcctgactctgtttccagtaatagggaatggaggtgtctttctctgaaagtatcctcgggtgttggcttatctcaggcaacagaccacattcctttgtgataaccataatgtgcaaatcccctggttgggacacagtctggcagtacattcaggctaaatgaactgtatgacgctctgttgaaatgagtggcaggtcctgtctttccatgcaagtgctagataaatgacaaggcaattacaacaatcaggaagcacaggttcttcccaaccttcgcagagactgcagaaagtggaagacactgagtatagggtatgaagtggcaaaggaaagctgccattatgtaggtttttacttcccatctgtaaattcactaggtcactgcatcagcccttataggaaggtatccttgtgatattatgctcacgtgtcttgttcagggcacatggtgaaaaaaattatttcctgcctttaaattatctttacaggcaatttactctacaagaaaattaggatctactacccctgaataaattggctttgaaattagacttattcctcattttcaacagagtatctctagccactctctcttaatatttctgttatctgcacagaactaaatcccattttgttagcctaacttaattctgacaccacatacctatcatatatatatgtgatatatatgatatatatgtgatatatatatcatatatctgtgatatatatatgatatatatatcattctctctttgaatatatgaatatatacagagagaaggtaaacatatatataaaatgcaggtaaatatttatataatataatatttgtaatatataatacatatatatgtaaatatatatttatctataaatatttaaatataaaaatatttatgtatttatatatttatctataaatataaaaatatttatgtatttatatatttatct

SEQ ID NO: 765 - DNA, 4044 bp, Homo sapiens
agctggcagagtaggattcaagtctaaggggctctgactccaaaccccactcactctccaatatgcctattgttctccatgtcctcccaagcttgggcacttccctgaaaaggcacaacagacaaagagcattaacaagcacacaagaaggatttctgcaatcacaactgtgttctccatttcatcttatctttcagataacctctttcagagagaggtgatctgacccattccaagagttatcccagtcactgtctcggttccccaggaattgaggcctggacaacatataggaataggaatttcgggtcacatcagctaaaaacactcccaaggactgagaaattattattagagcagccacattagatagcacgttatggaatcaggcatactaaaactgtgctataaatgagaatagaatttaactgaaaaactgcatacaccctcacacatcgttgagcaataggtaccaacttcctattgctcaatagcaaaatattctcacagtgtctacattattcaaacatttcccagataaaatagaaaatggtttaaagtgacaatagcaaagagctcgctccatttcattaggtcaccacttggctgtaccgctaacaggttgtgtgactcaggaaaaatccatttaacccctgaaaacctcagtttccttgtctttaaaatagggataatacctcccaaaaacattatgatgattcagggaataatccacgttatgcatttaagccgtgtcgggcacagaatcaattgctaaagagagatgtatatgtttttcaatccactatatcattcaagttttacggcagtctttcctactaaccactttccaactatactccagagaaccctcaacttccacagaagagcttcaggggttttgcaaacattttttcattttttttctgaatacactaatctctttcttcaaacctgtgataaagtaatatacacactcacgtggatcataggccacatttcaacatgttggaggttaacatatagcccagttcacttggttttaaacagctctaacgcttagtttctctagtcatctcagtacccatttctagcttctcataaactcgtcactgatttggaatgttgtaggtctgcacatgtcttgtcttgctttcaagtctgtgtatgcttgtccttatacaacaaacttctacaagcaactatacaacaaactatacaagcaacttcactaggctcaaatgtaaattttaatgttaataaaaacagcttccagtcttggtaacacagtgagatcccatctctacaaaaaaaaaaaaaaaaattttttttaaatagccaggcatggtggcatgtgcctatagtctcggatacccaggaggctgaggccagtgaaatgcttgagtacaggagtttgagactgcagtgagctaggatcatgccactgcattccagcctgggcaacagaacaagaacccgtctctttaaaaaaaaaaaaaaaaagcctcactttccttactgttacatgtttaattcacatgttttataaaatgtacactgatgaaattaatatattgtttttaaaaactactatgaatacttacttaatttacatcttagaattccatctaagattttgataagagttttgctgctaaaagtttggaaaaactactggaagataaactcccttaatctgggtattatatatatttttatatttctgagctagttgatcttccgcaatatgtgttttttcctcttcttatttattaatctgtgccagggttttctttgggggttcattttgactaggactcaatccaagtcagttttagaaaaagtaatgtgtctactgttaagtacagatgtcttttcatttccttttgtaaaaatcaaaactacatagttgagcgtctccaactgagtgaaaatggactttcttttctggaatcatctgaaatcgtctttcaacatcatgcctatactttatatgttatatgtcatatattatacccaatcatgatatctgcatgtgtctctggcgtttgtctataaattatgcaatggccattggctaatagcaatgaactatgacatggtctaacttaacactttattagtataatgactgaaacactttagtcttacagaatgtcctatttggaatttattctttgaggaggttcttacttttagtagggtcattttgatatatcaacaaccagacaaccctggatgaagcttaccatagaccaaatttggaccagatttcttcctcctgtcaatgatgttacagtgagaatctaatattgtattaaacccatgccacatgttaaatgaatctgaatgacagactgacttacctaatttcttggacttcacattttcttttcttctttttgatttttagagtgtgtccaagtttacggactatgagctgaaggcctatgccaaagcaggggtggtggctgatgaagtcatttcatcaatgagaacagtggctgcttttggtggtgagaaaagagaggttgaaaggttggttaattggaatctgattctttccttaatttcatcaatcagcatagtaccctgagtctctcagtttgtgcaaagcggcagacccaccttggtctgtggcctccagaggaagtacttgttcaagagggagctaagcagagtaatttaggttggtaatttaggtactataagaagtcccaagcctttagcagtatgtttttaaagatgttgcagttggcaatttttagaaagccagctcagggtagatatttatttcaaactctgatggtatgtatgtataaatattatacctcatatcagtctataatgctgtttgctgtcattaaagaaaagcctacatgagacattacaactgataccacagaaatacagaagatcataagagattactaaaaacaaacgccaacaaattggatgacctagaagaaatggataaattcctataaaaatacaacctgccaaggttgaatcacggagaaataaagagaaataaatctgaacataccaataatgagtaaggagattgaatcagtaataaaaagtctcccatgaaagaaaagcccaggacctgatagcttcattgctgaattttaccagacatttaaagaaaaactagtaccagtcctcctcaaattcttccacaaaattaaagcggagggaatacttcacactcattttacaaggccaatattaccttgataccaaagccagaaaaggatactacaagaaaatcaaaggccaatatccatgataaacatggacgtgaaaatgctcaacaaaaatactagtaaaccaaattgaatagcacattaaaagaatcattcaccatgatcaagtgagatttatccctaggatgtaaggatggttcaacataggcatgtcaataaatgtaatataccacattaacagaatgaaagacaaaaaccatatggttatctcaatagatgctgaaaaagcatttaacaaaattcaatatcctttcctgacagaaactctcaacaaattaggtataaaaagaatgtacctcaatacaataaaggtaacatatgacaagcccacagctaaatcatactcaagggtgagaatttgaaagcttttccccctaagatcaggaacaagacaaaaatgcccattcttgccacttcttagcaaccacaaaagaccttgaatagcaaaaatcctgaacaagaagaacaaagctggaggcatcacgttacctgatctcaaaatctactacaaagtaatagatcattattagattatttgattactatagtaataaaaacagcatggtactggcatagaaacagacacatagaccagtgaaaaagaatggagagcccagaaagaagtccatgcatttatagtccattgattttcaataaagagaccaacaacacaccatgaggaaagggcagtctcttcaataaacgatgttggggaaactggatatccacatgcagaagaatgaaatttgatccttacctcacactatacacaaatatc

SEQ ID NO: 766 - DNA, 4070 bp, Homo sapiens
tctagtagatggaatttttaagttaaagccttccagatggctgtcagtgaattacactgataaggattacagagtgtcaggtctcttgattagcttatcagaatttctggtcagaacagtcgaataatagataaaaaaatgaaagcagatgaaggaataggaagttaaaataccacagttgcaatttcattttattttcttttatccaattaaagtgtaaacactcaaatggaagccacaaagtctcgtgtaacttaattgtagaagagacatactgtaatttctgccatattctatgggtcacagaaaccaaccctggtgtaatttggaaggagtctaaacaagtgtgaatattgccagatgagaattttaggggctttttggaggctgattactactgcgggcattggggagctcaagtcttcacttcctctcatacagataaatcaatgcagaaatctaggcctgtcctttcacttggatttcagtctatgttcttagcaatatatattcagtttgtataagcaagcactattttgtagctagacagtttaggctatatacttttgtaatggctttgttgagatacaattcacatactataaaattcacccactcgaagtgtacaattagatgttttttagtatatttacagagttgtgcattcactgccacagtcaattttagaacattttcttttttttccttttttttaattatactttaagttttagggtacatgtgcacaatgtgcaggtttgctacatatatacacatgtaccatgttggtgtgctgcacccatcaactcgtcatttaacattaggtatttctcctgatgctatccctcccccctccccccaccccacaacaggccccagtgtgtgatgttccccttcctgtgtccatgtgttctcattgttcaattcccacctatgagtgagaacatgtagtgtttggttttttgtcctcgcgatagtttgctgagaatgatggtttccagtttcatccatgtccctacaaaggacatgaactcatcattttttatggctgcatagtattccatggtgtatatgtgccacattttcttaatccagtctatcactgttggacatttgggttggttccaagtctttgctattgtgaatagtgccacaataaacatacgtgtgcatgtatccttatagcagcatgatttataatcctttgggtatatacccagtaatgggatggctgggtcaaatggtatttctagaattttaaaacattttcattactagaaaaagaaaccccttgcccctcggccatcactttctagtacctcatcctcctccctatccctaggcaacactaatctgctttctgactgtagatttgcctattctgaacatgtcatattaataatatcatataatatgtgatcctttgagattggcttctttaacttaagcatgtgttttttgcagttcatccacatgtatttttattgctaaataatatttcgttatatggatataatacatgttatgtatctgttcatcagttgatggacatttggattgttcccacttttgagctattacaaataattctgctgtgaacatttgtatacagatttttgtgtggacatgtcttcatttctcttgggtacatgtctaagtgtggaattgctgtatcacatggtaactctatgtttaactattctaggaactgccagactattttccacagtggctgcaccatttacatttctgctaacagtgtatgagggttctaatttctccacatcctcaccagcacttgttatttagcatctgtgatatctctcataggtagaataatgacccccaaagatatccaggtccttatccctagaacctgtgaatgttaccttgtatgggaaaagggtctatgcagacgtgattcagttaacaatatcgagatgggggagactatcctggattatccaggtgggccctaaatgcagtcatgtgtgttcttaaaagggatggttgctaagaagaaggcagagggggatttgcctgtagagagaagagtagaggcaaggtgactacagaaaaaaagaatggaatgacattgccacagccgaggagtgtcagcagctatcaagagctggaagaagcagggggaaatttctctcttagggccttaggagggaacacagccctgtcagcaccttgatttccacccagcgaagctgattttgggcatgtgaggggatacatctctcttgttttaattgtggtaattgttacagcagtcataggaaaccaatacaatagccatcctagggagcaggaagtggaatctcattgtggttttgatttgcatttctctgaggaccagtgatgtttggcttctttttaggtgcttgttggccatttgcacatcttcttcagaaaaatatctattcagatctttcatttggaaataaataatataacaaaatatgtattcagccctttttaaaactgggatatatgtctactgattattgagttgtaggaattctttatatattctagatataagttccttatcagagatacaatttgcaagcaatttctctcattctttgggttgtctttctaacttcttgataattatctttgaagcactgaagtgtttaattttggtgatgtctagtttgttcttttgttgcttctgaattggtgtcatatctaagaaaccattgccaaatccaaggtcttgataattacctttgaaccactaaagtgtttaattttggtgatgtctagtttattcttttgttgcttctgaattggtgtcatatctaagaaactattgccaaatccaaggtcgtgaacattacacttgttttcttttaatggctctggccatgtgaagtgccagcttccccttcatctttcagtatgagtgtaaatttcctaaggccttcccagaaacttagcagatgctctaatccttcctgtacagcctgcagaattgtgacccaactaaacctcttttctttataagttacccagtctcaggtatttctttatagcagtgtgagatgaactaatacactcacggttagtctacgatccactttgagtaaatttttgtaggggtgaattaggggtccaaattgattcctatctgcatggatagccagttgttccagcatcatttgtggaacaactattttttccccattgattaatctcagaatccttatcaaaatcaatttactgtaattaagagggtttatttgtggactctcaatgctattccattgacctacacatctatctttatgccagtaacacactgttttgattaccgtagttttatagtaagttttgaaatcaagaagtgtgattctactactagggattgtctattctgggtctcttggattttcatataaattgtttaacttctgcaaagaagtcagctagaatgctaggaattgcattgactctgtagatcagtttaaggaatattgccgtcttaacaatattaagtcttctgattcgtgatccacttatttgcgtctgctttaatttatttcaacaaggttttatagctttcagaatattttgcaattttttgttaaattgattgctacgtattttattatttttgatgttatcataaatggaattgttttcttaattttattttcagtttgcccattgctactatcgcaaaatacaactttttttgtatattgatcttttatcctaaacctagctgaactacttatgagttcaatagttttttagtgggctctttaggattttttatacaagaccatatcatctgcaaatagaaataactatacattttcctttccaatctagctgccttttttattttattttattttattttattttatcttattgcctaattgttttggcccaaacctccagtacaatgttgagtagaagtggtgagagcacacatccttgtcttattcctatcttagggggaaagcatttagtctttcaccattaagtatggcattagctatgactttttcacaagtgtcctttattatgttgaggaattcccttctaat

SEQ ID NO: 767 - DNA, 4044 bp, Homo sapiens
ggtcttctcagcagtgcatggggcccacattagctcctctggctccaagcgaagagatggtctctagccccctgtttgatttggggcacttacagtcctctcgccagctaaactctcacactcgtcagcatccagacgctgaggggaaaataccagctgcttctgtgctctgcttactcttcggtacttctctgccatttctggttcctgaagatgtttatttttatttatttgagtctgactgtatctctttttaaaaacatgttatccaccattgctatatatttgaagcagagaaagttagtgaagcataaacttcatgctgaatcgagtgtctatatcctggaattctcagcctgtaccctctataaactaatttttccactgtgaataagactaatcatgactctgtcgacatttacattttatttagaaaatgtcttccttctgttcctttgatccaagcttgactcaccttaccttgaggttgcatttacaaaggaacactgaaggttacccaacagtatgtgggtgtcgttcatcaactacagtgactcaagaatatcaccagttggtttgcctttctcatggttttaatgttttctcattaaaaataaataaagcacagataagcagaaagaataaccatccatccaacaactagaggaaaatttatcaatggttttgctttatctttcctataattaagctataaaaaacaaccatccatgtaacaactagagaaaacctttatcaatgactgtggcttatctttcctgataattaggctctttcagggagttattaaccgattttaaaacttttgtctgagattgattagtaaagattatttcttgaaccaaattgttctttcgtttggctactttgattaaagaagaaagaagagataataattgcaatgattcttttattttattttatagggtcgttggctgtgggttgcaattaccatgtctgactcagtaattcttcgaagtataaagaaatttggagaggagaatgatggttttgagtcagataaatcatgtgagtggcttttttccctcactgcatcttgtacaaggagaggtgagaacaaaagtaggacaagctggtcaagtttcaaggagcagaaaaaaatcagcaacagtaggtagaagtatcattgtgtgtgattcttatacacaactgtgtggctctccctagaatccatgtaacgtaatatctgaaagcactaggtaagaacacaccaagtgtgtgtaaatgaaagcatctctcaccaacacctttcctagatagagtagggttgttccagtggtggctgttatgactacctttagtcctgtattgttattattaatcataattgagtgagcgctcctccttaggaagaactgtgcccagactctgcagaccagaatgagatcatgtggagggggcctatagcactagcacctgggatgtcctgggctcagatggttctaagctattgttttctaaccctatgattttacattttacagatgacaaaactgagacttggatatgtttttgaaacttggcaaggaactcatgagtaaaattaatggaaccataattctaatccagttgtgtttgattcccaagcccaagatattgccgtctgtcaacattatcatgcttctttactttaataagagtaaacaggcatgatagtgttgaatgacaaagctccctagtggcttccttacacccctggctataatcactgactttcacctcctgccctgcatctattctgacctacactggggaaaacagtatgtggtctcaatcctatggcttctactagtgtagaagtgttaatgacatcttgttattaacatcttattgttaatttgtggtctatattttaaacagataaattctgatgcttttaaagaaccagacaataaataaatatcaattttattttgtagttcaaaaagttgctgtccatttgatattcagatgatgcaaatatttcatgtcctgaagaaaagtccataaatgagtaaaggtagcagcactcctggaccctaaacgagtgtcttcgtgtgtgtgtgtgtgtgtgtgtgtgtgtgtgtgtgtgtgtgtgtagaaagatagagagagacaatatgagcaggaagaaagaaaaggcaaatagtcatttgctaatattccatgaataaaggtaatttataggaatatttttctagagcaaatttcttaatgactgcgttgcattttgtcattattattaactgcttttttgcgttgatttttttttctgacagataataatgataagaaatcaaggtaagtgactgatttcaacaatgcagcatcttttctagaataactccataatattcatatcaaaggcacaaagcagagaatactttcatgcacattgcacttcatataaaataatatatacaatccattctttttctctttaaaatattactataatttgattttaaaaaccttttggaatatcccttctaggttaggttcaaatgtcccctctgtattcaggaatggcacagaactcctgacctaagagggaggaggaaaagttgaacaacaagtataatttcatgggcattggagaggtctctaaaccccaaattcttgccacaggcaaagagtagagacctaaagtgtcattattgcatatttctgttcagctaaagattttgaattctcatatagaacacatatcagctaatcacagtctggtatgaaggcgggattagatgaggtctaatttagaagacagaagtgaggcatcaggtaagttcctgaagtggaggtggtggaaacggaagggttaaaggtattttagaaattttaagtaattcacagcagagggaggaagtgggagtggtaagattagctttgggctgggagtggtcaggtcagcctgggcctctgagagccacacgtttcttattgcgtgggaagtttaaaaaatgggtgtggatgtagatgaatggcaaggagaggatgagtaggaagttgaatgagttgctttgtttttagaggaggtgagcatggaatgagaagatcacagcaaattttgccagagctgctgagaagaatgggagcaatccgcagagaaatgaagtgtgcattgcatgttgagctggagagcacacattcactccattaattcattcgttttgcaaatattgagtgtctatttggtatcagacactattgtaggtgctgcgggtatagaaaagaacaaaataggcaaaaatgttggcccttgaggagtttacattttagtgagggagatataataaacattgtaaataaatcaaatgtatagcatggtagctagtgataatctatcactttctttctgagaaggaaaaataaactggaaatggagctatgaaatggtgcgtggggggtggggttgaaattttaaagactttggccaggcaagactctgttgagtaggtgatttcaaaggaaggtctagcggaggtgatggagctgtccctgtggttacctaaagaaaatgcacctggggagaaggagtagcaggtgcccgcacccagaggtgggaacagttgggcatggacaaaggtcagcaagaggccaggcaagtggggtgttgagaactagaatatagttggaggaggtgaggtcagagagccaagggccagaccgtggggagtctcagaaaaaatttaggattcttttctgggccagaagggaagcttagggcagctgagtactagactctgcctgtgttggtatccattcacaaggtggtgaggttgtgtccagcaggcccagcagcctggcttaaggagaagagggcaaacagctggatggatgcaggatgaagtttacaaggatgatgtagagaaaataattgaggatgatggtgagagtgtggttcaaatgcctggcagagggaccttggctgcatggggaaggaagcaaaatcttaatggggtttagcaatggaaggaaatgaaggatttaaaggactgcatggctcaagtgaggttgacaaatagg

SEQ ID NO: 768 - DNA, 4046 bp, Homo sapiens
gcgcggtggctcacgcctgtaatctcagcactttgggaggccgaggcgggtggatcatgaggtcaagagatcgagaccatcctggctaacacggtgaaaccccgtctctactaaaaatacaaaaaattagccgggcgcggtggcgggcgcctgtagtcccagctactcgggaggctgaggcaggagaatggcgtgaacccgggaagcggagcttgcagtgagccgagattgcgccactgcagtccgcagtccggcctgggcgacagagcgagactcctctcaaaaaaaaaaaaaaaaaaaaaaaaaaaagaggaaagaactgtacatttagagacaaagaatcgctgtggcagttaactttggtgttacattctgttttcttcctaagcaattctttagtcctctacctcaacggtgcctctgaagaaaggacttacgtggccaatgggatcaccgtgtatttatttcccttccctatcagccatagccctcagggctggaagggcctcattttagtctattcccagactgggtcacccacagtgttgacacacagcatcaaccgacagtgagcttatctggaaaataatgcctttctattttctttgtttcttagcatatattaaatgtttctttccttctctaataatcttttagataaagaaatcatttgctgagctgataataacaaaagtatcctacctacatttttaaatgtcagcagtgaaagacgttttaagggctttaaaaaaaaaaaaaagaaagaaaagaaaactgtagtttagaaaggacatccaaattgaagaggagcaggggcagttctgttctctctgagcagctctgtgaagggggagtttgtggcgctggggtcttgaaagtctttacagagggcaagacttcacaagagaaaagccgtggagggaccctcacatgatcagaatattcacagtgtgatgtggggcatggtgggggcgggtgctctccactcccgggcctggcttggttcccctcactgtcctcagctcctcaatggctttgaggacatttagattcttcttaccatcttggcctgaatgtggaaaaagctctttttccttaattaagtctagaaaaggtcaacatgtttcaaaaaatagcatttgggtggaaattaaatggaaagtggaacaaatctctgcagagaaaatgcaaaaccctagaacacagacagagccatctctgcctcttggtctggtgggatctctattcttctcaaacccatttcctaacctctgtgggtgtgggctccaagtcccaagccttatcagggtaactttttttaagtataaatttgatcatatcctttcttgcctaaaagacttcattagcttcccatggcctttaggataaggtcccaagttctcagtggtaaggatcatgaggccctgaaggatcaaccagccacatcctcccgagttgcccatccgcctccctgagattcactgggctccttcagccttggacccggctgccctgtctcttgcatctgggcctttgcatgtgtccttccctgcctggactgctcttccctctcctcttcccatggaaaacttgctctcatcttcaacatctcatgctaagcacttgctccagagccttctccagctctctagacaaggcagctcctctgcatcagggcccaggagatgcctgtatttcccctttcctcactgccatcctgcttgacgcctaatttcccagataatgtctgccttccctgccacattgtaagttccatgagggtagggctggctggagggctggtgctccacacaatttttagggtaggtaaatcaggtcctcagagatttcttcctgggcctcaggctgccctgaactgatctcacagtacagggattgacattttctgcaaagagctgtatagtgaatattttaggtatgggagagagaaagggccatacattctgtcactgtagcacagaagcagccaaagataatagaaaatgaaagggtatgactgtgttcccataaaactgtatttataaaataggatggtaatggtatctttcagcccagaaggattcagctctggagacaccttttctcaaccctgaccctttttttttcttcaattcttctacaataccaatagccaattgctagtattgatcccagccattggtgaagatcagcctgtccatctgttgctccaggctgacatccccaccagttcacactagcagccttgctgtagtggcaagtagtgggcactgacattttatgctctcaggatctttgatttctttctggcatggcttgtagaaccctgtatctcctccaattttgacagcctcaggacctttgtggtactactcattcaggcccatttttaaggtcagtcaaagtactaggttctctcaagtgaccatctagctgatggtctctcttccccatcccctcctccccagcagtgaggtctttcagaatgctgttgttagagtgtaagatagaaacatctttgatatgtttttaccagtaattgtcaggagactgttctctaatgtgcgtatctgtgttgataagattacacattttatcaagagaaaacttcaaccctgaatagttaaacagaagcgcatatagtgtgcaggttatagaccacatgtcacttagcagagaggaacactggagttggtgtggacaattaagaattcttgggggattctatgattaggtgtccaaagtctgccaactagtgcttagacatctcgatttcctgctttttactcttagattcccttaagtttattggaaaatacatttttctggaatgccttgaaaattctcagtctgttcctgaagagattttggggaggttaaaataatttaatatgttaaagtgcacagtaaaaatgaaatagcattggatgttattttcaactctgagttttcttgtgttagtttaagtaaaattttgttattgtaaatttgttaagaaaccctaattaaagcctccttcaatgtatgaaactcaaatcaagttattaggttaggtgctaaaaaagtgttacagctaatggccgagacagtagaactaggtgacattatatctacttgtaatcagtgaggaaaaataatgtggcaaaacaccatggtactcttaaatcatagaaagtgccaaatgaggaggaggtacactctcaagaacctgcaaaacaaatatgtttatcaccaaaaactagattcccactgcatttccagggtttcagagactggcagccatgtcctccagcatctgatgtatgggtttcccaacatctcatctgataaaaaaaataatttgccagtggaagaaaacatggtctaataatatatatcagatatatattctacattcataatgatacatggcaattcatctaatattcaattctgaaaacctcttttgtggcaaatatcacaggcaaggccttcattctttctagaaatttcggtttttcagtgtactttcccaaacttagtgttataaaattcccagtgtttttgtgggtacatgcaagtaattaagattttcagcacaatggccttcaaaaatcatcacagccgtttctaagctgcccaaagataaagggactagcttccatttctgactgaacaaccagtgcatgcctttagccctagagagtatacatcttttgaagtatagctccttggcatgtcaaaaaagaacagtggactaccaaagttcagagtgatgcacttgatgctgagaaagaaaacaaacaaagaaaacaaacaaaagaacaccctgttccatttcatagctggcctggtactcacacctaagccatgttattctcttattagacataaacaatctcacagagtaccaacctcaaagttactttgagtcaatgcaaggtcaatttatactttgttctcagcaaaggcaaaatcaaggtcactgtgcaacccacaaaataccaaacaccttgctaaatgaatggctgttatttctttatctagtcataacatagtcccagctt

SEQ ID NO: 769 - DNA, 4042 bp, Homo sapiens
ctttcatatttgaacaatacagatgtctcatgtactccttccctaaacaaaagtacactcaaactcccaggaaacaatctgaattaatgcaaatttacaaattaagaaagccctttctagacacgctgtataatggagtattagaaaaccagtttcacagccctgaatatcttggtttgaatcccagttctgcgtcttgcctgagtctccctttcctcagaaggaatgtaggtagtaatggtatattattcatggggtcacaaggattaaatgaaataacctgtgcccaggtgttagcaccatgcttggcacaaattagtgcatactgcctatgacctatttgtattaaactattatcatctaagatgaaactataaactttaattgcatgtattataatactgcaagatttggtttaaaggtcccctttagtttttacttcttggcatgtcatgtctccaaattcattcaatagatgtcatttaagagtcatttgaccagaaccagaaaccaattttcctgaaatgtatgacatttgctcactgcttattaggcccaaaatgaaagaagcaattctggaaaaatcaaagaaaatgtctgcctctctgagataccaaacctaattttataattcacatacctgggacagaacttcaacccagtaccttgtcagacttcagcttcaacatgtccagtgtcttcactctgtctgtggctgcgctgactgaaaccctgagaaactgaccaggtgaatgcatgatcatacaaatgacttcagtgcacaacgtgcatgaaattgggaattaacctcatcagttactctagatttagcattaatttttgaatccaaagggtgtttcatttaattgctcaataaaaatgtcactacctccaattaaactattgggaaactctcaaatcctgatctactacataggttaaactttccttttctttggtcaattctgagcttcattctgtaccaaataacttctcaaatttccgattcctgaagcttggtaactaatggttgaattttgggggatgtgttctttaatattttgtaatttctcatatcttcctctgtaagtgcaactggtcccgacactagtatatctctccaaaagtgtgtatgtgtcactgtcataaaaatgtcacagatttttaagattggatttttttcttaatcttcacaatatgtttctcctttttgttgcaagaatactctgtgcataattctaccacggtccttaatacattatgctgtgatatttggttcacttatctgcctccttccacccctccttaaactgtaagtctctgaaaggttaaggactaggtcatcgtcatcacagtactttcaatgcctagcacagttcatggcagtagttaatgctcaataagtgtttcttgaaagaacaaatcaatcatatctatagtatatttcttagtgtccagtttgacctaaaaagggtaaatgcccacatggtcaaaaaaatcatacacctcagaaatacagtgctgcagggaattattttataataattaagccctggatctgccatgggctcactaaactctcattcacctgtcctctcacctcttctctttatattcccaggcccacatcagatgctctttcagaatgtttctctctcccttcctctctgctgtctgcccacagccactaccctatttttctaaagcacatggtgggaccttccattcaaagctgactttgagtttgacagttcagacagcaaatgcctaaaccccctcctcatcaaagcccgggtgacagatgatcctgggtgagaatttcagctctggagaggggaggaaatgaataagcagtcaaatgtcaagtctgctgacttcttaggaaagaaagagaagatacttataatactggacaggagggctttggcttacatttgccagcattatactaaatagggaaaatgtcagctgagtcccacatgtagattccttgtcatcttggtgttttcctgagtgtaaaattaaaactccaaaagattctggacatcagagctcattttcagttttcaacaaatctatctgatgagaaaaaaaataggcaagtagtaaaatatgcaactaaaattttaaagtctaatttttagccagataattaggttgcaaactcattgaaagcagcaacgatgttttttataaatctcaggtgactagaactatattaagtatatacaataggttttttaaaaacaacctcttgattaatatatgccctcctccttaccctgtcccctgaggtaaagccatattagggaaatcaagtaaatgccttatctttatttaccagactgcttgactggggatttagggttccagaaaccacacaagttttaattccacagaatcccctttgcacaccatggtgtagagagggctcttatagaaggggaaggaaagagcagcttgtgagttctgatgctgcccgtttgtttgtagaatcctatcactcacaggcatttctatgattggaaatcatttacaaaattagtccacataggattcttactaaagaggattcaatttgggaatttctcgaaataaagcccttactacactatgtgtgtctgggaatgtcactgacatagttcaggacttcataaataatgagtttggttttgtaagacgtttgaagtcttttcctcattggatttttcactggaaagctggtaaaggtcaagcacctgactccataactcatccacaaaggtaaaatatctctcaaagtaaaactctgagaaagttaaaaatagccagcaattcaaatgcaaatctagaatctttcttgctttgcatcagatgcagagaatcattccggacatgctgcataaggcactttatgagaaggatagagaagcagttggtaaatcttgctcgtgagataattcttgaatgtcttgagtttggttttgcataaacatctgaaaattttagactatatgaagaatgtatagtcccatcaaattgaactaaaactcctacagagggattctatttctgtagaaattctggaactattggttgtctctggattgtttgtttgtttcctactatatttcaaatgaggaaattagaagggggaaaagaaacctgacatccagaagaaaataatacctaattttagaggccacattttcatcgcattttgacaggattggtcccatttctccctctctgtgaagatgatcattcactggtttaactttgcttcatggtggttttatctgtgtggtgcttgggaacagccatgtgaggctctctgtgtagataactcaaggtaactgtttgctttgaaaacataaaaatagaacagcacaggactcatttctctgttggaatgaatcaaaagaaaagttgacagagaaataaagtttatgtacaaaggagaaggaaggtttagataacatatacccaaatatgagaaaatttttgtagatatagaaaatataacaatagaactggtacaaagaaaactggctagagaatgtctataacaatctgcttctcagtcttctaggtctatttccccattgacacgtggatttagtgtttgctgaactgaaagtgaaaaaaactggtataaagaaaacaaatgtgctctgatttacatgcctaaatgaagaaagctatcttttttcatataagcatataaagttgtaattttgatttcaggcacatgatggtgtttaagtacatttattgcagcttgtattctagtgagaagtaataagaaaattaataaacaagataaaaaggaagctacttacttcaccacaacctatgaacgtcctaaggtgtctacacgttttaaaaattcattctccatcctactaccctttaaattatagcctgttacagggagtaagtggggactgtgccctgacagagtgtcaatgtgtctggagagcaagagtcagcagcatgtatttggaaataaggctaaaaggtagaaaagagccatgctaagtaagaccttacaggtcacacg

SEQ ID NO: 770 - DNA, 4065 bp, Homo sapiens
tgaggaaaatgaggcacagaaaagaccttcaacttcttcaaagttacagttaacaagtgttaaggcctaattcaaattcagttgatccaatcctgattccagagttatatactttatccccatcgcaataaaatttcaaaccactatgcaggtaaaataataaccttcagaggatatggttgtagataaatttgaatcaacttttaataagaattcaagcctgaaatatttattggagtcaaatctcgaaactacaattggtaccaaagaaccatgcctattgtcatctggtgttacagaattgaacttcaaatcacagtgatatttagagagttcataaacatgtattgtttaaagaaaaaaatatttgtttctcttaccagtgtcacctagaaccttattagaaatgtcaattcctttctttctttctgatgtagaacaagtgacccaacttgcaaattaatttaattcaattctttttaacaatcaattctcaggcccctttcagaaaaaaaagcacttatgcttttccttcctctcaaaaataaagaactcaagtttgcattatttctatgaaataagtataatttacactcagaagtcagtaggctagtaagaaactagggttgataaacagactggaagacatgttcccttactctcaagttgcttgcaaattagtactgattactattcaaaagaaagcaatgtcttggttttcaaaagcatatgggtcttttgtaaggacatgggtctctgctctctgcaagtgactttattatggatagaggttgtctagagaggacttcacaaggctgtcaaactaatccttccttagcaggtagctgataagaacatatgaccaagaccaatgttcttgtcatttaaattagaattacttaaagttgatgccttcaggatgaaaagagaggtgatagaaatggtggtctgacagatcagaggagctggtatgttagaagagtgtcctctcacacatggtaagcccccatgctacctgctgctcaggtggactctgcaactgggaagttccaagaacaatgagagtcaaaagaaagactgaacagaacatcttactctttctcaataaaataactcttcattgtccacaaaccttccccaagcaaaaaattttcttccctgtgccgccagctcctgttgtatgacacaacacccaatttagtctaatggaatcacatgaagttaagagcgtgggctttcacacctgggatttggaccttgtcctctcattactagctgtgtcatcttgggcaagttacttaatgttttgagcatcagtttctacatctataaaatgggtgctcataatatttatcttgcaggtcttttgggaagtttgaatgaaatgacatatataacacatgtgctcatatgatgggtgagcaatcaaaactagccgttgttataaaagcatgggctatgtttacaaagccctattgtcattattcactttatggtgaatagccatttccactgtattgcagtttgtggggaggaggcccagggtgagaaagaatggggaggtatttttgtttactcagatagattgtaagtccctcatccttgatactaactacatccaagaaagcatatcatctctgacattgagggtctaacctaagtggtggagactatacatatggtgctatattagaaagtagaatgtgctcactgttatactagactcacaaagcactttgggatcaccaaagaggggaaagctaattttgatcaggagttggggatgccatcatggaaggctgcatatttgatctgtgtcttaaacaaaggctcgaataagaattagaaataagaaggaaatagacacctcaaaatttcaaaagcaaaacagacacaacttgggatgcataggatatggagagtaaataggaaaaagaagagtgaaagataaccagaatttagaagcccagaaaactggaaggacagtgctgactgaagttcagcaggacgtcacagagaaggggtgaaatcagtagaagatgataaactcaggttgagtttgaggtggaggaagaacatccagatgaggatatatcctggtgaagtataatttacaactcagggaagagatgcagattccagagtcattttcatggatgtggtcatttaaacttaagcaatcattttagggtagagaataaatcaataatttaatggcaactagtgtagaacagtaagaagcagctatgctttggagactcatagaacacatagttgggtttttttgttgttgtttttctgagatggagttttgctcttattgaccaggctagagtgcaatggcacaatcttggcttgctgcaacctccgccttccggtttcaagcaattctcctgcctcagcctcccaagtagctgggattacaggcgcctgccaccacgcccagctaatttttttgtatttttagtagagatggggtttcaccatgttggtcagagtggtcttgaactgctgacctcgtgatccacccacctcggcctcccaaagtgctgggattacaggtgtaagccacctcgccctgccgacacatacttttaaaggaaactttgtgcaactgggaaggaaaccaggagaatgcagaatcacagaggccaaaggaagagcgaattttacagtggcaagggtgattgggaatgtcaggccctaaagagagcctgagtagcatgaagcataagggactgtgtatgccatgaggtgactgcatagaaagctgtttcagggctaacaaggagcagaaccattgagaagataaagtgggagagaggaggatgcatagaatcgtagcttgagggacaagggaaggtgttttattaggataataatagcctaaacacatttgcaggtttgagggaaggagccagtaaaatggattaaagctgaagaataaacaaggattaattaatcaatcaagacctccacagcactggttatcaaccctttcttaacataaaactcacttaggacccttattataatactaacacctggtcctgattctgatcaggattatttactagttttcccaggtgattcaaatctgtatctaggtatgagagtcacttacttagaagaactggacattggattaagaccactatagatggttattttgggatgacaaaggctctctttttcctctgagatgagggtagtatagtaccggggtggcggagtaagaaaaggatgaattaagagcggaaacatttagaaagactttgaaaggactcctgatgaatggcttcgaactgagaaagtagaaggtgagatgcttacattgagggtgcaaaagtaagactgggccattaaagaaatttaaagcattccgaataactattaagatttccacagagataaacaaggtaactgtccaattactgctttattctctctacccttattcgttggccatgcctttacaaagaaagggcattactgtgtttcttgttactcttatgaaaaagagaaaaagaaatattataattggggaacagatagaagaatagtaacgttaatagagctttagtgaaggctttaagtaaaggtatcaagaataaggaaatctaagcagtgcattgagatctctgtgaaatcagtgagaattcatccttgatggtatcttggagattatctcacccaccatttaaattatgagtaaactagggttcagagacattctgtgatttgaccaccatcaaacagcaagttagcaacaccaagagacattgaaacgaaaccttggagccccacaccagtgccttcagctcctgcacacacttggcctcctgacctctgctgtgaggttcctggttagcaaaatggctgtcgttcttttgggaggattaataagaaaatctgtaaattggttttagctctttgcaagagagaaaaaaaaactatgtgcaatttcttctttattgctgttattatgtgaaccagattgaattgctgcatctctgaagagtttcttatgactagtgtgaagtttcccattttaacccaagtcaa

SEQ ID NO: 771 - DNA, 4049 bp, Homo sapiens
ggtggaacgcgaaggtaatacagatgagcttctgcctcccacaagagagcaaccacatctgttttcctaagccagaggtccattgaggacaaagacatcatttaatacttatggttatctcacactctcttaaggaatgatgcgtatgtgtaatgcataaaaatcaggagggcttgatacacaaatggctgaaaagggataattgtatttgcaattattatgctatgttggacagccacaaaggctctatgacagcctatgtgtgctatgtgtgttttccataaaaagagatgttgatagagaagtagtatctgttaacctgtaatctgggttatactattgtctttttaaagttctggtaggtctatacgttttggtaaactcctggtttgcgcctgcttattttgttttacgagagtcattcttaaagtatggcacatagaccatctacgttagcatcactgcagtgaggtatttttttaaagtgaaggtttctatggaatcagaatttctgtgagaagggcccagtttgttagcatactctctggagcttctaatgcacactgaagtcgttttcttttttcgtgtgactcttttgctttaacgtggtcccagaaaacaccatttaatattccaaatgttttggccactaaaggtataaagtttgacaagttcttttacccctcaatttctttttttaaaaaataaagtacgagcagagggaagggggctctggtgttggggagtggggtgttgtagataatctctatgggtcctgccaactaacatgccattctcgagttttaagttaacttaagcttggaggccagagcagtttattacctaggtacttttagagctattatcaattatatggcacatattcaacctggattaacagaaacttttaaaatatttatgtatatatttatgacgtgtaaaatggaaaatgataccagaaatgaagtaccagaaatgaaataagtgtctaataaaataagcaaaccagtaagaagtcatatatcacctgactcagttccttctacagggactaatcaaatgaaatgcatcttgaaatccacaattaaacatgccaaagagtctagccagagaatactgcatcaaaagacatgatttgacttttatgagtccactttttcattggataagttaaattttgtaaactgatttcaaagtggttttggagtccttgagctgaattctccccactacaatctactctgaaaactaactggtgacaaagttttattctattgattttgaccgatgcttattttgttgaccaatagttatttaatgtccataatatggcatgttccacttcctggaatgacctaatcacctcccgtctctatctactaccaattccccggccttagattgggcttttgtgtctctttcccgtgttgcaatgtccttccaacaggtcatccttctcctttcaatacatctccaccttagattcttaaaatgcaagtctgattatgtcagccttctacttgaaactctttattggctactctttacctattgtataaagtccaacctcttggccacggcataccagatcattcattacctgactaagcttttatctctaatcatgtctgcatgaccccagagggactgaaattccaagcaggcaagttctttgagagccatcactttgaaaatgctattttgttcttctggtatgccctcttccctccctccctccttacctacccaagtgtgcctggcatatttgaggaatatcaggaagacagcactgaggcaagagtaaagtgagtgaagggaagactattaggagattaggtggtagacagaaaatgaggcagatcatgtaggaccttatgctttgagtaatatggaatgtcactggaaggattctagcaaataattggtatgatctgttttgtattttaaaggctcactctggcttccatggtgagaatgtctgtgagagtgagaagcgtgagaagagcaaaagcagagagaccaattacgaagaaattacattaacctgagcaagaaattagtgtggaagcagtgaagatggtgggaagttgccagattctggatgtgttttgaaactagaagcaataggatttgctggtgaattgatgtaggtgtgacagaatgaagaaatcaaagatgacccccatgtttggggtcaaaggaattggaaaattggagtagccatttactgagatagaatagaaagagcatgtttgcagagaataggagcaaattagaagttcaatcctggaaatgttgaattgagatgcttattagacactcaagtcaggatgccttgtagacaactggatgttttagtctggaattcaagggggaggctgcaactacataaattaactcagaagttgtcaacacataagcattatttataagtgagtatagataaaaaagaggaatgttaacacataaaaagcactaaaaatgtgaaatgaataaatgaatgaataatactgagatcccaacttacacaacaatactaaagtttcatatgagtatcattagagagatttcattcttcaccatattctcttatgaaaaatctgtttgcaattcttctttccaatgacacactactaatgaaattatttatgaggctaatatagacatgggcatacaattatctgtttgaatattgaattactaacgtcttattattccgtgccttagtggcatatacagtatttgcaaaaaaaaaaaaaaaatcaatacatcaatacgatgaggctgtcaactgttagatggctatcactgctaaaagaggtatttcagcatattaaaaatttgtcacatcctcacatgatggctaacagtttccagtgtgctttatcatccattatctctgtttgactttgaacctcatgacatccaaatactaggcaggtcagtgttattatccgtgatttaaattttgagaaactaaggctcaggaggtgaagtgatttacttgagctgatgaatgggtcatcatggtttgaatcctggtagtccaagtgactgctcctcttcaacttgccacctttctgaaaagcccgaggtcctgctcatccttagctgctgatatggtttggctgtgtctccacccaaatcttatcttgaattgcagttcccataatccccatgtgttgtgggagggaccaggtggtgataattgaatcatggggggcagttcccccatcttgttctcatggtagtgagttagtgctaacgagatctggttgtttttataaggggcttccccattagctgggcattcattctccttcctgctgccatgtgaaaaaggatgtgtttgcttttcccttccaccataattgtaagtttcctgaggcctccccagccatgctgagctgtgagtcaattaaacctctttcctttataaattacccagtctcgggtatgtctttattagcagcatgagaacggactaatagaggtgccaaaccaatgaatggcgcaggatgacaagtagtataggtcttttttacatttcagattgaagactaaggaaataaatggtctttactgggcaccattcagtaggtcagatgctctgtgtgtggatctgggtttaatcactagacaccctcaggcaggggatcttgagctttccgaagaggcactgaaggggaggagaatgatgaccccaagaatgtgtctggactcagcttgagaggcaccttccactcaaccccatcacccacttagctcttgccacctttgatttgagatgtgttcccatagatgccaacacattaacattttatcttgctcttcaatcttaatcccttagacgccttccttttgttaactaagtttctgagtcctactcacacattcccatgcatccagttgcagatgatctattttcaatttcaataacctatcctcaataatgatagttcagaataagaacatatatcattgattttatacttttatatacacttggcctttgctcatgttatctaagctggacaacaatcatatta

SEQ ID NO: 772 - DNA, 4052 bp, Homo sapiens
tatggaatagctaagtatcatgaacagaatattggtagacatataaacagcaaaagtcagacagaaatgaggaatattttattggaaactggaggaaaggtgatcttttttataaagtggcaaataatttggctgaatagtgtttatgttctagtgctttgtggaagatagaacttgcaagctttgatatttagctgaaataattcccaagcaaagtgttaaaagtacagcttggtgccccctggcttcttacagtaaaatctaagagggaaaatgacataacaatagaattgttaggcaaaaaggatctaaacttaaagatttggaaaatttgcagccatccatattgcaaaaattgagaaaaaatgtttggaacactaagggtgtggcctagtgaccatttgataagatttgtgtgggcataaactgtagatttaatcagccaccccagaaggaataccaccagtttgaactgaaggggaaggagataggaaggaatgaagggaggctgtcagacttcttacgtcttataggacaggaccaatcttatagatacgttttatagtataggacctattcagctgcaaatgtgcactattgaagacaagggaagaagaaccccaaaagcaattcaaatatcatcagagatgcctcttcagttacaaaaagtggagccattgcctgagtttcaactggttagacaggttctgcccaaagctgtgggtccatagagaggtacctccccaactagtggacctagagggcagagccacaagccaaagaggattattctgcagctgtaagacctcatgaagtttcccttgtagcctggacttattttgaatgtgttatgcctttcttctttcctatttcttttttttttttttttgtggaaatttctttcctttgtctgagccatctttgaattttggaagtacataatttgtttggtttcacaagctcacagctggagagcaatttgtctctggatgaatcataccttgagtctcacccatctctggggctatgatgatccctttaatgtattttgcatgtaagaaggacatgatttgggggtgggggcagaagctgaataatatagattgaatgtttgcatcccccccaccaaattcataagttaaaatcctcatccctaatatgatggtattaagaggtaaggggctttggtaggagagtaagtcacaagggcagagcccttacaaatgggatttgagctatagagaaagcttcaatctcgggaaatacaagatgagataccagaaagctctctctccccttccatcatgtgaagacacagcaaaaagacagccatctatgaaccaataagtagtccctcactagacattgaatctgccagcactttgatctaggacttcccagccttcagaactgtgagaaataaatttctgctgtttataagcaacccagcttatggtagtttattatagcagcctgaatagactaaaacaggaccaggtccaaggtcagatttaggacgagtgttatttccactggagcatattcctcttaaagagaggttaagacaacacaaagaactgaatatagaaacttaatggtgattcgggtgtaaaaaacatcggggcaggtatacagtgcagtggcaaagggttagatctcctagaagaaagatattttgacggagccctaaagattctgaaacatgtggaaaggctaagttgataataaattaagaaatcaaaagacaggcaggattgtggatggagtatgtcagtggtcatttaaaatccatgtttttgtttttaaaatgcctgcaaacctcttcaaacctctgattacaacaacctgttaacttcttgttctagactgcccagatttcaggactacagagttgtgtttctcagtctctgtaatgtaggcattgtatcttatctgagagtttatatacaggattgccaaggtagtgatcaaagtaaatgcaattgtcaatttaattagcattagtccctccaaattcattgtgcatgcgtgtgtgtgtgtgtgtgtgtgtgtatgtgtgcataaacacatacaagtttgtgtttcaggtttgctaactggcttattagcaaatactaaagacaaagctttaagaaagcattcataatttcttgggtcagctactgagtatctaacataagtaatttccttctatgctctgttatcttgttaatacagtcatttaaaatgagattttctttataggttttaatgaaaagaacagatcaatttttatgggatccatgttcctactcagctagcaagaatgaacaccatttctctagtagttctaagattcttccttaagtaaaattttaatgtttaggagacacagagcacacaaagggagtaaaagagcttaaaaatgtgagtttatattttgaatcatcctaaacaagcacagaaatatacatgagaggaagtaaaattatagtcacaggatagagagactttgaaagaggtaagagcaaaatagacaaaatcagaaaattaaattcaaacttctaaagtaaagcaacagacactatgaatgctttggagaaaaactggactttgtgggatttttaacccatgaaggaaagtaaacaaggatgcaagagcattttataattttacccataggctggcaataatcatttattcctgcaggacatggagttaaaattgaagtgctcaaattggctctgaattctctcattaaaactgtcctaaaatatacatagggttgattgtatttttaatttatcctttttttaatttttgtgggtacatagtaggtgcatatatttattgagtacatgagatgttttgatagaggcatgcagcatgaaataagcacaataatagagaatgggctatccatccatcaaagtatttatccattgagttacaaacaatccaattacactctattttaaaatgtacaattaagttatcattgacaataatcaccctattgtgctattgaatagtaggtcttatttattctttctattttttgtacctatttccactgccccctcagcccccaactacccttcccagctcctgggaaccactcttctactctctgggtccatgagttcaattgttctgatttttagatcccacaaataagtgagaatatgcagtttgtctttctgtgcctccagttctatgttgctacaaatgactgtatcgcatccttttttatggttaaatagtactccattgtgtacgtataccacatttttctttacctgtttatctgttgatggacacttaggttgcttccaaatcttagctattgtaaaccatgctgcgacaaacacaggagtgcaactatctcttcaatatactgatttcctttcttttgggtacatgcccagcagtgggattgctggatcgtatggcagctcaattttcagtttttttgaggaacctccaaattgttccccatactgtttttactaatttacattcccacaaacaatgtacaacagttcccttttctccacatcctcgccagcatttgttattgcctgttttttggctacaaaccattttaactgtggtgacatgatatgtcattatagttttgcatttctctgatgatcagtgatgttgagcacctttacatattcctgtttgcccttttttatgacttcttttgagaaatgtctattcaaatcttgtgcccattttttgataagtttattagattttttcctatagagtcgtttgagctccttatgtattctgattattaatcccttgtctgaggtgtttttttttcccattctgtcagttgtctcttcactttgttgattacaacccttgctgtgcagaagctttttaatttgatgtgatccgatttgtccattttttactttggttgcctgtgcttgtagggtattgttcaagaaacctttgcccagataaatgtcctggaaattttctccaatgtttacttgtagtcatttcatagtgtgagatcttagatataagtctttagtctatttcgattttttttt

SEQ ID NO: 773 - DNA, 4023 bp, Homo sapiens
atgaatgaatagaagtgtcatttggcatcttgccacattctcctcaccagtctcatcacttgctctgcaactctgcccggttttctgtgtcatagtccttcttcattcaggctgtgtggtgccatcaagacctaaatttatattcaggtatacattctgtgttttcttcacatactaatcattcaccactgtgtctatatggtgacatttaagaatttatatttgggcatgaaattatcttttagcttattattttaaagatcattgcctggtaaactataataattatacaaattcaatacttcagttcttgttcattacctactaattcatagtcattagtaccacaaacaaaatggttattaaccaaaagccagagtttcatagtttcattgacatcactgtcattagagatgcagaagacatatttcacctgtgcacttcatgttatgtatggtttgagcatttttcccaagctaaagtaattttgaactttgattttaaattagatataacataatttattgtttgagtactttatgtccttgaaatctgtgtctcagatacaaccataagtcagtgtttggtttcttccaaattttccaaacccagcccagggacttacagaaaattgcttctcaaaaaagatcccttcagcataaaaatgatataatggattgtaggaacttgggtggaagaatgggaggggagtgagggataaaagaatacaaatataatgcagtgtatactgctcgggtgatgggtgcaccaaaatcttacaaatcaccactaaagaacttactcatgtaactaaataccacctgtaccccaataacttacgaaaaaaataaaataaagtaagaggcacaagtaacattaaaaaaatctcttcaacttagatgaattatgtttttcacgcatgtcatttaaaaacaaaacacaaatagagggacccatgtctgaattaattgccttgtgatatcactgtgcattggggacttaatatataatcagaaagaaaaactgcactcactctcttagcttcttgagtatcttgaagcttccagcactcttttcaccttcatgtgggacaaatacacaaaactgcttgagcaagccatctgggacctctttccaagaatcgtccttctctatcattggagtctcttctaagcattgcttttattttcttcaacttttaagtacactggtacatgtgccagatgtgcaggtttgttacagaggtaaacatgtgccgtggtggtttgctgcacagatcattccaccacccaagtattaagcccatgccccccaacagaccacagtgtgtgttgttcccccatgtgtccacgtgttctcatcattcagcacccactcataagtgagaacatgtggtgtttggttttcagttcttgcattagtttgttaaggaaaatgacttccaactccatccatattcctgcaaaggacatgctctcattcttttttttgtggctgcatagtattccatggtgtatacgtaccatattttgtttatccaatctatcattgatgggcatttaggctgcttccatgccttttctattgtgtatagtgctgcaatgaacatatgcaagcatgtatctttataacagaatgatttctgttcctttgagtatgtacctagtaatgggattgttgggtcaaattgtatttctgcttctaggtctttgaggaatagccacactgtcttacacaacggttgaattaatttacactcccactaacattgtaaaaacattcctttttctatgtggcttcaccagcatgatcaaactatctttgtttcctattttcttttcttgaggttaggagttcctgtgacacagggatgggaagaactgtcttatgacacagcagaacttggacactggaagggagtggtgagaaggttcttcattagtatctaataacatttagaagatagttaattacattggtctttagtttccccaatctataaggtgaaattatagaaaaagaaaatttgtgaggtcccatacctattgttctaattcagtaaatgaatgtaaatggtctaacacaagtgaaatgaaggtcatacagggatagatggtttatgaagaaaccactaacaaactcatggggcaaacctggagatactaggtagtcacaagcatggtagaagaaacccaaggctcataacaaaccctgcatatggtagttattttctgtctctgatagaccattctccctttacaacatcttactggacatgttcctacttgggtgttctataagataaattcaaacttattaagtcccacaatgatttcagtatttctgtcaatcctgaatcttctaatacttctgtttttattgaggagtcccagcaccctcttagtgatacagctttcagatttactaaactcctttctgttcctggacactcatctaaacagggctcaatcctgctgattcaactgccacaactcatagcagttacgtcctcttcaccatcagcacctcgattcagacctctctgtggatttccacaatacctaatttgcggcctcacttattttctctgtcttccagcccattctggaaatagctaccagagttatttttcaaaggacagggaaaagtctactattcttaaacacatttaattgtaccctttagcctgtgtgtaaaattcaaactccccagactgttttttgagatccccacaacctcatttcaaccaaacattttttggttcatttccttctaatctctttcagatacactcctaacttactgaactgcatggtcctttctttatattttcctgtttttattcccctctagattgctttccccattatctctgcatgtctgaatctactctcgtatcaaggcaccaataaaatgccacctcttctctaaagcttttccccatcctcctgctggaagcaatattttctgcctccaaacacctacagtgttttacctgcaattctcttatggcacttctcactttttatgataaaatactcactaaaagacactcttgacaagaatgtaagcttaaataactaatgtagtgtcttgtatatattttggccccaattcatatgtattgaggttgaagtctcatcagaggagacagatatgaaagaaattacattttgaccaggaagtattttcttagatagtagaaagaacatatcaattagaggggttgtttagatgggctgttctggtacagactaccaaatgcttgtagacttctttcatacaagccttttaaaatagcattagtcaatcatttccttatggatatccaaagacttaaattgttaaatagattttttaaacatccatgtaatttatatttactctagaaatatagaccattgacttaaggtaggtttctacattatgcagtggtagctacagatttcatgtgttagatgtctttctactcttgtttgttttatcggttttagctgtactagagttacccttgaatagattttttttaatttctataaatccaagtaacatcttcaaatattgtttgctgcttatgacagaagcaaagccatgttaaaataattccagttgatatatatgatctgttttatacaccttgtaatgtattaaaatcttgacattaattatctcatttaagtctcacagcaatctgatgagatcatatcactattttccagatgtgagcattgaggcacagatatgttgaataaattatccaaggttaaacagctaataagtgaaaatcacagaaagagaatcaaagtaatttgacactggaatctacctacttgatcactatactgtactgtccattggctgtggagttagacaaggattaaatccttcctctgttatttactactagttgtgttatcgtgagcaaagtatttaacctctctgagactcatttcattatctacaagatggttaaataatacttatatgacaaagttattaataaaaataaataaaataatatct

SEQ ID NO: 774 - DNA, 4057 bp, Homo sapiens
ttatccagtccactgttaatgggtgcctaggttgaatctatgtctttgctattgtgaatagtgccatggtaaacatacaagtgcaggtatcattttagtagaactatttattttcctttgggtatatacccagtaatgagattgctgcattgaatgatagttctgctttaagttctttgagaaatctccaaactgctttccccaggggctgaactaatttgcattcccactgacagtgtataagtattcccttttctctccagcctcaccaacgtctgtttttgttattgtttttgttgttgttgttttactctttagtaatagccattctgacaattttgagaaggtatctcattgtgattttgatttgcatttctctgacgattagtgatgctgagcattttttcacatgtttgtcggccactggtatgtcttcttttgagaaggatctgttcatgtcctttgcccactttttaatagggttgttttcttcctgttgatttgtttaaattccttatagaatctggatatcagtcctttgtcagatgcagagtttgcaaatattttgtcccattctctaggttacctgctttctctgttgatagtttcttttgttgtacagaagctctttagtttaattaagtcccatttgtctattttttattttcttgcatttgcttttagggtcttgttcagaaattctttgcctaggccaatgtctagaagagtattttctagggtttcttctaggatttttatagtttaaggtcttacccataaatctttaatccatcttgcgttaatttttgcatatggtgagaggtaggggtccagtttctctcttctgcatatggttagccagttttccagcaccacttattgaatagcgtaccttttccccactgtttatttttgttaactttgtcaaataccattttgttgtgggtgtgcaggtttatttcaggggtctgtattctcttccattggtctatgtgtctatttttgtaccagcacaatgctgttttggttactgtagctttgtagtatagttcgaagttgggtaatctgatgcctccagctttatttttattttttcatttttgctcagggttgctttggctattcagactcttttttggtgagaaatgaattttagaatacttttttcaaagtctgttaaaaatgacattggtaatttgaaaagaatagtattgaatctgtatattgctttggcaagtatggacattttaacaatattgattcttccaacccatgtgcatggaatgcttctccacttgtttgtgtcatctctgatttgtttaggcaatgttttatagttctcctcatagaaatcttccatctctttggttacatgtagtctcaggtatttgtatgtgtgtgtggctattgtaaatgagattacattcttgattttgttctcaccactcctattcaacatagtactagaagtcttagccagagcaatcaggcaagagaaagtaataaaaggcactgccctccccccaccaaaaaacgaaaaagttatcaccactaacaatatgattctatatctaggaaaccctaaagattctgcaaaaagactcctagacttgataaacaactttagtaaagtctcaggataaaaatagtcaacatataaaaatcagtagcatttctatacacgtgatatctttcaactagatttatttctagtttaattctactgtggtcagagatcatcttttattatttcagcttttcaacttgttaaagtttgtttttccccagaatataatctatcttagtgaatttcccatttgcacttaaaaaggaatatttcatgtgctgttattcgatggaatgttgtcagatattaatataaacatgtccatttacttttgattagtgttttcatgacgtatcattttctaaccttttacctttaacctacctatattatttcctttgaagtgagtttcttgtacatagcatgtagttggtttatttttttaatccatctatcctaacaatctctatgttttagttggtatatttagatcatttgcttttaatataattattatgaatttagctctcccattttatttgttttctctatttttcattcctttgttttctattccttgacttttttggataatttaaatatttttaatgcttaaatttaatttatttaatgtgtttttaattatctcagtgaataatattttagtggcccttttaaagattacagtctacatatataacttttcatagtctacatacaatcaatattttactagttcaagtagaatgtaaaactctcaccaccaaataggttcctttatcttccccctttatcttacaattattttatatatgacatctgcacatactgaaaacctcatatgacaatgccctaacttctactttcaaccatcaaccatacttaaagaattcaagaggaaaaaaataatctactgtgtttaccatttctgttggtcttttctcatttgtgatgttctgagtttccttctggtatcatttatcttctgtcagaagattttctttactgattcttttagagtaggtctgatggcaacaaattctttcagttttctttgacttgacttgaaagtgtttttattttaccttcgttcctgaagaatattttcactgtatattgaattttggttgacaggttttttttcaaatatttctttagatattttttagatatacactgcatctaaagaacactggaattgcttttacagaccagagtctgctccattttttctctttatgataagaatatatgaaataaaatagacattcaaatatattacttacttgcacttctgcacttgccctgaagatttcaaagtagaaaagtttctatagcaaacataaaatgtttacttatgataatatgagacattgagccaatgtagctcaagatcacagcctgtcactatttttattaatttgtctttctcccataatttattgaaaagatatattgtctctttcattacagtttcagctgttctttcattgatttttccattctgttgcgatcacattttcattactaccctggctagagatctaaaaaacaaacaaacaacaaactctatcttcattaataacaccacctgcctccctcgtcaggctgctaattaaattagaataagtaagctaataacagcaaaactcttgctatttaggtgtgtattgaagtaacaggaaatagccatatacccttttgaaataccaaggaaatatctattctagctctcaatgttcttgaatctacgtactggcctcaatacatattgctctcatctaatccaaagttcccatctggtcaagattctcttccccatatttttccccttcccctatatacctgaataattttagtttcgccttttaggactcaaataaattgtcactcccatttagaaggcttttattagtgtcctctttctccaccgtggtaggcagagtagtagacaccctaaagatgtctatgtcctaatctctagaacctgagaagatgttaccctacttggcaagaggaaatttgcagatgtgattaagttaataaccttgagatttggaaattatcttgtattatccttgtgagcccaatctaattaaatgagtttttagaagtggagaaaacttttcttggctatggtcagagagagacatgactaaggaagaaaagtcagagagatgcaacattgctggctttgaagatggaggaagggagtcatgagccaaaaaaagtgggcaacctctagtagctagaaaagaaaagaaaatggttttcccttagagcctctaggaaggaatgcatcactgcacacacctttattttagccccatgagacttgtgtcagaattctaacctctaaaactataagataataaatttgtgttcttttaagctactaagtttgtggtaatttgttacagcaagaatagaaaactaatataatcccctccaggccaggttaaatgctacttttaaaagttcttgccacat

SEQ ID NO: 775 - DNA, 4043 bp, Homo sapiens
agcctcacttctctcctccctgcacagcaacaaggcagtcatcggagaccccttgtcaaaaaaattcccaaagtggtaaaggcagaaaaacgtacctgtagtaccaaacatatggctggggatggggtaatctctcaaagggttttgagttgacggcctcacacaccttggaatattgcttcaatatggctgtggggtatcatttttcatcactgtgctgtgtgtacactggccaataaatatgcaatccagtgacctgacagagggagacttggtaaacatcactagggccttgtccaggctgtctcagaggcctgtgtggtattcagggtaaggtaaattgaatgattttttgagtctgtggctgttacaagaaacactattttgagggaataccaaggcctgtgggcaaaatgagtgggattcctagaagggaaagtaaagggaagaaaagtcttaagataagacagtgtggcctccatagcagtgtagcagagtgtgcagaaaaggagtccaggagccctgtgaccatatcatgtaacaatgttcttgcttgtcacacatcctctccccaaagtttctgtctcctagaaagaagttgtaagtgtctgaattatgctaggataaatctactgtagaaatggtacacataaatttatatttctagtttttatcaagacagacacaaaaacagattacgatggtaacctatcatggccattgcagatgtcagatgatgcccaccacacttcctccttaaagcactatcctctgaggatacagaggctcagagatactcagagcagctaagccttctaatcttctgaattttccctgagaaaaagcaagcatatactcccacgtgctactacaagtggcctgactccccaggctcctgctgtgttgacaaaattctgcaagcacaaatggacctggtcagaaagagccctggttactgtaattccctaatagtgacattttccaatctctgcgtcgtgttgatcacaaagttcctctgacagtagagtgttctgatagcaaactgtttcagctgccatggtggggggaaccacaaacacaaaagcttgagcagaaatacagcctgaaaggttgacttttcatttacttctatctctggagctcatggcgctataagctccagcattaaattttaagcatttgatgcaggaggatcaaggggaagcctgggaagtgtttggcttcatcgaccgctggtcttgctatgaattttcagcaagaaaaagagaggcattgtttgaagagaatgtaacattggacagaattaaagcatctatttctggagatttgtgaaatatcattagcaaattttagttcagagggtataggcatatgaccctcaagaaggtcagtattcactagaatatggtttgctatagcgatagaagttaaatctttttttaactacctgcagagatggaaagagactgtgagctctttgaaatgtctatgatcagggtgaaatacacataatattgtaagttaataacacggtatttcatgttaaatgaagccataatggggcttttattgttaggcattctgcctgataaattgttgacatgataaatatagattaataacctgaaatatctttttgctccctcagtccttcaagtaataggaatttgaaacacttattttataactattgtacaattccttctgtttttcaacaaaaggtcatttttctataactatgtagactagtgcatgaggaattagtcattgaaagaaatagttatatcagtaattagaagaaagcagtgctttacatttgttttactccagttttttactcattctttcaaaaagttatttcaggaacccctactatgtgctatgctaaatgttaggtggatgatggtgaccaaaccaaaccaatccctgtttccatggaacaaaaatctttgacaaaccttgtttcttcaagatagagcaagggttgacacccagtggctcagtgtcatgcttggaacagaggctcactggagccttctcctgaaacgggaaacttcctgcaaggacacataggatcttgtgggatccgaaaaaaaaaaaggattaggcatggccaggcttcccaagacctgcaatgaacccagggcagccataaatccccacagcctgattttgctcttcttacacaagttatcagccacttctagggctcagctactttctatttgcctgctctacattcttcttgctgctactcatcaattatagagaagcagtggaaggtaatggtgaacaagcagactctgaagccataaagccccacttcaaatgcaagctttgccacctactacctgtgtgacaggaagatgttaataaacctgtatgtgcctcagtttattcttccacaaagtggagatattaataaaataatcctcataaagttgttgaaagattcactgacataaatcacataaacacttagtatgatacctctcaggtaataagtcaaacactgattgtattagtccattttcatgctgctgataaagacatacccaagacggggcaatttacaaaagaaagaggtttaattggacttacagttccacgtggctggggaagcctcacaatcatggcagaaggcaaggaggagcaagtcacatcttacatggatggcagcaaagagagagaactcgtataggagaactcccccttataataaccatcagatcttgtgagacttatttactataattgagaacagcatgggaaagacccgcccccatgattcaattacctcccactcggtccctcccacaacacgtgggaattcaagatgaaatttgggtgcagacacagccaaaccatatcattccacccttggcccctcccaaatttcatgtcctcacatttcaaaccaatcatgccttcccaacagtcccccaaagtcttaactcatttcagtattaactaaaaggtctacagtccaaagtctcatctgaaaaaaggcaagtcccttaggcctatgagcctgtaaaatcaaaagcaggttcgttacttcctagatacaatgggggtacagcattgggtaaatacagccatcccaaatgggagaaattggccaaaacaaaggggctacaggccccatgcaagtctgaaatccagcagggcaatcaaatcttaaagttccaaaataatctcctttgactccatgtctcacatccaggtcacgctgatgcaagaggtaggttcccatgatcttggacagctctgcctctgtggctttgcagggtacagcctccctcccagctgctttcatggactggtattgagtatctgtgacttttccaggtgccagtgcaagctatcagtgagtctaccattctggggtctggaggatggtgacccttttctcacagctccactaggtggtgccccggtagggactctgtgtggtggctccaacccaacatttcccttctgcattgccctagcagaggttctccatgaaagccccactcctgcagcaaacttctgcctggacacccaggtgtttccatacatcttctgaaatctaggtagaggttcccaaaccccaattcttgacttctgtgtactggcagtctcaataccaagtggcagctgcaaaggcttgaggcttgcaccctctgaagccatggcccgtgctctacattgacccgtttcagccatggctagagcagctgggacacagggcaccaagttcctaggctgcacacagctggggcccagtccactaaaccatattttcctcctaggtctctgtgcctgtgacaaaaggggctgctgtgaagaccttagacatgccctggagacattttcctcattgtctcggggattaactttcggctccttgttacttatgcaaatttctgcagccggcttgaatttcttctcagaaaatgagattttcttttctatcacattgtcaggctgcaaattttccaaacttctatgctctgctccctttaaaaaactgaatgcctttaacagcacccaagtca

SEQ ID NO: 776 - DNA, 4053 bp, Homo sapiens
attataaaattttaggcttgagaaactgagtagattgtatgatcatttactgagttgaaaaaaaaaaaaaaaggaatgagtatctgtcaggaaagtaatcagagtcctgttgggaagtgtcaatttttggatgtctagtagatacataaatagtgtcaggcagaagtatatgtgagtctagagtttaggagacaaatccagagatataaatttgggagtcttggaagtcacttagcgatagatgataattaaaggcatggaactagatgaggtcatctaggaaggaaggatgtatagatttgtggtggaaaaggcaagctatcagttaacaaactgaaaactgtgggaggtttgacaagaaaggtgaagatatgaattaattgtttcaaagagagaaatcaaactcattagggaactgtaggtgatggttgagtatcatttgaaatgtatagtcattctttaatatgaagccagtaagtcaggctttgtgattttcttcagtaaaggttggctgctgctgtacaggagcagaaaagatagctattttcaccaaagattggggttcagtcagataaggacaataaagggaaaatgaggcaaaggagttaggggtgactgcaagggaaggattataggaaaagactgtgaaatcgatttagatgaggagaaaagcaaagagaggaagtgagaagttgatggataatgaaaaacagctgggagattcagtaagctcaaaaagctattgcatagagaatcttagaataaataagcttcaggtgaatgctgttgaccaggagtaggatgtttaaaatcaagatttctgagatggtgcagatactagtgatgatacaatttaggatatgaccatgggagagagtgggtagatggagacaaaatttagatcatgtcttttgatactcagcaatttcttgtgagagaatcaaacgaaacacaccactgtgtagtggtagaacaaataatctttttggaagtagaaaaccataggttatgttatacttctgtcatttactggtggcatgccttggaaaagccttcagtgtctgtttcatgatctgaaaaaatggtgctaacaataactaagttaacattcacaggatttttgtcattgttaaatagagtgacatatatcaaactcattttaaagcagaaaaccactataaaatgcaagccataatcaggattattttataggtaagaaacaaggctcaagataactaaatgttcaaggttagatgataaatgaaggacctagaattaaacccccattatttgattcgtagtctactgctctttccaccacaccatttacaattttgtcaaacataaaatctacatctcattattaaaaagaaataacttcgcacattttgatctttgtgcaaatacatttattataacaagaaatgtggtggcacactgagttataaactgatttttcatgaattgtcacccaaaaagcagaaattcttaataccataccattacaacatattacattcatgcacctcttttttggtcaatgatgaactatataggacataggacaatggtctcataagattataatactgtagttttactctaccttttctatgtttaaatatacaaatacttaccattgtgttgcaattgcctacagtgctcagtaaagtaacaaacttcagatttgtagcctaggagcaataggctacactatatagtctaagtgtgtagtaggatataccatctaagtttgtgtaaaatacattctacgttactcacaggacaaaatcaacacatttctcagaaaatatccatgtcattaagcagtgcatgtgtgtacttccttgagtcaaagaatgagactcagcacaactcattattttgagtactaatgcccagtgcagatcctgttaagactggtgtgattgcaagaacaatccacattatgaacactggaagtttttatatttgcattacccagagtgacatgcatatatagcaactaaactttgtccaaaaataaaataaaataaaatctctcctggcccagagcattgtgttagccacagaagaaaatggaagggtatttaaatagctatttaactcactcagataaatgaactaatacaagtaaagtataatactttgtgtgactcatgaaaacaaatcaatgagaataataaactacatttagaacaaggaaaaatattgcatatttattactcttctttgatgtctagaatgaataacgtagtatgggaatcttcactaaattacagtgtgaacacatccaagctaaattgtacactattgctcacaaattatactttgctaatcaggtaatggtgctgtgtcttcttacaaagtaggcaccaaaaagtagtcatcgcagcatttgagactgggcatggactcctagagttcactcgttctttcccaaagtgcattgttgtggcaactacccctcacacacgtgttatcaaccacccactaaaaaagatgcctgtcactggccaactagtatagacccgactttaagatatggggtgagtgtctgcaagaatacttactacagcctggctcattttctgttttataaaataaaaccacctctcatttcttgttgactttcactttctaccttttcttctttatttttccaaagggagcctgaggccagatttttaaaaaggtgtttacttcagtaaacatgatttggcttgtcacctacacaatctgtcactaattcttcttccacaatcccattcacgttctcagcaaatgcctaagctgggcttctagatcagttctgctagaatttgtgtgtgtgtgtgcacgcgcgtgtgcatgtgtgcatgtccacgtgtgtgtgcatgtccacacatgtgtgcactggaggaacaagactgaaaccctgtactttctggttttgtacaagacaatgcttttattaatcacctgtctgttccctagtaccaataactccttaaaaattgctatcctagaccatcttcctgttcatcgagccctcaatcccacccatctctattatcatcacatttaattaaatgcctttgctcttacttctaccagaagatggtgattgtaagatatgaactaccttatcttccctactccaaatattccagagtctactttcctctgttcctttgattttcttccttcttaatctaagaccttctttcttccccaagactccatgcctagaatataaccaaatgtttttctacctctccacatctccactcctctttgcctgtccaagtctcattgaacaaaaagacccacctcaaatcccacctcctataggaagccttcccttatgttcccagaagaaaaagagatatacccctcttccatattcttatcacaagttttgtttttatttttattttgagatagggcctttctctgtcacccaggctggagtgtagtgatgccattatagcgccctataccctcaaattcctgggctcaagcgatcctcctgccttggcctcccaagtagctaaaactagaggtgtataccactacacctggttatttttttatttttttatggcaatggggtctcactgtgttgcccaggctgatctagaaatcctggcctcaagtgatcctcctgcttcagcttctgaaagcactgggattccaggcataagccaccatgctcagcccacaaatatttttcatacatgtgatttggcagttaacctaattctgccttgtgacaattgcataattatcttgaattgctgttttattttcctattttgttatttaacttcgtgcatatttctgatatgccttcccaactagattttaagtgttttaaaggaagacatgataacaaacatctcttttcacaatttattaaatatgcatagaattattcacttgatttgatatgtggacgttactttagatgcaatgtcaaataaaaacataaatggttttaaaagagtatcatgatgttgatataattttagagagtaattaaacaacttacataccctgaaacccacaatt

SEQ ID NO: 777 - DNA, 4048 bp, Homo sapiens
tttattgctggacactttacatgcactatctcatttaaccacacccaccactccaagctattgtattagcttcacctaagagaagccgaggcttccaggagacgtacctcacatcctggctaattggcagagtcagaactcaagtctttttgactcttagcttttatgtcttgttggtatcaggattaatttgggggtaaatgaatagagatgcctggcagcacaggataagtccaacagatactctcaggaaaaacaattgcacaaaatctagtcagttatgttttagttttgaagaaaataaatactcattaaattataattatctggtttacccgataacaccaaaatcacaataccattcttagaataatccttggctcttcttttgctcacacactctacaatcaaatcctgtcagtccagtcctcaaaatagattcagcatctccaacgctaccctactgctccacaagcccatcatctctgtcctgactctttctaaatacaatgtcaaaatgggtctctctgttccaacccttgctcactgcaagggctcaacctgtcagccagaaggactccattaaaagtgacgttgatcatgtccattagatgctcaaagccctgcagcagctctccacttcactccaggcaaaagacaagtcctggacattgcctacaggccttttgtgatctggcttcctgctgactttctttttctttctttctttcttttttttttttttttttttttttttgagacagggtctcactctgtcacccaggcgggagtacggtggtacaatcatagctcactgcagcctcaacctcctgggctccagcaaccctcccaatcttggcctcccaaagcattggaattacaggcatgagccatggcaccagccctctactaactttctaatgcacctcccccacttccatgtgactcactttgcttctttgctgttcttcaaatacagtaagcacattatcacctcagggtctacatttgccattcgcctgccttgaatgggaaatctacttgcttacctcaccaccagatcccttacccctgatctcatggccagatcccttatttatttatctcatggacagattccttatctctttatctcatagctaaatttcttacctccttacttcatggagagatcccttacctccttacctcatgaccagatcccttacctccttacctcattgctaaatttcttacctactcactccatagctaaattccttacttactcgcctctagctaaatcctttacctccttcaggtcctcatcaaaatgttggtttattagtgaggtcactaatagattaactaacgatcccctcctcccacgtatcttcttcccctgcataatattctccaaggcattatcaccagccaacatgatatatatacagtcataattcgttatctttatctctttatcccacttgaatgtgttagcttgaaccatatgacactgccttttatgtaggtagaaaatggtcaaatgtctataatttcattttgtttaacttagtagttgatatggtttggctgtgtccccaaccaaatctcatcttgaattgtaattccgatgtgtcatgggaggaggctggaaggatgcaactgaattttgggggcaggtctttcccatgctattctcatgacagtgaataagtctcacaagatctgacagttttaaaaaaacaggggttttcctgcacaagctctcttgtcttgtctgccaccatgtgagacgtgtctttcaccttctgccatgattgtgaggctttcccagccacgtagaactgtaagtccaataaatctcttacttttgtaaattacccagtctcaggtatgtctttatcagcagtgtaaaagtggactaatacagtaactttataatgatctgtttcatacactgctaaatttcctaatgcagataacactgccttgcatataacaggtgttcaataaataattgtttaaaaatgacttgtttggcacaagttttaaataactgaaacatgtagaagtaggtagatgtcttgtctaactgatggtaattaatttccatctcagcccaatttagtccccaattatcacatcttatatacccagttaggaaattagttcaacctgaaccacccttgtggtttctttggaactcaaagctagcggtattcaccccatttgcctctgtctcttcaaagacttcaaagctctgagtttttcctgttgacagtttcaaaaaaaaaagaagttatctattactttttgttcttggacctcccctacatattccacactttggaaggggaaacctggcatggacgagggcattctggggtccctggcaggctgttcccggatcacacagtcacggcaactctttactgagttaggagtaggaaaaaggtagaaaggcctatcgtcctccctttctgctctctttgttcaaggcttagagagtcttgatccccaatcttaatatatactaaataacattttatttccacttcattattttcttgcagaaagttaactgctttcttactattcaacatggcttttatttttaaattttaagtattttaaaattccatggaagattatgtatttatagcagtaaatgctcaataatattaatatcagacctgcttttccccctttttgaatctgggtccaaaataatcaaataggctttaccctatttgttctgtcaaatgtatttgtactgggtctgagacaccgtaacacaaagaacataatcattactggaatgtaatgaggagaatgtgcatatcttgggaattaccatatatgcatgttcactacctcttcctccccactcttcccaccaactcagactccagatccatattcttttttgggactccagaaattcaccagggatattcttccaaaggtttgtgatacctccttttctcttgctgatataattgccaagctgtgtgaggtaaggagctctctatcctgccagttctcatttacagacagaaagccattacatcttcatttcagccacagaccaaatgttcagtgtgtcttattaaaaaatattaactcaaagttgttttagtacagagttttctgcttcagttactgtcttagtccatttgtgctgctataacaaaatgtgacacactgggtaatttacaaagaacaaaaatgtattttctcacaattctggagactgggaagtccatgaagaggtctgagcattggtgtctggtgagagaccactccattgatgaaatttttaatggtagcatcctcacatgacagaaggcagaagtgtgaaaagggccaaaggctgtgtgaagcctcttctttaaaggtcctaagcccacgaacatgggctccacctttatggcttaatctcctcataaagactccacatcttaatactatcacgctggtaagtaagttttagcagaggaatggggagaggggcattcagacctaccagttacagtcctacctttcatgtctacacctttctttggactgagccttggaaagatacaaggtgaaaaaagaaagaaagaaagaaaagaaagacaggataggaaacatatctacagagccctttctatgtcccaggttcctgttccatatattgccttgtttccatctcacggttttggggaatccattaaatctagagcaggtgagtaagaaaatacttgaagtcaagcaattaggtaatctaagacagtggctgtgtgggaagttacatggagatgggctctgaaccatcatggggacttgagcactctactctcatttatattccagaagagttgtggacattcctggccagatctgtgtaacagaagccaggaaaagcacacactgagggcacccccgctctggactgtaatgaaggcaaaagcgttaggcttgccaagaaacacttctacttccttgttccccatttaaacttgaaatgacttcactatccttctttccccctttgtaatttaggatatgtccaaaatgagca

SEQ ID NO: 778 - DNA, 4047 bp, Homo sapiens
tttacacaaatgcaggtatagatctgctatcagaaacagattcactttctttatgccacatgatattaatatcctaattccagaaatgcatctaaagttcaaggacatattgtagcatcttgactttctggaccaagaactaatatatgattcatacaaaaataagaatgctattaaaaactgtctacagtctaccagttaatattcactgccaaatcataaattacattttttttaaacacttgatttcttttaaggtttaccatattcctgatactgtctgaaaacagggaattaatccttcacatctagtgtgatatctgacacctactatgtgttatataacaaatgttatgtaaataaatgcatcagtaaataaaacacccagagaaattgttttaaagacaaagaaaaggagattaactttttttagagaaaatattgaggaggaatgacctaacacttatattctagataaaatcgaattttaactatctttttactgaaacctaaacttcctggattttcacgctaaaaatattagattcttaaaataggagttctttttcttaagcgataatcacttatcctcagatatactatgcaaaacatgtccatttcataccaaatagctacccttctagagtatttgggaaacattttgatataatgaatatggctcttgtcaaacatgttattctctatctaaatgcaaattcatttacaaatgacaagcaataaagaaaattagaatcattttgcttgagttttgacacaggaagtcatcaaggacaactcagggactttctcctctggggctcccaagaacaaaagctaaactgcagcactctctatgtatctcgagggagattacctgcctccagactggtttaagtcaatggatcctgctttcatttataattttcagaggtatccagtaactgatgcttctccccagggttccatcttaagcaccccttcccttctcaccctgcagaattttcttaaaaattcttaacactccgaagtctgtatctacaacctggacctttattctgagtcctagcatgtgtcaactgcctacaacactttccccaagtgtcttctttgtcattttctttacctttcccaaccactccctgccttccccaacaactccatccactcatccactcaatccctgctccaaagcacctctcattttattattttattatatttcccatactggttaataatgccaccatccacacagtccccaaagagagtttaaaaatcatttttaattcctccctccatcatcttcactctctttagtctaatcagtcatcaagccctgaccctatatcttctaaatactgcctgtatttgttcattcttttcacccctacccttggttggagtatggccattaccatccaattccctgctcatagtttcatctgctctaatttatcctcaacattaccttcacagtaacatttcaaatatgtaaatatgatcgagtggctgactcccttgcttaaaagcatgtgatgaagttcaaatttttaaaaaataatttaaatgtttaatgggacaccatcacctttcaagatagagcctggtacttctgcatggtcttcacaaggcaggtggggaatttcagaatctgactcttcactcacaatttcctgtatgtatcatagacgaccctcccagccaggaatgttgacatgatcacagaatacataaataaaaggaggtgatagttttgccatcctcagaagtaattagatgacaccagaagttgtataatcagaaaaacagaatcgtacagtgtttaaaagtgtagactcctaatgtaggctgctggagttcaaaccctggctcctctacttgccggttttgagcaagttatgaagctatgcaaccttcatcagtaaaataggaataataaaaatacctatcttatgggggtttccggcaactacattaattaaaatatacaaagcaacatgaaataataaatgttaatattgtaatgcccataatactttaagagagatattaaccaatggagcatagcctgacaaggtgaccagaatatgaagacaaactgagattatgccatgtgaagaataattgtagttatatgcaacttacagtaaagaaatgttggccaggcacggtggctcacgcctgtaatcccagcactttggcaggtcaaggcaggcagatcacaaggtcaggagttcaagaccagcctggccaacattgtgaaatcccatctctactaaaaatacaaaaaattagctgggtgtgatgacgggcgcctgtaatccaagctactcagaggctgaggcaggagaattccttgaacctgggaggcagaggttgcagtgagctgagatcacgccactgcactccagcccgggtgacagtgcaagactccgtctcaaaaacaaaaaagtcagaaatgttggcaagacattacatggcaagatgtactaaaatatctggaaagcaatccagagtgttgaaccaggaacattagtggaactcttgggaaacaaattctagctcaaattctagaaacacttttcataaaagaaatgtctaacaataagagggtttgtcatcagagaaagtgggttcccctccactaaaggtgtttaaccaatagctggataactcttcatttacaatatttcaaagaaattgatcaaaaaaatgcaggggagaaaaatgacttctaagggacttaggggtctcagatgacaaagggcttcatatgtcacctaacagtaaataggtgcttatagtaattatttttagtaaattccataaagtataaatagtcatggcatgagcttaggttgatttgtcatctagtttcccttaataaccctgtttacccagtgatgagtaaaatacagatctagggatgtgtcacatcatctgaaattatttccccagctccatgattcatcgtggacagctctagacaaatgctctcaagtggtagctgtccctggctactgcagctgcatttccttttgttcccatggaatttttcttgaaaaacacaatgactatttttttacctctacaatttgcttgcagtgtttcttttcattcatttaacgtgttttgaaagcaatatgccaaagggaatttgagaggagttttattttgaccctatgtatcagtttcaagaaggtgaaaaagttcagaaacaaagaaattgagtcatcttttgaccttgatacaactgaagctttaagataaatccattaaaaagagctactcagtcgaattcctactatgtaccaataataattctattttaaaaataaaaaaacaggctaagacgggcttaatagccaactcaaagccacatggtcaataaggaggaaagctgagagtcagtcatgtgagtctaatgtcaaatatattatgcctgatttctaccctttaagacacacacacacacacacacacacacacacacacacacacacacacacctgttccaggctcactccctgcatcatacagtaaagcatgtctcaaatcttgaaggtaggagaagccagtgtaccattctctatggtcctgaaccatctttcaccctgaggaacacaccaaggccagtctttgaatttgcatataatatttgatgttacagtttgtacctgcacgttactgtttggcctggatttgtccactggctcaggactagccagttaggctctccctccctgtagcaccaacaccctccaacccgactcctggcacctggccactgggcgtttccttaccaccacctgcacaagagcgatgtgataatttagtcatttaatcatccatttcagctggagtgtcaagacatgttatgctgtgattggttatgaatggcacagcataaagttttgcataacttggagtccatactgcagcctgacctttcagaatatggaaattccatggcatggaatacaagaaaatgtgtgaaatgtgaggggaaaggatgaagaaagcaccatctcgtattgatacttaagg

SEQ ID NO: 779 - DNA, 4046 bp, Homo sapiens
caggttcaggttttttgtaagactaaatcataattgatattgtagttgttctctttttgataataaaaatcattcatgatcaaggtctcagtacattaacccattatgagttgcaaaatgatgatagtttaattctactataccatcctcattaactaagttaaatacttctacaaagaaaaactttaattcacctactatttggtttcccagtgctttagttaataaaagaaatataggataaatgatggattcttttcctatacttaccaggtttcaatataataagttgattccctagcatcttctaatggtgaccaattagttgttttttttaaaaaaaaaaaaaaaaaaagcactatgaaattatgggttaaacacatttgctgtatttctattcatttcagctgttgtcctgattgatacttagattgccctttctttgttccatcttcaagttggtccctgaactcctttgaagcaatcctgatagtctgatagtctttgatagatgccctgctatctagtgtaattcatcttccttatttcctgtcccacatctggaatcagtcttctccctaaggaatctttattccttataggaacaatgctggcattttctccaacgatcttaatccatcctgaatgtctattgcatttctgcacttcaccccaacaccatgcctcccagttgagactcagggatgcaaggagggattgaaagttcctcatgaatatgatgacagataggtttaggctcaaagatggctgaagcccagggatgtccatgacataaatgacttggtagaaataataaaataatggtattacaatttcaagtggctactatgacacagccatatcaaaataccctgctgtaaggcaagccaaccagttaggaggcaatttgattatttcaggaaaagcagcatgataggtattggagtcaaactaacttgggtttgaatcccgtatctactacttgaaaatttgcatgaccttgggcaaattacttaacctccctaagcctcagcatcctcattcataaaataggatagtaataacacatatctgatagggttatcaatgtaatacatgtaaaacataagacctattacataccaagtgctcaataaataaaaatagtgattatttttgacattttattattgctaaaatttatatactgacagacagcagattctaaaacagtgcaaaacagtagccactagccacaggtgactactgagcactccaaatgtggttggtctgcactgcaaagtgctataagtataaaatatgcactgaatttcaaagcctttgtgaaagtaatgtaaattataccattaattctttttatttttattacatgatgaaattgtaatattttgggcatattaggttaaataaaatatattattagaattaatttttcctatttcttttattattttaatgtaatactagaaaatttaaaattatatatgtgacacattctacttctactggacagtgcttctctagagatattaagaagatatttttgttttgttttgtttacagcaaaggggaccaaatgaattaagaatatatgacgggcacggtggctcacgcctgtaatcccagcactttgggaggctgaggtgggtggattacctgaggtcaggggtttgagaccagcctggccaacatggtgaaaccccgtctctactaaaaatacaaaaatcagccaagcgtggtggcacacgcctgtaatcccagctactcgggaggctgaggcaggagaattgcttgagccaaggagacagaggttgcagtaagccaagattgtgccactgcactccagccttggagcaagactctgtctaaaaatttaaaaaataataataatatatatatacacatatatatacatatatgtatatagtaagcaaaggtttggtgactgctgggatctgggatgaggggtgaggaacaggggggagtgatggaccacctctagttttctggcctaaatcatttctttcatggagcctatgcacctgacactttctaacatgaaaccgcttttttttttctttttttattatactttaagttttagggtacatgtgcacatagtgcaggttagttacatatgtatacatgtgccatgctggtgcgctgcacccactaactcgtcatctagcattaggtatatctcccagtgctatccctcccccctccccccaccccaccacagtccccagagtgtgatattccccttcctgtgtccatgtgatctcattgttcaattcccacctatgagtgagaatatgcggtgtttggttttttgttcttgcgatagtttactgagaatgatgatttccaatttcatccatgtccctacaaaggacgtgaactcatcattttttatggctgcatagtattccatggtgtatatgtgccacattttcttaatccagtctatcattgttggacatttgggttggttccaagtctttgctattgtgaataatgccacaataaacatacgtgtgcatgtgtctttatagcagcatgatttatagtcctttgggtatatacccagtaatgggatggctgggtcaaatggtatttctagttctagatccctgaggaatcgccacactgacttccacaatggttgaactagtgtacagtcccaccaacagtgtaaaagtgttcctatttttccacatcctctccagcacctgttgtttccagactttttaatgattgccattctaactggcgtgagatggtatctcattgtggttttgatttgcatttctctgatggccagtgatgatgagcattttttcatgtgttttttggctgcataaatgtcttcttttgagaagtgtctgttcatgtcctttgcccactttttgatggggttgtttgtttttttcttgtaaatttgtttgagttcattgtagattctggatattagccctttgtcagatgagtaggttgcgaaaattttctcccattttgtagtttgcctgttcactctgatggtagtttcttttgctgtgcagaagctctttagtttaattagatcccatttgtcaattttggcttttgttgccattgcttttggtgttttagacaggaagtccttgcccatgcctatgtcctgaatggtaatgcctaggttttcttctagggtttttatggttttaggtctaacatttaagtctttaatccatcttgaattgatttttgtataaggtgtaaggaagggatccagtttcagttttctacatatggctagccagttttcccagcaccatttattaaatagggaatcctttccccattgcttgtttttctcaggtttgtcaaagatcagatagttgtagatatacggcgttatttctgagggctctgttctgttccactgatctatatctctgttttggtaccagtaccatgctgttttggttactgtagccttgtggtatagtttgaagtcaggtagcatgatgcctccagctttgttcttttggcttaggattgacttggcaatgcgggctcttttttggttccatatgaactttaaagtagttttttccaattctgtgaagaaagtcattggtagcttgatggggatggcattgaatctgtaaattaccttgggcagtatggccattttcacgatattgattcttcctacccaggagcatggaatgttcttccatttgtttgtatcctcttttatttccttgagcagtggtttgtagttctccttgaagaggtccttcacatcccttgtaaggtggattcctaggtattttattctctttgaagcaattgtgaatgggagttcactcatgatttggctctctgtttgtctgttgttggtgtataagaacgcttgtgatttttgtacattgattttgtatcctgagactttgctgaagttgcttatcagcttaaggagatttggggctgagacaatggggttttctagatatacaatcatgtcgtctgcaaacagggataatttgacttcctctttt

SEQ ID NO: 780 - DNA, 4042 bp, Homo sapiens
ccatactgagcaaaaagagcacaactggaggaatcatattatctgacatcaaattatgccacacagctataataaccaaaacagcatggcactggaagaaaaagagacaaatacaccaaagaaacaaaatagagaacccagaaacaaatctacacatctacattaaactcattttcaacaaaggtagcaagaacatatattggggaaaaagatagtcttttcaataaatggtgctgggaaaactaaatatctatatgctgaagaatgaaaccagactctgtctcttgccatgtgcaaaaaacaaatcaaaatggattaaaaacttaaatctaagatctcaaaccatgaaaccactgtaagaaaacattaaggaagctctccaggacattggtctaggcaaagatttcttgagcagtaccccaaaaacacaggaaaacagagcaaaaatccaccaatgggatcacatcaagttaaaaagcttctgcatagcaaagaaaagaatcaacaaagtgaagagacaacccacaaaatgggagaaaatatctgcaatctatccatctgacaagggattagtaaccagaatatgtaaggagctcaaacaaatctataggaaaaaaatctaataatctgattaaagaatgggcaacagttctgaatagacatttctcaatagacatacaaatggcaaacaagtatatgaaaaggtgctcaacatcattggtcatcaaagaaatgcaaattaaaactacaatgagatatcgtctcaccccaagttaaaatgacttttatccaaaagacagggaataacaaatgctagtgaggatgtggagaaaagggaactcttgtacactgttggtgggaatgtaaattagtacaaccgttatggaaaacagtttggagtttcctcaaaaaaatataaatagaactaccatataatccagcaatcccactgctagataaacccaaaagaatgcaattcagtatgtcaaagacatacctgtactaccacgtttgttgcagcactattcacaatagccaagatttggaagcaacttaagtgtccatcaacagatgaatagataaagaaaatgtggtacatatacacaatgaagtactattcagccataaaaaaatagatcctgtcatttattccaacatagatagaacttgaggtcattatattacatgaaataagccaggcacagaaagacaaagttcacatggtctcactcatttgtggaagctaaaagttaaaacaattgaactcatggagatagaaagtagaaggatggttaccagaggctgggaaggaaagtcaggaatggagggagaaaatgagaatggttaatgggtacaaaatatagttgatagaatgaataagatctagtatttaatagcacaacagggtgactgcagtctacaataatttattgcacattttaaaataactaaaagagtaataattggatggtttgtaacacgatgaaatgataaatgctcaaggtgatggataccgcatttactctgacatgattgttacccattgtatgcctgtatcaaaataactcatgtaccccatactatatgctatactatgcacccataaaaattaaaaagaaagaaagaaaagaagtctgcaataaaaatccaaagaatgtattctctcttatttcattcttctcaaaagacaatagtgttctgcaatgcactcttcttttcctctacaactgggcagtaagcagggctattcattcaatcttctaggcatcaaattgggagagaaaagtatttttcattcttgttatgaagcatcaagagactattcagtagtacttgccagttcccaaaattatactgacatttaaggggtagttagagaaataagaatccacaaaagaaatggaaggagcagctagataagaagaaggaaagctaagaggtcattgtcctctaagtcaaggttgcaaagcatttacaacatttctctttatagtagaaggaaatgagcaacagtatcaaattcagcaagctgagagcttaagtaaatgtggagagacaactattatatatacctgctgggaagtcatagcaaccttagaagagagctggtctggtgtagtacaaatgttgatttgttattctgactcttccatggactgcactccttagaagcaggtctgaatgttttggtccccacagtacctaggacagtgcctggaatgtaagaggcacttaataaatgtttggcaaatgaatgaactaaaacaaagtaaagtatgtagttgatttggagggaaaagatcccaatgacatttaaaactgcttgtaataagatgcaccaatatttccttaattaaatccctaagtctaaaattatcaccatatatttggcttcttccccaaaggccctgaagccaaaacaactcagttcctaaggagaatatataatctgccacctacaaagataaagtctcaaacataagaagcaaccctaaatttctgtgcttagagtgaccttttgagttgccagagtgatgtcattagtgttacagttttctgcaaggttaggcatataagtatgtgttaaatagttccatgggctcctgcttgctcatttaataaagaagagttcattaagagtatcccaaatgcgtagctcagggccactgacactagaaaactgcaaccactttgttctttccctgccccgtatctcacttgtccttgcagctgtcaccttgaggcctcagcactggtaggaagtgagaagacactgagaagtggcacccagtagaagcttctagaaacagaaagagtatccataaataattaaacttatgaaatcagaacctgagaggttatagtcatgtttctcggctgcccatcataattacctggacagcttccaaaaatacattaatgccagaggcccactcccagagattctcactggcctggagtgagatccaggcaccagtattttttaaaattcttccagataattctaatgtgtgaccagcattcagaggcactatctttatgtctttatatctcagaatgggtatcagaacttaatgctaatgagaaagtacttcagattttatcaccctatgtctcagaaaaccacttttcctctattgagtgccactgacccataagaaaaaagatcaatagtctaaatgtacaagtacaaagtgacttaatcgaatttttttacaaaaagagaaaattcaatccatttgtttttaagtttaataacggggtgaaaaaagagtaaactattggttagtgtgtgccactaaccaattattatgttattatgtttcatggtctactttaaacacttttacatgtattgttttacttagtctcccaagcaacccagaaaggcaaatattattattcccatttttacagctgaggaaacaaaaactcagagacgttaaattgacttgtccaaagtcacagagttggcatatggtgatgccaggaggcaaacaaacaaatggccccatctgctgctctcacttatcttttcatcaggccatgttgccctatctaaagaaaatcttagtgaatgatacttcaccaagcaacagaaattttctgtccaagccaatgaaagggatagatggagctggacaattgaaagaaggaaagagaagaagtagagagtaagaagaatgaaagacagtgcaagctaagggaagggtcagaaaggaaacatcaactgcacccagcagatgagtcacagtgcatgaggccaaagtcatactaatggccacatttcccaatacatacttagatggtcaaggcagcaaatacagccagtgtgttactatgtgtcctggattgtgctgtaagggtgcatgagacacagtcctgccctacagatgcttataacctagcatgggaggcagatttgcacgcaaacaggatagattttgccttgccttagcagaagtaagtaccgagaactgggagcagagatgaagaaactgttcatatgggtcagagaagacctcacagaagagggtcatct

SEQ ID NO: 781 - DNA, 4043 bp, Homo sapiens
cagtattttttaaaattcttccagataattctaatgtgtgaccagcattcagaggcactatctttatgtctttatatctcagaatgggtatcagaacttaatgctaatgagaaagtacttcagattttatcaccctatgtctcagaaaaccacttttcctctattgagtgccactgacccataagaaaaaagatcaatagtctaaatgtacaagtacaaagtgacttaatcgaatttttttacaaaaagagaaaattcaatccatttgtttttaagtttaataacggggtgaaaaaagagtaaactattggttagtgtgtgccactaaccaattattatgttattatgtttcatggtctactttaaacacttttacatgtattgttttacttagtctcccaagcaacccagaaaggcaaatattattattcccatttttacagctgaggaaacaaaaactcagagacgttaaattgacttgtccaaagtcacagagttggcatatggtgatgccaggaggcaaacaaacaaatggccccatctgctgctctcacttatcttttcatcaggccatgttgccctatctaaagaaaatcttagtgaatgatacttcaccaagcaacagaaattttctgtccaagccaatgaaagggatagatggagctggacaattgaaagaaggaaagagaagaagtagagagtaagaagaatgaaagacagtgcaagctaagggaagggtcagaaaggaaacatcaactgcacccagcagatgagtcacagtgcatgaggccaaagtcatactaatggccacatttcccaatacatacttagatggtcaaggcagcaaatacagccagtgtgttactatgtgtcctggattgtgctgtaagggtgcatgagacacagtcctgccctacagatgcttataacctagcatgggaggcagatttgcacgcaaacaggatagattttgccttgccttagcagaagtaagtaccgagaactgggagcagagatgaagaaactgttcatatgggtcagagaagacctcacagaagagggtcatctgagatggctttgaaacagggtaactcattcaccatgaaggcagaaggaatggccgaactgaatcatggaaacagaaactagcaaggtgtgtgcttgagaaatggaaagggccctttataaatttctgagacggggaaattatcacattctcactgactccctccttttactcagggctgagattatatctttaagctttgaattttcacatcatactcatctgcagttacataggaatggttctgccaggttcactccagttcctagatcatttaatggtggaattagattcaggtttcctctcctcactgcccacagctctgttcagccactatacaacgcagatctctgttttacgtgaggattccaaattacaaaattgtgtaaagtactttcttttttggtctctatatccctatcctgatcacaattcaaatgaaaagtttcttgtcctataaaatgagcaaaattgaattaatatcttaaggagttcaggggggctgtctttgagctgggaaagaacctccaagccagcttccattaacatatttggaattctaggtgtttctttgaagcctggaaatttttttaacctgcacagaacctttgtactgttgcctttaaagcagctactcccttttattttaattaacaatgacttcagcaggttttaaataatggtttgtctttatgaaagaaaactagggtggaaacactccaaatccacttattggaataaactgaggagtcactaagtcctttccaacaagatttagacagttcattagaataaatatatatttaatctccctctttctatatcatcttgaaacagagcaaagatacaatgctggaataatgacacacagtctgaaaaatattctaaatgtattgaaatcactgcagctcctttcactttgtatagtttcaaaacatttataatttgtatgatgtgtctattaaatgctgcctaatagccaggaacaggacagcactcaggaatttattggtttagctagactcaaattgtgcccaaaccctgtgaaggaatgactaaagcaatcagaggattccaccagagtccaagttgaaataacttcttgaaagtttaagccaatcctcattcttatgaagtaattcattcaatttagatgaaaagtattcttatttcctgaaagttaactggttttaataatggatgtagtccctattctatttgatattttagagatgttcaaaaagaaacaaataactttaaacaaccaggcctaagccatttaaagagatagcagatttaatttctacgtctttctaaatctagtgtctagggcatccattcaggtgaatcctttgattcctgccattatcctagaacaagagtagatgtatgaattcttgcatctgtactggttactaaactctcagcctctgttctacctcccacagtctctgttccccatagctctgatgctgacccaagggttatagaaggagatcaactcccaaacctaatcccagaaagtaaatacacaacgatatagtatatgcttagatccattcttcagtttattgaatcacaaaatattggcgctgagaggaatcttagaagccaacagtttcaaactctccgtggtacagactaagccctaaagatgttaagtgactttctcaaggtcacacagctagttagtgacaaaacagggcctataaccaatcacttattatgagtgcatgctctgatcctttgctgctcgctgttgtttgcagaccagcaatatcagcatcgcttgagagcttgttacaaaggcaggctctcagactccacccaagaccctctaaagcagaatttgaattgtaacaaatctttttctttttttttttaaacagggggtgtcactgtgtcatccaggctggagtggtgcagtgacacaaccacggctcactgcagcctggtactcccaggctaaagctatcctcccaccttagcctcccgagtagctggaactacaggcacacactaccacacgtggctaattttttttatttttaattttatgtagagacgggatcttgctatgttgccaggtctggtctcaaattcctggactcaagcgatcctccctactaagcctctcaaattgctgggattataggcataagccaccacaactggcccaaatctttaggtcattcatatgcacattacagagctgaagctaagccaggcacattggcacgcaccggtagtcccaactactggggaagctgaggaggtaggatttcttgaacccaggagtttgaggctgcagtgagctatgactgcgcatgtgaatagccactgcattcctgcctgggaaatgtagcaagttctcatctctaaagaatatatttttcatttaaaaactaaaagaatggaaggcaagtagatactggtttgaagcatgggtctacctcttctaaatgtaagcaaaaatctcaaccttctgaaagcatcatttagaacctggaaataatatcactacccaccttgcagagttttcattgtataagcataacacagatatatgcatgttcatttcatgaaatacgtatgtgcataaataatacattcaaagtgtgtggcatatagtagataatatggtatatagtagctaatgttatttcccatctcatgcttatcattaatattgtgcttaaccaaactgaaagccactaatgactatgcatccatgaaggaatcaccagtcttccttcctttgttctaatgtgttaaatatcattttaacttttatatatgattaaggcttttttatttaatgttcctaactctcaagaaaattattattatgtggaaaacaataatagctaactacttttagtgctgtgcttagagaggaaagaacttctcccaaagccaagtcataataataataataataataataataataataacccacaacattcttaaaata

SEQ ID NO: 782 - DNA, 4037 bp, Homo sapiens
tgactgactgagttatttaattaagtaaaataactggcttagtactaattattgttctgtagtatcagagaaagttgttcttcctactggttgagctcagtagttcttcatattctgagcaaaagggcagaggtaggatagcttttctgaggtagagataagaaccttgggtagggaaggaagatttatgaaatatttaaaaaattattcttccttcgctttgtttttagacataatgttaaatttattttgaaatttaaagcaacataaaagaacatgtgatttttctacttattgaaagagagaaaggaaaaaaatatgaaacagggatggaaagaatcctatgcctggtgaaggtcaagggttctcataacctacagagaatttggggtcagcctgtcctattgtatattatggcaaagataatcatcatctcatttgggtccattttcctctccatctctgcttaactgaagatcccatgagatatactcacactgaatctaaatagcctatctcagggcttgaatcacatgtgggccacagcaggaatgggaacatggaatttctaagtcctatcttacttgttattgttgctatgtctttttcttagtttgcatctgaggcaacatcagctttttcagacagaatggctttggaatagtaaaaaagacacagaagccctaaaatatgtatgtatgtatatgtgtgtgtgcatgcgtgagtacttgtgtgtaaatttttcattatctataggtaaaagcacacttggaattagcaatagatgcaatttgggacttaactctttcagtatgtcttatttctaagcaaagtatttagtttggttagtaattactaaacactgagaactaaattgcaaacaccaagaactaaaatgttcaagtgggaaattacagttaaataccatggtaatgaataaaaggtacaaatcgtttaaactcttatgtaaaatttgataagatgttttacacaactttaatacattgacaaggtcttgtggagaaaacagttccagatggtaaatatacacaagggatttagtcaaacaattttttggcaagaatattatgaattttgtaatcggttggcagccaatgaaatacaaagatgagtctagttaataatctacaattattggttaaagaagtatattagtgctaatttccctccgtttgtcctagcttttctcttctgtcaaccccacacgcctttggcacaatgaagtgggtaacctttatttcccttctttttctctttagctcggcttattccaggggtgtgtttcgtcgagatgcacgtaagaaatccatttttctattgttcaacttttattctattttcccagtaaaataaagttttagtaaactctgcatctttaaagaattattttggcatttatttctaaaatggcatagtattttgtatttgtgaagtcttacaaggttatcttattaataaaattcaaacatcctaggtaaaaaaaaaaaaaggtcagaattgtttagtgactgtaattttcttttgcgcactaaggaaagtgcaaagtaacttagagtgactgaaacttcacagaatagggttgaagattgaattcataactatcccaaagacctatccattgcactatgctttatttaaaaaccacaaaacctgtgctgttgatctcataaatagaacttgtatttatatttattttcattttagtctgtcttcttggttgctgttgatagacactaaaagagtattagatattatctaagtttgaatataaggctataaatatttaataatttttaaaatagtattcttggtaattgaattattcttctgtttaaaggcagaagaaataattgaacatcatcctgagtttttctgtaggaatcagagcccaatattttgaaacaaatgcataatctaagtcaaatggaaagaaatataaaaagtaacattattacttcttgttttcttcagtatttaacaatccttttttttcttcccttgcccagacaagagtgaggttgctcatcggtttaaagatttgggagaagaaaatttcaaagccttgtaagttaaaatattgatgaatcaaatttaatgtttctaatagtgttgtttattattctaaagtgcttatatttccttgtcatcagggttcagattctaaaacagtgctgcctcgtagagttttctgcgttgaggaagatattctgtatctgggctatccaataaggtagtcactggtcacatggctattgagtacttcaaatatgacaagtgcaactgagaaacaaaaacttaaattgtatttaattgtagttaatttgaatgtatatagtcacatgtggctaatggctactgtattggacagtacagctctggaacttgcttggtggaaaggactttaatataggtttcctttggtggcttacccactaaatcttctttacatagcaagcattcctgtgcttagttgggaatatttaatttttttttttttttaagacagggtctcgctctgtcgcccaggctggagtgcagtggcgcaatctcggctcactgcaaactccgcctcccgggttcacgccattctcctgcctcagcctcccgagtagctgggactacaggcgcccgccatcacgcccggctaatcttttgtatttttagtagagatggggtttcaccgtgtgccaggatggtctcaatctcctgacatcgtgatctgcccacctcggcctcccaaagtgctgggattacaggagtgagccaccgcgcccggcctatttaaatgttttttaatctagtaaaaaatgagaaaattgtttttttaaaagtctacctaatcctacaggctaattaaagacgtgtgtggggatcaggtgcggtggttcacacctgtaatcccagcactttggaaggctgatgcaggaggattgcttgagcccaggagttcaagaccagcctgggcaagtctctttaaaaaaaacaaaacaaacaaacaaaaaaattaggcatggtggcacatgcctgtagtcctagctacttaggaggctgacgtaggaggatcgtttggacctgagaggtcaaggctacagtgagccatgattgtgccactgcactccagcctgggtgacagagtgagactctgtctcaaaaaagaaaaaggaaatctgtggggtttgttttagttttaagtaattctaaggactttaaaaatgcctagtcttgacaattagatctatttggcatacaatttgcttgcttaatctatgtgtgtgcatagatctactgacacacgcatacatataaacattagggaactaccattctctttgcgtaggaagccacatatgcctatctaggcctcagatcatacctgatatgaataggctttctggataatggtgaagaagatgtataaaagatagaacctatacccatacatgatttgttctctagcgtagcaacctgttacatattaaagttttattatactacatttttctacatcctttgtttcagggtgttgattgcctttgctcagtatcttcagcagtgtccatttgaagatcatgtaaaattagtgaatgaagtaactgaatttgcaaaaacatgtgttgctgatgagtcagctgaaaattgtgacaaatcacttgtaagtacattctaattgtggagattctttcttctgtttgaagtaatcccaagcatttcaaaggaattttttttaagttttctcaattattattaagtgtcctgatttgtaagaaacactaaaaagttgctcatagactgataagccattgtttcttttgtgatagagatgctttagctatgtccacagttttaaaatcatttctttattgagaccaaacacaacagtcatggtgtatttaaatggcaatttgtcatttataaacacctctttttaaaatttgaggtttggtttctttttgtagaggctaatagggatatgatagcatgtatttatttatttatttatcttattttattatagt

SEQ ID NO: 783 - DNA, 4028 bp, Homo sapiens
agaacctggatttgtcctgtgcctctgacatcttgcgcacagctcagcctgtttccctttctggaaagtgagttaagaccacgtcaggaaattcgaggaactggcagatggggccacttcatgttcacatccatctgttaggtactggggagtcatttggggagcagcaggatctgttgctgattggttaggccattggtctagggagtcctgggggcccttcccatccagctccaggcaatgacgctttctcttcctccccacagaggatgtcacccccatcccctctgacagcactcgcaggaaggggggtcgccgtggtcgccgtctgtgaacaagattcctcaaaatattttctgttaataaattgccttcatgtaaactgtttcaactccagccttctctccttcatcaggggctactcaggcatttgatttcttcctcctatttggcttcttgggagaaaggagcctgaggagagctgagatcctggtgctgcatttggggtcttttccatgctacttgcggcattaagttgccttggtcatctaaagcagaccaaggcgttggagacctcgttttgagtggagatgctggttctaaatatggaccaattcttaaagagccagagtgggaactgttgatccaagtgtagcctgaagcgaaagaggagccttccagacccatgccatatataaacacacgtgggtgtgcattctccccccacaccttctgtgcaaagctgggagctcactccactgcgtcttgctttttttcacttggcagatcttggagattgttccacatcagtacataaagtacataaagattgtcaccccacaaatacacaccaagtcctattttcatcagcgataaaaaagaaaagttcttgctttccggaagcttgcatgcggctctgagtacccagtgacaccagatggtactcagcgttttgcaagggattaccacaaggccccgtgatggtgcctgccatggttaggacaggctggtggctgggtagggttagtgagacccagtggagaggatgctgtgtgtcacaggctggagaggtgagaccattgaggtagtcagttgtagaggaaagaaaccagcaagaggggaaaatctgttgggatgctgcttttagcctttgatggcgtgttccaggcagagggaataagcaaataaatgggtcctgagacaaggggttactgtgatgaggcggcgttggttacatgccaaaccttgctagggattttaataacaacattgaatcttaacctgatgaaataacagtactcctggggaggcgggagggatagcattaggagatatacctaatgctaaatgacgagttaatgggtgcagcacaccaacatggcacatgtatacatatgtaacaaacctgcacgttgtgcacatgtaccctaaaacttaaagtataataaaaaaaaaaagcttgcaaaaaaaatataacagtactccttaaattgttaaaagtcatgaaagtcaaggacaggagattaaggaggcgtgaaaactaaatgcccattgtggtatcctggattggattctggaaccagaatagggtattagtataaaaactagtgaaataggataaaggcagggcacagtggttcacgcctataatcccaacactttgggaagccgagacaggaggacggattgagcccaggagtttgagaccagcctgggcaacacagggagaccccgtctctacaaaaaataaaaaattagctgggcatggtggcacacgtctgtactgccagctacttgggaggctgaggtgggagaattgcctgagcctgggaagtggaggccgcagtgagctgtgattgcatcactacattcagcctgggtcacagagcaagatcctatctcaaaaactaaataagtaaataataaattaaaaaatatgaataaagtctggagttaaagtctggaataaagctagtagtaatgtaccagtggtttcctacttttggcaaatgtatcatggcgatgtaagatggtaacaggtgaaaccgggtgagtggcacacagaaactgtatctttgcaactttttggtaaacttaaaattattccaaagtcaaattattagggaaaaaaaatgaggggtgcttttatactgtcagtctggcagtctaaggcaggatgtggtgcacagaccctcaggaggcagacacacctggaggaaaatcctattccacagcttcagaccgttcaaccttaggcaaagtacttaacctctcagccgtttagtggaaactcctgtgatgatggctgcctcaaatggaatcacacaagatcaaagtgtttagcgcagtgcctggcactgaagaagctgctgctattcttacactggtgcaggtcttgtgccaagcagcataaaggacagctggctggaatcgtggtagaaaaatgctgccagtcgccggagcattctttttatttcctgtggtgagactgtaacttgtcctgctctttcctggtaaccagggatgcaatcagccgggtctttgaaagcagttcctttcgggggttttgcctgaaaggagagccaagttgtggtgtggctcaggtgggaacgtagcagcctattgaccgcagaggcggctgggctgctgcccacctgagactgcagcctgcagcagaggcgcctgaagctgcgactgcagccccaaccagacctctagagacagtcgctgcccctctcccctgctccccttctggccgccttcccatgccaaggtttccttcctagcgtttcccagtcttccctctggcctctgcctatctctagaccacattgcaacatgccatctaaaactaactggattctgtcactccctgctgttttctttgagacggagtttcgctctgtcacccagggtggagtgcaatggcatgatctcaggctcactgcaatctctgcctcctgggttggagagattctcctgcctcagcctcccaagtggctgggattacaggtgcccgccaccatgcctggctcatttttgtagagtttcaccatattggccaggcaggtctcaaactcctaacctcaggtgatccgcctgcctcggcttcccaaagtgctggggttacaggcatgagccgccacgcctggccctcccctgctgttttatcactgccctccctgttgtctttagaataggatccaatctcctcagtgaatctcctgtgttttagctggccccaccccatcctccgccctcctctcactctgcccaagccaagcctgtttccctcagttctcccctcctccatgccttctcatgctttcagcctctcctctgtgtcttccttcccagcttggctcatggagcatctactctccccaacttggcctcactatcatctgcttacctgttagaatctgttttgtttttttttgttgttgtttttgagactgggtctcactctgttgcccaggctggagtgcagtggcacaatcacggctcactgcagccttgacctcctgggttcaagtgatcctcctccgcctcagcctcctgagtagctgggactacaagtgtgcatcaccacacccacctatttttaaattttttgtagagactgggtctccctgtgccgcccaggctggtctcgaactcctggactcaagtgaccctcctgccttggcctcccaaagtgctgggatttacaggcatgagccaccgtgcctggcctggaatcaatttttcatcactgtctcaaaagtatcttcctggaggctaggcgcagtggctgacacctgtaattccagcactttgggaggccgaggcgggtggatcacctgacgtcagaagtttgagatcaaaaggtatcttcctggatgccttcaaggtacctctccactgaattctcataacacctctattcccccatggtaccactggtcaccctctatcacaacagcctactcacccccgcaccgccaaagtctatgagccctgagagggaagggagtatgtcttgttca

SEQ ID NO: 784 - DNA, 4045 bp, Homo sapiens
agagacaactgcagggaaaggtcttgaggtgggggtgaacctgggcacctgtgaaggaaagagtggcatgaggtgcagtcagaggggaagaggtggagtcctgtaggagaggggaaggacctggatttgagtgatgggggcatgaaagctgaaatagatgactgttgcgtgaacaagccagacagtggtcagaacataacaacaaaccatagtggccccctcagcctaaaatatttactgtctggcttttttttttttcctcttttttgagacagggtctcactctcacccaggctggagtgcagtggcgctatctcagcttactgcagtctctggctttcaggctctagcagtcctcccacctcagcctcccgagtagctgggactgctagtagtagtgccaccacgcctggctaaattgtgtatttttgtagagatggggtttcaccatgttgctcaggctggtcttgaactcctgagctgaagcagtccgccctgccttagcctcccaaggtgctgagattatgggtgtgaaccactgtgtacagccctgtctggctctttacagaaagtttgcagacctctgaactagcggggtgttgggatcttagaaaggagatcttccattgacttggccaaaggctcttcttaacttaaaccttcattttctaggaccaagacccctggacctggggcccagtcggccctcagagcccttgcccgctcgggtatgaagatcgggcggattggtaagtgcccccctctagctaatgcttgggtttattttgaagcattggccccaaaaagcacgtgctgtgcccagtggatgtgcagcggctggtctggtcacttttggcagttaagtttgttaagggaggctgcaagaggcaccttgtgacttaaaaatctctccctgaatatctctgtcaccttgatatgaatgtcctgtttcatttgtgaatctctgtcctacactgcctggtgcaggtaaaactgacaagagatgaattgtcctttcctccattcttgaggtcattgctattagcattttgtgtgtaccatctcctgcattgtaggatgttcagcatttttggtttccgcctactaaatatcagttgggcatgccagtcgtgtgacagccaaaaatgaagtggggggtaccagcttctgttattaataccctcaggcctgtgatctcctggctccttacagctcttaggaagggaacagtagtctttccctgcacattgttctgtgcagttagtagcgacatacactgacgccccaggccaaagttcctactgtgtcctacttgaaggatgattttgttttcttgagacagggtctggctctgttgcgtgggctggaattcagtggcacaatctcagctcactgtaaatttcgcctcgtgggcggatctgtccaaaggatcctcccacctgcatctactgagtagctgggacaacagtgtgtgccacaccgggctttttttttttgtagcggggagtttcaccatgttgcccaggttggtcccaaactcctggcctcaggcgttccaccagcctcagtctcccaaagcccaaagtgctaggattacaggcatgagccaccgcgcccagccttaaaagattttttcagactttttttcagtgtctttttacttaatgaaaacgagacagttgcagttaccctgtctaaaagggttttttcctctagagaagacggtgggctagatgtcagaacctggatttgtcctgtgcctctgacatcttgcgcacagctcagcctgtttccctttctggaaagtgagttaagaccacgtcaggaaattcgaggaactggcagatggggccacttcatgttcacatccatctgttaggtactggggagtcatttggggagcagcaggatctgttgctgattggttaggccattggtctagggagtcctgggggcccttcccatccagctccaggcaatgacgctttctcttcctccccacagaggatgtcacccccatcccctctgacagcactcgcaggaaggggggtcgccgtggtcgccgtctgtgaacaagattcctcaaaatattttctgttaataaattgccttcatgtaaactgtttcaactccagccttctctccttcatcaggggctactcaggcatttgatttcttcctcctatttggcttcttgggagaaaggagcctgaggagagctgagatcctggtgctgcatttggggtcttttccatgctacttgcggcattaagttgccttggtcatctaaagcagaccaaggcgttggagacctcgttttgagtggagatgctggttctaaatatggaccaattcttaaagagccagagtgggaactgttgatccaagtgtagcctgaagcgaaagaggagccttccagacccatgccatatataaacacacgtgggtgtgcattctccccccacaccttctgtgcaaagctgggagctcactccactgcgtcttgctttttttcacttggcagatcttggagattgttccacatcagtacataaagtacataaagattgtcaccccacaaatacacaccaagtcctattttcatcagcgataaaaaagaaaagttcttgctttccggaagcttgcatgcggctctgagtacccagtgacaccagatggtactcagcgttttgcaagggattaccacaaggccccgtgatggtgcctgccatggttaggacaggctggtggctgggtagggttagtgagacccagtggagaggatgctgtgtgtcacaggctggagaggtgagaccattgaggtagtcagttgtagaggaaagaaaccagcaagaggggaaaatctgttgggatgctgcttttagcctttgatggcgtgttccaggcagagggaataagcaaataaatgggtcctgagacaaggggttactgtgatgaggcggcgttggttacatgccaaaccttgctagggattttaataacaacattgaatcttaacctgatgaaataacagtactcctggggaggcgggagggatagcattaggagatatacctaatgctaaatgacgagttaatgggtgcagcacaccaacatggcacatgtatacatatgtaacaaacctgcacgttgtgcacatgtaccctaaaacttaaagtataataaaaaaaaaaagcttgcaaaaaaaatataacagtactccttaaattgttaaaagtcatgaaagtcaaggacaggagattaaggaggcgtgaaaactaaatgcccattgtggtatcctggattggattctggaaccagaatagggtattagtataaaaactagtgaaataggataaaggcagggcacagtggttcacgcctataatcccaacactttgggaagccgagacaggaggacggattgagcccaggagtttgagaccagcctgggcaacacagggagaccccgtctctacaaaaaataaaaaattagctgggcatggtggcacacgtctgtactgccagctacttgggaggctgaggtgggagaattgcctgagcctgggaagtggaggccgcagtgagctgtgattgcatcactacattcagcctgggtcacagagcaagatcctatctcaaaaactaaataagtaaataataaattaaaaaatatgaataaagtctggagttaaagtctggaataaagctagtagtaatgtaccagtggtttcctacttttggcaaatgtatcatggcgatgtaagatggtaacaggtgaaaccgggtgagtggcacacagaaactgtatctttgcaactttttggtaaacttaaaattattccaaagtcaaattattagggaaaaaaaatgaggggtgcttttatactgtcagtctggcagtctaaggcaggatgtggtgcacagaccctcaggaggcagacacacctggaggaaaatcctattccacagcttcagaccgttcaaccttaggcaaagtacttaacctctcagccgtttagtggaaactcctgtgatgatggct

SEQ ID NO: 785 - DNA, 4076 bp, Homo sapiens
gggaaacagacatggtctctaccctccttgtgtgggaccgaggctggtgggagagtcagactttaaacaacagagcaccagggagtatgtggttttcatttgtgacaaatgccaggaagcacaagtaaggagttggtgataaagtgtaatttaaactagggtctaaatgataagtccggagtccttccagtgaaataaggacaggaggagggtattccagctagagacaactgcagggaaaggtcttgaggtgggggtgaacctgggcacctgtgaaggaaagagtggcatgaggtgcagtcagaggggaagaggtggagtcctgtaggagaggggaaggacctggatttgagtgatgggggcatgaaagctgaaatagatgactgttgcgtgaacaagccagacagtggtcagaacataacaacaaaccatagtggccccctcagcctaaaatatttactgtctggcttttttttttttcctcttttttgagacagggtctcactctcacccaggctggagtgcagtggcgctatctcagcttactgcagtctctggctttcaggctctagcagtcctcccacctcagcctcccgagtagctgggactgctagtagtagtgccaccacgcctggctaaattgtgtatttttgtagagatggggtttcaccatgttgctcaggctggtcttgaactcctgagctgaagcagtccgccctgccttagcctcccaaggtgctgagattatgggtgtgaaccactgtgtacagccctgtctggctctttacagaaagtttgcagacctctgaactagcggggtgttgggatcttagaaaggagatcttccattgacttggccaaaggctcttcttaacttaaaccttcattttctaggaccaagacccctggacctggggcccagtcggccctcagagcccttgcccgctcgggtatgaagatcgggcggattggtaagtgcccccctctagctaatgcttgggtttattttgaagcattggccccaaaaagcacgtgctgtgcccagtggatgtgcagcggctggtctggtcacttttggcagttaagtttgttaagggaggctgcaagaggcaccttgtgacttaaaaatctctccctgaatatctctgtcaccttgatatgaatgtcctgtttcatttgtgaatctctgtcctacactgcctggtgcaggtaaaactgacaagagatgaattgtcctttcctccattcttgaggtcattgctattagcattttgtgtgtaccatctcctgcattgtaggatgttcagcatttttggtttccgcctactaaatatcagttgggcatgccagtcgtgtgacagccaaaaatgaagtggggggtaccagcttctgttattaataccctcaggcctgtgatctcctggctccttacagctcttaggaagggaacagtagtctttccctgcacattgttctgtgcagttagtagcgacatacactgacgccccaggccaaagttcctactgtgtcctacttgaaggatgattttgttttcttgagacagggtctggctctgttgcgtgggctggaattcagtggcacaatctcagctcactgtaaatttcgcctcgtgggcggatctgtccaaaggatcctcccacctgcatctactgagtagctgggacaacagtgtgtgccacaccgggctttttttttttgtagcggggagtttcaccatgttgcccaggttggtcccaaactcctggcctcaggcgttccaccagcctcagtctcccaaagcccaaagtgctaggattacaggcatgagccaccgcgcccagccttaaaagattttttcagactttttttcagtgtctttttacttaatgaaaacgagacagttgcagttaccctgtctaaaagggttttttcctctagagaagacggtgggctagatgtcagaacctggatttgtcctgtgcctctgacatcttgcgcacagctcagcctgtttccctttctggaaagtgagttaagaccacgtcaggaaattcgaggaactggcagatggggccacttcatgttcacatccatctgttaggtactggggagtcatttggggagcagcaggatctgttgctgattggttaggccattggtctagggagtcctgggggcccttcccatccagctccaggcaatgacgctttctcttcctccccacagaggatgtcacccccatcccctctgacagcactcgcaggaaggggggtcgccgtggtcgccgtctgtgaacaagattcctcaaaatattttctgttaataaattgccttcatgtaaactgtttcaactccagccttctctccttcatcaggggctactcaggcatttgatttcttcctcctatttggcttcttgggagaaaggagcctgaggagagctgagatcctggtgctgcatttggggtcttttccatgctacttgcggcattaagttgccttggtcatctaaagcagaccaaggcgttggagacctcgttttgagtggagatgctggttctaaatatggaccaattcttaaagagccagagtgggaactgttgatccaagtgtagcctgaagcgaaagaggagccttccagacccatgccatatataaacacacgtgggtgtgcattctccccccacaccttctgtgcaaagctgggagctcactccactgcgtcttgctttttttcacttggcagatcttggagattgttccacatcagtacataaagtacataaagattgtcaccccacaaatacacaccaagtcctattttcatcagcgataaaaaagaaaagttcttgctttccggaagcttgcatgcggctctgagtacccagtgacaccagatggtactcagcgttttgcaagggattaccacaaggccccgtgatggtgcctgccatggttaggacaggctggtggctgggtagggttagtgagacccagtggagaggatgctgtgtgtcacaggctggagaggtgagaccattgaggtagtcagttgtagaggaaagaaaccagcaagaggggaaaatctgttgggatgctgcttttagcctttgatggcgtgttccaggcagagggaataagcaaataaatgggtcctgagacaaggggttactgtgatgaggcggcgttggttacatgccaaaccttgctagggattttaataacaacattgaatcttaacctgatgaaataacagtactcctggggaggcgggagggatagcattaggagatatacctaatgctaaatgacgagttaatgggtgcagcacaccaacatggcacatgtatacatatgtaacaaacctgcacgttgtgcacatgtaccctaaaacttaaagtataataaaaaaaaaaagcttgcaaaaaaaatataacagtactccttaaattgttaaaagtcatgaaagtcaaggacaggagattaaggaggcgtgaaaactaaatgcccattgtggtatcctggattggattctggaaccagaatagggtattagtataaaaactagtgaaataggataaaggcagggcacagtggttcacgcctataatcccaacactttgggaagccgagacaggaggacggattgagcccaggagtttgagaccagcctgggcaacacagggagaccccgtctctacaaaaaataaaaaattagctgggcatggtggcacacgtctgtactgccagctacttgggaggctgaggtgggagaattgcctgagcctgggaagtggaggccgcagtgagctgtgattgcatcactacattcagcctgggtcacagagcaagatcctatctcaaaaactaaataagtaaataataaattaaaaaatatgaataaagtctggagttaaagtctggaataaagctagtagtaatgtaccagtggtttcctacttttggcaaatgtatcatggcgatgtaagatggtaacaggtgaaaccgggtgagtggcacacagaaactgtatctttgcaactttttggtaaacttaaaattattccaaagtcaaa

SEQ ID NO: 786 - DNA, 4127 bp, Homo sapiens
aaggcaatggctgggacgggctagcagttcaggggattctctctaaagaaatgctgttttgtccaggtaagaaaatgtgcttgtccatttagcccacaaatattgtgatttcccaggggttacaagagaggagacacattcttcgtccttacagcgtgatggtcattgaatccttggtttcttgggaattatcttctttccctagttccctttgcaggagcagcagtggactgcaagtgggctctgggtgcgggttcgacggccatttagcaagttgtgacttgtgtgaaatcactcagattctgagttttggtttcctcatatgtaaaattaggacagtaatgtctaccttgtggagtaatggtaaggattaaatgcaaaagtagatatataaaatgttaatactgagtatagctatattgggccattcaaccccactggactgaactccatgagggcagagcccatgaccatcatcctccaccatgactgagctgtgttgctcttcactcattaggatatcgtaagcactccttgttggacgaggaagaaatgaccctgtgcttttgtccccagggaaaccatctgccgtgtgactggtgggatgaaggtaaaggcagaccgagatgaatcctcaccatatgctgctatgttggctgcccaggatgtggcccagaggtgcaaggagctgggtatcaccgccctacacatcaaactccgggccacaggaggaaataggtacgagtcgcagaggggatggctgggtggtagaaaacctgctgggcttgggtgctggagcacctggatttgaggtttgggttttttgttgtgaccttgaacaagatattttaggcatatacatacttaataattggctcctgtgtacaccccccagcagctcagtgttgagcacccactgtatactaggagctgtgtttcaggtactagaagagagtgatggggaaacagacatggtctctaccctccttgtgtgggaccgaggctggtgggagagtcagactttaaacaacagagcaccagggagtatgtggttttcatttgtgacaaatgccaggaagcacaagtaaggagttggtgataaagtgtaatttaaactagggtctaaatgataagtccggagtccttccagtgaaataaggacaggaggagggtattccagctagagacaactgcagggaaaggtcttgaggtgggggtgaacctgggcacctgtgaaggaaagagtggcatgaggtgcagtcagaggggaagaggtggagtcctgtaggagaggggaaggacctggatttgagtgatgggggcatgaaagctgaaatagatgactgttgcgtgaacaagccagacagtggtcagaacataacaacaaaccatagtggccccctcagcctaaaatatttactgtctggcttttttttttttcctcttttttgagacagggtctcactctcacccaggctggagtgcagtggcgctatctcagcttactgcagtctctggctttcaggctctagcagtcctcccacctcagcctcccgagtagctgggactgctagtagtagtgccaccacgcctggctaaattgtgtatttttgtagagatggggtttcaccatgttgctcaggctggtcttgaactcctgagctgaagcagtccgccctgccttagcctcccaaggtgctgagattatgggtgtgaaccactgtgtacagccctgtctggctctttacagaaagtttgcagacctctgaactagcggggtgttgggatcttagaaaggagatcttccattgacttggccaaaggctcttcttaacttaaaccttcattttctaggaccaagacccctggacctggggcccagtcggccctcagagcccttgcccgctcgggtatgaagatcgggcggattggtaagtgcccccctctagctaatgcttgggtttattttgaagcattggccccaaaaagcacgtgctgtgcccagtggatgtgcagcggctggtctggtcacttttggcagttaagtttgttaagggaggctgcaagaggcaccttgtgacttaaaaatctctccctgaatatctctgtcaccttgatatgaatgtcctgtttcatttgtgaatctctgtcctacactgcctggtgcaggtaaaactgacaagagatgaattgtcctttcctccattcttgaggtcattgctattagcattttgtgtgtaccatctcctgcattgtaggatgttcagcatttttggtttccgcctactaaatatcagttgggcatgccagtcgtgtgacagccaaaaatgaagtggggggtaccagcttctgttattaataccctcaggcctgtgatctcctggctccttacagctcttaggaagggaacagtagtctttccctgcacattgttctgtgcagttagtagcgacatacactgacgccccaggccaaagttcctactgtgtcctacttgaaggatgattttgttttcttgagacagggtctggctctgttgcgtgggctggaattcagtggcacaatctcagctcactgtaaatttcgcctcgtgggcggatctgtccaaaggatcctcccacctgcatctactgagtagctgggacaacagtgtgtgccacaccgggctttttttttttgtagcggggagtttcaccatgttgcccaggttggtcccaaactcctggcctcaggcgttccaccagcctcagtctcccaaagcccaaagtgctaggattacaggcatgagccaccgcgcccagccttaaaagattttttcagactttttttcagtgtctttttacttaatgaaaacgagacagttgcagttaccctgtctaaaagggttttttcctctagagaagacggtgggctagatgtcagaacctggatttgtcctgtgcctctgacatcttgcgcacagctcagcctgtttccctttctggaaagtgagttaagaccacgtcaggaaattcgaggaactggcagatggggccacttcatgttcacatccatctgttaggtactggggagtcatttggggagcagcaggatctgttgctgattggttaggccattggtctagggagtcctgggggcccttcccatccagctccaggcaatgacgctttctcttcctccccacagaggatgtcacccccatcccctctgacagcactcgcaggaaggggggtcgccgtggtcgccgtctgtgaacaagattcctcaaaatattttctgttaataaattgccttcatgtaaactgtttcaactccagccttctctccttcatcaggggctactcaggcatttgatttcttcctcctatttggcttcttgggagaaaggagcctgaggagagctgagatcctggtgctgcatttggggtcttttccatgctacttgcggcattaagttgccttggtcatctaaagcagaccaaggcgttggagacctcgttttgagtggagatgctggttctaaatatggaccaattcttaaagagccagagtgggaactgttgatccaagtgtagcctgaagcgaaagaggagccttccagacccatgccatatataaacacacgtgggtgtgcattctccccccacaccttctgtgcaaagctgggagctcactccactgcgtcttgctttttttcacttggcagatcttggagattgttccacatcagtacataaagtacataaagattgtcaccccacaaatacacaccaagtcctattttcatcagcgataaaaaagaaaagttcttgctttccggaagcttgcatgcggctctgagtacccagtgacaccagatggtactcagcgttttgcaagggattaccacaaggccccgtgatggtgcctgccatggttaggacaggctggtggctgggtagggttagtgagacccagtggagaggatgctgtgtgtcacaggctggagaggtgagaccattgaggtagtcagttgtagaggaaagaaaccagcaagaggggaaaatctgttgggatgctgcttttagcctttgatggcgtgttccaggcagagggaataagcaaataaatgggtcctgagacaaggg

SEQ ID NO: 787 - DNA, 4041 bp, Homo sapiens
cagcctcggacctcaggtggctgaaggagagaatgtatttggtgtctgccatatctttgcatccttcaatgacacttttgtccatgtcactgatctttctggcaagtgagtacctgggtggagaggcatccagctggcaaaaggctgaggaaggcaatggctgggacgggctagcagttcaggggattctctctaaagaaatgctgttttgtccaggtaagaaaatgtgcttgtccatttagcccacaaatattgtgatttcccaggggttacaagagaggagacacattcttcgtccttacagcgtgatggtcattgaatccttggtttcttgggaattatcttctttccctagttccctttgcaggagcagcagtggactgcaagtgggctctgggtgcgggttcgacggccatttagcaagttgtgacttgtgtgaaatcactcagattctgagttttggtttcctcatatgtaaaattaggacagtaatgtctaccttgtggagtaatggtaaggattaaatgcaaaagtagatatataaaatgttaatactgagtatagctatattgggccattcaaccccactggactgaactccatgagggcagagcccatgaccatcatcctccaccatgactgagctgtgttgctcttcactcattaggatatcgtaagcactccttgttggacgaggaagaaatgaccctgtgcttttgtccccagggaaaccatctgccgtgtgactggtgggatgaaggtaaaggcagaccgagatgaatcctcaccatatgctgctatgttggctgcccaggatgtggcccagaggtgcaaggagctgggtatcaccgccctacacatcaaactccgggccacaggaggaaataggtacgagtcgcagaggggatggctgggtggtagaaaacctgctgggcttgggtgctggagcacctggatttgaggtttgggttttttgttgtgaccttgaacaagatattttaggcatatacatacttaataattggctcctgtgtacaccccccagcagctcagtgttgagcacccactgtatactaggagctgtgtttcaggtactagaagagagtgatggggaaacagacatggtctctaccctccttgtgtgggaccgaggctggtgggagagtcagactttaaacaacagagcaccagggagtatgtggttttcatttgtgacaaatgccaggaagcacaagtaaggagttggtgataaagtgtaatttaaactagggtctaaatgataagtccggagtccttccagtgaaataaggacaggaggagggtattccagctagagacaactgcagggaaaggtcttgaggtgggggtgaacctgggcacctgtgaaggaaagagtggcatgaggtgcagtcagaggggaagaggtggagtcctgtaggagaggggaaggacctggatttgagtgatgggggcatgaaagctgaaatagatgactgttgcgtgaacaagccagacagtggtcagaacataacaacaaaccatagtggccccctcagcctaaaatatttactgtctggcttttttttttttcctcttttttgagacagggtctcactctcacccaggctggagtgcagtggcgctatctcagcttactgcagtctctggctttcaggctctagcagtcctcccacctcagcctcccgagtagctgggactgctagtagtagtgccaccacgcctggctaaattgtgtatttttgtagagatggggtttcaccatgttgctcaggctggtcttgaactcctgagctgaagcagtccgccctgccttagcctcccaaggtgctgagattatgggtgtgaaccactgtgtacagccctgtctggctctttacagaaagtttgcagacctctgaactagcggggtgttgggatcttagaaaggagatcttccattgacttggccaaaggctcttcttaacttaaaccttcattttctaggaccaagacccctggacctggggcccagtcggccctcagagcccttgcccgctcgggtatgaagatcgggcggattggtaagtgcccccctctagctaatgcttgggtttattttgaagcattggccccaaaaagcacgtgctgtgcccagtggatgtgcagcggctggtctggtcacttttggcagttaagtttgttaagggaggctgcaagaggcaccttgtgacttaaaaatctctccctgaatatctctgtcaccttgatatgaatgtcctgtttcatttgtgaatctctgtcctacactgcctggtgcaggtaaaactgacaagagatgaattgtcctttcctccattcttgaggtcattgctattagcattttgtgtgtaccatctcctgcattgtaggatgttcagcatttttggtttccgcctactaaatatcagttgggcatgccagtcgtgtgacagccaaaaatgaagtggggggtaccagcttctgttattaataccctcaggcctgtgatctcctggctccttacagctcttaggaagggaacagtagtctttccctgcacattgttctgtgcagttagtagcgacatacactgacgccccaggccaaagttcctactgtgtcctacttgaaggatgattttgttttcttgagacagggtctggctctgttgcgtgggctggaattcagtggcacaatctcagctcactgtaaatttcgcctcgtgggcggatctgtccaaaggatcctcccacctgcatctactgagtagctgggacaacagtgtgtgccacaccgggctttttttttttgtagcggggagtttcaccatgttgcccaggttggtcccaaactcctggcctcaggcgttccaccagcctcagtctcccaaagcccaaagtgctaggattacaggcatgagccaccgcgcccagccttaaaagattttttcagactttttttcagtgtctttttacttaatgaaaacgagacagttgcagttaccctgtctaaaagggttttttcctctagagaagacggtgggctagatgtcagaacctggatttgtcctgtgcctctgacatcttgcgcacagctcagcctgtttccctttctggaaagtgagttaagaccacgtcaggaaattcgaggaactggcagatggggccacttcatgttcacatccatctgttaggtactggggagtcatttggggagcagcaggatctgttgctgattggttaggccattggtctagggagtcctgggggcccttcccatccagctccaggcaatgacgctttctcttcctccccacagaggatgtcacccccatcccctctgacagcactcgcaggaaggggggtcgccgtggtcgccgtctgtgaacaagattcctcaaaatattttctgttaataaattgccttcatgtaaactgtttcaactccagccttctctccttcatcaggggctactcaggcatttgatttcttcctcctatttggcttcttgggagaaaggagcctgaggagagctgagatcctggtgctgcatttggggtcttttccatgctacttgcggcattaagttgccttggtcatctaaagcagaccaaggcgttggagacctcgttttgagtggagatgctggttctaaatatggaccaattcttaaagagccagagtgggaactgttgatccaagtgtagcctgaagcgaaagaggagccttccagacccatgccatatataaacacacgtgggtgtgcattctccccccacaccttctgtgcaaagctgggagctcactccactgcgtcttgctttttttcacttggcagatcttggagattgttccacatcagtacataaagtacataaagattgtcaccccacaaatacacaccaagtcctattttcatcagcgataaaaaagaaaagttcttgctttccggaagcttgcatgcggctctgagtacccagtgacaccagatggtactcagcgttttgcaagggattaccacaa

SEQ ID NO: 788 - DNA, 4044 bp, Homo sapiens
agaaggcctggggctttaggccggaagcagtcttatcctagccttccactttctcattcattctcacccgccttcctcctgtcagtttctctctcccttagatcttgtgacagtatgattgcaattattatgaaggtcataataggttagagttatttagtctcaggacccatcagatttctgagatgggtcttttccattagcctgccttttggatatattttagtgcctttgatatttgatgttggtgacaaagatttagttctaaatagttgtgggagtcaaatcagttgcatttttgaacattttgaagggatcaggtggagcacaggaaaacaggagatgagaggcttgagggctgtgttggtaagggtcccttgaattctaagctgaggagttcatgcaggaatcaagcagctccctcgccccatgaagggtgttaggaatggtaccagtacatgggtagctgttggtcttgggtttcttcttgccttttggggtgcagccttcaggcatctgctgctagatccctaggcttctatcttgtaggtgctgtgagctgagctgttggtagtttctggggaaaggatacttctcatggtactttgccatgtggccacagttgatacccccccaagtgcaaggagaaagaagttttagtgaggcagaaatgagagaatacagtagagtattggatggaagaagacagggacatgaagcaggactagggtttcatttaatagccaggggaaagggattctggaaatgttttgtctgttaaccttgagtttcttttccttccactcagaaatggcacctcgaaaggggaaggaaaagaaggaagaacaggtcatcagcctcggacctcaggtggctgaaggagagaatgtatttggtgtctgccatatctttgcatccttcaatgacacttttgtccatgtcactgatctttctggcaagtgagtacctgggtggagaggcatccagctggcaaaaggctgaggaaggcaatggctgggacgggctagcagttcaggggattctctctaaagaaatgctgttttgtccaggtaagaaaatgtgcttgtccatttagcccacaaatattgtgatttcccaggggttacaagagaggagacacattcttcgtccttacagcgtgatggtcattgaatccttggtttcttgggaattatcttctttccctagttccctttgcaggagcagcagtggactgcaagtgggctctgggtgcgggttcgacggccatttagcaagttgtgacttgtgtgaaatcactcagattctgagttttggtttcctcatatgtaaaattaggacagtaatgtctaccttgtggagtaatggtaaggattaaatgcaaaagtagatatataaaatgttaatactgagtatagctatattgggccattcaaccccactggactgaactccatgagggcagagcccatgaccatcatcctccaccatgactgagctgtgttgctcttcactcattaggatatcgtaagcactccttgttggacgaggaagaaatgaccctgtgcttttgtccccagggaaaccatctgccgtgtgactggtgggatgaaggtaaaggcagaccgagatgaatcctcaccatatgctgctatgttggctgcccaggatgtggcccagaggtgcaaggagctgggtatcaccgccctacacatcaaactccgggccacaggaggaaataggtacgagtcgcagaggggatggctgggtggtagaaaacctgctgggcttgggtgctggagcacctggatttgaggtttgggttttttgttgtgaccttgaacaagatattttaggcatatacatacttaataattggctcctgtgtacaccccccagcagctcagtgttgagcacccactgtatactaggagctgtgtttcaggtactagaagagagtgatggggaaacagacatggtctctaccctccttgtgtgggaccgaggctggtgggagagtcagactttaaacaacagagcaccagggagtatgtggttttcatttgtgacaaatgccaggaagcacaagtaaggagttggtgataaagtgtaatttaaactagggtctaaatgataagtccggagtccttccagtgaaataaggacaggaggagggtattccagctagagacaactgcagggaaaggtcttgaggtgggggtgaacctgggcacctgtgaaggaaagagtggcatgaggtgcagtcagaggggaagaggtggagtcctgtaggagaggggaaggacctggatttgagtgatgggggcatgaaagctgaaatagatgactgttgcgtgaacaagccagacagtggtcagaacataacaacaaaccatagtggccccctcagcctaaaatatttactgtctggcttttttttttttcctcttttttgagacagggtctcactctcacccaggctggagtgcagtggcgctatctcagcttactgcagtctctggctttcaggctctagcagtcctcccacctcagcctcccgagtagctgggactgctagtagtagtgccaccacgcctggctaaattgtgtatttttgtagagatggggtttcaccatgttgctcaggctggtcttgaactcctgagctgaagcagtccgccctgccttagcctcccaaggtgctgagattatgggtgtgaaccactgtgtacagccctgtctggctctttacagaaagtttgcagacctctgaactagcggggtgttgggatcttagaaaggagatcttccattgacttggccaaaggctcttcttaacttaaaccttcattttctaggaccaagacccctggacctggggcccagtcggccctcagagcccttgcccgctcgggtatgaagatcgggcggattggtaagtgcccccctctagctaatgcttgggtttattttgaagcattggccccaaaaagcacgtgctgtgcccagtggatgtgcagcggctggtctggtcacttttggcagttaagtttgttaagggaggctgcaagaggcaccttgtgacttaaaaatctctccctgaatatctctgtcaccttgatatgaatgtcctgtttcatttgtgaatctctgtcctacactgcctggtgcaggtaaaactgacaagagatgaattgtcctttcctccattcttgaggtcattgctattagcattttgtgtgtaccatctcctgcattgtaggatgttcagcatttttggtttccgcctactaaatatcagttgggcatgccagtcgtgtgacagccaaaaatgaagtggggggtaccagcttctgttattaataccctcaggcctgtgatctcctggctccttacagctcttaggaagggaacagtagtctttccctgcacattgttctgtgcagttagtagcgacatacactgacgccccaggccaaagttcctactgtgtcctacttgaaggatgattttgttttcttgagacagggtctggctctgttgcgtgggctggaattcagtggcacaatctcagctcactgtaaatttcgcctcgtgggcggatctgtccaaaggatcctcccacctgcatctactgagtagctgggacaacagtgtgtgccacaccgggctttttttttttgtagcggggagtttcaccatgttgcccaggttggtcccaaactcctggcctcaggcgttccaccagcctcagtctcccaaagcccaaagtgctaggattacaggcatgagccaccgcgcccagccttaaaagattttttcagactttttttcagtgtctttttacttaatgaaaacgagacagttgcagttaccctgtctaaaagggttttttcctctagagaagacggtgggctagatgtcagaacctggatttgtcctgtgcctctgacatcttgcgcacagctcagcctgtttccctttctggaaagtgagttaagaccacgtcaggaaattcgaggaactggcagatggggccacttc

SEQ ID NO: 789 - DNA, 4047 bp, Homo sapiens
taacgcactgggtcgtgctcattggtctgatttgaagataggaacatttaacttcgtacacccaagacttacacttgaagtacttactgtggtcacacacttaactaaagtttatatagggaaggcagaggagagatctaggaacacctgagacagactagggtagttatttgtggtgtagaggcatcttggcaggaggcagagagtgctgggctgggagtcaggacacgttgtttctatgtttggttttgccactgtctttactgtgaccataggctgagacactctctatcttcaccatctgcaggatatcgattagtgttagtgtcttctgaaaatgttaaattgttctgaacaccaggaggttcagaaggcctggggctttaggccggaagcagtcttatcctagccttccactttctcattcattctcacccgccttcctcctgtcagtttctctctcccttagatcttgtgacagtatgattgcaattattatgaaggtcataataggttagagttatttagtctcaggacccatcagatttctgagatgggtcttttccattagcctgccttttggatatattttagtgcctttgatatttgatgttggtgacaaagatttagttctaaatagttgtgggagtcaaatcagttgcatttttgaacattttgaagggatcaggtggagcacaggaaaacaggagatgagaggcttgagggctgtgttggtaagggtcccttgaattctaagctgaggagttcatgcaggaatcaagcagctccctcgccccatgaagggtgttaggaatggtaccagtacatgggtagctgttggtcttgggtttcttcttgccttttggggtgcagccttcaggcatctgctgctagatccctaggcttctatcttgtaggtgctgtgagctgagctgttggtagtttctggggaaaggatacttctcatggtactttgccatgtggccacagttgatacccccccaagtgcaaggagaaagaagttttagtgaggcagaaatgagagaatacagtagagtattggatggaagaagacagggacatgaagcaggactagggtttcatttaatagccaggggaaagggattctggaaatgttttgtctgttaaccttgagtttcttttccttccactcagaaatggcacctcgaaaggggaaggaaaagaaggaagaacaggtcatcagcctcggacctcaggtggctgaaggagagaatgtatttggtgtctgccatatctttgcatccttcaatgacacttttgtccatgtcactgatctttctggcaagtgagtacctgggtggagaggcatccagctggcaaaaggctgaggaaggcaatggctgggacgggctagcagttcaggggattctctctaaagaaatgctgttttgtccaggtaagaaaatgtgcttgtccatttagcccacaaatattgtgatttcccaggggttacaagagaggagacacattcttcgtccttacagcgtgatggtcattgaatccttggtttcttgggaattatcttctttccctagttccctttgcaggagcagcagtggactgcaagtgggctctgggtgcgggttcgacggccatttagcaagttgtgacttgtgtgaaatcactcagattctgagttttggtttcctcatatgtaaaattaggacagtaatgtctaccttgtggagtaatggtaaggattaaatgcaaaagtagatatataaaatgttaatactgagtatagctatattgggccattcaaccccactggactgaactccatgagggcagagcccatgaccatcatcctccaccatgactgagctgtgttgctcttcactcattaggatatcgtaagcactccttgttggacgaggaagaaatgaccctgtgcttttgtccccagggaaaccatctgccgtgtgactggtgggatgaaggtaaaggcagaccgagatgaatcctcaccatatgctgctatgttggctgcccaggatgtggcccagaggtgcaaggagctgggtatcaccgccctacacatcaaactccgggccacaggaggaaataggtacgagtcgcagaggggatggctgggtggtagaaaacctgctgggcttgggtgctggagcacctggatttgaggtttgggttttttgttgtgaccttgaacaagatattttaggcatatacatacttaataattggctcctgtgtacaccccccagcagctcagtgttgagcacccactgtatactaggagctgtgtttcaggtactagaagagagtgatggggaaacagacatggtctctaccctccttgtgtgggaccgaggctggtgggagagtcagactttaaacaacagagcaccagggagtatgtggttttcatttgtgacaaatgccaggaagcacaagtaaggagttggtgataaagtgtaatttaaactagggtctaaatgataagtccggagtccttccagtgaaataaggacaggaggagggtattccagctagagacaactgcagggaaaggtcttgaggtgggggtgaacctgggcacctgtgaaggaaagagtggcatgaggtgcagtcagaggggaagaggtggagtcctgtaggagaggggaaggacctggatttgagtgatgggggcatgaaagctgaaatagatgactgttgcgtgaacaagccagacagtggtcagaacataacaacaaaccatagtggccccctcagcctaaaatatttactgtctggcttttttttttttcctcttttttgagacagggtctcactctcacccaggctggagtgcagtggcgctatctcagcttactgcagtctctggctttcaggctctagcagtcctcccacctcagcctcccgagtagctgggactgctagtagtagtgccaccacgcctggctaaattgtgtatttttgtagagatggggtttcaccatgttgctcaggctggtcttgaactcctgagctgaagcagtccgccctgccttagcctcccaaggtgctgagattatgggtgtgaaccactgtgtacagccctgtctggctctttacagaaagtttgcagacctctgaactagcggggtgttgggatcttagaaaggagatcttccattgacttggccaaaggctcttcttaacttaaaccttcattttctaggaccaagacccctggacctggggcccagtcggccctcagagcccttgcccgctcgggtatgaagatcgggcggattggtaagtgcccccctctagctaatgcttgggtttattttgaagcattggccccaaaaagcacgtgctgtgcccagtggatgtgcagcggctggtctggtcacttttggcagttaagtttgttaagggaggctgcaagaggcaccttgtgacttaaaaatctctccctgaatatctctgtcaccttgatatgaatgtcctgtttcatttgtgaatctctgtcctacactgcctggtgcaggtaaaactgacaagagatgaattgtcctttcctccattcttgaggtcattgctattagcattttgtgtgtaccatctcctgcattgtaggatgttcagcatttttggtttccgcctactaaatatcagttgggcatgccagtcgtgtgacagccaaaaatgaagtggggggtaccagcttctgttattaataccctcaggcctgtgatctcctggctccttacagctcttaggaagggaacagtagtctttccctgcacattgttctgtgcagttagtagcgacatacactgacgccccaggccaaagttcctactgtgtcctacttgaaggatgattttgttttcttgagacagggtctggctctgttgcgtgggctggaattcagtggcacaatctcagctcactgtaaatttcgcctcgtgggcggatctgtccaaaggatcctcccacctgcatctactgagtagctgggacaacagtgtgtgccacaccgggctttttttt

SEQ ID NO: 790 - DNA, 4045 bp, Homo sapiens
cttgggacgagagacgggggtctttccgtgggaaccgagctaggtgccgggcaagagacgcgcggctggcccacctggatcctggccaactcgggattgagttcgttcctggtctcagaaggcccgttttgctttcagggaggagcttgtgaagtaagggtgagtgcgggtccagccttttaaggcctcggccccgcaatacggccacggccacggccgcgtttgagctgcacagcgtagttgagggaacccgggacagacgtgggctcccgcctctacctcgccaaacttttttcttggtgatcgcaggcccacgcctaatctcgtttgtttcctcgtttgcaaaataggaataacaatagcaccgatcccatgggtttgtagtgatcattcaaagaaggaaagcagggaaaactctcgcactatgttggatgcttctaaatctgggcgattctttccgttgctgagtcgggcacgttgcaagttctgggcgctcagggcccagcaccaatgtttgctgtgcgcttgccctgcgtttatatactcctgatgaccactctgctcgttactttaggggatgttaggaacggagaaactgcaaattggcatttactgaatggccatcatgccgaaacatactcatgcttacgtatttgagatatgctggagcctttctatgcttctcgaggcagaactttgggcttctctcctgtggcgcgttccttacaatagttaacgcactgggtcgtgctcattggtctgatttgaagataggaacatttaacttcgtacacccaagacttacacttgaagtacttactgtggtcacacacttaactaaagtttatatagggaaggcagaggagagatctaggaacacctgagacagactagggtagttatttgtggtgtagaggcatcttggcaggaggcagagagtgctgggctgggagtcaggacacgttgtttctatgtttggttttgccactgtctttactgtgaccataggctgagacactctctatcttcaccatctgcaggatatcgattagtgttagtgtcttctgaaaatgttaaattgttctgaacaccaggaggttcagaaggcctggggctttaggccggaagcagtcttatcctagccttccactttctcattcattctcacccgccttcctcctgtcagtttctctctcccttagatcttgtgacagtatgattgcaattattatgaaggtcataataggttagagttatttagtctcaggacccatcagatttctgagatgggtcttttccattagcctgccttttggatatattttagtgcctttgatatttgatgttggtgacaaagatttagttctaaatagttgtgggagtcaaatcagttgcatttttgaacattttgaagggatcaggtggagcacaggaaaacaggagatgagaggcttgagggctgtgttggtaagggtcccttgaattctaagctgaggagttcatgcaggaatcaagcagctccctcgccccatgaagggtgttaggaatggtaccagtacatgggtagctgttggtcttgggtttcttcttgccttttggggtgcagccttcaggcatctgctgctagatccctaggcttctatcttgtaggtgctgtgagctgagctgttggtagtttctggggaaaggatacttctcatggtactttgccatgtggccacagttgatacccccccaagtgcaaggagaaagaagttttagtgaggcagaaatgagagaatacagtagagtattggatggaagaagacagggacatgaagcaggactagggtttcatttaatagccaggggaaagggattctggaaatgttttgtctgttaaccttgagtttcttttccttccactcagaaatggcacctcgaaaggggaaggaaaagaaggaagaacaggtcatcagcctcggacctcaggtggctgaaggagagaatgtatttggtgtctgccatatctttgcatccttcaatgacacttttgtccatgtcactgatctttctggcaagtgagtacctgggtggagaggcatccagctggcaaaaggctgaggaaggcaatggctgggacgggctagcagttcaggggattctctctaaagaaatgctgttttgtccaggtaagaaaatgtgcttgtccatttagcccacaaatattgtgatttcccaggggttacaagagaggagacacattcttcgtccttacagcgtgatggtcattgaatccttggtttcttgggaattatcttctttccctagttccctttgcaggagcagcagtggactgcaagtgggctctgggtgcgggttcgacggccatttagcaagttgtgacttgtgtgaaatcactcagattctgagttttggtttcctcatatgtaaaattaggacagtaatgtctaccttgtggagtaatggtaaggattaaatgcaaaagtagatatataaaatgttaatactgagtatagctatattgggccattcaaccccactggactgaactccatgagggcagagcccatgaccatcatcctccaccatgactgagctgtgttgctcttcactcattaggatatcgtaagcactccttgttggacgaggaagaaatgaccctgtgcttttgtccccagggaaaccatctgccgtgtgactggtgggatgaaggtaaaggcagaccgagatgaatcctcaccatatgctgctatgttggctgcccaggatgtggcccagaggtgcaaggagctgggtatcaccgccctacacatcaaactccgggccacaggaggaaataggtacgagtcgcagaggggatggctgggtggtagaaaacctgctgggcttgggtgctggagcacctggatttgaggtttgggttttttgttgtgaccttgaacaagatattttaggcatatacatacttaataattggctcctgtgtacaccccccagcagctcagtgttgagcacccactgtatactaggagctgtgtttcaggtactagaagagagtgatggggaaacagacatggtctctaccctccttgtgtgggaccgaggctggtgggagagtcagactttaaacaacagagcaccagggagtatgtggttttcatttgtgacaaatgccaggaagcacaagtaaggagttggtgataaagtgtaatttaaactagggtctaaatgataagtccggagtccttccagtgaaataaggacaggaggagggtattccagctagagacaactgcagggaaaggtcttgaggtgggggtgaacctgggcacctgtgaaggaaagagtggcatgaggtgcagtcagaggggaagaggtggagtcctgtaggagaggggaaggacctggatttgagtgatgggggcatgaaagctgaaatagatgactgttgcgtgaacaagccagacagtggtcagaacataacaacaaaccatagtggccccctcagcctaaaatatttactgtctggcttttttttttttcctcttttttgagacagggtctcactctcacccaggctggagtgcagtggcgctatctcagcttactgcagtctctggctttcaggctctagcagtcctcccacctcagcctcccgagtagctgggactgctagtagtagtgccaccacgcctggctaaattgtgtatttttgtagagatggggtttcaccatgttgctcaggctggtcttgaactcctgagctgaagcagtccgccctgccttagcctcccaaggtgctgagattatgggtgtgaaccactgtgtacagccctgtctggctctttacagaaagtttgcagacctctgaactagcggggtgttgggatcttagaaaggagatcttccattgacttggccaaaggctcttcttaacttaaaccttcattttctaggaccaagacccctggacctggggcccagtcggccctcagagcccttgcccgctcgggtatgaagatcgggcggattggtaagtgcc

SEQ ID NO: 791 - DNA, 4060 bp, Homo sapiens
tggagtctggagacgacgtgcaggtaggaggcccgggcgcgacaatcggggggcatcctgcggcgaggggaccctgtggggcttgggacgagagacgggggtctttccgtgggaaccgagctaggtgccgggcaagagacgcgcggctggcccacctggatcctggccaactcgggattgagttcgttcctggtctcagaaggcccgttttgctttcagggaggagcttgtgaagtaagggtgagtgcgggtccagccttttaaggcctcggccccgcaatacggccacggccacggccgcgtttgagctgcacagcgtagttgagggaacccgggacagacgtgggctcccgcctctacctcgccaaacttttttcttggtgatcgcaggcccacgcctaatctcgtttgtttcctcgtttgcaaaataggaataacaatagcaccgatcccatgggtttgtagtgatcattcaaagaaggaaagcagggaaaactctcgcactatgttggatgcttctaaatctgggcgattctttccgttgctgagtcgggcacgttgcaagttctgggcgctcagggcccagcaccaatgtttgctgtgcgcttgccctgcgtttatatactcctgatgaccactctgctcgttactttaggggatgttaggaacggagaaactgcaaattggcatttactgaatggccatcatgccgaaacatactcatgcttacgtatttgagatatgctggagcctttctatgcttctcgaggcagaactttgggcttctctcctgtggcgcgttccttacaatagttaacgcactgggtcgtgctcattggtctgatttgaagataggaacatttaacttcgtacacccaagacttacacttgaagtacttactgtggtcacacacttaactaaagtttatatagggaaggcagaggagagatctaggaacacctgagacagactagggtagttatttgtggtgtagaggcatcttggcaggaggcagagagtgctgggctgggagtcaggacacgttgtttctatgtttggttttgccactgtctttactgtgaccataggctgagacactctctatcttcaccatctgcaggatatcgattagtgttagtgtcttctgaaaatgttaaattgttctgaacaccaggaggttcagaaggcctggggctttaggccggaagcagtcttatcctagccttccactttctcattcattctcacccgccttcctcctgtcagtttctctctcccttagatcttgtgacagtatgattgcaattattatgaaggtcataataggttagagttatttagtctcaggacccatcagatttctgagatgggtcttttccattagcctgccttttggatatattttagtgcctttgatatttgatgttggtgacaaagatttagttctaaatagttgtgggagtcaaatcagttgcatttttgaacattttgaagggatcaggtggagcacaggaaaacaggagatgagaggcttgagggctgtgttggtaagggtcccttgaattctaagctgaggagttcatgcaggaatcaagcagctccctcgccccatgaagggtgttaggaatggtaccagtacatgggtagctgttggtcttgggtttcttcttgccttttggggtgcagccttcaggcatctgctgctagatccctaggcttctatcttgtaggtgctgtgagctgagctgttggtagtttctggggaaaggatacttctcatggtactttgccatgtggccacagttgatacccccccaagtgcaaggagaaagaagttttagtgaggcagaaatgagagaatacagtagagtattggatggaagaagacagggacatgaagcaggactagggtttcatttaatagccaggggaaagggattctggaaatgttttgtctgttaaccttgagtttcttttccttccactcagaaatggcacctcgaaaggggaaggaaaagaaggaagaacaggtcatcagcctcggacctcaggtggctgaaggagagaatgtatttggtgtctgccatatctttgcatccttcaatgacacttttgtccatgtcactgatctttctggcaagtgagtacctgggtggagaggcatccagctggcaaaaggctgaggaaggcaatggctgggacgggctagcagttcaggggattctctctaaagaaatgctgttttgtccaggtaagaaaatgtgcttgtccatttagcccacaaatattgtgatttcccaggggttacaagagaggagacacattcttcgtccttacagcgtgatggtcattgaatccttggtttcttgggaattatcttctttccctagttccctttgcaggagcagcagtggactgcaagtgggctctgggtgcgggttcgacggccatttagcaagttgtgacttgtgtgaaatcactcagattctgagttttggtttcctcatatgtaaaattaggacagtaatgtctaccttgtggagtaatggtaaggattaaatgcaaaagtagatatataaaatgttaatactgagtatagctatattgggccattcaaccccactggactgaactccatgagggcagagcccatgaccatcatcctccaccatgactgagctgtgttgctcttcactcattaggatatcgtaagcactccttgttggacgaggaagaaatgaccctgtgcttttgtccccagggaaaccatctgccgtgtgactggtgggatgaaggtaaaggcagaccgagatgaatcctcaccatatgctgctatgttggctgcccaggatgtggcccagaggtgcaaggagctgggtatcaccgccctacacatcaaactccgggccacaggaggaaataggtacgagtcgcagaggggatggctgggtggtagaaaacctgctgggcttgggtgctggagcacctggatttgaggtttgggttttttgttgtgaccttgaacaagatattttaggcatatacatacttaataattggctcctgtgtacaccccccagcagctcagtgttgagcacccactgtatactaggagctgtgtttcaggtactagaagagagtgatggggaaacagacatggtctctaccctccttgtgtgggaccgaggctggtgggagagtcagactttaaacaacagagcaccagggagtatgtggttttcatttgtgacaaatgccaggaagcacaagtaaggagttggtgataaagtgtaatttaaactagggtctaaatgataagtccggagtccttccagtgaaataaggacaggaggagggtattccagctagagacaactgcagggaaaggtcttgaggtgggggtgaacctgggcacctgtgaaggaaagagtggcatgaggtgcagtcagaggggaagaggtggagtcctgtaggagaggggaaggacctggatttgagtgatgggggcatgaaagctgaaatagatgactgttgcgtgaacaagccagacagtggtcagaacataacaacaaaccatagtggccccctcagcctaaaatatttactgtctggcttttttttttttcctcttttttgagacagggtctcactctcacccaggctggagtgcagtggcgctatctcagcttactgcagtctctggctttcaggctctagcagtcctcccacctcagcctcccgagtagctgggactgctagtagtagtgccaccacgcctggctaaattgtgtatttttgtagagatggggtttcaccatgttgctcaggctggtcttgaactcctgagctgaagcagtccgccctgccttagcctcccaaggtgctgagattatgggtgtgaaccactgtgtacagccctgtctggctctttacagaaagtttgcagacctctgaactagcggggtgttgggatcttagaaaggagatcttccattgacttggccaaaggctcttcttaacttaaaccttcattttctaggaccaagacccctggacctg

SEQ ID NO: 792 - DNA, 4106 bp, Homo sapiens
tttgaagctagaattccaaacccttctgcaaaggtgtgctctcagttaacatcctttatctgtaagagggaaatcaaaattatttgataatgtcttgaggagtaaatgaagcaatgcatataaactgtttagcccagaccggtctgaaaatacatattgaataatttattcttattttgcccattatataatatgccaaagtaagtgattacggtgtgttttccccgactatgttgcctaggctggcctcgaactacttggacgaagcgatcctcagcctcctgagtaactgggaccacaggccggcgccaccctagctttaattaaggccgttttgttgttgttattcccctgctccacacaaggggcgctgccgctccaaggctgccagggcgggagtcaggatggcggaagtctgtctagccacgaccaccgccatcatggaatacaggcccacctcaccccgcgggtgtagccgcttcgtactgtcgcttaggccgacccgctcgcagcgacaaccagccctctacctcttttcgctctcccttaagtaataaaccgtctttccttatgacgagtcttaaactctttgggaggaataatgccggcgtcttccggaacccgacctcgccccgtgacctcagaggtatacttccgggacacggaagtgacccccgtcgctccgccccctcccactctctctttccggtgtggagtctggagacgacgtgcaggtaggaggcccgggcgcgacaatcggggggcatcctgcggcgaggggaccctgtggggcttgggacgagagacgggggtctttccgtgggaaccgagctaggtgccgggcaagagacgcgcggctggcccacctggatcctggccaactcgggattgagttcgttcctggtctcagaaggcccgttttgctttcagggaggagcttgtgaagtaagggtgagtgcgggtccagccttttaaggcctcggccccgcaatacggccacggccacggccgcgtttgagctgcacagcgtagttgagggaacccgggacagacgtgggctcccgcctctacctcgccaaacttttttcttggtgatcgcaggcccacgcctaatctcgtttgtttcctcgtttgcaaaataggaataacaatagcaccgatcccatgggtttgtagtgatcattcaaagaaggaaagcagggaaaactctcgcactatgttggatgcttctaaatctgggcgattctttccgttgctgagtcgggcacgttgcaagttctgggcgctcagggcccagcaccaatgtttgctgtgcgcttgccctgcgtttatatactcctgatgaccactctgctcgttactttaggggatgttaggaacggagaaactgcaaattggcatttactgaatggccatcatgccgaaacatactcatgcttacgtatttgagatatgctggagcctttctatgcttctcgaggcagaactttgggcttctctcctgtggcgcgttccttacaatagttaacgcactgggtcgtgctcattggtctgatttgaagataggaacatttaacttcgtacacccaagacttacacttgaagtacttactgtggtcacacacttaactaaagtttatatagggaaggcagaggagagatctaggaacacctgagacagactagggtagttatttgtggtgtagaggcatcttggcaggaggcagagagtgctgggctgggagtcaggacacgttgtttctatgtttggttttgccactgtctttactgtgaccataggctgagacactctctatcttcaccatctgcaggatatcgattagtgttagtgtcttctgaaaatgttaaattgttctgaacaccaggaggttcagaaggcctggggctttaggccggaagcagtcttatcctagccttccactttctcattcattctcacccgccttcctcctgtcagtttctctctcccttagatcttgtgacagtatgattgcaattattatgaaggtcataataggttagagttatttagtctcaggacccatcagatttctgagatgggtcttttccattagcctgccttttggatatattttagtgcctttgatatttgatgttggtgacaaagatttagttctaaatagttgtgggagtcaaatcagttgcatttttgaacattttgaagggatcaggtggagcacaggaaaacaggagatgagaggcttgagggctgtgttggtaagggtcccttgaattctaagctgaggagttcatgcaggaatcaagcagctccctcgccccatgaagggtgttaggaatggtaccagtacatgggtagctgttggtcttgggtttcttcttgccttttggggtgcagccttcaggcatctgctgctagatccctaggcttctatcttgtaggtgctgtgagctgagctgttggtagtttctggggaaaggatacttctcatggtactttgccatgtggccacagttgatacccccccaagtgcaaggagaaagaagttttagtgaggcagaaatgagagaatacagtagagtattggatggaagaagacagggacatgaagcaggactagggtttcatttaatagccaggggaaagggattctggaaatgttttgtctgttaaccttgagtttcttttccttccactcagaaatggcacctcgaaaggggaaggaaaagaaggaagaacaggtcatcagcctcggacctcaggtggctgaaggagagaatgtatttggtgtctgccatatctttgcatccttcaatgacacttttgtccatgtcactgatctttctggcaagtgagtacctgggtggagaggcatccagctggcaaaaggctgaggaaggcaatggctgggacgggctagcagttcaggggattctctctaaagaaatgctgttttgtccaggtaagaaaatgtgcttgtccatttagcccacaaatattgtgatttcccaggggttacaagagaggagacacattcttcgtccttacagcgtgatggtcattgaatccttggtttcttgggaattatcttctttccctagttccctttgcaggagcagcagtggactgcaagtgggctctgggtgcgggttcgacggccatttagcaagttgtgacttgtgtgaaatcactcagattctgagttttggtttcctcatatgtaaaattaggacagtaatgtctaccttgtggagtaatggtaaggattaaatgcaaaagtagatatataaaatgttaatactgagtatagctatattgggccattcaaccccactggactgaactccatgagggcagagcccatgaccatcatcctccaccatgactgagctgtgttgctcttcactcattaggatatcgtaagcactccttgttggacgaggaagaaatgaccctgtgcttttgtccccagggaaaccatctgccgtgtgactggtgggatgaaggtaaaggcagaccgagatgaatcctcaccatatgctgctatgttggctgcccaggatgtggcccagaggtgcaaggagctgggtatcaccgccctacacatcaaactccgggccacaggaggaaataggtacgagtcgcagaggggatggctgggtggtagaaaacctgctgggcttgggtgctggagcacctggatttgaggtttgggttttttgttgtgaccttgaacaagatattttaggcatatacatacttaataattggctcctgtgtacaccccccagcagctcagtgttgagcacccactgtatactaggagctgtgtttcaggtactagaagagagtgatggggaaacagacatggtctctaccctccttgtgtgggaccgaggctggtgggagagtcagactttaaacaacagagcaccagggagtatgtggttttcatttgtgacaaatgccaggaagcacaagtaaggagttggtgataaagtgtaatttaaactagggtctaaatgataagtccggagtccttccagtgaaataaggacaggaggagggtattccagctagagacaactgcagggaaaggtcttga

SEQ ID NO: 793 - DNA, 4038 bp, Homo sapiens
tactaatacacacacacaaaaaatttgtcgggcgtggtggcacgcgcctgtagtcccagctacttgggaggctgaggcagaatagcttgaacctgggaggcagaggttgcggtcagccgagattgcgccactgcactccagccttggctacagaacaagattcggtcgaaatatatacatgtatattgttattagagggctatgtggaagtagctattaaacacgagggctttgaagctagaattccaaacccttctgcaaaggtgtgctctcagttaacatcctttatctgtaagagggaaatcaaaattatttgataatgtcttgaggagtaaatgaagcaatgcatataaactgtttagcccagaccggtctgaaaatacatattgaataatttattcttattttgcccattatataatatgccaaagtaagtgattacggtgtgttttccccgactatgttgcctaggctggcctcgaactacttggacgaagcgatcctcagcctcctgagtaactgggaccacaggccggcgccaccctagctttaattaaggccgttttgttgttgttattcccctgctccacacaaggggcgctgccgctccaaggctgccagggcgggagtcaggatggcggaagtctgtctagccacgaccaccgccatcatggaatacaggcccacctcaccccgcgggtgtagccgcttcgtactgtcgcttaggccgacccgctcgcagcgacaaccagccctctacctcttttcgctctcccttaagtaataaaccgtctttccttatgacgagtcttaaactctttgggaggaataatgccggcgtcttccggaacccgacctcgccccgtgacctcagaggtatacttccgggacacggaagtgacccccgtcgctccgccccctcccactctctctttccggtgtggagtctggagacgacgtgcaggtaggaggcccgggcgcgacaatcggggggcatcctgcggcgaggggaccctgtggggcttgggacgagagacgggggtctttccgtgggaaccgagctaggtgccgggcaagagacgcgcggctggcccacctggatcctggccaactcgggattgagttcgttcctggtctcagaaggcccgttttgctttcagggaggagcttgtgaagtaagggtgagtgcgggtccagccttttaaggcctcggccccgcaatacggccacggccacggccgcgtttgagctgcacagcgtagttgagggaacccgggacagacgtgggctcccgcctctacctcgccaaacttttttcttggtgatcgcaggcccacgcctaatctcgtttgtttcctcgtttgcaaaataggaataacaatagcaccgatcccatgggtttgtagtgatcattcaaagaaggaaagcagggaaaactctcgcactatgttggatgcttctaaatctgggcgattctttccgttgctgagtcgggcacgttgcaagttctgggcgctcagggcccagcaccaatgtttgctgtgcgcttgccctgcgtttatatactcctgatgaccactctgctcgttactttaggggatgttaggaacggagaaactgcaaattggcatttactgaatggccatcatgccgaaacatactcatgcttacgtatttgagatatgctggagcctttctatgcttctcgaggcagaactttgggcttctctcctgtggcgcgttccttacaatagttaacgcactgggtcgtgctcattggtctgatttgaagataggaacatttaacttcgtacacccaagacttacacttgaagtacttactgtggtcacacacttaactaaagtttatatagggaaggcagaggagagatctaggaacacctgagacagactagggtagttatttgtggtgtagaggcatcttggcaggaggcagagagtgctgggctgggagtcaggacacgttgtttctatgtttggttttgccactgtctttactgtgaccataggctgagacactctctatcttcaccatctgcaggatatcgattagtgttagtgtcttctgaaaatgttaaattgttctgaacaccaggaggttcagaaggcctggggctttaggccggaagcagtcttatcctagccttccactttctcattcattctcacccgccttcctcctgtcagtttctctctcccttagatcttgtgacagtatgattgcaattattatgaaggtcataataggttagagttatttagtctcaggacccatcagatttctgagatgggtcttttccattagcctgccttttggatatattttagtgcctttgatatttgatgttggtgacaaagatttagttctaaatagttgtgggagtcaaatcagttgcatttttgaacattttgaagggatcaggtggagcacaggaaaacaggagatgagaggcttgagggctgtgttggtaagggtcccttgaattctaagctgaggagttcatgcaggaatcaagcagctccctcgccccatgaagggtgttaggaatggtaccagtacatgggtagctgttggtcttgggtttcttcttgccttttggggtgcagccttcaggcatctgctgctagatccctaggcttctatcttgtaggtgctgtgagctgagctgttggtagtttctggggaaaggatacttctcatggtactttgccatgtggccacagttgatacccccccaagtgcaaggagaaagaagttttagtgaggcagaaatgagagaatacagtagagtattggatggaagaagacagggacatgaagcaggactagggtttcatttaatagccaggggaaagggattctggaaatgttttgtctgttaaccttgagtttcttttccttccactcagaaatggcacctcgaaaggggaaggaaaagaaggaagaacaggtcatcagcctcggacctcaggtggctgaaggagagaatgtatttggtgtctgccatatctttgcatccttcaatgacacttttgtccatgtcactgatctttctggcaagtgagtacctgggtggagaggcatccagctggcaaaaggctgaggaaggcaatggctgggacgggctagcagttcaggggattctctctaaagaaatgctgttttgtccaggtaagaaaatgtgcttgtccatttagcccacaaatattgtgatttcccaggggttacaagagaggagacacattcttcgtccttacagcgtgatggtcattgaatccttggtttcttgggaattatcttctttccctagttccctttgcaggagcagcagtggactgcaagtgggctctgggtgcgggttcgacggccatttagcaagttgtgacttgtgtgaaatcactcagattctgagttttggtttcctcatatgtaaaattaggacagtaatgtctaccttgtggagtaatggtaaggattaaatgcaaaagtagatatataaaatgttaatactgagtatagctatattgggccattcaaccccactggactgaactccatgagggcagagcccatgaccatcatcctccaccatgactgagctgtgttgctcttcactcattaggatatcgtaagcactccttgttggacgaggaagaaatgaccctgtgcttttgtccccagggaaaccatctgccgtgtgactggtgggatgaaggtaaaggcagaccgagatgaatcctcaccatatgctgctatgttggctgcccaggatgtggcccagaggtgcaaggagctgggtatcaccgccctacacatcaaactccgggccacaggaggaaataggtacgagtcgcagaggggatggctgggtggtagaaaacctgctgggcttgggtgctggagcacctggatttgaggtttgggttttttgttgtgaccttgaacaagatattttaggcatatacatacttaataattggctcctgtgtacaccccccagcagctcagtgttgagc

SEQ ID NO: 794 - DNA, 4029 bp, Homo sapiens
cacggtggctcacgcctgtaatcccagcactttgggaggccgaggcaggtggatcacgaggtcagaaaatccagaccaccctagtcaacacggtaaaaccccgtctctactaatacacacacacaaaaaatttgtcgggcgtggtggcacgcgcctgtagtcccagctacttgggaggctgaggcagaatagcttgaacctgggaggcagaggttgcggtcagccgagattgcgccactgcactccagccttggctacagaacaagattcggtcgaaatatatacatgtatattgttattagagggctatgtggaagtagctattaaacacgagggctttgaagctagaattccaaacccttctgcaaaggtgtgctctcagttaacatcctttatctgtaagagggaaatcaaaattatttgataatgtcttgaggagtaaatgaagcaatgcatataaactgtttagcccagaccggtctgaaaatacatattgaataatttattcttattttgcccattatataatatgccaaagtaagtgattacggtgtgttttccccgactatgttgcctaggctggcctcgaactacttggacgaagcgatcctcagcctcctgagtaactgggaccacaggccggcgccaccctagctttaattaaggccgttttgttgttgttattcccctgctccacacaaggggcgctgccgctccaaggctgccagggcgggagtcaggatggcggaagtctgtctagccacgaccaccgccatcatggaatacaggcccacctcaccccgcgggtgtagccgcttcgtactgtcgcttaggccgacccgctcgcagcgacaaccagccctctacctcttttcgctctcccttaagtaataaaccgtctttccttatgacgagtcttaaactctttgggaggaataatgccggcgtcttccggaacccgacctcgccccgtgacctcagaggtatacttccgggacacggaagtgacccccgtcgctccgccccctcccactctctctttccggtgtggagtctggagacgacgtgcaggtaggaggcccgggcgcgacaatcggggggcatcctgcggcgaggggaccctgtggggcttgggacgagagacgggggtctttccgtgggaaccgagctaggtgccgggcaagagacgcgcggctggcccacctggatcctggccaactcgggattgagttcgttcctggtctcagaaggcccgttttgctttcagggaggagcttgtgaagtaagggtgagtgcgggtccagccttttaaggcctcggccccgcaatacggccacggccacggccgcgtttgagctgcacagcgtagttgagggaacccgggacagacgtgggctcccgcctctacctcgccaaacttttttcttggtgatcgcaggcccacgcctaatctcgtttgtttcctcgtttgcaaaataggaataacaatagcaccgatcccatgggtttgtagtgatcattcaaagaaggaaagcagggaaaactctcgcactatgttggatgcttctaaatctgggcgattctttccgttgctgagtcgggcacgttgcaagttctgggcgctcagggcccagcaccaatgtttgctgtgcgcttgccctgcgtttatatactcctgatgaccactctgctcgttactttaggggatgttaggaacggagaaactgcaaattggcatttactgaatggccatcatgccgaaacatactcatgcttacgtatttgagatatgctggagcctttctatgcttctcgaggcagaactttgggcttctctcctgtggcgcgttccttacaatagttaacgcactgggtcgtgctcattggtctgatttgaagataggaacatttaacttcgtacacccaagacttacacttgaagtacttactgtggtcacacacttaactaaagtttatatagggaaggcagaggagagatctaggaacacctgagacagactagggtagttatttgtggtgtagaggcatcttggcaggaggcagagagtgctgggctgggagtcaggacacgttgtttctatgtttggttttgccactgtctttactgtgaccataggctgagacactctctatcttcaccatctgcaggatatcgattagtgttagtgtcttctgaaaatgttaaattgttctgaacaccaggaggttcagaaggcctggggctttaggccggaagcagtcttatcctagccttccactttctcattcattctcacccgccttcctcctgtcagtttctctctcccttagatcttgtgacagtatgattgcaattattatgaaggtcataataggttagagttatttagtctcaggacccatcagatttctgagatgggtcttttccattagcctgccttttggatatattttagtgcctttgatatttgatgttggtgacaaagatttagttctaaatagttgtgggagtcaaatcagttgcatttttgaacattttgaagggatcaggtggagcacaggaaaacaggagatgagaggcttgagggctgtgttggtaagggtcccttgaattctaagctgaggagttcatgcaggaatcaagcagctccctcgccccatgaagggtgttaggaatggtaccagtacatgggtagctgttggtcttgggtttcttcttgccttttggggtgcagccttcaggcatctgctgctagatccctaggcttctatcttgtaggtgctgtgagctgagctgttggtagtttctggggaaaggatacttctcatggtactttgccatgtggccacagttgatacccccccaagtgcaaggagaaagaagttttagtgaggcagaaatgagagaatacagtagagtattggatggaagaagacagggacatgaagcaggactagggtttcatttaatagccaggggaaagggattctggaaatgttttgtctgttaaccttgagtttcttttccttccactcagaaatggcacctcgaaaggggaaggaaaagaaggaagaacaggtcatcagcctcggacctcaggtggctgaaggagagaatgtatttggtgtctgccatatctttgcatccttcaatgacacttttgtccatgtcactgatctttctggcaagtgagtacctgggtggagaggcatccagctggcaaaaggctgaggaaggcaatggctgggacgggctagcagttcaggggattctctctaaagaaatgctgttttgtccaggtaagaaaatgtgcttgtccatttagcccacaaatattgtgatttcccaggggttacaagagaggagacacattcttcgtccttacagcgtgatggtcattgaatccttggtttcttgggaattatcttctttccctagttccctttgcaggagcagcagtggactgcaagtgggctctgggtgcgggttcgacggccatttagcaagttgtgacttgtgtgaaatcactcagattctgagttttggtttcctcatatgtaaaattaggacagtaatgtctaccttgtggagtaatggtaaggattaaatgcaaaagtagatatataaaatgttaatactgagtatagctatattgggccattcaaccccactggactgaactccatgagggcagagcccatgaccatcatcctccaccatgactgagctgtgttgctcttcactcattaggatatcgtaagcactccttgttggacgaggaagaaatgaccctgtgcttttgtccccagggaaaccatctgccgtgtgactggtgggatgaaggtaaaggcagaccgagatgaatcctcaccatatgctgctatgttggctgcccaggatgtggcccagaggtgcaaggagctgggtatcaccgccctacacatcaaactccgggccacaggaggaaataggtacgagtcgcagaggggatggctgggtggtagaaaacctgctgggcttgggtgctg

SEQ ID NO: 795 - DNA, 4140 bp, Homo sapiens
acccaggctggagccacgggatatatttatatatttaaaatatatttataatatttatatagtatgtaatacaaaaatactatatatattccatataaatattacatatagtacatagataaaatgtatctaccgcttgcctagctctgtgaggtacacttcttggcccttccccacagctccgacatattctcccaagccttcaaggtccttcaatattgttattagaggctgggcacggtggctcacgcctgtaatcccagcactttgggaggccgaggcaggtggatcacgaggtcagaaaatccagaccaccctagtcaacacggtaaaaccccgtctctactaatacacacacacaaaaaatttgtcgggcgtggtggcacgcgcctgtagtcccagctacttgggaggctgaggcagaatagcttgaacctgggaggcagaggttgcggtcagccgagattgcgccactgcactccagccttggctacagaacaagattcggtcgaaatatatacatgtatattgttattagagggctatgtggaagtagctattaaacacgagggctttgaagctagaattccaaacccttctgcaaaggtgtgctctcagttaacatcctttatctgtaagagggaaatcaaaattatttgataatgtcttgaggagtaaatgaagcaatgcatataaactgtttagcccagaccggtctgaaaatacatattgaataatttattcttattttgcccattatataatatgccaaagtaagtgattacggtgtgttttccccgactatgttgcctaggctggcctcgaactacttggacgaagcgatcctcagcctcctgagtaactgggaccacaggccggcgccaccctagctttaattaaggccgttttgttgttgttattcccctgctccacacaaggggcgctgccgctccaaggctgccagggcgggagtcaggatggcggaagtctgtctagccacgaccaccgccatcatggaatacaggcccacctcaccccgcgggtgtagccgcttcgtactgtcgcttaggccgacccgctcgcagcgacaaccagccctctacctcttttcgctctcccttaagtaataaaccgtctttccttatgacgagtcttaaactctttgggaggaataatgccggcgtcttccggaacccgacctcgccccgtgacctcagaggtatacttccgggacacggaagtgacccccgtcgctccgccccctcccactctctctttccggtgtggagtctggagacgacgtgcaggtaggaggcccgggcgcgacaatcggggggcatcctgcggcgaggggaccctgtggggcttgggacgagagacgggggtctttccgtgggaaccgagctaggtgccgggcaagagacgcgcggctggcccacctggatcctggccaactcgggattgagttcgttcctggtctcagaaggcccgttttgctttcagggaggagcttgtgaagtaagggtgagtgcgggtccagccttttaaggcctcggccccgcaatacggccacggccacggccgcgtttgagctgcacagcgtagttgagggaacccgggacagacgtgggctcccgcctctacctcgccaaacttttttcttggtgatcgcaggcccacgcctaatctcgtttgtttcctcgtttgcaaaataggaataacaatagcaccgatcccatgggtttgtagtgatcattcaaagaaggaaagcagggaaaactctcgcactatgttggatgcttctaaatctgggcgattctttccgttgctgagtcgggcacgttgcaagttctgggcgctcagggcccagcaccaatgtttgctgtgcgcttgccctgcgtttatatactcctgatgaccactctgctcgttactttaggggatgttaggaacggagaaactgcaaattggcatttactgaatggccatcatgccgaaacatactcatgcttacgtatttgagatatgctggagcctttctatgcttctcgaggcagaactttgggcttctctcctgtggcgcgttccttacaatagttaacgcactgggtcgtgctcattggtctgatttgaagataggaacatttaacttcgtacacccaagacttacacttgaagtacttactgtggtcacacacttaactaaagtttatatagggaaggcagaggagagatctaggaacacctgagacagactagggtagttatttgtggtgtagaggcatcttggcaggaggcagagagtgctgggctgggagtcaggacacgttgtttctatgtttggttttgccactgtctttactgtgaccataggctgagacactctctatcttcaccatctgcaggatatcgattagtgttagtgtcttctgaaaatgttaaattgttctgaacaccaggaggttcagaaggcctggggctttaggccggaagcagtcttatcctagccttccactttctcattcattctcacccgccttcctcctgtcagtttctctctcccttagatcttgtgacagtatgattgcaattattatgaaggtcataataggttagagttatttagtctcaggacccatcagatttctgagatgggtcttttccattagcctgccttttggatatattttagtgcctttgatatttgatgttggtgacaaagatttagttctaaatagttgtgggagtcaaatcagttgcatttttgaacattttgaagggatcaggtggagcacaggaaaacaggagatgagaggcttgagggctgtgttggtaagggtcccttgaattctaagctgaggagttcatgcaggaatcaagcagctccctcgccccatgaagggtgttaggaatggtaccagtacatgggtagctgttggtcttgggtttcttcttgccttttggggtgcagccttcaggcatctgctgctagatccctaggcttctatcttgtaggtgctgtgagctgagctgttggtagtttctggggaaaggatacttctcatggtactttgccatgtggccacagttgatacccccccaagtgcaaggagaaagaagttttagtgaggcagaaatgagagaatacagtagagtattggatggaagaagacagggacatgaagcaggactagggtttcatttaatagccaggggaaagggattctggaaatgttttgtctgttaaccttgagtttcttttccttccactcagaaatggcacctcgaaaggggaaggaaaagaaggaagaacaggtcatcagcctcggacctcaggtggctgaaggagagaatgtatttggtgtctgccatatctttgcatccttcaatgacacttttgtccatgtcactgatctttctggcaagtgagtacctgggtggagaggcatccagctggcaaaaggctgaggaaggcaatggctgggacgggctagcagttcaggggattctctctaaagaaatgctgttttgtccaggtaagaaaatgtgcttgtccatttagcccacaaatattgtgatttcccaggggttacaagagaggagacacattcttcgtccttacagcgtgatggtcattgaatccttggtttcttgggaattatcttctttccctagttccctttgcaggagcagcagtggactgcaagtgggctctgggtgcgggttcgacggccatttagcaagttgtgacttgtgtgaaatcactcagattctgagttttggtttcctcatatgtaaaattaggacagtaatgtctaccttgtggagtaatggtaaggattaaatgcaaaagtagatatataaaatgttaatactgagtatagctatattgggccattcaaccccactggactgaactccatgagggcagagcccatgaccatcatcctccaccatgactgagctgtgttgctcttcactcattaggatatcgtaagcactccttgttggacgaggaagaaatgaccctgtgcttttgtccccagggaaaccatctgccgtgtgactggtgggatgaaggtaaaggcagaccgagatgaatcctcaccatatgctgctatgttggctgcccaggatgtg

SEQ ID NO: 796 - DNA, 4074 bp, Homo sapiens
tcaaaaaatacagacatttcacagaagagatgcaaatggttaaaacaatccgtaaagagatgtctgacgtcactcatcatcgaagaaatgcaatgcaacgagaaggtatgttgaggctgggtgcattggctcacgcctataatgccagccctttgggagaccgaggcgggtggatcacctgaggcaggagttcgagaccagcctggacaacatggtgaaaccccgtctctactaaaaatacaaaaattagccgggtgtggtggcgcacacctgtaatcccagctactcgggagatgaggcaggagaatcacttgaacccaggaggcggagcttgcagtgagccaagatggcgtcactgcactccagcctgggcaacaagagccagactccgtctcaaaaaaaaaaagaaggtatgttgagtttttcagtttagcagaataaattttttttttttttgagacagggtctcgctgtgtcacccaggctggagccacgggatatatttatatatttaaaatatatttataatatttatatagtatgtaatacaaaaatactatatatattccatataaatattacatatagtacatagataaaatgtatctaccgcttgcctagctctgtgaggtacacttcttggcccttccccacagctccgacatattctcccaagccttcaaggtccttcaatattgttattagaggctgggcacggtggctcacgcctgtaatcccagcactttgggaggccgaggcaggtggatcacgaggtcagaaaatccagaccaccctagtcaacacggtaaaaccccgtctctactaatacacacacacaaaaaatttgtcgggcgtggtggcacgcgcctgtagtcccagctacttgggaggctgaggcagaatagcttgaacctgggaggcagaggttgcggtcagccgagattgcgccactgcactccagccttggctacagaacaagattcggtcgaaatatatacatgtatattgttattagagggctatgtggaagtagctattaaacacgagggctttgaagctagaattccaaacccttctgcaaaggtgtgctctcagttaacatcctttatctgtaagagggaaatcaaaattatttgataatgtcttgaggagtaaatgaagcaatgcatataaactgtttagcccagaccggtctgaaaatacatattgaataatttattcttattttgcccattatataatatgccaaagtaagtgattacggtgtgttttccccgactatgttgcctaggctggcctcgaactacttggacgaagcgatcctcagcctcctgagtaactgggaccacaggccggcgccaccctagctttaattaaggccgttttgttgttgttattcccctgctccacacaaggggcgctgccgctccaaggctgccagggcgggagtcaggatggcggaagtctgtctagccacgaccaccgccatcatggaatacaggcccacctcaccccgcgggtgtagccgcttcgtactgtcgcttaggccgacccgctcgcagcgacaaccagccctctacctcttttcgctctcccttaagtaataaaccgtctttccttatgacgagtcttaaactctttgggaggaataatgccggcgtcttccggaacccgacctcgccccgtgacctcagaggtatacttccgggacacggaagtgacccccgtcgctccgccccctcccactctctctttccggtgtggagtctggagacgacgtgcaggtaggaggcccgggcgcgacaatcggggggcatcctgcggcgaggggaccctgtggggcttgggacgagagacgggggtctttccgtgggaaccgagctaggtgccgggcaagagacgcgcggctggcccacctggatcctggccaactcgggattgagttcgttcctggtctcagaaggcccgttttgctttcagggaggagcttgtgaagtaagggtgagtgcgggtccagccttttaaggcctcggccccgcaatacggccacggccacggccgcgtttgagctgcacagcgtagttgagggaacccgggacagacgtgggctcccgcctctacctcgccaaacttttttcttggtgatcgcaggcccacgcctaatctcgtttgtttcctcgtttgcaaaataggaataacaatagcaccgatcccatgggtttgtagtgatcattcaaagaaggaaagcagggaaaactctcgcactatgttggatgcttctaaatctgggcgattctttccgttgctgagtcgggcacgttgcaagttctgggcgctcagggcccagcaccaatgtttgctgtgcgcttgccctgcgtttatatactcctgatgaccactctgctcgttactttaggggatgttaggaacggagaaactgcaaattggcatttactgaatggccatcatgccgaaacatactcatgcttacgtatttgagatatgctggagcctttctatgcttctcgaggcagaactttgggcttctctcctgtggcgcgttccttacaatagttaacgcactgggtcgtgctcattggtctgatttgaagataggaacatttaacttcgtacacccaagacttacacttgaagtacttactgtggtcacacacttaactaaagtttatatagggaaggcagaggagagatctaggaacacctgagacagactagggtagttatttgtggtgtagaggcatcttggcaggaggcagagagtgctgggctgggagtcaggacacgttgtttctatgtttggttttgccactgtctttactgtgaccataggctgagacactctctatcttcaccatctgcaggatatcgattagtgttagtgtcttctgaaaatgttaaattgttctgaacaccaggaggttcagaaggcctggggctttaggccggaagcagtcttatcctagccttccactttctcattcattctcacccgccttcctcctgtcagtttctctctcccttagatcttgtgacagtatgattgcaattattatgaaggtcataataggttagagttatttagtctcaggacccatcagatttctgagatgggtcttttccattagcctgccttttggatatattttagtgcctttgatatttgatgttggtgacaaagatttagttctaaatagttgtgggagtcaaatcagttgcatttttgaacattttgaagggatcaggtggagcacaggaaaacaggagatgagaggcttgagggctgtgttggtaagggtcccttgaattctaagctgaggagttcatgcaggaatcaagcagctccctcgccccatgaagggtgttaggaatggtaccagtacatgggtagctgttggtcttgggtttcttcttgccttttggggtgcagccttcaggcatctgctgctagatccctaggcttctatcttgtaggtgctgtgagctgagctgttggtagtttctggggaaaggatacttctcatggtactttgccatgtggccacagttgatacccccccaagtgcaaggagaaagaagttttagtgaggcagaaatgagagaatacagtagagtattggatggaagaagacagggacatgaagcaggactagggtttcatttaatagccaggggaaagggattctggaaatgttttgtctgttaaccttgagtttcttttccttccactcagaaatggcacctcgaaaggggaaggaaaagaaggaagaacaggtcatcagcctcggacctcaggtggctgaaggagagaatgtatttggtgtctgccatatctttgcatccttcaatgacacttttgtccatgtcactgatctttctggcaagtgagtacctgggtggagaggcatccagctggcaaaaggctgaggaaggcaatggctgggacgggctagcagttcaggggattctctctaaagaaatgctgttttgtccaggtaagaaaatgtgcttgtccatttagcccacaaatattgtgatttcccaggggttacaaga

SEQ ID NO: 797 - DNA, 4047 bp, Homo sapiens
agttctcctaggcaggtagcctcacaaacccattttacaaggcccagtgaggttgtggcagttgccaaggtcacacagctcagaactcaggcctgtctgactccatagccacactgctatttaaggagctaggttagccaaggtcacagtcagaggcattggagagactcaggccaggccccctcaccgtcagctcaggatgctggattatatgctactgaggacctggcagtgtccaacagctctgaatgccagattcctgaggagccagcgtctccccagcctcagctactccctggctggctggggccctagatctgagtgcagcatctgcatttcccaggctgtgagaactacagtgcaaccctcctctgtgttgctggagtgaatgccctcagggcaggcagcttccagggtggcacctcatataaatccagggagtggccgaggcctgcaaggaatctggctcaacacctgccatttgggtctcagttttacacattttgatcttgcacatgatttcactagggcaaaattaagtgcatgaaggaatcacacattcctgggtctcgccctcagtgatgcagagtgggtagggacctgggctatgggggccctgtaggtattctgctgcagatgggggcaccacacttgcagctcagaacagagataaaaccagataaaactccgctttatgactgctttgcatcactttccagctggcctcatctgaacagggcagaaagttcctaataacaataatcaacgtcagaattaaatgtgtgtcatgctctgctggcacaaaactcttttcaatgcattctttctttcctttggatcccagtgtcaaatacccgcttgccaacatagtttgtttgctgtacacaggttgaaactgcaaaggttttcaattttaaatttagctaatattttactttttttttttttttgaaatgggatctcgctttgttgccttacctggagtgtagttgcgagatcatagctcactgcagcctccaactcctgggctcaggtgatcctcccacctcagtctcctgtgtagctgggactacaggtacaccaccatgcccacctggataatttttaactttttttgtagagataaagtcttgctatgttgcctaggctagtctcgaactcctgggctcaagggatccttccccttcggcttcccaaagtgttaggattacaggtgtgatctggtttctaacttctcttaaagtgttggaggtctggctattatagatcttctggatggcctgacatccattgcctggagggagtggtgactgcctgtctggaggcagctggctctctccctattgacaggccctgccacaccctggcaattcttcctggcaccaaggcaagagtcagtgggcacctgtcatctcattgctttgcctgcttcaccctctgacaataccttcatgagccctgtaggcaattgagcacatgatctcgatttcaaatacacagcccacttggcctgtgtccctccctggtttccttagatagctctgtgtgaagtccttctttcataatatcctttgaaaccgatattcacccatttaagtgatgaagcttcagggctcagaaagagtgagaaatttgccaaaaattctacagccaatccaagcagagccaggactccaaggtaggacctgcgcccaggtgtgtagcctgtaccccgagcagctccagcaccgccatccacacacaagacacaaatgagagcgtgctctccagacctgtacagcgcatggcctgccaagctttagaccaaagccccgactccaatccaggggcccgactacaaagctggtatttttctttactccatatcaagcccttggctaagaaatggggatttccaagcccacagctgctcttgtttctccccacagtgctcctacatcccaggcagcgtggacaattaccagacggcccgggccgacgtggagaaggtcagagccaaattccaagagcagcaggtcttctactgcttctccgcacctcgggggaacgaaaccagcgtcctattccagcgcctctacgggccccaggccctcctcttctccctcttctggcccaccttcctgctgaccggtggcctcctcattatcgccatggtgaagagcaaccagtacctgtccatcctggcggcccagaagtagagccatccatccatgccataccacttgtcagggcacaggggactggctgggcccccagggctgctccccacttgcagcacaatgccttctccacctgccctcccactcttccagtccaatccacgctgtcttctgttgcaggactaacctttgagaaatccttttgtgaagtcattgcctgctcaagaatgtacagtggctccccaatgccttggaggccataaggccagccagttctagctctctattacctgtccccactcaactgactcatacctgtttccggctgcatcactatgtgccccacagagaacgatgatcgtcacctctgtgcctgagttctccctgttgtctcaaagcggtacccatcctcccccagaagctgtccccagcgagcctcccttctttgtttgaattctctaataagagcaacagcagctcccatttctagaacacatttacagtattactattttctaggatataaagtgccatatatatttttaattccaatattaataaatgtatgccaaacaacaatcagctgcaaggaaacacatgagaactcatcaaaattttagcggtgggatggtggttaatttctgttttcttccttatcccctttttatttttgctgcttttctaaatttttgattataggaagggtgtgtttcgtttgcttttaatcagaaaagccatggtagatgccattttggaaaagttgaaagagtgtgtccccctcacagaaaaagatggaagtgggtctggggacggagttgggttccagtcagagacaggccattcagaacacacaatcttaaaaacccctctgggccgggcgcggtggctcactcctgtaatcccagcactttgggaggccgaggctggtggatcacgaggtcaggagatcaagaccatcctggctaacatggtgaaaccccgtctctactaaaaatacaaaaaattagccaggcgtggtggtgggcacctgtggtcccagctactcaggaggctgaggcaggagaatggcgtgaacccggggttcggagcttgcagtgagccgagattgtgccactgcactccagcctggtgatagaacaagactccgtctcaaaaaaaaaacaaaaaacaaaaaatgaaaaacaaccctctggaggaaaggtcatgatatagaggaggatttgttatttaaattgagggtatggactctggcactgagcctgctggggaagcctatctcagatttgaaaagggcaaaatgggaagaagccatcacctttaccattcccactccaggaagttttcctagaacgatgactgtccaagtgtggtccctgggccagcagcatcaggatcctgtggcagcttgtgagaaatgcacactctcaggcccctgtcccagccccaccacgccagaagccctgcacggggtgggggtagcaatgttctgtgttctaacaatgcgtaggggattctgtggcacacctcgagccagagaactaccggtgtaggaagtgagcgtcctgtcgcgaggattttcagagcaggtgagtgaccattcggcagggccagtcctgagctgggtgtgaagttaggctggtgtctgaagtttcttccagtgttgtgagtccaagatgcagatcttgggtttgaatcctgtctctactctgcccgatttcatctctttgattcttagttttttcatctataaaagaaggactctttctggatagttgggagggctgaaggaatgtttgacacatcataggtgtttaaaatggcaactatagttttttttgtttgttttgtgtgtgtgtttttttcttaactttcattttaagttgcaggg

SEQ ID NO: 798 - DNA, 4046 bp, Homo sapiens
agacatcttggggggccattactgagcctattacatactgtgtgacctagggcaagtcactttacctctctgagccgtaggtcttttatctgcaattgcctctcaattgcacagggaaggcttacatggggtccaaaaagcaagacttctggaagttgcaaagctccaaatataaacaagagtgatattaatagttgagtaccttcccctctcacctgtcctctctttctgtggatcacctgtgaactgggctgatctcacttctgtttgcttctgtggacctagaaatgatcactgcccccagtgaatatggtgaagaagctggtgatggcccagaagcggggagagacacgagccctttgcctgggtgtaaccatggtggtgtgtgccgtcatcacctactacatcctggtcacgactgtgctgcccctctaccagaaaaggtactgagctctcccggcctgcccaccccccaaccctctcctaagggtctggcatctgtaaggaaccctggccttctactcacccctctccttgaccctcattcaaggcagcagggtcaagacgatgctcattcttaggttctagggttcaagtgcagggaaggtaggatgaactgagccccactggtctgagattctaggacctggtggtaacagacacatgatctaggacgtggtggtaacagacacatgatgcccttctcagaagaaatagcaaagaatcagagcaaaggttccagtgcaagtttgatcccaggaggaatcagagaattgcagatgtttacagctcagctgcataattctctcccctctgaagcctccctgtcaggtgggcatccagcctcctgatgaatacctcaagagacggggagctccttgcctcactgaacatacatttcatgtttgaggttttctgatgtgtctgcattgagccagcatctgcttccctgaagttctgctcaggaatctcagagaatggtccatgcccttgctccatgacatatcaaccacttgagattttaaggaaaagctgtgaattcctaattcgtgttctatttggaacaaagacactcagttcccccagcctgtccttaggataagtctcagacctgtgctctgggcacgttccagcagctgacagcccccttctgactggcaatgggtctcccacaggatacttgggagttgaagcacaactgatttactaatatgttgatgaacctgttagcctctcccgggcctgctgcagcctcactcttcacaacgctgaagcgattccaggctggactcttaatctggtgaagcaccatctagagactgtccccaccatctttcccatcctggctcaactcaaaccccttctacatctgctccttttaggggaaagaacacagctctccaacccactcagacctagcttcaggtcctgcaaggtctcagcaaagtcacttgacctttctgagtttctcttctgcctctgcaaaatgaagacgatatggataagaaagtctcaggtttggctgctcgtcagaatcacatcagggagctttgaaaaaacacccagggcctgggccaaaccacccaagaagttctgattcacttgctctggggtgtagcttggacacgggaatctttttagaagctccccaggttgttgcaagagtagccaaggttgagaaccagtcatatagataatgtctaagaccccatccagcttctacaattcctccctgtgtccggggactgtggggtcatgtgcctttattgctggatgctgaagacaagatgaggatcccagtcctggatccctctagaggctcccaggggataatgggttcaaatgggtgttctgtgtgtcacccagttctgagatgtgtatgtgtgcatgtgtgtggtctcctcagcgtgtggacccaggaatccaagtgccacctgattgagaccaacatcagggaccaggaggagctgaagggcaagaaggtgccccagtacccatgcctgtgggtcaacgtgtcagctgccggcaggtgggctgtgctgtaccacacggaggacactcgggaccagaaccagcaggtactgaactggagggatggggacacatccctttatccctgtcaggtgtgtgagcctgttcctaactgtccctgtccccgaggctgagaaagatcaacccacttgaccaggtctcacagctggaatgagactgagccagccctagctcttctgtgttggagtcacacagacctgggtttgaatctgccgctaactggctgtgtaaacataggcaggccacttagcctctcacctcctcagtttccacccttgtaaagtggaatgctaatgctgcaccttgaagagctgttatcaagtcagagacgctgtatataaagtgccacgcttgatgctgagtggatagtgggcactcaaacaaaagcagtgattagtgttagtactttcattctacaacctcagtcaaatgagggaccaggcccagggccagatcctcaaagtggaatcccggtgactccccaggaaaccagggactcagggctggagtaacctccataaacaaacatttagatggtttttccatccttgcatcccaacatcccaccctccccctccaaaacacaaaactcaccaccatatcctttcctaaagcgatcagttggcccatattctgtctctcttccttccttctttctttccttcttttttccctttcttccctccttctttcttttcttttttttcccctccctccttccctccctctctccctcccttccttccttccttccttccttccttgtttccttctttcctcctctcatttatttattcaacagccattgagcacctcctgtgtcaagcctgtaggactcaagaggagagagctcatgcatgaacagtgcctagcagggaagaattggcaccggggagaagaacagaggaagttacaggggttagaggagggggatgttttccagctgacaatgatgggggtatcagaaaggctcttggtgagattgcaccattgcactccagcctggcaacaagagtgaaactccatctcaaaaaaaaaaaaaaaaaaaagaaaggctcttggattaggcttttaacatcaggcaggcgcaggatgcaaggcatagagaatgaggtgatataggaagcgggtatgcctataggacgaggcatggcggagggaagggctaggtggagacagggatcagagggctgactacagaaaatgacccatgatggggtgtatgcagctggaaaaggctgtcagggcagactaaggtctgttcccagaggcctttgatcaccacaatatggaattaaaatgtgagtgtgtatgtctcaagatatgtcaactttggctatgcattagaaccctgtaagagtcttaaaaaacaaaactagggtccaacactagacatatcaaggtggaatctctggtcagagatccattcatggagctcccaaggtgattctaaggttggaaattattgctgttggcaatgggaatctttagggcatgatcagagtttcagagttgggctgggaagatggagcctacaggtgtgtgggtccagttactagacagaggagccaaggccgcagcaagcactcacgaccaagatgtggcctgcagcaggggagatgctgacagtccggacttgatggctgatgggacgggaaggggcagggtgcctgggatggggcgtggaggctgggggatcttgagagtgctgaaggtcaatgagaagtgggtctgggcagtgcaggatggtcaggtgttctgtcatcgctagtatgactcggccccacccggtggagagaggtctcagggcccactggaggcagctcctacccatgacccctgcctctgcgttggcattcagtagcccttgatttatcccaatgcaagaaacaaattttcaataactggtaacattctccgggagtgatatgggccagagcaggctggttttcaggctgcctccctggtcctgagattgccagctcagaggagca

SEQ ID NO: 799 - DNA, 4037 bp, Homo sapiens
agtggcatttcttgtgttctgagtcccacaagccctaacaacagctttctctctcttgctctctctcactcactaaggctcaagtcaggcctgggacagggttgagcaattgccaacctgtcaccatctcccacttctatgatgttgccatctctatccacctgttctggtccccaaactttgtgcttatagatacagtctcccttatacctgtccattcatgaaaaatgacatctgggcatgggtgtggttcaggggtagagaataaaacaggtctgcccatagcagaggcggactctgccttccgctaaacacaaacaagcatgcagggaagcaagtacccttcttaaatatctgacaacatggctttgatgaaatctatcccgacttagccataacctagaaaactgtatagcctttctagaaaaatgtttttgaaatgctcagcatcactaatcatcagagaaatgcaaattaaaccacaatgagatgtcacctcgtaccagtcagaatagctattactaaaaagtaaaaaaataacagatgctggcaaggctgcagagaaaagggaatgcttttacactgttggtggaaatataaattaatttagcccctgtggaaagcactttggagatttcttaaataactaaaaatagaaccatcatttgacccagcaatcccactgctggatgcatacacaaaggaaaataaagtattctaccataaagagacctgcacttgtacatttattgccgcactattcacaatagcaaaggtgtggaaacaaccttggtgcccaacaacagcagattagataaagacagtgtgctacgtatacaccttggaatattacacagccataacaaaggatgaaatcatgtcctttacagcaagatggatacagctggaggccattatgctaagcaaattaatgcggaaacagaaaaccaaatatcacatgttctcacttctaagtgggagctaatccccgggtagacacagacataaagacaggaataatagatactggggactccaaaaggaaggagggagtggggcaaaggctgaaaatcttctttttgggtactatgttcactctatcagtgatgggatcaatagaagctcaaacgtcagcatcacgcattacaccctcacaacaaacctgcacgtgtatcccccgaatctataattaaaattcaagaaagaaaagtgttttatgtacaactgtgaaactataatatatcaatttaaagaagaaaaatgtttcatggcatgggaaaatgattataatattctgttatgtaaaaaagcgagagattttttttcccgaaaaccaaagcacgatgacaacaaaaccgcaagatctttgtttattcctcctggcgctagagatgcggcagtgaataagaacggttccagtccctgattttagagagcttacccttgggttaggagacatgttaatggaggatgcacatgaataaatgttaaattacaggcggaggaagtgttctgcagaagaggcatgcggtgctcccagcatgcggaagcagagcttccgcctggcccaggaggcgcggagagtggctaaggggctgggggcgagggaaggccccagcggggagtcctgtggaagaggaagagctggccaggaggcaaggacagaggagacatgtgccatggaaggagagggcacatgcttcctttatgtgtgttgaaaaggccaccaccactcttacagcaactctctctgagcagtgaggctaacactgtacctcatcttctccctgcacttccacatcatgccactttcccacagagctgggatgatttgcactaaggaaaaagcatttttttaaaaaaaccaaccttaccacacagacagacagcagggctgtttatttatttatgctcctctttgtctcaaagaggattttcaaggtgcttacaattatgttaacagcatggcaggataaaggaagaaaaatcaggccaagggaaaatatggtgaaaagagtcagaggaaaaaggagtgagtatcaccctacacagcagggaacaactttaccatgttttttgtcgtgtcttgttgtgtgaccatttaattgtaatatcggcatttacttttgctgttgttatactttgtcatctcaactctactaaaaaacctcccaccgttatttcctctgccttttattactgtctctcatttaaaacacatctttcactttctgttctgtatttttgtagttgaggaaatctggcatcgcttttctgcagtgaagggaccgtgtctgagtcacctcggcacagtggtgtatccagagcctctgcatagcaagtgctgggatgtctgtgaacgcacagcttcgctaggactgagagtgactaacacccatccctgcagcactcagagaggcacacacaggggctcaagactcagttgccaatttgatttatgggacttattatcccaagtgtcagcagagaggagatattgattcagaaagacttaaataaacaagcaggtgcataatccagagaggggtacagactgagctgagggtgtctggaaagcagtggaagcagacatcatgaagaaacctggggtctcttgaaaactgctcccaagggagtcatggggtgacagaggggcagggacgggctgtggagtcagcgggcacaggtgcactccaggctccatcacatcacacgctaggggcgtgaccttgggaaaatcactttgccttgtgcttttacagaaagaacaaggccttttgtgggggattgtggagaggaatgtccatgtgtatgtgtatgtgtatgtattgcatatctatgtggtcattccctggtacatagtaggtgcttcataaacaaaaataccctcccatatcactgcccttctattccatttgtgccatagtgtgtgacctaagagtagataaagcactttttttgtttgtttgttttggtttagatggagtctcactctgtcgcccaggctggagtacagtggctcaatctcagctcactgcgacctccgcctcctggattcaagtgattttcatgcctcggcttcccagaatagctgggattataggcacctgccatcgtgcccagctaatttttgtatttttagtagaaacggggtttcgccatgttggccaggctggtctcgaactactggcctcaaatgaaccgcctgccttggtctcgaaaagtgctaggattacaggcatgagccaccatgccctacctagataaagcatttctaaactctcctgtaacactccatatagcaatctcaggtgttttaattctcactggtttaatcctaccactatcaccagcaactgtaacagtccccctttgaaatcacttgcaagtgtgttccagttactatgactgcataacaaattaccccaaaacgcaggggcatgaaacattagtttttttcttctcgtggattttgtggctctggaattcagagagagcacagagcaggtgggctgtctctgctccacattctctgaggcctcagctgggaggctggcaggctgggggctggaactgtctgcaggcttgttctctcccatgcccggtgagatttgctagctgttggctgagatctgagctgaggctgtcagctggagcacggggcctcggcttcctacaacatggtggctggttcccaggtacatgtcccgagagcgtgtggggggaactcgagcccccgtctatgacttagccttgaacatcgtgctgtgtccttctaccatattctactattgaggcccttacgaagctccacccagggtgaaggggaagagacatcaatgcccctcttgatggtggagtgttgatgccacactgtgaaaagggcacatggaatgggaagtatttggtgtgaccatctttggaaaggacaatctccatactatgtgtcaggtagcttaggtgatctctcattcctcaaaaacactgaggggctaggtataattatctctattttagagacagacaaactgaagctt

SEQ ID NO: 800 - DNA, 4016 bp, Homo sapiens
ggccagcacagtttcacttcagggaaaggtttggggtgaagcaaacagtgcctcagagaggtacattgggaagggtacataagggtctgtaggtctaggggtcaagtttctaatactcctgaactgggaggtagcctccaagccttggtcatttaaataattaaaaacaatgtctctcccttccaatgctctagggaatgtttagcaagcatctgctgtaggcgaggtcctgaactgggtgacttcctatttacctcgtcagtcgcaggataatcgttcagatataggaaaagacagccgcagcctgaaaaaagtcttttgaagctaaccttctaggtcaggcattttgaggaccagcggagagatccgaggcctctaatcctcgaagctcgctctccccttccccaggctgagacagtcatcactgaggctttggaaaggaattaccgagggtataatttggggtggggtggagacatctatgtttttataaaaaaccaggtgccatgaataaaaatgtgcttcccaaaatgatatgtaggcctggggtgtgcaaacttggaagccggtatttctgagacttgcaaacgagagggaggcactagatattggcgacttttcctcctcccccccacccccattaccctccgaggcaaacactggcattcaaacacgcacgacaaacacaggctcaaacaaactcatgaatgcacacttgcactgtcttgagaaaaaggtcggatccggatcgcgctcagaaaggaggttcaggagacaagtacagagatttcaactttctaaaagtgcgctggatttgctttctagtgagagagatggggacaactgatttaaattcttcactccgaaccatttgggagagaggcactcctgaccacttctcgggctccttccggcccctcttttccaggggaaagagttgtaataataacagtgggcgcttttgagcgctggctagtggcgagttactcttctaagtgcatacatttctttcacagggatactggcctgtgagtttcagcaccgactttctggaactgtaaagtaagccaattttgacgcatagtaggggcttcgtaaatgtttctgcaatgctgtttgcgaatcttgaacttattctggcggtagagggagagtgggatgggcgcagggtcccttttaaagaagggtcaaaagagagaagaaatgggactcggcgaacttccgctttaaataatcgctcttaattaggtctcgggcttttcagtttcggcgtgattataacccttcagggatcgcctaataacaactctgctgactgctcctgtaattaactcctaatttatttcaaacaggaaaaaaaaaaaaaaaaaaaaaaaggagggggggcagccccttcgggaagagccaatcaggggcgagcgtctctggcgtcagcgccaggcccggcgcggattggcggcgcgcgtctcccacttcccctcggaggaaaggctcagctcccagcgcgcccctcccgtctccgcagcaaaaaagtttgagtcgccgctgccgggttgccagcggagtcgcgcgtcgggagctacgtagggcagagaagtcatggcttctccgtccaaaggcaatgacttgttttcgcccgacgaggagggcccagcagtggtggccggaccaggcccggggcctgggggcgccgagggggccgcggaggagcgccgcgtcaaggtctccagcctgcccttcagcgtggaggcgctcatgtccgacaagaagccgcccaaggaggcgtccccgctgccggccgaaagcgcctcggccggggccaccctgcggccactgctgctgtcggggcacggcgctcgggaagcgcacagccccgggccgctggtgaagcccttcgagaccgcctcggtcaagtcggaaaattcagaagatggagcggcgtggatgcaggaacccggccgatattcgccgccgccaagtgagtgcgcgccggggcaggagtaggaggtagcgcggggtactggagggagcggggggcgggtgttccagggctgagggtaccgagacccttctgcgtgcgctacactcccgggaaagcaagcccagggcctctggactcctgggtgcccggggcgttcggcgcgcccagtgcgccgtccgcatccaagacaccctctgggtaataaccgcgctgtgtgtgtctgagactccctcgacatacagattgttttttcaagagcgaaccccagctgggtttacggggtcgctcggtggtccgtttctacagccctcggccctgcgctctggccacttggcttgtttttgtttcactgttccccggagtctctgcctggggagtgaaggagttggatccatgttcagtgagcacttggatgtaccaggaacgagacaggttcaaaactcaaccctgagagttgtgcccccattttaaagatgagctaactgggcttagccagacattgaggagaaaccattttctttcgtgagtcccgcgggtgtcgaagccggatcccacgaagggatggtggcaccagggatggtggcatcagagtctggtgcggggaggaaatgtctctctgtggtctccgcagccagcacctccccggcaaggttctgagcttcgccgggagcgggctggggccagaagcgcacgggctcttcttggctcacagtaataattaaccgcattccagcagggcttgagagtttgcagagtgatgttcactagctcaccagatcgagatcctcactagaacccccaagtgtagacactggacttgtgactaccctatttttcagacgtggacgctgaggcttttaaagaagacggcctttgcttgtcccaggttaccaacaaccactgattggccaggggcacctgttgcccacgccctgctcctctgtttgatatgccctgaccacttttgcgtcctctccccagagagactaggtagagatccgcacctgcaccccacttgagaattgaggctgcagagaattctccgcttcagcatccatttttggtccctgagtccttttacaatttggagacgtcatcctttacagcctcttttacttttatctcttggcttttatggtttctctaccccctaatttcccaccacgccatcccctacctgtaggaaaggtgagggtgggggctgtggagggactttctccaaagctgagagagatcctttcactatttacatcattcagccctcaagactagacgcactgtattttgttaacaaaacaaggccatatacccaggcgtcagtggctgtcccctctggcagtctctctccaccctgttagaaactctgaaagattcaaagggcgaggagattaagggactcaaagaatttaaactcaagtttggatagtgctttatagcacttttcaccgtattatcttatctcctctgtagggcagcagccggcctcttaacagatgaggacatttcagcaaagttcagagaggaatcggcagtttgggcctgaccaaaaaaaaaaaaaaaaaaaagctggggaccatttaatgatcacctaccaggtggcagacagacagggctctgggtactcttaaaattttagtactgtggaccacattgagggattagtgttacttacccactttatcgacagtgaggtagaggctcagaaaattaaaagacttaatttgtttaacaaatattgagtacatagcctacgcctatgcccagccaatgatacaggccttaaatggagtagtgtccagaggttaggaatcctgccatcctttaggcctgtgggtctggaaaggcaatgactactacccctctaaacatctctgccctgtgctcaagcttccctgctctgggtaaggcaacctcgggcccaggctgtgaccttcccatgaaaagaaccagaaattctgagaaccgagtttataacctgcacattctgcacatgtatcccggaacttaaagtaaaaaaaaacaaaaaaacaaaaaa

SEQ ID NO: 801 - DNA, 4036 bp, Homo sapiens
cggcgaacttccgctttaaataatcgctcttaattaggtctcgggcttttcagtttcggcgtgattataacccttcagggatcgcctaataacaactctgctgactgctcctgtaattaactcctaatttatttcaaacaggaaaaaaaaaaaaaaaaaaaaaaaggagggggggcagccccttcgggaagagccaatcaggggcgagcgtctctggcgtcagcgccaggcccggcgcggattggcggcgcgcgtctcccacttcccctcggaggaaaggctcagctcccagcgcgcccctcccgtctccgcagcaaaaaagtttgagtcgccgctgccgggttgccagcggagtcgcgcgtcgggagctacgtagggcagagaagtcatggcttctccgtccaaaggcaatgacttgttttcgcccgacgaggagggcccagcagtggtggccggaccaggcccggggcctgggggcgccgagggggccgcggaggagcgccgcgtcaaggtctccagcctgcccttcagcgtggaggcgctcatgtccgacaagaagccgcccaaggaggcgtccccgctgccggccgaaagcgcctcggccggggccaccctgcggccactgctgctgtcggggcacggcgctcgggaagcgcacagccccgggccgctggtgaagcccttcgagaccgcctcggtcaagtcggaaaattcagaagatggagcggcgtggatgcaggaacccggccgatattcgccgccgccaagtgagtgcgcgccggggcaggagtaggaggtagcgcggggtactggagggagcggggggcgggtgttccagggctgagggtaccgagacccttctgcgtgcgctacactcccgggaaagcaagcccagggcctctggactcctgggtgcccggggcgttcggcgcgcccagtgcgccgtccgcatccaagacaccctctgggtaataaccgcgctgtgtgtgtctgagactccctcgacatacagattgttttttcaagagcgaaccccagctgggtttacggggtcgctcggtggtccgtttctacagccctcggccctgcgctctggccacttggcttgtttttgtttcactgttccccggagtctctgcctggggagtgaaggagttggatccatgttcagtgagcacttggatgtaccaggaacgagacaggttcaaaactcaaccctgagagttgtgcccccattttaaagatgagctaactgggcttagccagacattgaggagaaaccattttctttcgtgagtcccgcgggtgtcgaagccggatcccacgaagggatggtggcaccagggatggtggcatcagagtctggtgcggggaggaaatgtctctctgtggtctccgcagccagcacctccccggcaaggttctgagcttcgccgggagcgggctggggccagaagcgcacgggctcttcttggctcacagtaataattaaccgcattccagcagggcttgagagtttgcagagtgatgttcactagctcaccagatcgagatcctcactagaacccccaagtgtagacactggacttgtgactaccctatttttcagacgtggacgctgaggcttttaaagaagacggcctttgcttgtcccaggttaccaacaaccactgattggccaggggcacctgttgcccacgccctgctcctctgtttgatatgccctgaccacttttgcgtcctctccccagagagactaggtagagatccgcacctgcaccccacttgagaattgaggctgcagagaattctccgcttcagcatccatttttggtccctgagtccttttacaatttggagacgtcatcctttacagcctcttttacttttatctcttggcttttatggtttctctaccccctaatttcccaccacgccatcccctacctgtaggaaaggtgagggtgggggctgtggagggactttctccaaagctgagagagatcctttcactatttacatcattcagccctcaagactagacgcactgtattttgttaacaaaacaaggccatatacccaggcgtcagtggctgtcccctctggcagtctctctccaccctgttagaaactctgaaagattcaaagggcgaggagattaagggactcaaagaatttaaactcaagtttggatagtgctttatagcacttttcaccgtattatcttatctcctctgtagggcagcagccggcctcttaacagatgaggacatttcagcaaagttcagagaggaatcggcagtttgggcctgaccaaaaaaaaaaaaaaaaaaaagctggggaccatttaatgatcacctaccaggtggcagacagacagggctctgggtactcttaaaattttagtactgtggaccacattgagggattagtgttacttacccactttatcgacagtgaggtagaggctcagaaaattaaaagacttaatttgtttaacaaatattgagtacatagcctacgcctatgcccagccaatgatacaggccttaaatggagtagtgtccagaggttaggaatcctgccatcctttaggcctgtgggtctggaaaggcaatgactactacccctctaaacatctctgccctgtgctcaagcttccctgctctgggtaaggcaacctcgggcccaggctgtgaccttcccatgaaaagaaccagaaattctgagaaccgagtttataacctgcacattctgcacatgtatcccggaacttaaagtaaaaaaaaacaaaaaaacaaaaaaaaaacaccatgaagaattgttggtgctttgggcctggaggtggcagcgggaaccctgtggtcagagtagtgggtcctgagaatgccaggcgacggagcctggggcgagagggagctacccgcccgggcctgattttgttatttggaggaagtaggataaacgctgttttgccttatataatcgcatccttcctctggctggtttaaaattaggtgggggtggagggatggggagtgttgcattgggaggaagcctcatagcttcatggttttgatacacatgtgcgatcccggtcacctggatttcataattcaaatgtaacccgaaggaccagctggaattaccctgcccaggcgcacagtgcttcaaaaccccacgtagagccaggagcaagagtatatacacgctaggaacttggtatctgagctgagacacctgagtcctcctgagggcccggcctagtttagaaagggcgagaattttgcaggtctcttgagagtctctgacagtgttgttaatttgtaaattaagaagctggctccccggctgtctagtaacttagggattagcaaatgcaaaagtatagacttttatggtagtttcttatccttccctttcccagatttctgttctttggttggttacaaagcctcttatctctttttgattcagtaaagtgatgggtaataatgcgacactggaacaaatccatctcttgttggaaatggaagctgggttgggacttgtgctgtgtcaccctcaagtatgaagtgtaaactctttcttgggccaccaaagtaactaaacaagaaatgcaacattctcccatgaatacattagagttaatactgtggccacatttggaaaattagcatagctcgtaaaagccaaatgcagaaaattaattgttaagtattctatcaccacagctctatcctcctccgcccacccacccttgaggaagacaagcccaaagttagttgatgctatggaatcacaaggatgtcccagtccgtgatttgctgtaattgaatccattttaaatgtggagtctggatgctgttggcatacctttattttgcttgtttttccccctgacaaacaaatcatttacacatttgcccgaagccatagaatgggtagaggggatgactaagatgtcatcacgtgctctcaatttggaggcagcatgatttcccctgacatttacatttatgggctagctaatttt

SEQ ID NO: 802 - DNA, 4048 bp, Homo sapiens
tcccagaaccagctgaaaagcaaagttcagctgaactgcaaactcattttcatgatgccaaacaatttgcacagcttgatttagggattacactgctccatgaacaactggtaagttaaccctccaggaaactcagtgattgttttaaatgcatctcatccccattaagatatgaactctttccccgcgccttaacaagtgaattgtgtgcatatgcaggagtcatctgtaaacctcacttgatgtttcccctctgaactctgattggtatacctacagctattatttacttcacctctactcagagttatccagaatgttacgcatacaaaggagtataaatagggaaagcaggttatcaaacgccgtggatggcattttcccattacacctagatacatatgaaaaaatgtacaaacgactagaatgattacaccatagtgataacaatgattactactgggtactaagataatgtattttataattttttccttttgtttatctctcttttctgttttctacattgaaaatgtattacttgtttttaaattaaaaacatttaatttgaatacctcatatgagtgtggccttacaggcctgggtacccaggaagcctggtctggcctgtataataattaagaaataattaattgtataataattgtgcttgtataataattaagaaatctgctacctcctttcaggtagcagcccttaccagggctctagaatctcctgaatcagtttagtctccctgaagccactaagatctgggcatgtcaaaatgggtggcaccctgcccagtcaaagcacttccactaacaggtccttgggtgggaactagaagacagcatcaggcttttgggctttcaaaaagtatttcttaatgtagagactcctattcctgtagtcccattaacagtagactcttgattaataagcatggctaatgaaaatccacagaatcacagaaccacagaatcctggagctaggagggaattcagcaaacccctaaggtgggagagtactttgccccaaatcctcagttcatcgtcatctgaacactttcatctgccaacagctacactcccaagacacaagaagccgaggatttggcaatgcagtaaaaagacaagcctaattcagggaaaccctacattcagccaaaattttttgctggcagtataaaacccccacttccttctgaatcctgcagtctaaatcaagccaagaagggcaacagggcttttacaagcctggccaaccgattacccacacaatgtcagacagaaacagcccaggactcaaatttccctctgacacctgacctgcccctgactacatacctggtgtcttcagtagtttcactgggcccatggtggacaaacttaacacagagaaagaatgtgcatgacagcctctctattggttgtcctagagagataggaggatctgaggcacttggtggcaactgcttaggcagcaagcctccaaacaagcctttagcaataggaagccatttccacacatccagatcacttgccaagctgatgggtgccttccctcctgtccccacctctccccgacccccgtctcacccacagaaaagtagcacatagaaaatatggcttccagggtgagagatatagggaatcccacagtgcccttgggggacacagtaatgtggctcagacatagaccactgtacagatccagcagcacaggaagggctgcaggcctgggagaaaagtgacagcagatggccggtccaggctttctgggtacccaggcctgtaaggccacactcatatgaggcaggcagcaccccttggaacaatatctatggtaggtctatagaccaagggctctgctctgtgccgcagacatccacacacatacataggtacacatgacatagaattcaatagcttgaagaaattgcctatgattcttcaacttgcttacctggatctgaattcttccataacattttaaatcaatccaggtgtacccatcttcagaaataatggaccccaatgtctcagaattacagagtcagagtcctcaacatgtccaaagcatttcgtggaaattattccaccatgaagactagaatggcctctcttcatggattcagcttgctaaggaggcttagttcagagggactaagacactctccttttagcaaataactaaccaaaagggcaaggaagggaggtaaaagacgtcataaccaggccagtagaatcccctggtctggccattacatgtgatgatttcaaatgggttcttagtaccttaattttgagggaaaagagtagaggaaaccagccaatgctttgcatgcttagtttctgctgatgacactgaactcagagaactgagatctttggagaaaccaaagatggctcaaatgactcgtgataataaatgaacgtattactgctcgctgacaaattgaagtttcctaattataaagcagaaccagtggccaccaccatagaaagcctaccccacagatggagaagaggcaaagcactgaaactcagtccgagggacctccccagccatgggggcagggccaaatggggcttcttcaggaccagcaaagccatttttctcatcagcaaactagcttcagagaagtttgcaatcagggcactctcttccaagcctagagacccagggaaaggggtacgggggtgtcccaaggcaaagagaatctacactttttgcccccggagaggctacttccctcccaagatgcctgggattttccacttcagcagggggaaggtaagtcacatagcaaaataatgagggcacagaacagatgacctccctatagagttttgaatgagaaacacagcagggcagatgtgccccttctctagtctaggaggagctaggtccagcccctgaacatcctccccctcagaaaagctgaggccagactaagaattcaccagaccaaggagctacaacaggacatcagagctgaggctgcaaagccaggactgagaccagaccaggcaggaaactgtcaagagctttggtcaccaggcctggctgccctccaacatcagctggctctttctaaattgacacaccacatgtccctaaaattctctcttcaagtaataccaccatcaaagcaggacatttcccagagccttagagcctggtgtctgctcagtgggactcaaccccagaagaagctgttaaatcacccactgtttcagtttacaaacttcttacgacttggcaacaagtgaaactacattctggcagcaactgcaagttccctagtacccaggacttcccgttttttcttgctgtactccctcctgttaaatcacagactcatccatctccaacccccagaatatagagaaagagcacaacactacatcttaactcctgagacgtggagaacacttctcctcctgagagcttaagtaccaaatggaagctacttttcccccttggtctcaaatgtattactagattctgaactggactccaccatcacgtaagaaagcagtcatgggcagtaattctgggagatccagataggacatgccagccccacactggtggcataggaagccaagttgctgcttcctccctgtgcactcccatttgtctggcctctcttgatctcagctggcgctcacttcacatcagctatgatgcaatccagcaactaaagtattagttaataaatgctgacagcacagccttttctggtcacgtattcatactaaaatacgggggagagttggggggagagggggatatatgggaaatctctgtaccttcctctccattttgctatgacctaaagctgccctttaaaaaatacaaggggctgggcacagtggttcacgcctgtaaacccagcactttgggaggccgaggcgcgtggatcacctgaggtcaggagttcaagacccgcctggccaacatggcaaaaccccgtttctactaaaaatacaaaaagtagctgggcgtggtcgcatgcatctgtagtcccagctactc

SEQ ID NO: 803 - DNA, 4069 bp, Homo sapiens
ccccacacagacagccactcacctcttcagaacgaattgacaaacaaattcggtacatcctcgacggcatctcagccctgagaaaggaggtgggtaggcttggcgatggggttgaagggcccggtgcgcatgcgttccccttgcccctgcgtgtggccgggggctgcctgcattaggaggtctttgctgggttctagagcactgtagatttgaggccaacggggccgactagactgacttctgtatttatcctttgctggtgtcaggaagttcctttcctttctggaaaatgcagaatgggtctgaaatccatgcccacctttggcatgagctgagggttattgcttctcagggcttccttttccctttccaaaaaattaggtctgtgaagctcctttttgtcccccgggctttggaaggactagaaaagtgccacctgaaaggcatgttcagcttctcagagcagttgcagtactttttggttatgtaaactcaatggctaggattcctcaaagccattccagctaagattcatacctcagagcccaccaaagtggcaaatcataaataggttaaagcatctccccactttcaatgcaaggtattttggtcctgtttggtagaaagaaaagaacacaggaggggagattgggagcccacactcgaattctggttctgccaaaccagccttgtgatcttgggtaaattccctaccacctctggactccatcagtaaaattgggcgtggactaggtgatctcatagatccttcctgctggaacattctatggcttgaattatattctcctaattattgtcaaaattgctgttattaagtatctactgtgtgccaggcactttaaataaatattgtgtctaatcttcaaaacaaatttgcaaggaaggtttttggagataaggaaactgagactcaggattaagtaacacacctaaagtcacaggtgagcttggaactgaacccaagtgtgcccccactccactggaatttgcttgccaggatgccaatgagttgtagcttcatttttcttagagactttcctggctgtggttgaacaatgaaaaggccctctagtggtgtttgttttagggacacttaggtgataacaattctggtattctttcccagacatgtaacaagagtaacatgtgtgaaagcagcaaagaggcactggcagaaaacaacctgaaccttccaaagatggctgaaaaagatggatgcttccaatctggattcaatgaggtaccaacttgtcgcactcacttttcactattccttaggcaaaacttctccctcttgcatgcagtgcctgtatacatatagatccaggcagcaacaaaaagtgggtaaatgtaaagaatgttatgtaaatttcatgaggaggccaacttcaagcttttttaaaggcagtttattcttggacaggtatggccagagatggtgccactgtggtgagattttaacaactgtcaaatgtttaaaactcccacaggtttaattagttcatcctgggaaaggtactctcagggccttttccctctctggctgcccctggcagggtccaggtctgccctccctccctgcccagctcattctccacagtgagataacctgcactgtcttctgattattttataaaaggaggttccagcccagcattaacaagggcaagagtgcaggaagaacatcaagggggacaatcagagaaggatccccattgccacattctagcatctgttgggctttggataaaactaattacatggggcctctgattgtccagttatttaaaatggtgctgtccaatgtcccaaaacatgctgcctaagaggtacttgaagttctctagaggagcagagggaaaagatgtcgaactgtggcaattttaacttttcaaattgattctatctcctggcgataaccaattttcccaccatctttcctcttaggagacttgcctggtgaaaatcatcactggtcttttggagtttgaggtatacctagagtacctccagaacagatttgagagtagtgaggaacaagccagagctgtgcagatgagtacaaaagtcctgatccagttcctgcagaaaaaggtgggtgtgtcctcattccctcaacttggtgtgggggaagacaggctcaaagacagtgtcctggacaactcagggatgcaatgccacttccaaaagagaaggctacacgtaaacaaaagagtctgagaaatagtttctgattgttattgttaaatctttttttgtttgtttggttggttggctctcttctgcaaaggacatcaataactgtattttaaactatatattaactgaggtggattttaacatcaatttttaatagtgcaagagatttaaaaccaaaggcgggggggcgggcagaaaaaagtgcatccaactccagccagtgatccacagaaacaaagaccaaggagcacaaaatgattttaagattttagtcattgccaagtgacattcttctcactgtggttgtttcaattctttttcctaccttttaccagagagttagttcagagaaatggtcagagactcaagggtggaaagaggtaccaaaggctttggccaccagtagctggctattcagacagcagggagtagacttgctggctagcatgtggaggagccaaagctcaataagaaggggcctagaatgaaacccttggtgctgatcctgcctctgccatttctacttaagccagggtttctcatatgttaacatgcatgggaattccctgggcatcttcttgtggtgtggagtctgacttagcaagcctcgggtgggtttgagggtcaaatttctaccaggcttatatccctggtgatgctgcagaattccaggaccacacttggaggtttaaggccttccacaagttacttatcccatatggtgggtctatggaaaggtgtttcccagtcctctttacaccaccggatcagtggtctttcaacagatcctaaagggatggtgagagggaaactggagaaaagtatcagatttagaggccactgaagaacccatattaaaatgcctttaagtatgggctcttcattcatatactaaatatgaactatgtgccaggcattatttcatatgacagaatacaaacaaataagatagtgatgctggtcaggcttggtggctcatgcctgtattccctaaactttgggagcctaaggtgagaactccttgaactcctaaggccaggagttcaagaccagcctggataacatagcaagaccccatctctacaaaaaaccaaaaccaaacaaacaaaaatgatagtggtgcttccctcaggatgcttgtggtctaatgggagacagaacagcaaagggatgattagaagttggttgctgtgagccaggcacagtgctgatataatcccagcgctatgggaggctgaggtgggtggatcatttgaggccaggagtttaagaccagcctggtcaacatggtaaaaccccatctctacttaaaaatacaaaaaagttagccaggcatggtggcatacacctgtaacccagctactcaggaggctgaggcacatgaatcacttgaacccaggaggcagaggttgctgtgcaccactgcactccagcctgggtgacagaacgagaccttgactcaaaaaaaaaaaaaagaagtttgttgctatggaagggtcctactcagagcaggcaccccagttaatctcattcaccccacatttcacatttgaacatcatcccatagcccagagcatccctccactgcaaaggatttattcaacatttaaacaatcctttttactttcattttccttcaggcaaagaatctagatgcaataaccacccctgacccaaccacaaatgccagcctgctgacgaagctgcaggcacagaaccagtggctgcaggacatgacaactcatctcattctgcgcagctttaaggagttcctgcagtccagcctgagggctcttcggcaaatgtagcatgggcacctcagattgttgttgttaatgggcattccttc

SEQ ID NO: 804 - DNA, 4049 bp, Homo sapiens
atgatgggcaaatgcagctacagatctcaatctatgatacttatcaagcaaatcaactctttcttgtaatgtcatgacttttctctgcttcttgggagcacttgcagtatcactagaagcactacatgtgggtcccatggtattattcaatgtttacaatactgtactacccacaatgaaaaatacatgagaataaaccacgaaagatcactttttgtgatctgctaaagagacaaactgcttctgcagagatgattagcattatgtgacatcttaaggagatacttgcaactctttagctcaccacagtagcaacatgaggtagctacaaaattattatagtagtacagtgtgtaccacagttaatttaatgcaattatgattgaaaactgcatctttacatttgtttacatttctcttgactgcaaatggcaccatataaagtctgtaagggcttatgttcatatattttgataaatttcaactttgtatagtagatttgtgtatattttatggtagtaaatgatgaaatagactagtatctgtatatattttatgcattcatgaatactttagtttttgaatatttctacactacacagttttgagttttttcaaattgtctcaatctccaaaaaattttctcatttatttaaaatctgcatgtaagtgtgcccatgcagttcaaacccatgttgttcaagggtcagttgtattagaaactgaaatatgtcatgcatattactattccaatttttcacattctatctgaagtgcctccaagcctgccctcttcttattcacatagtgctaaatgtagtcacgtaatttttatgaagccaactatgctttgaaaagcccctgtaaagagactgccagactgtagataaggaccttacaagccttgctatcactttcattttatcttgttctccactactcttttttataccaggttttgatcttttctttctcattctttccataaacataagtcaaactccacacagcccaagtgaactgcatctgaattggtaaaactgttttaaaaagtataatttacccaatctcttttctctatctcattaatattgtctatgactacatgaaccaccatatatttaaacattttatctgagcttattataaaataccttgtacaaaccaaatatgttcatgggtgtactgattttgaggatgatgatatgattgccgaatcgacttgaaacagtgttctgcataaagacacctaagggactaatctgacaagtgtctcaaaagcaggacagagaaacatgaatatgcattaaatgcctaagtggaaaaaaatagttacttatgtagcaagtgacagatggcaatataagaatcacagtgtaggaaaggcatttaaaaacaaaagtaatacctttcctactctatagcacagaaagaataaaaaagagaagcctcacctgtcatctctgatatggtagaaaaatccataaccattgtgtaccatgggaactaccactccctggactcgtaaatagccaaccagacttgttgagagaacaaaatttccacctcctccgctgtgtggcacaataaaagaacattttactaggcctacagatgcttatattgtttctaaaaaccatttaatatacaaaaagaggaagccaattgatgaagctgtaaaacactacactatattaccttttggaaaaaagtgggtccgtaaagagttctggaacaggaagaccttcctcttttgctatgagtaagagacctaaaaggtgacgatcaaatcctgcaatgaaaccccaaatctcaggttagaaaaaaatttttcaccatgagagatttttaagtcagaaaaattttaacttaagtaccttttccagctgaacaatctttcatcattttattatgctttgcaaaagcttgtaacatcttttgctgccgctcacgaagctgtattaaaaatcgagagacacttcaataacacactgtgcaaaacccaactagaaaaaaatcctaagctcattgtaattaggattggggtaatttgggagaggaaagatttctaggaagatctataacacatactcctatatctttccatcagttattctatcgcctagtcttccctgtatatcctgcttcttatttctttcctggaataggaaactatgaacttgtgggcagcactgaagtgacactaacaagtataaagataaaagcaaccgatatttcaaaaatgaaagcataactaaaaatgacaataaagcagttctataaaattaagatacaggcactcatatataaccacatctagcaaaactaaagaaacaaatataatactaaaataacagtgagaaggaaatttgctgttgtctaaatgcttcaaaaaaaagagtatgaaacaaagcatacaactgtcctggttccactatatgaaacaagaatctgtcatttcaaaaacattcaaccacatcaagaaaaccttccttttaaaggcaccttgggatttctgcactttgttggtgttgttctaaaggtagattagaagtcctgaaatacctaaagtactgaagaccctttgcctagaaaataacacaaatgggatccttttcctgccttccctgtttccaattacacatttcactggtgaatgaacaaatgctttaaaaacctcagaaaagatgtctcaaagtattttaatgatccaggaaaactgaagcaaagaagttagttactcaaagaccacggttcctttagaacaattaaacaaatcttgtgagtttttttcctttccaatactcacattgacagaaggatcctgcatggactggcaccacctcactgcttcaactgtgcatgatcgcatagtctctgtacggccatgataaaaatgtcttgtcatagctgtttcatagcaacaaccagggctacaagaaaaaattaaaagagtgtatcataagaaagaaaatgctctaatatcattacagatatagttgcctaataaagctagctttgttcagagactaagccctttaacacagataggttggagactttcaacaaaaaagagcctatttccaataccaaagagcaaaaaatactctgataatgtgggctgtttcaaaggcgtggctgctgtcaggtcatatacattacagcctctaagatggcccccgtgattcctgcctcctgctatttatgctctgctgtaacccctcacttttgagcgcaggctagacagtgacttgcatctaatggggagagtacagcacaagtgatgggatatcacatctgcaattaggttacaaagagagctctctcttgttctcttatttctcatctgaagaaagccagctgccatgctgagggctgcccgatggagaggccctagcggcagaaaactgagggtgaccctctggacaacagctagggaggaactgaatgctactagttcccgtgggtgagctgagaagtggacctaccctcaggagagcagatgaaaacagccttggctgatactgactacaacctcatgaaaaacctttattaagtcagagttactcaactaagctgcatcacaaaaaatgacccacaaaattgtgatataaaattactgacccacaaaatatgtgatataaaattactgacccacaaaatgtgtgatataaaaaagtatgtgttttaagccactacgttttggggtaatttattacacagaaataggtaatacagagtccttgacctttagtgcctccatatagaacatgaaggactagaataaagtagaagtataatttaagaagttccccagggtgatatctgttttcctgggttggagaatgatatagcaattttaggtataaaactctcttactttcttattggttagaatttagagtcaaagagatcaaataaagtgagagtgaaaagtctctgaatgtgggtactaggagggctcaaacagttttcaagcctcttctgttcagtgtttctgtctctctggagtgaaatggtatcccttcaaagtgtgaaggagaaagtgt

SEQ ID NO: 805 - DNA, 4032 bp, Homo sapiens
aatactgaatataagtttaatttttaccctgtcatgggcctttccagtcagtctgattgttctaagcaaatactgacttactggcttataaaggtgaactacagactcctgcccaaattcaaagctgacttccaaaacagggtgctacctgcttattgcctccccaccgctttcagttttgctgccttctcttaccttgaattctcggctctcgaactttgactttgatcctcaacctccagccctttcatatttggcttttgtcattgattttctagcatgtagccccgtggctctcttccttgagtgaagaccaactcttactgataatgcttgtatctgccataaccttgggacagcacccatgacagagccctgggagcctgtccccattagacagtcaccaaagtgttaagccttgtttcttttattaatagttgttaagcctaaatcagccttgttaagcctaatttagttgtttctctctggaaatcttctgctttgctattatagctattctgcaggtaacataggcaaaccagctcaccaaaactctgtaaatatggtgtgctgatacgatggtgggaatttttttctttattgagatcaagactagctggacttgtgtctattcctttgcctgtaagctttaccttacacgaggctgtattttcaagtacatattacaacacttccctaggagcaccatgcctcctgcctatagcaagtaaaacaaaaacaaaaccatcactgccagcaaaaataatcctcccaaagacactgccctttgtaacttgttccttttccatgggattcttgtccttagtgctatcagagaggtgagggaaagttaaggctagtagttttcagggaaaagagaggtagaggtaggaccagagtcaaccagcttttggggccctgcttctgatcagctttttcactgctgtgcatgggggaaggggaaatcaagtcaaggtgaagggttaggattattctggggacagcagacctgagtgggacaccttgatgcaggcttctttaacgcagagtaggacacagatggctggaggagggcagacaaggacaaagagaagtgtgaaaaaagagggtcaaatgtgctaccattttgccagttagaccaagatagggatggcttaatcaccataaaaatcatcatgttggccatgctggcctcaatggtataagtcttggagggttgttgttttgaagctgctgacaccctcatgcaacgatcctccaaatggacaatctagtaactttttagtttttttttcttttttatacccttcttatagtttgtggactttggttttcagcttctcgatggtcaagaagcaaagaaactcaatgtccagtggctcagagctcaactcggaatcgtgtctcaggagcctatcctatttgactgcagcattgccgagaatattgcctatggagacaacagccgggttgtatcacaggatgaaattgtgagtgcagccaaagctgccaacatacatcctttcatcgagacgttaccccacgtaagttaaagagtagctgaaatcagaagagactactttttatcccccaaacaattaccaaagttatgccaacaaaatcttgtaacaaaatatgttgatttactaacattaacaacttggacaaggcacttcaggataccaagcttccttatttgtaaatgggaatacattatgcctacctcatacaaatgtagtgagaagctcaaaaccaccatacttcaggttacagactggtggttgagggctgcatttagactgcagtcatgtttggtttagccctatggtacttttaaaacaattatagtttttattttgagataattatggatttacatgtaattgtaaggaatacagagatcttatgtaccctttacctagtttctgccaatgacaatatcttgcaaaactagtatacagtatcacaagcaggatactgatattgatacactccactcatcttattcagacttcccttgttttacttgcattcatttgcatatggatttagttctgtgcagctgtattgcagatggggattcatagatccactaattaagaacactggccaggcacggtggctcacacctgtaatctcagcactttgggaggccaaggtgggtggattacgaggtcaggagattgagaccatcctggccaacatggtgaaaccctgtctctactaaaaacacaaaaatcaaccaggcgtcgtggtgggcacctgtagttgcagctactcaggaggctgaggcgggagaatcgcctgaacctgagaaacggaggttaaagtgatccaagatcacaccattgcactccagcctgggcgacagagtgagactccgtctcaaaaaaaaaaaaaaaaagatacagaacattctcatctccataaagatccctcatattgcccttttagagccatgcatatatcccttcctcccaccctcattcctctcaaactctggcaaacatgaatctgttctccgtttgtataattttatattttaaaaatgttttataaaaatatatacagtatgtaaacttttgggattaacttttgtctttcagctaattccctgaagttgtgtgtattcataggcattgctttttattactgagtgatattccacagtgtggatgtaccacagtttaaccattcacctgttgaaggatagctgggttatttcctgtttctggctattgcaaataaagctgctgtaaatacttgtatacaggtttctgtatgaattcaagtttttatttctttgggataaacacccaggagtagaattgtggagcagtatggcaatttcatgtttagtttataagccactgctaaactgttttccagagtggccatcccattttacattcctaccagcaatgtgtaagtgatgtagtttctctgaatctttgccagcatttactgttgtcattagtttttatttttaccactctgataagagtgtagtgatacatcactgtggctttaatatgcatttcccaatggcaaatgatgttgaacatagttttttatatgcttatttaccatctatatatcctcttggtgaaatgtctccatgttgtttgcccatattctaattggatttttatcttttactgctgagttttcagaagttttttttgtttgtttgtttaacatattgtaattactgttggatatgtagtttgtaaatgttttctcccagtctgtagcttgtttattcatcctataagaaggtctttgcagagcaaaagttttacttttgatgaggtccaatttaccaattcttccttttatggattatgctttcagtgtcaagtctaagaactcgttgcctagccctaggcccaaaatattttctccatgtttttttctaaaagttttatagctttacattttaaatttcagtccatgatccatttttagttcactttaaacatgtgtagccctggaaggatggcttgaggtccctaaaagtgatggtagggacaattcattttatggcattcttccagcattcggggttccactgggttacactgacgtagagcttaattatttttgcttttattttctgctatagttagaaatcactcacacccacaaataaaattttaaaaccctttcattttggttagccttaccaacctttaatgcacattgacctgaatcaaatattggatttgactgtgaatagaaaaatttacagcttcagctcttaatataagtgaccactggaccttaggaaattaattcacatgatatacatcactgcataagccctgcaaactgaactgactcaatttacatctctattcatatgctctttctcagcctagaatgctctctcaaaatctagctccccaaacttctctaaaaagatttctttcatttatttccccttttttctccttctaccctgtctccataacaacttctatctccttcttctgatctttcatagtgtgctgtgtatactactacagtcct

SEQ ID NO: 806 - DNA, 4013 bp, Homo sapiens
actaataattgtcaattgtgtatgaaatattttactgtattaatgtctagaacttaaatataaggtgattaacataaaacgttgagcctatagaaagcacttaacatagttatgataaagaacttctgaatattcaaagtgcatttcattttacttcatgtccaaatgctactgtttggacaaatgtcatccctgtttcacaaaccttcatgcagaagactgtaagtgaattgttcagggtcggacatgtgctggcatttaagagatcctcttctttttggctgtgatttctataattaagatggcagccaccagatggcagtaatgcctcaattttgtggttctcactataatggcaattgggcttaacatttacttgagccttactacgtgccagttattgtgctacatatttatatgcaccaatttattacatcttcacaataatcctataaggcaggcactattgttatcccaatttcagaaatacagaacctgagattcaaacagaagttagagatttggctgggatttaagttcaggtctagtttcaaagctcttacctctactatatggtctctttatatgtgtttaagtgtctaaatctacacataaacattttatttacaagtacatgcactgaaatgttcacatgtagattataaccatgaacattcttagtcttatttatgtaattattatcctttattgaaacatgaggaagtgaagcagataataaatataaattgtgatataggttttatagcattgcactttacaaagcccttttacaagcattactgcaactgaccttaactagttatgagaagtggaacagacagtatctctatagggaagaaggcgtcagagactgggtgagtgactagcttcagaggcaccatattaagagggaagattaacattcggactaaccatgtttccactaaaccaattatgtctggtgaaatcctttcttgtcctcttgtaatcagcatcagctgccgctgcatgcagcgttaggtataatagtatctccaggtttccatcagaattcactctcctcattttcacgctgcatcctctccaagacttggagcttgctaggacaatatgtggttcccaggacttgggaacccctgggtgtctagagttcttgaagattctcttggctgctggctgtgggtactttagggcatcatttccttgacttctgagtgtctcaactaactgctgaagaaacactgtgtagctctgtttcctcccctgcccctcaatcctgcttctttccacatttcatatgggagaatggtcagttggatggaatgaaaataaacttttcttagacaagttacatgatagaaaacatcttgaatctagttaatagtcttagctccattaattgttagaattttgtcagagtagagcaggtagaattgagcagtattgaaacaaaacaaaatcttgggttattagctttggtcttgctattcacagtgtgtgaggctggagaagatccccaacttctctagtcctcatgtcctaccttagtaaaatgagaaattgtaccagatactgccccaagttccttccagctaaaaccctgttattctaagcatcagagattgaataactcagactggccagtttaaatttttttagtagctactttaacctaatagggttatgaaatatgaaagattaaatatgaaatatgaaagattttaaatatgaaagattaaaaatgttttaaatgttaatatcagcagttcaatcatagtttaatattgtttactcagtcagcacttgcttaagagtcggaaagaaggttctagaaaaaccccaaatcactatttaaaaagaaacactctcatttacctgggtacagtttcatcatcattaaagtacaacagggtttgaggtattcccatcccaattttccaaaaagggcttggtagtgagggtgttggttactgggcagggagtggggagggaagactgcctcataaccatcttgacccagggcttgtctggtcactgagattaagggccctctgtgccacagctaacccgtaagggagttgatccatgactagaatgtcaagaggagtgtcaagtcattactggtttctccttgtgtaaattacacagcaggggtagcagaatagcattatggcttaggaacatggactccacatcagatagtctcagttggaattcttgctttgctacttattaactttagaacttaaggcaattcagttaacttctctgtgcctcggttctctcatctgtgtaaataggaatactatttccctttcaaggttgtgaggctaaatgagatcatattggtgaatgaggtaatacttggacatagtaaaagctcagtaatttttctctattcttgtaattgctatctgttatatctttattacaaatgaaaaatctatggttattcagtctcaagcatcacatatcttcctttcagctcattgcagaagctaagaactgaggtaaaaaaaaaagtcttaaagctgttaaaaacctaaaattaagatcttatgctccatgtgctgttggtttagatgactcaactacagaactaagatttagactaaatagctaagtcacagacaatcaacatttgtcaagggtggtttggctgtaagaatcagagaactgctctggctggtttgggtaaaagcgatttgatataaggacactccaaagtgcaagaaatacaggcagtttgtgtgtaactggctcttacagccacaggctctaatatctgagtcttcctatacatctattccattcctcggatgctgtatattcagaccagcttcttacacatacccaatgtgacatcagcctctgaagccccagggcctcacggttcaaacttgtgtccagggccaggaaaccaaatctgattgacccagattagtcagatgtctgactctgatttaatcacggatttaaagcatgctcatgttgttgacaattgggatctccttcccattgtgggtggacagcttttataagaagttatactcagggaggaaataattggcagctccaataggcccttagaaatcacagcctaatcctttcttttaggactctgccttgtgaagaaagccaggccacaaaggggttgtgactaaggccagtcatgtaactgcctggtggcaggctgggaatagaaccaggcccttggttcccaggccacagttcttgcccttagctgatcagccttcctgagcatacaaagacttgcctaccatacttagcacagccagaagtaccagttttgtcataaagctagtcttgaacagattatgcctttggtttttaatttaaaggaaattaaagcctatcaacgtaaccttcaggatacttttgacagagccctagggcttatttttcattatttcagaagtgaaaacaccacttctaatgaaggtctattctgtgttacagattgcaacagaggcaatagaaaatattaggacagttgtgtctttgacccaggaaagaaaatttgaatcaatgtatgttgaaaaattgtatggaccttacaggtaatgaaccatatgattcctgctaagaacctagtgctttcctaaggctgaattattgtcccaaaaagataataaaagctctgctgctccaaacaatgatatgactataagggtggccttttttcaacaattctgtcactgaaaataagtagctttttgatgtgactaggacacagaattatattttttacatcttatgcaaacaacaagaataggtctccaagacgtaaaagatatagagaattgcacagtctttggttatcagtgcaggcaacataaataacctatctgggtgacttaagacaaacattcctttaaggaattgctcaaacctttctttgcagtgtgtagactgaaccaaaagtgagacttgctattgggtatgttccagaggaaagtatttcatttgttctctgaatgaggaccagatcc

SEQ ID NO: 807 - DNA, 4048 bp, Homo sapiens
acctatttagaatggtttagaagccagaactggacacctttaagatttttggcctttgattgtaatgcatactgatgattttgcagtacatgaatttgacgtgggggctttgaattcgtatttggtcctggacttttgttatttaaatagttaacatacaaataatgtaaaatcaatgtgaatataggcacctgtgtcagaatactagcaactgttacccacacaacgggcaggtttggtcacttggtgggtttcaacccaatgaccacatcaaggaggatttagcaaaggaattttataacttgtcacaagtgagaagctcacagagcttagttcccaaagcagtatctccccaagctggaggctgggtcaggttttataagcgtatggtaatgaagtgtgatctgattggatcttgcaatgaagtgatgccgggaagcaccatctgactggatcctgccatggggtggtgtcagagctcaatctgattgaatcctgcatcctgccatgtggtgtctgcttcttaattcagtccctgattcttgtttcggagcacttaggttcctgctatggttgcatgcttgattcatctggggctgctcaggttattaacatgacttgaggatccgtggcaactgtaaaacaactcataactttgctacataaaagttgaacatgattggtctggtgcaattacatacataaagatcaaaagagaccatagccttttttctcaaccagggtttcacgtttgggaaagctggcgagatcctcaccagaagactgcggtcaatggcttttaaagcaatgctaagacaggtaggagtgtgcgctggagaatgccttctgatctttcacatttcttccatattaagcttcttactgttcttattgttatgtcgatatgcatgttttccccccagggtattcacgcaaggatggggcagagtcctgcaaattgtcctggtccttcaagagctaaagacttctcatgttttttttgttttttttttgtttttgttttttttcatagaaataggctttatttgggtagctttggcttattctgtaaatatctctctccatgtagacactatcatttcgaagacctgtatctcttttctggatcctgtgcaggccctggtgagtccattgagactccaggatgtctttaaaccaagaaaaacctagttgatagcatttaatctcatgtaccacaatctaccatactaactgtaggtatcctcaaatgttaataattgagttttgtttatttcttatttgaggtctattttcacattaattcacttgtttgtttattcaaacattacttatcatgtaccagacactgtgctggtggctggtactgtataatccattatttgctctcctcgtaagttcacattctagtgcctgacataggaaaatatgcaaacatgaattatctatttttatagaaaatgcctaagagagggccagaatattatccattcaattgacaggaactgattacatttctgttcacaaatgggcacatagtaggtagtatattctgattaaatctgtctacaaatcctatttcagtatctcctaaactcttgctatgcaggaaaaattattttatgtgaaggtaaaagatgccatggatgagtagcttacaattaaaattaagtctcagacatgcttctttttttatccctgtggctaactggagatcagacacactttcaatcagtgtttaacaaaaaatcaaacaaaagcttggtgagaaaccagtgcttattttctcctgcctagaatctatcagaacaacatgtccaagacagctccaccaccctttatgagagacaacaccatatcagggcagaagtgtccatagtgaaagacctgatgattgggtgaatggaatgcctaccagcctcccagccttgggaggagctggcaaggagcatggcagccatctgggtgagccctgcccccctagaccagagatgccctccctgctaccacagagcagtcaggaagctgggttctgctagattctgggggtgtgtgctcagagcaaggccagggactctacactgcatatgaggtctcccctaaatttcctcagcattggagctttgggaggctttgtctggttttctttgcttgttttaattttgaactaacataaacgtgtattttatgccataggacatgagctggtttgatgaccataaaaacagtactggtgcactttctacaagacttgccacagatgctgcccaagtccaaggagtaggtagactgcactctacttgtagttttttacataacatggttttagataagcatgtagcatacccacacttgttaagatgcttccagctagaaatagcagaaagctcaaatcaaaactgctgtaaacaataagcagaagattaaacttcaaggttgattgacccactgccccctccagatttaatccagaatccaggttccctcattggctttggctttatcccaaggctgattccctgcagtcacaggatggctgctaatagtaattagaactacaggcttccttatttcccatccagtgaaagagagcacacacctctacctcaaccaccaaacaaaaaccctttgctgaaatctaatttgggctaatttgggtcacatgccccaccctgaaccactgtctccaggggatggtggtgttctgagtggcctacgtcccccacccctttagctgaggtgggttactttgcagctcactgcttccacacaacaggagaaggaggaatggatgcagagagctgactgcaatgttgctacagccacctttgttttctgagtggtacaacactaattcatccttatatgtgctttgtggtggatgtctcttaggacacgtaccctttgtaacaacagatggtctctttcccttttacacttttgaattaaatggtctttaaaattacccaggtacattggagttagtttcctctttgaacattgcatctatgaaaaaatacatgcacccccagtgcccatccacaaagcagagaagttgattacttggttctagaatgttggttcaggtgggcaggagaggaatgagagtgtaaaggcacaatgaagaaatgtctgcagagcctcatgagttaagcacaggtgttgtgggtttattgtaatgaaagtaagccaatgtagctcaggcatagaacccactcatcattctgaccaagaggctaaggctggagcgcatgcatttggagcttaaaactacagttgctttgtgctttttctctcccaggccacaggaaccaggttggctttaattgcacagaatatagctaaccttggaactggtattatcatatcatttatctacggttggcagttaaccctattgctattagcagttgttccaattattgctgtgtcaggaattgttgaaatgaaattgttggctggaaatgccaaaagagataaaaaagaactggaagctgctggaaaggtaggtcaaataagatttcaattggtgttaagtgttgtttttagacatgtgttttatttgaattatttatcatgatatgcaggctttaataattaaatgtttgtgcccactacaactaataattgtcaattgtgtatgaaatattttactgtattaatgtctagaacttaaatataaggtgattaacataaaacgttgagcctatagaaagcacttaacatagttatgataaagaacttctgaatattcaaagtgcatttcattttacttcatgtccaaatgctactgtttggacaaatgtcatccctgtttcacaaaccttcatgcagaagactgtaagtgaattgttcagggtcggacatgtgctggcatttaagagatcctcttctttttggctgtgatttctataattaagatggcagccaccagatggcagtaatgcctcaattttgtggttctcactataatggcaattgggcttaacatttacttgagccttactacgtgccagttattgtgctacatatttatatgcaccaattt

SEQ ID NO: 808 - DNA, 4048 bp, Homo sapiens
accagtgcacactggagtgattttatgttttatgatgtgcaaactgttactttttatgttaaaaatctttaaaaatatatgtgacatggtgctttttaggagcattacatagggccaaaatctgccatgttttatattgaaccgtctatgtaattccatgcatagttagagaaaatcatataggatggaataataatactgactgaaaatgtttctttctggtggcatttgtgagtgagtcaatgaaataggtttgaaaaatctttttaactctgtatgtattcaggagaacaataggtagtttgagaaaatagacccactcaggcaataaaatgctatattagccttgcaaatgttgctcttccacaaaaaaaaaaggaaaggataaacctaaacttaatcctttatgtactatgttacatatacatcacattttagataataatgaatgccagaatgtgacttaaacttttcctcatgttattttgctcaggtttttttttcaatcctaattggagctttcagtgttggccaggctgccccatgtattgatgcttttgccaatgcaagaggagcagcatatgtgatctttgatattattgataatgtaagtcatttattattttagtgccaaaagaagtctttgagcttgtataattaaatctggctttagtttgcatatttttgaatcaactacattgaataagttgtactgactaaagtgacatttaattatatgaaatgaatgacctgttagtaataaatgaaagaaaatacctcttattaatattttttaaatgtatctttagataatataataatactgatctcattttggaaaaggacatctgcactagtgcagagcaaagacgtttctcttcctagtttttatctttttcactttcatgttgtagccagactgagaatcttatgatttctatatgggatggggggtagataaattatcggtgggaccaaaattgacagtatattttgctgtgggttccccctctccaaaaaattatcactgcatgtttggtatgattttaaataaactacattaaataaactgactacagtgaaaaagaaaaagttttgacgtaaaaaagtaagtcactgcattcaaatattgcaaggtagctaagtgaaatttgatcatttaatctaagcaatttcctttttcattgatccaagtcgtgagaaaagtgctcagtttctgattgtattaaaagtttacattatttctaaataactgctataatcaaccattcaatcttctcaattcaatctattacatttattatttaggaatgagctaattttcactaaatgctgaaatacttggctataatatatatcaattatagcatatttttgttattgcacttgtataaatatgcatatctgaccatttagaaaatttatgaggatatgccaaaaacttaaagggaaatattatatgaaatgagatgaatatctcttacgtacttttcaggaaaacactattttctgaaaaggagtatttctttaaacagcacacatacatatacacacaatcttcatcttgggtttttcttatgtaaaggggattgtgacattccaggtcctatttttggaatttgctgaatcatattccttaaaaatgcaacttgtttgtgctatgatggaatagtcattacattttgttttatttagaatcctaaaattgacagtttttcagagagaggacacaaaccagacagcatcaaagggaatttggagttcaatgatgttcacttttcttacccttctcgagctaacgtcaaggtactgtaagtaatatttataggaattcctaactgaggttgattgttgaatcattttaaagaataaagtctctattattttgatacttatgtgccttttcctttgggggttatattcccttatttgatacttttttttcaaatttcaaactgaatcgaattattcccattttagggctttgttgtgaagtgtgttcttttttctcattttccttacagatcttgaagggcctcaacctgaaggtgcagagtgggcagacggtggccctggttggaagtagtggctgtgggaagagcacaacggtccagctgatacagaggctctatgaccctgatgagggcacagtaagtgggaagaaccaagctttccagagtgggaagctggatacaaattggccctttgaaattggtttttcagtaacaaatttgcgtgtgaatccagttttggtaaaaagcctacaaaatggcaatgccgatggataatgccttcacacccttgggctggtttcacaaatgcattaaataaaagtcataaaagctgtggaagctggacaaagctctcctctgttctgactaagctttcataacacattaaattactgcaaagcagtctacaaaccactgagaggattactttcaatgagttagagtttggtcaaacatactccatatagcaattgttgggaacaattgatgacaattagggtcaccagatattttaggacagcaattaaattcatccaagacagttgagttttcttaaacttaggaatatctaagggggaaagtgggatggtctcttaagaaactagtctcttgagaaaattctagaaacacagagacagtaatagcctagggtatgtttttttgccatttaaaagttttgctataaatttgaatttacagaaaattgtaactagagaactcacagatccttcacccagatttagattgtttatattttgacccacttgctttatcatcttctctttctccgtgtgtgtgtgtatgtgtgtgtttatgtgtgtgtgtgtgtattatgtatacccttatacttcagaatacattcctaaaaaggacattctcttagattaccacaaaacaatgattaaaaatcagtaaatttaacattaatgcaatatacaagtccacgagctatattcagaatttcctcagttgtcccaattttagagcattgagtttatctgatattaaaatggattataattcaataattgtgaaaacagaagattataaggtaaaaagtaaaaataatggcatgccaaaaccaaaaatcataaaaaggcattgggacagaacagagatctccagaattaatacataattttctacaatacatggaactatttatttaatttaataaaattaatattattggaaaaatctgatattactatgggggaacataggcccattctcatttactaaagtaaactctgggttggttcaagtgtaaatattttctttattttttaaaaagaacctggtaaaataccaaccattgagaattaaattattattgaaacaactgacatttttaaagaaagcatatgttaacagaaaaaaaagatcttcagaaattctataactcagagatattcactgttaacatcatgatttaacaattttcttaccactgaaataatagaaaaaaatgcccagtggcataattgattaattcagttgttccttaagcctctttccaataaaaaccaataaaactatgatgaaagaaagcaataaaggcctgacatggtggctaatgcttgtgatctcagcactttgggagattgaggtgggaggttcacttgaggccaggagtttgagatcatcctgggcaactaatgagaatctgtctctacaaaatattttttaaaatagccaggcctggtggtgtgcacccatagtcctagctacttgggaggctgaggcaggaggatcacttgagcccaggagttcaaggctgcagtgagctattgttgcaccaatggttgcaccactatgctcctccaaagcctgagtgacagaatgaaactctgtctctaaatttaaaaaaaaaaaaggacaaaaataatgaattggaacaaaagatttattatatatggaaaaagtattatatttattattagagaagttaatatgaatatatgaaggtaaccctgctcattatgaacatgcgactctctggaatatataaagatttgtaaaaagtttcaagaaat

SEQ ID NO: 809 - DNA, 4051 bp, Homo sapiens
tgagcccccaagatatcttcataactgtccatagtgcctagggtgcctgaacaaacaccagctctttattttataatgaatagttctatgtgttaaaagaagtcctaggcaacatttaaaaataactaaaagtacataattggattgtttgtaacacaaagaaaggagagatgcttgaggtgatggatacctctctttcttcccctttgaaaaaaaaagaagtcttgggcagaatccgggaaggcagacattgatttactttgagactcaaaagtgaaaatgaagactatgtttccctatctaatccttaatgtatacactgcttattcagacccttcacccataagctgtgtgaccatgagcaagtctcttaacctctataatccttactgttctcatctttgagaggtaagcatcaatttactgatagaattaagtgagatgatttgtgtaaagtgtctggaacatagtaaatgatcaataaatattgggacaaactagctataagaacttggaaatgaaacaacccactctgtctcttcatctgtaaaatggataggttatataggtactctctaaaatgaacaggcagcttcaggagttccccagttccttactacgggaggcattcaggtggactggggtgtaagttctccatcctggcatattagaatcaaccagggtactttttcttttttgagacagggtcttgctctgttgcccaggctagagtgcagtgaagtgatcatagctcactccagccttgagctcctgggctcaagtaatcctcctgcttcagtctcctgtgtagctgggactacaggcacctgccaccatgcccggccaactttttgtaaaggtggatttcaccacgttgcccaggctggtctcaaactcctggcctcaagtgatcctcccgcctcagcctcccaaagtgctgtaattataggtgtgagccaccgggcctggcggggggcactttataaaaatgtgatgctctggactcaaccagagattctggctgcattgggcttgagtggagcctgaacatctgtaattcttaagctccccatgtaattctaatgcacagacagcgttaagtaccaccaagccaaatgaccatgtagatatcgtttatgagactgaagcagaataggtagcatctgacaagaccaggagtaggctcttttcagatctagcaggccatgacttttcaggcaacacaccaacatatgtttagttcacctttgtcccaggcagcagaaactctgagtttccccggggactctggagctcctcaggttactaacccagcactagatttccattcttgagactctgagaaaggagcgggtccaatctggaacgctcatagattctttcctaggagggagagtcaatttgagttggtatctgtgttagtccattttgtgttgctaggaaggaatacctgagactgggtaatttatgaagaaaatatgtttatttggctcatggttcagcaggctgtaaaagtatggtacccacatctgtttggggcttctggcaaagcctcaggaagcttttactcagtgagggaaggtgaatggggagcagatgtgtcacatggagagagagggagcaggagggagaggccaggctctctttaacaaccagctgtcacatgaactgagtgagaactcgctcattatctcagggagggcaccaagccattcatgtgggatctgtccccttgacccaaacacctcccatcaggccccacctccaacactgaggatcacatttcaacgtgagatttggagggaacaaatatccaaaccatatcagtatccttattgagagaatttaaaagtttgaggtaggtgttgaaagagaggaaaaacttatttaagatttcacccaatttttcagttcagggaaataaaaaaaccacaatgatttttacaaatgccacagctttagaatagcttgcctgcctctagttccaaatactcttccaatttgccctatttaaaacttcaggatggaaatgaacacacagaaaggaactgataagatgaaaagtaaaatagggtatgaatcttcaaggttctgatagcttataaagagctagattaataatcggaaatttcactgtgaacatcagtagaaattataatcctgggggaaagatgatgctgcagttggggccagatgcctggtaattgatcctgacagtagtttgagttttaaataagtttcaaccttatctttctttggaaaaagataaggaggatacacagcaccacgaaaacacgaaaacacgacccctgggctatttacacatggcaaaggaacaaagagaccaatttctctcctaggaccatggaaaatgagaaatatgtaccctgatgtgttttctcaacaatgctgtggtgatattttatcctattattttgtgaatgcagtagatgtaggctgtttcttattttttcatttgtcttttctaaaaaataaaaataagtcattgtcacatgaataaatcagtatagtatagtgttacgagcataggccaaattgcctgggctgactttcagctctgccacttactagctgtatgacattgagtaagttactttatttatctgtgcctccatttcctattctataaaatggggtttgtgaaatagtctcacctcataagataattaaatgaattaacacacctaaagtattcagagcagtgcctggtatttaataaatgctcaataaacattagctattattaaaacatggaaatcaggaaagatacattgacattttatcaaattagctcaaattaatagacaatagatttctttccaattaatactgcttcaaaaaatactagaatacagcagtgctggtaaacaagaggtggaatgcaggatgttcactaattgccagtgatcactgacatgcctttgagcaactaagttatcttccctgtctagtttttcctcctttgcgatggatgtaacttagcctttcccttacttatgtcatatgagacatgtaaagaaaaaacacacagatataaaaataaaatttattgaagttctataaagtgctttgagccaccaaaaaaaaaaaatgcctcttaaatcctgtgttttctattttaaatatttcttattccctcctctgtcttctgtgtgttttgtggcttccttgtctcttcagtggctcctctgtgcctccttagaaggctgctttgctaaaggctgagaccgccaggatgggggaaagacctgggagggcttatcttcccctttcttggcccttaatgtccagtacctaaacccttgggctctttacttgagtaaagtgaaaagaatgcacttaagtgtgcaaagaaaagtgttttttaaagagaaacttaacaatagcatcttctagctttcatacatttaaattattaacagatttttaaaaacctggcaatgcctattaatagtttgatcttttaacatgttttattttattttttaatttagtgaacttttccttgtcgctgctaaatccaggcaaaattctggaagaagaaatgactaggtaactcatatatatggtctacttttttaaagtttcatttgaagataatttccaattacagagttataagaatatacaaataacgtgtactctttacccagattcacctattattatcatttttgctcccaaatcccaatttaaagtaagatgcacacatcatggccctttactgcagtatgactcctaagaataaggatattttcttacataatcacagtacagctattagcttcagtaaatttcagtacttttatctaatataacatctatattccaattttgtcatttgatccaataatgtcatttatggcattttctcctccttctagtttctcaatagaaatctctaaagcctgtaagcatgatgtttgtatgtctgcatagcagtgttgctgattgtaacgagtgctgtctgtatgctaaaaggcctgaaaggtgtctatctggaagcagtttataaaattagataataaaa

SEQ ID NO: 810 - DNA, 4043 bp, Homo sapiens
actgataccctttcttccacttgatcgaattggctactgaagcttgtgctttcgtcacatagttcttgtgccatggttttcagctccatcaggtcctttaaggacttctctgcatcggttattctagttagccattcatctattcttttttctaggtttttaacttctttgccatgggttcgaacttccgtctttagctcagagaagtttgatcatctgtagccttcttctctcaactcatcaaagtcattctccgtcctgctttgttccattgctggtgaggagctgcattcctttggaggaggagaggcgctctgatttttagaattttcagtttttctgttctgttttttccccatctttgtggttttatctacctttggtttttgatgatggtgacgtacagatgggttttggcgtggatgtcctttctgtttgttagttttccttctaacagtcaggaccctcagccgcaggtctgttggagtttgctggaggtccactccagaccctgttttcctgggtatcagcagcggaggctgcagaacagcgaatattgatgaacagcgaatgttgctgcctgattgttcctctggaagtttcgtctcagagggctgcccggccatgtgaggtgtcagtctgcccctactgggtggtgcctcccagttaggctactcgggggtcagggacccacttgagaaggcagtctgtccattctcagatctcaaatgctgtgctgggagaaccactactctcttgaaacctgtcagacagggacatttaagtctgcagaggtttctgctgccttttgttcagctatgccctacccctagaggcagagtctacagaggcaggcaggtctctttgagctgtggtgggctccacccagttcctggccgctttgtttacctactcaagagcttcctggccgctttgtttacctactcaagtctcagctatggagggcacccttcccccagcctcgctgccaccttgcagattgatttcagactgctgtgctagcaatgagcgaggcttcgtgggtgtgggaccctctgagccaggcgtgggatgtaatctcctgatgtgccgtttgctaagaccattggaaaagcgcagtattagggtgagagtgacccgattttccaggtgccgtctgtcacagctttgcttggctaggaaagggaattccctgacctcttgtgcttctcgggtgaggggatgcttccccctgctttggctcatgctcggtgcgctgcacctactgtcctgcacccactgtccgacaagccgcagtgagatgaacctggggcctcagtaggaaatgcagaaatcacctgttatctgtgtcacttgcactgggagctgttgactggagctgttcctaatcagctatcttggaaccgcctctgaaagctggttttaatgcataggttttaaatctgcctcctacagaaaatacaatcctacaaaccttaatgtaggaacagaaattttcatttgaatttagaagttttagcttaagttaaacttaaatttaatatttattttcacctcttactagatatcttaatagatattttttgtcctgaaagaggttgaggataaaactgtgctctaacaggagttagaaatatattattttctggaaaatcactgaaaacaaacctaggtttacttaggatgttgctgtgaaattcacctcgttttaaatttatgcttagaggctgtaaaattgtattcaattaatatgaaaacatttaaaatgctttttaatgttaacaacctgaccctgtgcttttaactatagctgacagactcaagtgttctgttttccttttcccagaaccactaaaaatgaacctttgggacactggtccctttgtgacaattttagggacccagctccattggctcttgactttacctgctcccattgttttatccaagctctgcctggtttctgaccctttgtctctttcggttctcttgcttgccctgtgtgtttgatgatggagtttgtccctgtccctgaaaccttgcctgaactcctggaaatctttgagaatggtgtacacacatatccactttccaccatgtgcctctaacctcagcctcacccgggttattgacccagtctgacctagcttcagccctcaaaggctccactgtgccaagcctggctcatcaccctctctcccaataactgttctttgtccccaaaaggggctgaggtggggggaatgggcagagtaaagcattttaaaagagaggagagaaaaaaaagataggaagctatagaaatggaaatgtaagatgaggaaaatgtagtctagaaggcagaggaggaaagaagaacaaagagaaagagagccataaatgggtcaatcaaaaacagaaagaaaaggtgagaaatggaagaggactaataagacagtaacaaagtcctttgaagtgttagaacactgaactgctggttagttcttgagggttgtgcacttcactgtgacaactggtatcacccttcccctctgtaggtagtactgtgtccaagattcttggtgtggcccaccagcgcaggccttctatctctctccaacatcctctcccacactttgtactgtgcccttcaggaattccactgccaggggttacttaagcattccatgtagtttctagttaccttcttattctaagcctaaattcttcctacttcttttacactcgccgattcttctccagcgaactccctcttacccttcaaggttctgcatacttggcaggtgacactggtgaaaactaaatttttaaaaaaggttctgcataaggatctccataggcaagacttccctaaggtgcatatatagacacactgtaatgtttattgtgcttcactactgagttgcctttttaaagctaacttaaaccttctaaagggatcttatctcaaaactcagagcatctattttcctctattttaaattctccctctgaaatattctgaatgcttttttaaaggatgtggtgtgtgtgtgtgtgtgtgtgtgtgtgtgtttaaacttaatgtctttccctagccgttctttattaccacaggagctctgggatatcaaataatatttcttaaacctttatcccttttgattgtatagtaattatttattcaaatcagataccaattaaacataattagattgatttcttcacagaatacaaaataaacagaatcatgaaattaagttgttaatgatttgaaggcctccttttctaagacattcatttacaactcttaaaaaagtactgactttaaataaaaatccaaagaatatataattatggaagaggagaaattccattccacagctaagtattattttatttcctttttttagtttcgatactccgattggcaggataaattgtttatgtcgctgggtaccatcatggccatagctcacggatcaggtctccccctcatgatgatagtatttggagagatgactgacaaatttgttgatactgcaggaaacttctcctttccaggtaagcatttctttaccttttaaaaaaatccatagcatttctttaactgggtaaaaatttgggagttgattttgctattcattaccatcttatttaatgatttggatatctggttgactccagatatcatagaaggagttgtaaaattctcagaaaattgttcaaatactcgtttaaatttaaagaaatatgtgtattgttgtttgacttttaatacaggtgaaggaaatacacaggaagcttctaaataaagtaaggaagtcactctacttgagaacagtggaaatgtaatgagagtatctctatgcagtatccatcccattagtaattgctgatgagtttcaaagcacatcagttaaacatggcagtacttcttagctgtgtttagcttgtagatctgtttctgggttttcttttcttctctccccttcaccttaaaaaaaattatacccattttctgtctctaattttggatcaaccagattgactggaacttgaga

SEQ ID NO: 811 - DNA, 4023 bp, Homo sapiens
aaatcatcatacacacacacacacacacactccctcatagagtttatattatagtacggaggacagacataaataatgtacatactaaataagtaaaccacagccaatgttagaaggtaattaacgccatggaaaaaagcattaatccaggttaaggggatcaggagtacaaaaggggagtactttgtaattttaagtagggtggttagggtagatcttattttaaaggtaatatttgagcaaagacttgaaagaaatgagaggagacagctgtgtgggtatctaaggggagagcattcccggaaaaggtaactggcaatgcaaagaccctgagtcaggtacatgtttggtgagttcatggaacagcagagagtccaggctggttggagcagagtaagcaggtttgggagtagggatgtggtcagagaggaaataagcaaacagatcgtgtaggacctcagaggttaatgcaaggattttggcttttattgtaagaaaaaggaaagccattgtaggtttttgagcaaagaagtagtgtatggcttggcattttgaaataattactctgactgctagttgaagatagactgaagcggcataggtggaagtggagagactaggcaggaggctgccctactggtgacagcaatgaaactggtgataagtggttaaattctagatgtactttgaatgtatcaccaacaagattgcctgacaccactctccacaatccttcagaagaatagacattcctaattttaaatcatgattttttttaattttagaaaacaaataacttaattgacttagcgacactgttagcatacttatctttcctgtgtatgtgagctctgtaaggcaggcgaccatttcttatgtatccatgtatctttgtagtaccttcgacagttacttttgtgcttgctatgtttgttgaactgaataattttgacattttgtgaacatcactcttatatttgaaaatataatagttgaatattgtaactaaacatatttatgttcaattgattgtaaaacattttgtaacagttttaaattgaagcaattctattttttacagcaaacaaaaaaggaaaaaaacgaagacagtgaaaatgattggagtattaacattggtaagctgtgaaatgttaaatgtgaataatcctaccttttattcaaatttgaggtattgaatcaattacctttaaagcaaatactttaagattgtctagctaggcgagctgactcatacttgtaatcccagcactttgggagactgaggtgggagggttgcttgagcacaagagtttgagaccagcctggacaacatagtgagatctcatctctacaaaataataaaaataaaaatcttaaaaaatagcatatgtcatggcatgaacctgtagtcccagctacttgggaggctgaggcaggagggtcttaggagtctgaggctgcagtgagttatgatcacaccactgcactccagcctgggtggcagagcaagaccctgtctcaaaaacaacgacaacaaaaaactgtctgcagacagcaataaattgtccttgctgcacctgtgctgtataagtttggcttattatagtcaatgacccacattcttaagatggatgattttttaaaaagtagagacaggctggcgatgacaccggacagagctaactggtgtgcaaggaaagtgaaaatgggaattgtgttagtagcacaatgcaaactcaacaatttcaagaaaatgcatttctgcatttgcttcacagacccccaccccaaatttagcttaaaataagcttgcatttcaagaaagtaattgttaagtacataaattttaatttaaggaatctacattcacatttggtttccaaaaaattggctaaatagggggtaactattaggaattctgattatgcttaaaacagttttcggtgcttttctgttggtacaagacaagacaatatttttggaagaagtctcctcatctggttttcatttgaaatatgtcttacagaggcagctcaagaaagcatttgcccatttttggtaaatatgacgtgtttcaaactgtgacagccattatttggtagcaaagaagttagaattaagtgtcatgtcagctgaaatccaacttagtaattaaatggataaaaagacaccaaaacatccacactctcaaacactgctgcatacttctcatgtaaccaaaagcccctattcattgtcttctctcctctttttttatttgtttaaaaagcctcagtaagggcaatttaaaaaaaaattagcactttggagaataaattgtttatcaaatgaaagctggttttatttatttttttagaagtttttttttctttatttttttaaatttgtttaaattatactttaagttctagggtacatgtgcataacgtgcaggtttgttacatatgtatacatgtgccatgttggtgtgctgcacccattaacttgtcatttacattaggtatatctcctaatgctatccctcccccatccccccaccccacaataggccccggtgtgtgatgttccccttcctgtgtccaagtgttctcattgttcagttcccacctgtgagtgagaacatgaggtgtttggttttttgtccttgcgatagtttgctgaggatggtttccagcttcatccatgtccctacaaaggacatgaactcatcattttttatggctgcatagtattccatggtgtatatgtgccacattttcttaatccagtctatcattgttggacatttgggttggttccaagtctttgctattgtgaatagtgctgcaataaacatacttgtgcatgtgtctgtatagcagcatgatttatattcctttgggtatatacctagtaatgggatggctgggtcaaatgatatttctagttctagatccttgaggaatcaccacactgtcttccacaatggttgaactagtttacagtcccaccaatagtgtaaaagtgttcctatttctccacatcctctccagcacctgttgtttcctgactttttaatgattgccattctaactggtgtgagatggtatctcattgtggttttgatttgcatttctctgatggccagtgatcatgagcattttttcatgtgtctattggctgcataaatgtcttcttttgaggagtgtctgttcatatccttcacccacttgttggtggggttgtttttttcttgtaaatttgtttgagttctttgtagattctggatactagccctttgtcagatgagtagattgcaaaaattttctcccattctgtaggttgccagttcactctaatgatagtttcttttgctgtgcagaagctctttagtttaattagatcccatttttgtcaattttggcttttgttgcctttgcttttggtgttttagacatgaactccttgaccatgcctatgtcctgaatggtattgcctaggttttcttctagggtttttatggttttaggtctaacatgtaagtctttaatccatcttgaattaatgtttgtataaggtgtaaggaagggatccagtttcagctttctacatatggctagccagttttcccagcaccatttgttaaatagggaatccttttcccatttcttgtttttgtcaggtttgtcaaagatcagatagttgtagatgtatggtattatttctgagggctctgttctgttccattggtctatatctctgttttggtaccagtaccatgctgttttggttactgtagccttgtagtatagtttgaagtcaggtagcatgatgcctccagctttgttcttttagcttaggattgacttgccaatgcaggctcttttttggttccatattaactttaaagtagttttttccaattctatgaagaaagtcattggtagcttgatggggatggcattgaatctataaattaccttgggcagtatggccattttcacgatattgattcttcctatccatgagcatggaatgttcttc

SEQ ID NO: 812 - DNA, 4036 bp, Homo sapiens
caggtagggggacaaactgcagaagggaggggggttagcttccagccccataggctaccagtggacactcctcagtgcctccttgacttcccaggttagcttccagccccataggctaccagtggacactcctcagtgcctccttggcttcccagggcagtctatcgccttgatctccgggatcactggagagaacagcaaaccggcgcctacttttctgcccaggagccttttgcttgatggatggtatctgtgtttgaatgtgcaattttgttaggcttttaaaaggcaggagattccccgcggtctgtgggcctctcctagcttggcattataatcaagaaattatactttgctatgcaaaagcatgatggcttttttaaaaaaatcgttttttaatgttcccttcccaggttcaccctccctttttgttattttgaattctggtcgtaacaattcggtcttacttttttattttttattttttgttcgttttgatttacatttttattttttttcccccacaagcagaaggttttattttaaattccaagaatatgatggtcaaaattgctgggaagattctgatttagggttgtcactgcagagcatttccatgtcaatgtaagtaggtacccaaagtcgtttaggtgcagcattcagtaacgtaaaggtaaagaaaaaaaaagtagccacctgtggctttttatccccagtcgtagtaggaataagattgcatggtttgggcacactaccaatcacaatttccaaatttcatttccaccactgagatgccttgactcaaatgaaacattagtataggtttaggtggtgtttgtgtgtttttggtgaaacattagtataggtgtaggtggtggttgtgtgcttaactgaccccctaaaaacaagaccaaatacttaagcacggaatgtatttctgtttatgatatggaattcaatacaccccttcagtggtataaagacattcctggatttctttaggatagggtcagagttggtttactatctggccttcagtttttaaaaggggcgattctttgatatagcaatagcgtcaattttttttttcttttacctttacaggtgagaaaccttaccactgtgactgggacggctgtggatggaaattcgcccgctcagatgaactgaccaggcactaccgtaaacacacggggcaccgcccgttccagtgccaaaaatgcgaccgagcattttccaggtcggaccacctcgccttacacatgaagaggcatttttaaatcccagacagtggatatgacccacactgccagaagagaattcagtattttttacttttcacactgtcttcccgatgagggaaggagcccagccagaaagcactacaatcatggtcaagttcccaactgagtcatcttgtgagtggataatcaggaaaaatgaggaatccaaaagacaaaaatcaaagaacagatggggtctgtgactggatcttctatcattccaattctaaatccgacttgaatattcctggacttacaaaatgccaagggggtgactggaagttgtggatatcagggtataaattatatccgtgagttgggggagggaagaccagaattcccttgaattgtgtattgatgcaatataagcataaaagatcaccttgtattctctttaccttctaaaagccattattatgatgttagaagaagaggaagaaattcaggtacagaaaacatgtttaaatagcctaaatgatggtgcttggtgagtcttggttctaaaggtaccaaacaaggaagccaaagttttcaaactgctgcatactttgacaaggaaaatctatatttgtcttccgatcaacatttatgacctaagtcaggtaatatacctggtttacttctttagcatttttatgcagacagtctgttatgcactgtggtttcagatgtgcaataatttgtacaatggtttattcccaagtatgccttaagcagaacaaatgtgtttttctatatagttccttgccttaataaatatgtaatataaatttaagcaaacgtctattttgtatatttgtaaactacaaagtaaaatgaacattttgtggagtttgtattttgcatactcaaggtgagaattaagttttaaataaacctataatattttatctgaataatgttttttattgttttgttttcctcctggaaaaatatgaacagtgtttggtttaaacacaccgggttaataaggcatgtaagaagcacgcacaaaaaagccaactttatgtcaacaaattaaaatacctttttttattaaaaaaaaactatttagttttaccataaatactatcaatatagggctgagaactcttgattattgtacgtttaaaaattacaagattaaaaacccagttcaggtttgctctttccaaatgtacgtaaagctacgtgaaagcagtttccttacctatgattttcccagtagaaacagcttaatcatccttaaatttgctcagtttagtatgaaaatatttatgaaatatatacatttcagtttcatatttgaaaaaaatctttatggtttgtcttttaaagtaaataaaaataaaaaagttttctgtggaggcctgtcccagcacccctcacatctgagtaacaaaagaaccttcctacagcagacaaccctaagaacgtagttccacagtgccctcctgaggattaaagggttcatttatgcttggtgtgtgttaaagatacatcacttctactagttacagccttaaagaggtcagaaccaaagtttctggcagattgttttaaagctaaatcagttcccctgactgaaggtgggaaaacaaactgaaataaaataatttaaaaattattcaaattcataaaactaagtgtaaagtaagatggtgttatggtaagtttgtagcgtttatattagaagttttaatattaaaactcaaaactgccctgttagaatctgaagttcttgagatgggtgcctgaaagattgaaattcatttggggctatcgcaaaatggaaaaagcatttgtgacacttgttgacaccttatatacttgtaatagtgatgtgggtgactaaacatcatcaaggggacagagctcactgctcactggcattttttttagagtgcttattaactattgattgtatctagtgtccagaggtgcgtttgtaccatgggtacatgtaataaatgaaataaaaaatggatgtttataagaggcttatggtagatcagcacaaggtattttctttggcttttgagagtccaccatgactggaaagcatagcatgtgtctctgcttaaaagaaaacaggtgcatcaataggatggaattttatgtggccaagaacatattcaaagcatatttaatgacatggaaaaatgctcatagtaatgttaagtggaaaaagcaggatataagactatcaacagtaccaattcaactgtgtacatttaagtgtatgtgtgctttgaaggagagagagagaaacaaaaggaaattaagagaaaaccctagaaggaactgccaaaatattcatactggttttctcagttttaattttcttttctttttttttgagatggattcttgcttgtcaccaaggctggagtgcagtggtgtgatctcggctcactgcaatctccacttcacaggttcaaacgattctcctgcctcagcctcctgagtagctgggattacaggcgcccaccaccacacccgacgaatttttgtatattcagtagagacagggtctcaccatgttggccaggctggtttcgaactgctgacctcaagtgatccgtccacctaggcctcccaaagtgctgggattacaggcataagccaccgtgcccagcctaaattttcttttttgaagttttcaaatattctaaaacagctatagtaagtttgaaaaactttttcataagaatgaagatataaagaacaattaaaattatttaaacaaaaagccctcattagaacacattatt

SEQ ID NO: 813 - DNA, 4044 bp, Homo sapiens
gacacacgggatgatgctcaccccaccttcttcacccctagagctcatgccacccggttcctgcatgccagaggagcccaagccaaagaggggaagacgatcgtggccccggaaaaggaccgccacccacacttgtgattacgcgggctgcggcaaaacctacacaaagagttcccatctcaaggcacacctgcgaacccacacaggtagggggacaaactgcagaagggaggggggttagcttccagccccataggctaccagtggacactcctcagtgcctccttgacttcccaggttagcttccagccccataggctaccagtggacactcctcagtgcctccttggcttcccagggcagtctatcgccttgatctccgggatcactggagagaacagcaaaccggcgcctacttttctgcccaggagccttttgcttgatggatggtatctgtgtttgaatgtgcaattttgttaggcttttaaaaggcaggagattccccgcggtctgtgggcctctcctagcttggcattataatcaagaaattatactttgctatgcaaaagcatgatggcttttttaaaaaaatcgttttttaatgttcccttcccaggttcaccctccctttttgttattttgaattctggtcgtaacaattcggtcttacttttttattttttattttttgttcgttttgatttacatttttattttttttcccccacaagcagaaggttttattttaaattccaagaatatgatggtcaaaattgctgggaagattctgatttagggttgtcactgcagagcatttccatgtcaatgtaagtaggtacccaaagtcgtttaggtgcagcattcagtaacgtaaaggtaaagaaaaaaaaagtagccacctgtggctttttatccccagtcgtagtaggaataagattgcatggtttgggcacactaccaatcacaatttccaaatttcatttccaccactgagatgccttgactcaaatgaaacattagtataggtttaggtggtgtttgtgtgtttttggtgaaacattagtataggtgtaggtggtggttgtgtgcttaactgaccccctaaaaacaagaccaaatacttaagcacggaatgtatttctgtttatgatatggaattcaatacaccccttcagtggtataaagacattcctggatttctttaggatagggtcagagttggtttactatctggccttcagtttttaaaaggggcgattctttgatatagcaatagcgtcaattttttttttcttttacctttacaggtgagaaaccttaccactgtgactgggacggctgtggatggaaattcgcccgctcagatgaactgaccaggcactaccgtaaacacacggggcaccgcccgttccagtgccaaaaatgcgaccgagcattttccaggtcggaccacctcgccttacacatgaagaggcatttttaaatcccagacagtggatatgacccacactgccagaagagaattcagtattttttacttttcacactgtcttcccgatgagggaaggagcccagccagaaagcactacaatcatggtcaagttcccaactgagtcatcttgtgagtggataatcaggaaaaatgaggaatccaaaagacaaaaatcaaagaacagatggggtctgtgactggatcttctatcattccaattctaaatccgacttgaatattcctggacttacaaaatgccaagggggtgactggaagttgtggatatcagggtataaattatatccgtgagttgggggagggaagaccagaattcccttgaattgtgtattgatgcaatataagcataaaagatcaccttgtattctctttaccttctaaaagccattattatgatgttagaagaagaggaagaaattcaggtacagaaaacatgtttaaatagcctaaatgatggtgcttggtgagtcttggttctaaaggtaccaaacaaggaagccaaagttttcaaactgctgcatactttgacaaggaaaatctatatttgtcttccgatcaacatttatgacctaagtcaggtaatatacctggtttacttctttagcatttttatgcagacagtctgttatgcactgtggtttcagatgtgcaataatttgtacaatggtttattcccaagtatgccttaagcagaacaaatgtgtttttctatatagttccttgccttaataaatatgtaatataaatttaagcaaacgtctattttgtatatttgtaaactacaaagtaaaatgaacattttgtggagtttgtattttgcatactcaaggtgagaattaagttttaaataaacctataatattttatctgaataatgttttttattgttttgttttcctcctggaaaaatatgaacagtgtttggtttaaacacaccgggttaataaggcatgtaagaagcacgcacaaaaaagccaactttatgtcaacaaattaaaatacctttttttattaaaaaaaaactatttagttttaccataaatactatcaatatagggctgagaactcttgattattgtacgtttaaaaattacaagattaaaaacccagttcaggtttgctctttccaaatgtacgtaaagctacgtgaaagcagtttccttacctatgattttcccagtagaaacagcttaatcatccttaaatttgctcagtttagtatgaaaatatttatgaaatatatacatttcagtttcatatttgaaaaaaatctttatggtttgtcttttaaagtaaataaaaataaaaaagttttctgtggaggcctgtcccagcacccctcacatctgagtaacaaaagaaccttcctacagcagacaaccctaagaacgtagttccacagtgccctcctgaggattaaagggttcatttatgcttggtgtgtgttaaagatacatcacttctactagttacagccttaaagaggtcagaaccaaagtttctggcagattgttttaaagctaaatcagttcccctgactgaaggtgggaaaacaaactgaaataaaataatttaaaaattattcaaattcataaaactaagtgtaaagtaagatggtgttatggtaagtttgtagcgtttatattagaagttttaatattaaaactcaaaactgccctgttagaatctgaagttcttgagatgggtgcctgaaagattgaaattcatttggggctatcgcaaaatggaaaaagcatttgtgacacttgttgacaccttatatacttgtaatagtgatgtgggtgactaaacatcatcaaggggacagagctcactgctcactggcattttttttagagtgcttattaactattgattgtatctagtgtccagaggtgcgtttgtaccatgggtacatgtaataaatgaaataaaaaatggatgtttataagaggcttatggtagatcagcacaaggtattttctttggcttttgagagtccaccatgactggaaagcatagcatgtgtctctgcttaaaagaaaacaggtgcatcaataggatggaattttatgtggccaagaacatattcaaagcatatttaatgacatggaaaaatgctcatagtaatgttaagtggaaaaagcaggatataagactatcaacagtaccaattcaactgtgtacatttaagtgtatgtgtgctttgaaggagagagagagaaacaaaaggaaattaagagaaaaccctagaaggaactgccaaaatattcatactggttttctcagttttaattttcttttctttttttttgagatggattcttgcttgtcaccaaggctggagtgcagtggtgtgatctcggctcactgcaatctccacttcacaggttcaaacgattctcctgcctcagcctcctgagtagctgggattacaggcgcccaccaccacacccgacgaatttttgtatattcagtagagacagggtctcaccatgttggccaggctggtttcgaactgctgacctcaagtg

SEQ ID NO: 814 - DNA, 4038 bp, Homo sapiens
gcccaattacccatccttcctgcccgatcagatgcagccgcaagtcccgccgctccattaccaaggtcagtcccggggatttgtagctcgggctggggagccctgtgtgtgctggccccacttcgggacacacgggatgatgctcaccccaccttcttcacccctagagctcatgccacccggttcctgcatgccagaggagcccaagccaaagaggggaagacgatcgtggccccggaaaaggaccgccacccacacttgtgattacgcgggctgcggcaaaacctacacaaagagttcccatctcaaggcacacctgcgaacccacacaggtagggggacaaactgcagaagggaggggggttagcttccagccccataggctaccagtggacactcctcagtgcctccttgacttcccaggttagcttccagccccataggctaccagtggacactcctcagtgcctccttggcttcccagggcagtctatcgccttgatctccgggatcactggagagaacagcaaaccggcgcctacttttctgcccaggagccttttgcttgatggatggtatctgtgtttgaatgtgcaattttgttaggcttttaaaaggcaggagattccccgcggtctgtgggcctctcctagcttggcattataatcaagaaattatactttgctatgcaaaagcatgatggcttttttaaaaaaatcgttttttaatgttcccttcccaggttcaccctccctttttgttattttgaattctggtcgtaacaattcggtcttacttttttattttttattttttgttcgttttgatttacatttttattttttttcccccacaagcagaaggttttattttaaattccaagaatatgatggtcaaaattgctgggaagattctgatttagggttgtcactgcagagcatttccatgtcaatgtaagtaggtacccaaagtcgtttaggtgcagcattcagtaacgtaaaggtaaagaaaaaaaaagtagccacctgtggctttttatccccagtcgtagtaggaataagattgcatggtttgggcacactaccaatcacaatttccaaatttcatttccaccactgagatgccttgactcaaatgaaacattagtataggtttaggtggtgtttgtgtgtttttggtgaaacattagtataggtgtaggtggtggttgtgtgcttaactgaccccctaaaaacaagaccaaatacttaagcacggaatgtatttctgtttatgatatggaattcaatacaccccttcagtggtataaagacattcctggatttctttaggatagggtcagagttggtttactatctggccttcagtttttaaaaggggcgattctttgatatagcaatagcgtcaattttttttttcttttacctttacaggtgagaaaccttaccactgtgactgggacggctgtggatggaaattcgcccgctcagatgaactgaccaggcactaccgtaaacacacggggcaccgcccgttccagtgccaaaaatgcgaccgagcattttccaggtcggaccacctcgccttacacatgaagaggcatttttaaatcccagacagtggatatgacccacactgccagaagagaattcagtattttttacttttcacactgtcttcccgatgagggaaggagcccagccagaaagcactacaatcatggtcaagttcccaactgagtcatcttgtgagtggataatcaggaaaaatgaggaatccaaaagacaaaaatcaaagaacagatggggtctgtgactggatcttctatcattccaattctaaatccgacttgaatattcctggacttacaaaatgccaagggggtgactggaagttgtggatatcagggtataaattatatccgtgagttgggggagggaagaccagaattcccttgaattgtgtattgatgcaatataagcataaaagatcaccttgtattctctttaccttctaaaagccattattatgatgttagaagaagaggaagaaattcaggtacagaaaacatgtttaaatagcctaaatgatggtgcttggtgagtcttggttctaaaggtaccaaacaaggaagccaaagttttcaaactgctgcatactttgacaaggaaaatctatatttgtcttccgatcaacatttatgacctaagtcaggtaatatacctggtttacttctttagcatttttatgcagacagtctgttatgcactgtggtttcagatgtgcaataatttgtacaatggtttattcccaagtatgccttaagcagaacaaatgtgtttttctatatagttccttgccttaataaatatgtaatataaatttaagcaaacgtctattttgtatatttgtaaactacaaagtaaaatgaacattttgtggagtttgtattttgcatactcaaggtgagaattaagttttaaataaacctataatattttatctgaataatgttttttattgttttgttttcctcctggaaaaatatgaacagtgtttggtttaaacacaccgggttaataaggcatgtaagaagcacgcacaaaaaagccaactttatgtcaacaaattaaaatacctttttttattaaaaaaaaactatttagttttaccataaatactatcaatatagggctgagaactcttgattattgtacgtttaaaaattacaagattaaaaacccagttcaggtttgctctttccaaatgtacgtaaagctacgtgaaagcagtttccttacctatgattttcccagtagaaacagcttaatcatccttaaatttgctcagtttagtatgaaaatatttatgaaatatatacatttcagtttcatatttgaaaaaaatctttatggtttgtcttttaaagtaaataaaaataaaaaagttttctgtggaggcctgtcccagcacccctcacatctgagtaacaaaagaaccttcctacagcagacaaccctaagaacgtagttccacagtgccctcctgaggattaaagggttcatttatgcttggtgtgtgttaaagatacatcacttctactagttacagccttaaagaggtcagaaccaaagtttctggcagattgttttaaagctaaatcagttcccctgactgaaggtgggaaaacaaactgaaataaaataatttaaaaattattcaaattcataaaactaagtgtaaagtaagatggtgttatggtaagtttgtagcgtttatattagaagttttaatattaaaactcaaaactgccctgttagaatctgaagttcttgagatgggtgcctgaaagattgaaattcatttggggctatcgcaaaatggaaaaagcatttgtgacacttgttgacaccttatatacttgtaatagtgatgtgggtgactaaacatcatcaaggggacagagctcactgctcactggcattttttttagagtgcttattaactattgattgtatctagtgtccagaggtgcgtttgtaccatgggtacatgtaataaatgaaataaaaaatggatgtttataagaggcttatggtagatcagcacaaggtattttctttggcttttgagagtccaccatgactggaaagcatagcatgtgtctctgcttaaaagaaaacaggtgcatcaataggatggaattttatgtggccaagaacatattcaaagcatatttaatgacatggaaaaatgctcatagtaatgttaagtggaaaaagcaggatataagactatcaacagtaccaattcaactgtgtacatttaagtgtatgtgtgctttgaaggagagagagagaaacaaaaggaaattaagagaaaaccctagaaggaactgccaaaatattcatactggttttctcagttttaattttcttttctttttttttgagatggattcttgcttgtcaccaaggctggagtgcagtggtgtgatctcggctcactgcaatctccacttcacaggttcaaacgatt

SEQ ID NO: 815 - DNA, 4067 bp, Homo sapiens
cgctggaccccctctcagcaatggccaccggccggctgcacacgacttccccctggggcggcagctccccagcaggactaccccgaccctgggtcttgaggaagtgctgagcagcagggactgtcaccctgccctgccgcttcctcccggcttccatccccacccggggcccaattacccatccttcctgcccgatcagatgcagccgcaagtcccgccgctccattaccaaggtcagtcccggggatttgtagctcgggctggggagccctgtgtgtgctggccccacttcgggacacacgggatgatgctcaccccaccttcttcacccctagagctcatgccacccggttcctgcatgccagaggagcccaagccaaagaggggaagacgatcgtggccccggaaaaggaccgccacccacacttgtgattacgcgggctgcggcaaaacctacacaaagagttcccatctcaaggcacacctgcgaacccacacaggtagggggacaaactgcagaagggaggggggttagcttccagccccataggctaccagtggacactcctcagtgcctccttgacttcccaggttagcttccagccccataggctaccagtggacactcctcagtgcctccttggcttcccagggcagtctatcgccttgatctccgggatcactggagagaacagcaaaccggcgcctacttttctgcccaggagccttttgcttgatggatggtatctgtgtttgaatgtgcaattttgttaggcttttaaaaggcaggagattccccgcggtctgtgggcctctcctagcttggcattataatcaagaaattatactttgctatgcaaaagcatgatggcttttttaaaaaaatcgttttttaatgttcccttcccaggttcaccctccctttttgttattttgaattctggtcgtaacaattcggtcttacttttttattttttattttttgttcgttttgatttacatttttattttttttcccccacaagcagaaggttttattttaaattccaagaatatgatggtcaaaattgctgggaagattctgatttagggttgtcactgcagagcatttccatgtcaatgtaagtaggtacccaaagtcgtttaggtgcagcattcagtaacgtaaaggtaaagaaaaaaaaagtagccacctgtggctttttatccccagtcgtagtaggaataagattgcatggtttgggcacactaccaatcacaatttccaaatttcatttccaccactgagatgccttgactcaaatgaaacattagtataggtttaggtggtgtttgtgtgtttttggtgaaacattagtataggtgtaggtggtggttgtgtgcttaactgaccccctaaaaacaagaccaaatacttaagcacggaatgtatttctgtttatgatatggaattcaatacaccccttcagtggtataaagacattcctggatttctttaggatagggtcagagttggtttactatctggccttcagtttttaaaaggggcgattctttgatatagcaatagcgtcaattttttttttcttttacctttacaggtgagaaaccttaccactgtgactgggacggctgtggatggaaattcgcccgctcagatgaactgaccaggcactaccgtaaacacacggggcaccgcccgttccagtgccaaaaatgcgaccgagcattttccaggtcggaccacctcgccttacacatgaagaggcatttttaaatcccagacagtggatatgacccacactgccagaagagaattcagtattttttacttttcacactgtcttcccgatgagggaaggagcccagccagaaagcactacaatcatggtcaagttcccaactgagtcatcttgtgagtggataatcaggaaaaatgaggaatccaaaagacaaaaatcaaagaacagatggggtctgtgactggatcttctatcattccaattctaaatccgacttgaatattcctggacttacaaaatgccaagggggtgactggaagttgtggatatcagggtataaattatatccgtgagttgggggagggaagaccagaattcccttgaattgtgtattgatgcaatataagcataaaagatcaccttgtattctctttaccttctaaaagccattattatgatgttagaagaagaggaagaaattcaggtacagaaaacatgtttaaatagcctaaatgatggtgcttggtgagtcttggttctaaaggtaccaaacaaggaagccaaagttttcaaactgctgcatactttgacaaggaaaatctatatttgtcttccgatcaacatttatgacctaagtcaggtaatatacctggtttacttctttagcatttttatgcagacagtctgttatgcactgtggtttcagatgtgcaataatttgtacaatggtttattcccaagtatgccttaagcagaacaaatgtgtttttctatatagttccttgccttaataaatatgtaatataaatttaagcaaacgtctattttgtatatttgtaaactacaaagtaaaatgaacattttgtggagtttgtattttgcatactcaaggtgagaattaagttttaaataaacctataatattttatctgaataatgttttttattgttttgttttcctcctggaaaaatatgaacagtgtttggtttaaacacaccgggttaataaggcatgtaagaagcacgcacaaaaaagccaactttatgtcaacaaattaaaatacctttttttattaaaaaaaaactatttagttttaccataaatactatcaatatagggctgagaactcttgattattgtacgtttaaaaattacaagattaaaaacccagttcaggtttgctctttccaaatgtacgtaaagctacgtgaaagcagtttccttacctatgattttcccagtagaaacagcttaatcatccttaaatttgctcagtttagtatgaaaatatttatgaaatatatacatttcagtttcatatttgaaaaaaatctttatggtttgtcttttaaagtaaataaaaataaaaaagttttctgtggaggcctgtcccagcacccctcacatctgagtaacaaaagaaccttcctacagcagacaaccctaagaacgtagttccacagtgccctcctgaggattaaagggttcatttatgcttggtgtgtgttaaagatacatcacttctactagttacagccttaaagaggtcagaaccaaagtttctggcagattgttttaaagctaaatcagttcccctgactgaaggtgggaaaacaaactgaaataaaataatttaaaaattattcaaattcataaaactaagtgtaaagtaagatggtgttatggtaagtttgtagcgtttatattagaagttttaatattaaaactcaaaactgccctgttagaatctgaagttcttgagatgggtgcctgaaagattgaaattcatttggggctatcgcaaaatggaaaaagcatttgtgacacttgttgacaccttatatacttgtaatagtgatgtgggtgactaaacatcatcaaggggacagagctcactgctcactggcattttttttagagtgcttattaactattgattgtatctagtgtccagaggtgcgtttgtaccatgggtacatgtaataaatgaaataaaaaatggatgtttataagaggcttatggtagatcagcacaaggtattttctttggcttttgagagtccaccatgactggaaagcatagcatgtgtctctgcttaaaagaaaacaggtgcatcaataggatggaattttatgtggccaagaacatattcaaagcatatttaatgacatggaaaaatgctcatagtaatgttaagtggaaaaagcaggatataagactatcaacagtaccaattcaactgtgtacatttaagtgtatgtgtgctttgaaggagagagagagaaacaaaaggaaattaagagaaaaccctagaaggaactgc

SEQ ID NO: 816 - DNA, 4047 bp, Homo sapiens
aggcagccctgacggcagccacccggtggtggtggcgccctacaacggcgggccgccgcgcacgtgccccaagatcaagcaggaggcggtctcttcgtgcacccacttgggcgctggaccccctctcagcaatggccaccggccggctgcacacgacttccccctggggcggcagctccccagcaggactaccccgaccctgggtcttgaggaagtgctgagcagcagggactgtcaccctgccctgccgcttcctcccggcttccatccccacccggggcccaattacccatccttcctgcccgatcagatgcagccgcaagtcccgccgctccattaccaaggtcagtcccggggatttgtagctcgggctggggagccctgtgtgtgctggccccacttcgggacacacgggatgatgctcaccccaccttcttcacccctagagctcatgccacccggttcctgcatgccagaggagcccaagccaaagaggggaagacgatcgtggccccggaaaaggaccgccacccacacttgtgattacgcgggctgcggcaaaacctacacaaagagttcccatctcaaggcacacctgcgaacccacacaggtagggggacaaactgcagaagggaggggggttagcttccagccccataggctaccagtggacactcctcagtgcctccttgacttcccaggttagcttccagccccataggctaccagtggacactcctcagtgcctccttggcttcccagggcagtctatcgccttgatctccgggatcactggagagaacagcaaaccggcgcctacttttctgcccaggagccttttgcttgatggatggtatctgtgtttgaatgtgcaattttgttaggcttttaaaaggcaggagattccccgcggtctgtgggcctctcctagcttggcattataatcaagaaattatactttgctatgcaaaagcatgatggcttttttaaaaaaatcgttttttaatgttcccttcccaggttcaccctccctttttgttattttgaattctggtcgtaacaattcggtcttacttttttattttttattttttgttcgttttgatttacatttttattttttttcccccacaagcagaaggttttattttaaattccaagaatatgatggtcaaaattgctgggaagattctgatttagggttgtcactgcagagcatttccatgtcaatgtaagtaggtacccaaagtcgtttaggtgcagcattcagtaacgtaaaggtaaagaaaaaaaaagtagccacctgtggctttttatccccagtcgtagtaggaataagattgcatggtttgggcacactaccaatcacaatttccaaatttcatttccaccactgagatgccttgactcaaatgaaacattagtataggtttaggtggtgtttgtgtgtttttggtgaaacattagtataggtgtaggtggtggttgtgtgcttaactgaccccctaaaaacaagaccaaatacttaagcacggaatgtatttctgtttatgatatggaattcaatacaccccttcagtggtataaagacattcctggatttctttaggatagggtcagagttggtttactatctggccttcagtttttaaaaggggcgattctttgatatagcaatagcgtcaattttttttttcttttacctttacaggtgagaaaccttaccactgtgactgggacggctgtggatggaaattcgcccgctcagatgaactgaccaggcactaccgtaaacacacggggcaccgcccgttccagtgccaaaaatgcgaccgagcattttccaggtcggaccacctcgccttacacatgaagaggcatttttaaatcccagacagtggatatgacccacactgccagaagagaattcagtattttttacttttcacactgtcttcccgatgagggaaggagcccagccagaaagcactacaatcatggtcaagttcccaactgagtcatcttgtgagtggataatcaggaaaaatgaggaatccaaaagacaaaaatcaaagaacagatggggtctgtgactggatcttctatcattccaattctaaatccgacttgaatattcctggacttacaaaatgccaagggggtgactggaagttgtggatatcagggtataaattatatccgtgagttgggggagggaagaccagaattcccttgaattgtgtattgatgcaatataagcataaaagatcaccttgtattctctttaccttctaaaagccattattatgatgttagaagaagaggaagaaattcaggtacagaaaacatgtttaaatagcctaaatgatggtgcttggtgagtcttggttctaaaggtaccaaacaaggaagccaaagttttcaaactgctgcatactttgacaaggaaaatctatatttgtcttccgatcaacatttatgacctaagtcaggtaatatacctggtttacttctttagcatttttatgcagacagtctgttatgcactgtggtttcagatgtgcaataatttgtacaatggtttattcccaagtatgccttaagcagaacaaatgtgtttttctatatagttccttgccttaataaatatgtaatataaatttaagcaaacgtctattttgtatatttgtaaactacaaagtaaaatgaacattttgtggagtttgtattttgcatactcaaggtgagaattaagttttaaataaacctataatattttatctgaataatgttttttattgttttgttttcctcctggaaaaatatgaacagtgtttggtttaaacacaccgggttaataaggcatgtaagaagcacgcacaaaaaagccaactttatgtcaacaaattaaaatacctttttttattaaaaaaaaactatttagttttaccataaatactatcaatatagggctgagaactcttgattattgtacgtttaaaaattacaagattaaaaacccagttcaggtttgctctttccaaatgtacgtaaagctacgtgaaagcagtttccttacctatgattttcccagtagaaacagcttaatcatccttaaatttgctcagtttagtatgaaaatatttatgaaatatatacatttcagtttcatatttgaaaaaaatctttatggtttgtcttttaaagtaaataaaaataaaaaagttttctgtggaggcctgtcccagcacccctcacatctgagtaacaaaagaaccttcctacagcagacaaccctaagaacgtagttccacagtgccctcctgaggattaaagggttcatttatgcttggtgtgtgttaaagatacatcacttctactagttacagccttaaagaggtcagaaccaaagtttctggcagattgttttaaagctaaatcagttcccctgactgaaggtgggaaaacaaactgaaataaaataatttaaaaattattcaaattcataaaactaagtgtaaagtaagatggtgttatggtaagtttgtagcgtttatattagaagttttaatattaaaactcaaaactgccctgttagaatctgaagttcttgagatgggtgcctgaaagattgaaattcatttggggctatcgcaaaatggaaaaagcatttgtgacacttgttgacaccttatatacttgtaatagtgatgtgggtgactaaacatcatcaaggggacagagctcactgctcactggcattttttttagagtgcttattaactattgattgtatctagtgtccagaggtgcgtttgtaccatgggtacatgtaataaatgaaataaaaaatggatgtttataagaggcttatggtagatcagcacaaggtattttctttggcttttgagagtccaccatgactggaaagcatagcatgtgtctctgcttaaaagaaaacaggtgcatcaataggatggaattttatgtggccaagaacatattcaaagcatatttaatgacatggaaaaatgctcatagtaatg

SEQ ID NO: 817 - DNA, 4045 bp, Homo sapiens
gtacattccgccgcagcagccgcagccgccaggtggcgggctgatgggcaagttcgtgctgaaggcgtcgctgagcgcccctggcagcgagtacggcagcccgtcggtcatcagcgtcagcaaaggcagccctgacggcagccacccggtggtggtggcgccctacaacggcgggccgccgcgcacgtgccccaagatcaagcaggaggcggtctcttcgtgcacccacttgggcgctggaccccctctcagcaatggccaccggccggctgcacacgacttccccctggggcggcagctccccagcaggactaccccgaccctgggtcttgaggaagtgctgagcagcagggactgtcaccctgccctgccgcttcctcccggcttccatccccacccggggcccaattacccatccttcctgcccgatcagatgcagccgcaagtcccgccgctccattaccaaggtcagtcccggggatttgtagctcgggctggggagccctgtgtgtgctggccccacttcgggacacacgggatgatgctcaccccaccttcttcacccctagagctcatgccacccggttcctgcatgccagaggagcccaagccaaagaggggaagacgatcgtggccccggaaaaggaccgccacccacacttgtgattacgcgggctgcggcaaaacctacacaaagagttcccatctcaaggcacacctgcgaacccacacaggtagggggacaaactgcagaagggaggggggttagcttccagccccataggctaccagtggacactcctcagtgcctccttgacttcccaggttagcttccagccccataggctaccagtggacactcctcagtgcctccttggcttcccagggcagtctatcgccttgatctccgggatcactggagagaacagcaaaccggcgcctacttttctgcccaggagccttttgcttgatggatggtatctgtgtttgaatgtgcaattttgttaggcttttaaaaggcaggagattccccgcggtctgtgggcctctcctagcttggcattataatcaagaaattatactttgctatgcaaaagcatgatggcttttttaaaaaaatcgttttttaatgttcccttcccaggttcaccctccctttttgttattttgaattctggtcgtaacaattcggtcttacttttttattttttattttttgttcgttttgatttacatttttattttttttcccccacaagcagaaggttttattttaaattccaagaatatgatggtcaaaattgctgggaagattctgatttagggttgtcactgcagagcatttccatgtcaatgtaagtaggtacccaaagtcgtttaggtgcagcattcagtaacgtaaaggtaaagaaaaaaaaagtagccacctgtggctttttatccccagtcgtagtaggaataagattgcatggtttgggcacactaccaatcacaatttccaaatttcatttccaccactgagatgccttgactcaaatgaaacattagtataggtttaggtggtgtttgtgtgtttttggtgaaacattagtataggtgtaggtggtggttgtgtgcttaactgaccccctaaaaacaagaccaaatacttaagcacggaatgtatttctgtttatgatatggaattcaatacaccccttcagtggtataaagacattcctggatttctttaggatagggtcagagttggtttactatctggccttcagtttttaaaaggggcgattctttgatatagcaatagcgtcaattttttttttcttttacctttacaggtgagaaaccttaccactgtgactgggacggctgtggatggaaattcgcccgctcagatgaactgaccaggcactaccgtaaacacacggggcaccgcccgttccagtgccaaaaatgcgaccgagcattttccaggtcggaccacctcgccttacacatgaagaggcatttttaaatcccagacagtggatatgacccacactgccagaagagaattcagtattttttacttttcacactgtcttcccgatgagggaaggagcccagccagaaagcactacaatcatggtcaagttcccaactgagtcatcttgtgagtggataatcaggaaaaatgaggaatccaaaagacaaaaatcaaagaacagatggggtctgtgactggatcttctatcattccaattctaaatccgacttgaatattcctggacttacaaaatgccaagggggtgactggaagttgtggatatcagggtataaattatatccgtgagttgggggagggaagaccagaattcccttgaattgtgtattgatgcaatataagcataaaagatcaccttgtattctctttaccttctaaaagccattattatgatgttagaagaagaggaagaaattcaggtacagaaaacatgtttaaatagcctaaatgatggtgcttggtgagtcttggttctaaaggtaccaaacaaggaagccaaagttttcaaactgctgcatactttgacaaggaaaatctatatttgtcttccgatcaacatttatgacctaagtcaggtaatatacctggtttacttctttagcatttttatgcagacagtctgttatgcactgtggtttcagatgtgcaataatttgtacaatggtttattcccaagtatgccttaagcagaacaaatgtgtttttctatatagttccttgccttaataaatatgtaatataaatttaagcaaacgtctattttgtatatttgtaaactacaaagtaaaatgaacattttgtggagtttgtattttgcatactcaaggtgagaattaagttttaaataaacctataatattttatctgaataatgttttttattgttttgttttcctcctggaaaaatatgaacagtgtttggtttaaacacaccgggttaataaggcatgtaagaagcacgcacaaaaaagccaactttatgtcaacaaattaaaatacctttttttattaaaaaaaaactatttagttttaccataaatactatcaatatagggctgagaactcttgattattgtacgtttaaaaattacaagattaaaaacccagttcaggtttgctctttccaaatgtacgtaaagctacgtgaaagcagtttccttacctatgattttcccagtagaaacagcttaatcatccttaaatttgctcagtttagtatgaaaatatttatgaaatatatacatttcagtttcatatttgaaaaaaatctttatggtttgtcttttaaagtaaataaaaataaaaaagttttctgtggaggcctgtcccagcacccctcacatctgagtaacaaaagaaccttcctacagcagacaaccctaagaacgtagttccacagtgccctcctgaggattaaagggttcatttatgcttggtgtgtgttaaagatacatcacttctactagttacagccttaaagaggtcagaaccaaagtttctggcagattgttttaaagctaaatcagttcccctgactgaaggtgggaaaacaaactgaaataaaataatttaaaaattattcaaattcataaaactaagtgtaaagtaagatggtgttatggtaagtttgtagcgtttatattagaagttttaatattaaaactcaaaactgccctgttagaatctgaagttcttgagatgggtgcctgaaagattgaaattcatttggggctatcgcaaaatggaaaaagcatttgtgacacttgttgacaccttatatacttgtaatagtgatgtgggtgactaaacatcatcaaggggacagagctcactgctcactggcattttttttagagtgcttattaactattgattgtatctagtgtccagaggtgcgtttgtaccatgggtacatgtaataaatgaaataaaaaatggatgtttataagaggcttatggtagatcagcacaaggtattttctttggcttttgagagtccaccat

SEQ ID NO: 818 - DNA, 4054 bp, Homo sapiens
ggcggacatcaacgacgtgagcccctcgggcggcttcgtggccgagctcctgcggccagaattggacccggtgtacattccgccgcagcagccgcagccgccaggtggcgggctgatgggcaagttcgtgctgaaggcgtcgctgagcgcccctggcagcgagtacggcagcccgtcggtcatcagcgtcagcaaaggcagccctgacggcagccacccggtggtggtggcgccctacaacggcgggccgccgcgcacgtgccccaagatcaagcaggaggcggtctcttcgtgcacccacttgggcgctggaccccctctcagcaatggccaccggccggctgcacacgacttccccctggggcggcagctccccagcaggactaccccgaccctgggtcttgaggaagtgctgagcagcagggactgtcaccctgccctgccgcttcctcccggcttccatccccacccggggcccaattacccatccttcctgcccgatcagatgcagccgcaagtcccgccgctccattaccaaggtcagtcccggggatttgtagctcgggctggggagccctgtgtgtgctggccccacttcgggacacacgggatgatgctcaccccaccttcttcacccctagagctcatgccacccggttcctgcatgccagaggagcccaagccaaagaggggaagacgatcgtggccccggaaaaggaccgccacccacacttgtgattacgcgggctgcggcaaaacctacacaaagagttcccatctcaaggcacacctgcgaacccacacaggtagggggacaaactgcagaagggaggggggttagcttccagccccataggctaccagtggacactcctcagtgcctccttgacttcccaggttagcttccagccccataggctaccagtggacactcctcagtgcctccttggcttcccagggcagtctatcgccttgatctccgggatcactggagagaacagcaaaccggcgcctacttttctgcccaggagccttttgcttgatggatggtatctgtgtttgaatgtgcaattttgttaggcttttaaaaggcaggagattccccgcggtctgtgggcctctcctagcttggcattataatcaagaaattatactttgctatgcaaaagcatgatggcttttttaaaaaaatcgttttttaatgttcccttcccaggttcaccctccctttttgttattttgaattctggtcgtaacaattcggtcttacttttttattttttattttttgttcgttttgatttacatttttattttttttcccccacaagcagaaggttttattttaaattccaagaatatgatggtcaaaattgctgggaagattctgatttagggttgtcactgcagagcatttccatgtcaatgtaagtaggtacccaaagtcgtttaggtgcagcattcagtaacgtaaaggtaaagaaaaaaaaagtagccacctgtggctttttatccccagtcgtagtaggaataagattgcatggtttgggcacactaccaatcacaatttccaaatttcatttccaccactgagatgccttgactcaaatgaaacattagtataggtttaggtggtgtttgtgtgtttttggtgaaacattagtataggtgtaggtggtggttgtgtgcttaactgaccccctaaaaacaagaccaaatacttaagcacggaatgtatttctgtttatgatatggaattcaatacaccccttcagtggtataaagacattcctggatttctttaggatagggtcagagttggtttactatctggccttcagtttttaaaaggggcgattctttgatatagcaatagcgtcaattttttttttcttttacctttacaggtgagaaaccttaccactgtgactgggacggctgtggatggaaattcgcccgctcagatgaactgaccaggcactaccgtaaacacacggggcaccgcccgttccagtgccaaaaatgcgaccgagcattttccaggtcggaccacctcgccttacacatgaagaggcatttttaaatcccagacagtggatatgacccacactgccagaagagaattcagtattttttacttttcacactgtcttcccgatgagggaaggagcccagccagaaagcactacaatcatggtcaagttcccaactgagtcatcttgtgagtggataatcaggaaaaatgaggaatccaaaagacaaaaatcaaagaacagatggggtctgtgactggatcttctatcattccaattctaaatccgacttgaatattcctggacttacaaaatgccaagggggtgactggaagttgtggatatcagggtataaattatatccgtgagttgggggagggaagaccagaattcccttgaattgtgtattgatgcaatataagcataaaagatcaccttgtattctctttaccttctaaaagccattattatgatgttagaagaagaggaagaaattcaggtacagaaaacatgtttaaatagcctaaatgatggtgcttggtgagtcttggttctaaaggtaccaaacaaggaagccaaagttttcaaactgctgcatactttgacaaggaaaatctatatttgtcttccgatcaacatttatgacctaagtcaggtaatatacctggtttacttctttagcatttttatgcagacagtctgttatgcactgtggtttcagatgtgcaataatttgtacaatggtttattcccaagtatgccttaagcagaacaaatgtgtttttctatatagttccttgccttaataaatatgtaatataaatttaagcaaacgtctattttgtatatttgtaaactacaaagtaaaatgaacattttgtggagtttgtattttgcatactcaaggtgagaattaagttttaaataaacctataatattttatctgaataatgttttttattgttttgttttcctcctggaaaaatatgaacagtgtttggtttaaacacaccgggttaataaggcatgtaagaagcacgcacaaaaaagccaactttatgtcaacaaattaaaatacctttttttattaaaaaaaaactatttagttttaccataaatactatcaatatagggctgagaactcttgattattgtacgtttaaaaattacaagattaaaaacccagttcaggtttgctctttccaaatgtacgtaaagctacgtgaaagcagtttccttacctatgattttcccagtagaaacagcttaatcatccttaaatttgctcagtttagtatgaaaatatttatgaaatatatacatttcagtttcatatttgaaaaaaatctttatggtttgtcttttaaagtaaataaaaataaaaaagttttctgtggaggcctgtcccagcacccctcacatctgagtaacaaaagaaccttcctacagcagacaaccctaagaacgtagttccacagtgccctcctgaggattaaagggttcatttatgcttggtgtgtgttaaagatacatcacttctactagttacagccttaaagaggtcagaaccaaagtttctggcagattgttttaaagctaaatcagttcccctgactgaaggtgggaaaacaaactgaaataaaataatttaaaaattattcaaattcataaaactaagtgtaaagtaagatggtgttatggtaagtttgtagcgtttatattagaagttttaatattaaaactcaaaactgccctgttagaatctgaagttcttgagatgggtgcctgaaagattgaaattcatttggggctatcgcaaaatggaaaaagcatttgtgacacttgttgacaccttatatacttgtaatagtgatgtgggtgactaaacatcatcaaggggacagagctcactgctcactggcattttttttagagtgcttattaactattgattgtatctagtgtccagaggtgcgtttgtaccatgggtacatgtaataaatgaaataaaaaatggatg

SEQ ID NO: 819 - DNA, 4046 bp, Homo sapiens
cgacggccgaaagccgcccctgactctcctgtctccgctccctgccttgctcgcaggcagccacctggcgagtctgacatggctgtcagcgacgcgctgctcccatctttctccacgttcgcgtctggcccggcgggaagggagaagacactgcgtcaagcaggtgccccgaataacgtgagtatcgctccgggccgccgggaacgcccggtgggttttcgtgggtgtggtgggggcgggcggagccttggggtcaccaagagccactgaacgagggtaaggagcggccaccgcgcggactccgcaaccttcccgggatagcttccgtgtccttggctcagctgtgtatgcccgtggtgcgagcactgcggagccgcctggggcgcaagccgggtcttcaccagtccccgggcgcgctgtcggtagggcgggcgctctcgggccaccgggcgggaggtggccgcgtccccagacactggctgggccagagtgagtttagcgcgtaggcggccccgtggcgagagcgcaccgagagagcctcggtgtgccaattccggggacgtccacgggacctggagggggagggaccagccgcggcgctcgctcacacgcaattgggcagacaggacataacacccgcaatacagacgcatcacctcttcttcgacccgggagtgggccgagattgcagcgctggcgccctgggttcccgggtgcttcctgcctgaccagtccccatgtctgggcggtgcagtcgcgcgtggcccgccagcacgtcagtatgtcgggtggcaacaggggaccaccactgacaggtctctcccgccctgtccccgcagcgctggcgggaggagctctcccacatgaagcgacttcccccagtgcttcccggccgcccctatgacctggcggcggcgaccgtggccacagacctggagagcggcggagccggtgcggcttgcggcggtagcaacctggcgcccctacctcggagagagaccgaggagttcaacgatctcctggacctggactttattctctccaattcgctgacccatcctccggagtcagtggccgccaccgtgtcctcgtcagcgtcagcctcctcttcgtcgtcgccgtcgagcagcggccctgccagcgcgccctccacctgcagcttcacctatccgatccgggccgggaacgacccgggcgtggcgccgggcggcacgggcggaggcctcctctatggcagggagtccgctccccctccgacggctcccttcaacctggcggacatcaacgacgtgagcccctcgggcggcttcgtggccgagctcctgcggccagaattggacccggtgtacattccgccgcagcagccgcagccgccaggtggcgggctgatgggcaagttcgtgctgaaggcgtcgctgagcgcccctggcagcgagtacggcagcccgtcggtcatcagcgtcagcaaaggcagccctgacggcagccacccggtggtggtggcgccctacaacggcgggccgccgcgcacgtgccccaagatcaagcaggaggcggtctcttcgtgcacccacttgggcgctggaccccctctcagcaatggccaccggccggctgcacacgacttccccctggggcggcagctccccagcaggactaccccgaccctgggtcttgaggaagtgctgagcagcagggactgtcaccctgccctgccgcttcctcccggcttccatccccacccggggcccaattacccatccttcctgcccgatcagatgcagccgcaagtcccgccgctccattaccaaggtcagtcccggggatttgtagctcgggctggggagccctgtgtgtgctggccccacttcgggacacacgggatgatgctcaccccaccttcttcacccctagagctcatgccacccggttcctgcatgccagaggagcccaagccaaagaggggaagacgatcgtggccccggaaaaggaccgccacccacacttgtgattacgcgggctgcggcaaaacctacacaaagagttcccatctcaaggcacacctgcgaacccacacaggtagggggacaaactgcagaagggaggggggttagcttccagccccataggctaccagtggacactcctcagtgcctccttgacttcccaggttagcttccagccccataggctaccagtggacactcctcagtgcctccttggcttcccagggcagtctatcgccttgatctccgggatcactggagagaacagcaaaccggcgcctacttttctgcccaggagccttttgcttgatggatggtatctgtgtttgaatgtgcaattttgttaggcttttaaaaggcaggagattccccgcggtctgtgggcctctcctagcttggcattataatcaagaaattatactttgctatgcaaaagcatgatggcttttttaaaaaaatcgttttttaatgttcccttcccaggttcaccctccctttttgttattttgaattctggtcgtaacaattcggtcttacttttttattttttattttttgttcgttttgatttacatttttattttttttcccccacaagcagaaggttttattttaaattccaagaatatgatggtcaaaattgctgggaagattctgatttagggttgtcactgcagagcatttccatgtcaatgtaagtaggtacccaaagtcgtttaggtgcagcattcagtaacgtaaaggtaaagaaaaaaaaagtagccacctgtggctttttatccccagtcgtagtaggaataagattgcatggtttgggcacactaccaatcacaatttccaaatttcatttccaccactgagatgccttgactcaaatgaaacattagtataggtttaggtggtgtttgtgtgtttttggtgaaacattagtataggtgtaggtggtggttgtgtgcttaactgaccccctaaaaacaagaccaaatacttaagcacggaatgtatttctgtttatgatatggaattcaatacaccccttcagtggtataaagacattcctggatttctttaggatagggtcagagttggtttactatctggccttcagtttttaaaaggggcgattctttgatatagcaatagcgtcaattttttttttcttttacctttacaggtgagaaaccttaccactgtgactgggacggctgtggatggaaattcgcccgctcagatgaactgaccaggcactaccgtaaacacacggggcaccgcccgttccagtgccaaaaatgcgaccgagcattttccaggtcggaccacctcgccttacacatgaagaggcatttttaaatcccagacagtggatatgacccacactgccagaagagaattcagtattttttacttttcacactgtcttcccgatgagggaaggagcccagccagaaagcactacaatcatggtcaagttcccaactgagtcatcttgtgagtggataatcaggaaaaatgaggaatccaaaagacaaaaatcaaagaacagatggggtctgtgactggatcttctatcattccaattctaaatccgacttgaatattcctggacttacaaaatgccaagggggtgactggaagttgtggatatcagggtataaattatatccgtgagttgggggagggaagaccagaattcccttgaattgtgtattgatgcaatataagcataaaagatcaccttgtattctctttaccttctaaaagccattattatgatgttagaagaagaggaagaaattcaggtacagaaaacatgtttaaatagcctaaatgatggtgcttggtgagtcttggttctaaaggtaccaaacaaggaagccaaagttttcaaactgctgcatactttgacaaggaaaatctatatttgtcttccgatcaacatttatgacctaagtcaggtaatatacctggtttacttctttagcatttttatgcagacagtctgttatgcactgtggtttcagatgtgcaataatttgtaca

SEQ ID NO: 820 - DNA, 4044 bp, Homo sapiens
gggcccccacattaatgaggtaggtgaggcgcgcggcgctgggagcagggaggggtgaggaccggtgggacgcgccggaacgacggccgaaagccgcccctgactctcctgtctccgctccctgccttgctcgcaggcagccacctggcgagtctgacatggctgtcagcgacgcgctgctcccatctttctccacgttcgcgtctggcccggcgggaagggagaagacactgcgtcaagcaggtgccccgaataacgtgagtatcgctccgggccgccgggaacgcccggtgggttttcgtgggtgtggtgggggcgggcggagccttggggtcaccaagagccactgaacgagggtaaggagcggccaccgcgcggactccgcaaccttcccgggatagcttccgtgtccttggctcagctgtgtatgcccgtggtgcgagcactgcggagccgcctggggcgcaagccgggtcttcaccagtccccgggcgcgctgtcggtagggcgggcgctctcgggccaccgggcgggaggtggccgcgtccccagacactggctgggccagagtgagtttagcgcgtaggcggccccgtggcgagagcgcaccgagagagcctcggtgtgccaattccggggacgtccacgggacctggagggggagggaccagccgcggcgctcgctcacacgcaattgggcagacaggacataacacccgcaatacagacgcatcacctcttcttcgacccgggagtgggccgagattgcagcgctggcgccctgggttcccgggtgcttcctgcctgaccagtccccatgtctgggcggtgcagtcgcgcgtggcccgccagcacgtcagtatgtcgggtggcaacaggggaccaccactgacaggtctctcccgccctgtccccgcagcgctggcgggaggagctctcccacatgaagcgacttcccccagtgcttcccggccgcccctatgacctggcggcggcgaccgtggccacagacctggagagcggcggagccggtgcggcttgcggcggtagcaacctggcgcccctacctcggagagagaccgaggagttcaacgatctcctggacctggactttattctctccaattcgctgacccatcctccggagtcagtggccgccaccgtgtcctcgtcagcgtcagcctcctcttcgtcgtcgccgtcgagcagcggccctgccagcgcgccctccacctgcagcttcacctatccgatccgggccgggaacgacccgggcgtggcgccgggcggcacgggcggaggcctcctctatggcagggagtccgctccccctccgacggctcccttcaacctggcggacatcaacgacgtgagcccctcgggcggcttcgtggccgagctcctgcggccagaattggacccggtgtacattccgccgcagcagccgcagccgccaggtggcgggctgatgggcaagttcgtgctgaaggcgtcgctgagcgcccctggcagcgagtacggcagcccgtcggtcatcagcgtcagcaaaggcagccctgacggcagccacccggtggtggtggcgccctacaacggcgggccgccgcgcacgtgccccaagatcaagcaggaggcggtctcttcgtgcacccacttgggcgctggaccccctctcagcaatggccaccggccggctgcacacgacttccccctggggcggcagctccccagcaggactaccccgaccctgggtcttgaggaagtgctgagcagcagggactgtcaccctgccctgccgcttcctcccggcttccatccccacccggggcccaattacccatccttcctgcccgatcagatgcagccgcaagtcccgccgctccattaccaaggtcagtcccggggatttgtagctcgggctggggagccctgtgtgtgctggccccacttcgggacacacgggatgatgctcaccccaccttcttcacccctagagctcatgccacccggttcctgcatgccagaggagcccaagccaaagaggggaagacgatcgtggccccggaaaaggaccgccacccacacttgtgattacgcgggctgcggcaaaacctacacaaagagttcccatctcaaggcacacctgcgaacccacacaggtagggggacaaactgcagaagggaggggggttagcttccagccccataggctaccagtggacactcctcagtgcctccttgacttcccaggttagcttccagccccataggctaccagtggacactcctcagtgcctccttggcttcccagggcagtctatcgccttgatctccgggatcactggagagaacagcaaaccggcgcctacttttctgcccaggagccttttgcttgatggatggtatctgtgtttgaatgtgcaattttgttaggcttttaaaaggcaggagattccccgcggtctgtgggcctctcctagcttggcattataatcaagaaattatactttgctatgcaaaagcatgatggcttttttaaaaaaatcgttttttaatgttcccttcccaggttcaccctccctttttgttattttgaattctggtcgtaacaattcggtcttacttttttattttttattttttgttcgttttgatttacatttttattttttttcccccacaagcagaaggttttattttaaattccaagaatatgatggtcaaaattgctgggaagattctgatttagggttgtcactgcagagcatttccatgtcaatgtaagtaggtacccaaagtcgtttaggtgcagcattcagtaacgtaaaggtaaagaaaaaaaaagtagccacctgtggctttttatccccagtcgtagtaggaataagattgcatggtttgggcacactaccaatcacaatttccaaatttcatttccaccactgagatgccttgactcaaatgaaacattagtataggtttaggtggtgtttgtgtgtttttggtgaaacattagtataggtgtaggtggtggttgtgtgcttaactgaccccctaaaaacaagaccaaatacttaagcacggaatgtatttctgtttatgatatggaattcaatacaccccttcagtggtataaagacattcctggatttctttaggatagggtcagagttggtttactatctggccttcagtttttaaaaggggcgattctttgatatagcaatagcgtcaattttttttttcttttacctttacaggtgagaaaccttaccactgtgactgggacggctgtggatggaaattcgcccgctcagatgaactgaccaggcactaccgtaaacacacggggcaccgcccgttccagtgccaaaaatgcgaccgagcattttccaggtcggaccacctcgccttacacatgaagaggcatttttaaatcccagacagtggatatgacccacactgccagaagagaattcagtattttttacttttcacactgtcttcccgatgagggaaggagcccagccagaaagcactacaatcatggtcaagttcccaactgagtcatcttgtgagtggataatcaggaaaaatgaggaatccaaaagacaaaaatcaaagaacagatggggtctgtgactggatcttctatcattccaattctaaatccgacttgaatattcctggacttacaaaatgccaagggggtgactggaagttgtggatatcagggtataaattatatccgtgagttgggggagggaagaccagaattcccttgaattgtgtattgatgcaatataagcataaaagatcaccttgtattctctttaccttctaaaagccattattatgatgttagaagaagaggaagaaattcaggtacagaaaacatgtttaaatagcctaaatgatggtgcttggtgagtcttggttctaaaggtaccaaacaaggaagccaaagttttcaaactgctgcatactttgacaaggaaaatctatatttgtcttccgatcaacatttatgacctaagtcaggta

SEQ ID NO: 821 - DNA, 4050 bp, Homo sapiens
tacaacttttctaagaacttttgtatacaaaggaactttttaaaaaagacgcttccaagttatatttaatccaaagaagaaggatctcggccaatttggggttttgggttttggcttcgtttcttctcttcgttgactttggggttcaggtgccccagctgcttcgggctgccgaggaccttctgggcccccacattaatgaggtaggtgaggcgcgcggcgctgggagcagggaggggtgaggaccggtgggacgcgccggaacgacggccgaaagccgcccctgactctcctgtctccgctccctgccttgctcgcaggcagccacctggcgagtctgacatggctgtcagcgacgcgctgctcccatctttctccacgttcgcgtctggcccggcgggaagggagaagacactgcgtcaagcaggtgccccgaataacgtgagtatcgctccgggccgccgggaacgcccggtgggttttcgtgggtgtggtgggggcgggcggagccttggggtcaccaagagccactgaacgagggtaaggagcggccaccgcgcggactccgcaaccttcccgggatagcttccgtgtccttggctcagctgtgtatgcccgtggtgcgagcactgcggagccgcctggggcgcaagccgggtcttcaccagtccccgggcgcgctgtcggtagggcgggcgctctcgggccaccgggcgggaggtggccgcgtccccagacactggctgggccagagtgagtttagcgcgtaggcggccccgtggcgagagcgcaccgagagagcctcggtgtgccaattccggggacgtccacgggacctggagggggagggaccagccgcggcgctcgctcacacgcaattgggcagacaggacataacacccgcaatacagacgcatcacctcttcttcgacccgggagtgggccgagattgcagcgctggcgccctgggttcccgggtgcttcctgcctgaccagtccccatgtctgggcggtgcagtcgcgcgtggcccgccagcacgtcagtatgtcgggtggcaacaggggaccaccactgacaggtctctcccgccctgtccccgcagcgctggcgggaggagctctcccacatgaagcgacttcccccagtgcttcccggccgcccctatgacctggcggcggcgaccgtggccacagacctggagagcggcggagccggtgcggcttgcggcggtagcaacctggcgcccctacctcggagagagaccgaggagttcaacgatctcctggacctggactttattctctccaattcgctgacccatcctccggagtcagtggccgccaccgtgtcctcgtcagcgtcagcctcctcttcgtcgtcgccgtcgagcagcggccctgccagcgcgccctccacctgcagcttcacctatccgatccgggccgggaacgacccgggcgtggcgccgggcggcacgggcggaggcctcctctatggcagggagtccgctccccctccgacggctcccttcaacctggcggacatcaacgacgtgagcccctcgggcggcttcgtggccgagctcctgcggccagaattggacccggtgtacattccgccgcagcagccgcagccgccaggtggcgggctgatgggcaagttcgtgctgaaggcgtcgctgagcgcccctggcagcgagtacggcagcccgtcggtcatcagcgtcagcaaaggcagccctgacggcagccacccggtggtggtggcgccctacaacggcgggccgccgcgcacgtgccccaagatcaagcaggaggcggtctcttcgtgcacccacttgggcgctggaccccctctcagcaatggccaccggccggctgcacacgacttccccctggggcggcagctccccagcaggactaccccgaccctgggtcttgaggaagtgctgagcagcagggactgtcaccctgccctgccgcttcctcccggcttccatccccacccggggcccaattacccatccttcctgcccgatcagatgcagccgcaagtcccgccgctccattaccaaggtcagtcccggggatttgtagctcgggctggggagccctgtgtgtgctggccccacttcgggacacacgggatgatgctcaccccaccttcttcacccctagagctcatgccacccggttcctgcatgccagaggagcccaagccaaagaggggaagacgatcgtggccccggaaaaggaccgccacccacacttgtgattacgcgggctgcggcaaaacctacacaaagagttcccatctcaaggcacacctgcgaacccacacaggtagggggacaaactgcagaagggaggggggttagcttccagccccataggctaccagtggacactcctcagtgcctccttgacttcccaggttagcttccagccccataggctaccagtggacactcctcagtgcctccttggcttcccagggcagtctatcgccttgatctccgggatcactggagagaacagcaaaccggcgcctacttttctgcccaggagccttttgcttgatggatggtatctgtgtttgaatgtgcaattttgttaggcttttaaaaggcaggagattccccgcggtctgtgggcctctcctagcttggcattataatcaagaaattatactttgctatgcaaaagcatgatggcttttttaaaaaaatcgttttttaatgttcccttcccaggttcaccctccctttttgttattttgaattctggtcgtaacaattcggtcttacttttttattttttattttttgttcgttttgatttacatttttattttttttcccccacaagcagaaggttttattttaaattccaagaatatgatggtcaaaattgctgggaagattctgatttagggttgtcactgcagagcatttccatgtcaatgtaagtaggtacccaaagtcgtttaggtgcagcattcagtaacgtaaaggtaaagaaaaaaaaagtagccacctgtggctttttatccccagtcgtagtaggaataagattgcatggtttgggcacactaccaatcacaatttccaaatttcatttccaccactgagatgccttgactcaaatgaaacattagtataggtttaggtggtgtttgtgtgtttttggtgaaacattagtataggtgtaggtggtggttgtgtgcttaactgaccccctaaaaacaagaccaaatacttaagcacggaatgtatttctgtttatgatatggaattcaatacaccccttcagtggtataaagacattcctggatttctttaggatagggtcagagttggtttactatctggccttcagtttttaaaaggggcgattctttgatatagcaatagcgtcaattttttttttcttttacctttacaggtgagaaaccttaccactgtgactgggacggctgtggatggaaattcgcccgctcagatgaactgaccaggcactaccgtaaacacacggggcaccgcccgttccagtgccaaaaatgcgaccgagcattttccaggtcggaccacctcgccttacacatgaagaggcatttttaaatcccagacagtggatatgacccacactgccagaagagaattcagtattttttacttttcacactgtcttcccgatgagggaaggagcccagccagaaagcactacaatcatggtcaagttcccaactgagtcatcttgtgagtggataatcaggaaaaatgaggaatccaaaagacaaaaatcaaagaacagatggggtctgtgactggatcttctatcattccaattctaaatccgacttgaatattcctggacttacaaaatgccaagggggtgactggaagttgtggatatcagggtataaattatatccgtgagttgggggagggaagaccagaattcccttgaattgtgtattgatgcaatataagcataaaagatcaccttgtattctctttaccttctaaaagccattattatgatgttaga

SEQ ID NO: 822 - DNA, 4045 bp, Homo sapiens
gctccacacaactcaccggagtccgcgccttgcgccgccgaccagttcgcagctccgcgccacggcagccagtctcacctggcggcaccgcccgcccaccgccccggccacagcccctgcgcccacggcagcactcgaggcgaccgcgacagtggtgggggacgctgctgagtggaagagagcgcagcccggccaccggacctacttactcgccttgctgattgtctatttttgcgtttacaacttttctaagaacttttgtatacaaaggaactttttaaaaaagacgcttccaagttatatttaatccaaagaagaaggatctcggccaatttggggttttgggttttggcttcgtttcttctcttcgttgactttggggttcaggtgccccagctgcttcgggctgccgaggaccttctgggcccccacattaatgaggtaggtgaggcgcgcggcgctgggagcagggaggggtgaggaccggtgggacgcgccggaacgacggccgaaagccgcccctgactctcctgtctccgctccctgccttgctcgcaggcagccacctggcgagtctgacatggctgtcagcgacgcgctgctcccatctttctccacgttcgcgtctggcccggcgggaagggagaagacactgcgtcaagcaggtgccccgaataacgtgagtatcgctccgggccgccgggaacgcccggtgggttttcgtgggtgtggtgggggcgggcggagccttggggtcaccaagagccactgaacgagggtaaggagcggccaccgcgcggactccgcaaccttcccgggatagcttccgtgtccttggctcagctgtgtatgcccgtggtgcgagcactgcggagccgcctggggcgcaagccgggtcttcaccagtccccgggcgcgctgtcggtagggcgggcgctctcgggccaccgggcgggaggtggccgcgtccccagacactggctgggccagagtgagtttagcgcgtaggcggccccgtggcgagagcgcaccgagagagcctcggtgtgccaattccggggacgtccacgggacctggagggggagggaccagccgcggcgctcgctcacacgcaattgggcagacaggacataacacccgcaatacagacgcatcacctcttcttcgacccgggagtgggccgagattgcagcgctggcgccctgggttcccgggtgcttcctgcctgaccagtccccatgtctgggcggtgcagtcgcgcgtggcccgccagcacgtcagtatgtcgggtggcaacaggggaccaccactgacaggtctctcccgccctgtccccgcagcgctggcgggaggagctctcccacatgaagcgacttcccccagtgcttcccggccgcccctatgacctggcggcggcgaccgtggccacagacctggagagcggcggagccggtgcggcttgcggcggtagcaacctggcgcccctacctcggagagagaccgaggagttcaacgatctcctggacctggactttattctctccaattcgctgacccatcctccggagtcagtggccgccaccgtgtcctcgtcagcgtcagcctcctcttcgtcgtcgccgtcgagcagcggccctgccagcgcgccctccacctgcagcttcacctatccgatccgggccgggaacgacccgggcgtggcgccgggcggcacgggcggaggcctcctctatggcagggagtccgctccccctccgacggctcccttcaacctggcggacatcaacgacgtgagcccctcgggcggcttcgtggccgagctcctgcggccagaattggacccggtgtacattccgccgcagcagccgcagccgccaggtggcgggctgatgggcaagttcgtgctgaaggcgtcgctgagcgcccctggcagcgagtacggcagcccgtcggtcatcagcgtcagcaaaggcagccctgacggcagccacccggtggtggtggcgccctacaacggcgggccgccgcgcacgtgccccaagatcaagcaggaggcggtctcttcgtgcacccacttgggcgctggaccccctctcagcaatggccaccggccggctgcacacgacttccccctggggcggcagctccccagcaggactaccccgaccctgggtcttgaggaagtgctgagcagcagggactgtcaccctgccctgccgcttcctcccggcttccatccccacccggggcccaattacccatccttcctgcccgatcagatgcagccgcaagtcccgccgctccattaccaaggtcagtcccggggatttgtagctcgggctggggagccctgtgtgtgctggccccacttcgggacacacgggatgatgctcaccccaccttcttcacccctagagctcatgccacccggttcctgcatgccagaggagcccaagccaaagaggggaagacgatcgtggccccggaaaaggaccgccacccacacttgtgattacgcgggctgcggcaaaacctacacaaagagttcccatctcaaggcacacctgcgaacccacacaggtagggggacaaactgcagaagggaggggggttagcttccagccccataggctaccagtggacactcctcagtgcctccttgacttcccaggttagcttccagccccataggctaccagtggacactcctcagtgcctccttggcttcccagggcagtctatcgccttgatctccgggatcactggagagaacagcaaaccggcgcctacttttctgcccaggagccttttgcttgatggatggtatctgtgtttgaatgtgcaattttgttaggcttttaaaaggcaggagattccccgcggtctgtgggcctctcctagcttggcattataatcaagaaattatactttgctatgcaaaagcatgatggcttttttaaaaaaatcgttttttaatgttcccttcccaggttcaccctccctttttgttattttgaattctggtcgtaacaattcggtcttacttttttattttttattttttgttcgttttgatttacatttttattttttttcccccacaagcagaaggttttattttaaattccaagaatatgatggtcaaaattgctgggaagattctgatttagggttgtcactgcagagcatttccatgtcaatgtaagtaggtacccaaagtcgtttaggtgcagcattcagtaacgtaaaggtaaagaaaaaaaaagtagccacctgtggctttttatccccagtcgtagtaggaataagattgcatggtttgggcacactaccaatcacaatttccaaatttcatttccaccactgagatgccttgactcaaatgaaacattagtataggtttaggtggtgtttgtgtgtttttggtgaaacattagtataggtgtaggtggtggttgtgtgcttaactgaccccctaaaaacaagaccaaatacttaagcacggaatgtatttctgtttatgatatggaattcaatacaccccttcagtggtataaagacattcctggatttctttaggatagggtcagagttggtttactatctggccttcagtttttaaaaggggcgattctttgatatagcaatagcgtcaattttttttttcttttacctttacaggtgagaaaccttaccactgtgactgggacggctgtggatggaaattcgcccgctcagatgaactgaccaggcactaccgtaaacacacggggcaccgcccgttccagtgccaaaaatgcgaccgagcattttccaggtcggaccacctcgccttacacatgaagaggcatttttaaatcccagacagtggatatgacccacactgccagaagagaattcagtattttttacttttcacactgtcttcccgatgagggaaggagcccagccagaaagcactacaatcatggtcaagttcccaactgagtcatcttgtgagtggataatcaggaaaaatgaggaatccaaaagacaaaaatcaaa

SEQ ID NO: 823 - DNA, 4041 bp, Homo sapiens
gagccgccgagtgaccctcccccgcccctctggccccccaccctcccacccgcccgtggcccgcgcccatggccgcgcgcgctccacacaactcaccggagtccgcgccttgcgccgccgaccagttcgcagctccgcgccacggcagccagtctcacctggcggcaccgcccgcccaccgccccggccacagcccctgcgcccacggcagcactcgaggcgaccgcgacagtggtgggggacgctgctgagtggaagagagcgcagcccggccaccggacctacttactcgccttgctgattgtctatttttgcgtttacaacttttctaagaacttttgtatacaaaggaactttttaaaaaagacgcttccaagttatatttaatccaaagaagaaggatctcggccaatttggggttttgggttttggcttcgtttcttctcttcgttgactttggggttcaggtgccccagctgcttcgggctgccgaggaccttctgggcccccacattaatgaggtaggtgaggcgcgcggcgctgggagcagggaggggtgaggaccggtgggacgcgccggaacgacggccgaaagccgcccctgactctcctgtctccgctccctgccttgctcgcaggcagccacctggcgagtctgacatggctgtcagcgacgcgctgctcccatctttctccacgttcgcgtctggcccggcgggaagggagaagacactgcgtcaagcaggtgccccgaataacgtgagtatcgctccgggccgccgggaacgcccggtgggttttcgtgggtgtggtgggggcgggcggagccttggggtcaccaagagccactgaacgagggtaaggagcggccaccgcgcggactccgcaaccttcccgggatagcttccgtgtccttggctcagctgtgtatgcccgtggtgcgagcactgcggagccgcctggggcgcaagccgggtcttcaccagtccccgggcgcgctgtcggtagggcgggcgctctcgggccaccgggcgggaggtggccgcgtccccagacactggctgggccagagtgagtttagcgcgtaggcggccccgtggcgagagcgcaccgagagagcctcggtgtgccaattccggggacgtccacgggacctggagggggagggaccagccgcggcgctcgctcacacgcaattgggcagacaggacataacacccgcaatacagacgcatcacctcttcttcgacccgggagtgggccgagattgcagcgctggcgccctgggttcccgggtgcttcctgcctgaccagtccccatgtctgggcggtgcagtcgcgcgtggcccgccagcacgtcagtatgtcgggtggcaacaggggaccaccactgacaggtctctcccgccctgtccccgcagcgctggcgggaggagctctcccacatgaagcgacttcccccagtgcttcccggccgcccctatgacctggcggcggcgaccgtggccacagacctggagagcggcggagccggtgcggcttgcggcggtagcaacctggcgcccctacctcggagagagaccgaggagttcaacgatctcctggacctggactttattctctccaattcgctgacccatcctccggagtcagtggccgccaccgtgtcctcgtcagcgtcagcctcctcttcgtcgtcgccgtcgagcagcggccctgccagcgcgccctccacctgcagcttcacctatccgatccgggccgggaacgacccgggcgtggcgccgggcggcacgggcggaggcctcctctatggcagggagtccgctccccctccgacggctcccttcaacctggcggacatcaacgacgtgagcccctcgggcggcttcgtggccgagctcctgcggccagaattggacccggtgtacattccgccgcagcagccgcagccgccaggtggcgggctgatgggcaagttcgtgctgaaggcgtcgctgagcgcccctggcagcgagtacggcagcccgtcggtcatcagcgtcagcaaaggcagccctgacggcagccacccggtggtggtggcgccctacaacggcgggccgccgcgcacgtgccccaagatcaagcaggaggcggtctcttcgtgcacccacttgggcgctggaccccctctcagcaatggccaccggccggctgcacacgacttccccctggggcggcagctccccagcaggactaccccgaccctgggtcttgaggaagtgctgagcagcagggactgtcaccctgccctgccgcttcctcccggcttccatccccacccggggcccaattacccatccttcctgcccgatcagatgcagccgcaagtcccgccgctccattaccaaggtcagtcccggggatttgtagctcgggctggggagccctgtgtgtgctggccccacttcgggacacacgggatgatgctcaccccaccttcttcacccctagagctcatgccacccggttcctgcatgccagaggagcccaagccaaagaggggaagacgatcgtggccccggaaaaggaccgccacccacacttgtgattacgcgggctgcggcaaaacctacacaaagagttcccatctcaaggcacacctgcgaacccacacaggtagggggacaaactgcagaagggaggggggttagcttccagccccataggctaccagtggacactcctcagtgcctccttgacttcccaggttagcttccagccccataggctaccagtggacactcctcagtgcctccttggcttcccagggcagtctatcgccttgatctccgggatcactggagagaacagcaaaccggcgcctacttttctgcccaggagccttttgcttgatggatggtatctgtgtttgaatgtgcaattttgttaggcttttaaaaggcaggagattccccgcggtctgtgggcctctcctagcttggcattataatcaagaaattatactttgctatgcaaaagcatgatggcttttttaaaaaaatcgttttttaatgttcccttcccaggttcaccctccctttttgttattttgaattctggtcgtaacaattcggtcttacttttttattttttattttttgttcgttttgatttacatttttattttttttcccccacaagcagaaggttttattttaaattccaagaatatgatggtcaaaattgctgggaagattctgatttagggttgtcactgcagagcatttccatgtcaatgtaagtaggtacccaaagtcgtttaggtgcagcattcagtaacgtaaaggtaaagaaaaaaaaagtagccacctgtggctttttatccccagtcgtagtaggaataagattgcatggtttgggcacactaccaatcacaatttccaaatttcatttccaccactgagatgccttgactcaaatgaaacattagtataggtttaggtggtgtttgtgtgtttttggtgaaacattagtataggtgtaggtggtggttgtgtgcttaactgaccccctaaaaacaagaccaaatacttaagcacggaatgtatttctgtttatgatatggaattcaatacaccccttcagtggtataaagacattcctggatttctttaggatagggtcagagttggtttactatctggccttcagtttttaaaaggggcgattctttgatatagcaatagcgtcaattttttttttcttttacctttacaggtgagaaaccttaccactgtgactgggacggctgtggatggaaattcgcccgctcagatgaactgaccaggcactaccgtaaacacacggggcaccgcccgttccagtgccaaaaatgcgaccgagcattttccaggtcggaccacctcgccttacacatgaagaggcatttttaaatcccagacagtggatatgacccacactgccagaagagaattcagtattttttacttttcacactgtcttcccgatgagggaaggagcccagccagaaagcac

SEQ ID NO: 824 - DNA, 4071 bp, Homo sapiens
tgggagaaggcggaggaaaaggctgtagcgaaggaagttataagtaaggaacgcgcgccggcggccggcagtttcccgaccagagagaacgaacgtgtctgcgggcgcgcggggagcagaggcggtggcgggcggcggcggcaccgggagccgccgagtgaccctcccccgcccctctggccccccaccctcccacccgcccgtggcccgcgcccatggccgcgcgcgctccacacaactcaccggagtccgcgccttgcgccgccgaccagttcgcagctccgcgccacggcagccagtctcacctggcggcaccgcccgcccaccgccccggccacagcccctgcgcccacggcagcactcgaggcgaccgcgacagtggtgggggacgctgctgagtggaagagagcgcagcccggccaccggacctacttactcgccttgctgattgtctatttttgcgtttacaacttttctaagaacttttgtatacaaaggaactttttaaaaaagacgcttccaagttatatttaatccaaagaagaaggatctcggccaatttggggttttgggttttggcttcgtttcttctcttcgttgactttggggttcaggtgccccagctgcttcgggctgccgaggaccttctgggcccccacattaatgaggtaggtgaggcgcgcggcgctgggagcagggaggggtgaggaccggtgggacgcgccggaacgacggccgaaagccgcccctgactctcctgtctccgctccctgccttgctcgcaggcagccacctggcgagtctgacatggctgtcagcgacgcgctgctcccatctttctccacgttcgcgtctggcccggcgggaagggagaagacactgcgtcaagcaggtgccccgaataacgtgagtatcgctccgggccgccgggaacgcccggtgggttttcgtgggtgtggtgggggcgggcggagccttggggtcaccaagagccactgaacgagggtaaggagcggccaccgcgcggactccgcaaccttcccgggatagcttccgtgtccttggctcagctgtgtatgcccgtggtgcgagcactgcggagccgcctggggcgcaagccgggtcttcaccagtccccgggcgcgctgtcggtagggcgggcgctctcgggccaccgggcgggaggtggccgcgtccccagacactggctgggccagagtgagtttagcgcgtaggcggccccgtggcgagagcgcaccgagagagcctcggtgtgccaattccggggacgtccacgggacctggagggggagggaccagccgcggcgctcgctcacacgcaattgggcagacaggacataacacccgcaatacagacgcatcacctcttcttcgacccgggagtgggccgagattgcagcgctggcgccctgggttcccgggtgcttcctgcctgaccagtccccatgtctgggcggtgcagtcgcgcgtggcccgccagcacgtcagtatgtcgggtggcaacaggggaccaccactgacaggtctctcccgccctgtccccgcagcgctggcgggaggagctctcccacatgaagcgacttcccccagtgcttcccggccgcccctatgacctggcggcggcgaccgtggccacagacctggagagcggcggagccggtgcggcttgcggcggtagcaacctggcgcccctacctcggagagagaccgaggagttcaacgatctcctggacctggactttattctctccaattcgctgacccatcctccggagtcagtggccgccaccgtgtcctcgtcagcgtcagcctcctcttcgtcgtcgccgtcgagcagcggccctgccagcgcgccctccacctgcagcttcacctatccgatccgggccgggaacgacccgggcgtggcgccgggcggcacgggcggaggcctcctctatggcagggagtccgctccccctccgacggctcccttcaacctggcggacatcaacgacgtgagcccctcgggcggcttcgtggccgagctcctgcggccagaattggacccggtgtacattccgccgcagcagccgcagccgccaggtggcgggctgatgggcaagttcgtgctgaaggcgtcgctgagcgcccctggcagcgagtacggcagcccgtcggtcatcagcgtcagcaaaggcagccctgacggcagccacccggtggtggtggcgccctacaacggcgggccgccgcgcacgtgccccaagatcaagcaggaggcggtctcttcgtgcacccacttgggcgctggaccccctctcagcaatggccaccggccggctgcacacgacttccccctggggcggcagctccccagcaggactaccccgaccctgggtcttgaggaagtgctgagcagcagggactgtcaccctgccctgccgcttcctcccggcttccatccccacccggggcccaattacccatccttcctgcccgatcagatgcagccgcaagtcccgccgctccattaccaaggtcagtcccggggatttgtagctcgggctggggagccctgtgtgtgctggccccacttcgggacacacgggatgatgctcaccccaccttcttcacccctagagctcatgccacccggttcctgcatgccagaggagcccaagccaaagaggggaagacgatcgtggccccggaaaaggaccgccacccacacttgtgattacgcgggctgcggcaaaacctacacaaagagttcccatctcaaggcacacctgcgaacccacacaggtagggggacaaactgcagaagggaggggggttagcttccagccccataggctaccagtggacactcctcagtgcctccttgacttcccaggttagcttccagccccataggctaccagtggacactcctcagtgcctccttggcttcccagggcagtctatcgccttgatctccgggatcactggagagaacagcaaaccggcgcctacttttctgcccaggagccttttgcttgatggatggtatctgtgtttgaatgtgcaattttgttaggcttttaaaaggcaggagattccccgcggtctgtgggcctctcctagcttggcattataatcaagaaattatactttgctatgcaaaagcatgatggcttttttaaaaaaatcgttttttaatgttcccttcccaggttcaccctccctttttgttattttgaattctggtcgtaacaattcggtcttacttttttattttttattttttgttcgttttgatttacatttttattttttttcccccacaagcagaaggttttattttaaattccaagaatatgatggtcaaaattgctgggaagattctgatttagggttgtcactgcagagcatttccatgtcaatgtaagtaggtacccaaagtcgtttaggtgcagcattcagtaacgtaaaggtaaagaaaaaaaaagtagccacctgtggctttttatccccagtcgtagtaggaataagattgcatggtttgggcacactaccaatcacaatttccaaatttcatttccaccactgagatgccttgactcaaatgaaacattagtataggtttaggtggtgtttgtgtgtttttggtgaaacattagtataggtgtaggtggtggttgtgtgcttaactgaccccctaaaaacaagaccaaatacttaagcacggaatgtatttctgtttatgatatggaattcaatacaccccttcagtggtataaagacattcctggatttctttaggatagggtcagagttggtttactatctggccttcagtttttaaaaggggcgattctttgatatagcaatagcgtcaattttttttttcttttacctttacaggtgagaaaccttaccactgtgactgggacggctgtggatggaaattcgcccgctcagatgaactgaccaggcactaccgtaaacacacggggcaccgcccgttccagtgccaaaaatgcgaccgagcattttccaggtcggaccacctcgccttacacatga

SEQ ID NO: 825 - DNA, 4063 bp, Homo sapiens
ggtgagtacggccctggtcgcgcagcgaccgaacctgcgcccggttcctcgcgccccgcgctggggcggacgccgccgccgccgccgacaccactgccgccggcgtcagctcggctccagcccgccagctgcctggctggcgtcacggcccggcccagccccgcccgcgcccctccttcccctcccccgcccccacgtgcgccgagtttgttgatttagctgccatagcaacgatggaagggagcctcggggggggcggagagaagaaagggaggggcggggcatgggagaaggcggaggaaaaggctgtagcgaaggaagttataagtaaggaacgcgcgccggcggccggcagtttcccgaccagagagaacgaacgtgtctgcgggcgcgcggggagcagaggcggtggcgggcggcggcggcaccgggagccgccgagtgaccctcccccgcccctctggccccccaccctcccacccgcccgtggcccgcgcccatggccgcgcgcgctccacacaactcaccggagtccgcgccttgcgccgccgaccagttcgcagctccgcgccacggcagccagtctcacctggcggcaccgcccgcccaccgccccggccacagcccctgcgcccacggcagcactcgaggcgaccgcgacagtggtgggggacgctgctgagtggaagagagcgcagcccggccaccggacctacttactcgccttgctgattgtctatttttgcgtttacaacttttctaagaacttttgtatacaaaggaactttttaaaaaagacgcttccaagttatatttaatccaaagaagaaggatctcggccaatttggggttttgggttttggcttcgtttcttctcttcgttgactttggggttcaggtgccccagctgcttcgggctgccgaggaccttctgggcccccacattaatgaggtaggtgaggcgcgcggcgctgggagcagggaggggtgaggaccggtgggacgcgccggaacgacggccgaaagccgcccctgactctcctgtctccgctccctgccttgctcgcaggcagccacctggcgagtctgacatggctgtcagcgacgcgctgctcccatctttctccacgttcgcgtctggcccggcgggaagggagaagacactgcgtcaagcaggtgccccgaataacgtgagtatcgctccgggccgccgggaacgcccggtgggttttcgtgggtgtggtgggggcgggcggagccttggggtcaccaagagccactgaacgagggtaaggagcggccaccgcgcggactccgcaaccttcccgggatagcttccgtgtccttggctcagctgtgtatgcccgtggtgcgagcactgcggagccgcctggggcgcaagccgggtcttcaccagtccccgggcgcgctgtcggtagggcgggcgctctcgggccaccgggcgggaggtggccgcgtccccagacactggctgggccagagtgagtttagcgcgtaggcggccccgtggcgagagcgcaccgagagagcctcggtgtgccaattccggggacgtccacgggacctggagggggagggaccagccgcggcgctcgctcacacgcaattgggcagacaggacataacacccgcaatacagacgcatcacctcttcttcgacccgggagtgggccgagattgcagcgctggcgccctgggttcccgggtgcttcctgcctgaccagtccccatgtctgggcggtgcagtcgcgcgtggcccgccagcacgtcagtatgtcgggtggcaacaggggaccaccactgacaggtctctcccgccctgtccccgcagcgctggcgggaggagctctcccacatgaagcgacttcccccagtgcttcccggccgcccctatgacctggcggcggcgaccgtggccacagacctggagagcggcggagccggtgcggcttgcggcggtagcaacctggcgcccctacctcggagagagaccgaggagttcaacgatctcctggacctggactttattctctccaattcgctgacccatcctccggagtcagtggccgccaccgtgtcctcgtcagcgtcagcctcctcttcgtcgtcgccgtcgagcagcggccctgccagcgcgccctccacctgcagcttcacctatccgatccgggccgggaacgacccgggcgtggcgccgggcggcacgggcggaggcctcctctatggcagggagtccgctccccctccgacggctcccttcaacctggcggacatcaacgacgtgagcccctcgggcggcttcgtggccgagctcctgcggccagaattggacccggtgtacattccgccgcagcagccgcagccgccaggtggcgggctgatgggcaagttcgtgctgaaggcgtcgctgagcgcccctggcagcgagtacggcagcccgtcggtcatcagcgtcagcaaaggcagccctgacggcagccacccggtggtggtggcgccctacaacggcgggccgccgcgcacgtgccccaagatcaagcaggaggcggtctcttcgtgcacccacttgggcgctggaccccctctcagcaatggccaccggccggctgcacacgacttccccctggggcggcagctccccagcaggactaccccgaccctgggtcttgaggaagtgctgagcagcagggactgtcaccctgccctgccgcttcctcccggcttccatccccacccggggcccaattacccatccttcctgcccgatcagatgcagccgcaagtcccgccgctccattaccaaggtcagtcccggggatttgtagctcgggctggggagccctgtgtgtgctggccccacttcgggacacacgggatgatgctcaccccaccttcttcacccctagagctcatgccacccggttcctgcatgccagaggagcccaagccaaagaggggaagacgatcgtggccccggaaaaggaccgccacccacacttgtgattacgcgggctgcggcaaaacctacacaaagagttcccatctcaaggcacacctgcgaacccacacaggtagggggacaaactgcagaagggaggggggttagcttccagccccataggctaccagtggacactcctcagtgcctccttgacttcccaggttagcttccagccccataggctaccagtggacactcctcagtgcctccttggcttcccagggcagtctatcgccttgatctccgggatcactggagagaacagcaaaccggcgcctacttttctgcccaggagccttttgcttgatggatggtatctgtgtttgaatgtgcaattttgttaggcttttaaaaggcaggagattccccgcggtctgtgggcctctcctagcttggcattataatcaagaaattatactttgctatgcaaaagcatgatggcttttttaaaaaaatcgttttttaatgttcccttcccaggttcaccctccctttttgttattttgaattctggtcgtaacaattcggtcttacttttttattttttattttttgttcgttttgatttacatttttattttttttcccccacaagcagaaggttttattttaaattccaagaatatgatggtcaaaattgctgggaagattctgatttagggttgtcactgcagagcatttccatgtcaatgtaagtaggtacccaaagtcgtttaggtgcagcattcagtaacgtaaaggtaaagaaaaaaaaagtagccacctgtggctttttatccccagtcgtagtaggaataagattgcatggtttgggcacactaccaatcacaatttccaaatttcatttccaccactgagatgccttgactcaaatgaaacattagtataggtttaggtggtgtttgtgtgtttttggtgaaacattagtataggtgtaggtggtggttgtgtgcttaactgaccccctaaaaacaagaccaaatacttaagcacggaatgtatttctgtttatgatatggaattcaatacaccccttcagtg

SEQ ID NO: 826 - DNA, 4053 bp, Homo sapiens
cgcagacagcgcggcaagcgcgtatgctagcaggggtgcggacgcgtgaccgtgccgcccgctgaccccaccagtcttcgcgggcttcgaacccagggagccgacaatggcggtgagtacggccctggtcgcgcagcgaccgaacctgcgcccggttcctcgcgccccgcgctggggcggacgccgccgccgccgccgacaccactgccgccggcgtcagctcggctccagcccgccagctgcctggctggcgtcacggcccggcccagccccgcccgcgcccctccttcccctcccccgcccccacgtgcgccgagtttgttgatttagctgccatagcaacgatggaagggagcctcggggggggcggagagaagaaagggaggggcggggcatgggagaaggcggaggaaaaggctgtagcgaaggaagttataagtaaggaacgcgcgccggcggccggcagtttcccgaccagagagaacgaacgtgtctgcgggcgcgcggggagcagaggcggtggcgggcggcggcggcaccgggagccgccgagtgaccctcccccgcccctctggccccccaccctcccacccgcccgtggcccgcgcccatggccgcgcgcgctccacacaactcaccggagtccgcgccttgcgccgccgaccagttcgcagctccgcgccacggcagccagtctcacctggcggcaccgcccgcccaccgccccggccacagcccctgcgcccacggcagcactcgaggcgaccgcgacagtggtgggggacgctgctgagtggaagagagcgcagcccggccaccggacctacttactcgccttgctgattgtctatttttgcgtttacaacttttctaagaacttttgtatacaaaggaactttttaaaaaagacgcttccaagttatatttaatccaaagaagaaggatctcggccaatttggggttttgggttttggcttcgtttcttctcttcgttgactttggggttcaggtgccccagctgcttcgggctgccgaggaccttctgggcccccacattaatgaggtaggtgaggcgcgcggcgctgggagcagggaggggtgaggaccggtgggacgcgccggaacgacggccgaaagccgcccctgactctcctgtctccgctccctgccttgctcgcaggcagccacctggcgagtctgacatggctgtcagcgacgcgctgctcccatctttctccacgttcgcgtctggcccggcgggaagggagaagacactgcgtcaagcaggtgccccgaataacgtgagtatcgctccgggccgccgggaacgcccggtgggttttcgtgggtgtggtgggggcgggcggagccttggggtcaccaagagccactgaacgagggtaaggagcggccaccgcgcggactccgcaaccttcccgggatagcttccgtgtccttggctcagctgtgtatgcccgtggtgcgagcactgcggagccgcctggggcgcaagccgggtcttcaccagtccccgggcgcgctgtcggtagggcgggcgctctcgggccaccgggcgggaggtggccgcgtccccagacactggctgggccagagtgagtttagcgcgtaggcggccccgtggcgagagcgcaccgagagagcctcggtgtgccaattccggggacgtccacgggacctggagggggagggaccagccgcggcgctcgctcacacgcaattgggcagacaggacataacacccgcaatacagacgcatcacctcttcttcgacccgggagtgggccgagattgcagcgctggcgccctgggttcccgggtgcttcctgcctgaccagtccccatgtctgggcggtgcagtcgcgcgtggcccgccagcacgtcagtatgtcgggtggcaacaggggaccaccactgacaggtctctcccgccctgtccccgcagcgctggcgggaggagctctcccacatgaagcgacttcccccagtgcttcccggccgcccctatgacctggcggcggcgaccgtggccacagacctggagagcggcggagccggtgcggcttgcggcggtagcaacctggcgcccctacctcggagagagaccgaggagttcaacgatctcctggacctggactttattctctccaattcgctgacccatcctccggagtcagtggccgccaccgtgtcctcgtcagcgtcagcctcctcttcgtcgtcgccgtcgagcagcggccctgccagcgcgccctccacctgcagcttcacctatccgatccgggccgggaacgacccgggcgtggcgccgggcggcacgggcggaggcctcctctatggcagggagtccgctccccctccgacggctcccttcaacctggcggacatcaacgacgtgagcccctcgggcggcttcgtggccgagctcctgcggccagaattggacccggtgtacattccgccgcagcagccgcagccgccaggtggcgggctgatgggcaagttcgtgctgaaggcgtcgctgagcgcccctggcagcgagtacggcagcccgtcggtcatcagcgtcagcaaaggcagccctgacggcagccacccggtggtggtggcgccctacaacggcgggccgccgcgcacgtgccccaagatcaagcaggaggcggtctcttcgtgcacccacttgggcgctggaccccctctcagcaatggccaccggccggctgcacacgacttccccctggggcggcagctccccagcaggactaccccgaccctgggtcttgaggaagtgctgagcagcagggactgtcaccctgccctgccgcttcctcccggcttccatccccacccggggcccaattacccatccttcctgcccgatcagatgcagccgcaagtcccgccgctccattaccaaggtcagtcccggggatttgtagctcgggctggggagccctgtgtgtgctggccccacttcgggacacacgggatgatgctcaccccaccttcttcacccctagagctcatgccacccggttcctgcatgccagaggagcccaagccaaagaggggaagacgatcgtggccccggaaaaggaccgccacccacacttgtgattacgcgggctgcggcaaaacctacacaaagagttcccatctcaaggcacacctgcgaacccacacaggtagggggacaaactgcagaagggaggggggttagcttccagccccataggctaccagtggacactcctcagtgcctccttgacttcccaggttagcttccagccccataggctaccagtggacactcctcagtgcctccttggcttcccagggcagtctatcgccttgatctccgggatcactggagagaacagcaaaccggcgcctacttttctgcccaggagccttttgcttgatggatggtatctgtgtttgaatgtgcaattttgttaggcttttaaaaggcaggagattccccgcggtctgtgggcctctcctagcttggcattataatcaagaaattatactttgctatgcaaaagcatgatggcttttttaaaaaaatcgttttttaatgttcccttcccaggttcaccctccctttttgttattttgaattctggtcgtaacaattcggtcttacttttttattttttattttttgttcgttttgatttacatttttattttttttcccccacaagcagaaggttttattttaaattccaagaatatgatggtcaaaattgctgggaagattctgatttagggttgtcactgcagagcatttccatgtcaatgtaagtaggtacccaaagtcgtttaggtgcagcattcagtaacgtaaaggtaaagaaaaaaaaagtagccacctgtggctttttatccccagtcgtagtaggaataagattgcatggtttgggcacactaccaatcacaatttccaaatttcatttccaccactgagatgccttgactcaaatgaaacattagtataggtttaggtggtgtttgtgtgtttttggtgaa

SEQ ID NO: 827 - DNA, 4043 bp, Homo sapiens
agtggaaaggagagtgcgtggcttgaaaagtcatcagtgagtgtttaattcttctttaatgggtgtcttctattattattattattctacagtgcaatttagtcatcaaatattacaggcagtggctcacgcctgtaatcccagcacttcgggaggccgaggcaggctgatcacttgaggtcaggtgttcgagacctgcctggccaacatggtgaaaccccgtctccacgaaaaatacaaaaattagccggcgtcgtggcgcacgcctgtaatccccgctactcgggaggctgacgcaggagaatcgcttggacgcaggaggcggaggttgcactgagctgagatcgtgccactgcattccagcttgggcgacacagcgagactctgtctcacaaaaaaaaaaaaaagaaagaaaaaaaaaggaaagggcttcgagatggctggttgaaaactgtctccgcgcctcacagtccctcttctctcccttatgcctctgagtaaatcttgagccctttcactccctttctcgctatttaaagtatcaaaaccataactccccattcgtgcctctttccgcctgttcccggcggaacactcctctggccttctcttgaggctcccagttcacgctgcacagtgctgggcactgcctcctctccacacccctagcgccccccacccctcagcagaagggcccgcgaggaaccgtgcgaggtcaggccgagcgccggcaccgccaccggcactggcgctgagcgacgagagcggactcctgcgagcgcagagagggagggggagatggagggctggatgagtcacgcggataatcgcgctcttctccagcgcgcagacagcgcggcaagcgcgtatgctagcaggggtgcggacgcgtgaccgtgccgcccgctgaccccaccagtcttcgcgggcttcgaacccagggagccgacaatggcggtgagtacggccctggtcgcgcagcgaccgaacctgcgcccggttcctcgcgccccgcgctggggcggacgccgccgccgccgccgacaccactgccgccggcgtcagctcggctccagcccgccagctgcctggctggcgtcacggcccggcccagccccgcccgcgcccctccttcccctcccccgcccccacgtgcgccgagtttgttgatttagctgccatagcaacgatggaagggagcctcggggggggcggagagaagaaagggaggggcggggcatgggagaaggcggaggaaaaggctgtagcgaaggaagttataagtaaggaacgcgcgccggcggccggcagtttcccgaccagagagaacgaacgtgtctgcgggcgcgcggggagcagaggcggtggcgggcggcggcggcaccgggagccgccgagtgaccctcccccgcccctctggccccccaccctcccacccgcccgtggcccgcgcccatggccgcgcgcgctccacacaactcaccggagtccgcgccttgcgccgccgaccagttcgcagctccgcgccacggcagccagtctcacctggcggcaccgcccgcccaccgccccggccacagcccctgcgcccacggcagcactcgaggcgaccgcgacagtggtgggggacgctgctgagtggaagagagcgcagcccggccaccggacctacttactcgccttgctgattgtctatttttgcgtttacaacttttctaagaacttttgtatacaaaggaactttttaaaaaagacgcttccaagttatatttaatccaaagaagaaggatctcggccaatttggggttttgggttttggcttcgtttcttctcttcgttgactttggggttcaggtgccccagctgcttcgggctgccgaggaccttctgggcccccacattaatgaggtaggtgaggcgcgcggcgctgggagcagggaggggtgaggaccggtgggacgcgccggaacgacggccgaaagccgcccctgactctcctgtctccgctccctgccttgctcgcaggcagccacctggcgagtctgacatggctgtcagcgacgcgctgctcccatctttctccacgttcgcgtctggcccggcgggaagggagaagacactgcgtcaagcaggtgccccgaataacgtgagtatcgctccgggccgccgggaacgcccggtgggttttcgtgggtgtggtgggggcgggcggagccttggggtcaccaagagccactgaacgagggtaaggagcggccaccgcgcggactccgcaaccttcccgggatagcttccgtgtccttggctcagctgtgtatgcccgtggtgcgagcactgcggagccgcctggggcgcaagccgggtcttcaccagtccccgggcgcgctgtcggtagggcgggcgctctcgggccaccgggcgggaggtggccgcgtccccagacactggctgggccagagtgagtttagcgcgtaggcggccccgtggcgagagcgcaccgagagagcctcggtgtgccaattccggggacgtccacgggacctggagggggagggaccagccgcggcgctcgctcacacgcaattgggcagacaggacataacacccgcaatacagacgcatcacctcttcttcgacccgggagtgggccgagattgcagcgctggcgccctgggttcccgggtgcttcctgcctgaccagtccccatgtctgggcggtgcagtcgcgcgtggcccgccagcacgtcagtatgtcgggtggcaacaggggaccaccactgacaggtctctcccgccctgtccccgcagcgctggcgggaggagctctcccacatgaagcgacttcccccagtgcttcccggccgcccctatgacctggcggcggcgaccgtggccacagacctggagagcggcggagccggtgcggcttgcggcggtagcaacctggcgcccctacctcggagagagaccgaggagttcaacgatctcctggacctggactttattctctccaattcgctgacccatcctccggagtcagtggccgccaccgtgtcctcgtcagcgtcagcctcctcttcgtcgtcgccgtcgagcagcggccctgccagcgcgccctccacctgcagcttcacctatccgatccgggccgggaacgacccgggcgtggcgccgggcggcacgggcggaggcctcctctatggcagggagtccgctccccctccgacggctcccttcaacctggcggacatcaacgacgtgagcccctcgggcggcttcgtggccgagctcctgcggccagaattggacccggtgtacattccgccgcagcagccgcagccgccaggtggcgggctgatgggcaagttcgtgctgaaggcgtcgctgagcgcccctggcagcgagtacggcagcccgtcggtcatcagcgtcagcaaaggcagccctgacggcagccacccggtggtggtggcgccctacaacggcgggccgccgcgcacgtgccccaagatcaagcaggaggcggtctcttcgtgcacccacttgggcgctggaccccctctcagcaatggccaccggccggctgcacacgacttccccctggggcggcagctccccagcaggactaccccgaccctgggtcttgaggaagtgctgagcagcagggactgtcaccctgccctgccgcttcctcccggcttccatccccacccggggcccaattacccatccttcctgcccgatcagatgcagccgcaagtcccgccgctccattaccaaggtcagtcccggggatttgtagctcgggctggggagccctgtgtgtgctggccccacttcgggacacacgggatgatgctcaccccaccttcttcacccctagagctcatgccacccggttcctgcatgccagaggagcccaagccaaagaggggaagacgatcgtggccccggaaaaggaccgccacccacacttgtgattacgcgggctgcggcaaaacctacacaaagagttcccatctcaaggcacacctgcgaaccca

SEQ ID NO: 828 - DNA, 4042 bp, Homo sapiens
acttcctggcacatggtcacttcccagggaagtccctttaggggggcctgacctacccggagcctgagccgaaggaacgagttgtcctttgacctttactggccatttcacctctttatgactcaatttctcatccataaagtggaaaggagagtgcgtggcttgaaaagtcatcagtgagtgtttaattcttctttaatgggtgtcttctattattattattattctacagtgcaatttagtcatcaaatattacaggcagtggctcacgcctgtaatcccagcacttcgggaggccgaggcaggctgatcacttgaggtcaggtgttcgagacctgcctggccaacatggtgaaaccccgtctccacgaaaaatacaaaaattagccggcgtcgtggcgcacgcctgtaatccccgctactcgggaggctgacgcaggagaatcgcttggacgcaggaggcggaggttgcactgagctgagatcgtgccactgcattccagcttgggcgacacagcgagactctgtctcacaaaaaaaaaaaaaagaaagaaaaaaaaaggaaagggcttcgagatggctggttgaaaactgtctccgcgcctcacagtccctcttctctcccttatgcctctgagtaaatcttgagccctttcactccctttctcgctatttaaagtatcaaaaccataactccccattcgtgcctctttccgcctgttcccggcggaacactcctctggccttctcttgaggctcccagttcacgctgcacagtgctgggcactgcctcctctccacacccctagcgccccccacccctcagcagaagggcccgcgaggaaccgtgcgaggtcaggccgagcgccggcaccgccaccggcactggcgctgagcgacgagagcggactcctgcgagcgcagagagggagggggagatggagggctggatgagtcacgcggataatcgcgctcttctccagcgcgcagacagcgcggcaagcgcgtatgctagcaggggtgcggacgcgtgaccgtgccgcccgctgaccccaccagtcttcgcgggcttcgaacccagggagccgacaatggcggtgagtacggccctggtcgcgcagcgaccgaacctgcgcccggttcctcgcgccccgcgctggggcggacgccgccgccgccgccgacaccactgccgccggcgtcagctcggctccagcccgccagctgcctggctggcgtcacggcccggcccagccccgcccgcgcccctccttcccctcccccgcccccacgtgcgccgagtttgttgatttagctgccatagcaacgatggaagggagcctcggggggggcggagagaagaaagggaggggcggggcatgggagaaggcggaggaaaaggctgtagcgaaggaagttataagtaaggaacgcgcgccggcggccggcagtttcccgaccagagagaacgaacgtgtctgcgggcgcgcggggagcagaggcggtggcgggcggcggcggcaccgggagccgccgagtgaccctcccccgcccctctggccccccaccctcccacccgcccgtggcccgcgcccatggccgcgcgcgctccacacaactcaccggagtccgcgccttgcgccgccgaccagttcgcagctccgcgccacggcagccagtctcacctggcggcaccgcccgcccaccgccccggccacagcccctgcgcccacggcagcactcgaggcgaccgcgacagtggtgggggacgctgctgagtggaagagagcgcagcccggccaccggacctacttactcgccttgctgattgtctatttttgcgtttacaacttttctaagaacttttgtatacaaaggaactttttaaaaaagacgcttccaagttatatttaatccaaagaagaaggatctcggccaatttggggttttgggttttggcttcgtttcttctcttcgttgactttggggttcaggtgccccagctgcttcgggctgccgaggaccttctgggcccccacattaatgaggtaggtgaggcgcgcggcgctgggagcagggaggggtgaggaccggtgggacgcgccggaacgacggccgaaagccgcccctgactctcctgtctccgctccctgccttgctcgcaggcagccacctggcgagtctgacatggctgtcagcgacgcgctgctcccatctttctccacgttcgcgtctggcccggcgggaagggagaagacactgcgtcaagcaggtgccccgaataacgtgagtatcgctccgggccgccgggaacgcccggtgggttttcgtgggtgtggtgggggcgggcggagccttggggtcaccaagagccactgaacgagggtaaggagcggccaccgcgcggactccgcaaccttcccgggatagcttccgtgtccttggctcagctgtgtatgcccgtggtgcgagcactgcggagccgcctggggcgcaagccgggtcttcaccagtccccgggcgcgctgtcggtagggcgggcgctctcgggccaccgggcgggaggtggccgcgtccccagacactggctgggccagagtgagtttagcgcgtaggcggccccgtggcgagagcgcaccgagagagcctcggtgtgccaattccggggacgtccacgggacctggagggggagggaccagccgcggcgctcgctcacacgcaattgggcagacaggacataacacccgcaatacagacgcatcacctcttcttcgacccgggagtgggccgagattgcagcgctggcgccctgggttcccgggtgcttcctgcctgaccagtccccatgtctgggcggtgcagtcgcgcgtggcccgccagcacgtcagtatgtcgggtggcaacaggggaccaccactgacaggtctctcccgccctgtccccgcagcgctggcgggaggagctctcccacatgaagcgacttcccccagtgcttcccggccgcccctatgacctggcggcggcgaccgtggccacagacctggagagcggcggagccggtgcggcttgcggcggtagcaacctggcgcccctacctcggagagagaccgaggagttcaacgatctcctggacctggactttattctctccaattcgctgacccatcctccggagtcagtggccgccaccgtgtcctcgtcagcgtcagcctcctcttcgtcgtcgccgtcgagcagcggccctgccagcgcgccctccacctgcagcttcacctatccgatccgggccgggaacgacccgggcgtggcgccgggcggcacgggcggaggcctcctctatggcagggagtccgctccccctccgacggctcccttcaacctggcggacatcaacgacgtgagcccctcgggcggcttcgtggccgagctcctgcggccagaattggacccggtgtacattccgccgcagcagccgcagccgccaggtggcgggctgatgggcaagttcgtgctgaaggcgtcgctgagcgcccctggcagcgagtacggcagcccgtcggtcatcagcgtcagcaaaggcagccctgacggcagccacccggtggtggtggcgccctacaacggcgggccgccgcgcacgtgccccaagatcaagcaggaggcggtctcttcgtgcacccacttgggcgctggaccccctctcagcaatggccaccggccggctgcacacgacttccccctggggcggcagctccccagcaggactaccccgaccctgggtcttgaggaagtgctgagcagcagggactgtcaccctgccctgccgcttcctcccggcttccatccccacccggggcccaattacccatccttcctgcccgatcagatgcagccgcaagtcccgccgctccattaccaaggtcagtcccggggatttgtagctcgggctggggagccctgtgtgtgctggccccacttcgggacacacgggatgatgctcaccccaccttcttcacccctagagctcatgccacccggttc

SEQ ID NO: 829 - DNA, 4034 bp, Homo sapiens
tgcggcgggctcggtgtgcactttttgagagctaggatcccaccgcatcgctccacttcctggcacatggtcacttcccagggaagtccctttaggggggcctgacctacccggagcctgagccgaaggaacgagttgtcctttgacctttactggccatttcacctctttatgactcaatttctcatccataaagtggaaaggagagtgcgtggcttgaaaagtcatcagtgagtgtttaattcttctttaatgggtgtcttctattattattattattctacagtgcaatttagtcatcaaatattacaggcagtggctcacgcctgtaatcccagcacttcgggaggccgaggcaggctgatcacttgaggtcaggtgttcgagacctgcctggccaacatggtgaaaccccgtctccacgaaaaatacaaaaattagccggcgtcgtggcgcacgcctgtaatccccgctactcgggaggctgacgcaggagaatcgcttggacgcaggaggcggaggttgcactgagctgagatcgtgccactgcattccagcttgggcgacacagcgagactctgtctcacaaaaaaaaaaaaaagaaagaaaaaaaaaggaaagggcttcgagatggctggttgaaaactgtctccgcgcctcacagtccctcttctctcccttatgcctctgagtaaatcttgagccctttcactccctttctcgctatttaaagtatcaaaaccataactccccattcgtgcctctttccgcctgttcccggcggaacactcctctggccttctcttgaggctcccagttcacgctgcacagtgctgggcactgcctcctctccacacccctagcgccccccacccctcagcagaagggcccgcgaggaaccgtgcgaggtcaggccgagcgccggcaccgccaccggcactggcgctgagcgacgagagcggactcctgcgagcgcagagagggagggggagatggagggctggatgagtcacgcggataatcgcgctcttctccagcgcgcagacagcgcggcaagcgcgtatgctagcaggggtgcggacgcgtgaccgtgccgcccgctgaccccaccagtcttcgcgggcttcgaacccagggagccgacaatggcggtgagtacggccctggtcgcgcagcgaccgaacctgcgcccggttcctcgcgccccgcgctggggcggacgccgccgccgccgccgacaccactgccgccggcgtcagctcggctccagcccgccagctgcctggctggcgtcacggcccggcccagccccgcccgcgcccctccttcccctcccccgcccccacgtgcgccgagtttgttgatttagctgccatagcaacgatggaagggagcctcggggggggcggagagaagaaagggaggggcggggcatgggagaaggcggaggaaaaggctgtagcgaaggaagttataagtaaggaacgcgcgccggcggccggcagtttcccgaccagagagaacgaacgtgtctgcgggcgcgcggggagcagaggcggtggcgggcggcggcggcaccgggagccgccgagtgaccctcccccgcccctctggccccccaccctcccacccgcccgtggcccgcgcccatggccgcgcgcgctccacacaactcaccggagtccgcgccttgcgccgccgaccagttcgcagctccgcgccacggcagccagtctcacctggcggcaccgcccgcccaccgccccggccacagcccctgcgcccacggcagcactcgaggcgaccgcgacagtggtgggggacgctgctgagtggaagagagcgcagcccggccaccggacctacttactcgccttgctgattgtctatttttgcgtttacaacttttctaagaacttttgtatacaaaggaactttttaaaaaagacgcttccaagttatatttaatccaaagaagaaggatctcggccaatttggggttttgggttttggcttcgtttcttctcttcgttgactttggggttcaggtgccccagctgcttcgggctgccgaggaccttctgggcccccacattaatgaggtaggtgaggcgcgcggcgctgggagcagggaggggtgaggaccggtgggacgcgccggaacgacggccgaaagccgcccctgactctcctgtctccgctccctgccttgctcgcaggcagccacctggcgagtctgacatggctgtcagcgacgcgctgctcccatctttctccacgttcgcgtctggcccggcgggaagggagaagacactgcgtcaagcaggtgccccgaataacgtgagtatcgctccgggccgccgggaacgcccggtgggttttcgtgggtgtggtgggggcgggcggagccttggggtcaccaagagccactgaacgagggtaaggagcggccaccgcgcggactccgcaaccttcccgggatagcttccgtgtccttggctcagctgtgtatgcccgtggtgcgagcactgcggagccgcctggggcgcaagccgggtcttcaccagtccccgggcgcgctgtcggtagggcgggcgctctcgggccaccgggcgggaggtggccgcgtccccagacactggctgggccagagtgagtttagcgcgtaggcggccccgtggcgagagcgcaccgagagagcctcggtgtgccaattccggggacgtccacgggacctggagggggagggaccagccgcggcgctcgctcacacgcaattgggcagacaggacataacacccgcaatacagacgcatcacctcttcttcgacccgggagtgggccgagattgcagcgctggcgccctgggttcccgggtgcttcctgcctgaccagtccccatgtctgggcggtgcagtcgcgcgtggcccgccagcacgtcagtatgtcgggtggcaacaggggaccaccactgacaggtctctcccgccctgtccccgcagcgctggcgggaggagctctcccacatgaagcgacttcccccagtgcttcccggccgcccctatgacctggcggcggcgaccgtggccacagacctggagagcggcggagccggtgcggcttgcggcggtagcaacctggcgcccctacctcggagagagaccgaggagttcaacgatctcctggacctggactttattctctccaattcgctgacccatcctccggagtcagtggccgccaccgtgtcctcgtcagcgtcagcctcctcttcgtcgtcgccgtcgagcagcggccctgccagcgcgccctccacctgcagcttcacctatccgatccgggccgggaacgacccgggcgtggcgccgggcggcacgggcggaggcctcctctatggcagggagtccgctccccctccgacggctcccttcaacctggcggacatcaacgacgtgagcccctcgggcggcttcgtggccgagctcctgcggccagaattggacccggtgtacattccgccgcagcagccgcagccgccaggtggcgggctgatgggcaagttcgtgctgaaggcgtcgctgagcgcccctggcagcgagtacggcagcccgtcggtcatcagcgtcagcaaaggcagccctgacggcagccacccggtggtggtggcgccctacaacggcgggccgccgcgcacgtgccccaagatcaagcaggaggcggtctcttcgtgcacccacttgggcgctggaccccctctcagcaatggccaccggccggctgcacacgacttccccctggggcggcagctccccagcaggactaccccgaccctgggtcttgaggaagtgctgagcagcagggactgtcaccctgccctgccgcttcctcccggcttccatccccacccggggcccaattacccatccttcctgcccgatcagatgcagccgcaagtcccgccgctccattaccaaggtcagtcccggggatttgtagctcgggctggggagccctgtgtgtgctggccccacttc

SEQ ID NO: 830 - DNA, 4052 bp, Homo sapiens
ctgcaagctccacctcctgggttcacaccattctcctgcctcagcctcccgaatagctggaactacaggtgcacgccaccacgcttggctaattttttatatttttagtagagacggggtttcactgtgttagttagccaggatggtctcgatctcctgacctcatgatccgcccatctcggcctcccaaagtgctgggattacaggtgtgagccaccgtgcccggctggctggcttctttttacccttcacatctggctttaaatactaccttttcacagatttcttctctaatcactctttctaaagtaaatatgctgtttttcattattagtcattgcatcctatttctttccctttaattttcttatcacaatgtataattatatgtttttttttttttttggttattgcctgtctccctcaatagatcataagttccatttgataaggtacaatgtctgttggtttattagccagtgcctaacactaccatttaatatgtattcaatgaatatttgttaaatgtattgattgaatttaaagtgactactcagcctacttctgccccttggagcttggattgtttcttcaaaggtattgatccttttgactattttaattatgaattcactaaagacatctggaaggcttattgtgtcaagcagtgccaaatccatggcttgatgaacctagatccatccccttcccctttccatatcacagatgacaacttgatggttggcctatgacttgtaaaagttgtcatatttgaattctgaaatttctctaattttcttgggaagcagaaaggaaaaattagtagttggcctcaaagggacagttgaatttcacatataatgagcaaagtagtgtgaggaagagaggagggccttttcttttgaggtcataactaaaagttaggtgagcaaatgccataagcatgaaaatagcaaaccaagcttcttggtttctatccaaaggctttgttgggaaaagtatcaaagtgtgttcatttgttatgtaatatataaggtagagaacccaatttgaaggaggtggaataactttccaaaatacttatggctaaattctcagttgatcttggaataagattcaagaatccaaatgcacccttctttgttatcttgctagaaaacatgctgggcatggtggctcatgcctgtaatcccaacacgttgagaggccgaggtgggcagatcacgagatcaggagttggagaccagcctgatcaacatggtgaagccccgtctctactaaaaatacaaaaattagccagacatagtggcacgcacctataatccgtgctactcaggaggtaggcaggagaattgctggaacccgggaggtggagtttgcagtgagccaagatcacaccactgcaatccagcctgggtgacagagcgagactctgtctcaaaaaaaaaagaaaagaaaaaagaaaagaaagaaaaaagggaagggaaggaaaggggggaggggagggaagggaagggaagggaaggtaagggaagggaagggaagggaagggaaaagggaaaacaatgtgcttttacccacagctgataagcttttctaattgtctacctttgggttaaactttatcattgagtgtttttatcccattatgaaagaattaaggtttgaaggactgaggtaagggtggatatttactcttaattgagtagcttaaccaagtcaagccacagattagctgaagccaaaaagcactggcagcatttgaaataactgagaacatattatacttaacactttattatctaagagaggcacttgaagttgagacctagaaatttgattctgggttctttgtttctaaggggcagggtgaacccagctatagcattcacagatgctatagaattatatatattctatatataattatatatattacattcatattaatatatgttaatatattctatattattcatatagaattcacagataatccaagtgcttttttaatacattgataccaaatctctcctgctctcaaaaaaaaaagcccaaggcaaaaatttttgattagcctgtatccgcaaattcatagtgcatggcatgatgggtactctacatccctcctcctattgcactcactgtgcccagatgaacctaaagtcaccagtaatagtgctaatgtagtaatgggcccaagcttcaaaagaaggaaaattagtattcagtatttaaatgtgggaaagaggaagaatatggaaattatcaattttataatacctatacatattcttacctgcattaatgtgaatagacatcaatgataaacagaataatgccccataaagatgtctacactgtaatctccaaaacttataactatactatatcacatggcaagagggaattaaggttactaatcagctgaccttgagatgggagattctcctggtttgtatgggtgggcccaatgtaatcacagggtccttataaatggaaaaggcagacaggagattcagtgtcagactgatacaatgagggaaagactaccagcagttgatggctttgaagatagaagaagggggccatgagccaagaaatgtgagtagcctctagaagctgaaaaaggcaagaaaacggattcttccctagaatctccagaaatgcagccctgccaacatggtgattttaactcaatgagatgcattttagacttctgacatctagaattgtgttattttcagccctcaagtttgtggtaatttgttacagcagcattaagaaaatgtacaatgaccatgtgcagtgcctcatgcttgtaatcccagcactttgggaggccaaggtgggtggatcgcttgagtccaagagttcgagaccagcctgggaaacatggtgaaaccttgtctctacaaaaacacaaaaattagcctggtgtggttgtgtggacctgtagtcccagctactctggaggctgaggtgggaggatggcttaaacccataaggtggagattacaatgagccaagatcatgccactgcactccagcctggacagtagagccagaacttctctcaaaaaaataaaaaagaaagaaactatacaatgctcctgtgattctagtgctatgtacatatatcctttatagggaattaaggaggttatagacacaaccagaagaggaggcatggaatagactaatgtataatggataggaaagtgtatcttttacaacttctctgtaaaaacaccttcacctactttatgagtttgcctcagctgccataacaaaatatcagaccaagtggcttaaataacaatttattttctcacagttctggaggctagaagtctaagatgaaagtgccagcaagtttgatttctggtgaagtctctcttccttgcttgccaatggccgctttctcactgtgtcttcaaatgtccttcctctgagtatgtgaggagagagaggtttgatgcctcttcaccttcttataaggacaccagtcctactggattagggctccacccttatgacctcatttaaccttaattacctccttaaaggttctatctccaaatacagtcacatttggagtcagacctacaacatatgaattttgagaggacacaattcagtctataacacctagatggaaggcaatttcatataaagatgatatgcagtctatgacagcaaagtagctagtggaaatcacaacccctaattctatttttatgtcattccctaagtccaggtcccatgtggatatagcattgttcagggctatctctttgctgttctttttttttttttagactcacacaagcaatgtggagaaggaacatgaaaacatctttgagatagagcttaatacagatgtcaatctctttgtaaataagcaattaaaagtggaaccactgtccaccatgtgagaagagtgactggctatggctggatatttttaaatacacataaaatgtggtataaatggtagaatgccagggatagaaggagtatcttataagttacctagtcaacgttctggc

SEQ ID NO: 831 - DNA, 4060 bp, Homo sapiens
tctcgatctcctgacctcatgatccgcccatctcggcctcccaaagtgctgggattacaggtgtgagccaccgtgcccggctggctggcttctttttacccttcacatctggctttaaatactaccttttcacagatttcttctctaatcactctttctaaagtaaatatgctgtttttcattattagtcattgcatcctatttctttccctttaattttcttatcacaatgtataattatatgtttttttttttttttggttattgcctgtctccctcaatagatcataagttccatttgataaggtacaatgtctgttggtttattagccagtgcctaacactaccatttaatatgtattcaatgaatatttgttaaatgtattgattgaatttaaagtgactactcagcctacttctgccccttggagcttggattgtttcttcaaaggtattgatccttttgactattttaattatgaattcactaaagacatctggaaggcttattgtgtcaagcagtgccaaatccatggcttgatgaacctagatccatccccttcccctttccatatcacagatgacaacttgatggttggcctatgacttgtaaaagttgtcatatttgaattctgaaatttctctaattttcttgggaagcagaaaggaaaaattagtagttggcctcaaagggacagttgaatttcacatataatgagcaaagtagtgtgaggaagagaggagggccttttcttttgaggtcataactaaaagttaggtgagcaaatgccataagcatgaaaatagcaaaccaagcttcttggtttctatccaaaggctttgttgggaaaagtatcaaagtgtgttcatttgttatgtaatatataaggtagagaacccaatttgaaggaggtggaataactttccaaaatacttatggctaaattctcagttgatcttggaataagattcaagaatccaaatgcacccttctttgttatcttgctagaaaacatgctgggcatggtggctcatgcctgtaatcccaacacgttgagaggccgaggtgggcagatcacgagatcaggagttggagaccagcctgatcaacatggtgaagccccgtctctactaaaaatacaaaaattagccagacatagtggcacgcacctataatccgtgctactcaggaggtaggcaggagaattgctggaacccgggaggtggagtttgcagtgagccaagatcacaccactgcaatccagcctgggtgacagagcgagactctgtctcaaaaaaaaaagaaaagaaaaaagaaaagaaagaaaaaagggaagggaaggaaaggggggaggggagggaagggaagggaagggaaggtaagggaagggaagggaagggaagggaaaagggaaaacaatgtgcttttacccacagctgataagcttttctaattgtctacctttgggttaaactttatcattgagtgtttttatcccattatgaaagaattaaggtttgaaggactgaggtaagggtggatatttactcttaattgagtagcttaaccaagtcaagccacagattagctgaagccaaaaagcactggcagcatttgaaataactgagaacatattatacttaacactttattatctaagagaggcacttgaagttgagacctagaaatttgattctgggttctttgtttctaaggggcagggtgaacccagctatagcattcacagatgctatagaattatatatattctatatataattatatatattacattcatattaatatatgttaatatattctatattattcatatagaattcacagataatccaagtgcttttttaatacattgataccaaatctctcctgctctcaaaaaaaaaagcccaaggcaaaaatttttgattagcctgtatccgcaaattcatagtgcatggcatgatgggtactctacatccctcctcctattgcactcactgtgcccagatgaacctaaagtcaccagtaatagtgctaatgtagtaatgggcccaagcttcaaaagaaggaaaattagtattcagtatttaaatgtgggaaagaggaagaatatggaaattatcaattttataatacctatacatattcttacctgcattaatgtgaatagacatcaatgataaacagaataatgccccataaagatgtctacactgtaatctccaaaacttataactatactatatcacatggcaagagggaattaaggttactaatcagctgaccttgagatgggagattctcctggtttgtatgggtgggcccaatgtaatcacagggtccttataaatggaaaaggcagacaggagattcagtgtcagactgatacaatgagggaaagactaccagcagttgatggctttgaagatagaagaagggggccatgagccaagaaatgtgagtagcctctagaagctgaaaaaggcaagaaaacggattcttccctagaatctccagaaatgcagccctgccaacatggtgattttaactcaatgagatgcattttagacttctgacatctagaattgtgttattttcagccctcaagtttgtggtaatttgttacagcagcattaagaaaatgtacaatgaccatgtgcagtgcctcatgcttgtaatcccagcactttgggaggccaaggtgggtggatcgcttgagtccaagagttcgagaccagcctgggaaacatggtgaaaccttgtctctacaaaaacacaaaaattagcctggtgtggttgtgtggacctgtagtcccagctactctggaggctgaggtgggaggatggcttaaacccataaggtggagattacaatgagccaagatcatgccactgcactccagcctggacagtagagccagaacttctctcaaaaaaataaaaaagaaagaaactatacaatgctcctgtgattctagtgctatgtacatatatcctttatagggaattaaggaggttatagacacaaccagaagaggaggcatggaatagactaatgtataatggataggaaagtgtatcttttacaacttctctgtaaaaacaccttcacctactttatgagtttgcctcagctgccataacaaaatatcagaccaagtggcttaaataacaatttattttctcacagttctggaggctagaagtctaagatgaaagtgccagcaagtttgatttctggtgaagtctctcttccttgcttgccaatggccgctttctcactgtgtcttcaaatgtccttcctctgagtatgtgaggagagagaggtttgatgcctcttcaccttcttataaggacaccagtcctactggattagggctccacccttatgacctcatttaaccttaattacctccttaaaggttctatctccaaatacagtcacatttggagtcagacctacaacatatgaattttgagaggacacaattcagtctataacacctagatggaaggcaatttcatataaagatgatatgcagtctatgacagcaaagtagctagtggaaatcacaacccctaattctatttttatgtcattccctaagtccaggtcccatgtggatatagcattgttcagggctatctctttgctgttctttttttttttttagactcacacaagcaatgtggagaaggaacatgaaaacatctttgagatagagcttaatacagatgtcaatctctttgtaaataagcaattaaaagtggaaccactgtccaccatgtgagaagagtgactggctatggctggatatttttaaatacacataaaatgtggtataaatggtagaatgccagggatagaaggagtatcttataagttacctagtcaacgttctggcttctgggcagaaaactatctaaactcagccagataatcagtttcaactaaatcaggaaaacatggaatcatctttatctaggtagtgttatagttacattgcctcatttatctacacatcaataaattctttctcattgctaatatttatcatt

SEQ ID NO: 832 - DNA, 4017 bp, Homo sapiens
tgcccggctggctggcttctttttacccttcacatctggctttaaatactaccttttcacagatttcttctctaatcactctttctaaagtaaatatgctgtttttcattattagtcattgcatcctatttctttccctttaattttcttatcacaatgtataattatatgtttttttttttttttggttattgcctgtctccctcaatagatcataagttccatttgataaggtacaatgtctgttggtttattagccagtgcctaacactaccatttaatatgtattcaatgaatatttgttaaatgtattgattgaatttaaagtgactactcagcctacttctgccccttggagcttggattgtttcttcaaaggtattgatccttttgactattttaattatgaattcactaaagacatctggaaggcttattgtgtcaagcagtgccaaatccatggcttgatgaacctagatccatccccttcccctttccatatcacagatgacaacttgatggttggcctatgacttgtaaaagttgtcatatttgaattctgaaatttctctaattttcttgggaagcagaaaggaaaaattagtagttggcctcaaagggacagttgaatttcacatataatgagcaaagtagtgtgaggaagagaggagggccttttcttttgaggtcataactaaaagttaggtgagcaaatgccataagcatgaaaatagcaaaccaagcttcttggtttctatccaaaggctttgttgggaaaagtatcaaagtgtgttcatttgttatgtaatatataaggtagagaacccaatttgaaggaggtggaataactttccaaaatacttatggctaaattctcagttgatcttggaataagattcaagaatccaaatgcacccttctttgttatcttgctagaaaacatgctgggcatggtggctcatgcctgtaatcccaacacgttgagaggccgaggtgggcagatcacgagatcaggagttggagaccagcctgatcaacatggtgaagccccgtctctactaaaaatacaaaaattagccagacatagtggcacgcacctataatccgtgctactcaggaggtaggcaggagaattgctggaacccgggaggtggagtttgcagtgagccaagatcacaccactgcaatccagcctgggtgacagagcgagactctgtctcaaaaaaaaaagaaaagaaaaaagaaaagaaagaaaaaagggaagggaaggaaaggggggaggggagggaagggaagggaagggaaggtaagggaagggaagggaagggaagggaaaagggaaaacaatgtgcttttacccacagctgataagcttttctaattgtctacctttgggttaaactttatcattgagtgtttttatcccattatgaaagaattaaggtttgaaggactgaggtaagggtggatatttactcttaattgagtagcttaaccaagtcaagccacagattagctgaagccaaaaagcactggcagcatttgaaataactgagaacatattatacttaacactttattatctaagagaggcacttgaagttgagacctagaaatttgattctgggttctttgtttctaaggggcagggtgaacccagctatagcattcacagatgctatagaattatatatattctatatataattatatatattacattcatattaatatatgttaatatattctatattattcatatagaattcacagataatccaagtgcttttttaatacattgataccaaatctctcctgctctcaaaaaaaaaagcccaaggcaaaaatttttgattagcctgtatccgcaaattcatagtgcatggcatgatgggtactctacatccctcctcctattgcactcactgtgcccagatgaacctaaagtcaccagtaatagtgctaatgtagtaatgggcccaagcttcaaaagaaggaaaattagtattcagtatttaaatgtgggaaagaggaagaatatggaaattatcaattttataatacctatacatattcttacctgcattaatgtgaatagacatcaatgataaacagaataatgccccataaagatgtctacactgtaatctccaaaacttataactatactatatcacatggcaagagggaattaaggttactaatcagctgaccttgagatgggagattctcctggtttgtatgggtgggcccaatgtaatcacagggtccttataaatggaaaaggcagacaggagattcagtgtcagactgatacaatgagggaaagactaccagcagttgatggctttgaagatagaagaagggggccatgagccaagaaatgtgagtagcctctagaagctgaaaaaggcaagaaaacggattcttccctagaatctccagaaatgcagccctgccaacatggtgattttaactcaatgagatgcattttagacttctgacatctagaattgtgttattttcagccctcaagtttgtggtaatttgttacagcagcattaagaaaatgtacaatgaccatgtgcagtgcctcatgcttgtaatcccagcactttgggaggccaaggtgggtggatcgcttgagtccaagagttcgagaccagcctgggaaacatggtgaaaccttgtctctacaaaaacacaaaaattagcctggtgtggttgtgtggacctgtagtcccagctactctggaggctgaggtgggaggatggcttaaacccataaggtggagattacaatgagccaagatcatgccactgcactccagcctggacagtagagccagaacttctctcaaaaaaataaaaaagaaagaaactatacaatgctcctgtgattctagtgctatgtacatatatcctttatagggaattaaggaggttatagacacaaccagaagaggaggcatggaatagactaatgtataatggataggaaagtgtatcttttacaacttctctgtaaaaacaccttcacctactttatgagtttgcctcagctgccataacaaaatatcagaccaagtggcttaaataacaatttattttctcacagttctggaggctagaagtctaagatgaaagtgccagcaagtttgatttctggtgaagtctctcttccttgcttgccaatggccgctttctcactgtgtcttcaaatgtccttcctctgagtatgtgaggagagagaggtttgatgcctcttcaccttcttataaggacaccagtcctactggattagggctccacccttatgacctcatttaaccttaattacctccttaaaggttctatctccaaatacagtcacatttggagtcagacctacaacatatgaattttgagaggacacaattcagtctataacacctagatggaaggcaatttcatataaagatgatatgcagtctatgacagcaaagtagctagtggaaatcacaacccctaattctatttttatgtcattccctaagtccaggtcccatgtggatatagcattgttcagggctatctctttgctgttctttttttttttttagactcacacaagcaatgtggagaaggaacatgaaaacatctttgagatagagcttaatacagatgtcaatctctttgtaaataagcaattaaaagtggaaccactgtccaccatgtgagaagagtgactggctatggctggatatttttaaatacacataaaatgtggtataaatggtagaatgccagggatagaaggagtatcttataagttacctagtcaacgttctggcttctgggcagaaaactatctaaactcagccagataatcagtttcaactaaatcaggaaaacatggaatcatctttatctaggtagtgttatagttacattgcctcatttatctacacatcaataaattctttctcattgctaatatttatcattcttatcatagtataagcaaatgttttaatt

SEQ ID NO: 833 - DNA, 4047 bp, Homo sapiens
ccttttcacagatttcttctctaatcactctttctaaagtaaatatgctgtttttcattattagtcattgcatcctatttctttccctttaattttcttatcacaatgtataattatatgtttttttttttttttggttattgcctgtctccctcaatagatcataagttccatttgataaggtacaatgtctgttggtttattagccagtgcctaacactaccatttaatatgtattcaatgaatatttgttaaatgtattgattgaatttaaagtgactactcagcctacttctgccccttggagcttggattgtttcttcaaaggtattgatccttttgactattttaattatgaattcactaaagacatctggaaggcttattgtgtcaagcagtgccaaatccatggcttgatgaacctagatccatccccttcccctttccatatcacagatgacaacttgatggttggcctatgacttgtaaaagttgtcatatttgaattctgaaatttctctaattttcttgggaagcagaaaggaaaaattagtagttggcctcaaagggacagttgaatttcacatataatgagcaaagtagtgtgaggaagagaggagggccttttcttttgaggtcataactaaaagttaggtgagcaaatgccataagcatgaaaatagcaaaccaagcttcttggtttctatccaaaggctttgttgggaaaagtatcaaagtgtgttcatttgttatgtaatatataaggtagagaacccaatttgaaggaggtggaataactttccaaaatacttatggctaaattctcagttgatcttggaataagattcaagaatccaaatgcacccttctttgttatcttgctagaaaacatgctgggcatggtggctcatgcctgtaatcccaacacgttgagaggccgaggtgggcagatcacgagatcaggagttggagaccagcctgatcaacatggtgaagccccgtctctactaaaaatacaaaaattagccagacatagtggcacgcacctataatccgtgctactcaggaggtaggcaggagaattgctggaacccgggaggtggagtttgcagtgagccaagatcacaccactgcaatccagcctgggtgacagagcgagactctgtctcaaaaaaaaaagaaaagaaaaaagaaaagaaagaaaaaagggaagggaaggaaaggggggaggggagggaagggaagggaagggaaggtaagggaagggaagggaagggaagggaaaagggaaaacaatgtgcttttacccacagctgataagcttttctaattgtctacctttgggttaaactttatcattgagtgtttttatcccattatgaaagaattaaggtttgaaggactgaggtaagggtggatatttactcttaattgagtagcttaaccaagtcaagccacagattagctgaagccaaaaagcactggcagcatttgaaataactgagaacatattatacttaacactttattatctaagagaggcacttgaagttgagacctagaaatttgattctgggttctttgtttctaaggggcagggtgaacccagctatagcattcacagatgctatagaattatatatattctatatataattatatatattacattcatattaatatatgttaatatattctatattattcatatagaattcacagataatccaagtgcttttttaatacattgataccaaatctctcctgctctcaaaaaaaaaagcccaaggcaaaaatttttgattagcctgtatccgcaaattcatagtgcatggcatgatgggtactctacatccctcctcctattgcactcactgtgcccagatgaacctaaagtcaccagtaatagtgctaatgtagtaatgggcccaagcttcaaaagaaggaaaattagtattcagtatttaaatgtgggaaagaggaagaatatggaaattatcaattttataatacctatacatattcttacctgcattaatgtgaatagacatcaatgataaacagaataatgccccataaagatgtctacactgtaatctccaaaacttataactatactatatcacatggcaagagggaattaaggttactaatcagctgaccttgagatgggagattctcctggtttgtatgggtgggcccaatgtaatcacagggtccttataaatggaaaaggcagacaggagattcagtgtcagactgatacaatgagggaaagactaccagcagttgatggctttgaagatagaagaagggggccatgagccaagaaatgtgagtagcctctagaagctgaaaaaggcaagaaaacggattcttccctagaatctccagaaatgcagccctgccaacatggtgattttaactcaatgagatgcattttagacttctgacatctagaattgtgttattttcagccctcaagtttgtggtaatttgttacagcagcattaagaaaatgtacaatgaccatgtgcagtgcctcatgcttgtaatcccagcactttgggaggccaaggtgggtggatcgcttgagtccaagagttcgagaccagcctgggaaacatggtgaaaccttgtctctacaaaaacacaaaaattagcctggtgtggttgtgtggacctgtagtcccagctactctggaggctgaggtgggaggatggcttaaacccataaggtggagattacaatgagccaagatcatgccactgcactccagcctggacagtagagccagaacttctctcaaaaaaataaaaaagaaagaaactatacaatgctcctgtgattctagtgctatgtacatatatcctttatagggaattaaggaggttatagacacaaccagaagaggaggcatggaatagactaatgtataatggataggaaagtgtatcttttacaacttctctgtaaaaacaccttcacctactttatgagtttgcctcagctgccataacaaaatatcagaccaagtggcttaaataacaatttattttctcacagttctggaggctagaagtctaagatgaaagtgccagcaagtttgatttctggtgaagtctctcttccttgcttgccaatggccgctttctcactgtgtcttcaaatgtccttcctctgagtatgtgaggagagagaggtttgatgcctcttcaccttcttataaggacaccagtcctactggattagggctccacccttatgacctcatttaaccttaattacctccttaaaggttctatctccaaatacagtcacatttggagtcagacctacaacatatgaattttgagaggacacaattcagtctataacacctagatggaaggcaatttcatataaagatgatatgcagtctatgacagcaaagtagctagtggaaatcacaacccctaattctatttttatgtcattccctaagtccaggtcccatgtggatatagcattgttcagggctatctctttgctgttctttttttttttttagactcacacaagcaatgtggagaaggaacatgaaaacatctttgagatagagcttaatacagatgtcaatctctttgtaaataagcaattaaaagtggaaccactgtccaccatgtgagaagagtgactggctatggctggatatttttaaatacacataaaatgtggtataaatggtagaatgccagggatagaaggagtatcttataagttacctagtcaacgttctggcttctgggcagaaaactatctaaactcagccagataatcagtttcaactaaatcaggaaaacatggaatcatctttatctaggtagtgttatagttacattgcctcatttatctacacatcaataaattctttctcattgctaatatttatcattcttatcatagtataagcaaatgttttaattctattatggtaaagataaagcttctgtaattaaaacactttaatctggaaagacagcagtaaacccttcaagcaaaagccc

SEQ ID NO: 834 - DNA, 4095 bp, Homo sapiens
cctaacactaccatttaatatgtattcaatgaatatttgttaaatgtattgattgaatttaaagtgactactcagcctacttctgccccttggagcttggattgtttcttcaaaggtattgatccttttgactattttaattatgaattcactaaagacatctggaaggcttattgtgtcaagcagtgccaaatccatggcttgatgaacctagatccatccccttcccctttccatatcacagatgacaacttgatggttggcctatgacttgtaaaagttgtcatatttgaattctgaaatttctctaattttcttgggaagcagaaaggaaaaattagtagttggcctcaaagggacagttgaatttcacatataatgagcaaagtagtgtgaggaagagaggagggccttttcttttgaggtcataactaaaagttaggtgagcaaatgccataagcatgaaaatagcaaaccaagcttcttggtttctatccaaaggctttgttgggaaaagtatcaaagtgtgttcatttgttatgtaatatataaggtagagaacccaatttgaaggaggtggaataactttccaaaatacttatggctaaattctcagttgatcttggaataagattcaagaatccaaatgcacccttctttgttatcttgctagaaaacatgctgggcatggtggctcatgcctgtaatcccaacacgttgagaggccgaggtgggcagatcacgagatcaggagttggagaccagcctgatcaacatggtgaagccccgtctctactaaaaatacaaaaattagccagacatagtggcacgcacctataatccgtgctactcaggaggtaggcaggagaattgctggaacccgggaggtggagtttgcagtgagccaagatcacaccactgcaatccagcctgggtgacagagcgagactctgtctcaaaaaaaaaagaaaagaaaaaagaaaagaaagaaaaaagggaagggaaggaaaggggggaggggagggaagggaagggaagggaaggtaagggaagggaagggaagggaagggaaaagggaaaacaatgtgcttttacccacagctgataagcttttctaattgtctacctttgggttaaactttatcattgagtgtttttatcccattatgaaagaattaaggtttgaaggactgaggtaagggtggatatttactcttaattgagtagcttaaccaagtcaagccacagattagctgaagccaaaaagcactggcagcatttgaaataactgagaacatattatacttaacactttattatctaagagaggcacttgaagttgagacctagaaatttgattctgggttctttgtttctaaggggcagggtgaacccagctatagcattcacagatgctatagaattatatatattctatatataattatatatattacattcatattaatatatgttaatatattctatattattcatatagaattcacagataatccaagtgcttttttaatacattgataccaaatctctcctgctctcaaaaaaaaaagcccaaggcaaaaatttttgattagcctgtatccgcaaattcatagtgcatggcatgatgggtactctacatccctcctcctattgcactcactgtgcccagatgaacctaaagtcaccagtaatagtgctaatgtagtaatgggcccaagcttcaaaagaaggaaaattagtattcagtatttaaatgtgggaaagaggaagaatatggaaattatcaattttataatacctatacatattcttacctgcattaatgtgaatagacatcaatgataaacagaataatgccccataaagatgtctacactgtaatctccaaaacttataactatactatatcacatggcaagagggaattaaggttactaatcagctgaccttgagatgggagattctcctggtttgtatgggtgggcccaatgtaatcacagggtccttataaatggaaaaggcagacaggagattcagtgtcagactgatacaatgagggaaagactaccagcagttgatggctttgaagatagaagaagggggccatgagccaagaaatgtgagtagcctctagaagctgaaaaaggcaagaaaacggattcttccctagaatctccagaaatgcagccctgccaacatggtgattttaactcaatgagatgcattttagacttctgacatctagaattgtgttattttcagccctcaagtttgtggtaatttgttacagcagcattaagaaaatgtacaatgaccatgtgcagtgcctcatgcttgtaatcccagcactttgggaggccaaggtgggtggatcgcttgagtccaagagttcgagaccagcctgggaaacatggtgaaaccttgtctctacaaaaacacaaaaattagcctggtgtggttgtgtggacctgtagtcccagctactctggaggctgaggtgggaggatggcttaaacccataaggtggagattacaatgagccaagatcatgccactgcactccagcctggacagtagagccagaacttctctcaaaaaaataaaaaagaaagaaactatacaatgctcctgtgattctagtgctatgtacatatatcctttatagggaattaaggaggttatagacacaaccagaagaggaggcatggaatagactaatgtataatggataggaaagtgtatcttttacaacttctctgtaaaaacaccttcacctactttatgagtttgcctcagctgccataacaaaatatcagaccaagtggcttaaataacaatttattttctcacagttctggaggctagaagtctaagatgaaagtgccagcaagtttgatttctggtgaagtctctcttccttgcttgccaatggccgctttctcactgtgtcttcaaatgtccttcctctgagtatgtgaggagagagaggtttgatgcctcttcaccttcttataaggacaccagtcctactggattagggctccacccttatgacctcatttaaccttaattacctccttaaaggttctatctccaaatacagtcacatttggagtcagacctacaacatatgaattttgagaggacacaattcagtctataacacctagatggaaggcaatttcatataaagatgatatgcagtctatgacagcaaagtagctagtggaaatcacaacccctaattctatttttatgtcattccctaagtccaggtcccatgtggatatagcattgttcagggctatctctttgctgttctttttttttttttagactcacacaagcaatgtggagaaggaacatgaaaacatctttgagatagagcttaatacagatgtcaatctctttgtaaataagcaattaaaagtggaaccactgtccaccatgtgagaagagtgactggctatggctggatatttttaaatacacataaaatgtggtataaatggtagaatgccagggatagaaggagtatcttataagttacctagtcaacgttctggcttctgggcagaaaactatctaaactcagccagataatcagtttcaactaaatcaggaaaacatggaatcatctttatctaggtagtgttatagttacattgcctcatttatctacacatcaataaattctttctcattgctaatatttatcattcttatcatagtataagcaaatgttttaattctattatggtaaagataaagcttctgtaattaaaacactttaatctggaaagacagcagtaaacccttcaagcaaaagcccaagtaggttcaaaaataatagccagagaggttaaaggtaaaccaatagagtgatatgttacagcaactaagggagagaggcaggagttttttaaaagagagaagaggaattataacaacagaaacaggttagccagctgccagtttagatgagcataatgagtcccttagatagatcattggtgatttttatcaaaacactatcggtggagttgtgggagtggtaggctgactatagtggattggggaattaaatagtga

SEQ ID NO: 835 - DNA, 4045 bp, Homo sapiens
aagaagattgcagtaaaacgattaaatgagggaacatatgcagaggtgcttttaaaaagcatatgccaccttttttattaattattatataaaatgaagcatttaattatagtaataatttgaagtagtttgaagtaccacactgaggtgaggacttaaaaatgataagacgagttccctattttataagaaaaataagccaaaattaaatattcttttggatataaatttcaacagtgagatagctgcctagtggaaatgaataatatcccagccactagtgtacagggtgttttgtggcacaggattatgtaatatggaactgctcaagcaaataactagtcatcacaacagcagttctttgtaataactgaaaaagaatattgtttctcggagaaggatgtcaaaagatcggcccagctcagggagcagtttgccctactagctcctcggacagctgtaaagaagagtctctggctctttagaatactgtaagtactacttcgtagctattaagtaatctttttcctattctattttctttctcttagatgccacctatagaaaagtcagagggtccagtaagtttctttccttcttcccacctcatctgcaatatatatatatagagagagaaatagatacatacatacatgcataaatacacatatgtgagttaaccagcagaactgtagaattaatattgtggacccagctctatgctaggttacactgataacctgggtaggaatgatatcatcctatataatttcattcctgagatgattttatcgttgaggagctaatgtgagcacatttgaaataactttagaaaataataagtgctgttttgtgtgaatcataagtagtagttttaggaagggaacccacaaggatttgaagttgatagaataaacttaaggaagtgggtttgctttttctctttaagccaagataggattaatattgcagccatctggatagtccagttggtttattttaatttcatttgttttttacctcttttggagccatggaaagagatgaaagggatagagcatagccattgtgtttggctatttgcgaaggttggcaaattagtgattgctaaatctcataagcttgagtattttaaagttcagagattgagggcataaatctaatacttcggctccttccacaattttactacatttctgcccaagaacagatgaccatggataatgcatatcgtagatactttttaagtttggaacctttttgccaagagggtagtggagaagtgaagtcaaaaccttgaccttccttgcctactttatgctgtagtttatataccttctttcctcccacctttcgtaaagctaaaagaagcttagcctccttaatgttttccagctgacaaaatattgtttaacataacattcgaaactttttttctggtgcacattcatgcatcacagcaggagcaacaagaaccatataagtgaactggcttcacttatagcccgttttaattcatatccatatttcctcagggcttgtttccatgcctcccagccccactccatatgcttaacaacattgtctggctgactgagggttatatacatcatggtcttgaaccttcttggaaacatggtctgtgccattgtttctcaaacccaagtaatgcttcatgatgaaacaccttctaaaggaacaaaattttctgagatcctaaaaaaatgtgttttgaggaacactgacttaacaaagatatttgaaatgtaaatatgttttccaatttcacgttgtctttgtcaaagatgtgttttatataacttatgtagaacttggggatccattagaatatattcacaaatccccagggttatcaccccaatttgagaaaccctggtctatgcttatgaaatcttctattggtaattaaattgtcattcattgtcaacatacaattataattattattggaatttgttttaaatgaatgaatttggaggtgattctgtaccttaagtcaagaggaaggatggcttgattttaggtggattgattatactagatagcatccaaaggtgaatcttgaagctgtatttaaattcattgcttgaaataatttccacccttaagaaaaatctctagcaattgtaaaaagggatgctctggaaatgtgggcatcttcaaaatagagataattcttgtgttagttcaacaaatattattgtaccaggtgctggaataaatagcaaaaccaaagacaggatttatatcaaggaatttgctttcttatggaggatgcagaaggaaatcattatggttttgggcagaaatgcttagactttagtcctggctctgagtttggttcagatcaccatcaatctgaccatctcgagactgctagtgaaataagataggggcttatatcaaatacctaaatccctgaaaatgacattttgtgatttggaaaattttcaaaagtctaatgaaggaaacttttttggcatttctttaaatgattattgtcatttcttttctgacttttccctttataaaaccttaacatgtaggattggaggaagttttctgaccattttctcatatcctctttcagctttatctttctgtaacttccatttctctagccacctccctaaattacagaagactgtgagacccagggctgctgtgattaggcattcataatttcttttcagggtgtttgtgccctgattatcaaatgtacagcttgaagggagttcatgtcttaaagtaatgaattaagagttgacctttgttgactgctaaaatattcttatatgtgaaagcatcctggaaaaatacgttaccagcttaaagagaaagaaactaatgattatatctgaactgagctaatgcctcttctcttcccccaaaccttatcagtttggatggcaaagagtaatgatgtgtcagttaaacagagctaatgccttcctctgccttgtcttaaagactggattgggagaaaattgatattctcactaccatattttgggctgtaggcaagtagcattttacacaggtttccttcaaaaatccaactcaagttggagctcatgtatttaagacatagctggcctgctgaatttaacaagttaaacttcagtggccatgtacagttatatatcactatatatatgtgtattaggctgtcgagttggtcatgtttttgttggtgacttaggctttacttgatagctcttccttgacctttccaaattgagtactgatacatggagcttgggcttcttctgcatcttatacaaatgagtttggtaaagaagcctctcctttactgttttgatgtttatattagaaataacttttgattattttttttcatgttaggatgagaaactgaaacaaaatgtaaatttgaccggtgctagacttcttaaattatgggtagacttaaagtattattttccttaaccaattagaatgctagtcttctagtgttcccggaaacatgagaggttatgcagtagacccaagcaataccctcttattacataatcaagtgcgtataagaatttaaaaatagggatatgactggaacatcactgtactttaccaggtcccattataaaattatctatgttactttacccatagctttgaaaactagtggcatagtatattttatagtatgctgttagtgtgattggcattgaacagtgatgggatataatcactctacaatctatatgttattaaagttttccagccttatagatctcccttgactgaaaattagctactaacttacgacttattttttacagcagattgactaggtctttccaggaaatctgttgatgtacaaaaacaaagtttaattgctaatgtttttttaaaaaataactttttgatattacggatacctggttatttgggccttgtatattttaacatcaaaattacctattataaatccatataaacagaaaagaaagagagtaagtctttagatcagatctgcaaacaatgatggtacgtactgtag

SEQ ID NO: 836 - DNA, 4045 bp, Homo sapiens
ccttccctctgccctgccccttttgcctctttgctgggtaatgttgaccagacaaggccctttctcttggacttaaacaattctcagttgcactttccttggtcccacccattatacatgaacccctctacttcctttcgcattgcttctgagtatgctgactacccaaagccccttctgtgttattaataaacacagtactgattgtcccatttttcagcccatcagtccaagatctccctaccactttggtgtgttggtgcagtgttgactatgaaaagcaggcctgaactaggtggataagccttcactcattttctttcatttattaatgatcctagtttcaattattgtcagattctggggacaagaaccattcttgcccacctgtgttactgctttactgtgcaaaatactgaaggcaagtcagacccagggagctggattgccatcctttattttgtgtttccagtgtacactataaaattgtctccccaggaaggaaggttggcactttctctgcattcttctttccagagcagattgcctggttaagaatctcttgttgtcccctttgtatattgttattgtaaagtgccaaatgccaggatacagccagaaaaattgcttattattattaaaaaaatttttttaagaaagacatctggattgtagggtggactcgataacctggtcattatttttttgaagccaaaatatccatttatactatgtacctggtgaccagtgtctctcattttaactgagggtggtgggtctgtggatagaacactgactcttgctattttaatatcaaagatattctagagtggaactcttaagaccagtatctttgtgtgggctttaccagcattcacttttagaaaaactacctaaattttataatcctttaatttcttcatctggagcacctgcccctacttatttcaagaagattgcagtaaaacgattaaatgagggaacatatgcagaggtgcttttaaaaagcatatgccaccttttttattaattattatataaaatgaagcatttaattatagtaataatttgaagtagtttgaagtaccacactgaggtgaggacttaaaaatgataagacgagttccctattttataagaaaaataagccaaaattaaatattcttttggatataaatttcaacagtgagatagctgcctagtggaaatgaataatatcccagccactagtgtacagggtgttttgtggcacaggattatgtaatatggaactgctcaagcaaataactagtcatcacaacagcagttctttgtaataactgaaaaagaatattgtttctcggagaaggatgtcaaaagatcggcccagctcagggagcagtttgccctactagctcctcggacagctgtaaagaagagtctctggctctttagaatactgtaagtactacttcgtagctattaagtaatctttttcctattctattttctttctcttagatgccacctatagaaaagtcagagggtccagtaagtttctttccttcttcccacctcatctgcaatatatatatatagagagagaaatagatacatacatacatgcataaatacacatatgtgagttaaccagcagaactgtagaattaatattgtggacccagctctatgctaggttacactgataacctgggtaggaatgatatcatcctatataatttcattcctgagatgattttatcgttgaggagctaatgtgagcacatttgaaataactttagaaaataataagtgctgttttgtgtgaatcataagtagtagttttaggaagggaacccacaaggatttgaagttgatagaataaacttaaggaagtgggtttgctttttctctttaagccaagataggattaatattgcagccatctggatagtccagttggtttattttaatttcatttgttttttacctcttttggagccatggaaagagatgaaagggatagagcatagccattgtgtttggctatttgcgaaggttggcaaattagtgattgctaaatctcataagcttgagtattttaaagttcagagattgagggcataaatctaatacttcggctccttccacaattttactacatttctgcccaagaacagatgaccatggataatgcatatcgtagatactttttaagtttggaacctttttgccaagagggtagtggagaagtgaagtcaaaaccttgaccttccttgcctactttatgctgtagtttatataccttctttcctcccacctttcgtaaagctaaaagaagcttagcctccttaatgttttccagctgacaaaatattgtttaacataacattcgaaactttttttctggtgcacattcatgcatcacagcaggagcaacaagaaccatataagtgaactggcttcacttatagcccgttttaattcatatccatatttcctcagggcttgtttccatgcctcccagccccactccatatgcttaacaacattgtctggctgactgagggttatatacatcatggtcttgaaccttcttggaaacatggtctgtgccattgtttctcaaacccaagtaatgcttcatgatgaaacaccttctaaaggaacaaaattttctgagatcctaaaaaaatgtgttttgaggaacactgacttaacaaagatatttgaaatgtaaatatgttttccaatttcacgttgtctttgtcaaagatgtgttttatataacttatgtagaacttggggatccattagaatatattcacaaatccccagggttatcaccccaatttgagaaaccctggtctatgcttatgaaatcttctattggtaattaaattgtcattcattgtcaacatacaattataattattattggaatttgttttaaatgaatgaatttggaggtgattctgtaccttaagtcaagaggaaggatggcttgattttaggtggattgattatactagatagcatccaaaggtgaatcttgaagctgtatttaaattcattgcttgaaataatttccacccttaagaaaaatctctagcaattgtaaaaagggatgctctggaaatgtgggcatcttcaaaatagagataattcttgtgttagttcaacaaatattattgtaccaggtgctggaataaatagcaaaaccaaagacaggatttatatcaaggaatttgctttcttatggaggatgcagaaggaaatcattatggttttgggcagaaatgcttagactttagtcctggctctgagtttggttcagatcaccatcaatctgaccatctcgagactgctagtgaaataagataggggcttatatcaaatacctaaatccctgaaaatgacattttgtgatttggaaaattttcaaaagtctaatgaaggaaacttttttggcatttctttaaatgattattgtcatttcttttctgacttttccctttataaaaccttaacatgtaggattggaggaagttttctgaccattttctcatatcctctttcagctttatctttctgtaacttccatttctctagccacctccctaaattacagaagactgtgagacccagggctgctgtgattaggcattcataatttcttttcagggtgtttgtgccctgattatcaaatgtacagcttgaagggagttcatgtcttaaagtaatgaattaagagttgacctttgttgactgctaaaatattcttatatgtgaaagcatcctggaaaaatacgttaccagcttaaagagaaagaaactaatgattatatctgaactgagctaatgcctcttctcttcccccaaaccttatcagtttggatggcaaagagtaatgatgtgtcagttaaacagagctaatgccttcctctgccttgtcttaaagactggattgggagaaaattgatattctcactaccatattttgggctgtaggcaagtagcattttacacaggtttccttcaaaaatccaactcaagttggagctca

SEQ ID NO: 837 - DNA, 4047 bp, Homo sapiens
ttcttggcttgttgacatgcataattgcatttatgttggttcttgtgccctagacaaggatgccccacctcttttcaatagtgggtgcccactccttatgatctttacatttgaacagttaatgtgaataattgcagttgtccacaaccctatcacttctaggaccattatacctcttttgcattactgtggggtatactgtttccctccaaggccccttctggtggactatcaacatataattgaaattttcttttgtctttgtcagtagattaaggtcataccccatcacctttcctttgtagtacaacagggtgtcctgatcaaccaaagtcctgttgttttggactgttaatatgtgcaattacatttgctcctgatctgtgcactagataaggatcctacctactttcttagtgtttttagcaggtagtgcccactactcaagactgtcacttggaatgttcatgtgcacaaactcaattctctaagcatgttcctgtaccacctttgctttagagcagggggatgatattcactaagtgccccttcttttggacttaatatgcattaatgcaattgtccacctcttcttttagactaagagttgatctccacatattccccttgcatcaggggcatgttaattatgaatgaacccttttcttttaatattaatgtcataattgtatttgtggacctgtgtaggagaaaaagaccctatgttcctcccattaccctttggattgctgctgagaagtgttaactactcataatctcagctcttggacaattaatagcattaataacaattatcaagggcactgatcattagataagactcctgcttcctcgttgcttacatcgggggtactgacccactaaggccccttgtactgttaatgtgaatatttgcaattatatatgtctccttctggtagagtgggatattatgccctagtatcccctttgcattactgcaggggctgctgactactcaaaacttctcctgggactgttaataggcacaatggcagttatcaatggttttctccctccctgaccttgttaagcaagcgccccaccccacccttagtttcccatggcataataaagtataagcattggagtattccatgcacttgtctatcaaacagtggtccatactcccaacccttttgcattgcgccagtgtgtaaaatcacaggtagccatggtgtcatgctttatatacgaagtcttccctctctctgccccttgtgtgcccttggcccctttttacagactattgctcacaatctcaggtgtccatatttgcagctattaggtaagattgtgctgtctccctcttcccttccctctgccctgccccttttgcctctttgctgggtaatgttgaccagacaaggccctttctcttggacttaaacaattctcagttgcactttccttggtcccacccattatacatgaacccctctacttcctttcgcattgcttctgagtatgctgactacccaaagccccttctgtgttattaataaacacagtactgattgtcccatttttcagcccatcagtccaagatctccctaccactttggtgtgttggtgcagtgttgactatgaaaagcaggcctgaactaggtggataagccttcactcattttctttcatttattaatgatcctagtttcaattattgtcagattctggggacaagaaccattcttgcccacctgtgttactgctttactgtgcaaaatactgaaggcaagtcagacccagggagctggattgccatcctttattttgtgtttccagtgtacactataaaattgtctccccaggaaggaaggttggcactttctctgcattcttctttccagagcagattgcctggttaagaatctcttgttgtcccctttgtatattgttattgtaaagtgccaaatgccaggatacagccagaaaaattgcttattattattaaaaaaatttttttaagaaagacatctggattgtagggtggactcgataacctggtcattatttttttgaagccaaaatatccatttatactatgtacctggtgaccagtgtctctcattttaactgagggtggtgggtctgtggatagaacactgactcttgctattttaatatcaaagatattctagagtggaactcttaagaccagtatctttgtgtgggctttaccagcattcacttttagaaaaactacctaaattttataatcctttaatttcttcatctggagcacctgcccctacttatttcaagaagattgcagtaaaacgattaaatgagggaacatatgcagaggtgcttttaaaaagcatatgccaccttttttattaattattatataaaatgaagcatttaattatagtaataatttgaagtagtttgaagtaccacactgaggtgaggacttaaaaatgataagacgagttccctattttataagaaaaataagccaaaattaaatattcttttggatataaatttcaacagtgagatagctgcctagtggaaatgaataatatcccagccactagtgtacagggtgttttgtggcacaggattatgtaatatggaactgctcaagcaaataactagtcatcacaacagcagttctttgtaataactgaaaaagaatattgtttctcggagaaggatgtcaaaagatcggcccagctcagggagcagtttgccctactagctcctcggacagctgtaaagaagagtctctggctctttagaatactgtaagtactacttcgtagctattaagtaatctttttcctattctattttctttctcttagatgccacctatagaaaagtcagagggtccagtaagtttctttccttcttcccacctcatctgcaatatatatatatagagagagaaatagatacatacatacatgcataaatacacatatgtgagttaaccagcagaactgtagaattaatattgtggacccagctctatgctaggttacactgataacctgggtaggaatgatatcatcctatataatttcattcctgagatgattttatcgttgaggagctaatgtgagcacatttgaaataactttagaaaataataagtgctgttttgtgtgaatcataagtagtagttttaggaagggaacccacaaggatttgaagttgatagaataaacttaaggaagtgggtttgctttttctctttaagccaagataggattaatattgcagccatctggatagtccagttggtttattttaatttcatttgttttttacctcttttggagccatggaaagagatgaaagggatagagcatagccattgtgtttggctatttgcgaaggttggcaaattagtgattgctaaatctcataagcttgagtattttaaagttcagagattgagggcataaatctaatacttcggctccttccacaattttactacatttctgcccaagaacagatgaccatggataatgcatatcgtagatactttttaagtttggaacctttttgccaagagggtagtggagaagtgaagtcaaaaccttgaccttccttgcctactttatgctgtagtttatataccttctttcctcccacctttcgtaaagctaaaagaagcttagcctccttaatgttttccagctgacaaaatattgtttaacataacattcgaaactttttttctggtgcacattcatgcatcacagcaggagcaacaagaaccatataagtgaactggcttcacttatagcccgttttaattcatatccatatttcctcagggcttgtttccatgcctcccagccccactccatatgcttaacaacattgtctggctgactgagggttatatacatcatggtcttgaaccttcttggaaacatggtctgtgccattgtttctcaaacccaagtaatgcttcatgatgaaacaccttctaaaggaacaaaattttctgagatcctaaaaaaatgtgttttgaggaacactgac

SEQ ID NO: 838 - DNA, 4049 bp, Homo sapiens
gtgcacaattgtaagtgaccacaaccatgcatcttggaaatttatgtgcataactgcacatggcttatcctatttgaataaagtcctactctcagaccccctttgcagtatagctggggtgctgatcactgaggcctctttgcttggcttgtctatattcttgtgtactagataagggcaccttctcatggactccctttgcttttcaacaaggagtacccactactttttaagattcttatatttgtccaaagtacatggttttaattgaccacaacaatgtcccttggacattaatgtatgtaatcaccacatggttcatcctaattaaacaaagttctaccttctcaccctccatttgcagtataccagggttgctgaccccctaagtccccttttcttggcttgttgacatgcataattgcatttatgttggttcttgtgccctagacaaggatgccccacctcttttcaatagtgggtgcccactccttatgatctttacatttgaacagttaatgtgaataattgcagttgtccacaaccctatcacttctaggaccattatacctcttttgcattactgtggggtatactgtttccctccaaggccccttctggtggactatcaacatataattgaaattttcttttgtctttgtcagtagattaaggtcataccccatcacctttcctttgtagtacaacagggtgtcctgatcaaccaaagtcctgttgttttggactgttaatatgtgcaattacatttgctcctgatctgtgcactagataaggatcctacctactttcttagtgtttttagcaggtagtgcccactactcaagactgtcacttggaatgttcatgtgcacaaactcaattctctaagcatgttcctgtaccacctttgctttagagcagggggatgatattcactaagtgccccttcttttggacttaatatgcattaatgcaattgtccacctcttcttttagactaagagttgatctccacatattccccttgcatcaggggcatgttaattatgaatgaacccttttcttttaatattaatgtcataattgtatttgtggacctgtgtaggagaaaaagaccctatgttcctcccattaccctttggattgctgctgagaagtgttaactactcataatctcagctcttggacaattaatagcattaataacaattatcaagggcactgatcattagataagactcctgcttcctcgttgcttacatcgggggtactgacccactaaggccccttgtactgttaatgtgaatatttgcaattatatatgtctccttctggtagagtgggatattatgccctagtatcccctttgcattactgcaggggctgctgactactcaaaacttctcctgggactgttaataggcacaatggcagttatcaatggttttctccctccctgaccttgttaagcaagcgccccaccccacccttagtttcccatggcataataaagtataagcattggagtattccatgcacttgtctatcaaacagtggtccatactcccaacccttttgcattgcgccagtgtgtaaaatcacaggtagccatggtgtcatgctttatatacgaagtcttccctctctctgccccttgtgtgcccttggcccctttttacagactattgctcacaatctcaggtgtccatatttgcagctattaggtaagattgtgctgtctccctcttcccttccctctgccctgccccttttgcctctttgctgggtaatgttgaccagacaaggccctttctcttggacttaaacaattctcagttgcactttccttggtcccacccattatacatgaacccctctacttcctttcgcattgcttctgagtatgctgactacccaaagccccttctgtgttattaataaacacagtactgattgtcccatttttcagcccatcagtccaagatctccctaccactttggtgtgttggtgcagtgttgactatgaaaagcaggcctgaactaggtggataagccttcactcattttctttcatttattaatgatcctagtttcaattattgtcagattctggggacaagaaccattcttgcccacctgtgttactgctttactgtgcaaaatactgaaggcaagtcagacccagggagctggattgccatcctttattttgtgtttccagtgtacactataaaattgtctccccaggaaggaaggttggcactttctctgcattcttctttccagagcagattgcctggttaagaatctcttgttgtcccctttgtatattgttattgtaaagtgccaaatgccaggatacagccagaaaaattgcttattattattaaaaaaatttttttaagaaagacatctggattgtagggtggactcgataacctggtcattatttttttgaagccaaaatatccatttatactatgtacctggtgaccagtgtctctcattttaactgagggtggtgggtctgtggatagaacactgactcttgctattttaatatcaaagatattctagagtggaactcttaagaccagtatctttgtgtgggctttaccagcattcacttttagaaaaactacctaaattttataatcctttaatttcttcatctggagcacctgcccctacttatttcaagaagattgcagtaaaacgattaaatgagggaacatatgcagaggtgcttttaaaaagcatatgccaccttttttattaattattatataaaatgaagcatttaattatagtaataatttgaagtagtttgaagtaccacactgaggtgaggacttaaaaatgataagacgagttccctattttataagaaaaataagccaaaattaaatattcttttggatataaatttcaacagtgagatagctgcctagtggaaatgaataatatcccagccactagtgtacagggtgttttgtggcacaggattatgtaatatggaactgctcaagcaaataactagtcatcacaacagcagttctttgtaataactgaaaaagaatattgtttctcggagaaggatgtcaaaagatcggcccagctcagggagcagtttgccctactagctcctcggacagctgtaaagaagagtctctggctctttagaatactgtaagtactacttcgtagctattaagtaatctttttcctattctattttctttctcttagatgccacctatagaaaagtcagagggtccagtaagtttctttccttcttcccacctcatctgcaatatatatatatagagagagaaatagatacatacatacatgcataaatacacatatgtgagttaaccagcagaactgtagaattaatattgtggacccagctctatgctaggttacactgataacctgggtaggaatgatatcatcctatataatttcattcctgagatgattttatcgttgaggagctaatgtgagcacatttgaaataactttagaaaataataagtgctgttttgtgtgaatcataagtagtagttttaggaagggaacccacaaggatttgaagttgatagaataaacttaaggaagtgggtttgctttttctctttaagccaagataggattaatattgcagccatctggatagtccagttggtttattttaatttcatttgttttttacctcttttggagccatggaaagagatgaaagggatagagcatagccattgtgtttggctatttgcgaaggttggcaaattagtgattgctaaatctcataagcttgagtattttaaagttcagagattgagggcataaatctaatacttcggctccttccacaattttactacatttctgcccaagaacagatgaccatggataatgcatatcgtagatactttttaagtttggaacctttttgccaagagggtagtggagaagtgaagtcaaaaccttgaccttccttgcctactttatgctgtagtttatataccttctttcctcccacc

SEQ ID NO: 839 - DNA, 4060 bp, Homo sapiens
gagtgccagctccataagaaccttacatttggacagtcaaggtgcacaattctaagtgaccgcagccatgcaccttggtcaataatgtgtgtaactgcacacggcctatctcatctgaataaggccttactctcagaccccttttgcagtacagcaggggtgctgataaccaaggcccattttcctggcctgttatgtgtgtgattatatttgtccaggtttctgtgtactagacaaggaagcctcctctgccccatcccatctacgcataatctttcttttcctcccagcagggagtgctcactccataagacccttacatttggacaatcaaggtgcacaattgtaagtgaccacaaccatgcatcttggaaatttatgtgcataactgcacatggcttatcctatttgaataaagtcctactctcagaccccctttgcagtatagctggggtgctgatcactgaggcctctttgcttggcttgtctatattcttgtgtactagataagggcaccttctcatggactccctttgcttttcaacaaggagtacccactactttttaagattcttatatttgtccaaagtacatggttttaattgaccacaacaatgtcccttggacattaatgtatgtaatcaccacatggttcatcctaattaaacaaagttctaccttctcaccctccatttgcagtataccagggttgctgaccccctaagtccccttttcttggcttgttgacatgcataattgcatttatgttggttcttgtgccctagacaaggatgccccacctcttttcaatagtgggtgcccactccttatgatctttacatttgaacagttaatgtgaataattgcagttgtccacaaccctatcacttctaggaccattatacctcttttgcattactgtggggtatactgtttccctccaaggccccttctggtggactatcaacatataattgaaattttcttttgtctttgtcagtagattaaggtcataccccatcacctttcctttgtagtacaacagggtgtcctgatcaaccaaagtcctgttgttttggactgttaatatgtgcaattacatttgctcctgatctgtgcactagataaggatcctacctactttcttagtgtttttagcaggtagtgcccactactcaagactgtcacttggaatgttcatgtgcacaaactcaattctctaagcatgttcctgtaccacctttgctttagagcagggggatgatattcactaagtgccccttcttttggacttaatatgcattaatgcaattgtccacctcttcttttagactaagagttgatctccacatattccccttgcatcaggggcatgttaattatgaatgaacccttttcttttaatattaatgtcataattgtatttgtggacctgtgtaggagaaaaagaccctatgttcctcccattaccctttggattgctgctgagaagtgttaactactcataatctcagctcttggacaattaatagcattaataacaattatcaagggcactgatcattagataagactcctgcttcctcgttgcttacatcgggggtactgacccactaaggccccttgtactgttaatgtgaatatttgcaattatatatgtctccttctggtagagtgggatattatgccctagtatcccctttgcattactgcaggggctgctgactactcaaaacttctcctgggactgttaataggcacaatggcagttatcaatggttttctccctccctgaccttgttaagcaagcgccccaccccacccttagtttcccatggcataataaagtataagcattggagtattccatgcacttgtctatcaaacagtggtccatactcccaacccttttgcattgcgccagtgtgtaaaatcacaggtagccatggtgtcatgctttatatacgaagtcttccctctctctgccccttgtgtgcccttggcccctttttacagactattgctcacaatctcaggtgtccatatttgcagctattaggtaagattgtgctgtctccctcttcccttccctctgccctgccccttttgcctctttgctgggtaatgttgaccagacaaggccctttctcttggacttaaacaattctcagttgcactttccttggtcccacccattatacatgaacccctctacttcctttcgcattgcttctgagtatgctgactacccaaagccccttctgtgttattaataaacacagtactgattgtcccatttttcagcccatcagtccaagatctccctaccactttggtgtgttggtgcagtgttgactatgaaaagcaggcctgaactaggtggataagccttcactcattttctttcatttattaatgatcctagtttcaattattgtcagattctggggacaagaaccattcttgcccacctgtgttactgctttactgtgcaaaatactgaaggcaagtcagacccagggagctggattgccatcctttattttgtgtttccagtgtacactataaaattgtctccccaggaaggaaggttggcactttctctgcattcttctttccagagcagattgcctggttaagaatctcttgttgtcccctttgtatattgttattgtaaagtgccaaatgccaggatacagccagaaaaattgcttattattattaaaaaaatttttttaagaaagacatctggattgtagggtggactcgataacctggtcattatttttttgaagccaaaatatccatttatactatgtacctggtgaccagtgtctctcattttaactgagggtggtgggtctgtggatagaacactgactcttgctattttaatatcaaagatattctagagtggaactcttaagaccagtatctttgtgtgggctttaccagcattcacttttagaaaaactacctaaattttataatcctttaatttcttcatctggagcacctgcccctacttatttcaagaagattgcagtaaaacgattaaatgagggaacatatgcagaggtgcttttaaaaagcatatgccaccttttttattaattattatataaaatgaagcatttaattatagtaataatttgaagtagtttgaagtaccacactgaggtgaggacttaaaaatgataagacgagttccctattttataagaaaaataagccaaaattaaatattcttttggatataaatttcaacagtgagatagctgcctagtggaaatgaataatatcccagccactagtgtacagggtgttttgtggcacaggattatgtaatatggaactgctcaagcaaataactagtcatcacaacagcagttctttgtaataactgaaaaagaatattgtttctcggagaaggatgtcaaaagatcggcccagctcagggagcagtttgccctactagctcctcggacagctgtaaagaagagtctctggctctttagaatactgtaagtactacttcgtagctattaagtaatctttttcctattctattttctttctcttagatgccacctatagaaaagtcagagggtccagtaagtttctttccttcttcccacctcatctgcaatatatatatatagagagagaaatagatacatacatacatgcataaatacacatatgtgagttaaccagcagaactgtagaattaatattgtggacccagctctatgctaggttacactgataacctgggtaggaatgatatcatcctatataatttcattcctgagatgattttatcgttgaggagctaatgtgagcacatttgaaataactttagaaaataataagtgctgttttgtgtgaatcataagtagtagttttaggaagggaacccacaaggatttgaagttgatagaataaacttaaggaagtgggtttgctttttctctttaagccaagataggattaatattgcagccatctggatagtccagttggtttattttaatttcatttgttttttacctctttt

SEQ ID NO: 840 - DNA, 4054 bp, Homo sapiens
actccatatacccttacatttggacaatcaaggtgcacaattgtaagtgagcataggcactcaccttggacatgaatgtgcataactgcacatggcccatcccatctgaataaggtcctactctcagaccctttttgcagtacagcaggggtgctgatcaccaaggccccttttcctggcctgttatgtgtgtgattatatttgttccagttcctgtgtaatagacatggaagcctcccctgccacactccacccccaatcttcctttcccttctggcaggaagtacccgctccataagacccttacatttggacagtcaaggtgcacaattgtatgtgaccacaaccatgcaccttggacataaatgtgtgtaactgcacatggcccatcccatctgaataaggtcctactctcagaccccttttgcagtacagtaggtgtgctgataaccaaggcccctcttcctggcctgttaacgtatgtgattatatttgtctgggttccagtgtataagacatggaagcctcccctgccccaccccaccctcaatcttcctttcccttctggcagggagtgccagctccataagaaccttacatttggacagtcaaggtgcacaattctaagtgaccgcagccatgcaccttggtcaataatgtgtgtaactgcacacggcctatctcatctgaataaggccttactctcagaccccttttgcagtacagcaggggtgctgataaccaaggcccattttcctggcctgttatgtgtgtgattatatttgtccaggtttctgtgtactagacaaggaagcctcctctgccccatcccatctacgcataatctttcttttcctcccagcagggagtgctcactccataagacccttacatttggacaatcaaggtgcacaattgtaagtgaccacaaccatgcatcttggaaatttatgtgcataactgcacatggcttatcctatttgaataaagtcctactctcagaccccctttgcagtatagctggggtgctgatcactgaggcctctttgcttggcttgtctatattcttgtgtactagataagggcaccttctcatggactccctttgcttttcaacaaggagtacccactactttttaagattcttatatttgtccaaagtacatggttttaattgaccacaacaatgtcccttggacattaatgtatgtaatcaccacatggttcatcctaattaaacaaagttctaccttctcaccctccatttgcagtataccagggttgctgaccccctaagtccccttttcttggcttgttgacatgcataattgcatttatgttggttcttgtgccctagacaaggatgccccacctcttttcaatagtgggtgcccactccttatgatctttacatttgaacagttaatgtgaataattgcagttgtccacaaccctatcacttctaggaccattatacctcttttgcattactgtggggtatactgtttccctccaaggccccttctggtggactatcaacatataattgaaattttcttttgtctttgtcagtagattaaggtcataccccatcacctttcctttgtagtacaacagggtgtcctgatcaaccaaagtcctgttgttttggactgttaatatgtgcaattacatttgctcctgatctgtgcactagataaggatcctacctactttcttagtgtttttagcaggtagtgcccactactcaagactgtcacttggaatgttcatgtgcacaaactcaattctctaagcatgttcctgtaccacctttgctttagagcagggggatgatattcactaagtgccccttcttttggacttaatatgcattaatgcaattgtccacctcttcttttagactaagagttgatctccacatattccccttgcatcaggggcatgttaattatgaatgaacccttttcttttaatattaatgtcataattgtatttgtggacctgtgtaggagaaaaagaccctatgttcctcccattaccctttggattgctgctgagaagtgttaactactcataatctcagctcttggacaattaatagcattaataacaattatcaagggcactgatcattagataagactcctgcttcctcgttgcttacatcgggggtactgacccactaaggccccttgtactgttaatgtgaatatttgcaattatatatgtctccttctggtagagtgggatattatgccctagtatcccctttgcattactgcaggggctgctgactactcaaaacttctcctgggactgttaataggcacaatggcagttatcaatggttttctccctccctgaccttgttaagcaagcgccccaccccacccttagtttcccatggcataataaagtataagcattggagtattccatgcacttgtctatcaaacagtggtccatactcccaacccttttgcattgcgccagtgtgtaaaatcacaggtagccatggtgtcatgctttatatacgaagtcttccctctctctgccccttgtgtgcccttggcccctttttacagactattgctcacaatctcaggtgtccatatttgcagctattaggtaagattgtgctgtctccctcttcccttccctctgccctgccccttttgcctctttgctgggtaatgttgaccagacaaggccctttctcttggacttaaacaattctcagttgcactttccttggtcccacccattatacatgaacccctctacttcctttcgcattgcttctgagtatgctgactacccaaagccccttctgtgttattaataaacacagtactgattgtcccatttttcagcccatcagtccaagatctccctaccactttggtgtgttggtgcagtgttgactatgaaaagcaggcctgaactaggtggataagccttcactcattttctttcatttattaatgatcctagtttcaattattgtcagattctggggacaagaaccattcttgcccacctgtgttactgctttactgtgcaaaatactgaaggcaagtcagacccagggagctggattgccatcctttattttgtgtttccagtgtacactataaaattgtctccccaggaaggaaggttggcactttctctgcattcttctttccagagcagattgcctggttaagaatctcttgttgtcccctttgtatattgttattgtaaagtgccaaatgccaggatacagccagaaaaattgcttattattattaaaaaaatttttttaagaaagacatctggattgtagggtggactcgataacctggtcattatttttttgaagccaaaatatccatttatactatgtacctggtgaccagtgtctctcattttaactgagggtggtgggtctgtggatagaacactgactcttgctattttaatatcaaagatattctagagtggaactcttaagaccagtatctttgtgtgggctttaccagcattcacttttagaaaaactacctaaattttataatcctttaatttcttcatctggagcacctgcccctacttatttcaagaagattgcagtaaaacgattaaatgagggaacatatgcagaggtgcttttaaaaagcatatgccaccttttttattaattattatataaaatgaagcatttaattatagtaataatttgaagtagtttgaagtaccacactgaggtgaggacttaaaaatgataagacgagttccctattttataagaaaaataagccaaaattaaatattcttttggatataaatttcaacagtgagatagctgcctagtggaaatgaataatatcccagccactagtgtacagggtgttttgtggcacaggattatgtaatatggaactgctcaagcaaataactagtcatcacaacagcagttctttgtaataactgaaaaagaatattgtttctcggagaaggatgtcaaaagatcggcccagctcagggagcagtttgccctactagctcc

SEQ ID NO: 841 - DNA, 4023 bp, Homo sapiens
ggggtgctgatcaccaaggccccttttcttggcctgttatgtgcgtgattatatttgtctgggttcctgtgtattagacaaggaagccttccccccgcccccacccccactcccagtcttcctttcccttccagcagggagtgccccctccataagatcattacatttggacaatcaaggtgcacaattataagtgaccacagccatgcaccttggacattattggacattaatgtgcgtaactgcacatggcccatcccatctgaataaggtcctactctcagatgccctttgcagtacagcaggggtactgaatcaccaaggccctttttcttggcctgttatgtgtgtgattatatttatcccagtttctgtgtaatagacatgaaagcctcccctgccacaccccacctccaatcttcctttcccttccaccagggagtgtccactccatatacccttacatttggacaatcaaggtgcacaattgtaagtgagcataggcactcaccttggacatgaatgtgcataactgcacatggcccatcccatctgaataaggtcctactctcagaccctttttgcagtacagcaggggtgctgatcaccaaggccccttttcctggcctgttatgtgtgtgattatatttgttccagttcctgtgtaatagacatggaagcctcccctgccacactccacccccaatcttcctttcccttctggcaggaagtacccgctccataagacccttacatttggacagtcaaggtgcacaattgtatgtgaccacaaccatgcaccttggacataaatgtgtgtaactgcacatggcccatcccatctgaataaggtcctactctcagaccccttttgcagtacagtaggtgtgctgataaccaaggcccctcttcctggcctgttaacgtatgtgattatatttgtctgggttccagtgtataagacatggaagcctcccctgccccaccccaccctcaatcttcctttcccttctggcagggagtgccagctccataagaaccttacatttggacagtcaaggtgcacaattctaagtgaccgcagccatgcaccttggtcaataatgtgtgtaactgcacacggcctatctcatctgaataaggccttactctcagaccccttttgcagtacagcaggggtgctgataaccaaggcccattttcctggcctgttatgtgtgtgattatatttgtccaggtttctgtgtactagacaaggaagcctcctctgccccatcccatctacgcataatctttcttttcctcccagcagggagtgctcactccataagacccttacatttggacaatcaaggtgcacaattgtaagtgaccacaaccatgcatcttggaaatttatgtgcataactgcacatggcttatcctatttgaataaagtcctactctcagaccccctttgcagtatagctggggtgctgatcactgaggcctctttgcttggcttgtctatattcttgtgtactagataagggcaccttctcatggactccctttgcttttcaacaaggagtacccactactttttaagattcttatatttgtccaaagtacatggttttaattgaccacaacaatgtcccttggacattaatgtatgtaatcaccacatggttcatcctaattaaacaaagttctaccttctcaccctccatttgcagtataccagggttgctgaccccctaagtccccttttcttggcttgttgacatgcataattgcatttatgttggttcttgtgccctagacaaggatgccccacctcttttcaatagtgggtgcccactccttatgatctttacatttgaacagttaatgtgaataattgcagttgtccacaaccctatcacttctaggaccattatacctcttttgcattactgtggggtatactgtttccctccaaggccccttctggtggactatcaacatataattgaaattttcttttgtctttgtcagtagattaaggtcataccccatcacctttcctttgtagtacaacagggtgtcctgatcaaccaaagtcctgttgttttggactgttaatatgtgcaattacatttgctcctgatctgtgcactagataaggatcctacctactttcttagtgtttttagcaggtagtgcccactactcaagactgtcacttggaatgttcatgtgcacaaactcaattctctaagcatgttcctgtaccacctttgctttagagcagggggatgatattcactaagtgccccttcttttggacttaatatgcattaatgcaattgtccacctcttcttttagactaagagttgatctccacatattccccttgcatcaggggcatgttaattatgaatgaacccttttcttttaatattaatgtcataattgtatttgtggacctgtgtaggagaaaaagaccctatgttcctcccattaccctttggattgctgctgagaagtgttaactactcataatctcagctcttggacaattaatagcattaataacaattatcaagggcactgatcattagataagactcctgcttcctcgttgcttacatcgggggtactgacccactaaggccccttgtactgttaatgtgaatatttgcaattatatatgtctccttctggtagagtgggatattatgccctagtatcccctttgcattactgcaggggctgctgactactcaaaacttctcctgggactgttaataggcacaatggcagttatcaatggttttctccctccctgaccttgttaagcaagcgccccaccccacccttagtttcccatggcataataaagtataagcattggagtattccatgcacttgtctatcaaacagtggtccatactcccaacccttttgcattgcgccagtgtgtaaaatcacaggtagccatggtgtcatgctttatatacgaagtcttccctctctctgccccttgtgtgcccttggcccctttttacagactattgctcacaatctcaggtgtccatatttgcagctattaggtaagattgtgctgtctccctcttcccttccctctgccctgccccttttgcctctttgctgggtaatgttgaccagacaaggccctttctcttggacttaaacaattctcagttgcactttccttggtcccacccattatacatgaacccctctacttcctttcgcattgcttctgagtatgctgactacccaaagccccttctgtgttattaataaacacagtactgattgtcccatttttcagcccatcagtccaagatctccctaccactttggtgtgttggtgcagtgttgactatgaaaagcaggcctgaactaggtggataagccttcactcattttctttcatttattaatgatcctagtttcaattattgtcagattctggggacaagaaccattcttgcccacctgtgttactgctttactgtgcaaaatactgaaggcaagtcagacccagggagctggattgccatcctttattttgtgtttccagtgtacactataaaattgtctccccaggaaggaaggttggcactttctctgcattcttctttccagagcagattgcctggttaagaatctcttgttgtcccctttgtatattgttattgtaaagtgccaaatgccaggatacagccagaaaaattgcttattattattaaaaaaatttttttaagaaagacatctggattgtagggtggactcgataacctggtcattatttttttgaagccaaaatatccatttatactatgtacctggtgaccagtgtctctcattttaactgagggtggtgggtctgtggatagaacactgactcttgctattttaatatcaaagatattctagagtggaactcttaagaccagtatctttgtgtgggctttaccagcattcacttttagaaaaactacctaaattttataatcctttaatttctt

SEQ ID NO: 842 - DNA, 4038 bp, Homo sapiens
ttttttgctgctgatcatttggtggtgtgtgagtgtacctaccgctttggcagagaatgactctgcagttaagctaagggcgtgttcagattgtggaggaaaagtggccgccattttagacttgccgcataactcggcttagggctagtcgtttgtgctaagttaaactagggaggcaagatggatgatagcaggtcaggcagaggaagtcatgtgcattgcatgagctaaacctatctgaatgaattgatttggggcttgttaggagctttgcgtgattgttgtatcgggaggcagtaagaatcatcttttatcagtacaagggactagttaaaaatggaaggttaggaaagactaaggtgcagggcttaaaatggcgattttgacattgcggcattgctcagcatggcgggctgtgctttgttaggttgtccaaaatggcggatccagttctgtcgcagtgttcaagtggcgggaaggccacatcatgatgggcgaggctttgttaagtggttagcatggtggtggacatgtgcggtcacacaggaaaagatggcggctgaaggtcttgccgcagtgtaaaacatggcgggcctctttgtctttgctgtgtgcttttcgtgttgggttttgccgcagggacaatatggcaggcgttgtcatatgtatatcatggcttttgtcacgtggacatcatggcgggcttgccgcattgttaaagatggcgggttttgccgcctagtgccacgcagagcgggagaaaaggtgggatggacagtgctggattgctgcataacccaaccaattagaaatgggggtggaattgatcacagccaattagagcagaagatggaattagactgatgacacactgtccagctactcagcgaagacctgggtgaattagcatggcacttcgcagctgtctttagccagtcaggagaaagaagtggaggggccacgtgtatgtctcccagtgggcggtacaccaggtgttttcaaggtcttttcaaggacatttagcctttccacctctgtcccctcttatttgtcccctcctgtccagtgctgcctcttgcagtgctggatatctggctgtgtggtctgaacctccctccattcctctgtattggtgcctcacctaaggctaagtatacctccccccccaccccccaacccccccaactccccacccccaccccccaccccccacctccccacccccctacccccctacccccctacccccctctggtctgccctgcactgcactgttgccatgggcagtgctccaggcctgcttggtgtggacatggtggtgagccgtggcaaggaccagaatggatcacagatgatcgttggccaacaggtggcagaagaggaattcctgccttcctcaagaggaacacctaccccttggctaatgctggggtcggattttgatttatatttatcttttggatgtcagtcatacagtctgattttgtggtttgctagtgtttgaatttaagtcttaagtgactattatagaaatgtattaagaggctttatttgtagaattcactttaattacatttaatgagtttttgttttgagttccttaaaattccttaaagtttttagcttctcattacaaattccttaacctttttttggcagtagatagtcaaagtcaaatcatttctaatgttttaaaaatgtgctggtcattttctttgaaattgacttaactattttcctttgaagagtctgtagcacagaaacagtaaaaaatttaacttcatgacctaatgtaaaaaagagtgtttgaaggtttacacaggtccaggccttgctttgttcccatccttgatgctgcactaattgactaatcacctacttatcagacaggaaacttgaattgctgtggtctggtgtcctctattcagacttattatattggagtatttcaatttttcgttgtatcctgcctgcctagcatccagttcctccccagccctgctcccagcaaacccctagtctagccccagccctactcccaccccgccccagccctgccccagccccagtcccctaaccccccagccctagccccagtcccagtcctagttcctcagtcccgcccagcttctctcgaaagtcactctaattttcattgattcagtgctcaaaataagttgtccattgcttatcctattatactgggatattccgtttacccttggcattgctgatcttcagtactgactccttgaccattttcagttaatgcatacaatcccatttgtctgtgatctcaggacaaagaatttccttactcggtacgttgaagttagggaatgtcaattgagagctttctatcagagcattattgcccacaatttgagttacttatcattttctcgatcccctgcccttaaaggagaaaccatttctctgtcattgcttctgtagtcacagtcccaattttgagtagtgatcttttcttgtgtactgtgttggccacctaaaactctttgcattgagtaaaattctaattgccaataatcctacccattggattagacagcactctgaaccccatttgcattcagcagggggtcgcagacaacccgtcttttgttggacagttaaaatgctcagtcccaattgtcatagctttgcctattaaacaaaggcaccctactgcgctttttgctgtgcttctggagaatcctgctgttcttggacaattaaagaacaaagtagtaattgctaattgtctcacccattaatcatgaagactaccagtcgcccttgcatttgccttgaggcagcgctgactacctgagatttaagagtttcttaaattattgagtaaaatcccaattatccatagttctgttagttacactatggcctttgcaaacatctttgcataacagcagtgggactgactcattcttagagccccttcccttggaatattaatggatacaatagtaattattcatggttctgcgtaacagagaagacccacttatgtgtatgcctttatcattgctcctagatagtgtgaactacctaccaccttgcattaatatgtaaaacactaattgcccatagtcccactcattagtctaggatgtcctctttgccattgctgctgagttctgactacccaagtttccttctcttaaacagttgatatgcataattgcatatattcatggttctgtgcaataaaaatggattctcaccccatcccaccttctgtgggatgttgctaacgagtgcagattattcaataacagctcttgaacagttaatttgcacagttgcaattgtccagagtcctgtccattagaaagggactctgtatcctatttgcacgctacaatgtgggctgatcacccaaggactcttcttgtgcattgatgttcataattgtatttgtccacgatcttgtgcactaacccttccactccctttgtattccagcaggggacccttactactcaagacctctgtactaggacagtttatgtgcacaatcctaattgattagaactgagtcttttatatcaaggtccctgcatcatctttgctttacatcaagagggtgctggttacctaatgcccctcctccagaaattattgatgtgcaaaatgcaatttccctatctgctgttagtctggggtctcatcccctcatattccttttgtcttacagcagggggtacttgggactgttaatgcgcataattgcaattatggtcttttccattaaattaagatcccaactgctcacaccctcttagcattacagtagagggtgctaatcacaaggacatttcttttgtactgttaatgtgctacttgcatttgtccctcttcctgtgcactaaagaccccactcacttccctagtgttcagcagtggatgacctctagtcaagacctttgcactaggatagttaatgtgaaccatggcaactgatcacaacaatgtctttcagatcagatccattttatcctccttgttttacagcaagggata

SEQ ID NO: 843 - DNA, 4024 bp, Homo sapiens
ttatcaacacatcaaagctctacctatcccttcccccattctcaaaaccaagctgaattaacatctttacatttattatgcagtttatggaggattttagcattaattattgcttgatttactcaatgtccccatgttatagatgagaactggaaaacccattgaagttgtgactcctggtctagaaatgaagtctacttccagttaatgttctttctggtatgtctttgctttcttgaaatttcccttttttgtccttactgggtaaattttgaaccaaccaaatcacaaagatgtccggctttcaatcttctaggccacgcctcttatgctctctccgccctcagcccccccttcagttcttaaagcgctgcaattcgctgctgcagccatatttcttactctctcggggctggaagcttcctgactgaagatctctctgcacttggggttctttctagaacattttctagtcccccaacaccctttatggcgtatttctttaaaaaaatcacctaaattccataaaatatttttttaaattctatactttctcctagtgtcttcttgacacgtcctccatatttttttaaagaaagtatttggaatattttgaggcaatttttaatatttaaggaatttttctttggaatcatttttggttgacatctctgttttttgtggatcagttttttactcttccactctcttttctatattttgcccatcggggctgcggatacctggttttattattttttctttgcccaacggggccgtggatacctgccttttaattcttttttattcgcccatcggggccgcggatacctgctttttatttttttttccttagcccatcggggtatcggatacctgctgattcccttcccctctgaacccccaacactctggcccatcggggtgacggatatctgctttttaaaaattttctttttttggcccatcggggcttcggatacctgctttttttttttttatttttccttgcccatcggggcctcggatacctgctttaatttttgtttttctggcccatcggggccgcggatacctgctttgatttttttttttcatcgcccatcggtgctttttatggatgaaaaaatgttggttttgtgggttgttgcactctctggaatatctacacttttttttgctgctgatcatttggtggtgtgtgagtgtacctaccgctttggcagagaatgactctgcagttaagctaagggcgtgttcagattgtggaggaaaagtggccgccattttagacttgccgcataactcggcttagggctagtcgtttgtgctaagttaaactagggaggcaagatggatgatagcaggtcaggcagaggaagtcatgtgcattgcatgagctaaacctatctgaatgaattgatttggggcttgttaggagctttgcgtgattgttgtatcgggaggcagtaagaatcatcttttatcagtacaagggactagttaaaaatggaaggttaggaaagactaaggtgcagggcttaaaatggcgattttgacattgcggcattgctcagcatggcgggctgtgctttgttaggttgtccaaaatggcggatccagttctgtcgcagtgttcaagtggcgggaaggccacatcatgatgggcgaggctttgttaagtggttagcatggtggtggacatgtgcggtcacacaggaaaagatggcggctgaaggtcttgccgcagtgtaaaacatggcgggcctctttgtctttgctgtgtgcttttcgtgttgggttttgccgcagggacaatatggcaggcgttgtcatatgtatatcatggcttttgtcacgtggacatcatggcgggcttgccgcattgttaaagatggcgggttttgccgcctagtgccacgcagagcgggagaaaaggtgggatggacagtgctggattgctgcataacccaaccaattagaaatgggggtggaattgatcacagccaattagagcagaagatggaattagactgatgacacactgtccagctactcagcgaagacctgggtgaattagcatggcacttcgcagctgtctttagccagtcaggagaaagaagtggaggggccacgtgtatgtctcccagtgggcggtacaccaggtgttttcaaggtcttttcaaggacatttagcctttccacctctgtcccctcttatttgtcccctcctgtccagtgctgcctcttgcagtgctggatatctggctgtgtggtctgaacctccctccattcctctgtattggtgcctcacctaaggctaagtatacctccccccccaccccccaacccccccaactccccacccccaccccccaccccccacctccccacccccctacccccctacccccctacccccctctggtctgccctgcactgcactgttgccatgggcagtgctccaggcctgcttggtgtggacatggtggtgagccgtggcaaggaccagaatggatcacagatgatcgttggccaacaggtggcagaagaggaattcctgccttcctcaagaggaacacctaccccttggctaatgctggggtcggattttgatttatatttatcttttggatgtcagtcatacagtctgattttgtggtttgctagtgtttgaatttaagtcttaagtgactattatagaaatgtattaagaggctttatttgtagaattcactttaattacatttaatgagtttttgttttgagttccttaaaattccttaaagtttttagcttctcattacaaattccttaacctttttttggcagtagatagtcaaagtcaaatcatttctaatgttttaaaaatgtgctggtcattttctttgaaattgacttaactattttcctttgaagagtctgtagcacagaaacagtaaaaaatttaacttcatgacctaatgtaaaaaagagtgtttgaaggtttacacaggtccaggccttgctttgttcccatccttgatgctgcactaattgactaatcacctacttatcagacaggaaacttgaattgctgtggtctggtgtcctctattcagacttattatattggagtatttcaatttttcgttgtatcctgcctgcctagcatccagttcctccccagccctgctcccagcaaacccctagtctagccccagccctactcccaccccgccccagccctgccccagccccagtcccctaaccccccagccctagccccagtcccagtcctagttcctcagtcccgcccagcttctctcgaaagtcactctaattttcattgattcagtgctcaaaataagttgtccattgcttatcctattatactgggatattccgtttacccttggcattgctgatcttcagtactgactccttgaccattttcagttaatgcatacaatcccatttgtctgtgatctcaggacaaagaatttccttactcggtacgttgaagttagggaatgtcaattgagagctttctatcagagcattattgcccacaatttgagttacttatcattttctcgatcccctgcccttaaaggagaaaccatttctctgtcattgcttctgtagtcacagtcccaattttgagtagtgatcttttcttgtgtactgtgttggccacctaaaactctttgcattgagtaaaattctaattgccaataatcctacccattggattagacagcactctgaaccccatttgcattcagcagggggtcgcagacaacccgtcttttgttggacagttaaaatgctcagtcccaattgtcatagctttgcctattaaacaaaggcaccctactgcgctttttgctgtgcttctggagaatcctgctgttcttggacaattaaagaacaaagtagtaattgctaattgtctcacccattaatcatgaagactaccagtcgcccttgcatttgccttgaggcagcgctgactacctgagatttaagagtttcttaaatt

SEQ ID NO: 844 - DNA, 4072 bp, Homo sapiens
atgggataatggaatgggaagtcccttgaagatggtactaacctcaatgtattactcctttctagcttctttggttcaaaagtttggtggaggagttacaaattctggtttgaatgatatatttggatactttatcaacacatcaaagctctacctatcccttcccccattctcaaaaccaagctgaattaacatctttacatttattatgcagtttatggaggattttagcattaattattgcttgatttactcaatgtccccatgttatagatgagaactggaaaacccattgaagttgtgactcctggtctagaaatgaagtctacttccagttaatgttctttctggtatgtctttgctttcttgaaatttcccttttttgtccttactgggtaaattttgaaccaaccaaatcacaaagatgtccggctttcaatcttctaggccacgcctcttatgctctctccgccctcagcccccccttcagttcttaaagcgctgcaattcgctgctgcagccatatttcttactctctcggggctggaagcttcctgactgaagatctctctgcacttggggttctttctagaacattttctagtcccccaacaccctttatggcgtatttctttaaaaaaatcacctaaattccataaaatatttttttaaattctatactttctcctagtgtcttcttgacacgtcctccatatttttttaaagaaagtatttggaatattttgaggcaatttttaatatttaaggaatttttctttggaatcatttttggttgacatctctgttttttgtggatcagttttttactcttccactctcttttctatattttgcccatcggggctgcggatacctggttttattattttttctttgcccaacggggccgtggatacctgccttttaattcttttttattcgcccatcggggccgcggatacctgctttttatttttttttccttagcccatcggggtatcggatacctgctgattcccttcccctctgaacccccaacactctggcccatcggggtgacggatatctgctttttaaaaattttctttttttggcccatcggggcttcggatacctgctttttttttttttatttttccttgcccatcggggcctcggatacctgctttaatttttgtttttctggcccatcggggccgcggatacctgctttgatttttttttttcatcgcccatcggtgctttttatggatgaaaaaatgttggttttgtgggttgttgcactctctggaatatctacacttttttttgctgctgatcatttggtggtgtgtgagtgtacctaccgctttggcagagaatgactctgcagttaagctaagggcgtgttcagattgtggaggaaaagtggccgccattttagacttgccgcataactcggcttagggctagtcgtttgtgctaagttaaactagggaggcaagatggatgatagcaggtcaggcagaggaagtcatgtgcattgcatgagctaaacctatctgaatgaattgatttggggcttgttaggagctttgcgtgattgttgtatcgggaggcagtaagaatcatcttttatcagtacaagggactagttaaaaatggaaggttaggaaagactaaggtgcagggcttaaaatggcgattttgacattgcggcattgctcagcatggcgggctgtgctttgttaggttgtccaaaatggcggatccagttctgtcgcagtgttcaagtggcgggaaggccacatcatgatgggcgaggctttgttaagtggttagcatggtggtggacatgtgcggtcacacaggaaaagatggcggctgaaggtcttgccgcagtgtaaaacatggcgggcctctttgtctttgctgtgtgcttttcgtgttgggttttgccgcagggacaatatggcaggcgttgtcatatgtatatcatggcttttgtcacgtggacatcatggcgggcttgccgcattgttaaagatggcgggttttgccgcctagtgccacgcagagcgggagaaaaggtgggatggacagtgctggattgctgcataacccaaccaattagaaatgggggtggaattgatcacagccaattagagcagaagatggaattagactgatgacacactgtccagctactcagcgaagacctgggtgaattagcatggcacttcgcagctgtctttagccagtcaggagaaagaagtggaggggccacgtgtatgtctcccagtgggcggtacaccaggtgttttcaaggtcttttcaaggacatttagcctttccacctctgtcccctcttatttgtcccctcctgtccagtgctgcctcttgcagtgctggatatctggctgtgtggtctgaacctccctccattcctctgtattggtgcctcacctaaggctaagtatacctccccccccaccccccaacccccccaactccccacccccaccccccaccccccacctccccacccccctacccccctacccccctacccccctctggtctgccctgcactgcactgttgccatgggcagtgctccaggcctgcttggtgtggacatggtggtgagccgtggcaaggaccagaatggatcacagatgatcgttggccaacaggtggcagaagaggaattcctgccttcctcaagaggaacacctaccccttggctaatgctggggtcggattttgatttatatttatcttttggatgtcagtcatacagtctgattttgtggtttgctagtgtttgaatttaagtcttaagtgactattatagaaatgtattaagaggctttatttgtagaattcactttaattacatttaatgagtttttgttttgagttccttaaaattccttaaagtttttagcttctcattacaaattccttaacctttttttggcagtagatagtcaaagtcaaatcatttctaatgttttaaaaatgtgctggtcattttctttgaaattgacttaactattttcctttgaagagtctgtagcacagaaacagtaaaaaatttaacttcatgacctaatgtaaaaaagagtgtttgaaggtttacacaggtccaggccttgctttgttcccatccttgatgctgcactaattgactaatcacctacttatcagacaggaaacttgaattgctgtggtctggtgtcctctattcagacttattatattggagtatttcaatttttcgttgtatcctgcctgcctagcatccagttcctccccagccctgctcccagcaaacccctagtctagccccagccctactcccaccccgccccagccctgccccagccccagtcccctaaccccccagccctagccccagtcccagtcctagttcctcagtcccgcccagcttctctcgaaagtcactctaattttcattgattcagtgctcaaaataagttgtccattgcttatcctattatactgggatattccgtttacccttggcattgctgatcttcagtactgactccttgaccattttcagttaatgcatacaatcccatttgtctgtgatctcaggacaaagaatttccttactcggtacgttgaagttagggaatgtcaattgagagctttctatcagagcattattgcccacaatttgagttacttatcattttctcgatcccctgcccttaaaggagaaaccatttctctgtcattgcttctgtagtcacagtcccaattttgagtagtgatcttttcttgtgtactgtgttggccacctaaaactctttgcattgagtaaaattctaattgccaataatcctacccattggattagacagcactctgaaccccatttgcattcagcagggggtcgcagacaacccgtcttttgttggacagttaaaatgctcagtcccaattgtcatagctttgcctattaaacaaaggcaccctactgcgctttttgctgtgcttctggagaatcctgctgttcttggacaattaaagaacaaagtagtaattgctaattgtctcacc

SEQ ID NO: 845 - DNA, 4042 bp, Homo sapiens
ttatggttgggagccatacaaggtagagtgttggagtaaaaactacattgactctgaatcatggtgtgtgacctcgggcacatgatgtaacctctataggactctattttaatgtataaaacaggaataatcctttattattatctatgcaatacatattccattatctattacatgggataatggaatgggaagtcccttgaagatggtactaacctcaatgtattactcctttctagcttctttggttcaaaagtttggtggaggagttacaaattctggtttgaatgatatatttggatactttatcaacacatcaaagctctacctatcccttcccccattctcaaaaccaagctgaattaacatctttacatttattatgcagtttatggaggattttagcattaattattgcttgatttactcaatgtccccatgttatagatgagaactggaaaacccattgaagttgtgactcctggtctagaaatgaagtctacttccagttaatgttctttctggtatgtctttgctttcttgaaatttcccttttttgtccttactgggtaaattttgaaccaaccaaatcacaaagatgtccggctttcaatcttctaggccacgcctcttatgctctctccgccctcagcccccccttcagttcttaaagcgctgcaattcgctgctgcagccatatttcttactctctcggggctggaagcttcctgactgaagatctctctgcacttggggttctttctagaacattttctagtcccccaacaccctttatggcgtatttctttaaaaaaatcacctaaattccataaaatatttttttaaattctatactttctcctagtgtcttcttgacacgtcctccatatttttttaaagaaagtatttggaatattttgaggcaatttttaatatttaaggaatttttctttggaatcatttttggttgacatctctgttttttgtggatcagttttttactcttccactctcttttctatattttgcccatcggggctgcggatacctggttttattattttttctttgcccaacggggccgtggatacctgccttttaattcttttttattcgcccatcggggccgcggatacctgctttttatttttttttccttagcccatcggggtatcggatacctgctgattcccttcccctctgaacccccaacactctggcccatcggggtgacggatatctgctttttaaaaattttctttttttggcccatcggggcttcggatacctgctttttttttttttatttttccttgcccatcggggcctcggatacctgctttaatttttgtttttctggcccatcggggccgcggatacctgctttgatttttttttttcatcgcccatcggtgctttttatggatgaaaaaatgttggttttgtgggttgttgcactctctggaatatctacacttttttttgctgctgatcatttggtggtgtgtgagtgtacctaccgctttggcagagaatgactctgcagttaagctaagggcgtgttcagattgtggaggaaaagtggccgccattttagacttgccgcataactcggcttagggctagtcgtttgtgctaagttaaactagggaggcaagatggatgatagcaggtcaggcagaggaagtcatgtgcattgcatgagctaaacctatctgaatgaattgatttggggcttgttaggagctttgcgtgattgttgtatcgggaggcagtaagaatcatcttttatcagtacaagggactagttaaaaatggaaggttaggaaagactaaggtgcagggcttaaaatggcgattttgacattgcggcattgctcagcatggcgggctgtgctttgttaggttgtccaaaatggcggatccagttctgtcgcagtgttcaagtggcgggaaggccacatcatgatgggcgaggctttgttaagtggttagcatggtggtggacatgtgcggtcacacaggaaaagatggcggctgaaggtcttgccgcagtgtaaaacatggcgggcctctttgtctttgctgtgtgcttttcgtgttgggttttgccgcagggacaatatggcaggcgttgtcatatgtatatcatggcttttgtcacgtggacatcatggcgggcttgccgcattgttaaagatggcgggttttgccgcctagtgccacgcagagcgggagaaaaggtgggatggacagtgctggattgctgcataacccaaccaattagaaatgggggtggaattgatcacagccaattagagcagaagatggaattagactgatgacacactgtccagctactcagcgaagacctgggtgaattagcatggcacttcgcagctgtctttagccagtcaggagaaagaagtggaggggccacgtgtatgtctcccagtgggcggtacaccaggtgttttcaaggtcttttcaaggacatttagcctttccacctctgtcccctcttatttgtcccctcctgtccagtgctgcctcttgcagtgctggatatctggctgtgtggtctgaacctccctccattcctctgtattggtgcctcacctaaggctaagtatacctccccccccaccccccaacccccccaactccccacccccaccccccaccccccacctccccacccccctacccccctacccccctacccccctctggtctgccctgcactgcactgttgccatgggcagtgctccaggcctgcttggtgtggacatggtggtgagccgtggcaaggaccagaatggatcacagatgatcgttggccaacaggtggcagaagaggaattcctgccttcctcaagaggaacacctaccccttggctaatgctggggtcggattttgatttatatttatcttttggatgtcagtcatacagtctgattttgtggtttgctagtgtttgaatttaagtcttaagtgactattatagaaatgtattaagaggctttatttgtagaattcactttaattacatttaatgagtttttgttttgagttccttaaaattccttaaagtttttagcttctcattacaaattccttaacctttttttggcagtagatagtcaaagtcaaatcatttctaatgttttaaaaatgtgctggtcattttctttgaaattgacttaactattttcctttgaagagtctgtagcacagaaacagtaaaaaatttaacttcatgacctaatgtaaaaaagagtgtttgaaggtttacacaggtccaggccttgctttgttcccatccttgatgctgcactaattgactaatcacctacttatcagacaggaaacttgaattgctgtggtctggtgtcctctattcagacttattatattggagtatttcaatttttcgttgtatcctgcctgcctagcatccagttcctccccagccctgctcccagcaaacccctagtctagccccagccctactcccaccccgccccagccctgccccagccccagtcccctaaccccccagccctagccccagtcccagtcctagttcctcagtcccgcccagcttctctcgaaagtcactctaattttcattgattcagtgctcaaaataagttgtccattgcttatcctattatactgggatattccgtttacccttggcattgctgatcttcagtactgactccttgaccattttcagttaatgcatacaatcccatttgtctgtgatctcaggacaaagaatttccttactcggtacgttgaagttagggaatgtcaattgagagctttctatcagagcattattgcccacaatttgagttacttatcattttctcgatcccctgcccttaaaggagaaaccatttctctgtcattgcttctgtagtcacagtcccaattttgagtagtgatcttttcttgtgtactgtgttggccacctaaaactctttgcattgagtaaaattctaattgccaataatcctacccattggatta

SEQ ID NO: 846 - DNA, 4075 bp, Homo sapiens
tgtgtcatatggttggtccaatgttgggttcctcagattcatggaggaaataggaaaatagtaaagattaaggagtcatagttaaaaaattacaaacaggtcacaaacagtactctttcttgattatttaggaaccaaatagccattctatgaaatgtctttctttcctttttctctcttgctcaccaattgactcgtaagcacttccgttctcttatggttgggagccatacaaggtagagtgttggagtaaaaactacattgactctgaatcatggtgtgtgacctcgggcacatgatgtaacctctataggactctattttaatgtataaaacaggaataatcctttattattatctatgcaatacatattccattatctattacatgggataatggaatgggaagtcccttgaagatggtactaacctcaatgtattactcctttctagcttctttggttcaaaagtttggtggaggagttacaaattctggtttgaatgatatatttggatactttatcaacacatcaaagctctacctatcccttcccccattctcaaaaccaagctgaattaacatctttacatttattatgcagtttatggaggattttagcattaattattgcttgatttactcaatgtccccatgttatagatgagaactggaaaacccattgaagttgtgactcctggtctagaaatgaagtctacttccagttaatgttctttctggtatgtctttgctttcttgaaatttcccttttttgtccttactgggtaaattttgaaccaaccaaatcacaaagatgtccggctttcaatcttctaggccacgcctcttatgctctctccgccctcagcccccccttcagttcttaaagcgctgcaattcgctgctgcagccatatttcttactctctcggggctggaagcttcctgactgaagatctctctgcacttggggttctttctagaacattttctagtcccccaacaccctttatggcgtatttctttaaaaaaatcacctaaattccataaaatatttttttaaattctatactttctcctagtgtcttcttgacacgtcctccatatttttttaaagaaagtatttggaatattttgaggcaatttttaatatttaaggaatttttctttggaatcatttttggttgacatctctgttttttgtggatcagttttttactcttccactctcttttctatattttgcccatcggggctgcggatacctggttttattattttttctttgcccaacggggccgtggatacctgccttttaattcttttttattcgcccatcggggccgcggatacctgctttttatttttttttccttagcccatcggggtatcggatacctgctgattcccttcccctctgaacccccaacactctggcccatcggggtgacggatatctgctttttaaaaattttctttttttggcccatcggggcttcggatacctgctttttttttttttatttttccttgcccatcggggcctcggatacctgctttaatttttgtttttctggcccatcggggccgcggatacctgctttgatttttttttttcatcgcccatcggtgctttttatggatgaaaaaatgttggttttgtgggttgttgcactctctggaatatctacacttttttttgctgctgatcatttggtggtgtgtgagtgtacctaccgctttggcagagaatgactctgcagttaagctaagggcgtgttcagattgtggaggaaaagtggccgccattttagacttgccgcataactcggcttagggctagtcgtttgtgctaagttaaactagggaggcaagatggatgatagcaggtcaggcagaggaagtcatgtgcattgcatgagctaaacctatctgaatgaattgatttggggcttgttaggagctttgcgtgattgttgtatcgggaggcagtaagaatcatcttttatcagtacaagggactagttaaaaatggaaggttaggaaagactaaggtgcagggcttaaaatggcgattttgacattgcggcattgctcagcatggcgggctgtgctttgttaggttgtccaaaatggcggatccagttctgtcgcagtgttcaagtggcgggaaggccacatcatgatgggcgaggctttgttaagtggttagcatggtggtggacatgtgcggtcacacaggaaaagatggcggctgaaggtcttgccgcagtgtaaaacatggcgggcctctttgtctttgctgtgtgcttttcgtgttgggttttgccgcagggacaatatggcaggcgttgtcatatgtatatcatggcttttgtcacgtggacatcatggcgggcttgccgcattgttaaagatggcgggttttgccgcctagtgccacgcagagcgggagaaaaggtgggatggacagtgctggattgctgcataacccaaccaattagaaatgggggtggaattgatcacagccaattagagcagaagatggaattagactgatgacacactgtccagctactcagcgaagacctgggtgaattagcatggcacttcgcagctgtctttagccagtcaggagaaagaagtggaggggccacgtgtatgtctcccagtgggcggtacaccaggtgttttcaaggtcttttcaaggacatttagcctttccacctctgtcccctcttatttgtcccctcctgtccagtgctgcctcttgcagtgctggatatctggctgtgtggtctgaacctccctccattcctctgtattggtgcctcacctaaggctaagtatacctccccccccaccccccaacccccccaactccccacccccaccccccaccccccacctccccacccccctacccccctacccccctacccccctctggtctgccctgcactgcactgttgccatgggcagtgctccaggcctgcttggtgtggacatggtggtgagccgtggcaaggaccagaatggatcacagatgatcgttggccaacaggtggcagaagaggaattcctgccttcctcaagaggaacacctaccccttggctaatgctggggtcggattttgatttatatttatcttttggatgtcagtcatacagtctgattttgtggtttgctagtgtttgaatttaagtcttaagtgactattatagaaatgtattaagaggctttatttgtagaattcactttaattacatttaatgagtttttgttttgagttccttaaaattccttaaagtttttagcttctcattacaaattccttaacctttttttggcagtagatagtcaaagtcaaatcatttctaatgttttaaaaatgtgctggtcattttctttgaaattgacttaactattttcctttgaagagtctgtagcacagaaacagtaaaaaatttaacttcatgacctaatgtaaaaaagagtgtttgaaggtttacacaggtccaggccttgctttgttcccatccttgatgctgcactaattgactaatcacctacttatcagacaggaaacttgaattgctgtggtctggtgtcctctattcagacttattatattggagtatttcaatttttcgttgtatcctgcctgcctagcatccagttcctccccagccctgctcccagcaaacccctagtctagccccagccctactcccaccccgccccagccctgccccagccccagtcccctaaccccccagccctagccccagtcccagtcctagttcctcagtcccgcccagcttctctcgaaagtcactctaattttcattgattcagtgctcaaaataagttgtccattgcttatcctattatactgggatattccgtttacccttggcattgctgatcttcagtactgactccttgaccattttcagttaatgcatacaatcccatttgtctgtgatctcaggacaaagaatttccttactcggtacgttgaagttagggaatgtcaattgagagctttctatcagagcattattgcccacaatt

SEQ ID NO: 847 - DNA, 4037 bp, Homo sapiens
ttttcttcctaccacttatcagttactgacagagggtcaacttcactactgtgtcatatggttggtccaatgttgggttcctcagattcatggaggaaataggaaaatagtaaagattaaggagtcatagttaaaaaattacaaacaggtcacaaacagtactctttcttgattatttaggaaccaaatagccattctatgaaatgtctttctttcctttttctctcttgctcaccaattgactcgtaagcacttccgttctcttatggttgggagccatacaaggtagagtgttggagtaaaaactacattgactctgaatcatggtgtgtgacctcgggcacatgatgtaacctctataggactctattttaatgtataaaacaggaataatcctttattattatctatgcaatacatattccattatctattacatgggataatggaatgggaagtcccttgaagatggtactaacctcaatgtattactcctttctagcttctttggttcaaaagtttggtggaggagttacaaattctggtttgaatgatatatttggatactttatcaacacatcaaagctctacctatcccttcccccattctcaaaaccaagctgaattaacatctttacatttattatgcagtttatggaggattttagcattaattattgcttgatttactcaatgtccccatgttatagatgagaactggaaaacccattgaagttgtgactcctggtctagaaatgaagtctacttccagttaatgttctttctggtatgtctttgctttcttgaaatttcccttttttgtccttactgggtaaattttgaaccaaccaaatcacaaagatgtccggctttcaatcttctaggccacgcctcttatgctctctccgccctcagcccccccttcagttcttaaagcgctgcaattcgctgctgcagccatatttcttactctctcggggctggaagcttcctgactgaagatctctctgcacttggggttctttctagaacattttctagtcccccaacaccctttatggcgtatttctttaaaaaaatcacctaaattccataaaatatttttttaaattctatactttctcctagtgtcttcttgacacgtcctccatatttttttaaagaaagtatttggaatattttgaggcaatttttaatatttaaggaatttttctttggaatcatttttggttgacatctctgttttttgtggatcagttttttactcttccactctcttttctatattttgcccatcggggctgcggatacctggttttattattttttctttgcccaacggggccgtggatacctgccttttaattcttttttattcgcccatcggggccgcggatacctgctttttatttttttttccttagcccatcggggtatcggatacctgctgattcccttcccctctgaacccccaacactctggcccatcggggtgacggatatctgctttttaaaaattttctttttttggcccatcggggcttcggatacctgctttttttttttttatttttccttgcccatcggggcctcggatacctgctttaatttttgtttttctggcccatcggggccgcggatacctgctttgatttttttttttcatcgcccatcggtgctttttatggatgaaaaaatgttggttttgtgggttgttgcactctctggaatatctacacttttttttgctgctgatcatttggtggtgtgtgagtgtacctaccgctttggcagagaatgactctgcagttaagctaagggcgtgttcagattgtggaggaaaagtggccgccattttagacttgccgcataactcggcttagggctagtcgtttgtgctaagttaaactagggaggcaagatggatgatagcaggtcaggcagaggaagtcatgtgcattgcatgagctaaacctatctgaatgaattgatttggggcttgttaggagctttgcgtgattgttgtatcgggaggcagtaagaatcatcttttatcagtacaagggactagttaaaaatggaaggttaggaaagactaaggtgcagggcttaaaatggcgattttgacattgcggcattgctcagcatggcgggctgtgctttgttaggttgtccaaaatggcggatccagttctgtcgcagtgttcaagtggcgggaaggccacatcatgatgggcgaggctttgttaagtggttagcatggtggtggacatgtgcggtcacacaggaaaagatggcggctgaaggtcttgccgcagtgtaaaacatggcgggcctctttgtctttgctgtgtgcttttcgtgttgggttttgccgcagggacaatatggcaggcgttgtcatatgtatatcatggcttttgtcacgtggacatcatggcgggcttgccgcattgttaaagatggcgggttttgccgcctagtgccacgcagagcgggagaaaaggtgggatggacagtgctggattgctgcataacccaaccaattagaaatgggggtggaattgatcacagccaattagagcagaagatggaattagactgatgacacactgtccagctactcagcgaagacctgggtgaattagcatggcacttcgcagctgtctttagccagtcaggagaaagaagtggaggggccacgtgtatgtctcccagtgggcggtacaccaggtgttttcaaggtcttttcaaggacatttagcctttccacctctgtcccctcttatttgtcccctcctgtccagtgctgcctcttgcagtgctggatatctggctgtgtggtctgaacctccctccattcctctgtattggtgcctcacctaaggctaagtatacctccccccccaccccccaacccccccaactccccacccccaccccccaccccccacctccccacccccctacccccctacccccctacccccctctggtctgccctgcactgcactgttgccatgggcagtgctccaggcctgcttggtgtggacatggtggtgagccgtggcaaggaccagaatggatcacagatgatcgttggccaacaggtggcagaagaggaattcctgccttcctcaagaggaacacctaccccttggctaatgctggggtcggattttgatttatatttatcttttggatgtcagtcatacagtctgattttgtggtttgctagtgtttgaatttaagtcttaagtgactattatagaaatgtattaagaggctttatttgtagaattcactttaattacatttaatgagtttttgttttgagttccttaaaattccttaaagtttttagcttctcattacaaattccttaacctttttttggcagtagatagtcaaagtcaaatcatttctaatgttttaaaaatgtgctggtcattttctttgaaattgacttaactattttcctttgaagagtctgtagcacagaaacagtaaaaaatttaacttcatgacctaatgtaaaaaagagtgtttgaaggtttacacaggtccaggccttgctttgttcccatccttgatgctgcactaattgactaatcacctacttatcagacaggaaacttgaattgctgtggtctggtgtcctctattcagacttattatattggagtatttcaatttttcgttgtatcctgcctgcctagcatccagttcctccccagccctgctcccagcaaacccctagtctagccccagccctactcccaccccgccccagccctgccccagccccagtcccctaaccccccagccctagccccagtcccagtcctagttcctcagtcccgcccagcttctctcgaaagtcactctaattttcattgattcagtgctcaaaataagttgtccattgcttatcctattatactgggatattccgtttacccttggcattgctgatcttcagtactgactccttgaccattttcagttaatgcatacaatcccatttgtctgtgatc

SEQ ID NO: 848 - DNA, 4049 bp, Homo sapiens
gatagatttgggtcgatagttacactttccagttcagccagtgggagggtaatgtatcctttgactttctagaagttgctctataatacttaagttgccattgtctcccttctggttctctgttgtttctcgaatgacatagaagagtttatgagattaattgcttcctactgaaatagccaggtttctgagggcagctttggcttttatatgagctttttcttcctaccacttatcagttactgacagagggtcaacttcactactgtgtcatatggttggtccaatgttgggttcctcagattcatggaggaaataggaaaatagtaaagattaaggagtcatagttaaaaaattacaaacaggtcacaaacagtactctttcttgattatttaggaaccaaatagccattctatgaaatgtctttctttcctttttctctcttgctcaccaattgactcgtaagcacttccgttctcttatggttgggagccatacaaggtagagtgttggagtaaaaactacattgactctgaatcatggtgtgtgacctcgggcacatgatgtaacctctataggactctattttaatgtataaaacaggaataatcctttattattatctatgcaatacatattccattatctattacatgggataatggaatgggaagtcccttgaagatggtactaacctcaatgtattactcctttctagcttctttggttcaaaagtttggtggaggagttacaaattctggtttgaatgatatatttggatactttatcaacacatcaaagctctacctatcccttcccccattctcaaaaccaagctgaattaacatctttacatttattatgcagtttatggaggattttagcattaattattgcttgatttactcaatgtccccatgttatagatgagaactggaaaacccattgaagttgtgactcctggtctagaaatgaagtctacttccagttaatgttctttctggtatgtctttgctttcttgaaatttcccttttttgtccttactgggtaaattttgaaccaaccaaatcacaaagatgtccggctttcaatcttctaggccacgcctcttatgctctctccgccctcagcccccccttcagttcttaaagcgctgcaattcgctgctgcagccatatttcttactctctcggggctggaagcttcctgactgaagatctctctgcacttggggttctttctagaacattttctagtcccccaacaccctttatggcgtatttctttaaaaaaatcacctaaattccataaaatatttttttaaattctatactttctcctagtgtcttcttgacacgtcctccatatttttttaaagaaagtatttggaatattttgaggcaatttttaatatttaaggaatttttctttggaatcatttttggttgacatctctgttttttgtggatcagttttttactcttccactctcttttctatattttgcccatcggggctgcggatacctggttttattattttttctttgcccaacggggccgtggatacctgccttttaattcttttttattcgcccatcggggccgcggatacctgctttttatttttttttccttagcccatcggggtatcggatacctgctgattcccttcccctctgaacccccaacactctggcccatcggggtgacggatatctgctttttaaaaattttctttttttggcccatcggggcttcggatacctgctttttttttttttatttttccttgcccatcggggcctcggatacctgctttaatttttgtttttctggcccatcggggccgcggatacctgctttgatttttttttttcatcgcccatcggtgctttttatggatgaaaaaatgttggttttgtgggttgttgcactctctggaatatctacacttttttttgctgctgatcatttggtggtgtgtgagtgtacctaccgctttggcagagaatgactctgcagttaagctaagggcgtgttcagattgtggaggaaaagtggccgccattttagacttgccgcataactcggcttagggctagtcgtttgtgctaagttaaactagggaggcaagatggatgatagcaggtcaggcagaggaagtcatgtgcattgcatgagctaaacctatctgaatgaattgatttggggcttgttaggagctttgcgtgattgttgtatcgggaggcagtaagaatcatcttttatcagtacaagggactagttaaaaatggaaggttaggaaagactaaggtgcagggcttaaaatggcgattttgacattgcggcattgctcagcatggcgggctgtgctttgttaggttgtccaaaatggcggatccagttctgtcgcagtgttcaagtggcgggaaggccacatcatgatgggcgaggctttgttaagtggttagcatggtggtggacatgtgcggtcacacaggaaaagatggcggctgaaggtcttgccgcagtgtaaaacatggcgggcctctttgtctttgctgtgtgcttttcgtgttgggttttgccgcagggacaatatggcaggcgttgtcatatgtatatcatggcttttgtcacgtggacatcatggcgggcttgccgcattgttaaagatggcgggttttgccgcctagtgccacgcagagcgggagaaaaggtgggatggacagtgctggattgctgcataacccaaccaattagaaatgggggtggaattgatcacagccaattagagcagaagatggaattagactgatgacacactgtccagctactcagcgaagacctgggtgaattagcatggcacttcgcagctgtctttagccagtcaggagaaagaagtggaggggccacgtgtatgtctcccagtgggcggtacaccaggtgttttcaaggtcttttcaaggacatttagcctttccacctctgtcccctcttatttgtcccctcctgtccagtgctgcctcttgcagtgctggatatctggctgtgtggtctgaacctccctccattcctctgtattggtgcctcacctaaggctaagtatacctccccccccaccccccaacccccccaactccccacccccaccccccaccccccacctccccacccccctacccccctacccccctacccccctctggtctgccctgcactgcactgttgccatgggcagtgctccaggcctgcttggtgtggacatggtggtgagccgtggcaaggaccagaatggatcacagatgatcgttggccaacaggtggcagaagaggaattcctgccttcctcaagaggaacacctaccccttggctaatgctggggtcggattttgatttatatttatcttttggatgtcagtcatacagtctgattttgtggtttgctagtgtttgaatttaagtcttaagtgactattatagaaatgtattaagaggctttatttgtagaattcactttaattacatttaatgagtttttgttttgagttccttaaaattccttaaagtttttagcttctcattacaaattccttaacctttttttggcagtagatagtcaaagtcaaatcatttctaatgttttaaaaatgtgctggtcattttctttgaaattgacttaactattttcctttgaagagtctgtagcacagaaacagtaaaaaatttaacttcatgacctaatgtaaaaaagagtgtttgaaggtttacacaggtccaggccttgctttgttcccatccttgatgctgcactaattgactaatcacctacttatcagacaggaaacttgaattgctgtggtctggtgtcctctattcagacttattatattggagtatttcaatttttcgttgtatcctgcctgcctagcatccagttcctccccagccctgctcccagcaaacccctagtctagccccagccctactcccaccccgccccagccctgccccagccccagtcccctaaccccccagccctag

SEQ ID NO: 849 - DNA, 4032 bp, Homo sapiens
ttaaggaagaaaatttgcatactttattatttttctggaaactgaagagcaagcttacctgatagatttgggtcgatagttacactttccagttcagccagtgggagggtaatgtatcctttgactttctagaagttgctctataatacttaagttgccattgtctcccttctggttctctgttgtttctcgaatgacatagaagagtttatgagattaattgcttcctactgaaatagccaggtttctgagggcagctttggcttttatatgagctttttcttcctaccacttatcagttactgacagagggtcaacttcactactgtgtcatatggttggtccaatgttgggttcctcagattcatggaggaaataggaaaatagtaaagattaaggagtcatagttaaaaaattacaaacaggtcacaaacagtactctttcttgattatttaggaaccaaatagccattctatgaaatgtctttctttcctttttctctcttgctcaccaattgactcgtaagcacttccgttctcttatggttgggagccatacaaggtagagtgttggagtaaaaactacattgactctgaatcatggtgtgtgacctcgggcacatgatgtaacctctataggactctattttaatgtataaaacaggaataatcctttattattatctatgcaatacatattccattatctattacatgggataatggaatgggaagtcccttgaagatggtactaacctcaatgtattactcctttctagcttctttggttcaaaagtttggtggaggagttacaaattctggtttgaatgatatatttggatactttatcaacacatcaaagctctacctatcccttcccccattctcaaaaccaagctgaattaacatctttacatttattatgcagtttatggaggattttagcattaattattgcttgatttactcaatgtccccatgttatagatgagaactggaaaacccattgaagttgtgactcctggtctagaaatgaagtctacttccagttaatgttctttctggtatgtctttgctttcttgaaatttcccttttttgtccttactgggtaaattttgaaccaaccaaatcacaaagatgtccggctttcaatcttctaggccacgcctcttatgctctctccgccctcagcccccccttcagttcttaaagcgctgcaattcgctgctgcagccatatttcttactctctcggggctggaagcttcctgactgaagatctctctgcacttggggttctttctagaacattttctagtcccccaacaccctttatggcgtatttctttaaaaaaatcacctaaattccataaaatatttttttaaattctatactttctcctagtgtcttcttgacacgtcctccatatttttttaaagaaagtatttggaatattttgaggcaatttttaatatttaaggaatttttctttggaatcatttttggttgacatctctgttttttgtggatcagttttttactcttccactctcttttctatattttgcccatcggggctgcggatacctggttttattattttttctttgcccaacggggccgtggatacctgccttttaattcttttttattcgcccatcggggccgcggatacctgctttttatttttttttccttagcccatcggggtatcggatacctgctgattcccttcccctctgaacccccaacactctggcccatcggggtgacggatatctgctttttaaaaattttctttttttggcccatcggggcttcggatacctgctttttttttttttatttttccttgcccatcggggcctcggatacctgctttaatttttgtttttctggcccatcggggccgcggatacctgctttgatttttttttttcatcgcccatcggtgctttttatggatgaaaaaatgttggttttgtgggttgttgcactctctggaatatctacacttttttttgctgctgatcatttggtggtgtgtgagtgtacctaccgctttggcagagaatgactctgcagttaagctaagggcgtgttcagattgtggaggaaaagtggccgccattttagacttgccgcataactcggcttagggctagtcgtttgtgctaagttaaactagggaggcaagatggatgatagcaggtcaggcagaggaagtcatgtgcattgcatgagctaaacctatctgaatgaattgatttggggcttgttaggagctttgcgtgattgttgtatcgggaggcagtaagaatcatcttttatcagtacaagggactagttaaaaatggaaggttaggaaagactaaggtgcagggcttaaaatggcgattttgacattgcggcattgctcagcatggcgggctgtgctttgttaggttgtccaaaatggcggatccagttctgtcgcagtgttcaagtggcgggaaggccacatcatgatgggcgaggctttgttaagtggttagcatggtggtggacatgtgcggtcacacaggaaaagatggcggctgaaggtcttgccgcagtgtaaaacatggcgggcctctttgtctttgctgtgtgcttttcgtgttgggttttgccgcagggacaatatggcaggcgttgtcatatgtatatcatggcttttgtcacgtggacatcatggcgggcttgccgcattgttaaagatggcgggttttgccgcctagtgccacgcagagcgggagaaaaggtgggatggacagtgctggattgctgcataacccaaccaattagaaatgggggtggaattgatcacagccaattagagcagaagatggaattagactgatgacacactgtccagctactcagcgaagacctgggtgaattagcatggcacttcgcagctgtctttagccagtcaggagaaagaagtggaggggccacgtgtatgtctcccagtgggcggtacaccaggtgttttcaaggtcttttcaaggacatttagcctttccacctctgtcccctcttatttgtcccctcctgtccagtgctgcctcttgcagtgctggatatctggctgtgtggtctgaacctccctccattcctctgtattggtgcctcacctaaggctaagtatacctccccccccaccccccaacccccccaactccccacccccaccccccaccccccacctccccacccccctacccccctacccccctacccccctctggtctgccctgcactgcactgttgccatgggcagtgctccaggcctgcttggtgtggacatggtggtgagccgtggcaaggaccagaatggatcacagatgatcgttggccaacaggtggcagaagaggaattcctgccttcctcaagaggaacacctaccccttggctaatgctggggtcggattttgatttatatttatcttttggatgtcagtcatacagtctgattttgtggtttgctagtgtttgaatttaagtcttaagtgactattatagaaatgtattaagaggctttatttgtagaattcactttaattacatttaatgagtttttgttttgagttccttaaaattccttaaagtttttagcttctcattacaaattccttaacctttttttggcagtagatagtcaaagtcaaatcatttctaatgttttaaaaatgtgctggtcattttctttgaaattgacttaactattttcctttgaagagtctgtagcacagaaacagtaaaaaatttaacttcatgacctaatgtaaaaaagagtgtttgaaggtttacacaggtccaggccttgctttgttcccatccttgatgctgcactaattgactaatcacctacttatcagacaggaaacttgaattgctgtggtctggtgtcctctattcagacttattatattggagtatttcaatttttcgttgtatcctgcctgcctagcatccagttcctccccagccctgctcccagcaaacc

SEQ ID NO: 850 - DNA, 4052 bp, Homo sapiens
ctggattcaagtgattctcctgcctcagcctcccaagtagctgggattataggtgcctgccaccatgcccggctaatttttgtatttatagtagagacggggtttcgctatgttggccaggctggtctcaaactcctcacctcaggtgatccagccacctcggcctcccaaagtgctgggattacaagcatgagccaccgcgcccggccaaccaaatttcttaaaagtatagaacatttccacacttgtagaaacttctagtagataaagttgtattagaggtttggtaatccagtctttctgatagctgcttcataggtgtcactgtaggtagtttctctctttgttaagcattgttttctcaaaggtaccattgtattgcaccactttacaatacaataaccctcatttggaatgacaagtcagattactttttttgtttgatccaaggacacttagaagatggaaggtatttcttaaggaagaaaatttgcatactttattatttttctggaaactgaagagcaagcttacctgatagatttgggtcgatagttacactttccagttcagccagtgggagggtaatgtatcctttgactttctagaagttgctctataatacttaagttgccattgtctcccttctggttctctgttgtttctcgaatgacatagaagagtttatgagattaattgcttcctactgaaatagccaggtttctgagggcagctttggcttttatatgagctttttcttcctaccacttatcagttactgacagagggtcaacttcactactgtgtcatatggttggtccaatgttgggttcctcagattcatggaggaaataggaaaatagtaaagattaaggagtcatagttaaaaaattacaaacaggtcacaaacagtactctttcttgattatttaggaaccaaatagccattctatgaaatgtctttctttcctttttctctcttgctcaccaattgactcgtaagcacttccgttctcttatggttgggagccatacaaggtagagtgttggagtaaaaactacattgactctgaatcatggtgtgtgacctcgggcacatgatgtaacctctataggactctattttaatgtataaaacaggaataatcctttattattatctatgcaatacatattccattatctattacatgggataatggaatgggaagtcccttgaagatggtactaacctcaatgtattactcctttctagcttctttggttcaaaagtttggtggaggagttacaaattctggtttgaatgatatatttggatactttatcaacacatcaaagctctacctatcccttcccccattctcaaaaccaagctgaattaacatctttacatttattatgcagtttatggaggattttagcattaattattgcttgatttactcaatgtccccatgttatagatgagaactggaaaacccattgaagttgtgactcctggtctagaaatgaagtctacttccagttaatgttctttctggtatgtctttgctttcttgaaatttcccttttttgtccttactgggtaaattttgaaccaaccaaatcacaaagatgtccggctttcaatcttctaggccacgcctcttatgctctctccgccctcagcccccccttcagttcttaaagcgctgcaattcgctgctgcagccatatttcttactctctcggggctggaagcttcctgactgaagatctctctgcacttggggttctttctagaacattttctagtcccccaacaccctttatggcgtatttctttaaaaaaatcacctaaattccataaaatatttttttaaattctatactttctcctagtgtcttcttgacacgtcctccatatttttttaaagaaagtatttggaatattttgaggcaatttttaatatttaaggaatttttctttggaatcatttttggttgacatctctgttttttgtggatcagttttttactcttccactctcttttctatattttgcccatcggggctgcggatacctggttttattattttttctttgcccaacggggccgtggatacctgccttttaattcttttttattcgcccatcggggccgcggatacctgctttttatttttttttccttagcccatcggggtatcggatacctgctgattcccttcccctctgaacccccaacactctggcccatcggggtgacggatatctgctttttaaaaattttctttttttggcccatcggggcttcggatacctgctttttttttttttatttttccttgcccatcggggcctcggatacctgctttaatttttgtttttctggcccatcggggccgcggatacctgctttgatttttttttttcatcgcccatcggtgctttttatggatgaaaaaatgttggttttgtgggttgttgcactctctggaatatctacacttttttttgctgctgatcatttggtggtgtgtgagtgtacctaccgctttggcagagaatgactctgcagttaagctaagggcgtgttcagattgtggaggaaaagtggccgccattttagacttgccgcataactcggcttagggctagtcgtttgtgctaagttaaactagggaggcaagatggatgatagcaggtcaggcagaggaagtcatgtgcattgcatgagctaaacctatctgaatgaattgatttggggcttgttaggagctttgcgtgattgttgtatcgggaggcagtaagaatcatcttttatcagtacaagggactagttaaaaatggaaggttaggaaagactaaggtgcagggcttaaaatggcgattttgacattgcggcattgctcagcatggcgggctgtgctttgttaggttgtccaaaatggcggatccagttctgtcgcagtgttcaagtggcgggaaggccacatcatgatgggcgaggctttgttaagtggttagcatggtggtggacatgtgcggtcacacaggaaaagatggcggctgaaggtcttgccgcagtgtaaaacatggcgggcctctttgtctttgctgtgtgcttttcgtgttgggttttgccgcagggacaatatggcaggcgttgtcatatgtatatcatggcttttgtcacgtggacatcatggcgggcttgccgcattgttaaagatggcgggttttgccgcctagtgccacgcagagcgggagaaaaggtgggatggacagtgctggattgctgcataacccaaccaattagaaatgggggtggaattgatcacagccaattagagcagaagatggaattagactgatgacacactgtccagctactcagcgaagacctgggtgaattagcatggcacttcgcagctgtctttagccagtcaggagaaagaagtggaggggccacgtgtatgtctcccagtgggcggtacaccaggtgttttcaaggtcttttcaaggacatttagcctttccacctctgtcccctcttatttgtcccctcctgtccagtgctgcctcttgcagtgctggatatctggctgtgtggtctgaacctccctccattcctctgtattggtgcctcacctaaggctaagtatacctccccccccaccccccaacccccccaactccccacccccaccccccaccccccacctccccacccccctacccccctacccccctacccccctctggtctgccctgcactgcactgttgccatgggcagtgctccaggcctgcttggtgtggacatggtggtgagccgtggcaaggaccagaatggatcacagatgatcgttggccaacaggtggcagaagaggaattcctgccttcctcaagaggaacacctaccccttggctaatgctggggtcggattttgatttatatttatcttttggatgtcagtcatacagtctgattttgtggtttgctagtgtttgaatttaagtcttaagtgactattatagaaatgtattaagaggctttatttgtaga

SEQ ID NO: 851 - DNA, 51 bp, Homo sapiens
cctcacttgagcaagacaggggtaccctggtgtagggtagggaaggcagga

SEQ ID NO: 852 - DNA, 21 bp, Homo sapiens
cagggtgagagcaaggagggg

SEQ ID NO: 853 - DNA, 38 bp, Homo sapiens
atccactgaagtggtcagcctgcagcagggccagagac

SEQ ID NO: 854 - DNA, 59 bp, Homo sapiens
agtttgcaaattatgaagctcaggtttgatatttggtcggcctcactccagaggctaca

SEQ ID NO: 855 - DNA, 45 bp, Homo sapiens
cagctgtcactcatgcagacagagatggatcagaggcctggtgga

SEQ ID NO: 856 - DNA, 61 bp, Homo sapiens
agtaagcaaatcctcggtgagaagagtggtaatatggagaaatatagctgggacaagggag

SEQ ID NO: 857 - DNA, 44 bp, Homo sapiens
gccatgtaggaggtgaccatgatgatgataagtaaataatccag

SEQ ID NO: 858 - DNA, 44 bp, Homo sapiens
ctgggaagtctgtgtggaccatggacccctgggcaggaagtggg

SEQ ID NO: 859 - DNA, 66 bp, Homo sapiens
gtgagttacctggaatcctcattttactgaagaggaaactgagctttataaagtatcttatttttt

SEQ ID NO: 860 - DNA, 115 bp, Homo sapiens
gtggatggtggtgggcctggctgggaataagggcttagcaggtagaggcaccatgagaggagggagatgttaattgagtaactaactgtacaagggaactgcaggtcccacaaat

SEQ ID NO: 861 - DNA, 45 bp, Homo sapiens
atccacacagtgagtcatgcctataatcaccatctatgcttcaat

SEQ ID NO: 862 - DNA, 48 bp, Homo sapiens
tcccagtccacctaggtcaccaatctgtgtgtgcgcacgcaagtgagc

SEQ ID NO: 863 - DNA, 56 bp, Homo sapiens
caaaggaggagatattttcaggtcccaagcagtctgtctgggatgcagttctagaa

SEQ ID NO: 864 - DNA, 42 bp, Homo sapiens
gccgataccagacagaagcttccctagactcctgagggagaa

SEQ ID NO: 865 - DNA, 40 bp, Homo sapiens
atattactgggagaaatagtacaattatgcatatttatgt

SEQ ID NO: 866 - DNA, 46 bp, Homo sapiens
ttccagtaaactagaggcttactatgccagggaaaaggcagatata

SEQ ID NO: 867 - DNA, 50 bp, Homo sapiens
tctcaaatggacaccccctggtttattttcccagctcccactagctccct

SEQ ID NO: 868 - DNA, 40 bp, Homo sapiens
ttatttgcatttatttagttaaaaacagaaggtggcacag

SEQ ID NO: 869 - DNA, 55 bp, Homo sapiens
aagcaaccaattgaatcagtaaagcaatcaataagaatcccctattctgagcatg

SEQ ID NO: 870 - DNA, 26 bp, Homo sapiens
agccagagagactgaagttattttcc

SEQ ID NO: 871 - DNA, 41 bp, Homo sapiens
ggtgattactatttcctgatacttcctgaggctttgcagag

SEQ ID NO: 872 - DNA, 29 bp, Homo sapiens
aagggaggaaaggagggaacatgtacatg

SEQ ID NO: 873 - DNA, 46 bp, Homo sapiens
tccactcgagaaggttaagtgtttgaaaactacagtggattttcag

SEQ ID NO: 874 - DNA, 50 bp, Homo sapiens
tcagtgtacacctacccctgctaggaaagtgtagctcaaccagctctgag

SEQ ID NO: 875 - DNA, 52 bp, Homo sapiens
ctgaattcagggattctgaataaaacaacagatacaacagaggtattccttg

SEQ ID NO: 876 - DNA, 43 bp, Homo sapiens
gtgttttcacgtggatattgtgtttgataagtcctgtgttttc

SEQ ID NO: 877 - DNA, 33 bp, Homo sapiens
tctttagaacggcttgtgcttatcttgtattaa

SEQ ID NO: 878 - DNA, 50 bp, Homo sapiens
atgaaaaagaatgctttccatgaagtattgctagatattggagccagtta

SEQ ID NO: 879 - DNA, 66 bp, Homo sapiens
tcctcccaaagagctatggtgatgggtcctgtggcttactattctacaactgaagaaaggtcagag

SEQ ID NO: 880 - DNA, 39 bp, Homo sapiens
acgcagggaaggagtgagggtgacctgctgaatgcttgg

SEQ ID NO: 881 - DNA, 41 bp, Homo sapiens
acctcccctagatgttctgtaaaaaaaaaaaaaaaaaaaaa

SEQ ID NO: 882 - DNA, 74 bp, Homo sapiens
tgactcgtggccaacctaggaggtgtgtcccctcagcacagagtcaggactccccccagacccacaccaagatg

SEQ ID NO: 883 - DNA, 44 bp, Homo sapiens
aataatacaataaaagattatttataaaacaaagcattcagctt

SEQ ID NO: 884 - DNA, 32 bp, Homo sapiens
agttgaccctatcctaatttcagagagtttag

SEQ ID NO: 885 - DNA, 47 bp, Homo sapiens
accttagactgggtaatttataaacaacagcaattgattgctcacag

SEQ ID NO: 886 - DNA, 69 bp, Homo sapiens
gtcactgagaagcaactcccttgggggaggggtgcttttggtcatagcggttgagtcaagttatcagat

SEQ ID NO: 887 - DNA, 42 bp, Homo sapiens
ccccagattgtagaagatcagatttcatgaagaaaacctaaa

SEQ ID NO: 888 - DNA, 43 bp, Homo sapiens
tgaaaaggcttcaagaatgaatgtctaattggtggaatttcag

SEQ ID NO: 889 - DNA, 49 bp, Homo sapiens
ttaaattatatgacaattacatcagttacaatattactacaatccctag

SEQ ID NO: 890 - DNA, 46 bp, Homo sapiens
tgacattttacacaagtgaagtcatatactgtgtgatcttttgtga

SEQ ID NO: 891 - DNA, 45 bp, Homo sapiens
acctaatctctctgggtctaagtttcccaatctgtgaaataatga

SEQ ID NO: 892 - DNA, 44 bp, Homo sapiens
ttcctgcacatagggccagaaatatactaaggggaaaatggtag

SEQ ID NO: 893 - DNA, 348 bp, Homo sapiens
ggaagagaggaaggacagaaaagtggacaaagaattccaggagatggccggccgcggtggctcatgcccgtaatcccagcactttgggaggccaaggcaggcggatcacctgaggtcaggagttcgagaccagcctggccaacatggtgaaaccccatctctactaaagatacaaaaaataactgggaatggtgatgcacatttgtaatcccagctacttgggaggctgagagaggaggactgcttgaacttgggagacggagattgtagtgagctgaaatcgtgacactgcactccagtttgggcaacagagcgagattctgtctcaaaaaataaagaatgccaaga

SEQ ID NO: 894 - DNA, 37 bp, Homo sapiens
gaggaaaatatctccagtgtgggattcagaagagcaa

SEQ ID NO: 895 - DNA, 42 bp, Homo sapiens
cccagatccccttgtgttctgaaatgcctgtgatgggaaggg

SEQ ID NO: 896 - DNA, 43 bp, Homo sapiens
cactaccttaaagtattatttattgatttattatttttttata

SEQ ID NO: 897 - DNA, 45 bp, Homo sapiens
atcaagcaacagactaaggacacagctaaataaatgaacaaaaag

SEQ ID NO: 898 - DNA, 52 bp, Homo sapiens
attctcttcacacattattcagttgagggtagtcccatctaccatatctcca

SEQ ID NO: 899 - DNA, 46 bp, Homo sapiens
tcttgcagctggtaccttgggtcatttgttttgtttttgtccctta

SEQ ID NO: 900 - DNA, 44 bp, Homo sapiens
tgcttactagatgctgttacaagtgttttccatatatatgaagg

SEQ ID NO: 901 - DNA, 52 bp, Homo sapiens
catcacaggcagggatgacagcttccaagaactatgtcgtctgtgagcccag

SEQ ID NO: 902 - DNA, 450 bp, Homo sapiens
tcagaagagcaacaaacatttttttttctagaagataagtggctaatttcaaaataattattttatcaactgccacataagtttttttttttttaattcattaaaaaaaaaaaatgaggccgggcacagtggctcatgcctgtaatcccagcactttgggaggccaaggtgggtggatcacctgaggtcaggtattcaagaccagcttggtcaacatggtgaaaccccatctctactaaaaatacaaaaattagccaggagtcgtggcgcatgcctgtaatcccagctactcaggaggctgaggtgggagaatcacttgaacccaagaggcagaggttgtagtgagccgagatcgtgccactgcactccagcctgggtgacagagcaagattccctctcaaaataaataaatacatacatacatacatacatacatacatacatacataa

SEQ ID NO: 903 - DNA, 45 bp, Homo sapiens
tcaatacaaaacatttggtgtccacttgggtcagcacctccatca

SEQ ID NO: 904 - DNA, 33 bp, Homo sapiens
taacctgctgaatcctgggctgctcctgccagt

SEQ ID NO: 905 - DNA, 48 bp, Homo sapiens
acatagatttgcctaaaatataataaaagctggggcatagatgagggg

SEQ ID NO: 906 - DNA, 32 bp, Homo sapiens
tcacagtgcactgaaataataaatgaagaaat

SEQ ID NO: 907 - DNA, 46 bp, Homo sapiens
ccttagggctggatttggcaaaaagcatgtgattattttttactct

SEQ ID NO: 908 - DNA, 41 bp, Homo sapiens
gtccagagacttacccaatgttttgccatagtaaattctcc

SEQ ID NO: 909 - DNA, 60 bp, Homo sapiens
gatgtaggaatttggggctgaggaggaaaccccagggccatcttctccactggtcaccaa

SEQ ID NO: 910 - DNA, 46 bp, Homo sapiens
atgtctgtgttaattcccaacagagctgagctgcagtcaacccctg

SEQ ID NO: 911 - DNA, 44 bp, Homo sapiens
atccaagcaagtgaaattcaaggcaaaagacattaaataaggca

SEQ ID NO: 912 - DNA, 33 bp, Homo sapiens
agatgttccgagagagagagagagagagtgtgt

SEQ ID NO: 913 - DNA, 49 bp, Homo sapiens
agaactgaaccagcaacttctccaggagcaaatgttttctgagcactgg

SEQ ID NO: 914 - DNA, 24 bp, Homo sapiens
ctgagttggggctcatggggcaag

SEQ ID NO: 915 - DNA, 47 bp, Homo sapiens
ccagcagcctgcacttctatggctttgcattattgggataagccaag

SEQ ID NO: 916 - DNA, 44 bp, Homo sapiens
ggaaggcggcattcccagcaagatgagctaagacttggaggatg

SEQ ID NO: 917 - DNA, 40 bp, Homo sapiens
tcgctggtgggtgcaaactttgctggtcccccatgctctc

SEQ ID NO: 918 - DNA, 42 bp, Homo sapiens
aaggaatgaggagcacgagctctctggacaagggcaggtcag

SEQ ID NO: 919 - DNA, 42 bp, Homo sapiens
tccatcttgggctcgtggaccgaggacgaggaggaagaggag

SEQ ID NO: 920 - DNA, 48 bp, Homo sapiens
acggcggggcgccccggtcaggccgtttttttccccaaagagccccca

SEQ ID NO: 921 - DNA, 44 bp, Homo sapiens
cttctgtctccagctgttgggtggagtacctaaagctgtctctg

SEQ ID NO: 922 - DNA, 45 bp, Homo sapiens
cttgaaccaggaaatcttgggctataaataaggtaaagagaggga

SEQ ID NO: 923 - DNA, 42 bp, Homo sapiens
tactgccaggtgggtgggttcgctggggggacctgggcagag

SEQ ID NO: 924 - DNA, 50 bp, Homo sapiens
tgagaataactttacttgttttttgggaggaggttaatgggtgggagggg

SEQ ID NO: 925 - DNA, 49 bp, Homo sapiens
ccttattatccatgcaaattttcaagaaacttcatgcttgtctaaaaag

SEQ ID NO: 926 - DNA, 44 bp, Homo sapiens
cagctgggaggctcaggctgtggggctggggggctgtccgctgg

SEQ ID NO: 927 - DNA, 47 bp, Homo sapiens
ggatttggcagatgacagggaccagcagcaggacgcagcccagcgcc

SEQ ID NO: 928 - DNA, 44 bp, Homo sapiens
ctgccactgaatggaggctctccaggatggcggggccaccgggg

SEQ ID NO: 929 - DNA, 44 bp, Homo sapiens
cgttgaggaagtgaggatgggagagaaacaagggggcacctaga

SEQ ID NO: 930 - DNA, 43 bp, Homo sapiens
aagatgcaaaccagctgagctccggggctggatgtcagggcgg

SEQ ID NO: 931 - DNA, 46 bp, Homo sapiens
atcctgctgatgttctggacccccgtgaacaccgtgaagagcccag

SEQ ID NO: 932 - DNA, 45 bp, Homo sapiens
atctcacccacagtgcggttcatgaaggcacgttcgccgagggtg

SEQ ID NO: 933 - DNA, 44 bp, Homo sapiens
ctgtacacgtagggcccgcgctcccgcacctgcggcttctcgcc

SEQ ID NO: 934 - DNA, 46 bp, Homo sapiens
tgaacaggcaggggtatcaatgggaccctgggaactttctgcctga

SEQ ID NO: 935 - DNA, 45 bp, Homo sapiens
cacttgtgggccagcagagctcaaggtcatgtccaaacaggggga

SEQ ID NO: 936 - DNA, 37 bp, Homo sapiens
gcagaggccaccgggaccagctgtggagtcggccccc

SEQ ID NO: 937 - DNA, 43 bp, Homo sapiens
atctgtctccctggttgaaagggcaatggtatgcaaagttagg

SEQ ID NO: 938 - DNA, 34 bp, Homo sapiens
gacggggacggcgacagagacgacacaggcgggg

SEQ ID NO: 939 - DNA, 47 bp, Homo sapiens
gggacacccacactcccgggacacccacgcccccgggacacccacac

SEQ ID NO: 940 - DNA, 41 bp, Homo sapiens
acccacactcccgggacacccacgcccccgggacacccaca

SEQ ID NO: 941 - DNA, 107 bp, Homo sapiens
acgcccccgggacacccacactcccgggacaccctcgcctccgggacacccacactcccgggacacccactcccccgggacacccacactcccgggacaccctcgcc

SEQ ID NO: 942 - DNA, 47 bp, Homo sapiens
gggacacccactcccccgggacacccacactcccgggacacccacgc

SEQ ID NO: 943 - DNA, 47 bp, Homo sapiens
gggacacccacgcccccgggacacccacacccccgggacacccacgc

SEQ ID NO: 944 - DNA, 47 bp, Homo sapiens
gggacaccctcacctccggaacacccacactcccgggacacccacgc

SEQ ID NO: 945 - DNA, 47 bp, Homo sapiens
gggacacccacactcccgggacaccctcgcctccggaacacccacac

SEQ ID NO: 946 - DNA, 47 bp, Homo sapiens
gggacacccacgctcctgggacaccctcgcctccggaacacccacac

SEQ ID NO: 947 - DNA, 50 bp, Homo sapiens
acactcctgggacaccctcgcctccgggacacccacactcccgggacacc

SEQ ID NO: 948 - DNA, 47 bp, Homo sapiens
gggacacccacgcccccgggacacccacactcctgggacaccctcgc

SEQ ID NO: 949 - DNA, 42 bp, Homo sapiens
acacccacgcccccgggacacccacacccctgggacacccac

SEQ ID NO: 950 - DNA, 46 bp, Homo sapiens
gggacacccactcccccgggacacccacactcccgggacacccacg

SEQ ID NO: 951 - DNA, 41 bp, Homo sapiens
acccacgcccccgggacacccacacccctgggacacccacg

SEQ ID NO: 952 - DNA, 42 bp, Homo sapiens
acaccctcgcctccggaacacccacactcccgggacatccac

SEQ ID NO: 953 - DNA, 42 bp, Homo sapiens
acacccacactcccgggacaccctcgcctccggaacacccac

SEQ ID NO: 954 - DNA, 41 bp, Homo sapiens
cctgcagtccccgacacccacgctcccgggacacccacgac

SEQ ID NO: 955 - DNA, 56 bp, Homo sapiens
agtgtgaggtgacccgtgagtgtgaagtgtgccctgtgtgaggtgtcctgtgggtg

SEQ ID NO: 956 - DNA, 56 bp, Homo sapiens
tgcccctctgtccagcgcctgtctgcctctgcctctcatcttttctattccatctc

SEQ ID NO: 957 - DNA, 51 bp, Homo sapiens
gctgggtgttgggagagaggccgcgggtggacggggtaaggactgggactg

SEQ ID NO: 958 - DNA, 63 bp, Homo sapiens
gagaaagaggtgggctgagacttccaggatgtatgtatctatggaagaaagggtgggaagtgg

SEQ ID NO: 959 - DNA, 37 bp, Homo sapiens
gaaacaaatccacaaataccataacctctgtcacaag

SEQ ID NO: 960 - DNA, 42 bp, Homo sapiens
ggtgcaggtcgaagtgcgggaagtaggtcttggtctgcgggt

SEQ ID NO: 961 - DNA, 42 bp, Homo sapiens
cactcagactttattcaaagaccaggaagggccggtgcaagg

SEQ ID NO: 962 - DNA, 45 bp, Homo sapiens
accttaccccaggcggccttgacgttggtcttgtcggcaggagac

SEQ ID NO: 963 - DNA, 42 bp, Homo sapiens
cgtggcccttaacctgggcagagccgtggctcaggtcgaagt

SEQ ID NO: 964 - DNA, 43 bp, Homo sapiens
cactcagactttattcaaagaccacgggggtacgggtgcagga

SEQ ID NO: 965 - DNA, 45 bp, Homo sapiens
gccgtgggctctgacttgtgaggagccggggctcaggtccaggtg

SEQ ID NO: 966 - DNA, 42 bp, Homo sapiens
ttattaaatccagatggcgcgcccctaaaggcgcccccaggt

SEQ ID NO: 967 - DNA, 49 bp, Homo sapiens
ataaggccttataaaaattacacaccaggcttgaagaatgaggctagga

SEQ ID NO: 968 - DNA, 45 bp, Homo sapiens
tcttgtgctagatataccactctgctggtgggggtgggacacggg

SEQ ID NO: 969 - DNA, 54 bp, Homo sapiens
aatctagtattcaacaatattctagatacaacataccacaacatttagaggaaa

SEQ ID NO: 970 - DNA, 76 bp, Homo sapiens
cagggtaaagaacagagtggatttgaagaggcaaaggcaagatgtccagcatgtagttatgttagtcagcacgaac

SEQ ID NO: 971 - DNA, 44 bp, Homo sapiens
gtaaggcagaatctcatttcaagcatttctagaggtgggaaaag

SEQ ID NO: 972 - DNA, 40 bp, Homo sapiens
acatcaactgtcaaaaattcacctaggagtacaccaggat

SEQ ID NO: 973 - DNA, 43 bp, Homo sapiens
tgaagtcagttggtatttaatcccaaagtgttgttctgattat

SEQ ID NO: 974 - DNA, 46 bp, Homo sapiens
agtacttcttcctgggattcagttattcaaaacaagacaggcagaa

SEQ ID NO: 975 - DNA, 39 bp, Homo sapiens
aatttcaagtatttctttttgtggaagaatcatgaaata

SEQ ID NO: 976 - DNA, 61 bp, Homo sapiens
aggttttccttacctctgaatgtttatcatgctactatattgatgcaacaaccatataggg

SEQ ID NO: 977 - DNA, 46 bp, Homo sapiens
ttagaaaggttaaggttggcagtgatactaagctggctctgcagtg

SEQ ID NO: 978 - DNA, 65 bp, Homo sapiens
caaagatgatgaaaataaagagtaccttgatgagggaacagctgcatgaaaactgctgatttaga

SEQ ID NO: 979 - DNA, 46 bp, Homo sapiens
tggcgccttccgtgcccgaggccccccggggccgggagcgctgggt

SEQ ID NO: 980 - DNA, 59 bp, Homo sapiens
tttgcagacaggtagactgtgtcacagagcggttaaggcacacaatcaaggtcatacag

SEQ ID NO: 981 - DNA, 51 bp, Homo sapiens
cagcttgtagaccacgaacctggaggtcggagaatgcacagaaataggaga

SEQ ID NO: 982 - DNA, 41 bp, Homo sapiens
tcccaaacaactcaggaaggagggggacgtggcgggaccgg

SEQ ID NO: 983 - DNA, 43 bp, Homo sapiens
ccgggccgccagcatatgcgcccagagtctcgggcggcggcgg

SEQ ID NO: 984 - DNA, 59 bp, Homo sapiens
gtcccccagacacactcatcatttcccgctgatatctggaagattgtctgtgagcctag

SEQ ID NO: 985 - DNA, 41 bp, Homo sapiens
gtggcctatgggctcctggcccgagagctggagcgggtgga

SEQ ID NO: 986 - DNA, 48 bp, Homo sapiens
agaagtacctgccccagctgggtgagtggctgcccatggggcctggtg

SEQ ID NO: 987 - DNA, 42 bp, Homo sapiens
ccctcttccgtggtgtctcggaggtgttcagctgcttcaaga

SEQ ID NO: 988 - DNA, 42 bp, Homo sapiens
ctcttccgtggtgtctcggaggtgttcagctgcttcaagatg

SEQ ID NO: 989 - DNA, 41 bp, Homo sapiens
tcttccgtggtgtctcggaggtgttcagctgcttcaagatg

SEQ ID NO: 990 - DNA, 46 bp, Homo sapiens
tcagctgcttcaagatgaagctgaacatctccttcccagccactgg

SEQ ID NO: 991 - DNA, 23 bp, Homo sapiens
tgccagaaactcattgaagtgga

SEQ ID NO: 992 - DNA, 41 bp, Homo sapiens
aagcgtatggccacagaagttgctgttgacgctctgggtga

SEQ ID NO: 993 - DNA, 41 bp, Homo sapiens
gcgtatggccacagaagttgctgttgacgctctgggtgaag

SEQ ID NO: 994 - DNA, 45 bp, Homo sapiens
tgtcttgacccatggccgtgtccacttgctactgagtaaggggca

SEQ ID NO: 995 - DNA, 62 bp, Homo sapiens
ttgctactgagtaaggggcattcctattacagaccaaggagaactggagaaagaaagagaag

SEQ ID NO: 996 - DNA, 48 bp, Homo sapiens
tgctactgagtaaggggcattcctattacagaccaaggagaactggag

SEQ ID NO: 997 - DNA, 48 bp, Homo sapiens
ctactgagtaaggggcattcctattacagaccaaggagaactggagaa

SEQ ID NO: 998 - DNA, 46 bp, Homo sapiens
actgagtaaggggcattcctattacagaccaaggagaactggagaa

SEQ ID NO: 999 - DNA, 45 bp, Homo sapiens
cattcctattacagaccaaggagaactggagaaagaaagagaaga

SEQ ID NO: 1000 - DNA, 26 bp, Homo sapiens
attacagaccaaggagaactggagaa

SEQ ID NO: 1001 - DNA, 46 bp, Homo sapiens
gtggatgccaatctgagtgttctcaacttggttattgtaaaaaaaa

SEQ ID NO: 1002 - DNA, 44 bp, Homo sapiens
ctgagactatgatgcctcgtcacctggggcccagtacagctagc

SEQ ID NO: 1003 - DNA, 49 bp, Homo sapiens
tgagactatgatgcctcgtcacctggggcccagtacagctagcagaatc

SEQ ID NO: 1004 - DNA, 44 bp, Homo sapiens
gagactatgatgcctcgtcacctggggcccagtacagctagcag

SEQ ID NO: 1005 - DNA, 45 bp, Homo sapiens
gagactatgatgcctcgtcacctggggcccagtacagctagcaga

SEQ ID NO: 1006 - DNA, 50 bp, Homo sapiens
cgtaaacttttcagtctctctaaagaaaatgatgtctgccagtatgttgt

SEQ ID NO: 1007 - DNA, 61 bp, Homo sapiens
taaacttttcagtctctctaaagaaaatgatgtctgccagtatgttgtaaaaaagccctta

SEQ ID NO: 1008 - DNA, 47 bp, Homo sapiens
aaagaaaatgatgtctgccagtatgttgtaaaaaagcccttaaacaa

SEQ ID NO: 1009 - DNA, 42 bp, Homo sapiens
ttgtaaaaaagcccttaaacaaagaaggtaagaaacctagga

SEQ ID NO: 1010 - DNA, 114 bp, Homo sapiens
agcgccttgtcactccacatgtcctgcagcacaaacagcggcgtattgctctgaagcagccgcatattaagaaaaataaagaagaggctgcagaatatgctaaacttttggcca

SEQ ID NO: 1011 - DNA, 150 bp, Homo sapiens
cgccttgtcactccacatgtcctgcagcacaaacagcggcgtattgctctgaagcagccgcatattaagaaaaataaagaagaggctgcagaatatgctaaacttttggccaagagaatgaaggaggctaagaagcaccagggacaaatc

SEQ ID NO: 1012 - DNA, 63 bp, Homo sapiens
tgcagcacaaacagcggcgtattgctctgaagcagccgcatattaagaaaaataaagaagagg

SEQ ID NO: 1013 - DNA, 48 bp, Homo sapiens
gcagcacaaacagcggcgtattgctctgaagcagccgcatattaagaa

SEQ ID NO: 1014 - DNA, 127 bp, Homo sapiens
gcagcacaaacagcggcgtattgctctgaagcagccgcatattaagaaaaataaagaagaggctgcagaatatgctaaacttttggccaagagaatgaaggaggctaagaagcaccagggacaaatc

SEQ ID NO: 1015 - DNA, 86 bp, Homo sapiens
agcacaaacagcggcgtattgctctgaagcagccgcatattaagaaaaataaagaagaggctgcagaatatgctaaacttttggcc

SEQ ID NO: 1016 - DNA, 50 bp, Homo sapiens
aagaaaaataaagaagaggctgcagaatatgctaaacttttggccaagag

SEQ ID NO: 1017 - DNA, 93 bp, Homo sapiens
ctgcagaatatgctaaacttttggccaagagaatgaaggaggctaagaagcaccagggacaaatcgtgaagagacgcagactgtcctctctgc

SEQ ID NO: 1018 - DNA, 44 bp, Homo sapiens
ttttggccaagagaatgaaggaggctaagaagcaccagggacaa

SEQ ID NO: 1019 - DNA, 133 bp, Homo sapiens
agagaatgaaggaggctaagaagcaccagggacaaatcgtgaagagacgcagactgtcctctctgcgagcttccacttctaagtctgaatccagtcagaaataagattttttgagtaacaaataagatcagat

SEQ ID NO: 1020 - DNA, 44 bp, Homo sapiens
agaatgaaggaggctaagaagcaccagggacaaatcgtgaagag

SEQ ID NO: 1021 - DNA, 95 bp, Homo sapiens
gtgaagagacgcagactgtcctctctgcgagcttccacttctaagtctgaatccagtcagaaataagattttttgagtaacaaataagatcagat

SEQ ID NO: 1022 - DNA, 96 bp, Homo sapiens
gtgaagagacgcagactgtcctctctgcgagcttccacttctaagtctgaatccagtcagaaataagattttttgagtaacaaataagatcagatt

SEQ ID NO: 1023 - DNA, 65 bp, Homo sapiens
gagcttccacttctaagtctgaatccagtcagaaataagattttttgagtaacaaataagatcag

SEQ ID NO: 1024 - DNA, 28 bp, Homo sapiens
aaataagatcagattcgcaaaaaaaaaa

SEQ ID NO: 1025 - DNA, 43 bp, Homo sapiens
ggtgggcaggtggtgaacaggggcaaaggggcactggtcagac

SEQ ID NO: 1026 - DNA, 26 bp, Homo sapiens
ctctgagggaccagatgtccgggcca

SEQ ID NO: 1027 - DNA, 22 bp, Homo sapiens
tctagtgaggggtggagaggta

SEQ ID NO: 1028 - DNA, 43 bp, Homo sapiens
aaaccacctgtaagcaaaatatgaacattcatctgtctctggt

SEQ ID NO: 1029 - DNA, 33 bp, Homo sapiens
cccacatggccagtcccctcttctggaggtagg

SEQ ID NO: 1030 - DNA, 54 bp, Homo sapiens
aaaggcagcggggcggggggattaggttaggaggtggggcagtttagagggaag

SEQ ID NO: 1031 - DNA, 51 bp, Homo sapiens
aaaggcagcggggcggggggattaggttaggaggtggggcagtttagaggg

SEQ ID NO: 1032 - DNA, 41 bp, Homo sapiens
cggtgattcaggaaggccccaagggccagtgtcaggggcag

SEQ ID NO: 1033 - DNA, 43 bp, Homo sapiens
cctggggaaggacgtccttcacctccgctggggctgagtagga

SEQ ID NO: 1034 - DNA, 86 bp, Homo sapiens
agttcccagcgctggccgctctgccactcggtctgctggcgcagctcgggctccggctctgtctccaccgcttgctccaccttggc

SEQ ID NO: 1035 - DNA, 42 bp, Homo sapiens
cccaggcactcagcaccaacctgaatccttgctggagggctt

SEQ ID NO: 1036 - DNA, 69 bp, Homo sapiens
actagaatctgtcccagtgaccttgctatgctgggtagggtaaatttttatggtgactatattaaggag

SEQ ID NO: 1037 - DNA, 61 bp, Homo sapiens
actccagcaagaaggatggctagaatgagggcagagtaagaacaggaaaagaaaaaaaaaa

SEQ ID NO: 1038 - DNA, 47 bp, Homo sapiens
tgagtctggcaaagcaaaaacttgaagcccacttttaggggttggaa

SEQ ID NO: 1039 - DNA, 49 bp, Homo sapiens
gaattgcaaatctgaacatccccgggagcccagtttaaagcctaaggga

SEQ ID NO: 1040 - DNA, 42 bp, Homo sapiens
tttagaaaagagacactttcctagctgggtgggtgtagtgga

SEQ ID NO: 1041 - DNA, 41 bp, Homo sapiens
cacagtgacgttagtgaaggaattgactatcatcccgatct

SEQ ID NO: 1042 - DNA, 1204 bp, Homo sapiens
agcatccctttactataaaatatataagtattatttgtttctctataaaatttctagaagataacattggaaaagcccttctagactttggcctaggcaaagatttcatgaccaagaacccaaaagcaaatgcaataaaaacaaagataaataggtgagacttaattaaactaaagaggtttttcacagcataaggaacagtcagcgagtaaacagacaacccacaggatgggagaaaatcttcacaatctacacatctgacaaaggactaatatccggaatctacaataaactcagaaagtgagctaaggacatgaatagacaattctcagaagaagatacacaaatggccaacaaacatatgaaaaaaatgctcaacatcactaatgatcagggaaatacaaatcaaaaccacaatgtgataccaccttaatcttgcaagaatggctataataaaaaaatcaaaacataatagatgttggcatggatgtagtgaaaaggaacacttctacactgttggtgggaatgtaaactagtacaacaactatggaaaacagtatggaaattccttaaagaactgaacatagaactaccatttgatccagcaatcccactactgggtatctacccagaggaaaagaagtcgttatacaaaagagatacttgcacacgcatgtttatagcagcacaatttacaattgcaaaactgtggaactagcccaaatgcccatcaatcaacaagtggataaagaaactgtgatatatatataacatatatgtatatatatacacagatacatataattacatatatatatggcagaatactactcagcaataaaaggaatgaattaatggcattcacagcaacctggatgggattggagactgttattctaagtaaagtaactcaggaatggaaaaccaaatattgcatgttctcactcataagtgggagctaagctatgaggatgcaaaggcataagaatgatacaatggactttggggactcagcggaaaagggtacgaaggcagtgaaggataaaagaccagagcttggattcagtgtatactgcttgggtgatgggtgcaccaaaatctcacaaatcaccactaaaggacttactcatgtaactaaataccacctgtttcccaaaaaaattatggaaataaaaaaaaatttaaggtattacttgtttccaca

SEQ ID NO: 1043 - DNA, 62 bp, Homo sapiens
tgcatcaatcttgtataatcccccaagaagaagtaacacctttctccctgtgtttccgtaac

SEQ ID NO: 1044 - DNA, 42 bp, Homo sapiens
ctcagtttgtattctttgctcgccttcaggtatgtgatccag

SEQ ID NO: 1045 - DNA, 30 bp, Homo sapiens
tgtgattgttgtgatgactttccttacaaa

SEQ ID NO: 1046 - DNA, 40 bp, Homo sapiens
ctttgaaatcacctactcaacagagtcttgcctggccaaa

SEQ ID NO: 1047 - DNA, 23 bp, Homo sapiens
aacctcaaggtaaggtgagtcaa

SEQ ID NO: 1048 - DNA, 50 bp, Homo sapiens
gtgatatgtaaattataccctcaaaaggctgttttttaaaaaaagacagg

SEQ ID NO: 1049 - DNA, 45 bp, Homo sapiens
tttaactttctcagagttttactttgagagatattttacctttgt

SEQ ID NO: 1050 - DNA, 52 bp, Homo sapiens
aagacatgataggcatgcttgagatatggcaagtagtatagtttagttgtaa

SEQ ID NO: 1051 - DNA, 87 bp, Homo sapiens
gggtctcatgagacgacccaagagcgtactgcatacttggataggattaagaaaagaaagaaaacagaacggtgcccagcagcattt

SEQ ID NO: 1052 - DNA, 46 bp, Homo sapiens
ttttttgagggtgatggagggaggttattgcaatcttttggcagtg

SEQ ID NO: 1053 - DNA, 39 bp, Homo sapiens
tcatagaattagctcattcttttcatcatgcaagagcac

SEQ ID NO: 1054 - DNA, 41 bp, Homo sapiens
gagaggtttatcagtcacggagaagaaggaatatgaagtgg

SEQ ID NO: 1055 - DNA, 52 bp, Homo sapiens
cttgcaccccatgttgcctctatctctcccattttaccctaggcctggcatg

SEQ ID NO: 1056 - DNA, 46 bp, Homo sapiens
cacctgtgcttataattgtgaaaacaatatttattcacatctagag

SEQ ID NO: 1057 - DNA, 48 bp, Homo sapiens
ggagagttgaagcaaactcaggggagtttggacctggcagactggccc

SEQ ID NO: 1058 - DNA, 40 bp, Homo sapiens
tgaagctatttcaattccaggagtcagttatcacacttaa

SEQ ID NO: 1059 - DNA, 30 bp, Homo sapiens
aactgtaatgaaagagacaatatatctttt

SEQ ID NO: 1060 - DNA, 25 bp, Homo sapiens
ttttaaactctctttggggactgtg

SEQ ID NO: 1061 - DNA, 24 bp, Homo sapiens
catttactccctaaacccaagtga

SEQ ID NO: 1062 - DNA, 53 bp, Homo sapiens
gttcttatcaggaaagaaggtgaggaagatgaccttagggttgcctaagtgat

SEQ ID NO: 1063 - DNA, 50 bp, Homo sapiens
ggagagatggcaaaggagtggagggtcatgtggtccagcttgacagagat

SEQ ID NO: 1064 - DNA, 24 bp, Homo sapiens
actttttgatgcctattcaggttt

SEQ ID NO: 1065 - DNA, 45 bp, Homo sapiens
aatagtgattagtaaaggagcccaagaatgcacaaagacaagaga

SEQ ID NO: 1066 - DNA, 46 bp, Homo sapiens
aatcttttgatgacattgcatacattcgaaagaccctagccttaga

SEQ ID NO: 1067 - DNA, 21 bp, Homo sapiens
tccaaaaaaatagatttatcc

SEQ ID NO: 1068 - DNA, 39 bp, Homo sapiens
tcaatttgcacatgatggtcttgtctctgtcattcttta

SEQ ID NO: 1069 - DNA, 45 bp, Homo sapiens
acgaattgacattgctacactttctcctcagacctttattaagtt

SEQ ID NO: 1070 - DNA, 42 bp, Homo sapiens
gtagggcggtgatacccagctccttgcacctctgggccacat

SEQ ID NO: 1071 - DNA, 47 bp, Homo sapiens
tgctaacttctgccttggggcaagttaaatcttttccttgtgcctcc

SEQ ID NO: 1072 - DNA, 55 bp, Homo sapiens
gcaggcaatgacttcacaaaaggatttctcaaaggttagtcctgcaacagaagac

SEQ ID NO: 1073 - DNA, 40 bp, Homo sapiens
attgaccttcagcactctcaagatcccccagcctccacgc

SEQ ID NO: 1074 - DNA, 49 bp, Homo sapiens
agaagtgagatcagcccagttcacaggtgatccacagaaagagaggaca

SEQ ID NO: 1075 - DNA, 26 bp, Homo sapiens
accctcagctcagtctgtacccctct

SEQ ID NO: 1076 - DNA, 66 bp, Homo sapiens
ttggtttttttaaaaaaatgctttttccttagtgcaaatcatcccagctctgtgggaaagtggcat

SEQ ID NO: 1077 - DNA, 35 bp, Homo sapiens
ttaacaaaatacagtgcgtctagtcttgagggctg

SEQ ID NO: 1078 - DNA, 41 bp, Homo sapiens
gtgcgcggcttccgattggtcttgtgtttcctcagggtgca

SEQ ID NO: 1079 - DNA, 24 bp, Homo sapiens
ccaggcttgtaaaagccctgttgc

SEQ ID NO: 1080 - DNA, 90 bp, Homo sapiens
atgaactctactcatctttagagatgaatcatctattaagcacttaccaaaacatatcattaaactgagtgctgggagtgagttggtaat

SEQ ID NO: 1081 - DNA, 47 bp, Homo sapiens
ttatgacatagtgaatatagaactatgcagtatttaagcctcaacaa

SEQ ID NO: 1082 - DNA, 42 bp, Homo sapiens
gcagtgaaaaagctgatcagaagcagggccccaaaagctggt

SEQ ID NO: 1083 - DNA, 44 bp, Homo sapiens
acaggaagcagcagtgagagagaaaaaaggaagaggttagagga

SEQ ID NO: 1084 - DNA, 41 bp, Homo sapiens
gaccatgctactcctcagctcagaaacttccagcggctgcc

SEQ ID NO: 1085 - DNA, 45 bp, Homo sapiens
aacagaacacttgagtctgtcagctatagttaaaagcacagggtc

SEQ ID NO: 1086 - DNA, 52 bp, Homo sapiens
cctctctgaccacatccctactcccaaacctgcttactctgctccaaccagc

SEQ ID NO: 1087 - DNA, 39 bp, Homo sapiens
ccagaaaggagaaatacaaataagcctggcgatgagagg

SEQ ID NO: 1088 - DNA, 47 bp, Homo sapiens
ccacaccgggggccctcatcccgggaagctcggcggtgcagggccag

SEQ ID NO: 1089 - DNA, 45 bp, Homo sapiens
ctcccctgtgtacagcttcagctttccccggaggaaattggagta

SEQ ID NO: 1090 - DNA, 45 bp, Homo sapiens
aagaagtaaaccaggtatattacctgacttaggtcataaatgttg

SEQ ID NO: 1091 - DNA, 46 bp, Homo sapiens
cagaaaagtaggcgccggtttgctgttctctccagtgatcccggag

SEQ ID NO: 1092 - DNA, 42 bp, Homo sapiens
ttgtgtaggttttgccgcagcccgcgtaatcacaagtgtggg

SEQ ID NO: 1093 - DNA, 45 bp, Homo sapiens
cggctgcatctgatcgggcaggaaggatgggtaattgggccccgg

SEQ ID NO: 1094 - DNA, 47 bp, Homo sapiens
cctttgctgacgctgatgaccgacgggctgccgtactcgctgccagg

SEQ ID NO: 1095 - DNA, 44 bp, Homo sapiens
gccacgaagccgcccgaggggctcacgtcgttgatgtccgccag

SEQ ID NO: 1096 - DNA, 46 bp, Homo sapiens
tagaggaggcctccgcccgtgccgcccggcgccacgcccgggtcgt

SEQ ID NO: 1097 - DNA, 41 bp, Homo sapiens
gaagaggaggctgacgctgacgaggacacggtggcggccac

SEQ ID NO: 1098 - DNA, 35 bp, Homo sapiens
aagagaagaaacgaagccaaaacccaaaaccccaa

SEQ ID NO: 1099 - DNA, 134 bp, Homo sapiens
aaaaaagcacttggattatctgtgaattctatatgaataatatagaatatattaacatatattaatatgaatgtaatatatataattatatatagaatatatataattctatagcatctgtgaatgctatagct

SEQ ID NO: 1100 - DNA, 59 bp, Homo sapiens
ttcttttgaagcttgggcccattactacattagcactattactggtgactttaggttca

SEQ ID NO: 1101 - DNA, 53 bp, Homo sapiens
ggaaggacatttgaagacacagtgagaaagcggccattggcaagcaaggaaga

SEQ ID NO: 1102 - DNA, 43 bp, Homo sapiens
agctacgaagtagtacttacagtattctaaagagccagagact

SEQ ID NO: 1103 - DNA, 41 bp, Homo sapiens
cctggggagacaattttatagtgtacactggaaacacaaaa

SEQ ID NO: 1104 - DNA, 42 bp, Homo sapiens
aggtgggcaagaatggttcttgtccccagaatctgacaataa

SEQ ID NO: 1105 - DNA, 26 bp, Homo sapiens
accaaggaaagtgcaactgagaattg

SEQ ID NO: 1106 - DNA, 49 bp, Homo sapiens
gccttgtctggtcaacattacccagcaaagaggcaaaaggggcagggca

SEQ ID NO: 1107 - DNA, 41 bp, Homo sapiens
tagtctgtaaaaaggggccaagggcacacaaggggcagaga

SEQ ID NO: 1108 - DNA, 42 bp, Homo sapiens
aaaaccattgataactgccattgtgcctattaacagtcccag

SEQ ID NO: 1109 - DNA, 40 bp, Homo sapiens
tgagattatgagtagttaacacttctcagcagcaatccaa

SEQ ID NO: 1110 - DNA, 46 bp, Homo sapiens
aggggcattaggtaaccagcaccctcttgatgtaaagcaaagatga

SEQ ID NO: 1111 - DNA, 49 bp, Homo sapiens
taactgaaaatggtcaaggagtcagtactgaagatcagcaatgccaagg

SEQ ID NO: 1112 - DNA, 34 bp, Homo sapiens
aatcaatgaaaattagagtgactttcgagagaag

SEQ ID NO: 1113 - DNA, 65 bp, Homo sapiens
tttctgtgctacagactcttcaaaggaaaatagttaagtcaatttcaaagaaaatgaccagcaca

SEQ ID NO: 1114 - DNA, 62 bp, Homo sapiens
ccttgccacggctcaccaccatgtccacaccaagcaggcctggagcactgcccatggcaaca

SEQ ID NO: 1115 - DNA, 34 bp, Homo sapiens
taccgcccactgggagacatacacgtggcccctc

SEQ ID NO: 1116 - DNA, 28 bp, Homo sapiens
tggctaaagacagctgcgaagtgccatg

SEQ ID NO: 1117 - DNA, 50 bp, Homo sapiens
ttccatcttctgctctaattggctgtgatcaattccacccccatttctaa

SEQ ID NO: 1118 - DNA, 75 bp, Homo sapiens
ctgcgtggcactaggcggcaaaacccgccatctttaacaatgcggcaagcccgccatgatgtccacgtgacaaaa

SEQ ID NO: 1119 - DNA, 79 bp, Homo sapiens
aaagcacacagcaaagacaaagaggcccgccatgttttacactgcggcaagaccttcagccgccatcttttcctgtgtg

SEQ ID NO: 1120 - DNA, 103 bp, Homo sapiens
accgcacatgtccaccaccatgctaaccacttaacaaagcctcgcccatcatgatgtggccttcccgccacttgaacactgcgacagaactggatccgccatt

SEQ ID NO: 1121 - DNA, 38 bp, Homo sapiens
caatgccgcaatgtcaaaatcgccattttaagccctgc

SEQ ID NO: 1122 - DNA, 55 bp, Homo sapiens
atgattcttactgcctcccgatacaacaatcacgcaaagctcctaacaagcccca

SEQ ID NO: 1123 - DNA, 43 bp, Homo sapiens
aatggcggccacttttcctccacaatctgaacacgcccttagc

SEQ ID NO: 1124 - DNA, 55 bp, Homo sapiens
tcaccccgatgggccagagtgttgggggttcagaggggaagggaatcagcaggta

SEQ ID NO: 1125 - DNA, 66 bp, Homo sapiens
ggaaaaaaaaataaaaagcaggtatccgcggccccgatgggcgaataaaaaagaattaaaaggcag

SEQ ID NO: 1126 - DNA, 52 bp, Homo sapiens
aagagtaaaaaactgatccacaaaaaacagagatgtcaaccaaaaatgattc

SEQ ID NO: 1127 - DNA, 49 bp, Homo sapiens
gagagagtaagaaatatggctgcagcagcgaattgcagcgctttaagaa

SEQ ID NO: 1128 - DNA, 18 bp, Homo sapiens
acgagtcaattggtgagc

SEQ ID NO: 1129 - DNA, 4051 bp, Homo sapiens
agtagagacagggtttcaccgtgttggccaggctggtctcgaactcctgacctcaagtgatccacctgcctcagcttcccaaagtgataggattacaggtgtaagccactgcacctggccgtcaaaggtagttttagcccagtgtggggatcccaagactgcccataaagacacgtggaccagtgcatactgagtggtggtaagggctgatgggccaggtgggagcaaaggctcgggaaggcagcacttccctgaggaagcttcctgaaacaatggagctgctagggcttgggccattggtgctttctttctccttcagcaggatggctggttaccctctcttggatgagtgatggtccaccagagagtgtgtgcacggctagcgggtgtcagtaccctatgccctggtatcctgtgtcagtcataactgactccaaagcttcctccacagtctagggctgttctcctctgcagtaagatgcagaggagaaaggctgtttacctttcagctccagaaaactcaccatccctccacacagggaacactcccctctcaccccctctatcatggagatattaaggagctggagggaaaggaataggagacttccctttctccagcagttggacacaggaagttgctgacacaggtctggtgacctgacatgctgctatttctatagatatctatgcagtgtccaagttgtagttgctcaataaatcatgggtcaaacgtccacttgccacaagcagctaatctattagacctttctctcaattatttatctgctctgacacatatgaaaggatgacatcttctgtgtaacaccctcctgtgggtgcatcaggattatgcacctcagcatagataaggtgggttatgtgctgttcctcccaccaaccagcttagtgacttatattctgagctcttaataagtgtttgttaaataaatgagtaattgtaactctgctcttttctaggttataaagcatatcagaacgtgaatgagcacggcaatatgctgataatcttaaactgttagctttggcatgcaaactcttaataataaggaattatctacaatagtttacaatgtgtgggtacaggataaggataatcctattcaagattactgccattgttggtttgtcatataacatatggtcttttttcaaactcaaaagcatacaatattctaaaaacaaagatgggtcctcaagtcagttggtctcctaaccattcctacattggagtggactcttagtaaataggccacaggtcccggatctgttgagataagtggtgaaatattgaggcagtggtagcagccctccctcatcccagccaggctctgcatgcatcctgatcagatgccccatccagagacttgggcgagtcttcgaccacaggaaattaggccaatatagaggagtttcttatcagcatgatggccttctccatctgctgctggagaatgaggcccagccaccacctgcctctgccccaggggatgacggagcagcaggactcttccaagtgtcaatggagaacacaggatccaggtggatccacagaaggcaacaaggggcacgccccaccatctgcttacttggacttgagatgctgaatggtgcccatacatcgaaaggcgccctttaccatgatggccagccgggtacacagtgcctcacattcttccatgctgtggggcaggagagaggaggtgagcaggagaggattcccacccaccttccccagccctgggaatctcttgcctgtgggatgtgaggaccacagccctcccttctctgatgatgctcacgatgacgttccacagcatgcggcgtgcctgggggtccatccctgtggtgggctcatcctggggggtggagagaaggttgggggcacaggctgggagctggcccttctgattactgcttccccctgggctggctcccctgtggaggatgagctgacagaaggcgcacacagtcactcccctcacttgagcaagacaggggtaccctggtgtagggtagggaaggcaggaggtggatccaagagtaaagaagcgtggcgtccatcctgggcccatttcagcccacgaggggattaaagtggattaaggcaatgacagaattctcctcaaaaaaagaaaatcctgcaaatacatttgtcagaaggcagggaggtcactcaggtcacttccttggttcccgctatgtcctgtgccctcatgatccttgggctgcgtgggcatggcctcaggcctggcctggctcagctcaggagcctttgacccagctcagtgctcctgtatggggaccagacaccgacaggccgcagagtgggctgaacttcccggctgtgagccgatggccccacaggagacatcctgggaacgcaggatgtgcgcagtcccaagtcaaggctgtgccgtgacttgtttttctccggagctgtgtgaaccaaacactgggctgatcgctcaaaatgagcaacacaggaaacagtccagactaaagccaaactgctgcagtttctaaatctgccgacccagaacctatttccccaacccaagagacccagcacttggtttaagcccttggtgcggcccaagcccgcagttaccagcagcaccagcggtgggcagccaatgagtgcgatggctgtggagagtttccgcttgttgcccccactgtacgtgccagccaggcagtcggcgtagacagtcaggcccaggctcttaatactccagtttgcaacctagggaagagaaagaaatgccatttggagaagacaagcaaacaccccaaacctcccccagttcaaagccttgggctcccagatctcacgcctccagaatgaaatccccagctaggctgaaacaggctcctgctggctcctgtcctctggcatgtgcttcaggcgccagacaggggctctttctctctgtgtcttggatcccagggtggcccagcctgctcagcatctgttgggtgtagccgcctgggaaatggacttcagccttacaaagagcaagacagtgggtctcgcccagcgtcctggaccatggctagcagtggaggaggaaggctctgtttgagaagatggtgagtcccagacctgttgatcccacccgtcaagagggttacacccaaagccttgtgcatccgacacatacctatggagcactgaccatacgccaggcactgaaccaggcactggagaacaatgtgaacacagccattgctgctatcctcagactgcggggaggtggcagtcaaaataaacagaatactggcagatcgtgacagtgctgtgagggaacgatgacagagacaccaggtgtgtgtgcacatgcgcaggaggggatctagggaagccactggagacaagctcaccatgcttctgccttctatactagtcccccgtgcctggaatgttcctccctaggtgtgcacgtggctccttctctcacctctagttcttcattcaggttctctcctctgcaggctctccctgggccaccctacctcaaaatgcaaaccctgccccagcagttcctccctgcgttacttttccctgaggacttttcactctctaatgtactggatattttacctatttatctacagatcgtctatccctcccactagaatgtaatctccatttttaactttttatttggaaatagtttcaaactcacacaaacatataggaataaaaatagttcatagaattattaactaataaaacccttctctctctcacacacaattttttgtgacccatttgagggtaaattactcatcacagcccttcactcctaaatacttcagggcatatttcctaagaatagagatcttctcttacataaccacagtacattatcaatgtcagtaaacttaatgttatgatacatttacctaatctactgttcatagttcagttttgtcagttggtccaataatatccttctatcattttttttctcttctgcacaagatgtagtctattgtctgctattcagtcattatgcctgtttag

SEQ ID NO: 1130 - DNA, 4021 bp, Homo sapiens
aattagtgggagctaccctaccatataatcccaattctgtgtcttaagcctatagtttctttctagcgtccagctcagttttaccttctggatgtcagactgtgcctcacttggacacagttgtaacttgatgtctcataaatgtgctcatggaaaattctatgatatctttcccctgccatggtatgatatctctaccctgccatgactccttttgtcaccatgaggaagtcacctgcgtggtcacttgcaggtgaagctggatctgttgagatggactcagccatgacctggcttcacccctgcctgtcccttttctgtaaacccagtagggctggctatggaggccaaagaatcaaattcatcctgtctgagccagtgaagcgtgctcaggactcgtcctgcccactgggcattgggccatgctgaggatggctttcaggagagaggaagaggccccagtcaagcagatgctggacagatgtcagcagcacctaactccacttataaaccagggcagaggcttcctctgggcacctctattgtgtgtgctgaagttttactgttcaagcttttcctgcagccaggaaagaggcagatgagtgagagctcatcctctctgtcctgcccataggggaccagtctgtttaaacacattttattacagagagcagcagtcaccctccagaatccaagggcacacgccagttttccctctatgctccttggtctggcaaagccaaatatcagcctacaaatagccaatgcaggttaggctaccccaaaggcccatgcatgagcccctatctagaaactcaacccagaggaaggattcttcattcatcacaggggttcttaacctgggattcaagagctcctgcaggatcataaatgtgacctggggctcagtaaactccctgaaacgttttgtaaaaatgtgtggagggaggtaatgggaagcaatggtgcatttttataggaataggctacaaatattcatcagatgcttaaaaggttccgtgacctctaagagattaagaaccacacacttagtgcttcccaggtctttccaagaatccatcccaacagaggaatctcttaactatcacaattcagttcacttttccattgggtctatgtgttgggctttttgggccatgctctctgggaggcctccttctctgtacagatctttcagggcctcagagccaccctactatagggtctgatgatcacccttcctattcttctcacaggacctgtgagagactccctgagacaggaggagcaggatactcacctcttgcctgctacggtggcatcccctgaggtcactgtggtgtccccagtgagcatcttgaatgtggttgttttgccggcaccattcactcccaggaggccaaagcactaggagaaaacacagagctagcctggccctagagatcaagaaggtctaaaatgtcaggccccagggtaagtgtgtgtgtgagctgggggaggaattttagacctgggctgccatcagaggccacgagccatatgtggctactaagcacttgaaacacatctaagtcccagttgacacgggccctgagtgtaaagattcaaagacttaaaaacaacgagaaattgtcaaatatttcattaataaggttttctattaattacattttgaaataatattttggttatattgagtaaaataaaaaatactaatgaaattaattttacctattttctttttacttttctcatgtggctagtggaagatttaaaattacatatgtgacttgcattatggcattatgttcctattgaatagctctgccttatggggaggagaggcaggcacaagagctgatgttcggaagcctttcacacgtggtctgcagagtacccacctctccagggcgaactccgacacacagcctgtccactgctgggctggaggtgcctggataaatctgcaagatacgaagaaaccggactgagaactgagacagggtgagagcaaggaggggaagagggaacaaagagcaaaggatggtttaggagaaaactaccagcactaggaggttacatattgacatgggcaggcacagaggtgtggtgagtactgagacatctcgaggctgacccatgctctgcagaaacagaacacagaaaagggaatgatgctcagctggagtgattctcactgaggccctgtgtcagtgcccgagatgaatagcagggaacacacattggaattagatgctcttggaagacgagttataacacagggatgatgaccctacataaaactgggaaccaaattgcttgcataagcatatcaattgttctatagaaggaaaatggcaacatcatgccaactgtggatctaaccagcacctccaaactcatacccattcccttaccttggttagttcatgtagccttaagatgtcagttttatttccaccagtaataattctttgtctttcttcagccacatcatcatcttcatcaacaatgggctccttagtgggctcggcaatcctagatgaagaaaaggggtcaggattgggctggctgtacagtgtccttggcactgtcctttccatgggacctctcttccacttccttgcttctgcttccttctgggcttccatcctttaagacttaaattctaaaaagggctcccagcaggagaggcattaggcattaggtagagaggtcaggtgctcatgtccagagtcagccttgggttccagtcctggcctcctcatgtgtgatcttgggcattggacctctctgaaccttgcctacttcaaccatgtgatgaggaggagggtaacaatacctgtctcataggattgtgctgaagatgaactcagcacagtgcctggcacagagtaaagactcagggcctgggatcaccgtcaggactaaaatgcttcctctacagcaagcactcagtaaggggtagttactaacctccgagcctcccacttcctccagtctgccctgccaactccacctttccaaaacagagttgtcatcaggccacctcatgcctcaaaaccttctgttgttccccatcagctgtaggttgaagccctccctctgcagctgtagttacagccctgcaatccagccccacctacccttctcacttacctcttgcactaactcctctgtcagcaattggcatctccccctggttcccagtcctattggtcattcccgtctcccagcctccgcatgtgtttccagtccctcaatgttctcctcctcctgccccaccaaatggaatcttccccattcttaaagacacagcctcttctttgaaaccctccctgaccttctggaagccagggactatggtgtacttctctggtcctctttaggccctaaagcaggcaggactcattcaaatgtgttgacatcagagtttgaagctaatgagtcaatttgggtagtcaacctcctgacctgctctctcccacacaaaagcctctaaaaggtatggccaaggctgcagaaagggtctgcaggggctgagggtgccaaggacaacaattcctgacactgtctcccataactagaactgcttgtgtatcctgtttcatcaggcgtgtgttgacacctgtgatctcattcacctctcacagtcctgtgagtagaaaggcagattcatttccaataaatcaattccctgtggatcaaaacataaaaccaagtccttggaatctatttacaggtgaccacactcagcctgagaggaggaaaagttaagaaacaaaacactattggggaaagcttgctaggaagggctgctgcttggcaattcaggcccctgggtgaggacaataaaggtaggactggattgcagaggggagtgaggcaggggcccacccagcttcaggaagagcctgcggaagaatggcaattgccagctaacctggcatttgagaagccctggtcaaaagtcagggttggcagctacccaccttcctccaggagtggggggtcgtgatca

SEQ ID NO: 1131 - DNA, 4038 bp, Homo sapiens
aagagagaaataaatgagaaggggcatcttgctgagaagttactttcaaatgactaagaaaaaaaggtttcaactgtacttgtgacttttccataagtctgtaactgttgcaaaattttaaagtaaagaaaaatagatgacacatataagaatttaaaacatcatatatgtgctaagtgaattacataagcaataattgtttgttccttcattcaactttttttttgccactggctaatggtggtcctaagttccaaaatgatggatcgcggaggtgagattccaggccagctttaaaattctggagcatcagaaagcctgctaacatgatgcctaccatcttctaccccttcattggactgccagctagtatcacctcccacctcagatgtccactctatcctagctacatctctctccataggctcagagatccctgtaagcgcacacgcgcgtgcgtgcacacatacacacacacagaaacacgtgggccagccccaagtgtgtaaattctatttcttatcttttaaaaaaagtaaaattaaaagcctccgcacttttctaagtaacttttcggtaccggtgggcctagctccttttatattagcatcacagggccaatgtggtacctgcagttgatgctcttatccaaagaaaggctttcaggttctgacctcctccccgtgcatttatgagtgtttcctcgtgtagacagaagagagaggaaataatttagttgctactgataatctctggttttgtattgttaagtgatagctgcttactaagctgagtaagatagaaatcatatcttcaggaattccaatattcaccatcattttaaaaaaccatggatgagaaggtcatttgtgttggtctccatcagttggtatatcttatcatcacatgaaatggaggctcatgttggtcttaaaatgttgagattttactactcaagacacctagaataaattggggttgatgtcataatgatccctgttacattataactaggcctttactaccaattcctttgaccctgcagcctgtaatagggtacgctatcctgacccctccctacccccaccaaccttggttgtcaggaaggtggtagtgtgctattgatttaataaatattttttcttcatttttccctgtagcggtggttaatctaataagtgaaggtcttattattttggccactggctggggttgccagatttggcaaataaaaatctaggatgcctagtgaaatttgagtttcagataaacaaccaggttttttttttttttttttttttttttagtgtagatatgtcctgtgcaatatttgaagtagcatatgcttatactaaaaattattcatcatctgaaattaaatttaactgggtgtcctgtatttatctggtgaccctaccacagggaaagttttacctttacccttttgaaggtggggcaggatttgagaaggggacttggggtgaaagaccccttcatattaccttctcagcgccagactgatgccaggaaggccagactcatgcctgcggtgcagtgattatttgatgggtcagaagacccctcagtgcaggacatagagagcccccgttcaccagttgttaagctgcaccccacagcctttcctagcttcgggctcctagttctgtgcctttctgagaagatgtcaagggacagcagatacacaaggcccttggcccagtgcctttcagcagccctggcaccgtgagaacccctcccctcttggtctggtccttcagagcacacacaagctccaccttgggcccacggaggggagggaggcgctgtaaactgacacttacgatgtcccagaggaagttggtcacccagtaggtggtggggctcactccactgataaactggaggtgcttggatttgttcacccgctcctggatcaaataaaggacaaagctggctgggacgaaggacatggagaaaatcacgcagatggcaaccacagcatccactgaagtggtcagcctgcagcagggccagagacacagggagagggcgatgaagagggaagagcagaaggaggagaagatacaaagtcaggctttgggaaggccttacacccgcccaggtgtggcctccaggttcctcttctctaccttgaagctgtcactccactaaactgtcttaatccatatggaccaaggttaaatgggtatttgcgggttgcctttctatttcatgtgaatatttctagacaacctttctttttattatattctctaattatttttatggtgtatagaaatagatgtttatattaatcttatgtactgcaatgctctcattagctctaataatctgtctatagagtctcttgaattttctatgttgacagacatacggtctgtgagatttatcttttgttaataatcatcttgttaaatcacattttcaagaagtacatcgtaacacaaggaaatgttcatgatgtaaatttaagtgaaaagagggcaggcaagttgtacagggacttggctctatttattctttcctcggacaaatagaaggcatctggctgaggggtaagttggggctaaagccagcctgaactttatgtacaagccataacccctggcatgggacagtgtccacctgcagaaaagagcatttttactaatttccacaaaggtatcctatgtggtagtcactaccttgataaaactacagatcatatcatccatacacgtagtaagcttagaacaaatgactggaaggagacacacgaaagtgtggctgagtgagaattaacagaggacagtctagggccctagggtgtccagaggaagacaccaaggagccaaggcccaggttttagtggatgaccctgggcatgttcactggcactcagcgtgtgctaggatagtaaaatcaggaccccacaacgttgctgaagtttgcactaacaaaggtgctcctaccaacccctcctccatgtaggcctcaaatagagtgaacatactacaaaacgcacaaggccactgtctccactggctgaaactgtgcaagaagagcctcagcttgagggtagcaaagctctgtcgacatctccaaagtatgctcttctgaggaaattcctggaatctaagataattactccgagggagctgaaaggtttactgaactttgccagttcctggcagctgctttgcacatagcaaagataataattgtataagctccaggagcaacttgctatcaaaagccaaaagggaatggaaccaaatgtaaacttacttgccacataaatgttggggagaaagaatgaccaagaggtctggtatgtgaagtgtgaggcacttatttgaaagtcggatgttcatatgtgcctgactaaacagcattaccatccaaatcagcacttcgcggtggtgagaatcctctcaggatgttcaaagagtggagaaggtgacaagaaagtggtgaggctggggctgtggtggcttacactgtaatctctgagagctgctccttggtcaggttcaggggttggctaatgacggtgattccatactcctcggggctcctgtccttaggcaggctggcccgtaagatggcgttgtgggccacattgagaaagctgaccagggcatgccagcctttgttattaaaccacacctagagggtggagaggacatctgagacgctgcactaacagctagttaaagcagaaatcagtgaaggaaaggaaatttgagaagcaggaagggtttggtagctggaagacattccttgctagatttcagcaggaggagggatggaatttaatgaaggtaggaaagtaaaaataaaataaccagctcaggtaaatttttagctccagagcagattatacataggtcaagtaccttaatgttgtcttcagtttctagatgtttaaggaaatcaggtatttctttagaggcctctctagtgatagggccctaaaaaccatgtaaacaaacaaacaagacggttttaatttttttttcctgttatcactcatga

SEQ ID NO: 1132 - DNA, 4059 bp, Homo sapiens
aaaaagtaatgaactaagagttaggggactgaggtttgaatatggattcttacaagatacataaatttggggaagtgactcaatctgcctaaatctgagttttctcagacttcttatctgtaaaatgaaggcatggtggctcatgcctgtaatcccagcactttgggaggccaagccaggaggattgattgaccccaggagtttcagatcagcctgtacaacatagggagaccctgtctctacaaacaactagaaaagaaattagccaggcacggtggcgtgtgcctgtagtcccagctacttgggaggctgaggtgggaggaccccttgggcccaggaggtcaaggctgcagtgagctatgatcgagccgctgtattccagcctgggtgacagagcaaaactctatctcaaaaaaaaaaaaaagaaaaaaaaaaagaacatttcacaggattggtttggaaatttaaatgagataacacatgggagcatgctctagaaaccattgcaagttgtcggttatgttgaagctacagtttatagtcactgattaatgctcatttgctgaacaactattgctggacatggagagcctagaggactgttggttggtccccagctgctttcttaaccctcctcaagtcccccaggacaaggacagttgtaaagggaattggatcagctcagtcatcctttcaactacatttacctatgacgtgccaggcctgggatgcgaaggctgggtggcagccccagccctggcacctgcactcagaggggcgaagttctgcaggttctcggtgccagagccccagttctgcaggctccttctcctgatccgggctcagatttgatgtcttctatggctggccctccctctgggaggatccctactgcccctcctctttgctggctgatatcatctcaaacctctgagctttgatctctccctgaaggctccatcctgactggagcccactgacctggccagagctaagggttccaggcctattcagaatcgccagtttgtccctagctatctgctgctttctagttactgactatgagtcaccccttcagaagtggcattgacccttgttggaggctgcacaaatgtttcttatgattaggcataattgaaatctgtcagtaacaacatgaacccgtgatcatttaagcagctgacccaatcattacctcctgctccttcctcctgttacccaataaataatgaagggctgcagaagcttagggagctgcctttactcattagaagcagggagcccttttcttcttctcttcttctctcttcttcttcccgatgctagcctttccttaaaacagttactttggtttttttgttatcatttccatgttgatcccttcgttcagtcttgtaatgatgttctcaggcagtaacagtagtaactgctgtaatgatggtttcacgtagtaaccgtggcagtcagccacagaccctctccatgccacgcattgtgtgaccccaatgcacagctacaggttcatttaaacactggagacaagatcagaaaatgtcatcctctgagactgagctaactcaaaacaaatgtacttagccatctgaaaagtggctgagagtgtggcattgagcatcctagattacagagctaagaccagagagtgagacccagtggcctgggtgactttaggcaaaccctccaacctctgtgagctcagttccccccagatggggcagacccctgccctgcctgcttcataagattacagtgataatcaaataagacaatggatgttaagtgctttgaggtaagagatggtttgtaaacatttagtttagagttgctaagtcttaatcagtgatcgtatactgtgttataagtcggcaagcattaactcacttaattctctcaacaatgctacaggtagatgctattattatctccattttgcagatggggaaacaggtacaaagaggctatgtacttacccaaagccagttagtttgcaaattatgaagctcaggtttgatatttggtcggcctcactccagaggctacactcttacccactccccttgactgtatctttggaacatcctgttctatgcctatgctgactaaacagtcctctgatgtgtaatttattctcctgagagggcctatttatcaagaaggaatattctgcacaggtaaaaggccctaactcttgaatccagcaaagcttctgatataaattagcatattttcattctggtcttggttaatatgagtctttgacattgggtgagctgagattattcaatttctgtgtcagcagagcttgaaagaaacttgggttctgtggtgaattgctgctgtcccctggagaggactgcttcctgccccacacccactgtgccaggacgactacatcttttggtcaccatgcgatgtactgggatgggctgaagcatatctgggctggtatatgtgtccattggtagttctaggcatagtagatagatgtttgggatcattatgaagaaagatgaaaaccaagttatcttaagagctgattccagaatccacatagaaaggaaacactccaacaggaaaacactgaaatatgccacactggaaagaaggaggtaactggtggtttaggaggtgttaggagcccaggggcagcaaaggagaatcgctgcaaagctttgcctgtaccaggagaggattttacagtgtgggtggacacctcgtgttctatcagaagtggtttctgtttgtgtggcaggtaacccttccacacatctatctccccaccctccaccctctgctgtaaactctgctacactcacacatgctttgtgtggctgtgggtttgataaaagttcatggaaggagctagttggtgcccaggctgacacatgtagaagagagacttctagaatccacaggaattttggtccccatgttttcaaagcccatagaccactaaataagggttcaaaatgattttatgttgatctcaaaggggccaggagactgacgtctgagttgtatttgataaacattaaggactctgccagctgtcactcatgcagacagagatggatcagaggcctggtggagatgacaggaggagatgaggatgatgacatggcaggccgagagactggggatacagcatgaggagctgagggatgaagctaccaacctgacctccgtaagaatcctcattcatccaaagtgtccccatctagacctaactcagtctgttattcctttgtcactcaaagccatctaggatgcaaaatgcctactactggggagtcagatactatggaggagtatttgcctgctttgttgtttcatgactttttccttagacttttttttttttttgagatggattttgctcttgtcgctcaggctgcagtgcagtggcacaatctctgctcactgcaacctctgcctcccaggttcaagtgattctcctgcctcagcctcccgagtagctggaattacaggtgcgcgccaccacacctagctaatttttgtatttttagtacagatggggtttcaccatgttggccaggctggtctcgaactcaggtggtccatctgccttggcctcccaaattgctgggattacaggcatgagccactgtgcccagccccttagactttcgagatggaacttgggagggaggcaaggaagggaacaagccactggctccagcaccatacccgcaaacagaggtcctgaatcagaatcctccgtgaccttcagaaaaatctgtcaagaagaaaaaaagagagaattttgtttagtcattcttattctcagaaaaatctaacccaagctctgttttgttgggtattgcttcataatgggaagaaaatccattacgactctatctgagaacatcatcttctataaatacaaaaacgtaagcacacagtaaccacaagtacataaaatttgtatgcatgcagagatgggggaactatgccaaaaataaagatagttgctatgcttgggtggggaacgatggctttttgcttttacaaaactttgct

SEQ ID NO: 1133 - DNA, 4045 bp, Homo sapiens
tgagtcaccccttcagaagtggcattgacccttgttggaggctgcacaaatgtttcttatgattaggcataattgaaatctgtcagtaacaacatgaacccgtgatcatttaagcagctgacccaatcattacctcctgctccttcctcctgttacccaataaataatgaagggctgcagaagcttagggagctgcctttactcattagaagcagggagcccttttcttcttctcttcttctctcttcttcttcccgatgctagcctttccttaaaacagttactttggtttttttgttatcatttccatgttgatcccttcgttcagtcttgtaatgatgttctcaggcagtaacagtagtaactgctgtaatgatggtttcacgtagtaaccgtggcagtcagccacagaccctctccatgccacgcattgtgtgaccccaatgcacagctacaggttcatttaaacactggagacaagatcagaaaatgtcatcctctgagactgagctaactcaaaacaaatgtacttagccatctgaaaagtggctgagagtgtggcattgagcatcctagattacagagctaagaccagagagtgagacccagtggcctgggtgactttaggcaaaccctccaacctctgtgagctcagttccccccagatggggcagacccctgccctgcctgcttcataagattacagtgataatcaaataagacaatggatgttaagtgctttgaggtaagagatggtttgtaaacatttagtttagagttgctaagtcttaatcagtgatcgtatactgtgttataagtcggcaagcattaactcacttaattctctcaacaatgctacaggtagatgctattattatctccattttgcagatggggaaacaggtacaaagaggctatgtacttacccaaagccagttagtttgcaaattatgaagctcaggtttgatatttggtcggcctcactccagaggctacactcttacccactccccttgactgtatctttggaacatcctgttctatgcctatgctgactaaacagtcctctgatgtgtaatttattctcctgagagggcctatttatcaagaaggaatattctgcacaggtaaaaggccctaactcttgaatccagcaaagcttctgatataaattagcatattttcattctggtcttggttaatatgagtctttgacattgggtgagctgagattattcaatttctgtgtcagcagagcttgaaagaaacttgggttctgtggtgaattgctgctgtcccctggagaggactgcttcctgccccacacccactgtgccaggacgactacatcttttggtcaccatgcgatgtactgggatgggctgaagcatatctgggctggtatatgtgtccattggtagttctaggcatagtagatagatgtttgggatcattatgaagaaagatgaaaaccaagttatcttaagagctgattccagaatccacatagaaaggaaacactccaacaggaaaacactgaaatatgccacactggaaagaaggaggtaactggtggtttaggaggtgttaggagcccaggggcagcaaaggagaatcgctgcaaagctttgcctgtaccaggagaggattttacagtgtgggtggacacctcgtgttctatcagaagtggtttctgtttgtgtggcaggtaacccttccacacatctatctccccaccctccaccctctgctgtaaactctgctacactcacacatgctttgtgtggctgtgggtttgataaaagttcatggaaggagctagttggtgcccaggctgacacatgtagaagagagacttctagaatccacaggaattttggtccccatgttttcaaagcccatagaccactaaataagggttcaaaatgattttatgttgatctcaaaggggccaggagactgacgtctgagttgtatttgataaacattaaggactctgccagctgtcactcatgcagacagagatggatcagaggcctggtggagatgacaggaggagatgaggatgatgacatggcaggccgagagactggggatacagcatgaggagctgagggatgaagctaccaacctgacctccgtaagaatcctcattcatccaaagtgtccccatctagacctaactcagtctgttattcctttgtcactcaaagccatctaggatgcaaaatgcctactactggggagtcagatactatggaggagtatttgcctgctttgttgtttcatgactttttccttagacttttttttttttttgagatggattttgctcttgtcgctcaggctgcagtgcagtggcacaatctctgctcactgcaacctctgcctcccaggttcaagtgattctcctgcctcagcctcccgagtagctggaattacaggtgcgcgccaccacacctagctaatttttgtatttttagtacagatggggtttcaccatgttggccaggctggtctcgaactcaggtggtccatctgccttggcctcccaaattgctgggattacaggcatgagccactgtgcccagccccttagactttcgagatggaacttgggagggaggcaaggaagggaacaagccactggctccagcaccatacccgcaaacagaggtcctgaatcagaatcctccgtgaccttcagaaaaatctgtcaagaagaaaaaaagagagaattttgtttagtcattcttattctcagaaaaatctaacccaagctctgttttgttgggtattgcttcataatgggaagaaaatccattacgactctatctgagaacatcatcttctataaatacaaaaacgtaagcacacagtaaccacaagtacataaaatttgtatgcatgcagagatgggggaactatgccaaaaataaagatagttgctatgcttgggtggggaacgatggctttttgcttttacaaaactttgctctaatgttagactttttcaaagaaccgccacttctggcacttgacagaaaccagctggaatctctactttacctcttccaggggagtgtcagaaattccaaaactgctgagaccaaggtcagccagcgtctcctccagctctctgaaaaggctggcatatgctctgtgcttgaagttcttatttggaagaaggaagataagttcttgaccaatgcactccaccagctttgcctctggaacatggtggagaactacatccatcagctcatttacatcccctaggacaagaaaaaagactgatgccagctctgttttccagaaactggaagactgtgaggttacccagatttcctacttctctccacttcccctttgaagaagaggtattttgtatctcggcagtgactctttcagaggactgatgctccatcaagtctgcttttagcttagttggccctgagatcatcattgagaggcagagggaaacggaagcaaagtcctcccgactagctagctgtgcaacctgggggcggaggttggtgggggggtcatgcaactttcctgtgccagttcctcctctgttcaacgaaatgctctgtcccctcaaactatgttatgttgggtgggtcacattagactttcctcatctgtgaaaaggggaaaatactggtatccacttcattgttgtttttgaggactggatgagtcaaactacacaaagcagttagagaaatacctggcacataggtgagtgctggctgctattattatcctttacatcatctcggtaagaaatctcttactcatggttgtttttcattctcattcactgaaaacttgagggctaagtcaaagttgttttcatttttctggtctgtcaccagctatgggggacttgcccaagacacaaacctggaaccggtgaccaagctgagtgagaagtaccttccctaaatcacacacacatgcctactctaacttctcagaagattgcacagtttctcttgggattgcacctgcctccacaaacaaaactgaatcctcaggt

SEQ ID NO: 1134 - DNA, 4061 bp, Homo sapiens
cacagaaaaagagcagtgccttttatccaatgcaacagcacccagatgccctcgaggtagaggggagggccaaaagagggtccccattgtctctcagtgtaaggtcagctcaggagggtgaaggcagtctttcccttgacggccagggggagttcagagtgtctctctgcaaacaagagagtctctagctatacagtcacaaaaaacatgaaacaattctcagcccagccctaatccacagttgctagacctatagcttcctagtgatctatgtacccaagaagatggcctcaaattccatctgcctactcaaggattaccaaaatagcccaactctgcccacagatgagtcataaggatttcttgccacttatccattgtgatcattttagaaaattgggtactacaaatggcagcaattgatttcttatttaacctaagaaatgaaaggcagatgccctgacacctctggagcctaataagtgtgagtcgtgagaacaagtcagactttctgtcttttcccagtgagggcaggtggttgtcccttcttgactctacagcacagagacagggagactccggaggacaaggggaactgcaccctccagggccagaggctgattagagggtggaaatggcccatttgaaaacaattagagaaaagacagtgctctttgtctgggtctgggaattgtgaactaggaagtttctcaggccatcagaagtcagcttcgggagtcctctcctggccagcgagcctgactctgtggacagtctcatttctgcacttctttctgcaaacattggtagagcatgttaaagatacttgtggaaatactccaattcaagtttttttgaagcaaaacaaaaacctttaattaatggaaacatctctttagacagatagtaaagtggcaagctccctcccttctgattcttctcaaagagtaggaaaggaaaactagtgaaatgggctgctggctctctcttgtgagtaaataaagggacccatgagttgaactggttttttaatgactttccagggcagatgaatcaagcaggcgtggtgaggagtcactgttgcatcgctcggggtgaggactgctcccacttttgcccctgtacattttagcctcacgtgaactttttaaccttaggtcaaaggcaaagtggaccccctcagagggcaggctgggcctccaggactgctacggacccttccaaggaaacgtgttgtaggacaggggccagcccaagggcctcaccacagccttcttcagctcagcggtcatgcggtcctgccaggcgaagcacaggatgtgtggcaggtagagggtgaaatagatgacaccactacaggctgctgccagactggccttggagaagaaggtgctgagcagaaagcacagcatgatggtggcagtggagaaagccaacaagaacaggaagaggatgaatgggtcgctgtaatgtaggattcttccatgctgaaaccaagaggccatgcgtcagtaactcctgcccttggccggacgccttctcattctgccctaaagggctctctcccaccagcctgcagttagtgtctaaatttctacgcacactccatgtgctgagttcctttaatcctaggaatgccattttccctgggaggagtagcacattagactcctaacagtcatcagtaatgttaaaaaaattaattgggagaccattaggttgaaacggccccagcattctgtgttcctacatcagcaaaccaaaacccaacttagagaaacttaactaatcacaaactgcccactaacctgtaatcagggactttccacttgaaccaatcaaatatttgctttgtttttctttgtcttgcttccctacccctcagtggggccctgaaccacttgtgatctggagcctcctgtgaatcactgtttgctggaatcaactctaacattttaatgtgcctaagtttctcttttaatagtatttattatgtgttaagtaagcaaatcctcggtgagaagagtggtaatatggagaaatatagctgggacaagggaggaagacctgggtagggggtcttggagcatctccagggccctggataaaccaggtatatggaaaacaaaagagggagatgggagggaactccagaggagcttcaacattttgcctggggcctggcctgtcctatgccgtcatctatacttgattttctgaggtttgctacccacacaggtgaaaataccagtaattaatccaaatcacttggaagtggattgatcctccccatccatgaatatcacacaaatatatttcctagaacctgctggcagtactcagtaactttcacattaaccaatgaatcaatcactttggctatgtagaaaataggaccaaactagcaacttttgctaggggaactgctatccaattacactataggataaactgagattgtcaaaggtattagaccttcttggttatcttttgctggaggcatcctatgaggcactttactctctgaacacgtaaatgagtacatagaattcatcctgtgctcttcccaggaacataaaggaacaaataggtccatgtcctaaatgagttctgatcagttggcagtagttccctggagctctggcttcctctcatagaaaagagaccaatgagctgtatctgtgatgggcatgcgagagctgagtggaacgaatgtgccatttgtctgctgtggctgccatttctcctttctgctctcctgcctgtgggtactgacagaacagactgaagaacagataaaacaaatggcaaaggggagcggggcacagaagagacccacgcttaactggaacccaaatttgaggaaatctaaataaaagtctaaattaggactcagagctcctgattttgtgtgtcacccacacgcagctccataaaagcaagtccatggctgaacatgtgggttttggatggaatcactttaaggtagttgttgcagttctcagaagaatgaaatcaatttcttttttatttatttatttttttagacagagtcttgctctgttgcccaggctagagtgcagtgatatgatatcagctcactgagacctccacctcctgggttcaagggattctccttgctcagtctcctgagtagccgggactacaggcatgtgccaccgcacctggctaatttttgtatttttaggagaggcagggtttcgccatgttggccagactgctctggaactcctgacctgaagtgatccacctgcctctgtctcccaaagtattagggttacaggcgtgagccaccacgcccagcctgaaatcaatttcttatccttgctcaaaacaaagtcccataaacttttaggacttctaggaccacaaacttctaggacttttcactgacttaagccagaggtgtaattcactctgtgaccctacagtttcaccagctgtggcttcctcagatggccacttttctttttgtttctaatagctcgagtaacaaagggaccttcccattgtccctgcttccagcttctttcctgtgttgttgaggtggggaggaagagacaagggaaaggtgggagagtcattcaaaggaaaaccctgttttggtatggaaagccctgtttccgtcatcactggaacaatgttctagttcccacaaagagaaacccttttgtgcatgaaactcctggtgaacattctttacctcacatcgtaaaagctttgaagacctaatggcccattcttaggagggcagatctcaatgctgcttatcaacaagccaggcaaaatctcatggctgttgctagtcagatgtttacacatttttactcctttaattctgaggacacaaacatgttggtactgggaaaagaagcagactgagggatgggaaagaacaagggaaacctagataaggacaaggggctcagctcctcccctcatctcttagaactttggtgccctttgcaaatgtaagcccacatccaggtggggtcaggttgtttgagcagaatgacctctaccttagcatttgtcttgtt

SEQ ID NO: 1135 - DNA, 4044 bp, Homo sapiens
aacgaatgtgccatttgtctgctgtggctgccatttctcctttctgctctcctgcctgtgggtactgacagaacagactgaagaacagataaaacaaatggcaaaggggagcggggcacagaagagacccacgcttaactggaacccaaatttgaggaaatctaaataaaagtctaaattaggactcagagctcctgattttgtgtgtcacccacacgcagctccataaaagcaagtccatggctgaacatgtgggttttggatggaatcactttaaggtagttgttgcagttctcagaagaatgaaatcaatttcttttttatttatttatttttttagacagagtcttgctctgttgcccaggctagagtgcagtgatatgatatcagctcactgagacctccacctcctgggttcaagggattctccttgctcagtctcctgagtagccgggactacaggcatgtgccaccgcacctggctaatttttgtatttttaggagaggcagggtttcgccatgttggccagactgctctggaactcctgacctgaagtgatccacctgcctctgtctcccaaagtattagggttacaggcgtgagccaccacgcccagcctgaaatcaatttcttatccttgctcaaaacaaagtcccataaacttttaggacttctaggaccacaaacttctaggacttttcactgacttaagccagaggtgtaattcactctgtgaccctacagtttcaccagctgtggcttcctcagatggccacttttctttttgtttctaatagctcgagtaacaaagggaccttcccattgtccctgcttccagcttctttcctgtgttgttgaggtggggaggaagagacaagggaaaggtgggagagtcattcaaaggaaaaccctgttttggtatggaaagccctgtttccgtcatcactggaacaatgttctagttcccacaaagagaaacccttttgtgcatgaaactcctggtgaacattctttacctcacatcgtaaaagctttgaagacctaatggcccattcttaggagggcagatctcaatgctgcttatcaacaagccaggcaaaatctcatggctgttgctagtcagatgtttacacatttttactcctttaattctgaggacacaaacatgttggtactgggaaaagaagcagactgagggatgggaaagaacaagggaaacctagataaggacaaggggctcagctcctcccctcatctcttagaactttggtgccctttgcaaatgtaagcccacatccaggtggggtcaggttgtttgagcagaatgacctctaccttagcatttgtcttgttaggactctagcacagagcataaccaaggccacagatcactggatcatggagcaacattaaaaagacaaaaccttcagatttagtacattttaccgtaaggagaaagggcaagatttggcttaactggagatgtgttgtttgaacaggatctgatggaacatttgtggatcaggtgggtaccagatatgggccagcatgggatgggagacactcagccagtctgtggtcactacacacactgcctagtgtggtacagcacttcctatcatgatggggaagaagtagaacaagctcaatcagtccatctcaggagcctgtaaagcctgaagtctaaaaattataccaaattccacccaataaaatataaaaaatgacctaaatttatatccttatcatttaacaagtacaaactatcatctacggtggaggagctaaaaatgaaggatagcagcgcattgcaaaataatgtttcatttccaagtctagctctcagaggagttgcaagtttgcagaggacagaccaatagatgctgcctgtggctataaaaactccttatcactgaggaaggatggactccaaattccatcctttaaaagagagagaggtgttggagctttttcaggcagcagaatgttttttggtgaagccatgtaggaggtgaccatgatgatgataagtaaataatccagatctcctcccctactgctactgaaaaggcaaaaggctttccccatttcaactctagccagtagttaaaattgtaagcccaggaaaacactccctgaactgattttttctgtgtttggaaagagaagaccactttaattacactatcaccctgtgcagggctctgctaatagcagcttctccagatggtcacggaatgggactgggaagtctgtgtggaccatggacccctgggcaggaagtgggagatgggaggatgctgtgatacagtggctccttcaggagatttcgtctctttgagtgtctcccacgttggctaaaaggaagggctgggaagctagatgtcacgctctccttggtggccacatgactaatccaggcacatgaacaggaggaaaggggaaaggaaccaaagtattcaagattttctgggccttctccatttggcttaccatgatgaatatcgtcaggaggaagatgctcatcgacatgatggagaagctgtccaggaaccaggtacaccaaatcactgcattggagacaccctgatttttcaaggtctccttcagtcgcaactccttctccaagacgatgctcttcacagtcatggagacagagtagatccatgccagcaccatgaagatagggaaacagcggttcaggatgatcatgaaactaaagcaaaaggagagaagcagaatagtagagtgctctgtacctggtagaggcagaataaatgtttgttgaatgaatgtgttgagaacaaagcccagatggagggaaaggaaaacaggaaaacctcccctggacatttaatgggctggaatcttttaacacattccatgttagccctgaagcattattttttgtttatagcagagtgctggctttctggttagcccgggtgaatgctctgcaagtaaaatgtgtcaataaaattatatcctctatgtcaaagatcttccctgtaaggccttgcaaggaaaaaactgcagacttgatgatgtggatgggatctgagtagacagctacatgctgacactgaaacccaagagggtggaggactgacaagggcaagtggtggtggtaagagcaataacttggctccccaaggggtcagccgccccagcacagtctgccctggaaggtcaaaccctagttacacaaaaagacacacaaaataactaatcagtttggcactttcagaaggcgaatgatccatcaatacatcagttatccaacagccactggacccaccaccagccatgcacaggtggaggagaccctggtatatccacctggcaaacaggatagatttgatacactggaacgactttcttgtgaactttacacgttttccctgtgtttcatgtgctagtaaagcccttgggattattatctattgaaaactgttgtgtgttgtcactgaaagggcccaattccagcatgggagggtttcactcaaggtggccctagggagagaagcatatgttcgtaaagcatgcacttctgggactagccaccagaggactctcccataccaaatgacccagctccctattgcctccccacacccacctcacttccccaccagccactcccgtcctgatcctaaagtggacctgggctttcgcccctggctccatttcccagctctgcctattgtccgaacccaaactaactgcagactggccactgttatctcaagttttctgtagagctgaggctggaaaacccattggacagttattaaaagagggtttcctgtgtccacactgagttttaggtgaactcaattgtagatctctgctgctgttttggtagtgtgtctgaccccatctataatgacaaatgagcctcccaaccctccaccccggccctttctctaccaccccccaaatccatattcagtcaaacagtaggctgcttgcttggcttattcctggtcaacagatatacaggcctgggatgggagtgtccagggaggcaggtcctgagctca

SEQ ID NO: 1136 - DNA, 4044 bp, Homo sapiens
tgaacatgtgggttttggatggaatcactttaaggtagttgttgcagttctcagaagaatgaaatcaatttcttttttatttatttatttttttagacagagtcttgctctgttgcccaggctagagtgcagtgatatgatatcagctcactgagacctccacctcctgggttcaagggattctccttgctcagtctcctgagtagccgggactacaggcatgtgccaccgcacctggctaatttttgtatttttaggagaggcagggtttcgccatgttggccagactgctctggaactcctgacctgaagtgatccacctgcctctgtctcccaaagtattagggttacaggcgtgagccaccacgcccagcctgaaatcaatttcttatccttgctcaaaacaaagtcccataaacttttaggacttctaggaccacaaacttctaggacttttcactgacttaagccagaggtgtaattcactctgtgaccctacagtttcaccagctgtggcttcctcagatggccacttttctttttgtttctaatagctcgagtaacaaagggaccttcccattgtccctgcttccagcttctttcctgtgttgttgaggtggggaggaagagacaagggaaaggtgggagagtcattcaaaggaaaaccctgttttggtatggaaagccctgtttccgtcatcactggaacaatgttctagttcccacaaagagaaacccttttgtgcatgaaactcctggtgaacattctttacctcacatcgtaaaagctttgaagacctaatggcccattcttaggagggcagatctcaatgctgcttatcaacaagccaggcaaaatctcatggctgttgctagtcagatgtttacacatttttactcctttaattctgaggacacaaacatgttggtactgggaaaagaagcagactgagggatgggaaagaacaagggaaacctagataaggacaaggggctcagctcctcccctcatctcttagaactttggtgccctttgcaaatgtaagcccacatccaggtggggtcaggttgtttgagcagaatgacctctaccttagcatttgtcttgttaggactctagcacagagcataaccaaggccacagatcactggatcatggagcaacattaaaaagacaaaaccttcagatttagtacattttaccgtaaggagaaagggcaagatttggcttaactggagatgtgttgtttgaacaggatctgatggaacatttgtggatcaggtgggtaccagatatgggccagcatgggatgggagacactcagccagtctgtggtcactacacacactgcctagtgtggtacagcacttcctatcatgatggggaagaagtagaacaagctcaatcagtccatctcaggagcctgtaaagcctgaagtctaaaaattataccaaattccacccaataaaatataaaaaatgacctaaatttatatccttatcatttaacaagtacaaactatcatctacggtggaggagctaaaaatgaaggatagcagcgcattgcaaaataatgtttcatttccaagtctagctctcagaggagttgcaagtttgcagaggacagaccaatagatgctgcctgtggctataaaaactccttatcactgaggaaggatggactccaaattccatcctttaaaagagagagaggtgttggagctttttcaggcagcagaatgttttttggtgaagccatgtaggaggtgaccatgatgatgataagtaaataatccagatctcctcccctactgctactgaaaaggcaaaaggctttccccatttcaactctagccagtagttaaaattgtaagcccaggaaaacactccctgaactgattttttctgtgtttggaaagagaagaccactttaattacactatcaccctgtgcagggctctgctaatagcagcttctccagatggtcacggaatgggactgggaagtctgtgtggaccatggacccctgggcaggaagtgggagatgggaggatgctgtgatacagtggctccttcaggagatttcgtctctttgagtgtctcccacgttggctaaaaggaagggctgggaagctagatgtcacgctctccttggtggccacatgactaatccaggcacatgaacaggaggaaaggggaaaggaaccaaagtattcaagattttctgggccttctccatttggcttaccatgatgaatatcgtcaggaggaagatgctcatcgacatgatggagaagctgtccaggaaccaggtacaccaaatcactgcattggagacaccctgatttttcaaggtctccttcagtcgcaactccttctccaagacgatgctcttcacagtcatggagacagagtagatccatgccagcaccatgaagatagggaaacagcggttcaggatgatcatgaaactaaagcaaaaggagagaagcagaatagtagagtgctctgtacctggtagaggcagaataaatgtttgttgaatgaatgtgttgagaacaaagcccagatggagggaaaggaaaacaggaaaacctcccctggacatttaatgggctggaatcttttaacacattccatgttagccctgaagcattattttttgtttatagcagagtgctggctttctggttagcccgggtgaatgctctgcaagtaaaatgtgtcaataaaattatatcctctatgtcaaagatcttccctgtaaggccttgcaaggaaaaaactgcagacttgatgatgtggatgggatctgagtagacagctacatgctgacactgaaacccaagagggtggaggactgacaagggcaagtggtggtggtaagagcaataacttggctccccaaggggtcagccgccccagcacagtctgccctggaaggtcaaaccctagttacacaaaaagacacacaaaataactaatcagtttggcactttcagaaggcgaatgatccatcaatacatcagttatccaacagccactggacccaccaccagccatgcacaggtggaggagaccctggtatatccacctggcaaacaggatagatttgatacactggaacgactttcttgtgaactttacacgttttccctgtgtttcatgtgctagtaaagcccttgggattattatctattgaaaactgttgtgtgttgtcactgaaagggcccaattccagcatgggagggtttcactcaaggtggccctagggagagaagcatatgttcgtaaagcatgcacttctgggactagccaccagaggactctcccataccaaatgacccagctccctattgcctccccacacccacctcacttccccaccagccactcccgtcctgatcctaaagtggacctgggctttcgcccctggctccatttcccagctctgcctattgtccgaacccaaactaactgcagactggccactgttatctcaagttttctgtagagctgaggctggaaaacccattggacagttattaaaagagggtttcctgtgtccacactgagttttaggtgaactcaattgtagatctctgctgctgttttggtagtgtgtctgaccccatctataatgacaaatgagcctcccaaccctccaccccggccctttctctaccaccccccaaatccatattcagtcaaacagtaggctgcttgcttggcttattcctggtcaacagatatacaggcctgggatgggagtgtccagggaggcaggtcctgagctcatccaacacattcctctgccttgtcattgagcatacatcatggaaatgttagttagggaaggggctgcattattccagggctcccaggaaccagacctactggccatacagagtccaaaatgaatgctgatgtggcaatcattgggcaaacattctgaccagaacccttccacataccaaacatactacatagtggggaatttgtcccctcccccagcctcactttccttgctttaattttcccc

SEQ ID NO: 1137 - DNA, 4066 bp, Homo sapiens
tattgatttatgagtccagtctcaatccctttctctctaccaaatgtaatttcccactgactttggagaaatgcagcgagcccttcctgaaacatcacctgtctttaatcttattggttttctccaccacgtctatgtccattcggatcttatacttcacgtggggtggtagagagctggtccagggatacatgtcagggaataccactccggcccagaacatgttttcctccagtagagagagggcacgttgggtgagctgagtttcatcattgtagctttcaaacttatccaggaccaagcactgcagagagtcacaaagttgagagagtgtgaggaggaccaactgcaaagactcaactctacacacagaaagtcacaggataagggctgctgtcccaggaaatggtcaaatgcaaggaggcctataaacttaatgtttgcttaactccagagtctggtgttaatttttcaacgtgtccagatgtaggggcgccagagagcttggaagtgctgacgtgctcttatccctgcagagctagtgaggaccacactttccagatgtccaaggctgtccaaatatgcaagtcttcaaaatgacaaaaatactccaggcttttactctccagcatggggaggcgagggagtggggtcacactggctacagcctgctttgaagatcagaaagcctgacgattaaagagctttaaagagagagagaaacattcctagccttgaacctttctggctctctccaaacacacaggatggccagctgagggaagagcaaggaggaagagagaaaataacagacagccaaaataacttagtcagggaaatcacttccaattacaattctgtgacaagtaatgctgggggaggaggaatttctataatatgcctcttttcttctcctggaagaggaaaaaaaaaaaccattacccacaaaagagcagaactaagaatgtttgaaaatttgaatatgatggttgtcctcctgtatagatttgttaaagcacttatattgctatttgcatctatttccttttctttaacctcctgttcctatcattgtgagggctattggtgtcgacatttctttcttagcatgtaactcacaagaagtcagatggtcttgtcttgattaagttgttccctgaatgcatactgagaatctgcaatgtgccagagcctggtcgactctaggaatacaagaaggaaagataaacatctcttcctgaaagaaagttgagagctaatgagggagaggattggagcaaaccaacaaccataatgtggaaggatcaggttctaatgaaagcaagcccagtgtattggggaagcccagcggagggacgcagctaagtcttcctggagggatcagggaaggctgcctggaggaagagcctcctgagtaggaggataagcaggaattagccgaggagaggaaagtgggggaaaggtcagctcaggcacagggaacagcacatgaggtatctggggacctacaagaatagatcagtggttcccatctgtggctgtgctttagaaccactgcggagctttaaaagatacctatgccaggccctaccccaagcaattaaatcagaatctctagtggcagggccagggcatccatatcttgtaaaaaactccctaggtaattgcaaggcacagaagggagtgtagggtgaagggaggtgagtgtgacagcagcactagaaaggagggtgggaccggacggtttgccctgcgggactcagtagtatgaacgaccaatgcagggcttccccggacacgtgctttcagtgctaagaccaggggagttctgggcaggccttaaacagccacagaagctaatgtagggttttgagctgggatatcacctatgggatcagactatgatcactggtagtggagaggggggaaagcaagcaggaagactgggttattgatgtactgcaggctttaaggaacagattcatccccacaaactatctgtgagttacctggaatcctcattttactgaagaggaaactgagctttataaagtatcttatttttttgaggagacctgcctgaggtcacccagagagacagtggcagagctgggactccctccccaatttcaccttcaggcctagagttcttcctgccacaccaggaaccgtgggaaaggctggatccacagcctggcgctcagggccctcactactatcttgtcaagtaggtggatcagcaattactacttatcctcacttggcagccccggaacttaggttcaacgagtctgagtgactcccccagaggcgtggtagagtaggtatcaaaccccaggtcatttgattccacaactactacccgagaaataaagaaacgagaaaggcagacagggcgtaaggacctgaccacagaaccaagctccactgcactgggaagaagtaggcaatcccaattcattcgccgaaacctctcactcccgagtcccacctgcgcctcagagtatgcaccggaagcctctggcgattcagaggctgtgtttgaacaaggggctgcacacccaacacttcttgggcctcctgaactaaactgtcccacctcagcctccatgccctgggggcaggtcccatgtaatgttctcagtcttctagataaaaaggaagaaaactattagtgttccagctgatatgggcagaggaacacaggtacatgaaaaattctaaagggcccaggcttaagtgacaccacgctgatgagatattaataatgatcttaaaatgatatggaattggtatttctttgggcccaggcttcagtgacaccatgctaatgagatattaataattatgttaaaaggaaatggaattggtatttctttaagaaataccagtatgtgtagtcacccaccatagagctaagggaaatggagaattttctttaggcagtgattctctcacaaacaggcattgcctagcctaacattgaccagtccttaaatgagatgtaggacttaaacaggtcacacaccaaaagttgtcaataaatgtttgtttcttctggacagaaataatgcaaggtttgctattggataaatagtttgggtctgttgagggtgggggtaggtggcatctaatatgtagactgttagcacagtccctgaccatgggcctgacacccagtgtttgtcagtacttaacccacccaaccatgctgcttgaggacaaaggattgacagtgtgatgcttgggccagggggcttctgaactgaactgctagaatacatttttaaaatatgcatttaaatttgctttagggagacctcaatgttgtacaaagataagtagtcaaataatctttttttattggtttgtcaagtttagaactgcatatagagaattttagtattggcaattagagtgaatctgaaatttaattcctaaaacgaaaaacaaaattatttggggagatgaaagtctttgctcttcatgttgtgacacacacatagaatgttctaccagttcactcagtcatggggcatttggacagagccctagagggcttgtggtctgatgttcttacttggctggtgaagaaattgggatcagaggagcaaagggccttgcccaaggtcaatctaggtcagaagcagagcctgcatccgtgtcttcagtgctgagcctgcagagtgccatggttcccctatccttgctctgaggataagccacactctagccacaagcgggggtgtaacatccctgaacaagaagatcttctgctccagagcagcattgttcagtagaactttctgcagtgatggaattgttctatatctgccctgtccaatatggcaggcaggagccacaaatatctattgaacacttaaaatgtggctaatgcatctgaggcattgtgtttttacttttaattaatttaaatttaaatagccctgcgtggctgctggttactgtattggccagcacagttccaaagatagtacattctttgaggctggggccgtggcttgttcgccgtggtctctagaatagcattttgtcatgatagggc

SEQ ID NO: 1138 - DNA, 4115 bp, Homo sapiens
ttaatagaagaaagaaataggacagataattcacaaatatttatatatctgagtctaaagtacattacatgatcagcagctttatcttcttaatcctattttttcttaggttatcctgaaaaatacattccctgcgtacattctgtttgggtggtggtggcatgtggccaggaacatgcaaggttacagagaaaaaatagtccaaatctctggcctttgagaattcatcagcaagataatcaccatgtagacaataaggagttatgcacatgtattgactgtgttgacagcagaggaaaaagcagttaatgaatgcatgttttttcacagcttagagaaatacagtggttactggttaaagtacaattttatgccttgatcagaggtattttcgtattaaaatctggctgaattcagcttcctatatcagcttcctgatgtgaaattcaagacctgaaaatcaaatatattatgaaatgaaaatacactgtgaactctgaatagtatttcatctgtgccaggcctaaccttttgctaaacaaaaaatccaaaggggaggggtgtgtatgcttgttttagctgaagggcaataagaagaataatgtattaatttttctaattgagcttttctccagaagcaaaatatatgtgaataaagacacatataaattagaactataaatgaatacacataccagtttaagatatttgcctgtatgaggacccatttgtcctgtgtccttagatttggagaaaagggtgattggaaggcccatgggaatgaatgtctccccatgagtgatgtgaggctccccaaaccaccatcatctattttcctactccactgcctgccttctaactgggccgtctgacttccatttatttccccctgctaatgggaggggatcagaggaaagacagaatgtatttatggggtgaatgagattgcagaccctattgtggagggggtctgagacagcagaccatggtccacagaaatgccagcatggtggttaggccgccctcctgggaggggcctgtactctctgctcagaacccccaggcaggccttcagcagcccagtgaagcaacatccttgctttcagagccatcagcaaagagttttcatggcctctctgctactaagccatcctcagggtggggacatgaatgattttcaagtctcctccagacttcccaaaacacgagaacagaagcagaaaaatccaggacaagccacagtgatgtgtttcttcctcacacatttcctccccgctatcttctcctttctgttcattgccccttgctttcctcctcccccaccccaagggcaggaagatcagaaaccacatcatcacagctgctgggcttctgctcccatcatacccctctgctcagaggccctcgtgaagtcctggcggccccggaggatgtgatttgcagcgttgtgattcctagaggagcaccagcttggaggctgggcctatttacaggaggcactaacatcatttcctctcctaagcagtgttttttggcttgtattttgttaaaaagctaatatttattaagtgcttactatatgtcagtgctttgcatgaattagctcatttaattctcataacgagcctattaggtaagtgctattaatatccctattttatagacttggaaactgggcacagataataggaatttgaacccaggcagtgtgggtccagagactgaattcttaaccatttaagcaattaatatattttaagtatctgtttggtgcctggggctgcattaggaacaagctgcttggaaaaaataatccttctggaaaacaagacatttatgtcacgatacgaatgtcaagtagacaaggagtattctttatatactttgcaaaaacattgtgagaaccactgaactccatgctgcacaaatgaagcaacagagcctctctcctccgtccacaccccctcgcacaggtcctgcttatgttataacagcagtgggtggatggtggtgggcctggctgggaataagggcttagcaggtagaggcaccatgagaggagggagatgttaattgagtaactaactgtacaagggaactgcaggtcccacaaatctaataggtctgtaaacatgcagataaccaggcctcttccctggaaattctgagccagtcgatctgggttgatgcttaagaatctgttttgtaaacagacacatagaccaatggaacagaacagaggcttcagaaatagcaccacacatctacaaccacctgatctttgccaaacctgacacacacaagcaatggggaaaggattccctatttaataaatggtgttgggaaaactggctagccatatgtagaaaacttaaactggatcccttccttacaccttatacaaaaattaactcaagctggattaaagacttaaatgtaaaatctaaaatcatgaaaactagaagaaagcctaggcaataccactcaggacatacgcatgggcaaagacttcatgactaaaacaccaaaagcaattgcaacaaaagccaaaattgaaaaatggatctaattaggctaaagagcttctgcacagcaaaagaaactatcattagcgtgaacaggcaacctgcagaatgagagaaaatttttgtaatctacccatctgacaaatgggtatctatcatctcatgccagtcagaatggtgattattaaaatgtcaagaaacaatagatgctggtgaggctgttgagaaataggaaggcttttacactgttggtgggaatgtaaattagttcaaccattgtggaagatagtgtgattcctcaaggatctagaaccagaaatacaatttgaccaggcaatcccattactgggtatataaccaaaggaatataaatcattctactataaaaatacatgcacatgtatgtttacaattgcaaagacatggaaccaatccaaatgcccatcagtgataggctggataaggaaaatatggtacatatacaccatagaatactatgcagccataaaaaggaatgagatcatgtcctttgcagggacatggaagaagctggaagccatcatcctcagcaaactaacacaggaacagaaaactaaacaccacatgttctcacttgtaagtggaagctgaacaatgagaacacatggacacagggaggggaacatcacacaccggagcctgttggggtggggtaggggcgaggcgagggagagcattaggacaaatagctaatgcatgtggggcttaaaacctagatgatgggttgacaagtgcagcaaaccaccatggcacacatatacctatgtaacaaacctacacattctgcacttgtatcccagaacttaaggtaaaataaagaaagaaaatctaaaaattaaaaaaaaaatcctgttttataaaatgcattcaaggtcattcttatcttcagacaagttggtgatcgcttagtagttgcctgcagtttggtgctgctgtcatgactggcaccttctgaaaggccactggggagcctcggctgccacttccagagtttggagagcgagggtcacacactctggaaaattgtggtggcaccagggcaacagaaagtcctcaagagcaccaggtgacagatagaacgaggcttttcttcactagtttgttatcctcaggactcacaagtctgagacaagagggcatgctcccgagggccctcgagtttattccctctcctactgctcacagaagcccctaccttccaacagttctagatgacacagacccagacctggcccatgggcaagagtggtccacccttagatggagtcatttactgggagtatgaggttgagaatttgaaaatgactgacatgtgctccctgattctaaataactccagtttagctgcccagccagagatggacatgtcaacagccaactctaatctatctgggagaggggtctgagagaggtgtgaagagagggccaggaagcacagaggagtgaatgactaaacctccatcaaagcagaagtgacatttaagagctgagtgctgagtctcaaagaatgaatgagtagaagctcagcagatgaggaaagggacagtcatt

SEQ ID NO: 1139 - DNA, 4045 bp, Homo sapiens
gtgtttgtaaaagcatcccacagccgtgtttacttgccagggcccttctgacctgagcttcacctggaactctgggttgcttccttgcggatcattctcttcctcttgaacttagccctagttcaattacatcagtgggaaatggcccctctgttccctttccaagtgggcctcagttctttctgtggttcatgtccagaattgcttataagcaatgccccctttctgcaaggggaagtggactttctgggagaagtctctttacctaaggccactcagcaagacaagacagatgcaaccccaggtttggtttcacctagaagtgttaaaccatcaacttaaccaacatgagaggccaatttataagcaggactcagaaaacttacttgttcttctgtcataagaatagataggatccttccttgtggagtcaatccccagaaaggccttatagttattgtcttcataccagttgaaggagagcacccgagagccacctccctcggggtagccacacaggaggtcagacaggatgcccatcagctttgtaaaggtctctggaccaccattctgcatgaggggcctggtcacccacagcaagtcctgcatactcggccgatggataaactagggcaaggcaaagtcttcaggttattttaaggcagctagagtcataatctgctgtgaggccaatgctccaacgtttggtttgacttccacatttaaaagaaaacatccatatattctcagcaatccttaatccagctgcgaaaaacaaaaaacaaaacctactgccatctacttagggactaggagaatactaggatgagccttaaagaaaatcacagagtggccgggcgcagtggctcatgcctgtaatcctagcactttgggaggccgaggcgggcggatcacgaggtcaggagatcgagaccatcctggcgaacatggtgaaaccccgtctctattaaaaatacaaaaaaattagccggacatggtggcgggcccctgtactcccagctattcgggaggctgaggcaggagaatggcgtgaacctggggggcagagcttacagtgagtagacatcgtgccactgcactccagcctgggcgactgagcaatactccgtctcaaaacaacaacaacaacaacaacaaatcacagagtgacccctagagcactgtagtatagcctctcttcttctagtctcctttatttgaattcgttgggaatgtgtccttgggcaaatgcagaaaatattttactgttaagccagttcttgggttctgttgtcccaccaagatggggatactggggagaaaaagagggaaataaaatgattggggaatgattctgttgtagaaaagcaagatcagagcaaatttctttggctaaatagtctaaaatttagtttcttatatttggaaaataatcttattagcttaattttaccaatgaattcttccatttccttgaaatgtgtggtttgtggttttctcgtgtgtgtgtgcgtgtgtgtgtgcacgcctgtgtgtgtctgtgtgtgcgttttaaaattctagcaaatacagaacagatgaagtatccattcctggaaaaacactttttcaattctgtgccagctaagaggaggttggtggccttctcttctccatgtgggcaccctgtggtgcttgctggcctcatcctttgagggtagatctgtaatgccgagaactcaggagaaggctggtggagctgccagtagcttggctcccataatgccatttggctttgctttaggggaaaatacgaaattaaaataatgctgcttttattcctaaaacacacctgattacttgctttgctttcagtggtactggggaatttataaaaccattaggattcaatcagtgagactgaaaatatttccccattgcaataagccatgtttacgtgtcatccctctctttgtccacatgccaacacttgccctctgaaactgatgagcccagggagaatccacacagtgagtcatgcctataatcaccatctatgcttcaataaagtcaaaatctcaaattgcttcaacaacagtgagtcttatgacatcttgtaaggggttattactattattatgttgctcatttagtcaaagcactcagagatgaaggggctgttctcaggtcaaatggtgtaataccaattcatataaactgggccttctgctttaacttagttcacaaatgattagacttgctatctagacagtcaagaagccttctggaacttctactcagaactaagagtgttgatatactttggggattgtttgtacattctctatcaatttcaaccttattgtagtgatataaatttttttaatgctatgaagaaaagactgtttaacagagactcccactgtagcaggtgagcattagtacaatgggctcttctctaactttcccacatcagtgtgcatactcggcccaggttgagatgcgttttataaagacagattccaaccatgcagttttccaggttggtggagcccaagtcagctgcgaataatggagggagaaaagtttggaaaaaaacctgtttcaacttttccctccctttcgtaacactcatcacacttgaagagaattgtttttttcccatctctctttcccacagggtcatgaccaaatctgtgtgttcatcatcatatccccagcacctcttatctattgcgtggaagaatccatttctatatgggaggagacttgtgcaatcagatgttaattaaaatgtgcgcatctttttacaaaacaacacaaaagtccattgttttctttatgatgaaataagccaacataggtaaaacacttagaagaagagtgcctgtaagctataaaggtgtatgctattattattggcagtatatatttatgtgaattttaagactgtaacagaataatgaaccacctcagtactgaaaagacttagattcaactgtaagtcttctgatgatttatgccacaccaggcaagttgcttattgccagtggcatttcttttttgatgtgaaatcagaagggtggttcctttctttctgcctcttacttaagagcacagataatttgggatgtgaacaggtgctttgaaattgctagatggaaagatcaaatgtacttttccttgaacaggtttgaaatacaattaaattatttgacataagtggggtaaatggtggaaagacataatgaaattataattactaccatcaggctactcacctcttgaattcttggtgacatatcagataatattcctccccaagatctcagattgataccttgagaacggctgtctaggagtgtgggaagctgtaattgacagtaaaacaattttttaaatatatatatgtttgtaggtatatacacacataggcacagtctgatctcctatatgtttgaaaactccccccctccttctttctgatcgcaggatcttttctgcaagattacttttagaaacaaaaaactcttttatttaattgaaaaaataaaggctctcattccaagactccttgctgcacttgtcaatcacagatagtttcatagttatattaaatactatcactatttcaaagtgattctaattgctgttttagtgacaccaaacaagattcctggaggaaggaaaacagagtgcagctggcagagactgaaggaagtgctgcgggcctggggtgcccatctgttcacctcggagctttgtagacactgcagtcttctcgtcattgtttacatctttcttcctttgtgccattttcagacaggttgtgtctcttcctccattcaacactgctctctcatggaggatttgaccagctacatcacctttattttaaagcagctgctggtaggagtcggagaagttcccttgcagattctccaattgccagcagtgttcaggaaaccccagcccatgtgaactcaccactgctcctgcttttgccacctcggcaggggatgtggaagtccccaggtgtgctgcctccaagctccagagactgatg

SEQ ID NO: 1140 - DNA, 4048 bp, Homo sapiens
actaagagatgcctgtatgccccagcagctgcccaggcctgtggtcctcacgccattggatcctgtgctcaggggcagggaggatgctgaagggggcagggaggatgctgaatacttcataaacagagttaaggaagaatcggtgtatattgagaccgcttactaaagaatgcatattagtggtaggtagaaaaacattttaatgtaaaggctattaacctggggtctggcttcagctgctccatgagccccatcctgtgtgtccctgtgaacttagttttctttagggaacaggtctagagctgtagtcagattctcgaaggtaatcctaacccataagaaaggttaagagctactgttctgtagagataaaacatatcagaagccaaaacctttcttaaaaccaactgaccctggagagaacctgacgcctcacacattggtgcacacattgtaggcgcctagtgcgtatttactgaacaaaggccaggaccccaggactcattatcctcaatggcagccttcccaggggcctgctcttgtcttaagtgacttcagttttgacttctcagtatttctttctttgtaaatccataaaagaacatctgatctgtcatgaaaataagccctggcctactgcctgcctggagctgaaaagacatcaaggcaggcaagtgacaatccagccagtaggctcaatgtgcacgaaggggcctctcttctatttcatttttatttcttctttgttgaaatccattcacccagaggatattttgatggtaataggtaaagatttttgtagatgcaggcagaaaaaatactaatgctataaatcaaatatatttgctgtggcttgaatattttcataaaaccccccaaaaacaacaacaaaaaccttcctgatttagttttgtttcctcccaacagccctgctgttccctggtactggcactcaggaatcactcctttctcttctccccttcccaaaacccttatggagaagtgggagaaattggaaagaatgaggaagtcatgacatcaagtcattagtgggacctcactgtaaaatcctgtagctgtgggggctttcccagacacttgacgtagcaatatccacccgaaagttgaaatgcataggtgaagtttaacaatctgcaaccaatgacccaggagagcagcaactgtggcaactctcactgggtagggggcggtccacccacgcttctccccagtgactcaggaattcagggagccagagccaagaatgaaacaggacattgatgggcgcatgtagtcagaaccccaagattgggcccttttcttcctggaactcaacgtccagccaccccgtagtcaaagagacacggataaaatgcaatcagaaaagtaaaaatgacaacagagcagtggttgggggacagaaaagaaagctgaatcatgccacactggaagcattttcaaaggaaaaccgtgagcccaaatgccgaggaggctgacttttctctatcaacaagcatttaggagggggaagggagggagactcagacttcccagcagcatggcaggtcttggcacccgcctcggttcccctgccgaacttccacaaataaacattcaaagcagaagggacagatttgcttctcagcaagatttcaaagctgtgcaccagagttggagagaaaacaggaaggatggtagggggaagagggggaggaggaggggaaggagaaggaggggcatgcatgccttgggccaaatcagatgggaagcgtcccaacctctcacccgaaactgacacaccatttttatgaggtgcgaaacatttcaggtagtgttggcactaataataccttgggcccaagtctgagcttctgggtttcaagctgggggcgttaagcctgcaaaggccgcaggtgaagacaagctccttcaggtgaaaccaagaggggctattaataaatttccttggagaaaatccagtcatttggctcttatttctctcccagtccacctaggtcaccaatctgtgtgtgcgcacgcaagtgagcgtgtgcgatagtgtgcaaatgagcgtgtgagtgtacgcgcggggatgggtgggatggtgtgggagggatgtagtaaggccatgggtactgcctttggattgtttgaagatgacaacactcacttctgatctccaaggaaccgagagaaaacacagctggtctcagtcggtgctaaccccagcgcccccctccgattctctgggctccacaggttcccttgtctcggaggttgcactcacacccccagctcctgactcaaagtgggtagatgccgtcacggtggtttactgagattttccctctttctttgttaatgagaactcatttggcatttaataaaaccttatttatacactggcctacgtgcgtatgagaaacagcccagaacagaaggcccagcattcccgcactgcagctaagcatggctgcgcgccaaccagctgcaataacagccgcgtcccagcggggccccttccctggccccggagcaacccctgcctgcctgatgctcctttcagaggatcggagggtctgccctgagcctttctgggcctgcctcaggcttgtttttctaaaaacccaaataggatgggcccaggagcaataaaggcaaagtcccattttaatgcctgcaatttctttcaggttttttttttttttttgtaaatttttgtttttagtgtaatccatttgtcaaatggaaaagtacattttaaaggcaccagaagactagatgtgtcctgcttcggttggatctttctccaccgagacggaagcaggagtgagaggagagcaggtaggggtggtgctccgtggttaactgaggccgactacggcagagctttctcctctgggccatctcccggtccactgcaggctctgtcgctcaccagctttgttaagagaacaggagagagaaagcatctccacaccacggtggtctcatgggtgatcaaatgaaagttctttggaccctcagaggtgtgtggggtactattattatgcgtggtctatagagactgaggtggtaaattaaactctaggtcagtgattctcaatcttggccggacattggacttatctgggaagctttttaacacagtgaagtcaaggctgcaccctaggccagctgactcagaatctctgggagtgggggccaggcatttgtaggacacattgaatcactggggaagcttctaaaagctaccgctcggggggacaaatgctgctggtgttggccctttctaggctgcactgctgtgaaatgtcctgtttgcttgtctctggtctggctgtgagttcagtgagggtggaaggttcacatttggagccttggcctcagcacagtgcccggcccttcacaggtgcctgatgcaggtttgagtgcctgcatacagaaaccgagaaagcaagcccccaggacccgtctgaggtctgcaagggtgacaggtcaaggtagcccagggtttgtgaatgctagcatttgccaaggcagcatgtgaagacgtaaggaaagacttggtctttcttgtctgataaagaaacatttggaagccagtgtcctgagttttggttctagtctccaatggaaagttttacccaggtgccgatttaccctactatctctggcattgacatcccagaatcaatggtcatgtcctgggaggtaaatttacctatactggtggccaaggtgcttcaagaagggaagaatgatgctgctcccttcatggtgacgagaggattgcacgaacctgggtacccaggccctgcctgcaaagcccaggtgcacagacattgctcattctgcccattctacaaagcatgcgggccctggacacctgagagggagcctctggtggctctgcaaacaccagcactggactcctggctgtgctggtattcagctgcctggaataagggacctttgttgcctcactcttctgtctgattctgaaaacaagtcaaggagcgtgtctaaaatcaagttctttttgaaa

SEQ ID NO: 1141 - DNA, 4056 bp, Homo sapiens
ctaggtcagtgattctcaatcttggccggacattggacttatctgggaagctttttaacacagtgaagtcaaggctgcaccctaggccagctgactcagaatctctgggagtgggggccaggcatttgtaggacacattgaatcactggggaagcttctaaaagctaccgctcggggggacaaatgctgctggtgttggccctttctaggctgcactgctgtgaaatgtcctgtttgcttgtctctggtctggctgtgagttcagtgagggtggaaggttcacatttggagccttggcctcagcacagtgcccggcccttcacaggtgcctgatgcaggtttgagtgcctgcatacagaaaccgagaaagcaagcccccaggacccgtctgaggtctgcaagggtgacaggtcaaggtagcccagggtttgtgaatgctagcatttgccaaggcagcatgtgaagacgtaaggaaagacttggtctttcttgtctgataaagaaacatttggaagccagtgtcctgagttttggttctagtctccaatggaaagttttacccaggtgccgatttaccctactatctctggcattgacatcccagaatcaatggtcatgtcctgggaggtaaatttacctatactggtggccaaggtgcttcaagaagggaagaatgatgctgctcccttcatggtgacgagaggattgcacgaacctgggtacccaggccctgcctgcaaagcccaggtgcacagacattgctcattctgcccattctacaaagcatgcgggccctggacacctgagagggagcctctggtggctctgcaaacaccagcactggactcctggctgtgctggtattcagctgcctggaataagggacctttgttgcctcactcttctgtctgattctgaaaacaagtcaaggagcgtgtctaaaatcaagttctttttgaaactttggatagagacatttggactacattgctttttatttttcctacagtgtggtgagccaagagaccttttctggggtcctgggctctcactgatggtggcatccctaggctctgacccttcatactcactctggggccccaccctgacgagctgggaaaatcgtagagtaactttccacggaaagtcacacattgaaggggattaagcgtggaccgtgccagaaactgcggtgtcttatttcatgttgcttcatttttaaaagccttcagcttgctttttaagacaagctgaaagtgagtttcctgggacttgagagagcagtcatgaaacagacaaaacacagttcctcaatcaagttcttagtgactgacattccctacaacacagttctagaaattaaaatgtaggcaaaagaaaaaaaacataattccatgctagaaatattatatatgccaccttctctgaaggattctaattttgagtgtttctgaaagtgtggcctacaatggtcttcatcagaatcgcctaaggtaacaggatagattctgggcctggcctggttcttctgaatcacagtgattgggggtggggatttagcacttgcatcttttaccaacttctctgatgggtttttttggtttgtttgtttgtttgtttttattgagacggagtcttgctctgtcacccaggctggagtgcagtggcgcaatctcggctcactgcaagctccgcctcccgggttcacgccattctccggcctcagcctcctcagtagctgggattacaggcgcccgccaccacacctggctaatttttgtgtgtgtgtgttttttagtagagacggggtttcaccgtgttagccaggatggtctctatctcctgacctcatgatccgcccgcctcggcctcccaaagtgctgggattacaggcgtgagccactgcgcccggccctctgatggtttttatgcactttgcagtgtgaaaacctctgctctacacctcctttatctaattccttctcatcttatccttctagcaaaggaggagatattttcaggtcccaagcagtctgtctgggatgcagttctagaacaaagggttgagctagatcagggctttccaaatttttgagactatgaaactttctctgtcgttttttctctctagaaacaccaaccattgaggttgagaccatttccagaggaagaagcatggggccatcatttattaaaatttatgaaatgttttgcgtatacttttcttgtataattcctaccactctgtaaagtattatatttgttttatagatgagtactgggaccagaaaaggttcaatatcttaccatgatcacctggctaggaaatagcaggtcagggagtcaaaccaggcctcctccttcctttaccactctgttagaggaggtaaaggggattatccccacatttagagtggacacaaacatgccacagccacatacctaatggtgaacctcatagtgacttctgggtccctgggccactgttctagaaatactatcagttgtgattttttgagccctgggagcctggagcttttgcaaggattgtccagaacaccaggctcacgccctccccaaggtcaattcgtgaggctctgctaccccaggaatcaccttgcaattggcgagcagccaaacccctcccttaccacacggaagagcttgaagaagtccacgttggcatacagagtgtcttctatccactgtagggtgccctgggagagggagcacagggcatagcgcaccgtctttgccccgcgtctctggctgaagatgatgaagcgctccaggagggcctcgctgcaggcgatgtccttcagcgccaggtccgggactccatgagcgaactgcagggagaagaggcaacactagaaactgccctgtggtaggaaagacacccacgtcctaacccacagaacctgggaataccttgtgttacatggcgacaggaattaagatcgcagatgggattaaagccactgattagctgattttaaaataaggagattattttggcttttctaggtgggcccctgtgtaatcacaagggtcccttaaatgtagaagagggaggcagaagaaacagagtcatgtgatgtgagaaagacttgataagcccccactggccttggagatggaagcagaccactagccaaagaatgtggcgtgtctctggaggctgaaggaggcaggaaaatggatttttctctagaactccgcagtaaggaatgcagtcctgctgatgccctaactttcagacttgtgacctccagaactgtaagataatgcatctgtgttgtttgaagccactaagtttgtggtaatttatgacagcagcaacaggaaaccaatacaatccccatacctcatcttatcagagtgccatttacaattcaagggatccccttcttacagcatgatgttacagtaccatcaaggcttcctctctgaaggtggggttgagaagtagctagaacaaatttgctcttggatttagcaaacaaaagcaccagatgcccagtcgaatctgaatttcagataaatgaatactttttagtacaaatatgtcccaaatagggaccgaatagaacacaattatttgaaaaaattatttgttgtttatctgaagttcgaatttaactagacaccctgcatctatcttgtctgcaggccctaagccctgcagagtgcacattctgcagctcctaggtagctcaaggatagtggttcttgaagtacaaccctcgtgatggcctctcgaggatcaggtggcaggggagaggcctggaccttggccagggacctgtggccacccagcaccttaactggctcctagagtcctggactcccatagcattggacagacactgagtaccgtgggcaaattcgtgagattcccggggcaccacagtctcccatgacatctaacgacgtggctctctgggctggagggcagaacaggcctgagctctgccacctcctacactgtccagactacacatggcagcctggtccccacacgaggcacaggttacagctgaccatgagtcggtg

SEQ ID NO: 1142 - DNA, 4042 bp, Homo sapiens
gcaagatctaaagacatttctgggtgtcacaactggggaggtgctggtgggtagaggccagagatgctgctaaacatcctgcaaggcccaagacactcctccctcccccacacaaaggattatctagccccaagtgtcagtgatgctgaggctgagaaactctggtctaggattggaggagacacgtgctcttcccacaccgcagctgtcacagggtagaggacccctctgggtgtttctatcatctcagcttgggctgagatgctcagggcactgacatggactaagagaaatgagttggggccattaagggcaggaaaagctccaggtagaaagaggagagccaggcacatgccggggcttgcctgatgagccctagtcaagctccctccagctcctctcaacacctgtgggaagcagggtttctttataaggaggcataaagaacacctaacagttaaggtgaccttggggcaagtgattgagcctgtccccgtgtctgcattttccacatctacctcataggattgttgatgcggggtaaggaatgtgaagtgcttagctcccaggcctcaaaacagcactcaataaatgcttattatgatcgaattaatataattcttacccctcctgggagattcacacaagcaccctcctcctcggctggcttccagggccaatgcttggcctcaaccctgctagtgctatagttcatgaggctctggccagagaagagccttatgggcctggatgtctacgaagggacttcaacacaaagggaaagcactggggtgcgtgaaaatgccaatctcttcaccccgagtgcttcaggggcatgggtgactgtttatctcccagttcttctctaactagctttaaccatcacatgtccccattctttcctggtcccaattccacggcatcccatcctcttcctctccaaattctcccctcccccagtggccaagaggcctgcccctgtgtgctggacagccacccttctcatccccaggttgtgcctttccctgaacagcaccatatccggatttatgttgcagctagtttcctctggaagggtcttgcgccaaccccacaggcctgtccatgcagctggggcaggggaagccggtcttgaagttcgaccacacagtggcacagtggcttctctcacagtaatgggttccctgagagtggtgcccactgtcactcccctttgcataggaaagatccaaggactttggggaaagctggacacagggcccgaagggaggaggagggctctgagaagggctgctcccttatattctagtcttccctcttcaaaaacataaatccggctgtcttccaaacccagccctcctgcttttcctcctgtccctgggtgccagctccattgttcttttcccaattaccccttcatacacagccttgtacactctcactccaccaacaccatccccaacacacgcacacacacacgcatgcacacacatgcacacacacatgcacacatgcgcacacatgcacacgcacgcatatgcagacatacacacatgggagatctcttgagagttgggggctatggctcctgcttttattatactcctcattgtacctagcaatgctgggtgcacagatgcaagcccttgaagtcacctctctctgacacccagcattaaagactgacatccaatcagagtctcaataaatgtctgttgaatgacatgaggcattcagtaaataactgttgtcttgacctgacagtcaggactccatttgactgtttatctcttcgttattctttaactcactcacctgaccttacatacaaatatcttgctggggagaaggggcaaaacaagaaaagctgggagtgatgttgcccaggcttggcacacaagaccacccaggagacagggctgctgtggctctgggggggaagggggagtgtgctggcttctggtacacctgaggagggcgggggcccaggtgaagaggaggccgataccagacagaagcttccctagactcctgagggagaaatgtgaactgggagcctgaggaaagaaaaataaatttcgtttaaaatgtggttcttcttgttcccttccctgggaagattagaggcttgggggtggggctgctgaggccccaggagctgagggtgggggtgggagggaagccaggagaatgtaggaggctcccgggaagaaggtgttttaaagatgattgagagaccacagagcttgcttcgagggagagggaagggggctccatgcctggtcttttaccattaatcctccctgctgagaatgcagtactgcaggtttgccatgaaagaaaacctctgcctgggtcaaccagcggcataccttcccaggtggctgtgcagaagcacgcaccagcaccagccccgccacccccacccgctcgctttcaaaggtgggctcttctgccacattggcctgaggagtccgtgctcacagtgagcagcgccccggtgaatctcaacagactgaaacagcctgtgttcctgacagtgcccttcaggccctggcctgggatttcctcaaagaccgtgtcccttacttggggatggacccctgttccctctcacagcctctaaggccagggatcttgcagagcccccattcctagggggccgtggccaacctttcctgagcccttgtccccagatttgctctgttagggacttctcacagcccgaagcctgcagaaggaaccgcctgcataccaattcaaaatcagtcctgctctggggttaagaagtagtgattttggttctcatatccacattgtaaaagccacagagaaactgtggtttgaaattacttccttcacacttcctcccagcaggactcaatctgatgatcaggcacttaagtgaaatgtctgcctcatcatcaaacccactggatgcatgaggtatgtcatcccgccaggagctggacagcccacgtctgcatctgtttgtttaaattaggaaaaaaacaccttctggttggtacacaggggaagggggatttcttactattaaaatggtaattgtactcataccatataaggttcctcaaacttgggctcactaaaataaacttctacccagggcaacaaagaatggagtgtttgtaatgcagtttgtagaagttactacataaaatctatggtttactagtttgaaacaatgagaacgtaattcagcatcttcatacaccaatctggtcatacgcctgtcctttctcacttggatggggagagagggcttcagaaggtggccagatgggaggaggatcagattctcctcggagaagtttcccctgttgactctcctgtgctcctgaatcccctccttccctccactgggccccacacgcgctgtggtcattttctgctcactcatctctcaccttctgccctgtgagccctctgagggctggcatttgcctgactcatctctccacccccagagactagcccagtgcctggctcacaggaggcactgaaggtcgactgaatgttgaaggagctgcacgcatgcacgggaaggtgcccccggggctgatttcaaccattctcccacatttcttgtttggaacctgcagcagaagctgttctatcaatacagcctctcccattcccctggtagaccccttggtgacccctttctcatccctgttaacctctaaggtcatccttagagtcaactccctaatcctaggagcacacatctcccagaagcccctaacagctgctttcgtggcctctgagccccgtttcctgggcaatctcccccagagcagcctttcctcagagggcacgctccacacccaaagctgcagcaacccctggattttggggggctttacttcctcacgaccactcttttcctctgctcttgcaagtgggatccagtggccatgtccagtccctctagccatccacagaggagcctactacacacgtgacagcacacaacacccactcacactttgtaaaggcacattggtgttattactttcgg

SEQ ID NO: 1143 - DNA, 4040 bp, Homo sapiens
ctctcacagcctctaaggccagggatcttgcagagcccccattcctagggggccgtggccaacctttcctgagcccttgtccccagatttgctctgttagggacttctcacagcccgaagcctgcagaaggaaccgcctgcataccaattcaaaatcagtcctgctctggggttaagaagtagtgattttggttctcatatccacattgtaaaagccacagagaaactgtggtttgaaattacttccttcacacttcctcccagcaggactcaatctgatgatcaggcacttaagtgaaatgtctgcctcatcatcaaacccactggatgcatgaggtatgtcatcccgccaggagctggacagcccacgtctgcatctgtttgtttaaattaggaaaaaaacaccttctggttggtacacaggggaagggggatttcttactattaaaatggtaattgtactcataccatataaggttcctcaaacttgggctcactaaaataaacttctacccagggcaacaaagaatggagtgtttgtaatgcagtttgtagaagttactacataaaatctatggtttactagtttgaaacaatgagaacgtaattcagcatcttcatacaccaatctggtcatacgcctgtcctttctcacttggatggggagagagggcttcagaaggtggccagatgggaggaggatcagattctcctcggagaagtttcccctgttgactctcctgtgctcctgaatcccctccttccctccactgggccccacacgcgctgtggtcattttctgctcactcatctctcaccttctgccctgtgagccctctgagggctggcatttgcctgactcatctctccacccccagagactagcccagtgcctggctcacaggaggcactgaaggtcgactgaatgttgaaggagctgcacgcatgcacgggaaggtgcccccggggctgatttcaaccattctcccacatttcttgtttggaacctgcagcagaagctgttctatcaatacagcctctcccattcccctggtagaccccttggtgacccctttctcatccctgttaacctctaaggtcatccttagagtcaactccctaatcctaggagcacacatctcccagaagcccctaacagctgctttcgtggcctctgagccccgtttcctgggcaatctcccccagagcagcctttcctcagagggcacgctccacacccaaagctgcagcaacccctggattttggggggctttacttcctcacgaccactcttttcctctgctcttgcaagtgggatccagtggccatgtccagtccctctagccatccacagaggagcctactacacacgtgacagcacacaacacccactcacactttgtaaaggcacattggtgttattactttcggattgtttcttgttcttctcctggggaggagagacacaggagagggagcctcttcatcctttctcttcactcttcctgactccaggtggctcccaccctggtgcccagctcctgccatcttcctgcacaaccgtggtgtccgtgtggggccaacatcatcacctcccatttcctccttcccctcaccatgcacctgcacctttgccccacttcaccatggccgcatctgggggccagtcatcacccaccctaccttcgaaatcctgaattcacatatttcactttctgaccacagccattaaccttttcatcttgttcattttctcaatcacttaaacagggtcatggcacccactgagacttctattcccttgcctcttcatttcccccagtccatttccgtgctcatctgccttctcatccttcctcgtgcagcctggacttgatgcatgtagtccagtccctgccttcagcccgctgcctgttgaccttctgtggtgcctccatacacacccccagccctgcatcacccactctccacttgctctgcctcggggcctgggtgctaaatattactgggagaaatagtacaattatgcatatttatgtcatgataatacatgatctctgacctccctggctccttaatgatagttggccttgctgcttcatgttcctggttagctctcgctctagaactctgtgagagttgctctatatctttacgaaactctgtaaactcgtctcccctgcttctagcccttgacctagcctcatacttcccatagtgccatctctcttagcattctttctgtctctagacttaacgtggatgagacctttcctgccttccttcccaacttcctaccttccaggcttctgtggaggaagaggcatcttcaccaaggtgatgttcaagccgcctccagaccccatcccttcctgcctccgctagtatatttttcaccaactctccctgttctttcctatatcttcagtctctccataggtgagggaaatgatgcttgagagcactgcagtcatgcttacctgcaattctctccgggtgagtccggagggtgtccatgaattgggacaagatgtgtagctctgtccaaatacggccaaggtgctggctctctggtgcattcatgaggagttcttgaaaatctcgatatacccttgccaagctgtaaggacaaagcctcattaataaggaaatagctgttatttttataacagtaataatatctcatgctattttttttttttatctcgctctgtcacccaggctggagtgcagtggcgtgatctcggctcactgcaagctctgccccccgggttcacgctattctcctgcctcagcctcccgagtagctgggactacaggcgcccgccaccacacccagctaattttttatatttttagtagagacggggcttcatcgtgttagccaggatggtctcgatctcctgacctcgtgatccacccgcctcagcctcccaaagtgctgggattacaggcatgagccaccgtgcttggccatctcatgctatatttaaagatactatgtgtctggcctagctactacattgagtatccttacaatactgccaaggcaggagaaagagataattttacttccttgtacatataggctaactgacaaggatggtgagcgatctattcagtctcccagttttggcagggtctgctcgcctctcggtcccatgctctgtgtgtctcttgcccagagaagccttaaacagggtgacattggtggatatcactggagggtttatccagtttttacccaattctctgagacctgcccttccacccattcacgcaggtaggctctgacagccatgcttcatccacaaggacctccctgcacacacacattggcacgcatgcacatgcacgcctctgccaaggctgatgggacagggagaataaagctgggtcaacccgatttgttcccaggaatttggatggtgttcagagatgagcttctgattgcccaggccgaggtattgtgaattgcatgaacaatggcagcccaggcattgaggagcaggggagactggtccatggagagaggtgaatggagtagatacagaggccagggctggcaggcccagatggaagagagttgaggaagcagctcctgacagctctccaggtcttggcctgcctctcctgagccccgccttgctgcccttggctctgtgagaatgtctagtatccaaatcatagatttccttctggggtttaagattgcttgaatgggtttccgtgccttgcaagcaaaagaaccttgaataagccaatatttcactcataatgtgagtgcaaaacatgaaacccaactttccgggttcaaatgccaagtacagctagagtctggagcccccttctccaactcccacccctcagttttccgcaataacatctatagacactgccagggccgttcccaccaaagctccatgcagcctccactgagctgtcttcaggcctccctgatcccaccatgtgaccccacacgatctctctggatgggcaggtgtttcttaagctgaaagtgcagttgtaaactaaaact

SEQ ID NO: 1144 - DNA, 4046 bp, Homo sapiens
actccagcctgggcaacaaagcgagactccgtctcaaaaaaaaaaaaaaaaagaaaaaaagaattcgcttaaagagcttactgtgtaagatgtttctcagaagggttggttaaggggaggaaggaagaaaaagacaaagctagtaacaactcaaacacacctaaaactacagatttggagagaaacctaatattcacccggtctaatgtctccgtttacccaagagctcatggtatcattgctttctccacaacatctcaacttctcagttttaccttatcttaattcatcttacaatttaaagataaggccagatgcagtggctcatgcctgtaatcccagtactttggaggccaatgtgagtggattgcttgagctcaggagttcaagacaagcctgagcaacatggtgaaacctcgtctctactaaaaacaaacaaacaaacaaacaaacacaaaaaaattagctgggcatggtagggtgtgcctgtattcccagctacttgggaggctgacgtgggaggattgcttgagccagggaggcagaggttgcagtgagccaagattgtgccattgtactccagcctgggtgaaaaggtgagaccctgtctcaaaaaataaaatataatgagacatacttgcttggccagtgtggatcaaattacttataattttacctccactttggcctaagcaattgtacttctaaaaatatgtgtacagccataatttccttacattaaaaatttggctgccagggtcttcattcataggtattaagtaacaacattccactgaaaacaacatgaatgtccaattttagggaaattggttaagtatgcatccactaaaaataatgcagaaaaacatttcacgacagaaaaatggtcatgataaaatgtttgtgaaaaaccacaggtaacatactgacatgtatgatccatttttttgagggtaaaagtatttatatctatggaaataagacaaatatgtcaactttcttatgtctgagcagtaaaattacagggaatgtgcattttctttttggtttctataattgctaaattttctaaaataaacacattttatttatgtaatgaaaaaaattttttaaattataaattgatgttaaagaccctgaaatctcgaaacctcatgtgatctctatgggttgagagcagctgatgaacatgatggatggacacagctggttcatctgtaagggtctgacaggtctttgaacatccacttgatttggcagttaaggagactgaagttctgagatggaagtgatcaggccaaggttacaaagcaaaggggctttaaaagaacagggcccagagagagttttcaggcttcctagttctctgttatttcagcctcccaccatcttgtaagagctactcaatctcagagcagaggccatttacataaagcacacatgggcagtgaagagcccaagaaacccacaatgccccatgcacataggggaagggaggagcagtcagagctggtttccaacacagagggaaagtggcacctgctgatgcccatccctgctcccaccagccttacccacttcagaaacgctgttccccctcttccctcccaacccagctcctgtcgtttctttacctcttccaggacgtctgccttgaataacttctcacatttagttactttatgaagatgttttcctctgcctttttttccatcccctttattcgttattttaaaatgtatgaattattactaaatatatacaaattactacatattaatgtttaaatgttgttaagcatctttaattcttctgttttatcttcatatacccactggacttcccaatttcaatatggcacagcttatgctaacctttctttattgtttttatttattcttaattcctgttctgggaccctccctctttgctgccaccacaagaggacaaaggctgttttgccactaacatgggatctcctctttcatgatggatcacatttccagtaaactagaggcttactatgccagggaaaaggcagatatatacattacaagacaatgatatcaaggggatactaataaaacacacagacatcccccctcatgctgccaagactatataccattttgtttccattacatcaatttttttctccccttttgcaagcattaatcaaagaaacgtgaagagctcattaaagtgatagattgactgaaaatgtaaccactttttcattataaacagtttctttatgttcttggtgctatgggctttgtttttcagcatttgtcatgtagttcaaatgtccttttacatttaaaataccaaatgccaaatgggccccagttgtttggtttagtatgaattgatggccagcacagcagaaaccagaactccaaaatcacgagcaaagtataacatccatatcttaagcacacagaaaattaagtagctgtaaaagatgggtttgccaagtgatccaaggccttgccatgaaattcaggaaagcagaatcgcatcaacaactttcagccagctatctctgaatggttctagagacaagacgcctggcccaagatagcaccaaggttccaaacagttgatggttctttaaaagaaagaatctttttttcttaagtgttgaagtgtttcctgtacatacgtttatgctggcagatgaataggaaactgggatcttggatcttggggtcaggcattcccacatacatacacacacgaatcttcactagatgagggtttgatgctggtttgactctgagcatctctctgtacagcgtggtcaataacttttgaccactacctgaaataagccataccatttgtggtctagaacttgaacactgtggctagactgaatgagtttgggtcctgcctctttctgtttctaatttgtgatctggggcaatttatttaaattttgtgtctcagtttcctcatctgcaaattggaagaggaagatgtcatgaagattgaatgagttaataataataatacagggaaactgcttacaacagcacctggcacagagcatgtacttcatcagtactaacttactattatttatcaacaacagggttgtaagctgacagagaaaacaaaacacatgggttttagtcccaggtcaactcctacctctctgtgagaatgtagaaggattcaatgtcttatccaaactcagttctcccatccataaaatgaggttgtagcaatgtcccaaatccctttagattaccgtgcatcatacataatattgaaaccacgataattctgtgttcagctactcaatattcaggaatgtctgtggagtcattcatggggttgttcttttaaggaagtggaacacaggagccctctcttccagaatcctatcacattgtcggtatcaacaaacatatcaacatttcatacaagagatgcgcaccaaatacattaaaccacaacaaccatgtagcttgcacatcacaactccaggtacacatcatatcctctctcaggagtagcccctaaggcatgatcctccctccaggagccctgcatcctttccatttgctaacagtcaaatcattcatttgctgctatgcgatcacagtcgtggcaatggctgtggcccttggtgtcttcatctgtaaaataggaatgactctaaggccctctcagctttgagatttatgtctctttcatgaccccaaattttaaacgtgatctccaacaaaataagctagcaaagggaatccagaggatctccttacagactccttcacaagctctagtgtacatccagatttttttgattcagttttatacctttgcccagaggataaaacttcacttctcaaaccaaggagaaggaagtactttctccaaagttgctctaatggctgagaaggccataaataaccatttattaaacaaacactatgggctaaaggaagagaaaccaccgcaattaggcccctgaggcctgcaggcacagtacataacgatgggactctcataatccaggcaatatataaccagttgtt

SEQ ID NO: 1145 - DNA, 4050 bp, Homo sapiens
gcacagtacataacgatgggactctcataatccaggcaatatataaccagttgttccattttcttgaagttatcttcataatcaagatgctatctcgggcattgtgggctttaaaactatttttaattttaatttaaagagtaattaaagaaagacaatggatatgcaggataataaagtaagcgattagcagcatgcaaatgacataggcttaatgataatatggttctagtctccaaacagcttgtcgagagaaagccctttctacatgtggttgttcagctaatgtgtctcaacccacaattacaacattgctgacaccattaaccagtgaaacaacaccacttcgcgaaatccttgttgtctcattaaaaaggaaagggtcaggtaatttaccaacgttgtatgtctagttttgttgttggtaattagcaaacattacccagcatagactcccactgggaactggaggaactttgtgaaatattaaagaagaaagcctttatatttcactggaaaattgaaaagaggtgcagtaatattctccctgtcatctttttgcatttaggaaaaggaaaatgcaacttggaactctttaatttcaggagaaatattcaaaatgcattgggaagtcactacccacattaagaccctggatcaccattgtatactggcaaatagaatctgcatccctgtttacaaaagggagttggagatgggaggacgggaaaattgcaaactttatctttattgctcttacttatgttatttgaattaatctccttgaaacagaagaaaggagatataaaattttctttttgaaatgctacgggacttaaataagcaccagaattatttattcagaaaaatacacacacacacacacacacacgaacacgcgcgcgcacacacacacacacacacacgcacatacacacacatatttagacctaaagagagaagaaatatattccagggaagagacttcctgcctccatgcttcctaatagaatcttccccacattggaactcagaccccgcccccaacactggccaatgcttggtgtgttgtcagggagtagaatggtatcttattctttaaatggaacttttggaacataaaacacattccaataaatgtgagcagaaaattatgaattcattaaactactttggtatcttgtgctatatataatatttatattccgactactgtaaaatatgctttaatatctttaggcaactataaggacttaaatatttataaaatggctaaagataaagtatggccctcttattcctacatacagatgatgtaaggcatgcaatcaaagacaataacactctctgcccatttgtcatcttaaaggagccgatcaacgcgccatccctcgtgtgccatctacataagagttgttgccgacacaggcaactccagaggagtttgcgccttaaaaactacctagagtgctatacttcatagaaaacagggctttctgaaaatggagacaaaacaataaatttgcaggcaaaacagctccaagaggggcttcaaagtactgctgtatttatctctgggacatgagggaacaggaagcattttgatttaatatttcataagatagagacaattgcttccttgcatggtatatacttaatgctcacagaaatgagttttttttaaaaaagtttcaatatcttaaatgcaaataaataaataaataaggagacacacctgcataataggaagggcttcctttggaaatatggaatagacccatataatcccaataaagagaaagccaccacgaatttataatcacctaggggcctgttaaaagtagttttatagattaagtgtgaaacctcaaccctgatgttattattatttaccttccttgcttgcctttaggcccatggcctgattgattttcaaaattcttccatttcctatgctgattaggtattcaaagaattgtttgtgcccacctgccttgacctctcaaatggacaccccctggtttattttcccagctcccactagctccctgctgggaaccatgtggaagtttgtgaatttctcatgtatcttgcattttcacaatgcccattatatgctttccaaatctcctagcaatcatgcctaggagaatgatttattctataaataaatttccaagataaatttctatggaaatgtaagctttagtaaatcagctgcctgatacaaggatcagagatggtttccttgagtaagtaaggggctaggctggtgtttctcaacttgggctgcacgttggaatcaccaatgcatgcctgcatcaatgtctaatttaattgctctggagtatggcctgagcatttcaagaatgttaaaagttccccaggtgagtgcaatgtgcagctaaggttgaaaaacagtgggctagttcagaattaaatccacccatttaagggcaactaatctttgacaaggatgtcaagaacacacaataggtaaaggacagtctattcaatgaataatgatgttcagaaaacaatatttacatgcaaaagaataaatctgaacacttctcttacagcatatacaaaaatcaaatggattaaagacttgaatgtaaaatctgaaaccgtaaaactcctaggagaaaaaataggggaaaagctctttgacattggtctgggcgatgatttcttggatatgacaccaaaagcacaggcaacaaaagcaaaaattaaaaagcgggactacatcaaactaaaaatctgcacagcaaagaaaacaatcaacaaagtgagaagccaatctactgaacgggagaaaatattttaaaaccacctagccaataaagggttaatatcccatctatataaagaactcatatactcagtagcaagaaaataaataacctgattaagaaatgggcaaaggaacctaatagacatctttataaagaagatatacaaatggccaacaagtagatatgaaaaggtgctcaatatcactaatcatcagaaaaatgcaaatcacaataagatatcacctcatacctgttaagattgctattattgaaaagacaagtgataacaagtgttggtgaggttggagagaaaagtgaacccttgtacactgctggtgggaatgtaaattggtacagccctatagaagacagtatgaagtttctataaaaaattaaaaatagaaccaccacatgatttagcaatcccacttctgggtatatatccaacagaaatgaaatcagtatctcaaagagacatctgcacctccatgtttattggagcactattcacaatagccaagatatagaaaccactggtgtccattgacagatgagtagataaagaaaatatggtctgtgttgtgtatgtacctgcacatatatataatggaatattattcagccataaaaaagaaagaaattctgtcattcaacaacatagatgaactggagaacatcatgctaagtgaaataagccagttatagaaggacaaatactgtatgatctcacttatacatggaatctaaaaagttgaactcatagaagcagaaagtagaacagtggtggccagggactgtggtgagggtcagggggaatggggagatgttggtcaaaggatacaaacttgccattataggatgaataaattctggggctgtaatgtaaagtgtggtgactatagttgatagtgctgtgtagtacacttgaagtttgcaaaaagaatagatcttaagtgtcctcatgacacacacccgggcacacacacacacaatagtaactatgggagatgatggatgtgtttattaacttgattttggtaataatttcacaatgtatatgtatatcaaatcatcatgttgtaaaccttgaatatatacaacttttacttgtcagttgtatttcaataaacctggaggggaagaaaatcattagggtagacaaaactcttaaatttgtatataaatatttatgtgtctatgaagaggtaggaggagggtcacagagaagattcattattagctatttaaa

SEQ ID NO: 1146 - DNA, 4040 bp, Homo sapiens
taagcttcaattgcctgcatccatattcttttaattttcatcttgtagggaagccagccgtaattgtgatataagatgatccctgtgcagttgtacacacgtgatttcaaactacaagaaatacaaatgacatacatagaaatcgcttatgtttctctgggctggccctataggcagggtactgtttaaccaataaactctgtgaagacataggtgaaggcccattttgtgaaaatctattgtgcttgagtatgttaaattttggagggtttgaaatgacctgcaaagatgacagctcattcatatacatgaagaaagatgagtgaacgtgtacaagggcacacagagccgggcgcggtggctgatgcctgtaatcccagcactttgggaggccgaggtgggtggatcacctgaggtcaggagtttgcaaccatcctggccaacatggtgaaaccctgtctctactgaaaatacaaaaaaagtagccaggcatggtggtgcatgcctgtaaacccagctactcaggagactgaggcaggagaatcgcttgaacccaggaggtgaaggttgcagtgagccgagatcgtgccattgcactccagcctgggcagcaagagtgaaacttggactcaaaacaaacaaacaaacaaaaacaaacaaacaaaaaaggtcacacaggaggaaacatacacaaacacacaaaacacacacacaaataccaaatatcacacatatacccatctctctccacacacatacacacacagactcatgtatcctggtaaaataataaaccctttacaaagacactttcagaggtcaggggactatgtggaggagcacatgacagaaagataaccatggaatcatataatcaaatcgaccatatttctggaatgagcaaagcatatatatgcttatgctctcctctgtgtatgactgtttgtctataggtgactattttcaactgcctgtgctcactaaggcagtgggtttttggcccagcatccaaaagataactgtccgatctttttctcactcctttaaatatttattgagtccctattgtgtcaggcattatgtaaaggcacatggtggcatctaatgagtaacatgtactgcttgtggatagattcttgtgtgttctttaatgaattatattacttggctctttttccccccatttctgaggttttggaagctgataacagaaataatacattttagctttgtaagtgggggaaaacccagacttcttaacatgtagagaaatccatgttcctcagttgtttcttgttttgtttttgtttttgtttgaggcaggctcttgttctgttgcccaggctggagtgcagtggtgctttcacagcccactgcagcctccacctctcaggctcaagtgatcctcccaactcagcctctcaagtagctggaactacaagcacacgccaccacatcaggctaatttttttaactttttgtagagaagaggtctcaccatgttgcccaggctgctcatgaactcctgagcttaagtggtcctcccgcctcagcatcccaaaatgcagggattacagggattagccactgcacctggcccctgtttctcagtttcagggatgtgaacttacaagaaaaatatttggaggataagtgagatttgcatgaatttgtgatgtggagaattacatcaaatgttgaaatgcataattctctacaatgttttgagagtttgtggactatgcattcattatgattaggaagtagttaattacatgactcctaaatcccatatcctcacactaaattgtggagtcccagactgttttttcagactgaagtcctaatgttttgcagtcaagaatatcatgcacacatgcacacacggacacacacacaaacacaaccatgaacacgttgctggacttctaaatgaacaggggttggggctgagctgcagaaggagttggccttctgtacagcagaaataaagaactctgttatttgcatttatttagttaaaaacagaaggtggcacagatcaatgtttcttcaagcattaaaaatgccataagtataatgctataaatagttctgtaagcaaatccttactataaacatcataatataacaatgctctaggttttgtataggcaggagtgagagtgtttagacgctgatatggttaatatacttgatacaagctaaacttcatccctgatgagggactgaacttggctgcaaattccttttaataaggtctcccagggtttggattttccttgacagagcataggggaagtgctgagtcctcaggcccatacccagatgaagaagcacaggcatgatcaaagctacaactattatatccatccgggattttcttttgtgaatgaaaagaagaaaaggcatcaataatgtgaccttggacttacaggcaatatggacactttggggaagttatgaagcgtctcccattcccgcttgaggtactcaatagagcccacaaacacaatgtgcttgagctcatggtaatgaaagttgctggcacggagcggcatcaccaggttccggaggccgatcagggctgagctgacgtcgccaaagatgcagaccacgacatggccactcaggacggtcatggcagcttcacttcgagtctacaacagggagaagtgggtaagagtcagagagaagactgcatagggctgttgtaaggagtgaaataaatcatttgtgcaaagaatcaagcaaatatttgctgagagcttactatgtgctattatttttatttcatcaatgttatatacatgccatatagagctataatttgagcacgtgtatatgtattatatttttgtaataaatctgtccaaatgtatagccatacacattgctaccttctttgacaaaagatttaagaaaggtatgccataaatatgtgtgagcagaccttcataataattttcaggaggtaaaataaaaaggaaaaggaatatttatgctatttggaaagagaagtcttagtttccatgaaattgttgattaaatgagctgccttttctggcttgcttgctgagatgatgataaaatggtcagatgcctgcactgggctcagtgggagaaatttgactttagaattctagacttatcagtgagatgtccgtgcatcagcaggtggaacatgctacctaaagccaggagtggaaaactacgacccacaggccaaatctggcccactacattcttttgtatgttcagtgagctaaaaattgtttttgtgcttcaaaatggttgaaaaaaaatcaaaagaagacaatgtcataatctgtgaaaattacataaagttcaaattcccataaagttgtattggaatgcagccatgctcatacgtttaggtattgcctatgggtgcttttatgctacaacagcagagctaatcagtagcaacagagatcttataccctgaaaaacctaaatttttcattatatgacttattacagaaaaagtttgctgacccctgtccaatgctgccttggactttccagggacatttctggaggggcctgttttgcttaaatcattcagagaaaagatctccccaaataatcattacaaggggctagagagagattagtaagagcaacaggccagtgtcttcctccaactccaaacctctatctacaaaggagacaaatgaaagaacacagtcactctattagaggagaaccccaacttcccaggaaatacaaatgtttagtcactgctggccctttgattcactgagctagtgaagccaggaggccagccgtggacctttctctgcctctccttctggttcaatgcctcccattcctgtccacccactgcatgcctggatggccccatgtggcttacaatgctttgggggaggcatattaatgtccactgtacatatcaaactctgcttgatttaatctctagaattgaccactgcattgattgtataaatgccaatgttgcaattcacaacaatgtcagggttattacagtaaccccc

SEQ ID NO: 1147 - DNA, 4055 bp, Homo sapiens
gactgactaccaaatgcccacatctggaatacatgatttcaatactaaacaacaccctctctccttgccttgacaactgtatatgcactaaccatccaatgatgctccccaccaccttcacctcccaactgctgcatatcttagatgagagcctcaagctcagatgcatcttaataaacttgtttcaaattctcagggcaacattcgccctctattgccttgtctattggtggaaaaggaagatgcttccataaaggcctcccgtctagtgggttggcagagcctcactgacaaccttaagaactgcaatggaatcaggcagttctaacaagcttatagcacaataaataagctcctgcaccttgaatcatagtcaatgtccatgcttttatctctgatagtgattcagcacctcgggtttgggaagtcattgttccttcctgcaaaactggccatataattaggacattgtcccagctatacttaaccactcttgaaatggagctatcttttctgagtaatattgtcaacacaagacagaaaatatacatcgggtcacattccataaattgtaaagtgattttaccttttgaaattctatatttcaacatcagagggtgacttttttcttttttctttttttttttttttagacagagtctcgctctgcagaggctgacttttatttactttttactatttgtccttctgaaatgtctccgatacttcccacttatatgtcaagagtacagagtgggacagcaatctcttccatggcccaaaaacctaggattaagcttttgaataactaccacgaccctccaatatgctccccactcccacataaggtgagaaaactttctcactgcctttatttatgcctgagaatttgcttttagactacaccaaatgacaaatactatgtgaagccaacttgcaaagttatcttcaacgaacatgctagactactataggaatatctgtcatatctgatcttaaaagaagaacaatcccactccgagtagcatctcagtgtctggattgttgagaggtcttgaggtatgtaaaccaccaggccatcttccaaatactgaacttagtcaaagatgttaagataaaaaggctgataagaactatttacagatcagggtgagagcacattttgagggatgtttttgtccttgaagagtctttaacagttgcatagatatctattaatattatctggaataggtaggtagacaaaagccatcatggagaagaggtttgagaaaatgaacaaaattaactctttccagcccatgaagaacatatttcagttgcaagaggatattagcagacttgccctgaagatatagagccaggttcaaattctcttgccctgtttactggttggagagaaagtattacctcaggatgacctgagacctgcccctagtgcatttaggatttaaaagatactcagaactatgttcccataatatcagcaagcaagcaaatgaaacagcaagctgacaaaaaacacttttagaaaatgtgtgccttggggaagaggagatacattttggtttggtatacttgattctttctgggaaggagtcagacgttgttaacagtggcctacaactttcatccagaaaagcaaataagcaagcctgatgatcgatcgcccttcaataaaaagaaaaaagacagctaatgtcaagcttcattaactggggtagtggtttccagaaaccaggcataatttcacactggagctcaagccatggtttgcaatggaacatccagaggcatccaggaagtcttagaggtatgccacactacactctactccccacacatctctcatcctggcctggaccatttaaatataaacaatccaggatttcccccaagagactgacctgaggaacatcaaaaacctcccggaacaaagacattaccctctctgaccagcatggtacctggaattctaactttggtttattgaatcagtaaagcaaccaattgaatcagtaaagcaatcaataagaatcccctattctgagcatggaatggaggctacagtaatgattaagataaagtccctagtcaaagagaggtccacaagatagcaggaaaaaaatatatatacaccaatagttcaatagttacagtaccttgtggcaagtgttacagcaaagtacaaggtgatacaagaataccaagaaaaaagctgttcatatcctggtatttgggtagcattaaggaaggttttgcaaagaaagtagcatttgggccgggcgtggtggctcaggcctgtaatcccagcactttgggaggccaaggtgggcggatcatgaggtcaggagatcgtgtccatcctggctaacacggtgaaaccccatctctattaaaaatacaaaaaaattagccaggcatggtggtgggtgcctgtagtcccagctactctactcgggaggctgaggcaggagaatggggtgaacccaggaggtggagcttgcagtgagccgagatcacgccactacattccagcctgggcaacagagcgagactctgtctcaaaaaaaaaaaaaaaaaaaaaaaaattagcatttgatctgaaccatgagaaatgaagaggaatctcagcatgttgcagtgttgatccactaatagccagtaggacccacccagagaattgaggcccaaatgaaaagggccaaataatggcacctaaaaccatggctgaagatgccccataccataccacctaacctaaggtacagaagactcagaccaggccttccagctgtctccagatgtgcaatgacagtcaagttgaagatggattaaactgattgagtatgactgattgacagcagactaagaatgatccatgagattaagagagaacaaaaatcatggttccaaaacaggaagattgttataaaaattgaaagtaattcaaaaatgaaatgagttgttgcccaagacagtgggttttctatcattgagccattccacaagagcaagggatacagtgagcatatgcatataaaggttgggcgagcctagaagatcctgaaggtttgaagcactgtgctgtcactggagaaagacacagctagaagaattttgaaagtactggaccattgttggatatcagaaggctggagagccctgagtaggtaaagaaaggttgctagagtgaagatgagaggtaagcagcgtgggagagggattaatttatggctccagtaagggccagcactgttacacactcactggatttcacagtctgggagtaagctgggaacacaattcgttccagcaacaatagagtctgtaactgtttctggccagacagtataaatttctttactatggctgttgctgtagtaatttcaagtgccttaggctggcctgtgctgcagagagatctctggaacaggtggagagtgtacagtcagttgtccacagggactaaatcaaagtttctaaagcttctattgctagaagaaagtccaagcatttgccattgagcacaccaatcaacactgctgtgatccagggagacccagaggaattgggccgtttgttgtatggaaaggaggatcatgagaaatctccctgaacaagggatcccaacatcttcagtttgcaaggtgatagagacccacttccaaagcctctcccacaactcctcaaagaccagttagttgaaatcaaggaccaggattagatattgtctttcacatcataatgacattacctaagtcttccactcacaaagtaattttcaatttccctaaaaggcaccataattaattcaaggctcacttgtcacttgcgacttagccaatgtacatgccctattttagggtaatagaaactctatgatgtgagatatatctgctgtttcatttttatgggctgaactgtgttctcccccaaatttttatgtgaagtcttaaccgccggtacctcagaatgtgactgtattttgaaatatggtctttaaagaagtaattaagttaaaattaggtcattggggtgagttctgatccaat

SEQ ID NO: 1148 - DNA, 4026 bp, Homo sapiens
gttttgttttttttttttttttttttttttttttacaaattgaaggtttatttttccattgctagagcacaggcagagtagatttcacataattcttaatgcctatgggattttcagaatgttaaatgagctttgacttcaacttaaagtcaccagctgcattagttccaacaagaatcagcctgtcctttgaagctttgaagtcaggcatttacatctgtttacagcatgatctactgaatattttaatcctgctgttgagacctactgctcagagaaaaagatttctttcaagatgttactgctcactgataacgcacccaattattcaagagctctgatggagatgtataagatgaatgttgtttccatacctgctagaacaactaccattctgtagcccatggatcaaggggtaattttgactttcaagacttattacttaagaaatatatttaataagctatcactgccatagtgattcctttgatgaatctgggcaaaataaattgaaaaacttctgaaaaagaatcgccattctagatgctaataagaacattcgtgattcatgggaggaggtgaaaatatcaacaggagtttggaagaagtgaattccaaccctcatggatgactttgagggctttaagacttcagtggaggaagtaacagcagatgtggtggaaaaagtaagagaaatagaattagaagtggagcctgaacatgtgactgaattgctgcaaactcatgatcaaacttgaacatatgaggagttgcttcttacgggttagcaaagaaagtggtctcttgagatggaagctactcctagtgaagattctgtgagcattgttgaaatgacaacaaaggatttagaatagtacataaacttagttgatgaagcagcagcagagtatgaaaggattgactccaattttgaaagaagttctactctgggtaaaatgctatccaacagcatcacatgctacagagaaatcttttgtcaaaggaagagtcagtcgatgcagcaatcttcattgttgtcttattttaagaaattgtcgcagccaccacaatcttcagctaccaccccccgatcagacagcagccaccaacactgaggcaagaccctctaccagaaagaagattaaaactcactgatgactcagatgattactagcatttttaggagtaaattattttaatgaaggtatgtacacacttaatagactacagaagagtgtaaacctaacttttatatgcactagaaaaaaaatgtgtgttacttgctttattgcgatattcactttgttgtggtggtctggaactgagcctgcaatatctctgaggtgtgcctgcaaaagatctttgttttgaggattcgcagagcaagaaatgccacttggcatcaattaatctcaggaagtgaactaaatgccctgctacaacaggaacagaaaaagctcgccttgaagacaacagcctaaagcaaaaccacaaatcccttttctagcaaacctgctgtgaggaagctgatatcatattttaaagtgcacaatttcccttacaggcaaagacagcaaatcccagttccttcggtggcactgggttcaacgctggacttcagaaatttacatgaaagtacaaaaaaccagccaaacacacaaaaatgttatgaaaaaggaaagttacaaaatggctagaaaattgcattcttttctctgcttgattttcgagacctcatgtcttatcacacgataaggccttttctgtcattatgagcatcccatccaaattaagggcatcctacagtggtctccctgggagatgagaggcttgattaaaaggaggtgaatttctcatccctccacagaccttttatccgagctgcaaatactgactttattgagcatctattatgtaaggcaccatgatggggctaacaagacatttctcagacttcacagtttggctcaagtgttcctcataaagccatcatcctgaacagccagagagactgaagttattttcccttcctgggaacttctagagatgctccttcggcaataataatttccatgtctgttttatccattagatggtgaactatttaggggcagggatctattttgctcttccatgtatttccagaatccagcagaggatgcaatcaaactaactaaaggaactgatgaatcatctctagtccccaaacactcttcaagcagtcaacagagactcagcaaacctttcgtggagatccaaaacgtgtgcagtgagaacccatttacctctgatatcttgcaacaatttgtttttgaacaatcagggttcttgcatcatttttcatttacagggactgcgtatgaattaggacacagagcatttgctataaaaagggcattgtgatgtgaaggacaaccctaaattatgtctctaaccagtcaaggctgcctgaagttcgcctggagccagctgctgtaactaatcagcagggaggactcatgtcagtggtcagacagatgttcttaattaagcaactatttggttctccagtgcaaagtctgaacacttcttagagatgggcccccatcacttcaagctcctctcactgttctgattcttcaaaagagtggttctcaaactgtggcccagaccagccgcatcagcatcacctggaagtttaacagaaatgcaaatttccaatccccaggccagatctgctgaattagactgtgtagggctgtggaccagcaagctatatcttaacaaagccctccaggtgattccgacacctgctaaagtataagaaccaccactataaagttttgcccagatggagaatctatatggcttcagtaaatcctacccaagttagcaattgtcaacaacacacagattataaggctgtagttctattcagcaaagccaggactacagctagacaagagggtgcctagggtgcaaaattgaaggaggcgcctcacattctgggtgcctactctgattctctgtgactctgtggaactcgaggcattgtgtcaacacttgattcttgatggggatttactgactagatgctgcactaatgactctctcttgctgacttctcttcccatgagctaatcagcaaataaatttaaacaagcaaattaaatactagtcctcgcaaagtgcaatacttacaattcagtgttctacccttctttaacaacatggtatctagtcactaagaccttgagcacaatgttcaagaatatcaggccacacgggtctgtctgagcctgtatcagacacagaaggctggattaggccttaggtggtctcctcaaaaggaatcatagttgggtgttcagcaccataaatggttccaactggatctgcctcattcttgggtgccttggctcctgggtgattactatttcctgatacttcctgaggctttgcagagcaaatcctggctcctgccttaacacatccttcaacagggcttccactcttctgataatgatcatcacccccgagacaccactgcccaccaccctctccccatctcccacttgacggccatccctggagccacactgacaaaactctcaggccaggctgtagccaccctggcagaactagggtccttttcaatttctctgcatctatctacttgcattattttccctgctgccacctaagatgttatctagtgttaggcagccagcattctcagaagaaggaaatggttgcctttatgtttgggagacagcctgggagaaccaacacgttcatcagtcctacaggaggttgtacaagatgctcttgacacaagagggcaaggtcatgaccatctgctgagcatgaacttgtccagggacctgtgtggtccacccaagcctcagtaccatgacaccaactacttttttcttctccagtcctgggggaggcctgtcatatgctatcagtttgtgcattaagagatgaatttacttagctaagctgtccctgccttccttctttcttttgcccagtggaaggaat

SEQ ID NO: 1149 - DNA, 4041 bp, Homo sapiens
aattaatctcaggaagtgaactaaatgccctgctacaacaggaacagaaaaagctcgccttgaagacaacagcctaaagcaaaaccacaaatcccttttctagcaaacctgctgtgaggaagctgatatcatattttaaagtgcacaatttcccttacaggcaaagacagcaaatcccagttccttcggtggcactgggttcaacgctggacttcagaaatttacatgaaagtacaaaaaaccagccaaacacacaaaaatgttatgaaaaaggaaagttacaaaatggctagaaaattgcattcttttctctgcttgattttcgagacctcatgtcttatcacacgataaggccttttctgtcattatgagcatcccatccaaattaagggcatcctacagtggtctccctgggagatgagaggcttgattaaaaggaggtgaatttctcatccctccacagaccttttatccgagctgcaaatactgactttattgagcatctattatgtaaggcaccatgatggggctaacaagacatttctcagacttcacagtttggctcaagtgttcctcataaagccatcatcctgaacagccagagagactgaagttattttcccttcctgggaacttctagagatgctccttcggcaataataatttccatgtctgttttatccattagatggtgaactatttaggggcagggatctattttgctcttccatgtatttccagaatccagcagaggatgcaatcaaactaactaaaggaactgatgaatcatctctagtccccaaacactcttcaagcagtcaacagagactcagcaaacctttcgtggagatccaaaacgtgtgcagtgagaacccatttacctctgatatcttgcaacaatttgtttttgaacaatcagggttcttgcatcatttttcatttacagggactgcgtatgaattaggacacagagcatttgctataaaaagggcattgtgatgtgaaggacaaccctaaattatgtctctaaccagtcaaggctgcctgaagttcgcctggagccagctgctgtaactaatcagcagggaggactcatgtcagtggtcagacagatgttcttaattaagcaactatttggttctccagtgcaaagtctgaacacttcttagagatgggcccccatcacttcaagctcctctcactgttctgattcttcaaaagagtggttctcaaactgtggcccagaccagccgcatcagcatcacctggaagtttaacagaaatgcaaatttccaatccccaggccagatctgctgaattagactgtgtagggctgtggaccagcaagctatatcttaacaaagccctccaggtgattccgacacctgctaaagtataagaaccaccactataaagttttgcccagatggagaatctatatggcttcagtaaatcctacccaagttagcaattgtcaacaacacacagattataaggctgtagttctattcagcaaagccaggactacagctagacaagagggtgcctagggtgcaaaattgaaggaggcgcctcacattctgggtgcctactctgattctctgtgactctgtggaactcgaggcattgtgtcaacacttgattcttgatggggatttactgactagatgctgcactaatgactctctcttgctgacttctcttcccatgagctaatcagcaaataaatttaaacaagcaaattaaatactagtcctcgcaaagtgcaatacttacaattcagtgttctacccttctttaacaacatggtatctagtcactaagaccttgagcacaatgttcaagaatatcaggccacacgggtctgtctgagcctgtatcagacacagaaggctggattaggccttaggtggtctcctcaaaaggaatcatagttgggtgttcagcaccataaatggttccaactggatctgcctcattcttgggtgccttggctcctgggtgattactatttcctgatacttcctgaggctttgcagagcaaatcctggctcctgccttaacacatccttcaacagggcttccactcttctgataatgatcatcacccccgagacaccactgcccaccaccctctccccatctcccacttgacggccatccctggagccacactgacaaaactctcaggccaggctgtagccaccctggcagaactagggtccttttcaatttctctgcatctatctacttgcattattttccctgctgccacctaagatgttatctagtgttaggcagccagcattctcagaagaaggaaatggttgcctttatgtttgggagacagcctgggagaaccaacacgttcatcagtcctacaggaggttgtacaagatgctcttgacacaagagggcaaggtcatgaccatctgctgagcatgaacttgtccagggacctgtgtggtccacccaagcctcagtaccatgacaccaactacttttttcttctccagtcctgggggaggcctgtcatatgctatcagtttgtgcattaagagatgaatttacttagctaagctgtccctgccttccttctttcttttgcccagtggaaggaattgtgagggtgacttggctcagtccattttgccattttctattactaaaatctttcatgctagcaggctctgatgtgagaagtcctaacaaaatgaccccacgaaaggtttgagtcaaaagagaggtgatgagacttaacaagtagatgagtttatttcacttaatgaccaggagatgcccaagaggataatctgttttcctcaaatcatattttgcctcccattcaggaaactaatgtctaatattttctgggtctcctgacatgaaactctcctcaaaatgttcaatttcttttttctgggtgttgtcaattatccttgccagcccagctgggtgctatctgtgtaaactgtccacctgatacatcctatgtaaatcctaactttcactgaagttttcattgaaagtttatagggttggtaaggcccccaaattaagaactcttgacctagctatttagagacaaagtctgtgctccccaggactttacaaatgaggaaagatgtagctatccttacaaggcaccaccccactaagtagggagaattgggccacgggtgcttgatgattttagaggaaaactaggatgattttagaggaaaactctaggtctcaggactgatgtcaggaattacgtgtgtccttgggaaaactatgtatcccagtcctggtctactattctacagcagaccctgaatggcttagcacacaaacggccttggcagaggctggggttgagtgggccttctatttcacacctctgtgcttatgtagtgtgtgtctcagaaatctcctgatggaggactcccaacccttctctctgctgccaccagtgattcccccaaaacacaagttaggttaccgcctcctcgaaaaccttcaggggttccctaatgcctatgacaagcaaaaccttcatgactgggtgccagaatactcttacattctccactccatctaggccactccaaagacccctggctatagccacacccaggcatttactgtggtctgagcactgtccctatgtcttccatcatcctaattagggaaaacttacctagatttaccagactttacatttctgtacctcaacatactcacctgtaaaatgggggcaagagtaataactacttatagagttgtagttaggactcagtgagttacaggcatccagtctcggtaaacctagacaagtaatattattagttgagcattctcctcatggtatggaactaggttcaataagacctcctcctaaaccaggctcagcctcccaaaccagaggtaatgacagctctttctattctcacagcccatgctagtggaacccccagcttgttcttacccaattctgtgtttttatgtgcttgtcttctcctctgctaaactataagcattttgaaggcagggatctaa

SEQ ID NO: 1150 - DNA, 4029 bp, Homo sapiens
ctgaaagtcccatttactggagagtagaaagcaggtgtcggaagaggcgggggcaactggaaaagccacagggagctgggagagcccttgttttctgccaatcaacaaagggggtttagcaaaaatggacccatgacttcattgccagtgccagatattcaaatgtaaaacaaagggccctgaggtctttctgtaaactggaagtcaagggatatggagagagggctcaggaggggtccatctttgctcccaggtcagatggagaatgtggagcacctgggacatagaaagacgtggtaagggaggagtgtctaagactttctcacttgtcatgggatggcccattccagctgggctgcgaagggagaccatggtgggctggtgggataagacatcccagcgacaggaactgaggccttagcagcagcccaaaggcaaccaacatgagaagcccgagttctgtagcttggcaagtttccactcaccacctgacccacgtttagcaattttgatgtaccatgaaacagacagctccagcccaggatgactgcctccctcagcccctctccagcaacgaatgaaagcaagatccactttgaaaattctcccccatcatgcaaactgacacaggcatgcttttcaaaaacccacagccaatctgttgatcattacttatttacaaaggccttcgggcagaaagtcctgtaaaaaccatacttgatacgatatacactagctttttctgcttgtggaaaaaaagtccccccaaggctacctcaaaccatcactttctattgcacataaaatgtagcgtgtaacactaaagtatttaatatatatggtataatatatctacaggaaaggcatttgtgtagaagtatgttaccctggatttggtaatttgatgttttgctgaaggctacgacttaaaaaagcctccacctcatacagaagacctgtcatcttggtacccaagagccaacagaataaagaagtacccttaagcagcaaaactttgacacagctttgaagcatatgaaaacagtataactcctcagaattattattactcaagatcaaagaaatgagccatactttacatagcaaacagggacagggaatttggctccaaaggtttcagatttttcagacttctctttatttatttatttgcttctctaaatttaggtgaaggaaagtggctgggcttttctctactttaaatgggaataactattagaattagataaggtgattacctaaaggtgagtaaataggaaatgaatgctagcatgacactggcatcataaaaacgaaaagcttggcagttggcacattttattcctcctcataaactgtaaacaagcatgcaaatcagccaaacccaaggaaggctgggtgaagtggaaggcagagaacttttaaggaaacatttaacaggaatagatggtgatatggaaaaggagttgggcagggtgagtcttccacggaaaacctgtgtcctcaaccacatgaagaaagactgcccttgcctattttccagaaaggtggatgtggagggccaggaacatgcaaatgttattgaatatggggagtggaaatcaccactattctatttcaaaaatcaaagccggtggccatgaaaagacaaaactaatgtcaagatggcaggcatttccagagcagaaaccacatagggtgagcagtgcaaatctgaaatcactcctgtttcatttgggtggtagagagtcaggatgtcggaggaaaaaaatgctgggattggcagatgaattgaagacaaaaaggggagataaaagacagataggccaagaagaagaaactgcagaacgctgttgaaatttgacttcacttgctatttaccagaggaagccatagtcaagaaagaagtgagggagaaagagagagaaggaggaagggagggagggagggggaagaagggaaggaaggaaggagggaaggaaggaaggaaggaaggaaggaagggaggaaaggagggaacatgtacatgcatgctgtatttcataattaatattgcttttagcctgagcagaactggattacttttgaactttgctttggcaagtccacagattattagactttttcttatcagtcaaaatcaattaacagaaatttgatttcaatcgacaggataaaaggaaggtaatcttcaggttcatttttgattgtgatgatacatctcacatatggccttaagtacagaaaacagtcctcggagggactccagcagaaagagactgccgcaggcaaactaaccacacgagtttctctgattggttaccgccatcattagtgccactgctgtttaggaactacacacagacaggacatggtgacagctaagactttaaagcctatgtatttttcaaacagcttttcaaactgtttttcatgacagaattttttcagctctatcattaactgctgacaagctgacagaataaatactccagcctttaagaagccatctaacgatctcgctcccctcccccaccccgggcttgctggggaggggagactctgggcctggcagggtgaggagagggcgaggggaggaagagaagggctaagagggaaaccgtgggcaaccagcccctctccttacctcatcagcttaggcgaggtgttgggtgagttccgcatgcctccattccgttgctttttttttggtgatagtgttgacggctgctcatcttcaactggaaatacaggcagctcatgagattatgaacagtttgagggcagactgtgcaatacaggcaaaatatcaaaggacacacactcaaggctcagtcactcactaggaattcatggctgtcttttaggacccaatgacaaagaccaaatgtgttagtcaaagaggccggcttagagaaggtgaaggcaacacctctttacactccagcctttgaacatacactttaaacagactaaaacagtttgtaaacaccctgccataagaaaaaaaaaaaaaaaaaagaaatcatgatttatctgtataccaaaaaaaatacttatcattattcttagagttaattttggttactttgctttgcccagtaatagactgcgttttgttgtaaccaaaatcagaaataaagttgtatttgaaatgtcagcataactgccagcctgctgcttctccagatgaaccaacttagctggttcctaacccctgcataccagagaaagagcgttgaaaagaggcaaggattcaaggccttgacagccaatgtttcaatcagatcggggcacattggtgcatgctggctcaataatccccagcccaactcagctcttatccctccaactgccaggagggagggcttgtggggctgtgccaacggggtcctttttcaacccatgaagacaggagcaccggggctggtgaggttggaggagagccccggaatgaaggaggaggttgccattgaatgaaatctctgatgatgcagcagcggggcagggatggagggcagcacaggggattggaaaccaaaagctgttttccaaatgtctaaaccacacagattgctaagcaatgtgaagcttcacttagaaacaccacagcacactctactgctcttgcccaaagacacccactaataagctttgcagatgtattagcctgcatcatgcttctttttaagagaactgcttgataattagcagatgcaaacccagcctgtcacccaggggcatcagcggcaaaattctagtcctcctctccccacccccacaattcaggctaaagctgtaatatcaagaaggaaaaataagatctttggattcttatagttgactgcaacacagactaggaggaaagcaccctgaaactcagaatgcacagcagttaccttaaagctaagaagagaaatattagcagtgatgacatcaaaagagacttgatatatgttaatggtgtaggagtcttagatgggggagaaagtgccatgtcagctacttggtattatccaggaagaccca

SEQ ID NO: 1151 - DNA, 4046 bp, Homo sapiens
tttgagaacaatcaggaaaactcttccttggcttgagcagaacaaacagaataatggctcctaataggtaatagctatgagacattcagcttttggatacctccacgcgggaggaatcatttgggtgctgctgttgcattcaagctgcctacctcgagtcagagtcaaattaccctgaccgccataaaaggcctcgaatgttgctctacatttgggcaggttgatgtgcccacctgcagatgctgacacctctctagctacaacagactcctttcctcacatgagccctgcccaatgcattggttttatgctgccctgactcacaccaaaataatcaggtttgctgaaattaataaaactgaatgtgaatgtcacaagtccttgattttccagagcaaatgctctatatgtggtagtaaccctgccactcctcattggaagcattggtggatttttgcctatgtggttttttctggtactttgtttccagatcttctttcccataatttatccttcacaaagaatatcaattgcacctgccatttgatcattttctagttccttcagtcatgtccttgttctttcttactacatttttccctcttactcttcttgtacatcccagttttttatgtttacatatatatactatatagtaagttgctgcttagaaagttttgggaagcttcatggatctagggcgatctggcttctagcacatcaccaattcctttaagggttgggaagcccttcatttattcattcttttactcatgaaatatttactgaactggaatccttcaggccatttcctattcaagtactcttgccaatataggaagcccagccaaggatgtcagcatgctacatttttgaccttggagggagggaaggcagcccctgggtcctttcttgactgagtgtgatccaacaggctccagcccagaaagctgacattggccaaaatgaagatcattttaatgcaagcagtcagctcccttcccagaagatagcccatgctctatggtgtgcagatgcccatctatgcactgtcgatacagctggtgcagtgccagctctagggctggagtctttctcacttcatttataagtctctcagtgcagtcgatcatccctaatgcagatctgcctcaaaagattccattttctatttgcatagggttttctctgcagctctaggaacatttggtgggactcatcttgcggtattgaaggggctagaatgaaaactttcagatttactagaaaaggctgggggagttttttcttgctgtttcccttgaatatgagagattagctccccctgaggatgaccaaatgagatggtctgagaagaaaggccacttttgttagtcctgctcatctgagctggacatcaaaagaatgtctcctcagaataaaaatctgtgggcatgtgtagcaatctccctccaaagcaggcactatctagctatttacagaaaggcctttgcaattccctctgagatttcaaatgcaagggtctgacaatgctggatttagctctgtccatttagattccctttgggaaaaaggtcagctggggaagcagaacccctgtaagcagatgtggcgatggagggtcccctgactatccaggtaattcaacaagctggtttgggagaaagccccagagagagaaggacaacacacagctggttggcttggtgcattttgccacattgcacttccagaagttggcattctcagcatgcacagcctaccaccatgagggaacccaggactcaagtgcttttccatgcagttttaatgaccccctgaggtcaatggtgtacacaaatgccacaatcacggatgctgacataagtaaggacacagacaaaggtcttatgcacaaagcagtaaaaccgaaaagaaaattgtgcatgatacttagaaatgccacatgacttctttaggactctgtgtggcagtacttcacaggaaatgtgttttgtatttccactcgagaaggttaagtgtttgaaaactacagtggattttcagtgaatgggatgtgaagcactttattattttccccccatcgatgtaaggagacatgctgacttcctgagaaaggaggagaaaagtctccttgccatatacagggatttaaagaataattcccatgagctctaactgaagctaccacctgcagctggaagcaagagcctcagcgctggccagctgtccccactggtggctcccacttgctttgtgtctgctgctcagcctgagccaatacttcacaccagcaggtgagagctgcctgcctgtcaccttcaacacactcaagatgtaagatatatttgaactggggaagatgatgaggaataaggaagaaataatggttaggaaaaggaaacagaagcagtagatccccaaggccagtggtagtggatgcagccgagtgggtctcctagtcctgggtcaggggtcaggaaatcttcctccaataagaaggaaactctagcaaacccagctaggaatcacaatggctgccaggtcagctggggagaattaggctcatggaattcagctgctccagagccactaattaaactgtcttttaaagactgtaacttcttggatttgcatctgggcaatgtgcttcacctgcagggtcctgcagactatagatcaagtcttccttctgaaggcttctcagaacagctggggcccgcccacaacaggctcccctctgtttgtctcctccccgagaggggggcttccagctcccctctagtcagtcccttcctcccctgcagccacagcagccctcccaaaacaaagcctctgttaggtcacttccctgatcaaacaccaatatgatagtgtcgcactgtctaaagactttctatcatattacagactaagaacaaaacccttggcctggcccctgccaggaatggggccccattttacccttcaggggggtcaattccctgcatgctaagtaagtcttaaactctagccaaattgggtggccagctgctgtgcaggaggcccccccaggactctctacattatctcgaggtttcattaccagaatcctcacttttttctcctcccttggagattaagtgacttatccatcatattcaactgcaagagtaactgagcaactcaaccgactccacactctgtggagccacacggcctgtgttgaaatcccagctccaccagtcactggctatgagacccttggcaagtcatgagactgtgacatgaggctatgagacccttggccagactcactggctatgagacccttgtgccttagttgccttatctgtaaatggggcacattgcagatgtctcaggttatagttgcctcaactgcaaacagcagttaccacataataagggttaaattaattaatatttgtggtaatagggggagtagtgcctgtaatgcagcaaatgctatataagtgttaaatttaacaacagcaacaacacatacacacatcctccctgtgtactcagagttgcttgcacacagtaagagtagagactacactaattctagtcgtaacatgaatccaagttaaccaactagccatttcttagtaatgctgtgtcaacaagtctcactcccttggtgatgcagtatacacagaatatagatctctttggggagtgaccccatgctcagataagactaaaacatgatgctagcctcaaaagagaaacataatttttcagcaaatgttggtagtatgcctccctctgtctctcctcaccaatgagcatgacctgcttatgattactaggtccactccattctggtttccatttttggctgctctgtgcttgcagcttctaggcttcactgggagtcaaagatcccaaatgttaagatcgttttgaagagcatgctggcaaatgtcctaaatgtgctgggccagatgacaagcatccatctccgatgaaggaagtatccaactgaaatgatgggcaccatatgagaaggagaatcccaaggcatgatggaaaccacaggt

SEQ ID NO: 1152 - DNA, 4050 bp, Homo sapiens
tgactcaaccgatccacagtaatgggccacacctccatagaggggtgcaccgagcaggcagcccctgttgttagaaggcaggttttcagaactgtgtgagcacttttaatatattaccattcctctgggaaccagctacttctcttcccacttcacaaaacacataatgggactttgtgtttcaatttaacatcccttgaaaacggaaatttttccccttataagaaaaaaaatagagtaaagagggaaacgaaaggaaagagagaaatgaattaggcagtctccaaagcacactggctcaactgggaaactgcgaccaaagcaagctccataatagtataatgacctttaatgagtgtcttgggaaacaatacagccctagcataaaagacaaagggcaaaactcatcatggctctgctgacactaattcaaaatgattttcagaacaactaaagaatgtaagagaagtaatctgatccgcccatctgacctcactttgattcaagggcccttctcctgccatttctaattgtcaaaccctctacatttcacatctgttcatatttaatgaaaagcccactctcaccactgctcttgagtcaacttgctctgtcaaatgggcaccacccaactccaccaccagcgagggatgcctggggattgctattggagcactgccagtggaatttcacatagagacagacatttttataattggagaagaagggcttatgcaggcccaaaaaggggctcaaattggaatggatttttctaacttattattaatggtcaaaggtgagtggtctcacacagggatggatgaaatctgcttttgtttgatggagtgatgacggcaggacgactgatgaaacggagaaggcaaatcgccccctgagctgtcaataccagttaaggcttcaacacgcagcccaaagctccacgtgttccctggtgggggctgattttggaggcaagggagggacaacatgccactcacagaatgtttcttagagaatgggacaatcccaccccaaggttttcttctccctggtctccatcaatggttggattaaattgcacagctgagaaatccctctaattaagatttctcttggatataatggaaattacacacactgggcaccatggggtctacatgggggacacagagtgtgctgtgattggtattgttggccagtgccaagacatgaccaaggggccctagctcagagccagagtggctcctttcttttctccactgagtctaggctaaggttttagagcctcatgattatttgagaacagaagttgtgcattaggcagaagagtaacccgggggcttgtggttactttcaccaccatcagtcaaagagatgtgaccaattcatgccacctcaggccctcctctgctcttcctccccagcacctatctttgaacttggtgtcttgctgcacatcgtagacagacaagttctctgtgcagctgtgccctagcttatctctgtaatggcatgcaaactacagataactcttcaggggaaaataaagtgataaggattcatatggtagcatctaaggattgtaacagaaatctttccaagattttaggcccatatggcagtccacactccctctcaatgcaacctccattaggtattactttgaagtgaatcctgtcccttggcactgctctggagcagcaggaaatcgtgaatcagagagaatgactctctggtcctagatcaaagttttccaaatgcctctaatatggctcgatgcacaaatcatgctttgcacttgaactttgggcccaaacataagcacctggcatggcacacagtgaagtcccggttccctgagccctagaggcctcatggatcccggctacacagccgcactctgctgggaccagcctcaacaccagcacaggggagtcaagccagttcattttccatgggaataaatgcttaagagctcagtgatcttcttcctcctgtcgtcagtgtacacctacccctgctaggaaagtgtagctcaaccagctctgagcacttggaaggtgagaggacagggagcaagaggttagcaatatatgtgttggctgctttaaagaggaagggaggaagtgcagaaacgagaaccatctcctaccttctatgctaccaaaacatgaaaacaaagttatagttatacttcaagtaaagtcctccagtggaaccacagccttttctgcacttggaccaagacccacagtcccagggtctcaaactggagctttcaggaacttcacttatgaaccgtatcaggaaaacagcaaagtccatggggaagcaaggataagggaggtctcaggaaactggcacatctcagccttgccagctaccagctgcatagccttgacaggttctttaacatctctgagcttgtggatgacaaagaagactgacatcagaggcctgtgctatggactcagggatatcacagaggtttctgacttaaattttttgttggcatttggaatcacaattgctgcaagataccttagttaaacaggggctatactattggaaaaataaaagatattaatggaacagtccttcaaaatagtcatcattctgagaaaaagctctgtaatccactagcccagtgcaggctgacagacatagaaaactcgtttccagaacaaaagacaaaatctggcactggaggaatgaggcacaggttagagagacatagtaaaaagaaaatatatatatatatatatatatatatatatatatatatatatatccatctgcatcaaaactctgttgtattttggaaactatctaagaaactatctaagctcactaaaagcaattcaatgctagagctggcttgttctcgctacaccctttccttcctccctttgatacaattcaatttacagccatttcaaaaatattaacatgtacacttctgcatatctctgtattaatacagtaggtgatatgctgtcactttaatttccatttatatttatttaaaggagagagaggaaagatatcaccagactgtaatatcacagtcctgcatgctgttacgagaagcgtaagttaagaaaatcagaagggaggccttcctaggcacgtacacagagacataggcagctggggcaacatgtcagcacacaggagttcacactgggaagaagacatcagcccgactgactcagaaccacagggcacagcacaagacagggatgataccacagacagcacaaacatggaactacgtgtgttgaggttaaacttacaggcacggaaactggtggagcaatcattaacagagacagaagaaagtgggaaggctctctcaagggtgtccacgttaccacgcacacggcctgacatgcatgagcagtcacgctcagaacgtccgcaatcaaaacaacatgcccgtctcattctcttgtagatggacatcttggctataaccgtgtggttggatgggaggagaggaagagcggcaattaatggcaaggtcacacacagcaaggcagctggaagggagctgaagggatttaacacaggtcttagttcactttaacagtcttgacccagaaaaaaatgcagagtgattgttggtaacagtttggttgtacatcaaaaaagcagcgaaaatataaattgcctttatcgtctcccaaggctgttgcacatgatttttctcccctaggtaaagcggtgaccacaggaaaagggcatggctgaatacactcgggttctcaaatgggaagaagagcaaattatcgacagcaaaaaacgtaaccaacacttttcccctgatatgattaatacaggaggacaaaatatacacactgccaatcaatgaaattagctgcttatttggtataataaatggtttttgcaagatgcaaaaatatctaatatgtaggctttctaatttccatccatttctgggcattaggcagaggctgggacaagctttcatcaaattagatgtgaaacgattacgtgttaatacagtatctaaggatgcctttgctg

SEQ ID NO: 1153 - DNA, 4052 bp, Homo sapiens
cgattttacagatgaggaaaccaaagctctgagtgtttgagaagacttaccttccagggttattttgaagagcagcaataaagaatgtagcacacctagaacaggcctggctttgactaggaactcattcaatgaagacaataggcttatataactaatgatagaccttcacaattaataatgtacttaaaatattttatgcaatattactgttgagctgaatgacctgtctgaacatttgcatcacattttctgctagtaaatttctccaagttcataagatagaatcaaatacaataatattccatgttgtgctgcaaagggccctgtgaattcctaggctgcttaaacaggtttaaggatacgaataaaaatgtcatgaaacatgtaggccagtgaaatcctgtgctgcacttacagtggcttaacaattgaagctgacaacttcagccacttacctaggaggccacaaatagaaatagagccagtttcatattccatctgaaattaatcccaaccttttgaaattctatttggcagggagagtagtagaaaactgataattctcaagtaaatttcccagataatattaagtaaagagcactagataaggagccagttgtcttgttatgttgttctgaatcatcaggaatcaggatgacctcgagcagtcattcagctctctgagcccccattttctccctcacaaaataaatgagcaggtaactaggcttcctagttctaaaattttattattctcattcaaagatgtggaattcactacatgaactggagtccgtggaagtttttcttacaccagttgatggccatagacatgttaaggagttttggggttatggaagcctgcctacttccgtgggtcaaggtgtctacagccgggccagaaagaaagccagttgaaaataaactcttaccttttaacttctttggcatcacttgcgatgaaaaatcctaaagtaccttcttggatcttaagatggtttccaggattaattaatatactgctcagtgaacaaaaacaaacagagaagatacatttgtgaggtcatgttctgaataaaaccttgaaggctacaccatactgttgtgtttatagggggcccactagtctaaagctttccccaaagattttgtccagagtccaatgtccactgccccatacatttagttggataatgccatcattaagcactactgcttacttcccaggctggcatgctcccagttgaggaaatcaaagcaaatcaaggtattagggcctgggtttatataatggagcagtctagctgccatcatgggcacatgatttgaagcaaagtccatcagaataaattccttttgaaactgctattggtggtcaacacggaagcattattggcctgatgaagctattgctacaacaattttccattaaatgacagagcattaatgggacccctatagatatacataaacatcatgtacacacaccacatattaccgcagggaatggtacaagacacccgtaaccaatgcggaagcaagctgaacgtcttcatgacattgataaggacatggaaattgattccatgtacagcctttataggaagaattggatttacccaaacagtttttttttttaagtcagcagttggatatacttaacaattccagtctgctgtttataaaaacgtacagggtgtttgaataagatgtgtgtctagcatgtcctaattgaggcaaattgagaaaacaaatgcaaacctccccttaaaaaaacttgccctgcagagaagtgggaacctaaatatacattgtcctatttcaaagtggcataaatagattagcggaccaagttgtgtttggactgacagaagagataaatgtatcctaatctaataaatggatgaaacaaacaagtttaattttctgcagatcaaaagcagaatacaagattgtctgatgcagagactgagaaaagacttcaggcttaatggatactgaattcagggattctgaataaaacaacagatacaacagaggtattccttgttctgaaaagatgttgcttaataaggtaatagatatttggaatcagtctaaaggaagttctcagctgccccaaacaatcaaaatatagaggatggtaattaacacataatcttttttcctactgataaaccattccagagaagtgttgtggtcatgaagtgatacgtctgtagtcatacaggaaggacccaggtgaacctttgttcacctggttgggagacctccgagcagatcattattgcaaaataattttttgtggtcacaagaacatctaccattacttataacaatacctgacaggaggaaactgtacttgtgtcatgactattattaacactcaataataccaaaaggctatgaagatttaactgttctgccctacaaccacaggcagcagtgagattcctcccaaatcagacagcagcagtccacactaatagcacggcctgcactgagcagcggctctccataagcacctcctaatgacccctccgccaactcttcacatgggtataacaagccctctgacttcatgcaatcacgagggtgaagtgttagagctcatacagtttagatgaatttatctttcaaagccaattcagtatgatgttttagaaaggcaggattataaattttgcacatttttttaacctcctttcctgcaaggcagtttttacatgccctggctctgcaatcagaatttgggtccaaattccaacactaccacttaatagctgtttgactttgggccagttactaaatatccctagaactcaactttcttacctacaagaggtggataatggtaacaataatctttagagaattaagagagatgatgtatagaaggctcaatgcatgtgggttattgttcctttttttaattcttgcaaaaaaaaatccaaagtgtatttcattttcaacaaagttatcacagattttctctagctgaccccatggaatataatacagtcttcttatcaaaataccttgcccattaatgagatgaaattatagggtaaagaactgtacgctacagaataatgtataaggacatacacaaaaaattccatgcactggctttgcaaatgcaggtaagcctcacacttctcatctgtaaaatgggtcctggctttgcaaatgcaggtaagcctcacacttctcatctgtaaaatgggtgaataatcgctagcttacaatgcctctaagagagttaaagtatgtactatgtgctacatgactgacacatagaaggtcttaaattcttagttgctactctcagtgagctaggtgattataaaactgagaggtaaaaaaatcctcacagcaccatcaccctccactttgtccctgctgctaataaatgacccaggaggtgccctattggcattgaaagacttttccactgactgcaaggaaatccaaagcattttatccctgcacaatatctggtgatgggctaatttagactgacttttgtctgcacagtgaagtatcctgtgttccttaaatctatggctgattgtgtaaggaatcgaaagcatctctaattacctcacagatcatgtggattccaggatgccctcttattccctgtgaacaggggtgagggggtttaaatcatccccatgtgaggtgtaaggcagaaccatttgcagatactaagctaaggctaaggcagccttctgggtgggaatctaaagaatggatccagtccttgaaataatgaaagaaagaaatctagatacataaagatgctcttggcgctgaagcaccagaaactacattactggtttttgtttttgtttttaatattttcgacattaagtcttctatacacattccaaatctagaaagtttaaataaaatgctaatccccgtcttcttcaaaatataaaaagacaaggattctggatagtgataaccttctcccccttttgcctactatctttagaattcgttattgaccttctaataggaacacataaatttttccaagg

SEQ ID NO: 1154 - DNA, 4043 bp, Homo sapiens
agtcccacacaactagacacacacacttttactttaggataccattggagacacagttgtgtatttcatatgtcaatatacttaagcccagttcacttacacacagacagcatgataaagattgctcccagttggtcagactcaaatgactgccactgtggtccaccagagatactggtgaggacttactcagcctgcatccatctcagtaactttagaaatggcattttcaaatatatttcgtacatacaaaaaaatattagccatatgggatggggaacagagaggtgatctagaaaggataatgctggatatttggttctgggagcaagccaaatcattttctggtatacttaggacaagtcatgcctacatcacaacatgccttcaccacaagataaaaggactcaaaggccaaaagccaacagcagaggtgcaaccactgtggacctttaagatgcaaagtgttgcagtaacttcttgcagttggatcatatcaataataccaaactgacaggaagccacctctatttatacacatgtactcaaaaaaacaacagaagaatcagattttggaaaaagatacagacaaatacacacgcacagacacacacacacacacaattacaaacacaaacacatgacagtgattacaatcacagagaaaagtaacttgaaaagatgaacaagtaggcatctcaacagtatgttttcaacaatattgtcttagataacacattattgaaaagctatcctggaactattaacccaaaagtttttttttaaatgccattgatgatgatttagtcatgcttcatgcaatgtaaaacagcagcaaaacagggtgaaatcacatggtgaaaattgagaaacttcatattaagaaatatgcccaaacacactaggaaaaaaaagccatgagtctgtctcaataaacagtactaactctgtaaatcaagtgtgataatctggcaatttaatagcagtgttctaagactatactgagcactgcccaagaaataaaatattcaaaatgttatcaccaaaataaatgtaaggaaaaatagaagtgtaagggcttggtctctgttttgtggataaaaggacaggaattctgctctatagacaagaaactcgacacagggaggaggaggtcactgggaatgtggaagtggtatgtagacaaaatggcactagagtgcaatggacatcaagacacgtcaggacaatacagaaacagacacaaagggctggagagaagcatcctcctgttcaactttaatagtatttgttcccattattggtgccatgactgaaaacaggagtgtgcctttcctttcttaggtttcctgcaaagaagttagtgcgtcatccaaaagaaccaacaaatcaaacaggaacagaaataggctacttccaatttatgtactctagttggagaggggtgtgtgtgtatatatatatatatatatatatatatatatatatatatacacacacacatatataatatagatacaccagacaagggaatgagattatatatacatatatataatctctctcttcttgaattcttggcaaatggttagtcctgtggttaggagtgaagatagagggtggaggttggaagaaaagttaacgaagagtgcataccgctttcggcttctgcaaaacgacaagaaaagaatttaaaatcaaacaatttgataataaatcgactgacaccagaaggaaagaaggaataaaacctttgtttcaaatcacttgaaggatgcatgtgaaaacaaggttttttggcaaagcatgaaaacagtatcatggggtgaaaccaacaacaaaggcagttaaacacaggttaaagaaggtgggaaggagaaacaggtcctttgaattttcacacccagtcagttagaaaatgtgagagggaaagaagtgggacatgtttaaataaagaaaaacattaaaattattatctcagggaagattttaaaaaatgtgtgttttcacgtggatattgtgtttgataagtcctgtgttttctcagaggcatgatccacattccctcaaacacacctttttccacaagaaccaatgtgcttccacactgagaccaagccacatttgagaattaaagctggcaactgcacaaagaaagcccaaacaaagccaaacaagtcctttttgcccttttctgaagaaaaaaaaaatatatatatatatatatatactaaaaactatatctacaaatatggctttgttgaaaacatctcagaattgtgactcaattgaagggcctatccaagaaaagtttcatcttcagggagtgctctgagttagttttcttagaatagtgacattgagttcacaatgaaccattaacagcctttcgctctttttctctccttggaaccaaaaggcaacaagtgaaagacaactgctcaaggttcagggtgcaatctcctgcagtcagattattccagaatggtcgaaaaacactatgcagcatcagcatcacccacatcatgacatttttttttgaaagatgcacaaaagtaaatagagaacactgagttacacaaagatttgcgatttcgcaacacggggaatatcatttgcaaaaatccaggatacatacagttcccctacacaggtacaagtgagtattggcaaaaacatgggtaaacagtaaccccagaaaattccacctcatctgctgaacaactaataatcaggactgtcagtttttgcaaacaatattcttcactttgccaacatgaaaaagaaaatatttatctatctacatatttgttaactgctacagccatgttctacatatggccaccaaatctaccatttttttcttccttttggttgatttgggttttcaaaatagcttaacatttgatcagattgactttgtgagcaatctgatctggtagttaaggtaacagaaaacattggattgatctgtttacaatccagtgttttcttttcttttgttttgtcttgtcatagacacagactatacacttgaaagtctggctgtattgggttattcacccagataaggaaaactccttaaatgatgataaaaggaaacgtctagtcttcccctgtactctgctcagttattaaggtgtttgttggaggggatctgcactctacatttgggcatctgcaggatcaaaaatatgaactatagaggaatagactgtgggtgtcatttcagagaacaaaagcttgagcatttctcaatgagctctctttcttccaaaactattgacaagaactggggagcaaaaaaatcatctctattttatctgtaaggtgtacagtactccatcagcaaaatttcttgttagcacgatgcttcccacctccagtgtgaactcacatattgactgggatgttatctatttcaaccagacccagtccctcatcagtctgatttgcacataattaagtgtaaaataaataaataaagagagctcctgcctctgagctccactctcctggctcatttacatgaagctgatattctgccacctggattttggttgcaccgggagaagcacatatggtacacaataggctgcttgtaatttggctatcaagagagttggtgtctcccctcacagctctaccccaaggctgctgtaaaggaggccagagtccacctgcttttttgctcacagcagtaaaaaggggttttaagttctggtttaatacttagaaggtgaaaagtccaggtcggcatgatcaggtggagatattttgaggactcatccctcttccctggagaaacactctctgaatgcccagcagggctttgggtgccaggctggtctggcatagaagctgcagtgtctgatggggcatgcctcgaaatgtgctctagggtcagagaggttttacatctggttccatgcagataaataatgcacaagaaagcagaagtgaaccgaccgttctcagaacgcactctcaccatcaaaagtgtcagctggctgctgggtcaccgcaaacttaccggctctctc

SEQ ID NO: 1155 - DNA, 4033 bp, Homo sapiens
ccctaaactcataaagtgtgtgccctctaaaacacttttttaacctgtgtgatttctttcctttttcttttttctttttctttttttttttttttttttttttgagacagggtcttactgttgcctgggctggagtgcagtgggtcatagctcactgaagccttggacacctgcactgaagcaatcctcctgcctcagcctctggagtagctgggactataggtgtgcatcaccacacctggcaatttttttttttttaagagacagagtcttgctatgttgcccaggcttgtcttgaactcccggcctcaagtgatcctcctgctgctgcctctcaaagtcctgggattacaggtgtgagccaccgtgcacagtctttaatctgtatgacttctaatggtgcggagacatgggcactcacccacattagtgggcaaggaaattgatacaactgttttgaagagcaattttgcaattattatcaaaatttgtaaaagtacacagtcttttacactacaattccatttgaagtattcatagcaaagaaacaggaaaacagaggtaaaaaaatatacaagaacatcctttctattcatgaaaaatgggaaataaccgtaaatggcacacatacaatggaatactaagaagcaattaaaaattataatgaaaatgtatacctgttcatacagaaattctgtaaaaaggcacattataaaatagtgtacataatctgatcctatttttttagatggcctatagttatctgaatgtttgtaaagccataaaaagaatttaggaagctttatatcaaaacactaacagttgttacctctgagtggtagaatgatactttttttcctctatagattcctgtattgtctgaaggcttttataataagcatgtatatattataatgaaacagtatatttctactttgcacaaaatgacagatttttctgaccccccaaggaatatcacaaaaggtaaaatgttagtttcagagatgtcttgctccaaatttcaaaaggagtatcacaaaagtaaaatgtagtttcagagaggtcttgctccaaatttcattaaaatatgcattttttctaagtagtcaagtttagctggttttcccagcaaccctcttcatgctaggcatctctgaaaggatttcacaatgtagtgaatcttcttttttgtttttttgagacagtcttgctctgtcacccaggctggagtacagtggtgggatctcagctcactgcaatctctgccccctgggttcaagagattctattgcctcagcctcctgagtagctggaattgcaggtgtgcaccaccatgcctggctaattctttttttttttttttttttttttttttttttgagacggagtctcgctctgtcgcccaggctggagtgcagtggcgcgatctcggctcactgcaagctccgcctcccaggttcacgccattctcctgcctcagcctcccgagtagctgggactacaggcgcccgctaccacgcccggctaattttttgtatttttagtagagacggggtttcaccgtgttagccaggatggtctcgatctcctgacctcgtgatccgcccgcctcggcctcccaaagtgctgggattacaggcgtgagccaccgcgcccggccctaattcttgtatttttggtagagacagggtttcaccatgttggccagactgatctcaaactcctgacctcaagtgatctgcctgcctcggcctcccaaaatgctcccaaaatacaggcatgagccactgctaccggcttacaatggagtcagtctttagaaactggtgaattacaaggagaacgttgagccgctatgggagcttagggatctcacaggcctccctgagggaaggagggcaagctgtgtgtctttggctgcagcctctcaggcttcccttccagtgggggcatgggtaagaggaagatgagaggaagccaccccgccaacaggaagtggctctttagaacggcttgtgcttatcttgtattaaaaggcatcttgctggcagccagtcagtcagttcactgggagaaatgcaacatgtggaccagaaggagagctaggaacagtgggcaagggcacacctaccatctacttggtgacactccagcatacaaaagccagaaaaaatttagaaataaactgaaggctccctggctctgtgctctttgtctgcttttagctcagtctgggcaattagattatgtaggttaacctcattagtttgagctgcttccagcctactcccacaggttagacattagctaggcagtgctgctgggtatgagcagtttatctacaaattggccttccccagagtggggtctttaaaaaaaaaagtcactcaaccaattctattgctaaatggtatgattttaaaaattaactgcaatgtgtttagctaagcctgaactttttaatttctccaaaccataagatctcaataatttttttcgaataaaagatatgcttgacttataagcaaaggtcactaactctaactaatttgaagaaagcctaatctgccttagtaaaaaaatgttggaatatagaatatttgggaaacagtattaacataatttgttttattaatgaataggatactatatgaggtatcactaattacaaatccccatactagagccttatgggcaaatagtattcctgaagtaaaataattcagcctattcttttcatatgtgttcttttataatgtgttgtttatggtctaatttaaatacaacaactgattatcaaaaataatgaaaatacaaacctttattattgatcattggtggtattcctcaattaatatggttttaacaaggttcttttagttttggtcagaattttcatgcctttatgtcctaatgaagctattctttataccaaattttattgtaggtgaatcactaaactttttaaataagaaggaacacattttttgtaggataacaatattattcatgtttgttttgaatttagcaaaaattgttttattgagtcattcattcagcaaatattgactgcatatatttttaatcttaggatctgttctagcttctgattaaatcaaaactggtatttacttccccatatttttctctttgctagagaaagcaccagatgtatctgactatgatatacctgaccacatatatctgacttttactgatttttccatatcttttttcctgcaagtttgcctctgtggctaatcaaaatgcttgaggactgaaagtcgtataactggaaaaaagtacagaatgttctagaaaacaaaatgcctcttccacatccttgtgtagacctgcggatagtctctacacactagacctagtagcatcgaatcaactgaataaatgctggagcatttaaatccgttgccattgccatctgtttaagatttccacatctttaacactatttccatatggatagtcaatatgtttttgaggtttctggtaaaggaatttcactttaaaaagagtctaaaattgctaattgaattacactgtcatattctcaagcaatgtatgtagttggtgggaatgtaaagtggcacagccactgtggaaaacagtatggtggttcctcaaaaaattaaacatagaattaccattggattcataattccacttctaggcatatatccaaaggaactggaagaaggatctcaaagagatatttgtacactcatgctcacagcagcattagtcataatatctaagaggtggaagcaccccaagtgtccatggacagatgactagataaacaaagtgtggtaatttacaatggaatattattcagtcttaaaaaagaagaaaactctgacacatgctacaacatggatgacccttgaaggcattacgctaattgaaataacccaatcaaaaaaggacaaccgtgttatgattccacttatatgaggtacctagagtcctcaaatgcatagaaacagaaagtaggaaggtggctgccaggggttgc

SEQ ID NO: 1156 - DNA, 4050 bp, Homo sapiens
caatcttggctcactgcaagctccccctcgcgggttcatgccattctcccacctcagcctcctgactagctgggactacaagcgcctgccaccacgcccggttaattttgtttttgtatttttagtagagatggggtttcactgtgttagccaagatggtctcgatctcctgacctggagatccacccgcctcggcctcccaaagtgctgagattacagacgtgagccaccgcgcccggccagaacgtgatatttagtcacagaatcctttatttcaaggagcagcttaagaagatgggaaatgctaatctaaaaacttcctctcctgacttcccaccctgaaatctctgtttcccttgacgcttctatcacaaatatgtctctctatgacctttttcagttgtcaaaatccagtgcttcctgtaactttcaagtcataaactacctcctctctgaggcctttcctcatttcaccaatgtgctgtgctgtccctgccttaatgggaatagtaactgcacacatctctcaggaggccatgtgggctgaatgagatgatcagtacagaatgtctagaacagtacctggtacttagtaagtgctccatgtgtggtgattagcattaagtaccatcacagcatttgacttctctgacatctgaagagaactacaatgaggtggaattccatttccgtatcgactgtaagctccttaaaggaagagctgtcttactcagctctgtatcttctagaaggagcagcacagtactttgcaaataagaggtgctgggttaatatctgctgagttgaactaagcaagataaaactggagagagaggcctaaagaaacaagaacaatttttctaggcatctgatcataagtaagcatgaataacttcaataacttcatagcgtttagtgttggggcatgaaataaatcaattctgcttctgagcatggaaaaaatttctgcactgttaggatctaccagggagtatgtataactgggtcatttttacacttcccaaaaaacttcttactatgagcaatattttctgggaaatttttcattacagaacatcttgggcttcttagcaactgacttacggttttctaaattctaaatccgataacttggaggcttgaatttgaaagacaaaactctcaagaactgatatattgccaccaatctaactggagttattcctactagctagaagtcctgcctgcattcctctgggagaggaagccccgtccctccccatctcatgcctattctatcttccccatgtgactcagccctccttgtcttctccttgtcttcattttttggattccaaagtaaagtcaaacaacaattcaacaggaagtagactgagcccagggaaggtgatatttggcaagttcattattcctaaattctaaaattgaggccaaaacaacttgatcttttctaaaaaaaaaaaataaaaaaacaaaaaaacaaaaaaaaaactgggagaagaggaagggagttagaaagaacatttgaatccacataggaatggggagcttgcttttgataacacaaaaaactagagagttgcctgtgcctttgaaggatctttactattttagacagtttggtgagaatcccaccagccactgctgttagcaaatgacaaggtctcaccagtggatgtgtctgagggcttacttagtaaaagtcctttgaaatatggagtccagtgctatctatactttgatatgcacgtatgtcacccaagtgtcttggcaaaatccagtttctcatgccttagtcctgaggtggggtcaagtctatgagtctgcatttctaacaagctcgcagatgacactgatgcttcccctatagggcccacattttgagtagcaaggagctgttcccaaagacggtgaagaataaggggcaagtattctccatgatgccttgaggacaagagattcagaagaatcgattacagcctaaaggatttgaaccagagatgaaaaagaatgctttccatgaagtattgctagatattggagccagttacagagaaagcttttagacaattaagcacaagatgggtatccaagtgtttgggctgttgtgataattagcctaaacaatatttcaggggtccagatttatctacttagtctctctccattgattcagtgaccccagtaatagctgaatctccattggaatgtgggttgtgtagatacagaagcaatatcatgactatattgaattcaattaaaaataaagtttcagaaaatggccctgatttgcatccctaatttctattcaactttcccattttaggacacagtattgagtgtgaggacgaaaacgctcgccaacccagtcctgttttagtgacagcagattctgggtacttatgtctcctatcgccatacaatatggcctaataaagtcgcgccaaagagactagatttcatttcagagcaaagggttcagtcgtaaactttagctttctggctgaacagagccattccagccgcaagcataaattctgctagttttaggtatcagagtgattgggaagccaaatgggttatttgtgagcctggtagcaaaggcagaagcgccagctttattgtgtattcattgttatctggacaatctcttgtcagttagagaatattttcacaggaagttagaagcgatttcagaaattcccctctgcagtttctcagagtggatgttaggcctcatcaaaaagacatttggttcagagattgaaagtgggcagcctataaattgctgaggtatttagctgggcttagcagttttcctttgaggaggaaaccatgatcctgagtgctcactgagtacagcagggaagtgcctaagttcacgcagcctctggcttcaaaaaatcccagccttatcatgtgctcctgagccaaggagcataacctctccaagccttaattcccttcacctgcaaaatgagagcaacactagtacctacctcctagggaggcagctgaaatgaggtggtgcatgtaaagtgcttagcagggtgcctggcaaatagctaacatttgtggagtactttctatgcaacagatgagcatgtgttctaaccatactaagagatggcatttattgagtttgtaccttgtagacagtctatacatgtcagctgtcattataagtaatgagtgatagtgatagtgatgatgctgatgatgctgatgatagacaagatagctctactgctcagacaaaggaactatgccaattagatgtggggcctgtgattcatggcttcctattgcttagctgctgctagaaaaggctggaacatcagtgatcatacagtggttctctgaattgaagagaaacattaagcagcctgagtttgtccccaaaagacagcaatattctctggaggtcctctctgccacccatggactttcctaacggccagtaagttaactctgggtagatatgatgataagggagaagttgatattttgaggggacatgatggtctcccaaaatagaaaatggatcatgtgtgggtagcaccattaacatgatgcaggatcacccagcctggctttctgaaaggagccctgggcaaacaggaccctgatgaccagaatgacacttgcccacatctctcagttagtactccccacacactattcgtacctgtcgttctccttcctatcaaatggctttgctactcacttccagccttgcctccacgactgattttgaatggatacctagcatatccttggtccacaggatgagtgtgcaaaaaaaaaaaaagggtacttattcaaaatattctttttaaaaatacttgtccagcttgtatttggaggacagacagagcagtagatggggtgatagagagaggaatgatccctggtcagagtcttcagctactgaccctagtaattcaatcttgagcccaattttgcatactcagcaaaagaaaagttttgcagtcaagcagacccatgctttttagaaagcaagttataaaatatctgtcattacttgaa

SEQ ID NO: 1157 - DNA, 4066 bp, Homo sapiens
ccactgaaactcagtttccaagttttggcctccagaaaaggaaggaaaaaaacttgtgatatttacagcaactaggtttgtagtaatttattgcagtagccataggaaactaatacatagagtttcatttatcttgggtagatatctaggagtggtatttctgagtcatatggtaactcaatgtttaaccttttaagaaaaactccaaatatttcaacttaaaaacttctttccaggaaagaaagtttaagttaagaaaatgaaaacacaagctacagattaggggcaaatatttacaaattgtatatccaacgagatccaaaatatataaagaattcttaaacagtaaaaaacaaattcaaagaaacaactcaattaaaatggacccagcacttcaccaaaaagcatatacagatgacaaataaccactgggaaggtgttcaacatcagtagggaaatacacgtgaaaaccacaatgagataccacactgcccacctactagactgtttaaaataaaaagtattgacaatgccaagtgatgataaggatgcggagctacagaaactcctgcattgcttgctgatgggaatgataaatggtacagtccttctggaaaacactttggcagtttcttttaaagttaaatataaacttaccctataatccagcaatcctaattcgagatacttaccctagagaaattaaaacttatatccacacaaacttccatgtaaatgtttatatcgactgtattcatgatcgccccaactggaggaaaactaaatggtgtccaatggatgaatggataaacaaactggtacctgcatataagatgtcatactattcatcaacagaaaggatggaatactgatacatgcaacaacctggatggatgtcaagggaactatgctaaatgaaaaaagccaatctcaaaaggttacatgctccatgatgcctttacatgacagacttgaaaagacaaaactgtaatgacagagaatagatcagtggttgccagggcctaggagtgacaggagggtgtgactgtacagcatgagggaatttgggggtatggaaactatcctgtatcctgattgtggtggtggttgcatgactacacatacacaaaatcaactttactgtatgttaatttaaaaaataaaatgaaaaacacttctggaaaactataatcatttccaaatcttactggaatcatgtaccttcagcattttcctataatgcaaatggattactctgctaataaccttgaggacttatcaatccaaagccccaacacctccactcgaattgcttgagttacttgaatatttttgttatgatcagaaggtgtctgtaaacattaggattaactatatttttttctccaagatacttttctttcttcatcttattagcactacctaacccgtccggatctcactcccctttacagacacatttcacacatgggaagtctatcatactgcactgtaacctactgcttccttctttcaaatggttgagactaaactttatagctttcttacatgtccctcaacaaaccagtcatcatctcccttctgtactcagttgcgtcccttggcttgagcaatacatcctcccactacaaggcattatggtctagacaagacagcacttgcctgggtcttttccagactaagctaccaccaagggaatggggcagacatatgtatctcctaccttggaaaagagcttaatttttatagtttttcatggttgaggggaaacctaggataagctcattttacaaatgttgcaaagtggtttctattcttagaagctattgatttgaatataaaacaaagcagtgtttacattcaagacatttctcttggagaagcaatgtgtaacagtggggaaagcgctgagctgagaagccaatgatgttgtagcgttctggccctagctctaccattccccaaccagccatgcaaccagaagtcatcttccgatttcctcctcccaaagagctatggtgatgggtcctgtggcttactattctacaactgaagaaaggtcagagacattaggttctttgcatttggcatgttttccatatgtatctggtttccttgtgtatctggtcaaataaagaatttaagtgaaaatgtatatctcagccaggcacggtggctcatgctgtaatcccagcactttgggaggctgaggtgggcacatcacttgaggtcaggagtttgagaccagcctgggcaacatggtgaaaccccgtctctactaaaaatacaaaaattagccgggtgtggtggctcgtgcctgcagtcccagctacttgggagactgaggcagcagaatcacttgaacctgggggctgcagcggctgggttgctgggggagaggtgggcggaggttgcagtgagccgagactgcaccaccgcactccagcctgggtgagacagcgaaatctccgtctcaaaaaaaaaaggtatatcacgtaaactgaaaagtgctgtgcaaacgtaaagtattactataattccaaagttcttaacagaatacccacggtatcaaatcaatggtgcttccttgttttgcacccctagatgtgtagaatagttgcctcaaagttccaaattcctcatcattgttctggacacagattcacacttaaaatcaccttagggcaacgacaaccaatagacttaaggaaatctgatattttattccttatggcttacataggactttgcgattttcatgtaacaatcactaacagtggatggcactcaaaaaaccaaagtcaaaaatttggaagagtggggaggcagagtagacccagtctgtggatacccaggtggactcaggaatgcatgcaattaattaaaggccaattatctctgaaagagctcagactgatgcttggccagaggcttgttcaataagatggctcttatttcacatcagtgactatatcctgccagccgagaagggccagggtgagtgtcagcttctactggattttcgcattaagtcctgaccattgccgcttctcgggccccatcctcgctgggcaccggactctgtgtatatgttatgtaatctttctgtgctgcctttctctttgttcagtccatgccaagacccatataaaagaatccatatgtgattacagctataaaaccaagaggaaaatattagatgaaaatataacattttggggtttctaagtttgctttacctttaatgctaggcagacagtttacacaaatcattttgctgcaaagtaaagaataatgagttaaatgtgttccctgtcaccatcaatcatgtacatttgcttttgattcaccaaacatataagacacatgaaatgactttctaatcatgttgggggaaggagggagaagggaagaagatggggaaaggagtttcaacttcttttattttattcagaagatccgttgacattttctggcaatctatcttctaacatgctgtatgggcttctttttgctaataatgtttgccttgagaatttgtaaaggtctgagaacgctttaattcaatgttctagaaattaccagggccataggggaaatgaatccctgttaatagctcatggattacttctctctttattagaaatagttttcacagaagttactctactttcaggtgggcattagtgggcttggtcagactgagtggcactgcgggaggcagcatcctgcatggaagcctctgatctaatgggatctaagtagggtgaaaagcgggtacacagtgacgttgacccaaataggatactggggtttagcaaattcatttcaattcatgggtgtttattttgatttgtgaacttaaacaacacactgactggattttctggcagttgaagagctttataaccaaatctaaccagcctctgcacaatccttgtcaaggattaaagagctttgcatttcatgtttctacattgaatcaaagctctttaatttggcaagggaatcatatacagtagcaaagaaagaagttttctgcaccaaaatcacaccaaattacaag

SEQ ID NO: 1158 - DNA, 4039 bp, Homo sapiens
ggccccccaccagcatttctgattcagtagatctggggtaaggctggagaatttggcatttctcacaagttggaggtgacgctgacgctgttgatctaggggccacactttgagaaccactggcctaaaacatcaggtaaatcacagtgtcgacgtttccaatctcttgcaaatggactggtcctattcaacccttatgtcaggccctgagacaagaacccagaggcatgctcatccaattatttttaagtggcatgaagcagagagtcatagaaaatacattggatgaaagaatcaaagttcaaaaggttctccagagttggaaaaatcggcaaaagaccaaactaaaaagatttacaaggctttcatgtcaagtacagcatttaggctaaaaaaaatcaactatataaattcaaaatgagaagacctagcttggcagcaggcaggagagaaataaaagaaaacaaaacacacaaagctaaatttaagtgtgtgggtaactaaaacctcaaattttaggctagccatgtgacattacagagaaagccagtgtttactttttagaagtgctccccagatcaagggaaatgaacatttcattctgttgtgaattggtcagactagttccagagtacttgatccagttttcagtcagatttaaagagggaaaatgatcaactgaataacttccagagaaaagtgacaaagacaagaggaggtagcgtctggaaaagatcttttgaggaacagttaagacagccagtaatatttggcctgaagaaggctctcgtcctcacagagacaggatggttacatctgaatacttcaggtgctgctgtgtacaagattaggtttgtcctgctttgttctagaagccagaattaagactgactggtatatattccaagaaagcagatttttgtcttgttttataaatgaacttcctaaggatgtaatttgtctaccaaacggagaaggttaccttaaaaaatgaaaggtctttgtccctaagactcagtaagtatttctccaagttactatggaaagaacttttgctctgcactaggaggttgaatcagagagcccttctaagtctctgctagtgccaagattctatggctttgaagttattatttctctgcacatctcagcaaacacaaggagcaccaagggagcattcccttcactttcagaacaatatacaatagttgaactagaaggatggaagactccattgtgaaaacaaagagcaagtccaagggttccacactctgctttcaaaaatactattcttatgaaattccttcttgcaaaatccgcttctgtgacaatcttgtgcatcctaagccaaaagtgggtactccagggagagatgacagtgccctccctgatgagagcatggttaaatagtctcatggaggggccacagcaagtggtaattgctgtcaaactatcaaaggaccttccccacactgcagactcaattccaacaactagccctaccctttattccttcctctccctactctccagtggcttcagatggccactttcccttttacttcctgggcatcgtagagaacacattggtataactggagaaatactcacttgcagtaatatcatctgagaacctgagaggaatgaggagaaattcagtttaagtaatgaacaagtcaagcattgtgtgtgaaaggagatttttttggtccaagccctaaagagacagctctgaaccttcatggcaccttcaaacaaacaagcaaaacctttcagagaaagtctctcctatccgcatgtgctatctaaggtataaggctgaggcatttcatccttgggtcccccatggccctgtctggtttgagttctgtaggcatattttgagctttctttctcactgtccaccttgacacttggccatgtgattatatagaaaagttgagtttgttccttatctcagggttctgtgccctctttttttggatattatattttctccaacgcagggaaggagtgagggtgacctgctgaatgcttggagggaaatctctgtgcatgaaacaaagagaagagactgacccaggaacataaatcctttgtttctggaaacttcgtccttttccatttgaagtaaattgagtctgatgaaaaatgccagtgttagtgcccagaagtctggaggcaaatcctctctccctaacttggagaatataaagagcaggtctggcagacctggctgcccttcatttctgctacttcaccacccctccctcctctcatggagaaggaactggaaatacgctgtcctggaaaaccaggagagatggatttcagtcctagttccatctctcactacatacaattttgggaagccactatgaggaacaaagaaggccatgaaagaggaaacgatttaatacaattgcccaagtgtcagggtggacagtggaaaaaaaaagctcaaagaacttgcctctatctgcactgggctcatgggacttggcttccagagataaaggcctctttcactagagtctttgggaaaaataaaaaatccactgagaggtaaatcatcaggagtgatacttttccaagaagttataaaccaatctttccttgaagagctttgagccatttacactcaaatcagaagatgcagggccagcatttaaaagatggccagcatgaaagcgtttctctccaagaattctagtgatattaaaagatacactttggagagcatcagcccttctataatgcctactctcgggaaccacagtttggttcaatgggctgtggctccatttaaagagtcggtggcagtaagctcttctgtctccccgctcgctggctgcagagtggtggccatgatttgtgcccagcagagctgcgctgtctatacagagcttagatgccctgctctgaagttaccctgggatgctaaaatgcacagatggtccaacgagtactaaagaagataatggatgtcaaagctcttttaaaaccataaaatatgacacacatgtctacaattatgatgatgacaaactcagggccagttttacatggagagaaagtaggcagcttccctacatccctctaggccctagaatattactattactggatcataggggattgaaatgcttcatatttcaagcccgttgtccaattatgaaatcagctatctcttggaatatgttcatagtgacatgactttacaggcacataccaggtcctttcctgaaagcaaattgtaatgcatggagatctctaagcatctaggatgagtgcagcaaaaagtgccaagaaaggcagaaaaaaaatgttgaaagggaagaggaagaaaatgtattgaaagagtaggaaacatctcaggaaacacagcaaaactgtgaagcaaggtgaagaatgtccatttgcaattctacaaggaatgaaagacaaacaatgatgagtggacgttttcttctttctctagaagagagatatgaaagaacaacaacaacaaaatgccctgtgtcaaagtcactctattccctgtgtcctgactaatcatccaaggatctgtaagtgattctgcccaaccccaaaactcgaatagtttgggatggttctaaacaaaatgtgttttaagcaaataatcatgaattggttgatatcttcctcactgtttctgaataattacaacacagaggtttgccaaacacattcaggttgctatgatcatgtgattactgaccagggactgtctggatcccaggccggctgagctgctttgagttggacaataaccacagctaaaatcctccttaatttcttgaagatgctgcatcagcactcattggaaagagaaaaaaaaggaactgacaaccccttctaaacatacaacattaattttcctattcaatctaaattcagccaaaaatctaaacaacagcttaaagcactcccacactaaatgaaatttcagatcacaaatgaaagaaggagagctcgttgctgcaggagctgtcactagtcacagccttgctaataa

SEQ ID NO: 1159 - DNA, 4041 bp, Homo sapiens
gtgcatttattatgaccacccccacaaacttcccacccagcagcgctccccacttcaccccttttagtgcagaaatggagagaaggcagccagggagcagctttatctgaaaagctgcaacgtacgaatttaggaaatggatcacgctaaagcctctcccagcacaaattcaccctgcgtttttgcacttgaaggatttcattttatttttgaaaaagtgttgcgttggcccacgcttataactcaaggactttgagcctctgtcagccctgccttgcagttcacagcttcagccagttttctgcattagctcatttcaaatggatctttgacattttaatttcaaaggaggcagattggtctcattaaactgaggaggaaggaggattatacaaataagagaaagacaaagcccatttttaaccctgaacttcccacttctttttgcagccaaggcctcagttctggctctacttaattacatttctgatactacctttgaccagtaatttctttttttcttttctttttttttttttttttttttttttttttttttttaagacggagcctcgctggctctgttgcccaggctgtagtgcagtggcgcgatcttggctcactgcaacctccgcctcctgggttcaagcgattcccctgcctcaacctcctgagtaactgggattacaggcacacaccaccacacccagctaagttttgtatttttagtagatacggggtttcaccatgttggtcaggctggtcttgaactcctgacctcgtgatctgcccaccttggcctcccaaagttctgggattacaggtgtaagccactgagccccgcccttgaccagtaatttctatgcctccttgtcctgccagtcaccctagtacctatgtgtcttcatattaaccctaccacagttagggtttaaataaaatactacaattaagagaaacacccatttcaaaactattactcaggtagccccaaacatctctgtggagtcaaaacattaagcttcatcttcttttggttttccatttggaattttgaagacagtgaagccaggttccttaaagggttacatttttttttttaaatcatttccaatgacagaaaaaggtgtcaaaagttgaaaatccttcctacttcaaagaaaggaacaagtgacacacccaaccctgatcctggtgtagccactgtgcagctgtaactgattcgggaatgagcccaggtgtgaagccagaatctgttccaccctctctctgcagcctggcaagcccaaagcttagaagagttcacgcatccacttccttaaaatgacctcactaagcatattgccaaagaaaactgagtggcaagagaagatggtgccagatgttgcctgccagacacaaggaccagatgcttaagggaggactggctcctctgaaatgcactggaggaattcccccacctcactgatggggaagctccggtcacttggggccactgatggaaagcaaagacaaaggcaatgcaaacattgtcaggatgtaaaggtaacttcttgaccttcaacctcaggtaagttcccaggaggcagtaaaccaagccaccggtagagggggaaccttcggcccgaaagatggctgttcacagttaggtaaaagttcctgggaatgcagtgggacggaaatcccactgaatttagctcaactctccagaagcttccctttatcatttcctctcagccctcttaactcttctgcaatttatgctacagaaaagacaaattccaaagggcctctaactacctggagcaaaataccttgactttttagtcatttcattgtcacacaatgtgactactgggtttatgcaaggaacaaaaactgaacaattgctttttttctgaattaagaaaagaataaggtgctggtgttggggccaatattagcagttgacaggcctaacccttgtgcacaaaaagcactgcacagtgtttcccagtatgacctcccctagatgttctgtaaaaaaaaaaaaaaaaaaaaaagggagggcagggcagggcagggcagggccacagcggcacactcctgtaatccagagttttgggatgcccaggtgggaggatcacttgaggttaggagttcgttgagatcagcctgggcaacatagcaagaccctgtccctactaaaaaaaaaaatctaaaaattggccatgtgtggtggcacattcctatagcctcggctacttgggaggctgaggtgagaggatcgtttgggctcaggagttcaaggttatagtgagctatgattgagtccctgcactccagcctgggcgatagtgcgagactctgtctctatgaaaaaaaacgggggggggttgggggaggtgggagaggagcagaggcttatagtcaaataggtttggaaagtgttctatagtacgttatctcagagatgcatattagtattaaaagcactgaaaagcctttcaagaaagaacattaattttgggaaactggatgaaacagcctaactggtcactaaattcccctttggggtgataggaatcaatatgccgtagacacacttggaaagccctagtaagggttttctcagcctcgacaccattaacattctgggccagacaattctctgttttgggggctgacctgtgcattgcagggtcgttcgcagtgtccctgggctctacctatcagatgccagcagcacggtcccctagttgtgacaaccaaaaacatctccagacattgcaaaatgtcccctgggggcatctgcctttagttaagatatctcaggcccatttcctttagggaacatggtactttaattcaggccagcacccatctcaatctatttcctagttctgtctcaaggaatctcaaacccaaggccagctgtaagccctagagctgccacctgctgagggtgagcttccggttggtgacaccctgtgtgccactgccccaacccacacagacagcctcggctcccccaggcctatgcagctggtgagttgtacagtggcttgtggggcaaaaaggcctcatagagatagtcctctgcagaagatccaaaagggccgtgaacagccacagactgccaagcccagggccttccgcagcgccccaagagttacctcatgatattcgaggcatcctccgcatccgggtcagcgcagtacttgttggcaaggatcaggcatgcatctgctgactctatctaagacaccgaaaggaaaattcacagaacacaaacatataaatagccatgctcgagtgtagtctctctctgttgacagcttcttggggaagctttgcaaagaaaaaaaaaaaacaatcctgagagcctgagagattatagtttttgtcaaaagtgtaggttccaagttcttgttatggtataaacatttcatcttgttgctgttggagggtacaacatgtaccttggtaattatacttttcatttggcatcgttgcttacttgtaggatttccagatttctttaaataacaattaattaagcctttcagtctcctccccacctcctttctcaaccatctgcaccatcatcctaattcttcctatcaggagttggaggtgggtgggttaaatcccttctctccagttagcaaggtaactgagtattggggattcagaaatgtacactctgaagtccttcatctgacctttttcacatcttcattttctataggctgggaagagatcagagctctaaatcagataacatcaccatattgcttagtatccgattagtattcagatattcagaagacaacaaatctatgtatgaaataatgtgttacagttgaactcaaaatatacctactgacttatccaaacacgagcccacaggggtttattccttagaggggaccatgagtttgatgtgctaatgattgcttgcatttaaattaggtccacgaacaataacaattgtccctacgttctcataagattttacataagcaataacttgagttatgtctggataatatcaagatt

SEQ ID NO: 1160 - DNA, 4074 bp, Homo sapiens
aaacccaaggccagctgtaagccctagagctgccacctgctgagggtgagcttccggttggtgacaccctgtgtgccactgccccaacccacacagacagcctcggctcccccaggcctatgcagctggtgagttgtacagtggcttgtggggcaaaaaggcctcatagagatagtcctctgcagaagatccaaaagggccgtgaacagccacagactgccaagcccagggccttccgcagcgccccaagagttacctcatgatattcgaggcatcctccgcatccgggtcagcgcagtacttgttggcaaggatcaggcatgcatctgctgactctatctaagacaccgaaaggaaaattcacagaacacaaacatataaatagccatgctcgagtgtagtctctctctgttgacagcttcttggggaagctttgcaaagaaaaaaaaaaaacaatcctgagagcctgagagattatagtttttgtcaaaagtgtaggttccaagttcttgttatggtataaacatttcatcttgttgctgttggagggtacaacatgtaccttggtaattatacttttcatttggcatcgttgcttacttgtaggatttccagatttctttaaataacaattaattaagcctttcagtctcctccccacctcctttctcaaccatctgcaccatcatcctaattcttcctatcaggagttggaggtgggtgggttaaatcccttctctccagttagcaaggtaactgagtattggggattcagaaatgtacactctgaagtccttcatctgacctttttcacatcttcattttctataggctgggaagagatcagagctctaaatcagataacatcaccatattgcttagtatccgattagtattcagatattcagaagacaacaaatctatgtatgaaataatgtgttacagttgaactcaaaatatacctactgacttatccaaacacgagcccacaggggtttattccttagaggggaccatgagtttgatgtgctaatgattgcttgcatttaaattaggtccacgaacaataacaattgtccctacgttctcataagattttacataagcaataacttgagttatgtctggataatatcaagattaactggactctatgagcataagaattcttatgctggctcaggtctgcaatctgtcctacttggtatgttatacttaatagatcattcctggattttgagggaggccataatatcctccgtggtatgtcacaaatcatctctgatttctttaataatataaagaaagaatttatccaaatccttttggattattcatcttggccaattatattatttacaaaattatgcggtgaccacagttagcatttagacttcagtgaattcattatattaatgtacaccccctggcatgcaaatattgaacatgcttacaaaatctatattacataggtaaagtagcagatgccattttgccttgtacctttcccttctaagcctcaggtgtgctttatgagaagattctaaattaccagtttctggaaaaaaagattcgcccattatcaatgatatcagataactgcatgtttagttttacaccctgcgtcttagatggggaaaaaagaaagctcaaatgttttatcgcttagtaaaattttattttatattttagcctaatgtttctttcagatgtaaataatagaagtcagagctatattgagtccaacttaagtgttcaatataggaattacttgattattatgttgtataaagctactgggtccatataactggtctacttccttgatgagtagctgattttgaggaatccagcaaagcaagtttcatgttatgaccagtccaagtgtgggatggttataggtagtgttgcatatgccagcagaaggaggtcctgggaccagtggaagggtgacctcaaggttgctggtatgtgattgatctcattaggtgtttaggagatgactcgtggccaacctaggaggtgtgtcccctcagcacagagtcaggactccccccagacccacaccaagatggaataaaagcagaagtcacctcttcctccttaccttgactcttgcaagatcatgtggattgaggacggaaccctgataaaattccacctgagtaaaatgtcgtttgaacagagcttcaagctccaggttgggggagatgctacacagggagagaagaaatcgctattaatttaatggactcgggggtttcagcctccatgggctccttcctctctaatttccacagggagccctggggagaggctgtgacctacagtcacccttttgcttgccataaataaaagactcacactcaagagaagtaaaaccccagcccaactgaaaaccaaaccagtaccatggtaaaagaaagaggttcatgggctttaggaaggccaagacctcaggacaaatgtcttctcttcggtatgaatggaattcctatcttataaatatggaagctgggctgcgccactagtgggatggttcattttatgcggactgtgccagagggtgcccagatccagtgtgatttctgggtgtgtctgggagagtctctggatgagaatggcatttgaatcagtgaattcagtagactaccctcctttgtgggagtgggcatcatccagtcctttgagggtctgaagagaacaataaaacagaggacagaggcgtttgtcccttttgcttctttcctgccggcttgaactgggcatctcttgtcattctcctatccttggactggggttgacattggctctatgactctctggccctcagactcaaacaccaccagctttcctgggtctccagcttgctggtggcaggcagtgggacttcccagcctctgtaatcaaatgagccaattcttcctaataaatctctctagagatagatagatagatagatgtatcaatatatagataccgatatatatctgtattagatatattgatatatatatttcctattgactctgtttcactggagagccctgactaatacaatcaaggattagccgaaggttcccctgggagaggcatcctgctgttccctccatcatgaaccttatctctgcttctgtgtctcatggacttctcatcccccaaggcctggatcaaaaagtatcactctgaggagccacagacagacttaatttactctcattattgttcttgattcacacacatgtatgcgactcatcacatttcttggtgctgatctgtactgacatctttctctttggaggacaaggattaaacaagtgacctatttattcatttgttaattctgcagagatgaaaaagactgtcgataaggtaccgtgctaggcactgggagatgatatttagttagaacctactatacgccaggtaccgtgataagtcaacacttgcctaacatttgtgaagtccataatgacaataataataatagttcatgttttgtaacatttactatatggcagataacattttaaataaataatagtaaaatagtattataaataaataagtaaaataaataatatttatttattttattttattttacttagagtttatctctgtcacacagactgcagtgcagtggcaggatctctgctcactgcaacttcccaggttcaagtgatttttgtgcctcagccttcagagtagctgggattataggcatgtgccaccatgcccggctaatttttgtgttttcagtagacacagggttttgccacattggccaggctggtcttgaactcctggcctcaagtgagccacccaccttgccctcccaaagtgctgggattacaggcatgagccaccatgcctggccatgatgagcattaattcatttaaatctcaaaacaaccctataggcaggtatgttattaacccagagcttcaagaggttaattaactgggccatctactataagtatgacattgatggatgttagggatacaaaggtgaatcctagcaatggaagcatgagcagccagtttttgttttgttttgttttgttttgt

SEQ ID NO: 1161 - DNA, 4044 bp, Homo sapiens
gaaaataggaaggaaggaaggaaggaaggaaagaaggcatgaaggcaagaagggagagaaggagagaaggcaggaaggcaggaaggcaggaggggaaagggagagaacgagggtaagaatcccaatttgaggtcgggcatggtggctcatgcctgttatcccagcactttgggaggctgaggtggactgatcacttgaggtcaggagttcgagaccagcctggccaacatggtaaaaccccgcctctaccaaaaatacaaaaaattaaccaagtgtggtggtatgtgcctgtaatcccagctacttgggaggctgaggcaggagaatcacttgaacctgggaggtggaagttgcagtgagccgagatctcgccactgcactccagcctgggctacagagtgagagtccatctcaaaaaaattaaaaatttaaaaattaaaaaaaaaatcctaatttgatagaccccaaataagagctcatggctgttttattttgcttttctatcttaacaaatgaagctaattattttttcatataattattagtcattttattttcttctctaaagtgctttagagtggcctttgccagtctgcctgtgtatttatcttaattgtagtaatacaattatgttctcatataaagaagattttgtataccatatattatctcccaccgttcgtcattcttctcaatttggcttaaagtatttttcctactgtcaaattttacttaaggtgggtttctttccccatgaattctaaaatatatcaatctttctaccatgttccctttttttaaaatttttttggccatccccatcatatagataatttttttttttttttttttactgcatctatttttttttctttgtacttttggggcactggttctggactttgactgtacatttaaatcacctgggaaacttttagaattgttgacacctgggtctcagcaccccctacctgcattctgatttaatgggcgtggggtacattcaggcagagggagtattaaggctccagagtgattctaatgagccatccaggttaagaagcattgcaaactttttctataaatgaacatatagtaaatattaataaatattttaggctgtcacaacgactcaactttgctgtaaataataggaaaacaaataggtgtgaccatattccagtaaaatgttattcatataaataggccatggacactaattttctacacttgctttggaggcatgggattcaaatccattgtgcacatgaatcacctggcatttgtaaacatccagattctgactcagtgggtctccgatggggcctgatactgtgcatttctaacaagctctaagctatcgtcaatgctgttggtcagaagaccacactttgggaaaacaaggctgcaaggcagtggtccccagatttctctgccattgcaatcacccgaggattttaaagcaatactgaggcctgcttcccaccagattcaacgggtctgggatacaagctgggcatcagaatttttataaattctgattcgagtgtgcagccaagtttgggaaccagtggttcagaatatattttcttttctctaacctttaatttgttaatctgttttgatgtatttatttattttggttaacagtgcaccaaaaggaccaagctttatttttctaatcaagaagattctaatgtacagccagatgatggatgaggatgagtccagtgtacagccaagtttgggaatcactgctttagagtatcttttattttctttttttaacctctaacttgttaatccatcaggatgtatttatttattttggctagtagtatgccaaaaggagaatgctttattttttctccaaatagcaaatttccgttaatccgagtaatcacttgagtaatttaaaaccagtaatctaccctctaagcacactaccagtctatttaaatcaattttaaagaacatactggctaactagaagttaaatcaataatacaataaaagattatttataaaacaaagcattcagcttaagattttgggggaaaagtagtcttgacaataggagaaagctgattttttagttcagtgtttatgactaaataaccagaaaaccaataaatatgaaaaaaaattttaaaaatctgtagaattttatgggagcaaacaatggcaacaagaaaacaaacaaaataaagttctggctgatccaataaaaaaagaaaaaaattatccacaatgatattctaataaatctgtgaaaaacctcagtgagagggatgactttctgaaaaatataaacttcgaaacttgatacacacaaaaaagaaatccattataggataacaattgagatatacattgaaatatatagtaacagcttcccttacagactctgcacccatatataatttatgattaaattattgcacatacattttattaaaattctaaactgttccataatacaaaacgagatctaaagctactaacttatattataaaataaacataaactgaggaccaaaaactgactctcaaagcacaaaaataaagtagaaatggccctcaacttacaatggttcaacttaatgattttctgacttttcagtggtgcaaaagtgatacctattcaccttaaaccatactctaagtattcacacaaccattctgtttttcactttcagtacagtattcaatacattacactaaattttcagcactttattataaaatatgctttgcgttagatgattttgcccaacagtaggtaatgtaagtgttctgagcatgtttaagatagggtaggctcagctgtgatgtttggtaggtgaggggtattaaatgcattctcaaacttaaaatattttcagtttatgatgggtttgtgaggatgtaactccatggttaaattgagaagcatctgtattctaatatcactaagatcatagatgccaaaattctgtatataataccaacataaattattcatcaatgaattaaaatgataatccagagcattctagttaaacatagcagatggatcacaatggtttatgtctgccccctctcaaaacttcactaaactaatacaaatgttgagggggtaggaaacagcagaatcccacaagaacaaaaagaatggaagaggagattacaacacagaacagacgaacacaaaatgtgggtagatactctgttagaaactgacttggcatacatatatatgtatttatttatatttatataaacatatacatatattttccatgtatatatttccataatgagaaagaaagacatatacacacacatatgtctatctccacaatgataaacagaatattaaaaatgtctttggtcaatacataaagactgaggttgatgggggggtggttgggatgcagagatcacagtgaagaagaaaacaaccatccaaaaggtgaaatgaagtggctgaccctgggaagaaggaggctgtgacaataacactgattgactggggtgccaaacaggagtagtcactacatggcagcaagtgcatacacttgaggtgttaaaatagagcaatatcctgagtaaactgtaactcttggaagaaacacactgtctctacagctgtaagaccagttaccgaatagaaacacacagtagcatatctcagtactccccagacaaactgcaacacacaaagacagcattcacatataggctaacagaagatctcaaatgcaaagataagcacaaaacaggccaagcacggtggctcatgcccgtcatctcagaactttgggaggctgagcaagactccatctccaaacaaaaaaacactgtcaagtacatctacatataaccacatggatgaatcacacaggcgtaacactgagagaacaaggcctgacacagagtcattctatataacccagttatatgaagttcaaaactgggcaaaactgatatatggtcaggagagtggttacctttgtggggtgtagtgactagaaggttgccaggagaagggactagggggtg

SEQ ID NO: 1162 - DNA, 4032 bp, Homo sapiens
taacttattttattcctattacatttataaggatttcagagaaaaattcatgttcaggtcatcaaaattgattagtagctattgtatgcaaaacatagtgccagacatttagaggaatataaaagaatatataacatagctgcaaatctagaccagggatcagcaaactttctctaaaaagaaagataataattttttaaggcttttttgggtcctatcttcttcatgtcattgccataaacaatatgtgaacgaatgaacatggctatgttccaagaaaactttatttacaaaaacaggcagtaggccagagtggctaactcctgatctagttgatgagtcaggacaggtacatgttacttataaaaacacaaccacatcagaagatcacccatgatcaaaagagtggctcagactatagtggttttggaagaggcaagtaacaggataataactggttgagtgcaggtaagcagagaagacaagaaagcagctgctagacaagaaactaccaaaaccatggcgatggaacatatctgagattgggtaggagtggttggtaagtaggctggctagagtgaaaatgggagaaattcacaaaaatgcaaacagggctggagaagaaggctaggtgagaatataaagaaggaagaccatgagactgagttttttgtttgtttaatttaatttaattttttatttttattttttttttaagatgggatttcactgtattgcccaggctggagtacagtagcacaaccacagctcactgtagcttcaacctccaaggctcaagcaatcctcccacctcagcctcctgagtagctgggaccacaggtatgtgccaccatgccgggctaattttttaaaaaaatttttgtagagacagggtctcactgtgttgcctaggctggcctcaaacgatcctcttgccttgggctctcaaagtgctgggattacaggagtgagccaccacactcagccaagtttttacaaaaaggaagtatctgctgtgctcccaatctggccagtgaggtttgcaatccactcaggaaataataagctaattttaccctttatgagctgggttgctaaattcctacctggccttaaaggggtaagtcgaatttagtgattgtgatatgggagcaaagtgtcaccacactagtgtttggcatttatttcgagtgatatagtgtgtcttatgaaaaatgggccaggcacagtggctcacacctgtatcccagtactttgggagaccgaggtgggcagatcacttgaggtcaggtgttcaagaccagcctgtccaacatggtgaaaccccatctctactaaaaatacaaaaattagctgggcgtggtggtgggcacctgtaatcccagctacttgggaggctgaggcaggagaatcacttgaacccaggaggcggaggttgcagtgagccaagattgtgccactgcactccagcctgggcaacaatgcaagacccaatctaaaaaataataataaaaataaatttaaaaaaaagaaaaatggagctctgctcaccacctatcatctgttcttactctcatgagcaggcttgggcccaggcctgggcatctcagtgtctgcaagtgagatgactgggaaagaagatttgttcaaataagtcaccctgctattggagagaggctggaccctaagagagcccttccctcgaggagcgggctgagatactgtatccctgggagaaggttggaggtgaggctccatccctgggagaaggtcggaggtgaggctccatccctgggagaaggtcagaggtgaggctccatccctgggagaaggtcagaggtgaggctccatccctgggagaaggtcagaggtgaggctccatccctgggagaacatcggaggtgagactctagggatgagttagaaatttggcctgggacctccctccgcccctctccttccctaatctccaacacaccctgtatctattttcctgaatgagttgaccctatcctaatttcagagagtttaggaagcgatatcaaccaaattggctctagacaaaatactagtgactaataaagtcaagcaaaggtgctcattcttactagtaaccaaggacttggaataccttagaaggggattacaagtggaagatccaagagctatgggaaaagggttctgctgttcaagttgaaattgtaatatggaatatcataggatgagtatatctcaagatgtaaatgactcagattttaatctcaaaaacatatgaaataaaggattacattaataagaatactgatatttaggagcacaaaatagcaaggtttactctaataccagaatcctggaaacttgcatagcagctacaactagaattcaagttcagcctcaccgtgggctggaccagcagatctcaaagtgtggcccccagatcagcagcagcagcatcacttgggaatgtgttagccatgcagatcctcaggccccatcccaggtgtactgaatctgaaactctggggatggaacaccccaaatctgtaatttaaccagacctctaggtgactctggtgcactcaaagtttgagaaccactggtctatctagaatacatagtgtgcttgttccaaagcaattgtccttaccacgacccaaagagcctcacagaatagatttcggaaagtacgtgtgcgtgtgtgtgtgtgcgtgtgtgtgtgtgtgtgtgtgtgtgtgtgtgtgtgtgtgtgttgaagtttctcaggtattcaggtatgttcctctggtttaagaaccaccactgtgccaggcctctcaacagtggctgcacaagtgaaattattcagagaacttgaaaacattctggtgactgagttcatccccaattctcatatgcttggttagaaatacagtctggccaggaggacgtgtcagagttcctgggtgattctaacatactgccaagatcatttagcccatagaagaatcaccaggagaatttgttaaaacagattcctcagccctacctttcagagattctccaggtttagggttgaactccaacatttttatttctattaagctcccaggccatgtgctggcttgcagaccgcacctcgagtagtcctgctctaggagaaacatgtttatattttagatacctgaaatcttctttgggctgggatggccaactttcctccatctgttcctcctctaaattcctataaacttactgttctttctagaggacactccaattaagttattaacatcttatagaggcaagatctatgttttccccatctttgggtcactcctagcacctagggatttgcacacagtaggtgttcagctgaataatgcagtcgaatccctgagctggtttcaggtgttcattttctccctatctgatctgctagccaggtcaatccattatggccctggtctcatggaaaagaatcaaggcatctattttttgaagatgatgtgaaggtaaatatacgtccagtcctagagatttaggttgctgaggaggctgttccaataataccccagatgaagtacagccatctggagaggttttggcatccatgcaaacctactgctgaattcgttccttgaagacattcattttaggatggtatttccaatttggcatataacagagccatgcaaatcaatgaggatttagaatctctacttacggagggcatcttatttaaagcgtgtccctgacaaagcaatatcaagggaacacaattggaaatctcttggagaggagtaatttctctagaagcagttttagctatagcagcgaccggaacagcaatgagctccctgaaatacatccaaatttttagtattccacttggctgggctgccttcttcagagcccaatcatagggacagaacttaataatgagttcatttttcttgtcacactagagcaattcagttgcaatgctattcataaggtgtatgttgccattgaattctttctcaaaaaaaaacaaaaaaaaaaaagctcaagcca

SEQ ID NO: 1163 - DNA, 4047 bp, Homo sapiens
tgactaataaagtcaagcaaaggtgctcattcttactagtaaccaaggacttggaataccttagaaggggattacaagtggaagatccaagagctatgggaaaagggttctgctgttcaagttgaaattgtaatatggaatatcataggatgagtatatctcaagatgtaaatgactcagattttaatctcaaaaacatatgaaataaaggattacattaataagaatactgatatttaggagcacaaaatagcaaggtttactctaataccagaatcctggaaacttgcatagcagctacaactagaattcaagttcagcctcaccgtgggctggaccagcagatctcaaagtgtggcccccagatcagcagcagcagcatcacttgggaatgtgttagccatgcagatcctcaggccccatcccaggtgtactgaatctgaaactctggggatggaacaccccaaatctgtaatttaaccagacctctaggtgactctggtgcactcaaagtttgagaaccactggtctatctagaatacatagtgtgcttgttccaaagcaattgtccttaccacgacccaaagagcctcacagaatagatttcggaaagtacgtgtgcgtgtgtgtgtgtgcgtgtgtgtgtgtgtgtgtgtgtgtgtgtgtgtgtgtgtgtgttgaagtttctcaggtattcaggtatgttcctctggtttaagaaccaccactgtgccaggcctctcaacagtggctgcacaagtgaaattattcagagaacttgaaaacattctggtgactgagttcatccccaattctcatatgcttggttagaaatacagtctggccaggaggacgtgtcagagttcctgggtgattctaacatactgccaagatcatttagcccatagaagaatcaccaggagaatttgttaaaacagattcctcagccctacctttcagagattctccaggtttagggttgaactccaacatttttatttctattaagctcccaggccatgtgctggcttgcagaccgcacctcgagtagtcctgctctaggagaaacatgtttatattttagatacctgaaatcttctttgggctgggatggccaactttcctccatctgttcctcctctaaattcctataaacttactgttctttctagaggacactccaattaagttattaacatcttatagaggcaagatctatgttttccccatctttgggtcactcctagcacctagggatttgcacacagtaggtgttcagctgaataatgcagtcgaatccctgagctggtttcaggtgttcattttctccctatctgatctgctagccaggtcaatccattatggccctggtctcatggaaaagaatcaaggcatctattttttgaagatgatgtgaaggtaaatatacgtccagtcctagagatttaggttgctgaggaggctgttccaataataccccagatgaagtacagccatctggagaggttttggcatccatgcaaacctactgctgaattcgttccttgaagacattcattttaggatggtatttccaatttggcatataacagagccatgcaaatcaatgaggatttagaatctctacttacggagggcatcttatttaaagcgtgtccctgacaaagcaatatcaagggaacacaattggaaatctcttggagaggagtaatttctctagaagcagttttagctatagcagcgaccggaacagcaatgagctccctgaaatacatccaaatttttagtattccacttggctgggctgccttcttcagagcccaatcatagggacagaacttaataatgagttcatttttcttgtcacactagagcaattcagttgcaatgctattcataaggtgtatgttgccattgaattctttctcaaaaaaaaacaaaaaaaaaaaagctcaagccaagagtagagccccatgtcagtctatatgcgctaacaaaataccttagactgggtaatttataaacaacagcaattgattgctcacagttctaaaggccggaatgtcccagatcaaggcgacaacagattcagcatctggggagggttttttctctgctccatagatggcactttcttgtttccctgcatggtgggagggacaaacagcctcccaagggcttctttcataagggcaccaataccattcctgagggctccaccctcatgatctaatcatctcccagaggccccatctccaacacgacggcattgggatttcatttcaacacatacatttggggcagatacaaacattcagaccatagcagcccataacatctagcatgatactatttcaacatggactaatggtaaaaacatggattgtttttatttatttggctacttgtatagaatgggtcaagaagctcagaagaggggactggtgaacatgggggaaaaaagtagtttggaggctggtaagttattaaaaatgtgttaacttgtagcttgagagacagcatagtatcatatcaagtaacatggactttggaggtagattgcctgagatcaaagctgagctctaccatttactcactaggtgactctcagcaatttatttaaccttctgaagcctcagtttccccatctgtaatatgggcccccaaatgacacctatttcatagtactgtttggaagagcacttgagacaattatatactgtatgtacatacacatacatacatatatatacacatatatgtaatatgtgtaatatgaacacatctaactttattctagttatggaagcacttttcttttggatttctctttctctcaaaccccccaacccccactctcctaaggacacctggcccaaaaagggaaatcatactttttcttttctttatttcactattcttattctaaagaaacccacagactacagacagcagtttacttagaaggctctgggcttcagggaatctagatgtccaagttgaaagtcagctgcctggaacatggagtgggtgacctctgggggcactcaggggcccttccttccaggcttcgggcactgtcactgagaagcaactcccttgggggaggggtgcttttggtcatagcggttgagtcaagttatcagatgtcaaatagcttataggagttcaaagtgagcctatctccaccactgctaaccacgaactgcccatctgagcatgatgaaattggcccccttcccctctccccttgctacttaattgctcacaaatccagcaaattgcaggaccagcctctagggggcaccagagacctttcctttcagagcccaaaatgccatttcagtagcagcagagtagtgtgtcctggagctggagcatggtccagtgtctcttgtgctttttggcctactgagtccttaagtatatttaatttaatttgggtagggtggtagagggttccttttaacagtgtattcatgatttctctagcatttcttcaggaaagttatttatttcttttagatatagaatttttaccattggtccattcactcaaaatcacttcaaaaaacatttgctaagcttccactatgtgcaagagtgtcctgggcatacaaaaagtaaaaagccatggtgtgtgctgtcacagactcattctagagcagcgtggtcccacagaactgtctatgatgatggaatgttccacatctgtgctgtccagctccgcagccaatgagccacatggggctcttgagtacctgaaaaacagctggtaggatggaggaactgagcttttaaataggcaaatgtggctaggagctaccatactggacagcacagtgtattagtttggtgcaaaagtaattgtggttttggccatttttaagtggattggtaagcctggctatttaaagtgtggtccacagagcaggagaatcactacacctgagagctggtggaaatgtagatctctgacgttagcataggcttcctaaatcagaaactgcattctaacaagatctcctggtgcttctcatgcacagt

SEQ ID NO: 1164 - DNA, 4069 bp, Homo sapiens
tttagatacctgaaatcttctttgggctgggatggccaactttcctccatctgttcctcctctaaattcctataaacttactgttctttctagaggacactccaattaagttattaacatcttatagaggcaagatctatgttttccccatctttgggtcactcctagcacctagggatttgcacacagtaggtgttcagctgaataatgcagtcgaatccctgagctggtttcaggtgttcattttctccctatctgatctgctagccaggtcaatccattatggccctggtctcatggaaaagaatcaaggcatctattttttgaagatgatgtgaaggtaaatatacgtccagtcctagagatttaggttgctgaggaggctgttccaataataccccagatgaagtacagccatctggagaggttttggcatccatgcaaacctactgctgaattcgttccttgaagacattcattttaggatggtatttccaatttggcatataacagagccatgcaaatcaatgaggatttagaatctctacttacggagggcatcttatttaaagcgtgtccctgacaaagcaatatcaagggaacacaattggaaatctcttggagaggagtaatttctctagaagcagttttagctatagcagcgaccggaacagcaatgagctccctgaaatacatccaaatttttagtattccacttggctgggctgccttcttcagagcccaatcatagggacagaacttaataatgagttcatttttcttgtcacactagagcaattcagttgcaatgctattcataaggtgtatgttgccattgaattctttctcaaaaaaaaacaaaaaaaaaaaagctcaagccaagagtagagccccatgtcagtctatatgcgctaacaaaataccttagactgggtaatttataaacaacagcaattgattgctcacagttctaaaggccggaatgtcccagatcaaggcgacaacagattcagcatctggggagggttttttctctgctccatagatggcactttcttgtttccctgcatggtgggagggacaaacagcctcccaagggcttctttcataagggcaccaataccattcctgagggctccaccctcatgatctaatcatctcccagaggccccatctccaacacgacggcattgggatttcatttcaacacatacatttggggcagatacaaacattcagaccatagcagcccataacatctagcatgatactatttcaacatggactaatggtaaaaacatggattgtttttatttatttggctacttgtatagaatgggtcaagaagctcagaagaggggactggtgaacatgggggaaaaaagtagtttggaggctggtaagttattaaaaatgtgttaacttgtagcttgagagacagcatagtatcatatcaagtaacatggactttggaggtagattgcctgagatcaaagctgagctctaccatttactcactaggtgactctcagcaatttatttaaccttctgaagcctcagtttccccatctgtaatatgggcccccaaatgacacctatttcatagtactgtttggaagagcacttgagacaattatatactgtatgtacatacacatacatacatatatatacacatatatgtaatatgtgtaatatgaacacatctaactttattctagttatggaagcacttttcttttggatttctctttctctcaaaccccccaacccccactctcctaaggacacctggcccaaaaagggaaatcatactttttcttttctttatttcactattcttattctaaagaaacccacagactacagacagcagtttacttagaaggctctgggcttcagggaatctagatgtccaagttgaaagtcagctgcctggaacatggagtgggtgacctctgggggcactcaggggcccttccttccaggcttcgggcactgtcactgagaagcaactcccttgggggaggggtgcttttggtcatagcggttgagtcaagttatcagatgtcaaatagcttataggagttcaaagtgagcctatctccaccactgctaaccacgaactgcccatctgagcatgatgaaattggcccccttcccctctccccttgctacttaattgctcacaaatccagcaaattgcaggaccagcctctagggggcaccagagacctttcctttcagagcccaaaatgccatttcagtagcagcagagtagtgtgtcctggagctggagcatggtccagtgtctcttgtgctttttggcctactgagtccttaagtatatttaatttaatttgggtagggtggtagagggttccttttaacagtgtattcatgatttctctagcatttcttcaggaaagttatttatttcttttagatatagaatttttaccattggtccattcactcaaaatcacttcaaaaaacatttgctaagcttccactatgtgcaagagtgtcctgggcatacaaaaagtaaaaagccatggtgtgtgctgtcacagactcattctagagcagcgtggtcccacagaactgtctatgatgatggaatgttccacatctgtgctgtccagctccgcagccaatgagccacatggggctcttgagtacctgaaaaacagctggtaggatggaggaactgagcttttaaataggcaaatgtggctaggagctaccatactggacagcacagtgtattagtttggtgcaaaagtaattgtggttttggccatttttaagtggattggtaagcctggctatttaaagtgtggtccacagagcaggagaatcactacacctgagagctggtggaaatgtagatctctgacgttagcataggcttcctaaatcagaaactgcattctaacaagatctcctggtgcttctcatgcacagtaaagtttagaaagttaggagatgcatacaagtggttctcatcctgactgcacttcagacacaactgagaaacattaaaagaagctgagcctaggtcacaccctccacccagagattcttaggttaatggtttaaaggcttggcctgaacatgaagagttttaaaagcactctgggggattctaataaaaattcgagaaccatcccagcataagtcagtacggtggctccaaaactggagatcaccaggagtgcttgttaaaacacagactgctggctccaactcgcggtttctgatccctgggtctcggttgagctctaagaaccctcatgtgtaacaagtccccagtaacgctgatgctgctgatccaggaaccacactttgagaaccactggtctaatcattttaaaagatgggctccagaattggactaacctgagtcttggacctgccacttacttagaccctgaacctcagtttcccaaactgtaaacttgggctatgaatatttactcatcgagttattgtgaatattaactcagagaatgactgtgagatgctgggcatagtgcctacttttaataagcaatcaataactgttccttactatcatgatcctaagaagactcactcattcattcattcaacaagtatgaactatgtgtcaggcactgttccaggtactagggacatagcgaaaaacaagggggccacagtccctgccacattgctatcatggaagctgcagtcctacctgtcagtacaaagcaggctgcgtatggtgctcctatagcacgaatcctaacagcacaatacaaaggtcagagaggaattcattccaatggatgagaatgggaaagctgcacacaggagctggagtcagagctgtgccttaatggggagaaggattacaacctgcagagtcagggcaggaacttactcatgaccaggcacagggcagagacagcaagaagatgcagctagcagcctagtggagctggggcaggaagtacagggaaaggggaggcaggaggcagggctgtgcatatggggatgccaaccagggtctgcctccactctctggccaaaccatactatttgt

SEQ ID NO: 1165 - DNA, 4042 bp, Homo sapiens
acgtatctctttcttattctgaaccttagtatttcagccagtagcctaagaggtctattacagttccaactcttgtacctcttggcacatctgcactcaagcagaatggcacacaagcccctcagcagggcactcaaggtctacactaacaaagagtaccaatgctgaagacttgctgatcctgaatgtaggaagcctgagaacatctggaaaaaaaaataattatgtttaaaaaacagttgttccatttatctgctgcttcactttgacgaacagaaaacaatgtcacataacatagatagtcaccacaaggacaccagcttgtttaaagttacacatgaatttatatgtgatgctgaaggataattataatggcttatatctatttctaacatcttgaagttttgttgttgttgttgttgttattgttgttgttgttgttgaggattttttttaagaacacacagagaaagacctggtagaagtctttctgacatctggcatagaagacaattatacctttattgcacaaggaaataaaatagctgtgtcttagctccgtctttggctgacagctaaggcctggaagttttgtaagttttcctatttaggagttttgttgagagcctagcagcctcacagccaaaacggagtgtctgagatgctgctgattagaagtcatgggtctgctgagtacaaggctagagtcactccttaggaatgtcataaaggacctgggcagtagaaaccaacaccaccatggaaaatcagacaggatgagttacctttaaaacaaactgtcatcattaatagggaaaatggcaatgacttattaacccctatgattatacaatcatatcttcaagtatgcacacttttcatttccttcttgacaacttcatgaaagtaatgtctcatctcctggaacatttcttttcctttttttttctttccttcttgcttctaattaacattgaaaatcatttatttatcaaaattaggtttcccctgcccatgtttcagaaataataaatagctggctgagtatggtggctcaagcctgtaatcccagcactttgggaggccgaggcaggtggatcacttaaagtcaggagttcgagaccagcctggccaacatggtgaaaccccacctccactgaaaatacaaaaattagctgggagtggtggtgaacacctgtagtcccagctactcgggaggctgaggcaggagaatggtttgaactcgggtggtagaggttgcagtgagccaagatcataccactgcactccagcctgggcaacggagtgagactgtctcaaaaaaagaaaaataataataaatagctatttccaccatatcaatgacatccactagatttttgggtataaatttggaaagaaatatgatgaattacctgctcagtggggtgaagtgtctttctccttgcttcctcctgcaggcccttcttttaattttattgtcctatctttgaacttctctagagatgttattcctatcattataaaaacatctctgtgagaggcctaggatggccccaggaagccgatttcttaggattttctcttctgtctctgtgaatggatctctgtatccccactttctgttgggcttcagaaatcctttcattttatgaggaatcactgtgtttttctgggaaagaggaatgggtctctgtactgaagaatctcacaaaagagaatcagatgtttccttcgccaagcccccagatgaaaacgttcataaagtgagaatatgccaacgtgctgggcaggatcgcctgcctgcacaggtctgtactgtaattacatttaagctcctttcaaaaagcgaaatgctcccattcaaaggatctttttactggttaccaaaagaacatgttatgaaattctaagcaaagtccatttcaatataatacatgggatatggttaatagaataggaggaaaaaggactgtgggaagagcttcaatctactaagcccccagattgtagaagatcagatttcatgaagaaaacctaaaaataagataagaagcattcggctttgtttcattctgactgcttagtgcctactcttgggctaagggatgctgacaagctagtatcatcaagaattgtctaggaactgttattcctaccctaggattatcacagcttggaatgcctcgcctttcatttttctcagcttacaaccaaggcatgtctaaaatgcaaagtatctatttgaaatgacaaaaaaagaaatgcagtgagaaaacagatcctgacagttgtgttttataaaagtccattctgagaatacaagaaagaagtatacaagtttaaaaaaaataaggaaaagaaagcagttttaaagtaagtcattagacagccctaaggcaaaaaaaaaatatttcaaggagagaaaatgatcacaatttactaatcaatgatgttgaatgcagtgccaacatgctttaacaaatgcgatatttcttcctagtagtaccatttcatttcttttaaagttgaattaatagttttactaaacactatgaaaacgatcaataattgcatttcctgaggcatttagcccaagaagtgcttttaaaaggtatatctttttatttagatatttgttagatctaagcaaaatcaaatcaggtaacattattcagaaagacatgaaagggtatcatcatcctggtcacttggtgcacacccaggtggagtcaggaacatgtaggactgatgatcaggtaggttgttacttggaaaactggtcctagcttctaattatttgtcattagtctttgctcagcataaacctaaaaacgggagatttatctctctcttttccaatgtcctagtcttgaattttcaagggacatggtggcctttgtgatatcacagcaaactgagggcccacagggatgatccaggagaagcctcaggcccagtgcttcagtgtattggaatgctcgctgctttaattcatgcatgcgtccagtgctcaccacgttcagggccatcggggaaagcacgtcaacatgcttgggcagtgcaggaaaagaatctggttaacctggaggcgacaaccgaaagggggaggttgcatcatgcaaatgaaaaccacagcttggccttagctgccatgcagaaaggacctacatcaaagagtctgcagtgcggctcctgggtaagagtcgatatgagagaggtgagttacttcagcaatgagagacacaggcagaaaaatgttcaaaccactctaaacagaacactgtacagagcgctggcattacacgcgagaagaggcagctttggggacgaggaggggcgagacagagggaaggtgaggacagaactggccgttactcaatgaaatggcttccctggccatcctttcatatgcatgtatttttataatgtatttcacttcaacaaataacctcatgagagtttttaacatcaaccataattgttaagatgttgtgaaaattcaggagaaacaaggcatcagttacataaagatacacaccatggtttcctgtagttacagttcattatagaagcagagctgaagcgggtcagataaataagagacagttaagtgccaacatccttaacactttggttacagagctcatgatgactctcaaggcgtaatgtagtgttgaaggaacccaacagtcgtgaaagctcgggtggtgcaagggtagggactctatgcatctatacccctgaaagccatttataaccctgaagttaaccacgctctcaagtgaagccatcttttcttcatctcagcatgaatgacaggtgaacagtgagctcacctcatacatattgaccatttagcagaaccctagttacgagcaagattctcaaaggtatttcttatcaaaatcaattcatcagcaaaaagcatatatatgtgatatatatatatatatatatatatatttcttaacatttctcttaaaggagtaataatactgttttaaattcagtagagattcatcaagcttcgctctaatgt

SEQ ID NO: 1166 - DNA, 4043 bp, Homo sapiens
aaaaaaaaacccaccctagtaagaagctgttctttctgctatttggagagcagtctctaaattatagttagaatcgacataaaatgaacatatttcagtacctcaaataggggtacctggacatagtagacacatgccaacaattatagacaaattacagataacagattatagacaaattgtatacatgtgatcacacccaggcacatagaaaaattacagtgaacacttctgctgcatccactattaattacctaaagaacttggttagtcataccgtcaagccatcaacttaactgccttttaagtgtccatccaaccctgtgcacagttaggatttcatgagcatgttggactggttttctctcacagaatcctgacctttagatttagatgtccttagtttccagagggctgcctgaaagtatgaattctggggtgtgcagggggtagggggtgaggctttcttttggcaggagttgacaagaggaaagatgccattttcaggtaatgtgctttctctttaaaaagtgaccaagtgtgtttgatactcacttagctcaattttaaccgtggtgggagctctgtaccctatgttggtaaatcagaaacaggaaagttctgtctgtgtgctgctgtgaccatgcggtcatatttgtttggtggatttccatttgttccaagtccattctagtttggagtttccatgaagccaggccaagtgtacaaatgctaacacagggaaaaagaaccctctatacatggacttacggagaagacaatacacactgaacttggaaaaggagcacaggctgagattccctaaagtggcagccaccttgctgcacagcagacactcagggagatgctccaggcagcaattgctcagcaggaaggcatgctggggaaggacctcatttcaaaggagagtagaacaggcctaagtgctgggattacaggcgtgaggcaccgcacccagcctgaaattagtattattttaaagttcacgcatgtgaccttataaaaatgttggtgcttatttttaagttatttctttttctttttaaaatttggtttctcacaagagaatttcattgtgctgatggaagagttctgtatactgactggagaggtaataaaacaaatttatgtgggataaaatgtcttggatctacacagcaaaaaaaaaaaagtgcttgtaaaaactggcaaaacatctgtacttgagtttacagcagtacgccaatatcaatttcctggttttgataacataccatgcatgcctatgtagcatatagcactatcatggggaaagcttggaaaggatacagaaactctgtcctgtttttgcaacttcttgtgaatcttaaactatttcaaaatgaagttctaattttaaaaaacagttattctcctgtttggttttactgtagccagacatcaggctagtggtctatttctggtgatatgtgcctctaaatgtctacagactgatttctttaacaaacatttactcagcacctgttataggtataatactgtgttcaattccaaaagatataaaagagggataagaaaccacagtgatacaaatcaacattaactatcttagttcctttctcaaaggagtgctaattgaggcaaagacatcatttacctactgcacaaattctcagagacaatcccccaagataatcagctgtcaataaatgtaggtcgttaatgtaataagcaagcttctagaattaacccacagtaatctcttcaggtaagcagatatcaggtaacaagctgtgctgaataatgcaactgatgtgataatgactctcttccttcacgtacagttggtgcaggctaagccatccttttccttagtttttcagtccctgttttgtccttcccagaactcagtgctcaccacactgaggagccaacaagtgatacctgcttaatgaaggtgcagggtgacactaagagctacttagattttaagaaacaactgaaaaggcttcaagaatgaatgtctaattggtggaatttcaggtactttgcaagttagaagagatgttttggagtataggagtatttacagcaccctcaaactcacccaaggatggccatctaccacactctctactaaaataagttgtcatgggcaattatattggaagtaaagtcaaggccaaatgaggcaataaggatggatccttagaatgccaaagactttgcaaggaacatgtcaacagtttttatcattctgagaagctgcctctaacaggaacaaaaagaaaacagagaaatgtgcaaagaataaaatctcctggaattgaagcctcagcaaatgaatatccaggaagagccaattcaatccttcctgaaatagaagatgtgtcactgctgttaacctgacaccgttattacctgcaagtggcttgggcttttaagaagtctggaagtaccatctttttcttgctgtttaaaggataaacaactagaacagctcaatccgggaacaaatgaatttttcaaagcattccccaaagaactgggaaactcctgctatgaagaagggtcctatcctaatcacaacaatttttaaagaagttttgtaacagtggaagacagaagactcccagaaatatttgacatctgtaagaatgaacagcagctaagaatggacgggctgctgcattcactcctctgtttcacacccatgctattcccttgcaagctcttactcatccacctttgaacactcaactcagtggctgcctcctccagaaagcctcccctgatcctcctcccacccagaggtaactgaacctttttctaggcttttcttcctgggtgcttctgttgtggcgctcatcactcatgaagtggtaatttatttgtttgtgtatctgtctcccttccctgctagactgtgagctcctgaggggagagccttggtgttttgtgtctgggttcccatcatcatggtacccgcaaaataggccctcaatacatgtttaaggaggaggagaaaaataaatgaattgagggagaaaatagacaaacctggaggaaactgattataattcaacagtaccaagatactagggaagtcccatctcccaacatggtttcaaatggccccatagtcccataccaattcagaacttaaattaggctaggcgtgatggctcacacctgtaatcccagcactttgggaggctgaggcgggcagatcacttgaagtcaggaatccgagaccagtctggccaacatagtgaaacctcatctctaatagaatacaaaaattagctgggcatggtggcgggttcctataatcccagctacttgggagactgagtcaggagaatcacttgaatccatgaggtggaagttgcagcaagccaagatcacatcactgcattccagcctgggggacacagtgagactccctctcaggaaaaaaaaaaaaaagaaagaaagaaaaaagaacttaaattatatgacaattacatcagttacaatattactacaatccctagaggatgaggtgcattcaaaggactgatttgtgtgctcttcccgtgtttcaggggagtttcaggttatctcacctcatgtgtgcaagaagaagaatgggaatgaccttggaggtaacaagattcaccactcagcaaagccatttgacctcactagccatgagaggtccaagacctgagaaggctatgggatagttaaaattccacaggagagtctccccgagggcattcaatttctgtgtcattaggcatcacaaaatctaaatgcctaaaactaaaaaaaagtcattcctctgaaactaatgagtatgcacttttctccttctatgagggttatcttctataactgggaaaccaagattgaaatgaagttgcccctgtaaacattataaaattaatcagggaagaagaaaggggaaaaaataaattaataaaccaagcttgaagcacattcagcattaagcatgaggtcaactcattctctgacctgcttcctcgacatggtttggt

SEQ ID NO: 1167 - DNA, 4049 bp, Homo sapiens
agactgatttctttaacaaacatttactcagcacctgttataggtataatactgtgttcaattccaaaagatataaaagagggataagaaaccacagtgatacaaatcaacattaactatcttagttcctttctcaaaggagtgctaattgaggcaaagacatcatttacctactgcacaaattctcagagacaatcccccaagataatcagctgtcaataaatgtaggtcgttaatgtaataagcaagcttctagaattaacccacagtaatctcttcaggtaagcagatatcaggtaacaagctgtgctgaataatgcaactgatgtgataatgactctcttccttcacgtacagttggtgcaggctaagccatccttttccttagtttttcagtccctgttttgtccttcccagaactcagtgctcaccacactgaggagccaacaagtgatacctgcttaatgaaggtgcagggtgacactaagagctacttagattttaagaaacaactgaaaaggcttcaagaatgaatgtctaattggtggaatttcaggtactttgcaagttagaagagatgttttggagtataggagtatttacagcaccctcaaactcacccaaggatggccatctaccacactctctactaaaataagttgtcatgggcaattatattggaagtaaagtcaaggccaaatgaggcaataaggatggatccttagaatgccaaagactttgcaaggaacatgtcaacagtttttatcattctgagaagctgcctctaacaggaacaaaaagaaaacagagaaatgtgcaaagaataaaatctcctggaattgaagcctcagcaaatgaatatccaggaagagccaattcaatccttcctgaaatagaagatgtgtcactgctgttaacctgacaccgttattacctgcaagtggcttgggcttttaagaagtctggaagtaccatctttttcttgctgtttaaaggataaacaactagaacagctcaatccgggaacaaatgaatttttcaaagcattccccaaagaactgggaaactcctgctatgaagaagggtcctatcctaatcacaacaatttttaaagaagttttgtaacagtggaagacagaagactcccagaaatatttgacatctgtaagaatgaacagcagctaagaatggacgggctgctgcattcactcctctgtttcacacccatgctattcccttgcaagctcttactcatccacctttgaacactcaactcagtggctgcctcctccagaaagcctcccctgatcctcctcccacccagaggtaactgaacctttttctaggcttttcttcctgggtgcttctgttgtggcgctcatcactcatgaagtggtaatttatttgtttgtgtatctgtctcccttccctgctagactgtgagctcctgaggggagagccttggtgttttgtgtctgggttcccatcatcatggtacccgcaaaataggccctcaatacatgtttaaggaggaggagaaaaataaatgaattgagggagaaaatagacaaacctggaggaaactgattataattcaacagtaccaagatactagggaagtcccatctcccaacatggtttcaaatggccccatagtcccataccaattcagaacttaaattaggctaggcgtgatggctcacacctgtaatcccagcactttgggaggctgaggcgggcagatcacttgaagtcaggaatccgagaccagtctggccaacatagtgaaacctcatctctaatagaatacaaaaattagctgggcatggtggcgggttcctataatcccagctacttgggagactgagtcaggagaatcacttgaatccatgaggtggaagttgcagcaagccaagatcacatcactgcattccagcctgggggacacagtgagactccctctcaggaaaaaaaaaaaaaagaaagaaagaaaaaagaacttaaattatatgacaattacatcagttacaatattactacaatccctagaggatgaggtgcattcaaaggactgatttgtgtgctcttcccgtgtttcaggggagtttcaggttatctcacctcatgtgtgcaagaagaagaatgggaatgaccttggaggtaacaagattcaccactcagcaaagccatttgacctcactagccatgagaggtccaagacctgagaaggctatgggatagttaaaattccacaggagagtctccccgagggcattcaatttctgtgtcattaggcatcacaaaatctaaatgcctaaaactaaaaaaaagtcattcctctgaaactaatgagtatgcacttttctccttctatgagggttatcttctataactgggaaaccaagattgaaatgaagttgcccctgtaaacattataaaattaatcagggaagaagaaaggggaaaaaataaattaataaaccaagcttgaagcacattcagcattaagcatgaggtcaactcattctctgacctgcttcctcgacatggtttggtgcctattgtcctagaatcatgtagactctgtgataagatgatagttccccttaagtgctctatagataacaacttgaacattaagaaatgttaagctttccccgtgaggtagtctttcaggtcctgcatacgagtgaaactactacatcagctgatctgaatgaaagaccccacgggtgaccccaggaaggtctgaggaacaccacaagaagctgactcaccaaagaacacaatttccacattctgatgatttaatcccccttcccctgatcagtcaacaaccccaattttccagcccatcacgctccatgatgttcttaaaaaccacagcccagagctcctcagaaagatgaatttgaggctctcctcccatctcctcccttggtgccctgagatagttaaacccttctctgctgcaaacctgctgtctcagggtaatgggtctgttactatgcagtgggcacacaaacttattggttctatatcagaaataatacacagaggtgattgaagccccagttcgttcttctctctttgcttcaaatgatatatttttttgtgctctagctcaggaagctggacctaaacttgacacgaagcatactaggagcaaagctaaaaatctagagatgtgtgcatatcaaataggaggaagtcagctcatgtttctcttgctgattcatttctccaggaagccaacccaaggaatcaggtgttcaagcaacaatggaaaaagatgaattaaaatctccacataagaatacatagatgaagaggagtgtgggtgaggattttaacccaaagggtctccttggagagtaacttatcttactggatataaatcaacatgctctaatttttccagtaaggctgaatatatttaaaccttcaaaaaatatagtaatttttaatgcagtcttagattgatgaaggtttcttatagtttttactccatgctgcatatatgatgaagattccattaggaagtccatctgaaccaagtatttaaatcacttaacattaactttcctttgaatttgtcctctcatatcagcctagattttgataacctgctccttctagtcatcactctccctaaatataaaaccattttttaaaaaatcaggacgactttttaaaagtctatgaaattgtaaaaatttgtagagttatcactagcttctgaagtgacacctctgggtaggcaattctacaaagactatttgtaactatatgagctaatagtatagaagcagtgatgtaaaactgtattatttgtttattatgagcaacagaataatggaatgaattaatgcaccaatctcgctctaatgaatctatggacaacatgacagtatggtgtgaacagaacaaaataaaaccattgagtgggtccatttgcaaataagcccatttccccataaggcgagagaacatttgtttaatttaaagcttaagaacaatctctttacatacaaaatactttttctcag

SEQ ID NO: 1168 - DNA, 4046 bp, Homo sapiens
cattattcacaatagccaaaaggtagaaacaatctacatgttcattgacaaatgaatggataaacaaaatgtgtggcagacataaaatggaatattattcagccatcaaagggaattaagtactgatacgtgctacaacgtggatgaaccttgaaagcattatgtcaatgaaggaagccagacacaaaggtcgcaaatatatgattccatttagatgaaacatctagaagaggtaaatccatagagacagaaagcagatcagtggttgtcagggcctaggaggacagaggaatggggagtgactctgatgagtatggggtttccttttgggtttacagaaatgtcttgactaaatagaagtgatggttgcataacattgtgaaggtacgaatcaccactgtatcgtacacattaaaatggctaatagttacttttatgctctgtgaattttgccaggattaagaaaacaaaagagtggtaaagttagaagatatttcacaagttctctattgcactgcattctttgtggatgaggaaaatgagctgtcagtctgtccagtgcggaattacatagctaaagtttgccggtgaagttggggttagaagtcaaccctctgtcaattaatttatcagagcttgcacccaggctcacactggggctctggaggaaaagaagaacaatattgagagaaataattctttctcaagtgtaactgagagcctcccagttcctgcctctttggctcaaagctcatattcctgggaagtcatcctcccttccactccagggaaaatggcttcctacttttatgtgaaaaggagccacaaagaattcagcatcatgaaacacccttagctctatcaatagagaaatttctgtcttcaagggaagtccacttgatttgcttctgcttgaagtgaagcagataacctcaatcaacatctgattacttctttaatttccagagcttgctcattaccgaagccacactgtctctagagaaggacctagagtaactcagattttaacacacctgggctgacaagttacttagcttgggctttaattgagaaatcagttattttacccattattttgctaacattatcaaaatcctgtgatactcaaggccctgaaatgacattttcctctcctttatcatttgtacatgtgactaggagaaaattatgtgtgatggacatgtcgaagatacataagttcttgaagagattctttcctacttgctctactcactgatccgtttccactgaacaaattgagtatcagcatgagaagtcacaaggcagggggttcattctttcttccctggcttggctttctaaagcgtgtgagttttatattgttgcttttcaagatgtgaagttgtgtgtaaatttgtgtgcatgtatgatgaatatttttccctgctaaaaggtacaatgaaattgatagtgaaactttgcaaaccaactctccgataagcttctagtgtttttcttttttttaggtttgccactaatcctcccagcatttctgcagattgtaactgaagctcagcttttctaggaggaaaatacctgttatggtcaacaacctaagagtcactcttgattcctctccattttcaactaaacagctgctctgtctgtgacgcctccagcatgtgctcacaccccaatggcctcggacctctcccaaggcagcatcctctcagttgagacctaagaaaactgcctcccaaatattttccttgcttttgtctttccctgaactctattctccacatcacagtcattatttgctaatggctttattgagttctagtttctacaccatacaattcacccatttgaggtttaaaattcaatgggacaatcaattttaaaacactttcatcacctcaaaaagaagccctgtagccttcagctatcaacccccaatctccccacaagcaaggagtcagtaatctattctctgactctatatatttgcctattcttgacattttacacaagtgaagtcatatactgtgtgatcttttgtgactagtttcttccacttagcataatgctttcaaggtacacatatgttgtggcatgtttcagttctccattcctttttatagccaaatggtattccactgcataagcacatcacattttgttaatccagtcatctgttgatgggcatttagattgtttcgctgttatgaatgttcaagcgcaagttttgtgtggacatgtattttcatttctgttgggtaaatacctaggagtggaatgtacatgtcatggtagctctgtctttcagtttttcaggaattgccaggctgttttccaaagctacagcaccattctacatcatccccacgagcagccacaagggttgcaatttatccatatccttgtcaacacttgttatgatctgtcttttcaagtatagccatccaaatgggtgtaaagtggtatctcaccatggttttgatttgcatttctctgatgactaaggtgttgaacatcttttcatgtgcttcttgactatttgtatatcttctttagagagagatgtattcataaactgaccatttttaaactgggctgtcatttcactttctttgtaatgtccttccattgaaacacaaatgtttttaattttgatgaggtccaatttatctactttttcttttgttgcttttgtgtttggtatcatatttaagaattcatggctaaatccaatgtcacaaaggtctaccccgtcttctctcctaaaagtttaaatgtttttgctctcacatgtagatctttgatctattttgagttaattgatgtgaagagtccaattttattattttgcatgtgcctatctagttatcccagcaccattttttttttttttttttgagacagggtctcactctgtcacccagactggagtgcagtggcacaatcacaactcactgcagcctccacctctcaggctcaagtgatcctctcatctcagcctctcaagtagctgggttcacaagcgtgtgccaccatacctggctaatgtttaaaaaagaaatttgtagagacagagtctcactatgttgcccacactggacagcatcattaattggaaaaactattctttcctcattaaatggtcttggtattattctcaaaaattagttgactataaaaactggatgtatttctggactctcaattctattccactgatctatatgtccagaatgactgtttaaaagtggaaattgcattattactctttctaaagtaatagcctaatgcccaatacaagtcattctctatcccaaggattcttcacttggggccatatacttccaagaggtccttgtgcagtactcagggagtccatgatttggaccaaaaaaattacatctttatttttattaacctctaattcaaatttggcatttcctttaattatgaatatagcaataaactgtagggagccaaaggcccatgggacatgaccaactcagcattccactggaggctatatgatcaaacagcaaactgtttatcgtgaatgcagaatgtgagcaaactcaggactgcgcatgcctccaggaggtttgctaagggccaggaggtttgctgggctccttaaagttatctactgggaaatctagtgcctattgtttgaagaatgcagtcttgcaagcctgctgtgattcaaactgctggccgacaaccacctgcccctttctcgttatctcttttacctaataaattcggaggaccgaaacagctcagggcccttgtccactagaggcgaggtgcccccaaccccttcttccaaatatactctcttgtctttgacttttattccccagttagccccactttgttcagtccaccagggatcatggcaggttacaagtggcaccccgaacagtgacagaatcaggtgttctacaataaattagaacagtattaatgacacttgtaactttttttagcaacagaaatctcagatatttacatataagattacaattgttacaggtatctcaaag

SEQ ID NO: 1169 - DNA, 4045 bp, Homo sapiens
gaaaatggacaatagcacagccaagcatagactattccccctcaggtgatggagcacttcaggaaaaaggcagattcagtgatgtgagtatagaggtgattgagttgggaaagctggctcttagaaatatttcctgttctagaacctggactggagttgctgcaattaggcccatatgctttcagcgggtgtgtgaggcttcacggccttgggaggcagattcagagccaaggctcacaaaggtggctaccaccagaatccagtcacctgaggagctttccttccaaagcagagatgccctcatcccaccctagggccagcaaatcatgagctgggggaggggaagtctgggcacctctttttaacaagctcctccagtgaatctgacaatgggagtcactgaattaaagccattaggagaaaccacttagctcaagtcagagattaatctacaaatgtcgccttaacaattagcccattagaacatatgtatgaggcctgcaggcttagagaatcgtgctaggagtactagaaaaagtacagagaggaggatgaattaattctctcctgagcaggttttacacattcttctcagctcacagcagaacaaatgaccctaattaatgattctgcatgtttgatcagggtttatctgcctactgaaggcagagacccttctcagaaaatggacaattttctatatatgatcccaaaggcataggactttttaaattgaagtatataatttacatataataaaatccactatattaaaaaatacactttgggaggccaaggcaggaagattgcttgagctcaggagttcgagaccagcctgggcaacatagagagaccatatctctacaaaaaaaactttaaaaaaattatccaggcatgatagcatgtgcctataatcccagctactccagagggtgagtcaggaggatcgcttgagcctgggaggtggaagctgcagttgagctgtgatcaaaccactacactccaacgtgggtgacaaggcaagaccctgtctcacacacacaaaaaagaaaaaaatagatgtgagaactcccaaggcaaaacaatctggtgacattttgttttttgagagataatatcattccaacatctaaattataatgtttttgtcctggtgaatttattaataacaatgccaacaaacatttattgaacacctatgcacaagggccagagtgagagacagagaaatgcaaaactgaaacagttaagtctggcctggcctttgccctcagggagcatgggatctagaagtttaaattactcaagagtcccttctgaatgtaagaagcgctacacatatcaacagtcatctccaggatataaaggaaggatcagatcaggcagagaagcaacaccaccctcatttcagactcccaaagtggaacggggagagaaagtgagaaatggaaaaccaaggaaaaaggaagaagaatttttgacattccaagtccacctggctgttctaggaaaggacagacaccagtgatatggtttggctgtgtccccacccaaatcttatcttgaactgtcgctctcacaattcccacgtgttgtgggagggacctggtgggaggtaattgaatcatgggggcgggtctttcccatgctgttcctgtgatagtgaataagtctcacaagatcagatggttttataaaggggagtttccctgcacaagctctctctcttccctgccaacatgtaagatgtgacttgctcctccttgccttccgccatgattgttaggcctccccagccacgtggaactgtgagtccattaaacctctttttctttataaattacacagtattgggtatgtctttatcagcagtgtgaaaacggactaatataaccaggcacacaggatgagtgatgtggagaaggaagagcacaggacacagaagacctgggtgtgaatctccactctgcccctataagcaacatgctcttaagcacgtcacctaatctctctgggtctaagtttcccaatctgtgaaataatgagattgaaacagatgattatgagatgggaccttggtaggaactaaaaacttttggcttgaaaaggtagccctcacttatgctaactgtaaaccatgtatacataagtctgattcaacatgctgacaatatgcctgtccctaaatctgtatgcaggagacttgtttcataagatcacaagaataaactccatagacactcagattcatagtttgtgtttccagcagcacaatcaattgctcatgcagaatgtcatcccacaaaactaacacaagacatagaagggccatggatcagctttctcctgagtctgggtctcagctctgccatcactacagaaaattgagtggtggtctgacccatcgcctccctctccttgcctctgtgagctttgaaaagcccatgtttttgcaggctttagccttccagaagctcagactgagtctcagtgttttcctaagggaaaaagaaaatgatttttttctctttactgtttagcaagtatagttgatatgttcttgtcattcctaagtcatgaatggttctcaatagaagaagatataggccaggtgcggtggctcatgcctataatcccaacactttgggaggctgaggcgggtggattacttgagatcaggagctcaagaccagcctggccaatacggtgaaaccccatctctactaaaaatacagaaattagctgggtgtggtggcacacacctgtaatcccagctactcaggaggctgaggcaggagaattgcttgaacccaggaaacggaggtttcagcaagccgagataacgccactgcactgcagcctgggcaacagagcgagactctgtctcaaaaaaatatatatataatatataatcttgccaccaaaaaaggatttttgttatcatacatttaaaaatatctgtaatatttctgcagagccatttaatcatccataggtcccctaaattaccaagctagcactatgaaacatcacatttgacttatggaagcacatgcacaaaaatgctgtaaattgattcactggaaaccaagactccaaacaacggattaagtagagatgtattcaagatgaaagaaaggaagaagaaagaggggctttgtagttggtatttgggattatagcattaaaataaaatgcatgggattgccagataagagtaaaactgatttgttcacatgtaaggaaacctagtaaaaatctctatgattttacaggcattaggatctggtgcttccaaaagtgcaatactatgaagccatactctgtgtgcaatggactgaattcttaggacacacatgtaaatcggagagaatccctccttaaatcacctcaaatgtcctccataacttttggtatgaagaaaaaaaaaatccttgacagagtccacaaggccctgaaagctctggtcttttcctcctctctggctttatttcacatgcttccacatctagactccaggaatctaacttgcagttattctcattctccatttgcctcctcccaccccaaccaccacagagccttcgcacaagcactttcctcctcccagaagcctcacctgctcacatgggatgcccatccttcagaaatcagctctgctgtcacttccctgcccacaggtattctgttttgtgtagcagttagcaaagcagcaattttacatgtctttgtgcaatcattttgatcaattgctctcctctttcctttgctggatggcaagttctatgaaggccgggtgtgtgtccatttttagttatcacgaaattccaagaaagtagcaaagtgtctcaatcagtatttgttaaataaataaatatgtggagaaaaggctggagaattagtttgaagactgagtgtagtggaagcaaaagagaggtgggagaaacatggattaccctcactgagtgagaccctgaagtttataacccggaataaaggtgagatgcagttccaggtaatggcagcatccaggggatccctggtg

SEQ ID NO: 1170 - DNA, 4044 bp, Homo sapiens
ataaggtcacaaagatagtaaacagcagacctaggacttagccctggtccctctgatttccaagcttccttccaccaaatggtggagtaacttgctcccaatccatggatccagacctgggaaaggggctgcttctctgagctccaggagctattggttgagaatcctctcttttttgcatccctgggttgctgcccacccccatactgctccttaagcacttaattaatggtgtcctgtggccagtcctgatgatgcagtttttcttggtcactctgtgggccacagacttgcagctgccaattccccctacaagcattgctcgggtccaggcccactgtaggagacaccctgactactccggtgcagatctcacagctaccatgactgtttgttcagcccccacattctccagggtcccaatttcttgtcccacattcaaaaagaatgaggttatgctgccagccagtgggtgagcaaggtgaaaagttttattaactgatgaaacagctgtcagcagagaggggacgtgagaattgtctaccacccaaagtcaggtagtctctgtgtcccagtgtggctgagtccagggtttttatgggctcagaaaggggatggatactgattggtctgtgagtatgcaaaaaaaggcaacagtgtaaaaaccaattggggaagggtgggtataggtgaagaggtgggggttaatcagaggaaagcatgccaaatgggaagagaggttctcaatccagtctgtggatttatccaagacttgtagcttggctttcagactttaaactggctttggtttgcaggggggggtttcactggggactcacctgtgtttgcctagggatttgtctacctcctgctgtatcactgagttcaaatccccattctaccacttgccagctgtgtagccttgggaaaattactaacctctctggcctcagtttctccatgtttgaggtggaaataataatacctactctgctctgaacactaaatgagctcatttacgatggcatttagaagagtggacagaagtgaatgttccttctcccattattcatattgactccaccagtactgtctcacagggtcactgtatcatggcatccatctttccatgggtacatgtcttgtatagtccttaggggaaggtcttgttcttctctcctctcctcagggtccactcacttatgcattatctcataaaggatactgaagcccattgagggcatttcctaatctgaaggggcctctgatagacttctactacttaagtctcccatcactttcccacccttaaccccattctagaaaaacccataggtaaacagagtatacctgattttctaatacccattgaatattttatatttgtttttatactttgcaatgaagaatgtttcagtaaatttcctaaaggaaacaaaaaactcatagatgatataagtaagccatgtcacccctgggcttcctccaccttccactgtgtactacaggcagcacagtccctcccatgctgtgctctgaccttgcctgaccttgccaccctgagtgtgacctgcagaccagcagcatcagcatacccaggaagtcagttagaaatgtgaattcttgggccacagacttaaagactcagaatttgagcccatggattcttgcttcagggtctgtgctcttcgccaccacactacactgtttctctttatcagcaatgaaattgagaacagactcattgcaagacgctcattgtcagctccgtcctctactgacttcaaaacatcatcagcttttcacattaaatttgtttatcacccgtctcagatactatctttgatatcagaggtaagactggcattgtggacagatgttttcatgccttgacccaaaagggtaacaaacatggatactgcaggccaacacgaaggaattgtgttgatgggccataagaaccacaatgggtcccttaaaccacacctcagctacctgatttcctgcacatagggccagaaatatactaaggggaaaatggtagaagggaaaatgagaacaagaaagaatgagataccctgcaggtgtcttcctctactagggaggcccctgagaaatgactgaatgtttttagcaaaagattagaagaataatattatcttgccatctgttattgcttatagagagccaataagtgtgtcttagagattctgagttccagggatgatcccactcaggttccctgacccactgtgagtcatacctccatagcagaggggcccctaaccccaggatttccatgccttctgcaagctggtcttttagatttcatcagcagtcagtcctgtggccatggaacggggaatgatcgatgacagcccactgaaggaggaccttcttcttgtttgcttggttctggggaatgcatctcctaggcaggagcaacacgtgccataatggtaaaataatttgggaaaaaatggcaaaaaatatttgcttttgccttaaatctaccaaaagtggatcacaggttgaaaactgcctgatcttggtcgttcgaagcccctgagtggctcagtatttgaactcagtgcagccctgagcaaccaattaatatttgcccagtgggcaggattgacttcagttacctaaagatgttactactgctcttctggttgcccagagattcccacaccccgtgtgcagcacagatccagcagagactccttgccaaaggccattgcggtccaagaccccaaagaggaaggctccagaggtgactgctgcttgggaagtcaatatcggacatgagtgctagaaccaaggtaatgcttcccagacttcactatgcccaccagagacctggagagcttgttaaaattttgactgctgggccaagagagctggggctgaacctgagaatctacatttctaacaagtctccaggggatggtggtcgatggaccacactgagaagcaccatgtctgaaaatcttttgagccaaacattttatttcaccaatgaagaatttgggaccagagaggctaactagtatgtccaaaatcacccagcacatcagtgacagggttgggaccaggtgccctgactcctagtttccactgtgttcccactctatcagcttaccttaaaacagcaatcgtcatagtcattttatgaactataactcattttgagtaccaaatgcttttcctatttcctcttctttatctttataatcaccctttgaggttgagggcatgggtctcaacttatagagaaagaaacgaaggttgaaaaaagtaacaacaacaatgaaaattggctctagatcacaagccaaggagtagagctggattctacccagttctctctgaccttgtgctgttcctctttacatctcttcaggttctcagaggggagctctctctaccaaaggtttaatgcaagacccacatagtcacctagcttacggaaaggacaggcctgaagactagggtaaaattaagatgataaaacagtgaacaaatattttaaaactatgtccaggaggaaagctagaggaaagagccctaagccccagctgctccataggctacctgtcattctctttccaaaacctttcaggggtttaagacctagaaccacgtgtctgacaccacagccctgtaaattctgtccccaagagtcctgaggctctgcgcaaacaaaattaatagcctgcaaactctaaatgggtgattacaatctataaagcagcccataaaatgacatcatggggattcatatttattttctcccactgatttccactataaatttgcttggtttatgagtagaaacagtttcttctgctacgtgcctgggcataaagctcacctaaagatggaaacctaaagatgtctggggctcacttcacccccagtggtgctctggtcaatgggacacacagaagaaacctcccaaggaagctctggaaaccccaaagcagccactgcctctacaaacatgccctgagagcctgctgagctgcaggcttctgtgct

SEQ ID NO: 1171 - DNA, 4348 bp, Homo sapiens
atcccccatcccaaccccatgatccaacaaccaaagggttaatttctgagatctcgatccaaaaggtgcccataccatggtgatcctagtcagcccaaagccacaccacacatctaacaagcattcctgtgtgccagataccatcttaggcacattaacatatgttactttttctccccttcacactaacctcttcagattaaggaactgaggcttggagcagttatgtgacttgttcaaggatgcaataacagtatttgaacaaagaccattaaatccaagtccagagctcacttcttaaaaccccagctgcctctgagcagccttggcccgcagacagacgagctttggaggaaataggaggaatttctccctgctatggagattgttttaagatcatgaattgttagcggaacaagttgtcgtggcagcttatgaaatcaccctcttctgcgatttttataagtaagaggggttagaataggcccagagacagagggagagatgaaatgacctaataaaaccctttccaaccctggaacacttcagccccacatgaacagaaaagtctatttattttcaaagccccattttaactcctgaagtacttaggagacttaaatatgtctgaaggcaaaacaagttccctctttttcctcttttcctaccactccaactcttcattgcagattttcttcctgcaggtctgacaaacaccatttttggccacagctgctgtcagttcaaaagtttggctctggggtctgaagaccaaagtctgtccaaggctgatcaccttctgagaaagactcttaaattctgtgaagagtctccagcagaggagaaattggtttaaaaaagcaagaagaatcaccacaatgcatgcccactccacattaccaagcctgcacaactcatgttaggggatgtctgctgctcctccagctttctcccctggcaaatacagtggtggtccctgagtccccattagggcccaacagcaggaccagtagcagcccctgtcagagaaaccacagccagttggggagagcgaactcatactataggcttgtttccatggcaacagatgctccctcctccctgcttctcggcaccagggaaggacaaggaaacccatgagaagacagtggcaactagggggaggaggaatggcagcaagtcccctttctttgaaacccaggcagctgctgccccacatgttgatggttacagctctcagtgaccttggacaagttatgccccagctctgaactttgtttttatcatttaaaaaaataaataaataaaaaagatcaagagattgagagagagagcaagcgagctgggccagagatgatccaataaagctatttcagctctgatgtcccagaatccaatgatttgtctaacctggccagtgattgggaatgggttcacctcttcttgcagccctctgcaggagcatgacattccgcaaggctggagtggatctgcctctcagggacctaagccttatccattcccccagtcatgctgcctccctcacaatggtctgctgtcatttctctgaaatcatctcaggagatctatcccatgctttcctaagggtgcacgggtttcctggggctcacacaagccatccaacatgacaggtgagccagaatgtcatggcaccgcacccagccacttgcctcccacctcactgatgttgttggattcaacctgcaattcagatgcacacagcccactaggcgctagcctgctatgactgcgcaagcgaaggaactccagggagaacacccagaaaggtcattttgtttggtatgaagagtgctagggtgaggtgaggggcagggagtgggacagaagcttcccaggaaaaggggaaaccatgcacagcagccaggagccatggactccaataccccaaggtttggaaaagtacttgtaattttggctgattgaccaaaagtggaaagaggagtgtagcatgagagaagggaagagaggaaggacagaaaagtggacaaagaattccaggagatggccggccgcggtggctcatgcccgtaatcccagcactttgggaggccaaggcaggcggatcacctgaggtcaggagttcgagaccagcctggccaacatggtgaaaccccatctctactaaagatacaaaaaataactgggaatggtgatgcacatttgtaatcccagctacttgggaggctgagagaggaggactgcttgaacttgggagacggagattgtagtgagctgaaatcgtgacactgcactccagtttgggcaacagagcgagattctgtctcaaaaaataaagaatgccaagaggcataaaaacacggcaatgcttccagggctggatttaggggagaaaagggagtactcattgttggaagtacaagccacatgcccagtgctagcttttatgggagtagcaggggatagctgagggccaggttagtcactgagccctccacatgagcctggtgggggtgtacttgtttccattgtatgcatgaagaagcagcaactcagaactacagcatgatttcacctagtaggtcagctaccccttttctggagtatacaatcttgctgggggacaaaataaacaatcatggacaaattaccacatgatttaaaaattgacacacggccactctcacaaccatcctcagaaatccagaagttcagggaggaacaacaacaaattggacttctgaggacttcctgttgccagtggactttaagaaacgttcagcctctccagcgcaattcacccctaacctatcagactccgcgttggtctgtgatggctcatctctggctcggaaatggttaaacagttcatttctgtgcttgaatcaggagcttccttaaacgctagcataaagctggtctacacataagaaatctgattagctcccagcattgggcaatcccaattattatgccctgcaagttgctctgcaggattagcggtctgcggaagaaaggaatcaatatacaacagtaattagggctcctgatgccggtaagaggagcacttctcttccccttaagccactcacgacagagtccatgaggggacagggccttcacagcactgccagtctctgttttctagcatatgttcattttgactttggtttttatttactgaaggatgtgaaattctctgctactgggccaagactttagggctacatacgtcacccaagaacagcgaacaggatgtgtcatgcatgggaccttccttccaaggaaactcagggaaagcagatgctaggatcctggcaaccccaggaaacctaatcagtgtccctgtaaccaagagctctttgagaacaggggctgtgtcttatttaccttatatcaatgtggcctagcacagtacctggcacatggtaagtaatgaacgggatggatgaggaagtgaatcaatgagtaagtgaattaataacacatggttttcagtttgtcaaaaactttatctgtgagcctgctgtgcacagaattttgtaccctaatactgtagtagcaatttacattggactcacaggatttgggggttaaagggaatttgaatataacccaatctggtatttttaaaatcacaggttgcaacctattagtggaccatgagatcagtttcatgagtcctgaccgtcattttataaatgaaatgagaatggaatgaaatgaagtggagtggagtgggatggaatgagatggaactagcaggaaataatagaatattccagaatagaaactatcaaagtacatcacatgtagtaaaggtgagtacaggaaaattaggcttgtacttgcagggcatgagtgtgtgtctattgggtgtacagtgtcttaaggccaaaagccactgatgaatctaaccattcatccagtgattttcactgccctcagaggccacatcagggacaaataattttcctttttgatcccctcttgttacaggaaatgaatttcatccagaagcagcctgtttcacttacagactgtctggctgcaggaattagggcaaatcagagatgttatagaaagaaaaagaaaatgtttcctagatcaaaacacccatctaagtgctggggccatagagatgagatcgattccattttccacatgacaaacattcaaagattttagaatgtcaattgcgcccctgctgaatggcttggagaagagcaggaatagttctagttatcctaacaattgctcctaagatgttgctttgtacctgctcgttatccatcttgattgtgtttatgtaagttccagcccattcatgacccctggtgtgtggcat

SEQ ID NO: 1172 - DNA, 4037 bp, Homo sapiens
gaaatgagaatggaatgaaatgaagtggagtggagtgggatggaatgagatggaactagcaggaaataatagaatattccagaatagaaactatcaaagtacatcacatgtagtaaaggtgagtacaggaaaattaggcttgtacttgcagggcatgagtgtgtgtctattgggtgtacagtgtcttaaggccaaaagccactgatgaatctaaccattcatccagtgattttcactgccctcagaggccacatcagggacaaataattttcctttttgatcccctcttgttacaggaaatgaatttcatccagaagcagcctgtttcacttacagactgtctggctgcaggaattagggcaaatcagagatgttatagaaagaaaaagaaaatgtttcctagatcaaaacacccatctaagtgctggggccatagagatgagatcgattccattttccacatgacaaacattcaaagattttagaatgtcaattgcgcccctgctgaatggcttggagaagagcaggaatagttctagttatcctaacaattgctcctaagatgttgctttgtacctgctcgttatccatcttgattgtgtttatgtaagttccagcccattcatgacccctggtgtgtggcatgaagaccatcacatttgagtctggtctgaagcttgtctgggtgatggctgaggtgaacccatgttagctcctggtgctcaccaactctcttcctaaaagctctcacattatctgttcaaaagcctgcatccacctagcagggtaatttcatcatccctgccctctcgtctgtgaataaacagcttgaactaatagtatttttcaaatgtttttgaccacaaccctcaggaagaaatgtactttacaacatggttcagaagacaccaccacacccccaacacacacacacacacacacacacacacacacacacacacacacgaagcaatgtttacctttactatatataatgggatgtactatgatgttttattctattctgcttcatttcttatgatgttggtgatgacccattaaatagatttcacaagctactgatggaccatgacccacagtgacactgaactagatagtacctaataatctgaaaaggcagggaagggcatctgggaagaatttcacaccaagcccatttcttttcattatgtttatttagccatgtgcctacgtttggttgtgtgtaaaggaagacaatggcttagtgagctgcagccaggctgttttggggactcacaaaggaatggtcacagtttcctgcctgtctcttattgccccccaggcaagctcattgagaaaagacagtgtgagtctcgtacagagcatgctgataactattacagatacgtgattattctcggttctgttgatgataacaacatagctgccatcttgtgtttgtttcctcttaggattagaaagcaaaagcaatctgaagattgaaagtcagaagcaaagttagaatggtgatttttttcccccaacccaacttggaagaatttgtctttggagaaccaacctaatcaaataaagtagcatcaatttactggagacataatccaacttgcataattgtcctggctggtttacaccacagctgttcatatgacatggttcattaaataataaagtcttcatcaggctctcctgcactgggctgcaattcttttcccccacaccaccaaagaagtgctgcctttattagaatgcagtgccacccattggcagtgggataatcaggggatttgtttttatgtgacattctattaaccaaacatcataaactgcatcaagtaaaagccactgcattttccccagtggaggatcccatcaccacataatcattctagactgtgggttctctgtgggcagggaccacatcccttcatctttatattcccagtgctaagcaaagtactcagcattggtgggcgcaagataaacatctattgaattaagaggaaaatatctccagtgtgggattcagaagagcaatgcttagaaacctggaggctccctggttgcaatgagcatttagtgtcttgaatactgtgtccctttcctttctggtttattaattttccacttgactggaccaaattttccaagtccacgtgatagcagacaggactctcaaaatcccctctggccaacagaaggttcaacaacaccaattttgctgtcttcaagctcaggagccctgctgggcagcagggaacctgtgccaatctcagtcttcctaaagaatcccacagttaaaagaggccacctgaaaatgggctgctgagaggtaacgatgaccttggaaatgtcctcaggtttgggaagtcagcaatttggtttacaaagcatgaaaaggaagactcgttgtaaaatacagaagatttaccagcttaagtagtttagaccaactcaaacttgagcttgagcctgcacgggactctcctggagggattgttcaagcacagagggttggcttcaccctcagagtttctgattcaggaatctgcacctctaagatccaggtaacgctgctcctccaggcaccccactttgagaagcattggtttagcctgcttattacaagcaaggctctagagctggctatctatgctggaaccctgaacccaccacctcagccaataattttaggcaagtcatttaaactttcccatccccaagatgcaagtgtcaaaccaaagcaccaagaggatctttctcacgagattgttatgaaggtcaaaggaggacacccactgcttaggggtgtgcttggtaggtagaaagagcttaattaaagttaaccacataaaggaaagtagggatatggtctgggggaaagactgctggtcagagaagccagatatgcattctagctctagccctgcgaccctgacttgctgtgtgaccctggacaagtgacttctttctgggtcatgccctcattcataaaatggggacactggacattctataatggactgaaggtgccttggcgctagaagcttccaaagctccttgctcctgactctatcacacagcgtcacgtacctgtagtgccttcccaatcaccccctaccacttagactgccaactgccaggccccagcaggataactcaagactgccttgaagacattgtctggttccttggccttgaagggtctttccacttggccacaggtgaccacctgactcaccgaatgtagtctaaggaacccacttccacctgggaagtgcaacctgggatccttcttgctgaaaccctattgcactccaccaagattttgttcacgtttcatttgtagccagctccactcatgcctctcattgatattcttttgtggttacattccagactggaagataagggaattcattgaagtgtttagaagggacaagtgtggtttcatcgggagtgttatgctcagatgagtattggaggattagttggggagagaatccacactcgcagagggagatgaggttctgaaatttattatcatagcctggttgtggggaagggagcctcaggaggagggttggaagcccaaattcctaattgaagatgcgaagcccattttcatcttatatttttattagccccatagcagcccactgcactggctttctgctaacagccgatggcagggagaggatgcttgttggcacaaggccgctgtacatttcatttttgtcagatgctggcaaaatttcctcatcagggaagataaattcgaggtgatattaataaacctctgaatgcagcaatcagatctggctggcactcttaatgattccaccagcagtgagccatttccagcctgaggagcttagagattcacggttttgtttaaggcatcccaaaaactagaaattgtttgcttgactcctgggttgagcccgcatcttcaacctggatactcccaggtgccccaagtgaggcagtagtgatggaagagaggcatttacaaaataaagtcttgggtaaatgtt

SEQ ID NO: 1173 - DNA, 4042 bp, Homo sapiens
caactcccaagagaactaaatgtttccctccactaggggagggttactggtgggtttgggcttaggctggtttgttggaaggtggctgacactgcagtttggctcacccaaggtggagtccaaccttgcctgtcctcgaagatggaaagctgaataatcaccttccagcctcccttgcagctataggtggccacgccacatattctgcaggggaagatgtctgataaaaagcaggagggaacagcttaacctgatattgcccttcccccttttctttctaccttgaaatggacccaaagtctgaagctctccatctctcttgcagccatgagtgaaaagccaagggaatcctgacatcctacagacactatcttgacatgatgtagcagcagcactagtgccagaaacccctacatctagacttctacttgtaggaaaaactgcttttctctctgttacatgaagcccaaggaatcctaactaacacagaagtcaagagtgacaggcacagacacatgaaaaaatgctcatcatcactggccatcagagaaatgcaaatcaaaaccacaatgagataccatctcacaccagttagaatggtgatcattcaaaagtcaggaaacaacaggtgctggagaggatgtggagaaataggaacacttttacactgttggtgggactgtaaactagttcaaccattgtggaagacagtgtggcaattcttcaagcatctagaactagaaataccatttgacccagccatcccattactgtatatatacccaaaggattataaattatgctgctattaagacacatgcacatgtatgtttattgtggcactaatcacaatagcacggacttggaaccaacccaaacgtccatcaatgatagactggattaagaaaatgtgcacatatacaccatggaacactatgcagccataaaaaaaggatgagttcatgtcctttgtagggacatggatgaagctggaaaccgtcattctcagcaaactatcgcaaggacaaaaaccaaacactgcatgttctcactcataggtgggaattgaacaatgagaacacttggacacaggaaagggaacatcacacactggggcctgtcgtggggtcggggggagggggcagggatagcattaggagatatacctaatgtaaatgatgagttaatgggtgcagcacaccaacacggcacatgtatacatatgtaacaaacctgcatgttgtgcacatgtaccctagaacttaaagtataatttaaaaaatgccaaaaaaaaaaaaaagagtgacaggcataatccttacccatctgacttccctggagtctctttataaacacatctgtactacaaaacagaatgactagtgcttctcaatgtccagagtgcagggagactcagagatgctctgccatgctttaggtcccagggtcatggcctctctgcagggggttaagcacatgggctttgcactcaaattgacctggattctagtcctaactcctccacaaaagctgtgtgatcttagacacctcaccgttctgtatgtccgttgttttcactgtagaatgaagttgacaacagcacttatctcatagaattgttgcaaagattaaatgagatatatcacacactaatctcagtgcctggcacatactgtcttctcaatacgtgttagctgtcaagataattttccactttccctttctgggtctaagtccttctatgagcttgtctgtctcatttcccaattatttctcagtgttttctcatttccttatctctgtagctctttccttctcctttctctgtttctccatctctctgcatgtgtctccatttttgtctggctttttctccctcctccctcattcccattcaggtttacagtggagaaacacagcaatttgcctaattttccctctcccaggtcaagagaaagcccttcccaggctctcagtcacagttccttagacgtgggtcccccagatccccttgtgttctgaaatgcctgtgatgggaaggggaggggatggtgatgtggtctcctgccaggaaaagttgctgaaggttggggctggtgaagggggtagtgagagaggggcctgctgccctgcctcaggaatcacgtccacttcatgactggctttagcagctgagtctaaaagctttggaaggaaacgctgggtccaccactggctccattcctgcctccctttctggcctaccccaggattccttggcagaacttggaatttggtatagtcagggacaaactcttctctcagatgcttactgtcccaaatggaaagcaagacctaagtgcataatcctaacccaccatggacagacccctctggctccacagcacccaaaagacccctctggtgaggggagcaagtcaccaataataacccacaacacttgccctgcactgatgctgcttcaaaggcctttcctgtgccaacctactgacatccttgcagctgcaccaaggaacagactcctctttccccattttacaaatgtcatggcacatgggggctaagtgatatgttcaaggtcacacagttataaatagcaaagacatgttccaatctaagcaataacaacagcaataataacagcaacagcaaaataatattaagataattttaatgataaaaacacaatgtagcatttattatatgccaggcacatgcaagggctttgcatctattagctcattaaatctgacgcctaccctgtgagataactactatcattgtccccattttacaggtggaagggaaggtcaagggaaattcagtcatttgcccaaggcctcgataccataagagtgtggattcagggatgtgcatgctgcagtggccaaggcccacaatcttatgggacagctgaccacccaacccccagccagattcctacaagccccaggagtaaacactcccatgaagaatcagctcaagctcacctccaggctgagacaaagggtcaccaaggactggccaccacacgaatgcttctccttggtcttacaaaacatgaaaggtgctattatcagaagccatgcctgcttgcaaactacagaggtgacacgaggtaaattcatttccttcctgtcaagagaaactcaacaagggtataatcagaagctaatgtgtgtactgtgattgggcccatcacggggtggcacataattgaacaagttctccatgcctggaggagcagagccgagccccatcactgggaagtgtcactcatctggccagcacacattggtttttaataacattatggaaataatgctgcagggctgtggaaaggacagaagcttgaggggcagggcctcatcaggtctccgagagctttgaccttgagaaagaaccttctggccccatccagaatagccactttcctcagggatctctcctgtaggctttgtggatttatgtctcctgggcttaaggaacagggcttggtgtggctgaaccttcttgctgaatggatcccaggggaccccaggtgagcattgaggccgggttctcaagagactgaagggggtcggggggttaccagagagaggacaggccctttgcttccccagtaactgttgacaatggtaatacctccatggcccctactatgaatcagataattttctgaggactttatgtatattaactcatttaaactgaaaaacaatccatgtgataggtattgccattgtcctgattgtatagataaagaaattgaggcacagagaggtgaatttatctaagatcacacaggtgggaagttgtgtttgagcccgggcagtccatcatcctaaccatactccctactgcctcaatgagctgacacagcccagccctgataaagggggtggcagaggggagggggatgaggtgccttcctggctgttggcattcatttcattcacatttttatcaggcacccctttcaaccagatactgctgtaggcactgaggatacagtggagtataaatagataagagttatatt

SEQ ID NO: 1174 - DNA, 4043 bp, Homo sapiens
agctaatgtgtgtactgtgattgggcccatcacggggtggcacataattgaacaagttctccatgcctggaggagcagagccgagccccatcactgggaagtgtcactcatctggccagcacacattggtttttaataacattatggaaataatgctgcagggctgtggaaaggacagaagcttgaggggcagggcctcatcaggtctccgagagctttgaccttgagaaagaaccttctggccccatccagaatagccactttcctcagggatctctcctgtaggctttgtggatttatgtctcctgggcttaaggaacagggcttggtgtggctgaaccttcttgctgaatggatcccaggggaccccaggtgagcattgaggccgggttctcaagagactgaagggggtcggggggttaccagagagaggacaggccctttgcttccccagtaactgttgacaatggtaatacctccatggcccctactatgaatcagataattttctgaggactttatgtatattaactcatttaaactgaaaaacaatccatgtgataggtattgccattgtcctgattgtatagataaagaaattgaggcacagagaggtgaatttatctaagatcacacaggtgggaagttgtgtttgagcccgggcagtccatcatcctaaccatactccctactgcctcaatgagctgacacagcccagccctgataaagggggtggcagaggggagggggatgaggtgccttcctggctgttggcattcatttcattcacatttttatcaggcacccctttcaaccagatactgctgtaggcactgaggatacagtggagtataaatagataagagttatattctagcgaggagacacaaatcccatataaatgtacaaataagacaatttcagagaatgccaaatacaatcaagaaaataaaaccaagaggtcatagtgtccgtggcaggaaaaggtaagtaagttattttagagaggaggaaaaggtaactttaagaaccagagacaactgtttaggagaaggcctagccaagactgaataattcatgtgttaagaggttttcaatcacctaccaaatacaggaaggaaccagtcattgaggctattgagaagtcaagaagttagagacctatgaagacaaaggcagcctgggctctgctccacctgcccactcatgggcctaggcatcagaagctccgccatcttgcactgcaaccctggaagccacagtctcttcagtgccatcagggaagacagcaactgcaccaccacacacaggcatcccctgccccagcccagaagtgatgcacatcccttagtgcctcatgtcctgcctaacagtggatgctggaaatttacaggagcaactggaatattcataagcctaactgcctcggccaccagcccacaagggacactaatggagacagcagagttgcgtgagggctcacgagctaagaggtggaacccagccaggctgagtagaaagtaagccatcgacaagcagggagttaataggtttttccaaatgaacggtccttaatttcaattcattgagaggtgagggatcaggtgaaggaagcaaggtgaaaaggaggattaatccatccatcaaggaccttgggtactgaaaacatgaaaagatgaatgcatttgtgagacatactgattcactaccatgagaaataattatcttgaagcttatttggtcccagaatcaatctttatttaaccgtacttatttttggtggctcatcctgcttgcctctcttggaaactcaagaaatgctttctctatttttttttttgggtaaattccaaagacttgcatatttcatatttttcaacaggatgatctttgtgtagactgactgtcttccctcttcactagtcctctctatcattggacctcacccgtagtaatcactcactccacaatcatcttctcttgtttcctgcatcactcatcactaccttaaagtattatttattgatttattatttttttataatctgactcttctattgtaatataaggtgggtaaagacggagacctttcctgtctccgttggccacatccccaacaccacaccaatcaagcaacagactaaggacacagctaaataaatgaacaaaaagataataataacaatcatgtgttagtcttcataacaatcttcatttattctttttgattattcccatgttacaaatgaagaaatggaggcacagagaataattaagtaacttgctcaaggttatacagatattgtaaaacagccaggatttgaaaccagagagtttggctagaggttccatgctttgttggtataaatatttaagaaatatttgttgattgaatgaataataaataaatgaatggcttccttgtgtttcctgccttctttaccagggttatttgccttcaactttcactggaccctctatgtatcaggcatggtcttaaattctcttcacacattattcagttgagggtagtcccatctaccatatctccatagaatcggtcccaagcctggtacttagaactgccctgcattgtcaggctccccctttgccaggtggtgcctccctaatctgaaatcatggactgagtaccttcaaaagaaaaattaaaccaaagatcaggaggagatgcttctgacttagtgagtctagaagaccctggcctcccttgcccactctgcccagaaactgaatcccagagagatgaagttatgggtttcatacctgtgtctgcccatcaacccaagggggacaaatgccaacatagaatgacagagagggaaggaagaaagtgtttttcctaattaattggctctaaaagtggagaggaaccaagttgggttattatagaagcatcagcgtccgacacaggtcttcaactgccatgcaaataccccctactctgcaccatgcagttcccatggtttactctgttgtgatgtaactgtgcatgtttctacctgaacccattgaacacggctttgtgcttgaaccttgaacaatgcctgggacacagttggtgctcaataaataatgatgggataaatgaatgagggatccccattctcctacctaccttggccttgtcatcatctctcacttttgcgactgccagataacacctagctctatccccttgagccatccaagtctcagacacattcatatactgactgaccttgaatacatactcccttcctgaaagagatgcttcccaggaccctgcatcatggaaaataggaatatcatggtaaacgttgctttaattgaacagtggaatctatgctagtcttcatgacgaaccttgaaacacaagagtgctgcagtaaccatcattcctgaattgtggaacttcacagactcaggttagccccaagtgatgctttgctgagcaatttaaaacccagtcatgcaaagccaagtgctttcatgtttgagaaacaaaaacatttcaactgctcagcacatctaaatcagtactcccttaacaacccaccttggttcttccccttgattctgaaagccaatttagtaagaaaagcatattaataatcttgccctctcactggccttccctccctccctcctattccagcatcttgcagctggtaccttgggtcatttgttttgtttttgtcccttaggctgaagtgcgtccacagttttgaaactgctaactagagtttatatggaaaattcagattagaaacaaattcaaatgcactctctcattttcctgtaatacactgggtttcttcccccaatcagctagaagacttgctgggtacctcctcattgtgtcctgttggaaagtgtctcttctggtcaccttgactgttaaataagtaaacagactcattggggttgctgtgtcctgtgacattggcacagactctcaccccagccaagcatgcacatatcaatgggccaccatctgtggcagaattaccagacccaagatggaatttgatgcatctgtcctg

SEQ ID NO: 1175 - DNA, 4045 bp, Homo sapiens
ggtttttaataacattatggaaataatgctgcagggctgtggaaaggacagaagcttgaggggcagggcctcatcaggtctccgagagctttgaccttgagaaagaaccttctggccccatccagaatagccactttcctcagggatctctcctgtaggctttgtggatttatgtctcctgggcttaaggaacagggcttggtgtggctgaaccttcttgctgaatggatcccaggggaccccaggtgagcattgaggccgggttctcaagagactgaagggggtcggggggttaccagagagaggacaggccctttgcttccccagtaactgttgacaatggtaatacctccatggcccctactatgaatcagataattttctgaggactttatgtatattaactcatttaaactgaaaaacaatccatgtgataggtattgccattgtcctgattgtatagataaagaaattgaggcacagagaggtgaatttatctaagatcacacaggtgggaagttgtgtttgagcccgggcagtccatcatcctaaccatactccctactgcctcaatgagctgacacagcccagccctgataaagggggtggcagaggggagggggatgaggtgccttcctggctgttggcattcatttcattcacatttttatcaggcacccctttcaaccagatactgctgtaggcactgaggatacagtggagtataaatagataagagttatattctagcgaggagacacaaatcccatataaatgtacaaataagacaatttcagagaatgccaaatacaatcaagaaaataaaaccaagaggtcatagtgtccgtggcaggaaaaggtaagtaagttattttagagaggaggaaaaggtaactttaagaaccagagacaactgtttaggagaaggcctagccaagactgaataattcatgtgttaagaggttttcaatcacctaccaaatacaggaaggaaccagtcattgaggctattgagaagtcaagaagttagagacctatgaagacaaaggcagcctgggctctgctccacctgcccactcatgggcctaggcatcagaagctccgccatcttgcactgcaaccctggaagccacagtctcttcagtgccatcagggaagacagcaactgcaccaccacacacaggcatcccctgccccagcccagaagtgatgcacatcccttagtgcctcatgtcctgcctaacagtggatgctggaaatttacaggagcaactggaatattcataagcctaactgcctcggccaccagcccacaagggacactaatggagacagcagagttgcgtgagggctcacgagctaagaggtggaacccagccaggctgagtagaaagtaagccatcgacaagcagggagttaataggtttttccaaatgaacggtccttaatttcaattcattgagaggtgagggatcaggtgaaggaagcaaggtgaaaaggaggattaatccatccatcaaggaccttgggtactgaaaacatgaaaagatgaatgcatttgtgagacatactgattcactaccatgagaaataattatcttgaagcttatttggtcccagaatcaatctttatttaaccgtacttatttttggtggctcatcctgcttgcctctcttggaaactcaagaaatgctttctctatttttttttttgggtaaattccaaagacttgcatatttcatatttttcaacaggatgatctttgtgtagactgactgtcttccctcttcactagtcctctctatcattggacctcacccgtagtaatcactcactccacaatcatcttctcttgtttcctgcatcactcatcactaccttaaagtattatttattgatttattatttttttataatctgactcttctattgtaatataaggtgggtaaagacggagacctttcctgtctccgttggccacatccccaacaccacaccaatcaagcaacagactaaggacacagctaaataaatgaacaaaaagataataataacaatcatgtgttagtcttcataacaatcttcatttattctttttgattattcccatgttacaaatgaagaaatggaggcacagagaataattaagtaacttgctcaaggttatacagatattgtaaaacagccaggatttgaaaccagagagtttggctagaggttccatgctttgttggtataaatatttaagaaatatttgttgattgaatgaataataaataaatgaatggcttccttgtgtttcctgccttctttaccagggttatttgccttcaactttcactggaccctctatgtatcaggcatggtcttaaattctcttcacacattattcagttgagggtagtcccatctaccatatctccatagaatcggtcccaagcctggtacttagaactgccctgcattgtcaggctccccctttgccaggtggtgcctccctaatctgaaatcatggactgagtaccttcaaaagaaaaattaaaccaaagatcaggaggagatgcttctgacttagtgagtctagaagaccctggcctcccttgcccactctgcccagaaactgaatcccagagagatgaagttatgggtttcatacctgtgtctgcccatcaacccaagggggacaaatgccaacatagaatgacagagagggaaggaagaaagtgtttttcctaattaattggctctaaaagtggagaggaaccaagttgggttattatagaagcatcagcgtccgacacaggtcttcaactgccatgcaaataccccctactctgcaccatgcagttcccatggtttactctgttgtgatgtaactgtgcatgtttctacctgaacccattgaacacggctttgtgcttgaaccttgaacaatgcctgggacacagttggtgctcaataaataatgatgggataaatgaatgagggatccccattctcctacctaccttggccttgtcatcatctctcacttttgcgactgccagataacacctagctctatccccttgagccatccaagtctcagacacattcatatactgactgaccttgaatacatactcccttcctgaaagagatgcttcccaggaccctgcatcatggaaaataggaatatcatggtaaacgttgctttaattgaacagtggaatctatgctagtcttcatgacgaaccttgaaacacaagagtgctgcagtaaccatcattcctgaattgtggaacttcacagactcaggttagccccaagtgatgctttgctgagcaatttaaaacccagtcatgcaaagccaagtgctttcatgtttgagaaacaaaaacatttcaactgctcagcacatctaaatcagtactcccttaacaacccaccttggttcttccccttgattctgaaagccaatttagtaagaaaagcatattaataatcttgccctctcactggccttccctccctccctcctattccagcatcttgcagctggtaccttgggtcatttgttttgtttttgtcccttaggctgaagtgcgtccacagttttgaaactgctaactagagtttatatggaaaattcagattagaaacaaattcaaatgcactctctcattttcctgtaatacactgggtttcttcccccaatcagctagaagacttgctgggtacctcctcattgtgtcctgttggaaagtgtctcttctggtcaccttgactgttaaataagtaaacagactcattggggttgctgtgtcctgtgacattggcacagactctcaccccagccaagcatgcacatatcaatgggccaccatctgtggcagaattaccagacccaagatggaatttgatgcatctgtcctggtgaaatggcattatacttctgccatattcttctggttcaagaacattgtcctcaagcccaagggacagccctgtccagcataaacatgattaaaatgcccattgcccgactgccctgctgaccaagaa

SEQ ID NO: 1176 - DNA, 4052 bp, Homo sapiens
gataattttctgaggactttatgtatattaactcatttaaactgaaaaacaatccatgtgataggtattgccattgtcctgattgtatagataaagaaattgaggcacagagaggtgaatttatctaagatcacacaggtgggaagttgtgtttgagcccgggcagtccatcatcctaaccatactccctactgcctcaatgagctgacacagcccagccctgataaagggggtggcagaggggagggggatgaggtgccttcctggctgttggcattcatttcattcacatttttatcaggcacccctttcaaccagatactgctgtaggcactgaggatacagtggagtataaatagataagagttatattctagcgaggagacacaaatcccatataaatgtacaaataagacaatttcagagaatgccaaatacaatcaagaaaataaaaccaagaggtcatagtgtccgtggcaggaaaaggtaagtaagttattttagagaggaggaaaaggtaactttaagaaccagagacaactgtttaggagaaggcctagccaagactgaataattcatgtgttaagaggttttcaatcacctaccaaatacaggaaggaaccagtcattgaggctattgagaagtcaagaagttagagacctatgaagacaaaggcagcctgggctctgctccacctgcccactcatgggcctaggcatcagaagctccgccatcttgcactgcaaccctggaagccacagtctcttcagtgccatcagggaagacagcaactgcaccaccacacacaggcatcccctgccccagcccagaagtgatgcacatcccttagtgcctcatgtcctgcctaacagtggatgctggaaatttacaggagcaactggaatattcataagcctaactgcctcggccaccagcccacaagggacactaatggagacagcagagttgcgtgagggctcacgagctaagaggtggaacccagccaggctgagtagaaagtaagccatcgacaagcagggagttaataggtttttccaaatgaacggtccttaatttcaattcattgagaggtgagggatcaggtgaaggaagcaaggtgaaaaggaggattaatccatccatcaaggaccttgggtactgaaaacatgaaaagatgaatgcatttgtgagacatactgattcactaccatgagaaataattatcttgaagcttatttggtcccagaatcaatctttatttaaccgtacttatttttggtggctcatcctgcttgcctctcttggaaactcaagaaatgctttctctatttttttttttgggtaaattccaaagacttgcatatttcatatttttcaacaggatgatctttgtgtagactgactgtcttccctcttcactagtcctctctatcattggacctcacccgtagtaatcactcactccacaatcatcttctcttgtttcctgcatcactcatcactaccttaaagtattatttattgatttattatttttttataatctgactcttctattgtaatataaggtgggtaaagacggagacctttcctgtctccgttggccacatccccaacaccacaccaatcaagcaacagactaaggacacagctaaataaatgaacaaaaagataataataacaatcatgtgttagtcttcataacaatcttcatttattctttttgattattcccatgttacaaatgaagaaatggaggcacagagaataattaagtaacttgctcaaggttatacagatattgtaaaacagccaggatttgaaaccagagagtttggctagaggttccatgctttgttggtataaatatttaagaaatatttgttgattgaatgaataataaataaatgaatggcttccttgtgtttcctgccttctttaccagggttatttgccttcaactttcactggaccctctatgtatcaggcatggtcttaaattctcttcacacattattcagttgagggtagtcccatctaccatatctccatagaatcggtcccaagcctggtacttagaactgccctgcattgtcaggctccccctttgccaggtggtgcctccctaatctgaaatcatggactgagtaccttcaaaagaaaaattaaaccaaagatcaggaggagatgcttctgacttagtgagtctagaagaccctggcctcccttgcccactctgcccagaaactgaatcccagagagatgaagttatgggtttcatacctgtgtctgcccatcaacccaagggggacaaatgccaacatagaatgacagagagggaaggaagaaagtgtttttcctaattaattggctctaaaagtggagaggaaccaagttgggttattatagaagcatcagcgtccgacacaggtcttcaactgccatgcaaataccccctactctgcaccatgcagttcccatggtttactctgttgtgatgtaactgtgcatgtttctacctgaacccattgaacacggctttgtgcttgaaccttgaacaatgcctgggacacagttggtgctcaataaataatgatgggataaatgaatgagggatccccattctcctacctaccttggccttgtcatcatctctcacttttgcgactgccagataacacctagctctatccccttgagccatccaagtctcagacacattcatatactgactgaccttgaatacatactcccttcctgaaagagatgcttcccaggaccctgcatcatggaaaataggaatatcatggtaaacgttgctttaattgaacagtggaatctatgctagtcttcatgacgaaccttgaaacacaagagtgctgcagtaaccatcattcctgaattgtggaacttcacagactcaggttagccccaagtgatgctttgctgagcaatttaaaacccagtcatgcaaagccaagtgctttcatgtttgagaaacaaaaacatttcaactgctcagcacatctaaatcagtactcccttaacaacccaccttggttcttccccttgattctgaaagccaatttagtaagaaaagcatattaataatcttgccctctcactggccttccctccctccctcctattccagcatcttgcagctggtaccttgggtcatttgttttgtttttgtcccttaggctgaagtgcgtccacagttttgaaactgctaactagagtttatatggaaaattcagattagaaacaaattcaaatgcactctctcattttcctgtaatacactgggtttcttcccccaatcagctagaagacttgctgggtacctcctcattgtgtcctgttggaaagtgtctcttctggtcaccttgactgttaaataagtaaacagactcattggggttgctgtgtcctgtgacattggcacagactctcaccccagccaagcatgcacatatcaatgggccaccatctgtggcagaattaccagacccaagatggaatttgatgcatctgtcctggtgaaatggcattatacttctgccatattcttctggttcaagaacattgtcctcaagcccaagggacagccctgtccagcataaacatgattaaaatgcccattgcccgactgccctgctgaccaagaaacatggccaagcacagagtctgcaagcagcctgcatgtgggtctaaagaagaggaagggggaaagtgtttccagaaagtaaggttgccaagatttgaatctcaatgtcacaatctggctttatgaccttgggtgagtcccttaatcccacagagcctcagtttccccatctgtaaaatgaagagtaccaatatcctgatgtgttgtgaggattacatgagatcattttcgtaaagcaccctagcacagagcctgatacagtgtcattgggagctaagatttaccagcactcatcatataccaggccttgtgcatgaaccccacctacattatgtcattaagcatcactgcatgcataagaaatgggtgttaccatcccta

SEQ ID NO: 1177 - DNA, 4046 bp, Homo sapiens
tactgaaaacatgaaaagatgaatgcatttgtgagacatactgattcactaccatgagaaataattatcttgaagcttatttggtcccagaatcaatctttatttaaccgtacttatttttggtggctcatcctgcttgcctctcttggaaactcaagaaatgctttctctatttttttttttgggtaaattccaaagacttgcatatttcatatttttcaacaggatgatctttgtgtagactgactgtcttccctcttcactagtcctctctatcattggacctcacccgtagtaatcactcactccacaatcatcttctcttgtttcctgcatcactcatcactaccttaaagtattatttattgatttattatttttttataatctgactcttctattgtaatataaggtgggtaaagacggagacctttcctgtctccgttggccacatccccaacaccacaccaatcaagcaacagactaaggacacagctaaataaatgaacaaaaagataataataacaatcatgtgttagtcttcataacaatcttcatttattctttttgattattcccatgttacaaatgaagaaatggaggcacagagaataattaagtaacttgctcaaggttatacagatattgtaaaacagccaggatttgaaaccagagagtttggctagaggttccatgctttgttggtataaatatttaagaaatatttgttgattgaatgaataataaataaatgaatggcttccttgtgtttcctgccttctttaccagggttatttgccttcaactttcactggaccctctatgtatcaggcatggtcttaaattctcttcacacattattcagttgagggtagtcccatctaccatatctccatagaatcggtcccaagcctggtacttagaactgccctgcattgtcaggctccccctttgccaggtggtgcctccctaatctgaaatcatggactgagtaccttcaaaagaaaaattaaaccaaagatcaggaggagatgcttctgacttagtgagtctagaagaccctggcctcccttgcccactctgcccagaaactgaatcccagagagatgaagttatgggtttcatacctgtgtctgcccatcaacccaagggggacaaatgccaacatagaatgacagagagggaaggaagaaagtgtttttcctaattaattggctctaaaagtggagaggaaccaagttgggttattatagaagcatcagcgtccgacacaggtcttcaactgccatgcaaataccccctactctgcaccatgcagttcccatggtttactctgttgtgatgtaactgtgcatgtttctacctgaacccattgaacacggctttgtgcttgaaccttgaacaatgcctgggacacagttggtgctcaataaataatgatgggataaatgaatgagggatccccattctcctacctaccttggccttgtcatcatctctcacttttgcgactgccagataacacctagctctatccccttgagccatccaagtctcagacacattcatatactgactgaccttgaatacatactcccttcctgaaagagatgcttcccaggaccctgcatcatggaaaataggaatatcatggtaaacgttgctttaattgaacagtggaatctatgctagtcttcatgacgaaccttgaaacacaagagtgctgcagtaaccatcattcctgaattgtggaacttcacagactcaggttagccccaagtgatgctttgctgagcaatttaaaacccagtcatgcaaagccaagtgctttcatgtttgagaaacaaaaacatttcaactgctcagcacatctaaatcagtactcccttaacaacccaccttggttcttccccttgattctgaaagccaatttagtaagaaaagcatattaataatcttgccctctcactggccttccctccctccctcctattccagcatcttgcagctggtaccttgggtcatttgttttgtttttgtcccttaggctgaagtgcgtccacagttttgaaactgctaactagagtttatatggaaaattcagattagaaacaaattcaaatgcactctctcattttcctgtaatacactgggtttcttcccccaatcagctagaagacttgctgggtacctcctcattgtgtcctgttggaaagtgtctcttctggtcaccttgactgttaaataagtaaacagactcattggggttgctgtgtcctgtgacattggcacagactctcaccccagccaagcatgcacatatcaatgggccaccatctgtggcagaattaccagacccaagatggaatttgatgcatctgtcctggtgaaatggcattatacttctgccatattcttctggttcaagaacattgtcctcaagcccaagggacagccctgtccagcataaacatgattaaaatgcccattgcccgactgccctgctgaccaagaaacatggccaagcacagagtctgcaagcagcctgcatgtgggtctaaagaagaggaagggggaaagtgtttccagaaagtaaggttgccaagatttgaatctcaatgtcacaatctggctttatgaccttgggtgagtcccttaatcccacagagcctcagtttccccatctgtaaaatgaagagtaccaatatcctgatgtgttgtgaggattacatgagatcattttcgtaaagcaccctagcacagagcctgatacagtgtcattgggagctaagatttaccagcactcatcatataccaggccttgtgcatgaaccccacctacattatgtcattaagcatcactgcatgcataagaaatgggtgttaccatccctatgttacaacagagaagactgatggtcagaaaagttaagtaacctgcacaaaggcaaggaggtagagacgagtgaacttaggattggaactcaggactctcttaaccacatgaagagaatccaagtggaaggtgcctcctaccaacgctgagatgaggttcgtgtctgtgggcccctgtctgaggctggttgacaagaagctttagagagacgcttggggatggcaggcttgcagccagaggccagggtttgactcctgtatgggctgtgtgaccaggggcctctttaccgctcgggtgtgcttcacctccttcctccataagacaaggacaactgcatcttccctgtaagactattgggaataaaacaatagggctttgtgacctttgacctaaggtaggattcttatactaccccatgctctatgacatgataagaagacagtaccaacactcagcacagtgttaaaagattccagcaaataataatggatactaacataataatagctaccatatatagaatacattatatttcagaaactgtactaaaaccttaattaaagcacttaatcctcaatgcaaccctgtgaagtagatgctttttattatccccttttacagatgaggaaactgaggcatgtaatgattaggtgacttgctcaaggtcacaaaactaagtgctgaaaacttgggattcacatggttgcatcaaaactttattgaaaggattggtcaatccaagtgaacaacacatctggactgtgccccatagaaacaagcattttagtttcactagaatcaccgggataaacagaggcaagctaacccctttactacaggacatctatggtctttaacttgtaaatacgaggaaaccatcaagagggagatagagtatgcagcctttcctgagctttgaggggcaacagtgtgctctgacatacgattcgagatgtaccaagtctgagtcatttaccctaaatagaacagccttccattggctgttggaaacacaaagtaaaacccaaagaagagagaaagcaaaagtgaagaggccattgtcctcgatcctttatcttttgttctctgattcagatcaggagaggtgtgtatgcctgcagacctggacacccgcaagccacatgctgaa

SEQ ID NO: 1178 - DNA, 4044 bp, Homo sapiens
tagggcagctgtagtctgccccttgctttcttattaccccagataaccaatgttatcctctgtttttccttcctcccagggggaaaagaattcagaaccctagtctgagtatatgaattagactctgcaaattgtttatatgagtcattctcaaaactaggtctggagggtccccaagagatccacaaatttcttgcaatattcatgtaacaatgttcatctctttagatctattaccattgagtaacccattgatatttaacaacaaaacaacagcaaacaccatcctgatagctttaaaagcaaccctgttcttctaattgtttctagtgcatgctttttgaagctaaactagtagactggattgtcctcaagtagactggctcaccaaaggtgtccacaacaagaacatttcaagttcagattggacaggaatatttatgagggtttgaccagtgctagacttgccagacaatgtgcctgaatagtctccctgaacttctctcttaaacacaaacaagatcctatgctggctttctggccacacctgtgccagccacaaatgggctaaaacacgtgaaatgtgctgtccgcgtgcagggttcaaatcagataacaaaatacacattgacggttctctatagaatgaaaaatatcctactttcattgcatgctggtgttgggtcagaaaacaacagtttcttatttctcctggttagtggtcctttggaaatcacagaggaaatacatgcagagagttaagaggactacttcacatctgttgtcccgtgatgctacttaactgaacactacactcatgtgcccattcccgttccctttcccctttatggtaaatgttgtcccatatgactttgtgattgatggaaatgttctctatctgtgctgcccaatatggtagccactaaccacacatggctattgagtactcaaaaggtggctaatgcaaagagaaactgaacctgtaatttcatttaaacttaaacaaccactcgtgtctagtggctaccatataaaacagtgaactaagtctaaaatttaggatcttgcagtacagggtgtgtgtgtgtgtgtgtgtgtgtgtgtttgtgtgtgtgtgttaacaaaacaaacactgctccttctgtagtgagcactggcctatggccagggtctaaggaatatgcaaaagaaagtgactggaagttttaagcttttaaggttttatcaaaagacatttcttaccactccctctgggcagtactgtagaacatctactagggagaggatgatatgaagatagagaagcaacaaaagtacagacacattagaggcaaaatatagatgccaccttgtaaactggttgataattcagaaaatgacagctctccccgacttagttggaaaggcaaaggccaaatgggaaacatcagtctcttcacgtccatggaagacaatcccctgaatgcaaaattagaacttggtggctatttcctgatccagccccttgtatttttcatgaagcttaaaggagattaatgggacaatcaggatattacagatgagaagcacaggcatttcaaatgaggctgtgacaaatggctgggaggcctttagaatgggggaagagaggatgtggaacaagccctggactgggaagctcctcactatgattcacaccctggtcctgctaatgaccacctggccaggagaccctggagaggcatccaacccttccctgagagccactggacagaggaataggagccccatcactgagtggttgtagggctcaagaaggatcatattggcagcaagaactccagaaactataaagctctatttagatgaatcacattattattaaacagttcaatcaacataataattattaataatagctaagatttattcagtgtctgctattgccagacaatatatatgcaaagtctctagggcttacagcaaccctataagatatgtctatctatccacatcattcgtgcttactagatgctgttacaagtgttttccatatatatgaaggtatatataatatatacatatataatgcataaaatttgtaaatgagttaaatgaggattaatccttacaacaacctataatgtggacattacttgtatcaatattttacagatgaaacaattgaggccaaagagataaagtgacagccaccatcatcccaactaagttggaaggccaaatgacaaaaggaaacataagaacgcaattacctgaatgacagattagaactcagggattatttcttgatccaggcttagtcaatggaagagctgggacatgaacgcaggcacagttggtgaacagtagagccaggattcagactcaggcagcctggctacagggcctgttttcttcaaccccatggcatcctgcctctttttttgggggggggggtggtgggggtggaggggtggggatggagtcttgttctgtcacccaggctggagttcagtgagtggtgcaatctcggctaactgcaacctccgcctcctgggttcaagcgattctcctgcctcagcctcccaagtagctgggactacagatgcgtgccaccacacccagctaatttttgtatttttagtagagacagggtttcaccatgttggccatgatggcacgatggtctcgatctcttgacctcgtgatctgcctgcctcagcatcccaaagtgctgaaagtgacagggtaaggatttgaaactcaggcctgcctgcctgtctccaaccactcagtcttttcttcagccaccctgcgtccgttacaattcacacactgtttgtcaccactggctaatggctttggatatttcttcctcttatcagtgtgagacatctggggaggctcccctttttttcaccatttgaggactgaaagtaaatttagcttcctcagcagaaagaaaagaagctgttttggaggttgggaagagctttagaaaatgcggcatcacgtctgttgccccatttgaagaaagcagctctggaaaaggcctaggacattagttgctacaaagttctagatcattctgtgtggtaagtatgccatcatgcccatagcactcttctctgtccacaaaattcgtcatatactaataaagaatgggtgtctttggacaaagtcaaagcaagtttgtccagagtactaactaagaagagactacagagggaagcaaaaggtagttcagtggctgaattatccaaggaaaggcctagaatttgagttgtcatagactgagcatcaaagattatgtcttggagctatatagaacctttactgcccaaaaaagagagactatggaaacttcagtgctctggtaaacatttctttgatgccttaccaaaacatatgccttctgagcatttgatatggtttggctctgtgtccccacccaaatctcatcttgaattgtattcccataattcccacgtattgtgggagggattccgtgggagataatctgaatcacggggtggtttcccccatactgttctcgtggtagcgaataaatctcatgagatctgatggttttatcaggggtttccacttttgcatcctcctcatttttatcttgctgctgtcaggtaaagaagtgcctttcacctcccactgtgattctgaggcctccccagccatgtggaactgtaagtccaatttaacctctttttcttcacagtctcaggtatgtctttatcagcagtgtgaaaacggactaatatagcatccgttgtccacttcctccttccatcagtctgcaaaattccatttggggatccatgtggcttcagggaaatcaactttatcaatgttctctgttccgtggcagcagtgatgggttcagggatgggcatgtgacctaagccagtccaatcagagtgactctcaggtcttgctgaaagtgcctggaaacgatgccatttccttcctgttgggcatgatgaaggaagcatctagccccaggagctccttcagtcatattagggcctaaaaggtgccagcctttga

SEQ ID NO: 1179 - DNA, 4052 bp, Homo sapiens
ttcactgacttatctgtagtagatattattaaatatgtctcaaagcatctcccccaccttctcacacccacccattagaacaggatgttatctacaggctgatacctccccactccctccacctcccttctaatacatggcaccaagacactgcctaggacctaacaagtgattggcccctccttctccaagacattcccctcttcctttttctcttttaagcccagagggcctgaccctctaacgcctgtcccagaccactctctccctccaggagcctgccaagttgaacacaaagtcctaccacccctgccctcaacacagacttctccaaaacaagtccacaaacaccattcaggatgattcctgctaagacccacagggtgggagtgataaaatttccagtaacatctaccatgatattacttacaatcctaaaagaggaaatgttctgtattacataaaacatgtccaaggtcctcctacaagtacgagtgaatccgtgcctggttcttctttgtcttcggatcctgccacctcatccctgtcgtcatctgtctaagttttgctttagaagccaccctcggtcaaaccttcactctcttacacaatgagctgggcatcctcagtttccccttcatgctaaaagtaagccccatgttttgtgcatgtgcccacaccatttcctcaagttcttgctcctaaaggtaacagggcctgggtaaggcacttcctgcagagatcaaaggagactcgttcacacccaggaggaggaatattcttcctgttctaccccatttaaccctgtcccctcaacccagaggtgtcctcactgtccagcaagtgcttcaggcctgcagttctgctgttaccctattttgaatctcataggtgtggaagcatgtgttggcggggaggggcaggaaggtttgtccgccaggaagaagaaacgagtgtgtcggtatgtgtgtgtgagcgccgcaatgacagtgctgccaccgctgctgctgcatgtgctgggtctttgaatgtggcatctgtcgggctcagtgaggatgacagatgtctctctgctttatgaacaaacaacacaggcctgtggggtgacaaaaacagcctcagcccaaccagagcggagaggtgcagttctctgggaataatcagaagacagcagcgtaggagtccagagtctaccacacacctgctcccctaaaaaagcatgttctcattatgaaaccttagaaggcagctcccacgccagggacaagtataagggagcctgtgtggcctcattcattaccagatgaaccactcattcagggaagtcttgaggcatgtccaggaaatggcgccccaaagacccagttaacccacagggtgagtgcccacggagatgggagctctgggggtgacactgttgagccagtggatcaagcttcaccctgagtcaaccctaattctgtgtttttcaaataaataagccaatcaattttcctgttcatttctgtatccccagcacctagaacagtgcctggcacacagtaggtgcccagtggacattcgctgaaagaacaaacgaatgccaaggcagaaaatgggggtgagaggcaaagatgtataaaaaaagaactaagcagagcaaagcgataagaagaatattaataatatgaaccacaaagacaggaaagtcatctgatttcaatacacaagagtataaactcattatggatgctgaattacactagtgatagtttaaatatttcttggaactgaatatgcacataagaagagcccatcccaggcttgaatgagtgcacattcttgtcttggagaaaaggaagaaaaatatataaagcaataggtacaatacaatgcaacagatgttctagaacaaaggcctggagctatgattccagggcagcctgcaaagatctcccagtggagctgatgattagcaggccttgaagcaaggatggaagcctggcaagaggcaggtcagtcatcacaggcagggatgacagcttccaagaactatgtcgtctgtgagcccaggggccagagagctgctgggtttcccagtctttccaggctatggccaaactgatgaagccatccttgtttcagtctctgattccttcagagaagaagaaagagttgagtctagcagagtctcactctgcctggacgcctgctgtaccaggagagcactccctccacatgccactctaaacagaaatactccccggagcacctgggacgaccggcatcctctgcacttccaaggccttcactcttcccagttttgcttacttcttctcatcttcccattcacttcccagatgtgtttctcgggtctccaaagggaaactcaggggagaaactgagtcaagctactttaaatctcctttcctacctggccctttccacagcactcagcccagaagaggtgctctgggtgaaacaaagcagcagtcggaatctctgcaggccacagggagggagggacgggtagaatcaaggagtggggcactagcacggaggcctgagcctcctcactgccaggatgagggagccgcaatgatctggggtactggcagctctgggagcctctgaatagtgaccctggggctctcagaagtactaggtcaaggtgtcccggtgggcacagctgggcttagtcatcaagacatgggtacaaacctcagctcagtcaccatccagctgtttgagtctgaaagttacttaatctctctaagcacagatgttctcatctatgaaaggactataatgcttgtcttgcggggatgttgttagaattacatgtgatgaggtctaaattgctcctagtacagaataggcaattggtaactcttaactactattagtgtagtattatcatgatcgtcatcgtcatcatcatcatcattggggcagacaaatctcagaccaggcctgagaattcccaactctgaattcagagccttttgctccagcaacagaaatgagaaggtaaggcctaaagtagaacaagactagaggaggccctgaacagtgctgggcgcccaaacagggacttcctcccaggaggcctctgtgccactggcctggggtctcatcatcaccgccagcaacagggtgactggctgccccctggattttctgcaagcaaagaacaggagggcagagcagaaaagcccgggaactaatgagattcagagagctcgaaaattagaggtgcacgaaaggagtttccgcctaattgctctgacacctcccactcccactgccgagtcactgcaaggagcaggcgagtgcaggagcaagaggggatccataggtctgctggtccaggtcactgctctctccaggagcactggctccagttgggagtggcccagggcctttctgcggcctggcaggacagggtggccactgcccgtggctggcccagaagagtccaccttgtgggtcaagagctgcccaggctgatatgtgccttaaaaagcgggaacgaaagcaaggcagcacacagcaagcccaggcacctcctcagccttgcaaatgggagctggtgatatgggctcaggaactgccatttctgacccagcccagacaaatgtggcccaattctctgttcccttggagctgagcccatttgtagccatgccaggcccagggtctccctcagtggctgctggcagttgatagcagctgtccttagagcctcagctgcctctcctgcgctgtgtcctccctaaggggcttccagatcggttgtctcacgcgaggctcccagcaggctggaggagggcaggctggcaaggcagccacactgcccctgcatcacagaggagaggagggtggcccactgacaggccagaggcaaactgagacccttccgatccattgtcccttccctgcacccccaagaacaatgacttagccccaggacacatccttaagaagagggcatccctaaataccaccagcccccaccccctatccccccccaccccccccaccccacacacacacacacacgatgctgggat

SEQ ID NO: 1180 - DNA, 4450 bp, Homo sapiens
tgattaagtagtagatcacaggggatggaaggcaaggccttggcatctttgggttttctccaaacctatcttgacatgggttcaatgccagcctccccttccagtaaacacaaggattattgcactcctgggcacagacttgctgatgccttggtcttttctatcccttctcttgcagtttctttaggtaggagggaatacaaaccccaaaaacaaacagacatgagtccattttaccagctgggtttaatgggaaagctggtagggttccccatgacccctaggactgaatgagtgcccacatttcacaacaccctgattccagacaggaagcttggagaagtatctatatttgggggaaggaagctgccccagacacagcttcctggactgttagcaaaggaatctcacacaaggcctaaaccagtttccatacaacttccttgccttttgggaaggtgcaatctcacaggactggtgggacttacccaatgcagtcatccaaaaacagttatggccaacacctaagtgctgagaaaagtcaagaggaagaggaagccccaagggcagagaaagtggtgaaggtcacagaaaaggcatggagctgtggcaccattggcgggggacagctagagtccaggcacagagctaaaactgggtatgagcaagggtaggagaggggacactgctgaacacccacaatggtcctgctcctgttggctctgccttcaatctcaaaggcaattatgaataaaggaaagcacactgccttcagagtccgacctaagtttgaatcctggcatctttcccagctggccgtattacccctaggagctactcaacacttcagaacctcactttcttcttcagcaaaacagaggtgcaggtatatatctcctaggagtgacaagggaattcacgcggctgttaatgacctggtgcctgcctggggctaccaagcagccaccacaagagtcctccataatagcatccaccgcactgcagtcagggcaacagcactgcaagcacttcatggacagagaccaagcctttccaacttgatctgccatgtttcaacacagtgcctcagccattgagaaaatcctgtgacaggcacagacccccttcaagaaggacttgctgctcagctcgtgagagggttgtcagcagcttcttcagggcttgctcagttgcagagagctacctggccagaggtcatgcccttcaggggcagcccacctcctctgagtgatgggagtgatggaataaaggcccatgtcagcccatcccagcactcattccagcacaatgctggcaggccatcttggtgctcttggggctggctgtggctgcatccagcctgcatcacgactcaacctctgcacagtcctgctgccttcccctcctcccgtgggtatgagcctccagcacactcaacttcgtgtcagagcttaccttccaagaaccctacctgcaatgaacttggtatttgttgatgagtaaatgtctgaaacaagatccccaatcttctaaatccagagttaaaactcagacaggccacggtccttggtcattctaggtccaagaggctcttgctgctggcatggccaagagatacaggtaagtaaaacagtatactgtggtgctatgaccacccagggggctgccgtgtcccactcaggaaaatcaggtacctagttggcttccaaaagaggctggggaaattttaagttgaggttgggctctgtagaccttctccaccactaaagcccccaggtttatcatttcccgggagaataggtcctgggggagagggggagataacaatggaacacaccaaaagggaaccctgtaatggaacagtgcccactaatgtttattttatcccaggagtcacagaaggcctggaatggctgcgatggagataaaggatgaagggtagtcccctcagggtgttatccaaaaagtcaccttggaagaggaagaaactcctaccaatatcagaagagcaacaaacatttttttttctagaagataagtggctaatttcaaaataattattttatcaactgccacataagtttttttttttttaattcattaaaaaaaaaaaatgaggccgggcacagtggctcatgcctgtaatcccagcactttgggaggccaaggtgggtggatcacctgaggtcaggtattcaagaccagcttggtcaacatggtgaaaccccatctctactaaaaatacaaaaattagccaggagtcgtggcgcatgcctgtaatcccagctactcaggaggctgaggtgggagaatcacttgaacccaagaggcagaggttgtagtgagccgagatcgtgccactgcactccagcctgggtgacagagcaagattccctctcaaaataaataaatacatacatacatacatacatacatacatacatacataaaaatgaaatgcttcccttttcaaatgaggagtgggaacacttagattacagtgctaagttctttttgtctgtgaggtaaggagaagagcctgcgcctaggtgaccttggcctggtcagagatgctgggacagcctggacgtgggaaagaagggatctacgcaggtctgtccacagcacattccagggcagcttcctcccgggctgcttctgtgccagaacctgctggcctcaggagccccagctcacctttcactgaccttcagcccacaggagaacagcatttcctacctcccccacctgctgacaaggcctctctctttcccacgccaaggacaaagatgacctctgggggattccttttagctggctcataaaaggaagagagatgggccaaagagaaagagctgctgggtccttccccaactagaacatgggaaatgatgattttccagtagggaagtggtggccaggcaggcaggcgtcgactagatgggtccctctggggtgtggtggaaatgacctcaacttcaaagagacagacttccagagaaggctggcattagcatcctgatctgctctactgagaatcccaagggttttgcggaactcttgctgggccatgaggatacagtctcctcctgaccccaatcctctaaccaaagcagctaggtttcagttagtgtacacagagctccaggcctctaagagtgtgaaagccactgcctcaggagatatcccttgctggagatcctgggaagtagaggctatggaggcagaccacttaatagctgtgcaaccctcagcaagtcattcatccactctgagcccgagttccctcctgtgtaaaacagcagttatcacagtgcctagctcctagtctgggtgtgagagttcaaggtgaggccaaccagttgcttcactccgtgcctggctcatagtgagacctcagtaaatgtgagctattttctttcaatgaatatttgccctttccagcatcacaaatacatgagcttccaattctagggatacaaagacagaggggctttatttctttcaatgagttcagagaagtccctagcacttaaactgctatacactgagagagtaagccatagttctgaaaatgctctgtgtgctcattcacctgaagcagcactgggggtcactgcagcctcaggtgccaccgagccgacaggccatgaaaagaacacccactgactcactcatctgggtggaatggtttcatggggacccaggtgaggtggtgaggttgctgcttttttatgtattggctttttctgcctccccaatgccccacttccgtcgcaaaagtgtctgagttctggagcaaaggctcagctaggaaaagtttcagatattttctttgtcttaacccttcagggagaggaaggaaaatctgtctcttgccagggtgagggccaccaagcgggttagctcactctgccacattctgcattttctaccttcaacacaatggacagtgggatgtctctctcttgccatatgcattcaagagaaaagccctggtttgggtggggctctggtttgggtggggtttgcattgggtctacagccactagcaacttgctgtagtcaaggcaaatgacataagctctctgatcctcagcttcctcattgtaaagagagctcttagctccaggtctcattactttcagggtatttaggatgtttagatgccaaataagacagcagaaggcagagcaccttgacaagcataaagcactgtatgcaaacataaagcatggtgcaatctcacaggactggtgggacttacccaattataaacaaatttataatcacatggcaggaagggtggaatttcaagatagaattattattcattgtaagatgacttgtgtaatattgtaaatgactgctcttcaccccatcctctgattcaaattaaaatcctcattccatggcccctacatgtacgctcattttcactgttcagtta

SEQ ID NO: 1181 - DNA, 4045 bp, Homo sapiens
ctgtgtaaaacagcagttatcacagtgcctagctcctagtctgggtgtgagagttcaaggtgaggccaaccagttgcttcactccgtgcctggctcatagtgagacctcagtaaatgtgagctattttctttcaatgaatatttgccctttccagcatcacaaatacatgagcttccaattctagggatacaaagacagaggggctttatttctttcaatgagttcagagaagtccctagcacttaaactgctatacactgagagagtaagccatagttctgaaaatgctctgtgtgctcattcacctgaagcagcactgggggtcactgcagcctcaggtgccaccgagccgacaggccatgaaaagaacacccactgactcactcatctgggtggaatggtttcatggggacccaggtgaggtggtgaggttgctgcttttttatgtattggctttttctgcctccccaatgccccacttccgtcgcaaaagtgtctgagttctggagcaaaggctcagctaggaaaagtttcagatattttctttgtcttaacccttcagggagaggaaggaaaatctgtctcttgccagggtgagggccaccaagcgggttagctcactctgccacattctgcattttctaccttcaacacaatggacagtgggatgtctctctcttgccatatgcattcaagagaaaagccctggtttgggtggggctctggtttgggtggggtttgcattgggtctacagccactagcaacttgctgtagtcaaggcaaatgacataagctctctgatcctcagcttcctcattgtaaagagagctcttagctccaggtctcattactttcagggtatttaggatgtttagatgccaaataagacagcagaaggcagagcaccttgacaagcataaagcactgtatgcaaacataaagcatggtgcaatctcacaggactggtgggacttacccaattataaacaaatttataatcacatggcaggaagggtggaatttcaagatagaattattattcattgtaagatgacttgtgtaatattgtaaatgactgctcttcaccccatcctctgattcaaattaaaatcctcattccatggcccctacatgtacgctcattttcactgttcagttacaagcaacaagatgagacattttgacgcccttggtaattgtctggtttctagaagttcttggttcacaggcctaagcatgtttcatttgatgtttggcaccatagaaaacagtgtatgtttaatgatttctgtgttaaactgaataatgaataaccaggaaagacaacagaccaaatagcaacttcttgatacacctgcttgacggaattctgagcctttttcccactctatcaaggacaactgcctaatggagagtcagaatatttttctaatacaaataaagtaaaaaagcaatgtaatgttattatcttttaaagacagaaatactattaaatcctcaaccatttttaaattaaagcataaaaccctcttctacccaataagcaataagaactcacttgaattccttttcacaggcatttaagggatactaatgggtacagacagaagagggaaaagtacagaaaggaaaacagcagataaatatatagaagcagaaaacaagagtaacagaagagaagcagaagagactaaggaaggcatctaggatgcagttgtgaagagaaaatcagacatatgtaggcagaaaagaaaacaatcaaacaaacaacaataataaaattagaactaaagagaaactttcttaaaggaacccataattttggaagcttatcagtagattttaaaagtagactacagatttatgactacaggagtaaagggtgtgttactcttagtaattgtttccttaatgacataaaatcacatcaagactatatccagctcatgggccagcagctccccatccctgccccataatgctgcactgtattatgtttcaatacaaaacatttggtgtccacttgggtcagcacctccatcagactgccatcactaagggaactgagccagcctcccacgtcagtttcctcccctatgggctccactgaatggggatgaatgcggtacctactctcatagtagggatatgaggattaatgaggtgatgtagaaaaatcacctggtattgtaggtggcatttagtaaatccttcataaacactagtgttcattattagttggggttacaaatagttactctcagagggggaaaaatgaatgaaagtgtgtgaacaggttaaacaaaatattttggaaattttatgttgtcgtctgaaagttctttcatgtgcatctaaaggcatcacactcactgtcaccctcttcacatggtgggtatcaatataaagaacattcttcaatttctgcttgactgctacatctcatttctgtctctaggtttccactgagccctccagctcaaggggcctccctccgcatgagtcgtctttaggaagcccagcctggtctctaattttgagaagcatttcccttatttcaggtcttcattcagccagtggttcaaccactgaaccacttcagtttccttccttcattttattcacaaaggaatcctttcatctacagcccctagctgggctcctttgaagagactttctcttcttgcattattttcttggtcagccttccttaggaaggaattaagacacatttcaggaaacgggcagaaaatgttaatccttctctccctcattgtcctactcataaacgcttactccctcaaatgcacccataaataagctgtagatccacatctggttctgagcccagcacatagtaggagctcagatgaatgatcacgcctgacttctcagccttgcttctgccatcccttcccctgaaaaatctgctcctctctacttaacctagtagaaccctcatgaaagctgttgtccctgttgaaggaatgatgccccaagcatccagcgtgtctgctgtttacttcatgcaccttagtggatgtggtgaaatgaaatgacttttccatttccaaagagaaagtgcaaagtctccaaacttatgacctctttctcagaatgccaatatttacagcttagccctgggcaaccctgtgcttttctgaccttagattcccatttggagtggaaatggcttttctatttctccccaaggttctctgaattagatgaccaaaggagaacttacttctaccaagatgggtctatgagacccattcaggctctcatccattcgttcaacagattcattcattcagcccctactgtgttccaggaaataagtgtcaaccatacaggagtgacccagacaaaaagccctgcttttatggagttagtttggattttagtggagacaggggaagatagatgataagtaaaataaataaagtatatatagtatattagagaattataaggtttataaagaaaaaatgaaagatacaattagtagggaatggggataatttaaaatagggggaaatttataaacataatggaaaatatgcatgtaagtaaaattccttccaaaaaatggaatatttaacactaacttgcggtgtaaacatgaacacatcatgggctccctccaggcctcggtttccttctcggcagtataaggtggaactacaaggtatctctatggtagcttctggcactgaaattctctttctctacccaatagatagcaatttgaattaacactagagcctgttgggacccagtgattgtggtctaagtttcaatgactttttttttaaatccctacattccttggggttcccagcaatgtctccagtgggctgctggtccaaattaattgtgagagcaaccacaaattcccttgtttatatttttgaattgttgacttagaatcagttttaaatctgagcccttcttccccacagatactctcaaaacagcctcctgataggcactaacccctaagaaggtcatcaagtggggctctgagagcaaggatgctg

SEQ ID NO: 1182 - DNA, 4033 bp, Homo sapiens
ttttaaagttcatctaaaagttaacctacaaggaattttcatttggggaatttctgcaatgtcaactccactgatcacccacagtgtttaacacccttgctataaatttgggggctagcttggcagctcctgccacccccctgagtctgctaccttgctccagaaataaaaaatgactttggccacagtaatgtttcctcgatcctcagcccctcctgggggcctccggcagtcattattttaaataaacatgccttttattgttttcaggtacacagagatggaggcgcttctacctctggaggagggatggactttcaggggccccatgatttgcagcagttcagtcaaaagcaatacaaagagcaaaggataggggctgttatctcacccaagagctcctcaagcagaggatactcaattggaaaggaggctcttccagtcaaatttggggctagtggggtcaccacgtttgataccaactaggaacaacatccccttagaggcttccaactgaggaaggttccaaaagagagctccatggctgaaatgattcaaaagaagccaactccttctcattgagctggccctttggaatatggccccctcctcccacggcatccttccccctgcccagtgcctcaggcccatctacatgcttctacctataggctttgcttcttctctagaaaggagcaaagaaggaaaagaatcattggaggtgagtcaaaagcaggcaccgtaactcacggggccttgtaagccagggacacagtttcagattttacttcaaatggaggcaaaaccatgggagagccatgcagagacaccccttgatgaactctgcttcacgccaatcactctggcagctaagaaaagtgcattctctctccttttgcagttctcctggtgcctagcacagggccaagggcacagtagatgtgagcctaacacttgtggcctttgctgatgaaggacagtgaaggggataagaaaacataaagatattttgggctgcaagggaacgaactactgaaaaactactgcggccccctctatttatggagatgctgaggccttggagagggaattgacttgtccaaggtcaaccagaaaagtgatagcaaagccagggttagtatccaggtttctgctgattgcagctcctcagataaaagtaagtgacttgcctctcttctcccatatccagaattgatctcaaacactgtcatgaatccccaagggccagagagacacacagcatagaccaaggtgagtaaactgttttctctctttctgatgatctgagctttttcctggagagatctcaggtggccaagaaaccaagttgcccacctcatggttcagaggaaacaataacctcctggcagcttccctgggagcccatgcaggtgcctcagggattaaggagctcctgaaaacaactcctttcctttgcaggaagtgattttccacccctgaggcataacaccaggcagaggctctatcagtgcctgctgatataattagctctggacagactctccaaccaaggcagacacaaccaggcccttgctctagaaacaaaaagaatgttctggacctatcccagtacacttccaaaccccacgccttcctgggcaagtcggggctcagagaccaacaaacccaacagacttcagcagcagccagggagctggcagcctctgtcccctgaaatgccacttttttttttgtgattcagcctctgtttcaagctatttttagtgtaagcaaaggctgcatctgagggaaggtggtgtgggaaaggggtctttactttctctctccttttcaatgaactgtcctgtttcccttaggacagccatttcaccaaaagccacaaaacatgtggggagggaggattaaaaagaaaaatgggaaaaaggtcaaaattcagcctgtttgctaaaagtctgggaacagttctaggaaggtgatagtttctcgatcctttgcgttaacctgctgaatcctgggctgctcctgccagtggggaaccaatatgcccagtccatctaccttccgaattaaccaacctccagtaaacaaggaaggcccagaagtttgctctcccagggacgtggtgcaaacaggtttaatggtcccccttgatgccccagggaaggatgtgtgcccttggaggcttgtgaacagagaagcaagcttccgctcacagaggaccctggcttcccaccctcaccccgtctccatcatgtcagcacaaggccaattttacaaactgaaattaactggatgagcaaaaagatagccttggtgcttaagaggcttgggtacatttaattgagtttccaagtgccctgattccttaagaaagccagagaagccactgttatgtcctagatccctcactactcaaacaggagagaatagtttttacaataaaaattttagggcaaatggtggctttctgttgttgtcatttccctgaagtaggttttttgtttgtttgtttgtttgtttgtttgtttgtttttttctggaaaaagcctcactctggacccagagtctaaaaatgaggcttttagtgcaccaaattgggctgtttggggcccgtaggcacgagtcagtctgcctcctcctaaacatagcctcgtaaactaaacttggaagcatcagcttgcgtgtggtcccgagtgtgactttccaagcatgcactcccctgcaacgacaaaggctgatgactttgtcatcatcatctctatttttgagtctccctgctaaacaaactttctcgcagctgaaatggaggctctaaggatatttttctgacaaaaacggagtgctaagccatcagcaccctctgaaggccttgggggaaaacctgggtaagaaaagtctcccagcccaactcagtagccgcaaatacagacatttcatttcctgaaatgcctccagggggcgccagctttcatgggttgggaaggagggagggaaggacggaggaatggaatgaggcgaggaaggaagggagggagggaggaagggagggagggaggagggaggagtgggggaggtgggagggggcagtggggaggaaggaaggaagggagagagggaaagaaggaagggagagagggaagggaagggagggaaaggaagggagggaagggaaggaaggtaagggaggcaagggagggaagggagggaggcagggagggaaaccaactactcacatatttgcccaggcccctgggattcagctgcagaactgcacaggatgtgcaatcaggactagaatgtctgagctcccaggcctgtccaagggactgagagatgggtcacaggttctgacttatcactaaaccctacttcagaaaccttgccaccccaaatcattctagaaaatgcaagcataacatttccaccttcaacactttggatgactgcactttgcagcttttgctgaatgaaccaacatatgtccagcacattgaacagtatctgaccccgagcaggtgctccagaatgtttgaaggaatggatgaagggatggaggaatagctcagaggagctgcctcgcatgtgcagtagaatctgggtctttatcttctggtgacctcacacgctttcccatctcctttcaatgaatgtgtggtcactacctgtcaaaatgtacatcaaacccacctccccaaatactggtgcagatgtgccctccgaaaccagcctgtccctgccctgtcagcctcgccccacctccagggagaagtggatacggagaccacagtaagtgcacttgaccctttttccttaagactcatctgttgtcctgccaaggcatttcctgtgacacatgcgcccacaacgtacagctccagggagagcccagcccgttctccagtccccagccagctcagggaggctatatgaagtgagaatttcctggccaatttgacaatggtgagtcaggctggcatgagccagctgcaaagaggacgcagcctggacaagcctgaattaagtgtgtgca

SEQ ID NO: 1183 - DNA, 4048 bp, Homo sapiens
ctccttcattttcacagcagccctggggagggcagaggagccaacacaccagctagtaaaattaacagctgctctttacagggcgtgccggagagcccagcacatggctcgaggcctgcagaccagaagctgctgcgagctgaggtgcctggcctgcaggccctgatcaggggtcctcttgggggtaaggcttagactctgagctgccagcagggcctggggtgtgggggctgccgaagcagtgggcaggtggatggagaaactcaaggaatgatgctgctacaaaattctcagacatattctcctgaccttgcgaagtggaaatccatatgttcaccccagctgggaatctgctatggaacttggggacccacctggctctggcctctccatctctaatgcagtacttagttgagcttggggaagtgaatgtagacacgtccccatgagaaggggacagatgttatatcttatctattacctatgccataggtaacttatggagcaagtcctgtaggccacttgaagaggaatattgacaggcatacagggagtggcaattgtttctttacagggacagatggtaattattttaggctggtgggtgttttggactccggatactactcaactctgcctttgtagcttcttacagaagcagccacagacgatacgtaaatgagtgagcatggctgtattccaatgcaactttgtttatggacgctgaaatttgaatttcatatagctttcacatgtcacaaaatacacttattttgatttttaaaaaataaccatttaggccaggtatggtggctcacatctgtaatcccagcactttgggaggtcaaggtgagaggattgcctgggcccaggggttcaagaccaacctgggcaacacagtagaaccccatcagtacaaaaaatttaagaaaacatagcatgtcatggtggcctgcacctgtaatcccagctatcagggaggctgaggcagaaggatcgcttgaacccaggagtttgaggttgcagggagctatgattgcaccaatgcactccagcctgagcaatagagtgaaaccttgtctctgaaaaaaaaataaaaaaatgtaaaaaccatccttagcttatgaaccacacaaaagaggcaatgagccagactgtcccacaggctataactaactgatccctgggctaattaaatgtttcccaaagtgagtgctatgtgatgcccacaggtattacatggggaaaggattccacagggaaatgaaaatggaaaatgctgggcaaaacagagcctttccgctttctgactgcaggacttctgtaagtatttatatgctgatatgcattggcaatctcgaggagggggatgagaaatgaagtctatccaagttcccagggaaccatttttatccgggaacaattcgtgggtctagtgttctatggaacctaattaaagccatgaggataaagtctaaccaactgtcagcaacagcactatgaaatgcgatcctgctgctctttgaatatttctagtaacaggcagctcactacctgtcgggggagactgctcaattcaattatttctctgactcatgttttctcatctgggtaaatgatgttgagtcaaaaataacaaatctagtgcaaatctagtgtatctttcattagataaagacaaaatttcatgtttaatagtaaaaaaagaatgtatcttctttgactttttgactgatacccataatgtgatttcagtatctatgcatgggatgaaatacagaaccactattaagtcctggaaggaaattatcatatggttcctttaaacagaagcctcccttaggagtgttaaaacaatgccaataaaactccaactgattcccaatagcagagagcaggacatacctattcactatgggacattcttactaaaagtacagtcctgtgaaacctctagtctttctgctacacaaggcattggccaatgatgtaagaattttacatagatttgcctaaaatataataaaagctggggcatagatgaggggggtgagagacagagacagagacagagagagagagaagtgtgtgtgaatttgccaccaggcaccactgagaaagaaaagtagaggatactgatgggaaatgtcacaacctccatagggcacctaacagaagtgaatgcaatgaatgtgatatatttgattatgtgtgtgcccatgtgtactcccactgggttcaaccagtctaatttcatgcgcaaacagcacatcagtgaatgtacatctatttaactctgttaaaccaataggattattcctatttgaaaggcatatttgacacatattttcttttgggcccttggagataaagatgaaatggtccaggctatgtatataacgttaatgtaaaatgccacacatgcaacatatttagggggataaagagagaggctgatatttttctttcttcttacatcgataaatcatccctatacattcaagcaagtagcatatgctttcagttcatagaattagctgtgtaagcttcctggagcaatacacagatgtaacagcataggaatatggggaaagtaactacaaagagtgattctaagggctctctctagctttgctcaggagctggtagctattttggcaagaccagtctttgaagagacacacaaaacattgaatctgtcagggggttgaggtaaagtctaggcagtgtagatgtcgctcccaagttgaggtgaggctgtccttcaccacaggacatagtttccctagggagacagttgctgtgagatcaacatggaaatgaatatgaacatgcagaaactaagtgacaatgtggatagtgagagtatgtgtgtgtgcctgtatttatctttgtgtgtgtatcactgagtctgtaacgctcctttacaaagagtgtgacactcttgctactcgaccttagagaatctcttcgcctccagccccagactttcaatttctttatatataaaacaaggggataaattagactgagtcagcaaactatggtgtgtgaaacaaatctggcccaccacctgtttctttttttaaaacgttgtattgacatataatagtgtacatattttgggggatgcatgtgatattttggtacatgtataatgattagatcagggtaacagaaaaccatcacctcaaacatttatctttgtgttgggaacattctaattcttttctagctattttgagatgtacaataaattactgttaactataatctccctattgtactatcacatgctggaacttattccttccagtcaactgttttctctaccccctatttctataaatacagtttatttgtataaatgtaaggagtatgagtgcagttttgtcacatggatattttgcacagtggtgaagtctgggcttttagtgtaaccgtcatccaaatagcgtgcattgcaaccattaagtaatttctcatcactcatcgccacctcccacccttccaccattctgagtctccattgactactattccactctctgtccatgtgtacacactatttagctcccacttattcatgagaacatgtggtatttgacttcgtttctgagttgttccacttaagataatggtgtctagttccatccatgttgctgcaaaagacatgatttcattcttttttatggctgaatagtatcttattgtgtgtgtttgtatatatataaatgtaatatatatacatatataatgtgatatatatgcatgtgtgtgtatatatgtgtgtatgtgtgtgtgtgtgtgtgtattttttttttctttatttaatcatccactgatggacccttgggttgattccatagctttgctattgtgagtagtgttgtgataaacataggagttcaggtatctttcttatataatgatttcttttcctatgggtagccaccaattagtagaaatgctggatcaaatggaagttctgttttcacttctttgagaaatttctgtgctgtttttcatagaggttgtactaatttac

SEQ ID NO: 1184 - DNA, 4032 bp, Homo sapiens
gtcatgaggctcagagagattgggtaattttccaagattacccatcttgtaagtggcagagctgaaatttcaatctagtccattctaactctgaaggccatattttttctctctattccacactgtcttgggataggtccaatgtgcaagaacagagatggaatctccatataaaattctgtttactactactactgaaacaaccatctcacaacctatggcttctaagtaacaaaatcctgtagtacagacatctaaattcagttataatccactatgtacggacagagagttggagaaatgggctaggggacggggatccaacctgggaatacaatgctcattagacattagatatgttctcaaatggccacatatgctgcctaaaattagtaaggcaacctccaaactttcagggctaatacatacatcctggccaatgtgccgtatttgtaaaataacaatctccttctctttcaattagcttaataaaattggaaaatataagtgacagtccagagtccactatcagagccatagagactttgaattggattagtagagtcctcagccaggatgaccctggcagggtccaagacagcctgctgtccatcagagactcggagactcagctgccagtctgcagggcagcccatcctgccccagaagctcagctcaagacctgcccagacaagaaaactgtggcaggggcccagcaggaaggcaaaaattacatttgtttctcatcagggcagactgggatatggataaccaaacacacaggaaatcccaaaccctcatgttcataaaagaatgcagaaatcttcgtgccaagttaacttttaccggagggagcccattgccatcctgtagaccaggaggaggatccagcccccaaggagcctcactctcctcagcaaaggctcctgcaggtagctcacaggtgctctgttcccatgggtcctgcatggccacagggcagtgctgcccctgatgtggtacggaatgaaaagcctcagtacagcgcactgtgtgtgtcagtggaagacaactgatgaagggcctctcccaggaagaactgtccttttctttgacattatatcgttactcctttgttgggtattaacatgtccttttaatgaaatgacaatggtggcagagctggcatttgacagtttctttttttatgtttttgcttgtcaaaataaaaagctggtggccttgtgatattctgttttataaaaattcattgattatcccacaaaaagtctaggaaccactcccctagcccaaatgcctcattctacaggcaggaaatttaaggccccaatattccacactcatagtggccaggttcccctcgaaaaatgtggctttcagacttcaggggcccagggtgtgtctgtcacactagccagaggcagccttggggccaggaaaggtagggtctgagggatggaggcatggtctctcagggctggaggagctctgcaagctgctggcccacacaataggggaaaggggaaggcaagcattttcagagctcagggccataccaaccgcctgagttcctggcatctaatgccttcactaccactactgcaggaaatgcacagaactataacaacctcccgggaaatactacaagtgttaccgtggccccaagccaccacccaaggggcaactgggaagaaagaattcaaccacagatagcagataggatgaattgtttatggttgaatattcccttcagagtcaacagaggactccaagcaatttggagtaaaaagatgagtaacccgagagcaatgtaagtcacagcccagtgccccacacggaagggaacacggtcatccccttcgctgctgttctttgcttcccaccactaccaccttcatcacacacgtgtgcttattctctagcagtcagggcagagtctgcctgatttgcccactccacatcctcaaagcctgaacagcacctagcacacggtgagcatttcacagtgcactgaaataataaatgaagaaattctgttttttgttctgtcctgctttgttttcactcttcgctcatatcttctggaatctcaaaaatcctgccaagtccacaatgccctaagcatagaagtcaaactcctcaaggcctgatcttcaaggcctggagctgaggctgccggctgccctccccactcgtcactgacctgctcttccacctgacttctcggctatgacttggtcctcctgactgccacacctccgtgctggctgttcccactcctgggatgctctccccattgctccccaaccatcttcatcctccctgatcaaatcccagaggtgcagtgaagttctccttcctggctagatctccccaaagctctccctgtcctgtctccagggcccacatctgctcccccaattccacatgggacaggtacttagctgtcttttggtccatgcatgttgcattgccccagttagcctggacaatccttgaaggcaaggcctatataccttttatgcccaaagtgtttggcatacagcaatgtgcttaacagacacgtaccgattgagtaaattaaatctctgctcagtgggcactggaaaagcaagagctttcccaggcatcactgacgtctgggtaaaccaggccagtttccatgacttgaagcttaaactgggggttggctcctaactgctgttcctcagggcagctacattttcaaataaaaacactaaatcccaaatgagatcagatgacatggagcttctgagaggcacatgccctaccaggcatgtcagtcaaaagaaagatgaatgttcttgtttacaaaaggatttgtcccgtgccaggaaaatttccaccatgatttaggacctaatccagtctgtgcctatagacctcaccaactgaacatgttcccgcttcttccatttgctgaacttggatggggcttggcttcgggtcaaaagagctgtcccaattaggtcgtcagacagcctttccccacacttaagatgatccccattcaggaaaccaagggctagcaagacagacagactttgggaggcagaaagatggccaggttaccaggcatacagcggcagtcaggatctaccgctccgagcacagcccagcctgaggaaccaggctcccagagctgccctgctccctggactctgcctctgacctcaccccttggaagaactggctgggttccaaaacttcagcctctatgtccctgggttcccacacaccctagtttggatctaggtctccaacacagcagccaaacacaagagagtccagagcagttgctaatgtgaaataaaaacaattcaacagcccagggaaaggagacaggacttctttttccattggattcagagaactccttctccttttccttctcgatccctaatgggagttaaggatggcaagcgcctggccctgcaaagcctcaactctctacttggctccgctagacccatcaatcttctctccatggcctgggacccctccaaccctggacgtcgagagagactcggcagctgtgagaaccttctttctcaagtaaggtttttttccaaaattatatcaggtttccttctaccccagcttgtcagtgggggactcttttgcctaacatggttgaggaatgtcttagaaactggtgtgattcaatctggcttctgatgaggttttccacccagacagagctcaccgagtgtctggaagtgtcggttccctacacccaggggcatccacaccctgtccccatctccagacctcagtgaggaggatacccttgacaaagtggctggtccagccctacgatgaagttggatccagaaaaagagccaagaggaagccaaaaggacttgcccacacacttgcatccacgggggcctccctcctaccatgtcccctctttcccccaactttctaaattggtgaatctacttgcaacacacccagtataaataattgaagagctcccgatggaagtggctcaataattgaaatctc

SEQ ID NO: 1185 - DNA, 4046 bp, Homo sapiens
cctcttttctaattcagggatctgcatgtcctaggtttccttttcctgtaacaaccttcttcacacagtcatattccagatgtcctactcatatttaagatctctccccaggaagcctttcctaactcaccctccacctccactccaccaccaccattgctatcagtcaataaaaccttccaatcatgtggtctttgcactgctccttcataacactcaaggcatttgcaagtacttgttcagggcctctttgcttcactagactagaggtgggcaaattgtttctgtaaagggccagataggaaatattttaggctttagcatatggtctctgttgcaactattcagctctgttgctggggggcaaaagtggccttagacaatatataaacaaaggagtgtggttgtattccagcggaattttatttagagacattgaaatcagaatttcataccatttcatgtttcatgaaatattcttcatttaaaatttttgttcaactatttaaaaatgtgaaaaccattcttagctaatgggccatacaaaaacagatggcaggccagacttggcccacagcctgtggtgtgccagctcctgcactagactatcagtttcctagagacggaagccacgtcttgttcacagatgtatctctccagcacagtgtcttgttctcacaaggcggttcataaaaattcactgaatgccttgatatgtggactagagccatgtttcccagtgtaaattcacggaacaccagtctgatgggaaactccatacaaaagggacacttctctttgcagtgaaatctggaaatgccatcattcctcttctaacaaatgttcaatgctcactgcatacagcatagcaaaagctcagagatagccttcagtcaaggaacctgttcaacatagaccaatacaatgctgcccacactcattttgaccaaataactttcttctttaacccaaaatatctgccagtgtccaagggcagccccactgaaaagtgatgcagtgaggagagacggcagaatttagaggaatgggtctcaaactttagtgtgcatcagagtcaccaggaaggcttattaaaataagaaactaccccagcccagagtttccaattcagtaggcttaggttggagcataagaatttacatgccttacatgtttctcagctgacgctaatgctgatggctaggggaaccccgttttgagaaacactgatctgcagaataaatgatttcaaggcttcggtcctctagctggagtttgctcctccatccaaggatcttattcccaggtgaactccaacttgtccactttctcacactggcagtagcagctctgacccatctttctagtcttaggcacctgtaatgggttgcagtgtttttttccaaaagatttgtttcaatagtaatccccagttcctgtgaaggtaagccttatttggaaagaaggtctttgcagatgtaatcaagttaaaatgaggtcatactggagtagggtgagctcctaatccaatatgactggtgtccctaggagaggaggaaagagacacacatagggagaacgccccatgaccaaagaagcagagactggagtggtggctgcaagtcaaagactgccagccaccagcagaaacacggaagatgcaaggaaggagaaaccctacaggcttcagagggaggctggccctgctgacatcttgatttaagccttccagccttctgaactgtgagacaataaattaacattgttttaagtcaaccccgttgttatggcatcactaagaaacattctagtccaaggacagataaagctctggccaaggccttattcttggtaggtgtccacatgaactctgaaggaggaagccacgatgtcagctgtctgttccctttgtcatcactgctagacagtgggtgtctgcgctggggtctgtttttggaaattagattatctaattaatgtgatgttttgttggatccatgccttagggctggatttggcaaaaagcatgtgattattttttactcttaaaaaaatgtcactaaataagataaggagacttggctttgccctatcttgggctccacatgtcctgtttctcactgagagaccctggcaaggagtttctcagtgacaaagaaatggtttcttctcctctagttctgagctataaacaccttctctaatcgacatagaaacggctaagcagtagatattttcagtcagagtaccccagttttagtcataaattatatgcctctccttttggaaatataaggggtataatttttattcttgggcagacatagtcctgtgcccgataccttaggaaagagccaaaaagagaatgtggacacagcttgtcatggtggatggagaggaaggagacaccaggggtagggactctgtattctgaagctctgaggccacaggatgaaaaatcagagccaagtgaatgccttctctgcctctccaatccatgccaacccagggctggctgctcacatggggtctgcacaaacttgaaaatctccagatgttttataggggggacaaagccacgctttctgctgcaacagactgtgagacttttaggatgctcaccccaaggcccttgaaaaatgagagaggggtctgattctttgagatgggtaaggcagaggcaccccgtggaagtcaagcattccttctctcttccctcccaaggccagcatgtaatttcaaatgtccagtccatccatgaacaatatgttagcctttggccaggcggtgagcttccaaaatgcaaacatctcagcctctgtctgcagaggtgagaattcagcttggcagaggaatgggacactgtcaaggaagacaagcttttggagtcagacaatcccaggtttgcatattggccttgttttgttggtttgttttgctttgtgttaaaatctaatttattctgcaaactacagcaggttagttaatcctttgaaacctcaggtttctgagctataatacaggaataattataagtgctttgcagcagatttgtgaggattctgagagttgttggatgtgtctagcacattccttctaacttataaagcattatatgccaagtatgaatctaagtaatgcacatgccctaatcttttccatccttacaactatttatagcactgcccccatatggcaaatgaaggctcagagaggtcaaggcacctgcccacagtcacaaagtcagtaagcagctgattctggagctggtgctctcaccacagggactgctatatacccatagtggaagcctggggctaggaatgaagatctgtgttcattcattcattcattcattcattcaacaattcacctgggcatctctgagagaggattactcacaacaggttctcagacaaaaaaaaaaatacaatctctccttccaggagttgaagatctctcaggggaaacagacaagtacccaaaactaaatcaaggtagaatatgacaccagggaggaagagagtatggcagaggacctgttaaatggcaggaacagactgatttaatgaaggtggtggtatttctgctgagcctcaaaggataggcatgattttgacagatgcactcagcctggttcagtccaaattagggcccccttgttctttctcatcacaacccattcatttcctttgttggactcactgtgattttaatttcacagctatttgctgatttatttgttcaatgctggtctcccacactagaccatgagcaggaaggagaggcagcatgcaactgtgctcgttgtctacacagggcctagcactgggcctgggccagggcaggcacctgggaggtatgtgctgaataaatgaatggatggatgggtggatggatgggtggatggatgagtggatggatggatggatggatgagtggatggatggatggatggatggatggatggatggatggatggatgaggatataagtattggcaggctggtggcagcttgcagaaggagagcacattatctataaac

SEQ ID NO: 1186 - DNA, 4041 bp, Homo sapiens
aggaagccaggcacccagggttccccttgccacctagacccccgccacctccccatctaggatgggctttctctactccacacataagcactctcctgccccagctcctaagctgttctccctacccctaatcttagcagggacctggcatggaagtcagatgagcctggcttggcctcttgggtctgctactttactagttgtaagatcatgggcaagaggtttcattgctcagtgcctcagcttccccacctgtacaatgggcacaataacgatactgacctctagggactgcttatgaggacctatcgagagagcaggtaaaggttgtcatctagagcctggcacacagcaagtgcttgctaaggggtgttactggcagcttttctctgagtccaactcccatcacctatatgcatgggactcagcacacatttgctaagttgttggtttctccacgctcccctcctcctccttcacacccaagaggaatgaccaggtggccacaggagtcagcatgtttgactttggtacctggggctcctgaccatccagtgtgaatccaaacgcatttccctgactgtctgacacctgctgtttaatctccatcaccttccctcctcctacctggctcagggtccctcactccgcataggtggccaaggtgtgggggagagccctccttcctaatgcttgtttgttttttcgctcatgtgtttgctcagagacaggataccatggtgacacccacgatccagggtggctgggtacacacacatagacagggaaatcaagtgaaagaaaaagcccatgggggccaccatcatcccacgaggggccagactggctcccaaaagagggggaaaggctgtccctcccaggggcctacatatgttttcccaatggaaagcttttctcagtggtcccggcaggcttccaggacactcctgcaggccagggactggtttctgtttgtctagaagccctgcattcatggtctagcatagccaccaacctccttgagatccatcactatccccccatcatgggcatctgcagagcattcatgggttgtggtcatgacttggaaaattattcttaggctgggagtatggctggactaggcttcacagagaacacggagggcagggtgagacgctgccagttggagagaatggcagcccctcatgaagttcagagaccccagcacacgaggaatctaccctgcctggcactgcattggctctcgtggaacatggagggagtgggctttggaatcagaggccagggatcaattcctagctgtgccacttcctagctaggtcaactgtgctgtttcctttaacctttctgagccaaattatttctaattcagaaatggcaacatctgagctccacctctaaagtgctttctaggttgcttttcaaatggaaccaaaggagacaatctttggatagatttgtgataaagaaatactgaatgctaaaatgaaaataaaaatatcttctgcagaaataagacctagagtttgatagatcagtagggtgactatagtttagaaaatattatatatttcaaagtagctagaagagaataattcaaaggtttctagcataaagacaaatatttaatatgatagatatcccaataaccctgatttgacctttacaaattatatgactatattaaatatcacatgtacatatgtacatttattatttatcagtaaaaataaaattaaaattataaaagggagagagacttcctgcatatgaaatagagattacaaatcctttctaagtacacatgggatactgacctgtatgctaagtcattaaaaaaagaaatccttctgcaaaggaccgttttgagactatgaggctctaatttagaaaggtgacaagcacattgcaggaccttacttaatagggctggggcttgccagcatacaaaattactgcagtgacttgttcagactcctgcactgggaaaagacttagtccagagacttacccaatgttttgccatagtaaattctccaaggatgaagaaaggaggaggagagaaagagaacttttctctgtcttcttcaaaagctgtagcagccagatgaagtacggtgtaggtggccaagcagccagatccctaaatagcaactaatgactttgattgaaattaataatgaaacgacacctgttagctcacttgtagccactttagtttgtcacatggcaattatattcactatcctatcagctggtccatgagctgtaaaatgctataatgccatgccatatgcctctcttgtctcccatgttgagacgggggctgtcctcagggtggttatcaattccaggcctcctaaccactctggagattgtcctgggaacttccccggcattcaaaaagacttgaggaccaccagccccagtgaacctgctgagtcccagggagcagctgggcagcctctttgaaggtggattcccccaccgagcaagaggaaaaacacacccaagagttaccgagtcccttctgtggttgggtccttgaaaagccttgttgggtgatagagggaattctccacttgagcagtgaacaacagtgtcaccatccacattatctccccagacagaggcaggacataaagaactaaacaggcccccagcaggccatgagatttggtttctatagcaacccaactgaggttgcatgagtgcctatgagatagatgcccaaggctcaccccagacagggccagaattccagaatcccaacggcaaggaccacccagcagcgtttagagatggaaagcaaggtttgttcatgttcagaaaaacccagggaagccacaggaaaaaaatggggctaggatccccactttctataaggcaagctccaagactatctggcagcccaaagctggcatgcagagctgaggcaggccccacaggtgagctgagccacgctggggattttaacagaaaataatcctccatccacctctgcatcgtccatattctctctctctctctctcacacgcacatacacagacacacacacacacacacacacacacacacatatgaaaaataaaaaaaatcttgcaattattcaaaagaaactatggttgatttgttgatcagaaaaatatcaatgaatgaccaattgcaacaaggtccaaggtcctttaatgaaagtttctaattaaccctacctttgaacacttctattactctatctgtagagtaattgttattttagcgatgcaatgtttcctaataagaccaagcattgggagaaagggaggaagggagggacctgaaacccaaacccagccccaggtacaagctagcacaattagcagccagtgtactggcttctcgaatgctgatatggaatagctcaggaaactcaatcccaccagggacctgcttactgtccacagatgtcatcacagtcatcggtcaagctgagagaggctagcgcaaacaggcgatggggccgctctatctctcctcctccatcaaatcacaaaatgccatgacaacacccaagccagggcctctgaggacacatgaaaggaaatccaacttcatgcaacagggactcaaggtatggcccttttcggccaaaaggcagtgtgggctggagagagagataaacacaagaggctggaaacacagacagggtgagtgggaaagcttagaaggcacttagcaggtaaggctggcatcgggagggagctggctggaccctaatccctgaaacctctctccctgaaacctctcttcaaagagatctacactttctaaatcctgcctccatgagatgaaacttctgttcggtgtcccactcttacagcccctgattcccccagggcctagctaaggaggcccttggaccaccagtgaaactaaacagagtcactgcctatgaagtcccttcagtctggagctgtctgaggaaacagataagccatccaggccaaagaccagcctttcaccatctgaggggctattagatgcccagcaaatatggg

SEQ ID NO: 1187 - DNA, 4060 bp, Homo sapiens
ccagtgattcttgtgcctcagcctcccaagtagctgggactacagatgtgcacaaccatgcctggctaatttttgtatttttggtagagacagggtttcaccatgtgggccgggctggtctcgaactgtcagaactgtcaggggattctgtcagaaccaggggattctggagtcagaatgcctgccatcttctcctatagctctgtgtctacacacaagttacttagcccctctgtgcctattaagggctgatttatgttccccaccaaaaattcacattgaagtcctaatgcccagtacctcagaatgggatgtattcagagacagggtattcaaagatgtgataaaattaaaatgaggtcattagggtgggtcctaatgcaatatgactggtgtccttagaagaagaggaaattaggacacagacatatacaggagggagatgatacatacacagggagaagaaggcagtcttccacaaggcaatgagagagtcctggaaccgatccttccttcacaacccagagaaggaaccagccctgccaacaccttgatctcagacttctggcctctagaactgtaagaaaattaatttctgttgtgtaagccacctggcctgtagtactttgtcacagcaggcctagcaaactaatacagtgcctccctttcctcatcaagaaaatagaaatgataatagtcccttcctcacagagatgtgttgagtacccagttcccagcactcagtaggtgtccagcaaatgtttcttgcactacttgtgattagtacagagtcttaacccaacctggtctctgcatgcttcatcttactcttctgtgtgagaaaagaggcttataatgaaagcagagaacagtaaattctgcagacaagtcacacacttcacaatccccaccaccctccccgaccacttcgccccaagcaccttaaggttgaatggtttgagtcccaaatctgcacttgcataaggtttcttttgctctagccatgtactttgctgactgttgtaggacccgcctgcccatcctgtgttctctccacccaataccttcaaaggccacaataggaaccccgctactccttggtttatcaatattagacaacttaggatgcagttagagatccacacgccatccaagtccccacattacagaaattagaagcctctccttccagtttattggagaaggaggatttctggtcaagacgtccaccttcaagatgaggtgaagagcagacaccactctggacagtttgcctggccacctaaggaaaacacagcgtttagagggcagcgccagaactgtgtctcctcaagaaatttgtcttgagaagggtccctgaatataacggttgccagaggggactccttggggcctagagcaagcttactgggggtcctggaagagttctcagaggtgtgtgaactcactggcagctgactgagaaactgggagtggcacaaagacctttagaaaccaataaggacttcagaggtatcacccacaagcccagaagtgtggccaaactgaataccccagctctctgctgcctcagcaaggagccagggattcagtgatggtgtcttcttccaaacctgtatggcatggtaattaaaatcaaggtcatttagaacccagaaaccaaagccattctgactctagagggaattttaatttgttaatggatcttccggctgatggctgggggaaaagatagcaattcacaatgggtttgaggccaaaaatggcaccacagtggccgggaagccgctgatagctcctcggtcagtcttcaactgcagcaaggaacaggctgggctacccagggatacagatttttttttttaactttttaatcagctaatagcagatgaagacctaacaatgctgccaagattctgctccttctgtcagcagtggtgagaaggaggccagggtcggatgcgtccggctgcctttgctctctgaggttcttttggagggatgtaggaatttggggctgaggaggaaaccccagggccatcttctccactggtcaccaactgcaaggatccaggaaagggaaacaggtggaattctcagttccctatgccaatcctgggggagggcctgagacatgtactgtattaatttaccccacaaatgattatgggctgcttaaacggtgccacagatgtaatggagactcagcaaactgaggaggtgaggcccggaaacgtgtcactaaagctgcttactgtgtgccgcaaagggaagactccgggtggcctcagacagagggagggtagggcagcagaagagcttcatccagaaatgtaaaccaaaggcccggcaccctaccttgaacacccagtgctgccggaagatcctgtccccacatgagggctctgggcaggggatctcctcctaaccagcgccagcgaccacaaagggtgctcttcagtggagaagaaaaagaagaatctaattcctgacttttatttttagctgcaagtcagacagaagagcagaaagaaggcacttgaccataatcctgatcatactgaacgagtaatttaatcatttttaaagcctgtgtgcaggctccgccatcttactggggtctaacttgggaaactctcacctcatttcaagcaaccagggtttctctacaagagccatcaaaaactacttctttagaagcacaatttctaggcatttgttttgtccaaaaacttggattctcttactttgttccttgagctaaatcaagcacaactatgccagctgaggcagtgaggagaaaaccggggtggggaatgaagcaggcaagagggcctcctgccctcagagaggcagcccggctcatccaatggatagacgcacaccatacacacaccacacaacacacatgtaacacaacacacactacacactgcacaccacatacataacacaactcatactacacacacaacacatatacaacacacaatacacaccagacatgttacataactcacactacacaccacacacataacaactcacactacacacacaccacacacaacacacaatacacaccacacatgcaacacacactacacaacacacattacacacataacacaactcacactacacacacaacgcacatacaacacacaatacacaccacacatgtaacacaacacacactacacagtgcacaccacacacaactcacactacacacacaacacaacacatgtaacacaacacacactacttaccacacacaccacataacacacatcacacatacacacaccaagcaccacacacaatgcaactcacactacacacacaccatgcaccacacacgtaacacaatacatgctacacacacacttcacaccatacaccacacaccatacacatacacacagcacacactacacacacaccatacactgcacacactccataccaaataccacaggtcacacacacacaccacacacactatacatatacatacataatacacacccaacacatatagacacatcacacactacacacacacaccacacacactatacacacatacacattatatacacatatcacacatacacacataacacacatacacgcattgtccacacaccatccacgtacataccacacatatacacacacccaacaaatatacacgcagcacacacatactatacacacattatacacaacgcatgtacacactatacacacatcacacatatatacacacacataaacatacaagtggtatacacacactatacacacaccatatatatatacacaccacatacaccatacatacaccacacactacacatcacacacacataatgccacatacacacaccacacacacatacaccacacaccacacacatgacacatattcacatacatgtaccacatacacacatgcaccatacacataccacacacacacaccacataaatacccacacaccacgcattctgcacacactacataccacacatatcacacatatattatata

SEQ ID NO: 1188 - DNA, 4046 bp, Homo sapiens
aaggggacacattataaatcagaaaacaaagatggccccagaaagggactggggagctgagctgtttggcctcccacccctcctgatggccctaaatccaatccacctcccactcctgtgagccctcctccctcctatgccagcctctctcctgctgctctgccctttgcaagcccagcattggtgcttcccgctccctaagccctcttccctctgctgctcggtcagggccactgtccgaaggccttagcacagggatccctctcttcagggtccatgcagctctaaccccaggtcctgagcgggtcagaggcttttggctcctgctgtcacaggctgcaaataaggatttaatgactagcctttttatgaggaagaaaatgtctccagtggactgataatgtcatcgtctgctgctcaggtgcatgtgcccaggtaagcctcacagccagaaccctgctcttatgatgaaagctcagggcacaatcccagtgcagacttggaaaggccagcatgcaaaagaggtcggggcacctccttgtttcttccatgaatgaatgaatgaatggattttctactgacttatatgccataaatattttcttgagtacttcctatgtgttagtcacagcacttgagattggagaggaaaagcagtcaaaaacacagaaataaataagacacgaccctaccctcccagaattcatagtagcacatacttgacaggtgaaaacatttttagaaaaacaaaaacgaaaaccagcaagagaactggcatctgaaggcaggacacctggattccaggaaaagctcttagctgcatgacttgcctcctgccggtcatttgtcttccttgggcctccatcatctgtgccatggagataataccaacttcgtggatcccacaggggttgccatggaaaacatgataaaacacaggaacagaccctctgagaaatgtctgcagtgtaactccttatcataacacgaaacactgaagattctgttggctgataggaataagaattctattttcccacacttgccagtctgactcaagatggcacctagttccttggacaaagatcccaagggtagagaaaggcaatttatcaggccaccatatgtctgtgcttaccaaggaaccttctagatggtgacattttctcatatgctgtggctcacaggggaaagactgcctctatgtctagggatgacaaggttttattccaggagcaaatgaaccccatctgtgtggtagtggctgcctggagcactgtgttaaaaaagatcctgaagttgcatcttggcttggctagaaagaacatcctgatagattatggatgtctgttatgaatatggagttggggagtggcactttgttacttgtgacctaggaagataacatgcccactcaaccacactccttgttgcacacctttctttagagctgtgtcctctggccattcaaaggtgagctgagtattggtcaatgccctgaacacgattccttctgtgtgaattgttaatattaagttcttagagccagcaaagcctaagacatatgcccagcaagaaactgctatttttaggaaattagctggtccttcagacccggttaaatgtgctaggtggtctcagtcatgttctttataaactgagaagaatgcctcacaaatttgggtgtcattagggtctgtggatcccgggcactgccacacaaaatcacccggttcaaataccctgcaggtacatgataccctctgccgttaattctatgccattttgttgaagtctattccacttccttcctttaccacttctcaggacaatgcattctctgagtttattatgagctttatgctctatgaattcttgccatttttctaatatttaccctgcttgcgttttaaaggggacctctctcttagcatgtcaggatgtggcaaagagtctgtactggcttagttgctctgctcacacttttataaaagtctattatgtctgtgttaattcccaacagagctgagctgcagtcaacccctgaactacttattaaaaagaagcactgagcagatgaacgctctgctcatgactgagaggggaagagaacagactgtgtccaagtccatcaacacatcatctgtgcaccaggaatgctccaaacacaaacagccctagtgagtcacaaggatagatgaatgctacggtgattcttacatttgcagtcaggaccacagagtgctggagacaagaggcagcttagaaaccatctagtgactaaagatgcagaaattcaggcccagaacaattaaccggcccacagtgttactccaagccaggtatacttactataaaaaagagtatcacaaaactctacatgtgaggtatttcatttatgtctctttttgctatttcagatggtttcctctcagaactaaaagcacattgtattgcacattgtagatactcaaagtctgttaaataaataaaccaatgaggtaatgtacataaccctgcagaaggatttcagtacaatgctatttataatagcaaaaaagaggaaaaagtaaagagcaaatataaggaaaaggagtgagcatccatataagatatagtcatttaaaatatgtttatagagtcccagtgtcacttggaaatgctgataacgtaatgttaagaagaaaagcagaacactaaatcgcacatattctaggatctcggcattataaagaaaaatgcacagtaatatatttgggggaaaataaaacgaatcatgaacagtagtagatgtttctgttgtgattatgggaggttttatttctgcttctttgcactctgctgttttttgcagataatttacaatgtgcccataggattttcataagcaatgcgagggtattaagaaatagaaaagaatatccacagatattattcagccttgctgggatttggaaagagacagagatcatttctctcttttcacataaagaagctgatgaaacaaagagacagagacactagtgatgaaggcaggcattagctctctggtgtggagggccatccaatgccaggcaaacaacagatgcgggataaaatccactcaaaccacagtgggagggggcaggaggtgtccagtcttcctcttcacaaaggttccatccttaccttatccaaaagatgagcaatacaaggctaggctcagcctttaccagcagagcctccccaaagactctctggcccctgcagccaatgacaataaattaactatcacagtgaggtttttccccttcgtcaggcaatgtgctatacacattgtctcattaaatcctccccatgtctctgaggcaggtcttactgtgcccatctgagggatatagagaccaggactcacacaggtaaacccaggtggccaaggtgtcacagtttgtaaccggaccccagaagcctaagccctcgcccctgtgccccggctggtcattcgttcctccagatctttgcagcactaagaagatgctgcctggtgacatttcctgaattgtttcccacgggtcttgtctttcaggctaggacaagttgtttaacctttcacgtgcgtctgtctctcttgcttccctcaattggactgttagctcctgagggggatgagggggtcctgctttataattccttgtgtgtcccacggagccaagcctggtgatgtcttcagtacttgacacttcagatctcagaaaatacctgctcatcgattattggattgaataggttaaggaggagaaccgtctcatgggcagacctggcctgcagccaagacagaagctggatgcgcctccctccggactcttgaccccaccaaatacgacgcccatatatgtcaactgtggcattggtgtttgtcccccacacccctaaaccacaagccaataaattgcagggcactcagacatcaggatgtgtccttcacttgccaccagacctgagctggctacaggccaatgacagcatagggctggccctgcccgcctcccatctggcagcaaggatcc

SEQ ID NO: 1189 - DNA, 4044 bp, Homo sapiens
caggattaagttccccttctggaactattcatggttccagctcactcacccagactcacaggtctctgcaaggcttcacttcatcatccagtgctctagtgcaagatccgagagtagcattctatgggcaatgaggtgcacagcagaggagcccaagagaattgaccctccctatttacaggcaaacactgactgcattcatggatgcaaaacacgaaaacctcccaccagaccttgaaaacattcttaactataaaaggtagagaatgcagcactcaaaataaataaatttgaaaaaaaaaaggactgggtgggaaagtgccattatcatcatggccaagagcacaggctctgctgtgaaactggctggacctgagtcctggcccccagtcagtacccagatgaggctgagtagggctcaaccctctggacatgcgtttccccaatctatataatgaggacaaacaaagcacatgccccttggagttgttctgaggtaatgcacacaaagtgcttagcacagtgcacagaggacagtctgtgctcagtaaacaactcgtgtgatattgtgataattgaacttggagaaaccatctattctatgtctgcagtaaaagtcaagagaacttatttctgaaacaagatgtgttatgaagggcacatttagaaagcactctcaaaatgaagaggaaaaaaatacagaagcagaaatactgtgaggtctaagacagattatacaaaaagatgacagatatagaggacaggcagccaattcagaataaacctaactgaaaagacgaaaacaaaaaaaagtttcttaacacagaagacagacccaagtctgaaagtcaaaatgctcagtaggcatgtatatatatatatatatatacacacacacacatacacacacacacacacacacatatatatatacacatacatacatatattttaatttcatggtgaagaattatcagcatccaaacagaagatatcagattatctatgaaaaaaaaagagaaaaatcaagctgatatctgatgtctcctctgcaaaacccaacagcagggccaagttgtcattcatattaaaagaaacaaagtgcaaagtgcgataaagcagaatacgttgttcaagaagattaaacaggtgttaaatttttcatatttgtaattaagacattaatcaaaacaaggaattcaacaacaggagatgtccatggtaataaagatctggcaatgaaccctaagatctattaggtttaaataattgttacaactgtgattacaaatcaaaatgaaaatgaaaactaaaatttattggaagagaagataaaatgtgaaaaatataataataataagtagaagttttaaatatcagattataccataaaagcatgagtgtaatattatggaatgggggaatgaaaagaagaaaaattatttatcttacgtggcaaggagtaagaggctatttcactctatacattaaccattggcaaaatatggttgaacaatagttttaaatacttgagaggcagcatgggtagacattccaatttaataaagaaaagtataaaataaaaaatttaaatatctattacagatagacaaaaaagactgcaaaaagcattttttaaaaaacagaaaggccaaaacatattagttattacaatcaaaatgtgtggtacacattatatatagtattaactatatgcaataatatataataaataaatatataaaattatacactgtttataagaaatataccctaaaccaagtgacaaaataaggttaaaagtaaaagaataaaccagaatatgccaggcaaaaatcaagtgaggctcacacctgtaatcccactgctttgggaggccgaggtggcaggatcacttgaggccaggagtttgaaaccagccagggcaatatagtgagacaccatctctaccaaactgtaaaaagcaagctaaggagtgatgccaagttaaaggcaatggtatccaagcaagtgaaattcaaggcaaaagacattaaataaggcaacacaggaggtttcacattgatggagataatccaaagtgagtatctaaaagtcaatgacttttaggcacaaaggaagcctcacaacacaaaacatcaaattgtcaaaaataagaggagacaagtgacagaaacccagtagcagtagaggagtttactgaagtactattgctctctcatatattaagttgtccaaaactaaacataattatgggtgattagaaggctggaatttctgcgttaactggtcaactggagagaactggtagaaagctcaaccctctggttttggaggttggaaactgagacgggatgatgagtcagtacagcacagactagtgtggtccctgggctttacctcaaatggaaacttattaaaaacacacattctcagacctatcgcagacctgaccgaaatcagaaactctggagtggggccaagccctccaggttgttctaatgcaggctcaaggctaagacccaccaaggcaacaattaagcccataggctctggagggccagggccaaatcctgccccatttcagcattgttgggtgacatcaaacaagttgcttaacctctctatgcctccattatcatcatccataaactgagaagaagaagaatagtgcctcctcttggcatggccctgaggacaagatgagatcatgtggacacaggctcacagtgcctgcacggtgtgagcactcattgatggcttgctttggttcaggaatgcttggcagagctgtgcctccagccccactgctctcctgcctcccaacacccagaggtgttgagggtgaactcctctgcacccaatcctctgtgcatgtgcctgaggaggatggactgtcccctgacaatggatggatgccacctcatggctgatcactgctgcatgaggcagtgtcataaacccctccttgatgctctctggctggagcggccagttgagtgactcatggagcttgtcatctcagggcctccttccctgatgcacacggccctctatccctgccccccagcctgattcctcctccccctggcaagactgcagagctgagcagaggctgacccgatctgggcccctcgtctctgcagaagagagaaagccagcatgcagcggactcctgggcaagttccaggatgctgtcctcaagtaccacgtggccactgctacccatggtggggtgggagcaggggcaggcagaggccttgggccacagaacaaattctctctgtctgtgagcagaccagggtcaggtgtgtcctagttaaatcaaaatgtcctgtggggcaggaaacagtttttccactcataaagatgcagttcaaatttgagatgtgtcagggatttcactgtggctgactgtgtgtcatcatgattagatcatacactcgagcattttagagctgtaagtccctatggaaatcaccctgtgtatccccctcctctgccaggtgagacccatgaaggacagagaggccctaaggcagccccaaggtcacacaacataaaaatctaacagcaagaatggaaaagaaactgccttctaccacattgggttgccatgaaacctaacagctgggggcgcctgggaagagagaaaaagtcacgaagtttcttcctgacactcccactgacaatcgtgattctgacaccagaaatgccttttcttcatagcatttcccttacatggagaaatacacctcttgtcttgcttcattcacagttaaatatgcttaggaagacgaggagacggaggcccgtactcttgagccacccacctctgaatccacctgcctctggatccaccaaaatacctgcccttcctatttgcccgaatgctctcatgtttcagagccctctcctccaggaagccctccctgcaaacttcatcttaccatccccttttccatcctggatactctagagaaatcagagctcagattgaagctgagtcctcagactttcagttgcgtctgatttggaaggaga

SEQ ID NO: 1190 - DNA, 4033 bp, Homo sapiens
caattctcctgcctcagcctcccaaatcactaggtattacaggcatgagtcaccatgtccagccaggaagcttctttaaattgttgcattttatcttttaaaatatgtatgcatattttattcctcctcatgacaaatgtgattgaatacaaaataatattcattcccaaaccttcaagaagaactggttctccaggaaaatgtgccatgattatactgcagcttctagcattccctgtgaggctctgggctgtgcacctctaatgctggaaagtccaaatccaggagactcgggtctcctgagattccttggccatctgttcattcatgccatccactcactgattcagggcccagaggagcaccagggttaacggctggcggctgagtcagcagctctcaaggcaatcaccttttccacctactcatgaatcactaacctgctgcccccttgctacgtgcctggaaatgcataaatgtgcttaaaataagtggtacctgggtagcaagtttctcaccagcaggaaccagtccaagtgagtacagggcaaatagcagtgcggggtgaaaataaagactgactaccactggcaacccttggtcactcttcatttattcatccaacattgctgaatatttgccctgtgcaaggctccatgccctggcaatggggggcacttgaaggcaaataagagctttacaaggctctaggagatgtcactagtattccaaaaaccctaacagaagatacaaaagattagtgccattagagaggaaatggggtagaagctttggttggggggaagctcattagttagaggagagagatgttacttctaacttagaacatcaaaaacagaagcttcctggctttagccccaggccatgaagaatgagtggaatttcaggatacacagacaagaaagcagaaaagataaaatgaactcccacataaggcaggagataggggtgactagttatgtgggttgcagcccaggaacacagggaggaatgatggagatctttgagcaccaagaagagaagtttggactttttgttttcctttggttaatgaggagccatgaaagagtatttgtggaggaaagtgaagtaattagctaacatttagaaagtttaagtgggtagtaagatgtatgactaatcagaaatgacagagtcacgagaccagctggaagagtactgcaagagtccaagcaagcagcaatggaagcctgaactagaaaagagacagcagcagtggagaagagttgagccacgaggatttggcaactgactagagaaggcaccaggagaagcaagtccctgaaaaccatgctgcttgggaaagaccaactctttctctcatttcctcttagggaattgtaaaaggaattccctatcaccatttaaatttggttaaattcaccaaagagtgatggggtgaatcactctttggtgactaacccctctggctcttgtgtagagctaattagagtttcttctggaagatctgaaaccaccaacagtgagactcctcagatgaccctgatgggcaggtccatgattcaatctgtttcttccagcatctccccactggctgcagcacatctaggggttcaacctaagggagcccccctactctgggtatggttagagctcctttcaagatcattctaatatcaaaagagggaatcttcaaggagccttgttggcttcttatacttagagagaaaccaagaacacagtcagagttgatgtttttaaataccaaatctgtatgcatctatcagagagacagagagagaaagagagagagagagttagagagagacagagttttgaaacatggagagagggaaagagagatgttcctagagagagagagagagagagagagagtgtgtgtgtgtgtgtgtgtgtgttagagagggagagagacagagagggagagagagagagagagagagagctttgaaatatgaagagagagagggaaagagagatgttccgagagagagagagagagagtgtgtgtgtgtgtgtttgttagagagggagagagagagagagagagagctttgaaatatgaagaaagagagagaaagatgttccgagagagagagaaagagagagagagagagagtgtgtgtgtgtgtgtgtgtgtgtgtgtgtgttagagagggagagagagagagctttgaaatatgaagagagagagtaaaagacagatgttcctatgaagccctcagctcctaaccctctctctggctcagtgtttgaagcccctccagccgcccatggcaaaacttccttccagaggagcaggccatgcatcccagacccatgtgtatgctgtcccctaagaatgagagcagtgctctgtttcccaaatgggcaggggaagcaaacttttgtttccatagtctataaaacatttttaaatttaaaaacaaatgctttgcagcctctgaattattagttttttattaaaaatacaaacagctctatggaacaccatgggaaaatgaggactcttgcaacttcgtttggctccctgttaaacagaataatgttcatgaggaagaaggtactgtttgttccttaaaatgttgtattgcgtacaatggagaagagcaacgtggagatgactttccaatgtgttcccttgaaatgacctgaggaccgaatcaggaagctcagtctgaccagctcagcagactacccccactgccccatcccagagctgaacttgcagtcagccctgataaaaatctctggactagaaccagagcaccaatatcaagggattatccatgaactgactgttctttcctgcaggcaggctccacgctcctgggtggccagagtgccaatcagccctgtcccagtgctctaacgaggtgcccattcactgcccaagagacaacatgcccaagctatgacccagctccaagatctgaagggaccagactgccttcctgtttttctctgcatcccctgagctccctcttgaaaagggaaggaaagctaacagaaaagccactttctcacacacttttggtgagatttcatgaaagctgcatgacctttctggaaagcaacttggcaatgtatagagaatcttaaaaaacatgtgcatcctttggcccagcaattctgcttctaggaatctgtcctaaagaaacaagtctgtgatgtaaataaaaatggacatattcagttcttgactgcagtgcaacctgaaacactgaaaaactgaaaataactcagaggaccaacaatagggagatggttaagtaaactgcagtgtatctacttgggaaactaatatgcatcatttaaaagcatagcttcaaagaattattgataaaacaggaagatatttatgtatgcatctaaatgcatagagaaaagagtgacataaaacattcaaatatgaacagcaatcatctctaggatttaactgctgctttcatttttatttgattttattttgagacagggtatcactgtatcacccagccggcaatgcagtggcacgatctcagctcactgaaccgcaaccccctgggctcaagcaatcctcccacctcaacctcctaagtagctgggactacagatacgcatcaccatgcctggctattttttttttttttttgtaatttttgtagagatggggtttcatcatgttacccagggtggtttcaaactcctaggctcaagcagtctgcctgcctcggcctcccaaagttccaggattagaggcgcgagtccccccactcagcctgctttgacttttatgctctttttattgtggcaaaataaatatcacataaaatttaccattggaaccacttttcctttttcttttttttttcttttctttttttttttttttttgtagaggtgctctctccctctctctctctttttttctttttgtaaaggcatgatctcactacgttgcctaggctggtattgaactaagtgtctagttctatagcacgaagtacattcacattgtggtgcaact

SEQ ID NO: 1191 - DNA, 4049 bp, Homo sapiens
cactcccagtgccagcacagagcaccacccgtgcctatctttagaagtttcgcaggctgaaaaatcaatttgcccgcctggcacctgggtctggggcctccccgctaacatcagtggcaggcgaaatgtggcctcccctctgcctgccctgatgcgtcagaccttactcagggtcccgagggcctggcagtgccgcccaacagactcctgtgagctgctgcacccacaggtgtgctggtctgcccctcagagatagccaggcctcaccagaagatgcgggcaaacaccacgccctagaaaatactggcaagggggaagcgaatcactttgcatcctggctgcctgactggcacattccccaggtggtcatctggcacctaatccatgtgtggtcacagcaaactggcttgcccaggtggtacaagttcagcctcttcctccaagcagggaccagaggtaagagaacagcacacaactccacgccttaataaaaaggcccaggaggcagattcccaacgcagtgacaactcccagctggcccccaggcttcccaactactgaaaatggccacatgtgactcccacaagccaaagggaccctgtattactgggtatgcggagagagaaccatctcagacatttcaccatattaataatctctctttcaataaagactcgctgagcacctggcagtggcagggtgggtggaatagggtaagaataagctgaggaacaagagaaaggaaatctctggccctggccctgtactttctccttgcacctgtgggcgctctgtgctcagcctttgagatttccaaatcccctctgaccttctgcctcttcactcacgtctagacaccatttttacagaaaccaggagctactgcctgttttgtttttttttgttttttttccagtaatacagcctagggccctgcccaccccacctccttttctttatgagatacagtgaagtccagctgtcctgcagcagatgaaaacagagagagggctctcacccgctagctctagttgagaaatgagaatgccccagaagagcttaagggctcaaaagccatctctgagaatttgcagaagcacaatcctacatgtttgcttccttaatccaaaaaaggatccaaggtcatgtgtctacaggagccagcctgttacggtgagtgaggggtgctgcattcagcaccgggggatgggggggaaaggagagcgtgcaatggctctgcccaaaccaatcatcaccatgaggggacacaggcacacaaaggtacattttcaatcttttattttttcaaaaacagctagcaatccagatttttatccaaaatctcctttgtaaatataggcaattgatgaaaaaaaaaattaaaaaacaatgaagccacatgggctaaaccaaacacacctgtagactgccagtttgtcccctctcataggtaggatggggtgactgaattctggggagcacgttcagaggtcgctatctttctctgcttctccccagagaggtcttcctaggctgcctctcagacacacagcaccagccagagggcaaggaccaactgataagccaggaagtgtggctcccatcactttgaggagggaatcaggaactctttggaaacccctgctgtacaccttgctggtgccatttcccaaatatttgtggttcacccctcggctttcagtgtctctttccttctctgcctccccacccagggctaactcctctccttcctgaagactctgttcaagcatcagctcctccaaagagctgcccactaagcagtgcccctccctccagcccctgggctgggaggcttcccggcacctggcatatcatgcactctgcatgcccacacacaacttccaggcacttgattgaccctcactagcagggagctcctcaagagaagggctggttctcttccatccctgttatccctgcagccagcgcagatcttggaacacagagcagctccacacagaactgaaccagcaacttctccaggagcaaatgttttctgagcactggcctataccaggtgcatgcgaagggtgcataaggccactgagatgaatttgacatatccaggggcttcagaggatcacagtctcttgggtctgacagatgtttaagaaatccccatcatgtagagtacccacagcccacccccctactccgccccgccacagccaccctcctcccatccttcctgggtcttggccacacttgctcttccttctgcctgcaacatggccctttcctgaaatctgctccaaactccccttaacaaagagctttctctccatgcaccctccatagcactattttttcccattccctgtttcatttgtgcttgtgcacttatggccacctggcttctcctgtttccctatttgtcctgtctgtggtctgtctccactactagacctaacccaatgagggcagggcctgcatctgcttcgttttctgcagtatgcccggtgcagaggacagcgcctgacccatggtaggtgcacagtaaacagtggttacccgaatgaatttaagaatgagaaagtaagatacgttccaaaagctctgcatgctgcaaaggcctctgagcctctatatgctgagaggcagctggacctctgcctcctcctttgcacggtgggcagagcacctgcagaactttccacttctcatgcctcatcatgtgtctgggctccggctccggtgctgcaaagcaggtgaagggccccctgtgcaagtgtaagaggctaaaacgggggtgcctgtgtgagcggctggtgtggggtgggcacctgccggtgtacgggagactgaagggtggagagggcctctcatgcaggcatgtgtgagcagctgcaggtgtgtgagcaaatgtgcatcactggggaacaggtgtctgtggatgagggaggaagtgagggtgagggtgtttgtggacatagggatgtgtgttttttacaaaaaaaaaaaaaacaaaaggtgaggggaagccggcctgcatacatgtgcatgcatgtgaacatgcgtgtgtgaatgtggggaagggcgcattggtgaaaaaggtgctggtgctttttctccctgatgcaaactcaggctggagagactgggactaggcagaccctacccttggcactccaggaagagttcctccctctatgaagagctgcctgacctcattcaaggtgtacagaaagaaagcagtgtcaccggaacccaggcctccaccataaatgggccagaggcaattccacagcagtaaccgggcaggcaaaaccacccctggaaaacacaagctgacacgaaggatgagcctctcaggccccctgggcgtggggtccctggaatccctctgtccctggctcctagtgattttacaccaaggctgaacacatagatttgaggcaccagtgcagtgcaggacatgggcgtgttattaccagctccatggttaatgagcattgcatccactgggagcagccaggctggggatgctaagacctgctgggtggttctgctgagttggggctcatggggcaagaaggccagtttctgccagcccctcccagcagcagtgagacaaggacacagacactgaagggcccgtgttctcagcctctccccctccgactcctgcccatcttcctggtcacatctcctcccaccgtctgccttgcttgctgagtccatgcatttgttcatttccccattcaacaaggaggtatcaagcaccactatttcccaggcacattcctagggtgtagaactgaaaaacacaggtaaagtactgcctccatgcaacagacattgtagttgaggaaacaggcgataagccaaactgataagagaaatataaggtgtgttaagacaaatataagatggtgacaaatgccccagagaaaataataaaatagggaagggaggcaggaagaggggccgttaatcagggtagccaaggaaactctccagcagccagcctcgttccctccccagaggcttcacagctgctgttccac

SEQ ID NO: 1192 - DNA, 4024 bp, Homo sapiens
agcaccagccagagggcaaggaccaactgataagccaggaagtgtggctcccatcactttgaggagggaatcaggaactctttggaaacccctgctgtacaccttgctggtgccatttcccaaatatttgtggttcacccctcggctttcagtgtctctttccttctctgcctccccacccagggctaactcctctccttcctgaagactctgttcaagcatcagctcctccaaagagctgcccactaagcagtgcccctccctccagcccctgggctgggaggcttcccggcacctggcatatcatgcactctgcatgcccacacacaacttccaggcacttgattgaccctcactagcagggagctcctcaagagaagggctggttctcttccatccctgttatccctgcagccagcgcagatcttggaacacagagcagctccacacagaactgaaccagcaacttctccaggagcaaatgttttctgagcactggcctataccaggtgcatgcgaagggtgcataaggccactgagatgaatttgacatatccaggggcttcagaggatcacagtctcttgggtctgacagatgtttaagaaatccccatcatgtagagtacccacagcccacccccctactccgccccgccacagccaccctcctcccatccttcctgggtcttggccacacttgctcttccttctgcctgcaacatggccctttcctgaaatctgctccaaactccccttaacaaagagctttctctccatgcaccctccatagcactattttttcccattccctgtttcatttgtgcttgtgcacttatggccacctggcttctcctgtttccctatttgtcctgtctgtggtctgtctccactactagacctaacccaatgagggcagggcctgcatctgcttcgttttctgcagtatgcccggtgcagaggacagcgcctgacccatggtaggtgcacagtaaacagtggttacccgaatgaatttaagaatgagaaagtaagatacgttccaaaagctctgcatgctgcaaaggcctctgagcctctatatgctgagaggcagctggacctctgcctcctcctttgcacggtgggcagagcacctgcagaactttccacttctcatgcctcatcatgtgtctgggctccggctccggtgctgcaaagcaggtgaagggccccctgtgcaagtgtaagaggctaaaacgggggtgcctgtgtgagcggctggtgtggggtgggcacctgccggtgtacgggagactgaagggtggagagggcctctcatgcaggcatgtgtgagcagctgcaggtgtgtgagcaaatgtgcatcactggggaacaggtgtctgtggatgagggaggaagtgagggtgagggtgtttgtggacatagggatgtgtgttttttacaaaaaaaaaaaaaacaaaaggtgaggggaagccggcctgcatacatgtgcatgcatgtgaacatgcgtgtgtgaatgtggggaagggcgcattggtgaaaaaggtgctggtgctttttctccctgatgcaaactcaggctggagagactgggactaggcagaccctacccttggcactccaggaagagttcctccctctatgaagagctgcctgacctcattcaaggtgtacagaaagaaagcagtgtcaccggaacccaggcctccaccataaatgggccagaggcaattccacagcagtaaccgggcaggcaaaaccacccctggaaaacacaagctgacacgaaggatgagcctctcaggccccctgggcgtggggtccctggaatccctctgtccctggctcctagtgattttacaccaaggctgaacacatagatttgaggcaccagtgcagtgcaggacatgggcgtgttattaccagctccatggttaatgagcattgcatccactgggagcagccaggctggggatgctaagacctgctgggtggttctgctgagttggggctcatggggcaagaaggccagtttctgccagcccctcccagcagcagtgagacaaggacacagacactgaagggcccgtgttctcagcctctccccctccgactcctgcccatcttcctggtcacatctcctcccaccgtctgccttgcttgctgagtccatgcatttgttcatttccccattcaacaaggaggtatcaagcaccactatttcccaggcacattcctagggtgtagaactgaaaaacacaggtaaagtactgcctccatgcaacagacattgtagttgaggaaacaggcgataagccaaactgataagagaaatataaggtgtgttaagacaaatataagatggtgacaaatgccccagagaaaataataaaatagggaagggaggcaggaagaggggccgttaatcagggtagccaaggaaactctccagcagccagcctcgttccctccccagaggcttcacagctgctgttccacacacctgaagtactgttccctcaaagatcccccatagtttccttttccaggcaagttgatcttgttccactcattggccacttccttagaaagaccctccctggccaactacataaaacaggttccccattgcactcacatcactatccccttagcctgtttcatattctaaaaccagttctcattatctgaagttagtttattatttatttactatgtttctgcctcccccagtgaaatatgaggtctcaaaggagagaggatgtgtgtcttgctgaccactatatcttcagcacccagaacaggccaacacatggcaggccctgggactgaaatttcatagtccacttcttgttcctttgggttaagcaatgccctcccccagcatccatttaaaaatactctcaggcaagtgatacatgaagtcatgaacactctagtatgaatccgtcacttctctctaggggctgctcagaaatctaggagcacgtgttagtactgagggaaggggacagggccgaaggaagaagcccacaggctgcctgcccaagcacaggactggaagggaggaggcctgggtgtggtgccagctctgtccccagcttctgggtaacctctctaagcatccgtttcttcatgacttagagctgagagggagctcttggtcacctatgctttggggactccagcggggaggaaatgagtcaattaggaggacatgaagttggctgcctcctcactttgccatcaaagacaataggtctatgttctgatccctgcctcagacaaaatggagaaaacccaaagatagtgggaagccgcctgcactgtatgaatgcacgcttggagaagactgtctccctgctgcccagcacccactgtccacgcatggttactattagaaagttaatcatggaaaatgctgaggtctctttccccagccctgcacctctcagctccacactacaatttcatcttccatatagtgttaccagacagtgccattggctccgtccactcacttgtcccaggcctttatgacctttccattcaagccacacaccacgtctgctccacagagctgtaagacacactggcttcagcccgcctggcctgggccagcacgctgacattttccatgagtccacatcagccagtgaaatgctcagaggggattaaggcaaccttctccatcacccccgagttgctttaggaaagagaataacagcactgacccctccattggcagctggtgatatccacacaccatctctatccagagatgaaaggctccttctccatccttgacttgcaaaacagggattatttcccacctcacgctttctgaaatatcaccaaagatgcagctgtgtttgaaggccagcctcataaaaggcgtaggacccacgtgtcagtcaacactccactgagaagataattgattttttttttgttttatgattatttgcgggcactggttctctttccattagcctggataatcgagggaagactgtaaagagta

SEQ ID NO: 1193 - DNA, 4047 bp, Homo sapiens
caagctatattacttggttttgtaccaagctcttatcagattgctttcactagattggtgccctgtgcacatggcaggccctcaagaaatgtttgtaacccttccttgaacatgctctgcactttacccagcttttctgttctcatcacctcttcaacattgtttgtataaaaattatgtattctgcaaggatgagatcagatgccacctcccctaattaggtttacatgcttcatgattcccagacgaacaacttccctgtcttgtttttggatttctcaggcatctaaaaacaggtcctcaccaccttcagttatacccatccatataggtatactatatgctcctatcagaccacagctccttgaagacaaatactgagattcatgcattgttatttggggccaaggctctagcgacagaacaattaaaaagcagtgctatttctgtaggggagcactccaaaactcctttccaaaacctttttctcataagcccatgagccagaatggctttccagaacctcatttttatcaaaaatagaaaccaatctgaccacgcacactttatatcagagtgaaatggaacatcccaaacttttatcaacatgcattttctgttcccggtatataataaagggtcccaatgtttatctaacatttttctgaaatcagtatgtaacactctccacttctgaatctgatggggcaccagtcagtttcatagtcatcactggagagactctgtgccagattttgtcttcagttgtaacacaggatcacatggtcactctactgagctattcccacccacactcttggttctagggatgatgaagggaaaaacaaaatggttctagcacctggatgcagaccgttgcatgttcgacgtccttttcttgtgctccatatgaaacatgtcccagatccttcacgagcaaccctccactgttcagtttcataggagcgcagaaaacaagtccagtttcaagtaggtagtaatttctgtttcatttcatgaacaaaatagagatgcagcaataaattacatgatttgagccctcattagtagacagtaaatgtcactgtttattaaaaagctaataatccattcaattttttaaattaagcaataagactctaatataataaatttgaataattaagcctaatattaatggagtgaaaacatgagggaagaaagaagttctaaaatctttatttttccctccacataaaacatgttaataatgatcccacaggtgaaagaagtttctatgtgcataccagtggagtacttatttgtcaaagcaagaactcacacgtatgcttagatggctggaaatctctagggaagtacagagaactctcctaactcagccctcactattgactcctagctctatttttacctgatctgtttttattgctggactccactctctttccattacatacagcctaagaattttctactccagctagaaagagctctgactaggacacaagtttacaaccaggatggttggtctgtacgtgctgtcttctccctgctcaataaaaggagagcatccttgtgttagaaatagcttggtatctgcggccataccaccctggacacacctgatcttgtctgatcttggcagctaagcagggtctggcccagttaatacttggatggaagaaacaactttgcacaacagttctaaacaaagcacagtttgaacttattcttcctgccacacagccttcccaccacgtgaggccgtagcatcatctctgcttggaaactctacaccaagattgcaccatcacgccctgaagaaggcaagaagccttttctcaggccactgaatataggcttatgtaaacaggcagtataactcagtaggcggagatgaaacatttgcacttctctccaagcattataatgagaaagcaaaactctttatacaagctaaacccttttctacattcttaagtgtccaaacaaacttttccccagcagcctgcacttctatggctttgcattattgggataagccaagagggagggaacaggagcctttcctcctaagctcagagagatcaaagaaaacaaagctagagagtgtgagggattctgcttggtgagcatttctcagcagagtggactttctgtgtctgggctgcgggcccctgagtgtccggtgctctgaggacaccttcagtggaatctgtggaaggtacacatcagatctgctcccagtaataatgccctgctttgcagaggctgttttgctttcccaggtgctttcatgtcttttattgatcaacaagcaaacacttactgagcgcctatcagatgcagggccccaggtggagttatctcaccgacagatcatctcacggccccagtcttcagatatatgtgccactctgaaaagaaaataaggcccagatctgccttcaagatgtttatagtttatttggagacataagcagagtcccacagaaagagaaataatactgcaaagcactctattttaagttagtcttcctcaaactttgatcataatcacaaccacattaggagcttattaaaagtcaaaggggcctggatcacatctttggagattctaattccatgggaatgaagcctgggtccctgtatttttaacaagcagccacaaagattaaaaatttaaaacctaagacagtgcctaagtggcaaatgagacagtcactcctgttggccgaggtcaaaggactccagcaaggtcagacataaaagagacctgcaagggcagacaggaggctgagagcagaaaggcagaaaggggcaaggtaggaagttaggagggagagggggatagggtcccaagaacaagtgcaatattcatgtaggggacagaatgcagaaaattctggatgtaggagaaggctgccctagaggattgagagatcaagacagacaggtaggtctggagtccagggccgtgggactgcagtctgggccctgatattttatcatatcaaagtaaggaggatcatgaatgacaggtgtttactttagcctggaggcaaagggtgcctcaggaatggcagggccatgagagcagagaattttagacagaggtcccgtgctaggcctggattgaaaccatcaggaagaccggaagctgggcccaaggttctagtaagatattttaatatcctgttctaccctcaccacagatcaacgaactcagcaagatagataatattatcttctttctgtagagagaaaactggagcacaaagtggccaaacagcaagaggaaacctggggaagccagaacagccatgtggctggcgctcatctttgacaaatcaatccactgcatttcaagcctattcaacatacatttattgagtgcctactaccagcaagaaacaagaagcagcaagataaacggagtgccgttcctgccctcagggagctcacctcccaggggaggagctggcaaacattttctgtgaagaaccggatagtgaatacttcagactgtgcaggccagttagtctctgtagcaaatgctcacctctgacatagcacaaaagtggccatgcacaatacacgaacaaatgagcatatctgtgttccaataaaactttatttacaaaacatgcagtgggccggattcgacctgtaatgtaccaatccctaatctagtgggtaaaacaaaccccttcatggctacttataaaacaagagaggtgtgttataaataaaacgactttgcagcccaaaggaaagatagagtaatttagtctggccatggatgactggggaggcagcactggagtaggacaagtacttagttttctaggtctcagttaaaacgatggggctgaatcagaagcacatggacggcccttcttgttcccgtgttctctgacttggatgtggtgctcctttcctgcccagagtcttccaactgcacaaacaacgtggcctctcccaagctccctgggcctctcctcacctctaccatcaagttttgaatgtcaattaaggaataaaaat

SEQ ID NO: 1194 - DNA, 4044 bp, Homo sapiens
tatggacagcagaagccctcagtgtgggactcgggagccccttcagcagtccaggtgttctccaaatctatttcaatctcctgggtgcagtgctacatttcccaggatcccttgcagttaaaataccatgtgatcaagttctggccaatgaactgtgtgggtagacgtgatgtgaatgacttccataactacccctacaaaactacccctcatgatccttacttctcatcccctatcatccggacagatgcagagggtccagcagagaccttcaggggcccctagaagatttcaggtccacaagtgaaaggagccggggtctttaatgactgtctgaagtgtgtcttcactgcaccctccacacacaccatcaatggtactttgtatgagcaatacgtaaacttctgctgtattaagtcattgacatgttgacctcttgttacagaggtggcctagctgactaatacacagtttatcaaacctcaagatggactcacaggtccctgttgcctcaatgattccatcgccactgcacacaccagagtctagataccataaatatggtccaggagagaaaccagcagcgtggtgtggtaactggcaactggccaggtatggtaagcataaggtaaagcctgcagcaactcaagaaatgcagagggaagactactcgtctagaagaaacaggatggcccagcagcaatattacctgtgctcatagctactggttcttcaggagaacaggaaagagcatggtctcaaaggccaagcatatcagaggccatatctgcctgggatctacccagaaaagtgactgaactgctctgggcttcagtttccacaactgccaatcatggataacaataccctatgttctgtgacatcacactggtatcttcaaaccagccagggcaggaatatttataccataggaattgacgaacaccgtacatagggactttcttctctagaaatcccgttgttaatcacttaccagcacatccctggataaacaggagtcagctaagtggaaggggagaaggaggacaagaaaagagaagtccggcagtgtgaacagcatgtgtgaaggcccagaggtaaaaatcaaaaggtttaacgaaatgaaggaagtcctaagtggctgggtgtggagagcttgggaagatgttaagaggaacctagaaagagggcaggagctggaccttgtgaaaggacttcactaaatagtaattatttgttccagtcatccatggctatgtaacaaattaccccaaaatgtagtggcttaaaacaatcatttcattttgtttatgacttttaagtaaggaattcatagagggatcagctggtgggttcatctccaatctatgtcaactggggttggaggatccacttccatgatggcatcttcacacatatgcgtggtgccccagtagtgtctctctgtctgtctgtctctctctctctctctctctctctctctctcgtatgcccacgcacatgcttcctctcactctcgctcttccccctgtagtggccaacttccctaagaagtagcattcccagataacaaatgaactgccagggttcttccaacatagcctcagaagtcacatagcatcatttccaccacaatccatgggttacaagcaacccatggattacaggggctagctctgccccaaagggtacaacccaagaggatgaacgtgaggagtcgtggttcactgagggcctgctttgatgaccagccaccacattgagcgacccctggtcactgccctctaggaccacctgccaggcacagatccagaaagaaaccaggaccagccctgtccacaaggagctgtctgcagaggagacaggatgcctgtatagaaaatagggctgcagcatcagacggctgctccccacccaggatggaaggacaaacagagaggacgcatcagggaagggagaggcagagaaagctgactagggtaggtagagaaggcttcccaggaaggcggcattcccagcaagatgagctaagacttggaggatggaggaggtggagggttggaagggaaggagtaggccatcactggggccacccccagccttctatcacatttggatcactatggaccacgccaggtcatctccgcttttcccagcagggatgttgatcagacctgggcactctgcagtgatgatcagcagctcaagagcaagggtggctcctgaccgtgaggggtcagcaccaggcccacaagcctgtctgttgcaccagtgcccaggaggggctgtcgactgcagaactgttttctctggctcgacctcacccagaaccagcggcagaaaggccagttatgcaaccatcctcaccacagcctgccagcctcagaggctgggcctggccgccgggcctggccgccaggcctggtaaggagactgctgtggcctgcacagcacaaggccatcctgggccccaactgccactttccatgcaggtgcaagacgctctgctgacaaatacctggggaaagcaggagctgtgggagggaggtaaaaatagcacagttggcaacagagaaggcttttctaagtcctcagggtcctattagtccttgtccatgggatacacatgagctggcactgagcattctctcttctccaaggctcatgcttagaacaggcacagaggcctgggaggcctcttgtatcatgtcaggagctgcacagtgatcagaagttagggagagcgcctgttgcagaggctggatttggaggatatgctggggctgccgtcataaccccacatccccagtgggttctctctggccactccctctacggccagttctgttttctccccatttttggaaacccaaattcttgatgtttctgttattcacattgccattaagaattatgggctttgcactgtgtttttaatttgttgtgtaagggttttacacaaacacagctagatgcctagaaaagacaatgtatatgggcatgcaggctgtgcactgcacaactccagagggcttcattcatgaccaggatgtgagtggcgccctggaatcatgcaatgtggttaccggtattgccagagaggaaatgatgtcttacatgaccccatatccccgggaaaaggccagccatgctaataaagatttgctaactaaccaatttgtctcctgcttccaaatattccatgcacggggtttggcaggcacacggccacaatgcgcaatggcctagaaagagagccatattgaaatataataatgtatttccaggccacggaggtggagaggcacaaggaattgatctttctaaggcaaggaagattcataaccactgaatgagttaaccactaccttcttctgagtgtgcagattaaattctctgtcgcaccaacatccaagtgcgctaaattttaacagacctggaatttggatatatttatttctctttcacagaattcccattcttttactaacacagtttcagagtttgagatatgagcatatctcatgtgggataataaggcatcattccacaccaggttgcacaggcccatggtttaatgatgagacttcgctggtgggtgcaaactttgctggtcccccatgctctcttgaatctgtgtgcatctcacacatacgtacatgtacacacacacacacacacacacacccctctctcaagtttttaaaaacctacttaaattctgcatcctacctccaatatactctgtgtacagtgtaagtgttaataccaaaaatagtgtttttctgctgggcacagtggctcacgcctgtaattccagcactttgggggccgaggcaggtggaccacttgagctcaagagttagagaccagcctgggcaacatggcgaaactccatctccaccaaaaatacaaaaaattagccaggcatgatggtgcatgcctgtagtcacatgcctgcaagtcccagctactcaggaggctgaggtgggagattgcttgagcccaggaggtggaggttttagagaaaaatagtgtttttct

SEQ ID NO: 1195 - DNA, 4040 bp, Homo sapiens
tcttccaacatagcctcagaagtcacatagcatcatttccaccacaatccatgggttacaagcaacccatggattacaggggctagctctgccccaaagggtacaacccaagaggatgaacgtgaggagtcgtggttcactgagggcctgctttgatgaccagccaccacattgagcgacccctggtcactgccctctaggaccacctgccaggcacagatccagaaagaaaccaggaccagccctgtccacaaggagctgtctgcagaggagacaggatgcctgtatagaaaatagggctgcagcatcagacggctgctccccacccaggatggaaggacaaacagagaggacgcatcagggaagggagaggcagagaaagctgactagggtaggtagagaaggcttcccaggaaggcggcattcccagcaagatgagctaagacttggaggatggaggaggtggagggttggaagggaaggagtaggccatcactggggccacccccagccttctatcacatttggatcactatggaccacgccaggtcatctccgcttttcccagcagggatgttgatcagacctgggcactctgcagtgatgatcagcagctcaagagcaagggtggctcctgaccgtgaggggtcagcaccaggcccacaagcctgtctgttgcaccagtgcccaggaggggctgtcgactgcagaactgttttctctggctcgacctcacccagaaccagcggcagaaaggccagttatgcaaccatcctcaccacagcctgccagcctcagaggctgggcctggccgccgggcctggccgccaggcctggtaaggagactgctgtggcctgcacagcacaaggccatcctgggccccaactgccactttccatgcaggtgcaagacgctctgctgacaaatacctggggaaagcaggagctgtgggagggaggtaaaaatagcacagttggcaacagagaaggcttttctaagtcctcagggtcctattagtccttgtccatgggatacacatgagctggcactgagcattctctcttctccaaggctcatgcttagaacaggcacagaggcctgggaggcctcttgtatcatgtcaggagctgcacagtgatcagaagttagggagagcgcctgttgcagaggctggatttggaggatatgctggggctgccgtcataaccccacatccccagtgggttctctctggccactccctctacggccagttctgttttctccccatttttggaaacccaaattcttgatgtttctgttattcacattgccattaagaattatgggctttgcactgtgtttttaatttgttgtgtaagggttttacacaaacacagctagatgcctagaaaagacaatgtatatgggcatgcaggctgtgcactgcacaactccagagggcttcattcatgaccaggatgtgagtggcgccctggaatcatgcaatgtggttaccggtattgccagagaggaaatgatgtcttacatgaccccatatccccgggaaaaggccagccatgctaataaagatttgctaactaaccaatttgtctcctgcttccaaatattccatgcacggggtttggcaggcacacggccacaatgcgcaatggcctagaaagagagccatattgaaatataataatgtatttccaggccacggaggtggagaggcacaaggaattgatctttctaaggcaaggaagattcataaccactgaatgagttaaccactaccttcttctgagtgtgcagattaaattctctgtcgcaccaacatccaagtgcgctaaattttaacagacctggaatttggatatatttatttctctttcacagaattcccattcttttactaacacagtttcagagtttgagatatgagcatatctcatgtgggataataaggcatcattccacaccaggttgcacaggcccatggtttaatgatgagacttcgctggtgggtgcaaactttgctggtcccccatgctctcttgaatctgtgtgcatctcacacatacgtacatgtacacacacacacacacacacacacccctctctcaagtttttaaaaacctacttaaattctgcatcctacctccaatatactctgtgtacagtgtaagtgttaataccaaaaatagtgtttttctgctgggcacagtggctcacgcctgtaattccagcactttgggggccgaggcaggtggaccacttgagctcaagagttagagaccagcctgggcaacatggcgaaactccatctccaccaaaaatacaaaaaattagccaggcatgatggtgcatgcctgtagtcacatgcctgcaagtcccagctactcaggaggctgaggtgggagattgcttgagcccaggaggtggaggttttagagaaaaatagtgtttttctccaaaacttcatggaagactgttgacactcagaaaaatgacccaatattgattctgtgcctccacataccccccagcacagagatgtggcacatgtgctgtggttcataaaatacatttatatgtcatctgatgtgaatctcatagcagtcctggagttgtacattgagtaacctgcatgactgtatatagcccactgcctgtcaggtagagaaaaggtgattatcccattttccagcaagaaaaactaagactcagggaatgtaatagaactagacaacatttaaggttccttctcatcctgggaattgacatacctgagaattcagtagtacaaaactctctgaacttgtcaagggacctcacatctctccaggaacaacacaccactcctcttttcagtcctgtctatgtcatcagagtttccctcacactgtggccaggaagagctaaggaggtataaatgaggtgtacagtgtgggattaggtgcatgggatccacagcccacctgcctggatttaaactggctctgctcctcacctgtgtgtgaccctgagcagttactcaacctctctgtgcctcagttttctaatccataagtgaggataataataccaccgaattcactgggttgttgtgaggattatataatacatatagtttaaaaacaaccagacacacagtaatcactcaaagtttgttatccaaaaaaagaaaaacattctcattctctatgcatccattttctaacctgtaaaatgggaatttaaaaggggactacatcacaggattgttttgaggattaaataacagaataaacataaggagcttaaaacaatgcttaatgcatagaagccactcaaacaagtttgttctgattttttttcccctaagaaaatagtaactccaattcccacagaaagacttcccaaaacaaaagtaccaataagtctgaaaataaatgcaagacctgaggaggaatcattgctgttttctaaaaccagtgatagacaggctatcttagagaccggaggttcttgctttacattcattttctgaggtcaggaagtaaaaaggaacatgggtgaacaggcactggtgagatgaggaagaaagaacaggaacatctcagttgctagtttctgttttcaccatgaaaatcattttaaagccctgcctagaatttaaatagcatcatccctggagatagctgttttagtttcattacagtctgtgttcgtagagtacaaatagaaaccttcgtgattttattagtttccatgcaacttaggagagatttgcatgataacatttcatctcctgactttaaaaagggaccaattaaaaatacagcacttgcattgcctgtcacgggaaaatgaaaaggttcacagagttttaaaaacctctgccatatctagtccatggtcataaatcaagtattcagtactacggtggcaatcactattgtctaaatttttagtttattttgtaagaagtacttggaacagctgggtgcagtggctcacacctgtaatcccagcactctgggaggccgaggcaggtggagtacttgagatcagg

SEQ ID NO: 1196 - DNA, 4042 bp, Homo sapiens
aaggcatggccctgtctgatccccagggatgtctccaagggacccagtgttccccacacggcccagggcctggcatcacagcacaaacagccctttcactggaaccacaaaggcgaccttccaggggatctgcagcttggcaaggtggtattggctgctgtgattcacagattagcatggtcactgccagtgtgagccgggacgcccactttgggaaggaggtcctggcattgcaatcgaatgccaatgtaactgtttctgcaccaggcctctcatgccctgatgagagagagagaaagagagagacagccccaaagcaagcacttactcctggctatcagccaccaatgaatgtccccatccagggaacaaaatagctgtgaggcaaagagaaggtccatttggacttaccattggaatgctttatcccccaggccaaacagcagggggcaggcagctcttcttttcctcctgttgtatgtttggtcaagtttcctgggcacctagaagcagggctagcccaaggctcccaaagggaggccataggttctcagtgtcctcctaggaaatgctataaaatggggttggtgaaaaaaaccaccccatgaggctgtgctctatcacagacctcaatttgcaggtgaggaaactgaggcacaaaggcatgacgtctttgcccaggatcacaggctgaaccttgggcactgcacagcacccctgacactgaagcaagactgctcacaggtagcacatttgagggcattttaaccactttctctaccagcaggatgccgccaagcctgtgatgtggccctccaaaggggaagctcagccacgccatgcctgctgattttttttcacaaggtaatttaaaaggcaggtgtgccacagaacacacttggggaaacctggcctagggggtgtcttggaaaagctggtctgggtagacagtgagtgtcctggccaagagaccgtgacatcacttgggagacaggtctatgagttctggacttgggataacagggatggaatttgtccctcctcaagggtacaatgctggacaaccatacctgcccaccaaatgccacagtgtttcccttctgccagcccagcagctcctggtcccccatactgtcgatgttcgtccactgataccccaccatcaaaactgtaaccatcctgccaggaccccatccgtgaagcctacctctgctgccctgccctaactttccagccttgcaacagccaagagccataagcccatgtctcagtctgactctaaatggttttttgatctatgacagtatacttcaggatctaaagcctccttttggctcaaaaactttatttgttatagtctgcgcccttcaggggctataagttcaatgaatcaaagggaaaataaactcagcacttcatgaagctatgatagttaccacttacaagaggcctgctaagtgtctggcatttgcagggtgctatgtgcccattattcctgctccctataagaaccctacaaagtaagcatcagtatgctcttggtataggtgatgtaaccaaagctcaacatggttggcagtcaaagatgccctgctaataaatgtgagatccatgatttgaacttgggtttgcctgattgcagagtcttgtactaaagtgtgcatttccataaagagggccaggggctggacgccgtgcctcacgcctgtaatcccagcactttgggaggccaaggtgggcgaatcacaaggtcaggagatcaagacaatcctggccaatgtggtgaaaccccgtctctacttaaaatacaaaaattagccaggtgtggcagcgtgcgcctgtagtcccagctacttgggaggctgaggcaggagaattgcttgaacccaggaggcgcaggctgcagtgagccaagatcgtgccgctgcactccagcctgggtgacagagcgagactccatctcaaaaaaaaaaattaataaaaggagagagagagagagcaaggaatgaggagcacgagctctctggacaagggcaggtcagctggagctcccccgtgactaggacccaagaactcctccaaggccaccccaagtgatctgctcaaaaaggagtatctcaaggtcatctggtgcagccaatccccaggacaggatgagatgaggcacaagggccaatctggaatcaagagctccacggcactgaagctccagccctgattgactgcgtcaggccagaccctgggtaattaccaagctgtaatgggatctgatatttatattagtcacgagcctgacagagaaaacgtgttgttttctcaggcacagccatggagacaacatctcgataattcattacacgcagaccatccttgatcaagcccaagcttctacaaggccaacagctcaaactgagaatggaaataactctatgcccagccacactcaggcccctcaacaaaccacagctccaacaggaagttggcctcagtttccccagttatttaaagagaagtagaccacatgctggaagacgagcagaagatggaaataaagatatgtaactgtcccaaggctgaattcctaaaggaattgctagggaactgcaaaacacattctgagctagaaactttaaccctcattcctcaactcctccctctctcctatatcgaatcacagagcaggaagggacattagaactcacagaattcaatccccacattttatacacaaggaaagatagacaccagagaggttaaataacttcttcaaagtcatggctttattcaggctaccagagcagctccctattcaatatagtctatgacaggattgaacttcacaacgtcacacccaagtgaatagagagctctgatgaaatcccacaaggaaaaaaacaataatgtgaaaaagtacagcaaagaacacagtactggaatgactgtgaccaagttcccaacaggaggaaattgtaatgttttcttcttcactttctgaaaaagtccacatgccactcttttcaaaagactaaagtcattcactgtttgagattcagaggccaaaggtactaatgaagagatgtcccacgatgcatgtccacagtcttgggttcctttgatcaaaaaggtttggtgcgatcccagagaccaaacgctcatgaaattggagctccttgctgaattttatctcccacagaatttcagacctgctttcctctggactccagctcttgatcaaaccatcttggggctgaaggagggtgagggtgaacccatctgagggctggtagaattttctggaaaggcagcctatgttttcttgggaaatctagcacaaaaattattattctaagcttaagccaaatacatgcctgtgtatcgagtcttgacaaaactaccaaatacttggaaagaaaaaagaaaaaaagacaaacacacacacacacacacacacacacacacacacaattgcaataaaaatacagacctcaagcatagaaagaaaagcttttaaaaggcctaacttaccgttactgcatataatgagctggctacctatggcttaagtgagcaaatctaggggcaggtatcaagagattctaggtgtgctttaaaatggacttacggtatcaaaaggaacctgcactcattctatactggcctcacatcttccaaacaaaccaccatcacctctcatccctggcagatttcttacagcaactcacttccagttatgtccactcagcaggtcttggggctacaaaacatagccaaatatttacgaattgttttttctaatcgttgccaaaaacctattttcttgagtaaactgacagaagttatgcttgctcatcatttaggagatcctttgtgtgtgcgatgggattagcatttcattacagacactgcaattgcatttatgtaccccctaacataaaaagactttggaagctgtgtttaggaccccaggttcacaaaaacaccacaacttattttcaatcatggaaaaagttttcattatgataaaaattgccccctgcctgaa

SEQ ID NO: 1197 - DNA, 4042 bp, Homo sapiens
atttcagaggcacacaactatgagctatctttcccctaaagacagtcgctgaatctcagtaaaccggggaacaaaattcccgagactgttgggggaggtggaggagaaggatggagagagggaatgtgggaatttgaaggctccaggaataagctgttctcagcaggaaggctagtcagggatctggtgtatagggctttgcttaacctgagggcttctctggaaggtgggaggtttgcctccttaacaaataagaagaaacctctacggctgagaaggtaattccaaagaaaactctccgaccagcacctgcaggcctccggagaagccagagaatgacgaagagaatgatggttttcatatttctccctttgttccaatacaccagtattttccaaaacacaaatgtgctgccacaaaacacagctgagctccagcacccaacaggatgtataattaatgatcaggagagacaggctccttcccccctggtgttttcatagccagccttcacccatagccccaggcttccctacttctctcagccgccaaggaggctgctacaagttgctgtgccctgtagaagtttgaggggtcctcggtttaactttactagaaaagatgtgaacatgtggaggctgcaatgtgtatctaccctgcactattcccctggatttcccttccctccaaaacggttcgcgcgtgaagtcccctaggatgggaattactcagaaagaaggcagctggctcactctcttttttccagttctttcttttttattctgcagttttctatcagtgtcgggtcccccactccagccagtggctgtggggaagggaagacatctctagggacacgactacagaccaggcagtgagcctagcaaccatacatcgaaggtgtcgccagcctcagtgccggtgggcgtctgcaccaggaatagctaaagccgacgacatctagccacctcgagcgccagggaagacgctccgcgtaaaaccgcggcctcaggcggactcccgctccagctccgcgctgctggtggcatttccggggacccaaagtgggtggcctgggggcaaaggaacagaggccgaagaacttggggtatgttccactagagcacctaagggacggagtgggaggttacatcagatatgcgacctcgacacattccaaaagtggcagccccgtgggctacccccaatagtgggatggatctccccaacttctctcgcccctcgaagtccccctgttatctcgggccatgctcctcccccgggattcccttgtgcaaaattattctctcccttgcccaaaggatttttcccttctttctgaccccacgaactcatctccccaacaggttcctaaagtatgggcggatgtgctccctctcgcccaccgccaggagccgagccccggcaggtgagcggtgcaaaacacgcacccagctgcccccagcttcctccgtccccgctgagttggctgtccccaccccgcaccacggcacccgagcctgtgagtccccgaccccggccccagccgcagccgccaacaaccctacaataaacaagaggacaggattgagcgtccgcgtcccggagcgcactggctgggggcaactcctcacccccggcgcgccgcccgctgccccgatccgagagcaccgggagagccgagggaagggaaggcggcgaggggaaggcaggcggggatggagggaggcacggcgcggcgcggagcgaggaggtgggctgcaggggacgccgagaagcggtggggctggcgcagagggcgggcgcccggggcgcgcgttaccttcgtcttgcccccgcagtggcagcacacggtccacaggtacttgagcgtccgccagagcaagatgatgaagaggcccccgaagaaagtcaccatggaggaggccaggaaagcccaccacatgcgttggccccggctgtcgcacggcacctccatggtcaccgggatgatgagcgcatccatcttgggctcgtggaccgaggacgaggaggaagaggaggaggaagaagaagaagaggaagaggaggaggaggaggaggaggacgcgtctaggctgagatggttcgcgtggatattgctactcattctaagactgctgcctccgccgccgccgccgccgccgctgctgccgccgccgccgccgccaccatttgccatagctagcaacgggcagccggcgcaggggctcgggggagctcctcccgccgccagcgccaccccaaacacccatcaacagccatattgctgctactgctgccgccgccgccgccgccgcggagcgcgggaggggggcggggaggcgcctgggctcggggcgctgtgcgcgacctggcggggtgcgccgagatatatacagcgagccgccgccgcccgcccgggggggagggggatggagtgcgcgggcagctccccctccccggcccgcgccccgctcgccccgggctgcgctggccccgagcgccgagagccagggggcgccgcgggccgcccgcgcccggggtctgcgccgcccccgggcccgccccggctccgcgcgcggtcccgggtgtcctcggcgccgcgccgcccgccgtgcgccacgggtgtgcgctgcgctcggccggtgacccccttccccgagcgcctcccgcgcggctaacgagccgctctccgcttattaggtggtaactcgttaataatggataatcggccccctccgcccgggcgcccctgcgccagccctcctcccccggctgcgctcggctccggctcgccgcgccagtgcgcgcccggccgcggcaggttcaccgcgtccggccgccggcccgtggccgcctgctagcccatgttctcgggaccccctagtcctgtcgccacgccgctgagcccctcggcctccgctcgctcttcctccttgccgcctccgactcctcctcgtccccgtcctcgccgcccaagcctcttcggcgcgcgccccgcgctccccgcagccgccagcagcagcagctgcagcaactggagcgggcgcggactcaggacgacccaggcgggaggggaggaggctcgccgcgctggctcgcctgggctccgggctgggcaggggtgggcagggcccctcggcagcggcccggcaagcgcccctgacccccagggcgcaaggtagagcgcccccagcccaggcgcggggccaggcgcctctctccaaggtgctgcgcccccagccgagagcggtggggtacactgggaggacggcggggcgccccggtcaggccgtttttttccccaaagagcccccagtggggaggggaggagtggccagctgtcaactggattccacaggctgagctccccaggaccctcgggcttcgggagtgaggaggaccccacgccaggatacacacagctacccacccctacttcgctcttcctgctacctatgtgcccagggtcccgcgtgtggctggagggtagagtcaggaaggccagcgggtggtctgtggcctctgacagcagcaggtggtttctctcctttttccttattagcaacagaggctgcccaacaaagagtaggcagaaatgatcaaggacgacctggcctggggatagtgcaggccccgatagacaatagagttccctgaagggttgctttcctctcatatagtctcagactccatccatcccgtgaggagggcagatgggggaagagggactccagacttcattctggctcaccgttccccatttagggtcttcccttctccccacttaagatgaagaaggagtccgtgtttgttccgtagcgtgtctccgtacaccaccaggggaatcccccttctgacactttcagaaactttgcgccccctgaacagcgtccgtcctcgtgctaccagctggaccccaagtttttccagcgctaattaaatcgaggatgatcacgctcttccctcattgctgcagtggtttccccaaagtttccagctcattagtttaagcctaattggaattctcaggttcctttca

SEQ ID NO: 1198 - DNA, 4048 bp, Homo sapiens
gctcctcccccgggattcccttgtgcaaaattattctctcccttgcccaaaggatttttcccttctttctgaccccacgaactcatctccccaacaggttcctaaagtatgggcggatgtgctccctctcgcccaccgccaggagccgagccccggcaggtgagcggtgcaaaacacgcacccagctgcccccagcttcctccgtccccgctgagttggctgtccccaccccgcaccacggcacccgagcctgtgagtccccgaccccggccccagccgcagccgccaacaaccctacaataaacaagaggacaggattgagcgtccgcgtcccggagcgcactggctgggggcaactcctcacccccggcgcgccgcccgctgccccgatccgagagcaccgggagagccgagggaagggaaggcggcgaggggaaggcaggcggggatggagggaggcacggcgcggcgcggagcgaggaggtgggctgcaggggacgccgagaagcggtggggctggcgcagagggcgggcgcccggggcgcgcgttaccttcgtcttgcccccgcagtggcagcacacggtccacaggtacttgagcgtccgccagagcaagatgatgaagaggcccccgaagaaagtcaccatggaggaggccaggaaagcccaccacatgcgttggccccggctgtcgcacggcacctccatggtcaccgggatgatgagcgcatccatcttgggctcgtggaccgaggacgaggaggaagaggaggaggaagaagaagaagaggaagaggaggaggaggaggaggaggacgcgtctaggctgagatggttcgcgtggatattgctactcattctaagactgctgcctccgccgccgccgccgccgccgctgctgccgccgccgccgccgccaccatttgccatagctagcaacgggcagccggcgcaggggctcgggggagctcctcccgccgccagcgccaccccaaacacccatcaacagccatattgctgctactgctgccgccgccgccgccgccgcggagcgcgggaggggggcggggaggcgcctgggctcggggcgctgtgcgcgacctggcggggtgcgccgagatatatacagcgagccgccgccgcccgcccgggggggagggggatggagtgcgcgggcagctccccctccccggcccgcgccccgctcgccccgggctgcgctggccccgagcgccgagagccagggggcgccgcgggccgcccgcgcccggggtctgcgccgcccccgggcccgccccggctccgcgcgcggtcccgggtgtcctcggcgccgcgccgcccgccgtgcgccacgggtgtgcgctgcgctcggccggtgacccccttccccgagcgcctcccgcgcggctaacgagccgctctccgcttattaggtggtaactcgttaataatggataatcggccccctccgcccgggcgcccctgcgccagccctcctcccccggctgcgctcggctccggctcgccgcgccagtgcgcgcccggccgcggcaggttcaccgcgtccggccgccggcccgtggccgcctgctagcccatgttctcgggaccccctagtcctgtcgccacgccgctgagcccctcggcctccgctcgctcttcctccttgccgcctccgactcctcctcgtccccgtcctcgccgcccaagcctcttcggcgcgcgccccgcgctccccgcagccgccagcagcagcagctgcagcaactggagcgggcgcggactcaggacgacccaggcgggaggggaggaggctcgccgcgctggctcgcctgggctccgggctgggcaggggtgggcagggcccctcggcagcggcccggcaagcgcccctgacccccagggcgcaaggtagagcgcccccagcccaggcgcggggccaggcgcctctctccaaggtgctgcgcccccagccgagagcggtggggtacactgggaggacggcggggcgccccggtcaggccgtttttttccccaaagagcccccagtggggaggggaggagtggccagctgtcaactggattccacaggctgagctccccaggaccctcgggcttcgggagtgaggaggaccccacgccaggatacacacagctacccacccctacttcgctcttcctgctacctatgtgcccagggtcccgcgtgtggctggagggtagagtcaggaaggccagcgggtggtctgtggcctctgacagcagcaggtggtttctctcctttttccttattagcaacagaggctgcccaacaaagagtaggcagaaatgatcaaggacgacctggcctggggatagtgcaggccccgatagacaatagagttccctgaagggttgctttcctctcatatagtctcagactccatccatcccgtgaggagggcagatgggggaagagggactccagacttcattctggctcaccgttccccatttagggtcttcccttctccccacttaagatgaagaaggagtccgtgtttgttccgtagcgtgtctccgtacaccaccaggggaatcccccttctgacactttcagaaactttgcgccccctgaacagcgtccgtcctcgtgctaccagctggaccccaagtttttccagcgctaattaaatcgaggatgatcacgctcttccctcattgctgcagtggtttccccaaagtttccagctcattagtttaagcctaattggaattctcaggttcctttcagctcttcccatggaaaaggcccaagttagcatccttagctttacacctgaggctgtctccgtgagagtcagatcagccctgcccttgtccttggaggtctctggaaggaagagcgagcaagggaggctgagctgggcagagaggctgaagaggatgtttgaagcttctctcttgcttgattcggaatacattcattgggtttagagtacacatccactaagaaagagtcaaggccaaagtcaaaggagaaaatggaatgaggtaagagttcttgagtatttggttctcaaaaagaagtgtatgtaaaagggagctgcagaaagtgtgctccagaaaatggaattgtctgagcctcctctccataccatcccatagtacctccaacctcggcctctgtgttcagccactctgaatgcatccctgccacaccagacccaagcatgcaaaggccctgggccttttctggtactgggttgggggagcgggacccagaagtgctgtggggatgcgcaggaaggtgactatggcattgaggttcctttattagcctctcaatggctgtagtttgctgcttttgtgcctcagcaatgccaagaaagttaaggacattccttaaatcaaggccaagatttgaaatttaaaaataaaacacccagaacataaaaagggcagcaaaggataggactgtctccccagtgggatatgaaacctccagaatggattccctcacccacaaaattgaaattttgcaaaccagcaaatcccctctggggccttcttagacattccctacagcctggattcccctgaaatgccagtctggggtctactggtaagcagccgatggccgtgacttctgtcaccccaactgcaggatctatagctttttctcctccatcatcaccttcatcacctcagcatctttggagagggtgcttggaggcccctcagatgccatctcctgctctcttcatcacccctgcctctgctgattgaagcttttagcaacttctgtgctgtccaaagcctcggcttagtcaggaatcatcagaaactctcagtgttgatgtcaatatcctttccttcctacaatccccagtctctcacctcctccctgaatggcctggctggtaagcactgagagagtgctaccatccaccagaaatagacattcccaggcctttgcccagttctctctggccatttccacattgttcacaaacttttgcaccacttccagaaaacttggcccctggcattacaaatttaggaaaag

SEQ ID NO: 1199 - DNA, 4044 bp, Homo sapiens
cagacactgagaagctcaggagctcaggaagagaggtctaagatggagaaaggtaagaaccatcaacatggtaataatcattagtatcatagttctgatatctagtagctaattagggtactttctgtgtgcctggctttgtgtgcaccttaaatactttatgcacattaactcatttagtcttcatagtaactgtaggaagttattactgttactatccccatcttacctgtgaggaattgtggacacagatgaacttgctcagggtggcacagctcagtaatggcagagctggaatctaaactcaggctgactttagacctgtgcccttcaccattgtgctgtaatgtctcccgtaacatttgaagccttaagaacggataactggctgcgcatggtggctcacgtctgtaatcccagcactttgggaggccgaggcgggcggatcatgaagtcaggagatcaagactatccttgctaacacggtgaaaccccgtctctacttaaaaaaatatataaaaaattagccgggcatggtggtgggtgcctgtagtcccagctactcgagaggctgaggcaggagaatggcgtgaacctgggaggcggagcttgcagtgagacgggattgcgccactgcactccagcctgggcgacagagcgagatccgtctcaaaaagaagaacagataacttcacctgaaagagaatgttgaacaagaaggtgtcaaagatatttgctttttaatttatatcatcctgtattgtatcatttttatgtaataagcattgttcatgtgtcacttgtgtaattaatttttaaaaatatttttatagaaaaagggtagacccaggattagaaagtgcatcagctccatttttctccttggttaagtctgtcatgatctcctacctttgtgtttgtcaacaaagatgattcctgagcttgtaagatggaggcatgagatctcctccaaatactttaagtccgtagagcacataagaggtaataaataactgggccgggcgcggtggctcacgcctgtaatcccagcactttgggaggccaagacgggtgtatcacttgaggtcaggagttcgagaccagcctggccaacatggtgaaaccctgtctctactaaaaatacaaaaattagctgagcatggtgatgtgtgcctgtaatctcagctactcgggaggctgaggcaggagaatcattttaacccacaaggcagaggttgcagtgagtcgagattgcaccactgcactccagcctgggcaacagagtgggactccatctcaaaaaaaaaaaaaaaaaattatagccaatgtgatggtgtgcacctgtagtccctgctactttgggggctgaggcaggaagaacctggctggtcgaggctgcagtgagctgagatggcgccactgcagtcaagcctggggtacaaagtgagaccctgtctcaaaaaaaaaaaaaagaggtaataaataactgattgatttgtgcctcctcccttatacatcggttccttctaatgactccatctcttccaacaatccttgtagcaggcagcatgtcagtagttctgttttgtgtcttcacctagggaaaccatgagcgtaaggcagaaaacctgaccatggggatgccccaggaccacctttccctgtaggaaacagtctagggagaggctgtcagagacaggaaccactgagccgctttgtgcacttctccaggtgtgcgatgactgtgtggtgttgcgtagtaacatcggaacagtgtatgagcgctggtggtacgagaagctcatcaacatgacctactgtcccaagacgaaggtgttgtgcttgtggcgtagaaatggctctgagacccagctcaacaagttctatactaaaaaggtacgcaggatctgtgtttgggttggggctagtaggcattgaagaccaaatagtgaatttctctttgggaagttaaaattccaaaacacacatctggagccacacttctgtctccagctgttgggtggagtacctaaagctgtctctgtcaagccaactaggcctaatagtagtcacaatcggtattaaccaaccatatctagcattcctacacatctgtacccatgccttctttaaagccatactattcatatgctccggatctatcattcataacctcaacaatgaataagacatccgaaaaataggaggactacttaaaattttacccctcacttcaacctccagccttcagtggccattatagagcagtgggtggggaaccctggacagccctcatgatgggaccactctccccctgtgccacagtgtcgggagctgtactactgtgtgaaggacagcatggagcgcgctgccgcccgacagcaaagcatcaaacccggtgaggagagtttttcctgagagtgtcttccctgtttctaccagtccttctgagtgtcaggggcctggcagggaagtcaggggtgggattccccacctcaccagtgagctgatagccccctccctcaccacaggacctgaattgggtggcgagttccctgtgcaggacctgaagactggtgagggtggcctgctgcaggtgaccctggaagggatcaacctcaaattcatgcacaatcaggtaggtgcgagcggcagcacgaggctccctgtcgttccatctgtaagaaggaccaatgtccaagcccccagtacttccccagcaagcatgagagagggccctctggagctagagggagaactggagcagctggacccaggaaagaaaccccaggggagggcacagtgacgttggcgaccacctggcgctgtgaaggtgcaccagggagcccgtgggggaggctgggcaggagcgaggccaggtggccacgctgccccatccgttggactccacacagtgtgagtgggagcgtctcacttggcccttcccctgcagtgtctctgccttcctctattcccaggatatgcttctgcttggtggttttgctttgagagtctagactggccgatctccttgtgtctttctggtgtgcgtgcagcttgcgtgtgcgtgcgtgcgtgcctgcgtgcttgtgtgtaagtagcttgtatctgtcctctctggagtgtgtttatttgcctttttcttctgcggattcttcttcctgttcttttccttcctctgagtgttcccactctgtcccctgctccacaggccccattccctttcttttgattggggagcacttgtggatacatctttccctcattgtaattccaccataggagctgacttttttttttctctcttggtcttttaacacagtgttacctttttctctcagtggacattccttaagctaattcctttctgaggccagcgcatcatcccaggtccgttcacagctctgactcctcacacaagtgccttccctcctctttccctgatgtccgggttcctctccctgaggctctgagccagacccaaatgtgtgaagccccacagaccctggccaggccgcagaccctcaggggaggtggatgcctgactgacgtggctgtctccctccctccgctagccgttgtagctctctttcaggaacgtagctgggcagctttggtttaacaggaaatggctgcgcaggctgccagcagccccttagtatattttcaatttaggacttagggcagtagccaaccccaaagaccttaggaccatcccagagaggggtctacctaagtgcttttctggaccacaaaggtgtcagtacttcttggggagcagacttctgaccacattttagcgccgtggcctctgaagatgagatcttgctgagcaacgcccaggtgctctgccctgttcctcgtcctgcccttggcatagccccactgggcagccatccaagccagtctgtggttgaaggcttggcccctagaagatagactgcagagaaggggaggaaagcccgggttctcaatctcacctcacagttagtaatgagatagcgacctgccccctattctgccacacagtgttcagttggagtg

SEQ ID NO: 1200 - DNA, 4045 bp, Homo sapiens
gggcacctgagggccctgcagagagctgggctgccatgaatgaacaggctgctagagggagcagccagactgggcgtcctcacctgaactgagattaagtgaaagaaagccaaggccctggccctctccgttcccttacaggtgggtatggtcgagagaggtgtggtgattcagccagggcctcccacagggccccggactcctggccaggagtgtcttccactgcatagaactcccagaagctcccctaggagctgccttcatggaattctgtcctggaaaaacctggctgcactctcagggaatttgagacctgctggcttcccgcgcccaaaaggaaacagatgctcggatttaggctccccatgggggaagtgagagcagagtggggccctggccctgacacctttctggtgcccagcgtcctggactggattgggttgctgtctcccaccggggatatgggtctgaacccgctgctggcttattgctggctgggactccaaagccacctagtgcagctccaccccagcacaatcacaacactgagattctgcctcaccccacctccaggcggttgtgaccacggcccctggcacaaggatcacgctgagcacctgggaccagttaaatgcactttccgctgtcacagctcagtttcatcatctgaagagtgaatgctgtaggggaagacaggttccttctagcgttaatgttttatgaactcagaaaccactctgggcctggtttaatcatcgggaaaacaaaacaaaaaacagtatctgctctcactttgctgtgaagatcaatgtccctgggcttttttctttttttttttttgagacatggtctcactccatcacccaggctgaagtgcagtggcatgatctcggcccacctcaaactctacctcctgggttcaggtgattctcctgcctcagccttccaaatagctgggattataggcgcgccaccttgcccagctaatttttgtatttttagtagagacggggtttcaccatgttggccaggctggtcttgatctcctgacctcaggtgatcggcccgcctccgcctcccaaagtgctgggataacaggcatgagccaccgcacctggccatcccctgtgcatttttatgaaaacaggcacaccgaaattgagaagagtgagttctctgtgactgcacttatcttttattgcccaataaacattgggaagacatagcaggccagaaaggcctgtccccagacattgtttcttgaggccaccctccttttaccccaaagatccaggggcttccttcaggagccctgtggaccagtctgtgcaacacccactcaggactgcccgacaactgccctgctgatcccccatcgcagcacaggagacacacttgtcacacatacatccaacagtagggaggggtttccccaacttccctccaggctcctggcacggggctggcatccggttgtacctgcaacacaggttatcttacgagtgaatggagggcccctacagcctcccatttactgatggctgccccaggaccaagggccagggctcagccactgacttgtgccctgggtgtcgggtggtacatacctggccatccccaggagccagcctggtcactgaggcactgcagaagaggaggccatgtcactgtgtcctcccagccttctggaagctattgcccatctgggcgtggcagggtccgtgcccttgcagccagggcaggtgcttggccgaggacaacggagcaaagcccagggtccccactgccgcccgctcttcccatctcccaggccctggccccgagggctcctcacctcgcacctccaggcggcactcacaccgtgcctcgccctgtaagttggtggccctgcagacatagatgcccccgtcaaaggggcagggctttctaatctccagagtcaacactccctgcttgctgaacatgcggaagcgggcgtcttctcccaggtccaggccattcttgaaccaggaaatcttgggctataaataaggtaaagagagggagggaagccatccaggctgagaggggacctggcagggacccagggagacacatctgtgtttctactcggggggtcccacgagagtccctgactatgcccaaggctggaaacaaacatggaaccaagagtgagtaccatggccctgcccagggggaggaacccggtccatacaccccaaggtggagagaaagcaggggagacaggctggggagaggactgctcaacgtcggggcctgtgagccctgcctcctggtcggcctggaccagcgcctaaagttccctaccttggggctaccccggacagcacagcagagcatagcagtgtagcccgcgatgaccgagcggttcaccaggggctgggtgaagcttggggcctcggagaagtccagggccttatagttgggtggctcataggtgatgcctgttggtgacaggacttggtaccgagagggccacacaaagctaggcccctctccctgttcccacagcctccctgccccagcccctggttggaagaatgagggtacagcacctggtctggggataaagacgggctccttggtggtggccgctctgtcactaaagccaaccatattctggctgaagacgcggaagtagtagccattgccaatgatgagctctggcaccacgcagtgggtgcggcggtaatgctccaagacggtgaaccactcctgggggcagggagggaggggaggcatctctgggccaggcccttcctgatgccgagagcctctcctgggtgcccttggcatctccacccctactatggagggattcagatcagcagagggagggtgaggggtccacggtgaggacagtgaagggtagctgcggcctgggtctgccgggcctaggcagggtgcacgtggggaccccagaccctgggctcaccatggtcttcttgtcggctttctgcactgtgtacccccagagctccgtgttgccgacatcctggggtggcttccactccagagccacattaagaccccaggcgtcagtcacccggagatcctggggaggacttggcttgtctgcgggagacagacccagttgggtcaccacgcctcctgacagtgagcagggggtcactggctccagggaccaccccacccctgccaaccagggccaggcctgctggggcagtggactggaaaatgtgagctgtgggttgggtcccctggccccacccttggccccagcagcccagcccagggaagggaaacaagggggctcaaggaggccttggccacgcaccaacaacctgcagcaccagcgtggccttgtcctccatgttctcaatgcgcaccgtcacctggtaagtgcctgaatgcacgcggcgagcggcccggatgaacaggatggtgtctgtggggctgttgcggatgctcacctcctcgcctgccaggggctgcccctctttggtccaggtcacctgaggccggggcttgccctgaggggaggaaaagcttaaccctgaacctggatcactccaagggccggccgccaccccagcctctggtacctcagatcaggccagccctgagacatcagtccactggatgggaacaacacactatagcctctctcccctgggggacagggaagggggccagtcccacctggaaagggatgagaaggttcacaggctccccgaccttcttctgaatggtctggcgcaggtgcctgggcagctgaagccgtggccgttctgtgggtatagagtgggtagctaagtgagggcccgccacagctctgaggggctccacagctccaacctcccttgagacaaggcccagagagctgcagctaagaaaaaagctgcctgctgggccctgcgcctcctttagctcctgctaacacagcaactccaggctgcccaagcccagctggcttccccgagcctcaccacttcaaaaggcagggatcagagagggtaagcaacttgactgaagtcacacagctagtaagtcatagaccagg

SEQ ID NO: 1201 - DNA, 4042 bp, Homo sapiens
aggtgcctgggcagctgaagccgtggccgttctgtgggtatagagtgggtagctaagtgagggcccgccacagctctgaggggctccacagctccaacctcccttgagacaaggcccagagagctgcagctaagaaaaaagctgcctgctgggccctgcgcctcctttagctcctgctaacacagcaactccaggctgcccaagcccagctggcttccccgagcctcaccacttcaaaaggcagggatcagagagggtaagcaacttgactgaagtcacacagctagtaagtcatagaccagggtgtaagcctgggctttgacaccctatgccctgtgttgttaccacctgagtttgctgcctcgttccagctttgagaaccaatccttacaaaagatggaccctttgttgggacaaggaacaaaggaatgggaagtggatcccagagggaccaatctgactacatagacaatatttacctgttggagctgagacactcctggaagagagcttgggtactgtggcttttactttccctgttccagaactaagggactgacatacaccaagagagccctttctgcactttttttttttttgagacgttgtctcactctgtcacccagactggagtgcaatagtgtgatctcagctcattgcaactgccacctcccgggtccaagcgattcttctgcctcagcctcccaagtagttgagggactacaggcacgcgccaccacacctggctagtttttgtatttttagtagagacagggtttcactatgttggccaggctggtctcaaactcctgacctcaagtgatctgcctgccttggcctcctaaagtgctgggattacaggcttgagccactgtgcctggccaccctctctgcactttttccctaggcctagcgcatggacgatggctccaacccctcctgtctctgcccagcgttctgggcagagcattctgggcctccccaactgtccccacctccactggacaccaagggcctggggtgtcaatggcgggtcttgtgactgcacaaaggggcactcacgcaggatctcctgcactgtcaccggctccgtggtggtaacaggggctccaggccctgccatattgtgtgcccgcactcggaaaagcagccgggcccccgtgggcaggtccttcaccagtatcgatgtgtgctctgtcagcccctgcagggcagccacccactctgagcctgggggtggggagggggaggcaaggccacaggctgtgtcaccactgacaccccactcccactgcccactcctctgataggaatctccaggatttaaatatgtttttttaaatttttatttgtttatttatttttgagatggagtttcgctcttgtctcccaggctggagtgcaatggcatgatcttggctcaccgcaacttctgcctcccgagttcaagtgattctcctgcctcagcctcccgcgtagctgggatcacaggtgcccaccaccacacccggctaattttgtatttttagtagagacggggtttctccacgttggtcagactggtctcgaactcccgacctcaggtgatccgcccaccttggcctcccaaagtgctgggattacaggcgtaagccatcgcgcctggccttaaatatgtttttaaaatgtagttgctgatttcgcactgctcaaagaagtgttacagtcagctttactctgcatttgtttttcactaggcaagcttttttacttctgaaaacaggacagatatttctctgggtgtcctcaactttcggcaaaagtgggcctaaaaaacttgactacaggtgaatctgctcaatggcaaggtgagcatgttcttcctttggggaggggggttgggggcggggacactcacagccctctgggcagtactccacgctgtagccatccaggcctcctgctcccacgcgctctgggggccgccacttgagggagaccgtggtgtcagagacgtcctctactgccaggtgggtgggttcgctggggggacctgggcagaggagaggtcagagaggggtctgagcaagcctggggaagctggagatccatgccctagactctgaactgcccactggtcacatagggggcacttcctgttcagctggcttttggccactttaaggaatattttgtccctgttacaagacatgtctgtagattggcttaaaaacaaacagcaacagcagccaggcacggtggctcacgcctgtaatcccagcactttgggaggccgaggtgggaggatcacctgaggtcaggagttcaagaccagcctggccaacatggtgaaactccgtctctacaaaaatacaaaaattagctgggcatggtggtggatgcctgtaatcccagctactcagaaggctgaggtgggagaattgcttgaacctgggaggtgaaggttacagtgaccccagatcgcgccaggactgcactccagtctgggtgacagagcgagactccatctcaaaaaaaaaaaaaaaaaaaaaaaactaaaactaaaactacagaaaacatgggaatttcctggcacgtatgattaggtgagttgactaagaactgaacaaaccaggaatcagtccctaaaacgagaggcctggacccttctccccacaggccccgattcctgccatcttcccaagctgtgccccatccctgggcccaggggtccttggcctgcccttgccacaggcagctgcccccggactcacccaccctagtgggaacaggtgtcctcctgagccctgccacagtctcaacacctgttctgcccactcagaccccattatacagatgaggaagctgaggcttcagggagggatgactccagttggccccccggggaccatggagctgcctctgccatctctgagtcttggtccaggactctttccacagacagatgcccctgagacccctccactaactacagcccttgccccatcccataggtgaaaaccctgggttgaagggtgtggagaacaggggacaatgaacatttattgagcacctgttagatgccagatggcctgcctggtcatcccatatcatcctaacagctctctgagataggcagtgtcattattcccattttgtagacatggaaagagaggcttgaaacgtgaactaggggtcggcgtagtgtgagagtcagctccaccccaaccagctgggagatctcaagcaggtcatttaactgcttggagcctgtttcctcatctgtaaaatgcggctgagtatccccagtcgaggatgaaaggagactgtggatgtgagtgtctagcatggctgcctgcagagcacctgctattattggaggtttttaactggggagggggcggggggcaggaccaggccaggcaggctcaccgataggcatgaagggctgggaggcagggctgggcctggacatgccgatggcgttgaccgcgtagacgcgcatctcgtacaccacgccctcgatcatgcgccgcgcttcatgactcagctcctgaatcaggtcgaagttcagccgcatccaccggtagctcttcttcttcttgcgctccaggatgtagcctggctcaggggaggtggcagctctggtctggaacccaggcatccccacaccaccttccctcggatctgtttggcgccctcacacctccatccggtgcccttgcactcacccaggatgggctgcccgccatcgtaggcaggcggctcccactgtactgtgcaggagtcctctcccacgttgctgatcttgggggccgcaggtgcgtctggcacgtctggatggggtgggatggacccacatcagccctgccccgctcagggccttgagtaacgttgctcgtccccttcccactccaactaaccgccacaggctgcccccaccacccccagatccaaagagatctttctagaatgcatttctttcttcttttcctttttttttttttttttttagtgatatggagtctcactgtgttgtccaggctgggtctcaacaggatgc

SEQ ID NO: 1202 - DNA, 4050 bp, Homo sapiens
tcccttcccccctcaccccccgcagcacaattctgcctccccaacctttggcaagcctcaggggtactccaagccccgtgtgtgtccctcttacagcaaattgtacggtgggagcatgctgggcccataaccctaaggctaacgggtcaggagcatcctcgcaggcagttcaggcagtggtcatgtccacagaccctggggccagggtgtctctgagtcctagcactgccatctctttaatctcaaagcacctggtttcctcatctgtaaagcggggtgggtgaaagcagcacccactgcacaggattgtcacacgtatgaagtgggtttataattttaaaaatgttaggccgggtgtggtggctcatctgtaatcccagcactttgggaggccgaggcaggcagattatttgaggccaggagtttgagaccagcctgggcaacatggcaaaaccccatctctactaaaaaaataaaaaataaaataaatacacacacacacacaaattagccaggtgtggtggtgtggacctgtagtatcagctacccaggaggctgaggtgggaggatcgcttgagtccaaggagttccgggctgcagtgagccaaaatcgcaccactgcactgcagcctgggtgacagagtgataataataataaaaatattatttattattattttttattattaatatctcaaagaataataataaaaaaataaaaatgggctgggcgaagtggctcacacctgtaatcccagcactttgggaggctgaggcgggcagatcacttgagctcaggagttcgagaccagcctgggcaacatgatgaaaccccatctgtacaaaaaatacaaaaatcagtcaggcatgtgacgcacacctgtagtcccagatgctcgggaggctgaggcaggagaatcacttgagcccggggggtcagggctgcagtgagccatgttcgtgccactgcactccagcctgggcaacaaagtaagaccctgtctcaaaaaaaaaaaaataaaaatagaagaatgaagacacaacaccattttgccttctcttgtggccctgcagtaggactagggagctgcagggttgggctgcagtgagccctctggggttgaggaggtgtggggcgggtatttgtccctacgataatggccccagaatctgggttccctaaggtctttgacagcgttgggaagtccctcactcccaggctgtctactgccactacttgctaccgtctggaggaaaacacaggacttacaggcttctccgctcagcttggtctgtttctcccctgctgtggctaggagctagaaagcaaatagaacctgggggtcccaccagggattcacttgggtctaaagtcctgctgggcgtgcagctcgtgagaaccctttgcggcccacaggagctttggggcttaattcctgtcctcggaatgctgaagagtatcctcttccagataagcaaggcctcccactccatgttgacgtgtcgggacagacctggagtgtgatccaacttggccactcaacggctgtgaccttggggaaataatttgacctctacaagcctcagtttcccattctataaaatggagtgatattagactccacatctcaaggttggcagatactaattgaccagaatatcaaatgttgttgctggtcatggtcatcatcatcatcatcatcatcatcatgagttcaaacctcatcaaggcttaaaaacaacaactatcaggagtagagagcttttaaataggatctgctctcctaatcacaattgaggacttgttctttccaccaaactctaactcctgttcaggcgctctgtgtcattggtcctcatgttcccagggtccagcattgggtacagtcctcggtaaacacccgatggacaaatgacaaaaagagacgtcgcagcacacaggggccaaaagagatacacaacaaattttaaaagagactctgtgctgcaagaggatggattgagaataactttacttgttttttgggaggaggttaatgggtgggaggggtgagaggggagatctgatttacatacggacttgagactcccaaggcagtaccccgggtcgtcctctgcaaggttgccccggtggggtctgacgcccagctggcgtccgggagccggggtggagtcctggagggaggcgaagcgggatgtggagggggcctggagtggggggagggggcgggtgaggcgaggcccggcccgccacagtcctgcctctgggccccgggagcgtcctccctgtgtccgggccgggcgagggcttaatgctatggccagcggggaggcctggcggggcccggcgggggctgcgggctcagtggggcgggtggcgccgctcggccaggcccccgcggcccagcacttcgccgctgaactggtaggtgagcttcttcttcaccttcttgacctcgcccgtcttgccgtagttgcgcagcgcgcgcgccatcttctggtaggtcatcttcttgcggttgcccttctggatgccccagcggtgcgccagcgcctccttgtgcttggacgagaactggaaggtgcccttgtccttgtccacccaccagatgctgtccttcatgtcgccgctgcggagcaggtccaacaggaactggtacaggcggatcttcttcttgctgcctgcgggggggagggcccggtgggagggggcccggggcccacatgggagccgcccccaccgccttgcgtacgcacaggggcccggggacggggtggccgggaagggcaggggaacggctgccccagcccgcgccgggcgtgcatacacaacgcacccacactcacacacacacacatgcttgcgcacacacaggcgttcacacacacccactcacacccacgcactcaccccccccacgcgcacacactcgcacccacacagtgcaccaagtacacacacatgctcacatccacataacgcacccacacctccttacacatgctcacacatcacgcccacacccactcacacacgtgctcacacaacgcaccttctcacacccactcacactcatgcttaaacacaatgcaaccactcactcatgctcacacccacacacgctcacacgtacaatgtatctgatcacacacatgctgtcacacacatgcacacacaatgcacgtgctcacagactcacacccacatgctcacacacatgcttgtgcaatgcacccaaacgccagattgcacccacacccacccacttgcacattcacacccacatctgccctcacacactgtcactttctcacacacccacacaatgcaccagctcacactcacacacatgctcacacactcattcactaacatgcccccacacactggcacccacacgacacacccactcacatgcttgcacccacccacatgttcaaacccacactgcatctgcttacacattcacaacccactcacacacacctggtcacacccactcatgctcacacctcattcacacccactcacatgcacactcacacccacccaatgcacccactcacacacatgcacacacactcagacccacttactgcccccacacacggtcacacccaatgcaccttctcacactcatatgcccactcacacctgctcacacacacctcacaccaggttcacacactcatgttcacacacctgctcatacacctcacaccaggtctcataatcacacctgcttatacttgcttacacatgcttgcacaaacacacctgcttacacatcttacactgctcaccctcacaccttacattgctcacccttgcacacacatgcccctgctcacacacacatgcttacaccacaccattcactcacacatatccactcacatatgatcgcacctacccacacctcacacacacttgcacgcacacacctgcttacacacatctcacgttactcagccccacacgcacacacctgctcacacacatctcacattactcagctacacacacacgcccctgctcacacacttgtg

SEQ ID NO: 1203 - DNA, 4049 bp, Homo sapiens
tgctttctacaagcctccttcccctttaagagaacttgcgcttcttcatggcttccgccttgaccgccaagctcttggcacagatggtcaggaccacaatgagaacgcccaccacaaatgtcaccaggggccagaggaagcaatgcaggaggacaatctcatcatgagtgcgatgcagaagcacatcatctggtctgcaagacaatggagaataagaaagaaagggcagtcaaatgccttggcactgaaaaactctttacaacctaaagccaaacttgctttccataaccattattgaaagtaaaggctgcactctgactataaacactgtatttttgtgcttcaaacccattacagaaagttttgagctcttgagtcaagtaattggtgcaaatttatgtattaattataatttacatgttacaaagtgtcaaaaatgtatctcttatgctatgatttttcttcattctaagttacttaatgtattccactttctcattcatcctctaatgtccattggtcaaggggcttgaatcagtcaaaaaattactgatgggtgagcattctccaacaaatctgaactagacctcagctcataggtgtggcccaaatgatcttaattcagataaaaaaaaaaaaaggtcagttaaagccactgcttgaatttagtcagaaagacagctggtgtaattctcagggcaactcagcttcactatgtaagctacaggtttttattaataagcagacaatggctgaatgagtgcctttttccatgcttctgggtgaaattagccgtcattttaaaacactgaccactttcttaataaatcttgcaaagtcctagcaatagatttctgtcttgtcaatgtgaggctctatttttcaattcctgcattggtcccattcacagaaagtgaagatgagatgtgctccacaagccatgatctctaatcttcggccattagaaagagatcctggaaatctaacttttttcttttttttttttttttttgagatggagtctcactctgtcacctaggctggagcgcagtggtgccatcttggctcactgcaagctccgcctcctgggttcatgccattctcctgcctcagcctcctgagtagctgggactacaggcgcccgccaccacgtccagctaatttttttgtatttttagtagagacggggtttcaccatgttagcccggatggtctcgatctcctgacctcgtgatccgccctcctcggcctcccaaagtgctggcattacaggcgtgagtcaccgcacccggccggaattttaactttttaatacaagaggtttacattttgtaagatatttccgtttcatccacaaggtttgccctgctacactagagtagctatgtttcctccaggaaaaaaatgaaaataatgcagaataatgagtccaactgcccttaagaacatcaaagccttcagagcacaagggcagtgcatctaacacagaaatgcattcctgaaaatcactcattagtcacagctctcataattcagaacccattttccctgaagattgacaaagggtgttgggtatttctttttacttatagtggagctatcatgtgccattaacataaatagttttacagactggctttgaaattacaaaatccttgcattttttcctttgatgcacagtgtaatttcaaattttgcacataatacaagatttctattgatgttttatttcatagtatttcaaataaaatttatattaagtaaacgcagtcattttaacaattaggcaacaatcatcccagctttcagaaattgcctttttttggaattcttatagcacgaaattatctccaagacttgtgctaccattagtatatgtgtatacattgatgtatatattcttttcttctgtaaggcccattagggctatgacattgtcattgctgctattctacaaatagatgttgctactgagaaagaggagcctgcctctgttgcagccttattatccatgcaaattttcaagaaacttcatgcttgtctaaaaagtctaaaaaagtcaaggctgaggtctaaaaaaagagtcaggacacaggatagaaagaatcatatttaagagtctgaaatccccatcccagcactgccgtgattcttttcccaggtacagtgctcatagctgtcaaaaacctctccctaagtgtgagggaaggtaaaagctgtctctcaggttgctctttccttctttctgtgaaggactattatgctcctccataatctactgatacaaaaatgagtcttaaattcttcatcaaaatggctaagggtgcacaacaatgtgaattttacttagtatcactgaagtgtacattttaaaatggttaagatggctgggcgtagtggctcatgcctgtaatcccagcactttgggagacagaggcgggcaggatgcttgagatgaggagttcaagaccagcctgggcaacatagcgaaaccctgtctctacaaaaaactacatgcctgtagacctagttatttgggaggctgaggtgggagatctctcgagcccaggaggtcgaggctgcagtgagccacgatcaagctgctgcactccagcttgggtgacagagtgacaccctgcctccaaaagaaaaaaaaatggttttgatgttaaaaaaaagaaaaaggattcagggtgagggacttggattttttaacattattttaataaatgtgcatgtaatttccataagtaatatgtttttgcaactaattttctagtaaaatgcttcagcgtggatcctcgtttgtattcatactccagtcactcttaactgatgttgaatgctttcacaatattgtgcaattgagccagaaaaatagcccagatgacagtggtgggaatcatacatattttctgaaacacagtttgaagaacatgtaccaaaaaagaatgtgagtaaaaagaagaggaggagagaaaaataataactggaaaatgctggacccagatatttgttttattcagaaacttcttggcattccacctcctaccagagcgcttggagtaaaactttattttaatatcttaaatgacaaaacaacatcagtccctccgagttagctatactgaatttgtaattacttcaaaagcgttctttgaggtgcaaatgttatatataaatgtacacatttctttaaaaataattcatgtccgtttccacttcctacagctctaaggtgctccataatctccttcaacaggaaaatcatttctctgcacagtaatgctcacgcttatcattcagttttttgatttagtgagattatctctaaattgcttcttgtgtcctaattaaagtctagctcattcaaactgggcttgtagtgccttaattgaaggcactcccctgtctcagtttcctccaattttatcaggcaggcagttttcagattgtttagccaaaaactatttgcaaaggggtttgggcttagaattcaatttgccgtaattatatggtagggaatgaactacaatttctttataaataatcactgtttgccacatgtggcaaactggataaatggcatgacgggagctgacataataaaaccaggatggtgacaagaatatgtggacaataagcaaaaaaggggtaattactctatatctagggacttcaaaaaagcaagcaagagatttctcttggagtatgcaggaacacaaatgaaaaacacttttaagccctgggtcagggctacaaaagaagagtaaatactgtgggtacccatagaaaaacttccctaagcactggcactaccctgagtcaaggtttgaaaatatgtggtgataataatgacagtcagcatttattatgtgctttctatcctcccggtgctgtggtaggacattcagactcatttgatccttaaaatgaccctttgctcaagtaatttttaattttcactttataatggaagaaactgaggtaaaaaagattagtttccccaggattacacaatttaaaataatgacatgatttgaaaccct

SEQ ID NO: 1204 - DNA, 4044 bp, Homo sapiens
ataaatggtttaagccacctattgatggtattttttctttttgagacagtgtctcactctgtctcgcaggctggagtgcagtggcatgatcacagctcactgcagcctcaacctcttggcttccagcaatcctacctcagcctcctgagtagttgggaccacaggcgcccaccaccacgcctggctaatttttgtattttttttgtattgatgagggtctcaccatattacccagactagtcttgaactcctggcatcaagcaatcctccggtcttggcctcccacagggctgggattacaggcgtgtgccaccacgcccggccttgatggtattttgttatggcagccccagacctaaaaaaatttacccttgatggtcacaagaaataaaaaaaaaaagtttgcttcaacttatatatttatgttgcaggcaagtataggagtgattaataaaaggcttaaaagcatcaaatataaatatcatttagataaaattttaggagggaagaagaaaggaaatacaagtttaaggggaaaagggctaacatttctgaccataaaagagcttgttcgtatattctttgaaatgttcggcagtgaataccctctcctctcctagttagatcccagcgggcacacttaaatactgatgaaatggtctcatattcaaacatcaacgatgatgacaatcggagaaaattccatcctttgcaatgatctacacttaagatgagaacttttagatggctccaatctgttctcttacccgcttctcttcttcaccatttatgtaacgagcagaaagcaaaggcctagaacaacacggggcatgtcctatgggcaccaggatttgtagataaatgcacagaaacacatccagggggccccatgcaaaagtggcaaaagcgtctgcactgggggctgtgggatgggactcagaccctgctgcttctaaacaagggcgtactcatgcagtatttctatgaaactcaacattgcacaaggttgaaatttgaaaacaacaggaaggtaagccagcagcccggccctgggagagacgctcttggcagccaccagaaaggagctattgaccaagagaagaggagcccggaacttcccagaggcccccacccccacgacctcagcaaacaaggctgtcacagaggcaggcatcccatttttttaaacgtttattacttcaagagtgaattatttttcaaagatgataaaactcatttctattccagtagaaaagggtcacaggtttgccccagggtccaggagcgcccggaaggcagggcccccaggcctcttcacctcagcctgggcacctataatctgagggaccctgtgagggggtgggggcagctcgggggcacagcctgcggccacttcggccagagagtggccggctcagtccataggatgatgtcagtttaggctggaggaaaagggcgccagacaacccgatgcagtgcctgtgaagacttcggggggatcaaagtccggccggggtgggcggagaccctcgggcagctgcacagggcatcttgtgctcactccattgttttccgaggcctgtgtaaaggcgctttgcctggcctggcaggtagaccaaggccaaagctcgtggccagggcctgggcactgagtccccactgaatttggcacaggaaggcggcactcccagcctggcccgtcctgcatggggagccaccacaccgggactgcagtgtttcaccttggaggggaggaagcctgggcccaacggctgaacgggacaggccaggctcacccgaggaaggggacgcaggacccacagcccctgtggtcaggcctgtgggccacgtggagagaaggttccagaacagtgcttgttgacgagcctctccctacaagtcccttcagcagcagctccatccctgagtgtctgcacaagcctgcacgcatgtgtgtatgtgtgccagggcgtgtgtgcaggtgtgcaacaggcacatggcagctgggaggctcaggctgtggggctggggggctgtccgctgggagagtccgggagaagcggggtgtaggggctggggggccggtcaggcccagcggccaggcctggctggctcacggtgtcctcaggaccctgtggagaaaggcaaagctgggtgaccacccacgccctgtcaccaaaccccaccctcatccccgcccaccacagccctgtacccacatccccagcagagactccacccccgccaccaggctgtcagaagtgagaagagactggagtcacctatagactcctggaatgactccaagggcctcttcatctcactcaacacccgcctggcctccccgacctcctttagagatggagaaactgaggcccaaagagacttaatacagtgaggggcagagcaaggggggcggcctgtgtgcagcacagtcaacatggaacaaccggggcaagctctgtccctcaggaggagaacgtatgtttatgtgttgatttattttttattttttagagacggtctctctctgtcgcccaggctggagtacggtggtgccatcatggctcaccacggccttgaactcctgggctcaagtgatcctcccacctcggcctcccaagtggccgggacaatgacacgtgccaccaccacgcccggctcattttttaattttttgtagagatcaggtctatgttgcccaggctggtctcgaactcctgggctcaggcgatcctctcacctcagcctcccaaagcgctgggattccaggcgtgagacaccatgcctggcctgtgtttttaaacccatgtcacaggacggtattcagcctgaacagtattcctgaacagaagacagggaggaaagccagccacacagcaatacacgcagcaggatgcagcttcggtcacattcaaaaagtgacctcatgctcatggctgcgcacatgcagattcagaaaaaacaaacccacgtgccaagttcctggccatggctgctcagggtatgcggggcgcaggacgtggggagggggacgagggccacccagggaacgagtgaaaccaagggcatgagatgctggccatcttcaacactgacagctgtcagcaatggctgcgtctgggtgaggggaactggatactgtcatttgtctagtttgacagttgtagaaaatttctcaacttaaaaattaaaaatacagataatgctaatgataagagtgtggggtgagccttcgtcccactaagccccctgcctcccttgccctgagcaacagaggcctccctgccccggtggctggggctggaaaccgctgcccacctccgcccacctgtgcttgcttcaccacggggtaggaaaatcaaactcctgctcagggcagagagcgggcacaggggccagggtctgctgcactgagccaggcgcgggggaggtcagccccgcccccacaccacccactgaggcagcacaggacacccacaggtggctagaccttagccatgtgggcccaaagagccgtgacttgagaaggtctcactcagaagtagaaaggggaaaccacccctaggctgtaaaagaaccccttgtctttcccaaggaagacacgtggaacaaaacccgcaggtgccagagggtgaagcaggttcctcctccttcccctcctcctcctcctctttgccacttgtttgactgaggaacatggacttggcgtggaagaaagatcggtgagaagctaagaaaggtccaggaacatatccctgaagggccacctggacagttgtccaggctgttcactgcacaaaaggacccagctgaagggttacagaccagtggacacacagtttaccaagccccctgccctacagcaggcctcatctgcccagaggggctgtctttttcttatttatataaaaatatctgttttccccccttctcccaagcaaggcagcccctcagggccatccccatacccaggtacagggcaaaggtgtggggccttccccagggactcaggcctgagactcagaacaggacccaagaggg

SEQ ID NO: 1205 - DNA, 4047 bp, Homo sapiens
caatggtcattgttcatcgggagctcaaacgctagagcagcaacatgatgacagctggtgtccaggctaccatctcacattgtggaaaccttttccccccgaggacaggaattttgaaaggaagtcgggtttcaggtctgaaagccaaggtgaagaaccaggaatgctttattgtcacccagcatgcaagcatggaagcaggcaagccttccctgagacaggggaagaggaagaatcattcaccagtgctaaaggaagcaggtgctgcagaggagccaagaccagcagagcagcggggcagccccaaggcccctcagaaggcctcggcctgtggccctaggatgatgcaggtgggggccacctcagagagtggctttctggtccatgcatccaaaaacagcctttcctgatgacctgccagtgggcagcatcccttcccctgccatggcagccactcgcccatctccactgccccttgagctctgtgatcacagctctcctgtccttcgtgtgactgtagtaacttgcctaaaggcctgccttgcccatctttgctgcagatcttatgttctggtcatctgcatcccctgacctgtgcaaagggccttgcagtgaatgcatgaatgaataaataaatgaccccgaagcaaggagggacactgttatcacccctcttcctgctgcttctggaggtctgaagcccagggctggagctcttccccacttccgttccctcctgatagcagctgccccatcctgttcaagccatcgacttcctcacgcactggggcctccccgctgggcccaggcttccacccctcccagcccggggcccattccccagccagcagctgacctagtgattcccctctttaaaagcctccaatgcctctgtcactcccagaatcagttccaaactgctcactgtgcaccacgaggccctgggtggcccgccctgtccactctcagacaccacctcctacctctgtccctgccctcactcccctccagccaccctggccctacctgaccgtccaatgtgccttgcctgtccctgccacagggcctttgcagtggccgctccaggcagcattcctcatgtggctgtgtgctgagtgcctccctggcctccatgtcaaagctcactatctacctcttcagagaggccttcctgaagctccatctgtccttgtccccacttgctccagacatgcactctccagtctggaagctgcattcagttggtgagcccttgaaacggggccagtccaaaatgagacctgctgcacatgtatcgtacacacaggatttcaaagacttcatgcaaaaacactgcaaaaatattgatgccgtttatactgattacatgttgaagtgataatactttgcatatatttgggttaaataagattaaaattaattccacctgtttcctttgactgttaagtggctattagaaaatttaaactgaaaacctcacacgtggctcacgctgtatttctatttggctctaacccctcacagctcctatcatgagtgaaattatcttttctgctgatttacttggttttcatctgtctccccggctgggatgccagcccccctcaatccccctgagcagggatctcagctgtctcctctactgctgtacgtcccctcgcccctaacagaacctggcatccccgggtgctgacttgatgaatggatgatgcaagtaccaggtctcattactcaaagcccacctgtgccccctccaagggagggtcccaggccttccagaacaggcagagtagtggcaacgcggcatgcaaaagacgcaagcgtgctgcgcagcccccagcagtgaccgctcccactccggcagagacgcaggactgctgctggaggtgggctccaggctgcggttggccagagggtccgatctgaggcccctttcccccagcaggcaagcgaatggctgtcagcccgggctgccctctggccagcacctacttggctccggatttggcagatgacagggaccagcagcaggacgcagcccagcgccaggaggacgtactgggcatagtgcatcaccttgggcatcaacaccagctgagtgtagaatgtgtgaagagtctccccctccatggccccgctctgaggagacagaatgacaaacacatgagctggggccgcaggctgcgggctacagcgcagatgccacccaacaccttcctctgtgcccgcctcagcttttccccacctcaagcttcccggctaaagcatgtgttggagcctgccagggacctcctccctccaggacacaaggtgagactacaattccccgactcccttgcagttgggcagggccatatgatcgtgtcctgaccaatgggaggtggacctggcctcacgtgactctccatctcgttccctgccactgaatggaggctctccaggatggcggggccaccggggccctggaaccctaaatgactgcagggagcagagctctgcctccccatcaacccacttcagattcggctgtgagtaggaagtaaacttgacattcggaggcttgtttgtcctggccattagctagccctgatttaaaacgaggtgggcaagaaacaataaatacagtaaataaaataaaataaaataataaaataaaacaagctaggccagaaggaattctgaaaagctgcgagagaagtaagtttaagagaaaagctgacaccttggaaaccaacttccccactttcaggagaagaggtcatatgccccaacaaaattattttacacccagggccagggactttacctcttcatgcagcttctgtcttccccatctctagggatccctttcaccttggtgggataactgacatagggtgcttggacagggtgaagtttctgatacgctggtccatgtcacagtccggttaccctggctcagccctctccctttctacaagctgctccccccgcctcctgcctcaaatgcccacattggctcttaacaaaagcccccgacgctgtgcccaacgcacccttacctctgcaaaccagagcagcggcaggaccacaggctcaatcttcccagtttgtctggaaataagcaagacatagctgtgtgaaacaaagtcttacacccaaacttgatctaattctgcttgaatacaacatctaaacaggtttagtataattttgcacacactaaaccctcaccaccaaatataaacaatgagctgaaacactttaggagccatatgacaaaactgtccccaggctgaaggtctcagtctacagccctcaataatacttgtaaataagactaactttaaatctttaaaaggcgttttgtttttttttttctttagttgacaaggtgagatgttttcccacagggctgtttgacatcacacagctttgaacctgtgatcataagctctgaggccaggagggatttgattctgcaatctcagtcatccctccttatccatggttttgatttctgccatttcttaccctcagtacagtacaataagatattttgagggagagaccatgttcacataacttttattatagtatttgttataattaccctattcttagttattgttaattgtggctatgcctaatttataaattaactttatcatagatgtgtgtgtataggaagaagcatagtatatgctatacagggttcagtactatccccagcttcaggcatccactgggggtcttggaatatacccccagggataaggggtccatggtacttgattggcatgggctgagggaaccagtgtttcgatgtgctgccagaaggaatctcccctggcaaagagcttgacaacttgaaaataatctttttaaactaaaaactcacatctcctacagggcagagaccaccagtgacccagccaaaatccattggtcccttttagaaacaggacccaaattttactcaggatggcaatgcacccagttaaagactccacttcagcctctcttgtggcaagtgaggctctgtgaccaagttctggttaatgagat

SEQ ID NO: 1206 - DNA, 4044 bp, Homo sapiens
gccagtgggcagcatcccttcccctgccatggcagccactcgcccatctccactgccccttgagctctgtgatcacagctctcctgtccttcgtgtgactgtagtaacttgcctaaaggcctgccttgcccatctttgctgcagatcttatgttctggtcatctgcatcccctgacctgtgcaaagggccttgcagtgaatgcatgaatgaataaataaatgaccccgaagcaaggagggacactgttatcacccctcttcctgctgcttctggaggtctgaagcccagggctggagctcttccccacttccgttccctcctgatagcagctgccccatcctgttcaagccatcgacttcctcacgcactggggcctccccgctgggcccaggcttccacccctcccagcccggggcccattccccagccagcagctgacctagtgattcccctctttaaaagcctccaatgcctctgtcactcccagaatcagttccaaactgctcactgtgcaccacgaggccctgggtggcccgccctgtccactctcagacaccacctcctacctctgtccctgccctcactcccctccagccaccctggccctacctgaccgtccaatgtgccttgcctgtccctgccacagggcctttgcagtggccgctccaggcagcattcctcatgtggctgtgtgctgagtgcctccctggcctccatgtcaaagctcactatctacctcttcagagaggccttcctgaagctccatctgtccttgtccccacttgctccagacatgcactctccagtctggaagctgcattcagttggtgagcccttgaaacggggccagtccaaaatgagacctgctgcacatgtatcgtacacacaggatttcaaagacttcatgcaaaaacactgcaaaaatattgatgccgtttatactgattacatgttgaagtgataatactttgcatatatttgggttaaataagattaaaattaattccacctgtttcctttgactgttaagtggctattagaaaatttaaactgaaaacctcacacgtggctcacgctgtatttctatttggctctaacccctcacagctcctatcatgagtgaaattatcttttctgctgatttacttggttttcatctgtctccccggctgggatgccagcccccctcaatccccctgagcagggatctcagctgtctcctctactgctgtacgtcccctcgcccctaacagaacctggcatccccgggtgctgacttgatgaatggatgatgcaagtaccaggtctcattactcaaagcccacctgtgccccctccaagggagggtcccaggccttccagaacaggcagagtagtggcaacgcggcatgcaaaagacgcaagcgtgctgcgcagcccccagcagtgaccgctcccactccggcagagacgcaggactgctgctggaggtgggctccaggctgcggttggccagagggtccgatctgaggcccctttcccccagcaggcaagcgaatggctgtcagcccgggctgccctctggccagcacctacttggctccggatttggcagatgacagggaccagcagcaggacgcagcccagcgccaggaggacgtactgggcatagtgcatcaccttgggcatcaacaccagctgagtgtagaatgtgtgaagagtctccccctccatggccccgctctgaggagacagaatgacaaacacatgagctggggccgcaggctgcgggctacagcgcagatgccacccaacaccttcctctgtgcccgcctcagcttttccccacctcaagcttcccggctaaagcatgtgttggagcctgccagggacctcctccctccaggacacaaggtgagactacaattccccgactcccttgcagttgggcagggccatatgatcgtgtcctgaccaatgggaggtggacctggcctcacgtgactctccatctcgttccctgccactgaatggaggctctccaggatggcggggccaccggggccctggaaccctaaatgactgcagggagcagagctctgcctccccatcaacccacttcagattcggctgtgagtaggaagtaaacttgacattcggaggcttgtttgtcctggccattagctagccctgatttaaaacgaggtgggcaagaaacaataaatacagtaaataaaataaaataaaataataaaataaaacaagctaggccagaaggaattctgaaaagctgcgagagaagtaagtttaagagaaaagctgacaccttggaaaccaacttccccactttcaggagaagaggtcatatgccccaacaaaattattttacacccagggccagggactttacctcttcatgcagcttctgtcttccccatctctagggatccctttcaccttggtgggataactgacatagggtgcttggacagggtgaagtttctgatacgctggtccatgtcacagtccggttaccctggctcagccctctccctttctacaagctgctccccccgcctcctgcctcaaatgcccacattggctcttaacaaaagcccccgacgctgtgcccaacgcacccttacctctgcaaaccagagcagcggcaggaccacaggctcaatcttcccagtttgtctggaaataagcaagacatagctgtgtgaaacaaagtcttacacccaaacttgatctaattctgcttgaatacaacatctaaacaggtttagtataattttgcacacactaaaccctcaccaccaaatataaacaatgagctgaaacactttaggagccatatgacaaaactgtccccaggctgaaggtctcagtctacagccctcaataatacttgtaaataagactaactttaaatctttaaaaggcgttttgtttttttttttctttagttgacaaggtgagatgttttcccacagggctgtttgacatcacacagctttgaacctgtgatcataagctctgaggccaggagggatttgattctgcaatctcagtcatccctccttatccatggttttgatttctgccatttcttaccctcagtacagtacaataagatattttgagggagagaccatgttcacataacttttattatagtatttgttataattaccctattcttagttattgttaattgtggctatgcctaatttataaattaactttatcatagatgtgtgtgtataggaagaagcatagtatatgctatacagggttcagtactatccccagcttcaggcatccactgggggtcttggaatatacccccagggataaggggtccatggtacttgattggcatgggctgagggaaccagtgtttcgatgtgctgccagaaggaatctcccctggcaaagagcttgacaacttgaaaataatctttttaaactaaaaactcacatctcctacagggcagagaccaccagtgacccagccaaaatccattggtcccttttagaaacaggacccaaattttactcaggatggcaatgcacccagttaaagactccacttcagcctctcttgtggcaagtgaggctctgtgaccaagttctggttaatgagatgttcgcagaagcgttacgtgggatggccgggagggctgcttaaaaagaagctttcacagctgggaggtgaaccttttttccctcctccctttcagatgcctgaaacgcagatgcaagggctggagctctgcagacactgggaccagaggtgaccttgaggatggaagccatgtgttgggaaaatggaacagaaagatgagtggaacttggactatgaatgtctcttgccatacttggactgtctgcctccagacatcctctaaaagaagatttttaaaataacaatatacctttgtcccatttgagccacaactgttgagtttactgatctatactgccaaacctaattccaccaatatacctcacgacccagcaattacgctcttcagaaactgccctagagatgctcacac

SEQ ID NO: 1207 - DNA, 4044 bp, Homo sapiens
agttccagaccagcttggtcaggatggtgaaatcccgtctccactaaaaatacaaaaattagccaggtgtggtggtgtgtgcctttaatcccagctactctggaggccgaggcaggagaattgcttgaacccaggaggcagaggttgcagggagccacgatcatgccactgcactccagcctgggtgacgcagcaagactctgtctcaaaaaataaataaataaaaacagggaaatcctgttatttgtgacaacatgacggacctggggacactatgcgaagtaaaataggccaggcacaggaaagcaaaccctgcatgacctcacctgtatgtggaatctaaaagagttgaattcaggccaggcgtagtggctcacgcctataatcccagcaacctgggagtccgaggcgggtggatcacctgaggtcacgagttcgagaccagcatggccaacgtggcaaaaccctgtgtctactaaaaatacaaaaattagccgggtgtggtggtgtgtgcctgtaatcccagctacttgagaggctgaggcagggagaattgcttgaacccgggaggcggaggttgcagtgagccgagatcgtgccactgcactccagcctgggtaaccagagtgaaactccatctcagaaaaaaaaaagaaaaaaagttgaattcatggaagcagagggtagaatactggctaccaggggcagggatggggaagtccgtcaaaggatacaaaatttcagttagacagggggagtaagtttaggagacctactgggaaatagagcaacagtcactgtattgtactatacaatacaacacagtgactagagtgaatagcaatgtattgtaagcttgaaagttgctgacagtagattttaaatgttctcagcaccaatacatcatcagtatgtgaggtaatgcatatgttaattggcttgatttaggtattccacaagttatatacatacatcataacatcatgttgtacactcaaaaatagacagcttttcttcttcaatttagagaattaattttggctgggcacggcggttcatgcctgtaatcccggtactttgggaggccaagacaggaggatcgcttgagcccaagagttcgagaccagactgggcaacatggcaaaaccgcgtctctacaaaaaatataaaaattagccaggcatggtggtacatgtctgtagtcctggctacttagggaggctgaggtgggaggatcacctgaacccagggaggtcgaagctgcagtgagccatgatcatgccactgcaccccagcctgggcaaccgagtgagaccctgtctcaaaaataataataattttgttaaaggcccatgggatagaccacaagtgcccacccaggaaacagaaaaccacagatttctgaatcaatggtagcagccaccaagaccaactgggcatattttacagagaacggaggtgccaagagaagaggccacaagctgaaggagtgtccttgggagggccacatgtccagctccctgcttgtagacagaacttcacacgggacaaattccctgtgtgatttatctgcaaaataccccaggctcttcttggtacctaaagatctttatggtatcttgacacatccagagggctgcctccagctcacatgtaggagacatcccagctgataagttctaattaatttactgtcttagagcccatttatagaaaccagtacagggatcataaaacccttgaactaccttgaactatggagtcggggtgaagtaaggaactttggtggctcgagattctagaagccaggcttcccaccaccccagcccacagcagctctctgcctggggagagaggaggcagccaggtgtgctccaaccaggaatcacccaccccccacagaggatggcaggggctcaccgggtggatgtccaggaacaaggagtgtgcctcctggttagggtgcaggccagtcaccgcttctgccagaaccgggtcagcgttgaggaagtgaggatgggagagaaacaagggggcacctagaagaggggcagggaggggacatcagacaaggacagtatattggcaggtcctgccaggccggaggtctgcacagagctgtggtctgcagggcacccccgtggcgatgacaagataaccagacagagaggatcccttcctccattctgtaaaaagccccaggccctgtgatgagggacaagctctgcgccagagaaggggtgaggcaggagccgctgattctgacaggagagaccaaaagaaggaagaggcctcttcacaggagccaggtgaaggatgcccgggaagcgcattccaggtggaagggaaggcagaagcaagcgtggggagggggaaatgcatggtgcacaagggtgctagggaggcacggatggaaaaggcaacgccagatttgaacttgggtgtggggaggggagtctcaagcgcaagccaagcagcccacactgtcccctgcaggacacgcagcaatgatcggagctcaggtgtgtgcacctgtggccagatctccctgcatccacaggagtgtgtccctgtagacacacctgctacaaatgtgagctcaacctcgccactgaccaaccaaaccaggcaaacaccagctcaccctcgggacaatggacaacaggcctgaaggacaagttaacaaggaacagcgagcgggcctctctcaaaagctcacgagggccaggcgccatggcttacacctgtaatcccaacactttgggaggcctcagcaggcagatgacttgcacccaggaattggagaccaggctggacaatatggcaagatcctatctctacaaaaattagccgggcatggtggcacctgcatgtagttccagctactcaggaggctgaggcaggaaaatcgcttgagcctcagaggttgaggctacagtgagccgtgaccgtgccactgcactccagcctgggtaacagagcaagatcctgtctcaaaagaaaaacaatttttttttaaaaagctcacaaggatccagacagtgctaatccacagacagagccaacgggtggtgaccaggggctgggggagggggcggggagtgacttctgatgagtctgggtctccttttggggtgacagaaatgttctggaacgagatacaagtgatggctgcacaaccttgtgaccctgctaaatgccactgaatcattcactttaaaatggttaattttatgttacaagaattttgcctcagtaaggaaaacaaaacaaaacaaaacaaaaacttgaatcagaggccaggcacggtggctcatgcctgtaatcccaactctttgggaggccaaggcgggtggatcacttgaggtcagaagttcaagaccagcctgggcaacatggtgagaccccgtctctactaaaaatacaaaaattagctgagcatggtatgtgcctgtaatcccagctactcgggaggctgaggcaggagaattgcttgaacctgggcggcagaggttgcggaggctgcagggagctgaaatcgcatcactgcactccagcctggacaatagttttcggaggttgcagtaagccaagattgcaccaatgcactccagcctcggcaaaagagcaagactgtgtctcaaaaaaaataaaataaaataaagggccgggcgcggtggctcacgcctgtaatcccagcactttaggaggccgaggcgggtggaccagttgaggttgggagttcacgaccagcctgaccgatatggagaaaccccgtctctactaaaaatacaaaattagccgggcctggtggtgcacacctgtaatcccagctactcaggaggctgaggcaggagaatcgcttgaacccaagaggcagaagttgtggtgagccaagattgcaccattgcactccagccttggcaacagagcaagactgtgtctcaaaaaaaaaaaaaaaagacatagttaaaaaataccgtggaaaataatgatgttgtaagttctaactagaacctgttactgcatgaggctttaactggg

SEQ ID NO: 1208 - DNA, 4043 bp, Homo sapiens
gaccgtgccactgcactccagcctgggtaacagagcaagatcctgtctcaaaagaaaaacaatttttttttaaaaagctcacaaggatccagacagtgctaatccacagacagagccaacgggtggtgaccaggggctgggggagggggcggggagtgacttctgatgagtctgggtctccttttggggtgacagaaatgttctggaacgagatacaagtgatggctgcacaaccttgtgaccctgctaaatgccactgaatcattcactttaaaatggttaattttatgttacaagaattttgcctcagtaaggaaaacaaaacaaaacaaaacaaaaacttgaatcagaggccaggcacggtggctcatgcctgtaatcccaactctttgggaggccaaggcgggtggatcacttgaggtcagaagttcaagaccagcctgggcaacatggtgagaccccgtctctactaaaaatacaaaaattagctgagcatggtatgtgcctgtaatcccagctactcgggaggctgaggcaggagaattgcttgaacctgggcggcagaggttgcggaggctgcagggagctgaaatcgcatcactgcactccagcctggacaatagttttcggaggttgcagtaagccaagattgcaccaatgcactccagcctcggcaaaagagcaagactgtgtctcaaaaaaaataaaataaaataaagggccgggcgcggtggctcacgcctgtaatcccagcactttaggaggccgaggcgggtggaccagttgaggttgggagttcacgaccagcctgaccgatatggagaaaccccgtctctactaaaaatacaaaattagccgggcctggtggtgcacacctgtaatcccagctactcaggaggctgaggcaggagaatcgcttgaacccaagaggcagaagttgtggtgagccaagattgcaccattgcactccagccttggcaacagagcaagactgtgtctcaaaaaaaaaaaaaaaagacatagttaaaaaataccgtggaaaataatgatgttgtaagttctaactagaacctgttactgcatgaggctttaactgggagccctgctctttttctgttaaaagaaaaaacaaaacaaaaaaggctgatgagtgtggaaggctcttcaagtcctctcaacaccaagagaccttctcctgcaggtgatggcaaggaggaaaagagcatggacccagaagctcactctcacctccttggaccttctgaagccatcccaagcacccgcagggacagtgtcctccacaatctggaaaacgctgcctctcgtgcctcctccgtggaggaggcagccacggagccgaactctggaggaatctcaaacaagccctggcctgcccacagccccaggtggagaccgaggtgggatggaacaacttgccagcccccgcccttgcttcagaggccgagcctgcatggacccacgcacgtgtttcttccaatgttattaccaagcacgccgagagagatcttcccagctgtaagtggtaattaatttgtagctttatggcatatctagccagacataattgcccaggattgccaccgatgataattagttggctctgtgaggcaagtcggatgccctcacgcaacagggaggtttgagatgagggagttgtctgagtccaacagatttcaaggcccagaaaggcaaaggcatggtacctttactctttagataacatgccacagaaacacagacataggtgcaccaaacgacacgtgtgcaccacggtcacggtcgaaaaacaggaacttggatgcctaggagcaatggaaggagaagatggaggtggcacccacgatggaacaccacacagcaacggagaggaggggctgctaccacccacaacgtcacggacgaattgcaccagggtgctaaggggtgcacggaccagaaaaggaggaaaaggagtctagcattatgggtccattcacatgaagatgcaaaccagctgagctccggggctggatgtcagggcggtgggaggaccgcgagtggcatccagggcctgtcctgtctgtttctcagtcagggtgctggccacggggtgcgttgactttgtgaagtttcaaactgcaggtgtcagccaggcgcagcggttcatgcctgtaatcccagcactttgggcgggaggatcacttgagcccaggacttcaagactagcctgggcaatatggtgagaccccgtctcttaaaaaaaatttaagaattagctgggcatggtagcaaccgcttgtagtcccagctactcaggaggctggggtaagaggatcaattgagtgatggaggtcagactgctgtgagccatgatggcaccactgcactccagcctgggcgacagtgataccctgtctcaaaaaacaaagcaaaaaaccccaaaaactgcatgagtcatctgggaacttctttgtatctatgtatattttatttagaagcaaaaactaagcccgggcaagacggcacaaccccacctctacaaaaaaaaaaaaaaaaaaaaaaaaaattgaaataagataaaataaattagccaggtatggtggtgtgtacctgtgctcccagctacctgggaggctgaggtgggagaatcatttgtgcccaggaggtcaaggctgctgtgagctgtgattgcaccactgcacttgagcctgggcaacagagaaaccctgtctcaaaaatataaataaatataagaaaaaactctatttaaataaagattttaaaattcctttgcgcttttgaaattcttttggcagatgtgctaagagaaggcgggacacacctcgtcccacgcccttggaggggatgggcatgtcgtttctcccccttctcctggtacctacacccccactttaagccttccctactttcagccttgtgcttggagtggggccggcccacccaggagccatctgagcatgtgacacaagcctggccaatcagcatagtccacctcggctactgtgattggtttacagctgggcatgggagccaggcagaccaattagagcaaaccctggaacttctgctggagtgaaggaaacacaggtggccccctttctgcaggactcggagctgggcggaggtgagcctggagcctccacaggcagccaggagggagagcctgcttggcagcaaagccagtccagcagaaaactgagctgggacttggcagaggcagcttccagacaacatctaagttctggatttgtgcctaatgcagagatctgccctggaatttttcattacgcaaaccaagaagtgcccttttggcctaaatcaggtggagtccagcatctgccacttgcgacagttgctgtagcacacctattgggtgtgtaacatcctcaaccttaggagcagaaatccccgccgataccagcaaagaatgaagcaagcagaggccaatgcccagacgggccagacaggaccaggagacagcagcgggcgtcccaggccccagctccaaaccattcattcacaggttgttccattctgcctgaaataggggaaagcatccaatctgttgacagcccctcctcctgacccctgttgcagaccagtcctttagagtcgccattgccagctggaggacggggcttcaaccaaaaaggctcccagaaggcaagacacagtcaaatagagggccgcttccggtcctaccaaccctgtgaccttggtcgcatccagcatcaggcctcaatttcctaagtacagaacgcactcaccatccctatattcaaatactgtatgagtacccattacatgcggggcacagttctagaagctaagaataaaaccaacaagaggagcttggggccctgcctacagggatgacagtgaatggaaggggcaatgaataaaatccacagtccatgagttcagggagcaatgagcaccaagacaagaagaggaagacaagaagaccaagacaagaagacaagaagaggaagccatagggagcagcaggtgggagagggggc

SEQ ID NO: 1209 - DNA, 4046 bp, Homo sapiens
tgtgacttgacatgtcctgccccctcctcccagcccagcaccacctggctgcaaaccaccaccagcagcctctctttgggctgtgtagaggcattggcagctggagtttggcttttggtggtgtgaccaaagagaattcaagctggtgccaagggctactgagtcaaatccacgatgagtcaaaatgctttccaagtgcacagccaacaccacagaatttggccatgagctacccaggaaacccaggaggccccgagtcccagtgattaccggcaggcctccgggctgtagaactccagcgaggactcaggagtcatgaagggcggccacatttgcccagaagttccattgatcatgttgcactgatcggaatgccagaagtcaacctggggggaagcatccagactagacccctcagtagggccaaggccccttaataagccctctcaggtgctgcacacctaactcaccctggtgcacgcacggccactcaattcccaatactggcacggtgggaagagggcaggctatgtagacacacagagagaatgcctaccacagcttccccctcccagacccctgaatgtgtaacttcgctagggactcagttctttcatctgcaaaataggcctatcacccacatttccagcctgaatctggaaaagaagtgtggtgagcaggtgaggtgagaggtggggcgcggctgtgctcagccctcagagcggaagtcaacaggcacctcctgaaaacaatcggcacacaggcaaactacttaaaatcataatggtggccaccaccgggcaaccccaaaacagaacctgtcaggttaactgactctggggagcgagacccagactcgacaaaaccaactgctcactttccaatcttctgtatgatgaggatgtttaaaatcacgtgcacatgtacagtatattggaatatacaagccacaatgaatgtgaactccatctatcgtgaatggctactgccagttgcagatggtgatttttgccactctgggcaccggttggggtacgatttgtccctagccctcagggtctttgcagtaactaccacggggagtggggagtgggaagtcacacagtcattttcacacatattgagaaaaggtcacgaaggtgaaaaaagccagttgcaaaacaatgcacgtagtatgatttcatgatgttcaaagaagaaacaattccgtatttctctgcgtacatataggtgtgcacatgggtaaaaatggatgggaagaatatatcccaaactgataattgtgggtttcctctggggcaaggggtaggggtgggaggtgatactaagggcacttatctccctctcttgttttattttgtaatgtgaatctcttctcttttttttggagaccgagtttcactcttctcacccaggctgaagtgaaattgcgtgatctcagctcactgcaaccttcacctcctgtgttcaagcgattctcctgcctcagctcatgagtagctgggattacaggcatgcaacaccacacccagctaattttttgtattttagtagagacagggttttgccatgttggcctggctggtctcgaactcctgacctcaggtgatcccccccacctcggcctcccaaagtgctgggattacaggcatgaactaccacgcccggccttcaaaacatttttgtaagtaaagaatcgaaaggaagaaagcactcagttcccagcagatgccaggtgctcagtaagctcagtaagcaatcactaaccccacctgcccctctgggtggtcaagctttaaccagaggtaaaatccctcctccaacttcaagagtgttcatcctcccagcaccctcttcacgacaaaggaagaaggagctctctggtccctgccactcccgagcagccatggccgggcccaccctcccctctccctggcgacaggggccctcgcctctcgcccctcaccttgctcagcccgttccacttgtccacgaggtggatcctgctgatgttctggacccccgtgaacaccgtgaagagcccagagtcggagttgttgagctacagacacagcagggaacagcatcgtaaggcttaggcctgccattgagccggcctggtctgaacattctgggctgagccctcctccccctccaccagaaggacagggcccccagcatctggttcactgccaaatgcccagtgtctggggaccgagaggaggcttgggagctttctaggaggaatggtcccgggttctgtggctgcagtgttccaccctcccttcctaactccaggagagtctggctttcctcccaggtaaatggcagatcacccccaccacaccctactccagcataaaataaagcatggccaggtcagctccctgagcaatgaaaaaggagaagtggcatgtcacttggggggatgctttaaggactgtgcacacgcctttcaccgggctctctgccgctgctatagcagccaaggaggtatgtgtcaagacagagcctccctcagcctggatccccaagtgaccaccacaagcgcgggtgccccagtcacccacactggacgtggagtgcaagcaaaggaataagtcttggttgttctaagccatggagattccggggctgcttgtcacagcagcaaaacctggcctgtcctaacccatcgaggttcttgatagtggggcccaggctttggtgctccgagagcatttcccagaagctggtttctaatcccaaagacatgcaaagcacaaagtggtatgagtgactgaaggaaatatctagaagtgctttgcagggtggagcacactgaggagctccaaggttgcccggctgagtgactgcacccatcacagacctccagagcaggacccagcacaaggccccagcccagcatcccgggtgtgtctgtcacgtgcccatgtggagccaagaataaccagagccactacaaaggggagcattaaagggactcatgtgcaaaaacggccaggtacagtgcaccggacacagtaagagctcaaaatgatagtctttattttcattattattgttattattaataaatgctcacccaataggatacttaaatgatcattataatggacggagagcatcagaaactgccagttactacccaaagcccaatctctccttactctttcatacaaaacccaaaccatactcagagcatcagcacacccagctaaaaggctacctttccagcttcccctggagctaggtgtggccatgtgactcagttctggccaatagaaaggaagtggacattggttttcttcctccctaagagggaggaaactggaacacgctgttttacccccagttcctccatctgctccccaaagccccaccattttttccttcttgctgtgctgcctggaatgtgatgtgattgctgacactctagcagccaacttggacaatgaggttatcttgaggatgaaaaccacatgccaaggatggcagagcacagtagtagaaggcttccagatcacttaagaccatgaagccaccacaccaacactgaacagcctaccgctagacttttcttgtgaggttttcattatatgcagtcaaacgtagattatactaaactagggactttgtaataactttcatttgcaaagcacttcaggatttacaagatgcctttacagcatcatgccacttagcccaaacttgctcatttacccacacgacaggagcccgtcacccttgacaaaaacgtactgagtatctatcacacgcagcaccacgatatcccccccagcactctaccctgatcagcagagaccaaagagatggctgaggctggagcagtcccaaggactcagtgaaacctgcggtgagggagccaaggtcagggtcagaccctccatggacgagatgttggctccgaagcccagtcagtgaccctaccaggttgccaagagtcaagattaagagtcagcttgtgatattactccccagcagccatgcccccttcctccagcaaagcctccaatttgctaagc

SEQ ID NO: 1210 - DNA, 4045 bp, Homo sapiens
caatgaaaaaggagaagtggcatgtcacttggggggatgctttaaggactgtgcacacgcctttcaccgggctctctgccgctgctatagcagccaaggaggtatgtgtcaagacagagcctccctcagcctggatccccaagtgaccaccacaagcgcgggtgccccagtcacccacactggacgtggagtgcaagcaaaggaataagtcttggttgttctaagccatggagattccggggctgcttgtcacagcagcaaaacctggcctgtcctaacccatcgaggttcttgatagtggggcccaggctttggtgctccgagagcatttcccagaagctggtttctaatcccaaagacatgcaaagcacaaagtggtatgagtgactgaaggaaatatctagaagtgctttgcagggtggagcacactgaggagctccaaggttgcccggctgagtgactgcacccatcacagacctccagagcaggacccagcacaaggccccagcccagcatcccgggtgtgtctgtcacgtgcccatgtggagccaagaataaccagagccactacaaaggggagcattaaagggactcatgtgcaaaaacggccaggtacagtgcaccggacacagtaagagctcaaaatgatagtctttattttcattattattgttattattaataaatgctcacccaataggatacttaaatgatcattataatggacggagagcatcagaaactgccagttactacccaaagcccaatctctccttactctttcatacaaaacccaaaccatactcagagcatcagcacacccagctaaaaggctacctttccagcttcccctggagctaggtgtggccatgtgactcagttctggccaatagaaaggaagtggacattggttttcttcctccctaagagggaggaaactggaacacgctgttttacccccagttcctccatctgctccccaaagccccaccattttttccttcttgctgtgctgcctggaatgtgatgtgattgctgacactctagcagccaacttggacaatgaggttatcttgaggatgaaaaccacatgccaaggatggcagagcacagtagtagaaggcttccagatcacttaagaccatgaagccaccacaccaacactgaacagcctaccgctagacttttcttgtgaggttttcattatatgcagtcaaacgtagattatactaaactagggactttgtaataactttcatttgcaaagcacttcaggatttacaagatgcctttacagcatcatgccacttagcccaaacttgctcatttacccacacgacaggagcccgtcacccttgacaaaaacgtactgagtatctatcacacgcagcaccacgatatcccccccagcactctaccctgatcagcagagaccaaagagatggctgaggctggagcagtcccaaggactcagtgaaacctgcggtgagggagccaaggtcagggtcagaccctccatggacgagatgttggctccgaagcccagtcagtgaccctaccaggttgccaagagtcaagattaagagtcagcttgtgatattactccccagcagccatgcccccttcctccagcaaagcctccaatttgctaagctaaggcccagtcacatcatttgagcctggatcaagctgtacctgaatccaaccctagcattttcagttctatgagccccaacattccccatttcactcaagccggtttgagtcaggttctcagtcacttacaacccacagccactagatccccagccagctacaaagcaagctggtgaccagtgtccaggctgtgtgaggggaagacaggacacaggcctgaatctttggcttctcaccaggccacacgtacctcagcaaataatccgaacttgtccttgaaggggaacatgcctggaaagtacttgttgatgagattcacaagggggtccttgtagccccacatgatctcacccacagtgcggttcatgaaggcacgttcgccgagggtggtgaatgccaaggtcatgatgagcttcagggtcatgggcttattctccatcatcaccgccgcaccctgcaaggcgaagggacactagtgtcagaggctggacgtggctggcccatcctcccttggccccagctgggcctcacagcaaagagcccatgaagggaaatgctggggtgcaggaggcccctggagtggccacgtggggcatctgggacaccagaaccaccctctgctcctccagtgccaaggccacatgtgctcccgagaaccccttctcccccttgcaccccactggactcaggctaagtgaactccagccccagtcccagaggcgggcctgtggctcagccctcaacaagacagccccttttggagatctcagaaatgtaaattgaaaagggaaaaaaaagtactttggccaggacttccaaaccaagacaggtggacccacctgggaaactcagaacccactgggggtggtggagacagcacagggccgaaagccacccaccaggcgtgagtccccacgctccgaccacctcagggactgctctctgcacaaggggcaggcgggaggagagacaggggacgaggtcagggtgcgaggcggcgtgggccacagggcagcctcaccaagaccaggatgttgggcatgacgatgtagtcgctctccgagccgtgggacttggagggctggaactggaaggtgcggtactcgaggaaggacacggtgtcgttgttgttgaaggtgatgttgcttttgtgcctgaactccctgtgggggaagccagtgggtcagacgccccgccccgctgcatgggacgtttcccttctactcgcctgcaatgcctgcctgggaaccaggggccctggacgtctgtgcacacctccggccccacagccaaagctgagctcggccccttcgccaagtctgtccctcccgccgcctgcccactgcaggacatggtgtcgccgcccacccggcctcgttctgctctcccccacccaacacggccatcgtctctccatctacaaaaggaagtaatcacaagccctacttcacagggcagctgtggggattaagcaatcagatacccagaaagcaatcaacacagccgccgggtgcagagaaagcacgaggtaaacatcagctgctgtgactgttgctgctgctgtccttatgatctctcatctctccaagccactctccaccatccagaagaatctttgaaaagtggaaatcaggtcgggagcagtggctcatgcctgtaaacccagcactttgggaggctgaggtgggcagatcacctgatgtcaggagttcaagaccatcctgcccaacatggcgaaaccacgtctctactaaaaatacaaaaattagctgggcatggtggcagatgcctgtaatcccagctactcgggaggctgaggcaggagaatcgcttgaacctggggggcggacgttgcagtgagccgagatcgcgccaccgcactccaacctgggtgaaagagagactccgtctcaaaaaaaaaagtagaaatcagatcgtgccatgctctggaccacaaccccactttgcatgcaggttaaaatcaggctcctaacgtgacctctgaggccctcagcaaggctcaggcctcgtctctccactgtctccctccctcgtaaccccagccgcacaggcctctgtcccagccttcagacctttgcacatgctctgcccgggactctgtctccccagggcctcttcccaccatgcgggtccagtgagtgtccctttgcagatgtgctcccgaccctccagtcagaccgagccccaaggccaccctccctcctgcactccggcttcacactgttttgtctgcacaatactgatggctgcctgatttccccttatttgtccacttctttactctctccccatcagaacatcagcttggtgaggcagggccttggtctgcctgcgcccccagcacacaggaggtgctcagtcagtgctc

SEQ ID NO: 1211 - DNA, 4044 bp, Homo sapiens
accatccagaagaatctttgaaaagtggaaatcaggtcgggagcagtggctcatgcctgtaaacccagcactttgggaggctgaggtgggcagatcacctgatgtcaggagttcaagaccatcctgcccaacatggcgaaaccacgtctctactaaaaatacaaaaattagctgggcatggtggcagatgcctgtaatcccagctactcgggaggctgaggcaggagaatcgcttgaacctggggggcggacgttgcagtgagccgagatcgcgccaccgcactccaacctgggtgaaagagagactccgtctcaaaaaaaaaagtagaaatcagatcgtgccatgctctggaccacaaccccactttgcatgcaggttaaaatcaggctcctaacgtgacctctgaggccctcagcaaggctcaggcctcgtctctccactgtctccctccctcgtaaccccagccgcacaggcctctgtcccagccttcagacctttgcacatgctctgcccgggactctgtctccccagggcctcttcccaccatgcgggtccagtgagtgtccctttgcagatgtgctcccgaccctccagtcagaccgagccccaaggccaccctccctcctgcactccggcttcacactgttttgtctgcacaatactgatggctgcctgatttccccttatttgtccacttctttactctctccccatcagaacatcagcttggtgaggcagggccttggtctgcctgcgcccccagcacacaggaggtgctcagtcagtgctcacagaatgaaggagtatagagagctttggcatttttgcccattctgtccactgctgggtcccctgtacttagaacggcagccaacacctagcaggtgctcagtaaacatttgttaaatgaacgagcgaatgagtgaatgagtgaacggaatgcagcagctgattcatgtttcccattcccaaacctcaggcacatttgctgggttttcatcttggctttcccagaaccagactgtgggtctccaacagcgggaacaccctctgcccgccccatccctggaacaccgtgtgccgggggcaagtcagctcccctgtctgtgaactgggaagtgggggtgtggaggaggggaggtgctgtgaaaacgccaggaggtaagggagttgtaacaggcacatccgccagccgtctcagagctccgagtgcatcctgagtgtcccggtgaccccatgaaggggctcttgtgtctctccagtctgcagacgggcaaactgaggctcagaggaatgaagtcacttcccctaggccacagccaggtacaggacaagcagaaagcaaaggcacaactctgtggtccttgggccagcatgttccacaaacagctgaccccttcccgtgctgacccacccggtcctctggcccagatagggtctggggggtcggtccctgctcctggtcatgcatgtgtgtgtgtgtgtgtgtgtgtgtgtgtatgtgtgtatgcatgtgtaggtacatgtgtgtgtatgtatgtgtgtgtgtatgtgtatgtacgtgtgtatgtatgtatgtgtgtatgtgtatgtgtatgtgtgtgtatgtatgtgtgtaactcacacatgcaccctccacccagacgcacaccattggtccctccctgctccataaagaacctctctaggcaacgtctggtgattcgcacctgtaatcccagcactttgagaggctgaggcggaggatcgcttgagcccaggacttcaaaaccagcctgggcaacatagcaagatcccatctctaaaaaaaaaaaaaaaaaaaaaaaaaaccctaaaacaaaaacttctctgggactagcacttaccccgactatgacttgcctgcttccggaacaatctctggggctcagtcagcagcctccccatcccgtccactctgagacccctcccctgcccagcctcagccggcccctccaccctcacctggacacagcctcacctgtacacgtagggcccgcgctcccgcacctgcggcttctcgcccttcaggatctcgctggggttcatgacgtcaaagaagtagacggagagatagaaggggatagggatctccttccacatgttgaaggacaggctactggggtcgatgcgcacgttctgcaggggaagggacaagtacgcttgtgaggagagtgatgagggccccacgccccaccacaaggctccggaacagctgcccgagcccggccagggaaggggctcctcggcgggagcttgggataggaggtggtgggaaagcccttcgcacatgaggctgtcgcacctggagcttatggaattaaacaggcaacctatccatgctgtcataatgcatcttaaaatatgtcctaacagcaacaggtgacaccagtcaagggactgtggtaaacaggggcccatgcaccacctaaagggagcgccggagctcagggtagcggatgggctcagggcagggatagcctcatgcaggaacatgggctccgtgtggccagggggatcattcattcattccacaagcaagcactgagcactaccacctgccaggcgggttctaagagctggggatgggagaatgaccaggacagaccaaaagcccagctatgtggggctttaccatagcggaggaaaggcaggcaccaaacaactcaggtaaaacgcatgccacgtgacagagcacagagaaaacacagcagggattggggagagactgggatttgagacagtcatcacgtaagtgaaatataggccaggcaccatggctcatgcctgtaatcccagaactttgggaggccgaggtaggaggatcaccagagcccaagagtttgagaccagcctgggcaacatagcaagaccctgtctctataaagaataattttatttatttatttattttttgagatggagtctcactctgttgcccaggctggagtgcagtggcatgatcttggctaactgcaacctctgcttctgtgttcaagcgattctcctgccttagcctcctgagtagctgggactacaggcccccaccatcacgcctggctaatttttgtatttttattttattttatttttttgagagggagtcttgctctgtggcccaggttggactgcagtggcgcgatctcggctcaccgaaacctccatattccgggttcaagcagttctcctccctcagcctcccgagtagctgggactacaggcacccaccaccatacctggttaatttttgttttagtttttgtttttgttttagtagaagtggggtttcaccacgttggccaggctggtctcctgacctcaagtgatccgtctgccttggcctcccaaagtgccaggattacaggcatgagccactgtgcctggcctataaaaaataattttttaaaaagtagctgggcatggtgctgcacacctgtagtcccagctacttgggaggctgagatgggagggtcacttgagccaaggaggtcgaggctgcagtgagctgtaatggcgccatttgtactccagcctgggtgtccaagcaacaccctgtctcataaaaaaaaaaaaaagaaaagaaagaaagaaaaagaacacacacaaacacaacctagacccaaaatcaaaacagaaggcagtgaggaagggagctcacaaatctagaaggtgaggcgcaggggacattccacagcaaccacagcctgtgcaaaggccctgtggtagggagacgctgggagagagcctccctgtgtggctgagtgagccagtcggaagatgagaacacagaagttttccatgaaaaccagaaataaagaaatgtatatgaaatctcctgatttaaaaatgttgcaaaaacatggttttcttaaagggactataggaaacacgcctggggtccacttggactcctctgccagctttcctcctctagatctataattcgctgccccagtgtcacagggaggtcccccctagtccacctgacccccaccctcaacccagccgggacatatctcgggccc

SEQ ID NO: 1212 - DNA, 4046 bp, Homo sapiens
gggagaggcaaaacaggaaaagcccccacctgccactccatccagcctcccgtttccacccgaccagccctgagaccccagggtttccacaatcttcctggcccaggggatgagtcagggatcagatccgccatctcttcccatgtgatggcactggggtgggcagaggctggccgagggccgctgaaggatggacacatcaccgctcaaaggcaaggaatgagagccagaaattttagaaagcaggtggaggaagggaccaggaggaattgcaggcttcttcaacccaagaggttcagacttgcactgtgactgccaggctgggagctgggggaggatccaggcacccaaccccggctcatcagaaacactctgctccaatctgattcacacaatgaggcttttgtgtgggagtctgtgggaagaccacgtgcactcctgagaaagcaatcagacaaatccaaatcaagggccatcctgccaaaagcacccgcctggcccctttacagatgccagtgtcctgaaagacccagcaaagagaaaagggctggagaacaggtctggattaaagaggaaaaacacatgaggcaaccagacacagcatgcaaccttggattcaaaaaaaaattttctttttctgagacggagactcactctgtcgcccaggctggagtgcagtggcacgatctcggctcactgcaacctccgcctcctgggttcaagcgattctcctgcctcagcctcccgagtagctgggactacaggtgtgcgccaccatgcctggctaatttttttacttttagtagagacagggtttcaccatgctgcccaggatggtctcaatctcttgaccttgtgatccacccgcctcggcctcccacagtgctgggattacaagcgtgagccaccacgcccggccaattcaaaattttttaatgaacaactatgacaaaaagtgttattggggccgtaagggaatctgaacacagactgtcagattaaaggtgtggatcctcgtggccttcttgagtggggccgtggtccacggccatggagaaggacgtccttgtccttaggatgcacccaaaaggctcagcaacgagagagagaggatgcacatgcagcaacttgtacttttcttcccgtttttacaaaataaaatctttgaaaatagaaccttgggtgatgtggtggtggaagaacacactgggctgctttattttacaagctggatgcctccctcgtgagaacggcagaacgagccgtggtacatccgcaccgtggagcgtttccaggcatctagagaatcagagcgtgatcatcaccagaaaatcccagctgactgaggacgacatggacaagcgatgacagcgtgagaaacccacggtgcagcaaagcgtgcatagtatggtcccatttcagcaaactgctgacagatggatccctctctatgtctgtgtctatccggttaagatgttggaaacagccagcccttacttgacacttgccgagctgctatttgaagtgtgacatgtgccaattctgccaccttaaaagccctatgtaggagacacttttattaacttcattttacagaaaagtaaaaaaggcacagagagggtaagtcacttgcctgaaggcacccaactgggaagtggccaagccaggatttgaacctgggctgcctgccttcaaagtccatatgctggggtccacctgagctgctggaagctaaagccctgccaaaggctggagagaagcctgggatgctgctgggacacactgcagggtaaacccagtggctaggattccagatcaactcctccacgggtgcatctgggcagctcatccctcccacccctacctcatcccctctctgcccacggcacacccctgcagcctctcaccttgggtggacaaagcctgaactttggcacaccagccctgatatctccccaactttttaaaaaatgcctcatcccagtcctgccgccaggatgtgaacaggcaggggtatcaatgggaccctgggaactttctgcctgaagaacattcgttagtgacttcctccggcacccacccaggccccttccacccttgctgcccgggccctcctggcctccatccagctagcctgggacagtcggccccacccagcactggctgctaactatctccgtggccttgagtaaacctctgctacctacagaatttggtttccaaaggaaaaataaaagatagaactgagcttcggaacccaagtcagtccagatctaacaatctgacagctgatgaaactttccccgttagagcaattaggccaggtacagtgattcatgaatgtaatcccagcactttggaagaccaaggtgggaggattgcttgaggccaggagttcaagaccagcctgggcaacatagcaagacccctgtctctacaaaaaatctaaaaattagctgggcatggtggtgcacacctgtagtcccagttattcaggaggccaaggtaggaggatcgattgagcctgagtggttgaagctgcagtgagccgtaatcatgccactgcactccagcttgggtgacagagtgagaccctgtctcaaaaaatctaaataaataaataataaagggtgggcactgtggcatatgcttataatcccagcactttgggaggccaaggtgggtggatcatttgaggtcaggagttccagaccagcctggccaacctggtgaaacctcgcctctactaaaaatacaaaaattagccgggtgtagtggtgggcacctgtaatcccaactactcaggaggctgaggcaggagaatcacttgaacccgggaggcggaggttgcagtgagccaagatcatgccactgcactccagcccgggcgacagactgagaccatgtctcaaaaaaataaataaataggccgggcttcgtggctcacacctgtaatcccagcactttgggaggtcgaggtgggcggatcacctgaggtcaggagttcgagaccagcctggccaacatggagaaaccctgtctctactaaaaatacaaaattagctgggcacagtggcgcagcctgtaatcccagctacttgggaggctgaggtgagagaatcgcttgaacctgggaggcaaaggttgcggtgagccgagatcacaccattgcactccagcctgggcaacaagagagaaactccgtctcaaaataaataggtaagtaaatataagtaaatacatacataataaacagctggtaagctactacctcctcaagaggccttggtaaacagaatagtcagccaaacaaaataatctctaatactgtaacagccagagacagtgaaaggcaatgtggggatgaagtgggaagctacctgggggcaaaggggctcagccccatttttgctgcctatggccgcctcttcccccgacaacagcccctcctttttgccttttgggaaccaccctactcctacctgagtctctgtgggcaagaactacttccctccctggctccaaatgggcaggcgacccaaggctgaccaatcacagcagtccattactcgagccacagcaattggtccaaggatgcacatgtgatcccagctcagccaatcacagccaatgagcattgactccataagttgtgccagccactgagaaaattctttaattctccttcaatatccctcaggaaggttcccttccaagagcttctgggaattccaaagcagtcagtttctccctgacgtggtgcagatgccatttattttctaagcgtcagaggaagccactggcaagtgagactggggcgtacatataaaaacataggaatctaattctagaatcgcattcagcctgtccagatgccctgtcacgggacccaggaagaacagcagggtcacaagaaactcactccctacattgacactaaccaagtctacttatgagggtcactgctgttttcctttttttttctaattgaatgcatgtagatgattttgcatgaatgacatgcttatgggccacacctccacatt

SEQ ID NO: 1213 - DNA, 4045 bp, Homo sapiens
caacctcccgagtagctggaattacaggcacatgccaccacgcctggctaatttttgtatttttagtagagatgaggtttcaccatgttggccaggctggtcttgaactcctgacctcaggtgacccacccacttcggcctcccaaagtgctgggattacaggcatgagccactgtgcccggcccaatttgcatgttttaaagagcatcctggctttgatggggagaagtgacaacagtgtggtataaatcagcagagcaaacagccccatgatgacactccagcatccactgggaaacaacggtggcagctcggtctggggcgacggccacggcaggtggaggagtaggccccattgccctgcacaggaccacaacctgccactggtcacgaaccatcctgtgaaacaacccttgtcttttaaacatcctttcaataaatatttgagaacctgcgattatgtgctaggcatcgttccaggggcttgggtcacggcaacgaataacacaaaggtccctgccctcacagtccgacattctcatggggagaaatagacaataaacaatcaacatgatacccagggaagttccagggtatctacagtggctgacaggtctaagcagagcgggtaaggagggctggcagcacagggggacaagggggaacctgcatgatgcacaaacggaatcaggggagggtctccgtgagcaagtgagagctgaacagagacctacgggagatgagagggcttgtgtcaggagagctaaggcgattgggcccatggggctgaggaatggccaggaggccattgtgcaagggaaaagggaatgcggacgtcgccagaaaagtggcaggggtggatggcacaggccctgggccaggttaggacctggctgtgactcctaggggacgggtctggccatgtcagggctttgaggggaggaggtgctaagtgcaatcttgatgggctcccatggctgcttattgagaaaccccactggggagcaaggatgagcacagggaggccagtgaggaggcggatgcaggaatctgggggagaggtgatggtgccttggaccagaggtgatggcgcctcgggcgtggtgagaagtagttggaatctgggtatatttagatgatgaagctagaaaactttctgacgggttctctgagggaagtggagagaacagagtcaaggctgagtgcaagatgttggcccgggcaactggaagatgggggggctatgatggagtgggaagctggtgggagccacaggtgtggccgagggtgatgaggagccagccggggcgagcgtgagctgcctttgaccccgagttgagatacggactctgctgttggacactcgggggtggggttcaggggaaaggtctgggcccagggataccaatttgggagtggtcaggacagagatgccattcaggcgcaaggctggaggagcccaccccagggatgagggatgaggacacacagaaaggatgcctggagctccaccagcaggaggcaggaggccagggagatgaggaggcatcagcaggcaagaagacagagcagccaggaaggtgggaggaaaacccagagaatggagatttaaagcgcctcaagggtccttctagaagcttccagagaaggtgtaaggaacttcacccaaaatgccaggaagtgaacaaggtcaggcccctcccgttccttccccctccccagcacaggcaatcagtgaacaggaagaaacagtggagtggagggaaagaaaacaagaaaattaagacggccaggccttgggccatgaggcttcctggaacccgggacctggggagcttctgagcaggcggagtgtctccatatctcacgcaggctttgggaggaaaatcgcccccaacacccacagggagccagcccctgggccctttaaggcttcaaagtcaagaacgcagctttttgtgttgtttttgtttctctttgcaagacagctccagcctggccacttgtgggccagcagagctcaaggtcatgtccaaacagggggagggagacgaggtaaataaaagggattctctttttgttttgcgtttttgatttttgactgagccctagcgttgaattctccgcacaattaatgtgtctgtggtgtcggagctgccagcgcctcctggagcagaaggcctggaccgaactctcctccacagaatcctccaggcccaagatttaaaccacaaactctctgggttcagccttggggggtgtggcttatggccccaggggcctctcttttgctgaccacagacatggaatcaccctctggacactaaggaacctccatgcaggacccacgaatgacagtgccaacaagcctgcagcaaatcgccactggggccaagactcatccaggaaaaacaccttcatggagcaagccctccatggggactcacttccatcccatttgctagaaaccaaaggccagggtaaggcgattccaggtggctgagcttcgccacgttctagttaatcagggtgcatctcccggcggaggcacagcaagtaccggccattccgggaagggacagggaatgtttcctggaaaccccaggtgctgggcctggccccagaaaggccaaccacagcgggacacatcaacatgtatgtgcagacacatcaacacacaaggacatgcataaacacgtgtgttcatgtgtgtccatttgcatgtacagacacaccatgtgtgcctgtgtcaacatatgtaggcacacatcaacacaggtgtctgcatacacatcatcacgtcgtcacacatcaaggcaggtgtgtgcatgcctacacaggtgtgtgtgtcactgttttcaccatcagcacttgtgtacacacaccaacacacgtgtgtgcaaacacacacacactcacgaagacagggagaggcaaatctaccaggagcaaataaactagactcacacaaactaaaaatagcccatgtttttcagccgtcgccagggagtaagttgaagctgtctctcacatgctagaaggagtaggaagttcaatggcaggaaagaggaagaaaaacaaaacagaattggcacacacctgtgatccaagctgtcctcgaggagccccctccccacctgtgcccagtgatcagttctagggctttgccccacatgtccaaacaagggggtcctacaggaaacgcccggtaggtggagacactgggcctcccccccaggttccgcaggggggctgataaaggcgcagagcgggcggcccctgcaggatgggtgggagtccagcccccggggtcactgggagccctgggctaggaacaggtggcctccccgggagcctcacttggtgcctttgattggagaacatgtccctggtctcagactacccccggaagggagaggccagggtgcactctgcaccagcaaagtttggcggggtgatgattaggacaaagcctcgaagggaccctgctgttccctggtgatgcacagaaaaggaaggggcagcccaggaagagaatataagaagggcaccccccgccgcccgccttaagcatgcagtcgacctgctcagacacacggagaaccgggaggacgcagtgcgcagaggccaccgggaccagctgtggagtcggcccccagacttgaaatcctgattcaaccgcttggagctatgtgacatggggcaagttactttccgcctctgtgcatccatttccctcaataaaataagacacaatagtacctattttagatactaaaatgaataatgcacataaacacttggaacagtatccggccacaacgagtgcccattgactgttatctcccatcaacccccatcttttaactgattgacaaagatttcccaaaaggcacaaactcagggacagccggtgacatccctggctggccctggtgccggggctccccaaggctcactgtgtggctctggctgagggaggcaggggtgagctaaagagcctgaggccagggctgggggtcgcgcccgcctcattcattctgta

SEQ ID NO: 1214 - DNA, 4037 bp, Homo sapiens
aagggtccttctagaagcttccagagaaggtgtaaggaacttcacccaaaatgccaggaagtgaacaaggtcaggcccctcccgttccttccccctccccagcacaggcaatcagtgaacaggaagaaacagtggagtggagggaaagaaaacaagaaaattaagacggccaggccttgggccatgaggcttcctggaacccgggacctggggagcttctgagcaggcggagtgtctccatatctcacgcaggctttgggaggaaaatcgcccccaacacccacagggagccagcccctgggccctttaaggcttcaaagtcaagaacgcagctttttgtgttgtttttgtttctctttgcaagacagctccagcctggccacttgtgggccagcagagctcaaggtcatgtccaaacagggggagggagacgaggtaaataaaagggattctctttttgttttgcgtttttgatttttgactgagccctagcgttgaattctccgcacaattaatgtgtctgtggtgtcggagctgccagcgcctcctggagcagaaggcctggaccgaactctcctccacagaatcctccaggcccaagatttaaaccacaaactctctgggttcagccttggggggtgtggcttatggccccaggggcctctcttttgctgaccacagacatggaatcaccctctggacactaaggaacctccatgcaggacccacgaatgacagtgccaacaagcctgcagcaaatcgccactggggccaagactcatccaggaaaaacaccttcatggagcaagccctccatggggactcacttccatcccatttgctagaaaccaaaggccagggtaaggcgattccaggtggctgagcttcgccacgttctagttaatcagggtgcatctcccggcggaggcacagcaagtaccggccattccgggaagggacagggaatgtttcctggaaaccccaggtgctgggcctggccccagaaaggccaaccacagcgggacacatcaacatgtatgtgcagacacatcaacacacaaggacatgcataaacacgtgtgttcatgtgtgtccatttgcatgtacagacacaccatgtgtgcctgtgtcaacatatgtaggcacacatcaacacaggtgtctgcatacacatcatcacgtcgtcacacatcaaggcaggtgtgtgcatgcctacacaggtgtgtgtgtcactgttttcaccatcagcacttgtgtacacacaccaacacacgtgtgtgcaaacacacacacactcacgaagacagggagaggcaaatctaccaggagcaaataaactagactcacacaaactaaaaatagcccatgtttttcagccgtcgccagggagtaagttgaagctgtctctcacatgctagaaggagtaggaagttcaatggcaggaaagaggaagaaaaacaaaacagaattggcacacacctgtgatccaagctgtcctcgaggagccccctccccacctgtgcccagtgatcagttctagggctttgccccacatgtccaaacaagggggtcctacaggaaacgcccggtaggtggagacactgggcctcccccccaggttccgcaggggggctgataaaggcgcagagcgggcggcccctgcaggatgggtgggagtccagcccccggggtcactgggagccctgggctaggaacaggtggcctccccgggagcctcacttggtgcctttgattggagaacatgtccctggtctcagactacccccggaagggagaggccagggtgcactctgcaccagcaaagtttggcggggtgatgattaggacaaagcctcgaagggaccctgctgttccctggtgatgcacagaaaaggaaggggcagcccaggaagagaatataagaagggcaccccccgccgcccgccttaagcatgcagtcgacctgctcagacacacggagaaccgggaggacgcagtgcgcagaggccaccgggaccagctgtggagtcggcccccagacttgaaatcctgattcaaccgcttggagctatgtgacatggggcaagttactttccgcctctgtgcatccatttccctcaataaaataagacacaatagtacctattttagatactaaaatgaataatgcacataaacacttggaacagtatccggccacaacgagtgcccattgactgttatctcccatcaacccccatcttttaactgattgacaaagatttcccaaaaggcacaaactcagggacagccggtgacatccctggctggccctggtgccggggctccccaaggctcactgtgtggctctggctgagggaggcaggggtgagctaaagagcctgaggccagggctgggggtcgcgcccgcctcattcattctgtaacctgactggtgttgaaggggtggcaaggagctcaggcgctgctatggccctcggggacgctgcagtgacagtgatgggaaagcccctgcctcagcagatacaggggtatcaggaaaaaagcatgcaggcaaagatgaccgaaggtttttgcctctaccccaggggaaacaaaaggaggtgccgtttattgagacagggatcataggtgggggaagcccagcagcaggacaaggcaaccgaggttgagtccatctagaaaaccaacttaaagacagcagaggggacccaggttctctcctggacatggaagaaggccatgaggcctatcattgaagatggtggtcttggaagatgaccccttccctgcagcccagcagtagtgaggggcctctccccacgtccaccagctgggccttccttggaggaccagagacatacgggaacttggatgtgtgccccccaggacctgaaccaggccttcgttactcacccacatacctgagcacagctgcatgccaggctcagatccagggaatgggagcaagagtccccattctcatggcatctgcctctgggacagacagacaccttcacacacacacacacgtgcacacatgcacgcacacacatacactagcgaggtcacttggggcaaattactctcttcagcttgtctccttaacggacactgaagacaataaatcatatgtcacggccctctgcagggactaaatgagacaattttcacaaaggtgctttgaaccctgcctggtgcacagtaagctgcccatgaatggatgccatgaagttcacaatcgcggcccttagtgtgcctgtccaaacacctctctccaatcctacccactggcagaagggaaaagaaatgagttgcgcttccccaaagcctctccaagcaacctcgaccacagggcccctttgcagtgtgcctcatcggtctgtgtggcgcattcatctggccagtctttgaggaaaactatgtatctgttcattcgtaattttttttttaagagatgggattttggccgggcgcggtggctcacacctgtaatcccagcactttgggaggccgagacgggcggatcacgaggtcaggagattgagaccatcctggctaaaacagtgaaaccccgtctccactaaaaatacaaaaaactaggtgggtgcggtggcgggcgcctgtagtcccagctactcaggaggctgaggcaggagaatggcgtgaacccggaaggtggagcttgcagtgagccgagatcgcaccactgcactccagcctgggcgacagagccagactccgtctcaaaaaaaaaaaaaagagatgggatttcactttgttgcccaggttggagtacagtggcacaaacacagctcactgcagcctcgagctcctgggctcaagatatcctcccacctcagcctctcaagtagctaggactataggtgcatgccaccatgcaccagcttagttttgttgttgttttgttttgtagagatgggggtctcactatgttgcccacgctagtcttaaactcagggcttcaagtgaccctcccacctcagccccataaagtgctgggatcgcaagtttga

SEQ ID NO: 1215 - DNA, 4043 bp, Homo sapiens
ttattgctgagacatggaaaatttttcagctggtatctttgaattgaaaaacaaattgcaagataattatacatgttcaagttcacctacacttagttcaagttatgtaaaatatatattaatatgtatacatacaggctcctggtacacagaaaagggtctagaaagatccacatcaatgatggtgataatagctcaggaggggaataaaatgggggaaactttctctcttttcctccatttgaacttttttttacgagcaagtattcatatattttatataaagtcgtccctcaatgtcagaggggaattggtttcaggacccccatagataccaagatctgcagatgctcaagtccccgacataaaatgctgtggtatttgcatatcacctatgcgcatcctcccgtattctttaaatcatctctaggttacttataatacctaatacgatgtaaatgctatgtcaatagttgttatacagtattgtttttatgtctttttttagttgtattgttattttggggggattttttctgaaaacttttcatctgcagttgattgaatccacggatgcagaacctgcagacacagagggccaactgtagggacttctgttgttaaccaaaaagcacattaaaaaaaaaaaataaaagcacaaggcctcccattcaagttgcacacagactcatgtagccaaagaaaacaccagcgggcagtccctgcttatgcgtgtgtctcacccgcctggtcccctgaacacaggctctcttcttccatgctaaggcacttggccgctgctccagcctgggcggttccagaagtggccgtcttgggctgggcgtgtcttcctgccttcacaccactcggccccaaaccaatcgcctttgggatatccacagaaggatgctgggaggctcctgttcaactttaagccagatgctcctagctccaggacaattgaggacaatgtggttttcctctttagaagcccaggagaggagtggggaaatttggtggtgcatgcatgtgtggtgcacacacacacacacacatcctactgacatacttaacctgatgacatcctgagaaagaaaacaccttgaaataagcccccgaataactgagttggcaagactctttacctggcataagtccccacactcccatagcaagagaccaggtgctcactcacagcacagggtcacatgcttgaactgcctgagtgatagcccctctagggaccctgcatacacacagtggggtcctggcactgcagcagccacaaggctgtcactgacacacacgtttcagtatgagtaggccacagaaaaataaagctccctcagtgtaacagagaaagcctctgagctgtcatgggggagaagaggccattctgctgattttcctgccatccccagagacagtgtcaccatccaccgggacctctttgcagtcagattacaggctttggcgggacaagatttgaaaaatcaaaaatagacacaacgtggctaagatgccctagacaactgctcacccagagaccttgagagagaccatatgttgctccatctttaaggccagctagctgggtcccaagaagtgtggcagccagatctaagcagatccttcattcattcactcattcattcgctctgtgaatgagggaacagacatgaaatgtggacaaggaaccattcttaagaaacccagtccaaagaggcaggccaaggggaaaagacgtccattagagtgacaatgtccacatcttcaccccagctctgcatctggctagaactttgataagagtgagccccagtttcccctccccgccactgcatgtgtgggttcccagggcttcaaaactctaaatggcttttagttcaaatgtgatactctgcaatctcccagcccttccctaactccaggctcattcaaacaggccacccaggcacccagggcagagtctgtccgtctgcagaccagctgaccgcctaatctgtctccctggttgaaagggcaatggtatgcaaagttaggatcagaggaaagacctaaggctgcgtgcactcagaggaccttgggctgctgcctgcctctgcatgaatctggggagaaaagcggcttatagtttccagactgaatcatggaggcagtgagcagggagaacagagtcgcgcattctgcctctgggagagggttcctatggggagattctgggcagtggaggatgctcagctgagcacctaccatgtgagctgggcacccacgtgggtctcacagaaggttcctgtcctcctgggctcacaggatacaagcaaagtgcagctctaattttaccggaccctgctaccggctgctgtgaaagcagacgttcacacactcttgggctccttcgggcggcaccacggaagcaacctgtccacactcctgatccgtcgtgggcgcccagaccctttagggcgggtcaggcgcccgggtggtctcccgtccaggcctccccaaccctggcctgcgcctccagcaaagcccctgggttcccccctagcctcagtctggggcggtgagggtggtggggaggcgggcagcagcccctcccgaagcgcctggcctccctcgtgctctgcggcgccaggcccgggcgccgattccgctgcggtcgcccacccaccgcaacgcgcgggtcctcccggcgcccagcgcccaacagcccgggtccgtgcgcggaccccctggggtctccctcacccaccttaaggacctgctgcttgatgagcgacggcaccatcacgatcatgacagcgcccagcacagcgcacagtagccccgcgacgcccagcgccccggcagcccagcgcgctttggcggagcagcccatgtctgcgcgcctggggcccacccgcggctcgcagggctccgcgcctggcaggagacggggacggcgacagagacgacacaggcggggactccgggcacgcaggccgcagaggcacggtggatccgggacggcagcgcacgcaggagcagcccggcaggtggccagtggttttatgccccatcgccggcgccgccggaccgcccccgggcagccttgggcttcaggattccggcggcaggggcggggcctgagcgggcccggggcggggtcggggcggggacggggcggggcgctgatcggacgggcagggggcggggccatggccgccaagacaagccccgccatgctgccgctgcccccacggcctcgcttccgttttggggcgggagctgaggaggcctcgtggccgctgagccaaaacgtctatggggcctggtgcccctcaccctcttgctcccttcccctttctcctaccccttcccccacctatgtctcccctcctcccagctctcccctctgagcccctcacccttccttttccctcctcctccctctcctcctctatcgggaccatcatcatggttggtcactgtgagtaggacttcgccagcccacccaggaaccccagagcccttacaacggtccacatgccccgccaccaccttctagaccctcatctccgcagtccatctccagcctcactgtccctggaagaagccccgcaggctccagccccagggcctccatacaccctgcacaggcaattctgttctcccaggtatccgcctggccctatccttcgtaacgctggtgccaccatcaccctatgactgagcaccccctggcaggttcacgttcatttgcgtccttgcattctgaccatgtgctccaactgggatgccaacccgtgaggcgggcccccccccccacgcgtcctgagctctagaacgtggcctggcagggaatgcctgctcacagtaaatattctagaatgaatgactgaggagccttctaggtgctggcccctgtcctgagtgctttgcacacaatggctccattttacaataagaaaactgggaggtggctcacgcctgtaatcccagcactttgggaggccgaggcgggtggacttcatggatcacctgaggtcgggagttggaga

SEQ ID NO: 1216 - DNA, 4034 bp, Homo sapiens
gccagatgctcctagctccaggacaattgaggacaatgtggttttcctctttagaagcccaggagaggagtggggaaatttggtggtgcatgcatgtgtggtgcacacacacacacacacatcctactgacatacttaacctgatgacatcctgagaaagaaaacaccttgaaataagcccccgaataactgagttggcaagactctttacctggcataagtccccacactcccatagcaagagaccaggtgctcactcacagcacagggtcacatgcttgaactgcctgagtgatagcccctctagggaccctgcatacacacagtggggtcctggcactgcagcagccacaaggctgtcactgacacacacgtttcagtatgagtaggccacagaaaaataaagctccctcagtgtaacagagaaagcctctgagctgtcatgggggagaagaggccattctgctgattttcctgccatccccagagacagtgtcaccatccaccgggacctctttgcagtcagattacaggctttggcgggacaagatttgaaaaatcaaaaatagacacaacgtggctaagatgccctagacaactgctcacccagagaccttgagagagaccatatgttgctccatctttaaggccagctagctgggtcccaagaagtgtggcagccagatctaagcagatccttcattcattcactcattcattcgctctgtgaatgagggaacagacatgaaatgtggacaaggaaccattcttaagaaacccagtccaaagaggcaggccaaggggaaaagacgtccattagagtgacaatgtccacatcttcaccccagctctgcatctggctagaactttgataagagtgagccccagtttcccctccccgccactgcatgtgtgggttcccagggcttcaaaactctaaatggcttttagttcaaatgtgatactctgcaatctcccagcccttccctaactccaggctcattcaaacaggccacccaggcacccagggcagagtctgtccgtctgcagaccagctgaccgcctaatctgtctccctggttgaaagggcaatggtatgcaaagttaggatcagaggaaagacctaaggctgcgtgcactcagaggaccttgggctgctgcctgcctctgcatgaatctggggagaaaagcggcttatagtttccagactgaatcatggaggcagtgagcagggagaacagagtcgcgcattctgcctctgggagagggttcctatggggagattctgggcagtggaggatgctcagctgagcacctaccatgtgagctgggcacccacgtgggtctcacagaaggttcctgtcctcctgggctcacaggatacaagcaaagtgcagctctaattttaccggaccctgctaccggctgctgtgaaagcagacgttcacacactcttgggctccttcgggcggcaccacggaagcaacctgtccacactcctgatccgtcgtgggcgcccagaccctttagggcgggtcaggcgcccgggtggtctcccgtccaggcctccccaaccctggcctgcgcctccagcaaagcccctgggttcccccctagcctcagtctggggcggtgagggtggtggggaggcgggcagcagcccctcccgaagcgcctggcctccctcgtgctctgcggcgccaggcccgggcgccgattccgctgcggtcgcccacccaccgcaacgcgcgggtcctcccggcgcccagcgcccaacagcccgggtccgtgcgcggaccccctggggtctccctcacccaccttaaggacctgctgcttgatgagcgacggcaccatcacgatcatgacagcgcccagcacagcgcacagtagccccgcgacgcccagcgccccggcagcccagcgcgctttggcggagcagcccatgtctgcgcgcctggggcccacccgcggctcgcagggctccgcgcctggcaggagacggggacggcgacagagacgacacaggcggggactccgggcacgcaggccgcagaggcacggtggatccgggacggcagcgcacgcaggagcagcccggcaggtggccagtggttttatgccccatcgccggcgccgccggaccgcccccgggcagccttgggcttcaggattccggcggcaggggcggggcctgagcgggcccggggcggggtcggggcggggacggggcggggcgctgatcggacgggcagggggcggggccatggccgccaagacaagccccgccatgctgccgctgcccccacggcctcgcttccgttttggggcgggagctgaggaggcctcgtggccgctgagccaaaacgtctatggggcctggtgcccctcaccctcttgctcccttcccctttctcctaccccttcccccacctatgtctcccctcctcccagctctcccctctgagcccctcacccttccttttccctcctcctccctctcctcctctatcgggaccatcatcatggttggtcactgtgagtaggacttcgccagcccacccaggaaccccagagcccttacaacggtccacatgccccgccaccaccttctagaccctcatctccgcagtccatctccagcctcactgtccctggaagaagccccgcaggctccagccccagggcctccatacaccctgcacaggcaattctgttctcccaggtatccgcctggccctatccttcgtaacgctggtgccaccatcaccctatgactgagcaccccctggcaggttcacgttcatttgcgtccttgcattctgaccatgtgctccaactgggatgccaacccgtgaggcgggcccccccccccacgcgtcctgagctctagaacgtggcctggcagggaatgcctgctcacagtaaatattctagaatgaatgactgaggagccttctaggtgctggcccctgtcctgagtgctttgcacacaatggctccattttacaataagaaaactgggaggtggctcacgcctgtaatcccagcactttgggaggccgaggcgggtggacttcatggatcacctgaggtcgggagttggagaccagcctgaccaacatggcgaaaccccgtctctactaacaatacaaaattagccaggcgtagtggcgcatgcctgtaatctcagctactcgggaggctgaggcaggagaatcgcttgaacccgggaggcggaggttgtggcgagccgagatagcgccattgcactccagcctgggcaacaagagcgaaactccatctcaaaaaaaaaaaaaaagaaaagaaaaagaaaaagaaagaaagaaatgaaaactgatgcacagggaagcttagttaacccaaaccaagtccccactttctaatgaagagggaaaccaatgatgagcacgtgagcaaatgaatgaaggataattgcaggcaagtgctccaagaaaacagaacaggcccggtgcatggtggcccacaactgtaatcccagcactttggaaggtccaggtgagggatcacttgaggccactagttggagaccagcctgggcaacatagtgagaccagtctctacagaaaatgaaaagattaaccagccacagtggcatgcgcttgtcgccccagctactcaggaggctgaggcagaaggatcccttgagtcccagagttcaaggctgcagtgagccctgatcttaccaccgcactccagcctgggtgacagcaagaccctgggggaaaaagaaaaaagaaaaaagggagagaagtgggctggcactaagtggcagttgcccttagatgggtgagtgtatccctgaagccctccacgcccccctgaagtcctccaccacaccccacctggcctgccttctggtccctgaagtgctggccagtcccctcattttctgaatgaagttactgagaagagactcctgggttacacagggacaggagggtggtgtccccagcacgtgggtaaggcaggctcagtccttgagtgctccg

SEQ ID NO: 1217 - DNA, 4047 bp, Homo sapiens
gctcaaggaggtgggaactcacggactccgagtcctcacaggaggtgccctgggcggcaggagtgggaggggaggcccatgtccctgcagtccccgacacccacgctcccgggacacccacgacccccgggacacccacacccccgggacacccacgccccccggacacccacgcccctgggacactcacacttctgggatacccacgcccccgggacacccacactcccgggacacccacgcccccgggacacccacactcccgggacaccctcgcctccggaacacccacactcccgggacaccctcgcctccggaacacccacactcccgggacatccactcccccgggacacccacactcccgggacacccacgcccccgggacacccacacccctgggacacccacgctcccgggacacccacgcccccgggacacccacgctcccgggacaccctcgcctccggaacacccacactcccgggacaccctcgcctccggaacacccacactcccgggacacccactcccccgggacacccacactcccgggacacccacgcccccgggacacccacacccctgggacacccacactcccgggacaccctcgcctctggaacacccacactcccgggacacccacgacccccgggacacccacacccccgggacactcacacttctgggataccctcgcctctggaacacccacactcccgggacacccacgcccccgggacacccacactcctgggacaccctcgcctccgggacacccacactcccgggacacccactcccccgggacacccacactcccgggacacccacgcccccgggacacccacgctcccgggacaccctcgcctccgggacacccacgctcctgggacaccctcgcctccggaacacccacactcccgggacacccactcccccgggacacccacactcccgggacacccacacccccgggacacccacacccccgggacacccacactcccgggacaccctcgcctccggaacacccacactcccgggacaccctcgcctccggaacacccacactcccgggacacccacaacccccgggacacccacgcccccgggacacccacactcccgggacaccctcgcctccggaacacccacactcccgggacaccctcgcctccggaacacccacactcccgggacacccacgcccctgggacacccacactcccgggacaccctcgcctccggaacacccacactcccgggacaccctcacctccggaacacccacactcccgggacacccacgcccccgggacacccacactcccgggacaccctcgcctccggaacacccacactcccgggacaccctcacctccggaacacccacactcccgggacacccacgcccccgggacacccacacccccgggacacccacgcccctgggacactcacacttctgggataccctcgcctccggaacacccacgcccccgggacacccacgcccccgggacacccacgcccccgggacacgcacactcccgggacaccctcgcctccggaacacccacactcccgggacacccacactcccgggacacccacgcccccgggacacccacactcccgggacacccacgcccccgggacacccacactcccgggacacccacgcccccgggacacccacgctcccgggacacccacgcccccgggacacccacactcccgggacaccctcgcctccgggacacccacactcccgggacacccactcccccgggacacccacactcccgggacaccctcgcctccgggacacccacactcccgggacacccactcccccgggacacccacactcccgggacacccacgcccccgggacacccacactcccgggacaccctcgcctccgggacacccacactcccgggacacccactcccccgggacacccacactcccgggacaccctcgcctccgggacacccacactcccgggacacccacgcccccgggacacccacactcccgggacacccacgcccccgggacacccacactcctgggacacccacgcccccgggacacccacactcccgggacacccacacccttggaggctggtgtgagcagagccggtgaccgccctggggtgaaagcagatttgcatcagaaaagctctcaagaactgaggaaaacctgatgaagaacacacgattatctggaaggaacagaatggagcaaagaagataaaatcgcctgcaccccagtcccagggaaggccaagctggagcggtcacttcctctcgagcagggaacaccctccttggggggcactgcagtagccaccccgcgggctggctctttgccatgggaggggaaggaggtgatgttggcccccactgggccccaggacaaaaccagtggcagtccctgctcacctctgtgaggccccggcttccacggcatgtcccgtgtttctcctcctgaggccttagcgaccccgcctggggcaggaaggtggccggggtcataaggccatgctgtgagctagggctgcagccccacatcccaggcactgtccctcacagcccaccccccactcgccatccccacacgccatccccacgccccactagccatcctcacgccacaccccctactcgccatccccatgccccactcaccattcccaggccccagccccactcgccatccccacccccccatgccccatcctctgcaccccacacgccctttccatgccccatcccccacaccccacatgccccatccccgacaccccacacaccccatcccccacacctccatgccccatcccctgcaccccacacgccctttccatgccccatcccccacaccccacacactttcccacacctcacccccacaccccatgccccacatgctgtttcccaggccccacccccccacggcccatcccccacaccccacacgccatccccacccccgatcctccacaccccatcccctacgccccacatgccgtttcccacaccccatcccccatgccccaggcgccatcccccacgcaccgtcccctacctgtgctccccagcctgggagcaccctgtgcgcacttcctgcactctgagaggccccagactccctgcgcttgtccgacctcacaggcaggggcccatgggggccaggaaagcaccacccactcctaaagttctttgaaaaataatcccgccaaagcctgggccaccaagaagggcctcccctcctgtgcctggatgctggtttctagaaggaaagaaattgaacaggagccgccagaaaaccctcctggtggatgggggtgtccggagcaagggcggggtttgggaagcccgggctggctcctggatttgcccactgcccttccaccaagtttatggagaaaacctccccggacgcacctgcagccaggcagccctgaagcccaagcagaaggcagaggagcctgagggcctgggagaccatgatgaaatctctgcagtgctgcccctgcctgttgacattccccatgggactgacgggcaaagttctctgcctccaagggtgacagagggatgggggaggggaggacacaggcgtcctctgaacaccccagctgagagctgcacctggccggccagtggccatgcatcccctgctgcccagccactgagctcaagtgggggggacaggagaaaggtcaggtgaccccagctgtgctgcagagcggacggttttgttgccagcgtgcaggtgttaaggtgtgtgtggcaccaacacttcaaatacgatctagaattccaaacccctaatgtaagttgggaaacagatttaaactgcagatgaaaacttgtcccatagcaatcatgcgagtcaaatctcaagactgtatcttgggtgtggatgtaaatatttgaagagagcctccagaccaggccagctaggccgttgcctgcaagggaggctggtttcttaggtgagccacagagcctcactgagaag

SEQ ID NO: 1218 - DNA, 4041 bp, Homo sapiens
aggaggtgggaactcacggactccgagtcctcacaggaggtgccctgggcggcaggagtgggaggggaggcccatgtccctgcagtccccgacacccacgctcccgggacacccacgacccccgggacacccacacccccgggacacccacgccccccggacacccacgcccctgggacactcacacttctgggatacccacgcccccgggacacccacactcccgggacacccacgcccccgggacacccacactcccgggacaccctcgcctccggaacacccacactcccgggacaccctcgcctccggaacacccacactcccgggacatccactcccccgggacacccacactcccgggacacccacgcccccgggacacccacacccctgggacacccacgctcccgggacacccacgcccccgggacacccacgctcccgggacaccctcgcctccggaacacccacactcccgggacaccctcgcctccggaacacccacactcccgggacacccactcccccgggacacccacactcccgggacacccacgcccccgggacacccacacccctgggacacccacactcccgggacaccctcgcctctggaacacccacactcccgggacacccacgacccccgggacacccacacccccgggacactcacacttctgggataccctcgcctctggaacacccacactcccgggacacccacgcccccgggacacccacactcctgggacaccctcgcctccgggacacccacactcccgggacacccactcccccgggacacccacactcccgggacacccacgcccccgggacacccacgctcccgggacaccctcgcctccgggacacccacgctcctgggacaccctcgcctccggaacacccacactcccgggacacccactcccccgggacacccacactcccgggacacccacacccccgggacacccacacccccgggacacccacactcccgggacaccctcgcctccggaacacccacactcccgggacaccctcgcctccggaacacccacactcccgggacacccacaacccccgggacacccacgcccccgggacacccacactcccgggacaccctcgcctccggaacacccacactcccgggacaccctcgcctccggaacacccacactcccgggacacccacgcccctgggacacccacactcccgggacaccctcgcctccggaacacccacactcccgggacaccctcacctccggaacacccacactcccgggacacccacgcccccgggacacccacactcccgggacaccctcgcctccggaacacccacactcccgggacaccctcacctccggaacacccacactcccgggacacccacgcccccgggacacccacacccccgggacacccacgcccctgggacactcacacttctgggataccctcgcctccggaacacccacgcccccgggacacccacgcccccgggacacccacgcccccgggacacgcacactcccgggacaccctcgcctccggaacacccacactcccgggacacccacactcccgggacacccacgcccccgggacacccacactcccgggacacccacgcccccgggacacccacactcccgggacacccacgcccccgggacacccacgctcccgggacacccacgcccccgggacacccacactcccgggacaccctcgcctccgggacacccacactcccgggacacccactcccccgggacacccacactcccgggacaccctcgcctccgggacacccacactcccgggacacccactcccccgggacacccacactcccgggacacccacgcccccgggacacccacactcccgggacaccctcgcctccgggacacccacactcccgggacacccactcccccgggacacccacactcccgggacaccctcgcctccgggacacccacactcccgggacacccacgcccccgggacacccacactcccgggacacccacgcccccgggacacccacactcctgggacacccacgcccccgggacacccacactcccgggacacccacacccttggaggctggtgtgagcagagccggtgaccgccctggggtgaaagcagatttgcatcagaaaagctctcaagaactgaggaaaacctgatgaagaacacacgattatctggaaggaacagaatggagcaaagaagataaaatcgcctgcaccccagtcccagggaaggccaagctggagcggtcacttcctctcgagcagggaacaccctccttggggggcactgcagtagccaccccgcgggctggctctttgccatgggaggggaaggaggtgatgttggcccccactgggccccaggacaaaaccagtggcagtccctgctcacctctgtgaggccccggcttccacggcatgtcccgtgtttctcctcctgaggccttagcgaccccgcctggggcaggaaggtggccggggtcataaggccatgctgtgagctagggctgcagccccacatcccaggcactgtccctcacagcccaccccccactcgccatccccacacgccatccccacgccccactagccatcctcacgccacaccccctactcgccatccccatgccccactcaccattcccaggccccagccccactcgccatccccacccccccatgccccatcctctgcaccccacacgccctttccatgccccatcccccacaccccacatgccccatccccgacaccccacacaccccatcccccacacctccatgccccatcccctgcaccccacacgccctttccatgccccatcccccacaccccacacactttcccacacctcacccccacaccccatgccccacatgctgtttcccaggccccacccccccacggcccatcccccacaccccacacgccatccccacccccgatcctccacaccccatcccctacgccccacatgccgtttcccacaccccatcccccatgccccaggcgccatcccccacgcaccgtcccctacctgtgctccccagcctgggagcaccctgtgcgcacttcctgcactctgagaggccccagactccctgcgcttgtccgacctcacaggcaggggcccatgggggccaggaaagcaccacccactcctaaagttctttgaaaaataatcccgccaaagcctgggccaccaagaagggcctcccctcctgtgcctggatgctggtttctagaaggaaagaaattgaacaggagccgccagaaaaccctcctggtggatgggggtgtccggagcaagggcggggtttgggaagcccgggctggctcctggatttgcccactgcccttccaccaagtttatggagaaaacctccccggacgcacctgcagccaggcagccctgaagcccaagcagaaggcagaggagcctgagggcctgggagaccatgatgaaatctctgcagtgctgcccctgcctgttgacattccccatgggactgacgggcaaagttctctgcctccaagggtgacagagggatgggggaggggaggacacaggcgtcctctgaacaccccagctgagagctgcacctggccggccagtggccatgcatcccctgctgcccagccactgagctcaagtgggggggacaggagaaaggtcaggtgaccccagctgtgctgcagagcggacggttttgttgccagcgtgcaggtgttaaggtgtgtgtggcaccaacacttcaaatacgatctagaattccaaacccctaatgtaagttgggaaacagatttaaactgcagatgaaaacttgtcccatagcaatcatgcgagtcaaatctcaagactgtatcttgggtgtggatgtaaatatttgaagagagcctccagaccaggccagctaggccgttgcctgcaagggaggctggtttcttaggtgagccacagagcctcactgagaa

SEQ ID NO: 1219 - DNA, 4107 bp, Homo sapiens
aaggccactgcctgttttctttaaaatcagtttcacacgtcgacgcccctagagaactggtctggtttggaaggaggctgaggatgcaggcggggacaccaaagaatcgggctcaaggaggtgggaactcacggactccgagtcctcacaggaggtgccctgggcggcaggagtgggaggggaggcccatgtccctgcagtccccgacacccacgctcccgggacacccacgacccccgggacacccacacccccgggacacccacgccccccggacacccacgcccctgggacactcacacttctgggatacccacgcccccgggacacccacactcccgggacacccacgcccccgggacacccacactcccgggacaccctcgcctccggaacacccacactcccgggacaccctcgcctccggaacacccacactcccgggacatccactcccccgggacacccacactcccgggacacccacgcccccgggacacccacacccctgggacacccacgctcccgggacacccacgcccccgggacacccacgctcccgggacaccctcgcctccggaacacccacactcccgggacaccctcgcctccggaacacccacactcccgggacacccactcccccgggacacccacactcccgggacacccacgcccccgggacacccacacccctgggacacccacactcccgggacaccctcgcctctggaacacccacactcccgggacacccacgacccccgggacacccacacccccgggacactcacacttctgggataccctcgcctctggaacacccacactcccgggacacccacgcccccgggacacccacactcctgggacaccctcgcctccgggacacccacactcccgggacacccactcccccgggacacccacactcccgggacacccacgcccccgggacacccacgctcccgggacaccctcgcctccgggacacccacgctcctgggacaccctcgcctccggaacacccacactcccgggacacccactcccccgggacacccacactcccgggacacccacacccccgggacacccacacccccgggacacccacactcccgggacaccctcgcctccggaacacccacactcccgggacaccctcgcctccggaacacccacactcccgggacacccacaacccccgggacacccacgcccccgggacacccacactcccgggacaccctcgcctccggaacacccacactcccgggacaccctcgcctccggaacacccacactcccgggacacccacgcccctgggacacccacactcccgggacaccctcgcctccggaacacccacactcccgggacaccctcacctccggaacacccacactcccgggacacccacgcccccgggacacccacactcccgggacaccctcgcctccggaacacccacactcccgggacaccctcacctccggaacacccacactcccgggacacccacgcccccgggacacccacacccccgggacacccacgcccctgggacactcacacttctgggataccctcgcctccggaacacccacgcccccgggacacccacgcccccgggacacccacgcccccgggacacgcacactcccgggacaccctcgcctccggaacacccacactcccgggacacccacactcccgggacacccacgcccccgggacacccacactcccgggacacccacgcccccgggacacccacactcccgggacacccacgcccccgggacacccacgctcccgggacacccacgcccccgggacacccacactcccgggacaccctcgcctccgggacacccacactcccgggacacccactcccccgggacacccacactcccgggacaccctcgcctccgggacacccacactcccgggacacccactcccccgggacacccacactcccgggacacccacgcccccgggacacccacactcccgggacaccctcgcctccgggacacccacactcccgggacacccactcccccgggacacccacactcccgggacaccctcgcctccgggacacccacactcccgggacacccacgcccccgggacacccacactcccgggacacccacgcccccgggacacccacactcctgggacacccacgcccccgggacacccacactcccgggacacccacacccttggaggctggtgtgagcagagccggtgaccgccctggggtgaaagcagatttgcatcagaaaagctctcaagaactgaggaaaacctgatgaagaacacacgattatctggaaggaacagaatggagcaaagaagataaaatcgcctgcaccccagtcccagggaaggccaagctggagcggtcacttcctctcgagcagggaacaccctccttggggggcactgcagtagccaccccgcgggctggctctttgccatgggaggggaaggaggtgatgttggcccccactgggccccaggacaaaaccagtggcagtccctgctcacctctgtgaggccccggcttccacggcatgtcccgtgtttctcctcctgaggccttagcgaccccgcctggggcaggaaggtggccggggtcataaggccatgctgtgagctagggctgcagccccacatcccaggcactgtccctcacagcccaccccccactcgccatccccacacgccatccccacgccccactagccatcctcacgccacaccccctactcgccatccccatgccccactcaccattcccaggccccagccccactcgccatccccacccccccatgccccatcctctgcaccccacacgccctttccatgccccatcccccacaccccacatgccccatccccgacaccccacacaccccatcccccacacctccatgccccatcccctgcaccccacacgccctttccatgccccatcccccacaccccacacactttcccacacctcacccccacaccccatgccccacatgctgtttcccaggccccacccccccacggcccatcccccacaccccacacgccatccccacccccgatcctccacaccccatcccctacgccccacatgccgtttcccacaccccatcccccatgccccaggcgccatcccccacgcaccgtcccctacctgtgctccccagcctgggagcaccctgtgcgcacttcctgcactctgagaggccccagactccctgcgcttgtccgacctcacaggcaggggcccatgggggccaggaaagcaccacccactcctaaagttctttgaaaaataatcccgccaaagcctgggccaccaagaagggcctcccctcctgtgcctggatgctggtttctagaaggaaagaaattgaacaggagccgccagaaaaccctcctggtggatgggggtgtccggagcaagggcggggtttgggaagcccgggctggctcctggatttgcccactgcccttccaccaagtttatggagaaaacctccccggacgcacctgcagccaggcagccctgaagcccaagcagaaggcagaggagcctgagggcctgggagaccatgatgaaatctctgcagtgctgcccctgcctgttgacattccccatgggactgacgggcaaagttctctgcctccaagggtgacagagggatgggggaggggaggacacaggcgtcctctgaacaccccagctgagagctgcacctggccggccagtggccatgcatcccctgctgcccagccactgagctcaagtgggggggacaggagaaaggtcaggtgaccccagctgtgctgcagagcggacggttttgttgccagcgtgcaggtgttaaggtgtgtgtggcaccaacacttcaaatacgatctagaattccaaacccctaatgtaagttgggaaacagatttaaactgcagatgaaaacttgtcccatagcaatcatgcgagtcaaatctcaagactgtatcttgggtgtggatgtaaatatttgaagagagcctccagaccaggccagctaggccgttgc

SEQ ID NO: 1220 - DNA, 4047 bp, Homo sapiens
gggacggaaggtgagcgctactgggccacgtggggccgagagaaaggccactgcctgttttctttaaaatcagtttcacacgtcgacgcccctagagaactggtctggtttggaaggaggctgaggatgcaggcggggacaccaaagaatcgggctcaaggaggtgggaactcacggactccgagtcctcacaggaggtgccctgggcggcaggagtgggaggggaggcccatgtccctgcagtccccgacacccacgctcccgggacacccacgacccccgggacacccacacccccgggacacccacgccccccggacacccacgcccctgggacactcacacttctgggatacccacgcccccgggacacccacactcccgggacacccacgcccccgggacacccacactcccgggacaccctcgcctccggaacacccacactcccgggacaccctcgcctccggaacacccacactcccgggacatccactcccccgggacacccacactcccgggacacccacgcccccgggacacccacacccctgggacacccacgctcccgggacacccacgcccccgggacacccacgctcccgggacaccctcgcctccggaacacccacactcccgggacaccctcgcctccggaacacccacactcccgggacacccactcccccgggacacccacactcccgggacacccacgcccccgggacacccacacccctgggacacccacactcccgggacaccctcgcctctggaacacccacactcccgggacacccacgacccccgggacacccacacccccgggacactcacacttctgggataccctcgcctctggaacacccacactcccgggacacccacgcccccgggacacccacactcctgggacaccctcgcctccgggacacccacactcccgggacacccactcccccgggacacccacactcccgggacacccacgcccccgggacacccacgctcccgggacaccctcgcctccgggacacccacgctcctgggacaccctcgcctccggaacacccacactcccgggacacccactcccccgggacacccacactcccgggacacccacacccccgggacacccacacccccgggacacccacactcccgggacaccctcgcctccggaacacccacactcccgggacaccctcgcctccggaacacccacactcccgggacacccacaacccccgggacacccacgcccccgggacacccacactcccgggacaccctcgcctccggaacacccacactcccgggacaccctcgcctccggaacacccacactcccgggacacccacgcccctgggacacccacactcccgggacaccctcgcctccggaacacccacactcccgggacaccctcacctccggaacacccacactcccgggacacccacgcccccgggacacccacactcccgggacaccctcgcctccggaacacccacactcccgggacaccctcacctccggaacacccacactcccgggacacccacgcccccgggacacccacacccccgggacacccacgcccctgggacactcacacttctgggataccctcgcctccggaacacccacgcccccgggacacccacgcccccgggacacccacgcccccgggacacgcacactcccgggacaccctcgcctccggaacacccacactcccgggacacccacactcccgggacacccacgcccccgggacacccacactcccgggacacccacgcccccgggacacccacactcccgggacacccacgcccccgggacacccacgctcccgggacacccacgcccccgggacacccacactcccgggacaccctcgcctccgggacacccacactcccgggacacccactcccccgggacacccacactcccgggacaccctcgcctccgggacacccacactcccgggacacccactcccccgggacacccacactcccgggacacccacgcccccgggacacccacactcccgggacaccctcgcctccgggacacccacactcccgggacacccactcccccgggacacccacactcccgggacaccctcgcctccgggacacccacactcccgggacacccacgcccccgggacacccacactcccgggacacccacgcccccgggacacccacactcctgggacacccacgcccccgggacacccacactcccgggacacccacacccttggaggctggtgtgagcagagccggtgaccgccctggggtgaaagcagatttgcatcagaaaagctctcaagaactgaggaaaacctgatgaagaacacacgattatctggaaggaacagaatggagcaaagaagataaaatcgcctgcaccccagtcccagggaaggccaagctggagcggtcacttcctctcgagcagggaacaccctccttggggggcactgcagtagccaccccgcgggctggctctttgccatgggaggggaaggaggtgatgttggcccccactgggccccaggacaaaaccagtggcagtccctgctcacctctgtgaggccccggcttccacggcatgtcccgtgtttctcctcctgaggccttagcgaccccgcctggggcaggaaggtggccggggtcataaggccatgctgtgagctagggctgcagccccacatcccaggcactgtccctcacagcccaccccccactcgccatccccacacgccatccccacgccccactagccatcctcacgccacaccccctactcgccatccccatgccccactcaccattcccaggccccagccccactcgccatccccacccccccatgccccatcctctgcaccccacacgccctttccatgccccatcccccacaccccacatgccccatccccgacaccccacacaccccatcccccacacctccatgccccatcccctgcaccccacacgccctttccatgccccatcccccacaccccacacactttcccacacctcacccccacaccccatgccccacatgctgtttcccaggccccacccccccacggcccatcccccacaccccacacgccatccccacccccgatcctccacaccccatcccctacgccccacatgccgtttcccacaccccatcccccatgccccaggcgccatcccccacgcaccgtcccctacctgtgctccccagcctgggagcaccctgtgcgcacttcctgcactctgagaggccccagactccctgcgcttgtccgacctcacaggcaggggcccatgggggccaggaaagcaccacccactcctaaagttctttgaaaaataatcccgccaaagcctgggccaccaagaagggcctcccctcctgtgcctggatgctggtttctagaaggaaagaaattgaacaggagccgccagaaaaccctcctggtggatgggggtgtccggagcaagggcggggtttgggaagcccgggctggctcctggatttgcccactgcccttccaccaagtttatggagaaaacctccccggacgcacctgcagccaggcagccctgaagcccaagcagaaggcagaggagcctgagggcctgggagaccatgatgaaatctctgcagtgctgcccctgcctgttgacattccccatgggactgacgggcaaagttctctgcctccaagggtgacagagggatgggggaggggaggacacaggcgtcctctgaacaccccagctgagagctgcacctggccggccagtggccatgcatcccctgctgcccagccactgagctcaagtgggggggacaggagaaaggtcaggtgaccccagctgtgctgcagagcggacggttttgttgccagcgtgcaggtgttaaggtgtgtgtggcaccaacacttcaaatacgatctagaattccaaacccctaatgtaagttgggaaacagatttaaactgcagatgaaaa

SEQ ID NO: 1221 - DNA, 4047 bp, Homo sapiens
accgccgttttgcccatgggaagacggggctggtgagggccagagacgcccagggcgaggcaaccccgtgcgctcagctccgagcaggccgctcttcaggacgccctacagccgaggggaccgtcacccgggagcgccgtgagctgtgggcaccacgcggtggtggagagtgacccccgccccggggcggccgtgctgcccgaacctgcctcagcccgcgaggggagacgggcctgggggcaggcgggagagggaggccccgggaggaggcgagcggggctgagaggacgcgcgggaggggctctggagaggccgcaggaggcgcgttccggagggacgacctttgctgggaggacgaggcctcaggtggacgctgtgggccggtgggcaggagcccgagttctgcaggagcggcctaaattggttactgagcgcggaagaagggacggaaggtgagcgctactgggccacgtggggccgagagaaaggccactgcctgttttctttaaaatcagtttcacacgtcgacgcccctagagaactggtctggtttggaaggaggctgaggatgcaggcggggacaccaaagaatcgggctcaaggaggtgggaactcacggactccgagtcctcacaggaggtgccctgggcggcaggagtgggaggggaggcccatgtccctgcagtccccgacacccacgctcccgggacacccacgacccccgggacacccacacccccgggacacccacgccccccggacacccacgcccctgggacactcacacttctgggatacccacgcccccgggacacccacactcccgggacacccacgcccccgggacacccacactcccgggacaccctcgcctccggaacacccacactcccgggacaccctcgcctccggaacacccacactcccgggacatccactcccccgggacacccacactcccgggacacccacgcccccgggacacccacacccctgggacacccacgctcccgggacacccacgcccccgggacacccacgctcccgggacaccctcgcctccggaacacccacactcccgggacaccctcgcctccggaacacccacactcccgggacacccactcccccgggacacccacactcccgggacacccacgcccccgggacacccacacccctgggacacccacactcccgggacaccctcgcctctggaacacccacactcccgggacacccacgacccccgggacacccacacccccgggacactcacacttctgggataccctcgcctctggaacacccacactcccgggacacccacgcccccgggacacccacactcctgggacaccctcgcctccgggacacccacactcccgggacacccactcccccgggacacccacactcccgggacacccacgcccccgggacacccacgctcccgggacaccctcgcctccgggacacccacgctcctgggacaccctcgcctccggaacacccacactcccgggacacccactcccccgggacacccacactcccgggacacccacacccccgggacacccacacccccgggacacccacactcccgggacaccctcgcctccggaacacccacactcccgggacaccctcgcctccggaacacccacactcccgggacacccacaacccccgggacacccacgcccccgggacacccacactcccgggacaccctcgcctccggaacacccacactcccgggacaccctcgcctccggaacacccacactcccgggacacccacgcccctgggacacccacactcccgggacaccctcgcctccggaacacccacactcccgggacaccctcacctccggaacacccacactcccgggacacccacgcccccgggacacccacactcccgggacaccctcgcctccggaacacccacactcccgggacaccctcacctccggaacacccacactcccgggacacccacgcccccgggacacccacacccccgggacacccacgcccctgggacactcacacttctgggataccctcgcctccggaacacccacgcccccgggacacccacgcccccgggacacccacgcccccgggacacgcacactcccgggacaccctcgcctccggaacacccacactcccgggacacccacactcccgggacacccacgcccccgggacacccacactcccgggacacccacgcccccgggacacccacactcccgggacacccacgcccccgggacacccacgctcccgggacacccacgcccccgggacacccacactcccgggacaccctcgcctccgggacacccacactcccgggacacccactcccccgggacacccacactcccgggacaccctcgcctccgggacacccacactcccgggacacccactcccccgggacacccacactcccgggacacccacgcccccgggacacccacactcccgggacaccctcgcctccgggacacccacactcccgggacacccactcccccgggacacccacactcccgggacaccctcgcctccgggacacccacactcccgggacacccacgcccccgggacacccacactcccgggacacccacgcccccgggacacccacactcctgggacacccacgcccccgggacacccacactcccgggacacccacacccttggaggctggtgtgagcagagccggtgaccgccctggggtgaaagcagatttgcatcagaaaagctctcaagaactgaggaaaacctgatgaagaacacacgattatctggaaggaacagaatggagcaaagaagataaaatcgcctgcaccccagtcccagggaaggccaagctggagcggtcacttcctctcgagcagggaacaccctccttggggggcactgcagtagccaccccgcgggctggctctttgccatgggaggggaaggaggtgatgttggcccccactgggccccaggacaaaaccagtggcagtccctgctcacctctgtgaggccccggcttccacggcatgtcccgtgtttctcctcctgaggccttagcgaccccgcctggggcaggaaggtggccggggtcataaggccatgctgtgagctagggctgcagccccacatcccaggcactgtccctcacagcccaccccccactcgccatccccacacgccatccccacgccccactagccatcctcacgccacaccccctactcgccatccccatgccccactcaccattcccaggccccagccccactcgccatccccacccccccatgccccatcctctgcaccccacacgccctttccatgccccatcccccacaccccacatgccccatccccgacaccccacacaccccatcccccacacctccatgccccatcccctgcaccccacacgccctttccatgccccatcccccacaccccacacactttcccacacctcacccccacaccccatgccccacatgctgtttcccaggccccacccccccacggcccatcccccacaccccacacgccatccccacccccgatcctccacaccccatcccctacgccccacatgccgtttcccacaccccatcccccatgccccaggcgccatcccccacgcaccgtcccctacctgtgctccccagcctgggagcaccctgtgcgcacttcctgcactctgagaggccccagactccctgcgcttgtccgacctcacaggcaggggcccatgggggccaggaaagcaccacccactcctaaagttctttgaaaaataatcccgccaaagcctgggccaccaagaagggcctcccctcctgtgcctggatgctggtttctagaaggaaagaaattgaacaggagccgccagaaaaccctcctggtggatgggggtgtccggagcaagggcggggtttgggaagcccgggctggctcctggatttgcccactgcccttccaccaagtttatggagaaaa

SEQ ID NO: 1222 - DNA, 4047 bp, Homo sapiens
ggcccctctgtcccccgcgacccctgagagctccagacctcgcgcggatcctcctggggccggtcctgagagcacagccccccgccgcagctcctggcccctccgtaaccccgacggttacttgtggacaaacaggaccgccgttttgcccatgggaagacggggctggtgagggccagagacgcccagggcgaggcaaccccgtgcgctcagctccgagcaggccgctcttcaggacgccctacagccgaggggaccgtcacccgggagcgccgtgagctgtgggcaccacgcggtggtggagagtgacccccgccccggggcggccgtgctgcccgaacctgcctcagcccgcgaggggagacgggcctgggggcaggcgggagagggaggccccgggaggaggcgagcggggctgagaggacgcgcgggaggggctctggagaggccgcaggaggcgcgttccggagggacgacctttgctgggaggacgaggcctcaggtggacgctgtgggccggtgggcaggagcccgagttctgcaggagcggcctaaattggttactgagcgcggaagaagggacggaaggtgagcgctactgggccacgtggggccgagagaaaggccactgcctgttttctttaaaatcagtttcacacgtcgacgcccctagagaactggtctggtttggaaggaggctgaggatgcaggcggggacaccaaagaatcgggctcaaggaggtgggaactcacggactccgagtcctcacaggaggtgccctgggcggcaggagtgggaggggaggcccatgtccctgcagtccccgacacccacgctcccgggacacccacgacccccgggacacccacacccccgggacacccacgccccccggacacccacgcccctgggacactcacacttctgggatacccacgcccccgggacacccacactcccgggacacccacgcccccgggacacccacactcccgggacaccctcgcctccggaacacccacactcccgggacaccctcgcctccggaacacccacactcccgggacatccactcccccgggacacccacactcccgggacacccacgcccccgggacacccacacccctgggacacccacgctcccgggacacccacgcccccgggacacccacgctcccgggacaccctcgcctccggaacacccacactcccgggacaccctcgcctccggaacacccacactcccgggacacccactcccccgggacacccacactcccgggacacccacgcccccgggacacccacacccctgggacacccacactcccgggacaccctcgcctctggaacacccacactcccgggacacccacgacccccgggacacccacacccccgggacactcacacttctgggataccctcgcctctggaacacccacactcccgggacacccacgcccccgggacacccacactcctgggacaccctcgcctccgggacacccacactcccgggacacccactcccccgggacacccacactcccgggacacccacgcccccgggacacccacgctcccgggacaccctcgcctccgggacacccacgctcctgggacaccctcgcctccggaacacccacactcccgggacacccactcccccgggacacccacactcccgggacacccacacccccgggacacccacacccccgggacacccacactcccgggacaccctcgcctccggaacacccacactcccgggacaccctcgcctccggaacacccacactcccgggacacccacaacccccgggacacccacgcccccgggacacccacactcccgggacaccctcgcctccggaacacccacactcccgggacaccctcgcctccggaacacccacactcccgggacacccacgcccctgggacacccacactcccgggacaccctcgcctccggaacacccacactcccgggacaccctcacctccggaacacccacactcccgggacacccacgcccccgggacacccacactcccgggacaccctcgcctccggaacacccacactcccgggacaccctcacctccggaacacccacactcccgggacacccacgcccccgggacacccacacccccgggacacccacgcccctgggacactcacacttctgggataccctcgcctccggaacacccacgcccccgggacacccacgcccccgggacacccacgcccccgggacacgcacactcccgggacaccctcgcctccggaacacccacactcccgggacacccacactcccgggacacccacgcccccgggacacccacactcccgggacacccacgcccccgggacacccacactcccgggacacccacgcccccgggacacccacgctcccgggacacccacgcccccgggacacccacactcccgggacaccctcgcctccgggacacccacactcccgggacacccactcccccgggacacccacactcccgggacaccctcgcctccgggacacccacactcccgggacacccactcccccgggacacccacactcccgggacacccacgcccccgggacacccacactcccgggacaccctcgcctccgggacacccacactcccgggacacccactcccccgggacacccacactcccgggacaccctcgcctccgggacacccacactcccgggacacccacgcccccgggacacccacactcccgggacacccacgcccccgggacacccacactcctgggacacccacgcccccgggacacccacactcccgggacacccacacccttggaggctggtgtgagcagagccggtgaccgccctggggtgaaagcagatttgcatcagaaaagctctcaagaactgaggaaaacctgatgaagaacacacgattatctggaaggaacagaatggagcaaagaagataaaatcgcctgcaccccagtcccagggaaggccaagctggagcggtcacttcctctcgagcagggaacaccctccttggggggcactgcagtagccaccccgcgggctggctctttgccatgggaggggaaggaggtgatgttggcccccactgggccccaggacaaaaccagtggcagtccctgctcacctctgtgaggccccggcttccacggcatgtcccgtgtttctcctcctgaggccttagcgaccccgcctggggcaggaaggtggccggggtcataaggccatgctgtgagctagggctgcagccccacatcccaggcactgtccctcacagcccaccccccactcgccatccccacacgccatccccacgccccactagccatcctcacgccacaccccctactcgccatccccatgccccactcaccattcccaggccccagccccactcgccatccccacccccccatgccccatcctctgcaccccacacgccctttccatgccccatcccccacaccccacatgccccatccccgacaccccacacaccccatcccccacacctccatgccccatcccctgcaccccacacgccctttccatgccccatcccccacaccccacacactttcccacacctcacccccacaccccatgccccacatgctgtttcccaggccccacccccccacggcccatcccccacaccccacacgccatccccacccccgatcctccacaccccatcccctacgccccacatgccgtttcccacaccccatcccccatgccccaggcgccatcccccacgcaccgtcccctacctgtgctccccagcctgggagcaccctgtgcgcacttcctgcactctgagaggccccagactccctgcgcttgtccgacctcacaggcaggggcccatgggggccaggaaagcaccacccactcctaaagttctttgaaaaataatcccgccaaagcctgggccaccaagaagggcctcccctcctgtgcctggatgctggtttctag

SEQ ID NO: 1223 - DNA, 4047 bp, Homo sapiens
tgccggcgaggagaaggcggcgcggccccgggtgccgggcaaccccctggggcccacgtgaaccgcgcgtggaaatccgtacagccgcccgcggaaatccaaatccctcgtctccacccgcaccgcgtctccggcggccagatccgccttccccaggcctccgtcctggtccgaggcgcggcccctgcccggctcccccgacagcgagccccgggcttcctcgccagctcttggcggtcctgggcttctgccgccttccccgcctccgcttggggcccctctgtcccccgcgacccctgagagctccagacctcgcgcggatcctcctggggccggtcctgagagcacagccccccgccgcagctcctggcccctccgtaaccccgacggttacttgtggacaaacaggaccgccgttttgcccatgggaagacggggctggtgagggccagagacgcccagggcgaggcaaccccgtgcgctcagctccgagcaggccgctcttcaggacgccctacagccgaggggaccgtcacccgggagcgccgtgagctgtgggcaccacgcggtggtggagagtgacccccgccccggggcggccgtgctgcccgaacctgcctcagcccgcgaggggagacgggcctgggggcaggcgggagagggaggccccgggaggaggcgagcggggctgagaggacgcgcgggaggggctctggagaggccgcaggaggcgcgttccggagggacgacctttgctgggaggacgaggcctcaggtggacgctgtgggccggtgggcaggagcccgagttctgcaggagcggcctaaattggttactgagcgcggaagaagggacggaaggtgagcgctactgggccacgtggggccgagagaaaggccactgcctgttttctttaaaatcagtttcacacgtcgacgcccctagagaactggtctggtttggaaggaggctgaggatgcaggcggggacaccaaagaatcgggctcaaggaggtgggaactcacggactccgagtcctcacaggaggtgccctgggcggcaggagtgggaggggaggcccatgtccctgcagtccccgacacccacgctcccgggacacccacgacccccgggacacccacacccccgggacacccacgccccccggacacccacgcccctgggacactcacacttctgggatacccacgcccccgggacacccacactcccgggacacccacgcccccgggacacccacactcccgggacaccctcgcctccggaacacccacactcccgggacaccctcgcctccggaacacccacactcccgggacatccactcccccgggacacccacactcccgggacacccacgcccccgggacacccacacccctgggacacccacgctcccgggacacccacgcccccgggacacccacgctcccgggacaccctcgcctccggaacacccacactcccgggacaccctcgcctccggaacacccacactcccgggacacccactcccccgggacacccacactcccgggacacccacgcccccgggacacccacacccctgggacacccacactcccgggacaccctcgcctctggaacacccacactcccgggacacccacgacccccgggacacccacacccccgggacactcacacttctgggataccctcgcctctggaacacccacactcccgggacacccacgcccccgggacacccacactcctgggacaccctcgcctccgggacacccacactcccgggacacccactcccccgggacacccacactcccgggacacccacgcccccgggacacccacgctcccgggacaccctcgcctccgggacacccacgctcctgggacaccctcgcctccggaacacccacactcccgggacacccactcccccgggacacccacactcccgggacacccacacccccgggacacccacacccccgggacacccacactcccgggacaccctcgcctccggaacacccacactcccgggacaccctcgcctccggaacacccacactcccgggacacccacaacccccgggacacccacgcccccgggacacccacactcccgggacaccctcgcctccggaacacccacactcccgggacaccctcgcctccggaacacccacactcccgggacacccacgcccctgggacacccacactcccgggacaccctcgcctccggaacacccacactcccgggacaccctcacctccggaacacccacactcccgggacacccacgcccccgggacacccacactcccgggacaccctcgcctccggaacacccacactcccgggacaccctcacctccggaacacccacactcccgggacacccacgcccccgggacacccacacccccgggacacccacgcccctgggacactcacacttctgggataccctcgcctccggaacacccacgcccccgggacacccacgcccccgggacacccacgcccccgggacacgcacactcccgggacaccctcgcctccggaacacccacactcccgggacacccacactcccgggacacccacgcccccgggacacccacactcccgggacacccacgcccccgggacacccacactcccgggacacccacgcccccgggacacccacgctcccgggacacccacgcccccgggacacccacactcccgggacaccctcgcctccgggacacccacactcccgggacacccactcccccgggacacccacactcccgggacaccctcgcctccgggacacccacactcccgggacacccactcccccgggacacccacactcccgggacacccacgcccccgggacacccacactcccgggacaccctcgcctccgggacacccacactcccgggacacccactcccccgggacacccacactcccgggacaccctcgcctccgggacacccacactcccgggacacccacgcccccgggacacccacactcccgggacacccacgcccccgggacacccacactcctgggacacccacgcccccgggacacccacactcccgggacacccacacccttggaggctggtgtgagcagagccggtgaccgccctggggtgaaagcagatttgcatcagaaaagctctcaagaactgaggaaaacctgatgaagaacacacgattatctggaaggaacagaatggagcaaagaagataaaatcgcctgcaccccagtcccagggaaggccaagctggagcggtcacttcctctcgagcagggaacaccctccttggggggcactgcagtagccaccccgcgggctggctctttgccatgggaggggaaggaggtgatgttggcccccactgggccccaggacaaaaccagtggcagtccctgctcacctctgtgaggccccggcttccacggcatgtcccgtgtttctcctcctgaggccttagcgaccccgcctggggcaggaaggtggccggggtcataaggccatgctgtgagctagggctgcagccccacatcccaggcactgtccctcacagcccaccccccactcgccatccccacacgccatccccacgccccactagccatcctcacgccacaccccctactcgccatccccatgccccactcaccattcccaggccccagccccactcgccatccccacccccccatgccccatcctctgcaccccacacgccctttccatgccccatcccccacaccccacatgccccatccccgacaccccacacaccccatcccccacacctccatgccccatcccctgcaccccacacgccctttccatgccccatcccccacaccccacacactttcccacacctcacccccacaccccatgccccacatgctgtttcccaggccccacccccccacggcccatcccccacaccccacacgccatccccacccccgatcctccacaccccatcccctacgcccc

SEQ ID NO: 1224 - DNA, 4047 bp, Homo sapiens
cccggcctggcctctctgcttccgggggctgatcccgagggcgcgctcgggggcacgcgcggaagccgggccgaagggggctgcgggcgccgccgcgtaaacgtgaggctgcgggtcgatgccggcgaggagaaggcggcgcggccccgggtgccgggcaaccccctggggcccacgtgaaccgcgcgtggaaatccgtacagccgcccgcggaaatccaaatccctcgtctccacccgcaccgcgtctccggcggccagatccgccttccccaggcctccgtcctggtccgaggcgcggcccctgcccggctcccccgacagcgagccccgggcttcctcgccagctcttggcggtcctgggcttctgccgccttccccgcctccgcttggggcccctctgtcccccgcgacccctgagagctccagacctcgcgcggatcctcctggggccggtcctgagagcacagccccccgccgcagctcctggcccctccgtaaccccgacggttacttgtggacaaacaggaccgccgttttgcccatgggaagacggggctggtgagggccagagacgcccagggcgaggcaaccccgtgcgctcagctccgagcaggccgctcttcaggacgccctacagccgaggggaccgtcacccgggagcgccgtgagctgtgggcaccacgcggtggtggagagtgacccccgccccggggcggccgtgctgcccgaacctgcctcagcccgcgaggggagacgggcctgggggcaggcgggagagggaggccccgggaggaggcgagcggggctgagaggacgcgcgggaggggctctggagaggccgcaggaggcgcgttccggagggacgacctttgctgggaggacgaggcctcaggtggacgctgtgggccggtgggcaggagcccgagttctgcaggagcggcctaaattggttactgagcgcggaagaagggacggaaggtgagcgctactgggccacgtggggccgagagaaaggccactgcctgttttctttaaaatcagtttcacacgtcgacgcccctagagaactggtctggtttggaaggaggctgaggatgcaggcggggacaccaaagaatcgggctcaaggaggtgggaactcacggactccgagtcctcacaggaggtgccctgggcggcaggagtgggaggggaggcccatgtccctgcagtccccgacacccacgctcccgggacacccacgacccccgggacacccacacccccgggacacccacgccccccggacacccacgcccctgggacactcacacttctgggatacccacgcccccgggacacccacactcccgggacacccacgcccccgggacacccacactcccgggacaccctcgcctccggaacacccacactcccgggacaccctcgcctccggaacacccacactcccgggacatccactcccccgggacacccacactcccgggacacccacgcccccgggacacccacacccctgggacacccacgctcccgggacacccacgcccccgggacacccacgctcccgggacaccctcgcctccggaacacccacactcccgggacaccctcgcctccggaacacccacactcccgggacacccactcccccgggacacccacactcccgggacacccacgcccccgggacacccacacccctgggacacccacactcccgggacaccctcgcctctggaacacccacactcccgggacacccacgacccccgggacacccacacccccgggacactcacacttctgggataccctcgcctctggaacacccacactcccgggacacccacgcccccgggacacccacactcctgggacaccctcgcctccgggacacccacactcccgggacacccactcccccgggacacccacactcccgggacacccacgcccccgggacacccacgctcccgggacaccctcgcctccgggacacccacgctcctgggacaccctcgcctccggaacacccacactcccgggacacccactcccccgggacacccacactcccgggacacccacacccccgggacacccacacccccgggacacccacactcccgggacaccctcgcctccggaacacccacactcccgggacaccctcgcctccggaacacccacactcccgggacacccacaacccccgggacacccacgcccccgggacacccacactcccgggacaccctcgcctccggaacacccacactcccgggacaccctcgcctccggaacacccacactcccgggacacccacgcccctgggacacccacactcccgggacaccctcgcctccggaacacccacactcccgggacaccctcacctccggaacacccacactcccgggacacccacgcccccgggacacccacactcccgggacaccctcgcctccggaacacccacactcccgggacaccctcacctccggaacacccacactcccgggacacccacgcccccgggacacccacacccccgggacacccacgcccctgggacactcacacttctgggataccctcgcctccggaacacccacgcccccgggacacccacgcccccgggacacccacgcccccgggacacgcacactcccgggacaccctcgcctccggaacacccacactcccgggacacccacactcccgggacacccacgcccccgggacacccacactcccgggacacccacgcccccgggacacccacactcccgggacacccacgcccccgggacacccacgctcccgggacacccacgcccccgggacacccacactcccgggacaccctcgcctccgggacacccacactcccgggacacccactcccccgggacacccacactcccgggacaccctcgcctccgggacacccacactcccgggacacccactcccccgggacacccacactcccgggacacccacgcccccgggacacccacactcccgggacaccctcgcctccgggacacccacactcccgggacacccactcccccgggacacccacactcccgggacaccctcgcctccgggacacccacactcccgggacacccacgcccccgggacacccacactcccgggacacccacgcccccgggacacccacactcctgggacacccacgcccccgggacacccacactcccgggacacccacacccttggaggctggtgtgagcagagccggtgaccgccctggggtgaaagcagatttgcatcagaaaagctctcaagaactgaggaaaacctgatgaagaacacacgattatctggaaggaacagaatggagcaaagaagataaaatcgcctgcaccccagtcccagggaaggccaagctggagcggtcacttcctctcgagcagggaacaccctccttggggggcactgcagtagccaccccgcgggctggctctttgccatgggaggggaaggaggtgatgttggcccccactgggccccaggacaaaaccagtggcagtccctgctcacctctgtgaggccccggcttccacggcatgtcccgtgtttctcctcctgaggccttagcgaccccgcctggggcaggaaggtggccggggtcataaggccatgctgtgagctagggctgcagccccacatcccaggcactgtccctcacagcccaccccccactcgccatccccacacgccatccccacgccccactagccatcctcacgccacaccccctactcgccatccccatgccccactcaccattcccaggccccagccccactcgccatccccacccccccatgccccatcctctgcaccccacacgccctttccatgccccatcccccacaccccacatgccccatccccgacaccccacacaccccatcccccacacctccatgccccatcccctgcaccccacacgccctttccatgccccatcccccacaccccacacactttcccacacct

SEQ ID NO: 1225 - DNA, 4050 bp, Homo sapiens
ggcccacgcggcgggggcatcgcaggttcccgcccgtcctggaggaggggagcggcgctgctcgcgggcctggctgggtgtcctccctgccgtgctcccgggtcagccacccccgtcgcccatccttcccggcctggcctctctgcttccgggggctgatcccgagggcgcgctcgggggcacgcgcggaagccgggccgaagggggctgcgggcgccgccgcgtaaacgtgaggctgcgggtcgatgccggcgaggagaaggcggcgcggccccgggtgccgggcaaccccctggggcccacgtgaaccgcgcgtggaaatccgtacagccgcccgcggaaatccaaatccctcgtctccacccgcaccgcgtctccggcggccagatccgccttccccaggcctccgtcctggtccgaggcgcggcccctgcccggctcccccgacagcgagccccgggcttcctcgccagctcttggcggtcctgggcttctgccgccttccccgcctccgcttggggcccctctgtcccccgcgacccctgagagctccagacctcgcgcggatcctcctggggccggtcctgagagcacagccccccgccgcagctcctggcccctccgtaaccccgacggttacttgtggacaaacaggaccgccgttttgcccatgggaagacggggctggtgagggccagagacgcccagggcgaggcaaccccgtgcgctcagctccgagcaggccgctcttcaggacgccctacagccgaggggaccgtcacccgggagcgccgtgagctgtgggcaccacgcggtggtggagagtgacccccgccccggggcggccgtgctgcccgaacctgcctcagcccgcgaggggagacgggcctgggggcaggcgggagagggaggccccgggaggaggcgagcggggctgagaggacgcgcgggaggggctctggagaggccgcaggaggcgcgttccggagggacgacctttgctgggaggacgaggcctcaggtggacgctgtgggccggtgggcaggagcccgagttctgcaggagcggcctaaattggttactgagcgcggaagaagggacggaaggtgagcgctactgggccacgtggggccgagagaaaggccactgcctgttttctttaaaatcagtttcacacgtcgacgcccctagagaactggtctggtttggaaggaggctgaggatgcaggcggggacaccaaagaatcgggctcaaggaggtgggaactcacggactccgagtcctcacaggaggtgccctgggcggcaggagtgggaggggaggcccatgtccctgcagtccccgacacccacgctcccgggacacccacgacccccgggacacccacacccccgggacacccacgccccccggacacccacgcccctgggacactcacacttctgggatacccacgcccccgggacacccacactcccgggacacccacgcccccgggacacccacactcccgggacaccctcgcctccggaacacccacactcccgggacaccctcgcctccggaacacccacactcccgggacatccactcccccgggacacccacactcccgggacacccacgcccccgggacacccacacccctgggacacccacgctcccgggacacccacgcccccgggacacccacgctcccgggacaccctcgcctccggaacacccacactcccgggacaccctcgcctccggaacacccacactcccgggacacccactcccccgggacacccacactcccgggacacccacgcccccgggacacccacacccctgggacacccacactcccgggacaccctcgcctctggaacacccacactcccgggacacccacgacccccgggacacccacacccccgggacactcacacttctgggataccctcgcctctggaacacccacactcccgggacacccacgcccccgggacacccacactcctgggacaccctcgcctccgggacacccacactcccgggacacccactcccccgggacacccacactcccgggacacccacgcccccgggacacccacgctcccgggacaccctcgcctccgggacacccacgctcctgggacaccctcgcctccggaacacccacactcccgggacacccactcccccgggacacccacactcccgggacacccacacccccgggacacccacacccccgggacacccacactcccgggacaccctcgcctccggaacacccacactcccgggacaccctcgcctccggaacacccacactcccgggacacccacaacccccgggacacccacgcccccgggacacccacactcccgggacaccctcgcctccggaacacccacactcccgggacaccctcgcctccggaacacccacactcccgggacacccacgcccctgggacacccacactcccgggacaccctcgcctccggaacacccacactcccgggacaccctcacctccggaacacccacactcccgggacacccacgcccccgggacacccacactcccgggacaccctcgcctccggaacacccacactcccgggacaccctcacctccggaacacccacactcccgggacacccacgcccccgggacacccacacccccgggacacccacgcccctgggacactcacacttctgggataccctcgcctccggaacacccacgcccccgggacacccacgcccccgggacacccacgcccccgggacacgcacactcccgggacaccctcgcctccggaacacccacactcccgggacacccacactcccgggacacccacgcccccgggacacccacactcccgggacacccacgcccccgggacacccacactcccgggacacccacgcccccgggacacccacgctcccgggacacccacgcccccgggacacccacactcccgggacaccctcgcctccgggacacccacactcccgggacacccactcccccgggacacccacactcccgggacaccctcgcctccgggacacccacactcccgggacacccactcccccgggacacccacactcccgggacacccacgcccccgggacacccacactcccgggacaccctcgcctccgggacacccacactcccgggacacccactcccccgggacacccacactcccgggacaccctcgcctccgggacacccacactcccgggacacccacgcccccgggacacccacactcccgggacacccacgcccccgggacacccacactcctgggacacccacgcccccgggacacccacactcccgggacacccacacccttggaggctggtgtgagcagagccggtgaccgccctggggtgaaagcagatttgcatcagaaaagctctcaagaactgaggaaaacctgatgaagaacacacgattatctggaaggaacagaatggagcaaagaagataaaatcgcctgcaccccagtcccagggaaggccaagctggagcggtcacttcctctcgagcagggaacaccctccttggggggcactgcagtagccaccccgcgggctggctctttgccatgggaggggaaggaggtgatgttggcccccactgggccccaggacaaaaccagtggcagtccctgctcacctctgtgaggccccggcttccacggcatgtcccgtgtttctcctcctgaggccttagcgaccccgcctggggcaggaaggtggccggggtcataaggccatgctgtgagctagggctgcagccccacatcccaggcactgtccctcacagcccaccccccactcgccatccccacacgccatccccacgccccactagccatcctcacgccacaccccctactcgccatccccatgccccactcaccattcccaggccccagccccactcgccatccccacccccccatgccccatcctctgcaccccacacgccctttccatgccccatcccccaca

SEQ ID NO: 1226 - DNA, 4047 bp, Homo sapiens
gcccagtgcctcggagaccgccccacggcccacgcggcgggggcatcgcaggttcccgcccgtcctggaggaggggagcggcgctgctcgcgggcctggctgggtgtcctccctgccgtgctcccgggtcagccacccccgtcgcccatccttcccggcctggcctctctgcttccgggggctgatcccgagggcgcgctcgggggcacgcgcggaagccgggccgaagggggctgcgggcgccgccgcgtaaacgtgaggctgcgggtcgatgccggcgaggagaaggcggcgcggccccgggtgccgggcaaccccctggggcccacgtgaaccgcgcgtggaaatccgtacagccgcccgcggaaatccaaatccctcgtctccacccgcaccgcgtctccggcggccagatccgccttccccaggcctccgtcctggtccgaggcgcggcccctgcccggctcccccgacagcgagccccgggcttcctcgccagctcttggcggtcctgggcttctgccgccttccccgcctccgcttggggcccctctgtcccccgcgacccctgagagctccagacctcgcgcggatcctcctggggccggtcctgagagcacagccccccgccgcagctcctggcccctccgtaaccccgacggttacttgtggacaaacaggaccgccgttttgcccatgggaagacggggctggtgagggccagagacgcccagggcgaggcaaccccgtgcgctcagctccgagcaggccgctcttcaggacgccctacagccgaggggaccgtcacccgggagcgccgtgagctgtgggcaccacgcggtggtggagagtgacccccgccccggggcggccgtgctgcccgaacctgcctcagcccgcgaggggagacgggcctgggggcaggcgggagagggaggccccgggaggaggcgagcggggctgagaggacgcgcgggaggggctctggagaggccgcaggaggcgcgttccggagggacgacctttgctgggaggacgaggcctcaggtggacgctgtgggccggtgggcaggagcccgagttctgcaggagcggcctaaattggttactgagcgcggaagaagggacggaaggtgagcgctactgggccacgtggggccgagagaaaggccactgcctgttttctttaaaatcagtttcacacgtcgacgcccctagagaactggtctggtttggaaggaggctgaggatgcaggcggggacaccaaagaatcgggctcaaggaggtgggaactcacggactccgagtcctcacaggaggtgccctgggcggcaggagtgggaggggaggcccatgtccctgcagtccccgacacccacgctcccgggacacccacgacccccgggacacccacacccccgggacacccacgccccccggacacccacgcccctgggacactcacacttctgggatacccacgcccccgggacacccacactcccgggacacccacgcccccgggacacccacactcccgggacaccctcgcctccggaacacccacactcccgggacaccctcgcctccggaacacccacactcccgggacatccactcccccgggacacccacactcccgggacacccacgcccccgggacacccacacccctgggacacccacgctcccgggacacccacgcccccgggacacccacgctcccgggacaccctcgcctccggaacacccacactcccgggacaccctcgcctccggaacacccacactcccgggacacccactcccccgggacacccacactcccgggacacccacgcccccgggacacccacacccctgggacacccacactcccgggacaccctcgcctctggaacacccacactcccgggacacccacgacccccgggacacccacacccccgggacactcacacttctgggataccctcgcctctggaacacccacactcccgggacacccacgcccccgggacacccacactcctgggacaccctcgcctccgggacacccacactcccgggacacccactcccccgggacacccacactcccgggacacccacgcccccgggacacccacgctcccgggacaccctcgcctccgggacacccacgctcctgggacaccctcgcctccggaacacccacactcccgggacacccactcccccgggacacccacactcccgggacacccacacccccgggacacccacacccccgggacacccacactcccgggacaccctcgcctccggaacacccacactcccgggacaccctcgcctccggaacacccacactcccgggacacccacaacccccgggacacccacgcccccgggacacccacactcccgggacaccctcgcctccggaacacccacactcccgggacaccctcgcctccggaacacccacactcccgggacacccacgcccctgggacacccacactcccgggacaccctcgcctccggaacacccacactcccgggacaccctcacctccggaacacccacactcccgggacacccacgcccccgggacacccacactcccgggacaccctcgcctccggaacacccacactcccgggacaccctcacctccggaacacccacactcccgggacacccacgcccccgggacacccacacccccgggacacccacgcccctgggacactcacacttctgggataccctcgcctccggaacacccacgcccccgggacacccacgcccccgggacacccacgcccccgggacacgcacactcccgggacaccctcgcctccggaacacccacactcccgggacacccacactcccgggacacccacgcccccgggacacccacactcccgggacacccacgcccccgggacacccacactcccgggacacccacgcccccgggacacccacgctcccgggacacccacgcccccgggacacccacactcccgggacaccctcgcctccgggacacccacactcccgggacacccactcccccgggacacccacactcccgggacaccctcgcctccgggacacccacactcccgggacacccactcccccgggacacccacactcccgggacacccacgcccccgggacacccacactcccgggacaccctcgcctccgggacacccacactcccgggacacccactcccccgggacacccacactcccgggacaccctcgcctccgggacacccacactcccgggacacccacgcccccgggacacccacactcccgggacacccacgcccccgggacacccacactcctgggacacccacgcccccgggacacccacactcccgggacacccacacccttggaggctggtgtgagcagagccggtgaccgccctggggtgaaagcagatttgcatcagaaaagctctcaagaactgaggaaaacctgatgaagaacacacgattatctggaaggaacagaatggagcaaagaagataaaatcgcctgcaccccagtcccagggaaggccaagctggagcggtcacttcctctcgagcagggaacaccctccttggggggcactgcagtagccaccccgcgggctggctctttgccatgggaggggaaggaggtgatgttggcccccactgggccccaggacaaaaccagtggcagtccctgctcacctctgtgaggccccggcttccacggcatgtcccgtgtttctcctcctgaggccttagcgaccccgcctggggcaggaaggtggccggggtcataaggccatgctgtgagctagggctgcagccccacatcccaggcactgtccctcacagcccaccccccactcgccatccccacacgccatccccacgccccactagccatcctcacgccacaccccctactcgccatccccatgccccactcaccattcccaggccccagccccactcgccatccccacccccccatgccccatcctctgcacccca

SEQ ID NO: 1227 - DNA, 4042 bp, Homo sapiens
tcctcgaaggagcactgctcctccttgcactccctctccagggagcccggccgcagctcctccaggaacgcgttggcgcgccggcgccggtgcaggacgccgtgggcttcctcctgggttacgaagactgggaaatgcgagttccgtgaagcgcccaccgcgtgccccgcccagtgcctcggagaccgccccacggcccacgcggcgggggcatcgcaggttcccgcccgtcctggaggaggggagcggcgctgctcgcgggcctggctgggtgtcctccctgccgtgctcccgggtcagccacccccgtcgcccatccttcccggcctggcctctctgcttccgggggctgatcccgagggcgcgctcgggggcacgcgcggaagccgggccgaagggggctgcgggcgccgccgcgtaaacgtgaggctgcgggtcgatgccggcgaggagaaggcggcgcggccccgggtgccgggcaaccccctggggcccacgtgaaccgcgcgtggaaatccgtacagccgcccgcggaaatccaaatccctcgtctccacccgcaccgcgtctccggcggccagatccgccttccccaggcctccgtcctggtccgaggcgcggcccctgcccggctcccccgacagcgagccccgggcttcctcgccagctcttggcggtcctgggcttctgccgccttccccgcctccgcttggggcccctctgtcccccgcgacccctgagagctccagacctcgcgcggatcctcctggggccggtcctgagagcacagccccccgccgcagctcctggcccctccgtaaccccgacggttacttgtggacaaacaggaccgccgttttgcccatgggaagacggggctggtgagggccagagacgcccagggcgaggcaaccccgtgcgctcagctccgagcaggccgctcttcaggacgccctacagccgaggggaccgtcacccgggagcgccgtgagctgtgggcaccacgcggtggtggagagtgacccccgccccggggcggccgtgctgcccgaacctgcctcagcccgcgaggggagacgggcctgggggcaggcgggagagggaggccccgggaggaggcgagcggggctgagaggacgcgcgggaggggctctggagaggccgcaggaggcgcgttccggagggacgacctttgctgggaggacgaggcctcaggtggacgctgtgggccggtgggcaggagcccgagttctgcaggagcggcctaaattggttactgagcgcggaagaagggacggaaggtgagcgctactgggccacgtggggccgagagaaaggccactgcctgttttctttaaaatcagtttcacacgtcgacgcccctagagaactggtctggtttggaaggaggctgaggatgcaggcggggacaccaaagaatcgggctcaaggaggtgggaactcacggactccgagtcctcacaggaggtgccctgggcggcaggagtgggaggggaggcccatgtccctgcagtccccgacacccacgctcccgggacacccacgacccccgggacacccacacccccgggacacccacgccccccggacacccacgcccctgggacactcacacttctgggatacccacgcccccgggacacccacactcccgggacacccacgcccccgggacacccacactcccgggacaccctcgcctccggaacacccacactcccgggacaccctcgcctccggaacacccacactcccgggacatccactcccccgggacacccacactcccgggacacccacgcccccgggacacccacacccctgggacacccacgctcccgggacacccacgcccccgggacacccacgctcccgggacaccctcgcctccggaacacccacactcccgggacaccctcgcctccggaacacccacactcccgggacacccactcccccgggacacccacactcccgggacacccacgcccccgggacacccacacccctgggacacccacactcccgggacaccctcgcctctggaacacccacactcccgggacacccacgacccccgggacacccacacccccgggacactcacacttctgggataccctcgcctctggaacacccacactcccgggacacccacgcccccgggacacccacactcctgggacaccctcgcctccgggacacccacactcccgggacacccactcccccgggacacccacactcccgggacacccacgcccccgggacacccacgctcccgggacaccctcgcctccgggacacccacgctcctgggacaccctcgcctccggaacacccacactcccgggacacccactcccccgggacacccacactcccgggacacccacacccccgggacacccacacccccgggacacccacactcccgggacaccctcgcctccggaacacccacactcccgggacaccctcgcctccggaacacccacactcccgggacacccacaacccccgggacacccacgcccccgggacacccacactcccgggacaccctcgcctccggaacacccacactcccgggacaccctcgcctccggaacacccacactcccgggacacccacgcccctgggacacccacactcccgggacaccctcgcctccggaacacccacactcccgggacaccctcacctccggaacacccacactcccgggacacccacgcccccgggacacccacactcccgggacaccctcgcctccggaacacccacactcccgggacaccctcacctccggaacacccacactcccgggacacccacgcccccgggacacccacacccccgggacacccacgcccctgggacactcacacttctgggataccctcgcctccggaacacccacgcccccgggacacccacgcccccgggacacccacgcccccgggacacgcacactcccgggacaccctcgcctccggaacacccacactcccgggacacccacactcccgggacacccacgcccccgggacacccacactcccgggacacccacgcccccgggacacccacactcccgggacacccacgcccccgggacacccacgctcccgggacacccacgcccccgggacacccacactcccgggacaccctcgcctccgggacacccacactcccgggacacccactcccccgggacacccacactcccgggacaccctcgcctccgggacacccacactcccgggacacccactcccccgggacacccacactcccgggacacccacgcccccgggacacccacactcccgggacaccctcgcctccgggacacccacactcccgggacacccactcccccgggacacccacactcccgggacaccctcgcctccgggacacccacactcccgggacacccacgcccccgggacacccacactcccgggacacccacgcccccgggacacccacactcctgggacacccacgcccccgggacacccacactcccgggacacccacacccttggaggctggtgtgagcagagccggtgaccgccctggggtgaaagcagatttgcatcagaaaagctctcaagaactgaggaaaacctgatgaagaacacacgattatctggaaggaacagaatggagcaaagaagataaaatcgcctgcaccccagtcccagggaaggccaagctggagcggtcacttcctctcgagcagggaacaccctccttggggggcactgcagtagccaccccgcgggctggctctttgccatgggaggggaaggaggtgatgttggcccccactgggccccaggacaaaaccagtggcagtccctgctcacctctgtgaggccccggcttccacggcatgtcccgtgtttctcctcctgaggccttagcgaccccgcctggggcaggaaggtggccggggtcataaggccatgctgtgagctagggctgcagccccacatcccaggc

SEQ ID NO: 1228 - DNA, 4046 bp, Homo sapiens
caccgtcctctccgcgtccttgaagatctcccgggcctcctcgaaggagcactgctcctccttgcactccctctccagggagcccggccgcagctcctccaggaacgcgttggcgcgccggcgccggtgcaggacgccgtgggcttcctcctgggttacgaagactgggaaatgcgagttccgtgaagcgcccaccgcgtgccccgcccagtgcctcggagaccgccccacggcccacgcggcgggggcatcgcaggttcccgcccgtcctggaggaggggagcggcgctgctcgcgggcctggctgggtgtcctccctgccgtgctcccgggtcagccacccccgtcgcccatccttcccggcctggcctctctgcttccgggggctgatcccgagggcgcgctcgggggcacgcgcggaagccgggccgaagggggctgcgggcgccgccgcgtaaacgtgaggctgcgggtcgatgccggcgaggagaaggcggcgcggccccgggtgccgggcaaccccctggggcccacgtgaaccgcgcgtggaaatccgtacagccgcccgcggaaatccaaatccctcgtctccacccgcaccgcgtctccggcggccagatccgccttccccaggcctccgtcctggtccgaggcgcggcccctgcccggctcccccgacagcgagccccgggcttcctcgccagctcttggcggtcctgggcttctgccgccttccccgcctccgcttggggcccctctgtcccccgcgacccctgagagctccagacctcgcgcggatcctcctggggccggtcctgagagcacagccccccgccgcagctcctggcccctccgtaaccccgacggttacttgtggacaaacaggaccgccgttttgcccatgggaagacggggctggtgagggccagagacgcccagggcgaggcaaccccgtgcgctcagctccgagcaggccgctcttcaggacgccctacagccgaggggaccgtcacccgggagcgccgtgagctgtgggcaccacgcggtggtggagagtgacccccgccccggggcggccgtgctgcccgaacctgcctcagcccgcgaggggagacgggcctgggggcaggcgggagagggaggccccgggaggaggcgagcggggctgagaggacgcgcgggaggggctctggagaggccgcaggaggcgcgttccggagggacgacctttgctgggaggacgaggcctcaggtggacgctgtgggccggtgggcaggagcccgagttctgcaggagcggcctaaattggttactgagcgcggaagaagggacggaaggtgagcgctactgggccacgtggggccgagagaaaggccactgcctgttttctttaaaatcagtttcacacgtcgacgcccctagagaactggtctggtttggaaggaggctgaggatgcaggcggggacaccaaagaatcgggctcaaggaggtgggaactcacggactccgagtcctcacaggaggtgccctgggcggcaggagtgggaggggaggcccatgtccctgcagtccccgacacccacgctcccgggacacccacgacccccgggacacccacacccccgggacacccacgccccccggacacccacgcccctgggacactcacacttctgggatacccacgcccccgggacacccacactcccgggacacccacgcccccgggacacccacactcccgggacaccctcgcctccggaacacccacactcccgggacaccctcgcctccggaacacccacactcccgggacatccactcccccgggacacccacactcccgggacacccacgcccccgggacacccacacccctgggacacccacgctcccgggacacccacgcccccgggacacccacgctcccgggacaccctcgcctccggaacacccacactcccgggacaccctcgcctccggaacacccacactcccgggacacccactcccccgggacacccacactcccgggacacccacgcccccgggacacccacacccctgggacacccacactcccgggacaccctcgcctctggaacacccacactcccgggacacccacgacccccgggacacccacacccccgggacactcacacttctgggataccctcgcctctggaacacccacactcccgggacacccacgcccccgggacacccacactcctgggacaccctcgcctccgggacacccacactcccgggacacccactcccccgggacacccacactcccgggacacccacgcccccgggacacccacgctcccgggacaccctcgcctccgggacacccacgctcctgggacaccctcgcctccggaacacccacactcccgggacacccactcccccgggacacccacactcccgggacacccacacccccgggacacccacacccccgggacacccacactcccgggacaccctcgcctccggaacacccacactcccgggacaccctcgcctccggaacacccacactcccgggacacccacaacccccgggacacccacgcccccgggacacccacactcccgggacaccctcgcctccggaacacccacactcccgggacaccctcgcctccggaacacccacactcccgggacacccacgcccctgggacacccacactcccgggacaccctcgcctccggaacacccacactcccgggacaccctcacctccggaacacccacactcccgggacacccacgcccccgggacacccacactcccgggacaccctcgcctccggaacacccacactcccgggacaccctcacctccggaacacccacactcccgggacacccacgcccccgggacacccacacccccgggacacccacgcccctgggacactcacacttctgggataccctcgcctccggaacacccacgcccccgggacacccacgcccccgggacacccacgcccccgggacacgcacactcccgggacaccctcgcctccggaacacccacactcccgggacacccacactcccgggacacccacgcccccgggacacccacactcccgggacacccacgcccccgggacacccacactcccgggacacccacgcccccgggacacccacgctcccgggacacccacgcccccgggacacccacactcccgggacaccctcgcctccgggacacccacactcccgggacacccactcccccgggacacccacactcccgggacaccctcgcctccgggacacccacactcccgggacacccactcccccgggacacccacactcccgggacacccacgcccccgggacacccacactcccgggacaccctcgcctccgggacacccacactcccgggacacccactcccccgggacacccacactcccgggacaccctcgcctccgggacacccacactcccgggacacccacgcccccgggacacccacactcccgggacacccacgcccccgggacacccacactcctgggacacccacgcccccgggacacccacactcccgggacacccacacccttggaggctggtgtgagcagagccggtgaccgccctggggtgaaagcagatttgcatcagaaaagctctcaagaactgaggaaaacctgatgaagaacacacgattatctggaaggaacagaatggagcaaagaagataaaatcgcctgcaccccagtcccagggaaggccaagctggagcggtcacttcctctcgagcagggaacaccctccttggggggcactgcagtagccaccccgcgggctggctctttgccatgggaggggaaggaggtgatgttggcccccactgggccccaggacaaaaccagtggcagtccctgctcacctctgtgaggccccggcttccacggcatgtcccgtgtttctcctcctgaggccttagcgaccccgcctggggcaggaaggtggccggggtcataaggccatgc

SEQ ID NO: 1229 - DNA, 4041 bp, Homo sapiens
ggaaagcgacccccgcagaaagcgccgcgcgggcgccgctgcgtgttcgccgcccacagccgcagccaaagagacgcaggcggccccacgcggcctggttcaccgccgcctgcagtgtccgcggcgcggggcgccccgaggctgggctcaccgtcctctccgcgtccttgaagatctcccgggcctcctcgaaggagcactgctcctccttgcactccctctccagggagcccggccgcagctcctccaggaacgcgttggcgcgccggcgccggtgcaggacgccgtgggcttcctcctgggttacgaagactgggaaatgcgagttccgtgaagcgcccaccgcgtgccccgcccagtgcctcggagaccgccccacggcccacgcggcgggggcatcgcaggttcccgcccgtcctggaggaggggagcggcgctgctcgcgggcctggctgggtgtcctccctgccgtgctcccgggtcagccacccccgtcgcccatccttcccggcctggcctctctgcttccgggggctgatcccgagggcgcgctcgggggcacgcgcggaagccgggccgaagggggctgcgggcgccgccgcgtaaacgtgaggctgcgggtcgatgccggcgaggagaaggcggcgcggccccgggtgccgggcaaccccctggggcccacgtgaaccgcgcgtggaaatccgtacagccgcccgcggaaatccaaatccctcgtctccacccgcaccgcgtctccggcggccagatccgccttccccaggcctccgtcctggtccgaggcgcggcccctgcccggctcccccgacagcgagccccgggcttcctcgccagctcttggcggtcctgggcttctgccgccttccccgcctccgcttggggcccctctgtcccccgcgacccctgagagctccagacctcgcgcggatcctcctggggccggtcctgagagcacagccccccgccgcagctcctggcccctccgtaaccccgacggttacttgtggacaaacaggaccgccgttttgcccatgggaagacggggctggtgagggccagagacgcccagggcgaggcaaccccgtgcgctcagctccgagcaggccgctcttcaggacgccctacagccgaggggaccgtcacccgggagcgccgtgagctgtgggcaccacgcggtggtggagagtgacccccgccccggggcggccgtgctgcccgaacctgcctcagcccgcgaggggagacgggcctgggggcaggcgggagagggaggccccgggaggaggcgagcggggctgagaggacgcgcgggaggggctctggagaggccgcaggaggcgcgttccggagggacgacctttgctgggaggacgaggcctcaggtggacgctgtgggccggtgggcaggagcccgagttctgcaggagcggcctaaattggttactgagcgcggaagaagggacggaaggtgagcgctactgggccacgtggggccgagagaaaggccactgcctgttttctttaaaatcagtttcacacgtcgacgcccctagagaactggtctggtttggaaggaggctgaggatgcaggcggggacaccaaagaatcgggctcaaggaggtgggaactcacggactccgagtcctcacaggaggtgccctgggcggcaggagtgggaggggaggcccatgtccctgcagtccccgacacccacgctcccgggacacccacgacccccgggacacccacacccccgggacacccacgccccccggacacccacgcccctgggacactcacacttctgggatacccacgcccccgggacacccacactcccgggacacccacgcccccgggacacccacactcccgggacaccctcgcctccggaacacccacactcccgggacaccctcgcctccggaacacccacactcccgggacatccactcccccgggacacccacactcccgggacacccacgcccccgggacacccacacccctgggacacccacgctcccgggacacccacgcccccgggacacccacgctcccgggacaccctcgcctccggaacacccacactcccgggacaccctcgcctccggaacacccacactcccgggacacccactcccccgggacacccacactcccgggacacccacgcccccgggacacccacacccctgggacacccacactcccgggacaccctcgcctctggaacacccacactcccgggacacccacgacccccgggacacccacacccccgggacactcacacttctgggataccctcgcctctggaacacccacactcccgggacacccacgcccccgggacacccacactcctgggacaccctcgcctccgggacacccacactcccgggacacccactcccccgggacacccacactcccgggacacccacgcccccgggacacccacgctcccgggacaccctcgcctccgggacacccacgctcctgggacaccctcgcctccggaacacccacactcccgggacacccactcccccgggacacccacactcccgggacacccacacccccgggacacccacacccccgggacacccacactcccgggacaccctcgcctccggaacacccacactcccgggacaccctcgcctccggaacacccacactcccgggacacccacaacccccgggacacccacgcccccgggacacccacactcccgggacaccctcgcctccggaacacccacactcccgggacaccctcgcctccggaacacccacactcccgggacacccacgcccctgggacacccacactcccgggacaccctcgcctccggaacacccacactcccgggacaccctcacctccggaacacccacactcccgggacacccacgcccccgggacacccacactcccgggacaccctcgcctccggaacacccacactcccgggacaccctcacctccggaacacccacactcccgggacacccacgcccccgggacacccacacccccgggacacccacgcccctgggacactcacacttctgggataccctcgcctccggaacacccacgcccccgggacacccacgcccccgggacacccacgcccccgggacacgcacactcccgggacaccctcgcctccggaacacccacactcccgggacacccacactcccgggacacccacgcccccgggacacccacactcccgggacacccacgcccccgggacacccacactcccgggacacccacgcccccgggacacccacgctcccgggacacccacgcccccgggacacccacactcccgggacaccctcgcctccgggacacccacactcccgggacacccactcccccgggacacccacactcccgggacaccctcgcctccgggacacccacactcccgggacacccactcccccgggacacccacactcccgggacacccacgcccccgggacacccacactcccgggacaccctcgcctccgggacacccacactcccgggacacccactcccccgggacacccacactcccgggacaccctcgcctccgggacacccacactcccgggacacccacgcccccgggacacccacactcccgggacacccacgcccccgggacacccacactcctgggacacccacgcccccgggacacccacactcccgggacacccacacccttggaggctggtgtgagcagagccggtgaccgccctggggtgaaagcagatttgcatcagaaaagctctcaagaactgaggaaaacctgatgaagaacacacgattatctggaaggaacagaatggagcaaagaagataaaatcgcctgcaccccagtcccagggaaggccaagctggagcggtcacttcctctcgagcagggaacaccctccttggggggcactgcagtagccaccccgcgggctggctctttgccatgggaggggaaggaggtgat

SEQ ID NO: 1230 - DNA, 4042 bp, Homo sapiens
gcggccgcacggggagagcgcgtgcctgggggtggggggcatcgcccaggaaagcggagtcaccccgggcggaaagcgacccccgcagaaagcgccgcgcgggcgccgctgcgtgttcgccgcccacagccgcagccaaagagacgcaggcggccccacgcggcctggttcaccgccgcctgcagtgtccgcggcgcggggcgccccgaggctgggctcaccgtcctctccgcgtccttgaagatctcccgggcctcctcgaaggagcactgctcctccttgcactccctctccagggagcccggccgcagctcctccaggaacgcgttggcgcgccggcgccggtgcaggacgccgtgggcttcctcctgggttacgaagactgggaaatgcgagttccgtgaagcgcccaccgcgtgccccgcccagtgcctcggagaccgccccacggcccacgcggcgggggcatcgcaggttcccgcccgtcctggaggaggggagcggcgctgctcgcgggcctggctgggtgtcctccctgccgtgctcccgggtcagccacccccgtcgcccatccttcccggcctggcctctctgcttccgggggctgatcccgagggcgcgctcgggggcacgcgcggaagccgggccgaagggggctgcgggcgccgccgcgtaaacgtgaggctgcgggtcgatgccggcgaggagaaggcggcgcggccccgggtgccgggcaaccccctggggcccacgtgaaccgcgcgtggaaatccgtacagccgcccgcggaaatccaaatccctcgtctccacccgcaccgcgtctccggcggccagatccgccttccccaggcctccgtcctggtccgaggcgcggcccctgcccggctcccccgacagcgagccccgggcttcctcgccagctcttggcggtcctgggcttctgccgccttccccgcctccgcttggggcccctctgtcccccgcgacccctgagagctccagacctcgcgcggatcctcctggggccggtcctgagagcacagccccccgccgcagctcctggcccctccgtaaccccgacggttacttgtggacaaacaggaccgccgttttgcccatgggaagacggggctggtgagggccagagacgcccagggcgaggcaaccccgtgcgctcagctccgagcaggccgctcttcaggacgccctacagccgaggggaccgtcacccgggagcgccgtgagctgtgggcaccacgcggtggtggagagtgacccccgccccggggcggccgtgctgcccgaacctgcctcagcccgcgaggggagacgggcctgggggcaggcgggagagggaggccccgggaggaggcgagcggggctgagaggacgcgcgggaggggctctggagaggccgcaggaggcgcgttccggagggacgacctttgctgggaggacgaggcctcaggtggacgctgtgggccggtgggcaggagcccgagttctgcaggagcggcctaaattggttactgagcgcggaagaagggacggaaggtgagcgctactgggccacgtggggccgagagaaaggccactgcctgttttctttaaaatcagtttcacacgtcgacgcccctagagaactggtctggtttggaaggaggctgaggatgcaggcggggacaccaaagaatcgggctcaaggaggtgggaactcacggactccgagtcctcacaggaggtgccctgggcggcaggagtgggaggggaggcccatgtccctgcagtccccgacacccacgctcccgggacacccacgacccccgggacacccacacccccgggacacccacgccccccggacacccacgcccctgggacactcacacttctgggatacccacgcccccgggacacccacactcccgggacacccacgcccccgggacacccacactcccgggacaccctcgcctccggaacacccacactcccgggacaccctcgcctccggaacacccacactcccgggacatccactcccccgggacacccacactcccgggacacccacgcccccgggacacccacacccctgggacacccacgctcccgggacacccacgcccccgggacacccacgctcccgggacaccctcgcctccggaacacccacactcccgggacaccctcgcctccggaacacccacactcccgggacacccactcccccgggacacccacactcccgggacacccacgcccccgggacacccacacccctgggacacccacactcccgggacaccctcgcctctggaacacccacactcccgggacacccacgacccccgggacacccacacccccgggacactcacacttctgggataccctcgcctctggaacacccacactcccgggacacccacgcccccgggacacccacactcctgggacaccctcgcctccgggacacccacactcccgggacacccactcccccgggacacccacactcccgggacacccacgcccccgggacacccacgctcccgggacaccctcgcctccgggacacccacgctcctgggacaccctcgcctccggaacacccacactcccgggacacccactcccccgggacacccacactcccgggacacccacacccccgggacacccacacccccgggacacccacactcccgggacaccctcgcctccggaacacccacactcccgggacaccctcgcctccggaacacccacactcccgggacacccacaacccccgggacacccacgcccccgggacacccacactcccgggacaccctcgcctccggaacacccacactcccgggacaccctcgcctccggaacacccacactcccgggacacccacgcccctgggacacccacactcccgggacaccctcgcctccggaacacccacactcccgggacaccctcacctccggaacacccacactcccgggacacccacgcccccgggacacccacactcccgggacaccctcgcctccggaacacccacactcccgggacaccctcacctccggaacacccacactcccgggacacccacgcccccgggacacccacacccccgggacacccacgcccctgggacactcacacttctgggataccctcgcctccggaacacccacgcccccgggacacccacgcccccgggacacccacgcccccgggacacgcacactcccgggacaccctcgcctccggaacacccacactcccgggacacccacactcccgggacacccacgcccccgggacacccacactcccgggacacccacgcccccgggacacccacactcccgggacacccacgcccccgggacacccacgctcccgggacacccacgcccccgggacacccacactcccgggacaccctcgcctccgggacacccacactcccgggacacccactcccccgggacacccacactcccgggacaccctcgcctccgggacacccacactcccgggacacccactcccccgggacacccacactcccgggacacccacgcccccgggacacccacactcccgggacaccctcgcctccgggacacccacactcccgggacacccactcccccgggacacccacactcccgggacaccctcgcctccgggacacccacactcccgggacacccacgcccccgggacacccacactcccgggacacccacgcccccgggacacccacactcctgggacacccacgcccccgggacacccacactcccgggacacccacacccttggaggctggtgtgagcagagccggtgaccgccctggggtgaaagcagatttgcatcagaaaagctctcaagaactgaggaaaacctgatgaagaacacacgattatctggaaggaacagaatggagcaaagaagataaaatcgcctgcaccccagtcccagggaaggccaagctggagcggtcacttcctctcgagcagggaacacc

SEQ ID NO: 1231 - DNA, 4042 bp, Homo sapiens
aaaccggcatgcgcggtgcggccgcacggggagagcgcgtgcctgggggtggggggcatcgcccaggaaagcggagtcaccccgggcggaaagcgacccccgcagaaagcgccgcgcgggcgccgctgcgtgttcgccgcccacagccgcagccaaagagacgcaggcggccccacgcggcctggttcaccgccgcctgcagtgtccgcggcgcggggcgccccgaggctgggctcaccgtcctctccgcgtccttgaagatctcccgggcctcctcgaaggagcactgctcctccttgcactccctctccagggagcccggccgcagctcctccaggaacgcgttggcgcgccggcgccggtgcaggacgccgtgggcttcctcctgggttacgaagactgggaaatgcgagttccgtgaagcgcccaccgcgtgccccgcccagtgcctcggagaccgccccacggcccacgcggcgggggcatcgcaggttcccgcccgtcctggaggaggggagcggcgctgctcgcgggcctggctgggtgtcctccctgccgtgctcccgggtcagccacccccgtcgcccatccttcccggcctggcctctctgcttccgggggctgatcccgagggcgcgctcgggggcacgcgcggaagccgggccgaagggggctgcgggcgccgccgcgtaaacgtgaggctgcgggtcgatgccggcgaggagaaggcggcgcggccccgggtgccgggcaaccccctggggcccacgtgaaccgcgcgtggaaatccgtacagccgcccgcggaaatccaaatccctcgtctccacccgcaccgcgtctccggcggccagatccgccttccccaggcctccgtcctggtccgaggcgcggcccctgcccggctcccccgacagcgagccccgggcttcctcgccagctcttggcggtcctgggcttctgccgccttccccgcctccgcttggggcccctctgtcccccgcgacccctgagagctccagacctcgcgcggatcctcctggggccggtcctgagagcacagccccccgccgcagctcctggcccctccgtaaccccgacggttacttgtggacaaacaggaccgccgttttgcccatgggaagacggggctggtgagggccagagacgcccagggcgaggcaaccccgtgcgctcagctccgagcaggccgctcttcaggacgccctacagccgaggggaccgtcacccgggagcgccgtgagctgtgggcaccacgcggtggtggagagtgacccccgccccggggcggccgtgctgcccgaacctgcctcagcccgcgaggggagacgggcctgggggcaggcgggagagggaggccccgggaggaggcgagcggggctgagaggacgcgcgggaggggctctggagaggccgcaggaggcgcgttccggagggacgacctttgctgggaggacgaggcctcaggtggacgctgtgggccggtgggcaggagcccgagttctgcaggagcggcctaaattggttactgagcgcggaagaagggacggaaggtgagcgctactgggccacgtggggccgagagaaaggccactgcctgttttctttaaaatcagtttcacacgtcgacgcccctagagaactggtctggtttggaaggaggctgaggatgcaggcggggacaccaaagaatcgggctcaaggaggtgggaactcacggactccgagtcctcacaggaggtgccctgggcggcaggagtgggaggggaggcccatgtccctgcagtccccgacacccacgctcccgggacacccacgacccccgggacacccacacccccgggacacccacgccccccggacacccacgcccctgggacactcacacttctgggatacccacgcccccgggacacccacactcccgggacacccacgcccccgggacacccacactcccgggacaccctcgcctccggaacacccacactcccgggacaccctcgcctccggaacacccacactcccgggacatccactcccccgggacacccacactcccgggacacccacgcccccgggacacccacacccctgggacacccacgctcccgggacacccacgcccccgggacacccacgctcccgggacaccctcgcctccggaacacccacactcccgggacaccctcgcctccggaacacccacactcccgggacacccactcccccgggacacccacactcccgggacacccacgcccccgggacacccacacccctgggacacccacactcccgggacaccctcgcctctggaacacccacactcccgggacacccacgacccccgggacacccacacccccgggacactcacacttctgggataccctcgcctctggaacacccacactcccgggacacccacgcccccgggacacccacactcctgggacaccctcgcctccgggacacccacactcccgggacacccactcccccgggacacccacactcccgggacacccacgcccccgggacacccacgctcccgggacaccctcgcctccgggacacccacgctcctgggacaccctcgcctccggaacacccacactcccgggacacccactcccccgggacacccacactcccgggacacccacacccccgggacacccacacccccgggacacccacactcccgggacaccctcgcctccggaacacccacactcccgggacaccctcgcctccggaacacccacactcccgggacacccacaacccccgggacacccacgcccccgggacacccacactcccgggacaccctcgcctccggaacacccacactcccgggacaccctcgcctccggaacacccacactcccgggacacccacgcccctgggacacccacactcccgggacaccctcgcctccggaacacccacactcccgggacaccctcacctccggaacacccacactcccgggacacccacgcccccgggacacccacactcccgggacaccctcgcctccggaacacccacactcccgggacaccctcacctccggaacacccacactcccgggacacccacgcccccgggacacccacacccccgggacacccacgcccctgggacactcacacttctgggataccctcgcctccggaacacccacgcccccgggacacccacgcccccgggacacccacgcccccgggacacgcacactcccgggacaccctcgcctccggaacacccacactcccgggacacccacactcccgggacacccacgcccccgggacacccacactcccgggacacccacgcccccgggacacccacactcccgggacacccacgcccccgggacacccacgctcccgggacacccacgcccccgggacacccacactcccgggacaccctcgcctccgggacacccacactcccgggacacccactcccccgggacacccacactcccgggacaccctcgcctccgggacacccacactcccgggacacccactcccccgggacacccacactcccgggacacccacgcccccgggacacccacactcccgggacaccctcgcctccgggacacccacactcccgggacacccactcccccgggacacccacactcccgggacaccctcgcctccgggacacccacactcccgggacacccacgcccccgggacacccacactcccgggacacccacgcccccgggacacccacactcctgggacacccacgcccccgggacacccacactcccgggacacccacacccttggaggctggtgtgagcagagccggtgaccgccctggggtgaaagcagatttgcatcagaaaagctctcaagaactgaggaaaacctgatgaagaacacacgattatctggaaggaacagaatggagcaaagaagataaaatcgcctgcaccccagtcccagggaaggccaagctggagcggtcacttcct

SEQ ID NO: 1232 - DNA, 4041 bp, Homo sapiens
gttgtttctccccgacacgtgccctgaggaggtgccgctggtggcatgctgtgggccagcttctcaccacgtcccttctgcgagccgcgcgcgtctgcgatgcgcaggctgccctggacccttcggggactggggggactcccttgggaagttaagggggacaccctaagtgtgctttgcaaatcgtattttctgatgtgaaaaccggcatgcgcggtgcggccgcacggggagagcgcgtgcctgggggtggggggcatcgcccaggaaagcggagtcaccccgggcggaaagcgacccccgcagaaagcgccgcgcgggcgccgctgcgtgttcgccgcccacagccgcagccaaagagacgcaggcggccccacgcggcctggttcaccgccgcctgcagtgtccgcggcgcggggcgccccgaggctgggctcaccgtcctctccgcgtccttgaagatctcccgggcctcctcgaaggagcactgctcctccttgcactccctctccagggagcccggccgcagctcctccaggaacgcgttggcgcgccggcgccggtgcaggacgccgtgggcttcctcctgggttacgaagactgggaaatgcgagttccgtgaagcgcccaccgcgtgccccgcccagtgcctcggagaccgccccacggcccacgcggcgggggcatcgcaggttcccgcccgtcctggaggaggggagcggcgctgctcgcgggcctggctgggtgtcctccctgccgtgctcccgggtcagccacccccgtcgcccatccttcccggcctggcctctctgcttccgggggctgatcccgagggcgcgctcgggggcacgcgcggaagccgggccgaagggggctgcgggcgccgccgcgtaaacgtgaggctgcgggtcgatgccggcgaggagaaggcggcgcggccccgggtgccgggcaaccccctggggcccacgtgaaccgcgcgtggaaatccgtacagccgcccgcggaaatccaaatccctcgtctccacccgcaccgcgtctccggcggccagatccgccttccccaggcctccgtcctggtccgaggcgcggcccctgcccggctcccccgacagcgagccccgggcttcctcgccagctcttggcggtcctgggcttctgccgccttccccgcctccgcttggggcccctctgtcccccgcgacccctgagagctccagacctcgcgcggatcctcctggggccggtcctgagagcacagccccccgccgcagctcctggcccctccgtaaccccgacggttacttgtggacaaacaggaccgccgttttgcccatgggaagacggggctggtgagggccagagacgcccagggcgaggcaaccccgtgcgctcagctccgagcaggccgctcttcaggacgccctacagccgaggggaccgtcacccgggagcgccgtgagctgtgggcaccacgcggtggtggagagtgacccccgccccggggcggccgtgctgcccgaacctgcctcagcccgcgaggggagacgggcctgggggcaggcgggagagggaggccccgggaggaggcgagcggggctgagaggacgcgcgggaggggctctggagaggccgcaggaggcgcgttccggagggacgacctttgctgggaggacgaggcctcaggtggacgctgtgggccggtgggcaggagcccgagttctgcaggagcggcctaaattggttactgagcgcggaagaagggacggaaggtgagcgctactgggccacgtggggccgagagaaaggccactgcctgttttctttaaaatcagtttcacacgtcgacgcccctagagaactggtctggtttggaaggaggctgaggatgcaggcggggacaccaaagaatcgggctcaaggaggtgggaactcacggactccgagtcctcacaggaggtgccctgggcggcaggagtgggaggggaggcccatgtccctgcagtccccgacacccacgctcccgggacacccacgacccccgggacacccacacccccgggacacccacgccccccggacacccacgcccctgggacactcacacttctgggatacccacgcccccgggacacccacactcccgggacacccacgcccccgggacacccacactcccgggacaccctcgcctccggaacacccacactcccgggacaccctcgcctccggaacacccacactcccgggacatccactcccccgggacacccacactcccgggacacccacgcccccgggacacccacacccctgggacacccacgctcccgggacacccacgcccccgggacacccacgctcccgggacaccctcgcctccggaacacccacactcccgggacaccctcgcctccggaacacccacactcccgggacacccactcccccgggacacccacactcccgggacacccacgcccccgggacacccacacccctgggacacccacactcccgggacaccctcgcctctggaacacccacactcccgggacacccacgacccccgggacacccacacccccgggacactcacacttctgggataccctcgcctctggaacacccacactcccgggacacccacgcccccgggacacccacactcctgggacaccctcgcctccgggacacccacactcccgggacacccactcccccgggacacccacactcccgggacacccacgcccccgggacacccacgctcccgggacaccctcgcctccgggacacccacgctcctgggacaccctcgcctccggaacacccacactcccgggacacccactcccccgggacacccacactcccgggacacccacacccccgggacacccacacccccgggacacccacactcccgggacaccctcgcctccggaacacccacactcccgggacaccctcgcctccggaacacccacactcccgggacacccacaacccccgggacacccacgcccccgggacacccacactcccgggacaccctcgcctccggaacacccacactcccgggacaccctcgcctccggaacacccacactcccgggacacccacgcccctgggacacccacactcccgggacaccctcgcctccggaacacccacactcccgggacaccctcacctccggaacacccacactcccgggacacccacgcccccgggacacccacactcccgggacaccctcgcctccggaacacccacactcccgggacaccctcacctccggaacacccacactcccgggacacccacgcccccgggacacccacacccccgggacacccacgcccctgggacactcacacttctgggataccctcgcctccggaacacccacgcccccgggacacccacgcccccgggacacccacgcccccgggacacgcacactcccgggacaccctcgcctccggaacacccacactcccgggacacccacactcccgggacacccacgcccccgggacacccacactcccgggacacccacgcccccgggacacccacactcccgggacacccacgcccccgggacacccacgctcccgggacacccacgcccccgggacacccacactcccgggacaccctcgcctccgggacacccacactcccgggacacccactcccccgggacacccacactcccgggacaccctcgcctccgggacacccacactcccgggacacccactcccccgggacacccacactcccgggacacccacgcccccgggacacccacactcccgggacaccctcgcctccgggacacccacactcccgggacacccactcccccgggacacccacactcccgggacaccctcgcctccgggacacccacactcccgggacacccacgcccccgggacacccacactcccgggacacccacgcccccgggacacccacactcctgggacacccacgcccccgggacacccacactcccgggac

SEQ ID NO: 1233 - DNA, 4056 bp, Homo sapiens
gcccccattctggcatggacttgaggcacactggtccccatctgtggagtgggctggtgtcagtaagctgagaagggttgcaggcaggactggtggtgatcatccactcaccactgtaagaaatccagaacagcttctgaaggaacaagagagcaagcctcgtgagatgcaccttcaccagagcacccaacggtaagcactggacacaccatgaactggggttgggggacttggacctgggtctggcggggtgggctcaggaagccagactttcctctggagctgaggtaggtttcttctaatcttggcccctccccaggacatctggaactatgggtgaccacacatttcctgctcccaagtcagaacacccgaggttcaaccctgactcttctgtcgctgagctgtggacctgggacgaggtacacaggctctgagccacagctccacctctgacagggtggccacacatacggggagagggtgcagtagcagatgcaaaatattccacaaacagcaaaagcactccacagaaaaaagtgattgctgaagaaactgttggccacctgaacttaaactcacggggtgctgtgagaatacaacagatgagaaatgctttcaaaactaggtgtataaaaatgctaggcatgaccatcctcaatttgtctggaaagggtcatgttagcctttgcctcagacagctggacctcctgtgagtgtgaggcttctttgagcatgaggtgtcctgagtgtgaggtgtcttgtgcatatgagatgtggttctgtgagtgtgaggcatcctgtgagtgtgaggtgtggcgacctgtgagtgtgagatgagtgtaaggtgacctgtgagagggaggtgtcctgtgagaatgagatgatctgtgtgaggtgtgacctgtgagtgtgaagtgtgccctgagtgtgaggtatcctgtgagaatgaagtgatctgtgagtatgaggtgatctgtgtgaggtatggtgacctgtgggagtgaagtgtgccctgtgtgaggtgtcctgtgagagtaaggtgacctgtgagtgtgaggtgtcctgtgagagtaaggtgacctgtgagtgtgagttgtcctgtaagactgaggtgacctatgagtgtgaggtgtcctgtgggtgtgaggtgacctttgtgaggtgtcctgtgtgaggtgacctctgtgagttgtcctgtgggtgtgaggtgacctctgtgaggtgtcctgtgggtgtgaggtgacctgagtgtgaagtgtgccccgtgtgaggtgacctctgtgaggtgtcctgtgggtgtgaggtgacctctgtgaggtgtcctgtgagtgtgaggtgacctgtgagagggaggtgtcctgtgagaatgagatgatctgtgtgaggtgtgacctgtgagtgtgaagtgtgccctgagtgtgaggtatcctgtgagaatgaagtgatctgtgagtatgaggtgatctgtgtgaggtatggtgacctgtgggagtgaagtgtgccctgtgtgaggtgtcctgtgagagtgaggtgtcctgtgagagtaaggtgacctgtgagtgtgaggtgtcctgtgagagtaaggtgacctgtgagtgtgagttgtcctgtaagactgaggtgacctatgagtgtgaggtgtcctgtgggtgtgaggtgacctctgtgaggtgtcctgtgtgaggtgtcctgtgggtgtgaggtgacctctgtgaggtgtcctgtgggtgtgaggtgacctgtgagtgtgaagtgtgccccgtgtgaggtgacctctgtgaggtgtcctgtgagtgtgaggtgacctgtgagtgtgaagtgtgccccgtgtggtatcttgtgtgaggtgtcctgtgagtgtgaggtgaaatgacctgtgggtttgaagtgcaccctgagtgtgaggtgtcctgtgtgaggtgacctctgtgaggtgtcctgtgggtgtgaggtgacccgtgagtgtgaagtgcgccctgagtgtgaggtgtcctgtgagtgtgaggtgacccgtgagtgtgaagtgtgccctgtgtgaggtgtcctgtgggtgtgaggtgacctgtgagtgtgaagtgtgccccgtgtgaggtgtcttgtgtgaggtgtcctgtgagtgtgaggtgacccgtgagtgtgaagtgtgccctgtgtgaggtgtcctgtgggtgtgaggtgacctgtgagtgtgaagtgtgccccgtgtgaggtgtcttgtgtgaggtgtcctgtgagtgtgaggtgacccgtgagtgtgaagtgtgccctgtgtgaggtgtcctctttgaggtgatcttggagtgtgaggtgacccgtgagtgtgaagtgtgccctgtgagtgtgaggtgtcctgtgagtgtgaggtgacctgtgagtgtgaagtgtgccctgtgtgaggtgtcctctttgaggtgatcttggagtgtgaggtgacccgtgagtgtgaagtgtgccctgtgagtgtgaggtgtcctgtgagtgtgaggtgacctgtgagtgtgaagtgtgccctgtgtgaggtgtcctctttgaggtgatcttggagtgtgaggtgacccgtgagcgtgagctggagaaagtcccaggtccctaagtgttgtttctccccgacacgtgccctgaggaggtgccgctggtggcatgctgtgggccagcttctcaccacgtcccttctgcgagccgcgcgcgtctgcgatgcgcaggctgccctggacccttcggggactggggggactcccttgggaagttaagggggacaccctaagtgtgctttgcaaatcgtattttctgatgtgaaaaccggcatgcgcggtgcggccgcacggggagagcgcgtgcctgggggtggggggcatcgcccaggaaagcggagtcaccccgggcggaaagcgacccccgcagaaagcgccgcgcgggcgccgctgcgtgttcgccgcccacagccgcagccaaagagacgcaggcggccccacgcggcctggttcaccgccgcctgcagtgtccgcggcgcggggcgccccgaggctgggctcaccgtcctctccgcgtccttgaagatctcccgggcctcctcgaaggagcactgctcctccttgcactccctctccagggagcccggccgcagctcctccaggaacgcgttggcgcgccggcgccggtgcaggacgccgtgggcttcctcctgggttacgaagactgggaaatgcgagttccgtgaagcgcccaccgcgtgccccgcccagtgcctcggagaccgccccacggcccacgcggcgggggcatcgcaggttcccgcccgtcctggaggaggggagcggcgctgctcgcgggcctggctgggtgtcctccctgccgtgctcccgggtcagccacccccgtcgcccatccttcccggcctggcctctctgcttccgggggctgatcccgagggcgcgctcgggggcacgcgcggaagccgggccgaagggggctgcgggcgccgccgcgtaaacgtgaggctgcgggtcgatgccggcgaggagaaggcggcgcggccccgggtgccgggcaaccccctggggcccacgtgaaccgcgcgtggaaatccgtacagccgcccgcggaaatccaaatccctcgtctccacccgcaccgcgtctccggcggccagatccgccttccccaggcctccgtcctggtccgaggcgcggcccctgcccggctcccccgacagcgagccccgggcttcctcgccagctcttggcggtcctgggcttctgccgccttccccgcctccgcttggggcccctctgtcccccgcgacccctgagagctccagacctcgcgcggatcctcctggggccggtcctgagagcacagccccccgccgcagctcctggcccctccgtaaccccgacggttacttgtggacaaacaggaccgccgttttgcccatgggaagacggggctggtgagggccagagacgcccagggcgaggcaaccccgtgcgctcagctccgagcaggccgctcttcaggacgccctacagccgaggggaccgtcacccgggagcg

SEQ ID NO: 1234 - DNA, 4056 bp, Homo sapiens
accatgaggtgggcgcctgcatttcccattggcaggaagggaggctggcgctccaccaggaccccgcatgactcccctagtttcctcctgtgggtctgggtgggctcctgaactgtcctctcatccccaccctccgcttcttcccaggaagagtcctgccaacttccactcccaagaagtcagagtggcttccagaaccctgggctgggcttaggccctcaggagccccgggcattctggttgcagaattttctaccaattcactgaagcatctgtctgcagagtggctttgctgtcgatgaccatggcatgggcccttccagggccttgttccatccatgctgatctcatcccaccataagcatcacggtgggctcctgttttacacatgaggaaactgaggcatggtcactcggacaaaagagaaagcagagccagctctgacctggatcagggcccgccactggctcccgtcccgtttagggggcattaggaaccggggtctggccagggtcagcaagcatcttcagcagaggtcctgacactaaccatgctgggcttggcgggtcagctggtctgtccggctggacgtctctgccacggccactccatggacactaatatgggtgtgttcccataaaactttatttacaagagcagggtgccttggaagcagcccacggctgtagttcatagaccctgtctgctctgaagtagatgatgcctgagtgcccccgaggtgggttgctggtgcctgccttgctgctgtgagtgccaatggtgcccaccttgctgctgtgagtgccagtggtgcccaggacggccctgcagggatggcatcgagtccactctctgagccgtgcttgccggagtctgagtgggggcactgtttgtcacctccccatttctctgttcatgtgtttctcattcttcttccaccaccctggggactcagcaagagtgcagcttgccaggtcctcccactgcagccagggcctgggaacttgcatttagtgatgcgtgtgtccctgactcttgagcaggtgctcccagggtctctgtgaaatatcattgacaagggctgtggcagggagagaacatccaattccacaggatcctgggagctacagcctcaaacatctatcaaacagcttttgtttttaaaaaatagcttccatgtgagggttcatttcagtgatgttgaaaattgtgaaagaaaagagcatctcagaggatgagcaccgggggctccaaaaatgaatcatgggcaacccagtgggtggcaggcaccacaggtgtgcggaggagacgcagccgtttattgtgaagctgggaagcaggtggggaatagtctgtgcagcccggcacccagcgaagggagaaatacatttgggggagagtttgggggcattcgccaccatgcatggtgatgcttctgaattgtctgaagtgaagatgataatggataagaaccagaaaagtgagagctaaacaaccgccttcagaggacagcacacatggagtcagcatcggtgtgtgtgcatctgtgtgtgcatctgtgtgtgtacatcggtgtgtgtgcgcattggtgtgtgtgtgctcatccatgtgtgtgcatatctgtgtgtgcgcacatcggtgtgtgcatatctctgtgcatccgtgtgcactgatgtgtgcgtgcattggcatgtgcgtgcatccatgtgtatatctgtgtgtgcatctgtgtgtgcatatctctatgtgcgtgtgcatcggtgtgtttgcgtatctctgtgtgaccatctgtgtgtgcatccgtgtgtgtgcatatctctgtgtgtgtgcattggcgtgtgtgtgtgtgcatccatgtgtgttcatgcctctactgtctccagcaatgaaggcagagcagcagcctgaggccagcagatcacgtgcaggtgggcttggctgaagggaggtaaggaggctcagctgggctgtctgcctccaggacaaccttggcactcccctgcccctctgtccagcgcctgtctgcctctgcctctcatcttttctattccatctctgtgtctctattagtctctttgaatcttggagtctctttgagtctctctccatgtcctcagagtctctccctcagtctctctctgtctctgtctctctctgtttctgtctctgtctccctccccacctctccctccctcccatgccctcctctaccccattaactgcagaagaatatatgggatttggtgccaggacagttcgacgcagccttggctttctctccacaggccagggctgctgggctagggaaatggggctcgcaggaggactcctgggcgtggctctgagcgcatgagcttttgcagccactcgatgtactgggagaccctggtgtacaccccaaagtggcccacggttgcgcagccctggccccagctgacgatgcccgtcaggtaccacgtgccccggtagtgggtggcatgtgggcctccactgtcccccttgcaggagtccttgctgccatccgagtagccggcacagaacatgtactccgtgatatttggggagtctcccaccttccgtgactgctgcaggcagtcctgggtcatcagccggggcacgttgaggaccatgagctccagggccgtggcgccacggtccagcagctggccccagccgctgaccaatgagaagcgcacgaaggccagcgtcctctcagagaacgtccgttcgggcaggcagaggggcaccacatggtcagtgaggaccacgggctggtgcaggcggagcagcgcgatgtcgtggttggtggtgcccgggacgtacgtgctggggatgatgacctgcgccacccgccggctctgctcatccccgtcgtgctcgctgaggtcgtgctcgcctggaaggaagaagcccccctcaggccctttccaccacctgccacctcaccccctggtgcatggggatgggctgtggccatttctaggtctgcaggggctgcagtctccttctggggcaaggggacctgcatctaaccccaaggtggggccagcctgccccaggtggcagcctgtggctcgtgtggggacaagtgaactggggtgaatctggggtctgggtgttgaggtggggaagggatgctgtgccctggcagctgggaggacagggcgtgccccgattctccacagttcttcccggcccagtggccctcctgggagtgctcgtctcacccataaacccagtgagcagaacccctgccagccggtggtcccatgaggccctgggtgtcgcatcctcttctgggctcttggtcaagtgaggcaggatgggcagaagcccccagtcttttatcgttttatttgggcatgggaaagtggctgagagcacggtggccacagcagtcgtgcccagcatggttgctccccttttggggatgtctgtctgtctgtggaagtgacagcacgaagcccagagccacagcccctgagacacttgagagctgcggtcagacaggggagagtggtacccacccagcaccgcggtcggacagcggagagtggcacccacccagcaccgcggtcggacaggggagagtggcacccacccagcaccgcggtcggacaggggagagtggcacccacccagcaccgcggtcggacagggaagagtggcacccacccagcaccgcggtcggacaggggagagtggtacccacccagcaccgcgatcaggttcctccagttcttgattttgtcgaaacagtgggccgcggagaccacccagatggtgttgatcagggtccccccacacaactgagctccattcaccaacaacaggacctgggcggggggacaggaggtgtggaagtcacattgctgtcattgtttctctgatgactcgccctcccgggcatgccaaggaacctctggcattgcacaatttctttctgaaatcctggggtctttgcagatccctcccaggcaaagctgctcagacctggctctgggaggctgtgcccctctctagccgagacgtgctcttgggcacggcccaagaata

SEQ ID NO: 1235 - DNA, 4051 bp, Homo sapiens
gcaggctggagttcggctggcgaactcccagtcctgacccctgggctccacagtctttcaatttgctctggcaggacagtcccccttcttaaagcccggaagaagggaaggcaagctttgctagtttttgcccctcagctcagagacagactgccatacacacatctgcttcccccttatccctctctatgcccctccaggggaggcatatgccttgggtcccggctgtactccctcctccccatctactgacattaattgattttctccaggctgcggcttctctttgcttctatcgtttttctccctagtcctttgataggctgaccttggctcttctctggtcttcttactccccaactggtctcccatatggaccttactggctttcattctttattacttagcctatccactttctctacttttccttttagtactgacattaggataaacaataccgaattgcctataaagtaggattgcagccatgactggagttggacaagaaagcaaagaaaacatcggcattggaataaagaaatggaaaatggggaaggatgaagaaacagaagaaaagtagataataaagtcacaccaggttgtaaatacaagaataagatgcttgatgttcctgcacatgatcttggggtcctaatgagggtctcacatacctacactggggaggcaggaggggtctccctgaggagggcagggtgaagtttcttctccctgactgggattgcacctgaagacttgggctagcgagccgctgtatatcctggatccgggaaggtgtgaagggatcaaccaccacttctagaaatagtcatgtgggcaatatatctctatggggttttcagatggctgcaacttcctaccctggatctctgctgctcttgggcaccacattcctgtccacccagccaagcctggtctgaggctgtgtccttagtcaggggagcctgtttccctttcccctggcagactaggtcctgtgggtcccagcgtcctcttcacctcctgccagttgtaggagttctgtcctcccattttgcggaaccagggagcctgtgggaggccttacctccactgccagccccacctcaccccagggcagattagtgcctctgagccactcaattatccgcaggatgggtggggggggggcggggaggggaatctagaatttatagctgggggtggaaggcgcagtgagggaggtacagggaggaagagtgaaatatttagatctttggggttcctgccatttggcccctattaaagagaaccctggggcttttagaatgagttttgcatgaaattgaacaagcagggccatgagctgtacagaatcccacctccaccccccaacatacacacaccttatttattggttcttctgagatcttcccagacgcaaaaactctttacaaggatatcaaaaaatacaacacctgcctacgaggcaccactttgaggaagctaataaattacccccctttgaaacaaaaatggaatcagcattaagcacatactattattaggttgagtttcagtctcctagaaaattcgttagatgttgatatctggggagagaaggaatctctcttttccttaagaaaattcacgagggaaacagcagtagttcgctggctttgtttggtttcgtttatttgtacaaagaaagattgtgcgttaagatcttttttaaaaatccctgcaagttagagtttgcatcatcgtcgtgacctagtgaactaatatttgtatattctgggatcgaaattccgaggaagtttctgctcttccgcacaccagacttgccggtgtggtctccaggaggggttgggggccgcgtcctcagggggcgcgcggccgaggctgttcccagcgcgggaacgggagggagaacctgggcaggggcggggcggggcggggcgcggggacctgggtacgcggagacgcggggcgggcgggggccgagagcgaggctgccggctgggtgttgggagagaggccgcgggtggacggggtaaggactgggactggggagactgagagctggggggtgcggggaggatgaggctgcggacaggaaacgaagggcctgggacagctgcttctcttggtcctagaaaccaaactttcgtagcgagagaccctaagacagctcgagatttcaagtgtccacacttctagtttagacatttggcaaccaattcggaacagccgggccgcgaggggcccccaggtctttggcggcgtcgttgggaggccgcggagttgtccctgggcttccctgaaggccccgcagactccccgccagtcccggccacacccagccagggctttgcagctccagcctgagaatgttagccccggcaaccccttctggcggttgttcctttaaaaaccaattcattttttccatcaagtcttctacccaatgggtagactcttcgttaaatgactgttaaccagtactgaggagaagcacaatcaacatagtttctctgtcacctttcttgccggttttttcctcccaaccatggagtctccattttctaagcaattaaattatatattcaacaggaacattccatttaaaatggttcgggacagaagactgatgcacaaggtctgaagctggaagaaaatatttagtgcttgcctacagattctgtcacccatcatctgctcggaatgcgctccgtatctttcagcgtgtccggctcttatgattgcaaatggccctgttttcaaatggaaataagacttgcaaactgattatgtgtattgaatcagaatcactcgctagatcctcttgtttaaaatgtattgaaaaaaggatgatgggtgcagacctctgtaaccagctctgtctcttctctgggaggtcgatctattttgcaactttttgccatttgagcgtgtttcagccagataattacgttgccattgtgttaccggcccaaagctcagacagggtacacacaccaccacccagccgtctcccaggccctccccactaggatcaccccctaaacaccacaggcacatgacacagtcatccaccaccatccccacctccccatcactgtgacccagctatatataaccagcacttctcagctgccacaaccgccctcagaagcccacacactttcaccaggaatagttgtttctgttttctcccagtatcctttccggccccctttctctcttctgtctttccaatgagcagaaccacatacacaacccccaaatagctttcacaggcacaccaccaatgcaatctaagtatttagccatgttgagaattttcaacaactaactgtgttgatgtggcattgtaattgttagaaaatggttaatacaggaaggttactgtgaacatgtttgtatgctaccacatacctcaaagggtttctctttctctttacccctacccagtgctaaatgatggccatgagtgggttggctttttgttaaatatttccaaaaactttttctgtttgatttcagtacgaagccaatggactatgtagatgtgtagagagatgtctgagttttatctattgcgtgagttgtaggtatgatacaatgcagcacttccaaagtttactgcacccaggtcgaggctcaggagtcctgtcagggaacagtgctgccagggagtagtaatcgacatttcagttaatactgccaggtcacagggcagtaacgaactagctacaatttctgtctgctgtggcttgaggtaggaatgtgtgctgtgtgcaccacggtggtttgacagttgcaattctttctgaagtagaatcagaagggaaggaagaagctgccactgcccagccccccaggcccttagtcccaccccaggccttgcagaccttgaggcaccatcaagtggccaggcagagagagagatttaatcctctgcggcttgagtctcctctagaagtctgtcgctgcaagtctgtttagagacctaatgctctggaagcgtctgttgggaccataactttgcgaggttcgctttacacat

SEQ ID NO: 1236 - DNA, 4063 bp, Homo sapiens
agaaggctgttacattaagaccaaggcctaatgtgatctgccaagcttttttacactatgaaactatccattacacctttcacatatggacagtctgttataggcatcagcagtgctggaatttctatatgggcaaggtatagggttagcaatcttgctgacagggaggcccaggggactgggcctacagctatgtttgcacagtaagcatgctgattttacttagactgtatattataaaaccataagaataaccaattttagtaaagatacttttactcacagttgacatgaaattggtttaatacatcattagttgagggtaagttactgggaagggagtcgttaataaaaattatagtaagattaattactcccaatcactaccaacacactttttctcagcaacttttcagcactgccaccagggatggatcacacgcaagcagccagaatgtttctggatttgtgctaagagccttattccagtgaagcaattacagctatgatataatattctttcatggtgccaagcagccctatctaatagcaaaatagctgagcaggaatgaggtcagaaactggggaagttaaatttgtctcttctacccactttcttattgatccccagaggaaatgaatgagaaagtggaagtgaaaacaaagtaacaggaacaactttagagggcagttgtcagattgctggagtagttttttttttacagattccaacacagaattgagaaatatcaggaccaccatttcacaactgtgttaaatcccagggcctgcataaagaaacaggaacacatcagagccacagcacagtcaactggtcacagagactcatttattcctcttcttttatttttatttttttgagatagggtcttactccatcgcccaggctggagtgcaatggcacaatctcggctcactgcaagctctgcctcccgggttcaagtaattctcctgcctcagcctcctgattagctgggattacaggtgtgcgccaccacgcccagctaatctttgtatttttagtagagatggggtttcaccatgttggtgaggctggtctcaaactcctgacctcaagtgatccgcccgcctcagcctcccaaagtgctgggattacaagtgtgaaagacggcacccggccgagactcatttatttcaattatgatatggtcactataacctcaagttattcaaacttagcttgattatttttgaaaaaaaaaaagagtaggaacactttacccgaccccttcatcttgttcttaactttctctctctctccacacacacacacacctcccagtatttcctccatcactcaaaattcactaactttatacgaagaaacaacaaggatatttaagggcaataaaatattggtggctggggcctaccagagatatctgaacacaaacccccatgttgacttccagttaaacacagatgaacgtgtatgtacatcacctctcctaaaacccaaataaaaaaggcagtaagggaattttttaaggcatgaacccacaggataaacaacagaaaagaagattgtagcaggaaagagaaatgagagcgaggagcgtgaacactgtatcagaataaagctgtgcaaagccaaggcaggcagtcttgtgtttgcagaaacaaagaacctagacatgaacggactggcctgcaggacccctgagatatgcctggaggcatccagtgcagagcaaggcagggttgaggctggggatcccacagggaagtttcattacaagtctgaaagcagtgttgtatgaaagcaaagaaggtgagcactccccttgacaaggatagaagagtcctcaggcctgacaacaagttcgacagcagagcactgcagctagacccctgcccagcttcttccccaacccctcactgttagctaaaccccccttaaaggatggggctggactgaaggtaagctcaggacctctccagtcagagaaggctctgcagagaaagaggtgggctgagacttccaggatgtatgtatctatggaagaaagggtgggaagtggaagaggaagcaggcagtaggggacgagaaggaaggggcatctgtgtttcagaccctccaagtctttaagttgcaatatgacttccaagttagatccatacaggtaaagagagaaagcctgatgagatagattctcagcagatgagggcaggtcctataaacctgtattcttgttcactgcacagtcacacttacctcgcaagtttgctgaggccaaggacttgcttgttaggaagataaccaatatggaccttcagagaagagacggaaatcattagctgagtgaaaatacagtgccttctttgtgacaaaataaggaaatatagaaagaatatagtacacttttatgtaatttatcacgacaatgtattaccttgaaaacatctggaactgttaagacttagaaaatgaaacatttatatatgtatttttaaaattacataaatgcagtaaaagcaaaatatataagtatgagtctattaatcaaataacaaacttgtacagttgtccgttggtaaatgcgggagattgcttccaggacccctgtgtatacccaaatcctgcatactcaagtcccgcagtcggccctgcagaacctgcatatatgaaaagttgcccctccatctatacaggttttgtatcctgcaaatactgtagaatttttgatcagtgtttgcttgaaaaagagccatgtctaagtggacccatgcagttcaaattcatgttgttcaagagtcaattgcatggccctgacacttacctgtgaagttgaactcttgacacaaatctgaaagtttcttctttatggaggagaaacattctcaaggaaaggcaaatgatctcatagcaacactaaaatgtatacaggaaagcctcctttaaatggcaaaaactgtaagcataagtattgccattccacacatcacagcagccttaagatcccacctcacagccttaagatcccaccgcaaagccctgcagcacagaaggtctccacacccttttgtgcttggcttcctggtttctaagctgctagagagtgcaccatcttccttttttttttttttttttttgagatggagtctcactctgtcgcccaggctggagtacagtggcccagtcttggctcactgcaagctccgcctccaaggttcaagcaattcccctgccttagcctcctgagtagccgggactacaggcgcctgccaccacacccagctaatttttgtatttttagtagagatggtgtttcaccgtgttagccaggatggtttcgatctcctgaccttgtgatctgcccgcctcggcctcccaaagagttgggattacaggcgtgagccaccacgcccggccccatcttcctaactggagaaaaagggcactgctaccaccatggcttggcaagaacctgcaccctaagaactaagttttaaaggacccaatatacagccaggccatttctgttatcttaaatggcaccaattaatatcaaatataaaagttactcttttggggccaaatactacatacgaaaaacattagttctctgaaaagattaatagagtaaatggtcacttgtaggcaattaattaaccgaatataaaattagagactcaacggcatcatggtttgctaacactgttttcattgttcacttactatttacataattgatctagtagtacttagtgattttttcccccatccattggcactatgctttaggaatttgagaagtccacctcattgccttcctggttggcaggaggaaaaagtaaaatagcacctgaacattgaggatttcaaagaaaaattagagagttaaaactttcccatgaaccaaggtcttctatgctgtctgaaatttttacatttccatgcagacacggaatttgttcattgtttatactatttttggtcttaagatcctaggtaatttaaatgtccatttcacaaaatcactagataggccaggagtggtggctcacacctgtaattcca

SEQ ID NO: 1237 - DNA, 4037 bp, Homo sapiens
ctggaaggtggggcactctgctgaacagctggcctattttcttttcagtagagaatgttatgggtgggagcactattttagaacaaaagggacttaacaggtataaccaaatgcaatgtaaatacaaatgtgtgactctcccttggattcctgtttaaacaaaccaagagtaaacatttgagacaattggagaaatttaaatatgaattcgttattagacactatttaagaattattgttaattttgtgatagtgctgctgtggataagtaagaaaatattttagggccaggtgcggtggctcacgcctgtaatcccagcactttgggaggccaaggcgggcggatcacgaggtcaggagatcaagaccatcctggctaacaccgtgaaaccccttctctactaaaaatacaacaacaaaattagccagcatggtggcaggcgcctgtagtcccagctactcaggaggctgaggtgagagaatggcgtgaacccgggaggtggagcttgcagtgagccgagatcacaccactgcaatctagcctgggcgacagagcgagactccgtctcaaaaaaaaaaaaaaaaaaaaaaaaaagcatgcacatgtactccaaaaaagtattgacagcagtattgtttgtaatagcaaaaaaaaaaaaaaaaaaaaaagaggcaacaatacaaaggtccaccaagagcagaatagataaattgtggtatatttgtacaatggaataagatataacaatgaaaataaactacaatgacaggcaatgacatcaatgaatccgactatgtagaacaagagaggccagacacaaagagtacatatcgtagaatctttccacttacatatagttgaaaaacaagaaaacgaatccatagggttataagttgataaactgatacaaaggatggattagggattaagaagagaaaagaaatgaggtgagcttccaggatgctacacatattgtagttgtgggggtttcgttgttgtttgtttgtttgtttgtttgacagggtctggcagtctggctctgttgcccaggctaggatatagtggcgcaatctcggctcactgcaacccctgcctcttggactcaagccatcctcccatctcagcctcccgagtagctggcagtacaggcatgcaccaccatgcccaggtaatttttatttttatcttggtagagatggggtctcaccatgttgcccaggctggtcttgaactcctgggttcaagcaatccacctacctcagccttccaaagtgctgggattacaggcatgaaccaccgtgccagcctattctagttcttgatctctgaagtggtaaggaacacccttaagttttatgcattttctatctatatattatttccataaaaaagtgaaaagatacaatactttaacaaagacaaaaatgaagcaaatgttaacactttaactttagttgatgggtatataagtattcataacactgcttcttgtaagtcttctgtttaaagattattaataaagagtcaaaattaaataaaattatgatgggggtagggaaatgggacaactctttgttctataccacatgttctcaaaggtatgttaagtagtcattcctagacaacatctaataactaactcagatttaaattcctccaattgtctcaaatgttttacttttggtttgtttaaacaggaatccaatggagagtcacacatttgtatttacactgcatttggttatacctcttaagtcccttttgtcctaaaatagtgctcccacccataatattctctattgaaaagagaataggccagctgttcagcagagtgccccaccttctggatttgttccattcagcctctggatttcctgtaaactagattagatctaaagtttcataagactaggactaaacatttctgacaaaagaaattcacagaggtgctgaggaatctaatgcattagattcacttttcctaatatagaaaggaatggaaacaaatccacaaataccataacctctgtcacaagaaattctgcaattattgttgctcatgacatgccatacatacatatctatcttggatcaaacattattcaagttaaaataaagggcatctctagattgggatgctaataataaataaataaaggttaaaggttttcagagcctgtagtagctacaaaaaaaaaaaaagagagagagagatgctacttaaacctcattattttaacctatgaacctggtatttaacatgaaaggcttatcctgagagccttctgctactttggttttgttttttaagtttcaagttattagtcaggttaataaagaataaccatatatgtataattgtaaatacctgagatatcagcaattggcagctaaaaattttaaatataattattctaattgaaaaactttcactatgttttaaattgctgggaaacaacaaagagaaccttacctttccaacaaatggaaccaagtgatgctcacacatggaaaacatgtctatgtccttcacaatcaccatctcatcatgatcttcatcaaatatagcatcgtttaggacatctgaaatcagaggcttgctttagtaacatgtccaattttatagaaaggtagaattatggataaacatgaatagacagtcaacataaacgaacgttaatcctccctaaaatattaagggaatacaaattaaaactagatatttttccttatcaaagtagcaaagtccttttctgtaagtaacatttaaaaatccttgatacagtgttacatgaaaaatgcaggattatgaacatatttgcagtatggaagaggaaggagaacggagggaggaaaggaaaaattataccaaaataaaacagtggctatttctggcagtagaaatgggccactttcactttcttccttacattttcttctactttatattttgtctataatcaatatgtagaaaaccatatctgagaaaaagactaatccttagccctctgacttctgaggccagatccagacacctgtaaacctgacctctattatcaattccccaagtaattttctacatttgtaaagtgttctatatattgtaggctagcatcagacttattctaaacagttgccttcctaaggaaataaatcctacagtttgtgtgtatatgcctctctgggaaggctttggaagataagcagtgtcttgtttaagctgtggaccctggcacttccagccagacatacaatagacattaaaaaaaaaaaaagctttatttttaaaaattgcactgacttatcctcaactatgctatgtgcaaaagaaaagattaatcagatgatgcctgagagcactctgagcttcctaacattcggtgactgcaagaacatcctgtcctggatgctgaagagggatagagggaaacaagccacattccccaccaatcataatatagccaagctattgataataggcaggtacccaaacaacattgtagataaatgccatatgacatggaaacttcttcagctatattgtcaaatgagaaaagaagctacaaagaaatacagtaggatttcattttcggaaaataaatatagacatagaaaaaaactgtactgatacctagacagcttggcagactagatataataagacacgtagctgagtaatttcaaggatttgggggatatgcaatatacataatagaattagacagagaagggaagggatgtattagagctttgcacctgcagctctttcccctcagaaaggcaggcggctgagtgagtcacaggaagatggacaaatgtccacccacactgcctgaccttcagtggctccactgctactagaatagggggctcacagagaccaagtcatcacgtaaaccacagttattaccccaagtcaggctattcagagatacatttgactgtgtcatagaaaagtcattagtgtggtcaagaaaggcgaacatggcagggttagacacatacagacaaacagagacacccctggtagaagtgg

SEQ ID NO: 1238 - DNA, 4042 bp, Homo sapiens
ggacccccagagcccccccaccccggctgcgcgctgcaccattgccccggccggaaaggcctcaccggaaagttggctgggtccacgcgcagcacgagcgcgtgcaggtccgccagcgggctcagcgcggcgcgcaggttgtccacgtgctgcaccgccgcgcccacagccgccagcatgcgctgcccgtggctcagcagctgcgtcgcgtcctggcaggcgctcaggtgcgggaagtagaccttggtgctggggtacaccgtgaagagcctgcaggaccaggtcagtgaccggggaggagggcggctgcgtggggcttcactagcgcccacaccgcccagagcccggggatccgcacccgaaggaccttggatggcgttggcggcccacgcgcccaaaaccctcatctccacctccctgagctcccggagaccccgcctctaccgacctgagcagcagctccgccccgaattgcgcctcgtggcccgcaatcaggtcccagacctgcgcgatttgggcgcgctcctgggcgctgagcatggcgccgcctgacgtgctctgggggccgcgcccgccgccctggcctccttatagagcctccgggcaccccgcccgtccttatcggcccgagcgcggcgggaacgcggggaccctcggcctgcgccggggaacgtaaccagcccgggttcccgtctgtgtggaggcctcgacctccgggatcccagggtttctggcattgacccacgccgttgcgcgtgggcacctttactgcagactttaggggcatctgtttactcccctcgggtaaagttactgctctgccaggagggagcacatgggaggaaccggagagagaacaccgggcaggaaaccccctactctcttaggagtcggggagggaccggcctcagggacccccgtagctgccagagtcccgggattcggacgtcaggctttgtggaaaagttccctgagccccgacacgcttccaatacgcttagtgaagtgacaatctttgtgcgatatgggaagccgggagacgcacaaacgcccgtccgactcaaggaccccaggagacgccgcgggccggcccgggactgctccgctccacccgggccgcagctccggtgctcaggggctagaacctccccaaggcgccccccaagtgaaccccaggccgcgacgacagtggggacgaccgagttcctgcgaagcccccggacccatcactcagcttctcccctccttccctccaatactgagaacacagagcccagatcgctccgtcctcatccatttattggagtcagggcaggaactgtgggagggtgaagggcaggggaggggccgcagcctgtcctgggggtcccggaggcggcgctcagcggtacttctcggtcaggacagaggatacgaccgataggaacttggcccaggcggcgtgggcctcggccgtgaagtcggcggggaagcgcgcggccagggtgaccagcaggcagtgggacaggagctgggggcgggggcggctcagtgcgggggcggggcctagcccgggccccgccccgcgaccccaccccgccccgccccgccccgcgccccgccccgcgaccccgccccgcgaccccgccccggcccggcccgccccgccccgcgccccgccccgcccagcccctccccgccccgccccgccccgccgggccccggccgccccgcccgccccgccccgccccgccccgccccgcgaccccgccccgccccgcgaccccaccccgccccgccccgcgaccccgccccgcggccccgcccgccccgcggccccgccccgccccgcccgcaccgcgccccgcgcaccttgaagttgaccgggtccacgcgcaggatgtaggcgtgcagctcgctcagcttggacagggcgccgccgatgtcgtcgatgctcttcaccgcgtcgcccacggcggccaccaccttggagccgtgcgcgcgcaactgcgcggaccccgggtgcaggtcgaagtgcgggaagtaggtcttggtctgcgggtggctgaggaagagcctgggacggggggcgggggccgtgagctcccagcagcgcggcctcccgccacggcccacgcgccctgcggccctctccgagcaccgggacacatctgcgaccccgcagcaggccccagcccctcctcgcggggcccgggtgcccaggcagctgcccctcccaggctgccctgggctagaggccccccaggcctctgcagctcccggctgatcgccctgcttccgacgggttctgtgcagcctggtccccaaatctcccgccctccgcctccagcacgcctggtgcccccagcccctccaccgtctcctctggccacaggacctccctcccagccccagactgggttgcccgccaccccttctgcaggctcatgacctcccagcagcgttccagggaaggaaaagctccctggcccctcccaggggatcagatgctgggaatttgaagctgggacagtgccctgatcccagatgctgggactttagaggctgtagtgccctggctgccctgtaaggcccttcaggcctagaacgaaacctttcaccctctgcttgtcagaacctgggcctgtgcctgcccaggtctcagcgagcccagatggttgtgcaactcctaatcgttccctccttaccctgccctcctcactgagagggaaggctatctgtctccactgtcccctccccacagtcccctcctcactgtcccttcctcactctcccctccccactgtgccctccccatggtcccctcctcactgtcctctccccacagtcccctcctcactgtcccctctccattgtcccctcctcactgtcccctccccatggtcccctcctcactgtcccctccccaaggtcccctcctcactgtctccttcccacggtcccctcctcactgtcccctccccacggtcccctcctcactgtcccctccccacggtcccctcctcactgtcccctccctacggtcccctcctcactgtctcctccccacggtcccctcctcactgtcccctccccacggtcccctcctcactgtcccctccccactgtcccctccctatggtcccctcctcactgtccccactccacggtccccttcccatggtcccctcctcactgtcccctctccactgtcctctccccactgtctcctactcactgtcccctccccacggtcccctccccactgcccgctccccactgtccccactcacatacctggcctcccacccagtccctctggcagtcccatctgacactcacctctccagagtctcggtgccgatggtgtcggcctgcgtggagatcttggcccacatggacacaatgatggtcccctaagtcttggtcagagacatggcggcagggtgggcggctgcactggagttgggcctgctcaggactggccttggtagtgctcagcccccagggtccccttatatacagggagctgggcccagccaggctgtggccattggtcaggtgaggggagggggctgcaggggtggtgtttcttatcagatccagtgacaaaggggccctcaggtgggactgggggctgaggaacctatcgcttctgtctccccttctgcccacccctgagtcacagctggagccccagcttcagggagattggggccccaatctgggcatgagagtccacgtggtcagcccagcccggactggcctcaggagtgactgtccttgacctccctgtccctgtgatgacagggtgacctagagcacatgggccctggcagagggacgatccattcctcacttcactgaaacttctctggcccaccttatgagctccagtttgcaaatgaggaaaccgagaccccctagagagaaagtgggacccagtgtcacagggtgggaagggacagacctctcccacctccggtgtgcagccccctcacctgaatgaggctcggtctggggttctcctccagtagccttgtaggggacactctgagccggg

SEQ ID NO: 1239 - DNA, 4042 bp, Homo sapiens
tcatcacaggccctgaggaagtctggaggtgtggacgaggcattcaaggtgaccagggttagtctgagggcttcctggaggaggtgagacttaaggatatgtattaggtggaggaggtggaggagggaggaggcttggctcggggaggggaaaggacagaggagacaagggccctgtggttggagaatggaggtggggagatgttggggtgatgaggctggccagctcctgcagggtgaggaaggaaggggtggacttctggggaagggtgggaggtgcaggagtgccagtgggtgcatccctgtgcatgaaaagtgatgttttttggggggatggtactgaggagaaaacagcctgagaaatcactgataagtcatttcctgggggtctggcagaagatcttgctttgaggagtgcatcaggtcagcacccttcagcctgctccctgccctgtctccccaggcccttactcaggccctgccctgggtgtccaggagcaagccagggtaagctgccttgggcagagaaggaagtagctccgaccagcttagcaatgcttcccccgttggatcttctcatttcccctccctgtctgccaccctcttctgactctgcccacagcctgaaggaaaaaaaaaagataagatgtgggggcttttttttttttgaggcggagtttcgctgttgttttccaggctggagtgcaatggtgtgatcttagctcactgcaacctctgcctccttggttaaaatgattctcctgcctcagcctccggagtaggtgggtttacaggcatgggccaccatgcccggctgattttgtatttttagtatagatggggtttctacatgttgatcagggtggtctcaaactcccgacctcaggtgatcctcccacctcggcctcccaaagtgctgggattacaggcgtgagccaccgtgcctgtcggattttagtttattttttaaagtgtttctgctgaaataacaatgctctgggctgtgaggcgcaggaagagcgggtggtggagaggggagggaactccccaacaattcagagaggtccatgtccagaaggaaagcagtgacagggtcctctccaccctccccaaagctcaatccagtactgtgagtgtggagggggaggcttgctgtggggcagggactgggttggaagtgctgctcatgttcctaggctggctgagagccagatgggctgtgcaacttcccagcatggattccaggacttcagcaccggggacagggacgtttccagaagttgctggcagcacaggaagcagaagaccaggaggtcccagaggccctgggtggggcaattagctgggagctcagggctgggcacacagtgagttctgaatgcaccttacaaactgcaggagacgtgcaggagtaaggccgcaaggtgctctgctgaagagtctccccaggtgtgggctgccggctgtgagcatcccagccccttcctccttccccactgactgggctgctctcagagggtcaccgtgacacaggaagtgtgagtagggccagcaccctcactccagccacctaccctctggcaggaaggggtgggaatgagagaaatgttctggcacctgcacttgcactggggacagcctattttgctagtttgttttgtttcgttttgttttgatggagagcgtatgttaactgggttcaaccagggagatttcaaaggagggtggcgatgctgggactccctgagtagaaccctggatgcctctctcctccccagcttctgagccactgcctgcaggcctggcacctctcaggacaggggatggttcagcaccttctcttgagcaggcccacctcagcttcccctcccatactccctgcagttctccctccccagccccatgcagctgcagagaggtccttggtctgagacaggtaaacacctccattgttggcacattccgggatagagagaacccaggcacacacaggctgctgcccactcagactttattcaaagaccaggaagggccggtgcaaggaggggaggagggcccgttgggaggcccagcgggcaggaggaacggctaccgaggctccagcttaacggtatttggaggtcagcacggtgctcacagaagccaggaacttgtccagggaggcgtgcaccgcaggggtgaactcggcggggaggtgggcggccagggtcaccagcaggcagtggcttaggagctgtgcagagaagagggtcagtgcggcccaggcccgcagccgccgcctgcgctacacctcccgcaacccgcgtgatcctctgccctgagaggaaggcgccatctcgcccctcgacccagatcgctcccggcccgccgctcaccttgaagttgaccgggtccacccgaagcttgtgcgcgtgcaggtcgctcagggcggacagcgcgttgggcatgtcgtccacgtgcgccacggcgttggtcagcgcgtcggccaccttcttgccgtggcccttaacctgggcagagccgtggctcaggtcgaagtgcgggaagtaggtcttggtggtggggaaggacaggaacatcctgcggggagaagcagagtgaggggtggggtttgggtccggggccaggacggttgagggtggcctgtgggtccgggcgggcgaggagcccgggtcggagcaggggagggagcctcacctctccagggcctccgcaccatactcgccagcgtgcgcgccgaccttaccccaggcggccttgacgttggtcttgtcggcaggagacagcaccatggtgggttctctctgagtctgtggggaccagaagagtgccggcccgcgagcgcgccagggtttatgcttggggcgcgggggcacgcccggccgggcggcgctcattggctggcgcggagcccggggcgcggcctggaccgcaggggagtcccgggcggggcctgcgcggggccgggcggcgggctcggcctcccctgggggtgcacgcggggcgggggccaggacgtctccaccctccacccgccactccactcccgcccatcccgctcgcccgggggcagggcggtagcggcgctggcggggccggcccgttggggtcgggcgctgtcggctcgtgcaccccggagcgcagcgccaccctttcctttcgggcgccggagcgtccctagcgagggagaaagtcagcccgcacccccgccccggcctggcacgcgctggacgcgcatcgactccagcgggatcggggaacacacgggcgagcgagtgcgagccggagggcttcgcccaatcctggggcggagaggaatgcgcgcacccggacgccctggcccataggaactcaaaagaatttctgcgcagagcccctcctgctctccagcctcgcttcctgcagctccctttccctctggcgatagtcactagtgtgcttgagtgacaggcaccgggaaggaacaaacaccaggacgcaaaaagcacggggctgggctgggggcggctccagattcagactcctctacccggggttgtggggtggcgcgtggggtggtgggtgctggctaagccccaagtcatggactcacagtttgtgtgactgactctcccactggcctagaggtcgtggttcactgtgacacccccagctctccaaatgctatctgatggaagacttgctaggtaaatactggttgtaaacagataaacaaacttggctctgggtagggaaaggacaggggagagaaggcccctgtggttgcagaatgtaggtgaggggatgtggggtgaggaaggaaggggtggacttggcgagggggagggtgggaggtgcaggagtgccagtgggtgcatccctgctcatgaaaagtgatggtttggccaggctcggtggctcacgcctgtaatcccagcactttgggaggccaaggcgggtggatcagctgaggtcgggagttcgagaccaggctgaccaacatggagaaaccccgtctctactaaaaatacaaaaattagctgggtgtggtggtgcacgcctgt

SEQ ID NO: 1240 - DNA, 4045 bp, Homo sapiens
tggctaggctggtctcgaacccctgacttcaggtgatccacctgcctaagcctggcaaagtgctgcaattacaggtgtgagccaccgcgcccggccaatttttataattttttcttaggcttagtcaactgaagcagcaggagtggagaaggaaatgataaatttataactggttctgatcaattaattgtaaaaagcgctgcactccaaccagccctctgctgtacatttgacatatttctacctttaggtcagacctccattcttcctgatgaaataacgaagacaccgtcttcctgacagttgatactgtacccacaggctgcgggaaggacatcacaaacgcaggcagagggcctgccataggtgtttaccaagggtgattcatgggctcagggaataaaagatattcctatcagttgagggccagggctttatggctaccagctccgggaaccctccctctgataccccaggcactgcaagcctgctcagcagagagaaaacacacaccagggagaagggaccttctagccaggcctctgtggccccgctctcctctccagtcgcaatgggacaggctccccagcctcaggggagctgagtgggtgctgagctgggccctgagctgggcccagagacaaacgcctgatcttgacagccccagggcgtcagtgtctggtgtgtgagcattctggggtgacctgggggtgaaagtagagcccctattgaattgcctggggcctgcagttgcaccccgcacccctgatttcatctagactgtgcctgtatctgggaggttttacggagactagtgggaacgatgggggatcaatgcagccatgctggagtgggacttctctgacctacccaccacccatatgtgggaggacctctgggaaaccagtgacgtcccaggcagaaagccagccagttcttggcacaagagtgcccagaaacgtaaagatggataaattcattatttcagcaaacctgcattgaatctgaaaagtctgggaataaaactcgggaaagagcaaatgcatcctcaaagcactctagggtccagcgtttttccagctggacttcgcggtggctccactttccctcctccatcccctcctcccgcccctgccttttcctaccctatccagctgcagagaggttctagccatgtgtgtcccagctgctgtccacgcccatgcctggcacgtttgctgagggaaaaaactcaggcacacacaggctgccgcccactcagactttattcaaagaccacgggggtacgggtgcaggaaggggaggaggggctggggggaggcccaaggggcaagaagcatggccaccgaggctccagcttaacggtatttggaggtcagcacggtgctcacagaagccaggaacttgtccagggaggcgtgcaccgcaggggtgaactcggcggggaggtgggcggccagggtcaccagcaggcagtggcttaggagctgtgcagagaagagggtcagtggggccgagggcccaggcccgcagccgccgcctgcgctacacctcccgcaacccgcgtgatcctctgccctgcgaggaaggcgccatctcgcccctcgacccagatcgctcccggcccgccgctcaccttgaagttgaccgggtccacccgaagcttgtgcgcgtgcaggtcgctcagggcggacagcgcgttgggcatgtcgtccacgtgcgccacggcgttggtcagcgcgtcggccaccttcttgccgtggcccttaacctgggcagagccgtggctcaggtcgaagtgcgggaagtaggtcttggtggtggggaaggacaggaacatcctgcggggagaagcagagtgaggggtggggtttgggtccggggccaggacggttgagggtggcctgtgggtccgggcgggcgaggagcccgggtcggagcaggggagggagcctcacctctccagggcctccgcaccatactcgccagcgtgcgcgccgaccttaccccaggcggccttgacgttggtcttgtcggcaggagacagcaccatggtgggttctctctgagtctgtggggaccagaagagtgccgggccgcgagcgcgccagggtttatgcttggggcgcgggggcacgcccggccgggcggcgctcattggctggcgcggagcccggggcgcggcctggaccgcaggggagtcccgggcggggcctgcgcggggccgggcggcgggctcggcctcccctgggggtgcacgcggggcgggggccaggacgtctccaccctccacccgccactccactcccgcccatcccgctcgcccgggggcagggcggtagcggcgctggcggggccggcccgttggggtcgggcgctgtcggctcgtgcaccccggagcgcagcgccaccctttcctttcgggcgccggagcgtccctagcgagggagaaagtcagcccgcacccccgccccggcctggcacgcgctggacgcgcatcgactccagcgggatcggggaacacacgggcgagcgagtgcgagccgggaggcttcgcccaatcctggggcggagaggaatgcgcgcacccggacgccctggcccataggaactcaaaagaatttctgcgcagagcccctcctgctctccagcctcgcttcctgcagctccctttccctctggcgatagtcactagtgtgcttgagtgacaggcaccgggaaggaataaacaccaggacgcaaaaagcacggggctgggctgggggcggctccagattcagactcctctacccggggttgtggggtggcgcgtggggtggtgggtgctggctaagccccaagtcatggactcacagtttgtgtgactgactctcccactggcctagaggtcgtggttcactgtgacacccccagctctccaaatgctatctgatggaagacttgctaggtaaatactggttaaacaggtaaacaaagcaatagctggaaccggctggagcattcaacctcctctgggaggtaggcagtcctctaaccatcacacaagtacacacagaggtgcagacctcatcacaggccctgaggaagtctggaggtgtggacgaggcattcaaggtgaccagggttagtctgagggcttcctggaggaggtgagacttaaggatatgtattaggtggaggaggtggaggagggaggaggcttggctcggggaggggaaaggacagaggagacaagggccctgtggttggagaatggaggtggggagatgttggggtgatgaggctggccagctcctgcagggtgaggaaggaaggggtggacttctggggaagggtgggaggtgcaggagtgccagtgggtgcatccctgtgcatgaaaagtgatgttttttggggggatggtactgaggagaaaacagcctgagaaatcactgataagtcatttcctgggggtctggcagaagatcttgctttgaggagtgcatcaggtcagcacccttcagcctgctccctgccctgtctccccaggcccttactcaggccctgccctgggtgtccaggagcaagccagggtaagctgccttgggcagagaaggaagtagctccgaccagcttagcaatgcttcccccgttggatcttctcatttcccctccctgtctgccaccctcttctgactctgcccacagcctgaaggaaaaaaaaaagataagatgtgggggcttttttttttttgaggcggagtttcgctgttgttttccaggctggagtgcaatggtgtgatcttagctcactgcaacctctgcctccttggttaaaatgattctcctgcctcagcctccggagtaggtgggtttacaggcatgggccaccatgcccggctgattttgtatttttagtatagatggggtttctacatgttgatcagggtggtctcaaactcccgacctcaggtgatcctcccacctcggcctcccaaagtgctgggattacaggcgtgagccaccgtgcctgtcggattttagtttattttttaaagtgtttctg

SEQ ID NO: 1241 - DNA, 4042 bp, Homo sapiens
aaagtgctgggattacaggcgtgagccactgtgcccaaccaccgtgctaatttttaaattaaattaaattagattaaatttttttttgagacagagtttcgctcttgttgcccaagctggagtgcgatggcgcgatcttgactcactacaacctccgcctcccaaagtgccaggtttacaggcatgagtcatcacacctggacaatttttgtctttttagtagagacagggtttcactatgttggctaggctggtctcgaacccctgacttcaggtgatccacctgcctaagcctggcaaagtgctgcaattacaggtgtgagccaccgcgcccggccaatttttataattttttcttaggcttagtcaactgaagcagcaggagtggagaaggaaatgataaatttataactggttctgatcaattaattgtaaaaagcgctgcactccaaccagccctctgctgtacatttgacatatttctacctttaggtcagacctccattcttcctgatgaaataacgaagacaccgtcttcctgacagttgatactgtacccacaggctgcgggaaggacatcacaaacgcaggcagagggcctgccataggtgtttaccaagggtgattcatgggctcagggaataaaagatattcctatcagttgagggccagggctttatggctaccagctccgggaaccctccctctgataccccaggcactgcaagcctgctcagcagagagaaaacacacaccagggagaagggaccttctagccaggcctctgtggccccgctctcctctccagtcgcaatgggacaggctccccagcctcaggggagctgagtgggtgctgagctgggccctgagctgggcccagagacaaacgcctgatcttgacagccccagggcgtcagtgtctggtgtgtgagcattctggggtgacctgggggtgaaagtagagcccctattgaattgcctggggcctgcagttgcaccccgcacccctgatttcatctagactgtgcctgtatctgggaggttttacggagactagtgggaacgatgggggatcaatgcagccatgctggagtgggacttctctgacctacccaccacccatatgtgggaggacctctgggaaaccagtgacgtcccaggcagaaagccagccagttcttggcacaagagtgcccagaaacgtaaagatggataaattcattatttcagcaaacctgcattgaatctgaaaagtctgggaataaaactcgggaaagagcaaatgcatcctcaaagcactctagggtccagcgtttttccagctggacttcgcggtggctccactttccctcctccatcccctcctcccgcccctgccttttcctaccctatccagctgcagagaggttctagccatgtgtgtcccagctgctgtccacgcccatgcctggcacgtttgctgagggaaaaaactcaggcacacacaggctgccgcccactcagactttattcaaagaccacgggggtacgggtgcaggaaggggaggaggggctggggggaggcccaaggggcaagaagcatggccaccgaggctccagcttaacggtatttggaggtcagcacggtgctcacagaagccaggaacttgtccagggaggcgtgcaccgcaggggtgaactcggcggggaggtgggcggccagggtcaccagcaggcagtggcttaggagctgtgcagagaagagggtcagtggggccgagggcccaggcccgcagccgccgcctgcgctacacctcccgcaacccgcgtgatcctctgccctgcgaggaaggcgccatctcgcccctcgacccagatcgctcccggcccgccgctcaccttgaagttgaccgggtccacccgaagcttgtgcgcgtgcaggtcgctcagggcggacagcgcgttgggcatgtcgtccacgtgcgccacggcgttggtcagcgcgtcggccaccttcttgccgtggcccttaacctgggcagagccgtggctcaggtcgaagtgcgggaagtaggtcttggtggtggggaaggacaggaacatcctgcggggagaagcagagtgaggggtggggtttgggtccggggccaggacggttgagggtggcctgtgggtccgggcgggcgaggagcccgggtcggagcaggggagggagcctcacctctccagggcctccgcaccatactcgccagcgtgcgcgccgaccttaccccaggcggccttgacgttggtcttgtcggcaggagacagcaccatggtgggttctctctgagtctgtggggaccagaagagtgccgggccgcgagcgcgccagggtttatgcttggggcgcgggggcacgcccggccgggcggcgctcattggctggcgcggagcccggggcgcggcctggaccgcaggggagtcccgggcggggcctgcgcggggccgggcggcgggctcggcctcccctgggggtgcacgcggggcgggggccaggacgtctccaccctccacccgccactccactcccgcccatcccgctcgcccgggggcagggcggtagcggcgctggcggggccggcccgttggggtcgggcgctgtcggctcgtgcaccccggagcgcagcgccaccctttcctttcgggcgccggagcgtccctagcgagggagaaagtcagcccgcacccccgccccggcctggcacgcgctggacgcgcatcgactccagcgggatcggggaacacacgggcgagcgagtgcgagccgggaggcttcgcccaatcctggggcggagaggaatgcgcgcacccggacgccctggcccataggaactcaaaagaatttctgcgcagagcccctcctgctctccagcctcgcttcctgcagctccctttccctctggcgatagtcactagtgtgcttgagtgacaggcaccgggaaggaataaacaccaggacgcaaaaagcacggggctgggctgggggcggctccagattcagactcctctacccggggttgtggggtggcgcgtggggtggtgggtgctggctaagccccaagtcatggactcacagtttgtgtgactgactctcccactggcctagaggtcgtggttcactgtgacacccccagctctccaaatgctatctgatggaagacttgctaggtaaatactggttaaacaggtaaacaaagcaatagctggaaccggctggagcattcaacctcctctgggaggtaggcagtcctctaaccatcacacaagtacacacagaggtgcagacctcatcacaggccctgaggaagtctggaggtgtggacgaggcattcaaggtgaccagggttagtctgagggcttcctggaggaggtgagacttaaggatatgtattaggtggaggaggtggaggagggaggaggcttggctcggggaggggaaaggacagaggagacaagggccctgtggttggagaatggaggtggggagatgttggggtgatgaggctggccagctcctgcagggtgaggaaggaaggggtggacttctggggaagggtgggaggtgcaggagtgccagtgggtgcatccctgtgcatgaaaagtgatgttttttggggggatggtactgaggagaaaacagcctgagaaatcactgataagtcatttcctgggggtctggcagaagatcttgctttgaggagtgcatcaggtcagcacccttcagcctgctccctgccctgtctccccaggcccttactcaggccctgccctgggtgtccaggagcaagccagggtaagctgccttgggcagagaaggaagtagctccgaccagcttagcaatgcttcccccgttggatcttctcatttcccctccctgtctgccaccctcttctgactctgcccacagcctgaaggaaaaaaaaaagataagatgtgggggcttttttttttttgaggcggagtttcgctgttgttttccaggctggagtgcaatggtgtgatcttagctcactgcaacct

SEQ ID NO: 1242 - DNA, 4043 bp, Homo sapiens
gtaactctggccccggcagccactaatccgcttttggtccctatggatttggctgtagcggatattgcatatagatggggtcatgcagtttgtgacctttggtgtccggcttcttttacttgtcaaatattttcagggtgcagctacatcctatcagtgcttcatttctttttgtggccaaataatattccattgtgtgtatagaccaccacattttgtttacccattcatctactgatgtataatttttataattttttttgagatggagttttgctcttgttgcccaggctagagtgcaatggtgtgatctcgggtcactgcaacctctgcctcctgggttcaagtgattctcctacctcaacctcccgagtagctgggattacaggcgtgcgccaccacacccggctaattttttgtatttttagtagagatggggtttccccatattggccaggctggtctcgaattcctgaccttgtgatctgcccaccttggcttcccaaagtgctgggattacaggcgtgagccactgtgcccaaccaccgtgctaatttttaaattaaattaaattagattaaatttttttttgagacagagtttcgctcttgttgcccaagctggagtgcgatggcgcgatcttgactcactacaacctccgcctcccaaagtgccaggtttacaggcatgagtcatcacacctggacaatttttgtctttttagtagagacagggtttcactatgttggctaggctggtctcgaacccctgacttcaggtgatccacctgcctaagcctggcaaagtgctgcaattacaggtgtgagccaccgcgcccggccaatttttataattttttcttaggcttagtcaactgaagcagcaggagtggagaaggaaatgataaatttataactggttctgatcaattaattgtaaaaagcgctgcactccaaccagccctctgctgtacatttgacatatttctacctttaggtcagacctccattcttcctgatgaaataacgaagacaccgtcttcctgacagttgatactgtacccacaggctgcgggaaggacatcacaaacgcaggcagagggcctgccataggtgtttaccaagggtgattcatgggctcagggaataaaagatattcctatcagttgagggccagggctttatggctaccagctccgggaaccctccctctgataccccaggcactgcaagcctgctcagcagagagaaaacacacaccagggagaagggaccttctagccaggcctctgtggccccgctctcctctccagtcgcaatgggacaggctccccagcctcaggggagctgagtgggtgctgagctgggccctgagctgggcccagagacaaacgcctgatcttgacagccccagggcgtcagtgtctggtgtgtgagcattctggggtgacctgggggtgaaagtagagcccctattgaattgcctggggcctgcagttgcaccccgcacccctgatttcatctagactgtgcctgtatctgggaggttttacggagactagtgggaacgatgggggatcaatgcagccatgctggagtgggacttctctgacctacccaccacccatatgtgggaggacctctgggaaaccagtgacgtcccaggcagaaagccagccagttcttggcacaagagtgcccagaaacgtaaagatggataaattcattatttcagcaaacctgcattgaatctgaaaagtctgggaataaaactcgggaaagagcaaatgcatcctcaaagcactctagggtccagcgtttttccagctggacttcgcggtggctccactttccctcctccatcccctcctcccgcccctgccttttcctaccctatccagctgcagagaggttctagccatgtgtgtcccagctgctgtccacgcccatgcctggcacgtttgctgagggaaaaaactcaggcacacacaggctgccgcccactcagactttattcaaagaccacgggggtacgggtgcaggaaggggaggaggggctggggggaggcccaaggggcaagaagcatggccaccgaggctccagcttaacggtatttggaggtcagcacggtgctcacagaagccaggaacttgtccagggaggcgtgcaccgcaggggtgaactcggcggggaggtgggcggccagggtcaccagcaggcagtggcttaggagctgtgcagagaagagggtcagtggggccgagggcccaggcccgcagccgccgcctgcgctacacctcccgcaacccgcgtgatcctctgccctgcgaggaaggcgccatctcgcccctcgacccagatcgctcccggcccgccgctcaccttgaagttgaccgggtccacccgaagcttgtgcgcgtgcaggtcgctcagggcggacagcgcgttgggcatgtcgtccacgtgcgccacggcgttggtcagcgcgtcggccaccttcttgccgtggcccttaacctgggcagagccgtggctcaggtcgaagtgcgggaagtaggtcttggtggtggggaaggacaggaacatcctgcggggagaagcagagtgaggggtggggtttgggtccggggccaggacggttgagggtggcctgtgggtccgggcgggcgaggagcccgggtcggagcaggggagggagcctcacctctccagggcctccgcaccatactcgccagcgtgcgcgccgaccttaccccaggcggccttgacgttggtcttgtcggcaggagacagcaccatggtgggttctctctgagtctgtggggaccagaagagtgccgggccgcgagcgcgccagggtttatgcttggggcgcgggggcacgcccggccgggcggcgctcattggctggcgcggagcccggggcgcggcctggaccgcaggggagtcccgggcggggcctgcgcggggccgggcggcgggctcggcctcccctgggggtgcacgcggggcgggggccaggacgtctccaccctccacccgccactccactcccgcccatcccgctcgcccgggggcagggcggtagcggcgctggcggggccggcccgttggggtcgggcgctgtcggctcgtgcaccccggagcgcagcgccaccctttcctttcgggcgccggagcgtccctagcgagggagaaagtcagcccgcacccccgccccggcctggcacgcgctggacgcgcatcgactccagcgggatcggggaacacacgggcgagcgagtgcgagccgggaggcttcgcccaatcctggggcggagaggaatgcgcgcacccggacgccctggcccataggaactcaaaagaatttctgcgcagagcccctcctgctctccagcctcgcttcctgcagctccctttccctctggcgatagtcactagtgtgcttgagtgacaggcaccgggaaggaataaacaccaggacgcaaaaagcacggggctgggctgggggcggctccagattcagactcctctacccggggttgtggggtggcgcgtggggtggtgggtgctggctaagccccaagtcatggactcacagtttgtgtgactgactctcccactggcctagaggtcgtggttcactgtgacacccccagctctccaaatgctatctgatggaagacttgctaggtaaatactggttaaacaggtaaacaaagcaatagctggaaccggctggagcattcaacctcctctgggaggtaggcagtcctctaaccatcacacaagtacacacagaggtgcagacctcatcacaggccctgaggaagtctggaggtgtggacgaggcattcaaggtgaccagggttagtctgagggcttcctggaggaggtgagacttaaggatatgtattaggtggaggaggtggaggagggaggaggcttggctcggggaggggaaaggacagaggagacaagggccctgtggttggagaatggaggtggggagatgttggggtgatgaggctggccagctcctg

SEQ ID NO: 1243 - DNA, 4045 bp, Homo sapiens
gtgatctaccggcctctgcttcccaaagtgctgggattacaggcgtgagccaccatgccccgcccggagatctaatgtagtagagataataacctttatctgccacatgtagcaaatattttctctggctcttccccccgccccctcctcttttttttttttttgagacggagtctcgctctgtcgctcaggctggagtgcaatggtgtgatctcggctcaccgcaacctccgcctcccgggttcaagccatcctcctgcctcagcctcctgaagttgggattacaggcgcccgcaccacacccagctaatttttatttttatttttattttttctgagacggagtctcactctgtcgcccaggctggagtgcagtggcgcaatcttggctcactgcaggctccgcctccggggttcacgccattctcctgccgcagcctcccgagtagctgggaatgcaggcgcccgccaccacccccagctatttttttgtatttttagtagagacggggtttcacagtgttagccaggatggtctcgatctcctgacctcgtgatccgcccgcctcggcctcccggagtgctgggattacaggcgtgagccaccgcgcccggcctgtccacttttcctcagtgtcaccttgagaataccatttctgaggaaaagcatctctacatgtgcctagaagactggaacagctacgcatcaaatgttaggggtgtggatgaggcctgcctctaccccgtgtgtgtgtgtgtgtgtgtgtggcatgtctgtgttacacatgtgctcttggatatgacagccatgtcctgttcttgtttacacatgacacagtttgccgcgtgtcaagcggcagctgaaggatgtgctgcacccattcctggacctgggatacacaggaaggtgcagcaagccttgttttcggaagttctacaatgaccatgattggttttatgtggacaaatataaaaaagcttcactctccgtagtgatgtcgggtgacggcaggggtctgggtcggttcctggtccacctcgccagctacgtggctaggtgctggggctggtcccacctccttcaccacaaccccccggcaccccaggtccccgattccaggccacagccgcggcggctgggtgctgcgcaggtaccggctcgcgccgggagggggcgctgttccctaacctgctccgagtcagccccgggcccttaacgccgcccgcgtgcgttcacgctgcaggtgcggagttctcgcggtgggtccgggccgcgtgctcggcgcagagtggggagggcgaagccagccgccctcgggatgggcagagtcggccgtcctcgcagcccgccgcccggggcgtcccgcggccctcacctaccaccccattcgggagggtcaggctgcacgcagttcggtgcccccatggccgaggccccaaacctgctggaggtggaaagaggcgcgcctggatctgggcactgggggtgtgccccaggccctcgcctttccttggggaggggcggcgccttcctctcgcgtcctgacctcgagagagcacggcaagaaggctgctcctgggagaggctttactcaaacacggggaaggtcgcctggggatcccgcggccacccacccacagttcagcggtactcggaaaccagcgccgagataacgtggctcaggaacttgtccagcgacgcctgcagcgcggggctgaagtctccggggtagtgccgggcgagggttaccagcaggcagtggcccaggagctgcggcgagcgctcaaggctcactcgcctgcacccgccccgcacgccccccgcacccaccccgccggggccctcccggggacaggggcccagcacggcagccgctcacctggaagctggccgggtccactcgcagctggcacgcgtgcaggtggctcagcgcggacagcgcgtggggtaggtcgtccaggcgctccacggcgaggctcagcgcgtccgccaccttctggccgtgggctctgacttgtgaggagccggggctcaggtccaggtgggagaagtaggtcttcgtggcggggaaagccaggaaggtcctgcgagaggaacgtgggtgaggcgcgtccggggggcttggggagggagggcccctgggggcgggggcgcccagcctgccgcacctttccagggcctctgtcgtgtagacgccgacgttgctgcccagcttcttccacagggcgcgcaccagcgcccggtcctccgcggacagcgccatccccgcgctggaacccgccgcgccctgcgaccccgctgcgcctgcgcggaccggccaggggtcccgcggcctccagggggcgccgcgccgcagcttcgccgcccgggggtccagggcctcgtcggagatcccgggaccgcgcgcgctcaatctccgacagctccgaccggggccctctgaatcgccctggatccaaggccccccgtcttaggtgttcactatatggtatttagtctctactaaaaacacaaaaattggccgggtgcggtgagtgcagtggcgccattccggctcactgcaacctccgcctcccgggttcaaacgattctcctgcctcagcctcccgagtaactgggatcacaggtgcatgccaccatgccaattttgtatttttagtagagacagggtttcaccgtgttaggctgatctcaaactcccgacctcaggtgatcctcccgcctcagcctcccaaagttctgggattacaggcgtgaaccaccgcgcccggccatgtacattattatagcactgaatttcggcatggatttggcattggaagtcagtttattctgcctcttgattctattgtgacacttgcccgagtctgttttctcatttattatataaaatgagggtgacagtttcttctcagattgtgagaattaaacggataacaactgtgaggtgcctgactcgtagcaggtgtttcttcagggcagtgaacatttattgagtacctgggatgtaacccaagaataatagtaaatgcatatgcagcactcactctgctgtaccccttatatcttttttgttttaaaaaaggtgataaaatagacataaattaccattgtagccatttttcaggtataaaatttggtgatattaagaacacttagtgttatgcagccatcaccactatctaggtcagaactttttcatcatcccaaacgccacctcggtactcattaacagtaactctggccccggcagccactaatccgcttttggtccctatggatttggctgtagcggatattgcatatagatggggtcatgcagtttgtgacctttggtgtccggcttcttttacttgtcaaatattttcagggtgcagctacatcctatcagtgcttcatttctttttgtggccaaataatattccattgtgtgtatagaccaccacattttgtttacccattcatctactgatgtataatttttataattttttttgagatggagttttgctcttgttgcccaggctagagtgcaatggtgtgatctcgggtcactgcaacctctgcctcctgggttcaagtgattctcctacctcaacctcccgagtagctgggattacaggcgtgcgccaccacacccggctaattttttgtatttttagtagagatggggtttccccatattggccaggctggtctcgaattcctgaccttgtgatctgcccaccttggcttcccaaagtgctgggattacaggcgtgagccactgtgcccaaccaccgtgctaatttttaaattaaattaaattagattaaatttttttttgagacagagtttcgctcttgttgcccaagctggagtgcgatggcgcgatcttgactcactacaacctccgcctcccaaagtgccaggtttacaggcatgagtcatcacacctggacaatttttgtctttttagtagagacagggtttcactatgttggctaggctggtctcgaacccctgacttcaggtgatccacctgcctaagcctggcaaagtgct

SEQ ID NO: 1244 - DNA, 4042 bp, Homo sapiens
gtctcaaaaaaaaaaagtgaggaataatctctcctatatatctttctcttaattacaacataaggaatgcagaaaaatgctgttttaaaaactaatgtccttaatttttaacagatggtggtgagtttgattccacaatatgcataacaaacaacgaagccttaaggtcttttaaagctagggacagaaggagaaacactttcttgctttactgggtatataatcaaaatcattcctcctttttttttttttttttttttggagacaagagtctcgctctgtcgcccaggctagagtgcagtggtgtgatctcagctcactgcaacctccacctcccggattcaagcaattctcctgcctcagcctcccgagtagctgggattacaggcgcccgccaccatgcccagctaatttttgtatttttagtagagacgaggtttctccatgttggtcaggctggtctcaaactcctgacctcaggtgatccacctgccttggcatcccaaagtgctgggattacaggcgtgagccaccgcgcccagcccaaaatcattcctctcttaagtatctttttccaatatggcaaataagcctagagatgaacaggtaagaagtaaaaaaataaaattaagaaaaaactgaaaaaaatttttaatttttaaaatttaaggagaattgcggcgtggatccttcaatttcctacatccagattctgctgtccacaaggttcagctttggaagtcttctatgtgccttttaaatcctttcttaaaattacagagtcttttctaccaagttttaaatctaacgctctatcaataatgtaatcttttatatgcagtaacattatacttcagatggattagtagtttagtttagatgcctttgggtctggaagcatacgaatggataaaacaattccttcaagtctctgacagcttcataactctattttatctacatagcttcttctcaacttcctctgtctattccaagatattttccaggtaggtctgaaacgctgagtcccgtaaagaaatgtttatgcatcaaataacagaagagctcttcccccaccccttcagctcccataatgttttaccattatatccagtaaacaaaataggttgactcaatcttaaacaattcccccatcacaggaagcccactgcacccacagctgcagaaagcatcccttaaaccatccccaactacctacagcaacacaaagttaaaccaatttccactgacaaaaggctatgtgtgcatttattctaatcagccccaggatttattgtgtgaaactcaggcgataaaaagtcacctcctcaagctacaaaacttttttttcatcccaaatattctcaatgaaagttctcttgtcaaccaggagagagtcaaaaacaaccacaaacactagcagaatgatccgctccaggaccacatcccagctggctttgctctgttgtcggtggctctgaagcagtttctcactttcctttcacccttctcccctttactccccaacattctcactcgagaatgcatcacatcctcagaccgctggcaaaaaaaaaaggggggggggaagagactgcaattatcaaggaaggggaagatatttcagaaccacggtttccactgcaaacggcaataaaaaaaaaaggcagtctgtgtcatcaggatatgggggacgacgttgtagggcatcacaaagatgtgcagtgagtgtgcacttgaagctctcggggcaggatgagacgatggagcagaaagtaagaaaacctgtgccttccttgctttcttctgctcttccccctccaggagaggaagctgaagaaactgggggaggggcggaatgttatcgttctcctattgagggtatataagacaggccttagggttcgctcgtccccagttaggagggtcacggagggaagaggaagagagaacccctaaacgttacccacctctgctcaaaaacaaaagtaagggggtaattattaaatccagatggcgcgcccctaaaggcgcccccaggtcactcatccccatttccaagcggaagggctgggataaaggggatggagggtcggaggctggtcagggacaaggccccaccccccgacttaggagggaaagggtgcccaagctcccagctgtcccctcctacccctcacctcccgccttggccacccccacttatccccccttcccttctcttcccttcccttcctttcctccagagcctgaggcagccgcgggggaggcggccgctcctacctcccctcacctactctgtccccacccccactccgctcccacctcccgcccgccacgggccggttacctgctcgtcgaagcggctgaccacggcctggacccattccaccggcctgtgcgcggccatgtcctccccgcggccggggggcggcggagggaagggtgggccggcgccctgggccgggaagagggcggggagcggaggctgaggtgagggaagaggcaaggagagggtctgtggagtgcaggctcccagtgttcccacgggggtggggatggggggtcagcgccgagcgggagggggagagggaaagggggcgttggcaaggaggctggggggagggggataggggaaggggacccggggaggggagggggcctcttggtcgctctccccactagcgccgtctccccacagccatcacagtccgagacgccgccatgacaccccaccggaagtgggatcctttccacggcccggggagagggagcgcgagcgagctagagattgagagcgcggctgggaaaggggagggggaagcgagagggaaggcggcctgccgcgcatgcgcccgcgccggccggtttcattaatgaaaaagcgagtcctcctggaggtgacgtcatctaactcctctgggccgtctggcgagcgtccctcaccgccgtggggctcacctagactggcgctgggctcagctggcgagtgccagagctgacccgggagcatccactcccatccccaccgccccctacagctgtcccctcccccgccggcctccgggtttggattgctcccggagttggaagttagggcgccctggggctagcctttctcccagcgcgcggatctctgccgctaatctcctggggaggctgtgctctcagcttaagctctcagaaaaaataaggtacacgacctccgattttcaggttcttcgtagcttggtagactgctgagaaacaaaaaaggaaggccaaagagagattccgtgattttttttttttagaggtcgcttaaatcccaatgctagacccggtggcaatcaaggtctagccaccaggtctagcattgggatttaagcccagctttcctctgcaaaactcatagccatccaagttaatataactattgcacagttgatgagagattcaagtttcaccaccctcaaaacacctttaaggccttgcattcattattaattcaatatattcatcgtcttatttaaatccttgaacaaaccttttcaatacatatcattaacttcatgaactgatgaatacgtcacgtccccacccccgtgggaacgctgggagcctgcactcctccctcagacctttgatttgcccaaggtctgagttgacaggtggcaaagtcaggatgtaaaccaacgtggtttaactcctagaacaatagaggtagactatgggtctcctaaaacaaagtccttccctatacctccaataccagagttgaaaggatttcatgtgtaattgggttgtgccagttttccaggaagaggattacatccaaaacaacggataatctatgtctgacattggactttggaatgactaattttttttttttttttttaagacagagtctcaccctgtcacccaggctggagtgcagaggcgcgatctcggctcactgcaacctccgcctcccggttgaagtgattcttctgcctcagcctcccgagtagctgggactacaggcatgcgccaccacagccggctaatttttgtattttta

SEQ ID NO: 1245 - DNA, 4049 bp, Homo sapiens
gcctgagtgacagagcaagactctgtcacacacacaaaaaataataataataataagctataaagaaaacatataaatcttatattagaaaaattttagacttttcaaagtgcttcacattcatattctatcacaccattgcaaaatatcctaacagtaagtgacaaatccaaaattacaaaagtagttgatcagatctgaaacctgattcaaaaaacatgtttgctctatgggaggaaatataaatatgtataaattccttctttatgctaattttcttactcattcctagttaaaatatcacttatcagacctaggctattgcaaacatggaagtaaaattcagtaaaacaaagccaaaagtaccactttttttatttagccagtctacccttcaaccaggaatcatatgaaaaacattccatcaatgttctgtgtgtttaagactgtgctgggcactggggtgactagaagagaattcaaatagcgttctttgcttttcagaaagtatgcactccatttgataaaaagacaagaaaaaaagaaaacaaagccaagctgtgttcaaacaatcctcctaaaggaagaaaacttactgtgtggttctgtaaaactccaggtaacaaggataccaagaagtgagatagcagagtttagtctgaaacaacctcatggggaaaaaaaaaaaatgaaatctgagctgaacattgaaggatggacaggaattagaaaagcacaaaggaggaattaaagcattcaggcagagactggcagaaataaaggccaagaagtgggaagaagcatgatacacacagaagagactgaggtgacctgcctggaacataggtgcatgcagaggcataatgggaaagagtttggtaaatcaagtggggtcagctcccaatagactgctgggtcacagagacatgctgttagaatattaaaatcatcgaatatttaaacttgaaagaatctaaaagattttctagccatttctttttcaacagatgaggaaatcaaggatctataggaaagctaatggctaggatagggacaaaggcactgaatagcagaacaaaactaagacccccgctaaggaactccaattcagtagaaaagtattgtgtcttgggaactggaagagattggtttccggggggagtggaacatcacagtggcattacaactaagcaatgaccactatgttttgccagaagtaatcactttcaagaaaacagcaatcaagcagaggcaggagctacttttcagagttataaaggaaatgggtggataaacagtagaggcggtgagtatctggcaacaacaacaacaaaaaagactggtccacagagagagagctgcaggaccaagtaaacgtctgatttccaagagaaaggaaatcttagcctgaaaagtgaaaagaaagcagccaacataaagactaaattagttcccagacagataaggtggaaagtgtaagggagtgcagagaactgaggaacagctggaagaaatctttctaaaggatgaattccgggccgggcacggtggctcatgcctgtaatcccagcactttgggaagtcaaggcaggtggatcacgacatcaagaaattcagacccatcctggctagcacggtgaaaccctgtctctactaaaaatacaaaattagctgggcgtggtggcatgcgcctgtagtcccagctacttgggaggctgaggcaggagaatcgcttgaacccaggaggcagacgttgcagtgagctgagatcgcgccactgcactccagcctgggcgacagagtgagactccatctcaaaataaataaataaataaaaatttaaaataacaataataataaattaaaaaattccgaagcaaagaataagcattattgtgctcgattcagcaccacatatactaaaattggaagaataagcattatttctcactcaccataaagaattcgtcaccataaaagagtactcattttcaactactataaggccttataaaaattacacaccaggcttgaagaatgaggctaggagatattttttaaatccaaaaagcttcagttttgcaaatctatttgtctaatcagtatgtggtttgtaatttcgaagatacttgccaatcattttatactgtgaatcactcaccgcatattcaacgtacattcagatgaacactcaatgtatgagaacaacaaatatgctactacaacctctaaaatcagagtttattccataacatattctttaaattgggttttttggcttttatgtactacttttgcttgatcagatatggaaaatataattgctttaaatgaacatatttacaacaaatcattttgggatggagttctttttaattcttttttttttttttttagttcaaatatccatagttttcccatacttcccttcagaaataaagctctacaggaaccagtggggcatacagaactaggggagatacacagaaggttctaatttgcttagaaactgggttaatgaaccacaattaaaagctacacatggccgggcgtggtggctcacgcctgtaatcccagcactttgggaggccaaggcaggtggatcacctgaagccaggagttggagaccagcctggccaacacggtgaaacccccgtctctactaaaaatacaaaaattaggcaggcgtggtggtgggcgcctgtaatcccagctacttgggaggctgaggcaggagaatggcttgaacccaggaggcagaggttgcagtatgctgagatctccccattgcactccagcctaggagacaagagcgaaactctgtctcaaaaaaaaaaaaaaaaaagctacacacctacaatttgtcagtttcaattagaaacttgctatttggcaccacgaaggcaggttaaggagagatgtaagatttaactgataacattcagctttctggctgtccacctgtgcaactgtcatttccctaaccaaggaggtgattacttctaaaattggtaatactcattcaacttagaccctaaatactaggtttagctgcaatattatcaggttaaggaattttatattacccacaagaatgtgagctcaaaatgtcaatatggcacacatccacttcttttaactgagtctactgcactaagttgctaagcgatacccatcagagtgcaatatgtctgtaatcagcagtggctagaaatgcatttctgctttaatcacaccgaatattagaaatccaaccaaaacagcaatcataaacagagttgccatctttagacatgcacatgctccctgggggcgttaagtggtccaacaggcaaactcttagctgtaataagaaggaaagcttaactccccctgggcccagtaaagcaaagtacagataatataatccaaaattcaaaagttttataaacagttgaaactattaagattctttttttttttttttttttctgagatggagtctcgctctgtcacccaggctggagtgcagtggcgcaatctcggctcaccgcaagctccacctcccaggttcaggccattctcctgcctcagcctcccaagtagctgggactacaggcacccaccaccacacccagctaatttttgtatttttagtagagatggggtttcactgtgttagccaggatggtctcgatctcctgacctcatgatcggcccgcctcggcctcccaaagtgctgggatcacaggcgtgagccgccgcgcccggccaactcttaagattcttatacaactatctctcagtacatgcagggctttttctcccctcaataaaaatgtaagcgatggctcacgcctgtaatctcagcactctactaaaaataacaaatgttatccaggagtggtggcaggcgcctgtaatcccagccacttgggaggctgaggcaggagaatcacttgaacccaggaggcagaggttgcagtaagccaaggtcgcatcattgcactccagcctaggcaagaatcatgaaactccgtctcaaaaataaaaaaaataaaataaagtct

SEQ ID NO: 1246 - DNA, 4045 bp, Homo sapiens
cccacctcccaaagtgctgggattacaggtgtgagccaccatgtccagcaagctcagcatttttaaatccatttaagtttcatataatgccctcatacaacattgggaggaaagataaaaaatggtatgcctgagtactgaccaccattgcaccaaaaggaaaacaattaggatagtgaggtgtcttgaaaacatgttctttgagaaatggttgaagaatgaatgaaattttttggtgggggtgggaatctagggtgtacttaagatgtcttcaaatgtttttattttatttttatgtatttattttatttatttatttattttttcagagacagaatctcggttgggcacggtggctcatgcctgtaatcccagcactctgggaggccgaagtgggaagatcgcttgagtccaggaattcaagaccagcctgggcaagatggcgaaacctcgtctctacaaaaaatttaaaaactagcccggcatggtggcatgcacctgtgggtagtttgtgtcatgagaggaacaagagcttcaggtcttcgttgatctttgtcgccaatatatgactaaaacaaaacctactatcactgtcattccctactccagattcacttatcagaggccaaaaactgaaacataacagggaaagaaatactgtgctttttttccctccgcactcattacccaaaaggaagaagactcacatggagcataaaggcacattttcccagacccaaggtgggacaggaatagaaggcaccgataaagacaggaggatagaaaaaaatactccaaaagacaagatgaaggatttgagggttgttatagggaaaaagaaaaactgaaaaagtagatgtaacaattaaaaaaaccacatccaggaatcttcattcaaatactaccaaagttgaaaagtttgcctcaaatgtaatcaaactctaagtaaaatgttcttagaatataaaaaccaactttacaaaaatagactgtgcaatgccaacatgaaagaatcataatctcatatttatagctgtatgtgtatttctgttggtattctcacaaattctattctcccacttaagaatgtacaataagtgtattatataactaaataaaagggaaacaatgttacaacttctaacagctgaagaagttttgataaagtgaccaggagaataatacataatgaaatcaaggatatataatgcttaaaatttacatctatttctaacatctaaccaacttgaaaagattcagatactctaacatgaacttaaaaggaaaaacataatataccatcttcgagtgaagaagcaatcatacatccctcattttgcatatttgtactacctgttagtaaaatttagacttttaaaactatttattggaaagatagtgatctaagggtcaagacatccatactctagtttaactcagttaattatataatcatatgattgtgaacatgttttgcctctgtaacttttttctcatgtagagtagaaataataaccaccaaattataaagaatggatagaaaaaaaatactgcacagatgctaatacatttttatgactgtttacagcttcctttcatataagattcatacctaagtcattaaacaagcccatgatgtgagaagggtaagtatcatgcccattttacacatgaaaatatagaaaactgatgttcagagaggttaagagacttccccaagaccacactgcaagttgcacaatcaaaagctttttcttttactacatagtaggctgccctcacaagtctaaagtggtaaaagttgttttctcatgcccaaactactatgagaactacccaagagaaaccgtgtcaacagaaaagtgtcaccacttgagatcattaagagacataacttcccaaaaggtcattatctgagtataaaattttgattaaaaataagttaaataatccttaaaagtttctagtagtcctgctatttactaaattaatttcatgcctcttgtgctagatataccactctgctggtgggggtgggacacgggagttaggtggagcaggaaagaatttcatcagaaaaagttaagttctcagccgggcacggtggctcatgcctgtaatcccagcactttgggaggccaaggcaggaggatcacctgaggttgggagttcaagactagcctgaccaacatggtgaaaccctgtctctactaaaaaaacaaaatcagctgggcatggtggcgcatgcctgtcatcccagctacttgggaggctgaggcaggaaaatcgcttgagcctgggaggcagaggttgcagtgagcccagatcacaacattgcactccagcctgggcaacaagagcaaaactccatctcaaaaaaaaaaagttatctgaagttcaatggaataagacattcaaagctataaaatatgaataagggcaggcgacagcttgtggactgcagtggcaaccctaagccaaaccgtgagtgccagactatggtttaaagaaaatatgcaatctggaagtttgcacctcaagttactgctactgcaaagtaattagtaccatttatggtaagaatatgtaaagttttagaacataatgccaattcttcattttagtaggatgaactccacactagcttgaggctttgtctcaacagaagctttttgatgatatagtcagtggctcaaaagccactcaggacccagcacagtagttcacgcctgtaattccagtgctttgggaagccaggtgggaagactgcttgaggccaagagtttgagaccagcctgggcaacataacaagacactgtctctacgaaaaaaattaaaataatagccaggtatggtggcgcacgcccatagtcctagatattcgggaggtgggagatcacttgagcccaggagttcgaggctatggtgagctatgatcacaccactgcactccagcctgaggaacaaagagagacctcacttctaaaataaatgaataataaacaatttttaaaaaccagttatatgcagagaatataactatatatcacaggcatataacatttgaagtggtcaaatggattgcctttaagagaatttagcgagggtactataaacagcagttatagtttatatcctatagcattaaacacctgagagtactctgtttactgaaggctctaccacatagtatgatacagaaatttacaacttgctgagaccttaaacttaattcacagtcactacaacgtaaaaccacttttctgtccttcaagatcaaaacaaatggtctcatctctcccttcccgcccccaagaaaatggggtactttaaaagatgtcagatgaaacaagccaatgcttttataaatacaagtcaatcctttgcaaagaaacagattaagatgctcatattctgcttcggtattgatcccaagccttttaacagtttaagctgaccacaaatctccccttccacttctatagaatattctcctccttaaacttcctttagagccttccgatacctcctgtcccttgacttatatacacacacacctccaaaatatacgcagacctaaggaacacaagtggaaaacacatttttaattaatacgctgcttatccttaaaagtatgtcgttagaatgcaacaatatagagtctacatagaaccccagaataccaaatttgaaagctacaacaaaaatgccccatagcaatctgagtaatttaaagaacaaagatgtaaaaaataaggcattcttactactgtattatatgacttaaacttttgtttaaggacaaaatgtttggttgggtgcagtggccggtacccaaataaaaaacgaaaaacaaaaatactttctccatattaaaaaaaaaaattttttttgagacagggtctcacccaggccagagtgcagtggtgcaatcatgcctcactgcagccttaatttcctgggctcaagcaatcctgactcagcctcccaagtagcatatactaccacacttggctaatttgtctgttttttttcttttctttac

SEQ ID NO: 1247 - DNA, 4054 bp, Homo sapiens
gctgtgtatgtttagttcaccatgcttccctggcattagcacctttgcctggcaaagagtagaaggtcaatacttccatactggttatctgactgttaactcaccaagtttatgaagggtgagattttaccctaacagccattcaaaacctaaaattttcttattctaaaaattgtttcatattacatttgctatttattttctctcctggtaatatcagcccaaaagctgtcctttagtcattatgtacaaatatacatacatataacatttcaaaaacataaacagcttaggaatgattttgaaaattaaatgtatattgatattttcagaaaataattagaaataaaaactaaattcttattacaggtgtccttgagccaaaagaggaaatcctctctagttatggcttttcggtaaaataatatgtagctctgagaatcagcttataactagggctaagaagtaaaataacttctaagtgtagagaacatatttagactaccaatcaaattttacctctgttcaaaataatcatttagtttcatttttagtccttattcacagaaaattatgggcagctggtaaagtggatattgaagttaaataggaagtgaatattaaccccccaacaagtcctattattggaggtcattaactttctaccagaaaaggtagtaaacttaaagcaaaaaagtcaaataaacttctgatttcccagatctctggaataaacaggtcaataaataacttttaaacaacttatttcaagtagttttaaaagattttttaaaaatatcttattaaatgacatttaaacagctattatttatgcttacctccaattaacttatacctgtactgaaaatttcttcaacttaaaaaaaagtgaagtacttggcattacaaaaagtcaactaaaaggtaaccttgcattttaaagtttacttaaggaaacatcattgccatgatcttttggctatattttttaggctcaataatcccaaaatatatgacataaaaaacttctctatttgaacatctaagataaacaatcctcagaaataattactgacaactggataagagtgaaccacaactgtataaaaccaaaatatttcactgactaaggggacttggaaaaagagaagcatgccagggagaaagctgtttaaattatctcctaactgtgaaatgactaacttactagataaaaccaacaggtgaagacatgctatattttcagttgaaatgacaagatgtgactataatggtaactatacacagaaaagtcaaagaaaccaaggacttttctgatgtagttacaatgggtcatacttacagccacagaagcccactgccatgcaaaacagtgactggttggcatctgatcatgtgagcgacagcagccaataatagaaaataagaagcagaagacaaagcaccaccaatcaatgtcaagagttgctcttgtataatactcttgctatacataaacaccaaaaaaatgacttccacaatcttataattatctttttaaattgattccataggagttttaaaattccatattaagagtaataatctgtgagaatacccaattttaagtctgctttttattaagtttagagtcaaatgtcagtatcaaagttcctatcagttgtaaaacctcaaggcatatttgttgaaatacaaaatatttttattttaaatacaaaaactctaaattttattcatttcctatgtttaatagtcaccattcaattagctaaaatgtgcattggcagcaacattcactctaacccaggagtcagcttcccttactcatccccaaaacgtgagaggctaatcaaaatatttttgttcaaaagttttaaggagaaaaaaaactttaaaaacagaaaaaaaaggtgacattcattaagactttcagtgttttgtgagaaaatttatctaagaaaagttaagttcaactcatggaaacagtggaaaacaaacataatctagtattcaacaatattctagatacaacataccacaacatttagaggaaatgaaggacccattcaattctctaaaataaccaaagcagcaggaataggataaagacactaaaaaaaatgcaatagaaaggaggtgagattcaaaattcgtgatttatcttaccggtgccattcgtattgctgggtgtgctccacaaccttgcactgctttatgaagtgtttcaccaaacatatttcgaagttcaaccgagtgacaatacacagcatcaatcttaggccaccaatccaatgcggactagagaaaaacaaagaccaataggaagaaaaagtacaaaattacgtgagttgtatgctctgtttatcactgtagttttaagttttatccttttgtcgggaactttctaagaccatgcaaacacacaccatgatttccaaagtcttcaaacaacgtctttaattcaaacactaactcatacatattatattataaaacataatagtgagcatgagacaaattgcccactttatgagcatgtgcatgtgagacatcttttctcgatgattagccagtgaatttgaaaaataaagtcttcagagagctaatctgtagccaatcttctttttttttttttaagtttaatgttttacaatttctggcacacgtgcatacatggcatatattttcccaggtaagaatgctattatcaaagctttaaaagtgattagtggttcaacacagtattaaaagtgtatgtggaaaaccattacttatatgtttacagacaacaatgataattacaacatgaaattagtaaatgaaataaaactattaagtaaacctataaattgatatgcaatgatgacatgatatatgggagactaacaattaccataaacaaagacaaactgatcctagtgaaatattttttaaacaattattttatgtattttctatttcaatttaccctgtttaactctgatgtctagtttttagtgcctattttatttggaagtgtatctttaactttaaaatgaattacttgatatattattaaaaaatgacaattgtgaaaatcactatatctttaaagtctatcatttaataaaaaactgactggatgaattttcactacatatgtagactatgcattaaatgacctaaaatgtaggcttctaatttataatactccagatgtttatttaaaaaatctggaagaataatacattcaaattgtagataagagggattgaatagcctcacatctctcacatttcagtcccagattttttcttattcaaaactaagctaattgaagtctcgacattttaatttcttcacttggaattctcagaatattttgaatagcatcgagttatattaccttaacccaaactgtggattacaaatcctgttcgccggatagtaaaatataaaaccaacttatgatacacattttgaatactgaactccattcagggaggaatcccaaaactgggagggaagaaatgcttttttgggacagtatggttgtttacatttttccctcaactcctactttatttaatctagtttctacaaatgatcaatttttagtctgatagtataatggattcctccaactctcagcaattttgacttgcccaaagcaaccaatgcaacttgatttccttatacttactaaattatacagcttgtgttaatcagcctaaagtaacaaaaagctgaataataacaaagtacattgagtgaagggtcttccttacccaacacatctcgtaagatcttgtcagaaactgataaactaagaaaggcatcccatataacatcctattcaaattactgtgtctttttttaatagcttttgaaaccgtattgtggtaccaggtgcaccacataaaataactttaggcttaagatttagtaattttcatagttttcatttttcataatatattcattttaaagtaaaatacacattttcaaataaaataagtatgaaaaactagacatcatgtggttggcaaaaaagtttagtattttgagcagttac

SEQ ID NO: 1248 - DNA, 4076 bp, Homo sapiens
gattctgagctcaagcgatcctcccacctcaggctcccaagtagctaggattacaaaatagtttcttgaaaaacaactgtctacgctaaaaagccacttttcagtgctatatactactaaaatgttttaaatgttctacttttaaatataggttacaaacctagtagcataaaaattttaatcctgaaaacctgaattgctttcagacaacatcaggtgcattcagggtggtatggctgtaggcctgaactgctttcagaaataaccaaacatacataaattcatttcaaaacaaaatttttttgagacagggtctcgctctgtccccttaactggctgaagtgcggtggtgggaacatagctcactgcaaccttgaactcctggggtcaggcgatctacttgcctcagcttcccaagtggctaagactatacaggtgtgtgccaccacacctggctaatttttttttaaatgtactttgtagagacagggtctcatgatgttgcccaggctggtctcaaacccctggcttcaagtgatcctcttgccttggccttccaaagcactgggattataggcatgagccactgaagctgacctcatttcaaaattttagaagtcctatttaaaagagacatgaaggccaggcgcggcggctcacgcctgtaattccagcactttgggaggctgaggtgggcagatcacctgaggtcaggagttccagaccagcctggccaatgtggtgaaaccccatctctactaaaaatacgaaaattagccaggcgtggtggcaggcacctgtaatcccagctactcaggaggctgaggcaggagaatcacttgaatctgggaggtgtaggttgcagtgagctgagatcgtgccactgcactccagcctaggcaacaagagcgaaactctgtctcaaaaaaaaaaaataataaaaaaataaacgaatgaatgaatgagacatgaggcacaggtgcaatgagcatagacatggcataaaacttaataggattttctaaaaaaaaaaaaaaaaaaaaaaaaaaaaaaaaaaaaaagcttcaattaccaaggcaatgtctgtgcaaatatcactcaagaaaagatctctgtgttcttttcaaaaaaaaaaaaaaaaaaaaaacccaaaaaatccaaaaagaccaaagaaaaaaattacagaagggaaaactggacctgtttctaaagtaaaatattaaaactgcaatttgaaattctcaagaaagtgctatatgaaatttatgatcattctcatcattttcagaaattacttttttccattttcttaagaattttggaagaatcaatacgtgagggaagacagttctggaaacatttcaaaaacagatcaacggaaagtaatgtaagtatataaagaaagacacaattttttaacttaatttttgttttttagagacaaggtcttgctctgttgctcaggttagggtatccatagctcactgtagccttgaatttctgggctcaagcaatcctcctacatcagcctcctgagttgctgggactatagctcacatcccaccatgcctggtgattttaggaagatgatacagtgtacatacagcttgtagcaattaaggttctagcaggaaacaggtggcaaattcaaactgagatattagagattatgtataaaggagaaggcaggttttaaggaaactcttaagagacagtgtgatactacacctgaagtagtgagtgcaggaagcagttagcagaaagcagacacagagtaggttgtgtggagagggtcacccaacaaaaaccatactgcatggatggatgtagccagcccactgggaccctgcagaaacggagccaaaaatatatacctcctaaccttactctctttcttctccctaatcttccgcttgtattccctatgggccagctgaaagccagaaaggaggggagcccaatgataccctctacacaggtcagcctcttagggtacacagcagggtaaagaacagagtggatttgaagaggcaaaggcaagatgtccagcatgtagttatgttagtcagcacgaactaatttctgtcacaaataatcccaaaatatcactggctaagacaacaaaagttaatttctcttaaatcatgctttctaatggttttaccatcttctggcgtcttggagaccccctccactgaaccgtctgtttctagtaggcgttgatagaagaaagcaagaatggaagattggtgagaagttagacatcaggcttaaaaatcatatacagttgacccttaaacaacatggctttgaaccatgctgatccacttatacagaggtttacttccacctctgccagcccggggacagtaagaccaatccctcttctttctcctccacctactcaacatgaagataaagaggatgaagaccttcgtgataatccacttccactcagagaacagtaaatatattttctcttcctcatgattttctgggtaacaatttcttttctggagcttatttcactctaagaatatagcatatacaacatttaacttacaaaacatgttaatctgtttatgttatcaaaaggcttccgatcaacagtcttattagtagtttagtttttggggaggcaaaagttatacgtagattttccattgcgtggagattcagtgcccctaaccccagtgttgttcaagggtcgattgtacatcattggaactgacattttactggccagaactcagtcagatggtaccacctaactatcagaatgctaagagtggtatggtgctgtgcccagaaggaagaagagaaacatgaatatgctaagtactattcttatcatgtattatgtaacactccagtagaaaatggaacagcaccccaaaatcaatctcatcaatatttctgcagcgcaacattaatatccacactaagtgaaacaaagatagctaaaaacctcccatctatgcagataaggcatttgcaccaaataaattttggtgtcaaacttttttattttttgataaaacttaaggtttttggaggatttggggtttcagattacagacaagggattatgaatgtgcattatgatccacattgtacaaatgaagaaatcttctcaaaacagcagccaggaaagtagagatgaaagttaaactcaagcctgtgccttccaaatttatgctaatgtgaagggaaaactgcaaataaccaaataactcttactttagacatcattaatgataccagccctccgacatggagaaacaggaggtatttcaatgaattccaatacttattgtgccccttttttttttttttttttttttttgagatggagtcttgctctgtcccccaggctggagtgcagtggtgcgatctcagctcactgcaacctccacctcctggattcaagcgatgctcctgcctcagcctcccaagtagctgggactacaggcgcataccaccaagcctggctaattttttgtatttttagtagagatggggtttcaccgtgttagccaggatggtctccatctcctgacctcgtgatctgcccacctcggcctcccaaagtgctgggattacaggcatgagcctgtgtcctattctttataactggccctgtgtcctattctttataaacactcactatattagaagctagagggaatagaaggaataagaggtggtatcttaccacaaaaaaagccagaatatggtggaagatttagtttctttagtgaaaatgagactctgatcaaagtataaagtactaaaatgactgattctgacgtgaagaattagggaaggatcgtataaaaggtgctgacatgagtggagcttgaagaaacaacacaattttgaatgaggaaagtacagtagtacccccttaactgtgggggatatgttccaagacccctcagggatacctgaaaccacagaattacagtattgaacccaatatatgctgtgtttttctcctatacagaaatacctgtgataaagtttaattataaattaggcacagtaagagattaaaaacaataataaaatagaag

SEQ ID NO: 1249 - DNA, 4044 bp, Homo sapiens
ctgcacaacaataagttcacattcattccagaccaatcttttgaccaactctttcagttgcaagagataaccctttacaataacaggtggtcatgtgaccacaaacaaaacattacttacttactgaagtggatgatggaaacaaaagcccatgtgatagggactccatgttctacccaaatatcatctttaaaggaacataacatgtatcccacaccttctggatttacctcaagcttattcactgtaagtgggatgcagacagtggacaccattaactctctgagtgtggtaactcaacccaaagtgaccaaaatacccaaacaatatcgaacaaaggaaacaacgtttggtgccactctaagcaaagacaccacctttactagcactgataaggcttttgtgccctatccagaagatacatccacagagactatcaattcacatgaagcagcagctgcaactctaactattcatctccaagatggaatggtcacaaacacaagcctcactagctcaacaaaatcatccccaacacccatgaccctaagtatcactagtggcatgccaaataatttctctgaaatgcctcaacaaagcacaacccttaacttatggagggaagagacaaccacaaatgtaaagactccattaccttctgtggcaaatgcttggaaagtaaatgcttcatttctcttattgctcaatgttgtggtcatgctggctgtctgagggtctgcattttctgaaactaatgaaagcactcctccctgatgtacagttgggaaaatatgtccatatctaaccagtgattcgagctatatttaagtattcaagaaagccagtcttaacatttctaactctgatgtaaatgaagtaacttgtcttaaataaaagaaatgcacaatgtcttggtacttgctgctattttactgtcttaattaagtaaactaatgagtttcttttataaaaaaaatgaaatgttttaaggcttcaatttattgcacaaaatataaagcatctaaactttaatatgtattttatgtatgtttacactgtcaaacatctggaaaataaaaggtctatgctcataactgtgtcatttggctttccagtcataccaactttagcagaatcaaaatgacctcaccatttttgttctagggtaccttggtaaaatctttaaggtaaataaaatggcggtagtatccaaggatattttactgaagtaaaatcgtagctgccatcccatgaatggttatgctacaacattattttacagacaagccataattgttttaaatctaaatgatgtcctgcttctgaggaactcttggctacttgacagattatataatggacaaaagctcttcaaaaagctagaagacactaggctttgcattttaataagaaaagtttaacggttgtgttttttgcatgtaagaaaagtgttaaaaacataatgaaaaaatttaaaaacatgtaaagaagcagttttagtgcagatttaacacaccattaatggagaatttaaatatttacaaaattaaaatcctactacatgaaggagaagaaaatttatcttttacaaatcagaaatcagaattacctaaattaaaaataagattagcttaagaataaaatcattgggtctgacgaacttgggcagtactgaggaagtgaggaaggagagagggaaagggaaaagggcatttggtactacaaccaggtggtgaacccagtaaaacagactgaggactaaggctaggcatgggacagagatcttgacactccaaatcaaaccacactggaactccaactagaagaaaatcactgagaaattctctacaaatataaaagttagccaacttatgaattagtgacaaacataagaaacagccacaaggcagcaaaagaagtcctgaaacaggattgattaaaatgcaagacagcataactgagatgggtgagacacaaatgtggtatttaatttgtgagacgtaaggcagaatctcatttcaagcatttctagaggtgggaaaagatagagaaaggaatttttatgttccttcgtaaaaacttttaaaaattcagatagcctcctttgctggtttaggaacatttctattgagagagagaaaagtaacaacactctaatgtgttcttttttttgctttttaaggaccaggattatggaaaaattaccattaagcttcaacaaaacagtcatctttcatgctgtctagtacagtggctctcgaacattttctgccttagcaaacctgattggctcactgtgtcagggaatctcaccatgaagaaacaggattatttgaaaaagtcccctaaatgattttaaaatgcattacctctctatatacggaagctatctccactccctcccaaacactgattagtaccttcaccatccatgatagggactaattgcttagataatccctactctaccacatacttgtgtcttatttaaaaaaacatatacaccgactttcacagaaagtaggtttctttttttttttttttttttttttttttttttttgagacgaagtctcgctcttatcccccaggctggagtgcaatggcgtgatctcggctgactgcaatctccccctcccaggttcaagcaattctctcacctcagcctcccaagtagctgggattacaggcgcctgccaccacgctcgactaatttttgtattttcagtagagacggggcttcatcatgttggccaggctggtctcaaactcctgacctcaggtgattcgcctgctttggcctcccaaagtgctaggattacaggcatgagccaccacgcctgccctgaaagtaggtatcttagaggtaactgtcttttcctctgaggataccaaaaactcaatgctgtcttagaatttttaaggggaaaagtaataagaaagtcaaattatagactactgcattaggagcacctatggattatgtcaatcctacagacatgtctgcaaaatgcagagtcaaacttggtaaacttacaagtacaatatacgtcaactactcagactctaagttcttagacagaagaattatctagccttaaagtaaagttgacccttgaacaacatgggtttgaatggcatgggcacacttatacatagattgaaagcacagtatttgtgggatgtgaaacccacatactgtataaataggttccacaaggaagcacgttccacagggccgattttgggatttgaatatgcgcaaattttggtatacacaggggtctgctaaccaatcccccagatatactgagggaaactataattagatagtatttccttccaaagaaattatattcttattattaatggaaaaaggctcattatttgccactaagtattactatattcctggctccagaaaaatttcaaaatgcattagtccttagcatctatctctcaagcacatcaaatatgtatgcatatgtgtacagatatacacatacctatatacacatacatctatatctatcttcacccatccatctctaaggcttggctctactttacaagcaacttgcctctgccacttctcagctgtatgaccatagacaagttatttcactgctctaagtcacagtttcctcatctataaaatgggctggcagaacttacagtggtttttttctgaagattaaatgacataattcacataaacccttcacagtgtcttggcccacccacattcctagatgcagtaatgttgttgttgtgaggattattatcacatctgtatgtccaaacccaatgctatgagaaattcccatatatggaaacatttcagctctacacactgagagcaagggaatgaaaggatgtgcttgctttagtctcttccctgctagaaatcaggtttagatatcagtgaaatagggacccagaagaaagtcagaaagacattcacttaccacagcagaatgagaagatggcttctatagctaacttaaaagatcacaaatatgtgctattcaatatcttccataat

SEQ ID NO: 1250 - DNA, 4040 bp, Homo sapiens
agtgagcccagattgtgccactacactccagcctgggtgacagagtaagactgtcttgaaaaaaaaaaaattattgtaattattttttagctttttttctttcttctttttatttagagatgggatcttactatgtggtccatgctgttcttgaactcctggcctcaaacgatcctcccatcttggcttcccaaagtgctgggattacaggaatgagccactacgcctggcctttactgtttgcttctatcactagaatctgaaacacttaaaggcagtgactatcttttttttttttttttaatctcctaaacctagaacagagctccacacaaatgtggcatttaccaatagatgaatgaaagcagcagcaggactacttgaccaactggattgaatttactccaccagattcagagatcactctaggattttaagcctaagactctgagttgaatgaaattctttaaaaatatgcaatattaacataaggctaccacgctacagagacactaaggatgcttcaaagattactaatagactctgtgcctaagaaacttagtggtaccattaacagatacagagaagttgggagaagagtcagttgtcagttgtgagggtaaagatgaactccattttaaatatgttgaatttgctgatagtgggagatatttatatctatatctatgtctatctatctatatatataaaatatggaaaaatccaccaagaagtcacacaaatagaattaggacaaagaagatgtaggctggaggtacaggtttaggaattgtggcataaagctgagaactaaaatcttacagaatcaggaacaaagaaaagtaggtaagggtgaggacagaatatcaattaaccatatttaggaggcagaagaaaaagagctagtgagagtaacatgaaaggaagactgattacaaaaagctacttgaatattagtgaaggaacagtagtgtctaatgtggtcaaggaggggaggggagagaagaaataaagaacaattagattaggtaacagatgatcactggtgttcttcaaggcaggagaatcaatatatttctagtagaaaatggtgaaaaaaggtagagaacacatggatccagcatatagagcctatgcgttttgagaagtatgactaagtgaagtactgaaatataatgaagctagaggggcagcagagccaagtacagaacttgtattaataaaagaagagagatcactgcttatgaggtccaaatgctgtatgatgggttagagtatatccaagagttgttacaccaaacctacagtgtatcaagtctaaattaggaataataactactaatcaactactactaattaggaataatgtctacctactttatgccaggaatcataatgaaaagtcaaatttttaactagacaccaatgacgcctaactgtctttctctttcattataaacccgctatagataacgaggaaatattctgaaatggatcccaaatatttcatcttaattttgttttgtggacacctgaacaatacatttttttcaaagacagagacaattacaacagagaagcagtcacagcctaccttattcacatcatcaatgtcacaggtattggctaattctcaaaacacaacagggaatcctttgggtcaaccaacacaattcagcgacactttttctggacaatcaatatcacctgccaaagtcactgctggacaaccaacaccagctgtctatacctcttctgaaaaaccagaagcacatacttctgctggacaaccacttgcctacaacaccaaacaaccaacaccaatagccaacacctcctcccagcaagccgtgttcacctctgccagacaactaccatctgcccgtacttctaccacacaaccaccaaagtcatttgtctatacttttactcaacaatcatcatctgtccagatcccttctagaaaacaaataactgttcataatccatccacacaaccaacatcaactgtcaaaaattcacctaggagtacaccaggatttatcttagatactaccagtaacaaacaaaccccacaaaaaaacaattataattcaatagctgccatactaattggtgtacttctgacttctatgttggtagctataatcatcattgtactttggaaatgcttaaggaaaccagttttaaatgatcaaaattgggcaggtagatctccatttgctgatggagaaacccctgacatttgtatggataacatcagagaaaatgaaatatccacaaaacgtacatcaatcatttcacttacaccctggaaaccaagcaaaagcacacttttagcagatgacttagaaattaagttgtttgaatcaagtgaaaacattgaagactccaacaaccccaaaacagagaaaataaaagatcaagtaaatggtacatcagaagatagtgctgatggttcaacagttggaactgctgtttcttcttcagatgatgcagatctgcctccaccacctccccttctggatttggaaggacaggaaagtaaccaatctgacaaacccacaatgacaattgtatctcctcttccaaatgattctactagtctccctccatctctggactgtctcaatcaagactgtggagatcataaatctgagataatacaatcatttccaccgcttgactcacttaacttgcccctgccaccagtagattttatgaaaaaccaagaagattccaaccttgagatccagtgtcaggagttctctattcctcccaactctgatcaagatcttaatgaatccctgccacctccacctgcagaactgttataaatattacaacttgctttttagctgatcttccatcctcaaatgactcttttttctttatatgttaacatatataaaatggcaactgatagtcaattttgatttttattcaggaactatctgaaatctgctcagagcctatgtgcatagatgaaacttttttttaaaaaaagttatttaacagtaatctatttactaattatagtacctatctttaaagtatagtacattttacatatgtaaatggtatgtttcaataatttaagaactctgaaacaatctacatatacttattacccagtacagttttttttcccctgaaaagctgtgtataaaattatggtgaataaacttttatgtttccatttcaaagaccagggtggagaggaataagagactaagtatatgcttcaagttttaaattaatacctcaagtattaaataaatattccaagtttgtgggaatgggagattaaaatgcatgtttgagaatagagaaattttcttcttggtttcattgcaaagagtaaaacaaacatgttaaaacatcaactgaagggttgggttaggaacatttaccctgaaaaaaatatgaggatgcatcataaaatgtaaatattttcctaccatgttgggggggcacaaattttaaaactggcatctttacaagtttcttctttataaacacccaaacaaaatcaagttttataaagcaaaaaaaaggaaaagaagactatggcttcattctaaatacgggtgactttgggtgatttttttttcaggaaaagagactatcaaaacacagatgattctcaactttttactaaacttatactttctgatgctatccactcttaagtcacctttcttacacagaatttcatctttatccattatctgacaattggtaagtctgagttattagagtaggaatgggcccaatctttgtcaaagtcaagagtggtcatcagcctatacttttggggatgccagcctttgtctgcagaagtgctcctttgcccaacaagcacatattcttcctcattagtcccatctaactccagggggaaacaagcacttagaataaaatggtagcccagtcttggagaaccactcatagttctgggattttcagagtagaacatagcatttattcatagcactggcattcatgacattaacaaagctccatatttaataagaacc

SEQ ID NO: 1251 - DNA, 4043 bp, Homo sapiens
aggagaacaatatagttttgcttttagttcattcaaataaatgctaacaataaaatactcctttcaaaagtagctcaagacaaactggtatattattataagataccttaataatgattataaatctttcctgctgggttagcagtacatggaactgttaaattctaagatatgccatttctatttaaatcaatcatttggtagatttaaaaaatgtataatataacttgtctcctttttgtactagtttccagcaagctcagggccaaagcggaaattcaacattttcaattatctgttgagatgcttataacctgccacttcatcccaaatcatcaagatcctgatgctctatttctattttattacacatttttttttacaattatgtcaaaatcagaaaaaatgctaggtataaatgatgctttaaaagaaaacccagcaacttttgttgaacttttaagtctactcagaggaaatttgctgtttttttttttttttcttcagatttttaggttgagaaaactggtatgcctttgccttcagaaagacacagtcagtccagggaaatataaatgaaaagagacaaccaccacagtaaaattgcgttcacaaatacacttacaaatgtatttctaagtaccagctttattctaagcttcaagatgaacacccaagaaaaaaaaagaacaccttgaatttctatttgaagttcagtttcttttggttgctaccaaacttcccctctttccaccaaaaaaatttgcatttatttcatacatgaagcaagaagctcaaggccacatttcttctgtaaagattggtgacaggttagagggtgggtagtttctgtaagaatgatccttaatttttttttttttttaaagaaggaatcagaaaagtaaaagcagaactaactgactcaaagcagaagtctagcacgcttcaaaggaagaaaactatataaagccatgatagtccacttaaaatgattaatatttatttgtaatgctaacttctagcatctaaaagtgttaatagaaattaaaatgcttcttcatacatagctgaatagaaaagaaatttagttgagaaggaattcagggtagcgaatattaggcataagcttgtagtttacttgtaacatctcaacactatcttttaactacaattaccaaaactaggatccattattctttcacaaactaacaaattatattgctatcccaacagattgccaagcatgcccacggacatggaacacacaggacattacctacatcttgcctttctgatgacaacagttttttctttgtctcctggaacaaaagcaaactatacccgtctgtgggctaacagtacttcttcctgggattcagttattcaaaacaagacaggcagaaaccaaaatgaaaacattaacacaaaccctataactcctgaagtagattataaaggtaattctacaaacatgcctgaaacatctcacatcgtagctttaacttctaaatctgaacaggagctttatataccttctgtcgtcagcaacagtccttcaacagtacagagcattgaaaacacaagcaaaagtcatggtgaaattttcaaaaaggatgtctgtgcggaaaacaacaacaacatggctatgctaatttgcttaattataattgcagtgctttttcttatctgtacctttctatttctatcaactgtggttttggcaaacaaagtctcttctctcagacgatcaaaacaagtaggcaagcgtcagcctagaagcaatggcgattttctggcaagcggtctatggcccgctgaatcagacacttggaaaagaacaaaacagctcacaggacccaacctagtgatgcaatctactggagtgctcacagctacaagggaaagaaaagatgaagaaggaactgaaaaacttactaacaaacagataggttagtgaagaaaaatgcaaagtagcaatgagaaggcttatggagtaaaaatgaagtcagttggtatttaatcccaaagtgttgttctgattatctaaaatttgacatggtagaccttgcaatttagaatcaagcaggtgagacagggagaagtatgcctgcttaattatttaaactgtgtacttttgttttgacactgaatattttaaaaagcaaataataaaataactaagcatttgaggaaaattttaaggataaattgaggaaactgattaatagagatagcaagggataattaaataaatattccctatgtagcaacagtggttagatgatctttgtctgaatgtaattaaactttgaatagttttagtgtgtccttaaagccaagtatatgctttaacatcaaatggaagtcaaattcctaatgcatagatagagagagctaaactgtgtaatttaatggtatcttccttgctggatgtggcagaatccacaccagcttatcaaccaacacagctaattttagaatagatcctttatctttccatatggcacacgtaagaaagtgtttttctactattaatattaaattaaaacctttacttttgtataataaattaaaactcagaataaacctgtgaccacgtatatttgcattcactttattactttagagaacacattgtaaagatcaataagaaatagagcacaactaaaataaataagatttatagccacaccaataggctaagtgtaaacgcaaagtatgtttcactgtttatgattaataatattcatcttttctataaatactacttactggaacattaacaacaagtaccaaaggttgattaatttttggacttcaaggatgccaagtagcctaatgatttattaggggtgtgtgtgtgtgtgtgtgtgtgtgtgtgtgtgtgttcaaatctggaaaactgcatacttcaggttataatttaacctttaaagaaactggcttcaagtaaaataatgacttacatttaagttgagaacccccccatcttcaattaaatatattacaaaaattggtttgagagactttccaaatatctactgaaattaacacagggctaagatcaggccacatttcaaaaatctcatcccttactgggcatttatttcgggcaatatagtaaccattttaaaaatattttttatatgttttttcccaagtatgactacaatcttactctcccttctaagctagtgattcttaccctggctgcatgtcagaatcacctgaagagtttttaaaaaacaccaatgcctaattcccatgtcttccttctgatgcaactggaatggggtgaactctaagcattggtaatttttacgtaactctcaaggtgataactgctcttggtcatcaaattcaaacgtctagctattattaaaatgagaggaaaaaaataaagcatcatttttattatcaatttattagcaatttgtaaaaaacaaatctattctctaaacgagaaatcataacaatattattccagataaagttaagtgttaacaaagtaaaaaggaaagcatgagaatattcatgccagtcatggtgactgaaatcaggttatcttttgaggggaaaaataacccagattagaaatgaaactgggcagacttcccattctgtgcaaaaattgaaaatttgagattgtgcaccagtacatccaggagtaacacaaagcactccttgaatcaagggtcataaataaacacgtgtcagagaaaattaaaagaaattaatatcatcataaaaataggaaattactttcatattcaacatactggtcaaacattttctcaccagagagcttctaccacaaggatatttaaaagaatatttaaaattcaccactcactatcttggctattaaacatatactctcagaatggtactatccaatgatagttactgaacaaacagaagtgtttcctttccaaatgacaggtattttaaaatggtaggtaagatatctttgagttcaaaatttaaaagtcatttagttttgaacaaaaacacattccctacccctgggtattacagttcac

SEQ ID NO: 1252 - DNA, 4046 bp, Homo sapiens
taatgtgaaaagaataatctactttaaatcattctagcatctaatacagaagtccagtctagtataaaaagatggaaattacttgctaatccaatttcaagtatttctttttgtggaagaatcatgaaatatccaaagatttatgtcactaaacttaaaaattaaagctgaacactattatacaaaagccagtgacttgggcctttaattgtctactaaaggtcataatctaaaaagtaatcttaatcctggaatatttaatagtttttcctccctactattaatatgaaatatagtctccagttagcattgtttattacatgctacttttgtttgcataactcaacgtatcacatttcttattttcaatttctgtattttaatagtatacaaatgtcagccaatgacatataacaaccatttcttataaaaccttgatgttcaaaagcctgactagcagtggcatccatgttgcttaggagttggtttggaaacaaagactttcaggccctacctatactagctaggtaagaatctgccttttttttttttttttaaataaaaggactcctaagtacatttgagaagaatttctatagcatacgtagggttcttaaccaggcaatttcatttagtaaatctcaggagaacaatatagttttgcttttagttcattcaaataaatgctaacaataaaatactcctttcaaaagtagctcaagacaaactggtatattattataagataccttaataatgattataaatctttcctgctgggttagcagtacatggaactgttaaattctaagatatgccatttctatttaaatcaatcatttggtagatttaaaaaatgtataatataacttgtctcctttttgtactagtttccagcaagctcagggccaaagcggaaattcaacattttcaattatctgttgagatgcttataacctgccacttcatcccaaatcatcaagatcctgatgctctatttctattttattacacatttttttttacaattatgtcaaaatcagaaaaaatgctaggtataaatgatgctttaaaagaaaacccagcaacttttgttgaacttttaagtctactcagaggaaatttgctgtttttttttttttttcttcagatttttaggttgagaaaactggtatgcctttgccttcagaaagacacagtcagtccagggaaatataaatgaaaagagacaaccaccacagtaaaattgcgttcacaaatacacttacaaatgtatttctaagtaccagctttattctaagcttcaagatgaacacccaagaaaaaaaaagaacaccttgaatttctatttgaagttcagtttcttttggttgctaccaaacttcccctctttccaccaaaaaaatttgcatttatttcatacatgaagcaagaagctcaaggccacatttcttctgtaaagattggtgacaggttagagggtgggtagtttctgtaagaatgatccttaatttttttttttttttaaagaaggaatcagaaaagtaaaagcagaactaactgactcaaagcagaagtctagcacgcttcaaaggaagaaaactatataaagccatgatagtccacttaaaatgattaatatttatttgtaatgctaacttctagcatctaaaagtgttaatagaaattaaaatgcttcttcatacatagctgaatagaaaagaaatttagttgagaaggaattcagggtagcgaatattaggcataagcttgtagtttacttgtaacatctcaacactatcttttaactacaattaccaaaactaggatccattattctttcacaaactaacaaattatattgctatcccaacagattgccaagcatgcccacggacatggaacacacaggacattacctacatcttgcctttctgatgacaacagttttttctttgtctcctggaacaaaagcaaactatacccgtctgtgggctaacagtacttcttcctgggattcagttattcaaaacaagacaggcagaaaccaaaatgaaaacattaacacaaaccctataactcctgaagtagattataaaggtaattctacaaacatgcctgaaacatctcacatcgtagctttaacttctaaatctgaacaggagctttatataccttctgtcgtcagcaacagtccttcaacagtacagagcattgaaaacacaagcaaaagtcatggtgaaattttcaaaaaggatgtctgtgcggaaaacaacaacaacatggctatgctaatttgcttaattataattgcagtgctttttcttatctgtacctttctatttctatcaactgtggttttggcaaacaaagtctcttctctcagacgatcaaaacaagtaggcaagcgtcagcctagaagcaatggcgattttctggcaagcggtctatggcccgctgaatcagacacttggaaaagaacaaaacagctcacaggacccaacctagtgatgcaatctactggagtgctcacagctacaagggaaagaaaagatgaagaaggaactgaaaaacttactaacaaacagataggttagtgaagaaaaatgcaaagtagcaatgagaaggcttatggagtaaaaatgaagtcagttggtatttaatcccaaagtgttgttctgattatctaaaatttgacatggtagaccttgcaatttagaatcaagcaggtgagacagggagaagtatgcctgcttaattatttaaactgtgtacttttgttttgacactgaatattttaaaaagcaaataataaaataactaagcatttgaggaaaattttaaggataaattgaggaaactgattaatagagatagcaagggataattaaataaatattccctatgtagcaacagtggttagatgatctttgtctgaatgtaattaaactttgaatagttttagtgtgtccttaaagccaagtatatgctttaacatcaaatggaagtcaaattcctaatgcatagatagagagagctaaactgtgtaatttaatggtatcttccttgctggatgtggcagaatccacaccagcttatcaaccaacacagctaattttagaatagatcctttatctttccatatggcacacgtaagaaagtgtttttctactattaatattaaattaaaacctttacttttgtataataaattaaaactcagaataaacctgtgaccacgtatatttgcattcactttattactttagagaacacattgtaaagatcaataagaaatagagcacaactaaaataaataagatttatagccacaccaataggctaagtgtaaacgcaaagtatgtttcactgtttatgattaataatattcatcttttctataaatactacttactggaacattaacaacaagtaccaaaggttgattaatttttggacttcaaggatgccaagtagcctaatgatttattaggggtgtgtgtgtgtgtgtgtgtgtgtgtgtgtgtgtgttcaaatctggaaaactgcatacttcaggttataatttaacctttaaagaaactggcttcaagtaaaataatgacttacatttaagttgagaacccccccatcttcaattaaatatattacaaaaattggtttgagagactttccaaatatctactgaaattaacacagggctaagatcaggccacatttcaaaaatctcatcccttactgggcatttatttcgggcaatatagtaaccattttaaaaatattttttatatgttttttcccaagtatgactacaatcttactctcccttctaagctagtgattcttaccctggctgcatgtcagaatcacctgaagagtttttaaaaaacaccaatgcctaattcccatgtcttccttctgatgcaactggaatggggtgaactctaagcattggtaatttttacgtaactctcaaggtgataactgctcttggtcatcaaattcaaacgtctagctattattaaaatgagaggaaaaaaataaag

SEQ ID NO: 1253 - DNA, 4039 bp, Homo sapiens
agaggacttaaattaaaatgatgtgttgtatactaagcctctgatattagaatgttgctatcatgaacagaaacaagaagactgtcacaggcagcctcctttaaagaaaaaataaagttctttttatttcattaatttaattaatttttaagagatggagtcttgctatgttacccaggctggatttgaactcctgggctccaccagtgatcctcctacctcaacctacctagtagctgggattacagatatgtgctgccatatccagttctttttttttttttttttttttttttttttttttttgagacagagtcttactctgtcttcctggctggagtgcagtggcatgatcttagctcatgcagccaagatctcatgatctctgcagcctccacgtcccgggttcaagctattctcctgtctcagcctcccaagtaggtgggactacaggtgcatgctaccctgcctggttaatttttatatttttagtagagacaggttttctctatgttggccaggctggtcttgaactcctggcctcaagtgatctgcctgcgtcaaccctcccaacgtgctgggattacaggtgtgagccaccgtgttcagcccatacctagttcttaaagtctgtttcagtcatgttaaacttgaggtgatgacaggatgtttgacagttgtgtgtgtgtgtgtgtgtgtgtgtgtgtgtgtgtatacacacactacaccacacgaaagcattttctgtcccatataatctaagtttactagatattttctcaaataattgctgcagttccacaattgttacattatctgatcagtatcccatggactccaaactcacattttcaaatcagtctgtagatttcaaataagtcttttagagaagatttgaaatggaagataccatttcaaaacctcttttgaatgacactaaagcatgtagcaggcctatagaatgagcatactgtcaaaaggcattaagtggaaaaccctccctgctctggaggcggggattggttctacaaagcctcctgtcatgccagtggccaactagagaagttggagctttttcgttgtttttttttttttccctcctgtgacatgtgctttagttgcagtggaaaggaaatgtgtcatctgtggtttggttttaaaagtggaaaactagctgcacatatccttttttactgcagatttactttaaggctcatattctccaagtctattctgctttaaaaagaagacaagaaaagaagtggtttatcaaaatcacgttataatcagattttgaccaagcattttgtaaggtaggtcatatatatacggcttttcttatgccttttcacttctaacgtctgacagattagtgttcgaggaaatgctatcaaagtgtgtaagaatctcactaacaaactagaattgtgactgaaaatgtatactttttttttctgtcctgttacataaattttaagttagaaatgaaaaaatttgccatcgccatggagttttaaattaggattacgaaggatctaagtttggtttcctcaagtaaactggaaatgttttgttatttttcaaaagttaaaaaataaatttctcattactaatgcttggacattacaaattctactgaaaataaattctactgaaaatgatcagatataagaaaacttctgataacacaacctggcctccaaggcataaactggagtaaaaacagtcctcaattctcaggcatttgtaagggcaagagaaagtctcattttgtcatacagtttgtttatttgggcactgcagtacatctggctgaagacaatcaacagcaggcctattatctgttccgtggtaagcactgttaaaatgtgtaccaatactatgatgtatactacactgttaatgaactaatgtgaaaagaataatctactttaaatcattctagcatctaatacagaagtccagtctagtataaaaagatggaaattacttgctaatccaatttcaagtatttctttttgtggaagaatcatgaaatatccaaagatttatgtcactaaacttaaaaattaaagctgaacactattatacaaaagccagtgacttgggcctttaattgtctactaaaggtcataatctaaaaagtaatcttaatcctggaatatttaatagtttttcctccctactattaatatgaaatatagtctccagttagcattgtttattacatgctacttttgtttgcataactcaacgtatcacatttcttattttcaatttctgtattttaatagtatacaaatgtcagccaatgacatataacaaccatttcttataaaaccttgatgttcaaaagcctgactagcagtggcatccatgttgcttaggagttggtttggaaacaaagactttcaggccctacctatactagctaggtaagaatctgccttttttttttttttttaaataaaaggactcctaagtacatttgagaagaatttctatagcatacgtagggttcttaaccaggcaatttcatttagtaaatctcaggagaacaatatagttttgcttttagttcattcaaataaatgctaacaataaaatactcctttcaaaagtagctcaagacaaactggtatattattataagataccttaataatgattataaatctttcctgctgggttagcagtacatggaactgttaaattctaagatatgccatttctatttaaatcaatcatttggtagatttaaaaaatgtataatataacttgtctcctttttgtactagtttccagcaagctcagggccaaagcggaaattcaacattttcaattatctgttgagatgcttataacctgccacttcatcccaaatcatcaagatcctgatgctctatttctattttattacacatttttttttacaattatgtcaaaatcagaaaaaatgctaggtataaatgatgctttaaaagaaaacccagcaacttttgttgaacttttaagtctactcagaggaaatttgctgtttttttttttttttcttcagatttttaggttgagaaaactggtatgcctttgccttcagaaagacacagtcagtccagggaaatataaatgaaaagagacaaccaccacagtaaaattgcgttcacaaatacacttacaaatgtatttctaagtaccagctttattctaagcttcaagatgaacacccaagaaaaaaaaagaacaccttgaatttctatttgaagttcagtttcttttggttgctaccaaacttcccctctttccaccaaaaaaatttgcatttatttcatacatgaagcaagaagctcaaggccacatttcttctgtaaagattggtgacaggttagagggtgggtagtttctgtaagaatgatccttaatttttttttttttttaaagaaggaatcagaaaagtaaaagcagaactaactgactcaaagcagaagtctagcacgcttcaaaggaagaaaactatataaagccatgatagtccacttaaaatgattaatatttatttgtaatgctaacttctagcatctaaaagtgttaatagaaattaaaatgcttcttcatacatagctgaatagaaaagaaatttagttgagaaggaattcagggtagcgaatattaggcataagcttgtagtttacttgtaacatctcaacactatcttttaactacaattaccaaaactaggatccattattctttcacaaactaacaaattatattgctatcccaacagattgccaagcatgcccacggacatggaacacacaggacattacctacatcttgcctttctgatgacaacagttttttctttgtctcctggaacaaaagcaaactatacccgtctgtgggctaacagtacttcttcctgggattcagttattcaaaacaagacaggcagaaaccaaaatgaaaacattaacacaaaccctataactcctgaagtagattataaaggtaattctacaaacatgcctgaaacatctca

SEQ ID NO: 1254 - DNA, 4061 bp, Homo sapiens
aagtctcaagtctctttcctttcaatattttcttagctattattgcacttttatgtagaatttagaatcatttaagttctatctccattctcaatcctcaaatcccatggttattttgatgaaattacattaaatttgtaataatctgggaagaactgttcatgcaggaacacaatatgcctttacattcactcaaatcttctctcatattaatatttatgaataaagtttatacttttcttgttttgtcagtcctacacatttttttgttagggttatagtcctacatctcttacctgacaaagagtcttagtgaattgctgaagcttttaattatctaatatataaaagtcaagaaatgtgtttgaatgcagaaaaaaaagttttatatattacagggaaaggaaagggaagaaaaggtcaggaaatatgctgggagaagatcaacatttataaaactataggatataaagatggacaaatataaagagtggatattaaatttataagacttagttaaaacaaagtcagaactgactctgggccctgtattatgtgccactgtgctctccgtgaactgtacatttacaataaattcattgttcaaagtcaacctaaagaaaagagaaaatgactagttctctaaaattaaggaggcaacatggatacttatgtggacttttctgctatgaagagaaatgctgaagctaattaaactgcaacagtgaagaaaatactttgtaagtggtccagaggtgtgtaaagtaccaaactcttgccgctttgcttttattatcagaattttggtggatttctcaatgtggcctaccaaaaagttccttcagagttccttcagttacaggataccacagatataaaatcagaagaggaaaaaaagtaaaaatgtaagtgaaagtcttcactggaaaattctgaaatgaaagggttttctttgaattctcttagaataattgttagtattaaagaaaattatcattacttactagatttgctaaatccagaaatacactcttccaaaaattctaacgtgaggtgtggctcattggctgccagtgtcttactaatagagacaataaagagggtgttgttggcagggatacataaacctgatgtctctagtaactggccctcgatttttaaattaaaggtacaagttaaggcacacagaagattataggcagctgacctaggagaaaacacaaatgaagttgttttaaaacgtatttttccttatagttccaaaattttttcataacatacaatttgtgattctgttacaaagtatgatcaactatttttaaattttatgatcagttagaaataagatgttataattctacagtaaaaccaaaataccccttaatcatttagggattttataaaaagggacacacttgatataaccataagagcactgtgaggctcctatgacagaggggcggggtataggctttcctaaaatacatctcactgagacataaaatatgagaggacttatggtcctaatgtggatcaatagaaattaagtcagaataaggcacaccatacatttttagcaaagccaaaactcaaattctggttctctttcccactagatccagttataatggggatcatagggacagatatcagatggcccttcccttcatcaaattagaatgtgaaaatctttaatcaggatctgctgaacttctttctgggtgtcctaaaagttaccctacaaactgaaggttaaaaacaaaattaacttataattaagtcctcccatttttccctctatgacctcattacatcatatataaccaccaatatggaaaaaaactataatatccaggtttcattgagaccaaacatcacttacaaatgtctgaaaatatatttaagcaatttaggagacagcctaaaagactcagactcaatttaaaaattttaattttctcccctgtccagtaaaggaaatagtttgttcagtaactgtcaggttttccttacctctgaatgtttatcatgctactatattgatgcaacaaccatatagggaaaaaaagccactggaatttaagtctgcctaaaggctttttctctgggatgacatgcttcagcaaaaagcagaagctgtcagagattgctttaggtcactagagaagaatacaggtttacccaggctaataattgttaaaaggttgtatttttcaatgaagatctttgaattagaaattaaaggcaggcttatagctccattttcctaaaatgtgaaaattagtgttattatttctgtttacatatcttttttcttttttaaaaaacttttagtcagagtctcactatgttccccaggctggtgtgcattggctattcacagacatgattatagcacactgcagccttgaactcctgagctcaagctgtcctcccgcctcagcctcccgagtagctgggactacagtgccagtgctcagcttgtatcttttactaattcccaggaattctaagttatacaattttgacaaaacttttatcctgtgtatttcaacacttataaagaattggacttcctcaacccaggacaggtgtcacagacacctatgagataaaggaagcaaagcatacacaaaatcttatgtacaatttctgaagcccatccaagtaaacatatcttgattttcttctttttccctttaagtaaaggagaatttggaatcctaaaaggcccactataaaacctgggctatgttatcctcagggaaaattttcagaagttaagaatttacatctgaaaaatcttcaaagtctcagggtacttgagacaaagaattatcctaacttggtaaggagaggggagaaaagggagaaagggtgcaaggagatgctggcagggagggaaaagataagaaaatactacttactaagtataaactatttgctagtttgctatactatactactacacatactattttttaagcttttgtgggtatataagaaaggcaattacctttatttcacaaataaggaaactagatatctgaaaacttcagtatcttgctcaaagtacatagctagaaagtggcatatctgttcaaaccacatctactcactccacagccatgctctttccacatgcatattcaagttattaagcctaaatggaaccaattacactctgctcagatgacttatttgtcttaagatttattttgagaattttgttaagagtgatgtaggtggaaagtatgcaataatgttaccaagttattgaacattaggccttcttttgtaaagcaataatctgacttgacttttaaactaaatagtgatatacttctgaaaatggaaaaaaattagaggacttagaggaagaaaaacttaatttaggatactttggaaaaaaaaatctgctatgtcgtgttgttttacatgatggagaaaggacatatattggtttagtgtgaatcaccctgtttggaattccacagttcatgtgaataccccacaacttgatgaggtcacagtggttaaccaacactgcataccttccaatttacaatattaaggtagaggctgttttaaaattcattaaatggtctcattttaaaagcaacaaaccccaaatcaaactgaagagaattttaaaaaacctaccgtaaactcgggtcagaactgcctaaattaagtaatgcgatattgagcagtgtcccagggacatcttttggccgaatcttggtgtgttgggggatagagtcgggctgtgacagttcccagcgggtccggatatgaatgatagactggacaatggcttcacactcctggtgcatgaaggtgagcggcgtgccctggtttgcaatggttaaggtgaactggttctcatctactaggcagatttcttcaatttccgaagcataataaatgtcatttagaaagactgattgccctaggacttttgttcgctctgctgaagttacttggacagcagtagaaccaacctggaaagtggtggtgacggggtgaagtggagaagaattaaactcttttacataaaa

SEQ ID NO: 1255 - DNA, 4046 bp, Homo sapiens
ttttcaacttctgttcagtaacccagaaaatagtccaacagaaaaaaaagaactggtgggcttaaggcaaggcagacagaagtaatgaattagcaataaacaaacaaaaacaaggaaataaagaaggagaagggaaagtagatagataatcaaacagacaacagccatggaaggcaatgaatgtagtacaaaagggcctggccttggttctagataagaactgtataaagcagttaacccagctcttctaaaactcagtctccccaatgtacacaatattgtgagcctaaaactaaattacctgtatggttccctagctccaaaatgctaaaaggtttatcagcggggaagcaggaaggaattcagtggctgcagtatctgtaaaaaaagtaaattttaagttttgccctggccttcacagctgaaatgctgataatgggcaagaccagaagcagaccccagggcagtgcttctccaattctagtgtgtgtaagaatcgcctggggtatttattaacacactgactgctggctgggctctacttgggagttttttgtgcagatctgaggtgaaactacagcatctgcatttctaacaagctcccaaatgatgctgctggtctgggatcacacgtggagaaacactgtactagagagttagtggcagagggcaaacaaaccttgttacatgggaaaaaaagttagacttctcttacttctgggggaaaaaaggattacttgtaaggcgactgacaaatgtggaaataaaatttgtttcctctgctgaccaaagctttgttgttaagcagaatttaatagaatatagttaattacataatagtttataatatgaattgggtattgccaaattcttcagaaccttcaaaattacataagttgaaatgttcatgcaaaactgagatcataaactgggaattctatttattgatcttgaatatcacagaatagttatgtcattggattttttttaaatttatgctaacacttaaaagaactatatatagtaacttttccttatacaatgatgtgtttcataagtgaacttttcagataatggaacgttaaacaactaaagtttcttttatttttaaccattttagaagaatatctttctaaatagaaaacacaaccataacaaaagctttccttcattactcactgtcataataacacacacaatagtttaagttctataatgaatagcacctccagggtcaaccagagttgtatgaaaccattcactatgacactgaataagtccagagttctgtaggtttgccatttctcccaccttgtttatctcagtcccactggagctattagctattagtatttctcagtgtattcaaatctaagttgcattacgaattggtatatatatgcttatgggctttaagatgttattttcttgagatgaattttttgtttgattatttatttacttccagattttcaggatggtctatggatggttgagttattgctggcagcaggaaagtgaggtacctaatagattttgtgtttcttcttcttcttctttttttttttttttttttttttttttgatatagtatgctgtatcagagacagagaaagaggcccttagggcaatgttagtatatctagtaaataaattatagttctgttcacttacagaataatgtgttttaagttcctcttcctgcccaaactctacaaacttgtcaaccttggaatatcatgtggacattttaacattttactgtcttatgtacaacttgtttgaaagtagaaagcttcatagaataacaaaagtcaagtcagttacaaggtaaagaagaaatgtaaggtgaatctcataagaaaaaggagcaaaatttgctataaactgatcacaagggaattcctaatgttggtgtcttatattgttgctcaaagtcatataaagatcacatttactgacctggggaatgctgggaagttgcaagtgaggtcatggaattagaaaggttaaggttggcagtgatactaagctggctctgcagtgcaggagggtaaggagatgtgggagtcaggagggattcttcactggtttcttcatcaattccaggcaggtacgtgtcaatcaaggcatcaagaaacttaacaataagctcagcatagtctggaatttgtgtttgctgtaatggaaaataggaaattattttagttccttttttttaagtaaatccccatctgaagccaaaaatattaattttgtttggacttaatttactatttttcttcctttgtattacttatcattaaaaaaggggagtggagtaatatttatagactaccataggacttacaacagggagttctattcagcttaaagcttccagatgaacctgcattttctgaaagccatgcacaagacagactgaatgtaatactgagacaatacaatcaccaggaatgatgtctagccaattttccaaaacagagaaaatgagcagagcatcatcattccagctgccatttagattccactcactagacactgtaaagggctcagagggttactggcaatccaaatgcaaaaacttctgtatgatatacttatttctgtaacttcaggcccattttttaagtgacaacctttgcatgttgacagatattcaagtaatagtgaaaggaaataaataaaatacccaattcttaaaaactggaacaaggtttatacaattcatattgatttagcaccccctgtatctaaaacactgcaccaggaactgtttaaggaagaaacagaaaccctgtcttcaaggaactttgatcaatttggagagagcccacatacagagaaaatgatcatatacatcttatgtagcactacataaactaatgccaatcaaaaaacaaactgaggccaggtgcggtggctcatgcctgtaatcccagcactttgggaggccgaggtgggcagatcacgaggtcaagagatcaagaccatcctggccaacatggtgaaaccctgtttctactaaaaatacaaaaattagctgggcgtggtgctgcatgcctgtagtctcagctactcgggagactgaggcaggagaatcgcttgaacctgggaggcagaggttgcagtgagccaagattgcgccactgcactccagcctggagacagagtgagactccgtctcacaaaacaaacaaacaaacaaaaaaactgaataagagcaaatgaggacaaatccagagagaaattaatctaatctaataggctggaaataaaaatgttttcatgaaatagattttaaccatggtaatgctccttgctagtcataagatatctaactgtgtgcattaagattatcaaatacacaagggactgtggcagaaaagtatcacagaggtttatcatactcttctgaaaaattgatcataagttgactttgtttgtaaaagtgaatacacacaccccaacaccatgctgcctcctggaaaaaaaccttgtgatgagaaactttttataaaagtaacatatgtgtttattgtgaattatttttctggttttcagcacattgtgtgttcttaaagcaggcatactaatttgaacagaaaccttcattttgccaaaagttagagaaaaatatattttcttacctttgaaaacggtcctgcaaaccgccacaagccattaaaaccaaaacctgcaacaaatcaaattttactcttataacaagcaaggtatcttttaattgtaacagaaattaaataagtcatatagctgatgatatataaaccctatgtacatgttgaaaacatgtttttagaatgagtgtcaaagcaactaaaacctacttaaaatatactcagcataaaaagttgtcaaccagttacattggacatacagttgagagagtaaaaaaatggaatatggaaataaaagtatgaacaagtctatcccttataaagaattctgtagtcagtgcattctacaacagcgcgcatgttagcaagttcatcaaccatccttctccagatacatttatttacttt

SEQ ID NO: 1256 - DNA, 4065 bp, Homo sapiens
gaaaaggattagattacattattgttatttaagttagatgtctatcttccctgctagaacatgagttccttgaaggcaggtatcaaggtttgtgtatttttacaactagtgatgtagctccagcctgacaattttttagtcactcatttttaaaaaacacttttggtttcccaaactgaaataatcagttataatagtatcatgaaataataaaacaacagaatcgcttttaactcttgaaaagctaaggaaaaatgggttaggtaatttgtgagaagttatactacaaaaatgacagactaataaaaactgaaatctcctgccacctgtgcaggagcactagtaggttaccttactctgcatttagtttatttcatatacaatatggcaaacttattagaaaactcttattacatacaggagaacttaaacatgtcagaagacctaggtttgagacttgtttggatcaatattcttatttagttgtaattcttaatctggcaattaaggataacagcagacttgtctatttcaaagggttgttagacaaaataatctatgtgaagaatttttgcacacagataaaataattactccacaaattaagatgctcctaatatctgaagtaaaagaccaggtgatacaaaggagttttagaacaaatactaggactttaattttatgctagaatttgtaaaatgagtgaagctaatataaataagcacaaaatagaataaatcttcttaggtagctacagcctatttttaagctacagtaaatacattcatggaggcgtattaaatatatacttagaaatatttttattttgagctaaatataaaaaattgtaactataagaatttttggcttggtattgtggctcatgcctgtaatcctaacattttgggaggccaaggcaggcagatctttgaggtcaggagttcgagaccagcctggccaaaatggtgaaacctcgtctctactgaaaatacaaaaaaaattagccaggcttggtggaacatgcctgtaattccagctactcaggaggctgaggcaggagaatcgcttgaactggggaggcggaggttgcagtaagctgagatcacaccactgtactccagcctgggcaacagagagagactccgtctcaaaaagaaaaaagaatttttaaaaatgacgttcaccaactgctagcacttctttttctgtttaggtgtaatctttttgtatattaattacaggtgaataaaagaaaaggcatcttttataaattagacataaatgtgtcaaattttttcatcttagtccttatagctaactaatgaccatatattttttttttttaatttttttgtgagacagagtattgctctgtcactcaggctggagtgcggtggtgcgatctcagctcaccaaagcctcaacctccccacctcagtcctgtgaatagctttttgtattttttgtagaaagagggttttgccacgttacccaggctggttttcaactcctggactcaagtgatccgcccaccttggcctcccaaagtgctgtgattataggcgtgagccatcgcacctggccatattcctttttttaaccacaggtgattgaatagacagccagctttaatttctgaggaaacactggggttggctttctatttggggaaaacaagttattttctaagctaaaaaaacttcatcaaaccacgtattctgctctttctctattaactctctcttgagtttcttattaacctgcctttgttagtccaggtatgggattgcatcttcattgttctgggtgggtattagcagctccttaaacaagacaggccacacactggccgtgcaattcctgttaagtaccaagaccttataaagtggtggctttacaagttcctaaagtgcctaaggcagactgagcttacagggaccggtgagtaaagtctcatgctatgtgcccaggatgagtgtggggtaagcagtattttcgtgcaaagatgatgaaaataaagagtaccttgatgagggaacagctgcatgaaaactgctgatttagagcaaggcagagaagctttacaaagaatggaagaaaaaaaagcaagtaagtgatgttcataagatttaaaaaagggtgaaatacaattagatactagataattataatgttccttggttttcagaaggaatctggttttaattattgaattctgaccattaatttcctaaatattacagttggtaaataaatgagagaacttacaactttgtagatgtatttttttaccacttatattaaaattaagaattttagtttaaattaagaattaagctaaaaattagatttaaaaattagcaagaattataccaagaaatcgctcaatttaaaattatttttctcccttaaacataggataataacaaagaaaaagaaaacaaatcaagaaaaaaaggtcaggtaataccataaacaattctctaaaacattaaaatcatttcagagatcttaagtggcctcaaaatagagacttctaggtttcttctaaaagggagatatttcttttccttcttttaaaagacgagggtctcatgatgttgcccaggccagacttgaactcttgggctcaagcaatcctcccacctcagcctccctagtagctgggaccacaagcatgtgccactgtgcccagctaagagggagatatttcaaacctagtaaacagaagtattactgactcagagccaagtctaagtttagagcaatggtttagatgaaatatccctccgtacacagagctatcagcactattggtttaggaatgttatgatcactacctgatctagccagcttctcaggaagaaggtctacattacagaagcaaagtgagagaatgactggtaggcttggaccaaggccagaaataaaaatggaagaagggagtctaaagtaacgatgaactaagtatgtctttgttctaaaaaattcacgcaccaatactaacagtaaaatgagctgatcaaacaaaaaaaagttaaagcctttttcctagtaaaaaaaaattttaggccaggtgcggtggctcatgcctgtaattcccagcactttgggaggtggaggtgggaggatcacaaggtcaggagttcgagaccagcatggccaatatggtgaaaccctgtctccactaaaaatacaaaaattagccaggcatggtagtgggtgcctgtagtgccagctactcagcagggtgaagcaggagaattgcttgaacctgggaggcggaggttgcagtgagctgagatcgtgccactgcactccagcctgggtgacagagcaagactccatctcaaaaaaaaaaaaaaaaaaattaaatagatcacgaatttacttgttttgtttaaaaacatttttgaggtgaaaaatgtgttataaaacttttgccataattattacatgatccttccacacaaatgtccctttgaactatcagaatactatatagtacaaggtacaacatgacaggtatcacaatagaggtcaaaatagttatctatgtacattctactgcccgttctgatctgaaatatattgaaggcaggtatcatgccctggcagcccctctgctcccctggggtctaagagccccttgcatatagtaaacaatacatatatgtaggataaatatctggaattttggtattttctacagtgcactatagtattaatcttgtatttaaaataaaaaaaatagtgcacacttagaatttgttaaacaacatggatcggaaggaaataactttcaaggcaaaaaccgtcaagtctctggtgatcaaggattctaatacatacttaacatacacctacaaaacaggtattcaaatgtttattgaattaacttacaacaattctcctctgaagaatatcagaagaccctgataaagtatatattaaattttaatgctttggaaatggatcctattaattcattttctttctttccttctttttttttttttttttttgagataggttctcaatccctgactggagtgcagtggcatg

SEQ ID NO: 1257 - DNA, 4046 bp, Homo sapiens
ttgtagtgaaagacggagggactagaggggtgggcaggactagaagaggttgtttttggccgggcgaggtggttcacacctgtaatcccagcactttgggaggccgaggtgggtggatcacctgaggtcaggagtttgagaccagcctgaccaacatggtgaaaccccatctctactaaaaatacaaaaattagctgggagtggtggctcactcctgtagtcccacctactcaggaggctactcacgaagctgaagcacggtaatcgcttgaacccgggaggtagaggttgcagtgagccgagatcgtgccattgcactccagcctgggcgacaagagcgaaacttcgtctcaaaaaaaaaaaaaaaaatggttttgtttggatgagtgtttgtagccagaattgggagtggcctaaagttgggcggggcctgaagtaggaggagctaaaggaagttctatcttgataggtggattgtagtggaagagggaggagctagagaggtgggcggggcagaacaggttggttttgtttggatgcttgtttctagcttggactaggagtggccaaagggggtgggtggggactgaagtgggaggagccaagcagcactgagctaaaggaagttctttatcttgataggtgggttgtagctggagagggaagggccagaaggggtgggtggttaccgttgtgaggccgtgaaatgggaggagccctgagctctggcgtccaggtcaaggacgcttggccccctccctgtcccgcagcaagaagcgcagctccctcttccggaagatcacgaagcagtcgaacctgctgcatactagccgctcgctgtcgtcgctgaaccgctcgctgtcatccagcgatagtctcccgggctcgcctacgcacgggctgccggcgcgctcgcccacgcacagctaccgctccacgcctgactccgcctacctaggtattacctcctgcacctgcgcggggaccgagcagcgcggggtggcctggctggtgcttgggctgtactcactcgcttcacctcctgtctcccgcaggcgcctcatcccagagcagctccccagcctcgagcacgcccaactcgcctgcgtcgtcggcgtcgcaccacattcggcccagcacgctgcacggactgtcgccaaagctccatcgccagtaccgctctgcgcgatgcaagtcggccggcaacatccctctatcgccgctggcacacacgccgtcccccacgcaggcgtcaccgccgccactgccgggccacacggtgggcagctcgcacactactcagagcttcccggccaaactgcactcatcgcctcccgtcgtgcgcccgcgccccaagagtgccgagccccctcgctcgccgctcctcaagcgcgtgcagtcggccgagaagctgggagcctctttgagtgcggacaagaagggcgcgctgcgcaaacacagcctcgaggtgggccacccggatttccgcaaggacttccatggcgagctggcgctgcatagccttgccgagtccgacggtgagacgcccccagtcgagggccttggcgcgccccggcaggtcgccgtccgccgcctgggccgacaggagtcacctttgagcctgggcgcggacccgttgctgcccgagggtgcctccaggccaccagtgtcgagcaaggagaaggaatccccggggggcgccgaggcgtgcaccccaccccgcgcgacgacccccggtggccggaccctggagcgggacgtcggctgcacgcggcatcagagcgtgcagacggaggatggcactggcgggatggccagggctgtggccaaggcggcgctgagcccggtgcaggaacacgagacaggccggcgcagcagctctggcgaggcgggcacacccctggtacccattgtcgtagagcctgcgcggcccggggctaaggctgtggtgcctcagcctctgggcgcggactccaaggggttgcaggaacccgcacccctggcgccttccgtgcccgaggccccccggggccgggagcgctgggtgttggaggtggtggaggagcgcaccacgctgagcggtcctcgctccaagcccgcctccccaaagctctccccggagccccagacaccctccctagccccagcgaagtgcagtgcacccagcagtgcagtgaccccagtcccacccgcatccctcttgggctcaggcaccaagcctcaagtggggctgacctcccggtgccctgctgaagctgtgcccccagcaggcctgaccaaaaaaggagtgtccagtcccgcacccccgggaccatagccaagggggtcatcggccccgcgctgtacagcctccgtatacatatgtacacatataaataaagtgcgtccgtgctgcgtgagttttctggggctcactcctctccaggcaaggcgagacatcacacgaccccacccccatgcccaggtgctttttgggaggtgggactccagttctggttaccatggagagtggagggaattttggatagacacctcctgtggtcccacttctggtctcacctctgcaccaactgcccccaaacctttagggggagaattgaagctgcgatgctcttgtgtcccagcgcccacctgaagagaaggttaacagcctcgtccaccaatttccatttatttactcctcaacaatcctgatggcaggtattatgtttcccattttgcagacaggtagactgtgtcacagagcggttaaggcacacaatcaaggtcatacagctaggaaggggatgaactgggattcaaaatcaagtccaaactggttcctgagcccttagattttttattttttatttttttgacacagagtctcattctgtcacccaggctgaagtgccgtggtgttagctcagctcatgacaacctctgcctcccgagttcaagcgattctcctgcctcagcctcccgaggagctaggaccacagacgcgtgccaccatgtctggctaatttttaaatatttttaatggatatggggtttcaccatgttggccaggctggtctcgaactcctgacctcaagtgatctgcccatctcagcctcccaaagtgctggggttacagatgtgagccactgcacccacccgtcccccgccccccctttttttttgaaacagagtcttgctatgtgacccaggttggcgtaatcatagttcactgtgaccatgatctccctggttcaatcgatcctctggcttcagtggctgggactacaggcatttatcaccgtgcctggctaactttttttaagttctagtagagatgtggtctcactatgtagcccaggctggtctcgaattcctgagttcaagtgatcctccctccttggcttcccaaagtgctgggattacatacgtgagccactgcacctggccataagggttagatcttataagctctgctgggcttcctggccatgccattacagggctggtagttcttcaccagcggctggaaggctttccagagggctggcagctgggcacacagtgtgcccccaccccgttgctcctctccctggttccgattcatgtcacccacgcaggtccagggcccttttggggacacgcaccatttggagtggtcctctgtgctgttgaagcttgggccggctggtccagggaaagctatctggttcacattcagaacctgccagatatccgagcagttagagggcaggatgcctacagttttgtgccagaactggacctgcaggttggtaccaagggctgctgccaaccagccggagtacaggtctgcaaaggatggagagagggcacaggtagggtcagggccactgcgagggagtccctagtccacttcccctctctcagctcagtttccatatttccttttttttttttttttttgacatggagtcttgctctgtcgcccaggctagagtgcattggtgcaatctaggctcattgcaacctctgcctccgaggttcaagtgattctcctgcctcagccttctgagtagctgggacta

SEQ ID NO: 1258 - DNA, 4059 bp, Homo sapiens
ccctgagctctggcgtccaggtcaaggacgcttggccccctccctgtcccgcagcaagaagcgcagctccctcttccggaagatcacgaagcagtcgaacctgctgcatactagccgctcgctgtcgtcgctgaaccgctcgctgtcatccagcgatagtctcccgggctcgcctacgcacgggctgccggcgcgctcgcccacgcacagctaccgctccacgcctgactccgcctacctaggtattacctcctgcacctgcgcggggaccgagcagcgcggggtggcctggctggtgcttgggctgtactcactcgcttcacctcctgtctcccgcaggcgcctcatcccagagcagctccccagcctcgagcacgcccaactcgcctgcgtcgtcggcgtcgcaccacattcggcccagcacgctgcacggactgtcgccaaagctccatcgccagtaccgctctgcgcgatgcaagtcggccggcaacatccctctatcgccgctggcacacacgccgtcccccacgcaggcgtcaccgccgccactgccgggccacacggtgggcagctcgcacactactcagagcttcccggccaaactgcactcatcgcctcccgtcgtgcgcccgcgccccaagagtgccgagccccctcgctcgccgctcctcaagcgcgtgcagtcggccgagaagctgggagcctctttgagtgcggacaagaagggcgcgctgcgcaaacacagcctcgaggtgggccacccggatttccgcaaggacttccatggcgagctggcgctgcatagccttgccgagtccgacggtgagacgcccccagtcgagggccttggcgcgccccggcaggtcgccgtccgccgcctgggccgacaggagtcacctttgagcctgggcgcggacccgttgctgcccgagggtgcctccaggccaccagtgtcgagcaaggagaaggaatccccggggggcgccgaggcgtgcaccccaccccgcgcgacgacccccggtggccggaccctggagcgggacgtcggctgcacgcggcatcagagcgtgcagacggaggatggcactggcgggatggccagggctgtggccaaggcggcgctgagcccggtgcaggaacacgagacaggccggcgcagcagctctggcgaggcgggcacacccctggtacccattgtcgtagagcctgcgcggcccggggctaaggctgtggtgcctcagcctctgggcgcggactccaaggggttgcaggaacccgcacccctggcgccttccgtgcccgaggccccccggggccgggagcgctgggtgttggaggtggtggaggagcgcaccacgctgagcggtcctcgctccaagcccgcctccccaaagctctccccggagccccagacaccctccctagccccagcgaagtgcagtgcacccagcagtgcagtgaccccagtcccacccgcatccctcttgggctcaggcaccaagcctcaagtggggctgacctcccggtgccctgctgaagctgtgcccccagcaggcctgaccaaaaaaggagtgtccagtcccgcacccccgggaccatagccaagggggtcatcggccccgcgctgtacagcctccgtatacatatgtacacatataaataaagtgcgtccgtgctgcgtgagttttctggggctcactcctctccaggcaaggcgagacatcacacgaccccacccccatgcccaggtgctttttgggaggtgggactccagttctggttaccatggagagtggagggaattttggatagacacctcctgtggtcccacttctggtctcacctctgcaccaactgcccccaaacctttagggggagaattgaagctgcgatgctcttgtgtcccagcgcccacctgaagagaaggttaacagcctcgtccaccaatttccatttatttactcctcaacaatcctgatggcaggtattatgtttcccattttgcagacaggtagactgtgtcacagagcggttaaggcacacaatcaaggtcatacagctaggaaggggatgaactgggattcaaaatcaagtccaaactggttcctgagcccttagattttttattttttatttttttgacacagagtctcattctgtcacccaggctgaagtgccgtggtgttagctcagctcatgacaacctctgcctcccgagttcaagcgattctcctgcctcagcctcccgaggagctaggaccacagacgcgtgccaccatgtctggctaatttttaaatatttttaatggatatggggtttcaccatgttggccaggctggtctcgaactcctgacctcaagtgatctgcccatctcagcctcccaaagtgctggggttacagatgtgagccactgcacccacccgtcccccgccccccctttttttttgaaacagagtcttgctatgtgacccaggttggcgtaatcatagttcactgtgaccatgatctccctggttcaatcgatcctctggcttcagtggctgggactacaggcatttatcaccgtgcctggctaactttttttaagttctagtagagatgtggtctcactatgtagcccaggctggtctcgaattcctgagttcaagtgatcctccctccttggcttcccaaagtgctgggattacatacgtgagccactgcacctggccataagggttagatcttataagctctgctgggcttcctggccatgccattacagggctggtagttcttcaccagcggctggaaggctttccagagggctggcagctgggcacacagtgtgcccccaccccgttgctcctctccctggttccgattcatgtcacccacgcaggtccagggcccttttggggacacgcaccatttggagtggtcctctgtgctgttgaagcttgggccggctggtccagggaaagctatctggttcacattcagaacctgccagatatccgagcagttagagggcaggatgcctacagttttgtgccagaactggacctgcaggttggtaccaagggctgctgccaaccagccggagtacaggtctgcaaaggatggagagagggcacaggtagggtcagggccactgcgagggagtccctagtccacttcccctctctcagctcagtttccatatttccttttttttttttttttttgacatggagtcttgctctgtcgcccaggctagagtgcattggtgcaatctaggctcattgcaacctctgcctccgaggttcaagtgattctcctgcctcagccttctgagtagctgggactacaggcatgcacaaccatacccggctaattttttaataaagaggggtttcaccatattgaccaggctggtctcaaactcctgatctcaagcaatccgcccacctcggtcttccaaaatgctgggactacaggtgtgtgtcaccgcgccctgccacagtttccatatttctgagctcagttgtcaattcccagtcctgggaatgatgacattaatattaattgcccttcccaaatttgtttttgagacagagtctcactctgtcgcccaggctggagtgcagtggtgtaatctcggcacactgcaacctctgcctcctggtttcaagcgattctcatgcctcagcctcctgagtagctgggattacaggtgcccgccaccacacccggctaatttttgtacttttagtagagatggggttccaccatgttggccaggctgttctcaaactcctgaccgtgtaatcagccagcgccctccaccatgcccagataatttttgtacttttagtagagatggagtttcaccatgttggccagactggtcttgaactcctgggctcaagtgacccacccgccttggtctcccaaaatgtggggattacaggtgagccaccgcgtccggccctgagtgtttttaattaattaacttatttattttgagactgggtctcattttgacaccccagctggagtgcagtggcaggatcatgactcacttgcagcctcgacc

SEQ ID NO: 1259 - DNA, 4051 bp, Homo sapiens
ttcatctcaaacataagtaagtaagtaagtaaataaataaataaataaataaataaataaaaatttaaaaaaagaaggcaggccccacgcagtgtaatcccagcactttgggaagccgaggagggcggatcacctgaggtcgggagttcaagaccagcctggccaacatggagaaacctcatcactactaaaaatacaacattagccgggcatggtggtgcatgcctgtaatcccagctactcgggaggctgatgcaggagaatcacttgaacccaggaggcggaggttgcagtgagccgagattgcaccattgcactccagcctgggtagcaagagcaaaactccttctcaaaaaaaaaaaaaaaaaaaaggcaattagagggtattgctccaggcctcccagcaagctcatctgcaatcaggaacaccctcagtttgcagcggggcttagagagggtgccagcagtgttagaaccacagctgagctcagtttttgcaggcataaattcttatagtccagaataacgccaagagtaatgtaaggtagggaaacaggccaggtgtggcggctcatgccggtaatcgcagcacattaagaggccaaggtgggtggattgcttgaaccaggacttagagaccagcctaggcaacatggcaaaagcccactctacaaaaatacaaaaagtaggccaggtgtggtggctcacgcctgtaatcccagcactttgggaggccaaggcaggtggatcacctgaggtcaggagttcaatatcagcctgtccaacctggtaaaaccccatctctactaaaacatacaacatttagctgggcatggtggcgcacacctgtaatcccagctactccagaggctgaggcagaagaatcgcttgaactggggagatggagattgcagtgagctgagattgcaccaccgaactccagcctgggtgatggagagagagtgccgcaaaaaaaaaaaaaaaaaaaaaaagccaggcgtggtggggggtaccggcaggcccagtacttgggaggctgaggtaggaggatcacctgagccctgggaggtcaaggctgcagtgagctgtgatactgcactccagcctaggtgactgggtgagaccttgtctaaaagaaaataaaataggggaaatagatgcccaaggtctgacaggggagatctcccaccccactatggaggtcaggggttagcttggaaaaatgcataggaactcggctgggcagggtggctcattcctgtaatcccagcactttgggaggccaaggcgggtagatcacttgaggtagaaaccaggagttcgagaccagcctggccaacatggtgaaacctcgtctgtactaaaaatatgaaaattagcctggtgtgatggtgcgcctttaataccagctacttgggaggctgagacaggagaattgcttcaaccccagaggcagagattgcagtgagccaagattgtgccactgcactccagcttgggtgacagagcgaactcccaccgtctcaaaaacaaagaaaaaaaaaagttggggggaatagatgcccagggtctgacagtgcagatctccccgaccaccccatgcacgtcaggggttaccttggaaaaatgggacccgagtctctccccagcccccaatccaggcctcacccttcgtgtgcccacgcatggaagagtcctgagccttgctgggttgaggcggttggtcattgtagagcaggaaggcgagctgcgggcggataaacggaggcaacgtgaaattcctcccaggcagggcagccctagagtttcgcccctagttggcccggggcccccttcacctggctggtgttgctccggtacagcggctgcaggcttcggcccacggccccctccgggctgttgatgagtgccctgccgtcccgccagcctccggagctctcgtccagatacttgtactgcagccctctctgcgccgcctccccggaccctctaagagctggcagcttgtagaccacgaacctggaggtcggagaatgcacagaaataggagagagggaagagaaggcaccccagggttccccgaggaggtagccatcccggttgagtgaccgcagccggaccccggggcgatggtaggccccccgctgcgcactcaccagtctacaggctgcccggagtccccgtagcaggtcagggccccggcggggacgcacagcagcgctgccagcagcagcgggatcatagctgctatggggctgagatccaggaatctgtgtcgggactgcggggcgctgggttacatcagaggccaggactggcacctggcgcctttcacttccctaaacttgcctgggaaccggggcggggacatcacgagggtacagactcctcccccgagacgcgatgctgcgttttggagaggcaaaaggcaacgctgagtctgcccagaccacgcccacgacgggcccggcgctccagcgtctcctggagcctggccaccgttccttttcgtggtagctaatcccagcccacgctcttctgtctgacccaactcccgcccgggtttctggatcaggcacaagtttgtattttattttttattccagccctacaacctgggtccaactcttgggacctttgttcttcctctttttttttttttttttttttttttttttttgagacggagtttcactcttgtcgcccaggctggagtgcaatggcacgatctcggttcactgcaacctccgccttcctgattaaagcgattatcctgcctcagcctcccgagtagctgggattacaggcgcccgacaccacgcccggctaatttttgtagttttagtagagacggggtttttccatgttgactaggctggtctcgaactcctgacctcgtgatccaccagcctcggcccccgaaagtgccaagattgcagaagtgagccactgcgccccttaagaagcatttgtgttccagtgtatcttcccctttttctttctttttttttttccttccttttttttttttttttttcccggacaatatctcgctctgttgcccaggccggagtgcagtggcgcaatcttggctcactgcaacctctgcctccccagctcaagtgatcctctcacctcagcctcccgagtagctgggatcacgggcacatgccactatgcccagctaatttttgtagttttttttttgaaacacggtttcaccatgtggctcaggctgaactcctgagctcaagggatccacctgtcttgcctcccaaagtgctgggattacaggcatgtaatccacgccacccagactctcctttttcattctgcacgttttctccaggatcccctgagctagcaaagaggtgactgtatgtttgttttttgtcgttttgagacaggataatggtttctcacccaggctagaatgcagtgactccatcacagttcactgcagcctcaacctactgggctcaagagatcttcccaggtagctggtactacaggcctgtgccaccacacccagataattgttcattgcagagatgagggtctcactatgttgcccaggctgctctggaactccggggttcaagtgattctcccacctcagcctcaaaggatcatggcagggcaaagggctatgggaatctgagtactggcttgaaactgcctttgcaaaaattatgacagaaaattatgtcagtgaaagagctctgacctaaccaactccatcttgcctttaatctccaaactgcccttgcttggtcattcctggagtggggtcaagctaactttttttttttttttgacacgttgtctcactctgtcgcccaggctggagtccagtggtgtgatctcagctcactgcaacatccgcctcctaggttcaagcaatcctcctgcctcagcttcctgagtagctgggattacaggcatgcgccacatgcccagctaatttttgtatttttggtagagactgggtttcaccatttttggtagagatggggtttcaccttggggctcaggctggtgtcgaactcct

SEQ ID NO: 1260 - DNA, 4041 bp, Homo sapiens
aaccagcctggccagcatttcgaaaccccatctcttctaaaaatacaaaaattagcccggcatggtggcatgtgcctgtaatcctagctacctggtaggctgacacaggagaatcacttgaacccaggaggcagaggttgcagtgagccaagatggaacaactgcactccagcctgggcaagagcaagactccatctcaaaaacaaaaacaaagatggccagccattattctggaggtcacaaggtttgcaacttccccagttatttctgcaaataacatgactattgcaaaacctaacgctggcctttttagatgtctttttaggctttttgcatatctgacaactggatgactccacccagactagcgactctatggtccccacccagaagctgactcagcaactgttttccacagctccaggattgcagcaaggcacccattccctagccctcctgcccaccaaactgttcttgaataaccctagcctctgaattttcagggaggctgattcaagtaataaaactcccatctcccatttagctggatgtatgtggattaaactctctctattgcaatccctctgtctcgataaattggctctatctggacagtgggcaagatgaaccccctgggcagtcataggctgtgaactcttaaatccagggagatgtttgctgtcaatgtccgcagggttcaaggcagaagacaaggacagtgtagcctgaactgggtgggaaaagagaggacagcaaggcctccagtgcccaagggggcttgttggagttgaggggtgtcactgtagtttaggagatgagggtgtgtaaggccctctaatatgacctctaggtttacagcctcctgccatcttccagcctccaaaacccaaaaattcaggccaacgctgaagctttatctgggaggggcatttttataggacccataaccattgacagttaatatcagccacaataagggaccttcaggagccgctttctagacccagggtctctgggaagcctcatcccacaccctctcctgctgtccagggccatctgggagctggtctgagtgtccactgagtccgtttatttggcggtctgtctcactgggtttgcacgacagtttggacatctctgtgtggctccctgtggctgaaggcttgtcggattttccgtaagaggctcccccagggctgtctatgggtccgtgtttgatatttgggtggatctttgggaacgcgagtccaggagagggtccattcgtgggaaaaccacccagcattgtgtcacgcgcgtccgtgtgaagagaccaccaaacaggcttcttgtcccatccccagtcactaggagagtccaagtgccagggcagggctcaaaggtggcgcttcatgtgcaaggccaggtggtcagagcgcgaaaaagcacgtgggcagagctggcagcggaaggggcgctgccccgtgtgtttccggtagtggcgggtcagctcgtccgagcgcgcgaatctccagccgcagccttcccacgtgcaggcgtatggcttctcccctaggggacaaggaagccataagcgccactgtctgcccagtcatgtccccgggtcccctgcatctggccacacccctttactcagcctgggctgggactaggatgaacaaagtgaggcccctagggcacaaaatttaaggaggcactcactctcagaggccagccaagtccaagtcccgccctctgcaacccttcttcccctgtaactacagcgggcgccgcgccctttctcatgtccggggccccgccccctcacctgtgtgcgtgcgcagatgcgccttcaggtgggagctcttggtgtagctcttgccgcaacccgggtgcgcgcacgtgtgcgctgcctgcctcttgcgcgcccacgaacgtcggcctcgcttggatggcgcggtctcggctatcacacctggatcctctgcagtccccccgagtccagtgcccaccgtcccgggtcccaaacaactcaggaaggagggggacgtggcgggaccgggcgcgggtccctggagcccgcggaagagctggaagtgcccttggtactgaggcgccgggtacatcgcggggtacccggacagtagcccgtagggggcgcccgacgccgcaggcactgaaagcccggtccgcgggaagtagccacccgaggagccggcgccgggccccgggtacaccggttgcagcgccagcgccttgggctcgggggccggggctggagccagggctgggcccacgaaggcgtcgggagcccgggctcgcagggcagggcgcacccaacccgagtgatcctccgaacccaaaagcccagccaccagccccgggccgccagcatatgcgcccagagtctcgggcggcggcggatattgcgccccggaggcctcgctgggcgccagagcgcaggtctggggcgcgccaccgggctccgggcccgagaagttggtgaggaggagatccaggtcccaggtggcgtccgcgcccctctcatcgtcctcttcctccccgggctggtcctcagacttcacgtggaggggcggctccgtggggtcaggaggacccgggcccatgtcctgcgcctcttcggagcgccaccactgcgggagggagcaggcagctcgaggttcggtggacactggggtgccctgcccagggacatcgcgggctggacactctgacgcagaggctttggaaaggggtcttgtttgcctgtctgtctgtcccacttccccaacactgcccctctaaccgcccctctccccgctccccccccagctccagggacagaaaccgatcaggtctggctggagacaggagataagacttccactatctggaaccacactcggggatgggggaaggggtagcagagctgctggagatggaaaactggcaggggacgggggagaggatgccagccttgacttagttttcccccagaacatccctctccttccctgtctcccaaaacaagattaattccgaaattttggatgtcccccagacacactcatcatttcccgctgatatctggaagattgtctgtgagcctagatctcgttcctttttttttttttttttcttgagatagggtcttactcttttgcccaggctggagtgcagtggtgcagctcactgtatccttaatctcctgggctctaatgatcctcctgcatcagcctacggagtacctgggactacaggcacacgcccccatgcctggcctaatgtttttggtattttttgtagagatagggtttcaccatgttgcccaggctaccttcgttttctattaccgaaatagatcacacttagaacctcaaacccctagaccaccctcctcaccccctgccagactaagctgagatctcctctcctggactgagcgtacctcagtcctggttaagtctcttgatttcaggtcaagatgcaggtctggaccccaagatctgtgactgtggccctggattccagccagcccacctagaccccaccttctaggccccaccttgaggaagtcatcctgtgtgtccgggaaggggcccagggcggtcagtgtgctgatggagggcaaggcggtctcggctgtggccatggctggctggtgcccaccctgggcctcaagcctcctcttcctcggctgcctcgtgaactctgaggctgtgatagccccttcgagggctcctctctgtccttagctgattggctgcagcctctgataaggcaaagcaaggcaaggcggcgggggggcactgtttctggggcacaaacttcacgttggcctgtctggggctggggttaaagactaaccctgtgtccaaagccaagtcaaatatcaagggttggggggttcagggtttgagggtccaggtgctgggtaaaaacagacattgggtctccaaagaaggagagacttgggggtcttccctcagttaactttcctggaaaaggcagaaagggtattctgggaagaagctgtgggaccccctgtccccctgattgagg

SEQ ID NO: 1261 - DNA, 4043 bp, Homo sapiens
ccagactagcgactctatggtccccacccagaagctgactcagcaactgttttccacagctccaggattgcagcaaggcacccattccctagccctcctgcccaccaaactgttcttgaataaccctagcctctgaattttcagggaggctgattcaagtaataaaactcccatctcccatttagctggatgtatgtggattaaactctctctattgcaatccctctgtctcgataaattggctctatctggacagtgggcaagatgaaccccctgggcagtcataggctgtgaactcttaaatccagggagatgtttgctgtcaatgtccgcagggttcaaggcagaagacaaggacagtgtagcctgaactgggtgggaaaagagaggacagcaaggcctccagtgcccaagggggcttgttggagttgaggggtgtcactgtagtttaggagatgagggtgtgtaaggccctctaatatgacctctaggtttacagcctcctgccatcttccagcctccaaaacccaaaaattcaggccaacgctgaagctttatctgggaggggcatttttataggacccataaccattgacagttaatatcagccacaataagggaccttcaggagccgctttctagacccagggtctctgggaagcctcatcccacaccctctcctgctgtccagggccatctgggagctggtctgagtgtccactgagtccgtttatttggcggtctgtctcactgggtttgcacgacagtttggacatctctgtgtggctccctgtggctgaaggcttgtcggattttccgtaagaggctcccccagggctgtctatgggtccgtgtttgatatttgggtggatctttgggaacgcgagtccaggagagggtccattcgtgggaaaaccacccagcattgtgtcacgcgcgtccgtgtgaagagaccaccaaacaggcttcttgtcccatccccagtcactaggagagtccaagtgccagggcagggctcaaaggtggcgcttcatgtgcaaggccaggtggtcagagcgcgaaaaagcacgtgggcagagctggcagcggaaggggcgctgccccgtgtgtttccggtagtggcgggtcagctcgtccgagcgcgcgaatctccagccgcagccttcccacgtgcaggcgtatggcttctcccctaggggacaaggaagccataagcgccactgtctgcccagtcatgtccccgggtcccctgcatctggccacacccctttactcagcctgggctgggactaggatgaacaaagtgaggcccctagggcacaaaatttaaggaggcactcactctcagaggccagccaagtccaagtcccgccctctgcaacccttcttcccctgtaactacagcgggcgccgcgccctttctcatgtccggggccccgccccctcacctgtgtgcgtgcgcagatgcgccttcaggtgggagctcttggtgtagctcttgccgcaacccgggtgcgcgcacgtgtgcgctgcctgcctcttgcgcgcccacgaacgtcggcctcgcttggatggcgcggtctcggctatcacacctggatcctctgcagtccccccgagtccagtgcccaccgtcccgggtcccaaacaactcaggaaggagggggacgtggcgggaccgggcgcgggtccctggagcccgcggaagagctggaagtgcccttggtactgaggcgccgggtacatcgcggggtacccggacagtagcccgtagggggcgcccgacgccgcaggcactgaaagcccggtccgcgggaagtagccacccgaggagccggcgccgggccccgggtacaccggttgcagcgccagcgccttgggctcgggggccggggctggagccagggctgggcccacgaaggcgtcgggagcccgggctcgcagggcagggcgcacccaacccgagtgatcctccgaacccaaaagcccagccaccagccccgggccgccagcatatgcgcccagagtctcgggcggcggcggatattgcgccccggaggcctcgctgggcgccagagcgcaggtctggggcgcgccaccgggctccgggcccgagaagttggtgaggaggagatccaggtcccaggtggcgtccgcgcccctctcatcgtcctcttcctccccgggctggtcctcagacttcacgtggaggggcggctccgtggggtcaggaggacccgggcccatgtcctgcgcctcttcggagcgccaccactgcgggagggagcaggcagctcgaggttcggtggacactggggtgccctgcccagggacatcgcgggctggacactctgacgcagaggctttggaaaggggtcttgtttgcctgtctgtctgtcccacttccccaacactgcccctctaaccgcccctctccccgctccccccccagctccagggacagaaaccgatcaggtctggctggagacaggagataagacttccactatctggaaccacactcggggatgggggaaggggtagcagagctgctggagatggaaaactggcaggggacgggggagaggatgccagccttgacttagttttcccccagaacatccctctccttccctgtctcccaaaacaagattaattccgaaattttggatgtcccccagacacactcatcatttcccgctgatatctggaagattgtctgtgagcctagatctcgttcctttttttttttttttttcttgagatagggtcttactcttttgcccaggctggagtgcagtggtgcagctcactgtatccttaatctcctgggctctaatgatcctcctgcatcagcctacggagtacctgggactacaggcacacgcccccatgcctggcctaatgtttttggtattttttgtagagatagggtttcaccatgttgcccaggctaccttcgttttctattaccgaaatagatcacacttagaacctcaaacccctagaccaccctcctcaccccctgccagactaagctgagatctcctctcctggactgagcgtacctcagtcctggttaagtctcttgatttcaggtcaagatgcaggtctggaccccaagatctgtgactgtggccctggattccagccagcccacctagaccccaccttctaggccccaccttgaggaagtcatcctgtgtgtccgggaaggggcccagggcggtcagtgtgctgatggagggcaaggcggtctcggctgtggccatggctggctggtgcccaccctgggcctcaagcctcctcttcctcggctgcctcgtgaactctgaggctgtgatagccccttcgagggctcctctctgtccttagctgattggctgcagcctctgataaggcaaagcaaggcaaggcggcgggggggcactgtttctggggcacaaacttcacgttggcctgtctggggctggggttaaagactaaccctgtgtccaaagccaagtcaaatatcaagggttggggggttcagggtttgagggtccaggtgctgggtaaaaacagacattgggtctccaaagaaggagagacttgggggtcttccctcagttaactttcctggaaaaggcagaaagggtattctgggaagaagctgtgggaccccctgtccccctgattgaggctccacagccctccccctccccagtaaacagcaacaaccgtgctgatggcgggacttggcacgagctccccgccaagcattatcagacaccccagacgttggaggctgctatcaggtgggggcccaggccagctagagctctgtcctccggtgaaggggagggctgggagttgggtcttcaaattagcctggcgttcaatttgcctgggttgggacctcccagggtctcagccctgcagcaggaggaagcccctgacaactggcccaccattgtctactggggacccttgggtggcactgcatgggactgcatggaggctggttcagtgccagctgctttagtgcgatgggggcagccaag

SEQ ID NO: 1262 - DNA, 4059 bp, Homo sapiens
accctctcctgctgtccagggccatctgggagctggtctgagtgtccactgagtccgtttatttggcggtctgtctcactgggtttgcacgacagtttggacatctctgtgtggctccctgtggctgaaggcttgtcggattttccgtaagaggctcccccagggctgtctatgggtccgtgtttgatatttgggtggatctttgggaacgcgagtccaggagagggtccattcgtgggaaaaccacccagcattgtgtcacgcgcgtccgtgtgaagagaccaccaaacaggcttcttgtcccatccccagtcactaggagagtccaagtgccagggcagggctcaaaggtggcgcttcatgtgcaaggccaggtggtcagagcgcgaaaaagcacgtgggcagagctggcagcggaaggggcgctgccccgtgtgtttccggtagtggcgggtcagctcgtccgagcgcgcgaatctccagccgcagccttcccacgtgcaggcgtatggcttctcccctaggggacaaggaagccataagcgccactgtctgcccagtcatgtccccgggtcccctgcatctggccacacccctttactcagcctgggctgggactaggatgaacaaagtgaggcccctagggcacaaaatttaaggaggcactcactctcagaggccagccaagtccaagtcccgccctctgcaacccttcttcccctgtaactacagcgggcgccgcgccctttctcatgtccggggccccgccccctcacctgtgtgcgtgcgcagatgcgccttcaggtgggagctcttggtgtagctcttgccgcaacccgggtgcgcgcacgtgtgcgctgcctgcctcttgcgcgcccacgaacgtcggcctcgcttggatggcgcggtctcggctatcacacctggatcctctgcagtccccccgagtccagtgcccaccgtcccgggtcccaaacaactcaggaaggagggggacgtggcgggaccgggcgcgggtccctggagcccgcggaagagctggaagtgcccttggtactgaggcgccgggtacatcgcggggtacccggacagtagcccgtagggggcgcccgacgccgcaggcactgaaagcccggtccgcgggaagtagccacccgaggagccggcgccgggccccgggtacaccggttgcagcgccagcgccttgggctcgggggccggggctggagccagggctgggcccacgaaggcgtcgggagcccgggctcgcagggcagggcgcacccaacccgagtgatcctccgaacccaaaagcccagccaccagccccgggccgccagcatatgcgcccagagtctcgggcggcggcggatattgcgccccggaggcctcgctgggcgccagagcgcaggtctggggcgcgccaccgggctccgggcccgagaagttggtgaggaggagatccaggtcccaggtggcgtccgcgcccctctcatcgtcctcttcctccccgggctggtcctcagacttcacgtggaggggcggctccgtggggtcaggaggacccgggcccatgtcctgcgcctcttcggagcgccaccactgcgggagggagcaggcagctcgaggttcggtggacactggggtgccctgcccagggacatcgcgggctggacactctgacgcagaggctttggaaaggggtcttgtttgcctgtctgtctgtcccacttccccaacactgcccctctaaccgcccctctccccgctccccccccagctccagggacagaaaccgatcaggtctggctggagacaggagataagacttccactatctggaaccacactcggggatgggggaaggggtagcagagctgctggagatggaaaactggcaggggacgggggagaggatgccagccttgacttagttttcccccagaacatccctctccttccctgtctcccaaaacaagattaattccgaaattttggatgtcccccagacacactcatcatttcccgctgatatctggaagattgtctgtgagcctagatctcgttcctttttttttttttttttcttgagatagggtcttactcttttgcccaggctggagtgcagtggtgcagctcactgtatccttaatctcctgggctctaatgatcctcctgcatcagcctacggagtacctgggactacaggcacacgcccccatgcctggcctaatgtttttggtattttttgtagagatagggtttcaccatgttgcccaggctaccttcgttttctattaccgaaatagatcacacttagaacctcaaacccctagaccaccctcctcaccccctgccagactaagctgagatctcctctcctggactgagcgtacctcagtcctggttaagtctcttgatttcaggtcaagatgcaggtctggaccccaagatctgtgactgtggccctggattccagccagcccacctagaccccaccttctaggccccaccttgaggaagtcatcctgtgtgtccgggaaggggcccagggcggtcagtgtgctgatggagggcaaggcggtctcggctgtggccatggctggctggtgcccaccctgggcctcaagcctcctcttcctcggctgcctcgtgaactctgaggctgtgatagccccttcgagggctcctctctgtccttagctgattggctgcagcctctgataaggcaaagcaaggcaaggcggcgggggggcactgtttctggggcacaaacttcacgttggcctgtctggggctggggttaaagactaaccctgtgtccaaagccaagtcaaatatcaagggttggggggttcagggtttgagggtccaggtgctgggtaaaaacagacattgggtctccaaagaaggagagacttgggggtcttccctcagttaactttcctggaaaaggcagaaagggtattctgggaagaagctgtgggaccccctgtccccctgattgaggctccacagccctccccctccccagtaaacagcaacaaccgtgctgatggcgggacttggcacgagctccccgccaagcattatcagacaccccagacgttggaggctgctatcaggtgggggcccaggccagctagagctctgtcctccggtgaaggggagggctgggagttgggtcttcaaattagcctggcgttcaatttgcctgggttgggacctcccagggtctcagccctgcagcaggaggaagcccctgacaactggcccaccattgtctactggggacccttgggtggcactgcatgggactgcatggaggctggttcagtgccagctgctttagtgcgatgggggcagccaagggaaaagtgaccctctctcctcctgggtgggataggaccgttggatcaagccacaggcagtacctgacctgcaggagaccagtgccctggctctgggcctggctgctccttgattctgcccaacatgaggagaggatctgagtttctacaacaggaacctccactctggtgccctgggagcctgggaaggggacatggatacgtattacagacacataactcatagtcactcattggaagactgaggcaggaggatcacttgacaccaggatttcaagaccagcctgggcaacataaaacctatctctccaacaaaaagctgtgagtggtggtgcatgcccatagtcccagctactcaggaggctgaggtgggaggattgcctgagcccaggaggtcgggactgcactgaactataatcacaccactgcagtccagcctggggcacagaaagcaagactctgtcgctggaaaaaaaaaaaagttgggtggccatctttattcctggcagatcaacctgggtgacacaaacaaaaacaaggccaggtgcggtggttcacacctgtaaccccagcactttgggaagccaaggtggggagatcacttgaggtcaggagttcgagaccagactggccaacaggatgaagccctctctctgctaaaaatacaaaaattagctgggcattgtgg

SEQ ID NO: 1263 - DNA, 4041 bp, Homo sapiens
ccaactggctaagtgtaaggacctctggtcgcaccgtgtgtctgctgcccctgttcagctgtctgtctgccgcaggtggactctgtcccagaatccgagagctgcccgagcggggtggcagggtcgtggccagggtcagaggcactaaggcagtgagtgcgctgtgcctgcggggccggagaaaagtcacctgatcagtctcgcttgcagctcgcactagccggggggcgacatgggtgttggggggtagggctgatgagggtccgagaagggagggcacagtgatcttgcggactggaccgaggcgaattccccttcccagcctcgcgtcccgagtttgactggcaggacccgctggtgctggaggagcagctgaccacagatgagatcctcatcagggacaccttccgcacctactgccaggagagactcatgcctcgcatcctgttggccaatcgcaacgaaggtgggcgggctggtgggtgccctgagactgctcctccgcctggagccatagccaccccacctcaaggcccctctgtccttggggctggggcttcctgtggcctaggcctgggcctgaatttgggcactggtccctttgcagtttttcatcgggagatcatttcggagatgggggagttgggtgtgctgggccccaccatcaaaggtaggaacaagtatctctccacacactgcagaaccctctgtattctgaaagcctcttcctccttccctccctccctttcttccttccttctctttcttttcttttccttttctttcctttcttcttcccccccaacagagtctggctctgttgcccaggctggagtgcagtggcacgatcttggctcactgcaaattctgcctcccaggctcaagcgattctcctgcctccacccctctagtagctgggattacaggtatgtgccaccatgcctggctaatttttgtatttttagtagagacagggtttcactgtgttggccaggctggtctcaaactcctgacctcaggtgatccgcccacctcagcctcctaaagtgctgggattacaggcatgagccaccacgttcagccttctttttgagatggagtttcgctcttgttgtccaggctggagtgcagtgatgcaatcttggctcactgcagcctccacctcccgggtttaagtgattatcctgcctcaggctcccgagtagctgggattacaggcgtccgccaccacgcctggctaatttttgtatttttagtagaggtggggtttcaccgtgttggccaggctagtctcgaactcctgacctcaggtgatccacccgcctcagcctcctgattacaggtgtgagccaccgttgcccggcccttttcttttttttttttttttgagatggagtttcgctctgtcacccagcctggattactggattacagtggtgcgatcctggctcactgcagtttcctcctcctaggttcaagcaattctgccacctcagccttctgagtagctgggattacaggggtgcaccaccacgcccagctaatttttgtattttttagtagaaatgggatttcaccatgttggccaggctggtcttgaactcctgacctcaggtgatccacccacctcggcctcccaaagtgctgggattataaacgtgagccaccgtgcctggcccctttgtttctttttttagagacagggtctcactgtgttgcccaggctgttctcaagtgatcctcttgccttactgaaagcccccttctttccctaagccacaatttcccagtctgtaaagtggggctgttgtcccaccctctgaaagtggctgtggagatgaaatgaataaacctcagctagggccagcttggtgcctgcctccttgtgtgtccttattcagccctgtctcttgggtcttagctgggcagggccctgttctctattgtcctgctttcccctcctactaccaccaggatatggctgtgctggggtttcgtctgtggcctatgggctcctggcccgagagctggagcgggtggacagtggctacaggtcggcgatgagtgtccagtcctccctcgtcatgcaccctatctatgcctatggcagcgaggaacagcggcagaagtacctgccccagctgggtgagtggctgcccatggggcctggtggaaggaagacagtctctgaggtctggaactcaagggtggggctgtcccctgagcctattctgtccctatctcaaagatagcataagtggccacctggacccccgccagaccctgggcttcacctggagatctgatccctggccagcctgactgtccccctctgtgaccaccgtcatctccctatgctttctgtgttccccagtccagcccaaagtttaaagtccaccaggttcctgctggccatttgcagtggctcacacctataatcccagcactttgggagggtgaagtgagaagatcccttgagcccaagagttcgaaaccagcctgggcaacgtaaggagaccccatgtctattagaaaaacaaaaaaaggaaagagcctatgtgacctgcgctaagtggacgttggccctcttccgtggtgtctcggaggtgttcagctgcttcaagatgaagctgaacatctccttcccagccactggctgccagaaactcattgaagtggacgatgaacgcaaactttgtactttttatgagaagcgtatggccacagaagttgctgttgacgctctgggtgaagaatggaagggttacgtggtcggaatcagtggtgggaacaataaacaaggtttccccttgaaacagggtgtcttgacccatggccgtgtccacttgctactgagtaaggggcattcctattacagaccaaggagaactggagaaagaaagagaagatcagttcatggttgcatcgtggatgccaatctgagtgttctcaacttggttattgtaaaaaaaaggagagaagggtattcctggactgactgagactatgatgcctcgtcacctggggcccagtacagctagcagaatccgtaaacttttcagtctctctaaagaaaatgatgtctgccagtatgttgtaaaaaagcccttaaacaaagaaggtaagaaacctaggaccaaagcacccaagattcagcgccttgtcactccacatgtcctgcagcacaaacagcggcgtattgctctgaagcagccgcatattaagaaaaataaagaagaggctgcagaatatgctaaacttttggccaagagaatgaaggaggctaagaagcaccagggacaaatcgtgaagagacgcagactgtcctctctgcgagcttccacttctaagtctgaatccagtcagaaataagattttttgagtaacaaataagatcagattcgcaaaaaaaaaaaaaaacccacaaggccctgtgtgaccaggcctctgctgacctttccacctcatctctggccactcatgtgatcctcccagccagacttagctacttgaaattctccagaagtaccaccagttctttacacatctgttccctctcccagcactgctcttccccacagcctcctcctgcttaactcctcacacccttccagtttggccaactccttcctgattccctgggtccccctccccatcttggcattgtgatcatgactttggggtaacctgtctcttgaaagcagggccagatctaacttagttatgaggtctgactcaggggcgagggtaattttttttttctttttttgagacaaagtcccgctccgtcccccaggctgaagtgcagtggtacaatcttggctcactgcaacctgcggttccccagttcaagcaattcctgtgcctcggcctcccaattagctgggattgcaggtgcttgctacccgtgcctggctaatttttgtatttttagtagagatggtgtttcactatgttggccaggctggtctcgaactccagacctcaagtgatccatctgccttggcctcccaaagtgctgagattacatgtgtgagccac

SEQ ID NO: 1264 - DNA, 4048 bp, Homo sapiens
cgtggccagggtcagaggcactaaggcagtgagtgcgctgtgcctgcggggccggagaaaagtcacctgatcagtctcgcttgcagctcgcactagccggggggcgacatgggtgttggggggtagggctgatgagggtccgagaagggagggcacagtgatcttgcggactggaccgaggcgaattccccttcccagcctcgcgtcccgagtttgactggcaggacccgctggtgctggaggagcagctgaccacagatgagatcctcatcagggacaccttccgcacctactgccaggagagactcatgcctcgcatcctgttggccaatcgcaacgaaggtgggcgggctggtgggtgccctgagactgctcctccgcctggagccatagccaccccacctcaaggcccctctgtccttggggctggggcttcctgtggcctaggcctgggcctgaatttgggcactggtccctttgcagtttttcatcgggagatcatttcggagatgggggagttgggtgtgctgggccccaccatcaaaggtaggaacaagtatctctccacacactgcagaaccctctgtattctgaaagcctcttcctccttccctccctccctttcttccttccttctctttcttttcttttccttttctttcctttcttcttcccccccaacagagtctggctctgttgcccaggctggagtgcagtggcacgatcttggctcactgcaaattctgcctcccaggctcaagcgattctcctgcctccacccctctagtagctgggattacaggtatgtgccaccatgcctggctaatttttgtatttttagtagagacagggtttcactgtgttggccaggctggtctcaaactcctgacctcaggtgatccgcccacctcagcctcctaaagtgctgggattacaggcatgagccaccacgttcagccttctttttgagatggagtttcgctcttgttgtccaggctggagtgcagtgatgcaatcttggctcactgcagcctccacctcccgggtttaagtgattatcctgcctcaggctcccgagtagctgggattacaggcgtccgccaccacgcctggctaatttttgtatttttagtagaggtggggtttcaccgtgttggccaggctagtctcgaactcctgacctcaggtgatccacccgcctcagcctcctgattacaggtgtgagccaccgttgcccggcccttttcttttttttttttttttgagatggagtttcgctctgtcacccagcctggattactggattacagtggtgcgatcctggctcactgcagtttcctcctcctaggttcaagcaattctgccacctcagccttctgagtagctgggattacaggggtgcaccaccacgcccagctaatttttgtattttttagtagaaatgggatttcaccatgttggccaggctggtcttgaactcctgacctcaggtgatccacccacctcggcctcccaaagtgctgggattataaacgtgagccaccgtgcctggcccctttgtttctttttttagagacagggtctcactgtgttgcccaggctgttctcaagtgatcctcttgccttactgaaagcccccttctttccctaagccacaatttcccagtctgtaaagtggggctgttgtcccaccctctgaaagtggctgtggagatgaaatgaataaacctcagctagggccagcttggtgcctgcctccttgtgtgtccttattcagccctgtctcttgggtcttagctgggcagggccctgttctctattgtcctgctttcccctcctactaccaccaggatatggctgtgctggggtttcgtctgtggcctatgggctcctggcccgagagctggagcgggtggacagtggctacaggtcggcgatgagtgtccagtcctccctcgtcatgcaccctatctatgcctatggcagcgaggaacagcggcagaagtacctgccccagctgggtgagtggctgcccatggggcctggtggaaggaagacagtctctgaggtctggaactcaagggtggggctgtcccctgagcctattctgtccctatctcaaagatagcataagtggccacctggacccccgccagaccctgggcttcacctggagatctgatccctggccagcctgactgtccccctctgtgaccaccgtcatctccctatgctttctgtgttccccagtccagcccaaagtttaaagtccaccaggttcctgctggccatttgcagtggctcacacctataatcccagcactttgggagggtgaagtgagaagatcccttgagcccaagagttcgaaaccagcctgggcaacgtaaggagaccccatgtctattagaaaaacaaaaaaaggaaagagcctatgtgacctgcgctaagtggacgttggccctcttccgtggtgtctcggaggtgttcagctgcttcaagatgaagctgaacatctccttcccagccactggctgccagaaactcattgaagtggacgatgaacgcaaactttgtactttttatgagaagcgtatggccacagaagttgctgttgacgctctgggtgaagaatggaagggttacgtggtcggaatcagtggtgggaacaataaacaaggtttccccttgaaacagggtgtcttgacccatggccgtgtccacttgctactgagtaaggggcattcctattacagaccaaggagaactggagaaagaaagagaagatcagttcatggttgcatcgtggatgccaatctgagtgttctcaacttggttattgtaaaaaaaaggagagaagggtattcctggactgactgagactatgatgcctcgtcacctggggcccagtacagctagcagaatccgtaaacttttcagtctctctaaagaaaatgatgtctgccagtatgttgtaaaaaagcccttaaacaaagaaggtaagaaacctaggaccaaagcacccaagattcagcgccttgtcactccacatgtcctgcagcacaaacagcggcgtattgctctgaagcagccgcatattaagaaaaataaagaagaggctgcagaatatgctaaacttttggccaagagaatgaaggaggctaagaagcaccagggacaaatcgtgaagagacgcagactgtcctctctgcgagcttccacttctaagtctgaatccagtcagaaataagattttttgagtaacaaataagatcagattcgcaaaaaaaaaaaaaaacccacaaggccctgtgtgaccaggcctctgctgacctttccacctcatctctggccactcatgtgatcctcccagccagacttagctacttgaaattctccagaagtaccaccagttctttacacatctgttccctctcccagcactgctcttccccacagcctcctcctgcttaactcctcacacccttccagtttggccaactccttcctgattccctgggtccccctccccatcttggcattgtgatcatgactttggggtaacctgtctcttgaaagcagggccagatctaacttagttatgaggtctgactcaggggcgagggtaattttttttttctttttttgagacaaagtcccgctccgtcccccaggctgaagtgcagtggtacaatcttggctcactgcaacctgcggttccccagttcaagcaattcctgtgcctcggcctcccaattagctgggattgcaggtgcttgctacccgtgcctggctaatttttgtatttttagtagagatggtgtttcactatgttggccaggctggtctcgaactccagacctcaagtgatccatctgccttggcctcccaaagtgctgagattacatgtgtgagccacctcgactggcctaattttttgtatttttagtagagatggggtttcaccatattggtcaggctggattttttttcttttttgagatggagtcttgctctgttgcccaggctgtagtgcagtggcatgatctt

SEQ ID NO: 1265 - DNA, 4042 bp, Homo sapiens
atttgggcactggtccctttgcagtttttcatcgggagatcatttcggagatgggggagttgggtgtgctgggccccaccatcaaaggtaggaacaagtatctctccacacactgcagaaccctctgtattctgaaagcctcttcctccttccctccctccctttcttccttccttctctttcttttcttttccttttctttcctttcttcttcccccccaacagagtctggctctgttgcccaggctggagtgcagtggcacgatcttggctcactgcaaattctgcctcccaggctcaagcgattctcctgcctccacccctctagtagctgggattacaggtatgtgccaccatgcctggctaatttttgtatttttagtagagacagggtttcactgtgttggccaggctggtctcaaactcctgacctcaggtgatccgcccacctcagcctcctaaagtgctgggattacaggcatgagccaccacgttcagccttctttttgagatggagtttcgctcttgttgtccaggctggagtgcagtgatgcaatcttggctcactgcagcctccacctcccgggtttaagtgattatcctgcctcaggctcccgagtagctgggattacaggcgtccgccaccacgcctggctaatttttgtatttttagtagaggtggggtttcaccgtgttggccaggctagtctcgaactcctgacctcaggtgatccacccgcctcagcctcctgattacaggtgtgagccaccgttgcccggcccttttcttttttttttttttttgagatggagtttcgctctgtcacccagcctggattactggattacagtggtgcgatcctggctcactgcagtttcctcctcctaggttcaagcaattctgccacctcagccttctgagtagctgggattacaggggtgcaccaccacgcccagctaatttttgtattttttagtagaaatgggatttcaccatgttggccaggctggtcttgaactcctgacctcaggtgatccacccacctcggcctcccaaagtgctgggattataaacgtgagccaccgtgcctggcccctttgtttctttttttagagacagggtctcactgtgttgcccaggctgttctcaagtgatcctcttgccttactgaaagcccccttctttccctaagccacaatttcccagtctgtaaagtggggctgttgtcccaccctctgaaagtggctgtggagatgaaatgaataaacctcagctagggccagcttggtgcctgcctccttgtgtgtccttattcagccctgtctcttgggtcttagctgggcagggccctgttctctattgtcctgctttcccctcctactaccaccaggatatggctgtgctggggtttcgtctgtggcctatgggctcctggcccgagagctggagcgggtggacagtggctacaggtcggcgatgagtgtccagtcctccctcgtcatgcaccctatctatgcctatggcagcgaggaacagcggcagaagtacctgccccagctgggtgagtggctgcccatggggcctggtggaaggaagacagtctctgaggtctggaactcaagggtggggctgtcccctgagcctattctgtccctatctcaaagatagcataagtggccacctggacccccgccagaccctgggcttcacctggagatctgatccctggccagcctgactgtccccctctgtgaccaccgtcatctccctatgctttctgtgttccccagtccagcccaaagtttaaagtccaccaggttcctgctggccatttgcagtggctcacacctataatcccagcactttgggagggtgaagtgagaagatcccttgagcccaagagttcgaaaccagcctgggcaacgtaaggagaccccatgtctattagaaaaacaaaaaaaggaaagagcctatgtgacctgcgctaagtggacgttggccctcttccgtggtgtctcggaggtgttcagctgcttcaagatgaagctgaacatctccttcccagccactggctgccagaaactcattgaagtggacgatgaacgcaaactttgtactttttatgagaagcgtatggccacagaagttgctgttgacgctctgggtgaagaatggaagggttacgtggtcggaatcagtggtgggaacaataaacaaggtttccccttgaaacagggtgtcttgacccatggccgtgtccacttgctactgagtaaggggcattcctattacagaccaaggagaactggagaaagaaagagaagatcagttcatggttgcatcgtggatgccaatctgagtgttctcaacttggttattgtaaaaaaaaggagagaagggtattcctggactgactgagactatgatgcctcgtcacctggggcccagtacagctagcagaatccgtaaacttttcagtctctctaaagaaaatgatgtctgccagtatgttgtaaaaaagcccttaaacaaagaaggtaagaaacctaggaccaaagcacccaagattcagcgccttgtcactccacatgtcctgcagcacaaacagcggcgtattgctctgaagcagccgcatattaagaaaaataaagaagaggctgcagaatatgctaaacttttggccaagagaatgaaggaggctaagaagcaccagggacaaatcgtgaagagacgcagactgtcctctctgcgagcttccacttctaagtctgaatccagtcagaaataagattttttgagtaacaaataagatcagattcgcaaaaaaaaaaaaaaacccacaaggccctgtgtgaccaggcctctgctgacctttccacctcatctctggccactcatgtgatcctcccagccagacttagctacttgaaattctccagaagtaccaccagttctttacacatctgttccctctcccagcactgctcttccccacagcctcctcctgcttaactcctcacacccttccagtttggccaactccttcctgattccctgggtccccctccccatcttggcattgtgatcatgactttggggtaacctgtctcttgaaagcagggccagatctaacttagttatgaggtctgactcaggggcgagggtaattttttttttctttttttgagacaaagtcccgctccgtcccccaggctgaagtgcagtggtacaatcttggctcactgcaacctgcggttccccagttcaagcaattcctgtgcctcggcctcccaattagctgggattgcaggtgcttgctacccgtgcctggctaatttttgtatttttagtagagatggtgtttcactatgttggccaggctggtctcgaactccagacctcaagtgatccatctgccttggcctcccaaagtgctgagattacatgtgtgagccacctcgactggcctaattttttgtatttttagtagagatggggtttcaccatattggtcaggctggattttttttcttttttgagatggagtcttgctctgttgcccaggctgtagtgcagtggcatgatcttggctcactgcaacctctcctgcccgggttcaagcgattctcctgcctcagtctcctgagtagctgggattacaggcacccaccaccacatctggctatttttttttttttttttttttaagtagagatggggtttcaccatgttggccaggctggtctggaactcctgacctcaattgatccacctgccttggcctcctaaagtgctgggatgacaggcgtgagccactgcaccccgccacgaggataatttttgagtaaggggatgtatcagggaccaggcagccttgtgactttgtcttgtgcctgcagccaagggggagctcctgggctgcttcgggctcacagagcccaacagcggaagtgaccccagcagcatggagaccagagcccactacaactcatccaacaagagctacaccctcaatgggaccaagacctggtaagggttctg

SEQ ID NO: 1266 - DNA, 4042 bp, Homo sapiens
ttgggcactggtccctttgcagtttttcatcgggagatcatttcggagatgggggagttgggtgtgctgggccccaccatcaaaggtaggaacaagtatctctccacacactgcagaaccctctgtattctgaaagcctcttcctccttccctccctccctttcttccttccttctctttcttttcttttccttttctttcctttcttcttcccccccaacagagtctggctctgttgcccaggctggagtgcagtggcacgatcttggctcactgcaaattctgcctcccaggctcaagcgattctcctgcctccacccctctagtagctgggattacaggtatgtgccaccatgcctggctaatttttgtatttttagtagagacagggtttcactgtgttggccaggctggtctcaaactcctgacctcaggtgatccgcccacctcagcctcctaaagtgctgggattacaggcatgagccaccacgttcagccttctttttgagatggagtttcgctcttgttgtccaggctggagtgcagtgatgcaatcttggctcactgcagcctccacctcccgggtttaagtgattatcctgcctcaggctcccgagtagctgggattacaggcgtccgccaccacgcctggctaatttttgtatttttagtagaggtggggtttcaccgtgttggccaggctagtctcgaactcctgacctcaggtgatccacccgcctcagcctcctgattacaggtgtgagccaccgttgcccggcccttttcttttttttttttttttgagatggagtttcgctctgtcacccagcctggattactggattacagtggtgcgatcctggctcactgcagtttcctcctcctaggttcaagcaattctgccacctcagccttctgagtagctgggattacaggggtgcaccaccacgcccagctaatttttgtattttttagtagaaatgggatttcaccatgttggccaggctggtcttgaactcctgacctcaggtgatccacccacctcggcctcccaaagtgctgggattataaacgtgagccaccgtgcctggcccctttgtttctttttttagagacagggtctcactgtgttgcccaggctgttctcaagtgatcctcttgccttactgaaagcccccttctttccctaagccacaatttcccagtctgtaaagtggggctgttgtcccaccctctgaaagtggctgtggagatgaaatgaataaacctcagctagggccagcttggtgcctgcctccttgtgtgtccttattcagccctgtctcttgggtcttagctgggcagggccctgttctctattgtcctgctttcccctcctactaccaccaggatatggctgtgctggggtttcgtctgtggcctatgggctcctggcccgagagctggagcgggtggacagtggctacaggtcggcgatgagtgtccagtcctccctcgtcatgcaccctatctatgcctatggcagcgaggaacagcggcagaagtacctgccccagctgggtgagtggctgcccatggggcctggtggaaggaagacagtctctgaggtctggaactcaagggtggggctgtcccctgagcctattctgtccctatctcaaagatagcataagtggccacctggacccccgccagaccctgggcttcacctggagatctgatccctggccagcctgactgtccccctctgtgaccaccgtcatctccctatgctttctgtgttccccagtccagcccaaagtttaaagtccaccaggttcctgctggccatttgcagtggctcacacctataatcccagcactttgggagggtgaagtgagaagatcccttgagcccaagagttcgaaaccagcctgggcaacgtaaggagaccccatgtctattagaaaaacaaaaaaaggaaagagcctatgtgacctgcgctaagtggacgttggccctcttccgtggtgtctcggaggtgttcagctgcttcaagatgaagctgaacatctccttcccagccactggctgccagaaactcattgaagtggacgatgaacgcaaactttgtactttttatgagaagcgtatggccacagaagttgctgttgacgctctgggtgaagaatggaagggttacgtggtcggaatcagtggtgggaacaataaacaaggtttccccttgaaacagggtgtcttgacccatggccgtgtccacttgctactgagtaaggggcattcctattacagaccaaggagaactggagaaagaaagagaagatcagttcatggttgcatcgtggatgccaatctgagtgttctcaacttggttattgtaaaaaaaaggagagaagggtattcctggactgactgagactatgatgcctcgtcacctggggcccagtacagctagcagaatccgtaaacttttcagtctctctaaagaaaatgatgtctgccagtatgttgtaaaaaagcccttaaacaaagaaggtaagaaacctaggaccaaagcacccaagattcagcgccttgtcactccacatgtcctgcagcacaaacagcggcgtattgctctgaagcagccgcatattaagaaaaataaagaagaggctgcagaatatgctaaacttttggccaagagaatgaaggaggctaagaagcaccagggacaaatcgtgaagagacgcagactgtcctctctgcgagcttccacttctaagtctgaatccagtcagaaataagattttttgagtaacaaataagatcagattcgcaaaaaaaaaaaaaaacccacaaggccctgtgtgaccaggcctctgctgacctttccacctcatctctggccactcatgtgatcctcccagccagacttagctacttgaaattctccagaagtaccaccagttctttacacatctgttccctctcccagcactgctcttccccacagcctcctcctgcttaactcctcacacccttccagtttggccaactccttcctgattccctgggtccccctccccatcttggcattgtgatcatgactttggggtaacctgtctcttgaaagcagggccagatctaacttagttatgaggtctgactcaggggcgagggtaattttttttttctttttttgagacaaagtcccgctccgtcccccaggctgaagtgcagtggtacaatcttggctcactgcaacctgcggttccccagttcaagcaattcctgtgcctcggcctcccaattagctgggattgcaggtgcttgctacccgtgcctggctaatttttgtatttttagtagagatggtgtttcactatgttggccaggctggtctcgaactccagacctcaagtgatccatctgccttggcctcccaaagtgctgagattacatgtgtgagccacctcgactggcctaattttttgtatttttagtagagatggggtttcaccatattggtcaggctggattttttttcttttttgagatggagtcttgctctgttgcccaggctgtagtgcagtggcatgatcttggctcactgcaacctctcctgcccgggttcaagcgattctcctgcctcagtctcctgagtagctgggattacaggcacccaccaccacatctggctatttttttttttttttttttttaagtagagatggggtttcaccatgttggccaggctggtctggaactcctgacctcaattgatccacctgccttggcctcctaaagtgctgggatgacaggcgtgagccactgcaccccgccacgaggataatttttgagtaaggggatgtatcagggaccaggcagccttgtgactttgtcttgtgcctgcagccaagggggagctcctgggctgcttcgggctcacagagcccaacagcggaagtgaccccagcagcatggagaccagagcccactacaactcatccaacaagagctacaccctcaatgggaccaagacctggtaagggttctggg

SEQ ID NO: 1267 - DNA, 4041 bp, Homo sapiens
tgggcactggtccctttgcagtttttcatcgggagatcatttcggagatgggggagttgggtgtgctgggccccaccatcaaaggtaggaacaagtatctctccacacactgcagaaccctctgtattctgaaagcctcttcctccttccctccctccctttcttccttccttctctttcttttcttttccttttctttcctttcttcttcccccccaacagagtctggctctgttgcccaggctggagtgcagtggcacgatcttggctcactgcaaattctgcctcccaggctcaagcgattctcctgcctccacccctctagtagctgggattacaggtatgtgccaccatgcctggctaatttttgtatttttagtagagacagggtttcactgtgttggccaggctggtctcaaactcctgacctcaggtgatccgcccacctcagcctcctaaagtgctgggattacaggcatgagccaccacgttcagccttctttttgagatggagtttcgctcttgttgtccaggctggagtgcagtgatgcaatcttggctcactgcagcctccacctcccgggtttaagtgattatcctgcctcaggctcccgagtagctgggattacaggcgtccgccaccacgcctggctaatttttgtatttttagtagaggtggggtttcaccgtgttggccaggctagtctcgaactcctgacctcaggtgatccacccgcctcagcctcctgattacaggtgtgagccaccgttgcccggcccttttcttttttttttttttttgagatggagtttcgctctgtcacccagcctggattactggattacagtggtgcgatcctggctcactgcagtttcctcctcctaggttcaagcaattctgccacctcagccttctgagtagctgggattacaggggtgcaccaccacgcccagctaatttttgtattttttagtagaaatgggatttcaccatgttggccaggctggtcttgaactcctgacctcaggtgatccacccacctcggcctcccaaagtgctgggattataaacgtgagccaccgtgcctggcccctttgtttctttttttagagacagggtctcactgtgttgcccaggctgttctcaagtgatcctcttgccttactgaaagcccccttctttccctaagccacaatttcccagtctgtaaagtggggctgttgtcccaccctctgaaagtggctgtggagatgaaatgaataaacctcagctagggccagcttggtgcctgcctccttgtgtgtccttattcagccctgtctcttgggtcttagctgggcagggccctgttctctattgtcctgctttcccctcctactaccaccaggatatggctgtgctggggtttcgtctgtggcctatgggctcctggcccgagagctggagcgggtggacagtggctacaggtcggcgatgagtgtccagtcctccctcgtcatgcaccctatctatgcctatggcagcgaggaacagcggcagaagtacctgccccagctgggtgagtggctgcccatggggcctggtggaaggaagacagtctctgaggtctggaactcaagggtggggctgtcccctgagcctattctgtccctatctcaaagatagcataagtggccacctggacccccgccagaccctgggcttcacctggagatctgatccctggccagcctgactgtccccctctgtgaccaccgtcatctccctatgctttctgtgttccccagtccagcccaaagtttaaagtccaccaggttcctgctggccatttgcagtggctcacacctataatcccagcactttgggagggtgaagtgagaagatcccttgagcccaagagttcgaaaccagcctgggcaacgtaaggagaccccatgtctattagaaaaacaaaaaaaggaaagagcctatgtgacctgcgctaagtggacgttggccctcttccgtggtgtctcggaggtgttcagctgcttcaagatgaagctgaacatctccttcccagccactggctgccagaaactcattgaagtggacgatgaacgcaaactttgtactttttatgagaagcgtatggccacagaagttgctgttgacgctctgggtgaagaatggaagggttacgtggtcggaatcagtggtgggaacaataaacaaggtttccccttgaaacagggtgtcttgacccatggccgtgtccacttgctactgagtaaggggcattcctattacagaccaaggagaactggagaaagaaagagaagatcagttcatggttgcatcgtggatgccaatctgagtgttctcaacttggttattgtaaaaaaaaggagagaagggtattcctggactgactgagactatgatgcctcgtcacctggggcccagtacagctagcagaatccgtaaacttttcagtctctctaaagaaaatgatgtctgccagtatgttgtaaaaaagcccttaaacaaagaaggtaagaaacctaggaccaaagcacccaagattcagcgccttgtcactccacatgtcctgcagcacaaacagcggcgtattgctctgaagcagccgcatattaagaaaaataaagaagaggctgcagaatatgctaaacttttggccaagagaatgaaggaggctaagaagcaccagggacaaatcgtgaagagacgcagactgtcctctctgcgagcttccacttctaagtctgaatccagtcagaaataagattttttgagtaacaaataagatcagattcgcaaaaaaaaaaaaaaacccacaaggccctgtgtgaccaggcctctgctgacctttccacctcatctctggccactcatgtgatcctcccagccagacttagctacttgaaattctccagaagtaccaccagttctttacacatctgttccctctcccagcactgctcttccccacagcctcctcctgcttaactcctcacacccttccagtttggccaactccttcctgattccctgggtccccctccccatcttggcattgtgatcatgactttggggtaacctgtctcttgaaagcagggccagatctaacttagttatgaggtctgactcaggggcgagggtaattttttttttctttttttgagacaaagtcccgctccgtcccccaggctgaagtgcagtggtacaatcttggctcactgcaacctgcggttccccagttcaagcaattcctgtgcctcggcctcccaattagctgggattgcaggtgcttgctacccgtgcctggctaatttttgtatttttagtagagatggtgtttcactatgttggccaggctggtctcgaactccagacctcaagtgatccatctgccttggcctcccaaagtgctgagattacatgtgtgagccacctcgactggcctaattttttgtatttttagtagagatggggtttcaccatattggtcaggctggattttttttcttttttgagatggagtcttgctctgttgcccaggctgtagtgcagtggcatgatcttggctcactgcaacctctcctgcccgggttcaagcgattctcctgcctcagtctcctgagtagctgggattacaggcacccaccaccacatctggctatttttttttttttttttttttaagtagagatggggtttcaccatgttggccaggctggtctggaactcctgacctcaattgatccacctgccttggcctcctaaagtgctgggatgacaggcgtgagccactgcaccccgccacgaggataatttttgagtaaggggatgtatcagggaccaggcagccttgtgactttgtcttgtgcctgcagccaagggggagctcctgggctgcttcgggctcacagagcccaacagcggaagtgaccccagcagcatggagaccagagcccactacaactcatccaacaagagctacaccctcaatgggaccaagacctggtaagggttctggg

SEQ ID NO: 1268 - DNA, 4046 bp, Homo sapiens
ttcatcgggagatcatttcggagatgggggagttgggtgtgctgggccccaccatcaaaggtaggaacaagtatctctccacacactgcagaaccctctgtattctgaaagcctcttcctccttccctccctccctttcttccttccttctctttcttttcttttccttttctttcctttcttcttcccccccaacagagtctggctctgttgcccaggctggagtgcagtggcacgatcttggctcactgcaaattctgcctcccaggctcaagcgattctcctgcctccacccctctagtagctgggattacaggtatgtgccaccatgcctggctaatttttgtatttttagtagagacagggtttcactgtgttggccaggctggtctcaaactcctgacctcaggtgatccgcccacctcagcctcctaaagtgctgggattacaggcatgagccaccacgttcagccttctttttgagatggagtttcgctcttgttgtccaggctggagtgcagtgatgcaatcttggctcactgcagcctccacctcccgggtttaagtgattatcctgcctcaggctcccgagtagctgggattacaggcgtccgccaccacgcctggctaatttttgtatttttagtagaggtggggtttcaccgtgttggccaggctagtctcgaactcctgacctcaggtgatccacccgcctcagcctcctgattacaggtgtgagccaccgttgcccggcccttttcttttttttttttttttgagatggagtttcgctctgtcacccagcctggattactggattacagtggtgcgatcctggctcactgcagtttcctcctcctaggttcaagcaattctgccacctcagccttctgagtagctgggattacaggggtgcaccaccacgcccagctaatttttgtattttttagtagaaatgggatttcaccatgttggccaggctggtcttgaactcctgacctcaggtgatccacccacctcggcctcccaaagtgctgggattataaacgtgagccaccgtgcctggcccctttgtttctttttttagagacagggtctcactgtgttgcccaggctgttctcaagtgatcctcttgccttactgaaagcccccttctttccctaagccacaatttcccagtctgtaaagtggggctgttgtcccaccctctgaaagtggctgtggagatgaaatgaataaacctcagctagggccagcttggtgcctgcctccttgtgtgtccttattcagccctgtctcttgggtcttagctgggcagggccctgttctctattgtcctgctttcccctcctactaccaccaggatatggctgtgctggggtttcgtctgtggcctatgggctcctggcccgagagctggagcgggtggacagtggctacaggtcggcgatgagtgtccagtcctccctcgtcatgcaccctatctatgcctatggcagcgaggaacagcggcagaagtacctgccccagctgggtgagtggctgcccatggggcctggtggaaggaagacagtctctgaggtctggaactcaagggtggggctgtcccctgagcctattctgtccctatctcaaagatagcataagtggccacctggacccccgccagaccctgggcttcacctggagatctgatccctggccagcctgactgtccccctctgtgaccaccgtcatctccctatgctttctgtgttccccagtccagcccaaagtttaaagtccaccaggttcctgctggccatttgcagtggctcacacctataatcccagcactttgggagggtgaagtgagaagatcccttgagcccaagagttcgaaaccagcctgggcaacgtaaggagaccccatgtctattagaaaaacaaaaaaaggaaagagcctatgtgacctgcgctaagtggacgttggccctcttccgtggtgtctcggaggtgttcagctgcttcaagatgaagctgaacatctccttcccagccactggctgccagaaactcattgaagtggacgatgaacgcaaactttgtactttttatgagaagcgtatggccacagaagttgctgttgacgctctgggtgaagaatggaagggttacgtggtcggaatcagtggtgggaacaataaacaaggtttccccttgaaacagggtgtcttgacccatggccgtgtccacttgctactgagtaaggggcattcctattacagaccaaggagaactggagaaagaaagagaagatcagttcatggttgcatcgtggatgccaatctgagtgttctcaacttggttattgtaaaaaaaaggagagaagggtattcctggactgactgagactatgatgcctcgtcacctggggcccagtacagctagcagaatccgtaaacttttcagtctctctaaagaaaatgatgtctgccagtatgttgtaaaaaagcccttaaacaaagaaggtaagaaacctaggaccaaagcacccaagattcagcgccttgtcactccacatgtcctgcagcacaaacagcggcgtattgctctgaagcagccgcatattaagaaaaataaagaagaggctgcagaatatgctaaacttttggccaagagaatgaaggaggctaagaagcaccagggacaaatcgtgaagagacgcagactgtcctctctgcgagcttccacttctaagtctgaatccagtcagaaataagattttttgagtaacaaataagatcagattcgcaaaaaaaaaaaaaaacccacaaggccctgtgtgaccaggcctctgctgacctttccacctcatctctggccactcatgtgatcctcccagccagacttagctacttgaaattctccagaagtaccaccagttctttacacatctgttccctctcccagcactgctcttccccacagcctcctcctgcttaactcctcacacccttccagtttggccaactccttcctgattccctgggtccccctccccatcttggcattgtgatcatgactttggggtaacctgtctcttgaaagcagggccagatctaacttagttatgaggtctgactcaggggcgagggtaattttttttttctttttttgagacaaagtcccgctccgtcccccaggctgaagtgcagtggtacaatcttggctcactgcaacctgcggttccccagttcaagcaattcctgtgcctcggcctcccaattagctgggattgcaggtgcttgctacccgtgcctggctaatttttgtatttttagtagagatggtgtttcactatgttggccaggctggtctcgaactccagacctcaagtgatccatctgccttggcctcccaaagtgctgagattacatgtgtgagccacctcgactggcctaattttttgtatttttagtagagatggggtttcaccatattggtcaggctggattttttttcttttttgagatggagtcttgctctgttgcccaggctgtagtgcagtggcatgatcttggctcactgcaacctctcctgcccgggttcaagcgattctcctgcctcagtctcctgagtagctgggattacaggcacccaccaccacatctggctatttttttttttttttttttttaagtagagatggggtttcaccatgttggccaggctggtctggaactcctgacctcaattgatccacctgccttggcctcctaaagtgctgggatgacaggcgtgagccactgcaccccgccacgaggataatttttgagtaaggggatgtatcagggaccaggcagccttgtgactttgtcttgtgcctgcagccaagggggagctcctgggctgcttcgggctcacagagcccaacagcggaagtgaccccagcagcatggagaccagagcccactacaactcatccaacaagagctacaccctcaatgggaccaagacctggtaagggttctgggtggtgggcaggtggtgaacaggggcaaag

SEQ ID NO: 1269 - DNA, 4023 bp, Homo sapiens
cccaccatcaaaggtaggaacaagtatctctccacacactgcagaaccctctgtattctgaaagcctcttcctccttccctccctccctttcttccttccttctctttcttttcttttccttttctttcctttcttcttcccccccaacagagtctggctctgttgcccaggctggagtgcagtggcacgatcttggctcactgcaaattctgcctcccaggctcaagcgattctcctgcctccacccctctagtagctgggattacaggtatgtgccaccatgcctggctaatttttgtatttttagtagagacagggtttcactgtgttggccaggctggtctcaaactcctgacctcaggtgatccgcccacctcagcctcctaaagtgctgggattacaggcatgagccaccacgttcagccttctttttgagatggagtttcgctcttgttgtccaggctggagtgcagtgatgcaatcttggctcactgcagcctccacctcccgggtttaagtgattatcctgcctcaggctcccgagtagctgggattacaggcgtccgccaccacgcctggctaatttttgtatttttagtagaggtggggtttcaccgtgttggccaggctagtctcgaactcctgacctcaggtgatccacccgcctcagcctcctgattacaggtgtgagccaccgttgcccggcccttttcttttttttttttttttgagatggagtttcgctctgtcacccagcctggattactggattacagtggtgcgatcctggctcactgcagtttcctcctcctaggttcaagcaattctgccacctcagccttctgagtagctgggattacaggggtgcaccaccacgcccagctaatttttgtattttttagtagaaatgggatttcaccatgttggccaggctggtcttgaactcctgacctcaggtgatccacccacctcggcctcccaaagtgctgggattataaacgtgagccaccgtgcctggcccctttgtttctttttttagagacagggtctcactgtgttgcccaggctgttctcaagtgatcctcttgccttactgaaagcccccttctttccctaagccacaatttcccagtctgtaaagtggggctgttgtcccaccctctgaaagtggctgtggagatgaaatgaataaacctcagctagggccagcttggtgcctgcctccttgtgtgtccttattcagccctgtctcttgggtcttagctgggcagggccctgttctctattgtcctgctttcccctcctactaccaccaggatatggctgtgctggggtttcgtctgtggcctatgggctcctggcccgagagctggagcgggtggacagtggctacaggtcggcgatgagtgtccagtcctccctcgtcatgcaccctatctatgcctatggcagcgaggaacagcggcagaagtacctgccccagctgggtgagtggctgcccatggggcctggtggaaggaagacagtctctgaggtctggaactcaagggtggggctgtcccctgagcctattctgtccctatctcaaagatagcataagtggccacctggacccccgccagaccctgggcttcacctggagatctgatccctggccagcctgactgtccccctctgtgaccaccgtcatctccctatgctttctgtgttccccagtccagcccaaagtttaaagtccaccaggttcctgctggccatttgcagtggctcacacctataatcccagcactttgggagggtgaagtgagaagatcccttgagcccaagagttcgaaaccagcctgggcaacgtaaggagaccccatgtctattagaaaaacaaaaaaaggaaagagcctatgtgacctgcgctaagtggacgttggccctcttccgtggtgtctcggaggtgttcagctgcttcaagatgaagctgaacatctccttcccagccactggctgccagaaactcattgaagtggacgatgaacgcaaactttgtactttttatgagaagcgtatggccacagaagttgctgttgacgctctgggtgaagaatggaagggttacgtggtcggaatcagtggtgggaacaataaacaaggtttccccttgaaacagggtgtcttgacccatggccgtgtccacttgctactgagtaaggggcattcctattacagaccaaggagaactggagaaagaaagagaagatcagttcatggttgcatcgtggatgccaatctgagtgttctcaacttggttattgtaaaaaaaaggagagaagggtattcctggactgactgagactatgatgcctcgtcacctggggcccagtacagctagcagaatccgtaaacttttcagtctctctaaagaaaatgatgtctgccagtatgttgtaaaaaagcccttaaacaaagaaggtaagaaacctaggaccaaagcacccaagattcagcgccttgtcactccacatgtcctgcagcacaaacagcggcgtattgctctgaagcagccgcatattaagaaaaataaagaagaggctgcagaatatgctaaacttttggccaagagaatgaaggaggctaagaagcaccagggacaaatcgtgaagagacgcagactgtcctctctgcgagcttccacttctaagtctgaatccagtcagaaataagattttttgagtaacaaataagatcagattcgcaaaaaaaaaaaaaaacccacaaggccctgtgtgaccaggcctctgctgacctttccacctcatctctggccactcatgtgatcctcccagccagacttagctacttgaaattctccagaagtaccaccagttctttacacatctgttccctctcccagcactgctcttccccacagcctcctcctgcttaactcctcacacccttccagtttggccaactccttcctgattccctgggtccccctccccatcttggcattgtgatcatgactttggggtaacctgtctcttgaaagcagggccagatctaacttagttatgaggtctgactcaggggcgagggtaattttttttttctttttttgagacaaagtcccgctccgtcccccaggctgaagtgcagtggtacaatcttggctcactgcaacctgcggttccccagttcaagcaattcctgtgcctcggcctcccaattagctgggattgcaggtgcttgctacccgtgcctggctaatttttgtatttttagtagagatggtgtttcactatgttggccaggctggtctcgaactccagacctcaagtgatccatctgccttggcctcccaaagtgctgagattacatgtgtgagccacctcgactggcctaattttttgtatttttagtagagatggggtttcaccatattggtcaggctggattttttttcttttttgagatggagtcttgctctgttgcccaggctgtagtgcagtggcatgatcttggctcactgcaacctctcctgcccgggttcaagcgattctcctgcctcagtctcctgagtagctgggattacaggcacccaccaccacatctggctatttttttttttttttttttttaagtagagatggggtttcaccatgttggccaggctggtctggaactcctgacctcaattgatccacctgccttggcctcctaaagtgctgggatgacaggcgtgagccactgcaccccgccacgaggataatttttgagtaaggggatgtatcagggaccaggcagccttgtgactttgtcttgtgcctgcagccaagggggagctcctgggctgcttcgggctcacagagcccaacagcggaagtgaccccagcagcatggagaccagagcccactacaactcatccaacaagagctacaccctcaatgggaccaagacctggtaagggttctgggtggtgggcaggtggtgaacaggggcaaaggggcactggtcagacccctcaccg

SEQ ID NO: 1270 - DNA, 4041 bp, Homo sapiens
attctgaaagcctcttcctccttccctccctccctttcttccttccttctctttcttttcttttccttttctttcctttcttcttcccccccaacagagtctggctctgttgcccaggctggagtgcagtggcacgatcttggctcactgcaaattctgcctcccaggctcaagcgattctcctgcctccacccctctagtagctgggattacaggtatgtgccaccatgcctggctaatttttgtatttttagtagagacagggtttcactgtgttggccaggctggtctcaaactcctgacctcaggtgatccgcccacctcagcctcctaaagtgctgggattacaggcatgagccaccacgttcagccttctttttgagatggagtttcgctcttgttgtccaggctggagtgcagtgatgcaatcttggctcactgcagcctccacctcccgggtttaagtgattatcctgcctcaggctcccgagtagctgggattacaggcgtccgccaccacgcctggctaatttttgtatttttagtagaggtggggtttcaccgtgttggccaggctagtctcgaactcctgacctcaggtgatccacccgcctcagcctcctgattacaggtgtgagccaccgttgcccggcccttttcttttttttttttttttgagatggagtttcgctctgtcacccagcctggattactggattacagtggtgcgatcctggctcactgcagtttcctcctcctaggttcaagcaattctgccacctcagccttctgagtagctgggattacaggggtgcaccaccacgcccagctaatttttgtattttttagtagaaatgggatttcaccatgttggccaggctggtcttgaactcctgacctcaggtgatccacccacctcggcctcccaaagtgctgggattataaacgtgagccaccgtgcctggcccctttgtttctttttttagagacagggtctcactgtgttgcccaggctgttctcaagtgatcctcttgccttactgaaagcccccttctttccctaagccacaatttcccagtctgtaaagtggggctgttgtcccaccctctgaaagtggctgtggagatgaaatgaataaacctcagctagggccagcttggtgcctgcctccttgtgtgtccttattcagccctgtctcttgggtcttagctgggcagggccctgttctctattgtcctgctttcccctcctactaccaccaggatatggctgtgctggggtttcgtctgtggcctatgggctcctggcccgagagctggagcgggtggacagtggctacaggtcggcgatgagtgtccagtcctccctcgtcatgcaccctatctatgcctatggcagcgaggaacagcggcagaagtacctgccccagctgggtgagtggctgcccatggggcctggtggaaggaagacagtctctgaggtctggaactcaagggtggggctgtcccctgagcctattctgtccctatctcaaagatagcataagtggccacctggacccccgccagaccctgggcttcacctggagatctgatccctggccagcctgactgtccccctctgtgaccaccgtcatctccctatgctttctgtgttccccagtccagcccaaagtttaaagtccaccaggttcctgctggccatttgcagtggctcacacctataatcccagcactttgggagggtgaagtgagaagatcccttgagcccaagagttcgaaaccagcctgggcaacgtaaggagaccccatgtctattagaaaaacaaaaaaaggaaagagcctatgtgacctgcgctaagtggacgttggccctcttccgtggtgtctcggaggtgttcagctgcttcaagatgaagctgaacatctccttcccagccactggctgccagaaactcattgaagtggacgatgaacgcaaactttgtactttttatgagaagcgtatggccacagaagttgctgttgacgctctgggtgaagaatggaagggttacgtggtcggaatcagtggtgggaacaataaacaaggtttccccttgaaacagggtgtcttgacccatggccgtgtccacttgctactgagtaaggggcattcctattacagaccaaggagaactggagaaagaaagagaagatcagttcatggttgcatcgtggatgccaatctgagtgttctcaacttggttattgtaaaaaaaaggagagaagggtattcctggactgactgagactatgatgcctcgtcacctggggcccagtacagctagcagaatccgtaaacttttcagtctctctaaagaaaatgatgtctgccagtatgttgtaaaaaagcccttaaacaaagaaggtaagaaacctaggaccaaagcacccaagattcagcgccttgtcactccacatgtcctgcagcacaaacagcggcgtattgctctgaagcagccgcatattaagaaaaataaagaagaggctgcagaatatgctaaacttttggccaagagaatgaaggaggctaagaagcaccagggacaaatcgtgaagagacgcagactgtcctctctgcgagcttccacttctaagtctgaatccagtcagaaataagattttttgagtaacaaataagatcagattcgcaaaaaaaaaaaaaaacccacaaggccctgtgtgaccaggcctctgctgacctttccacctcatctctggccactcatgtgatcctcccagccagacttagctacttgaaattctccagaagtaccaccagttctttacacatctgttccctctcccagcactgctcttccccacagcctcctcctgcttaactcctcacacccttccagtttggccaactccttcctgattccctgggtccccctccccatcttggcattgtgatcatgactttggggtaacctgtctcttgaaagcagggccagatctaacttagttatgaggtctgactcaggggcgagggtaattttttttttctttttttgagacaaagtcccgctccgtcccccaggctgaagtgcagtggtacaatcttggctcactgcaacctgcggttccccagttcaagcaattcctgtgcctcggcctcccaattagctgggattgcaggtgcttgctacccgtgcctggctaatttttgtatttttagtagagatggtgtttcactatgttggccaggctggtctcgaactccagacctcaagtgatccatctgccttggcctcccaaagtgctgagattacatgtgtgagccacctcgactggcctaattttttgtatttttagtagagatggggtttcaccatattggtcaggctggattttttttcttttttgagatggagtcttgctctgttgcccaggctgtagtgcagtggcatgatcttggctcactgcaacctctcctgcccgggttcaagcgattctcctgcctcagtctcctgagtagctgggattacaggcacccaccaccacatctggctatttttttttttttttttttttaagtagagatggggtttcaccatgttggccaggctggtctggaactcctgacctcaattgatccacctgccttggcctcctaaagtgctgggatgacaggcgtgagccactgcaccccgccacgaggataatttttgagtaaggggatgtatcagggaccaggcagccttgtgactttgtcttgtgcctgcagccaagggggagctcctgggctgcttcgggctcacagagcccaacagcggaagtgaccccagcagcatggagaccagagcccactacaactcatccaacaagagctacaccctcaatgggaccaagacctggtaagggttctgggtggtgggcaggtggtgaacaggggcaaaggggcactggtcagacccctcaccgactgttccatccccaggatcacgaactcgcctatggccgatctgtttgtagtgtgggctcggtgtgaagatg

SEQ ID NO: 1271 - DNA, 4041 bp, Homo sapiens
tctgaaagcctcttcctccttccctccctccctttcttccttccttctctttcttttcttttccttttctttcctttcttcttcccccccaacagagtctggctctgttgcccaggctggagtgcagtggcacgatcttggctcactgcaaattctgcctcccaggctcaagcgattctcctgcctccacccctctagtagctgggattacaggtatgtgccaccatgcctggctaatttttgtatttttagtagagacagggtttcactgtgttggccaggctggtctcaaactcctgacctcaggtgatccgcccacctcagcctcctaaagtgctgggattacaggcatgagccaccacgttcagccttctttttgagatggagtttcgctcttgttgtccaggctggagtgcagtgatgcaatcttggctcactgcagcctccacctcccgggtttaagtgattatcctgcctcaggctcccgagtagctgggattacaggcgtccgccaccacgcctggctaatttttgtatttttagtagaggtggggtttcaccgtgttggccaggctagtctcgaactcctgacctcaggtgatccacccgcctcagcctcctgattacaggtgtgagccaccgttgcccggcccttttcttttttttttttttttgagatggagtttcgctctgtcacccagcctggattactggattacagtggtgcgatcctggctcactgcagtttcctcctcctaggttcaagcaattctgccacctcagccttctgagtagctgggattacaggggtgcaccaccacgcccagctaatttttgtattttttagtagaaatgggatttcaccatgttggccaggctggtcttgaactcctgacctcaggtgatccacccacctcggcctcccaaagtgctgggattataaacgtgagccaccgtgcctggcccctttgtttctttttttagagacagggtctcactgtgttgcccaggctgttctcaagtgatcctcttgccttactgaaagcccccttctttccctaagccacaatttcccagtctgtaaagtggggctgttgtcccaccctctgaaagtggctgtggagatgaaatgaataaacctcagctagggccagcttggtgcctgcctccttgtgtgtccttattcagccctgtctcttgggtcttagctgggcagggccctgttctctattgtcctgctttcccctcctactaccaccaggatatggctgtgctggggtttcgtctgtggcctatgggctcctggcccgagagctggagcgggtggacagtggctacaggtcggcgatgagtgtccagtcctccctcgtcatgcaccctatctatgcctatggcagcgaggaacagcggcagaagtacctgccccagctgggtgagtggctgcccatggggcctggtggaaggaagacagtctctgaggtctggaactcaagggtggggctgtcccctgagcctattctgtccctatctcaaagatagcataagtggccacctggacccccgccagaccctgggcttcacctggagatctgatccctggccagcctgactgtccccctctgtgaccaccgtcatctccctatgctttctgtgttccccagtccagcccaaagtttaaagtccaccaggttcctgctggccatttgcagtggctcacacctataatcccagcactttgggagggtgaagtgagaagatcccttgagcccaagagttcgaaaccagcctgggcaacgtaaggagaccccatgtctattagaaaaacaaaaaaaggaaagagcctatgtgacctgcgctaagtggacgttggccctcttccgtggtgtctcggaggtgttcagctgcttcaagatgaagctgaacatctccttcccagccactggctgccagaaactcattgaagtggacgatgaacgcaaactttgtactttttatgagaagcgtatggccacagaagttgctgttgacgctctgggtgaagaatggaagggttacgtggtcggaatcagtggtgggaacaataaacaaggtttccccttgaaacagggtgtcttgacccatggccgtgtccacttgctactgagtaaggggcattcctattacagaccaaggagaactggagaaagaaagagaagatcagttcatggttgcatcgtggatgccaatctgagtgttctcaacttggttattgtaaaaaaaaggagagaagggtattcctggactgactgagactatgatgcctcgtcacctggggcccagtacagctagcagaatccgtaaacttttcagtctctctaaagaaaatgatgtctgccagtatgttgtaaaaaagcccttaaacaaagaaggtaagaaacctaggaccaaagcacccaagattcagcgccttgtcactccacatgtcctgcagcacaaacagcggcgtattgctctgaagcagccgcatattaagaaaaataaagaagaggctgcagaatatgctaaacttttggccaagagaatgaaggaggctaagaagcaccagggacaaatcgtgaagagacgcagactgtcctctctgcgagcttccacttctaagtctgaatccagtcagaaataagattttttgagtaacaaataagatcagattcgcaaaaaaaaaaaaaaacccacaaggccctgtgtgaccaggcctctgctgacctttccacctcatctctggccactcatgtgatcctcccagccagacttagctacttgaaattctccagaagtaccaccagttctttacacatctgttccctctcccagcactgctcttccccacagcctcctcctgcttaactcctcacacccttccagtttggccaactccttcctgattccctgggtccccctccccatcttggcattgtgatcatgactttggggtaacctgtctcttgaaagcagggccagatctaacttagttatgaggtctgactcaggggcgagggtaattttttttttctttttttgagacaaagtcccgctccgtcccccaggctgaagtgcagtggtacaatcttggctcactgcaacctgcggttccccagttcaagcaattcctgtgcctcggcctcccaattagctgggattgcaggtgcttgctacccgtgcctggctaatttttgtatttttagtagagatggtgtttcactatgttggccaggctggtctcgaactccagacctcaagtgatccatctgccttggcctcccaaagtgctgagattacatgtgtgagccacctcgactggcctaattttttgtatttttagtagagatggggtttcaccatattggtcaggctggattttttttcttttttgagatggagtcttgctctgttgcccaggctgtagtgcagtggcatgatcttggctcactgcaacctctcctgcccgggttcaagcgattctcctgcctcagtctcctgagtagctgggattacaggcacccaccaccacatctggctatttttttttttttttttttttaagtagagatggggtttcaccatgttggccaggctggtctggaactcctgacctcaattgatccacctgccttggcctcctaaagtgctgggatgacaggcgtgagccactgcaccccgccacgaggataatttttgagtaaggggatgtatcagggaccaggcagccttgtgactttgtcttgtgcctgcagccaagggggagctcctgggctgcttcgggctcacagagcccaacagcggaagtgaccccagcagcatggagaccagagcccactacaactcatccaacaagagctacaccctcaatgggaccaagacctggtaagggttctgggtggtgggcaggtggtgaacaggggcaaaggggcactggtcagacccctcaccgactgttccatccccaggatcacgaactcgcctatggccgatctgtttgtagtgtgggctcggtgtgaagatggc

SEQ ID NO: 1272 - DNA, 4045 bp, Homo sapiens
tgcccaggctggagtgcagtggcacgatcttggctcactgcaaattctgcctcccaggctcaagcgattctcctgcctccacccctctagtagctgggattacaggtatgtgccaccatgcctggctaatttttgtatttttagtagagacagggtttcactgtgttggccaggctggtctcaaactcctgacctcaggtgatccgcccacctcagcctcctaaagtgctgggattacaggcatgagccaccacgttcagccttctttttgagatggagtttcgctcttgttgtccaggctggagtgcagtgatgcaatcttggctcactgcagcctccacctcccgggtttaagtgattatcctgcctcaggctcccgagtagctgggattacaggcgtccgccaccacgcctggctaatttttgtatttttagtagaggtggggtttcaccgtgttggccaggctagtctcgaactcctgacctcaggtgatccacccgcctcagcctcctgattacaggtgtgagccaccgttgcccggcccttttcttttttttttttttttgagatggagtttcgctctgtcacccagcctggattactggattacagtggtgcgatcctggctcactgcagtttcctcctcctaggttcaagcaattctgccacctcagccttctgagtagctgggattacaggggtgcaccaccacgcccagctaatttttgtattttttagtagaaatgggatttcaccatgttggccaggctggtcttgaactcctgacctcaggtgatccacccacctcggcctcccaaagtgctgggattataaacgtgagccaccgtgcctggcccctttgtttctttttttagagacagggtctcactgtgttgcccaggctgttctcaagtgatcctcttgccttactgaaagcccccttctttccctaagccacaatttcccagtctgtaaagtggggctgttgtcccaccctctgaaagtggctgtggagatgaaatgaataaacctcagctagggccagcttggtgcctgcctccttgtgtgtccttattcagccctgtctcttgggtcttagctgggcagggccctgttctctattgtcctgctttcccctcctactaccaccaggatatggctgtgctggggtttcgtctgtggcctatgggctcctggcccgagagctggagcgggtggacagtggctacaggtcggcgatgagtgtccagtcctccctcgtcatgcaccctatctatgcctatggcagcgaggaacagcggcagaagtacctgccccagctgggtgagtggctgcccatggggcctggtggaaggaagacagtctctgaggtctggaactcaagggtggggctgtcccctgagcctattctgtccctatctcaaagatagcataagtggccacctggacccccgccagaccctgggcttcacctggagatctgatccctggccagcctgactgtccccctctgtgaccaccgtcatctccctatgctttctgtgttccccagtccagcccaaagtttaaagtccaccaggttcctgctggccatttgcagtggctcacacctataatcccagcactttgggagggtgaagtgagaagatcccttgagcccaagagttcgaaaccagcctgggcaacgtaaggagaccccatgtctattagaaaaacaaaaaaaggaaagagcctatgtgacctgcgctaagtggacgttggccctcttccgtggtgtctcggaggtgttcagctgcttcaagatgaagctgaacatctccttcccagccactggctgccagaaactcattgaagtggacgatgaacgcaaactttgtactttttatgagaagcgtatggccacagaagttgctgttgacgctctgggtgaagaatggaagggttacgtggtcggaatcagtggtgggaacaataaacaaggtttccccttgaaacagggtgtcttgacccatggccgtgtccacttgctactgagtaaggggcattcctattacagaccaaggagaactggagaaagaaagagaagatcagttcatggttgcatcgtggatgccaatctgagtgttctcaacttggttattgtaaaaaaaaggagagaagggtattcctggactgactgagactatgatgcctcgtcacctggggcccagtacagctagcagaatccgtaaacttttcagtctctctaaagaaaatgatgtctgccagtatgttgtaaaaaagcccttaaacaaagaaggtaagaaacctaggaccaaagcacccaagattcagcgccttgtcactccacatgtcctgcagcacaaacagcggcgtattgctctgaagcagccgcatattaagaaaaataaagaagaggctgcagaatatgctaaacttttggccaagagaatgaaggaggctaagaagcaccagggacaaatcgtgaagagacgcagactgtcctctctgcgagcttccacttctaagtctgaatccagtcagaaataagattttttgagtaacaaataagatcagattcgcaaaaaaaaaaaaaaacccacaaggccctgtgtgaccaggcctctgctgacctttccacctcatctctggccactcatgtgatcctcccagccagacttagctacttgaaattctccagaagtaccaccagttctttacacatctgttccctctcccagcactgctcttccccacagcctcctcctgcttaactcctcacacccttccagtttggccaactccttcctgattccctgggtccccctccccatcttggcattgtgatcatgactttggggtaacctgtctcttgaaagcagggccagatctaacttagttatgaggtctgactcaggggcgagggtaattttttttttctttttttgagacaaagtcccgctccgtcccccaggctgaagtgcagtggtacaatcttggctcactgcaacctgcggttccccagttcaagcaattcctgtgcctcggcctcccaattagctgggattgcaggtgcttgctacccgtgcctggctaatttttgtatttttagtagagatggtgtttcactatgttggccaggctggtctcgaactccagacctcaagtgatccatctgccttggcctcccaaagtgctgagattacatgtgtgagccacctcgactggcctaattttttgtatttttagtagagatggggtttcaccatattggtcaggctggattttttttcttttttgagatggagtcttgctctgttgcccaggctgtagtgcagtggcatgatcttggctcactgcaacctctcctgcccgggttcaagcgattctcctgcctcagtctcctgagtagctgggattacaggcacccaccaccacatctggctatttttttttttttttttttttaagtagagatggggtttcaccatgttggccaggctggtctggaactcctgacctcaattgatccacctgccttggcctcctaaagtgctgggatgacaggcgtgagccactgcaccccgccacgaggataatttttgagtaaggggatgtatcagggaccaggcagccttgtgactttgtcttgtgcctgcagccaagggggagctcctgggctgcttcgggctcacagagcccaacagcggaagtgaccccagcagcatggagaccagagcccactacaactcatccaacaagagctacaccctcaatgggaccaagacctggtaagggttctgggtggtgggcaggtggtgaacaggggcaaaggggcactggtcagacccctcaccgactgttccatccccaggatcacgaactcgcctatggccgatctgtttgtagtgtgggctcggtgtgaagatggctgcattcggggcttcctgctggagaaggggatgcggggtctctcggcccccaggatccagggcaagttctcgctgcgggcctcagccacaggcatgatcatcatggacggtg

SEQ ID NO: 1273 - DNA, 4062 bp, Homo sapiens
gatcttggctcactgcaaattctgcctcccaggctcaagcgattctcctgcctccacccctctagtagctgggattacaggtatgtgccaccatgcctggctaatttttgtatttttagtagagacagggtttcactgtgttggccaggctggtctcaaactcctgacctcaggtgatccgcccacctcagcctcctaaagtgctgggattacaggcatgagccaccacgttcagccttctttttgagatggagtttcgctcttgttgtccaggctggagtgcagtgatgcaatcttggctcactgcagcctccacctcccgggtttaagtgattatcctgcctcaggctcccgagtagctgggattacaggcgtccgccaccacgcctggctaatttttgtatttttagtagaggtggggtttcaccgtgttggccaggctagtctcgaactcctgacctcaggtgatccacccgcctcagcctcctgattacaggtgtgagccaccgttgcccggcccttttcttttttttttttttttgagatggagtttcgctctgtcacccagcctggattactggattacagtggtgcgatcctggctcactgcagtttcctcctcctaggttcaagcaattctgccacctcagccttctgagtagctgggattacaggggtgcaccaccacgcccagctaatttttgtattttttagtagaaatgggatttcaccatgttggccaggctggtcttgaactcctgacctcaggtgatccacccacctcggcctcccaaagtgctgggattataaacgtgagccaccgtgcctggcccctttgtttctttttttagagacagggtctcactgtgttgcccaggctgttctcaagtgatcctcttgccttactgaaagcccccttctttccctaagccacaatttcccagtctgtaaagtggggctgttgtcccaccctctgaaagtggctgtggagatgaaatgaataaacctcagctagggccagcttggtgcctgcctccttgtgtgtccttattcagccctgtctcttgggtcttagctgggcagggccctgttctctattgtcctgctttcccctcctactaccaccaggatatggctgtgctggggtttcgtctgtggcctatgggctcctggcccgagagctggagcgggtggacagtggctacaggtcggcgatgagtgtccagtcctccctcgtcatgcaccctatctatgcctatggcagcgaggaacagcggcagaagtacctgccccagctgggtgagtggctgcccatggggcctggtggaaggaagacagtctctgaggtctggaactcaagggtggggctgtcccctgagcctattctgtccctatctcaaagatagcataagtggccacctggacccccgccagaccctgggcttcacctggagatctgatccctggccagcctgactgtccccctctgtgaccaccgtcatctccctatgctttctgtgttccccagtccagcccaaagtttaaagtccaccaggttcctgctggccatttgcagtggctcacacctataatcccagcactttgggagggtgaagtgagaagatcccttgagcccaagagttcgaaaccagcctgggcaacgtaaggagaccccatgtctattagaaaaacaaaaaaaggaaagagcctatgtgacctgcgctaagtggacgttggccctcttccgtggtgtctcggaggtgttcagctgcttcaagatgaagctgaacatctccttcccagccactggctgccagaaactcattgaagtggacgatgaacgcaaactttgtactttttatgagaagcgtatggccacagaagttgctgttgacgctctgggtgaagaatggaagggttacgtggtcggaatcagtggtgggaacaataaacaaggtttccccttgaaacagggtgtcttgacccatggccgtgtccacttgctactgagtaaggggcattcctattacagaccaaggagaactggagaaagaaagagaagatcagttcatggttgcatcgtggatgccaatctgagtgttctcaacttggttattgtaaaaaaaaggagagaagggtattcctggactgactgagactatgatgcctcgtcacctggggcccagtacagctagcagaatccgtaaacttttcagtctctctaaagaaaatgatgtctgccagtatgttgtaaaaaagcccttaaacaaagaaggtaagaaacctaggaccaaagcacccaagattcagcgccttgtcactccacatgtcctgcagcacaaacagcggcgtattgctctgaagcagccgcatattaagaaaaataaagaagaggctgcagaatatgctaaacttttggccaagagaatgaaggaggctaagaagcaccagggacaaatcgtgaagagacgcagactgtcctctctgcgagcttccacttctaagtctgaatccagtcagaaataagattttttgagtaacaaataagatcagattcgcaaaaaaaaaaaaaaacccacaaggccctgtgtgaccaggcctctgctgacctttccacctcatctctggccactcatgtgatcctcccagccagacttagctacttgaaattctccagaagtaccaccagttctttacacatctgttccctctcccagcactgctcttccccacagcctcctcctgcttaactcctcacacccttccagtttggccaactccttcctgattccctgggtccccctccccatcttggcattgtgatcatgactttggggtaacctgtctcttgaaagcagggccagatctaacttagttatgaggtctgactcaggggcgagggtaattttttttttctttttttgagacaaagtcccgctccgtcccccaggctgaagtgcagtggtacaatcttggctcactgcaacctgcggttccccagttcaagcaattcctgtgcctcggcctcccaattagctgggattgcaggtgcttgctacccgtgcctggctaatttttgtatttttagtagagatggtgtttcactatgttggccaggctggtctcgaactccagacctcaagtgatccatctgccttggcctcccaaagtgctgagattacatgtgtgagccacctcgactggcctaattttttgtatttttagtagagatggggtttcaccatattggtcaggctggattttttttcttttttgagatggagtcttgctctgttgcccaggctgtagtgcagtggcatgatcttggctcactgcaacctctcctgcccgggttcaagcgattctcctgcctcagtctcctgagtagctgggattacaggcacccaccaccacatctggctatttttttttttttttttttttaagtagagatggggtttcaccatgttggccaggctggtctggaactcctgacctcaattgatccacctgccttggcctcctaaagtgctgggatgacaggcgtgagccactgcaccccgccacgaggataatttttgagtaaggggatgtatcagggaccaggcagccttgtgactttgtcttgtgcctgcagccaagggggagctcctgggctgcttcgggctcacagagcccaacagcggaagtgaccccagcagcatggagaccagagcccactacaactcatccaacaagagctacaccctcaatgggaccaagacctggtaagggttctgggtggtgggcaggtggtgaacaggggcaaaggggcactggtcagacccctcaccgactgttccatccccaggatcacgaactcgcctatggccgatctgtttgtagtgtgggctcggtgtgaagatggctgcattcggggcttcctgctggagaaggggatgcggggtctctcggcccccaggatccagggcaagttctcgctgcgggcctcagccacaggcatgatcatcatggacggtgtggaggtgccagaggagaatgtgctccctggtgcatccagcc

SEQ ID NO: 1274 - DNA, 4048 bp, Homo sapiens
atcttggctcactgcaaattctgcctcccaggctcaagcgattctcctgcctccacccctctagtagctgggattacaggtatgtgccaccatgcctggctaatttttgtatttttagtagagacagggtttcactgtgttggccaggctggtctcaaactcctgacctcaggtgatccgcccacctcagcctcctaaagtgctgggattacaggcatgagccaccacgttcagccttctttttgagatggagtttcgctcttgttgtccaggctggagtgcagtgatgcaatcttggctcactgcagcctccacctcccgggtttaagtgattatcctgcctcaggctcccgagtagctgggattacaggcgtccgccaccacgcctggctaatttttgtatttttagtagaggtggggtttcaccgtgttggccaggctagtctcgaactcctgacctcaggtgatccacccgcctcagcctcctgattacaggtgtgagccaccgttgcccggcccttttcttttttttttttttttgagatggagtttcgctctgtcacccagcctggattactggattacagtggtgcgatcctggctcactgcagtttcctcctcctaggttcaagcaattctgccacctcagccttctgagtagctgggattacaggggtgcaccaccacgcccagctaatttttgtattttttagtagaaatgggatttcaccatgttggccaggctggtcttgaactcctgacctcaggtgatccacccacctcggcctcccaaagtgctgggattataaacgtgagccaccgtgcctggcccctttgtttctttttttagagacagggtctcactgtgttgcccaggctgttctcaagtgatcctcttgccttactgaaagcccccttctttccctaagccacaatttcccagtctgtaaagtggggctgttgtcccaccctctgaaagtggctgtggagatgaaatgaataaacctcagctagggccagcttggtgcctgcctccttgtgtgtccttattcagccctgtctcttgggtcttagctgggcagggccctgttctctattgtcctgctttcccctcctactaccaccaggatatggctgtgctggggtttcgtctgtggcctatgggctcctggcccgagagctggagcgggtggacagtggctacaggtcggcgatgagtgtccagtcctccctcgtcatgcaccctatctatgcctatggcagcgaggaacagcggcagaagtacctgccccagctgggtgagtggctgcccatggggcctggtggaaggaagacagtctctgaggtctggaactcaagggtggggctgtcccctgagcctattctgtccctatctcaaagatagcataagtggccacctggacccccgccagaccctgggcttcacctggagatctgatccctggccagcctgactgtccccctctgtgaccaccgtcatctccctatgctttctgtgttccccagtccagcccaaagtttaaagtccaccaggttcctgctggccatttgcagtggctcacacctataatcccagcactttgggagggtgaagtgagaagatcccttgagcccaagagttcgaaaccagcctgggcaacgtaaggagaccccatgtctattagaaaaacaaaaaaaggaaagagcctatgtgacctgcgctaagtggacgttggccctcttccgtggtgtctcggaggtgttcagctgcttcaagatgaagctgaacatctccttcccagccactggctgccagaaactcattgaagtggacgatgaacgcaaactttgtactttttatgagaagcgtatggccacagaagttgctgttgacgctctgggtgaagaatggaagggttacgtggtcggaatcagtggtgggaacaataaacaaggtttccccttgaaacagggtgtcttgacccatggccgtgtccacttgctactgagtaaggggcattcctattacagaccaaggagaactggagaaagaaagagaagatcagttcatggttgcatcgtggatgccaatctgagtgttctcaacttggttattgtaaaaaaaaggagagaagggtattcctggactgactgagactatgatgcctcgtcacctggggcccagtacagctagcagaatccgtaaacttttcagtctctctaaagaaaatgatgtctgccagtatgttgtaaaaaagcccttaaacaaagaaggtaagaaacctaggaccaaagcacccaagattcagcgccttgtcactccacatgtcctgcagcacaaacagcggcgtattgctctgaagcagccgcatattaagaaaaataaagaagaggctgcagaatatgctaaacttttggccaagagaatgaaggaggctaagaagcaccagggacaaatcgtgaagagacgcagactgtcctctctgcgagcttccacttctaagtctgaatccagtcagaaataagattttttgagtaacaaataagatcagattcgcaaaaaaaaaaaaaaacccacaaggccctgtgtgaccaggcctctgctgacctttccacctcatctctggccactcatgtgatcctcccagccagacttagctacttgaaattctccagaagtaccaccagttctttacacatctgttccctctcccagcactgctcttccccacagcctcctcctgcttaactcctcacacccttccagtttggccaactccttcctgattccctgggtccccctccccatcttggcattgtgatcatgactttggggtaacctgtctcttgaaagcagggccagatctaacttagttatgaggtctgactcaggggcgagggtaattttttttttctttttttgagacaaagtcccgctccgtcccccaggctgaagtgcagtggtacaatcttggctcactgcaacctgcggttccccagttcaagcaattcctgtgcctcggcctcccaattagctgggattgcaggtgcttgctacccgtgcctggctaatttttgtatttttagtagagatggtgtttcactatgttggccaggctggtctcgaactccagacctcaagtgatccatctgccttggcctcccaaagtgctgagattacatgtgtgagccacctcgactggcctaattttttgtatttttagtagagatggggtttcaccatattggtcaggctggattttttttcttttttgagatggagtcttgctctgttgcccaggctgtagtgcagtggcatgatcttggctcactgcaacctctcctgcccgggttcaagcgattctcctgcctcagtctcctgagtagctgggattacaggcacccaccaccacatctggctatttttttttttttttttttttaagtagagatggggtttcaccatgttggccaggctggtctggaactcctgacctcaattgatccacctgccttggcctcctaaagtgctgggatgacaggcgtgagccactgcaccccgccacgaggataatttttgagtaaggggatgtatcagggaccaggcagccttgtgactttgtcttgtgcctgcagccaagggggagctcctgggctgcttcgggctcacagagcccaacagcggaagtgaccccagcagcatggagaccagagcccactacaactcatccaacaagagctacaccctcaatgggaccaagacctggtaagggttctgggtggtgggcaggtggtgaacaggggcaaaggggcactggtcagacccctcaccgactgttccatccccaggatcacgaactcgcctatggccgatctgtttgtagtgtgggctcggtgtgaagatggctgcattcggggcttcctgctggagaaggggatgcggggtctctcggcccccaggatccagggcaagttctcgctgcgggcctcagccacaggcatgatcatcatggacggtgtggaggtgccagaggagaatgtgctccct

SEQ ID NO: 1275 - DNA, 4048 bp, Homo sapiens
cttggctcactgcaaattctgcctcccaggctcaagcgattctcctgcctccacccctctagtagctgggattacaggtatgtgccaccatgcctggctaatttttgtatttttagtagagacagggtttcactgtgttggccaggctggtctcaaactcctgacctcaggtgatccgcccacctcagcctcctaaagtgctgggattacaggcatgagccaccacgttcagccttctttttgagatggagtttcgctcttgttgtccaggctggagtgcagtgatgcaatcttggctcactgcagcctccacctcccgggtttaagtgattatcctgcctcaggctcccgagtagctgggattacaggcgtccgccaccacgcctggctaatttttgtatttttagtagaggtggggtttcaccgtgttggccaggctagtctcgaactcctgacctcaggtgatccacccgcctcagcctcctgattacaggtgtgagccaccgttgcccggcccttttcttttttttttttttttgagatggagtttcgctctgtcacccagcctggattactggattacagtggtgcgatcctggctcactgcagtttcctcctcctaggttcaagcaattctgccacctcagccttctgagtagctgggattacaggggtgcaccaccacgcccagctaatttttgtattttttagtagaaatgggatttcaccatgttggccaggctggtcttgaactcctgacctcaggtgatccacccacctcggcctcccaaagtgctgggattataaacgtgagccaccgtgcctggcccctttgtttctttttttagagacagggtctcactgtgttgcccaggctgttctcaagtgatcctcttgccttactgaaagcccccttctttccctaagccacaatttcccagtctgtaaagtggggctgttgtcccaccctctgaaagtggctgtggagatgaaatgaataaacctcagctagggccagcttggtgcctgcctccttgtgtgtccttattcagccctgtctcttgggtcttagctgggcagggccctgttctctattgtcctgctttcccctcctactaccaccaggatatggctgtgctggggtttcgtctgtggcctatgggctcctggcccgagagctggagcgggtggacagtggctacaggtcggcgatgagtgtccagtcctccctcgtcatgcaccctatctatgcctatggcagcgaggaacagcggcagaagtacctgccccagctgggtgagtggctgcccatggggcctggtggaaggaagacagtctctgaggtctggaactcaagggtggggctgtcccctgagcctattctgtccctatctcaaagatagcataagtggccacctggacccccgccagaccctgggcttcacctggagatctgatccctggccagcctgactgtccccctctgtgaccaccgtcatctccctatgctttctgtgttccccagtccagcccaaagtttaaagtccaccaggttcctgctggccatttgcagtggctcacacctataatcccagcactttgggagggtgaagtgagaagatcccttgagcccaagagttcgaaaccagcctgggcaacgtaaggagaccccatgtctattagaaaaacaaaaaaaggaaagagcctatgtgacctgcgctaagtggacgttggccctcttccgtggtgtctcggaggtgttcagctgcttcaagatgaagctgaacatctccttcccagccactggctgccagaaactcattgaagtggacgatgaacgcaaactttgtactttttatgagaagcgtatggccacagaagttgctgttgacgctctgggtgaagaatggaagggttacgtggtcggaatcagtggtgggaacaataaacaaggtttccccttgaaacagggtgtcttgacccatggccgtgtccacttgctactgagtaaggggcattcctattacagaccaaggagaactggagaaagaaagagaagatcagttcatggttgcatcgtggatgccaatctgagtgttctcaacttggttattgtaaaaaaaaggagagaagggtattcctggactgactgagactatgatgcctcgtcacctggggcccagtacagctagcagaatccgtaaacttttcagtctctctaaagaaaatgatgtctgccagtatgttgtaaaaaagcccttaaacaaagaaggtaagaaacctaggaccaaagcacccaagattcagcgccttgtcactccacatgtcctgcagcacaaacagcggcgtattgctctgaagcagccgcatattaagaaaaataaagaagaggctgcagaatatgctaaacttttggccaagagaatgaaggaggctaagaagcaccagggacaaatcgtgaagagacgcagactgtcctctctgcgagcttccacttctaagtctgaatccagtcagaaataagattttttgagtaacaaataagatcagattcgcaaaaaaaaaaaaaaacccacaaggccctgtgtgaccaggcctctgctgacctttccacctcatctctggccactcatgtgatcctcccagccagacttagctacttgaaattctccagaagtaccaccagttctttacacatctgttccctctcccagcactgctcttccccacagcctcctcctgcttaactcctcacacccttccagtttggccaactccttcctgattccctgggtccccctccccatcttggcattgtgatcatgactttggggtaacctgtctcttgaaagcagggccagatctaacttagttatgaggtctgactcaggggcgagggtaattttttttttctttttttgagacaaagtcccgctccgtcccccaggctgaagtgcagtggtacaatcttggctcactgcaacctgcggttccccagttcaagcaattcctgtgcctcggcctcccaattagctgggattgcaggtgcttgctacccgtgcctggctaatttttgtatttttagtagagatggtgtttcactatgttggccaggctggtctcgaactccagacctcaagtgatccatctgccttggcctcccaaagtgctgagattacatgtgtgagccacctcgactggcctaattttttgtatttttagtagagatggggtttcaccatattggtcaggctggattttttttcttttttgagatggagtcttgctctgttgcccaggctgtagtgcagtggcatgatcttggctcactgcaacctctcctgcccgggttcaagcgattctcctgcctcagtctcctgagtagctgggattacaggcacccaccaccacatctggctatttttttttttttttttttttaagtagagatggggtttcaccatgttggccaggctggtctggaactcctgacctcaattgatccacctgccttggcctcctaaagtgctgggatgacaggcgtgagccactgcaccccgccacgaggataatttttgagtaaggggatgtatcagggaccaggcagccttgtgactttgtcttgtgcctgcagccaagggggagctcctgggctgcttcgggctcacagagcccaacagcggaagtgaccccagcagcatggagaccagagcccactacaactcatccaacaagagctacaccctcaatgggaccaagacctggtaagggttctgggtggtgggcaggtggtgaacaggggcaaaggggcactggtcagacccctcaccgactgttccatccccaggatcacgaactcgcctatggccgatctgtttgtagtgtgggctcggtgtgaagatggctgcattcggggcttcctgctggagaaggggatgcggggtctctcggcccccaggatccagggcaagttctcgctgcgggcctcagccacaggcatgatcatcatggacggtgtggaggtgccagaggagaatgtgctccctgg

SEQ ID NO: 1276 - DNA, 4046 bp, Homo sapiens
tggctcactgcaaattctgcctcccaggctcaagcgattctcctgcctccacccctctagtagctgggattacaggtatgtgccaccatgcctggctaatttttgtatttttagtagagacagggtttcactgtgttggccaggctggtctcaaactcctgacctcaggtgatccgcccacctcagcctcctaaagtgctgggattacaggcatgagccaccacgttcagccttctttttgagatggagtttcgctcttgttgtccaggctggagtgcagtgatgcaatcttggctcactgcagcctccacctcccgggtttaagtgattatcctgcctcaggctcccgagtagctgggattacaggcgtccgccaccacgcctggctaatttttgtatttttagtagaggtggggtttcaccgtgttggccaggctagtctcgaactcctgacctcaggtgatccacccgcctcagcctcctgattacaggtgtgagccaccgttgcccggcccttttcttttttttttttttttgagatggagtttcgctctgtcacccagcctggattactggattacagtggtgcgatcctggctcactgcagtttcctcctcctaggttcaagcaattctgccacctcagccttctgagtagctgggattacaggggtgcaccaccacgcccagctaatttttgtattttttagtagaaatgggatttcaccatgttggccaggctggtcttgaactcctgacctcaggtgatccacccacctcggcctcccaaagtgctgggattataaacgtgagccaccgtgcctggcccctttgtttctttttttagagacagggtctcactgtgttgcccaggctgttctcaagtgatcctcttgccttactgaaagcccccttctttccctaagccacaatttcccagtctgtaaagtggggctgttgtcccaccctctgaaagtggctgtggagatgaaatgaataaacctcagctagggccagcttggtgcctgcctccttgtgtgtccttattcagccctgtctcttgggtcttagctgggcagggccctgttctctattgtcctgctttcccctcctactaccaccaggatatggctgtgctggggtttcgtctgtggcctatgggctcctggcccgagagctggagcgggtggacagtggctacaggtcggcgatgagtgtccagtcctccctcgtcatgcaccctatctatgcctatggcagcgaggaacagcggcagaagtacctgccccagctgggtgagtggctgcccatggggcctggtggaaggaagacagtctctgaggtctggaactcaagggtggggctgtcccctgagcctattctgtccctatctcaaagatagcataagtggccacctggacccccgccagaccctgggcttcacctggagatctgatccctggccagcctgactgtccccctctgtgaccaccgtcatctccctatgctttctgtgttccccagtccagcccaaagtttaaagtccaccaggttcctgctggccatttgcagtggctcacacctataatcccagcactttgggagggtgaagtgagaagatcccttgagcccaagagttcgaaaccagcctgggcaacgtaaggagaccccatgtctattagaaaaacaaaaaaaggaaagagcctatgtgacctgcgctaagtggacgttggccctcttccgtggtgtctcggaggtgttcagctgcttcaagatgaagctgaacatctccttcccagccactggctgccagaaactcattgaagtggacgatgaacgcaaactttgtactttttatgagaagcgtatggccacagaagttgctgttgacgctctgggtgaagaatggaagggttacgtggtcggaatcagtggtgggaacaataaacaaggtttccccttgaaacagggtgtcttgacccatggccgtgtccacttgctactgagtaaggggcattcctattacagaccaaggagaactggagaaagaaagagaagatcagttcatggttgcatcgtggatgccaatctgagtgttctcaacttggttattgtaaaaaaaaggagagaagggtattcctggactgactgagactatgatgcctcgtcacctggggcccagtacagctagcagaatccgtaaacttttcagtctctctaaagaaaatgatgtctgccagtatgttgtaaaaaagcccttaaacaaagaaggtaagaaacctaggaccaaagcacccaagattcagcgccttgtcactccacatgtcctgcagcacaaacagcggcgtattgctctgaagcagccgcatattaagaaaaataaagaagaggctgcagaatatgctaaacttttggccaagagaatgaaggaggctaagaagcaccagggacaaatcgtgaagagacgcagactgtcctctctgcgagcttccacttctaagtctgaatccagtcagaaataagattttttgagtaacaaataagatcagattcgcaaaaaaaaaaaaaaacccacaaggccctgtgtgaccaggcctctgctgacctttccacctcatctctggccactcatgtgatcctcccagccagacttagctacttgaaattctccagaagtaccaccagttctttacacatctgttccctctcccagcactgctcttccccacagcctcctcctgcttaactcctcacacccttccagtttggccaactccttcctgattccctgggtccccctccccatcttggcattgtgatcatgactttggggtaacctgtctcttgaaagcagggccagatctaacttagttatgaggtctgactcaggggcgagggtaattttttttttctttttttgagacaaagtcccgctccgtcccccaggctgaagtgcagtggtacaatcttggctcactgcaacctgcggttccccagttcaagcaattcctgtgcctcggcctcccaattagctgggattgcaggtgcttgctacccgtgcctggctaatttttgtatttttagtagagatggtgtttcactatgttggccaggctggtctcgaactccagacctcaagtgatccatctgccttggcctcccaaagtgctgagattacatgtgtgagccacctcgactggcctaattttttgtatttttagtagagatggggtttcaccatattggtcaggctggattttttttcttttttgagatggagtcttgctctgttgcccaggctgtagtgcagtggcatgatcttggctcactgcaacctctcctgcccgggttcaagcgattctcctgcctcagtctcctgagtagctgggattacaggcacccaccaccacatctggctatttttttttttttttttttttaagtagagatggggtttcaccatgttggccaggctggtctggaactcctgacctcaattgatccacctgccttggcctcctaaagtgctgggatgacaggcgtgagccactgcaccccgccacgaggataatttttgagtaaggggatgtatcagggaccaggcagccttgtgactttgtcttgtgcctgcagccaagggggagctcctgggctgcttcgggctcacagagcccaacagcggaagtgaccccagcagcatggagaccagagcccactacaactcatccaacaagagctacaccctcaatgggaccaagacctggtaagggttctgggtggtgggcaggtggtgaacaggggcaaaggggcactggtcagacccctcaccgactgttccatccccaggatcacgaactcgcctatggccgatctgtttgtagtgtgggctcggtgtgaagatggctgcattcggggcttcctgctggagaaggggatgcggggtctctcggcccccaggatccagggcaagttctcgctgcgggcctcagccacaggcatgatcatcatggacggtgtggaggtgccagaggagaatgtgctccctgg

SEQ ID NO: 1277 - DNA, 4045 bp, Homo sapiens
attctgcctcccaggctcaagcgattctcctgcctccacccctctagtagctgggattacaggtatgtgccaccatgcctggctaatttttgtatttttagtagagacagggtttcactgtgttggccaggctggtctcaaactcctgacctcaggtgatccgcccacctcagcctcctaaagtgctgggattacaggcatgagccaccacgttcagccttctttttgagatggagtttcgctcttgttgtccaggctggagtgcagtgatgcaatcttggctcactgcagcctccacctcccgggtttaagtgattatcctgcctcaggctcccgagtagctgggattacaggcgtccgccaccacgcctggctaatttttgtatttttagtagaggtggggtttcaccgtgttggccaggctagtctcgaactcctgacctcaggtgatccacccgcctcagcctcctgattacaggtgtgagccaccgttgcccggcccttttcttttttttttttttttgagatggagtttcgctctgtcacccagcctggattactggattacagtggtgcgatcctggctcactgcagtttcctcctcctaggttcaagcaattctgccacctcagccttctgagtagctgggattacaggggtgcaccaccacgcccagctaatttttgtattttttagtagaaatgggatttcaccatgttggccaggctggtcttgaactcctgacctcaggtgatccacccacctcggcctcccaaagtgctgggattataaacgtgagccaccgtgcctggcccctttgtttctttttttagagacagggtctcactgtgttgcccaggctgttctcaagtgatcctcttgccttactgaaagcccccttctttccctaagccacaatttcccagtctgtaaagtggggctgttgtcccaccctctgaaagtggctgtggagatgaaatgaataaacctcagctagggccagcttggtgcctgcctccttgtgtgtccttattcagccctgtctcttgggtcttagctgggcagggccctgttctctattgtcctgctttcccctcctactaccaccaggatatggctgtgctggggtttcgtctgtggcctatgggctcctggcccgagagctggagcgggtggacagtggctacaggtcggcgatgagtgtccagtcctccctcgtcatgcaccctatctatgcctatggcagcgaggaacagcggcagaagtacctgccccagctgggtgagtggctgcccatggggcctggtggaaggaagacagtctctgaggtctggaactcaagggtggggctgtcccctgagcctattctgtccctatctcaaagatagcataagtggccacctggacccccgccagaccctgggcttcacctggagatctgatccctggccagcctgactgtccccctctgtgaccaccgtcatctccctatgctttctgtgttccccagtccagcccaaagtttaaagtccaccaggttcctgctggccatttgcagtggctcacacctataatcccagcactttgggagggtgaagtgagaagatcccttgagcccaagagttcgaaaccagcctgggcaacgtaaggagaccccatgtctattagaaaaacaaaaaaaggaaagagcctatgtgacctgcgctaagtggacgttggccctcttccgtggtgtctcggaggtgttcagctgcttcaagatgaagctgaacatctccttcccagccactggctgccagaaactcattgaagtggacgatgaacgcaaactttgtactttttatgagaagcgtatggccacagaagttgctgttgacgctctgggtgaagaatggaagggttacgtggtcggaatcagtggtgggaacaataaacaaggtttccccttgaaacagggtgtcttgacccatggccgtgtccacttgctactgagtaaggggcattcctattacagaccaaggagaactggagaaagaaagagaagatcagttcatggttgcatcgtggatgccaatctgagtgttctcaacttggttattgtaaaaaaaaggagagaagggtattcctggactgactgagactatgatgcctcgtcacctggggcccagtacagctagcagaatccgtaaacttttcagtctctctaaagaaaatgatgtctgccagtatgttgtaaaaaagcccttaaacaaagaaggtaagaaacctaggaccaaagcacccaagattcagcgccttgtcactccacatgtcctgcagcacaaacagcggcgtattgctctgaagcagccgcatattaagaaaaataaagaagaggctgcagaatatgctaaacttttggccaagagaatgaaggaggctaagaagcaccagggacaaatcgtgaagagacgcagactgtcctctctgcgagcttccacttctaagtctgaatccagtcagaaataagattttttgagtaacaaataagatcagattcgcaaaaaaaaaaaaaaacccacaaggccctgtgtgaccaggcctctgctgacctttccacctcatctctggccactcatgtgatcctcccagccagacttagctacttgaaattctccagaagtaccaccagttctttacacatctgttccctctcccagcactgctcttccccacagcctcctcctgcttaactcctcacacccttccagtttggccaactccttcctgattccctgggtccccctccccatcttggcattgtgatcatgactttggggtaacctgtctcttgaaagcagggccagatctaacttagttatgaggtctgactcaggggcgagggtaattttttttttctttttttgagacaaagtcccgctccgtcccccaggctgaagtgcagtggtacaatcttggctcactgcaacctgcggttccccagttcaagcaattcctgtgcctcggcctcccaattagctgggattgcaggtgcttgctacccgtgcctggctaatttttgtatttttagtagagatggtgtttcactatgttggccaggctggtctcgaactccagacctcaagtgatccatctgccttggcctcccaaagtgctgagattacatgtgtgagccacctcgactggcctaattttttgtatttttagtagagatggggtttcaccatattggtcaggctggattttttttcttttttgagatggagtcttgctctgttgcccaggctgtagtgcagtggcatgatcttggctcactgcaacctctcctgcccgggttcaagcgattctcctgcctcagtctcctgagtagctgggattacaggcacccaccaccacatctggctatttttttttttttttttttttaagtagagatggggtttcaccatgttggccaggctggtctggaactcctgacctcaattgatccacctgccttggcctcctaaagtgctgggatgacaggcgtgagccactgcaccccgccacgaggataatttttgagtaaggggatgtatcagggaccaggcagccttgtgactttgtcttgtgcctgcagccaagggggagctcctgggctgcttcgggctcacagagcccaacagcggaagtgaccccagcagcatggagaccagagcccactacaactcatccaacaagagctacaccctcaatgggaccaagacctggtaagggttctgggtggtgggcaggtggtgaacaggggcaaaggggcactggtcagacccctcaccgactgttccatccccaggatcacgaactcgcctatggccgatctgtttgtagtgtgggctcggtgtgaagatggctgcattcggggcttcctgctggagaaggggatgcggggtctctcggcccccaggatccagggcaagttctcgctgcgggcctcagccacaggcatgatcatcatggacggtgtggaggtgccagaggagaatgtgctccctggtgcatccagcct

SEQ ID NO: 1278 - DNA, 4026 bp, Homo sapiens
ctcccaggctcaagcgattctcctgcctccacccctctagtagctgggattacaggtatgtgccaccatgcctggctaatttttgtatttttagtagagacagggtttcactgtgttggccaggctggtctcaaactcctgacctcaggtgatccgcccacctcagcctcctaaagtgctgggattacaggcatgagccaccacgttcagccttctttttgagatggagtttcgctcttgttgtccaggctggagtgcagtgatgcaatcttggctcactgcagcctccacctcccgggtttaagtgattatcctgcctcaggctcccgagtagctgggattacaggcgtccgccaccacgcctggctaatttttgtatttttagtagaggtggggtttcaccgtgttggccaggctagtctcgaactcctgacctcaggtgatccacccgcctcagcctcctgattacaggtgtgagccaccgttgcccggcccttttcttttttttttttttttgagatggagtttcgctctgtcacccagcctggattactggattacagtggtgcgatcctggctcactgcagtttcctcctcctaggttcaagcaattctgccacctcagccttctgagtagctgggattacaggggtgcaccaccacgcccagctaatttttgtattttttagtagaaatgggatttcaccatgttggccaggctggtcttgaactcctgacctcaggtgatccacccacctcggcctcccaaagtgctgggattataaacgtgagccaccgtgcctggcccctttgtttctttttttagagacagggtctcactgtgttgcccaggctgttctcaagtgatcctcttgccttactgaaagcccccttctttccctaagccacaatttcccagtctgtaaagtggggctgttgtcccaccctctgaaagtggctgtggagatgaaatgaataaacctcagctagggccagcttggtgcctgcctccttgtgtgtccttattcagccctgtctcttgggtcttagctgggcagggccctgttctctattgtcctgctttcccctcctactaccaccaggatatggctgtgctggggtttcgtctgtggcctatgggctcctggcccgagagctggagcgggtggacagtggctacaggtcggcgatgagtgtccagtcctccctcgtcatgcaccctatctatgcctatggcagcgaggaacagcggcagaagtacctgccccagctgggtgagtggctgcccatggggcctggtggaaggaagacagtctctgaggtctggaactcaagggtggggctgtcccctgagcctattctgtccctatctcaaagatagcataagtggccacctggacccccgccagaccctgggcttcacctggagatctgatccctggccagcctgactgtccccctctgtgaccaccgtcatctccctatgctttctgtgttccccagtccagcccaaagtttaaagtccaccaggttcctgctggccatttgcagtggctcacacctataatcccagcactttgggagggtgaagtgagaagatcccttgagcccaagagttcgaaaccagcctgggcaacgtaaggagaccccatgtctattagaaaaacaaaaaaaggaaagagcctatgtgacctgcgctaagtggacgttggccctcttccgtggtgtctcggaggtgttcagctgcttcaagatgaagctgaacatctccttcccagccactggctgccagaaactcattgaagtggacgatgaacgcaaactttgtactttttatgagaagcgtatggccacagaagttgctgttgacgctctgggtgaagaatggaagggttacgtggtcggaatcagtggtgggaacaataaacaaggtttccccttgaaacagggtgtcttgacccatggccgtgtccacttgctactgagtaaggggcattcctattacagaccaaggagaactggagaaagaaagagaagatcagttcatggttgcatcgtggatgccaatctgagtgttctcaacttggttattgtaaaaaaaaggagagaagggtattcctggactgactgagactatgatgcctcgtcacctggggcccagtacagctagcagaatccgtaaacttttcagtctctctaaagaaaatgatgtctgccagtatgttgtaaaaaagcccttaaacaaagaaggtaagaaacctaggaccaaagcacccaagattcagcgccttgtcactccacatgtcctgcagcacaaacagcggcgtattgctctgaagcagccgcatattaagaaaaataaagaagaggctgcagaatatgctaaacttttggccaagagaatgaaggaggctaagaagcaccagggacaaatcgtgaagagacgcagactgtcctctctgcgagcttccacttctaagtctgaatccagtcagaaataagattttttgagtaacaaataagatcagattcgcaaaaaaaaaaaaaaacccacaaggccctgtgtgaccaggcctctgctgacctttccacctcatctctggccactcatgtgatcctcccagccagacttagctacttgaaattctccagaagtaccaccagttctttacacatctgttccctctcccagcactgctcttccccacagcctcctcctgcttaactcctcacacccttccagtttggccaactccttcctgattccctgggtccccctccccatcttggcattgtgatcatgactttggggtaacctgtctcttgaaagcagggccagatctaacttagttatgaggtctgactcaggggcgagggtaattttttttttctttttttgagacaaagtcccgctccgtcccccaggctgaagtgcagtggtacaatcttggctcactgcaacctgcggttccccagttcaagcaattcctgtgcctcggcctcccaattagctgggattgcaggtgcttgctacccgtgcctggctaatttttgtatttttagtagagatggtgtttcactatgttggccaggctggtctcgaactccagacctcaagtgatccatctgccttggcctcccaaagtgctgagattacatgtgtgagccacctcgactggcctaattttttgtatttttagtagagatggggtttcaccatattggtcaggctggattttttttcttttttgagatggagtcttgctctgttgcccaggctgtagtgcagtggcatgatcttggctcactgcaacctctcctgcccgggttcaagcgattctcctgcctcagtctcctgagtagctgggattacaggcacccaccaccacatctggctatttttttttttttttttttttaagtagagatggggtttcaccatgttggccaggctggtctggaactcctgacctcaattgatccacctgccttggcctcctaaagtgctgggatgacaggcgtgagccactgcaccccgccacgaggataatttttgagtaaggggatgtatcagggaccaggcagccttgtgactttgtcttgtgcctgcagccaagggggagctcctgggctgcttcgggctcacagagcccaacagcggaagtgaccccagcagcatggagaccagagcccactacaactcatccaacaagagctacaccctcaatgggaccaagacctggtaagggttctgggtggtgggcaggtggtgaacaggggcaaaggggcactggtcagacccctcaccgactgttccatccccaggatcacgaactcgcctatggccgatctgtttgtagtgtgggctcggtgtgaagatggctgcattcggggcttcctgctggagaaggggatgcggggtctctcggcccccaggatccagggcaagttctcgctgcgggcctcagccacaggcatgatcatcatggacggtgtggaggtgccagaggagaatgtgctccctgg

SEQ ID NO: 1279 - DNA, 4046 bp, Homo sapiens
tatgtgccaccatgcctggctaatttttgtatttttagtagagacagggtttcactgtgttggccaggctggtctcaaactcctgacctcaggtgatccgcccacctcagcctcctaaagtgctgggattacaggcatgagccaccacgttcagccttctttttgagatggagtttcgctcttgttgtccaggctggagtgcagtgatgcaatcttggctcactgcagcctccacctcccgggtttaagtgattatcctgcctcaggctcccgagtagctgggattacaggcgtccgccaccacgcctggctaatttttgtatttttagtagaggtggggtttcaccgtgttggccaggctagtctcgaactcctgacctcaggtgatccacccgcctcagcctcctgattacaggtgtgagccaccgttgcccggcccttttcttttttttttttttttgagatggagtttcgctctgtcacccagcctggattactggattacagtggtgcgatcctggctcactgcagtttcctcctcctaggttcaagcaattctgccacctcagccttctgagtagctgggattacaggggtgcaccaccacgcccagctaatttttgtattttttagtagaaatgggatttcaccatgttggccaggctggtcttgaactcctgacctcaggtgatccacccacctcggcctcccaaagtgctgggattataaacgtgagccaccgtgcctggcccctttgtttctttttttagagacagggtctcactgtgttgcccaggctgttctcaagtgatcctcttgccttactgaaagcccccttctttccctaagccacaatttcccagtctgtaaagtggggctgttgtcccaccctctgaaagtggctgtggagatgaaatgaataaacctcagctagggccagcttggtgcctgcctccttgtgtgtccttattcagccctgtctcttgggtcttagctgggcagggccctgttctctattgtcctgctttcccctcctactaccaccaggatatggctgtgctggggtttcgtctgtggcctatgggctcctggcccgagagctggagcgggtggacagtggctacaggtcggcgatgagtgtccagtcctccctcgtcatgcaccctatctatgcctatggcagcgaggaacagcggcagaagtacctgccccagctgggtgagtggctgcccatggggcctggtggaaggaagacagtctctgaggtctggaactcaagggtggggctgtcccctgagcctattctgtccctatctcaaagatagcataagtggccacctggacccccgccagaccctgggcttcacctggagatctgatccctggccagcctgactgtccccctctgtgaccaccgtcatctccctatgctttctgtgttccccagtccagcccaaagtttaaagtccaccaggttcctgctggccatttgcagtggctcacacctataatcccagcactttgggagggtgaagtgagaagatcccttgagcccaagagttcgaaaccagcctgggcaacgtaaggagaccccatgtctattagaaaaacaaaaaaaggaaagagcctatgtgacctgcgctaagtggacgttggccctcttccgtggtgtctcggaggtgttcagctgcttcaagatgaagctgaacatctccttcccagccactggctgccagaaactcattgaagtggacgatgaacgcaaactttgtactttttatgagaagcgtatggccacagaagttgctgttgacgctctgggtgaagaatggaagggttacgtggtcggaatcagtggtgggaacaataaacaaggtttccccttgaaacagggtgtcttgacccatggccgtgtccacttgctactgagtaaggggcattcctattacagaccaaggagaactggagaaagaaagagaagatcagttcatggttgcatcgtggatgccaatctgagtgttctcaacttggttattgtaaaaaaaaggagagaagggtattcctggactgactgagactatgatgcctcgtcacctggggcccagtacagctagcagaatccgtaaacttttcagtctctctaaagaaaatgatgtctgccagtatgttgtaaaaaagcccttaaacaaagaaggtaagaaacctaggaccaaagcacccaagattcagcgccttgtcactccacatgtcctgcagcacaaacagcggcgtattgctctgaagcagccgcatattaagaaaaataaagaagaggctgcagaatatgctaaacttttggccaagagaatgaaggaggctaagaagcaccagggacaaatcgtgaagagacgcagactgtcctctctgcgagcttccacttctaagtctgaatccagtcagaaataagattttttgagtaacaaataagatcagattcgcaaaaaaaaaaaaaaacccacaaggccctgtgtgaccaggcctctgctgacctttccacctcatctctggccactcatgtgatcctcccagccagacttagctacttgaaattctccagaagtaccaccagttctttacacatctgttccctctcccagcactgctcttccccacagcctcctcctgcttaactcctcacacccttccagtttggccaactccttcctgattccctgggtccccctccccatcttggcattgtgatcatgactttggggtaacctgtctcttgaaagcagggccagatctaacttagttatgaggtctgactcaggggcgagggtaattttttttttctttttttgagacaaagtcccgctccgtcccccaggctgaagtgcagtggtacaatcttggctcactgcaacctgcggttccccagttcaagcaattcctgtgcctcggcctcccaattagctgggattgcaggtgcttgctacccgtgcctggctaatttttgtatttttagtagagatggtgtttcactatgttggccaggctggtctcgaactccagacctcaagtgatccatctgccttggcctcccaaagtgctgagattacatgtgtgagccacctcgactggcctaattttttgtatttttagtagagatggggtttcaccatattggtcaggctggattttttttcttttttgagatggagtcttgctctgttgcccaggctgtagtgcagtggcatgatcttggctcactgcaacctctcctgcccgggttcaagcgattctcctgcctcagtctcctgagtagctgggattacaggcacccaccaccacatctggctatttttttttttttttttttttaagtagagatggggtttcaccatgttggccaggctggtctggaactcctgacctcaattgatccacctgccttggcctcctaaagtgctgggatgacaggcgtgagccactgcaccccgccacgaggataatttttgagtaaggggatgtatcagggaccaggcagccttgtgactttgtcttgtgcctgcagccaagggggagctcctgggctgcttcgggctcacagagcccaacagcggaagtgaccccagcagcatggagaccagagcccactacaactcatccaacaagagctacaccctcaatgggaccaagacctggtaagggttctgggtggtgggcaggtggtgaacaggggcaaaggggcactggtcagacccctcaccgactgttccatccccaggatcacgaactcgcctatggccgatctgtttgtagtgtgggctcggtgtgaagatggctgcattcggggcttcctgctggagaaggggatgcggggtctctcggcccccaggatccagggcaagttctcgctgcgggcctcagccacaggcatgatcatcatggacggtgtggaggtgccagaggagaatgtgctccctggtgcatccagcctgggggtaagtggcagccactttgggaatgggtgttgggtcacctgcggatgcggctttgtcagg

SEQ ID NO: 1280 - DNA, 4044 bp, Homo sapiens
gtctcaaactcctgacctcaggtgatccgcccacctcagcctcctaaagtgctgggattacaggcatgagccaccacgttcagccttctttttgagatggagtttcgctcttgttgtccaggctggagtgcagtgatgcaatcttggctcactgcagcctccacctcccgggtttaagtgattatcctgcctcaggctcccgagtagctgggattacaggcgtccgccaccacgcctggctaatttttgtatttttagtagaggtggggtttcaccgtgttggccaggctagtctcgaactcctgacctcaggtgatccacccgcctcagcctcctgattacaggtgtgagccaccgttgcccggcccttttcttttttttttttttttgagatggagtttcgctctgtcacccagcctggattactggattacagtggtgcgatcctggctcactgcagtttcctcctcctaggttcaagcaattctgccacctcagccttctgagtagctgggattacaggggtgcaccaccacgcccagctaatttttgtattttttagtagaaatgggatttcaccatgttggccaggctggtcttgaactcctgacctcaggtgatccacccacctcggcctcccaaagtgctgggattataaacgtgagccaccgtgcctggcccctttgtttctttttttagagacagggtctcactgtgttgcccaggctgttctcaagtgatcctcttgccttactgaaagcccccttctttccctaagccacaatttcccagtctgtaaagtggggctgttgtcccaccctctgaaagtggctgtggagatgaaatgaataaacctcagctagggccagcttggtgcctgcctccttgtgtgtccttattcagccctgtctcttgggtcttagctgggcagggccctgttctctattgtcctgctttcccctcctactaccaccaggatatggctgtgctggggtttcgtctgtggcctatgggctcctggcccgagagctggagcgggtggacagtggctacaggtcggcgatgagtgtccagtcctccctcgtcatgcaccctatctatgcctatggcagcgaggaacagcggcagaagtacctgccccagctgggtgagtggctgcccatggggcctggtggaaggaagacagtctctgaggtctggaactcaagggtggggctgtcccctgagcctattctgtccctatctcaaagatagcataagtggccacctggacccccgccagaccctgggcttcacctggagatctgatccctggccagcctgactgtccccctctgtgaccaccgtcatctccctatgctttctgtgttccccagtccagcccaaagtttaaagtccaccaggttcctgctggccatttgcagtggctcacacctataatcccagcactttgggagggtgaagtgagaagatcccttgagcccaagagttcgaaaccagcctgggcaacgtaaggagaccccatgtctattagaaaaacaaaaaaaggaaagagcctatgtgacctgcgctaagtggacgttggccctcttccgtggtgtctcggaggtgttcagctgcttcaagatgaagctgaacatctccttcccagccactggctgccagaaactcattgaagtggacgatgaacgcaaactttgtactttttatgagaagcgtatggccacagaagttgctgttgacgctctgggtgaagaatggaagggttacgtggtcggaatcagtggtgggaacaataaacaaggtttccccttgaaacagggtgtcttgacccatggccgtgtccacttgctactgagtaaggggcattcctattacagaccaaggagaactggagaaagaaagagaagatcagttcatggttgcatcgtggatgccaatctgagtgttctcaacttggttattgtaaaaaaaaggagagaagggtattcctggactgactgagactatgatgcctcgtcacctggggcccagtacagctagcagaatccgtaaacttttcagtctctctaaagaaaatgatgtctgccagtatgttgtaaaaaagcccttaaacaaagaaggtaagaaacctaggaccaaagcacccaagattcagcgccttgtcactccacatgtcctgcagcacaaacagcggcgtattgctctgaagcagccgcatattaagaaaaataaagaagaggctgcagaatatgctaaacttttggccaagagaatgaaggaggctaagaagcaccagggacaaatcgtgaagagacgcagactgtcctctctgcgagcttccacttctaagtctgaatccagtcagaaataagattttttgagtaacaaataagatcagattcgcaaaaaaaaaaaaaaacccacaaggccctgtgtgaccaggcctctgctgacctttccacctcatctctggccactcatgtgatcctcccagccagacttagctacttgaaattctccagaagtaccaccagttctttacacatctgttccctctcccagcactgctcttccccacagcctcctcctgcttaactcctcacacccttccagtttggccaactccttcctgattccctgggtccccctccccatcttggcattgtgatcatgactttggggtaacctgtctcttgaaagcagggccagatctaacttagttatgaggtctgactcaggggcgagggtaattttttttttctttttttgagacaaagtcccgctccgtcccccaggctgaagtgcagtggtacaatcttggctcactgcaacctgcggttccccagttcaagcaattcctgtgcctcggcctcccaattagctgggattgcaggtgcttgctacccgtgcctggctaatttttgtatttttagtagagatggtgtttcactatgttggccaggctggtctcgaactccagacctcaagtgatccatctgccttggcctcccaaagtgctgagattacatgtgtgagccacctcgactggcctaattttttgtatttttagtagagatggggtttcaccatattggtcaggctggattttttttcttttttgagatggagtcttgctctgttgcccaggctgtagtgcagtggcatgatcttggctcactgcaacctctcctgcccgggttcaagcgattctcctgcctcagtctcctgagtagctgggattacaggcacccaccaccacatctggctatttttttttttttttttttttaagtagagatggggtttcaccatgttggccaggctggtctggaactcctgacctcaattgatccacctgccttggcctcctaaagtgctgggatgacaggcgtgagccactgcaccccgccacgaggataatttttgagtaaggggatgtatcagggaccaggcagccttgtgactttgtcttgtgcctgcagccaagggggagctcctgggctgcttcgggctcacagagcccaacagcggaagtgaccccagcagcatggagaccagagcccactacaactcatccaacaagagctacaccctcaatgggaccaagacctggtaagggttctgggtggtgggcaggtggtgaacaggggcaaaggggcactggtcagacccctcaccgactgttccatccccaggatcacgaactcgcctatggccgatctgtttgtagtgtgggctcggtgtgaagatggctgcattcggggcttcctgctggagaaggggatgcggggtctctcggcccccaggatccagggcaagttctcgctgcgggcctcagccacaggcatgatcatcatggacggtgtggaggtgccagaggagaatgtgctccctggtgcatccagcctgggggtaagtggcagccactttgggaatgggtgttgggtcacctgcggatgcggctttgtcaggcaggctccgtgctggggacgcggctccctgtgcctgtggagcccacacagtggtgattcttactcagcc

SEQ ID NO: 1281 - DNA, 4049 bp, Homo sapiens
tctcaaactcctgacctcaggtgatccgcccacctcagcctcctaaagtgctgggattacaggcatgagccaccacgttcagccttctttttgagatggagtttcgctcttgttgtccaggctggagtgcagtgatgcaatcttggctcactgcagcctccacctcccgggtttaagtgattatcctgcctcaggctcccgagtagctgggattacaggcgtccgccaccacgcctggctaatttttgtatttttagtagaggtggggtttcaccgtgttggccaggctagtctcgaactcctgacctcaggtgatccacccgcctcagcctcctgattacaggtgtgagccaccgttgcccggcccttttcttttttttttttttttgagatggagtttcgctctgtcacccagcctggattactggattacagtggtgcgatcctggctcactgcagtttcctcctcctaggttcaagcaattctgccacctcagccttctgagtagctgggattacaggggtgcaccaccacgcccagctaatttttgtattttttagtagaaatgggatttcaccatgttggccaggctggtcttgaactcctgacctcaggtgatccacccacctcggcctcccaaagtgctgggattataaacgtgagccaccgtgcctggcccctttgtttctttttttagagacagggtctcactgtgttgcccaggctgttctcaagtgatcctcttgccttactgaaagcccccttctttccctaagccacaatttcccagtctgtaaagtggggctgttgtcccaccctctgaaagtggctgtggagatgaaatgaataaacctcagctagggccagcttggtgcctgcctccttgtgtgtccttattcagccctgtctcttgggtcttagctgggcagggccctgttctctattgtcctgctttcccctcctactaccaccaggatatggctgtgctggggtttcgtctgtggcctatgggctcctggcccgagagctggagcgggtggacagtggctacaggtcggcgatgagtgtccagtcctccctcgtcatgcaccctatctatgcctatggcagcgaggaacagcggcagaagtacctgccccagctgggtgagtggctgcccatggggcctggtggaaggaagacagtctctgaggtctggaactcaagggtggggctgtcccctgagcctattctgtccctatctcaaagatagcataagtggccacctggacccccgccagaccctgggcttcacctggagatctgatccctggccagcctgactgtccccctctgtgaccaccgtcatctccctatgctttctgtgttccccagtccagcccaaagtttaaagtccaccaggttcctgctggccatttgcagtggctcacacctataatcccagcactttgggagggtgaagtgagaagatcccttgagcccaagagttcgaaaccagcctgggcaacgtaaggagaccccatgtctattagaaaaacaaaaaaaggaaagagcctatgtgacctgcgctaagtggacgttggccctcttccgtggtgtctcggaggtgttcagctgcttcaagatgaagctgaacatctccttcccagccactggctgccagaaactcattgaagtggacgatgaacgcaaactttgtactttttatgagaagcgtatggccacagaagttgctgttgacgctctgggtgaagaatggaagggttacgtggtcggaatcagtggtgggaacaataaacaaggtttccccttgaaacagggtgtcttgacccatggccgtgtccacttgctactgagtaaggggcattcctattacagaccaaggagaactggagaaagaaagagaagatcagttcatggttgcatcgtggatgccaatctgagtgttctcaacttggttattgtaaaaaaaaggagagaagggtattcctggactgactgagactatgatgcctcgtcacctggggcccagtacagctagcagaatccgtaaacttttcagtctctctaaagaaaatgatgtctgccagtatgttgtaaaaaagcccttaaacaaagaaggtaagaaacctaggaccaaagcacccaagattcagcgccttgtcactccacatgtcctgcagcacaaacagcggcgtattgctctgaagcagccgcatattaagaaaaataaagaagaggctgcagaatatgctaaacttttggccaagagaatgaaggaggctaagaagcaccagggacaaatcgtgaagagacgcagactgtcctctctgcgagcttccacttctaagtctgaatccagtcagaaataagattttttgagtaacaaataagatcagattcgcaaaaaaaaaaaaaaacccacaaggccctgtgtgaccaggcctctgctgacctttccacctcatctctggccactcatgtgatcctcccagccagacttagctacttgaaattctccagaagtaccaccagttctttacacatctgttccctctcccagcactgctcttccccacagcctcctcctgcttaactcctcacacccttccagtttggccaactccttcctgattccctgggtccccctccccatcttggcattgtgatcatgactttggggtaacctgtctcttgaaagcagggccagatctaacttagttatgaggtctgactcaggggcgagggtaattttttttttctttttttgagacaaagtcccgctccgtcccccaggctgaagtgcagtggtacaatcttggctcactgcaacctgcggttccccagttcaagcaattcctgtgcctcggcctcccaattagctgggattgcaggtgcttgctacccgtgcctggctaatttttgtatttttagtagagatggtgtttcactatgttggccaggctggtctcgaactccagacctcaagtgatccatctgccttggcctcccaaagtgctgagattacatgtgtgagccacctcgactggcctaattttttgtatttttagtagagatggggtttcaccatattggtcaggctggattttttttcttttttgagatggagtcttgctctgttgcccaggctgtagtgcagtggcatgatcttggctcactgcaacctctcctgcccgggttcaagcgattctcctgcctcagtctcctgagtagctgggattacaggcacccaccaccacatctggctatttttttttttttttttttttaagtagagatggggtttcaccatgttggccaggctggtctggaactcctgacctcaattgatccacctgccttggcctcctaaagtgctgggatgacaggcgtgagccactgcaccccgccacgaggataatttttgagtaaggggatgtatcagggaccaggcagccttgtgactttgtcttgtgcctgcagccaagggggagctcctgggctgcttcgggctcacagagcccaacagcggaagtgaccccagcagcatggagaccagagcccactacaactcatccaacaagagctacaccctcaatgggaccaagacctggtaagggttctgggtggtgggcaggtggtgaacaggggcaaaggggcactggtcagacccctcaccgactgttccatccccaggatcacgaactcgcctatggccgatctgtttgtagtgtgggctcggtgtgaagatggctgcattcggggcttcctgctggagaaggggatgcggggtctctcggcccccaggatccagggcaagttctcgctgcgggcctcagccacaggcatgatcatcatggacggtgtggaggtgccagaggagaatgtgctccctggtgcatccagcctgggggtaagtggcagccactttgggaatgggtgttgggtcacctgcggatgcggctttgtcaggcaggctccgtgctggggacgcggctccctgtgcctgtggagcccacacagtggtgattcttactcagccggactc

SEQ ID NO: 1282 - DNA, 4044 bp, Homo sapiens
ctcaaactcctgacctcaggtgatccgcccacctcagcctcctaaagtgctgggattacaggcatgagccaccacgttcagccttctttttgagatggagtttcgctcttgttgtccaggctggagtgcagtgatgcaatcttggctcactgcagcctccacctcccgggtttaagtgattatcctgcctcaggctcccgagtagctgggattacaggcgtccgccaccacgcctggctaatttttgtatttttagtagaggtggggtttcaccgtgttggccaggctagtctcgaactcctgacctcaggtgatccacccgcctcagcctcctgattacaggtgtgagccaccgttgcccggcccttttcttttttttttttttttgagatggagtttcgctctgtcacccagcctggattactggattacagtggtgcgatcctggctcactgcagtttcctcctcctaggttcaagcaattctgccacctcagccttctgagtagctgggattacaggggtgcaccaccacgcccagctaatttttgtattttttagtagaaatgggatttcaccatgttggccaggctggtcttgaactcctgacctcaggtgatccacccacctcggcctcccaaagtgctgggattataaacgtgagccaccgtgcctggcccctttgtttctttttttagagacagggtctcactgtgttgcccaggctgttctcaagtgatcctcttgccttactgaaagcccccttctttccctaagccacaatttcccagtctgtaaagtggggctgttgtcccaccctctgaaagtggctgtggagatgaaatgaataaacctcagctagggccagcttggtgcctgcctccttgtgtgtccttattcagccctgtctcttgggtcttagctgggcagggccctgttctctattgtcctgctttcccctcctactaccaccaggatatggctgtgctggggtttcgtctgtggcctatgggctcctggcccgagagctggagcgggtggacagtggctacaggtcggcgatgagtgtccagtcctccctcgtcatgcaccctatctatgcctatggcagcgaggaacagcggcagaagtacctgccccagctgggtgagtggctgcccatggggcctggtggaaggaagacagtctctgaggtctggaactcaagggtggggctgtcccctgagcctattctgtccctatctcaaagatagcataagtggccacctggacccccgccagaccctgggcttcacctggagatctgatccctggccagcctgactgtccccctctgtgaccaccgtcatctccctatgctttctgtgttccccagtccagcccaaagtttaaagtccaccaggttcctgctggccatttgcagtggctcacacctataatcccagcactttgggagggtgaagtgagaagatcccttgagcccaagagttcgaaaccagcctgggcaacgtaaggagaccccatgtctattagaaaaacaaaaaaaggaaagagcctatgtgacctgcgctaagtggacgttggccctcttccgtggtgtctcggaggtgttcagctgcttcaagatgaagctgaacatctccttcccagccactggctgccagaaactcattgaagtggacgatgaacgcaaactttgtactttttatgagaagcgtatggccacagaagttgctgttgacgctctgggtgaagaatggaagggttacgtggtcggaatcagtggtgggaacaataaacaaggtttccccttgaaacagggtgtcttgacccatggccgtgtccacttgctactgagtaaggggcattcctattacagaccaaggagaactggagaaagaaagagaagatcagttcatggttgcatcgtggatgccaatctgagtgttctcaacttggttattgtaaaaaaaaggagagaagggtattcctggactgactgagactatgatgcctcgtcacctggggcccagtacagctagcagaatccgtaaacttttcagtctctctaaagaaaatgatgtctgccagtatgttgtaaaaaagcccttaaacaaagaaggtaagaaacctaggaccaaagcacccaagattcagcgccttgtcactccacatgtcctgcagcacaaacagcggcgtattgctctgaagcagccgcatattaagaaaaataaagaagaggctgcagaatatgctaaacttttggccaagagaatgaaggaggctaagaagcaccagggacaaatcgtgaagagacgcagactgtcctctctgcgagcttccacttctaagtctgaatccagtcagaaataagattttttgagtaacaaataagatcagattcgcaaaaaaaaaaaaaaacccacaaggccctgtgtgaccaggcctctgctgacctttccacctcatctctggccactcatgtgatcctcccagccagacttagctacttgaaattctccagaagtaccaccagttctttacacatctgttccctctcccagcactgctcttccccacagcctcctcctgcttaactcctcacacccttccagtttggccaactccttcctgattccctgggtccccctccccatcttggcattgtgatcatgactttggggtaacctgtctcttgaaagcagggccagatctaacttagttatgaggtctgactcaggggcgagggtaattttttttttctttttttgagacaaagtcccgctccgtcccccaggctgaagtgcagtggtacaatcttggctcactgcaacctgcggttccccagttcaagcaattcctgtgcctcggcctcccaattagctgggattgcaggtgcttgctacccgtgcctggctaatttttgtatttttagtagagatggtgtttcactatgttggccaggctggtctcgaactccagacctcaagtgatccatctgccttggcctcccaaagtgctgagattacatgtgtgagccacctcgactggcctaattttttgtatttttagtagagatggggtttcaccatattggtcaggctggattttttttcttttttgagatggagtcttgctctgttgcccaggctgtagtgcagtggcatgatcttggctcactgcaacctctcctgcccgggttcaagcgattctcctgcctcagtctcctgagtagctgggattacaggcacccaccaccacatctggctatttttttttttttttttttttaagtagagatggggtttcaccatgttggccaggctggtctggaactcctgacctcaattgatccacctgccttggcctcctaaagtgctgggatgacaggcgtgagccactgcaccccgccacgaggataatttttgagtaaggggatgtatcagggaccaggcagccttgtgactttgtcttgtgcctgcagccaagggggagctcctgggctgcttcgggctcacagagcccaacagcggaagtgaccccagcagcatggagaccagagcccactacaactcatccaacaagagctacaccctcaatgggaccaagacctggtaagggttctgggtggtgggcaggtggtgaacaggggcaaaggggcactggtcagacccctcaccgactgttccatccccaggatcacgaactcgcctatggccgatctgtttgtagtgtgggctcggtgtgaagatggctgcattcggggcttcctgctggagaaggggatgcggggtctctcggcccccaggatccagggcaagttctcgctgcgggcctcagccacaggcatgatcatcatggacggtgtggaggtgccagaggagaatgtgctccctggtgcatccagcctgggggtaagtggcagccactttgggaatgggtgttgggtcacctgcggatgcggctttgtcaggcaggctccgtgctggggacgcggctccctgtgcctgtggagcccacacagtggtgattcttactcagccgg

SEQ ID NO: 1283 - DNA, 4045 bp, Homo sapiens
ctcaaactcctgacctcaggtgatccgcccacctcagcctcctaaagtgctgggattacaggcatgagccaccacgttcagccttctttttgagatggagtttcgctcttgttgtccaggctggagtgcagtgatgcaatcttggctcactgcagcctccacctcccgggtttaagtgattatcctgcctcaggctcccgagtagctgggattacaggcgtccgccaccacgcctggctaatttttgtatttttagtagaggtggggtttcaccgtgttggccaggctagtctcgaactcctgacctcaggtgatccacccgcctcagcctcctgattacaggtgtgagccaccgttgcccggcccttttcttttttttttttttttgagatggagtttcgctctgtcacccagcctggattactggattacagtggtgcgatcctggctcactgcagtttcctcctcctaggttcaagcaattctgccacctcagccttctgagtagctgggattacaggggtgcaccaccacgcccagctaatttttgtattttttagtagaaatgggatttcaccatgttggccaggctggtcttgaactcctgacctcaggtgatccacccacctcggcctcccaaagtgctgggattataaacgtgagccaccgtgcctggcccctttgtttctttttttagagacagggtctcactgtgttgcccaggctgttctcaagtgatcctcttgccttactgaaagcccccttctttccctaagccacaatttcccagtctgtaaagtggggctgttgtcccaccctctgaaagtggctgtggagatgaaatgaataaacctcagctagggccagcttggtgcctgcctccttgtgtgtccttattcagccctgtctcttgggtcttagctgggcagggccctgttctctattgtcctgctttcccctcctactaccaccaggatatggctgtgctggggtttcgtctgtggcctatgggctcctggcccgagagctggagcgggtggacagtggctacaggtcggcgatgagtgtccagtcctccctcgtcatgcaccctatctatgcctatggcagcgaggaacagcggcagaagtacctgccccagctgggtgagtggctgcccatggggcctggtggaaggaagacagtctctgaggtctggaactcaagggtggggctgtcccctgagcctattctgtccctatctcaaagatagcataagtggccacctggacccccgccagaccctgggcttcacctggagatctgatccctggccagcctgactgtccccctctgtgaccaccgtcatctccctatgctttctgtgttccccagtccagcccaaagtttaaagtccaccaggttcctgctggccatttgcagtggctcacacctataatcccagcactttgggagggtgaagtgagaagatcccttgagcccaagagttcgaaaccagcctgggcaacgtaaggagaccccatgtctattagaaaaacaaaaaaaggaaagagcctatgtgacctgcgctaagtggacgttggccctcttccgtggtgtctcggaggtgttcagctgcttcaagatgaagctgaacatctccttcccagccactggctgccagaaactcattgaagtggacgatgaacgcaaactttgtactttttatgagaagcgtatggccacagaagttgctgttgacgctctgggtgaagaatggaagggttacgtggtcggaatcagtggtgggaacaataaacaaggtttccccttgaaacagggtgtcttgacccatggccgtgtccacttgctactgagtaaggggcattcctattacagaccaaggagaactggagaaagaaagagaagatcagttcatggttgcatcgtggatgccaatctgagtgttctcaacttggttattgtaaaaaaaaggagagaagggtattcctggactgactgagactatgatgcctcgtcacctggggcccagtacagctagcagaatccgtaaacttttcagtctctctaaagaaaatgatgtctgccagtatgttgtaaaaaagcccttaaacaaagaaggtaagaaacctaggaccaaagcacccaagattcagcgccttgtcactccacatgtcctgcagcacaaacagcggcgtattgctctgaagcagccgcatattaagaaaaataaagaagaggctgcagaatatgctaaacttttggccaagagaatgaaggaggctaagaagcaccagggacaaatcgtgaagagacgcagactgtcctctctgcgagcttccacttctaagtctgaatccagtcagaaataagattttttgagtaacaaataagatcagattcgcaaaaaaaaaaaaaaacccacaaggccctgtgtgaccaggcctctgctgacctttccacctcatctctggccactcatgtgatcctcccagccagacttagctacttgaaattctccagaagtaccaccagttctttacacatctgttccctctcccagcactgctcttccccacagcctcctcctgcttaactcctcacacccttccagtttggccaactccttcctgattccctgggtccccctccccatcttggcattgtgatcatgactttggggtaacctgtctcttgaaagcagggccagatctaacttagttatgaggtctgactcaggggcgagggtaattttttttttctttttttgagacaaagtcccgctccgtcccccaggctgaagtgcagtggtacaatcttggctcactgcaacctgcggttccccagttcaagcaattcctgtgcctcggcctcccaattagctgggattgcaggtgcttgctacccgtgcctggctaatttttgtatttttagtagagatggtgtttcactatgttggccaggctggtctcgaactccagacctcaagtgatccatctgccttggcctcccaaagtgctgagattacatgtgtgagccacctcgactggcctaattttttgtatttttagtagagatggggtttcaccatattggtcaggctggattttttttcttttttgagatggagtcttgctctgttgcccaggctgtagtgcagtggcatgatcttggctcactgcaacctctcctgcccgggttcaagcgattctcctgcctcagtctcctgagtagctgggattacaggcacccaccaccacatctggctatttttttttttttttttttttaagtagagatggggtttcaccatgttggccaggctggtctggaactcctgacctcaattgatccacctgccttggcctcctaaagtgctgggatgacaggcgtgagccactgcaccccgccacgaggataatttttgagtaaggggatgtatcagggaccaggcagccttgtgactttgtcttgtgcctgcagccaagggggagctcctgggctgcttcgggctcacagagcccaacagcggaagtgaccccagcagcatggagaccagagcccactacaactcatccaacaagagctacaccctcaatgggaccaagacctggtaagggttctgggtggtgggcaggtggtgaacaggggcaaaggggcactggtcagacccctcaccgactgttccatccccaggatcacgaactcgcctatggccgatctgtttgtagtgtgggctcggtgtgaagatggctgcattcggggcttcctgctggagaaggggatgcggggtctctcggcccccaggatccagggcaagttctcgctgcgggcctcagccacaggcatgatcatcatggacggtgtggaggtgccagaggagaatgtgctccctggtgcatccagcctgggggtaagtggcagccactttgggaatgggtgttgggtcacctgcggatgcggctttgtcaggcaggctccgtgctggggacgcggctccctgtgcctgtggagcccacacagtggtgattcttactcagccgga

SEQ ID NO: 1284 - DNA, 4050 bp, Homo sapiens
gctgggattacaggcatgagccaccacgttcagccttctttttgagatggagtttcgctcttgttgtccaggctggagtgcagtgatgcaatcttggctcactgcagcctccacctcccgggtttaagtgattatcctgcctcaggctcccgagtagctgggattacaggcgtccgccaccacgcctggctaatttttgtatttttagtagaggtggggtttcaccgtgttggccaggctagtctcgaactcctgacctcaggtgatccacccgcctcagcctcctgattacaggtgtgagccaccgttgcccggcccttttcttttttttttttttttgagatggagtttcgctctgtcacccagcctggattactggattacagtggtgcgatcctggctcactgcagtttcctcctcctaggttcaagcaattctgccacctcagccttctgagtagctgggattacaggggtgcaccaccacgcccagctaatttttgtattttttagtagaaatgggatttcaccatgttggccaggctggtcttgaactcctgacctcaggtgatccacccacctcggcctcccaaagtgctgggattataaacgtgagccaccgtgcctggcccctttgtttctttttttagagacagggtctcactgtgttgcccaggctgttctcaagtgatcctcttgccttactgaaagcccccttctttccctaagccacaatttcccagtctgtaaagtggggctgttgtcccaccctctgaaagtggctgtggagatgaaatgaataaacctcagctagggccagcttggtgcctgcctccttgtgtgtccttattcagccctgtctcttgggtcttagctgggcagggccctgttctctattgtcctgctttcccctcctactaccaccaggatatggctgtgctggggtttcgtctgtggcctatgggctcctggcccgagagctggagcgggtggacagtggctacaggtcggcgatgagtgtccagtcctccctcgtcatgcaccctatctatgcctatggcagcgaggaacagcggcagaagtacctgccccagctgggtgagtggctgcccatggggcctggtggaaggaagacagtctctgaggtctggaactcaagggtggggctgtcccctgagcctattctgtccctatctcaaagatagcataagtggccacctggacccccgccagaccctgggcttcacctggagatctgatccctggccagcctgactgtccccctctgtgaccaccgtcatctccctatgctttctgtgttccccagtccagcccaaagtttaaagtccaccaggttcctgctggccatttgcagtggctcacacctataatcccagcactttgggagggtgaagtgagaagatcccttgagcccaagagttcgaaaccagcctgggcaacgtaaggagaccccatgtctattagaaaaacaaaaaaaggaaagagcctatgtgacctgcgctaagtggacgttggccctcttccgtggtgtctcggaggtgttcagctgcttcaagatgaagctgaacatctccttcccagccactggctgccagaaactcattgaagtggacgatgaacgcaaactttgtactttttatgagaagcgtatggccacagaagttgctgttgacgctctgggtgaagaatggaagggttacgtggtcggaatcagtggtgggaacaataaacaaggtttccccttgaaacagggtgtcttgacccatggccgtgtccacttgctactgagtaaggggcattcctattacagaccaaggagaactggagaaagaaagagaagatcagttcatggttgcatcgtggatgccaatctgagtgttctcaacttggttattgtaaaaaaaaggagagaagggtattcctggactgactgagactatgatgcctcgtcacctggggcccagtacagctagcagaatccgtaaacttttcagtctctctaaagaaaatgatgtctgccagtatgttgtaaaaaagcccttaaacaaagaaggtaagaaacctaggaccaaagcacccaagattcagcgccttgtcactccacatgtcctgcagcacaaacagcggcgtattgctctgaagcagccgcatattaagaaaaataaagaagaggctgcagaatatgctaaacttttggccaagagaatgaaggaggctaagaagcaccagggacaaatcgtgaagagacgcagactgtcctctctgcgagcttccacttctaagtctgaatccagtcagaaataagattttttgagtaacaaataagatcagattcgcaaaaaaaaaaaaaaacccacaaggccctgtgtgaccaggcctctgctgacctttccacctcatctctggccactcatgtgatcctcccagccagacttagctacttgaaattctccagaagtaccaccagttctttacacatctgttccctctcccagcactgctcttccccacagcctcctcctgcttaactcctcacacccttccagtttggccaactccttcctgattccctgggtccccctccccatcttggcattgtgatcatgactttggggtaacctgtctcttgaaagcagggccagatctaacttagttatgaggtctgactcaggggcgagggtaattttttttttctttttttgagacaaagtcccgctccgtcccccaggctgaagtgcagtggtacaatcttggctcactgcaacctgcggttccccagttcaagcaattcctgtgcctcggcctcccaattagctgggattgcaggtgcttgctacccgtgcctggctaatttttgtatttttagtagagatggtgtttcactatgttggccaggctggtctcgaactccagacctcaagtgatccatctgccttggcctcccaaagtgctgagattacatgtgtgagccacctcgactggcctaattttttgtatttttagtagagatggggtttcaccatattggtcaggctggattttttttcttttttgagatggagtcttgctctgttgcccaggctgtagtgcagtggcatgatcttggctcactgcaacctctcctgcccgggttcaagcgattctcctgcctcagtctcctgagtagctgggattacaggcacccaccaccacatctggctatttttttttttttttttttttaagtagagatggggtttcaccatgttggccaggctggtctggaactcctgacctcaattgatccacctgccttggcctcctaaagtgctgggatgacaggcgtgagccactgcaccccgccacgaggataatttttgagtaaggggatgtatcagggaccaggcagccttgtgactttgtcttgtgcctgcagccaagggggagctcctgggctgcttcgggctcacagagcccaacagcggaagtgaccccagcagcatggagaccagagcccactacaactcatccaacaagagctacaccctcaatgggaccaagacctggtaagggttctgggtggtgggcaggtggtgaacaggggcaaaggggcactggtcagacccctcaccgactgttccatccccaggatcacgaactcgcctatggccgatctgtttgtagtgtgggctcggtgtgaagatggctgcattcggggcttcctgctggagaaggggatgcggggtctctcggcccccaggatccagggcaagttctcgctgcgggcctcagccacaggcatgatcatcatggacggtgtggaggtgccagaggagaatgtgctccctggtgcatccagcctgggggtaagtggcagccactttgggaatgggtgttgggtcacctgcggatgcggctttgtcaggcaggctccgtgctggggacgcggctccctgtgcctgtggagcccacacagtggtgattcttactcagccggactcgctgacgtgctgaaaactgcccccatttggtgaccgtctcgctcatcccg

SEQ ID NO: 1285 - DNA, 4061 bp, Homo sapiens
tgggattacaggcatgagccaccacgttcagccttctttttgagatggagtttcgctcttgttgtccaggctggagtgcagtgatgcaatcttggctcactgcagcctccacctcccgggtttaagtgattatcctgcctcaggctcccgagtagctgggattacaggcgtccgccaccacgcctggctaatttttgtatttttagtagaggtggggtttcaccgtgttggccaggctagtctcgaactcctgacctcaggtgatccacccgcctcagcctcctgattacaggtgtgagccaccgttgcccggcccttttcttttttttttttttttgagatggagtttcgctctgtcacccagcctggattactggattacagtggtgcgatcctggctcactgcagtttcctcctcctaggttcaagcaattctgccacctcagccttctgagtagctgggattacaggggtgcaccaccacgcccagctaatttttgtattttttagtagaaatgggatttcaccatgttggccaggctggtcttgaactcctgacctcaggtgatccacccacctcggcctcccaaagtgctgggattataaacgtgagccaccgtgcctggcccctttgtttctttttttagagacagggtctcactgtgttgcccaggctgttctcaagtgatcctcttgccttactgaaagcccccttctttccctaagccacaatttcccagtctgtaaagtggggctgttgtcccaccctctgaaagtggctgtggagatgaaatgaataaacctcagctagggccagcttggtgcctgcctccttgtgtgtccttattcagccctgtctcttgggtcttagctgggcagggccctgttctctattgtcctgctttcccctcctactaccaccaggatatggctgtgctggggtttcgtctgtggcctatgggctcctggcccgagagctggagcgggtggacagtggctacaggtcggcgatgagtgtccagtcctccctcgtcatgcaccctatctatgcctatggcagcgaggaacagcggcagaagtacctgccccagctgggtgagtggctgcccatggggcctggtggaaggaagacagtctctgaggtctggaactcaagggtggggctgtcccctgagcctattctgtccctatctcaaagatagcataagtggccacctggacccccgccagaccctgggcttcacctggagatctgatccctggccagcctgactgtccccctctgtgaccaccgtcatctccctatgctttctgtgttccccagtccagcccaaagtttaaagtccaccaggttcctgctggccatttgcagtggctcacacctataatcccagcactttgggagggtgaagtgagaagatcccttgagcccaagagttcgaaaccagcctgggcaacgtaaggagaccccatgtctattagaaaaacaaaaaaaggaaagagcctatgtgacctgcgctaagtggacgttggccctcttccgtggtgtctcggaggtgttcagctgcttcaagatgaagctgaacatctccttcccagccactggctgccagaaactcattgaagtggacgatgaacgcaaactttgtactttttatgagaagcgtatggccacagaagttgctgttgacgctctgggtgaagaatggaagggttacgtggtcggaatcagtggtgggaacaataaacaaggtttccccttgaaacagggtgtcttgacccatggccgtgtccacttgctactgagtaaggggcattcctattacagaccaaggagaactggagaaagaaagagaagatcagttcatggttgcatcgtggatgccaatctgagtgttctcaacttggttattgtaaaaaaaaggagagaagggtattcctggactgactgagactatgatgcctcgtcacctggggcccagtacagctagcagaatccgtaaacttttcagtctctctaaagaaaatgatgtctgccagtatgttgtaaaaaagcccttaaacaaagaaggtaagaaacctaggaccaaagcacccaagattcagcgccttgtcactccacatgtcctgcagcacaaacagcggcgtattgctctgaagcagccgcatattaagaaaaataaagaagaggctgcagaatatgctaaacttttggccaagagaatgaaggaggctaagaagcaccagggacaaatcgtgaagagacgcagactgtcctctctgcgagcttccacttctaagtctgaatccagtcagaaataagattttttgagtaacaaataagatcagattcgcaaaaaaaaaaaaaaacccacaaggccctgtgtgaccaggcctctgctgacctttccacctcatctctggccactcatgtgatcctcccagccagacttagctacttgaaattctccagaagtaccaccagttctttacacatctgttccctctcccagcactgctcttccccacagcctcctcctgcttaactcctcacacccttccagtttggccaactccttcctgattccctgggtccccctccccatcttggcattgtgatcatgactttggggtaacctgtctcttgaaagcagggccagatctaacttagttatgaggtctgactcaggggcgagggtaattttttttttctttttttgagacaaagtcccgctccgtcccccaggctgaagtgcagtggtacaatcttggctcactgcaacctgcggttccccagttcaagcaattcctgtgcctcggcctcccaattagctgggattgcaggtgcttgctacccgtgcctggctaatttttgtatttttagtagagatggtgtttcactatgttggccaggctggtctcgaactccagacctcaagtgatccatctgccttggcctcccaaagtgctgagattacatgtgtgagccacctcgactggcctaattttttgtatttttagtagagatggggtttcaccatattggtcaggctggattttttttcttttttgagatggagtcttgctctgttgcccaggctgtagtgcagtggcatgatcttggctcactgcaacctctcctgcccgggttcaagcgattctcctgcctcagtctcctgagtagctgggattacaggcacccaccaccacatctggctatttttttttttttttttttttaagtagagatggggtttcaccatgttggccaggctggtctggaactcctgacctcaattgatccacctgccttggcctcctaaagtgctgggatgacaggcgtgagccactgcaccccgccacgaggataatttttgagtaaggggatgtatcagggaccaggcagccttgtgactttgtcttgtgcctgcagccaagggggagctcctgggctgcttcgggctcacagagcccaacagcggaagtgaccccagcagcatggagaccagagcccactacaactcatccaacaagagctacaccctcaatgggaccaagacctggtaagggttctgggtggtgggcaggtggtgaacaggggcaaaggggcactggtcagacccctcaccgactgttccatccccaggatcacgaactcgcctatggccgatctgtttgtagtgtgggctcggtgtgaagatggctgcattcggggcttcctgctggagaaggggatgcggggtctctcggcccccaggatccagggcaagttctcgctgcgggcctcagccacaggcatgatcatcatggacggtgtggaggtgccagaggagaatgtgctccctggtgcatccagcctgggggtaagtggcagccactttgggaatgggtgttgggtcacctgcggatgcggctttgtcaggcaggctccgtgctggggacgcggctccctgtgcctgtggagcccacacagtggtgattcttactcagccggactcgctgacgtgctgaaaactgcccccatttggtgaccgtctcgctcatcccggctctgcccggga

SEQ ID NO: 1286 - DNA, 4047 bp, Homo sapiens
caccacgttcagccttctttttgagatggagtttcgctcttgttgtccaggctggagtgcagtgatgcaatcttggctcactgcagcctccacctcccgggtttaagtgattatcctgcctcaggctcccgagtagctgggattacaggcgtccgccaccacgcctggctaatttttgtatttttagtagaggtggggtttcaccgtgttggccaggctagtctcgaactcctgacctcaggtgatccacccgcctcagcctcctgattacaggtgtgagccaccgttgcccggcccttttcttttttttttttttttgagatggagtttcgctctgtcacccagcctggattactggattacagtggtgcgatcctggctcactgcagtttcctcctcctaggttcaagcaattctgccacctcagccttctgagtagctgggattacaggggtgcaccaccacgcccagctaatttttgtattttttagtagaaatgggatttcaccatgttggccaggctggtcttgaactcctgacctcaggtgatccacccacctcggcctcccaaagtgctgggattataaacgtgagccaccgtgcctggcccctttgtttctttttttagagacagggtctcactgtgttgcccaggctgttctcaagtgatcctcttgccttactgaaagcccccttctttccctaagccacaatttcccagtctgtaaagtggggctgttgtcccaccctctgaaagtggctgtggagatgaaatgaataaacctcagctagggccagcttggtgcctgcctccttgtgtgtccttattcagccctgtctcttgggtcttagctgggcagggccctgttctctattgtcctgctttcccctcctactaccaccaggatatggctgtgctggggtttcgtctgtggcctatgggctcctggcccgagagctggagcgggtggacagtggctacaggtcggcgatgagtgtccagtcctccctcgtcatgcaccctatctatgcctatggcagcgaggaacagcggcagaagtacctgccccagctgggtgagtggctgcccatggggcctggtggaaggaagacagtctctgaggtctggaactcaagggtggggctgtcccctgagcctattctgtccctatctcaaagatagcataagtggccacctggacccccgccagaccctgggcttcacctggagatctgatccctggccagcctgactgtccccctctgtgaccaccgtcatctccctatgctttctgtgttccccagtccagcccaaagtttaaagtccaccaggttcctgctggccatttgcagtggctcacacctataatcccagcactttgggagggtgaagtgagaagatcccttgagcccaagagttcgaaaccagcctgggcaacgtaaggagaccccatgtctattagaaaaacaaaaaaaggaaagagcctatgtgacctgcgctaagtggacgttggccctcttccgtggtgtctcggaggtgttcagctgcttcaagatgaagctgaacatctccttcccagccactggctgccagaaactcattgaagtggacgatgaacgcaaactttgtactttttatgagaagcgtatggccacagaagttgctgttgacgctctgggtgaagaatggaagggttacgtggtcggaatcagtggtgggaacaataaacaaggtttccccttgaaacagggtgtcttgacccatggccgtgtccacttgctactgagtaaggggcattcctattacagaccaaggagaactggagaaagaaagagaagatcagttcatggttgcatcgtggatgccaatctgagtgttctcaacttggttattgtaaaaaaaaggagagaagggtattcctggactgactgagactatgatgcctcgtcacctggggcccagtacagctagcagaatccgtaaacttttcagtctctctaaagaaaatgatgtctgccagtatgttgtaaaaaagcccttaaacaaagaaggtaagaaacctaggaccaaagcacccaagattcagcgccttgtcactccacatgtcctgcagcacaaacagcggcgtattgctctgaagcagccgcatattaagaaaaataaagaagaggctgcagaatatgctaaacttttggccaagagaatgaaggaggctaagaagcaccagggacaaatcgtgaagagacgcagactgtcctctctgcgagcttccacttctaagtctgaatccagtcagaaataagattttttgagtaacaaataagatcagattcgcaaaaaaaaaaaaaaacccacaaggccctgtgtgaccaggcctctgctgacctttccacctcatctctggccactcatgtgatcctcccagccagacttagctacttgaaattctccagaagtaccaccagttctttacacatctgttccctctcccagcactgctcttccccacagcctcctcctgcttaactcctcacacccttccagtttggccaactccttcctgattccctgggtccccctccccatcttggcattgtgatcatgactttggggtaacctgtctcttgaaagcagggccagatctaacttagttatgaggtctgactcaggggcgagggtaattttttttttctttttttgagacaaagtcccgctccgtcccccaggctgaagtgcagtggtacaatcttggctcactgcaacctgcggttccccagttcaagcaattcctgtgcctcggcctcccaattagctgggattgcaggtgcttgctacccgtgcctggctaatttttgtatttttagtagagatggtgtttcactatgttggccaggctggtctcgaactccagacctcaagtgatccatctgccttggcctcccaaagtgctgagattacatgtgtgagccacctcgactggcctaattttttgtatttttagtagagatggggtttcaccatattggtcaggctggattttttttcttttttgagatggagtcttgctctgttgcccaggctgtagtgcagtggcatgatcttggctcactgcaacctctcctgcccgggttcaagcgattctcctgcctcagtctcctgagtagctgggattacaggcacccaccaccacatctggctatttttttttttttttttttttaagtagagatggggtttcaccatgttggccaggctggtctggaactcctgacctcaattgatccacctgccttggcctcctaaagtgctgggatgacaggcgtgagccactgcaccccgccacgaggataatttttgagtaaggggatgtatcagggaccaggcagccttgtgactttgtcttgtgcctgcagccaagggggagctcctgggctgcttcgggctcacagagcccaacagcggaagtgaccccagcagcatggagaccagagcccactacaactcatccaacaagagctacaccctcaatgggaccaagacctggtaagggttctgggtggtgggcaggtggtgaacaggggcaaaggggcactggtcagacccctcaccgactgttccatccccaggatcacgaactcgcctatggccgatctgtttgtagtgtgggctcggtgtgaagatggctgcattcggggcttcctgctggagaaggggatgcggggtctctcggcccccaggatccagggcaagttctcgctgcgggcctcagccacaggcatgatcatcatggacggtgtggaggtgccagaggagaatgtgctccctggtgcatccagcctgggggtaagtggcagccactttgggaatgggtgttgggtcacctgcggatgcggctttgtcaggcaggctccgtgctggggacgcggctccctgtgcctgtggagcccacacagtggtgattcttactcagccggactcgctgacgtgctgaaaactgcccccatttggtgaccgtctcgctcatcccggctctgcccgggacacat

SEQ ID NO: 1287 - DNA, 4042 bp, Homo sapiens
atggagtttcgctcttgttgtccaggctggagtgcagtgatgcaatcttggctcactgcagcctccacctcccgggtttaagtgattatcctgcctcaggctcccgagtagctgggattacaggcgtccgccaccacgcctggctaatttttgtatttttagtagaggtggggtttcaccgtgttggccaggctagtctcgaactcctgacctcaggtgatccacccgcctcagcctcctgattacaggtgtgagccaccgttgcccggcccttttcttttttttttttttttgagatggagtttcgctctgtcacccagcctggattactggattacagtggtgcgatcctggctcactgcagtttcctcctcctaggttcaagcaattctgccacctcagccttctgagtagctgggattacaggggtgcaccaccacgcccagctaatttttgtattttttagtagaaatgggatttcaccatgttggccaggctggtcttgaactcctgacctcaggtgatccacccacctcggcctcccaaagtgctgggattataaacgtgagccaccgtgcctggcccctttgtttctttttttagagacagggtctcactgtgttgcccaggctgttctcaagtgatcctcttgccttactgaaagcccccttctttccctaagccacaatttcccagtctgtaaagtggggctgttgtcccaccctctgaaagtggctgtggagatgaaatgaataaacctcagctagggccagcttggtgcctgcctccttgtgtgtccttattcagccctgtctcttgggtcttagctgggcagggccctgttctctattgtcctgctttcccctcctactaccaccaggatatggctgtgctggggtttcgtctgtggcctatgggctcctggcccgagagctggagcgggtggacagtggctacaggtcggcgatgagtgtccagtcctccctcgtcatgcaccctatctatgcctatggcagcgaggaacagcggcagaagtacctgccccagctgggtgagtggctgcccatggggcctggtggaaggaagacagtctctgaggtctggaactcaagggtggggctgtcccctgagcctattctgtccctatctcaaagatagcataagtggccacctggacccccgccagaccctgggcttcacctggagatctgatccctggccagcctgactgtccccctctgtgaccaccgtcatctccctatgctttctgtgttccccagtccagcccaaagtttaaagtccaccaggttcctgctggccatttgcagtggctcacacctataatcccagcactttgggagggtgaagtgagaagatcccttgagcccaagagttcgaaaccagcctgggcaacgtaaggagaccccatgtctattagaaaaacaaaaaaaggaaagagcctatgtgacctgcgctaagtggacgttggccctcttccgtggtgtctcggaggtgttcagctgcttcaagatgaagctgaacatctccttcccagccactggctgccagaaactcattgaagtggacgatgaacgcaaactttgtactttttatgagaagcgtatggccacagaagttgctgttgacgctctgggtgaagaatggaagggttacgtggtcggaatcagtggtgggaacaataaacaaggtttccccttgaaacagggtgtcttgacccatggccgtgtccacttgctactgagtaaggggcattcctattacagaccaaggagaactggagaaagaaagagaagatcagttcatggttgcatcgtggatgccaatctgagtgttctcaacttggttattgtaaaaaaaaggagagaagggtattcctggactgactgagactatgatgcctcgtcacctggggcccagtacagctagcagaatccgtaaacttttcagtctctctaaagaaaatgatgtctgccagtatgttgtaaaaaagcccttaaacaaagaaggtaagaaacctaggaccaaagcacccaagattcagcgccttgtcactccacatgtcctgcagcacaaacagcggcgtattgctctgaagcagccgcatattaagaaaaataaagaagaggctgcagaatatgctaaacttttggccaagagaatgaaggaggctaagaagcaccagggacaaatcgtgaagagacgcagactgtcctctctgcgagcttccacttctaagtctgaatccagtcagaaataagattttttgagtaacaaataagatcagattcgcaaaaaaaaaaaaaaacccacaaggccctgtgtgaccaggcctctgctgacctttccacctcatctctggccactcatgtgatcctcccagccagacttagctacttgaaattctccagaagtaccaccagttctttacacatctgttccctctcccagcactgctcttccccacagcctcctcctgcttaactcctcacacccttccagtttggccaactccttcctgattccctgggtccccctccccatcttggcattgtgatcatgactttggggtaacctgtctcttgaaagcagggccagatctaacttagttatgaggtctgactcaggggcgagggtaattttttttttctttttttgagacaaagtcccgctccgtcccccaggctgaagtgcagtggtacaatcttggctcactgcaacctgcggttccccagttcaagcaattcctgtgcctcggcctcccaattagctgggattgcaggtgcttgctacccgtgcctggctaatttttgtatttttagtagagatggtgtttcactatgttggccaggctggtctcgaactccagacctcaagtgatccatctgccttggcctcccaaagtgctgagattacatgtgtgagccacctcgactggcctaattttttgtatttttagtagagatggggtttcaccatattggtcaggctggattttttttcttttttgagatggagtcttgctctgttgcccaggctgtagtgcagtggcatgatcttggctcactgcaacctctcctgcccgggttcaagcgattctcctgcctcagtctcctgagtagctgggattacaggcacccaccaccacatctggctatttttttttttttttttttttaagtagagatggggtttcaccatgttggccaggctggtctggaactcctgacctcaattgatccacctgccttggcctcctaaagtgctgggatgacaggcgtgagccactgcaccccgccacgaggataatttttgagtaaggggatgtatcagggaccaggcagccttgtgactttgtcttgtgcctgcagccaagggggagctcctgggctgcttcgggctcacagagcccaacagcggaagtgaccccagcagcatggagaccagagcccactacaactcatccaacaagagctacaccctcaatgggaccaagacctggtaagggttctgggtggtgggcaggtggtgaacaggggcaaaggggcactggtcagacccctcaccgactgttccatccccaggatcacgaactcgcctatggccgatctgtttgtagtgtgggctcggtgtgaagatggctgcattcggggcttcctgctggagaaggggatgcggggtctctcggcccccaggatccagggcaagttctcgctgcgggcctcagccacaggcatgatcatcatggacggtgtggaggtgccagaggagaatgtgctccctggtgcatccagcctgggggtaagtggcagccactttgggaatgggtgttgggtcacctgcggatgcggctttgtcaggcaggctccgtgctggggacgcggctccctgtgcctgtggagcccacacagtggtgattcttactcagccggactcgctgacgtgctgaaaactgcccccatttggtgaccgtctcgctcatcccggctctgcccgggacacatgggcctgaaccagctcagtc

SEQ ID NO: 1288 - DNA, 4114 bp, Homo sapiens
gcctccacctcccgggtttaagtgattatcctgcctcaggctcccgagtagctgggattacaggcgtccgccaccacgcctggctaatttttgtatttttagtagaggtggggtttcaccgtgttggccaggctagtctcgaactcctgacctcaggtgatccacccgcctcagcctcctgattacaggtgtgagccaccgttgcccggcccttttcttttttttttttttttgagatggagtttcgctctgtcacccagcctggattactggattacagtggtgcgatcctggctcactgcagtttcctcctcctaggttcaagcaattctgccacctcagccttctgagtagctgggattacaggggtgcaccaccacgcccagctaatttttgtattttttagtagaaatgggatttcaccatgttggccaggctggtcttgaactcctgacctcaggtgatccacccacctcggcctcccaaagtgctgggattataaacgtgagccaccgtgcctggcccctttgtttctttttttagagacagggtctcactgtgttgcccaggctgttctcaagtgatcctcttgccttactgaaagcccccttctttccctaagccacaatttcccagtctgtaaagtggggctgttgtcccaccctctgaaagtggctgtggagatgaaatgaataaacctcagctagggccagcttggtgcctgcctccttgtgtgtccttattcagccctgtctcttgggtcttagctgggcagggccctgttctctattgtcctgctttcccctcctactaccaccaggatatggctgtgctggggtttcgtctgtggcctatgggctcctggcccgagagctggagcgggtggacagtggctacaggtcggcgatgagtgtccagtcctccctcgtcatgcaccctatctatgcctatggcagcgaggaacagcggcagaagtacctgccccagctgggtgagtggctgcccatggggcctggtggaaggaagacagtctctgaggtctggaactcaagggtggggctgtcccctgagcctattctgtccctatctcaaagatagcataagtggccacctggacccccgccagaccctgggcttcacctggagatctgatccctggccagcctgactgtccccctctgtgaccaccgtcatctccctatgctttctgtgttccccagtccagcccaaagtttaaagtccaccaggttcctgctggccatttgcagtggctcacacctataatcccagcactttgggagggtgaagtgagaagatcccttgagcccaagagttcgaaaccagcctgggcaacgtaaggagaccccatgtctattagaaaaacaaaaaaaggaaagagcctatgtgacctgcgctaagtggacgttggccctcttccgtggtgtctcggaggtgttcagctgcttcaagatgaagctgaacatctccttcccagccactggctgccagaaactcattgaagtggacgatgaacgcaaactttgtactttttatgagaagcgtatggccacagaagttgctgttgacgctctgggtgaagaatggaagggttacgtggtcggaatcagtggtgggaacaataaacaaggtttccccttgaaacagggtgtcttgacccatggccgtgtccacttgctactgagtaaggggcattcctattacagaccaaggagaactggagaaagaaagagaagatcagttcatggttgcatcgtggatgccaatctgagtgttctcaacttggttattgtaaaaaaaaggagagaagggtattcctggactgactgagactatgatgcctcgtcacctggggcccagtacagctagcagaatccgtaaacttttcagtctctctaaagaaaatgatgtctgccagtatgttgtaaaaaagcccttaaacaaagaaggtaagaaacctaggaccaaagcacccaagattcagcgccttgtcactccacatgtcctgcagcacaaacagcggcgtattgctctgaagcagccgcatattaagaaaaataaagaagaggctgcagaatatgctaaacttttggccaagagaatgaaggaggctaagaagcaccagggacaaatcgtgaagagacgcagactgtcctctctgcgagcttccacttctaagtctgaatccagtcagaaataagattttttgagtaacaaataagatcagattcgcaaaaaaaaaaaaaaacccacaaggccctgtgtgaccaggcctctgctgacctttccacctcatctctggccactcatgtgatcctcccagccagacttagctacttgaaattctccagaagtaccaccagttctttacacatctgttccctctcccagcactgctcttccccacagcctcctcctgcttaactcctcacacccttccagtttggccaactccttcctgattccctgggtccccctccccatcttggcattgtgatcatgactttggggtaacctgtctcttgaaagcagggccagatctaacttagttatgaggtctgactcaggggcgagggtaattttttttttctttttttgagacaaagtcccgctccgtcccccaggctgaagtgcagtggtacaatcttggctcactgcaacctgcggttccccagttcaagcaattcctgtgcctcggcctcccaattagctgggattgcaggtgcttgctacccgtgcctggctaatttttgtatttttagtagagatggtgtttcactatgttggccaggctggtctcgaactccagacctcaagtgatccatctgccttggcctcccaaagtgctgagattacatgtgtgagccacctcgactggcctaattttttgtatttttagtagagatggggtttcaccatattggtcaggctggattttttttcttttttgagatggagtcttgctctgttgcccaggctgtagtgcagtggcatgatcttggctcactgcaacctctcctgcccgggttcaagcgattctcctgcctcagtctcctgagtagctgggattacaggcacccaccaccacatctggctatttttttttttttttttttttaagtagagatggggtttcaccatgttggccaggctggtctggaactcctgacctcaattgatccacctgccttggcctcctaaagtgctgggatgacaggcgtgagccactgcaccccgccacgaggataatttttgagtaaggggatgtatcagggaccaggcagccttgtgactttgtcttgtgcctgcagccaagggggagctcctgggctgcttcgggctcacagagcccaacagcggaagtgaccccagcagcatggagaccagagcccactacaactcatccaacaagagctacaccctcaatgggaccaagacctggtaagggttctgggtggtgggcaggtggtgaacaggggcaaaggggcactggtcagacccctcaccgactgttccatccccaggatcacgaactcgcctatggccgatctgtttgtagtgtgggctcggtgtgaagatggctgcattcggggcttcctgctggagaaggggatgcggggtctctcggcccccaggatccagggcaagttctcgctgcgggcctcagccacaggcatgatcatcatggacggtgtggaggtgccagaggagaatgtgctccctggtgcatccagcctgggggtaagtggcagccactttgggaatgggtgttgggtcacctgcggatgcggctttgtcaggcaggctccgtgctggggacgcggctccctgtgcctgtggagcccacacagtggtgattcttactcagccggactcgctgacgtgctgaaaactgcccccatttggtgaccgtctcgctcatcccggctctgcccgggacacatgggcctgaaccagctcagtcatttgactcacagtgcatcttctggcatccgtcagcctcctggctctgagcatcgaacccagatgccaggctgggtgggactgtgtgcaaaccgagtgagcaggcaccgagcttcagtgccagggccatctg

SEQ ID NO: 1289 - DNA, 4150 bp, Homo sapiens
ctccacctcccgggtttaagtgattatcctgcctcaggctcccgagtagctgggattacaggcgtccgccaccacgcctggctaatttttgtatttttagtagaggtggggtttcaccgtgttggccaggctagtctcgaactcctgacctcaggtgatccacccgcctcagcctcctgattacaggtgtgagccaccgttgcccggcccttttcttttttttttttttttgagatggagtttcgctctgtcacccagcctggattactggattacagtggtgcgatcctggctcactgcagtttcctcctcctaggttcaagcaattctgccacctcagccttctgagtagctgggattacaggggtgcaccaccacgcccagctaatttttgtattttttagtagaaatgggatttcaccatgttggccaggctggtcttgaactcctgacctcaggtgatccacccacctcggcctcccaaagtgctgggattataaacgtgagccaccgtgcctggcccctttgtttctttttttagagacagggtctcactgtgttgcccaggctgttctcaagtgatcctcttgccttactgaaagcccccttctttccctaagccacaatttcccagtctgtaaagtggggctgttgtcccaccctctgaaagtggctgtggagatgaaatgaataaacctcagctagggccagcttggtgcctgcctccttgtgtgtccttattcagccctgtctcttgggtcttagctgggcagggccctgttctctattgtcctgctttcccctcctactaccaccaggatatggctgtgctggggtttcgtctgtggcctatgggctcctggcccgagagctggagcgggtggacagtggctacaggtcggcgatgagtgtccagtcctccctcgtcatgcaccctatctatgcctatggcagcgaggaacagcggcagaagtacctgccccagctgggtgagtggctgcccatggggcctggtggaaggaagacagtctctgaggtctggaactcaagggtggggctgtcccctgagcctattctgtccctatctcaaagatagcataagtggccacctggacccccgccagaccctgggcttcacctggagatctgatccctggccagcctgactgtccccctctgtgaccaccgtcatctccctatgctttctgtgttccccagtccagcccaaagtttaaagtccaccaggttcctgctggccatttgcagtggctcacacctataatcccagcactttgggagggtgaagtgagaagatcccttgagcccaagagttcgaaaccagcctgggcaacgtaaggagaccccatgtctattagaaaaacaaaaaaaggaaagagcctatgtgacctgcgctaagtggacgttggccctcttccgtggtgtctcggaggtgttcagctgcttcaagatgaagctgaacatctccttcccagccactggctgccagaaactcattgaagtggacgatgaacgcaaactttgtactttttatgagaagcgtatggccacagaagttgctgttgacgctctgggtgaagaatggaagggttacgtggtcggaatcagtggtgggaacaataaacaaggtttccccttgaaacagggtgtcttgacccatggccgtgtccacttgctactgagtaaggggcattcctattacagaccaaggagaactggagaaagaaagagaagatcagttcatggttgcatcgtggatgccaatctgagtgttctcaacttggttattgtaaaaaaaaggagagaagggtattcctggactgactgagactatgatgcctcgtcacctggggcccagtacagctagcagaatccgtaaacttttcagtctctctaaagaaaatgatgtctgccagtatgttgtaaaaaagcccttaaacaaagaaggtaagaaacctaggaccaaagcacccaagattcagcgccttgtcactccacatgtcctgcagcacaaacagcggcgtattgctctgaagcagccgcatattaagaaaaataaagaagaggctgcagaatatgctaaacttttggccaagagaatgaaggaggctaagaagcaccagggacaaatcgtgaagagacgcagactgtcctctctgcgagcttccacttctaagtctgaatccagtcagaaataagattttttgagtaacaaataagatcagattcgcaaaaaaaaaaaaaaacccacaaggccctgtgtgaccaggcctctgctgacctttccacctcatctctggccactcatgtgatcctcccagccagacttagctacttgaaattctccagaagtaccaccagttctttacacatctgttccctctcccagcactgctcttccccacagcctcctcctgcttaactcctcacacccttccagtttggccaactccttcctgattccctgggtccccctccccatcttggcattgtgatcatgactttggggtaacctgtctcttgaaagcagggccagatctaacttagttatgaggtctgactcaggggcgagggtaattttttttttctttttttgagacaaagtcccgctccgtcccccaggctgaagtgcagtggtacaatcttggctcactgcaacctgcggttccccagttcaagcaattcctgtgcctcggcctcccaattagctgggattgcaggtgcttgctacccgtgcctggctaatttttgtatttttagtagagatggtgtttcactatgttggccaggctggtctcgaactccagacctcaagtgatccatctgccttggcctcccaaagtgctgagattacatgtgtgagccacctcgactggcctaattttttgtatttttagtagagatggggtttcaccatattggtcaggctggattttttttcttttttgagatggagtcttgctctgttgcccaggctgtagtgcagtggcatgatcttggctcactgcaacctctcctgcccgggttcaagcgattctcctgcctcagtctcctgagtagctgggattacaggcacccaccaccacatctggctatttttttttttttttttttttaagtagagatggggtttcaccatgttggccaggctggtctggaactcctgacctcaattgatccacctgccttggcctcctaaagtgctgggatgacaggcgtgagccactgcaccccgccacgaggataatttttgagtaaggggatgtatcagggaccaggcagccttgtgactttgtcttgtgcctgcagccaagggggagctcctgggctgcttcgggctcacagagcccaacagcggaagtgaccccagcagcatggagaccagagcccactacaactcatccaacaagagctacaccctcaatgggaccaagacctggtaagggttctgggtggtgggcaggtggtgaacaggggcaaaggggcactggtcagacccctcaccgactgttccatccccaggatcacgaactcgcctatggccgatctgtttgtagtgtgggctcggtgtgaagatggctgcattcggggcttcctgctggagaaggggatgcggggtctctcggcccccaggatccagggcaagttctcgctgcgggcctcagccacaggcatgatcatcatggacggtgtggaggtgccagaggagaatgtgctccctggtgcatccagcctgggggtaagtggcagccactttgggaatgggtgttgggtcacctgcggatgcggctttgtcaggcaggctccgtgctggggacgcggctccctgtgcctgtggagcccacacagtggtgattcttactcagccggactcgctgacgtgctgaaaactgcccccatttggtgaccgtctcgctcatcccggctctgcccgggacacatgggcctgaaccagctcagtcatttgactcacagtgcatcttctggcatccgtcagcctcctggctctgagcatcgaacccagatgccaggctgggtgggactgtgtgcaaaccgagtgagcaggcaccgagcttcagtgccagggccatctgtgatgtgaaccacaacctgagtccccctgcgtggggtg

SEQ ID NO: 1290 - DNA, 4063 bp, Homo sapiens
attatcctgcctcaggctcccgagtagctgggattacaggcgtccgccaccacgcctggctaatttttgtatttttagtagaggtggggtttcaccgtgttggccaggctagtctcgaactcctgacctcaggtgatccacccgcctcagcctcctgattacaggtgtgagccaccgttgcccggcccttttcttttttttttttttttgagatggagtttcgctctgtcacccagcctggattactggattacagtggtgcgatcctggctcactgcagtttcctcctcctaggttcaagcaattctgccacctcagccttctgagtagctgggattacaggggtgcaccaccacgcccagctaatttttgtattttttagtagaaatgggatttcaccatgttggccaggctggtcttgaactcctgacctcaggtgatccacccacctcggcctcccaaagtgctgggattataaacgtgagccaccgtgcctggcccctttgtttctttttttagagacagggtctcactgtgttgcccaggctgttctcaagtgatcctcttgccttactgaaagcccccttctttccctaagccacaatttcccagtctgtaaagtggggctgttgtcccaccctctgaaagtggctgtggagatgaaatgaataaacctcagctagggccagcttggtgcctgcctccttgtgtgtccttattcagccctgtctcttgggtcttagctgggcagggccctgttctctattgtcctgctttcccctcctactaccaccaggatatggctgtgctggggtttcgtctgtggcctatgggctcctggcccgagagctggagcgggtggacagtggctacaggtcggcgatgagtgtccagtcctccctcgtcatgcaccctatctatgcctatggcagcgaggaacagcggcagaagtacctgccccagctgggtgagtggctgcccatggggcctggtggaaggaagacagtctctgaggtctggaactcaagggtggggctgtcccctgagcctattctgtccctatctcaaagatagcataagtggccacctggacccccgccagaccctgggcttcacctggagatctgatccctggccagcctgactgtccccctctgtgaccaccgtcatctccctatgctttctgtgttccccagtccagcccaaagtttaaagtccaccaggttcctgctggccatttgcagtggctcacacctataatcccagcactttgggagggtgaagtgagaagatcccttgagcccaagagttcgaaaccagcctgggcaacgtaaggagaccccatgtctattagaaaaacaaaaaaaggaaagagcctatgtgacctgcgctaagtggacgttggccctcttccgtggtgtctcggaggtgttcagctgcttcaagatgaagctgaacatctccttcccagccactggctgccagaaactcattgaagtggacgatgaacgcaaactttgtactttttatgagaagcgtatggccacagaagttgctgttgacgctctgggtgaagaatggaagggttacgtggtcggaatcagtggtgggaacaataaacaaggtttccccttgaaacagggtgtcttgacccatggccgtgtccacttgctactgagtaaggggcattcctattacagaccaaggagaactggagaaagaaagagaagatcagttcatggttgcatcgtggatgccaatctgagtgttctcaacttggttattgtaaaaaaaaggagagaagggtattcctggactgactgagactatgatgcctcgtcacctggggcccagtacagctagcagaatccgtaaacttttcagtctctctaaagaaaatgatgtctgccagtatgttgtaaaaaagcccttaaacaaagaaggtaagaaacctaggaccaaagcacccaagattcagcgccttgtcactccacatgtcctgcagcacaaacagcggcgtattgctctgaagcagccgcatattaagaaaaataaagaagaggctgcagaatatgctaaacttttggccaagagaatgaaggaggctaagaagcaccagggacaaatcgtgaagagacgcagactgtcctctctgcgagcttccacttctaagtctgaatccagtcagaaataagattttttgagtaacaaataagatcagattcgcaaaaaaaaaaaaaaacccacaaggccctgtgtgaccaggcctctgctgacctttccacctcatctctggccactcatgtgatcctcccagccagacttagctacttgaaattctccagaagtaccaccagttctttacacatctgttccctctcccagcactgctcttccccacagcctcctcctgcttaactcctcacacccttccagtttggccaactccttcctgattccctgggtccccctccccatcttggcattgtgatcatgactttggggtaacctgtctcttgaaagcagggccagatctaacttagttatgaggtctgactcaggggcgagggtaattttttttttctttttttgagacaaagtcccgctccgtcccccaggctgaagtgcagtggtacaatcttggctcactgcaacctgcggttccccagttcaagcaattcctgtgcctcggcctcccaattagctgggattgcaggtgcttgctacccgtgcctggctaatttttgtatttttagtagagatggtgtttcactatgttggccaggctggtctcgaactccagacctcaagtgatccatctgccttggcctcccaaagtgctgagattacatgtgtgagccacctcgactggcctaattttttgtatttttagtagagatggggtttcaccatattggtcaggctggattttttttcttttttgagatggagtcttgctctgttgcccaggctgtagtgcagtggcatgatcttggctcactgcaacctctcctgcccgggttcaagcgattctcctgcctcagtctcctgagtagctgggattacaggcacccaccaccacatctggctatttttttttttttttttttttaagtagagatggggtttcaccatgttggccaggctggtctggaactcctgacctcaattgatccacctgccttggcctcctaaagtgctgggatgacaggcgtgagccactgcaccccgccacgaggataatttttgagtaaggggatgtatcagggaccaggcagccttgtgactttgtcttgtgcctgcagccaagggggagctcctgggctgcttcgggctcacagagcccaacagcggaagtgaccccagcagcatggagaccagagcccactacaactcatccaacaagagctacaccctcaatgggaccaagacctggtaagggttctgggtggtgggcaggtggtgaacaggggcaaaggggcactggtcagacccctcaccgactgttccatccccaggatcacgaactcgcctatggccgatctgtttgtagtgtgggctcggtgtgaagatggctgcattcggggcttcctgctggagaaggggatgcggggtctctcggcccccaggatccagggcaagttctcgctgcgggcctcagccacaggcatgatcatcatggacggtgtggaggtgccagaggagaatgtgctccctggtgcatccagcctgggggtaagtggcagccactttgggaatgggtgttgggtcacctgcggatgcggctttgtcaggcaggctccgtgctggggacgcggctccctgtgcctgtggagcccacacagtggtgattcttactcagccggactcgctgacgtgctgaaaactgcccccatttggtgaccgtctcgctcatcccggctctgcccgggacacatgggcctgaaccagctcagtcatttgactcacagtgcatcttctggcatccgtcagcctcctggctctgagcatcgaacccagatgccaggctgggtgggactgtgtgcaaaccgagtgagcaggc

SEQ ID NO: 1291 - DNA, 4048 bp, Homo sapiens
ttatcctgcctcaggctcccgagtagctgggattacaggcgtccgccaccacgcctggctaatttttgtatttttagtagaggtggggtttcaccgtgttggccaggctagtctcgaactcctgacctcaggtgatccacccgcctcagcctcctgattacaggtgtgagccaccgttgcccggcccttttcttttttttttttttttgagatggagtttcgctctgtcacccagcctggattactggattacagtggtgcgatcctggctcactgcagtttcctcctcctaggttcaagcaattctgccacctcagccttctgagtagctgggattacaggggtgcaccaccacgcccagctaatttttgtattttttagtagaaatgggatttcaccatgttggccaggctggtcttgaactcctgacctcaggtgatccacccacctcggcctcccaaagtgctgggattataaacgtgagccaccgtgcctggcccctttgtttctttttttagagacagggtctcactgtgttgcccaggctgttctcaagtgatcctcttgccttactgaaagcccccttctttccctaagccacaatttcccagtctgtaaagtggggctgttgtcccaccctctgaaagtggctgtggagatgaaatgaataaacctcagctagggccagcttggtgcctgcctccttgtgtgtccttattcagccctgtctcttgggtcttagctgggcagggccctgttctctattgtcctgctttcccctcctactaccaccaggatatggctgtgctggggtttcgtctgtggcctatgggctcctggcccgagagctggagcgggtggacagtggctacaggtcggcgatgagtgtccagtcctccctcgtcatgcaccctatctatgcctatggcagcgaggaacagcggcagaagtacctgccccagctgggtgagtggctgcccatggggcctggtggaaggaagacagtctctgaggtctggaactcaagggtggggctgtcccctgagcctattctgtccctatctcaaagatagcataagtggccacctggacccccgccagaccctgggcttcacctggagatctgatccctggccagcctgactgtccccctctgtgaccaccgtcatctccctatgctttctgtgttccccagtccagcccaaagtttaaagtccaccaggttcctgctggccatttgcagtggctcacacctataatcccagcactttgggagggtgaagtgagaagatcccttgagcccaagagttcgaaaccagcctgggcaacgtaaggagaccccatgtctattagaaaaacaaaaaaaggaaagagcctatgtgacctgcgctaagtggacgttggccctcttccgtggtgtctcggaggtgttcagctgcttcaagatgaagctgaacatctccttcccagccactggctgccagaaactcattgaagtggacgatgaacgcaaactttgtactttttatgagaagcgtatggccacagaagttgctgttgacgctctgggtgaagaatggaagggttacgtggtcggaatcagtggtgggaacaataaacaaggtttccccttgaaacagggtgtcttgacccatggccgtgtccacttgctactgagtaaggggcattcctattacagaccaaggagaactggagaaagaaagagaagatcagttcatggttgcatcgtggatgccaatctgagtgttctcaacttggttattgtaaaaaaaaggagagaagggtattcctggactgactgagactatgatgcctcgtcacctggggcccagtacagctagcagaatccgtaaacttttcagtctctctaaagaaaatgatgtctgccagtatgttgtaaaaaagcccttaaacaaagaaggtaagaaacctaggaccaaagcacccaagattcagcgccttgtcactccacatgtcctgcagcacaaacagcggcgtattgctctgaagcagccgcatattaagaaaaataaagaagaggctgcagaatatgctaaacttttggccaagagaatgaaggaggctaagaagcaccagggacaaatcgtgaagagacgcagactgtcctctctgcgagcttccacttctaagtctgaatccagtcagaaataagattttttgagtaacaaataagatcagattcgcaaaaaaaaaaaaaaacccacaaggccctgtgtgaccaggcctctgctgacctttccacctcatctctggccactcatgtgatcctcccagccagacttagctacttgaaattctccagaagtaccaccagttctttacacatctgttccctctcccagcactgctcttccccacagcctcctcctgcttaactcctcacacccttccagtttggccaactccttcctgattccctgggtccccctccccatcttggcattgtgatcatgactttggggtaacctgtctcttgaaagcagggccagatctaacttagttatgaggtctgactcaggggcgagggtaattttttttttctttttttgagacaaagtcccgctccgtcccccaggctgaagtgcagtggtacaatcttggctcactgcaacctgcggttccccagttcaagcaattcctgtgcctcggcctcccaattagctgggattgcaggtgcttgctacccgtgcctggctaatttttgtatttttagtagagatggtgtttcactatgttggccaggctggtctcgaactccagacctcaagtgatccatctgccttggcctcccaaagtgctgagattacatgtgtgagccacctcgactggcctaattttttgtatttttagtagagatggggtttcaccatattggtcaggctggattttttttcttttttgagatggagtcttgctctgttgcccaggctgtagtgcagtggcatgatcttggctcactgcaacctctcctgcccgggttcaagcgattctcctgcctcagtctcctgagtagctgggattacaggcacccaccaccacatctggctatttttttttttttttttttttaagtagagatggggtttcaccatgttggccaggctggtctggaactcctgacctcaattgatccacctgccttggcctcctaaagtgctgggatgacaggcgtgagccactgcaccccgccacgaggataatttttgagtaaggggatgtatcagggaccaggcagccttgtgactttgtcttgtgcctgcagccaagggggagctcctgggctgcttcgggctcacagagcccaacagcggaagtgaccccagcagcatggagaccagagcccactacaactcatccaacaagagctacaccctcaatgggaccaagacctggtaagggttctgggtggtgggcaggtggtgaacaggggcaaaggggcactggtcagacccctcaccgactgttccatccccaggatcacgaactcgcctatggccgatctgtttgtagtgtgggctcggtgtgaagatggctgcattcggggcttcctgctggagaaggggatgcggggtctctcggcccccaggatccagggcaagttctcgctgcgggcctcagccacaggcatgatcatcatggacggtgtggaggtgccagaggagaatgtgctccctggtgcatccagcctgggggtaagtggcagccactttgggaatgggtgttgggtcacctgcggatgcggctttgtcaggcaggctccgtgctggggacgcggctccctgtgcctgtggagcccacacagtggtgattcttactcagccggactcgctgacgtgctgaaaactgcccccatttggtgaccgtctcgctcatcccggctctgcccgggacacatgggcctgaaccagctcagtcatttgactcacagtgcatcttctggcatccgtcagcctcctggctctgagcatcgaacccagatgccaggctgggtgggactgtgtgcaaa

SEQ ID NO: 1292 - DNA, 4127 bp, Homo sapiens
ttatcctgcctcaggctcccgagtagctgggattacaggcgtccgccaccacgcctggctaatttttgtatttttagtagaggtggggtttcaccgtgttggccaggctagtctcgaactcctgacctcaggtgatccacccgcctcagcctcctgattacaggtgtgagccaccgttgcccggcccttttcttttttttttttttttgagatggagtttcgctctgtcacccagcctggattactggattacagtggtgcgatcctggctcactgcagtttcctcctcctaggttcaagcaattctgccacctcagccttctgagtagctgggattacaggggtgcaccaccacgcccagctaatttttgtattttttagtagaaatgggatttcaccatgttggccaggctggtcttgaactcctgacctcaggtgatccacccacctcggcctcccaaagtgctgggattataaacgtgagccaccgtgcctggcccctttgtttctttttttagagacagggtctcactgtgttgcccaggctgttctcaagtgatcctcttgccttactgaaagcccccttctttccctaagccacaatttcccagtctgtaaagtggggctgttgtcccaccctctgaaagtggctgtggagatgaaatgaataaacctcagctagggccagcttggtgcctgcctccttgtgtgtccttattcagccctgtctcttgggtcttagctgggcagggccctgttctctattgtcctgctttcccctcctactaccaccaggatatggctgtgctggggtttcgtctgtggcctatgggctcctggcccgagagctggagcgggtggacagtggctacaggtcggcgatgagtgtccagtcctccctcgtcatgcaccctatctatgcctatggcagcgaggaacagcggcagaagtacctgccccagctgggtgagtggctgcccatggggcctggtggaaggaagacagtctctgaggtctggaactcaagggtggggctgtcccctgagcctattctgtccctatctcaaagatagcataagtggccacctggacccccgccagaccctgggcttcacctggagatctgatccctggccagcctgactgtccccctctgtgaccaccgtcatctccctatgctttctgtgttccccagtccagcccaaagtttaaagtccaccaggttcctgctggccatttgcagtggctcacacctataatcccagcactttgggagggtgaagtgagaagatcccttgagcccaagagttcgaaaccagcctgggcaacgtaaggagaccccatgtctattagaaaaacaaaaaaaggaaagagcctatgtgacctgcgctaagtggacgttggccctcttccgtggtgtctcggaggtgttcagctgcttcaagatgaagctgaacatctccttcccagccactggctgccagaaactcattgaagtggacgatgaacgcaaactttgtactttttatgagaagcgtatggccacagaagttgctgttgacgctctgggtgaagaatggaagggttacgtggtcggaatcagtggtgggaacaataaacaaggtttccccttgaaacagggtgtcttgacccatggccgtgtccacttgctactgagtaaggggcattcctattacagaccaaggagaactggagaaagaaagagaagatcagttcatggttgcatcgtggatgccaatctgagtgttctcaacttggttattgtaaaaaaaaggagagaagggtattcctggactgactgagactatgatgcctcgtcacctggggcccagtacagctagcagaatccgtaaacttttcagtctctctaaagaaaatgatgtctgccagtatgttgtaaaaaagcccttaaacaaagaaggtaagaaacctaggaccaaagcacccaagattcagcgccttgtcactccacatgtcctgcagcacaaacagcggcgtattgctctgaagcagccgcatattaagaaaaataaagaagaggctgcagaatatgctaaacttttggccaagagaatgaaggaggctaagaagcaccagggacaaatcgtgaagagacgcagactgtcctctctgcgagcttccacttctaagtctgaatccagtcagaaataagattttttgagtaacaaataagatcagattcgcaaaaaaaaaaaaaaacccacaaggccctgtgtgaccaggcctctgctgacctttccacctcatctctggccactcatgtgatcctcccagccagacttagctacttgaaattctccagaagtaccaccagttctttacacatctgttccctctcccagcactgctcttccccacagcctcctcctgcttaactcctcacacccttccagtttggccaactccttcctgattccctgggtccccctccccatcttggcattgtgatcatgactttggggtaacctgtctcttgaaagcagggccagatctaacttagttatgaggtctgactcaggggcgagggtaattttttttttctttttttgagacaaagtcccgctccgtcccccaggctgaagtgcagtggtacaatcttggctcactgcaacctgcggttccccagttcaagcaattcctgtgcctcggcctcccaattagctgggattgcaggtgcttgctacccgtgcctggctaatttttgtatttttagtagagatggtgtttcactatgttggccaggctggtctcgaactccagacctcaagtgatccatctgccttggcctcccaaagtgctgagattacatgtgtgagccacctcgactggcctaattttttgtatttttagtagagatggggtttcaccatattggtcaggctggattttttttcttttttgagatggagtcttgctctgttgcccaggctgtagtgcagtggcatgatcttggctcactgcaacctctcctgcccgggttcaagcgattctcctgcctcagtctcctgagtagctgggattacaggcacccaccaccacatctggctatttttttttttttttttttttaagtagagatggggtttcaccatgttggccaggctggtctggaactcctgacctcaattgatccacctgccttggcctcctaaagtgctgggatgacaggcgtgagccactgcaccccgccacgaggataatttttgagtaaggggatgtatcagggaccaggcagccttgtgactttgtcttgtgcctgcagccaagggggagctcctgggctgcttcgggctcacagagcccaacagcggaagtgaccccagcagcatggagaccagagcccactacaactcatccaacaagagctacaccctcaatgggaccaagacctggtaagggttctgggtggtgggcaggtggtgaacaggggcaaaggggcactggtcagacccctcaccgactgttccatccccaggatcacgaactcgcctatggccgatctgtttgtagtgtgggctcggtgtgaagatggctgcattcggggcttcctgctggagaaggggatgcggggtctctcggcccccaggatccagggcaagttctcgctgcgggcctcagccacaggcatgatcatcatggacggtgtggaggtgccagaggagaatgtgctccctggtgcatccagcctgggggtaagtggcagccactttgggaatgggtgttgggtcacctgcggatgcggctttgtcaggcaggctccgtgctggggacgcggctccctgtgcctgtggagcccacacagtggtgattcttactcagccggactcgctgacgtgctgaaaactgcccccatttggtgaccgtctcgctcatcccggctctgcccgggacacatgggcctgaaccagctcagtcatttgactcacagtgcatcttctggcatccgtcagcctcctggctctgagcatcgaacccagatgccaggctgggtgggactgtgtgcaaaccgagtgagcaggcaccgagcttcagtgccagggccatctgtgatgtgaaccacaacctgagtccccctgcgtggggtg

SEQ ID NO: 1293 - DNA, 4086 bp, Homo sapiens
atcctgcctcaggctcccgagtagctgggattacaggcgtccgccaccacgcctggctaatttttgtatttttagtagaggtggggtttcaccgtgttggccaggctagtctcgaactcctgacctcaggtgatccacccgcctcagcctcctgattacaggtgtgagccaccgttgcccggcccttttcttttttttttttttttgagatggagtttcgctctgtcacccagcctggattactggattacagtggtgcgatcctggctcactgcagtttcctcctcctaggttcaagcaattctgccacctcagccttctgagtagctgggattacaggggtgcaccaccacgcccagctaatttttgtattttttagtagaaatgggatttcaccatgttggccaggctggtcttgaactcctgacctcaggtgatccacccacctcggcctcccaaagtgctgggattataaacgtgagccaccgtgcctggcccctttgtttctttttttagagacagggtctcactgtgttgcccaggctgttctcaagtgatcctcttgccttactgaaagcccccttctttccctaagccacaatttcccagtctgtaaagtggggctgttgtcccaccctctgaaagtggctgtggagatgaaatgaataaacctcagctagggccagcttggtgcctgcctccttgtgtgtccttattcagccctgtctcttgggtcttagctgggcagggccctgttctctattgtcctgctttcccctcctactaccaccaggatatggctgtgctggggtttcgtctgtggcctatgggctcctggcccgagagctggagcgggtggacagtggctacaggtcggcgatgagtgtccagtcctccctcgtcatgcaccctatctatgcctatggcagcgaggaacagcggcagaagtacctgccccagctgggtgagtggctgcccatggggcctggtggaaggaagacagtctctgaggtctggaactcaagggtggggctgtcccctgagcctattctgtccctatctcaaagatagcataagtggccacctggacccccgccagaccctgggcttcacctggagatctgatccctggccagcctgactgtccccctctgtgaccaccgtcatctccctatgctttctgtgttccccagtccagcccaaagtttaaagtccaccaggttcctgctggccatttgcagtggctcacacctataatcccagcactttgggagggtgaagtgagaagatcccttgagcccaagagttcgaaaccagcctgggcaacgtaaggagaccccatgtctattagaaaaacaaaaaaaggaaagagcctatgtgacctgcgctaagtggacgttggccctcttccgtggtgtctcggaggtgttcagctgcttcaagatgaagctgaacatctccttcccagccactggctgccagaaactcattgaagtggacgatgaacgcaaactttgtactttttatgagaagcgtatggccacagaagttgctgttgacgctctgggtgaagaatggaagggttacgtggtcggaatcagtggtgggaacaataaacaaggtttccccttgaaacagggtgtcttgacccatggccgtgtccacttgctactgagtaaggggcattcctattacagaccaaggagaactggagaaagaaagagaagatcagttcatggttgcatcgtggatgccaatctgagtgttctcaacttggttattgtaaaaaaaaggagagaagggtattcctggactgactgagactatgatgcctcgtcacctggggcccagtacagctagcagaatccgtaaacttttcagtctctctaaagaaaatgatgtctgccagtatgttgtaaaaaagcccttaaacaaagaaggtaagaaacctaggaccaaagcacccaagattcagcgccttgtcactccacatgtcctgcagcacaaacagcggcgtattgctctgaagcagccgcatattaagaaaaataaagaagaggctgcagaatatgctaaacttttggccaagagaatgaaggaggctaagaagcaccagggacaaatcgtgaagagacgcagactgtcctctctgcgagcttccacttctaagtctgaatccagtcagaaataagattttttgagtaacaaataagatcagattcgcaaaaaaaaaaaaaaacccacaaggccctgtgtgaccaggcctctgctgacctttccacctcatctctggccactcatgtgatcctcccagccagacttagctacttgaaattctccagaagtaccaccagttctttacacatctgttccctctcccagcactgctcttccccacagcctcctcctgcttaactcctcacacccttccagtttggccaactccttcctgattccctgggtccccctccccatcttggcattgtgatcatgactttggggtaacctgtctcttgaaagcagggccagatctaacttagttatgaggtctgactcaggggcgagggtaattttttttttctttttttgagacaaagtcccgctccgtcccccaggctgaagtgcagtggtacaatcttggctcactgcaacctgcggttccccagttcaagcaattcctgtgcctcggcctcccaattagctgggattgcaggtgcttgctacccgtgcctggctaatttttgtatttttagtagagatggtgtttcactatgttggccaggctggtctcgaactccagacctcaagtgatccatctgccttggcctcccaaagtgctgagattacatgtgtgagccacctcgactggcctaattttttgtatttttagtagagatggggtttcaccatattggtcaggctggattttttttcttttttgagatggagtcttgctctgttgcccaggctgtagtgcagtggcatgatcttggctcactgcaacctctcctgcccgggttcaagcgattctcctgcctcagtctcctgagtagctgggattacaggcacccaccaccacatctggctatttttttttttttttttttttaagtagagatggggtttcaccatgttggccaggctggtctggaactcctgacctcaattgatccacctgccttggcctcctaaagtgctgggatgacaggcgtgagccactgcaccccgccacgaggataatttttgagtaaggggatgtatcagggaccaggcagccttgtgactttgtcttgtgcctgcagccaagggggagctcctgggctgcttcgggctcacagagcccaacagcggaagtgaccccagcagcatggagaccagagcccactacaactcatccaacaagagctacaccctcaatgggaccaagacctggtaagggttctgggtggtgggcaggtggtgaacaggggcaaaggggcactggtcagacccctcaccgactgttccatccccaggatcacgaactcgcctatggccgatctgtttgtagtgtgggctcggtgtgaagatggctgcattcggggcttcctgctggagaaggggatgcggggtctctcggcccccaggatccagggcaagttctcgctgcgggcctcagccacaggcatgatcatcatggacggtgtggaggtgccagaggagaatgtgctccctggtgcatccagcctgggggtaagtggcagccactttgggaatgggtgttgggtcacctgcggatgcggctttgtcaggcaggctccgtgctggggacgcggctccctgtgcctgtggagcccacacagtggtgattcttactcagccggactcgctgacgtgctgaaaactgcccccatttggtgaccgtctcgctcatcccggctctgcccgggacacatgggcctgaaccagctcagtcatttgactcacagtgcatcttctggcatccgtcagcctcctggctctgagcatcgaacccagatgccaggctgggtgggactgtgtgcaaaccgagtgagcaggcaccgagcttcagtgccagggccatct

SEQ ID NO: 1294 - DNA, 4050 bp, Homo sapiens
cgccaccacgcctggctaatttttgtatttttagtagaggtggggtttcaccgtgttggccaggctagtctcgaactcctgacctcaggtgatccacccgcctcagcctcctgattacaggtgtgagccaccgttgcccggcccttttcttttttttttttttttgagatggagtttcgctctgtcacccagcctggattactggattacagtggtgcgatcctggctcactgcagtttcctcctcctaggttcaagcaattctgccacctcagccttctgagtagctgggattacaggggtgcaccaccacgcccagctaatttttgtattttttagtagaaatgggatttcaccatgttggccaggctggtcttgaactcctgacctcaggtgatccacccacctcggcctcccaaagtgctgggattataaacgtgagccaccgtgcctggcccctttgtttctttttttagagacagggtctcactgtgttgcccaggctgttctcaagtgatcctcttgccttactgaaagcccccttctttccctaagccacaatttcccagtctgtaaagtggggctgttgtcccaccctctgaaagtggctgtggagatgaaatgaataaacctcagctagggccagcttggtgcctgcctccttgtgtgtccttattcagccctgtctcttgggtcttagctgggcagggccctgttctctattgtcctgctttcccctcctactaccaccaggatatggctgtgctggggtttcgtctgtggcctatgggctcctggcccgagagctggagcgggtggacagtggctacaggtcggcgatgagtgtccagtcctccctcgtcatgcaccctatctatgcctatggcagcgaggaacagcggcagaagtacctgccccagctgggtgagtggctgcccatggggcctggtggaaggaagacagtctctgaggtctggaactcaagggtggggctgtcccctgagcctattctgtccctatctcaaagatagcataagtggccacctggacccccgccagaccctgggcttcacctggagatctgatccctggccagcctgactgtccccctctgtgaccaccgtcatctccctatgctttctgtgttccccagtccagcccaaagtttaaagtccaccaggttcctgctggccatttgcagtggctcacacctataatcccagcactttgggagggtgaagtgagaagatcccttgagcccaagagttcgaaaccagcctgggcaacgtaaggagaccccatgtctattagaaaaacaaaaaaaggaaagagcctatgtgacctgcgctaagtggacgttggccctcttccgtggtgtctcggaggtgttcagctgcttcaagatgaagctgaacatctccttcccagccactggctgccagaaactcattgaagtggacgatgaacgcaaactttgtactttttatgagaagcgtatggccacagaagttgctgttgacgctctgggtgaagaatggaagggttacgtggtcggaatcagtggtgggaacaataaacaaggtttccccttgaaacagggtgtcttgacccatggccgtgtccacttgctactgagtaaggggcattcctattacagaccaaggagaactggagaaagaaagagaagatcagttcatggttgcatcgtggatgccaatctgagtgttctcaacttggttattgtaaaaaaaaggagagaagggtattcctggactgactgagactatgatgcctcgtcacctggggcccagtacagctagcagaatccgtaaacttttcagtctctctaaagaaaatgatgtctgccagtatgttgtaaaaaagcccttaaacaaagaaggtaagaaacctaggaccaaagcacccaagattcagcgccttgtcactccacatgtcctgcagcacaaacagcggcgtattgctctgaagcagccgcatattaagaaaaataaagaagaggctgcagaatatgctaaacttttggccaagagaatgaaggaggctaagaagcaccagggacaaatcgtgaagagacgcagactgtcctctctgcgagcttccacttctaagtctgaatccagtcagaaataagattttttgagtaacaaataagatcagattcgcaaaaaaaaaaaaaaacccacaaggccctgtgtgaccaggcctctgctgacctttccacctcatctctggccactcatgtgatcctcccagccagacttagctacttgaaattctccagaagtaccaccagttctttacacatctgttccctctcccagcactgctcttccccacagcctcctcctgcttaactcctcacacccttccagtttggccaactccttcctgattccctgggtccccctccccatcttggcattgtgatcatgactttggggtaacctgtctcttgaaagcagggccagatctaacttagttatgaggtctgactcaggggcgagggtaattttttttttctttttttgagacaaagtcccgctccgtcccccaggctgaagtgcagtggtacaatcttggctcactgcaacctgcggttccccagttcaagcaattcctgtgcctcggcctcccaattagctgggattgcaggtgcttgctacccgtgcctggctaatttttgtatttttagtagagatggtgtttcactatgttggccaggctggtctcgaactccagacctcaagtgatccatctgccttggcctcccaaagtgctgagattacatgtgtgagccacctcgactggcctaattttttgtatttttagtagagatggggtttcaccatattggtcaggctggattttttttcttttttgagatggagtcttgctctgttgcccaggctgtagtgcagtggcatgatcttggctcactgcaacctctcctgcccgggttcaagcgattctcctgcctcagtctcctgagtagctgggattacaggcacccaccaccacatctggctatttttttttttttttttttttaagtagagatggggtttcaccatgttggccaggctggtctggaactcctgacctcaattgatccacctgccttggcctcctaaagtgctgggatgacaggcgtgagccactgcaccccgccacgaggataatttttgagtaaggggatgtatcagggaccaggcagccttgtgactttgtcttgtgcctgcagccaagggggagctcctgggctgcttcgggctcacagagcccaacagcggaagtgaccccagcagcatggagaccagagcccactacaactcatccaacaagagctacaccctcaatgggaccaagacctggtaagggttctgggtggtgggcaggtggtgaacaggggcaaaggggcactggtcagacccctcaccgactgttccatccccaggatcacgaactcgcctatggccgatctgtttgtagtgtgggctcggtgtgaagatggctgcattcggggcttcctgctggagaaggggatgcggggtctctcggcccccaggatccagggcaagttctcgctgcgggcctcagccacaggcatgatcatcatggacggtgtggaggtgccagaggagaatgtgctccctggtgcatccagcctgggggtaagtggcagccactttgggaatgggtgttgggtcacctgcggatgcggctttgtcaggcaggctccgtgctggggacgcggctccctgtgcctgtggagcccacacagtggtgattcttactcagccggactcgctgacgtgctgaaaactgcccccatttggtgaccgtctcgctcatcccggctctgcccgggacacatgggcctgaaccagctcagtcatttgactcacagtgcatcttctggcatccgtcagcctcctggctctgagcatcgaacccagatgccaggctgggtgggactgtgtgcaaaccgagtgagcaggcaccgagcttcagtgccagggccatctgtgat

SEQ ID NO: 1295 - DNA, 4093 bp, Homo sapiens
tttttgtatttttagtagaggtggggtttcaccgtgttggccaggctagtctcgaactcctgacctcaggtgatccacccgcctcagcctcctgattacaggtgtgagccaccgttgcccggcccttttcttttttttttttttttgagatggagtttcgctctgtcacccagcctggattactggattacagtggtgcgatcctggctcactgcagtttcctcctcctaggttcaagcaattctgccacctcagccttctgagtagctgggattacaggggtgcaccaccacgcccagctaatttttgtattttttagtagaaatgggatttcaccatgttggccaggctggtcttgaactcctgacctcaggtgatccacccacctcggcctcccaaagtgctgggattataaacgtgagccaccgtgcctggcccctttgtttctttttttagagacagggtctcactgtgttgcccaggctgttctcaagtgatcctcttgccttactgaaagcccccttctttccctaagccacaatttcccagtctgtaaagtggggctgttgtcccaccctctgaaagtggctgtggagatgaaatgaataaacctcagctagggccagcttggtgcctgcctccttgtgtgtccttattcagccctgtctcttgggtcttagctgggcagggccctgttctctattgtcctgctttcccctcctactaccaccaggatatggctgtgctggggtttcgtctgtggcctatgggctcctggcccgagagctggagcgggtggacagtggctacaggtcggcgatgagtgtccagtcctccctcgtcatgcaccctatctatgcctatggcagcgaggaacagcggcagaagtacctgccccagctgggtgagtggctgcccatggggcctggtggaaggaagacagtctctgaggtctggaactcaagggtggggctgtcccctgagcctattctgtccctatctcaaagatagcataagtggccacctggacccccgccagaccctgggcttcacctggagatctgatccctggccagcctgactgtccccctctgtgaccaccgtcatctccctatgctttctgtgttccccagtccagcccaaagtttaaagtccaccaggttcctgctggccatttgcagtggctcacacctataatcccagcactttgggagggtgaagtgagaagatcccttgagcccaagagttcgaaaccagcctgggcaacgtaaggagaccccatgtctattagaaaaacaaaaaaaggaaagagcctatgtgacctgcgctaagtggacgttggccctcttccgtggtgtctcggaggtgttcagctgcttcaagatgaagctgaacatctccttcccagccactggctgccagaaactcattgaagtggacgatgaacgcaaactttgtactttttatgagaagcgtatggccacagaagttgctgttgacgctctgggtgaagaatggaagggttacgtggtcggaatcagtggtgggaacaataaacaaggtttccccttgaaacagggtgtcttgacccatggccgtgtccacttgctactgagtaaggggcattcctattacagaccaaggagaactggagaaagaaagagaagatcagttcatggttgcatcgtggatgccaatctgagtgttctcaacttggttattgtaaaaaaaaggagagaagggtattcctggactgactgagactatgatgcctcgtcacctggggcccagtacagctagcagaatccgtaaacttttcagtctctctaaagaaaatgatgtctgccagtatgttgtaaaaaagcccttaaacaaagaaggtaagaaacctaggaccaaagcacccaagattcagcgccttgtcactccacatgtcctgcagcacaaacagcggcgtattgctctgaagcagccgcatattaagaaaaataaagaagaggctgcagaatatgctaaacttttggccaagagaatgaaggaggctaagaagcaccagggacaaatcgtgaagagacgcagactgtcctctctgcgagcttccacttctaagtctgaatccagtcagaaataagattttttgagtaacaaataagatcagattcgcaaaaaaaaaaaaaaacccacaaggccctgtgtgaccaggcctctgctgacctttccacctcatctctggccactcatgtgatcctcccagccagacttagctacttgaaattctccagaagtaccaccagttctttacacatctgttccctctcccagcactgctcttccccacagcctcctcctgcttaactcctcacacccttccagtttggccaactccttcctgattccctgggtccccctccccatcttggcattgtgatcatgactttggggtaacctgtctcttgaaagcagggccagatctaacttagttatgaggtctgactcaggggcgagggtaattttttttttctttttttgagacaaagtcccgctccgtcccccaggctgaagtgcagtggtacaatcttggctcactgcaacctgcggttccccagttcaagcaattcctgtgcctcggcctcccaattagctgggattgcaggtgcttgctacccgtgcctggctaatttttgtatttttagtagagatggtgtttcactatgttggccaggctggtctcgaactccagacctcaagtgatccatctgccttggcctcccaaagtgctgagattacatgtgtgagccacctcgactggcctaattttttgtatttttagtagagatggggtttcaccatattggtcaggctggattttttttcttttttgagatggagtcttgctctgttgcccaggctgtagtgcagtggcatgatcttggctcactgcaacctctcctgcccgggttcaagcgattctcctgcctcagtctcctgagtagctgggattacaggcacccaccaccacatctggctatttttttttttttttttttttaagtagagatggggtttcaccatgttggccaggctggtctggaactcctgacctcaattgatccacctgccttggcctcctaaagtgctgggatgacaggcgtgagccactgcaccccgccacgaggataatttttgagtaaggggatgtatcagggaccaggcagccttgtgactttgtcttgtgcctgcagccaagggggagctcctgggctgcttcgggctcacagagcccaacagcggaagtgaccccagcagcatggagaccagagcccactacaactcatccaacaagagctacaccctcaatgggaccaagacctggtaagggttctgggtggtgggcaggtggtgaacaggggcaaaggggcactggtcagacccctcaccgactgttccatccccaggatcacgaactcgcctatggccgatctgtttgtagtgtgggctcggtgtgaagatggctgcattcggggcttcctgctggagaaggggatgcggggtctctcggcccccaggatccagggcaagttctcgctgcgggcctcagccacaggcatgatcatcatggacggtgtggaggtgccagaggagaatgtgctccctggtgcatccagcctgggggtaagtggcagccactttgggaatgggtgttgggtcacctgcggatgcggctttgtcaggcaggctccgtgctggggacgcggctccctgtgcctgtggagcccacacagtggtgattcttactcagccggactcgctgacgtgctgaaaactgcccccatttggtgaccgtctcgctcatcccggctctgcccgggacacatgggcctgaaccagctcagtcatttgactcacagtgcatcttctggcatccgtcagcctcctggctctgagcatcgaacccagatgccaggctgggtgggactgtgtgcaaaccgagtgagcaggcaccgagcttcagtgccagggccatctgtgatgtgaaccacaacctgagtccccctgcgtggggtggctggggaggaggctttccctgcttcag

SEQ ID NO: 1296 - DNA, 4044 bp, Homo sapiens
aggtggggtttcaccgtgttggccaggctagtctcgaactcctgacctcaggtgatccacccgcctcagcctcctgattacaggtgtgagccaccgttgcccggcccttttcttttttttttttttttgagatggagtttcgctctgtcacccagcctggattactggattacagtggtgcgatcctggctcactgcagtttcctcctcctaggttcaagcaattctgccacctcagccttctgagtagctgggattacaggggtgcaccaccacgcccagctaatttttgtattttttagtagaaatgggatttcaccatgttggccaggctggtcttgaactcctgacctcaggtgatccacccacctcggcctcccaaagtgctgggattataaacgtgagccaccgtgcctggcccctttgtttctttttttagagacagggtctcactgtgttgcccaggctgttctcaagtgatcctcttgccttactgaaagcccccttctttccctaagccacaatttcccagtctgtaaagtggggctgttgtcccaccctctgaaagtggctgtggagatgaaatgaataaacctcagctagggccagcttggtgcctgcctccttgtgtgtccttattcagccctgtctcttgggtcttagctgggcagggccctgttctctattgtcctgctttcccctcctactaccaccaggatatggctgtgctggggtttcgtctgtggcctatgggctcctggcccgagagctggagcgggtggacagtggctacaggtcggcgatgagtgtccagtcctccctcgtcatgcaccctatctatgcctatggcagcgaggaacagcggcagaagtacctgccccagctgggtgagtggctgcccatggggcctggtggaaggaagacagtctctgaggtctggaactcaagggtggggctgtcccctgagcctattctgtccctatctcaaagatagcataagtggccacctggacccccgccagaccctgggcttcacctggagatctgatccctggccagcctgactgtccccctctgtgaccaccgtcatctccctatgctttctgtgttccccagtccagcccaaagtttaaagtccaccaggttcctgctggccatttgcagtggctcacacctataatcccagcactttgggagggtgaagtgagaagatcccttgagcccaagagttcgaaaccagcctgggcaacgtaaggagaccccatgtctattagaaaaacaaaaaaaggaaagagcctatgtgacctgcgctaagtggacgttggccctcttccgtggtgtctcggaggtgttcagctgcttcaagatgaagctgaacatctccttcccagccactggctgccagaaactcattgaagtggacgatgaacgcaaactttgtactttttatgagaagcgtatggccacagaagttgctgttgacgctctgggtgaagaatggaagggttacgtggtcggaatcagtggtgggaacaataaacaaggtttccccttgaaacagggtgtcttgacccatggccgtgtccacttgctactgagtaaggggcattcctattacagaccaaggagaactggagaaagaaagagaagatcagttcatggttgcatcgtggatgccaatctgagtgttctcaacttggttattgtaaaaaaaaggagagaagggtattcctggactgactgagactatgatgcctcgtcacctggggcccagtacagctagcagaatccgtaaacttttcagtctctctaaagaaaatgatgtctgccagtatgttgtaaaaaagcccttaaacaaagaaggtaagaaacctaggaccaaagcacccaagattcagcgccttgtcactccacatgtcctgcagcacaaacagcggcgtattgctctgaagcagccgcatattaagaaaaataaagaagaggctgcagaatatgctaaacttttggccaagagaatgaaggaggctaagaagcaccagggacaaatcgtgaagagacgcagactgtcctctctgcgagcttccacttctaagtctgaatccagtcagaaataagattttttgagtaacaaataagatcagattcgcaaaaaaaaaaaaaaacccacaaggccctgtgtgaccaggcctctgctgacctttccacctcatctctggccactcatgtgatcctcccagccagacttagctacttgaaattctccagaagtaccaccagttctttacacatctgttccctctcccagcactgctcttccccacagcctcctcctgcttaactcctcacacccttccagtttggccaactccttcctgattccctgggtccccctccccatcttggcattgtgatcatgactttggggtaacctgtctcttgaaagcagggccagatctaacttagttatgaggtctgactcaggggcgagggtaattttttttttctttttttgagacaaagtcccgctccgtcccccaggctgaagtgcagtggtacaatcttggctcactgcaacctgcggttccccagttcaagcaattcctgtgcctcggcctcccaattagctgggattgcaggtgcttgctacccgtgcctggctaatttttgtatttttagtagagatggtgtttcactatgttggccaggctggtctcgaactccagacctcaagtgatccatctgccttggcctcccaaagtgctgagattacatgtgtgagccacctcgactggcctaattttttgtatttttagtagagatggggtttcaccatattggtcaggctggattttttttcttttttgagatggagtcttgctctgttgcccaggctgtagtgcagtggcatgatcttggctcactgcaacctctcctgcccgggttcaagcgattctcctgcctcagtctcctgagtagctgggattacaggcacccaccaccacatctggctatttttttttttttttttttttaagtagagatggggtttcaccatgttggccaggctggtctggaactcctgacctcaattgatccacctgccttggcctcctaaagtgctgggatgacaggcgtgagccactgcaccccgccacgaggataatttttgagtaaggggatgtatcagggaccaggcagccttgtgactttgtcttgtgcctgcagccaagggggagctcctgggctgcttcgggctcacagagcccaacagcggaagtgaccccagcagcatggagaccagagcccactacaactcatccaacaagagctacaccctcaatgggaccaagacctggtaagggttctgggtggtgggcaggtggtgaacaggggcaaaggggcactggtcagacccctcaccgactgttccatccccaggatcacgaactcgcctatggccgatctgtttgtagtgtgggctcggtgtgaagatggctgcattcggggcttcctgctggagaaggggatgcggggtctctcggcccccaggatccagggcaagttctcgctgcgggcctcagccacaggcatgatcatcatggacggtgtggaggtgccagaggagaatgtgctccctggtgcatccagcctgggggtaagtggcagccactttgggaatgggtgttgggtcacctgcggatgcggctttgtcaggcaggctccgtgctggggacgcggctccctgtgcctgtggagcccacacagtggtgattcttactcagccggactcgctgacgtgctgaaaactgcccccatttggtgaccgtctcgctcatcccggctctgcccgggacacatgggcctgaaccagctcagtcatttgactcacagtgcatcttctggcatccgtcagcctcctggctctgagcatcgaacccagatgccaggctgggtgggactgtgtgcaaaccgagtgagcaggcaccgagcttcagtgccagggccatctgtgatgtgaaccacaacctgagtccccctgcgtggg

SEQ ID NO: 1297 - DNA, 4133 bp, Homo sapiens
ttcaccgtgttggccaggctagtctcgaactcctgacctcaggtgatccacccgcctcagcctcctgattacaggtgtgagccaccgttgcccggcccttttcttttttttttttttttgagatggagtttcgctctgtcacccagcctggattactggattacagtggtgcgatcctggctcactgcagtttcctcctcctaggttcaagcaattctgccacctcagccttctgagtagctgggattacaggggtgcaccaccacgcccagctaatttttgtattttttagtagaaatgggatttcaccatgttggccaggctggtcttgaactcctgacctcaggtgatccacccacctcggcctcccaaagtgctgggattataaacgtgagccaccgtgcctggcccctttgtttctttttttagagacagggtctcactgtgttgcccaggctgttctcaagtgatcctcttgccttactgaaagcccccttctttccctaagccacaatttcccagtctgtaaagtggggctgttgtcccaccctctgaaagtggctgtggagatgaaatgaataaacctcagctagggccagcttggtgcctgcctccttgtgtgtccttattcagccctgtctcttgggtcttagctgggcagggccctgttctctattgtcctgctttcccctcctactaccaccaggatatggctgtgctggggtttcgtctgtggcctatgggctcctggcccgagagctggagcgggtggacagtggctacaggtcggcgatgagtgtccagtcctccctcgtcatgcaccctatctatgcctatggcagcgaggaacagcggcagaagtacctgccccagctgggtgagtggctgcccatggggcctggtggaaggaagacagtctctgaggtctggaactcaagggtggggctgtcccctgagcctattctgtccctatctcaaagatagcataagtggccacctggacccccgccagaccctgggcttcacctggagatctgatccctggccagcctgactgtccccctctgtgaccaccgtcatctccctatgctttctgtgttccccagtccagcccaaagtttaaagtccaccaggttcctgctggccatttgcagtggctcacacctataatcccagcactttgggagggtgaagtgagaagatcccttgagcccaagagttcgaaaccagcctgggcaacgtaaggagaccccatgtctattagaaaaacaaaaaaaggaaagagcctatgtgacctgcgctaagtggacgttggccctcttccgtggtgtctcggaggtgttcagctgcttcaagatgaagctgaacatctccttcccagccactggctgccagaaactcattgaagtggacgatgaacgcaaactttgtactttttatgagaagcgtatggccacagaagttgctgttgacgctctgggtgaagaatggaagggttacgtggtcggaatcagtggtgggaacaataaacaaggtttccccttgaaacagggtgtcttgacccatggccgtgtccacttgctactgagtaaggggcattcctattacagaccaaggagaactggagaaagaaagagaagatcagttcatggttgcatcgtggatgccaatctgagtgttctcaacttggttattgtaaaaaaaaggagagaagggtattcctggactgactgagactatgatgcctcgtcacctggggcccagtacagctagcagaatccgtaaacttttcagtctctctaaagaaaatgatgtctgccagtatgttgtaaaaaagcccttaaacaaagaaggtaagaaacctaggaccaaagcacccaagattcagcgccttgtcactccacatgtcctgcagcacaaacagcggcgtattgctctgaagcagccgcatattaagaaaaataaagaagaggctgcagaatatgctaaacttttggccaagagaatgaaggaggctaagaagcaccagggacaaatcgtgaagagacgcagactgtcctctctgcgagcttccacttctaagtctgaatccagtcagaaataagattttttgagtaacaaataagatcagattcgcaaaaaaaaaaaaaaacccacaaggccctgtgtgaccaggcctctgctgacctttccacctcatctctggccactcatgtgatcctcccagccagacttagctacttgaaattctccagaagtaccaccagttctttacacatctgttccctctcccagcactgctcttccccacagcctcctcctgcttaactcctcacacccttccagtttggccaactccttcctgattccctgggtccccctccccatcttggcattgtgatcatgactttggggtaacctgtctcttgaaagcagggccagatctaacttagttatgaggtctgactcaggggcgagggtaattttttttttctttttttgagacaaagtcccgctccgtcccccaggctgaagtgcagtggtacaatcttggctcactgcaacctgcggttccccagttcaagcaattcctgtgcctcggcctcccaattagctgggattgcaggtgcttgctacccgtgcctggctaatttttgtatttttagtagagatggtgtttcactatgttggccaggctggtctcgaactccagacctcaagtgatccatctgccttggcctcccaaagtgctgagattacatgtgtgagccacctcgactggcctaattttttgtatttttagtagagatggggtttcaccatattggtcaggctggattttttttcttttttgagatggagtcttgctctgttgcccaggctgtagtgcagtggcatgatcttggctcactgcaacctctcctgcccgggttcaagcgattctcctgcctcagtctcctgagtagctgggattacaggcacccaccaccacatctggctatttttttttttttttttttttaagtagagatggggtttcaccatgttggccaggctggtctggaactcctgacctcaattgatccacctgccttggcctcctaaagtgctgggatgacaggcgtgagccactgcaccccgccacgaggataatttttgagtaaggggatgtatcagggaccaggcagccttgtgactttgtcttgtgcctgcagccaagggggagctcctgggctgcttcgggctcacagagcccaacagcggaagtgaccccagcagcatggagaccagagcccactacaactcatccaacaagagctacaccctcaatgggaccaagacctggtaagggttctgggtggtgggcaggtggtgaacaggggcaaaggggcactggtcagacccctcaccgactgttccatccccaggatcacgaactcgcctatggccgatctgtttgtagtgtgggctcggtgtgaagatggctgcattcggggcttcctgctggagaaggggatgcggggtctctcggcccccaggatccagggcaagttctcgctgcgggcctcagccacaggcatgatcatcatggacggtgtggaggtgccagaggagaatgtgctccctggtgcatccagcctgggggtaagtggcagccactttgggaatgggtgttgggtcacctgcggatgcggctttgtcaggcaggctccgtgctggggacgcggctccctgtgcctgtggagcccacacagtggtgattcttactcagccggactcgctgacgtgctgaaaactgcccccatttggtgaccgtctcgctcatcccggctctgcccgggacacatgggcctgaaccagctcagtcatttgactcacagtgcatcttctggcatccgtcagcctcctggctctgagcatcgaacccagatgccaggctgggtgggactgtgtgcaaaccgagtgagcaggcaccgagcttcagtgccagggccatctgtgatgtgaaccacaacctgagtccccctgcgtggggtggctggggaggaggctttccctgcttcagagttggttctgcataggccctcttggtgtctcttgggtgggcctgaggcgccatctcaaccctacag

SEQ ID NO: 1298 - DNA, 4044 bp, Homo sapiens
caccgtgttggccaggctagtctcgaactcctgacctcaggtgatccacccgcctcagcctcctgattacaggtgtgagccaccgttgcccggcccttttcttttttttttttttttgagatggagtttcgctctgtcacccagcctggattactggattacagtggtgcgatcctggctcactgcagtttcctcctcctaggttcaagcaattctgccacctcagccttctgagtagctgggattacaggggtgcaccaccacgcccagctaatttttgtattttttagtagaaatgggatttcaccatgttggccaggctggtcttgaactcctgacctcaggtgatccacccacctcggcctcccaaagtgctgggattataaacgtgagccaccgtgcctggcccctttgtttctttttttagagacagggtctcactgtgttgcccaggctgttctcaagtgatcctcttgccttactgaaagcccccttctttccctaagccacaatttcccagtctgtaaagtggggctgttgtcccaccctctgaaagtggctgtggagatgaaatgaataaacctcagctagggccagcttggtgcctgcctccttgtgtgtccttattcagccctgtctcttgggtcttagctgggcagggccctgttctctattgtcctgctttcccctcctactaccaccaggatatggctgtgctggggtttcgtctgtggcctatgggctcctggcccgagagctggagcgggtggacagtggctacaggtcggcgatgagtgtccagtcctccctcgtcatgcaccctatctatgcctatggcagcgaggaacagcggcagaagtacctgccccagctgggtgagtggctgcccatggggcctggtggaaggaagacagtctctgaggtctggaactcaagggtggggctgtcccctgagcctattctgtccctatctcaaagatagcataagtggccacctggacccccgccagaccctgggcttcacctggagatctgatccctggccagcctgactgtccccctctgtgaccaccgtcatctccctatgctttctgtgttccccagtccagcccaaagtttaaagtccaccaggttcctgctggccatttgcagtggctcacacctataatcccagcactttgggagggtgaagtgagaagatcccttgagcccaagagttcgaaaccagcctgggcaacgtaaggagaccccatgtctattagaaaaacaaaaaaaggaaagagcctatgtgacctgcgctaagtggacgttggccctcttccgtggtgtctcggaggtgttcagctgcttcaagatgaagctgaacatctccttcccagccactggctgccagaaactcattgaagtggacgatgaacgcaaactttgtactttttatgagaagcgtatggccacagaagttgctgttgacgctctgggtgaagaatggaagggttacgtggtcggaatcagtggtgggaacaataaacaaggtttccccttgaaacagggtgtcttgacccatggccgtgtccacttgctactgagtaaggggcattcctattacagaccaaggagaactggagaaagaaagagaagatcagttcatggttgcatcgtggatgccaatctgagtgttctcaacttggttattgtaaaaaaaaggagagaagggtattcctggactgactgagactatgatgcctcgtcacctggggcccagtacagctagcagaatccgtaaacttttcagtctctctaaagaaaatgatgtctgccagtatgttgtaaaaaagcccttaaacaaagaaggtaagaaacctaggaccaaagcacccaagattcagcgccttgtcactccacatgtcctgcagcacaaacagcggcgtattgctctgaagcagccgcatattaagaaaaataaagaagaggctgcagaatatgctaaacttttggccaagagaatgaaggaggctaagaagcaccagggacaaatcgtgaagagacgcagactgtcctctctgcgagcttccacttctaagtctgaatccagtcagaaataagattttttgagtaacaaataagatcagattcgcaaaaaaaaaaaaaaacccacaaggccctgtgtgaccaggcctctgctgacctttccacctcatctctggccactcatgtgatcctcccagccagacttagctacttgaaattctccagaagtaccaccagttctttacacatctgttccctctcccagcactgctcttccccacagcctcctcctgcttaactcctcacacccttccagtttggccaactccttcctgattccctgggtccccctccccatcttggcattgtgatcatgactttggggtaacctgtctcttgaaagcagggccagatctaacttagttatgaggtctgactcaggggcgagggtaattttttttttctttttttgagacaaagtcccgctccgtcccccaggctgaagtgcagtggtacaatcttggctcactgcaacctgcggttccccagttcaagcaattcctgtgcctcggcctcccaattagctgggattgcaggtgcttgctacccgtgcctggctaatttttgtatttttagtagagatggtgtttcactatgttggccaggctggtctcgaactccagacctcaagtgatccatctgccttggcctcccaaagtgctgagattacatgtgtgagccacctcgactggcctaattttttgtatttttagtagagatggggtttcaccatattggtcaggctggattttttttcttttttgagatggagtcttgctctgttgcccaggctgtagtgcagtggcatgatcttggctcactgcaacctctcctgcccgggttcaagcgattctcctgcctcagtctcctgagtagctgggattacaggcacccaccaccacatctggctatttttttttttttttttttttaagtagagatggggtttcaccatgttggccaggctggtctggaactcctgacctcaattgatccacctgccttggcctcctaaagtgctgggatgacaggcgtgagccactgcaccccgccacgaggataatttttgagtaaggggatgtatcagggaccaggcagccttgtgactttgtcttgtgcctgcagccaagggggagctcctgggctgcttcgggctcacagagcccaacagcggaagtgaccccagcagcatggagaccagagcccactacaactcatccaacaagagctacaccctcaatgggaccaagacctggtaagggttctgggtggtgggcaggtggtgaacaggggcaaaggggcactggtcagacccctcaccgactgttccatccccaggatcacgaactcgcctatggccgatctgtttgtagtgtgggctcggtgtgaagatggctgcattcggggcttcctgctggagaaggggatgcggggtctctcggcccccaggatccagggcaagttctcgctgcgggcctcagccacaggcatgatcatcatggacggtgtggaggtgccagaggagaatgtgctccctggtgcatccagcctgggggtaagtggcagccactttgggaatgggtgttgggtcacctgcggatgcggctttgtcaggcaggctccgtgctggggacgcggctccctgtgcctgtggagcccacacagtggtgattcttactcagccggactcgctgacgtgctgaaaactgcccccatttggtgaccgtctcgctcatcccggctctgcccgggacacatgggcctgaaccagctcagtcatttgactcacagtgcatcttctggcatccgtcagcctcctggctctgagcatcgaacccagatgccaggctgggtgggactgtgtgcaaaccgagtgagcaggcaccgagcttcagtgccagggccatctgtgatgtgaaccacaacctgagtccccctgcgtggggtggctgggga

SEQ ID NO: 1299 - DNA, 4095 bp, Homo sapiens
tcaggtgatccacccgcctcagcctcctgattacaggtgtgagccaccgttgcccggcccttttcttttttttttttttttgagatggagtttcgctctgtcacccagcctggattactggattacagtggtgcgatcctggctcactgcagtttcctcctcctaggttcaagcaattctgccacctcagccttctgagtagctgggattacaggggtgcaccaccacgcccagctaatttttgtattttttagtagaaatgggatttcaccatgttggccaggctggtcttgaactcctgacctcaggtgatccacccacctcggcctcccaaagtgctgggattataaacgtgagccaccgtgcctggcccctttgtttctttttttagagacagggtctcactgtgttgcccaggctgttctcaagtgatcctcttgccttactgaaagcccccttctttccctaagccacaatttcccagtctgtaaagtggggctgttgtcccaccctctgaaagtggctgtggagatgaaatgaataaacctcagctagggccagcttggtgcctgcctccttgtgtgtccttattcagccctgtctcttgggtcttagctgggcagggccctgttctctattgtcctgctttcccctcctactaccaccaggatatggctgtgctggggtttcgtctgtggcctatgggctcctggcccgagagctggagcgggtggacagtggctacaggtcggcgatgagtgtccagtcctccctcgtcatgcaccctatctatgcctatggcagcgaggaacagcggcagaagtacctgccccagctgggtgagtggctgcccatggggcctggtggaaggaagacagtctctgaggtctggaactcaagggtggggctgtcccctgagcctattctgtccctatctcaaagatagcataagtggccacctggacccccgccagaccctgggcttcacctggagatctgatccctggccagcctgactgtccccctctgtgaccaccgtcatctccctatgctttctgtgttccccagtccagcccaaagtttaaagtccaccaggttcctgctggccatttgcagtggctcacacctataatcccagcactttgggagggtgaagtgagaagatcccttgagcccaagagttcgaaaccagcctgggcaacgtaaggagaccccatgtctattagaaaaacaaaaaaaggaaagagcctatgtgacctgcgctaagtggacgttggccctcttccgtggtgtctcggaggtgttcagctgcttcaagatgaagctgaacatctccttcccagccactggctgccagaaactcattgaagtggacgatgaacgcaaactttgtactttttatgagaagcgtatggccacagaagttgctgttgacgctctgggtgaagaatggaagggttacgtggtcggaatcagtggtgggaacaataaacaaggtttccccttgaaacagggtgtcttgacccatggccgtgtccacttgctactgagtaaggggcattcctattacagaccaaggagaactggagaaagaaagagaagatcagttcatggttgcatcgtggatgccaatctgagtgttctcaacttggttattgtaaaaaaaaggagagaagggtattcctggactgactgagactatgatgcctcgtcacctggggcccagtacagctagcagaatccgtaaacttttcagtctctctaaagaaaatgatgtctgccagtatgttgtaaaaaagcccttaaacaaagaaggtaagaaacctaggaccaaagcacccaagattcagcgccttgtcactccacatgtcctgcagcacaaacagcggcgtattgctctgaagcagccgcatattaagaaaaataaagaagaggctgcagaatatgctaaacttttggccaagagaatgaaggaggctaagaagcaccagggacaaatcgtgaagagacgcagactgtcctctctgcgagcttccacttctaagtctgaatccagtcagaaataagattttttgagtaacaaataagatcagattcgcaaaaaaaaaaaaaaacccacaaggccctgtgtgaccaggcctctgctgacctttccacctcatctctggccactcatgtgatcctcccagccagacttagctacttgaaattctccagaagtaccaccagttctttacacatctgttccctctcccagcactgctcttccccacagcctcctcctgcttaactcctcacacccttccagtttggccaactccttcctgattccctgggtccccctccccatcttggcattgtgatcatgactttggggtaacctgtctcttgaaagcagggccagatctaacttagttatgaggtctgactcaggggcgagggtaattttttttttctttttttgagacaaagtcccgctccgtcccccaggctgaagtgcagtggtacaatcttggctcactgcaacctgcggttccccagttcaagcaattcctgtgcctcggcctcccaattagctgggattgcaggtgcttgctacccgtgcctggctaatttttgtatttttagtagagatggtgtttcactatgttggccaggctggtctcgaactccagacctcaagtgatccatctgccttggcctcccaaagtgctgagattacatgtgtgagccacctcgactggcctaattttttgtatttttagtagagatggggtttcaccatattggtcaggctggattttttttcttttttgagatggagtcttgctctgttgcccaggctgtagtgcagtggcatgatcttggctcactgcaacctctcctgcccgggttcaagcgattctcctgcctcagtctcctgagtagctgggattacaggcacccaccaccacatctggctatttttttttttttttttttttaagtagagatggggtttcaccatgttggccaggctggtctggaactcctgacctcaattgatccacctgccttggcctcctaaagtgctgggatgacaggcgtgagccactgcaccccgccacgaggataatttttgagtaaggggatgtatcagggaccaggcagccttgtgactttgtcttgtgcctgcagccaagggggagctcctgggctgcttcgggctcacagagcccaacagcggaagtgaccccagcagcatggagaccagagcccactacaactcatccaacaagagctacaccctcaatgggaccaagacctggtaagggttctgggtggtgggcaggtggtgaacaggggcaaaggggcactggtcagacccctcaccgactgttccatccccaggatcacgaactcgcctatggccgatctgtttgtagtgtgggctcggtgtgaagatggctgcattcggggcttcctgctggagaaggggatgcggggtctctcggcccccaggatccagggcaagttctcgctgcgggcctcagccacaggcatgatcatcatggacggtgtggaggtgccagaggagaatgtgctccctggtgcatccagcctgggggtaagtggcagccactttgggaatgggtgttgggtcacctgcggatgcggctttgtcaggcaggctccgtgctggggacgcggctccctgtgcctgtggagcccacacagtggtgattcttactcagccggactcgctgacgtgctgaaaactgcccccatttggtgaccgtctcgctcatcccggctctgcccgggacacatgggcctgaaccagctcagtcatttgactcacagtgcatcttctggcatccgtcagcctcctggctctgagcatcgaacccagatgccaggctgggtgggactgtgtgcaaaccgagtgagcaggcaccgagcttcagtgccagggccatctgtgatgtgaaccacaacctgagtccccctgcgtggggtggctggggaggaggctttccctgcttcagagttggttctgcataggccctcttggtgtctcttgggtgggcctgaggcgccatctcaaccctacag

SEQ ID NO: 1300 - DNA, 4096 bp, Homo sapiens
tcaggtgatccacccgcctcagcctcctgattacaggtgtgagccaccgttgcccggcccttttcttttttttttttttttgagatggagtttcgctctgtcacccagcctggattactggattacagtggtgcgatcctggctcactgcagtttcctcctcctaggttcaagcaattctgccacctcagccttctgagtagctgggattacaggggtgcaccaccacgcccagctaatttttgtattttttagtagaaatgggatttcaccatgttggccaggctggtcttgaactcctgacctcaggtgatccacccacctcggcctcccaaagtgctgggattataaacgtgagccaccgtgcctggcccctttgtttctttttttagagacagggtctcactgtgttgcccaggctgttctcaagtgatcctcttgccttactgaaagcccccttctttccctaagccacaatttcccagtctgtaaagtggggctgttgtcccaccctctgaaagtggctgtggagatgaaatgaataaacctcagctagggccagcttggtgcctgcctccttgtgtgtccttattcagccctgtctcttgggtcttagctgggcagggccctgttctctattgtcctgctttcccctcctactaccaccaggatatggctgtgctggggtttcgtctgtggcctatgggctcctggcccgagagctggagcgggtggacagtggctacaggtcggcgatgagtgtccagtcctccctcgtcatgcaccctatctatgcctatggcagcgaggaacagcggcagaagtacctgccccagctgggtgagtggctgcccatggggcctggtggaaggaagacagtctctgaggtctggaactcaagggtggggctgtcccctgagcctattctgtccctatctcaaagatagcataagtggccacctggacccccgccagaccctgggcttcacctggagatctgatccctggccagcctgactgtccccctctgtgaccaccgtcatctccctatgctttctgtgttccccagtccagcccaaagtttaaagtccaccaggttcctgctggccatttgcagtggctcacacctataatcccagcactttgggagggtgaagtgagaagatcccttgagcccaagagttcgaaaccagcctgggcaacgtaaggagaccccatgtctattagaaaaacaaaaaaaggaaagagcctatgtgacctgcgctaagtggacgttggccctcttccgtggtgtctcggaggtgttcagctgcttcaagatgaagctgaacatctccttcccagccactggctgccagaaactcattgaagtggacgatgaacgcaaactttgtactttttatgagaagcgtatggccacagaagttgctgttgacgctctgggtgaagaatggaagggttacgtggtcggaatcagtggtgggaacaataaacaaggtttccccttgaaacagggtgtcttgacccatggccgtgtccacttgctactgagtaaggggcattcctattacagaccaaggagaactggagaaagaaagagaagatcagttcatggttgcatcgtggatgccaatctgagtgttctcaacttggttattgtaaaaaaaaggagagaagggtattcctggactgactgagactatgatgcctcgtcacctggggcccagtacagctagcagaatccgtaaacttttcagtctctctaaagaaaatgatgtctgccagtatgttgtaaaaaagcccttaaacaaagaaggtaagaaacctaggaccaaagcacccaagattcagcgccttgtcactccacatgtcctgcagcacaaacagcggcgtattgctctgaagcagccgcatattaagaaaaataaagaagaggctgcagaatatgctaaacttttggccaagagaatgaaggaggctaagaagcaccagggacaaatcgtgaagagacgcagactgtcctctctgcgagcttccacttctaagtctgaatccagtcagaaataagattttttgagtaacaaataagatcagattcgcaaaaaaaaaaaaaaacccacaaggccctgtgtgaccaggcctctgctgacctttccacctcatctctggccactcatgtgatcctcccagccagacttagctacttgaaattctccagaagtaccaccagttctttacacatctgttccctctcccagcactgctcttccccacagcctcctcctgcttaactcctcacacccttccagtttggccaactccttcctgattccctgggtccccctccccatcttggcattgtgatcatgactttggggtaacctgtctcttgaaagcagggccagatctaacttagttatgaggtctgactcaggggcgagggtaattttttttttctttttttgagacaaagtcccgctccgtcccccaggctgaagtgcagtggtacaatcttggctcactgcaacctgcggttccccagttcaagcaattcctgtgcctcggcctcccaattagctgggattgcaggtgcttgctacccgtgcctggctaatttttgtatttttagtagagatggtgtttcactatgttggccaggctggtctcgaactccagacctcaagtgatccatctgccttggcctcccaaagtgctgagattacatgtgtgagccacctcgactggcctaattttttgtatttttagtagagatggggtttcaccatattggtcaggctggattttttttcttttttgagatggagtcttgctctgttgcccaggctgtagtgcagtggcatgatcttggctcactgcaacctctcctgcccgggttcaagcgattctcctgcctcagtctcctgagtagctgggattacaggcacccaccaccacatctggctatttttttttttttttttttttaagtagagatggggtttcaccatgttggccaggctggtctggaactcctgacctcaattgatccacctgccttggcctcctaaagtgctgggatgacaggcgtgagccactgcaccccgccacgaggataatttttgagtaaggggatgtatcagggaccaggcagccttgtgactttgtcttgtgcctgcagccaagggggagctcctgggctgcttcgggctcacagagcccaacagcggaagtgaccccagcagcatggagaccagagcccactacaactcatccaacaagagctacaccctcaatgggaccaagacctggtaagggttctgggtggtgggcaggtggtgaacaggggcaaaggggcactggtcagacccctcaccgactgttccatccccaggatcacgaactcgcctatggccgatctgtttgtagtgtgggctcggtgtgaagatggctgcattcggggcttcctgctggagaaggggatgcggggtctctcggcccccaggatccagggcaagttctcgctgcgggcctcagccacaggcatgatcatcatggacggtgtggaggtgccagaggagaatgtgctccctggtgcatccagcctgggggtaagtggcagccactttgggaatgggtgttgggtcacctgcggatgcggctttgtcaggcaggctccgtgctggggacgcggctccctgtgcctgtggagcccacacagtggtgattcttactcagccggactcgctgacgtgctgaaaactgcccccatttggtgaccgtctcgctcatcccggctctgcccgggacacatgggcctgaaccagctcagtcatttgactcacagtgcatcttctggcatccgtcagcctcctggctctgagcatcgaacccagatgccaggctgggtgggactgtgtgcaaaccgagtgagcaggcaccgagcttcagtgccagggccatctgtgatgtgaaccacaacctgagtccccctgcgtggggtggctggggaggaggctttccctgcttcagagttggttctgcataggccctcttggtgtctcttgggtgggcctgaggcgccatctcaaccctacagg

SEQ ID NO: 1301 - DNA, 4065 bp, Homo sapiens
gattacaggtgtgagccaccgttgcccggcccttttcttttttttttttttttgagatggagtttcgctctgtcacccagcctggattactggattacagtggtgcgatcctggctcactgcagtttcctcctcctaggttcaagcaattctgccacctcagccttctgagtagctgggattacaggggtgcaccaccacgcccagctaatttttgtattttttagtagaaatgggatttcaccatgttggccaggctggtcttgaactcctgacctcaggtgatccacccacctcggcctcccaaagtgctgggattataaacgtgagccaccgtgcctggcccctttgtttctttttttagagacagggtctcactgtgttgcccaggctgttctcaagtgatcctcttgccttactgaaagcccccttctttccctaagccacaatttcccagtctgtaaagtggggctgttgtcccaccctctgaaagtggctgtggagatgaaatgaataaacctcagctagggccagcttggtgcctgcctccttgtgtgtccttattcagccctgtctcttgggtcttagctgggcagggccctgttctctattgtcctgctttcccctcctactaccaccaggatatggctgtgctggggtttcgtctgtggcctatgggctcctggcccgagagctggagcgggtggacagtggctacaggtcggcgatgagtgtccagtcctccctcgtcatgcaccctatctatgcctatggcagcgaggaacagcggcagaagtacctgccccagctgggtgagtggctgcccatggggcctggtggaaggaagacagtctctgaggtctggaactcaagggtggggctgtcccctgagcctattctgtccctatctcaaagatagcataagtggccacctggacccccgccagaccctgggcttcacctggagatctgatccctggccagcctgactgtccccctctgtgaccaccgtcatctccctatgctttctgtgttccccagtccagcccaaagtttaaagtccaccaggttcctgctggccatttgcagtggctcacacctataatcccagcactttgggagggtgaagtgagaagatcccttgagcccaagagttcgaaaccagcctgggcaacgtaaggagaccccatgtctattagaaaaacaaaaaaaggaaagagcctatgtgacctgcgctaagtggacgttggccctcttccgtggtgtctcggaggtgttcagctgcttcaagatgaagctgaacatctccttcccagccactggctgccagaaactcattgaagtggacgatgaacgcaaactttgtactttttatgagaagcgtatggccacagaagttgctgttgacgctctgggtgaagaatggaagggttacgtggtcggaatcagtggtgggaacaataaacaaggtttccccttgaaacagggtgtcttgacccatggccgtgtccacttgctactgagtaaggggcattcctattacagaccaaggagaactggagaaagaaagagaagatcagttcatggttgcatcgtggatgccaatctgagtgttctcaacttggttattgtaaaaaaaaggagagaagggtattcctggactgactgagactatgatgcctcgtcacctggggcccagtacagctagcagaatccgtaaacttttcagtctctctaaagaaaatgatgtctgccagtatgttgtaaaaaagcccttaaacaaagaaggtaagaaacctaggaccaaagcacccaagattcagcgccttgtcactccacatgtcctgcagcacaaacagcggcgtattgctctgaagcagccgcatattaagaaaaataaagaagaggctgcagaatatgctaaacttttggccaagagaatgaaggaggctaagaagcaccagggacaaatcgtgaagagacgcagactgtcctctctgcgagcttccacttctaagtctgaatccagtcagaaataagattttttgagtaacaaataagatcagattcgcaaaaaaaaaaaaaaacccacaaggccctgtgtgaccaggcctctgctgacctttccacctcatctctggccactcatgtgatcctcccagccagacttagctacttgaaattctccagaagtaccaccagttctttacacatctgttccctctcccagcactgctcttccccacagcctcctcctgcttaactcctcacacccttccagtttggccaactccttcctgattccctgggtccccctccccatcttggcattgtgatcatgactttggggtaacctgtctcttgaaagcagggccagatctaacttagttatgaggtctgactcaggggcgagggtaattttttttttctttttttgagacaaagtcccgctccgtcccccaggctgaagtgcagtggtacaatcttggctcactgcaacctgcggttccccagttcaagcaattcctgtgcctcggcctcccaattagctgggattgcaggtgcttgctacccgtgcctggctaatttttgtatttttagtagagatggtgtttcactatgttggccaggctggtctcgaactccagacctcaagtgatccatctgccttggcctcccaaagtgctgagattacatgtgtgagccacctcgactggcctaattttttgtatttttagtagagatggggtttcaccatattggtcaggctggattttttttcttttttgagatggagtcttgctctgttgcccaggctgtagtgcagtggcatgatcttggctcactgcaacctctcctgcccgggttcaagcgattctcctgcctcagtctcctgagtagctgggattacaggcacccaccaccacatctggctatttttttttttttttttttttaagtagagatggggtttcaccatgttggccaggctggtctggaactcctgacctcaattgatccacctgccttggcctcctaaagtgctgggatgacaggcgtgagccactgcaccccgccacgaggataatttttgagtaaggggatgtatcagggaccaggcagccttgtgactttgtcttgtgcctgcagccaagggggagctcctgggctgcttcgggctcacagagcccaacagcggaagtgaccccagcagcatggagaccagagcccactacaactcatccaacaagagctacaccctcaatgggaccaagacctggtaagggttctgggtggtgggcaggtggtgaacaggggcaaaggggcactggtcagacccctcaccgactgttccatccccaggatcacgaactcgcctatggccgatctgtttgtagtgtgggctcggtgtgaagatggctgcattcggggcttcctgctggagaaggggatgcggggtctctcggcccccaggatccagggcaagttctcgctgcgggcctcagccacaggcatgatcatcatggacggtgtggaggtgccagaggagaatgtgctccctggtgcatccagcctgggggtaagtggcagccactttgggaatgggtgttgggtcacctgcggatgcggctttgtcaggcaggctccgtgctggggacgcggctccctgtgcctgtggagcccacacagtggtgattcttactcagccggactcgctgacgtgctgaaaactgcccccatttggtgaccgtctcgctcatcccggctctgcccgggacacatgggcctgaaccagctcagtcatttgactcacagtgcatcttctggcatccgtcagcctcctggctctgagcatcgaacccagatgccaggctgggtgggactgtgtgcaaaccgagtgagcaggcaccgagcttcagtgccagggccatctgtgatgtgaaccacaacctgagtccccctgcgtggggtggctggggaggaggctttccctgcttcagagttggttctgcataggccctcttggtgtctcttgggtgggcctgaggcgccatctcaaccctac

SEQ ID NO: 1302 - DNA, 4028 bp, Homo sapiens
gagatggagtttcgctctgtcacccagcctggattactggattacagtggtgcgatcctggctcactgcagtttcctcctcctaggttcaagcaattctgccacctcagccttctgagtagctgggattacaggggtgcaccaccacgcccagctaatttttgtattttttagtagaaatgggatttcaccatgttggccaggctggtcttgaactcctgacctcaggtgatccacccacctcggcctcccaaagtgctgggattataaacgtgagccaccgtgcctggcccctttgtttctttttttagagacagggtctcactgtgttgcccaggctgttctcaagtgatcctcttgccttactgaaagcccccttctttccctaagccacaatttcccagtctgtaaagtggggctgttgtcccaccctctgaaagtggctgtggagatgaaatgaataaacctcagctagggccagcttggtgcctgcctccttgtgtgtccttattcagccctgtctcttgggtcttagctgggcagggccctgttctctattgtcctgctttcccctcctactaccaccaggatatggctgtgctggggtttcgtctgtggcctatgggctcctggcccgagagctggagcgggtggacagtggctacaggtcggcgatgagtgtccagtcctccctcgtcatgcaccctatctatgcctatggcagcgaggaacagcggcagaagtacctgccccagctgggtgagtggctgcccatggggcctggtggaaggaagacagtctctgaggtctggaactcaagggtggggctgtcccctgagcctattctgtccctatctcaaagatagcataagtggccacctggacccccgccagaccctgggcttcacctggagatctgatccctggccagcctgactgtccccctctgtgaccaccgtcatctccctatgctttctgtgttccccagtccagcccaaagtttaaagtccaccaggttcctgctggccatttgcagtggctcacacctataatcccagcactttgggagggtgaagtgagaagatcccttgagcccaagagttcgaaaccagcctgggcaacgtaaggagaccccatgtctattagaaaaacaaaaaaaggaaagagcctatgtgacctgcgctaagtggacgttggccctcttccgtggtgtctcggaggtgttcagctgcttcaagatgaagctgaacatctccttcccagccactggctgccagaaactcattgaagtggacgatgaacgcaaactttgtactttttatgagaagcgtatggccacagaagttgctgttgacgctctgggtgaagaatggaagggttacgtggtcggaatcagtggtgggaacaataaacaaggtttccccttgaaacagggtgtcttgacccatggccgtgtccacttgctactgagtaaggggcattcctattacagaccaaggagaactggagaaagaaagagaagatcagttcatggttgcatcgtggatgccaatctgagtgttctcaacttggttattgtaaaaaaaaggagagaagggtattcctggactgactgagactatgatgcctcgtcacctggggcccagtacagctagcagaatccgtaaacttttcagtctctctaaagaaaatgatgtctgccagtatgttgtaaaaaagcccttaaacaaagaaggtaagaaacctaggaccaaagcacccaagattcagcgccttgtcactccacatgtcctgcagcacaaacagcggcgtattgctctgaagcagccgcatattaagaaaaataaagaagaggctgcagaatatgctaaacttttggccaagagaatgaaggaggctaagaagcaccagggacaaatcgtgaagagacgcagactgtcctctctgcgagcttccacttctaagtctgaatccagtcagaaataagattttttgagtaacaaataagatcagattcgcaaaaaaaaaaaaaaacccacaaggccctgtgtgaccaggcctctgctgacctttccacctcatctctggccactcatgtgatcctcccagccagacttagctacttgaaattctccagaagtaccaccagttctttacacatctgttccctctcccagcactgctcttccccacagcctcctcctgcttaactcctcacacccttccagtttggccaactccttcctgattccctgggtccccctccccatcttggcattgtgatcatgactttggggtaacctgtctcttgaaagcagggccagatctaacttagttatgaggtctgactcaggggcgagggtaattttttttttctttttttgagacaaagtcccgctccgtcccccaggctgaagtgcagtggtacaatcttggctcactgcaacctgcggttccccagttcaagcaattcctgtgcctcggcctcccaattagctgggattgcaggtgcttgctacccgtgcctggctaatttttgtatttttagtagagatggtgtttcactatgttggccaggctggtctcgaactccagacctcaagtgatccatctgccttggcctcccaaagtgctgagattacatgtgtgagccacctcgactggcctaattttttgtatttttagtagagatggggtttcaccatattggtcaggctggattttttttcttttttgagatggagtcttgctctgttgcccaggctgtagtgcagtggcatgatcttggctcactgcaacctctcctgcccgggttcaagcgattctcctgcctcagtctcctgagtagctgggattacaggcacccaccaccacatctggctatttttttttttttttttttttaagtagagatggggtttcaccatgttggccaggctggtctggaactcctgacctcaattgatccacctgccttggcctcctaaagtgctgggatgacaggcgtgagccactgcaccccgccacgaggataatttttgagtaaggggatgtatcagggaccaggcagccttgtgactttgtcttgtgcctgcagccaagggggagctcctgggctgcttcgggctcacagagcccaacagcggaagtgaccccagcagcatggagaccagagcccactacaactcatccaacaagagctacaccctcaatgggaccaagacctggtaagggttctgggtggtgggcaggtggtgaacaggggcaaaggggcactggtcagacccctcaccgactgttccatccccaggatcacgaactcgcctatggccgatctgtttgtagtgtgggctcggtgtgaagatggctgcattcggggcttcctgctggagaaggggatgcggggtctctcggcccccaggatccagggcaagttctcgctgcgggcctcagccacaggcatgatcatcatggacggtgtggaggtgccagaggagaatgtgctccctggtgcatccagcctgggggtaagtggcagccactttgggaatgggtgttgggtcacctgcggatgcggctttgtcaggcaggctccgtgctggggacgcggctccctgtgcctgtggagcccacacagtggtgattcttactcagccggactcgctgacgtgctgaaaactgcccccatttggtgaccgtctcgctcatcccggctctgcccgggacacatgggcctgaaccagctcagtcatttgactcacagtgcatcttctggcatccgtcagcctcctggctctgagcatcgaacccagatgccaggctgggtgggactgtgtgcaaaccgagtgagcaggcaccgagcttcagtgccagggccatctgtgatgtgaaccacaacctgagtccccctgcgtggggtggctggggaggaggctttccctgcttcagagttggttctgcataggccctcttggtgtctcttgggtgggcctgaggcgccatctcaaccctacagggtcccttcggctg

SEQ ID NO: 1303 - DNA, 4043 bp, Homo sapiens
agctgaacatctccttcccagccactggctgccagaaactcattgaagtggacgatgaacgcaaactttgtactttttatgagaagcgtatggccacagaagttgctgttgacgctctgggtgaagaatggaagggttacgtggtcggaatcagtggtgggaacaataaacaaggtttccccttgaaacagggtgtcttgacccatggccgtgtccacttgctactgagtaaggggcattcctattacagaccaaggagaactggagaaagaaagagaagatcagttcatggttgcatcgtggatgccaatctgagtgttctcaacttggttattgtaaaaaaaaggagagaagggtattcctggactgactgagactatgatgcctcgtcacctggggcccagtacagctagcagaatccgtaaacttttcagtctctctaaagaaaatgatgtctgccagtatgttgtaaaaaagcccttaaacaaagaaggtaagaaacctaggaccaaagcacccaagattcagcgccttgtcactccacatgtcctgcagcacaaacagcggcgtattgctctgaagcagccgcatattaagaaaaataaagaagaggctgcagaatatgctaaacttttggccaagagaatgaaggaggctaagaagcaccagggacaaatcgtgaagagacgcagactgtcctctctgcgagcttccacttctaagtctgaatccagtcagaaataagattttttgagtaacaaataagatcagattcgcaaaaaaaaaaaaaaacccacaaggccctgtgtgaccaggcctctgctgacctttccacctcatctctggccactcatgtgatcctcccagccagacttagctacttgaaattctccagaagtaccaccagttctttacacatctgttccctctcccagcactgctcttccccacagcctcctcctgcttaactcctcacacccttccagtttggccaactccttcctgattccctgggtccccctccccatcttggcattgtgatcatgactttggggtaacctgtctcttgaaagcagggccagatctaacttagttatgaggtctgactcaggggcgagggtaattttttttttctttttttgagacaaagtcccgctccgtcccccaggctgaagtgcagtggtacaatcttggctcactgcaacctgcggttccccagttcaagcaattcctgtgcctcggcctcccaattagctgggattgcaggtgcttgctacccgtgcctggctaatttttgtatttttagtagagatggtgtttcactatgttggccaggctggtctcgaactccagacctcaagtgatccatctgccttggcctcccaaagtgctgagattacatgtgtgagccacctcgactggcctaattttttgtatttttagtagagatggggtttcaccatattggtcaggctggattttttttcttttttgagatggagtcttgctctgttgcccaggctgtagtgcagtggcatgatcttggctcactgcaacctctcctgcccgggttcaagcgattctcctgcctcagtctcctgagtagctgggattacaggcacccaccaccacatctggctatttttttttttttttttttttaagtagagatggggtttcaccatgttggccaggctggtctggaactcctgacctcaattgatccacctgccttggcctcctaaagtgctgggatgacaggcgtgagccactgcaccccgccacgaggataatttttgagtaaggggatgtatcagggaccaggcagccttgtgactttgtcttgtgcctgcagccaagggggagctcctgggctgcttcgggctcacagagcccaacagcggaagtgaccccagcagcatggagaccagagcccactacaactcatccaacaagagctacaccctcaatgggaccaagacctggtaagggttctgggtggtgggcaggtggtgaacaggggcaaaggggcactggtcagacccctcaccgactgttccatccccaggatcacgaactcgcctatggccgatctgtttgtagtgtgggctcggtgtgaagatggctgcattcggggcttcctgctggagaaggggatgcggggtctctcggcccccaggatccagggcaagttctcgctgcgggcctcagccacaggcatgatcatcatggacggtgtggaggtgccagaggagaatgtgctccctggtgcatccagcctgggggtaagtggcagccactttgggaatgggtgttgggtcacctgcggatgcggctttgtcaggcaggctccgtgctggggacgcggctccctgtgcctgtggagcccacacagtggtgattcttactcagccggactcgctgacgtgctgaaaactgcccccatttggtgaccgtctcgctcatcccggctctgcccgggacacatgggcctgaaccagctcagtcatttgactcacagtgcatcttctggcatccgtcagcctcctggctctgagcatcgaacccagatgccaggctgggtgggactgtgtgcaaaccgagtgagcaggcaccgagcttcagtgccagggccatctgtgatgtgaaccacaacctgagtccccctgcgtggggtggctggggaggaggctttccctgcttcagagttggttctgcataggccctcttggtgtctcttgggtgggcctgaggcgccatctcaaccctacagggtcccttcggctgcctgaacaacgcccggtacggcatcgcgtggggcgtgcttggagcttcggagttctgcttgcacacagcccggcagtacgccctcgacaggtgtgtgagggctgcagtgagattctctgggggtgtggggcagcttgggtttcactctctataccatgggtgactccccagcccccacccaccaggcctgagttccttgctctggaatgaccagtgacgtccttctgagcagctgtgggctgagtcaacggcagggccagggcaagcttgggggcactgaggcagcctgggaaggcgtcctggagcagggggccccaggacagggacggggtgggagagtgggcctcccctcgctcttaccctgccattgcccatgtaggatgcagtttggtgtcccactggccaggaaccagctgattcagaagaagctggcagacatgctcactgagattaccctgggccttcacgcctgcctgcagctcggccgcttgaaggaccaggacaagtaggggctgtgtggtgggggcggggggatggcagcggtggctggaggaccttgtgtccttcctggagagaaaggtccttcctgcctggtggccctggggacctgaaccttctgctgtccctcttgtccttgatgggctgggctgaggacagccccactggtccctcattgggagcttggctgcatcagggaatccccaccccgggctaggtttgcttggagcatcgggatgccaggatccccagtccttgttaccctcatgtgccactcccagggctgcccccgagatggtttctctgctgaagaggaataactgtgggaaagccctggacatcgcccgccaggcccgagacatgctgggggggaatgggatttctgacgagtatcacgtgatccggcacgccatgaacctggaggccgtgaacacctacgaaggtaggagctggacctcagagggctcactgaggcctcagtgtctggggagggggtacagggaggtgggacggggacaggtctgagtccaactccacctatcactaagtgacagtgtgacctggggcgagccttacccctctgtccctcatctggagttactcacatggggactgtggaagtgaagtgcttcatgcagcacacagaggccccatcaggccttgcgaggggctcccagctctttctcccacatgctcgggaggagggatgttcctgagacaggtaagctccgaaggcagcccaggggtgaggcccgact

SEQ ID NO: 1304 - DNA, 4026 bp, Homo sapiens
cagaagatggagcaacactgagtccacattcccgcctggcagtaatctgctagggccaaaaggaggctgctccttaggcaaggcatccattctcagtttgccagggtccatctggccttctttactcatttatttgatctgctcagccctgtaggcatttcgatttgtagcccctctagacagctggaaactgtctatgcctggcacagagcgggcaattaatcagtgaatcccccattatttctttacatcatttttttttatttggacaaagaaaaaaatccaagtttgttttcatctatggtagctattggataacagatttttcactttgagaagcgaaatgaacaagtcctttctgtcagtcaggatagactaggttaggctgtggtaacactctccaaatctcagtggcttacaacaacaaaggtttatttcttgcttactcacacaaacctagacacaaaatgaaaacactctcctgttttcacatgcatggagacagacatgaatgcataggcatttacagaatcatggaatcctgggatgtaaactcatgcaaacacgtttatagatactggtcagcttaaatagcacaactctctctttattggggatttcaagagatcccaggacccaagaagggtacaagaatatccactgtcagccaaggaaatgcccacactaccaaaggaactgaaagctaatgaagcacctgaaagcttaaacaaacaaacaaacaaacaaacaaaaaagcccgaagcttgtactacattaaattccatgcataaatccttaagtaagacactaaatatacagtgccagcaggctgtcacctccctgccatagcaagacagcctccatctctgggtttctagctcaggagggagatggaccccagacggccaatatgcagagcaacagagggggctgggctgggtcgaagacaggggccaacaggctggaatcctcttcctccagcaggagctacaggcaagaaggaaggggcaggatcaggtcacacctgtttttccttctagcaaccccctctttttaccgaatccaatccaggcctcatcattgttctcctggattatttcacagacctccttgctaattttcccacctccagtcttgcctcctccaaaccgtccatcaaagccacccacttgtctttctaaagctcagggtctctgaatttgtccttgcttagttcagaaacgttccctggctccccttcacatacagttgctgttctagacacctaagcctggcatgccagatctccaccatcagaagcctctccagcctcctttccctctgttctagcatttcctccaggccagtctgcccaatccactatttggacaagagaattcgcagctttccctgtctgtccccctaggtgtttctcactcttcaaggttcctccaatcttcttcaggtttgtcactgagccttgtgaaggcatccaatttccctaactagaacgtaagctccttgaaggcacttatcagacctcctcccaggccagaccccacttcagacttcagcaggcagcctgggtccagagacagagcattgggttccctgccactgtctcactatatgcccttgggcaagtccctgcctttctcagtgccccactttccttgatatcaagaaatttgctgtcgagtgccaaactgataaaatggattcactgaataactctcaactgcaatcccaggggccaggctgaggagcttggggtcctgggcctgaagacgttcaacctgtcgaccccctcatctccttggttagtccctgtgtacttcagtgatctccatttcccagccatccctatccatcctctcctttcatggcccacctggtgggccacaggggtgaagcagggagatccaggcagggttggggggcacagaaggggtcacacgaggagcctgggatgaatctttcagccccacgagggcttcagctgcctcttgctgcagctgccactctgagggaccagatgtccgggccaggcacgaggctccagaggcctgcaagggaaagggagacaagcagactgggaacccccgcttctgcccaccctctaagtgttcctcagcccctgcttccttcagtttcctgctttttccttccccaggctcaacctcctcccagggccctagatcccacttctttcccaggacctgtggctgtagctgaagagggtctggggtgccacagggctggagtatcagagttgagtgtctagaaacaaggagagaagatgccagggtggttaaacagatgaacagacatgcacacattgaaagaggggcaggattttgccatgttttgatctgggaatctgagagcctgctgggccattaagctgtgtcttgacttattttgttttcagtaaagtaaaaatccttgccagtttttcctcccagggctactgtgaggattatgggaaatcactagtgtcttttttttttttgagacaggctcttgctctgtcacctaggctggagtgcagtggcggtgtgatcatggctcaccataagcttgaactcctgggcctacaccatcttcccacctcagcctcctaagtagccaggaaaacaggtgtgcaccaccattcctggctgttttaatttttttgtagagacgaagtctcgctcagttactcaggtggtctcaaactcttggcctcaagtaatcctcccacctcagcctcccaaagtgttgggattacaggtgtgagccaccaggccccacctgatgccggtttttaaaaaaacacctagaagactgagattactgtccctgacctatcagagtctgggtcccattcccccagttccccagtcaccatagaacttgaaggagagcttggctcacctttgggaagcttttcctaatggcctctggcccctctcctgggtctctgaggctctcatcatctctgccccccatatcagcaggcaatcttaccccatcaaatctgtctaagcagatataacagctaccattaaagagtctgtgctaggtctattccatacattattgctaattcttacaacaatcagagaggtaagtaatagtgtctccaatttactgatagaaaaacaggctcagagaggtaaagataattgtccaaagcatcacagctaggaaatggcagtactaggagagctctgccttgcctattagtcagagaccttttcatcttcattatccactgtggttggacaccagcactgtggttggacacagcacaggcttaggcttatgatacacatccttctctccctactcacgtgcggggctggctagggggcccttggggctctccagaaagaggagctgtcagtactgggtgagatcctgggcaggtggtgaagggcccatgagtgggcagctggagggaggtgccagggtcaaagcctaataagaataaaagaatgcagagtgtataggggccaaggtcatagtttctttcctccctctccccacctatgctttcttcctcttccctctccaatatgtggcagattggcactcaaatatatgttgaatgaatgttgaattatcatcttaccagggaagggaggcagagagacagcaggttcttggtacagcaggcggcacaccactggtggtggcatggagaagcctggaggcagccagtgtccagggacccaagggccaggaggcaccggagtccaggacaagggcgaggcttccgggggatggctgagcagcagaggcccacaggagttctgcaggggcagagggcacaggctggagttgggtacaaggctggaaaaggattgagtgtattctgggatacgggcagaaccccaaaactttggggctgggaggccctcgttttcccctcattttgcctagagaagagcagtgatttgactagattacatagcaaaccagggctggggctagaacccaggtgttgagggcacagaagaaagggtctgggtaggaactagggtgggggacactttctcaggc

SEQ ID NO: 1305 - DNA, 4022 bp, Homo sapiens
gagacaagttgtggtcaggatggagtccccacttcacagagagagaaggtttaagattggagaggccgaggccccttagttagtgaaggtcggtgctaaggctgtcaccttgacataacacggcactgccaccgcccaccctgttacatcttcctgaaagtgaagatttagtgagtactgaaatattaagacacgtgagaactaacactagtcagggactgtacgtaaattattattggaagatcgaaaagagacggggctggcacgaggttgcagggtgtccataagatcagaagtcaagatttaaagcagggactgacctggccagatctccaaccatttagttagaaacagcctgttagagatatggagaaggctaacttgatgatctgagcaatagtaaagacaactggctttttcctgaataactactgtgcaacagacacgttctaaacactctgctttaaattcattcaatccttgcaatactctagtactggtacaataattagtcccattttggggatgagagagtgcacaggcaggttaaccaacttgccagaggacacacagccagatgtaaaagatggatccaaacccagggagtctgcctccgtgtatatagaaaggattaaaccacctgtaagcaaaatatgaacattcatctgtctctggtttcccctgaggctcaaagccacaggtcctcctctcacaaagctcttagaatgtcataaaaacttggagtaccaagttatcgaatgtcacatcacacaaagcaagtggtgacacaaccaagggtttctctccctcttggggcgggaaagagctcagaggagacagggaagtatggtttgtgccaggggtcacccagctccccactctccagccaaagacctaagttcctcaccagctcgcgtgtagaaccagttctcatcgtagggagcaagctctttgtgcttggccagcttgacggtatccacccattcggggactttcagcttcccggacctaagaccaaaacagtgggaaaagcacgattcagtcatctccacaaactaccccatatcccaaatgccctcccctcaacacaactatgctgtgcccagagtacaaagagaggctggaaccggaacacaagccaggcctcacgctgaaaggagccacggaggccccaaacaagcctcccctgccaggaccggcaaacactggggctcagatgggcaggccaaggcgacagcctccacccgttttgaacctcagtccccaaactcactttttgaggaaggctgccagagctctgacgaactcctgctggttcacgtcttttacagtaactccaggcatctgagggagaaagtcaagcatgtgaacacaggcctggcagagacgactgccaagagcacggaccccaccccaatcctttcgctccagcgcatcctaaaccgtggtaccccccgttacttcccacggccccttcaacgccgggctccggctcctgcgggtctgaaggagctcaccgacgcccacggcctctctggatcgcactaacagagcccggcccctgcgtgtgaggatcctgcgcgaccccactccccagccccgggactccggacgccccacgcaccccgccgctgccccccggggcccacgctcggttcccggacggcgctgaccgggcatgtccgggcctgccgctcgcacgtggccgcggctctagggggcgggacgggcccgcgccgggcgcctcggggccctcaggcacgcgctctgaggcttcggcgtccggccctgccacctcgcgcccggtccagctcggagcccccgcttaccgtgcggcctccgcgctgccagccaggggaaagggaacgacggggtttcccgggcgcacaagtcgggcgtagggtctcgcgagagttccgaaagctcgcgagagcgagggtagacgctgaggctccgcctctctcagggcgaaagttcgtccccgcctagaggggagggtgtctagtgaggggtggagaggtaaaggggagggccaaggggtcgcgcgtggaggcctgggtttcctcccgcgtttccttctcccggagtgtaatagagagaggatagagagctcctgttcggagctgggggaacttggcttcgtttgcgtcgttcgtggctggaaggaacagtggtggagaatactatgatggcgaaagtacggggcaggatgggtgggccacagctggcgccccacggcggaacaaccccttttccgggtggaagtggctgttccctggccggaagtgggagtagtaagggcggaactgtgacagggaacctaggggaagggcgaggaagaaatgtggctatcatcttccgtccttcaccgccaggagtcgcgagagcgggagacggaagccccacccttctcagggcggaagttgcttcagcacggccggggcgagcgaaaagggaatgaggcgctggaggaggggagaagataagggcgggacaaagcggcagaggcgggaccttagcagaagttagttcagctctgccttctagtgtcggagtctgttcgctcagcccttactttgccaatttagatttacctgccccgctgacctgtgtagctttaggcagtccatttgccttctcagggcttgtctcaccattaaaaaaaaaaaaaaaaatgagatccccgtttgtccatttaaagtggctcctctggttcatggcgcgtcacatgctctaaaaaatattttttgagtgcctgctctgtgccaggcacaggtaaatattatttggacatttatcatgtggctgttactgtagtgttacatgcatgatctcatttaatccttacaaggcccaacaactaaataacgtggtccaataaaattatgttaacttgttgcaaaaaggaaacactgaaatgtgtgtagctattttcttatgttggaaagactgagaatttaaaacataagagcaaatattagaattttaccccacactgatactgtggctgcaaaatgtgttaattattaataagccaagactcgtatctgttagaaaaattaaaaccaaccatgcttctagcataagatcatatatttaaatcaaggttttacattcatgtagaatgttgttgaaacctatctcatactgtttctaaaacttgagaaaatattttcattatctcaattgtttttccagaaccaacacatacatatttccatatgtattcaaagtgggtaatatatgcatgtctaactggaaatctccaggtacttgggtaatttatattcactttttataatttaagtaattattatttaattttttttgagttggagtctcgctttgtcgcccaggcgggagtgcaatgatgtgatcttggttcactgcaacctccacctcccgggttcaagcgattctccggcctcaggctcccaggtagctgggattacaggtgcctgccaccacacctggctaatttttgtatttttatagagacgggttttcaccacgttggccaggctggtctcgaactcctgacctcaggtgatccacctgcgttggcctcccaaaatgctgggattacaggtgtgagccaccgtgcctggcccccacttttaataatttctaataccagttctgaatcatttacacttaattcatttaagtcatttcattgaatttaatttttttttttaaagctctccagaggaactctggagtgcctgaccaaaggaagagacagggtgaatataggattttgggaagagtgaagcttaggtaaaatttatataaagcagagttttgatggacataaggcaaagcaggcatgtatttatgcaacggagctaacatcatgcctgggcgaggagcagacccaggattctgcttccttggacattagaaagtttagataaatgtacaatgttgtctctaaaaaccgcttctctgagatcatgactgcttctctgtgtcaaagtgacttagactttccaggtaagaatgagatgtcccattttcac

SEQ ID NO: 1306 - DNA, 4043 bp, Homo sapiens
aagggaatatagcagggaacctagttttggacagagccaccctgccaagccctcccagggtaacttgcagcaagtcccttcgcccgtctgcaccacagcttcctctttggtaaaacaagatcactcccatgatcagtataagctgactgccaaactgggtggaacatgttaaactctagaatagaggctggtcaactttgcctgtaatcccagtgctttggaaggctgaggcgggaggaccgcttgagcttgggagttcaacatagtgagactccatctctacaaataaaaaaaattagctaggcatggtgactgataggcacctgtagtcccagctacttaggagggtggggcaggaggatcacttgagcccaagaagctgcagtgagctataattgtgccactgcactccaacctgggtgacaggcctagaccctgtccctgaaaataaataataaagggtcaggtaggaaatatttcaggctttgtaggctacagcttctgccacaactacaactctgcccttgtgcatgtagatacacaggggtggctataacccaacaaaaatatacacaacaggcctctggtctaccacacaaccatcctatgccgctaggacagctgggcaagtgaggtgaaaaagaggcctttggggtactccaagtgatggagatcagtaggcaggcagaagatgcacatcctgcttgaggtttccaggcagggccactgtgggctgcaagggaccacagcagctctaccatgaccagcagatgcaactaggtttattatccaaggtcttaatgccatctcttgttaatccctccccatgttaaaaaaaaaaaaaaaatgtacaagacacatacagtcctactttggaggtatttggtatgtgcagaacgtgtcttcaccccagcaaatgagaaaggctaatcccagatccaaagctgctctgaccaactgacccttgaggcactgccaaagcaagatggggggacaggtggaggagatatgtaacttccagggcttgtcactgctgtgcgcccagggaagtcagcttctcttcatccgccccattttctgtctaaaacaaacggtgggtaggtggtatgccagcaacccgacccacctcagcaagttcatctttcagtcctcagaggccgcggctgagttatgctggtcctctgtgctcactccatggcctgaaagagtgggccccaatagacatttgaggcacaagtgtaccacaaatctacaaaatgcttcatattctgaagggccaagcaacctgtaccaaggccaactcttttcagggtcatggaggagctttgccgatttccaaaccctgcttcccacctacttcttatctggagacaagttgtggtcaggatggagtccccacttcacagagagagaaggtttaagattggagaggccgaggccccttagttagtgaaggtcggtgctaaggctgtcaccttgacataacacggcactgccaccgcccaccctgttacatcttcctgaaagtgaagatttagtgagtactgaaatattaagacacgtgagaactaacactagtcagggactgtacgtaaattattattggaagatcgaaaagagacggggctggcacgaggttgcagggtgtccataagatcagaagtcaagatttaaagcagggactgacctggccagatctccaaccatttagttagaaacagcctgttagagatatggagaaggctaacttgatgatctgagcaatagtaaagacaactggctttttcctgaataactactgtgcaacagacacgttctaaacactctgctttaaattcattcaatccttgcaatactctagtactggtacaataattagtcccattttggggatgagagagtgcacaggcaggttaaccaacttgccagaggacacacagccagatgtaaaagatggatccaaacccagggagtctgcctccgtgtatatagaaaggattaaaccacctgtaagcaaaatatgaacattcatctgtctctggtttcccctgaggctcaaagccacaggtcctcctctcacaaagctcttagaatgtcataaaaacttggagtaccaagttatcgaatgtcacatcacacaaagcaagtggtgacacaaccaagggtttctctccctcttggggcgggaaagagctcagaggagacagggaagtatggtttgtgccaggggtcacccagctccccactctccagccaaagacctaagttcctcaccagctcgcgtgtagaaccagttctcatcgtagggagcaagctctttgtgcttggccagcttgacggtatccacccattcggggactttcagcttcccggacctaagaccaaaacagtgggaaaagcacgattcagtcatctccacaaactaccccatatcccaaatgccctcccctcaacacaactatgctgtgcccagagtacaaagagaggctggaaccggaacacaagccaggcctcacgctgaaaggagccacggaggccccaaacaagcctcccctgccaggaccggcaaacactggggctcagatgggcaggccaaggcgacagcctccacccgttttgaacctcagtccccaaactcactttttgaggaaggctgccagagctctgacgaactcctgctggttcacgtcttttacagtaactccaggcatctgagggagaaagtcaagcatgtgaacacaggcctggcagagacgactgccaagagcacggaccccaccccaatcctttcgctccagcgcatcctaaaccgtggtaccccccgttacttcccacggccccttcaacgccgggctccggctcctgcgggtctgaaggagctcaccgacgcccacggcctctctggatcgcactaacagagcccggcccctgcgtgtgaggatcctgcgcgaccccactccccagccccgggactccggacgccccacgcaccccgccgctgccccccggggcccacgctcggttcccggacggcgctgaccgggcatgtccgggcctgccgctcgcacgtggccgcggctctagggggcgggacgggcccgcgccgggcgcctcggggccctcaggcacgcgctctgaggcttcggcgtccggccctgccacctcgcgcccggtccagctcggagcccccgcttaccgtgcggcctccgcgctgccagccaggggaaagggaacgacggggtttcccgggcgcacaagtcgggcgtagggtctcgcgagagttccgaaagctcgcgagagcgagggtagacgctgaggctccgcctctctcagggcgaaagttcgtccccgcctagaggggagggtgtctagtgaggggtggagaggtaaaggggagggccaaggggtcgcgcgtggaggcctgggtttcctcccgcgtttccttctcccggagtgtaatagagagaggatagagagctcctgttcggagctgggggaacttggcttcgtttgcgtcgttcgtggctggaaggaacagtggtggagaatactatgatggcgaaagtacggggcaggatgggtgggccacagctggcgccccacggcggaacaaccccttttccgggtggaagtggctgttccctggccggaagtgggagtagtaagggcggaactgtgacagggaacctaggggaagggcgaggaagaaatgtggctatcatcttccgtccttcaccgccaggagtcgcgagagcgggagacggaagccccacccttctcagggcggaagttgcttcagcacggccggggcgagcgaaaagggaatgaggcgctggaggaggggagaagataagggcgggacaaagcggcagaggcgggaccttagcagaagttagttcagctctgccttctagtgtcggagtctgttcgctcagcccttactttgccaatttagatttacctgccccgctgacctgtgtagctttaggcagtccatttgccttctcagggcttgtctcaccattaaaaaaaaaaaaaaaaat

SEQ ID NO: 1307 - DNA, 4033 bp, Homo sapiens
cagtcacactttctgtagtgcctaaggagaggctggtacagatcagagattctgggaggaccaggccccaccttccctggtcttggctacacctggagggtaaccacactcctgggtgagggcaggaggggagtgaggacactcttagggagaagaatgagactcttcttggggggaggtggacgtgaggacagcccagaaggggaaactaaattgaagacaccccctgggctcagcgccagttcaagtcccttctttatattcattcatttaactcccacagcccctatatggtgggtgctttcattctcccaagttttggatggggaacctcaggctctagagggctacctgggtattgggggtccctcggcccaggccctcgcccggctgactcagaggtccgagggggctcaccctgaacagcagcagcgtcccaggcaccaccgcgcagaacaggaggatgatcccctcggctgtgatgattcggttcttggtgccctcccccatgtccaggaagggcctggggggcggctctgcaaggaggtagtatggctcagagccctggcccctcttgccctccctagcctcctggccccgcccacctcctgcaaggccccagaccccccagagaccccactctgcagaggagaatgtccgtccctctgtccaagccggtttgaaacccacattgaaggtactggctctatccccacttcaaagataaaccgagtgtccccagcgggacagtgggagtaggggccagggctgggccactcacggcgcacgcggaggtaggtgccgcaggactgctggtatgactcgttgccctcctggacccggcacacgtatatgcccccatggctcttgttcacattctggatgatcagcgtaccattggggtcctcgcccgggcccaagaactcagggggccacgtgtagttgccatggaggacgcgccaccaggtgacgttggcgttgttgctgctattgtgcgggcattggaagtgggcgtcttcccccaggctcaccatcaatgatgctgggaccttgtgcatccacagggcctggcacccagggcctgtggagagacagggtgggtgggtcagggactggggatggtgacacatttccccagccctggcccctgcagttccagcactcctgggaagagggtgaggactctcctgggtggggagggagagagagagcccctgacaggggctgatacatcctggggagaggggggatgcgggaaagtgaagaagcccctgggaaggagagaggacatacctggttggggtgggtgaggatatcctgggagaggagaatgagactccctgggatggtaagacccctgggaggcccttctcacctctgcagcgccatctcttgtccccctcccgcatacgcactttgtactctggccctgtgaactctctggattttggatgtttgttccaggcactggaggaccgctgtccagacagctccttccagaagcagtgcaggcgtcccctcctcccgcagccttcccggtccatttttgcaccccagcctcagccaggcccagcacctggcgctttttcttgtgtaatcattcacagaaccctagaagtaggttctctccttagccccattttacaggagggatggctgaggctctgggagggcaggcgggttgccagcatcaccaggcagtcaggagtggcactgggttcaaactcttggctccctggcctctccctgcctgggctgaggagccagtctgtggcctgccctggcctgtgaccctgtgcctggccctcattctctgtaagttgtatgtgtcaacctaggggtcaggggtgagttcagtccttgggctgggctgctggtgattgaaggggctcagagcggggtggagactgggggtgtctctgagtgagacgaggcggctcaggctggctgcagtgtccaatccgggctcctctgggaagccccagctctcagccaggcctcccacatggccagtcccctcttctggaggtaggtggaggagggaggtgaggaagagagaaggaggaagagatggggagaggggccgagcaccctcatcgtcacgggcttaagactcagacgtgaactccaatccttgctcccagtgtccccttgggtggggaacctttttctctgaactcctgggttagcgtggccacagcccctgccagctgtccttgagcaggtgagggggagtccatgagacacccattcccccagtgctgagaagggactcccaacagagagaggcacctgaggtttaaggcagagaaagctttttctccccttgacagacgctgaatgctgctacccctaagtccccttcctgcccccagccctggtgctcagtcaagagcaactttagttccttattttggcctgtggggaacaggaggtgggggaggtgactcttgctcctgcctccctgtgtgagactgtggacgccccttctccttcgctgggctccctccagccccaccttggcccatcttggcacagatacgatttctataggcatcttccctgggtcccctatcctctgcctcctcttcccctttccctgagcccccttccctctgcctgtgccctctctgcagcctccacagcttcccccacctcccgccagttcctgccctttggccacatacccaggtagacagcagacagcaggaagaggaggaagatggtggcaggcagagcttggaggactcctggacccccaggcatcttctcccagtgggttggttagtttgagttgcagcagtcccagggtaccagatccctaccccaaaccccaccctacttcctgcccagccccccggagatgggctccagtggccctcgctactgggccctttgcttgttgggcctggggacagcccctgccgggtatgcttcaggctgtgagtggagagaaactgctccctgcacctgtggtggccacaattcccctgagaggtggctgcttgggtgggggaagaggctggttcaagggctggctcgtcactgctgagcctttggaaggaagcctagggaacctgagtcctgggcatgtgtcatgggcaggtgatggttctgagcttgacctctccccctgcctggacttgggcaaaccttgtcccttccctgaccccatttccttgcttcttgggattagaaacaaggacttaaaggggttgtcacatgcacagaaatggcccacagtaggcgcccagtaaatgttagtcactataaatactcatgaagaataaataaggcaggctgacctgtggctgactacccgtgtgactaggtgggcactttgatccttcgaagcttgacatttttcatctgtgagatgaggaccagaatgtctccctgtctcattatgtgatacgagatggtgttcctggtattcaaggagtgagaaccatgatcagctctttactggaattctttttttaaaaaaacaggccagctatggtggcttatgcctgtaatcccagccctttgggaggctgagacaggagaatcacctgaggtcgagtttgagaccagcctggccaacatggcgaaaccccatctctactaaaaatacaaaattagccagatgttgtggcacatgcctattattccagctactcaggaggctgaggcaggagaatcagttgaacccaggaggtggaggttgcagtgagctgagatcacaccattgcactccagcctgggtgacaaaagcgaaactctgtctctaataataacaataataacaacaacaacatatatttttcttcttttttttttttaagagggatgggatcttgctatattgcccaggctggtcttgaactcctggcctcaagcaatcctcctgcctcagcttcccaaagtgctgggattacaggcatgtgccactgtgcacagccagaagttgttttatattgacctgccatgactggcaaggtaggccatcccccattttacagagggggaaaccgaggccagagaggggagg

SEQ ID NO: 1308 - DNA, 4054 bp, Homo sapiens
ccctgggtcccggctcccgcttcctggctctggcggggcaggaagtcggggcgtttttccggaggcccccgccccgccgcccctccccgcttcctgcccgcgccccgcgcccgcccggcacctccgcttccttccccttctcgccgcttgcccgcccctcctttccccgctgcgcccgggtccctgcgggcaccggcccccgccccggccgcgcccgagctctccccggctttgtccatcggtccgtccgccgggcgcgggctccgcgggactcgcatctcccggctggggtcacctccccggaggtgctggggggcaagccctgctccccgtgcgccctagaccgagccacgacctccccggctttccgcgtctgtggttctcatggtcttgcgcccttccttcgcctctgtgggtgtgctcccgcctgcgtctgcatccccttctctgtccctctgtctttctctactggggtctttccctccttggcctccacctctcctctctgtccctccatcactttctccccgaaagcccttctctaccctctccagctctctctgtatctttctgcatctccgtctcagtctctgtcatttccccagctgttgctgtgcctgggcctcttcgtgcccattttcggttgccccttctcccttctgtctcttcctttccttctcgctctctctctgtccctttctctccacgtccctgtctctctcccggattcccagggtctcatcatctcttccttcccttgctcgtccccttcatgatccctgggtctcagcctctctcctctccctttctcaggaaatccgtgtctctgtgcctctctgtcattgccccgggatctccctgctatccccaggttaggaccacagaccctccaaaatgccccttctgtaagtcaacgcatcgggaaaaggctgcagtctgaattctgtactagccccaatccacaagatagtccctgtgtttccaaggcttaaatacgcataaagtggctcatgcctgtaatcccagcactttgggaggccgaagcatggtggatcacttgaggtcaggagttcgagaccagcccggccaacatggcgaaaccctgtctctactaaaacaaaaattagctgggtgtggtagcacatgcctgtcatcccagctactcgggagcctgaggtacaagaatcgcttgaggtggaggttgaagtgggctgagattgcgccactgcactccagcctgggcgacagagtcagactctgcctcaaaaaaaaaaaaaaaaaaaaaaagcggccgggcgtggtggcaggcgcctgtaatcccagcactttgggaggccaaggtaggtggatcacctgaggtcagaggttcaagaccagtctggccaacatggtgaaaccccgcctctactaaaaatacaaaaattagctgggcatggtggcaggcgcctgtaatcccagctacttgggaggctgaggcaggagaatcgcttgaacccaggaggcagaggttgcagtgagcactccaacctgggcaacagagtgagactctgtctcaaaaaaaaaaaaaaaaaaaaaaagtgtaagtaatttggtagccacagccatcttgatcttgtcccccttcttgcttaaggatatgaccctagggtgaggccctgcaaagagggccaaaccagtccttcagttggtctggggaccttcccaagagacatcttgttctcccaggagggcagcccagactggctacctggtcccaggtgtggggagtgggcagggagtggcttgggctgggactcctgggtctgagggacatgtgggagaggcggtttccgtaagatccacgactcctgccaaggtctgcagttgggaagaatttattatcactaagtggccctgacagatcagggaggagggggtgacactaacgaggctgctacaatcagctcccctagaggcagcgattaagggctcattacccgctggggtgaggggagcctgggaaaggcagcggggcggggggattaggttaggaggtggggcagtttagagggaagaagagtgggacacccccaggggagtccaaggaggcctggcctggagaagagtgaggttaccctcccaccccccactgggggaatatgactaaggaagcccccagaagggctgaaaggagaatgtcccagggaagtgagctgagacactggagctgggtgcacagcaggcgggggcagcctggcaggagtaggggtgtcacggcttctccagctggacatctcctatgttgaggctgcccacatcctggtaggtgccctggaggccccgggagatgtcctcatacatggagcagtcgtccaggttcaggccctgggatggaaatgaggcagcgaacatcagcaccctgacacctggggtccctgcccccagccacccccagagggaacacccccacccctaacacaactgcccctaccccatccccacccttcactcacttcataaaggttttcatcttcatattcatccccggcatccaacccgagcttctcgttctgccatcgtttctgtaggggtgggtggggtgggtgcctcagtgagcagggggaggtgaatatctttcagaccctcctggatgccaggaagtacttttccagaaagggtaagagatgtccccaaggccacatactggttatgtaacagttctctctgagtctacaaccagtgttctccttccttccttccttccttccttccttccttccttccttccttcccttcccttcccttccttccctccctccctctcgccctctctctctctctctctctctctctctctttctctctctctctctttcttctccctcagttgcccaggctgaagtgctgtggcaacatcatatttcactgcagccttgaactcctgggctcaagcaatcctcccacctcagcctcctgagtagctgggactataggtgtgtgccaccatgcctggctaatttttttttaagactttgtgtgtgtagagatagggtcttgctgtgttgcccaggctggtctcaaacttgtggcctcaagtgatcctcttgcctcggcctcccaagctagcgtcttcttgagtctccactcccttactattctccatgaataataacaataacagtcacactttctgtagtgcctaaggagaggctggtacagatcagagattctgggaggaccaggccccaccttccctggtcttggctacacctggagggtaaccacactcctgggtgagggcaggaggggagtgaggacactcttagggagaagaatgagactcttcttggggggaggtggacgtgaggacagcccagaaggggaaactaaattgaagacaccccctgggctcagcgccagttcaagtcccttctttatattcattcatttaactcccacagcccctatatggtgggtgctttcattctcccaagttttggatggggaacctcaggctctagagggctacctgggtattgggggtccctcggcccaggccctcgcccggctgactcagaggtccgagggggctcaccctgaacagcagcagcgtcccaggcaccaccgcgcagaacaggaggatgatcccctcggctgtgatgattcggttcttggtgccctcccccatgtccaggaagggcctggggggcggctctgcaaggaggtagtatggctcagagccctggcccctcttgccctccctagcctcctggccccgcccacctcctgcaaggccccagaccccccagagaccccactctgcagaggagaatgtccgtccctctgtccaagccggtttgaaacccacattgaaggtactggctctatccccacttcaaagataaaccgagtgtccccagcgggacagtgggagtaggggccagggctgggccactcacggcgcacgcggaggtaggtgccgcaggactgctggtatgactcgttgccctcctggacccggcacacgtatatgcccccatggctcttgttcacattctggatgatcagcgtacca

SEQ ID NO: 1309 - DNA, 4051 bp, Homo sapiens
ccctgggtcccggctcccgcttcctggctctggcggggcaggaagtcggggcgtttttccggaggcccccgccccgccgcccctccccgcttcctgcccgcgccccgcgcccgcccggcacctccgcttccttccccttctcgccgcttgcccgcccctcctttccccgctgcgcccgggtccctgcgggcaccggcccccgccccggccgcgcccgagctctccccggctttgtccatcggtccgtccgccgggcgcgggctccgcgggactcgcatctcccggctggggtcacctccccggaggtgctggggggcaagccctgctccccgtgcgccctagaccgagccacgacctccccggctttccgcgtctgtggttctcatggtcttgcgcccttccttcgcctctgtgggtgtgctcccgcctgcgtctgcatccccttctctgtccctctgtctttctctactggggtctttccctccttggcctccacctctcctctctgtccctccatcactttctccccgaaagcccttctctaccctctccagctctctctgtatctttctgcatctccgtctcagtctctgtcatttccccagctgttgctgtgcctgggcctcttcgtgcccattttcggttgccccttctcccttctgtctcttcctttccttctcgctctctctctgtccctttctctccacgtccctgtctctctcccggattcccagggtctcatcatctcttccttcccttgctcgtccccttcatgatccctgggtctcagcctctctcctctccctttctcaggaaatccgtgtctctgtgcctctctgtcattgccccgggatctccctgctatccccaggttaggaccacagaccctccaaaatgccccttctgtaagtcaacgcatcgggaaaaggctgcagtctgaattctgtactagccccaatccacaagatagtccctgtgtttccaaggcttaaatacgcataaagtggctcatgcctgtaatcccagcactttgggaggccgaagcatggtggatcacttgaggtcaggagttcgagaccagcccggccaacatggcgaaaccctgtctctactaaaacaaaaattagctgggtgtggtagcacatgcctgtcatcccagctactcgggagcctgaggtacaagaatcgcttgaggtggaggttgaagtgggctgagattgcgccactgcactccagcctgggcgacagagtcagactctgcctcaaaaaaaaaaaaaaaaaaaaaaagcggccgggcgtggtggcaggcgcctgtaatcccagcactttgggaggccaaggtaggtggatcacctgaggtcagaggttcaagaccagtctggccaacatggtgaaaccccgcctctactaaaaatacaaaaattagctgggcatggtggcaggcgcctgtaatcccagctacttgggaggctgaggcaggagaatcgcttgaacccaggaggcagaggttgcagtgagcactccaacctgggcaacagagtgagactctgtctcaaaaaaaaaaaaaaaaaaaaaaagtgtaagtaatttggtagccacagccatcttgatcttgtcccccttcttgcttaaggatatgaccctagggtgaggccctgcaaagagggccaaaccagtccttcagttggtctggggaccttcccaagagacatcttgttctcccaggagggcagcccagactggctacctggtcccaggtgtggggagtgggcagggagtggcttgggctgggactcctgggtctgagggacatgtgggagaggcggtttccgtaagatccacgactcctgccaaggtctgcagttgggaagaatttattatcactaagtggccctgacagatcagggaggagggggtgacactaacgaggctgctacaatcagctcccctagaggcagcgattaagggctcattacccgctggggtgaggggagcctgggaaaggcagcggggcggggggattaggttaggaggtggggcagtttagagggaagaagagtgggacacccccaggggagtccaaggaggcctggcctggagaagagtgaggttaccctcccaccccccactgggggaatatgactaaggaagcccccagaagggctgaaaggagaatgtcccagggaagtgagctgagacactggagctgggtgcacagcaggcgggggcagcctggcaggagtaggggtgtcacggcttctccagctggacatctcctatgttgaggctgcccacatcctggtaggtgccctggaggccccgggagatgtcctcatacatggagcagtcgtccaggttcaggccctgggatggaaatgaggcagcgaacatcagcaccctgacacctggggtccctgcccccagccacccccagagggaacacccccacccctaacacaactgcccctaccccatccccacccttcactcacttcataaaggttttcatcttcatattcatccccggcatccaacccgagcttctcgttctgccatcgtttctgtaggggtgggtggggtgggtgcctcagtgagcagggggaggtgaatatctttcagaccctcctggatgccaggaagtacttttccagaaagggtaagagatgtccccaaggccacatactggttatgtaacagttctctctgagtctacaaccagtgttctccttccttccttccttccttccttccttccttccttccttccttcccttcccttcccttccttccctccctccctctcgccctctctctctctctctctctctctctctctttctctctctctctctttcttctccctcagttgcccaggctgaagtgctgtggcaacatcatatttcactgcagccttgaactcctgggctcaagcaatcctcccacctcagcctcctgagtagctgggactataggtgtgtgccaccatgcctggctaatttttttttaagactttgtgtgtgtagagatagggtcttgctgtgttgcccaggctggtctcaaacttgtggcctcaagtgatcctcttgcctcggcctcccaagctagcgtcttcttgagtctccactcccttactattctccatgaataataacaataacagtcacactttctgtagtgcctaaggagaggctggtacagatcagagattctgggaggaccaggccccaccttccctggtcttggctacacctggagggtaaccacactcctgggtgagggcaggaggggagtgaggacactcttagggagaagaatgagactcttcttggggggaggtggacgtgaggacagcccagaaggggaaactaaattgaagacaccccctgggctcagcgccagttcaagtcccttctttatattcattcatttaactcccacagcccctatatggtgggtgctttcattctcccaagttttggatggggaacctcaggctctagagggctacctgggtattgggggtccctcggcccaggccctcgcccggctgactcagaggtccgagggggctcaccctgaacagcagcagcgtcccaggcaccaccgcgcagaacaggaggatgatcccctcggctgtgatgattcggttcttggtgccctcccccatgtccaggaagggcctggggggcggctctgcaaggaggtagtatggctcagagccctggcccctcttgccctccctagcctcctggccccgcccacctcctgcaaggccccagaccccccagagaccccactctgcagaggagaatgtccgtccctctgtccaagccggtttgaaacccacattgaaggtactggctctatccccacttcaaagataaaccgagtgtccccagcgggacagtgggagtaggggccagggctgggccactcacggcgcacgcggaggtaggtgccgcaggactgctggtatgactcgttgccctcctggacccggcacacgtatatgcccccatggctcttgttcacattctggatgatcagcgta

SEQ ID NO: 1310 - DNA, 4041 bp, Homo sapiens
agcaagagggagactgtctcaaaaaaagaaaaaaaagaaagtggggctaggcggctggacagaagtgggatgggaggggtgggaacagtatgatgcacctgctaaaagtcgaggctttgcaaatgggacctgggttttaatcacagcttcctctttggttgtgaccttgagcacaggggagccccctccccacatgtgaaatgagattccagcacctccccctggctgccacaggtattgtggtttccaggggcttgaagccgtgcttctgggttaaggttaggattctggagtcaaattgccagggcgtgaatcctggctctgccagttgccagctgtgtgaccttgggcaaatgacttgtcctctctgagcatcaagttcctttgctcatcagactgggaaagcagcggcacgggtatgtttggtgacaagctaacgtgtattgagcatggaggacagccctggcacacagcggtcctatgttagggctagcaatggacaggccacagtgaacgctcagacgctgtcactttcctaagccctgttataaatcccagatgtttcagaggagaaacccgtggttcagcagcaagacgaatggcaaaaccacacagtgagaactgggagagactgggactcattcctggctcctggagcgggtgggatcagaagattctgcgggtcaggggaggctgaactcctggttcgagaaggaacccccagtgccgggccgggcctgtttgctttggctggcaaggggtggctgaggtggggttggtaacctggggttggttctactcagcagcctccttccccagaccctgggggcagacagggtttcagttcctggaggctcgggagtcgtggtgggcatcagctgaccccagccctaggttggcaaaatccagacagcaccaagtcctcagacacaggtgacccaactcccatggctggcctaggcccctcctcccaggcctgcgagtccttgagccccttctccctgacacagcagttcctagtaccctagttgttctgaagctgttccagtagcttgaaccctctcccagctccctgcccccatctctgcactcagagacagtgtcatctctgctgctgcagtctgcagggacaaagtcctctatagccactccggccaggtcaagctgggggcaagtgaccttgagaccctaccctcaggcaagggaaggcccgtagtgtcccccagcagggcagatgttccggatgggaagatagcgaccccaggccacgctgcgcccctctgagccggacttaaggcagcatcaaggatccgctgctttccgtgctccggccctctggcgccccctgcaggcggctgggggaaggtcagggcggccagactccggatgaaatgctcaaaacaggccagacacacttgagaaaacggaggcctcccatcgttttttttcccacgtatattttttgttgttttttgttttttttctgtaaaatgtcccggttcttccataacttataaacatgatttataccgaggagatgggaaagtggacggggcagggtggactgaccggggatggggaagctcctctcgctgccccctcggggcgggcccaggccctttggaggatggggacgccaggacactcctccctgaggttgtctggccgcctctgcccctggtgctcagaatcctgcgtgcccctcaattccggaatccctcccgggaccccaggcccactgggcatgctgcccctgctactcagaatcccgaagcgccattcagttccagaatcccctcctcagctgctggggtggcggggtccctcctttccaatgtcccccccgacccccaaggggggagggaagggaggggggctcaggtctcccctctgtggcagggggaggtggaggtggaggtggaatcggaagggcgtggaaggcgggggccaggagggctcagccgatggtgaggccaaagccacactgaaacttgttcttgcggtgattcaggaaggccccaagggccagtgtcaggggcaggggtgggagcttcttctccagcgtggcacccacgatccagttgctatccacagagcctgcagggaagagctgaggtgagaggcgtgccagcttcccaccatatccatgcagagttcctggccaccttggataccagccacatgccgacagcttccagacctttaaccacactgctcctgccaccctgaaaccccatcacaccaacaacttcacgctggagcaaatggctcactcctcctctgctctccgctcagtgacccctgccctctgaaaagccctctagacccctgggttcccccaacctagtcctgcccactctgcggatgaatctgttcctctcactgagtcccgtgaagacagggctggtcaccgctgtggccccagcagtgctcagcaggaggctcaaacacccaaaatctgtgagccacagatatccaagaagacttaagactggacattgggactacgaccagtgtgcctgagatgaggttctggatttagttgtgaccttgaaacctctggaagcctcagtttccactaacgtaagatgaatggggcaggctcgaggcttccaaagtgccttctaccctggctgggtgtggtggctcacacctataatcccagcactttgggaggccaaggcttgagtccaggagttcgagaccagcctgggcaacatggtgaaacccccatgtctcccaaaactatcaaaaaaattagctgggcctggtggcatacacctgtggtcctagctactcaggaggctgaggtgggaaggctgcttgagcccgggaggtggaggctgcagtgagccgcagttgcactgctgcactctagcctgggcgacagagggagaccagtctcagaaaaataagagagtcaagtgcagaaaaataagaggggatggacaaagctccagcttggcccaaacacccatcagatgctccaccagattttttttaacatttatttatttatttcattttattttttttggagatggagtctcactctgtcacccaggctggagtgcagtggtgcagtctcaactccctgcaacctccgcctcccaggttcaagtgattcttgtgcctcagcctcctaagtagcggggactacagttgcagcacgctaccacacctggctaatttttgtacttttagtagagaggggatttcaccacgttggccaggctggtctccaactcctggcctcaagtattctacctggcttggcctcccaaaatgctgggattacaggcgtgagtcaccacgcctggctgctctacctactttttttttccaagcataaaacatagtagagggttgtccacctacttttttttttttgagatggagtcttgctctgtcacccaggctggagtgcggtggcacgatctcggctcaccgcaagctccgcctcctgggttcataccattttcccgcctcagcctcagtagttgggactataggcacccgcaaccacacccggctaattttgtttttgtatttttagtagagacggagtttcaccgtgttagccaggatggtctcaatctccttacctcggcccgccttggcctcccaaagtgctgggattacaggcgtgagccaccgcacccggccccacctaccttttaacaagtgttccctggtaatgtggaggcccacagggtggcagcacactgtcctccagcacctgtggtggcccacacatccactcagagttgagtcacctcctgcctgtttcccgcgtaggggaaccgagacctttacctttgaagaggaggttggccttgggcaggtccagctggtacccgaaggagacgctggtgtcctgcatccttgtgctggcctcaaactccacacccacctgcagctggaggggccggagcaacacatgagaattagcaagtggccccacctggacttccaggcccagcagcccctggcagcaccagctagtccctgcacccactcacctggtcactggctttgtgg

SEQ ID NO: 1311 - DNA, 4043 bp, Homo sapiens
gctctgccactcggtctgctggcgcagctcgggctccggctctgtctccaccgcttgctccaccttggcctggcatcctgtgtggaacaagttcaaggtgggtcagggtccttctgaccccgtccaggcatctagtacctaggggcacacagaaggtgctccacaaatgcttctttggagccatggtgggcagggtgaggggggagtcggtttaatcacttggaaagcattatgtatttataaacagggtcttgctctgtcacccaggctggagtgcagcggcctgaacatggttcactgcaaccttgaccttctgggctcaagcgatcctcctgcctcagcctcctgagtagctgagagcacaggtgtgtggcaccatgcctggctaatttttgtatttttagtagagacagggtctcactatgttgcccaggctggtgttgaactcctgggctcaagtgatcctcccaccttggcctcccaaagtgctgggattacaggggtgagccaccgcgcccagcggaaaagcatgtattgagtgtccttgtgtgccccaggcagggctgtgtgggggtgatggagaataaagatcacagctgccccgtgtctggtattcactatctgcctgcaatgcattagaaacctctaactcccagccaggtgcggtggctcacgcctgtaatcccagcactttgggagatcgaaacgggcagatcacctgaggtcaggagttccagaccagcctggccaacatggtgaaaccccgtctctactgaaaatacaaaaaagttagtcgggtgtggtggcatgtgcctgtagtcccagctacttgggaggctgaggcaggagaatggcgtggacctgggaggcggagcttgcagtgagccgagatcccgccactgcactccagcctgggcgacagagcgagacttcatctcaaaaaaacaaaacaacaacaacaaacaacaacaacaaaacaacttctaactcctatctcaaggatgggggaaaccgaggcccagagagcgtcaaatcgctgttcagagccaggaagcagcacagaagcctcagaagagggggcccagggtctgcctgaatggggccaggaggttgaggtgaggatgagagggggaggagcggggggaaccgagcaagccccgcccccatacctgccaggaatgtgaccagcaacgcagcccacagaaccttcatcttcctgcctgtgattggccagtctggggaaggagaaactgtcaatcaaccgccagtgaggactcctcccacccccagcccggccccaacccggcctcaccccaggttagccttccaagccttgttgcattatctgcaacagcctaatcccagcacatttaccaagccgcccccaacccattccctatttaactccctcctggtcttctcttatctccccatccccaggtcggcctccatagaaaattccatcttcctctcccggggttcaaattccatccccccaccccctccccaccgccggttccatctcagtcccagtctcgcattcctcattctcccttcacattctaagctccaacctcacagttaagcgccgtgttccatttatgagctaattcagtcctcattttaaagttctccaatcgacggctagctaccgtgtcgctgcccctggctccccagttatggagatctgaggacactggggacacccagtaggtgctcgataaatgatagtgacaactcgtggagtcctgctatggcttacatcccagtccagctgctctccccaccccaccttctagcgggtcgggtcgtctctgctgcccagcccttcccaggtccagtcccctgctgcttgcctcacccccgctcctcctctccccaagcccgaccccgagtagctctcctgagactacctggaggccaggggttcccagggtcccagctctttctagaggcccctgagctcatccccgtgcccccgactgcgcttctcaccggctcctggggaaggacgtccttcacctccgctggggctgagtaggactcaaggatcccagacttgtccaattatagggctccccctgtcccgccccctcccccagggatagggcgggctgggccagcccccagtcacgaggtgggctgttctccccctgccccaggcacagcagggcagagggaggaaggaggtggggcatagaggtcttttgaccaccccccacagtccccaggaagggaggacacctcgcccagtaatacagacaccctcctccattctgggggccaagcgtggaaggggaatgtggaggctgccgcccagagtcctcctttcctgaccctgtcctttcctgtgcctggatgaatgtaatctggagagggggctggggatctggactcctggatcccagaaagaaagtagggctagggggctggacagaagtgggatgggaggggctgggggcggtagctcacgcctgtaatcccagcactttgggaggccacagtgggcgaatcacttaaggtcaggagtttgagaccagcctggccaacatggtgaaaccccatctctactaaaaatacaaaagttagccaggcgtggtggcgggcgcctgtaatcctagctacttgggaggctgaggcaggagaatcgcttgaacccgggaggcggaggttacagtgagccgagatctcgccactgcactccagcctcagcaagagggagactgtctcaaaaaaagaaaaaaaagaaagtggggctaggcggctggacagaagtgggatgggaggggtgggaacagtatgatgcacctgctaaaagtcgaggctttgcaaatgggacctgggttttaatcacagcttcctctttggttgtgaccttgagcacaggggagccccctccccacatgtgaaatgagattccagcacctccccctggctgccacaggtattgtggtttccaggggcttgaagccgtgcttctgggttaaggttaggattctggagtcaaattgccagggcgtgaatcctggctctgccagttgccagctgtgtgaccttgggcaaatgacttgtcctctctgagcatcaagttcctttgctcatcagactgggaaagcagcggcacgggtatgtttggtgacaagctaacgtgtattgagcatggaggacagccctggcacacagcggtcctatgttagggctagcaatggacaggccacagtgaacgctcagacgctgtcactttcctaagccctgttataaatcccagatgtttcagaggagaaacccgtggttcagcagcaagacgaatggcaaaaccacacagtgagaactgggagagactgggactcattcctggctcctggagcgggtgggatcagaagattctgcgggtcaggggaggctgaactcctggttcgagaaggaacccccagtgccgggccgggcctgtttgctttggctggcaaggggtggctgaggtggggttggtaacctggggttggttctactcagcagcctccttccccagaccctgggggcagacagggtttcagttcctggaggctcgggagtcgtggtgggcatcagctgaccccagccctaggttggcaaaatccagacagcaccaagtcctcagacacaggtgacccaactcccatggctggcctaggcccctcctcccaggcctgcgagtccttgagccccttctccctgacacagcagttcctagtaccctagttgttctgaagctgttccagtagcttgaaccctctcccagctccctgcccccatctctgcactcagagacagtgtcatctctgctgctgcagtctgcagggacaaagtcctctatagccactccggccaggtcaagctgggggcaagtgaccttgagaccctaccctcaggcaagggaaggcccgtagtgtcccccagcagggcagatgttccggatgggaagatagcgaccccaggccacgctgcgcccctctgagccggacttaaggcagcatcaaggatccgctgctttccgtgctccggcc

SEQ ID NO: 1312 - DNA, 4086 bp, Homo sapiens
gtgacagggtgagacctttccctgccccctaaaaaagaaagaggggcagaggccgggcatggtggctcaggcctgtaatctcagcactttgggaggccggcgggtggatcacttggtcaggagtttgagacctgcctggccaacatggtgaaagctcgtctctactaaaaatacaaaaattagccgggtgtggtggtgtgagcctgtaatcccagctactgaggcagcagaatcgcttgaacccaagaggcagaggttgcagtgagccaagatcgtgccactgcactctagcctgggtgacagagccagactccgtctaaaaaaaaaaaaaagggcagagagaaagatacacacagacacagatggagaggagggggctgagaattgtgtggccagtatgtgggcagaaagagaaactgaggctggggcttagaggaaatcacagggggaggccagcagatgcgtgaaacttggtgaatctttattaaactagggtccaccccaggaggacggctggggcggggacagggtctcccgctgcaggctgcgcggaggcaggaggcacggggtggcgtggggtcgcatggctgcaggcttcggcgttcagtgattgtcgctgggcacaggggcggcgctggtgcccacggcagcctgcaccttctccaccagcccggcccactggcgctgcatgtcttccaccaggggctcgaaccagctcttgaggcgggcctggaaggcctcggcctgcaggcgtatctgctgggcctgctcctccagcttggcgcgcacctccgccacctgctccttcacctcgtccaggcggtcgcgggtccggctgcccatctcctccatccgcgcgcgcagccgctcgccccaggcctgggcccgctcctgtagcggctggccggccagggagcccacagtggcggcccgcacgcggccctgttccaccaggggccccaggcgctcgcggatggcgctgaggccgcgctcggcgccctcgcgggccccggcctggtacactgccaggcgcttctgcaggtcatcggcatcgcggaggagccgcttacgcagcttgcgcaggtgggaggcgaggcgcacccgcagctcctcggtgctctggccgagcatggcctgcacctcgccgcggtactgcaccaggcggccgcacacgtcctccatgtccgcgcccagccgggcctgcgccgcctgcagctccttggacagccgtgcccgcgtctcctccgccaccggggtcagttgttcctccagttccgatttgtaggccttcaactccttcatggtctcgtccatcagcgccctgcggccgagagggcgggagggtgtcgcacagtgggaggcggggagaagggctgggatggggcgggcgagatggggatgagccagagagacccaagagggagagaaggaacggggcagaggccgagagaaggagacagagacagatgcagagagcagatgcagagggcagaggcagagacgaagaaggagctaggaggccgggcaaggtggctcatgcctctaatcccagcactttgggaggccgaggcgggaggatcgcttgagcccagaagttcaagaccagcctgggcaacacagtgagaccccatctctctgtctctatataaaagagctagggaaggacagagacagagccaggacgagtgtgagagactgagtcagaagggaagagagagagacaaagctgagagagagaattccagagagctaaagccaggagtcagaaatgggaagaggaagctagaaccagcagagacccaggccccccaagacttagcgacaggggcagaatgaaacctggacctggggaggtatagccgcccaccaggagggtcaagggccaggatggggacactcacctcagttcctgggtgacctgggagctgagcagctcctcctgcacctgctcagacagtgtctgcacccagcgcaggtaatcccaaaagcgacccagtgccagttcccagcgctggccgctctgccactcggtctgctggcgcagctcgggctccggctctgtctccaccgcttgctccaccttggcctggcatcctgtgtggaacaagttcaaggtgggtcagggtccttctgaccccgtccaggcatctagtacctaggggcacacagaaggtgctccacaaatgcttctttggagccatggtgggcagggtgaggggggagtcggtttaatcacttggaaagcattatgtatttataaacagggtcttgctctgtcacccaggctggagtgcagcggcctgaacatggttcactgcaaccttgaccttctgggctcaagcgatcctcctgcctcagcctcctgagtagctgagagcacaggtgtgtggcaccatgcctggctaatttttgtatttttagtagagacagggtctcactatgttgcccaggctggtgttgaactcctgggctcaagtgatcctcccaccttggcctcccaaagtgctgggattacaggggtgagccaccgcgcccagcggaaaagcatgtattgagtgtccttgtgtgccccaggcagggctgtgtgggggtgatggagaataaagatcacagctgccccgtgtctggtattcactatctgcctgcaatgcattagaaacctctaactcccagccaggtgcggtggctcacgcctgtaatcccagcactttgggagatcgaaacgggcagatcacctgaggtcaggagttccagaccagcctggccaacatggtgaaaccccgtctctactgaaaatacaaaaaagttagtcgggtgtggtggcatgtgcctgtagtcccagctacttgggaggctgaggcaggagaatggcgtggacctgggaggcggagcttgcagtgagccgagatcccgccactgcactccagcctgggcgacagagcgagacttcatctcaaaaaaacaaaacaacaacaacaaacaacaacaacaaaacaacttctaactcctatctcaaggatgggggaaaccgaggcccagagagcgtcaaatcgctgttcagagccaggaagcagcacagaagcctcagaagagggggcccagggtctgcctgaatggggccaggaggttgaggtgaggatgagagggggaggagcggggggaaccgagcaagccccgcccccatacctgccaggaatgtgaccagcaacgcagcccacagaaccttcatcttcctgcctgtgattggccagtctggggaaggagaaactgtcaatcaaccgccagtgaggactcctcccacccccagcccggccccaacccggcctcaccccaggttagccttccaagccttgttgcattatctgcaacagcctaatcccagcacatttaccaagccgcccccaacccattccctatttaactccctcctggtcttctcttatctccccatccccaggtcggcctccatagaaaattccatcttcctctcccggggttcaaattccatccccccaccccctccccaccgccggttccatctcagtcccagtctcgcattcctcattctcccttcacattctaagctccaacctcacagttaagcgccgtgttccatttatgagctaattcagtcctcattttaaagttctccaatcgacggctagctaccgtgtcgctgcccctggctccccagttatggagatctgaggacactggggacacccagtaggtgctcgataaatgatagtgacaactcgtggagtcctgctatggcttacatcccagtccagctgctctccccaccccaccttctagcgggtcgggtcgtctctgctgcccagcccttcccaggtccagtcccctgctgcttgcctcacccccgctcctcctctccccaagcccgaccccgagtagctctcctgagactacctggaggccaggggttcccagggtcccagctctttctagaggcccctgagctcatccccgtgcccccgactgcgcttctcaccggctcctggggaaggacgtccttcacctccgctggggctgagtaggactcaaggatcccagacttgtccaatt

SEQ ID NO: 1313 - DNA, 4042 bp, Homo sapiens
ccaccttcctggttcaagcaattcccctgcctcagcctcccgactagctgggattacaggtgcacgccaccatgcctgcctaatttttttgtatttttagtagagacaaggtttcaccatgttggtcagactggtctcgaactcctgacctcaggcaatcagcccacctcggcctccctaagtgctgggattgcaagcatgagccaccgtgcccagcccaagaccatcttttaaaatatggcctggatgggagtcagggaaactgtccttgaagtctgagcaccttgagatctagctgtgtgaccagagggatgttgtcagcctctccaggacttgtttttttttcaatctgttcatcttggaccatctgccagggctccacccaaaaacacaccccagctctcccgtgccctgggaagggttctaaccgcatcttggcagaaagttcactctgtttgatgcggctgatgagttcccgagccttgtcctccagtgtgtttccaaactccttcagcttatccaaggcactggagacgtctggggtcccctgggctggggctgggcctgccaggaagatgggcaggggttcaaaatttgtttttttttttttttttttggagatggagtcttgctctgtagcccaagctggagtgcagtggcatgatctcggcctactgcaaccaccacctcccgggttcaagcagttctcctgcctcagcctcccaagtagctgggattacaggtgtgcaccaccacacccagctatttttgttttgttttgttttgagacggagtcttgctgtgtcagccaggctggagtgcagtggtatgatctcggctcactgcaacctccgcctcccgggttcaagtgattctcctgcctcagcctcccgagtagctgggcctacaggcgcgtgcctccacacctggctaatttttttgtatttttagtagagacgaagtttcaccatgttggccaggctggtttcgaactcctgacctcaagtgatctgcccgcctcggcctcccaaagtgctgggattacaggcatgagccaccctgcccggccaaaaatttgttattggaacccccttaggttgggataccgggatggatagagatccttggggatcatgtggttagaatggggaggaatggccggacgcggtggctcacgcctgtaatcccagcactttgggaggtcgaggcaggcggatcacaaagtcaggagatcgagaccacggtgaaaccctgtctctactgaaaatacaaaaaattagccgggcgcggtggcgggcgcctgtagtcctgctgaggcaggagaatggcgtgaaccagggaggcggagcttgcagtgagccgagatcgcgccactgcactccagcctcggcgacagagcgagactccgtctcaagagaaaaaaaaaaaaaaaaaaaaagaatggggaggaatactggagtgacctggtggggctcaagctgctgggaattgccttactcagcactgacctctcccagagccccccacccagcttacccactttcaaggctgtcgaagcaggacagccaatcccagaggtgtgggcctcaatacgtcatcggttgctagtgctctcctgcgcagatttggcgcctgcgggactgagcctgggagaacctggagacccacccgaccacgatgaggcaaccacgacccagaaggggccccggagctctcagaggtcctctaagccgggaccccaggcctgtagccaccttcactcttccaaatctccaactccgcaattctcccatcccacttttaccttccaagacgatcgacagaaccaccaccaggaccgggagcgacaggaagagcctcatggcgaggccggaggggcactctggaggcagaggcaggggttcaggggatcagtggcaccctcctccctccctacctccctcccacgatcccctcatctccctttttgagtttcttgcagagtgtaggcgggtgtccctcccaggcactcagcaccaacctgaatccttgctggagggcttggttgggaggtcctgtcctgcccgcaggacctttatcaggctggggagggggcggggcaggttgatgttgatctccctcctcctgagccttcccctgaccgcctgcctccctctgtccacccacgtttttctcctctgcccctgtcccgtgagcgttggggtcaggtggggtcccgggcacttcccttagccccaaagcccctccccgttcagcactctcacctctcaatcttcctgactctgtggggtcctcagaccaccttagtccctttccccactcagaatgtagcaggaggagccgcagacaaaattcctcagacgctgagttaaggaaggggtttattcgttcggggaatgggcaagattcctgtctcaagagccgagctccccgagtgagcaatccctgttccttttaagggctcacaactctaagtgggtgcacgtgagagggtcgtgatcgattgaacaagcaggggatgcgtgactgggggctgcatgcaccggtaattagatcggaacaaaacagaatagggattttcacagtgcttttctatacaatgtctgtaatctatagataacctaacggattaggtcaggggtcaatctttaaccaccaggcccagggtgtggcgcgggctgtctgcttgtggatttcatttctgccttttagtttttactttttctttctttggaggcagaaattgggcataagacaatatgaggggtggtctcctcccttaagaagacagccttgtcctgtccctgtggccatcttccctcaggggtctcccagtaataaccctgtgatctcatccccccctcattcacaccgtgtccctagatcacctctttccctcacttcccctctctcagcaagcctcctcagccccaacaacttttcctttatgttgctgggtctcccagttggcccggcgctcctaccctgcgtgccacctccaatttattccagaccagcccttgaagcaccccagaccaccgtgatattctctgggctcttaacttcatggttctcagtctcccttttttgggaggggaacgggtcgccttagctggatgacactgcaaaaacctcacctgcattagccaggcatggtggctcatgcctgtaatcccagcactttgggaagctgaagagggaggatcacttgagcctgggagttcgagaccagcctgggcaatatagggagacctcatctctacaaaaaagttcaaaaattagccgagcgtggtggcgcatgcctgtagtcccagctactcaagaggctgaggtaggaagattgcttgagcccaggagttcgaggctgcagtgagctgtgattgtgccactgcactccagcctggtgggacagagaccccatctcaaaaaattaaaaccctcagctgcaaagctctgcgtgtatgtcccttcttcccttccaccgggcctcaccccctttggctggctacctcccccaaacactctatctgcttttattcaccctctgacgcccctcctggcaccaagcctgcttcccaccatcactacatccgtcccccaaggctggagtccaatgccttccccaccagctgcctttgaccgccagtgaccctggcagctggtggggagggtgtcctccgcctagcctcagactctaggttggctggccttgtgcccccgcaaccacgtgtcagcctggcagtagggggatggttgtgaaaaggacagcatagacaagaccctggcaggattgcaacatccctctggccagctcagagcttccagtccctgtcagccccaggggcccccctacttccccaactaagcccagcaccccccaaacatccacccagatgtctgcttcccagaccccacaagaatagcataacaatgctcctgcttttccaacctcatcctcccctctgctataggggtttctctttaatagatggggaaactgtcgcataaccaagaacatccagtagggctcagcgaggggcaa

SEQ ID NO: 1314 - DNA, 4069 bp, Homo sapiens
tgagattatagattaattggaatgaaaggaatggaggtgattttgcttagtgaatggtcatggagactgatgtttatgattataattagcaccaacttaattccagtagcagtgagaatcactgttgtactgatagataatgctgatggaattcttttgcttctatgaatagttggaggccagaagagagttcataattgctgaatttaaaaatcatggcgcctagatctcatcggaattaaaaacttttgctctatgaaagcccatgtgaagatgaatagacgtgccatagtgtgggagaaaagaatttcaaaccacatatatgacaaaggactagtgtttagaatatataaactcaacagaaaaataaataatccaattagaaagtgggcaaaagacataagcagacatttcatttcagagaggacataaacatagcaaagcagcacatgaaaaggtgtttaatatcattagttgttagggaaatgcaaattgaaaccacaatgaaatatcactatacatttaacaggatagctaaaataaaaaatagtgacaccaccaaatactggcaaggatgcagagaaaccagatctctcatacattggtggtgggagtgtaaaatggtacagccactctagaaaacagtttaacagtttcttacgaaactaaacatgcaactaccatatgacctagaaattgtgctgttgggcatttatccaagataaatgaaaacttaactctcacacaaaaaatctctaggcatatgttcatggcagctttatgtttagtagtcaaaacctagaaacagcccagaagttgttcagcaggtgagtgactaaacaactgtggtacatctgtaccaggaaacactactcagtcatacaaaggaacaaataattgatacacacagactggatgaatctccagggaatcatgctgagtgaaaagcagccaattagaaaagattacatacagtgtgattctatttataaaaaattttgaaatgaaaaacattttagaaatggaggcagattagtggtggtcagagggcagggatagaactatggatggggagaccaggggaggggtcgggaaggaggaggttatgtctataaaacggcaacacaggatctttgtgctagtggaattaagttggtgtctcgactgtggtagcaaatacatgaacctatgcaggtgataaaattgtatagaacttaatatacacacagacacacaaaggaatacaagtaaaacttggcaaagctgaataacatcagtggagcgtatcaatggctttcgcaccaaagtggtaaggatgtcctggaagatcaccagtaaaacagttttggggaacaatacagttgttggaaatagaaagatgggaaatatccagttacaaattgcaaatggcagcaaagttttaaatttttcaaattaaattatacaagtaacacataaagatatctccttgtaaaaaggtaaaagagtacatacaaggagcaaatttgtgttctttccaatttcctatgcctttacacacatgtgtatatagtgtaaaaaaactatttgctttaatgtaattatgtgttcagtctatatcattttggaatttcccctttttattcaatataccctattattcagtaccttttaattcaatataccaatataccttagtagtttttccatattaatgctgtatgtgggtctatttcttattttaactgttggatagtgttacagagcatggctatgcatagtaattaatgcactgttcaccactgatgaatattttggttgtaggtcaatttttcactgataacaaattatactgcagtgtgaaatccttaatacagtaccagtttgcaggtgtttctagggcaaacactaccaaaaactggaattactggttaataggatatagatacaggtataggtatagggtgtggagaatgagagttacagtttacccattactctttgcctcctcttctttcagtactagaatctgtcccagtgaccttgctatgctgggtagggtaaatttttatggtgactatattaaggagagggaaaatgagtgatccgagatgtatacctttgttagtgtcatttcttttattggtggagtttgtaatattttaatcattgcagtcatttgtggtaaaacttgctattttaggatctcctcctgttcctgaaaatgacattggaaagcttcatgcccactcacctatggagttgtggaaaaaagtgtatgaaaagctctttccaccaaaggtacatatttctaatttttttaaaagcaagacttttagcactgtctaacagttataggaaatgtgtcaaagggcttattatgataactttgttttcatcttttatgctcaaaaatcaattaaacatttgctgaaaatgtaaataggcactgtgggggttaaaaaaaaaaaaaggtaagacatggttcctgctccactttcaaagagagttatctggctgttagagaagggagagacaactgaaaggggacctggcagaattggaagtgggcctcagtggtgatgagaaaagctagaaagatcatagagagcctttgtggcaggctgaggaatgggagcttggtttattaggcagatggtagccattgaattttggtttatgggcgtgaagtgattttgagatttgtaatttcagagtattaacacgctgaaagatatcaaggaccctgcgagagatcctcagtatgctgaaaatgaagtcgatgagatgagaattcagaaggatctggtattatcctaaacatttacttaatttcatctgaaattttaacacaaaacctggggtgccttgggaattccttacatttttctctatgtatttacttagagtatcttctttactattaaaattatttaagtagtacatctatttaaataacacactaatagtatactgtagaaaaaataaaaatttgatatgaataaagaaaaatttttaaatcacctgtcatcccaccacccagacatgacttagtgttcacataaacctttttgattttccagttttcattatattaaagatgagtggtgattcttaccttgctgctggagagacattttcttaatagtctttggtttgtggaattacatgaagagctttgtttttgattaggacattcagacatacctatactttccttgtactagaaaacgtatcttgcccagttaaggactgaaagcacgatctgaaagcacacagacatacctgacataacccaggttctctcaggaaaatgcttaaaagtggacaccaccatcccatgtatcactagatagccccatttgaacacacaagtctgatgtaagaatgttaagagttggcaaattcaccatcactcaaatacttagatttttcttttctttttctttttcttttttttttaagacgagtctcacactgtcgcccaggctggagtgcagtggcatgacctcggctcactacaacctccgcctcccgggttcaagcaattctctgcttcagcctcctgagtggctgggattacaggtgcctgccaccacacctggctaattttttttgcttttttagtagaaacggggtttcaccatcttggccaggctggtcttgaactcctgacctcgtgatccatccgccttggcctcccaaagtgctgggattacaggcatgagccagtgcgcctggcctagatttttctaaaaacaaacaagcaaacttagattttagttttatttgataaaatgagacgttgtacagaatctgtccttatatgagtaaacttatatatgctaagcactagatcgaaagccccagcaacttctcaggtggcagtcacgttgttgcgagggtaacctgaaaacagctgtcagctgggagtaggagccagggtttttttctcagtattcaccttcgggggctgttggagaagtaagcaaaacattttatgtaaacggtccagaagacttttgaaaaatatgccatgaatatttagaggttttatagctgtagcaaagtgagaggcatgttgtagaaa

SEQ ID NO: 1315 - DNA, 4061 bp, Homo sapiens
aggcacgcaccaccacgcctggctaatttttgtatttttagtagagacaggtttttgccacgtcggccaggctggtctcgaactcttgacctcaagtgatccaacctccgactcccaaagtgctgggattacaggcgtgagccactgtgcccggccaccctgagatttctaatggccatgaggtccttgtcttggttctacttccatctggtgggattgaggaatagacttttgccaaaagtagctttatttagctatgtacgatgtacattttggggaacaagaagccacttcagcctgcttgaatgtgttcagtagatacaggaactgagtctatccagaatattctggagtttacctcagtgtacataaggtctgtcattttctaacaacatccaagtgtcccttacctgttgacctttgacaggagactaacttgactactgcttattttctttcatcttaaaaatcagagaaaatgttggactgtatttcaaaacagagttttaaattgaattattataaaacacagtttttatttcaaaaatacatttcctccaagaaattgcttcctcagagtaacatgcaaaaataatatccccaaatagaatacttaccacaagtgaaattcagtccgtagaactcattgactacaagaatctcactgcaatatttttggaatgtaaaataactgatgattttaaaaggaatgggcatttcttgtatgtttcttaagaaaaagaaaacaaaaatgaaattcagtaggctctggcaatagtcctaccaaatgaaaagaaaggcaatccttatattttccaacaggaatatagttttctatctccttattataaaaatgatgctcactataaaaaaaccttcaaacaacattgaacaatataaagaaataccgttgcctagaaataactattgttaacattttggtaatatatataacatgtgtgtttaaaagttttatataaatggaattaaactcttcatgctctttcctaacttactctttttctgccaaacatatgtctcagacatccttccaagtcagtaagcatagcactttgtcatttttaggcacagcttggtggcctgttatagtgaagaccttaatttaacagttctctcaagtagacgattactgtctacttattttggtaagcactactgatataaacgtacaagaaaatacagacctaacacataccaattggaggaggagatttgtgattaaacagaaagttgaaggtaccaacgtagaaagttagaactaacctagaatacaaaggaaaaaggaaggagagaccgaaccaacattcattgtgaaaatgaaatatgtctcctctccaatctatttcaggtgaaactgtgtgctgacactgtggtcttcttagtccactgtatattttctgtcaatcaaaaggtataaaattctttctgtttgcaaggcactagttctaggagcttgagaacttcaaaagatgtatcctatccctaaagaactcataatgtagttggagatatagaatatatccttaaaactataaaaatatacagtagtgaactatttgtgccaagaaagtataaaaaaatgtgtaccacacatccatgatgttcttgtatttagtatttatggtttcacctatttgcaaggtgtcctcaacctttcagtttcctaaggcacaacattgaattaaccacattgagaggttgctaattgaaaaggatacgtgggactctgggaaggaattaggggaagaggatggaaattctaggaaggcagaaatggtatgagtacaggtatgccaagggctgcatatgggactgactggaccagaaacactggaagagaggatgtgaaggaacagtgggaggggagctcggaacaatagccagcaacagccatttcagggccttgctgtgagttgaggttgaatgaccatgaatgagacaggtcacgttgaaatcagcattctgagaaaattaacgtgactccagcaagaaggatggctagaatgagggcagagtaagaacaggaaaagaaaaaaaaaaaaaaaaaggaccagactacaaaaaaagttcaactatgagatgacaaaggcctggagtaggatgatggccatgagatggtggctgcctagtggctagggtgctatctttctgaggtaggaactgtgaacctttgtttctccctgtaccacacagagtcaaacacaaaatgttccacatgcacctatggtttgatatcagaaaagaaaaccaacatgatttggtgagtgatgcagtgtgtatacagttcaaagacagagtcatttacttattcactcaacaaataatgtttgcaggcctaattggtccaaggcctaattgggctggctgctgagagggtctaaaatgatgaatgagacacagctgctgccttcaaggggtggataatctattacagcaaaggaagaccgtgacaggaagtagtgtgtgataggctgagagagaaaacaaaaggggccttcaaagagagtgcgcctctagccttgggaacaaccaacagactttgtgcaggtggcggagagagagaaatggatcagtgaaaggcacagacagaaggagaagcagcgggaggaaccatagatctggatgtattgacatgacattgtccacattaggttggtttgtgctttgtcttttttattttttgaacggagtcttgttctgtcacctaggctggagtgcagtggcatgattttggctcactgcagcctccgcctcccaggttcaggtgattctcctgcctcagcctcctgagtagctgaaattacaggcacgtgacaccacacccacctaattcatattatgttgttaaatgggaaaaaaagtatgcatattttatatcttatacaacaggatgatttcatctttgttaaaaattatataaaattctagcaagaactacaacaaaatttaactctaggctctgatacttcaggtaacttttactttcttccacatccacatttatattgtgagcacttcttcccccaagaacttgcatgattttgtaagcagaaaacacagcaaagctaatttcctttgtgtttaaaagagaagggagccaacagcacaaatgccttaggcagttcacccagaaagatgatgactggggagaaaaatgggtaaatggaatgactagcaggttgatgtggcctttaagagtggagttttaattttcagcgatggaagtggaattcatatgaagccttgggttgttaagattttgcaactaatctgagaacatttagtattctttgcaactgcctaccttttaagagcaattaaccaccaggtatagtggctcacgcctgtaatcccagcaccttgggaggccgaggcagggaaatcacttgaagtcaggagtttgagaccagcctgaccaacttggtgaaacctcatctctaccaaaaatacaaaaattagctgggcgtggtggtgcgcacctgtaatcccagctattcaggaggctaaggcaggagaattgcttgaacctgagagacggaggttgcagtgagccgagatcgtgccattgcattccagcctgggtgacagagtgagtgagactctgcgtcaagaaacaaacaaaaataaaaataaagagcaactaacctccttttcctaaaaccctaatacaaatgcttcttatgatggggttacttccagataaacccatcataagttgaaaatattctaagttaaaaatgcatttaaggccagacgcggtggctcacgtctataatcccagcactttgggaggccaaggcaggcagatcacctgaggtcaggagtttgagaccaacctggccaaaatggtgaaaccacgtctctactaaaaatacaaaaattagccaggtgtaatggcaggcacctgtaatcccagctactcgggaggctgaggcaggaaaatcgcttgaacatgggaggcggaggttacagtgagccgagatcgcgccactgcattccagcctgggtgacagagcgcgattccctctcaaaacaaacaa

SEQ ID NO: 1316 - DNA, 4047 bp, Homo sapiens
atgatttccttattggccttgctttcgacctgtgaccagaacattcactgggcatattcagagaaatatacttaatgtacatgttaatgttggaaaagtaaatatgagggattcagtttcctgtaccttgcatagttcacaatctatgttggctgcaggcatgccagaagtgacattttggaaaattgaaccctctgacttatcagaattatacctctggttacaatgggctttctaggtttattggttaccaaatactttcaaacaaatttacaatctttatacctcaacttaataacagaagggattataaattataggcaatcaatacttagtccttatttttataacttcctggattctgtcaatttctgtttgcttgtttccttgctttgctttatacaaggaaatctttagttgcctttttcaaaattttcttagcatttctcttcataatgttatactcttcataatagtatattacattaaagattatactattcagggaagtcagaaaggccactttcaaaatatagggattaaacaattaatcaagtatgaagcaaaacaaaacattttcagacccatatctatgaactatttcttagaaatttgcttttggatgagctccaacaaaagggggtaaaaactagaaaaaggaatgtatgggaactacgaaataatggatctaatccaaggaaatatcacagggaactcacaggatgatgactgttcaacaggcaaacgttgcgagtgacagaaatgagggaagagatggcctgacagagacattggaagaacacaaaggttttcatgaagacaaagaatgcaagaaaaaaagaaacctttcagaaaaacaatcaaaaaaatataatgtaaatgtaactcactatttgactgaaggatgaacaatatttacataatcattaaaaaagctgtcaattgattttcaacttttagaatcaacttagagtgaaggcaggaaagataatgttataaacagaatgtgctctgaattcttgataaaagtgcagttagaacttaagaggtaaaagaagtaagaggtgaaaagagtaagaggtgaaaataaaggtaggattgctaacatttttcttttagaaagtgagaattcaagaggaactatctacaggtggtggaagagcaacggaagcagatcagaagtttacaaatttataaatagaaggcctaaaaaatgatataactatattgggaggaggtaggcaaaaggagggagtggtgagagtaagtagatttttatctcttgagaataaatcacagagagtctaaatttgttaaatcatgaaatagcatgagcatattatttaaagacataaaagtcaccattgggagatcaaaaaacatcaagtggtcaaaaatagttgcctttgagcagagaaatgtggagtgggagtgtaagcataaagcaggggggtggctttttattataaatatttattatttgattttgtgaccttctgcatatattacttttaaagaaagaaaaaaaggacagaaaagagaaagaaatgttatgaaaaataaataccaaagctattcaccaaaatttcaaatatccttgctaaagatttatggtacatggctctcaatctgagttccttgcgttatttagatttcagcttcttgaacaaggattgtcttagatcttttcatgctaactctcctttcttgctcatttatcattatttcccttatcactctactttttccattcctggtcattagtttcctgattagtctgcactttctgctccatttacgggtaagtgagtgcttctattaaatacactcatctccagctttgcagtgtgcccagttttctttgcctaactggtcagcaggccatctggaactggggaaaatctgacattagaaattgtgaggtagaatcaggtgaagcagcaaatgactgggactggaaaatatgcatggggtaagtgccttaggcaagcattttaaagtgagtctggcaaagcaaaaacttgaagcccacttttaggggttggaaatactctgcagaaggcaaaattctcaaaaaggttgcgtggcttaccaccttcccttgatcaggatcatagaaacgttccaacagctgaatgctagtgcttttgccacatccactgctcccaacaaacgccagtgtctgccctggactaatcgacactgagagaccattcagaacttgcgagtcaggtcgagaaggatatgtaaatttacaatcaacaaaatcaatcttcccctggaagttgtcctgtggatgggaggatcaaaattagagatgctcttactgaagcctagaatattgaaaacacacctaaatcttgagtttaaaatccctgcttgagataccttcaaaccatgctgccaaagtgcaaagtataaagacagcaacttaataaaaggacattccattttgtgttctgaaagatgtagtataaaggaaggcttgggcaacgaaattaaagacatttgactccccctattcccagtctaacataaggggattttcttgccatctattcctgacattctgaatagaagagaatagctggaagatatgacatcacagaagccagtaactgtccaaaccctatagctttgttctcctaaagactaaaaataatgttacacttaaaacgacctagaaagaaagttacctgaggtctgtactgcaaaggtgaatactttctattgtactttggtgtgcttaaaactctaacttataaaatctagaaatggatagacatttaatagaccacacagaaactttacatttactgaactgaaggagaaattttaccaatttagaaagattacagaatttagcttagctttactagtgtttaggtttgctttgctttctggaacatactaaaattttcaaaaataggtagagaagatttacaaatacctatctatcaattagaagaacagatattttgttgagattgaattaattttcaggacatccacataagctaaaacttgaatcaagatgaacatgaattaaatcaatgttattggacaggaagaagtgatttttctacattctgtatcagaacatcaatagaaaacacagtggttaggtagatctcagaggacaactggcttcattcatttgggaactaagtgtattttatattacacagaatttagcattcactgaatgtcatcaccttgttcaaatgccagctttaggaataatttttgatgctaatttactttattcctttgtatttataaatctactgtttgtcttctccaagtatgtatgaatgaacccatatacagcaggaatttagaagccaagtggtattgtatggccatccctaatggctgtcctgcacacacatacgcacaaccttacccctcatcaatacttacacattttatttatttatttattttattagactttaagttctggggtagatgtgtagaatgtgcaggcttgttatataggtatacacgtgtcatggtggtttgctgcacccatcaacctgtcatctacattaggtatttctcctaatgctatccctcccctaccccacaccatcccctgacaggccccggtgtgtgatgttccccaccctgtgtccatgtgttctgtttgttcaactcccacttatgagtgagaacatgtggtgtttggttttctgttcttgtgttagtttgctgagaatgatggtttccagcttcatccctgtccctgcaaaggacatgaactcatccttttttatggctgcatagtattccaacacttacccatttttcacctgcagtattgtatacactgattgggggttgtcggtccagcagttgaaaaaagcgtgcagctgatattttagcttttgcataacttggggtgtaagagaaggctcttccaagagctgttgcactcagtacaactgcagagatcaccctgtaaccagacagacacacaggaagagagcagggtggcgtggttggtgtgatgacctgaaggcagaagtttggggatctagccct

SEQ ID NO: 1317 - DNA, 4049 bp, Homo sapiens
agatgaacatgaattaaatcaatgttattggacaggaagaagtgatttttctacattctgtatcagaacatcaatagaaaacacagtggttaggtagatctcagaggacaactggcttcattcatttgggaactaagtgtattttatattacacagaatttagcattcactgaatgtcatcaccttgttcaaatgccagctttaggaataatttttgatgctaatttactttattcctttgtatttataaatctactgtttgtcttctccaagtatgtatgaatgaacccatatacagcaggaatttagaagccaagtggtattgtatggccatccctaatggctgtcctgcacacacatacgcacaaccttacccctcatcaatacttacacattttatttatttatttattttattagactttaagttctggggtagatgtgtagaatgtgcaggcttgttatataggtatacacgtgtcatggtggtttgctgcacccatcaacctgtcatctacattaggtatttctcctaatgctatccctcccctaccccacaccatcccctgacaggccccggtgtgtgatgttccccaccctgtgtccatgtgttctgtttgttcaactcccacttatgagtgagaacatgtggtgtttggttttctgttcttgtgttagtttgctgagaatgatggtttccagcttcatccctgtccctgcaaaggacatgaactcatccttttttatggctgcatagtattccaacacttacccatttttcacctgcagtattgtatacactgattgggggttgtcggtccagcagttgaaaaaagcgtgcagctgatattttagcttttgcataacttggggtgtaagagaaggctcttccaagagctgttgcactcagtacaactgcagagatcaccctgtaaccagacagacacacaggaagagagcagggtggcgtggttggtgtgatgacctgaaggcagaagtttggggatctagccctggttctgccaggaaaggaccaaatatccttgagcaagtcacttcagacttgtctggaaatggagagggtggtgtttaagggactggcagttttcaaactgtgttctatgaaaaaggagtaagaagaggactgaacaagcatgaaggggggagagctcagacctccaaacctttatttgaccacaatagcttcctttaagaaaattgttggccaggcgcggtggctcactcctgtaatcccagcaccttgggaggccgaggcgggcggatcacgaggtcagaagatcgagaccatcctggctaacacggtgaaaccccgtctctactaaaaatacaaaaaattagctgggcgtggtggtggtcgcctgtggtcccagctactcgggaggctgaggcaggagaatggtatgaacctgggaggcagagcttgcagtgagccaagatcgcgccactgcactccagcctgggtgacagagcaagactccgtctcaaaaaaaaaaaaaaagaaaagaaaattgtttgagggggaaaaagacttctgaaaaaatttttttaaaagaaaaagcaggcttgaaagatcaccagattgagttgatttttctagaattctaacagttattgaatctataataggtatataaaagataatgattgatgatataagcatcatttttgcaccaggcatgtatataatttatgcttcagagagcaagacagatgcaattgcctgtctccttctacttgtcttagcctctaactatagtcaacatgtacttaattaacgaaagagtgaatgaataaatgaatgataaatataatgagagataactttgttgctgtagagattatgatgtgagtagtagcccccaaagctgctcacctgcactgtcatgcacagagggtctgcctgggatggggatagggataagggatgtgtctttgtgtgtcacactgctcagttcataagcaggaattgttttaggccagaattgcaaatctgaacatccccgggagcccagtttaaagcctaagggaatgaaaagcacttgaaatgaaatggaaaatggtggaagatgacgttccaatttttaaagtgaagccagaaattggaagttttctgtagttccactttttgttttgttttgagatggagtctcactctgtcacccaggctggagtgtagtggcatgatctcagctcactgtagcctctgcctcctgggttcaagcgattctcctttctcctgcctcagcctcccaagtagctgggattacaggcacacatcaccatacctggctaatttttgtatttttttgtagagatgaggtttcgccatgttggccaggctggtcttgaactcctgacctcaagtgatccacccgcctcggcctgaggtgctgagattacaggcatgagccaccgcacccagcctgtagccccagatttttacatgttggcaaaaaaatattctaaattattctaaaattattctaaattattctaaaattattctaaaaccttaatataaactaaataaaaataagccaatggtttgtgttttctaatttagactagtagctttaaatatgcaaagatttagaaaagagacactttcctagctgggtgggtgtagtggagtgggagagaagtgctgaaagagataccaggtgagaaggcgggactcatggctagagaaggaaacccaagaaccgattcctataggaccacttttcctaatgccctccaaacctttctcagaccatctccacccttaccccccgactcgcccatatacatgtgtacctcgttccccagtaccctgacacccttaggctttcacctctggaaatgtgagaaattggactaaaagctaatcttattagaaaagcaggctttggctatacgaatggaacatccttcacctgtatggcccatgctgtctctgcctaggaggagtcagttgggaggagtcagccctctttgcaagagaggagttcaaacaaaacagttctctatgaaccatcttagccaagacctctagattttctcagcattaacatgtgtggcagattgtttataaacaacgatcatattaattcacactttcatgcatccctttgcaacatggcttttttactcctctcatcaaaaagtggattctatttttttctattccttaaacctgggcttgatggtatgactttctttggccaaacagaaaattagaaagtttctttgcgtggagagacttgaaaagtacttgcacagtggggcttgccctcttttgtggcacttggaactctgaggccataatatgaagaaaagaagctcatctgctagacaggccatgtggagacagaagaatacacagaagcctgactgagtcagcccaggtcagaagaaccgccctgatgacccacagaatcttgagaaataattaatcccagctattgtaagacaccaagcttgggatggtttgctaagcagcaaaaagctaactgacagaaccaggctattccttccttgtgtgttgatcttttctcaccttggctagatattcctcacctgaacacatagctgaaatggagcccctcattggagattaagtaacctccatatctgtaggaagcagaattcgcaataaacatgatgcactgggcaaaggcaaagcagaatccgtaaatattggctttctgaatggctgtcttgaagggcttctccagctcagtctcaagtgcttcaatgaaccgcctctcctttccaattccagcaacagtgcggatgttactgagggcttcatttgtaatctgaagattgaaaaagagtcttaggaatacaagggcagaaataactcctttcgtgacatttcagtggctgcctggattagatggtgcaaatggcagaatgtggtacaaatcagagaatgcatcatctgggaatacaaagacgtggctggagatcaacccaactggaccacgagacaatttttcagttaaattcaagtttcccttaattcttatacttgagaagtgttt

SEQ ID NO: 1318 - DNA, 4042 bp, Homo sapiens
tgttctgtttgttcaactcccacttatgagtgagaacatgtggtgtttggttttctgttcttgtgttagtttgctgagaatgatggtttccagcttcatccctgtccctgcaaaggacatgaactcatccttttttatggctgcatagtattccaacacttacccatttttcacctgcagtattgtatacactgattgggggttgtcggtccagcagttgaaaaaagcgtgcagctgatattttagcttttgcataacttggggtgtaagagaaggctcttccaagagctgttgcactcagtacaactgcagagatcaccctgtaaccagacagacacacaggaagagagcagggtggcgtggttggtgtgatgacctgaaggcagaagtttggggatctagccctggttctgccaggaaaggaccaaatatccttgagcaagtcacttcagacttgtctggaaatggagagggtggtgtttaagggactggcagttttcaaactgtgttctatgaaaaaggagtaagaagaggactgaacaagcatgaaggggggagagctcagacctccaaacctttatttgaccacaatagcttcctttaagaaaattgttggccaggcgcggtggctcactcctgtaatcccagcaccttgggaggccgaggcgggcggatcacgaggtcagaagatcgagaccatcctggctaacacggtgaaaccccgtctctactaaaaatacaaaaaattagctgggcgtggtggtggtcgcctgtggtcccagctactcgggaggctgaggcaggagaatggtatgaacctgggaggcagagcttgcagtgagccaagatcgcgccactgcactccagcctgggtgacagagcaagactccgtctcaaaaaaaaaaaaaaagaaaagaaaattgtttgagggggaaaaagacttctgaaaaaatttttttaaaagaaaaagcaggcttgaaagatcaccagattgagttgatttttctagaattctaacagttattgaatctataataggtatataaaagataatgattgatgatataagcatcatttttgcaccaggcatgtatataatttatgcttcagagagcaagacagatgcaattgcctgtctccttctacttgtcttagcctctaactatagtcaacatgtacttaattaacgaaagagtgaatgaataaatgaatgataaatataatgagagataactttgttgctgtagagattatgatgtgagtagtagcccccaaagctgctcacctgcactgtcatgcacagagggtctgcctgggatggggatagggataagggatgtgtctttgtgtgtcacactgctcagttcataagcaggaattgttttaggccagaattgcaaatctgaacatccccgggagcccagtttaaagcctaagggaatgaaaagcacttgaaatgaaatggaaaatggtggaagatgacgttccaatttttaaagtgaagccagaaattggaagttttctgtagttccactttttgttttgttttgagatggagtctcactctgtcacccaggctggagtgtagtggcatgatctcagctcactgtagcctctgcctcctgggttcaagcgattctcctttctcctgcctcagcctcccaagtagctgggattacaggcacacatcaccatacctggctaatttttgtatttttttgtagagatgaggtttcgccatgttggccaggctggtcttgaactcctgacctcaagtgatccacccgcctcggcctgaggtgctgagattacaggcatgagccaccgcacccagcctgtagccccagatttttacatgttggcaaaaaaatattctaaattattctaaaattattctaaattattctaaaattattctaaaaccttaatataaactaaataaaaataagccaatggtttgtgttttctaatttagactagtagctttaaatatgcaaagatttagaaaagagacactttcctagctgggtgggtgtagtggagtgggagagaagtgctgaaagagataccaggtgagaaggcgggactcatggctagagaaggaaacccaagaaccgattcctataggaccacttttcctaatgccctccaaacctttctcagaccatctccacccttaccccccgactcgcccatatacatgtgtacctcgttccccagtaccctgacacccttaggctttcacctctggaaatgtgagaaattggactaaaagctaatcttattagaaaagcaggctttggctatacgaatggaacatccttcacctgtatggcccatgctgtctctgcctaggaggagtcagttgggaggagtcagccctctttgcaagagaggagttcaaacaaaacagttctctatgaaccatcttagccaagacctctagattttctcagcattaacatgtgtggcagattgtttataaacaacgatcatattaattcacactttcatgcatccctttgcaacatggcttttttactcctctcatcaaaaagtggattctatttttttctattccttaaacctgggcttgatggtatgactttctttggccaaacagaaaattagaaagtttctttgcgtggagagacttgaaaagtacttgcacagtggggcttgccctcttttgtggcacttggaactctgaggccataatatgaagaaaagaagctcatctgctagacaggccatgtggagacagaagaatacacagaagcctgactgagtcagcccaggtcagaagaaccgccctgatgacccacagaatcttgagaaataattaatcccagctattgtaagacaccaagcttgggatggtttgctaagcagcaaaaagctaactgacagaaccaggctattccttccttgtgtgttgatcttttctcaccttggctagatattcctcacctgaacacatagctgaaatggagcccctcattggagattaagtaacctccatatctgtaggaagcagaattcgcaataaacatgatgcactgggcaaaggcaaagcagaatccgtaaatattggctttctgaatggctgtcttgaagggcttctccagctcagtctcaagtgcttcaatgaaccgcctctcctttccaattccagcaacagtgcggatgttactgagggcttcatttgtaatctgaagattgaaaaagagtcttaggaatacaagggcagaaataactcctttcgtgacatttcagtggctgcctggattagatggtgcaaatggcagaatgtggtacaaatcagagaatgcatcatctgggaatacaaagacgtggctggagatcaacccaactggaccacgagacaatttttcagttaaattcaagtttcccttaattcttatacttgagaagtgtttatgctaccatccctcatttaccccccaaggacaagatattaattagaacacactttaaaatgtgtagctaaaacctaagtgtatccaaaacctaaactgtagttcataattctggttgggaaagacacttgccccaagcctgggggactctaaagtatgaagagcaaaggcatgtgccattaaaaccatcatagctcctgtgtgtgtggaaagcatggctcaggggaaccattaaattgcaaaagcttcacggccagaaaactgaactatccacccctgcaaatgagagtacaccaaattggaatgtggaatgaatcactatgcgagaggaaattgaacaggcaatcctgtgttcactccgctatttctccacactggctcatactcagagtctcggagctttattgcctcagcctttgcgccaagcacgcatagaaagggtggtggaaggttcttaagtgtgcctgtcttgtgggctgacagcttccttcagtctcttcgtactactcgtttttaacagtttgtctgatagccactcagccatgaggaatgggaaaattagatctgcaagattacctgtcccaccatctccagggcctgct

SEQ ID NO: 1319 - DNA, 4041 bp, Homo sapiens
atctccacccttaccccccgactcgcccatatacatgtgtacctcgttccccagtaccctgacacccttaggctttcacctctggaaatgtgagaaattggactaaaagctaatcttattagaaaagcaggctttggctatacgaatggaacatccttcacctgtatggcccatgctgtctctgcctaggaggagtcagttgggaggagtcagccctctttgcaagagaggagttcaaacaaaacagttctctatgaaccatcttagccaagacctctagattttctcagcattaacatgtgtggcagattgtttataaacaacgatcatattaattcacactttcatgcatccctttgcaacatggcttttttactcctctcatcaaaaagtggattctatttttttctattccttaaacctgggcttgatggtatgactttctttggccaaacagaaaattagaaagtttctttgcgtggagagacttgaaaagtacttgcacagtggggcttgccctcttttgtggcacttggaactctgaggccataatatgaagaaaagaagctcatctgctagacaggccatgtggagacagaagaatacacagaagcctgactgagtcagcccaggtcagaagaaccgccctgatgacccacagaatcttgagaaataattaatcccagctattgtaagacaccaagcttgggatggtttgctaagcagcaaaaagctaactgacagaaccaggctattccttccttgtgtgttgatcttttctcaccttggctagatattcctcacctgaacacatagctgaaatggagcccctcattggagattaagtaacctccatatctgtaggaagcagaattcgcaataaacatgatgcactgggcaaaggcaaagcagaatccgtaaatattggctttctgaatggctgtcttgaagggcttctccagctcagtctcaagtgcttcaatgaaccgcctctcctttccaattccagcaacagtgcggatgttactgagggcttcatttgtaatctgaagattgaaaaagagtcttaggaatacaagggcagaaataactcctttcgtgacatttcagtggctgcctggattagatggtgcaaatggcagaatgtggtacaaatcagagaatgcatcatctgggaatacaaagacgtggctggagatcaacccaactggaccacgagacaatttttcagttaaattcaagtttcccttaattcttatacttgagaagtgtttatgctaccatccctcatttaccccccaaggacaagatattaattagaacacactttaaaatgtgtagctaaaacctaagtgtatccaaaacctaaactgtagttcataattctggttgggaaagacacttgccccaagcctgggggactctaaagtatgaagagcaaaggcatgtgccattaaaaccatcatagctcctgtgtgtgtggaaagcatggctcaggggaaccattaaattgcaaaagcttcacggccagaaaactgaactatccacccctgcaaatgagagtacaccaaattggaatgtggaatgaatcactatgcgagaggaaattgaacaggcaatcctgtgttcactccgctatttctccacactggctcatactcagagtctcggagctttattgcctcagcctttgcgccaagcacgcatagaaagggtggtggaaggttcttaagtgtgcctgtcttgtgggctgacagcttccttcagtctcttcgtactactcgtttttaacagtttgtctgatagccactcagccatgaggaatgggaaaattagatctgcaagattacctgtcccaccatctccagggcctgcttatctcgagaggcaaatcctgtcaacatcctggtctgtgtggctcctgataaagccaagaaggggaagaagcacaagatgaccaggctcagcttccagctaaaggagaaggcaatgatcatggccacagtgacgttagtgaaggaattgactatcatcccgatctgagagccggcagcctgcaaaccaaaaagcaatcaacccgtctcagacacacagtcgcttttaccaattaccattacacaaaaaggtcagaccttttataaagttgtgataaaatatacataacaatatatatcattttaaccattcttaagtgtacaattcagtggcatttcacaatgttttgtaaccatcacacatctatacctaaagcttttaaaatcatgtccaacaaaaactctgtatccattaaacaataacctccctttcttctctctcccccaagctcttggtgacttctattctaactctctgtctgtataaatttgcctaccctaggtatctctagaagtagaatcatacaatatttttccttctgtgtctggcttattttgctaagcataatgttttcaagcttcaggcatgttgtagcaggtatacaaatttcattcctttttatttttattttttgtttattttattttattttgagacaaggtctcactctgtcacccaggctggagggcagtggcataattatggctcactgtagccttgacctcctggactcaagcagccctcctgccccagcatgctaagtagctgggaccacagatgcatgccactacacctgctaattttttaatcttagtagaaatgaggtctcactatgttgcccaggctggtcttaaactcctaagctcaagtgatcctcccaccttggcctcccatagtgctgggattgcaggcacgagccatcacacctagcttcattcccttttaaaactgaatattccattgtatgtgtatatcacattttgtatatccattcatccattgatggacactggggttatttccaacttttggctattgtgaataatgctgctatgaacactggtgtataagcacctttcaagtccctgctttcaattcttttggatatagacctaggagtggaattgctgggtcatatggtagtcccctgttcaaaaagttaagttcttttaaatgattaagttcttttaaatgatgagctcacataacgtatctgaaggctgaattaattaaaaggttctttattcatagcttatccgaagttcatttattgactaatctcattttaagagtgtcagtgctagagcagtctgtctgagattaatgcagccctaaacatgggctacacatgtgtcaagtactgatgcatttggcttgtttgaagatatccagccattgggcttgaggtaatattacttattcaatgaagattaatgcttgctctataattatatttttgaagttgatacaagactattataagataccactttgattctcattgaagttagcctgctcgttggtacaaagttacatgctgctgtaatacacagctatttagtcaatgcagatggacaaaatggattcagtcccaatatagatggagaatggaccactgtggtaattatatctatactaatcagagtatccaatggttccaaatcgtcgtttcagttgcagctaggcaggtacgaccaaagcttggcacactctgtagaaaatacttgggtgaggacaattacatcacttctttttaaaattgtagaaacacatttttatttaagacaaaaaaatgtaaaacgacaaaaggtaacctgttagtaaccattcgatgctaaggcactgttattcaggaataatttgcatctttatactgaattgaagacacaaatggaatataaaattgtgtcccaaagcattcccatgtgttagtgctgacttccttggagactaacaggctaaatcaagaatttctcatttgtacacccacgttcagagcagaattaatcacaacagccaaacaacctgaatgtccacagacagatgaatgaataaagaaaacatgatatatccataaaataaacatccataaaaatgtagctctgacacatactatagcatagagaaacttcaaaaacatcatgttatgtgaaataagccagacat

SEQ ID NO: 1320 - DNA, 5204 bp, Homo sapiens
gagcgagcgagagagagagagagaagagagagagagagcaaggaatatagtgttaaaggatgcatttcatcttcccaaaggaaattttctcttaagatataagcagaggcttacagaaagacgttgggagtaacaggttaataatcagttgattaaaatgttagagacccatagtatgccatgtctgcacatagcaaggactcaagaaatattggttgaaagaataaattatttacaaaagtagagtagctcactgtacaatgggcaggaaatttaaagatgagagacataaaattggattcctactacagagagttaccaaagggatttttattcaagtgcttccagttggtattgtgtattatttgattttcaatttaccaattcacttttccctctgaaccattattattgtatacctctatcctctccttgtaggcatggaacaaaaggaaaaataagttttctcaatgcttgtcttcttgcatagcaagtatgtataagcagctaggactaaagccaactactgatatccctattttggtaaatgtcaaagttcttaggaggaattggatcaataaagacaagggactatagttaaaatctggacctgcaatacttcagtggcttttccaatctgtaaaaactgtatctaagttgttaagaagtggttaaattataaaattggtaacacttcccatccatactatctctttaaagtttacaaaacacattaacctgtattatcatatttattttctttaacaaagttcaaaagatgtcagctgttcatgctgccaagataaactgaattgaaaaagttgttctttgtgtattatcatgttcttaatgaaataaagtccgtggtttggaatgattatggtttgacctctgataatcacttccatttgcaaatcaaaatcctactcaattttccctggcaatgtatttatcttaaagcagtagattttgaattttaagctctcagctagcaaatttctggtatacaaggttttgatatttttcattgtttgctctatccggaatctggagctaaaaaattttacttaagaatttgatataaaacgactccctatttacttgcagggcaaatgaaacagatatttcattttttgtttccctgacctcgtagattttactgtctgagggtagaaacgggtgggcacaagtgtaaataaatgcaaatattccatatcacaaaagtgctttgaaaaaaaagtacagcagatcacaaaagagaatgaaaaatgggtgagtgtaaaaggcctgactgggaaagtggcatttagctgagaattcaaacaatgatcagagtccagttgcaacaagagagagccataagctaaggaggaaaggccttgggagagggagcaggataagaagccttcctggacccccgccacacctggttatcctgctattcactgtcaaggttctctgtcctctatagcatgtctctatttgtctgtattcatttacatggttacttatttattgcttgtcttctccattaaagtgtaaatcccatcaaggcaaaaaaacaaaaacaaaaacaaaaccacatttccgttgctcactgttgaatcccctgcattttctaagtgtctggcacatagtagatgctgaataattacttattgaatgaataactgtaaagacaatgaaaattaaaggcattagctactttagcacaagtgagcaataaagtacatttgtagcacctgttcagttaaggctgttattgacctggcattttagtaactcattatgtttcacaagtacatttattagtatatatcttggactatcataaagctcagttatacgagctgttaatttttagctgagagatcactgagtttccattttcatggcatattttctttttggactcagtcagaaaatcatcatttcatagctataaagtgttcagttaatttgaaattattaaattgctggtcttatcaattcaaatgtttagcatccctttactataaaatatataagtattatttgtttctctataaaatttctagaagataacattggaaaagcccttctagactttggcctaggcaaagatttcatgaccaagaacccaaaagcaaatgcaataaaaacaaagataaataggtgagacttaattaaactaaagaggtttttcacagcataaggaacagtcagcgagtaaacagacaacccacaggatgggagaaaatcttcacaatctacacatctgacaaaggactaatatccggaatctacaataaactcagaaagtgagctaaggacatgaatagacaattctcagaagaagatacacaaatggccaacaaacatatgaaaaaaatgctcaacatcactaatgatcagggaaatacaaatcaaaaccacaatgtgataccaccttaatcttgcaagaatggctataataaaaaaatcaaaacataatagatgttggcatggatgtagtgaaaaggaacacttctacactgttggtgggaatgtaaactagtacaacaactatggaaaacagtatggaaattccttaaagaactgaacatagaactaccatttgatccagcaatcccactactgggtatctacccagaggaaaagaagtcgttatacaaaagagatacttgcacacgcatgtttatagcagcacaatttacaattgcaaaactgtggaactagcccaaatgcccatcaatcaacaagtggataaagaaactgtgatatatatataacatatatgtatatatatacacagatacatataattacatatatatatggcagaatactactcagcaataaaaggaatgaattaatggcattcacagcaacctggatgggattggagactgttattctaagtaaagtaactcaggaatggaaaaccaaatattgcatgttctcactcataagtgggagctaagctatgaggatgcaaaggcataagaatgatacaatggactttggggactcagcggaaaagggtacgaaggcagtgaaggataaaagaccagagcttggattcagtgtatactgcttgggtgatgggtgcaccaaaatctcacaaatcaccactaaaggacttactcatgtaactaaataccacctgtttcccaaaaaaattatggaaataaaaaaaaatttaaggtattacttgtttccacagacagactccataaaatcattgatgcttttttcctgaaggcaccaaagtaataaacaaaatatctaatccatggacttttctgagataccagaaggaaatgctatgtctcggtcaataagtccaaggtacctggacaagggttcctggtgtatattctccttcatccaggacaagtgtggagccgtaccagaaggccagtgcataacacaaaaagatgagacaccacacgaatccagtaaagaatcccatcactattccttttctaattccccaacgctgggcgaacacaagatttttctcatacctgtgaagacaaaatgcttgagtcaatttcggcagaaacagctcaagttataatgtttaaaacaggccgtgatgcagtggttttacaaaatgatcataaaatcatcgcaaacacagagcagcttcagggagaaaaatctccaataacctttatgtagttttttaaagtttgttttaacctgacaatgaaacatgttgaaagggcgatacttaacagagctgcctgattgctgcttggattgcatagtgaggtaagcttggccccaagagaaaagaattttcaacataaatatatgaacaagagagatctagtattatgtttgaagtgtttccttgagtcacatgacatgtccttatcagaaaataatgcaactggctccaaataagcagaccagactttttgtttccagctccccaggcttggaactagtgtttgcaccaactcatctataactcacccatctgccctgtggctgagacgctgtgttgtgacacactggtcaggttcacagccatgagacatggataactgaaactatgtggaagtccaatgcaaggaataggtttcagtaattccatgatctagccattaacaatgggctttgtctcatatatagctcaggcattctgaaactgccttcctacatctcaggaattgaattcatggagaacttttaaccttttgcaggacacaaactgaaggtctatcctatgtttgttaccatttttaaaacactacactgtctcttttattgacaataaaagataatgtctttcatggtggaagaaatatgctactgaaattttttacaagaaataaggaacctcactccacaaaccaaaagaagtggggaaaagacgataataagaggttgtaaatcctattctcttttttacttgatggatttggtagcaactgagaataacaccatcttaccaaatctacaacacataaagtaagagttgctattcagttggtagctattttataaaaatcaaagcatggcacgtagtaagtactcaataaataccagataaattaaagaataaacaaaattacattttggacaactgtattattttggccatttgggtttttcttttcactgggagttaatctctagaataatgctctataacttttcaacactaatttgttttttgagacagggtctcactccatcattcaggctggagtgcagtagcatgatcacagctcgctgtaacctcaaactccccagaatcaggtgatcctcccacctcagcctcccaagtagctgggactacaggtgtacaccaccatgtctggttaatttctgtatttttttgtagagatgaggttttgccatgttgcccaggctggtctcaaactcctggcctcaagcaatccacctgccttggccttccaaagtgctgggattacaggtgtgagccactgtgcccagcctgtttgaccaaatagaaatcttatcagactttataaagaacatgtagcacagtacctgaataaagtgtgtttaattaaaaaggtgttcaataaaaatgtgtgaaatagcattttgaatcatgctggcatttctttattattttttaattgacaaaacttacatatatttatggtatacaacatgatggtttgaagtatgtataaattgtggaatggctaaatcaagataattaacatgcattacctcac

SEQ ID NO: 1321 - DNA, 4062 bp, Homo sapiens
agatgactagagaaactaagcgttagagctgtttaaaaccaagtgaactgggctatatgttaacctccaacatgttgaaatgtggcctatgatccacgtgagtgtgtatattactttatcacaggtttgaagaaagagattagtgtattcagaaaaaaaatgaaaaaatgtttgcaaaacccctgaagctcttctgtggaagttgagggttctctggagtatagttggaaagtggttagtaggaaagactgccgtaaaacttgaatgatatagtggattgaaaaacatatacatctctctttagcaattgattctgtgcccgacacggcttaaatgcataacgtggattattccctgaatcatcataatgtttttgggaggtattatccctattttaaagacaaggaaactgaggttttcaggggttaaatggatttttcctgagtcacacaacctgttagcggtacagccaagtggtgacctaatgaaatggagcgagctctttgctattgtcactttaaaccattttctattttatctgggaaatgtttgaataatgtagacactgtgagaatattttgctattgagcaataggaagttggtacctattgctcaacgatgtgtgagggtgtatgcagtttttcagttaaattctattctcatttatagcacagttttagtatgcctgattccataacgtgctatctaatgtggctgctctaataataatttctcagtccttgggagtgtttttagctgatgtgacccgaaattcctattcctatatgttgtccaggcctcaattcctggggaaccgagacagtgactgggataactcttggaatgggtcagatcacctctctctgaaagaggttatctgaaagataagatgaaatggagaacacagttgtgattgcagaaatccttcttgtgtgcttgttaatgctctttgtctgttgtgccttttcagggaagtgcccaagcttgggaggacatggagaacaataggcatattggagagtgagtggggtttggagtcagagccccttagacttgaatcctactctgccagctgtgcagtcccagacaaatccccttacctttctgagcctagtttcttatatttaaaatgatgttagtgctcactttataagattgttgtaaagattagagataatgactattaagctcctagtagtgcctagagaaacagtgaatgctcaataaatgtaattgctgttaataaaacaatatttacctattaaaacatcattaatccctattcgatgaaatgtcatttgacactggggagtaatctaacaaactacatgaagatagtgataattatgttgctaactgtactcaggaaaagggactcaagcttcacatttttggctgtttatgaaggcaaatgtcttcccatggagagatgcaaaaagacattcttaccagaccaatggtggctgctccaatcccaatgagagggctgacagaaataataaccaaggtcagtttccaacccctgaaaaatcccaacaggaaaccacagatggtcgaggtcatgcgctgaatgaaaagggccatttggtcagctatggcatcattgattttattaatatcactagaaaccagaaagattttggtcactaaaactgaatttgatcattcaaatatcttgctgaaagtctcagtctttcccttttaaacattcccatctctctatccctatcacccttggatagcattaacagcctctcagatcttggaaaatttgctgcaccttgggatgttatcaagcctctttcctgatagccaatcaattttgttcttaatctaggtttcccagctggtactcagtgttgataaaggcttttggaaaccatcttatttgtctttttcttttacatagctaatatccttgctctgtcttgcaaagcttttctttcttcatgcctgctgaatcctttcagcctcaaggttctagtcacataccttctcgtgcatcaatcttgtataatcccccaagaagaagtaacacctttctccctgtgtttccgtaacactgtaattaatccttgtgcatttgtatgtgtgtggaattattgcattctgcatataggcagtatagagtagtggtgaagagtgcagattctggagccagactaggaatttgaatacagactcttgttgggcaagttacttaacctttttgtggctcaattttcttgtctgtaaaataagaacaataatagaacctaccccaatgggtaataatgaggattaaagtagcgaatatatgtaaagcctataggacagcgcctatcatataataaacaatatgtgttagttctgattatttgcttgcatttcttatttcccctacgaggctgtaagttcctcaagagcacaagtgcaaggcaattgctccagaatatttattgaatataattatattaaattcatattcctgagaacatttccttaatctcttgtccagttggagtgaagagagcttggaactaaacagcaagaaagaacctaagacatcacccaggtattaggccattgtgttccagcagggttagataactgctcaaggtcacagtaaggagcagagtaagtgccggaagtcaggggtcctgaatttcagtgtgctttatctacactgtagagtgactgtctttcaggggacctcaaaattcagttcaatagggttcgaccaattctaattcctctcatttagaattcctgggtggctgttaatgacctaaactaggtgtaaactggatttaaatccagttacacctggacagctaaataacctttttaactgtcttctataatatttcctttctaatattttaattaaggtctacacaccaaattgcagtaccttgggtttcaatttttaatgtccatatttgacagtgtattacttatgaaaaagccatgccacatatgaaagcccaatttaagagatgaaacataggaaaactgaaaatatttttaaatttttatttaatttagaaacaagggttttattatccaaaaatcacacactaaaatactgttttaccagctacttactcagagaatcttgtattcagctcccccactgaattgcagtcaaaccaccctatttccattctcattattctcctaaagtaaaattttctcattttctgtatctgacgagctgcggcaatgacccaaaagcatatctggaaatggacaaaggaatgtttagcattgcaatgtttgaaatatttgttaatttcttttttcagaagaaagtactttcaatacaacagttgagaaaagggggaaagtaattcagaaaatgcctcttcttgggaactaagatgtgagctctgtcatctgctgctaaaagtggaggtaaacagaaccttcagcagggtagcctgagatttgggtttgaatccagctctgacacttaagcaggcccatgtcttctggactttaccctacagagcttcactttccccatgtgtgaaagaaggctcacagcaccaaaaataaggcattattgttcttaaataactatttttaatgccatttctgagtgaatttcctcccggaaagacctgcctagaagcattcatgcatagttttcaggcaataattttcaagaaatgtaaaacaaaaattatgacatcagcaaaaatctaatctgctgatagattttccctaactaaaaaaaaaaaaaaaaaaaaaaaagcctgtcattaaaattcccaatgcctaaatgggaaaaaatgattcatttctctttacaaacagcactgtgtggaattcttgaatgaatgggaaggaattcattatttttctacaaaagaaggcaaaagataaaatatttttctttcttaataagagttaagtacctccaagcccttccaacacttaaatctaaaatatgctctagattcagcctttcagaatttgggttggaatgcagtttgttgagactttagcaatgcgagaaaaagaaagtaaattttgctttcctctatctccccctgccccacattcttcaagctact

SEQ ID NO: 1322 - DNA, 4042 bp, Homo sapiens
tgaactgcaaaaaacacatgcttaagttaaagaagccaatctcaaaggatcacatattatatgatattattaatatgacatgttcagaataggcaaatctacagtcagaaagcagattagtgttgcctagggatagggaggaggatgaggtactagaaagtgatggccgaggggcaaggggtttctttttctagtaatgaaaatgttttaaaattctagaaataccatttgacccagccatcccattactgggtatatacccaaaggattataaatcatgctgctataaggatacatgcacacgtatgtttattgtggcactattcacaatagcaaagacttggaaccaacccaaatgtccaacagtgatagactggattaagaaaatgtggcacatatacaccatggaatactatgcagccataaaaaatgatgagttcatgtcctttgtagggacatggatgaaactggaaaccatcattctcagcaaactatcgcgaggacaaaaaaccaaacactacatgttctcactcataggtgggaattgaacaatgagaacacatggacacaggaaggggaacatcacacactggggcctgttgtggggtggggggaggggggagggatagcatcaggagaaatacctaatgttaaatgacgagttgatgggtgcagcacaccaacatggtacatgtgtatatatgtagcaaacctgcacattgtgcacatgtaccctaaaacttaaagtataattaaaaaaaaggaaaaaaaagaaaatgttctaaaattgactgtggcagtgaatgcacaactctgtaaatatactaaaaaacatctaattgtacacttcgagtgggtgaattttatagtatgtgaattgtatctcaacaaagccattacaaaagtatatagcctaaactgtctagctacaaaatagtgcttgcttatacaaactgaatatatattgctaagaacatagactgaaatccaagtgaaaggacaggcctagatttctgcattgatttatctgtatgagaggaagtgaagacttgagctccccaatgcccgcagtagtaatcagcctccaaaaagcccctaaaattctcatctggcaatattcacacttgtttagactccttccaaattacaccagggttggtttctgtgacccatagaatatggcagaaattacagtatgtctcttctacaattaagttacacgagactttgtggcttccatttgagtgtttacactttaattggataaaagaaaataaaatgaaattgcaactgtggtattttaacttcctattccttcatctgctttcatttttttatctattattcgactgttctgaccagaaattctgataagctaatcaagagacctgacactctgtaatccttatcagtgtaattcactgacagccatctggaaggctttaacttaaaaattccatctactagattacaattgacatgtggaaaccaatataataaaatagtaaaaccagctcctgtcattacacacacatgcttttgttgctaaaattattgggttgtcttgtatattctaaggctaatacatctattgtaataaaaggagaaactgtacttttaatgatatactttttccacgaaagaaacctgcaaacagtttgggcgactttggaggtatataaactacttacaggtagaaaaatgtcctctcttttctcctctgtcccacccaagtcataagatcgcggtgatcttaccataaaacagctaaacaaacatgttattcagaatagaacaaatagtattcatgtcaatgatcacaataactcacgatgacagtatttaactcatcaaggagttcctggtaaagaaatgcctagaaaggtatagtctatacaatttcagctatctgtatgaatttttttaaaaagaaaaggacaaatgtccattcacatttggtattacgtgaattcagccaaagccagtggacttctgaaagcctcagtttgtattctttgctcgccttcaggtatgtgatccagtaacaatgaagacagtgagtaatgagtggccacagagaattcctttttaatagatggctatgatgcaaatgttgaaagtagattcattctttaattcattggataaatattcataagcacctagtatcatgtatatgcctcaaattttggctcctctcacatttatttccaaattttaaggcatgataagatatacttgaggaccttttcctcaaaaacttatcctcataagtgttatccgtggcttgggtcaatttacatcacacataggtctgaatgcatttttttctccaaggggagaatgattaatcttatgttttgtggtcaaacccctctgtaaaaagcagttcacttctgtcctcccgcataaatgaaggatttcaaagacttttgttgaactcaatctctcttttatacaaattgctctgagtttgtcaaatgaaaagaaacttccaattttagaaaagaaacatacatatttagacattagggaacttatatagaataagtaggcttgttgtttataaagaataattcacattgtatattatcctgtgttttctgtcaggtacctccaagtctgtcactgcatatgtttttaaatgatcattgactgaatgatggcttactaggcttaagcttcacacagatagggatcatgactcttttggtttttctgagatggggtctcattctgtcacccatgtaatcacagccaactgcagccacaaacacccagacccaagtgatcttcccatctcagcctctcaagtagctgggatgacaggggcacaccacaaagccaagctattttttaaaaaaatttttgtagagacagggtctcactatgttgcccaggcttgtctcgaacttctgggctcaaacaatcctcctgtctcaccctcccagagtgttacgattacaggcatgagccaccatacctggctaggaccatgctcttaagacaactgtgtccttgatgctttcatgagttcctggtatatttgatgtttaaaaaaattttggttgaatgagtaaatgaatgaaagaccctaagagagataatattatggaagagtgtcaatgatttagaaggactcattcatagtctggaatcaagcctatagaaaatttcaaaaatgaaggtgaaaactataaattcctctgagggagccattcctagtgtctttctagccaagatgtgccccacccttgattcttgaacctgaatatgtgggttcctatgtgcaaataagctgttctgaacttgagccagcatgaggcacactgcaaaggccatgctatgacagtgagtcagccctgagtacacgacagactcactgattacaaggtggcctgtcaggcttatcacaaagaaaacagtagcatagtgactgtgtctgtgtgagttctggctacttctgcgtggttgcctctgatcacagcactgccctagttttctcacgcctgtaatctcagcactttgggaggctgaggcaggcagatgacctgaggagattgagaccagcctgtccaaaatggtgaaaccccatctctactaaaaatacaaaatttagctgggcatagtggcgggcgcctgtaatcccagctactcaggaggctgagtcatgagaatcacttgaacccaagaggcagaggctgcagtgagccaagatcacaccactgtactccagcctgggcaaaaaaggagactccatcttaaaaaaaaaaaaaaaagaaaaaagaaaaaaacaaactcaactactggttgagactagtgtaccttactcaaagtaatgcagcctgttcatgaaattcccattacagatggaagggttaagatcaagtggatcaccagccacagccacaaagctaaggggcagaggggagttggtgggggggaaaaatagaactcttggagatgatactcaagtaaaattcatgggtcacctccctagtgacgttaagtattggtagtgtcatgctcaagcctatactca

SEQ ID NO: 1323 - DNA, 4030 bp, Homo sapiens
atttgatgtttaaaaaaattttggttgaatgagtaaatgaatgaaagaccctaagagagataatattatggaagagtgtcaatgatttagaaggactcattcatagtctggaatcaagcctatagaaaatttcaaaaatgaaggtgaaaactataaattcctctgagggagccattcctagtgtctttctagccaagatgtgccccacccttgattcttgaacctgaatatgtgggttcctatgtgcaaataagctgttctgaacttgagccagcatgaggcacactgcaaaggccatgctatgacagtgagtcagccctgagtacacgacagactcactgattacaaggtggcctgtcaggcttatcacaaagaaaacagtagcatagtgactgtgtctgtgtgagttctggctacttctgcgtggttgcctctgatcacagcactgccctagttttctcacgcctgtaatctcagcactttgggaggctgaggcaggcagatgacctgaggagattgagaccagcctgtccaaaatggtgaaaccccatctctactaaaaatacaaaatttagctgggcatagtggcgggcgcctgtaatcccagctactcaggaggctgagtcatgagaatcacttgaacccaagaggcagaggctgcagtgagccaagatcacaccactgtactccagcctgggcaaaaaaggagactccatcttaaaaaaaaaaaaaaaagaaaaaagaaaaaaacaaactcaactactggttgagactagtgtaccttactcaaagtaatgcagcctgttcatgaaattcccattacagatggaagggttaagatcaagtggatcaccagccacagccacaaagctaaggggcagaggggagttggtgggggggaaaaatagaactcttggagatgatactcaagtaaaattcatgggtcacctccctagtgacgttaagtattggtagtgtcatgctcaagcctatactcaataaagtggtaacattttggcaatgtatttggtgagtgactttcaatcctgtttctattaagattttaaaacatagtaagatagaaggaaacttgaggcagagtaatttctagaaatatgggtaaactcatgtttctattctctttgtgttagataccactccagctcagccagtaaaatcccctctatacattttgaattacaatttaagatatgagcaaaaaagtaaaaaattaaaaacaaaaacaacctacccacaacgtgttccatttgtcatgttctggttgagggaactgttagtccatacaatggtgttattcacacatgcttttcctggaatctggagttcttgtaactcaacgtcgtagtcaataaaaacatctgtcattgtgccaaaaatgagtagcacgcctggctgggctattccatggagaaatgcacacaaacttcccacaaacatcagccaaatgtcagttgatgaagaaaaccgaaacttgaaaaacaaagggttcagagatcatctatgggtgaagagcaggagaggtaggaggactacttaatttagttactagattctcatgaatagtactcaacaccaaatttcatgggaatcaccttaattgagtggcagagttcgtatactaattatattgaaataaacggcacggtacatcaattatctaaaacattagactcttacattgttagatcatgttataaatttcctgctctctgaattcattctgtttatttcaggagctgactttcgtttttagctactcatctacaacttaggggaaaataatcactgtcattgatgccattgccaagtagataaactgtgtggggcattgagaaatactataaattgttttgttgaactgatagtgactatgaagaatgccaatttctgcctagaaatgcctccatcctgagaaaatttggagtaaacacctatactttaaaatttctaaagatttgtcataagaataaatatatatatgtgattgttgtgatgactttccttacaaatatgataaccatgggcttagtgataattttccaagacatttttctgatctattggataggatttgtatgctttatgagcaatatatttctaatagttattcagcatgttatcacataggcaaagcctatgactgaaaaagtgatcactgaagttaaaaacctgccaatatgactaaagatttaacactcccctcatgatctaaacaatttatagctgcacacccactgccataaatcaacacagttttattaccaattgaaagaagccaactctaacgccatcacctttcttctcatcttgtaacctgatgagaaaaacataaggatttaaagaccaccctttccaatacaatgggaaattctccctaggtggtgattttatgagttattctttagtaagaaagaaaatccccactggctggaaaattctggccaaacctagtatcttaaacacaagctttattcttctagatttccctcttctagagatttcagtatagctcaatctcaggttcactagcgattcacagagatgaacacctgagaggtatggagagaaagtaaaaagtcctctatactcccagttataccaacaaataactctttgccctcagtcatgaccctcaatctatttgtgactgcatttcctcatgggtaagttgaagtggttggattagctaattttaaagcttcctcatgcttaaaaatattacaactacattaaataatgttgataatgatgaaaaattcaagaacatgcccacacttttcatagaatcatatttccttaatatttcccattcatttcatttcccataaggccatgtttaacctgtatttgacctcttcaacttcggggatcttgacttaacctgagtcacgcagtccatgaatacaccctggaccttgctgtcaccaggaactactgtctgacatgtttaactccttggcactctgtgactgcccatgtacctcattttctcgcttccttcctccttccacacctatttgtcaacctcacttgagccatgcagtcctttaaatccttcatttccttccattgctaaaccccattaagattttgcttccttccccatgcagccaaggtccctctgccaggcatttgaaccacactctcaccatcatcctcaattattttctctacatcatccttgtaaacttcatcctgcatccatccagctgtttgccctcttctccttaagccaggctgctgggcctgctggacacaacctcaccaccttgtgaatggataccaacacaggcagagtctagtactcagctgccctaagcttcccttctggcccagaaaagaatcctaaattttttctgagactccccacggtctggcccttggctctctgacctcacctcctccaactatattctagttctcaacaccccacttgcctggcctcttgctgacctttgtccatgcccaactgttcccacctctgggtgcgggcacctgctactccttctccccaggtgcattttctttaggtaaccacagggacagctccatcacctccgctagaccttcctttgaaatcacctactcaacagagtcttgcctggccaaagtctttaaaatttcaaccccaccccccacgcaccatttcatagctccatttccagtttatttttccttctcagaaagaaagtgatagattatcactagctaccatgctatacatttgatttatttacaatgtttattatatctccctcactaaaatgtaaactcctcaagggccaacatttttgcctattttgttcttttctatacccgcagcacctacaatagtgtctgataccaaatagacactcaatatttgcaaaacgaatgaattaatggagtgaatgtgtgctctccagctcaacatgcaatgcacacttcatttctctgcggattgctcccattcttctcagcagctctggcaaaatttgctgtgatcttctcattccatgctcacctcctc

SEQ ID NO: 1324 - DNA, 4040 bp, Homo sapiens
caccaaatttcatgggaatcaccttaattgagtggcagagttcgtatactaattatattgaaataaacggcacggtacatcaattatctaaaacattagactcttacattgttagatcatgttataaatttcctgctctctgaattcattctgtttatttcaggagctgactttcgtttttagctactcatctacaacttaggggaaaataatcactgtcattgatgccattgccaagtagataaactgtgtggggcattgagaaatactataaattgttttgttgaactgatagtgactatgaagaatgccaatttctgcctagaaatgcctccatcctgagaaaatttggagtaaacacctatactttaaaatttctaaagatttgtcataagaataaatatatatatgtgattgttgtgatgactttccttacaaatatgataaccatgggcttagtgataattttccaagacatttttctgatctattggataggatttgtatgctttatgagcaatatatttctaatagttattcagcatgttatcacataggcaaagcctatgactgaaaaagtgatcactgaagttaaaaacctgccaatatgactaaagatttaacactcccctcatgatctaaacaatttatagctgcacacccactgccataaatcaacacagttttattaccaattgaaagaagccaactctaacgccatcacctttcttctcatcttgtaacctgatgagaaaaacataaggatttaaagaccaccctttccaatacaatgggaaattctccctaggtggtgattttatgagttattctttagtaagaaagaaaatccccactggctggaaaattctggccaaacctagtatcttaaacacaagctttattcttctagatttccctcttctagagatttcagtatagctcaatctcaggttcactagcgattcacagagatgaacacctgagaggtatggagagaaagtaaaaagtcctctatactcccagttataccaacaaataactctttgccctcagtcatgaccctcaatctatttgtgactgcatttcctcatgggtaagttgaagtggttggattagctaattttaaagcttcctcatgcttaaaaatattacaactacattaaataatgttgataatgatgaaaaattcaagaacatgcccacacttttcatagaatcatatttccttaatatttcccattcatttcatttcccataaggccatgtttaacctgtatttgacctcttcaacttcggggatcttgacttaacctgagtcacgcagtccatgaatacaccctggaccttgctgtcaccaggaactactgtctgacatgtttaactccttggcactctgtgactgcccatgtacctcattttctcgcttccttcctccttccacacctatttgtcaacctcacttgagccatgcagtcctttaaatccttcatttccttccattgctaaaccccattaagattttgcttccttccccatgcagccaaggtccctctgccaggcatttgaaccacactctcaccatcatcctcaattattttctctacatcatccttgtaaacttcatcctgcatccatccagctgtttgccctcttctccttaagccaggctgctgggcctgctggacacaacctcaccaccttgtgaatggataccaacacaggcagagtctagtactcagctgccctaagcttcccttctggcccagaaaagaatcctaaattttttctgagactccccacggtctggcccttggctctctgacctcacctcctccaactatattctagttctcaacaccccacttgcctggcctcttgctgacctttgtccatgcccaactgttcccacctctgggtgcgggcacctgctactccttctccccaggtgcattttctttaggtaaccacagggacagctccatcacctccgctagaccttcctttgaaatcacctactcaacagagtcttgcctggccaaagtctttaaaatttcaaccccaccccccacgcaccatttcatagctccatttccagtttatttttccttctcagaaagaaagtgatagattatcactagctaccatgctatacatttgatttatttacaatgtttattatatctccctcactaaaatgtaaactcctcaagggccaacatttttgcctattttgttcttttctatacccgcagcacctacaatagtgtctgataccaaatagacactcaatatttgcaaaacgaatgaattaatggagtgaatgtgtgctctccagctcaacatgcaatgcacacttcatttctctgcggattgctcccattcttctcagcagctctggcaaaatttgctgtgatcttctcattccatgctcacctcctctaaaaacaaagcaactcattcaacttcctactcatcctctccttgccattcatctacatccacacccattttttaaacttcccacgcaataagaaacgtgtggctctcagaggcccaggctgacctgaccactcccagcccaaagctaatcttaccactcccacttcctccctctgctgtgaattacttaaaatttctaaaatacctttaacccttccgtttccaccacctccacttcaggaacttacctgatgcctcacttctgtcttctaaattagacctcatctaatcccgccttcataccagactgtgattagctgatatgtgttctatatgagaattcaaaatctttagctgaacagaaatatgcaataatgacactttaggtctctactctttgcctgtggcaagaatttggggtttagagacctctccaatgcccatgaaattatacttgttgttcaacttttcctcctccctcttaggtcaggagttctgtgccattcctgaatacagaggggacatttgaacctaacctagaagggatattccaaaaggtttttaaaatcaaattatagtaatattttaaagagaaaaagaatggattgtatatattattttatatgaagtgcaatgtgcatgaaagtattctctgctttgtgcctttgatatgaatattatggagttattctagaaaagatgctgcattgttgaaatcagtcacttaccttgatttcttatcattattatctgtcagaaaaaaaaatcaacgcaaaaaagcagttaataataatgacaaaatgcaacgcagtcattaagaaatttgctctagaaaaatattcctataaattacctttattcatggaatattagcaaatgactatttgccttttctttcttcctgctcatattgtctctctctatctttctacacacacacacacacacacacacacacacacacacacacacacgaagacactcgtttagggtccaggagtgctgctacctttactcatttatggacttttcttcaggacatgaaatatttgcatcatctgaatatcaaatggacagcaactttttgaactacaaaataaaattgatatttatttattgtctggttctttaaaagcatcagaatttatctgtttaaaatatagaccacaaattaacaataagatgttaataacaagatgtcattaacacttctacactagtagaagccataggattgagaccacatactgttttccccagtgtaggtcagaatagatgcagggcaggaggtgaaagtcagtgattatagccaggggtgtaaggaagccactagggagctttgtcattcaacactatcatgcctgtttactcttattaaagtaaagaagcatgataatgttgacagacggcaatatcttgggcttgggaatcaaacacaactggattagaattatggttccattaattttactcatgagttccttgccaagtttcaaaaacatatccaagtctcagttttgtcatctgtaaaatgtaaaatcatagggttagaaaacaatagcttagaaccatctgagcccaggacatcccaggtgctagtg

SEQ ID NO: 1325 - DNA, 4023 bp, Homo sapiens
tttttaaaatcaaattatagtaatattttaaagagaaaaagaatggattgtatatattattttatatgaagtgcaatgtgcatgaaagtattctctgctttgtgcctttgatatgaatattatggagttattctagaaaagatgctgcattgttgaaatcagtcacttaccttgatttcttatcattattatctgtcagaaaaaaaaatcaacgcaaaaaagcagttaataataatgacaaaatgcaacgcagtcattaagaaatttgctctagaaaaatattcctataaattacctttattcatggaatattagcaaatgactatttgccttttctttcttcctgctcatattgtctctctctatctttctacacacacacacacacacacacacacacacacacacacacacacgaagacactcgtttagggtccaggagtgctgctacctttactcatttatggacttttcttcaggacatgaaatatttgcatcatctgaatatcaaatggacagcaactttttgaactacaaaataaaattgatatttatttattgtctggttctttaaaagcatcagaatttatctgtttaaaatatagaccacaaattaacaataagatgttaataacaagatgtcattaacacttctacactagtagaagccataggattgagaccacatactgttttccccagtgtaggtcagaatagatgcagggcaggaggtgaaagtcagtgattatagccaggggtgtaaggaagccactagggagctttgtcattcaacactatcatgcctgtttactcttattaaagtaaagaagcatgataatgttgacagacggcaatatcttgggcttgggaatcaaacacaactggattagaattatggttccattaattttactcatgagttccttgccaagtttcaaaaacatatccaagtctcagttttgtcatctgtaaaatgtaaaatcatagggttagaaaacaatagcttagaaccatctgagcccaggacatcccaggtgctagtgctataggccccctccacatgatctcattctggtctgcagagtctgggcacagttcttcctaaggaggagcgctcactcaattatgattaataataacaatacaggactaaaggtagtcataacagccaccactggaacaaccctactctatctaggaaaggtgttggtgagagatgctttcatttacacacacttggtgtgttcttacctagtgctttcagatattacgttacatggattctagggagagccacacagttgtgtataagaatcacacacaatgatacttctacctactgttgctgatttttttctgctccttgaaacttgaccagcttgtcctacttttgttctcacctctccttgtacaagatgcagtgagggaaaaaagccactcacatgatttatctgactcaaaaccatcattctcctctccaaatttctttatacttcgaagaattactgagtcagacatggtaattgcaacccacagccaacgaccctataaaataaaataaaagaatcattgcaattattatctcttctttcttctttaatcaaagtagccaaacgaaagaacaatttggttcaagaaataatctttactaatcaatctcagacaaaagttttaaaatcggttaataactccctgaaagagcctaattatcaggaaagataagccacagtcattgataaaggttttctctagttgttacatggatggttgttttttatagcttaattataggaaagataaagcaaaaccattgataaattttcctctagttgttggatggatggttattctttctgcttatctgtgctttatttatttttaatgagaaaacattaaaaccatgagaaaggcaaaccaactggtgatattcttgagtcactgtagttgatgaacgacacccacatactgttgggtaaccttcagtgttcctttgtaaatgcaacctcaaggtaaggtgagtcaagcttggatcaaaggaacagaaggaagacattttctaaataaaatgtaaatgtcgacagagtcatgattagtcttattcacagtggaaaaattagtttatagagggtacaggctgagaattccaggatatagacactcgattcagcatgaagtttatgcttcactaactttctctgcttcaaatatatagcaatggtggataacatgtttttaaaaagagatacagtcagactcaaataaataaaaataaacatcttcaggaaccagaaatggcagagaagtaccgaagagtaagcagagcacagaagcagctggtattttcccctcagcgtctggatgctgacgagtgtgagagtttagctggcgagaggactgtaagtgccccaaatcaaacagggggctagagaccatctcttcgcttggagccagaggagctaatgtgggccccatgcactgctgagaagaccctgaggaaactgctggccaccattgaagcatctattccttatgatgaaatgcagacccatggaggtcacaggaggagaccgtgatatgtattacatacatatatacacacatgtacaaataaaagagagaaagggggagttatgaaaatcttctaaattcacctaattggaatcccagaagcagagagtggagaatgacagaagtgtaataattaaagagataattgctaagaattttccagaagcaattacctgattcttcaaattaacagtagacaccaagaattgattggaatagatatcagtcaaaacttagatacattatatagaaatgtccctcagtatatgcaggagattggttctagcactcccatgtataccaaaatttgcatataccaaaatccaggtatacacaagtcctacagttggcttgcagaacttgtgcataggaaaaattggctctacatatccactggttttgcatcctgagaatactatatttttcatctgagattggttgaaaacaatccccatacaagtggacctccacagttgcaacctgtgttgttcaagaatcaaactgtagtaaagcatcaagaataaacaaaatccatcctaaacactgtgaaaggggaaaatgcatattcaaatataaagaacagactgacagaagttttctcatcagcaatagaggctagaaaacagtggcgtaatgtcttcaaagtgatgagaaaaaaaagtaatctttaacttagaattttacactgagccaaaaaattattcagcatctttacagacattcaaagtcagagggtttacacttacagacctgcataaaacaacaactagaggatgtgccttagccagaaggagtatccagaagggagccatgaaagagagaaacaagggtgagcacaagagttaacaaaatatgtcaggacggccaatcaaatattgataccaagtataaccttttatatttcaaaagaacataattaaaactctacacagtatgtagatatgagtgtaacttgaacacaagataaggtgttcgatatgcagataaagtatgttaagttcattgttatgacaatctgaggacattgttttataattataattaaatacatatttatacaactataattaaatatatgtttgattaaaccaaaggaaattgccaatatttaaccattttttaattacaaagttcaactaatatctgaacaaagttcaaccaatatctgaaaattttaagaaaaagcaatgaaaaagtaccagtaaaatctatagtttctaaataagcaaaggattaaaaactaagtatgtagaaaatgtcatcaatccaacaaaagttaaaaaaaactaaagaaactaaaaaaagcataacaaacagaaaacataaatgaatattattgaaaatagtccaaacggttcagtaattacggtaaatgtatgtagattgaagtactgatacatgctacacagatgaacctcaaaatcatgctacgtgaaagaagacggtctcaaaaga

SEQ ID NO: 1326 - DNA, 4050 bp, Homo sapiens
acatcttcaggaaccagaaatggcagagaagtaccgaagagtaagcagagcacagaagcagctggtattttcccctcagcgtctggatgctgacgagtgtgagagtttagctggcgagaggactgtaagtgccccaaatcaaacagggggctagagaccatctcttcgcttggagccagaggagctaatgtgggccccatgcactgctgagaagaccctgaggaaactgctggccaccattgaagcatctattccttatgatgaaatgcagacccatggaggtcacaggaggagaccgtgatatgtattacatacatatatacacacatgtacaaataaaagagagaaagggggagttatgaaaatcttctaaattcacctaattggaatcccagaagcagagagtggagaatgacagaagtgtaataattaaagagataattgctaagaattttccagaagcaattacctgattcttcaaattaacagtagacaccaagaattgattggaatagatatcagtcaaaacttagatacattatatagaaatgtccctcagtatatgcaggagattggttctagcactcccatgtataccaaaatttgcatataccaaaatccaggtatacacaagtcctacagttggcttgcagaacttgtgcataggaaaaattggctctacatatccactggttttgcatcctgagaatactatatttttcatctgagattggttgaaaacaatccccatacaagtggacctccacagttgcaacctgtgttgttcaagaatcaaactgtagtaaagcatcaagaataaacaaaatccatcctaaacactgtgaaaggggaaaatgcatattcaaatataaagaacagactgacagaagttttctcatcagcaatagaggctagaaaacagtggcgtaatgtcttcaaagtgatgagaaaaaaaagtaatctttaacttagaattttacactgagccaaaaaattattcagcatctttacagacattcaaagtcagagggtttacacttacagacctgcataaaacaacaactagaggatgtgccttagccagaaggagtatccagaagggagccatgaaagagagaaacaagggtgagcacaagagttaacaaaatatgtcaggacggccaatcaaatattgataccaagtataaccttttatatttcaaaagaacataattaaaactctacacagtatgtagatatgagtgtaacttgaacacaagataaggtgttcgatatgcagataaagtatgttaagttcattgttatgacaatctgaggacattgttttataattataattaaatacatatttatacaactataattaaatatatgtttgattaaaccaaaggaaattgccaatatttaaccattttttaattacaaagttcaactaatatctgaacaaagttcaaccaatatctgaaaattttaagaaaaagcaatgaaaaagtaccagtaaaatctatagtttctaaataagcaaaggattaaaaactaagtatgtagaaaatgtcatcaatccaacaaaagttaaaaaaaactaaagaaactaaaaaaagcataacaaacagaaaacataaatgaatattattgaaaatagtccaaacggttcagtaattacggtaaatgtatgtagattgaagtactgatacatgctacacagatgaacctcaaaatcatgctacgtgaaagaagacggtctcaaaagaccacatactgtatgattccatttacatgaaatgtccaagataggcaaatctatagggacagaaaataaataagtggttgcctaatgctggggtaggggtaggggtgggaggggaatgaggagtgactggtaacagatataaggtttcttttggggatgaagaaaatgttctaaagttagattatggtgatggtcgcacaactctgttaatatattgaaaaccattgaatactttacataggtgaactctgtgatatgtaaattataccctcaaaaggctgttttttaaaaaaagacaggtcagtttattgaattttttaaagtcaagacatacactttttttttttttctgagaccaagtcttgctctgttgcccaggctggagtacagtggctcaatcttggctcactgcaacctccacctcttgggttcatgtgattctcctgcctcagcctcctgagtagctgggattacgggtatgagccaccatgcctggatcatttttgtatttttagtagagatggagtttcaccatattggccaggctggtctcaaactcctggcctctgattatctgtctgccttagcctcccaaagtgctgagattacaggcatgagccaccacacccagccaatccagacatatacttattataaatgaaataatttataaaatcataaaaatggtccaaaattaaagggtgaaaaggatacgtcatgcaaatactgatgtctcaaagctgttatgttaatgtcagaaaaatagaatccatgttcaaaacaataatggatataataaaggacatataataattaaaagtacaatccagctagaagacaaatcaattattggattgtatatacccagcaacctaacacaacatagcctgcaactgtaatgaaaaatttaaacacaactttattagaaactgataaacagacaaaaaattagaaaacataaaagcttttcaaataaaaaataagtaattttatgtaatttactacataaaatttttcttaaaatttggttgaacattgttcatatattagttgaactttctaagtaaaaaaagattaaatgttggcaatttcatttgatttaatcaaatatatatttaattataattgtaacacaatgtcgatagattttcatgacaaatttcattactatggaacctgcaaccaagacatttttcaattacatttggcatttttataaaacttacccattaataagccataaaaaatttctacaaatgaaaaactatgtatttctctatattgttgttattcttaagggtgtatattctgacaatgcaattaaataaaaactaaaaaattaaacactagtaaaacacacacacatatactcagtaaaattgtgtgtgttacaaactttaaaatacatatgcagataaatatgggttaaggatgaaatcatgacagaaatagaaaatatttaaaatatggtgataaatatgtaaaatcttgtgggctacagctaaaaagatacttcaagatttatttataaagataaatgcattttgcttttaagagattaatgaatgaattatgttctaatcaagaacctaaaaaatgcaagatttataagatagaaaacaaaataaaatgaaaaacagtagaaaggatatatcaattcaaaagttgttttttgaaaactaaaaacatgcaagtcaataagactgttgaagaaaagagatataaatcacaaatactaattgaaaatgggaaaggtaaaataaataaagttttaaatcataagcaaatactaagtaatttcatggtagtaaatttgaaaaccaggttaagattaattttctagaaaaatatgagttatcaaaatttgtttataaaggaatagaaaacttaaaaagtaatggctattaaaatattgattcaatattcaaaagtctcccacctcaaaaaacaacagggctagataatgttacaggcaaattttaccaaaacttcaaacagtagataattctaatcttatataaatagttttggtgaaaagaaaaataagaaaagctacccaaatcattttataaagcaagtataattttgacatcaaaacaaagaaggataaaaataggcttataattacttctgaaaacagattttaaaatgataaataaaatatgttaaacataattcagcagtttatgaaaaaaatgaagcaatgttgatcccaggaatgcaatgattatttaaggtaaaaaataattaatcattttcataaatgcaaaaagtattcagtaaaaatcattatccattcc

SEQ ID NO: 1327 - DNA, 4045 bp, Homo sapiens
gaactgtagtccttttccagtgttccataatctcaccatctatccagttgtttaaccagaaatatagcgttatctttgacatcgtctctttctctatccacatctcaaatatagtccatgaacaactctatgaagtgattttctgtcttagttcattttatgctgctataacagaatacctgagactgagtaatttatacagaacagagatttatttcttacacacctggaggctgggaagttcaaggtcaaggggccaatggtggaaagcggaagagcaagagagcacacacacataagagagaagtgaaggaggaaaagggggcccaactcgtccatttattagggacccacttccacaataactaacccactccagcgaaaatggcattaatccattctggagggcagagcactcatgacctgctcacctaaaggtcccaccttttaacactgttgcattggggattaagtttctgtcacgtgaacattgggaatgtattcaaacatagcactttccagacacatattcttctggccatctttccgccatctcacagctgcctgggctaggctagcatcatttggattactacagtagactttcatctggcttcttggcatccactcttgttcttctccattttgatcacaacactgcagtcatagatacctttggaaagtgcaattaccttgtcagccccctgcttaataccttggatggctttccattcctcttagaatgatgagcaaactcattcgtgtgacctgtaaggtcttacttagcatggctcttttctaccttttagccttatttccaaatacatgctgctgactcttgctctccagacacattgacactctgtcagggcacagtccccacttactccctgtaacaggctataatttaaagggtagtaggatggagaatgaatttttaaaacgtgtagacaccttaggacgttcataggttgtggtgaagtaagtagcttcctttttatcttgtttattaattttcttattacttctcactagaatacaagctgcaataaatgtacttaaacaccatcatgtgcctgaaatcaaaattacaactttatatgcttatatgaaaaaagatagctttcttcatttaggcatgtaaatcagagcacatttgttttctttataccagtttttttcactttcagttcagcaaacactaaatccacgtgtcaatggggaaatagacctagaagactgagaagcagattgttatagacattctctagccagttttctttgtaccagttctattgttatattttctatatctacaaaaattttctcatatttgggtatatgttatctaaaccttccttctcctttgtacataaactttatttctctgtcaacttttcttttgattcattccaacagagaaatgagtcctgtgctgttctatttttatgttttcaaagcaaacagttaccttgagttatctacacagagagcctcacatggctgttcccaagcaccacacagataaaaccaccatgaagcaaagttaaaccagtgaatgatcatcttcacagagagggagaaatgggaccaatcctgtcaaaatgcgatgaaaatgtggcctctaaaattaggtattattttcttctggatgtcaggtttcttttcccccttctaatttcctcatttgaaatatagtaggaaacaaacaaacaatccagagacaaccaatagttccagaatttctacagaaatagaatccctctgtaggagttttagttcaatttgatgggactatacattcttcatatagtctaaaattttcagatgtttatgcaaaaccaaactcaagacattcaagaattatctcacgagcaagatttaccaactgcttctctatccttctcataaagtgccttatgcagcatgtccggaatgattctctgcatctgatgcaaagcaagaaagattctagatttgcatttgaattgctggctatttttaactttctcagagttttactttgagagatattttacctttgtggatgagttatggagtcaggtgcttgacctttaccagctttccagtgaaaaatccaatgaggaaaagacttcaaacgtcttacaaaaccaaactcattatttatgaagtcctgaactatgtcagtgacattcccagacacacatagtgtagtaagggctttatttcgagaaattcccaaattgaatcctctttagtaagaatcctatgtggactaattttgtaaatgatttccaatcatagaaatgcctgtgagtgataggattctacaaacaaacgggcagcatcagaactcacaagctgctctttccttccccttctataagagccctctctacaccatggtgtgcaaaggggattctgtggaattaaaacttgtgtggtttctggaaccctaaatccccagtcaagcagtctggtaaataaagataaggcatttacttgatttccctaatatggctttacctcaggggacagggtaaggaggagggcatatattaatcaagaggttgtttttaaaaaacctattgtatatacttaatatagttctagtcacctgagatttataaaaaacatcgttgctgctttcaatgagtttgcaacctaattatctggctaaaaattagactttaaaattttagttgcatattttactacttgcctattttttttctcatcagatagatttgttgaaaactgaaaatgagctctgatgtccagaatcttttggagttttaattttacactcaggaaaacaccaagatgacaaggaatctacatgtgggactcagctgacattttccctatttagtataatgctggcaaatgtaagccaaagccctcctgtccagtattataagtatcttctctttctttcctaagaagtcagcagacttgacatttgactgcttattcatttcctcccctctccagagctgaaattctcacccaggatcatctgtcacccgggctttgatgaggagggggtttaggcatttgctgtctgaactgtcaaactcaaagtcagctttgaatggaaggtcccaccatgtgctttagaaaaatagggtagtggctgtgggcagacagcagagaggaagggagagagaaacattctgaaagagcatctgatgtgggcctgggaatataaagagaagaggtgagaggacaggtgaatgagagtttagtgagcccatggcagatccagggcttaattattataaaataattccctgcagcactgtatttctgaggtgtatgatttttttgaccatgtgggcatttaccctttttaggtcaaactggacactaagaaatatactatagatatgattgatttgttctttcaagaaacacttattgagcattaactactgccatgaactgtgctaggcattgaaagtactgtgatgacgatgacctagtccttaacctttcagagacttacagtttaaggaggggtggaaggaggcagataagtgaaccaaatatcacagcataatgtattaaggaccgtggtagaattatgcacagagtattcttgcaacaaaaaggagaaacatattgtgaagattaagaaaaaaatccaatcttaaaaatctgtgacatttttatgacagtgacacatacacacttttggagagatatactagtgtcgggaccagttgcacttacagaggaagatatgagaaattacaaaatattaaagaacacatcccccaaaattcaaccattagttaccaagcttcaggaatcggaaatttgagaagttatttggtacagaatgaagctcagaattgaccaaagaaaaggaaagtttaacctatgtagtagatcaggatttgagagtttcccaatagtttaattggaggtagtgacatttttattgagcaattaaatgaaacaccctttggattcaaaaattaatgctaaatctagagtaactgatgaggttaattcccaatttcatgcacgttgtgcactgaagtcatttgtatgatca

SEQ ID NO: 1328 - DNA, 4052 bp, Homo sapiens
cctcttgaataatgtataatcctcaaggacctcttttattataatgccttcgtggggcaaatctttttttttttttttttttttttttgagacggagtctcgctctgtcgcccaggctggagtgcagtggcgctatcttggctcactgcaagttctgcctcccgggttcatgccattctcctgcctcagcctcccgagtagctgggactacaggtgcccgccaccatgcccgtctaattttttttttttttgtatttttagtagaaatggggtttcaccatgttagccaggacagtctcgatctcctgacctcatgatccgcccgcctcggcctcccaaagtgctgggattacaggcgtgagccactgtgcctggccgggcaaatcattttttaacaaaggaaatattagacaaagaatctctccttggggttgcaaagtctgaagattaaagtaagaatctgagaatgacatcaattccttagttaatttacttatatagccaacataacactgaccttatcaaggtaagagtttcctttaagttaactggtcaagaggtatttttcttttcataaataatgcaaggggatagaaagatagctgaagagaaaaaaaaatatgcatacttttttataagttacatttggaaactattgttattctgattaacgacaaagaattccagccagggtagagtgtaatgtgatttagataaactctaggtaaagtaacaatgcacaggagagaaatttgagcaagtttgcatgatgctcagatggaccgtaaacaagagacaatgagtgttgttacttttcttgttgacctttatttaacagaactctctcattagaaaagagcttgctttagcttattgttaaaactgctgtgtgctcacctgctttgaaaaaggaacaggcagcctgacatggtggttcacgcctataatcccagcactctgggaggctgaggcaggcggatcacctgaggtcaggcattcaagaccagcctggctaacatagtgaaacctcatctctactaaaaatacaaaaaaaaaaaaaaaaaaaaaaaagctgggcattgtggtgtgtgcctgtaatcccagctacttgggaggctgaggcaggagaatcgcttgaacccaggaggcagagactgcagtgagccaagattgtgccattgcactccagcctggatgacagagtgagactgcatctcaagaaaaaaaaaaaaaaaagaaaataaaagaaaaaggaagaggcaaggtaagccccgaggcagattgtttcccttcttttctctcttctctctatttcagagtctctctaattcttctctctcttcatgctaatagggttagcattactatattcatttatatattcagtgggcaatatttgtaaagtggatgtaaagcatagtatacaacattattttaaagaaaagcgtactaaaatatagagaaccaccaggtataatgaaatttccattttgttagtgaaaataaaatattagccatttcatattgcttatctttttataagatacctctacttatactgaccaaaattctataaagtaagtgacataatctcacttaataagggaactcaattatttgcccaaggacatgcactagatggattttgaactctggtcaactttctttctattcatcaattcatcttttcataaaatatagttcctgtcttcaattttgtaagtagaagtaaaaaaggaaaacttatttatacatataattatgttacaagcaagtaccaaaaggtagaatctgctgaaggagttcaaagattggagaggctccttctagcttggagtgaaaggaatagaaaaggaagaggaaaaatgtgaaaggattaaggggaggctctatttaagaggaaccattgagaattggtagattttgggaggtggaaatgagaggggaaagagaccttttctggaggtttgaaatgcatggggctcagggacagagatataaagacatgataggcatgcttgagatatggcaagtagtatagtttagttgtaacaggatgagagaagggaggtaaggattaggctagaaattcacctggccatcaaaaattggagggtcttgacatccagtcctagaagacttgatttgcttggttaagtgagagccaatggctgtgatgagggaagttccatgatcaaggtcatgcttggaaactattcatttgcatgatctaggcagaagaaacccagggcagaaagagattgcaagatctatctatagtatttggtaaatttccaggccttacccaaaaagattctgattaaatatgggccacatgaagtgatgtttttacaaagctccccagataattcttgtgcaggtgattcaataactaccactttgaaaaatatgagggtagagttgaggaggttatttagcaaactatcttaataaccaaagtgttccaataaagggactttatttgtctgtgaagagaaaagtgacagaaacaaaagatattttgaaagaagaatcagtaggccaattagatctatcgttggaagaggattcaaagacaattattggctttaatagctggaagatttgtggtacaatgaacagaaacatgagacagtatagatttattaggtctgataagagtttaattttgccaagtgaattttgaagtctaaagatgacagccacagggaaatgtcaacataggtagtagacaacacaggacttgggttggaagagcaaggttgcagctggagagatggcttcggttttaagtgtggatagatgatatttccaattactgaaaaaagctctaaagtgtaagagaagataaagaacccaggaaaggagaaaagataaaaagaactataaagtaggagagaacctgggaagttaaatagttaaacataattcaagtcaagtaaagagaggatttcaagaatatacatgtacacatacacacatacatacatacacatacacacacatatatgaaatagaggcagtgagcatacactataattttaaaatgttttatgatgaaagggaactgtagtccttttccagtgttccataatctcaccatctatccagttgtttaaccagaaatatagcgttatctttgacatcgtctctttctctatccacatctcaaatatagtccatgaacaactctatgaagtgattttctgtcttagttcattttatgctgctataacagaatacctgagactgagtaatttatacagaacagagatttatttcttacacacctggaggctgggaagttcaaggtcaaggggccaatggtggaaagcggaagagcaagagagcacacacacataagagagaagtgaaggaggaaaagggggcccaactcgtccatttattagggacccacttccacaataactaacccactccagcgaaaatggcattaatccattctggagggcagagcactcatgacctgctcacctaaaggtcccaccttttaacactgttgcattggggattaagtttctgtcacgtgaacattgggaatgtattcaaacatagcactttccagacacatattcttctggccatctttccgccatctcacagctgcctgggctaggctagcatcatttggattactacagtagactttcatctggcttcttggcatccactcttgttcttctccattttgatcacaacactgcagtcatagatacctttggaaagtgcaattaccttgtcagccccctgcttaataccttggatggctttccattcctcttagaatgatgagcaaactcattcgtgtgacctgtaaggtcttacttagcatggctcttttctaccttttagccttatttccaaatacatgctgctgactcttgctctccagacacattgacactctgtcagggcacagtccccacttactccctgtaacaggctataatttaaagggtagtaggatggagaatgaatttttaaaacgtgtagacaccttaggacgttcataggttgtggtgaagtaagta

SEQ ID NO: 1329 - DNA, 4087 bp, Homo sapiens
ggctcaggtcacgctgggtttgcatcctggttctgttgtttagcagctgtgttatcttgggcaagcaactgtagtcaagccttagtgtccacatctggggacaaaaatgcactaacttcatatagttatttcaaaaattctgataaaagacaagacagaaatcatttggcacatccccaacacgtagtgctcaaaaatgttagctaatgtttaaaatctttatcaccttaagtcagtgaactctctatcaaagaacagtgtagagcaaagccaattatctcgctacatttaggaaaagaaaactttggctttggatagatttcattgattggctgactactggttgattgatctaggtgtgcttgtgcttgtgcggctcagtggagtgcatttgcccatgcagtaatctcaagcttggaaaaagaattctaaggataaagttgggaatagcaatcgcttcagtggggtgatatctttaatttaattttgcattatttgttttcatgagaaataccctccagatagaagtctccctccctttgattgtcagtttttattagtcacctcagattcttagacaaaggcctcctgattggatgtcaattacttgggttctcatcctttcttatctctaactcactctgttgttgctaataaattagcccctcagaggaaacatttgagccaaatggtacaaactatcttggaaaacttgaagtattttgtttggtgatctaaaataatcaaatgaactgactaattacttgccaattattttctttcttgtggttcttaatttatatatatataaaaagtaatttatatatattagtaatttatatattcattttccctgtttaataaaaaagatatgtataatatataataaatatgctgtgtattcataaaagagtatataaatatacatatattgttttaatatatattttatacatatttgtattatatattttatatatatataatttttattaaacagggaaaactaaatatgggcaaggaaaatgaccttaatacatctgtatagtctgaaaaaataaattatggctaatttaaaatgaaaggtttcttaaacaattttgcagtcaggctattaataatcattttcgcaaagtggacaacatataccaggaatattagagattcatgaattgctgtcagtttgaatttgtatatatttcctcatcactaaaaatactgtgatctagtatgcagaggaaaaaagggtcctggaaaataatagtgttgttaaatgtttttgtaagacaatttctaggtgtgaaaagttaattagtgatataaaatacatatttggataattaataccagtgaagactagacacttgttgcctaaaacaatgaagatactttttttatagagtcatctagatgcttatatccattttccaactcagtttgcgtgtctagacagagcttcttttaaaaaattgttcaaatacaagaaaattctcatagtaaaatacttgagaatttgaaaggctgagaaaaaatcatgattccaatgtattatattaaagttgaaatctgagacttgtgaattaacatcacgcaatgttttaaaatatgagaaaatatgcactagaatcaagaataaccctaaatccaactaagaaaagaaaaatcacttccctgtgaaaaaaaccattctcacaagtcctcatgtccctccactcctgactttatagtcatacagatagttccaaagccagcaaatattgcattttctacacttttccatcatgtaatcattttacaaaacatccaaaccagtacagctcttttaaattgtagcctctcctctctttgtgtatcaccaattctttttattaattcatggggatgaatgcaaaataaatacagttctttgggtgagtccagcttacccacagcgcgtgctgccctctcacaccactcgccgctttgttgctctttctctcagttctttccaacatgcccctgggtctcatgagacgacccaagagcgtactgcatacttggataggattaagaaaagaaagaaaacagaacggtgcccagcagcatttataccaaggtgcagtgcccttcctggcacacaatgtgagaagagagcagtcaaccatgcaaggtaaacagcaaccagcctagtgcaactaactaaaggtagtgaaaagcccactgaagcacagagctgagtttagaatatttacaccaacgctcctctattttactgataaggaacctgaaattgagccataaatttatttatgattttaaaaaaacctggaactatgatccgtgaaatattctttatagtttgttttgaactattttagaaatgttggtggagggatgacaaaaattaaaatacagacagaaatgagagaggcttaattctgaaagaagtgttctagcttattcatcttgttttacagatttaaaaaaccccaggcccagagaattgcagctcctatccttgtattgtagccatgcagaggagacccactgatcttgttactacacacacagctcctttttaattacttaaaataagtcctgtgacagcttgcaggatctatcctgctgattctgtaggattgcaagttttccttttgcctttcattggatttcaaacaatgtattgagtgtggcaactgaattattacagtcagttatctgtgtattgtatgggcaatttaaaattgacttgggttaaaatgggaaacttcacactagtcataagaaactcttcagagatgcagcaattcaatctggttcacataataacagcaataaagaagaaattgcacatagtttttttttctctcttgcaaagagctaaaaccaatttacagattttcttattaatcctcccaaaagaacgacagccattttgctaaccaggaacctcacagcagaggtcaggaggccaagtgtgtgcaggagctgaaggcactggtgtggggctccaaggtttcgtttcaatgtctcttggtgttgctaacttgctgtttgatggtggtcaaatcacagaatgtctctgaaccctagtttactcataatttaaatggtgggtgagataatctccaagataccatcaaggatgaattctcactgatttcacagagatctcaatgcactgcttagatttccttattcttgatacctttacttaaagccttcactaaagctctattaacgttactattcttctatctgttccccaattataatatttctttttctctttttcataagagtaacaagaaacacagtaatgccctttctttgtaaaggcatggccaacgaataagggtagagagaataaagcagtaattggacagttaccttgtttatctctgtggaaatcttaatagttattcggaatgctttaaatttctttaatggcccagtcttacttttgcaccctcaatgtaagcatctcaccttctactttctcagttcgaagccattcatcaggagtcctttcaaagtctttctaaatgtttccgctcttaattcatccttttcttactccgccaccccggtactatactaccctcatctcagaggaaaaagagagcctttgtcatcccaaaataaccatctatagtggtcttaatccaatgtccagttcttctaagtaagtgactctcatacctagatacagatttgaatcacctgggaaaactagtaaataatcctgatcagaatcaggaccaggtgttagtattataataagggtcctaagtgagttttatgttaagaaagggttgataaccagtgctgtggaggtcttgattgattaattaatccttgtttattcttcagctttaatccattttactggctccttccctcaaacctgcaaatgtgtttaggctattattatcctaataaaacaccttcccttgtccctcaagctacgattctatgcatcctcctctctcccactttatcttctcaatggttctgctccttgttagccctgaaacagctttctatgcagtcacctcatggcatacacagtcccttatgcttcatgctactcaggctctctttaggg

SEQ ID NO: 1330 - DNA, 4046 bp, Homo sapiens
ataagagaatagttttataatcttgacatcaaaccgagaaaccacaagagaaaagattggcattttgggccgggcatagtggttcacgcctgtaatcccagcactttgggaggcccaggcgggcagatcacccgaggtcaggagttcgagacgagcctgaccaacacggtgaaaccctgtctctactaaaaatacaaaaattagccaggcgtggtggcacatgcctgtaatcccaactactcaggaggctgaggcaggagaatcacttgaacccgggaggcggaggttgcagtgagccgagatcatgccactgcactccagcctggtgacagagcgagacgctgtctcaaaaaaaaaaaaaaaaaaaaaaaaagaaagaaaaaaaaaagaaaagaaaattgctttctccccacctccttctattcttctgaaaaaaaattatgacaggctgttttcaaaaagtaaattttaaaggcacaagatttattttatgctaaaatataatgctgactaaaagagctcatctttagacttcctgacgtgcttgatttgttaccacaattacttgtttctttttttttcctgtccagtggcatatcacaaaacttctttttaatttggctctctgctggtgtttgcagctggaaattatttccacctcctgcttaggtcaagggaaagtcaaagatggaaggaatcttagaattcatctagtcaaatcctccatcctaaacttgaattccctccacaaaatcccctcttgacacatccatgggcttatcccagttgccccagcctatgtaaacgaggcaaagagcaagagacagggtagagaaacagcaagaggggagcagtggctgtttctgcaccttacaatcttactaagttttctataccactttaccatacagaaaaaatactcaattaaagattgttttatcaaaggccttaccttctgttgtaccacacacactaactaataaacttacatggcagtgtgcgaacattaatgagaatgaatcactcctaaattatcagctcacattatcatataaatgatcacttttattttctctcccaatagtgctataatctctaataaaacagtttatacatgttgtaagtgagactactgtgccctagaaaactagcattatattgctttgttaataaaaatgcaaaactactcaggcagcttttatcagatgcctaagtctctggatcaagcccaagtcagcccaccgtacatctggaagaaaagcaagtcagactgaaccctgaacacagtgttacaggaagtatcccaggcttggtatattcaaatacccagataagattgctgatcatggaatctgtttccagccctgtctctctccccttcccaaccctaaaaatttcttttattagaatttgggggtctagtagcaaaagtaagtggaaaacaatgatcctacctttgatgcattgtggccacgatatggaccatgaaaaagaagttctctagtctagtgaaagggatggttaatataataacttggacttaaatgaagcctattggctctgtaggaacacaaaagaaatgaccctgtgggggtaaaacagacctttataaatttcatcatgcatcatgtgggacaaaagagccactgaaattcgagtttgtacaaatgtattatgatgatgctgttcttaacaagttctgccaaagtctgaaaaacataagcgtttctagagtcgctatttgccaggagaataatctgctttctgtttgcagaaatccaagtgaaggaaagaggattctgtccagagagttttaatttgacccaaaaccttaatcagatgacttttctgtagatccttctcttagtctgtcaagaagagcgctgctgctgaagccaaaaatattggcagataaactccttacaagaaagaacattgtagataggtgcacacaaacacaatatgtaaacaatggctatgcctcagatggtttctgtttgttttttgagggtgatggagggaggttattgcaatcttttggcagtgaaaaaatagcaggtgtgataatcaactcacctttctatcaagagagtgaatttaaatgggtgtcgcttacataatattaatatagtagaaatttgactacttagtccaaaataaagaaatagggatgaattttcatacaaactttttcttttttttttggtttctttattccattttattatttattaagactgttaacaaaaaataggctttatttttcctctgaacttaaaaactataaatttacttgggtcactaacagtgctctcagtctgagagaaaataacataataacaacaataatgaacaaagcacttagcatgtgccaggcactgttctaggtgcttttacctattcagtcattacttttcacaacagctctgtgaggtaagtactatttcatacaaactttttcttttggagagggagggagggagggagggagacagcacctgcgggagactgggcaggatctctcctatgaagtcagaacaactattgcctgtggcaaagtacccagcactgtctcccactaagcctcactaatttatcttagtctgtacatgtaagaatcctctaatacaccaaccttggaccagtttctcattctcgttcagggttttgtaaggtgagcagcaagctgctttggaggcactaaacttgtgtgttggctgggatataaaagccatacccagatgcatgagctatccgtttcatcatctttttaaagcagacgtgttagccctgccagctaggacaaccccttggctagctgccttttgtcttctgtacatctcctttgccagtgcccttggagaagttagacattacaaaacatgacaaaaataacaccatttctggttaaataaatgatttcaacctaagttttcctaaccagggaagatagcttagtgtggagtttcacagacctccggttaattcttccacctgctactgcatcactttcaggccatgagaacaggtaattataacactatggagtgcagtgaacagcttgctattggaagtcaaagaaaggaaccattaactctggccgtttccttcttttctgaccttagcatttctgagtacatttatgtgcattatctcctttcttcttcaaaacatctctgtgaagagcgtaaggtattattcccacttttagaaataaaaatttcggagcctcagaaaagttaagtaacttgccaggattacacagctagtagattttagctgtgaaaaggaaatttttattctgcttttaaattctatcttcttgaggacatcattgtaaaagatccagtcaatgagaaacagttattgtttttatattttgtaactcagtcaaatttgaaataaatagctcaaagttcttaactatttacaattacagaatatcacctccaactactgaattaaaggtttttgatgaatcccagccaaaaagagacggaaacttgccattattaggttccctttttatatttgtataacttaattttgatttaaataagaaaataagatttaaccaatgattagtataatctgatgtaattgctcatcttactttgtggaatgcaaataacaaatagatcatactttaaacagccaaatatcctataagtatattagcaatttttatagtaacttttttatttctgaaacatgcatcttaatacgtattaacaaatctaggtagccatttcatccatcaagtaaataatgtatactttaagactgttcacttgaagtcctaagacatagattatattgaactcaaagcacattatttctgtttcctcttataaccaaatgaacatatagaaaattattccatttttaaagagaaccaatatcattggattcttattttatgccagaagttttacatataatattgtctttccttcttcagttttaccattgagaagttgattctcagaaaagttaaataatttgctcgtggtcatgcaatagttcagtggtaaaaatagtattta

SEQ ID NO: 1331 - DNA, 4039 bp, Homo sapiens
gtgactctcatctgggttgtctttaagataactctggccttgggtagtttgagagtcaggatcttcctttggctttaccatttatcaactatatgaccttgagcaaacaactttctgagactcaacattatcaaaggtaaaatatggataatagttccttcccttctttgactttgtggttaaaattaaacaaaatggtcatgaaacaggcaccatacattttaatgtgctctatgcatgtggtggtgttaggcagtaagatctgtgtactcagcttttcatttgtccattcattaattcaaatatttatcaaacacccactgtgtccaggcactctgctaggcctgtgatatagtgttaaacacattctcaacctcttacagatagattctgccctcacagaatacatgagaaggcatgttttaaacaacttattacatgactagtaatagttttcagatatactccacttcctatatgccaatcttgttctcagcattcatctcatttagtattcctgacaatcctataagagaagcaacaatatcttattttataaatgaagaaatttagccccagagagcttaaacaacttgcttgagggatttcacagctagtaagtggcaaaggcaagatcataacccaattagtctgtctctagattctatgcttaacctaataatcactacatcaaattacctcccttacttgagccagagcatccctctaggtaggtaagagcagtcacttccaaattccatagttaactaacctttctgatcttgagttcccttctctggaaaataggggataatactaatgtctacttatgtgtttttttattttttattttttattttggataaaaggagataatccttgtaaagaaaacttaacagagtaatttatctcacaaatgcatagtaaatattattttttagctattgattataataagtgcaatggaaaaaaactgcaaggtgctgcgagggagtaaaacaggaaaacctagtctagactggcttagaggggcatgaaaactgtcctggaaaaatatttaagcagagacccaaagaaataatgaacaaagatatcagaaagagaagggtggaggaagcagatatttaagcagaaacccaaagaaataatgaacaaagatgtcagagagataaaatatttaagcagagacccaaagaaataatgaacaaagatgtcagagagagaagggtggaggaatccctagttgggcaactagattagttccttctagaaacagagaaaaggccagaatagctaaaatggagagaataagaggagcaggaattagggggttggttggagaggcagaagaggaactttcccatctgttcctcccttgttatctgttccactgctatcatgtgaattcaggctctattgttttgggcctaaattatttcaatgactttgtaattattcttcctgtttgtactctcttgcgtcttctattcattgtgcatattcccggcaaattaaggtcctaaagcacccctttgaccatggcattgccttactaaaaaactttcaaaagtttgccattgcctatgaaaataaattccaaactctttagccaagcatacagtgataatttcaatttggcttcaaactgctttgggtcttatatctcaaaacttcctttacatacccaaaactcttaactaattttgctctgtccttctctgcctagaatgcatccttctttcccctttctatccagtcttagcattggcaagtcctgtttatctttcacatttgtatcaaatgttatcttattgccaggagttagatctgcatccttaaaatcttacacctttttggttgtcatttgctatggtctgaatgttagtgtttccccaaaatacattatgttgaaatcctaacgtgtaaaatgatggtatgaagaggtgggaacctggtaagtggttaggtcatgagtgcttagtgttcttattaaggagacctcatagaattagctcattcttttcatcatgcaagagcacagtgagaaggtaccgtctatgaaccagggagcaagtcctcaccagacactgaatctgctagcaccttggtcttggacttctcagcctcaagaattgtaatagataaatttttgctgtgtatatccctctcattctatggcattttgttacagaagcttaatggacaaaaatatctttcctgtatataactttttctctaaaaaataatttaaaattttttccatttaaaatctgcatataaaaattattcatagttttattagcttatccagctattagcattttggcatttttttctagttgtatgtatgaatattgagaacttaatttttatatacttttcattataatcgtatgttcataacaagtccttaaaaatattactttgagggctgcctaatattcaagcataggaacatatcataatatatataaacattcccctgtgggagcctcagtttctttttccatagaataagtcaataagaatgcctatcttccaccattattgtgaagattaatgagaaacatattaaagaacttacaaaaggaactaagacatagtagatgctcagtaagtaataatcattgttcctttttgtcttgctgaaaaatttccctatgatttatgtgctctcagatgaaagatggagtgtataggggtaagaatgaggaagctcttatatgagggacttctctttgcctactaaaaacaaagattattctgcccacaagaaacaaaaggcttccatttctctcacaagactcagtaaaaattatccaaaacatgtaaatttttatttttggcaatttcgtgggtcaaggaaaaggttggaagcaaaatgtggtttaaagatgatggaaatgaaattcattttactttctgtggtccttatttccatatataatcatggattgactttagacttttttggtttaattgtcgcaagcagaaatatctttgggcctcggttttttatactctaataaatctttataataaaatgagttagaggtagtcttattttatccaattactccaaatttgattgcaagtccaagagcattttaatcctcttggtatttatagtctgtaaatctttgataatttcatgttgcagccatcttttactcaaagttacgtgtttagtaactttgctctgagtatttctttaggtttttatttccttgatcaaaactgagcaggctgcttgagacacttctagtctctaaagttcaatttccatgtgacttctgacatttattcttagaggagatgaacagttgcttattttaaatatatctgccatacctgcagctaaggaaagatagtatataaggccctccagtctcactctccttcccctactagactgtaaattcttcaaagccagaggtcatataatgctctactctgtatcctcagaacctaaactgtgtctgatacatggcagctgctcagtaaatgttggctgaaagaattaacgatgactgctgtttcctcactgtattagagaaaactttttaggacacgggctttgggatcaaacagagctgggttttaaaccatcactggctgtgtgttcctggacaggtgatttgtattccctagtcccaatttttttatcttacagtgaaaaaataattcttacctaaggactaaaggaaataatatgtgtaagtgggcttggcacatagaacatacaccataaaatgtatctttccttcctttttgagatatcccaattcacattactttttaaattctcttagcctctcctctatctgaggctaaattcacaagagaataaactatgtaagtaaaaggctataaaaagcagtagaaagatggaaaaatgggaagggcattgagaattttttaaacttctttatggctttcggtaactttcattttccaaaaataggtttctgtttgccaatcagatagattaccttccctttacctcctctcttctcacttttgagttgtaagtgaaaag

SEQ ID NO: 1332 - DNA, 4041 bp, Homo sapiens
attgaggcactgcctagtggatctgtgagaagagggccaccattcttcagaccccagaatggtagagccaccaacagcttacactgtgcacctggaaaagttgcagacactcaatgccagcctgtgaaaggagctggcgggggggctgtaccctgcaaagctacaggggcggagctgcccaagaccatgggaggctacctcttgcatcagtgtgacctggatgtgtgtgagacatggagtcaaaggggatcattttgtaactttaaggtttaatgattgccctattggattttggacttgcatggggcctgtagcccctttgttttgaacaatttcttctatttggaatgggtgtattgacccaatacctgtactcccatggtatctaggaagtaactaacttgcttttgattttacaggctcataggcagaagggacttgccttgtctcagatgagactttggacctggacttttgagttaatgctggaatgagctaagactttggggaactgttgggaaggcatgattgtgttttgaaatgtgaggacatgagatttgggaggggccaagggtgaaatgatattgtttggctgtgtcctcacccaaatctcatcttgaattgtagttcccgtaatccccatgtgtcatgggagggactcagtgggaggtaattgaatcatagggggagttaccaccatgctgttctcatgatagtaagctctcaaaagatctgatggctttataagtggcatttcccctttttctcagcacttctccttgctgctgccatgtgaagaaggacatatttggttcccctctgccacgattgtaagtttcttgagtcctcgccagtcatgctgagacatgagtcaattaaatctctttcctttacaaattatccagtgtcaggtatatctttattagcagtgtgagaatggactaatacaccatgggtcttagtttgatcccagggatagagagcatactgtgtgtactatcatttttccttaatcaagccactcttttctgtaatgttattgtttgttgtggagataaaggcagagggacatacccaacagtcagacaaagccctgtgttttcagcctctgtgttgagatatgtacatttcctgaggcattgtactaatcctgtttccaaaggaaacaaaagcatcaggataacatggtcttgcctcccagatgacgcagaataatttatagtttcaattaaattgcttccaaacctgttgtactgtcaacctgttgcagtgaatgcaaattaaataacccatatttctattttaactgaaaatattttctagtaaggctggaaaccatgcatgatgtgaagctgtggctagaatagctgttttctccatgtgagaattaacatctggttaattattatacctagttattatgctaggtatgcttctgtggcttgagaattgttagtgcagttaactttgagtaaaatttaaattaattagccaaaggagtggcaaaacaagctgaaatccataatttgaattttagttagtagtcccattttctcccaacaccttttaatttgaattgtgacaaatagcacacctgagatttgaatttccctctctcattctttgtctacctggctatagtcaaggaacaattattcatctgttcatccattaatccattcatccatctgcccatccatcgaccccccgatccagtgttcaccatgtgttatttgggcctaaccatgggcagcaaaagggaattaaggaatgccagccgcataggcggaagctgagtagttttgtcagttcttggattgtggggtaaaatgcattcatgtccttttattaatagctatgtggcttgggtcccctagccttttcagtctcaatgtagctgttactgacagcactaataagctgtcagtctgtttttgccatgtgttaggaagcaagcaccactgagaatgccatctttaccaggaatttcagaaagtactgagaggtttatcagtcacggagaagaaggaatatgaagtgggaagatgacctagaggtttggttagtgagtaaggagtaacttttaccccgatgaaccatattaaggaggtaggaagggtctctgcctttcttaaagtttagatatctgaatccttttaatagataagcttccatcagggagagtagaaacactttctccgtattaaaaatgctatatagttttattaagttgtctgacttctttctttgcttgtaaataatgcctaacatattcgaaactactgaaaaataaggtgcttcacataaatcacttttccagataattgaaagttgctttctaaaacactaaagctgattaggcttggataacattttcttaaaaacaattccagcatttctgttcataagagctcttaagagttcttaagagtccactagtgaatgaaacattttgcttagaagacagaagttcaggtctccattcctcacatcaatttgcatatactattgcatataatagcatctatgtatcttggaaaaaagagatggggaagacaagaaaaggagaagggaggagggaatggcatggtatctgttgccctctcacctccttgaattaatttactataaactagaagctggactgtggtgcccacagtatacttataaaaaccagaaactggcacaaccattttcaagaaagaatttgtaatattccagacccaatgtaactctagttaggaaccaggtggcaaaatatagcaaagagtttagaagagatcgttctctctgtgactggcagaaacagaacttgacagtccatgaccttggcattagtgatggttccaaaattcttatgtggaacagcttactggtggcagtcccgttgggaggagatgctggaacacttattttatttcgaagatgattttgtgttcacacacattttaatttagattgtatgcttatttgtcagtaggttctaggagagtattgctggaaattgtgggagaaggaggggtctaaagcccaagcaagccatcctttgataccatctttcttgtcatggtcttggtgtaaacagaaatggctcaactgtagcagagagtctcttaaaagaagcgccagggaaatggactttgtggtcatttatacatggaagtaaaagcaggaaaaaagcaatatggtggacactggggcagggtgagttcttcctttagcactggagattcataactgtcattgggcatgactgtaactgtgagtctgttggtggtgtcaggtaacattggcagtacattaaacatgatctcatcttaccagatctaagaaccatcactagcctatactgtttactgtagtttgtactgcagaaatgccctttgaaagtatggaggtatgtagggcattttgccttactctaaatgggcccaaacttaatgaggaagttccatttggaaacttctggttgactattcatttccatgagcacaaacttactacttctccttcttgacattttatttattgaattatttgtgtttattgtgtatttatttgaggtcaaggagtttgtcttattgatctttgtgtatctgtgtgtctggcacaaagcttttactataagaggtactctgtaactattacataacaaaatacaatgatgattgtgatcttggaatattggtgacctcattttccagaccaggattctgtttatgttgttttcaatctctctgattataacacctcttatgccttgcaaccaccccattctcaccccaaccaagtaacatcctactgctttgattcctcttgaactttacccagcgcctcagacttctaataagaaatttgcccttcacttcaccactctgcctttcaggaggaatcacctcctttttccctgttaatttttcctacaggattgcatttagtttatccttgcttgctctagaattagaatatgctatttataataaacaaatcaaacaaatccagatgagtagaatgaacagatatataaatgcagaaaaatgt

SEQ ID NO: 1333 - DNA, 4052 bp, Homo sapiens
atgttctcacttatgagtgggtgctgaatgatgagaacacgtggacacatgggggaacaacacacactgtggtctgttggggggcatgggcttaatacttgggtggtggaatgatctgtgcagcaaaccaccacggcacatgtttacctctgtaacaaacctgcacatctggcacatgtaccagtgtacttaaaagttgaagaaaataaaagcaatgcttagaagagactccaatgatagagaaggacgattcttggaaagaggtcccagatggcttgctcaagcagttttgtgtatttgtcccacatgaaggtgaaaagagtgctggaagcttcaagatactcaagaagctaagagagtgagtgcagtttttctttctgattatatattaagtccccaatgcacagtgatatcacaaggcaattaattcagacatgggtccctctatttgtgttttgtttttaaatgacatgcgtgaaaaacataattcatctaagttgaagagatttttttaatgttacttgtgcctcttactttattttatttttttcgtaagttattggggtacaggtggtatttagttacatgagtaagttctttagtggtgatttgtaagattttggtgcacccatcacccgagcagtatacactgcattatatttgtattcttttatccctcactcccctcccattcttccacccaagttcctacaatccattatatcatttttatgctgaagggatcttttttgagaagcaattttctgtaagtccctgggctgggtttggaaaatttggaagaaaccaaacactgacttatggttgtatctgagacacagatttcaaggacataaagtactcaaacaataaattatgttatatctaatttaaaatcaaagttcaaaattactttagcttgggaaaaatgctcaaaccatacataacatgaagtgcacaggtgaaatatgtcttctgcatctctaatgacagtgatgtcaatgaaactatgaaactctggcttttggttaataaccattttgtttgtggtactaatgactatgaattagtaggtaatgaacaagaactgaagtattgaatttgtataattattatagtttaccaggcaatgatctttaaaataataagctaaaagataatttcatgcccaaatataaattcttaaatgtcaccatatagacacagtggtgaatgattagtatgtgaagaaaacacagaatgtatacctgaatataaatttaggtcttgatggcaccacacagcctgaatgaagaaggactatgacacagaaaaccgggcagagttgcagagcaagtgatgagactggtgaggagaatgtggcaagatgccaaatgacacttctattcattcatagaaaactgtgacacagaatttcagagctattccactacagctacatctaaagttgtctgttgtttttccctctgcccggtgtcaaagctgagcttattgtgaggaagggagtgtgtgtgtgtgtgtgtgtgtgtgtgtgtgtgtgtatgcataagcacctgtgtaagggatattataattattgcaaacaagaatcctgtaactgctggatacttgtcttagtaacatgtatgtccccaggcctcactagcctactggcaaggaagaaaataaatcagcaatttgtatccaaatggtgctggttcttagctcttcttagttcaagcaggttggtaaagtgtcctcctctggctggtattttggctcatctccaaggctgttgagtgcaataaaatctttgtgcactgggcattgctgtttcctctccagcccttccactacagagaagcactaccttgtctgcggtgctgccccctgctatgccttaaggctgaaaagtcatacatgaaaacagaattcaattcccttccatcaccacagtccaggagcctcaatatgggacagggaaaggggaaaattttcctccccactgaactcagacttgtacccttgcaccccatgttgcctctatctctcccattttaccctaggcctggcatgaccaagaccttctgatcaaaggcccttttcctcagagctcaaacaattcaaacaaatatacagttatagaggccttcagggtcataggcactcataaacttaatcgtggttactcccctctgccttcttaaatatttctccctgagatctcacatcagaaagatggcagctgttcacttaggcttttgagggagtctagcattgggttttgctctgttagaccaaaccgtgtgatatggttttgttgtatccccacccacatctcatcttgaattgtagtccccataatcccatgtatcatgggaaggacctggtgggaggtaattgaatcatggaggtggttacctccatgctgttctcatgatagtgagtcagatatctcatgatatctgatggttttataagggatttttcccattttgcttggctcttctccttgctgccaccatgtgaagaagggcatgtttgcttccccttctgccatgattttaagtttcctgaggcctccctggtcatgctgaactgtgagtcaattaaacctctttccttcataaattacccagtctcaggtatttccttattagcagtgtgagaacggactaatacagtaaattgggactgcagagagtggagtgctgctgtaaagatacccaaaaatgtgaaagtgactttggaactgggtaacagacagaggtgggaaccatttgaagggctcagaatataggaaatgtgggaaagtttggaactttctagagacttggagggctcagaagacaggaagacatgggaaagtttgaaattttgtagagacatgttgaatggctttgaccagaattgtgatagtgatatggacaataaagtccaggccaaggtagtctcagatggagatgaggaacttgttaggaactggagtaaaggtcactcttgtatgcaaagagactagcggcattttgcccctgccctagagatctgtgtaactttgaacttgagagatatgatttaaggtatctggcagaagaaatttctaagcagcaaagtgttcaacaggaagaagagcataaaaatttgaaaaatttgcagtctaatgatgtgatagaaaagaaaaacttatattctgggaagaaattcaagccagtagtagaagtttgcatgagtaacaaggagccaaatgctaattgccaaggcaatggggaaaatgtctccagggcatgtcagagaccttcatggcagcccctcccatcacaggcccagaggcctaggagggaaaaatggtttcctggggcaggtacaggtgcccacccaccctgtgaccactgtgtgcagcctcaggccttggtgccccacatcccagcccctccagccttggctacaaggggccaaggtacagtttgggtcatggcttcagagggtgtgagccccaagccttggcaggtgccatgtggtgttcagcctgcaggtgcacagaagtcaagaactgaggtttgggaacttctgcctagatttcagagggtttataggaatgcctgtatgtccagtcagaagtttgctggaggggctggggccctcatggagaacctccgtgagggcagtgcagaagggaaatgtgggttgaatcccccacacagagtccccattgaggcactgcctagtggatctgtgagaagagggccaccattcttcagaccccagaatggtagagccaccaacagcttacactgtgcacctggaaaagttgcagacactcaatgccagcctgtgaaaggagctggcgggggggctgtaccctgcaaagctacaggggcggagctgcccaagaccatgggaggctacctcttgcatcagtgtgacctggatgtgtgtgagacatggagtcaaaggggatcattttgtaactttaaggtttaatgattgccctattggattttggacttgcatggggcctgtagcccctttgttttgaacaatttcttctatttggaatgggtgtattgacccaatac

SEQ ID NO: 1334 - DNA, 4046 bp, Homo sapiens
atgaggatgagcattcctgttctccctaaccatcaggaggtaaaagtgctatgtaaacggaaaaatgccaagtctaaagacattaaaaagaacagtaacccttgaacaccccgactctttcttttccctcccctctagatggttagaaggactagtttttcttcttttgtgaggtcttgtatgtttcattgccataactctttcaaacttgtgccacagtctctagattagtcttcttgccaccagtgtttcagctacagtacttctttcacatcagtttaacacccttaaaacactcctttgcaccatgctaagatagcttcagaagcttccagatgcctatagggaaagcccagatgaatgagttttatattcattttgaaagttctgtgctaatagtaaagtgttatacaaaatgaggtaatactgttgtcttttaatgcattggtatcattttggtatcagctaggtccctagagagcagctatgtaaagttcaatctttctagtagtacaaatgacttaaggaatgaaaacataatctgtcttcaatttgtactttgctaagcctaccctgagactcaagggattttgtaagtcagaaagaaatcatttggagatgagattaggaatatctttgctgtttcataaggtggcagtttaagagttaaaagagaaaccgacatcatgtagaaaacattatgggaatttttcttggaggcaagtgtgatgtcatggttaagagcatgggatatgaatttacagttcttcagttcaaacttggaacacttttatattctgggtaacatatcttattactacagtgactctcaaagaatcatgcctattgtatgtatacccttgttgagctctctccacattaaccctaggtttgggacattggtaatgtgactcaagcagaggcttaaagagtgcttattcactgaggcttgccctttcttactccttcctgggaacccatttggcaacaagtgaagaaacctaggccagcctccttgaagatgagggaccaacggagagagaggctctgctgtcctagccctcccacagaataagtaagcctagccaacaccacgtggagcagagatgaaccatctcagttgagcccagcccaaattgctgaccaaaagaattgggaacaaataaataattattgttttaagctactgtgtttctgggtggttttgtatataatagtagctacctgatacattggatgacccaattactgaacttctcttaggcctgttttatcacgtgcaaatggggataattttagtaatttggggttgctgtgaagacagtgagataatccatttagagatcttagcataagtaatgaataaatattagttataattatattttatatcaggaattattataattaaaaatcattaaattagtagtgaaatagtgtaattttttcatatttgttatttcatactcacacttcctctgtgagatattattatccacaatttatatttgaacaagtggaaattaaatgatatccttgacaagcaaatgttttctaagcctgggctctttgcaccatgtaatagatgatacaagctcttgtcctttttataccacagaaaaggtataagaccataatggtgtgaattttgtatatagtcttcatccttggtcatattttataacccaaaatgatctgtatcattgtttacatcatatttatcttgcattttatgtgtctctaagctacctcaaatcgtttttcaaaacttttttgaggcattagaaaaagactataaaatttatataaatattgcccaagtaatgacatggctccttgaatagtttttgatgttggataaagctgagtaaatgagaacttgtgaagagaaattgcaaagaaaacagtttagcaaagggtattctacttttaggattatctttgagaataaaaatttatttctgtggctatgcgataatttcaatactttagcatataaacacctgtgcttataattgtgaaaacaatatttattcacatctagagttagtacctatggaatattctgtgtggccttagtcataccatttctgagatgaatatcatagcagattgtttaatttctagttaaatttcaatgccatctattgtctccttgattcatctaatttctctgagcttttgtttcctcatctgtaaaatgggataataacagccaccttatcctgttgtgaggactatagatctagtagtgtgtattgtccctgtaagaatgcttggactataagaggcattcaatgaattaaagacatgtagagcagagcttctcacacttcaatgtgtgtatgactcttctggagaatcttgttaaaagtctgattctgattcagtagatttggggcgggatccaagattctgcatttccggcaagcttccaagtaattctaatgctgctggtgcatggaccacactttgagtagcaagcataatgatcaggggttggtaaactgtagcccatgggtcaaattcagccaactgcctggctttgcaaaaaagttttactggaacacagccaggatcatttgtttatctactgtctatatctgtgcactacagtggcagagtagagtgaccgcaagagagactgtatagctcacaaagctgtttagtgtctgtctctttattaaaaaaaatgtttattgcagcactattcacaatagcaaagacttagaaccaaccaagatgcccatcaatgtagactagataaagaaaatgtggcacatgtacaccatgaaatactatgcagccataaaaaaggaagagttcatgtcctttgcaggaacatggataaagctggaaaccatcatgctcaacaaactaacacaggaacagaaaaccagacactgcatgttctcactcataagtgggtgctgaacaatgagaacacatggacacagggaggggaacatcacacactggggcctgtcggagggtggggggctaggggagggacagcattaggagaaatacctaatgtagatgacgggttgatgggtgcagcaaaccaccatgacacgtgtatacctatgtaacaaatctgcacgttctgcgcatgtatcccagaacttaaaatataataataatatatatatatgtatgtgtatatataaaaaacactgaaggtttgtaacatcatgaaggggcaatataatgctgctagagggacatagaaggatctgtctgaagaatcaggttattttattggatcccactagatcaccatgtaggaagaaaatgctgggaataactgtcagtgtcaggccctgtgtatatgaagcaataggacctggtgacaagtgtgcaggatttgaagtcttgaccctgccctttaccagctctgtgaccctgagcaagtcattttaacctctccgagtcttagtttgctcaactgtaaaataacattcaccaaaccaactcttggattcccttggaagattagtgattatgtatgaaagatatttaacatataacctgccacagagtagataataaaataactgttaccagggcatgggctaagcaaagagggtcttgtcagctctgagagacatggctggaatttctaagttattgtgatgctcagggtcaagtgggtagttgtttcctggttccaggtggtccttcttgggaaggggccccagtgagaactcagtcccagccaagtgggttgggcttcatggcagagttctagtcctgatggtaatatctcagaatctgagacaaaagccttatcacacagatagggaatattcgtaataataaaaataatgactattttcagttgaatgcctaccattgtctggtgctgtaattggtattttgcatacgttttcttatttaatatcctctgcaaactctgcaatgtaaatactaagagatgagacaactgttgctcaataaaattaagtaattaatcaaagggcaatcaagtaataagtagcagaaatggattcagatacaggactgtgtgattcaaaatttatgct

SEQ ID NO: 1335 - DNA, 4048 bp, Homo sapiens
aatcaaacttggagacagaatatagtgaagccaaatgcttcccactgccttctgataacagggttaatcacttctgaagtggcctagaggcccagaacagagtcacacaagctgttacctatgagttataaagccaggccattcctagtttctggggatcaaggttaaatgtggcattgccacagcctgtagggaagtatcttgaaatggaatccccaggaatgttcaaagatcattcaactcccttgggtttaaaagactgtaataagaggaaagcccaactttagtctacttggaacaatgccagcctcctgtacagggtttggtatgctgacaggagaaagggtgttgacatgcagtaattgttaaggaaaagaataaagcaactgatgaaaatgcaagaagctgggctaagctgtaaaatgttgtactctataagcagccttaatcaagagataatagatccagactgatgcagtgatgcttctgaaaaagtcacagggctgggctggaggctgcgagagatcattagcttagagacccagccctacctctagatgtccatagcttgtgttaaaccccatcttatagccacttggggtcttctggctgcttctgtgatgggatagatctcattagacttgggcttccaaatccaggactatgagtttagaatgagacagagatttgtgtctctgatgttggtatgaccatatatttgcttaggtcagtaagatgcatatacgatatagagaaaaaaaatcagactaaagtatgctaaagtgcttcatgatttgactttctgagaaggtgtggggcagtggaaagaaactgggaatttgtctaaaccccagctctatcccgactcaacacatggtctagagcaatctcccagtgtattccaatttatagctcacctaatctatgccacttctgatatcaaaccaagaaactgagtcccagaaagacaaaatgacttgtcttgggtaacactgtcatttagtgccatactggctttaactcagatcttctgattccagagtgggggaacacgaaggaaatgattttgatcttataggcaggcctacctaacttctgagagaaaaagtttatgtccttgagaggaagattagctagctagctagacacatgcatacatacagagatagacagacagaaaaaaactcagggacttggtaagattttcttgtttggttgggtttttacctgcatacagggcaatgcaatggaacgtaacacctgctagagaggaaattataaggaaaagtttcttctcaggcacaaagctgcaagacgcttgtatcccaaatacctgtaatttgttaagtgttattctgatctacttctatcacagaagggatgcagagtggctgacacaaaggggctcagatcagagcctgctgatagaaggacagcaagtgagaaacagtaaagattattcagagggaaatgcatgaaagtaaactctatttacaaaagggataagtcatgtccacttattattgttaaagatggtggcagttttgaaacaaaataagtaagtctctagaaatggacgagagtttaggaatggtgatctcacttcagattctcaggagtcaccaaaggtgaagatgccttttttttttttgtaaagaaagtactgacaaaattctgactctgttcttccttcctgcctaagttcccataacttatctgctttgtctacctactccccaggttatcccgaggctgtcttattcatctttgtatcacttattagactactctagtagagtgcctggcatacagcaggtactcaataaatgcttgctgaataagttgataatgttgactttgtaagctctaaagggctacataaggaattattgtatctcttgagaagatgcctccctgaagctatttcaattccaggagtcagttatcacacttaatgtgaacagaaagggtgtttaacttcaattgtccaattctctctgggagagttgaagcaaactcaggggagtttggacctggcagactggcccttgggcagcatcctatactgaggttgcattaggcttcatcattaactggagggactggaagcaattttctagcaatttacagccaaggaaggaaatcaatttcagtttaaaagaaacataatcaaaggacgcaaagtatgaatgtgaagccctgggcaggatctgaggaggttagaaatgagtgaaaaaaatttggtgcaagcaggatgaaggtaaatggttcatgaacacagtggtgctggaagtccatactttggaaacaggtggccagtttaaaagcccaggccaaactagatatgaagttaaaaagcataatagaaatacactagttttattctctttaattttccatttatatatggatacatcttgatgttgacatatacttattttaggttagacatgttggaacttgaatagttcatccttttttttttttttaagttgctgaaatttgcccagacataaagtgtgggcataagcctgacaagctgatcatttaacttattccaaaaaggcagggctttatgttttttaagcaatgcctaaagactgactctactatgacctgtggatatgaatgatatcctggagaaagaaggggtgtccctggaatgtcctcagtctctgacttgggggtgaaatataatttggtccagggacccgttcctcccaacttcctgcagttactaatatgcatatatgtggaaaacctgtccctgagattctctcaaggcctgtgatatcaagaaatgcaggttttgggatcatgcctgtaatcccagcactttgagaggccgaagtgggcaaatcacttgaggtcaggagttcgagaccagcctggccaacatggcaaaacccatctctactcaaaatacaaaaattagctgggcatggtggagcatgcgtgtaatcccagctactccggaagctgaggcaggacaatcgcttgaacctcggaggtggaaattgcagtgagccgagatcgtgccattgcactccagcctgggcaacagagcaagattccatctcaaaaaaaaaaaaaaaaaaaatgcaggttttagttctggctccacctcttaccagttctgtgaccactgatgaattatctttctgagactcagttttctctcaattgaatgggaagggcaatagtatgtagctcatgaggttgttgtgagggagataaatgtgataacgtgaatgtttaacaagaccctgacgtattgcaaactctcaacaaatatttgatactatcaatgttattatgtacattctctgggcattcagaaaaattcagaaatatcaaatatggaagagaagctaaactcactgttagcgggtatgtgatcaaactgcagaatgctctgctaattctgttaattcagaagaaccactgggagttggctgaactgtaagctttggttagagagatttgtgtattcagttgggaacaactgacagtatggaaagatacctcacagggtcagaggcactgacaggaaagtcctataaagcataagagaggggcaggcagttctggcatcttatccagatctcaatcagtgctgttggaccactacaggtcttggacttgctacctgaaaagttgacttctgttctcccagggccctggtctcctggtcaggttggtttagttgtcatcctaccatgaaagggaagctcactaagccaagggccctttgtaacaccagtgataggaaaaaaacttcatcaactaaacacacagagtacttgacaaatgccaactgcatatagtgtttagtaaataatcaccacatgaggaagaggcaggtcccagttggatataacaataaaacccatgacagcagtatggtgtggtttccagatatgcttgatttacagtaggactcagaaaccagaaaagcagcctagtgatataggtcctaacttgttcctccttgaaacagtagatcctagctgaaaacttaactcaaagacacagggagacatacatc

SEQ ID NO: 1336 - DNA, 4040 bp, Homo sapiens
aacataaaaatcatgagtttattccacctgaaaattataactattcctcagccaggttttataagcaaaaaaagaaagaaaaaggaatcaaacttggagacagaatatagtgaagccaaatgcttcccactgccttctgataacagggttaatcacttctgaagtggcctagaggcccagaacagagtcacacaagctgttacctatgagttataaagccaggccattcctagtttctggggatcaaggttaaatgtggcattgccacagcctgtagggaagtatcttgaaatggaatccccaggaatgttcaaagatcattcaactcccttgggtttaaaagactgtaataagaggaaagcccaactttagtctacttggaacaatgccagcctcctgtacagggtttggtatgctgacaggagaaagggtgttgacatgcagtaattgttaaggaaaagaataaagcaactgatgaaaatgcaagaagctgggctaagctgtaaaatgttgtactctataagcagccttaatcaagagataatagatccagactgatgcagtgatgcttctgaaaaagtcacagggctgggctggaggctgcgagagatcattagcttagagacccagccctacctctagatgtccatagcttgtgttaaaccccatcttatagccacttggggtcttctggctgcttctgtgatgggatagatctcattagacttgggcttccaaatccaggactatgagtttagaatgagacagagatttgtgtctctgatgttggtatgaccatatatttgcttaggtcagtaagatgcatatacgatatagagaaaaaaaatcagactaaagtatgctaaagtgcttcatgatttgactttctgagaaggtgtggggcagtggaaagaaactgggaatttgtctaaaccccagctctatcccgactcaacacatggtctagagcaatctcccagtgtattccaatttatagctcacctaatctatgccacttctgatatcaaaccaagaaactgagtcccagaaagacaaaatgacttgtcttgggtaacactgtcatttagtgccatactggctttaactcagatcttctgattccagagtgggggaacacgaaggaaatgattttgatcttataggcaggcctacctaacttctgagagaaaaagtttatgtccttgagaggaagattagctagctagctagacacatgcatacatacagagatagacagacagaaaaaaactcagggacttggtaagattttcttgtttggttgggtttttacctgcatacagggcaatgcaatggaacgtaacacctgctagagaggaaattataaggaaaagtttcttctcaggcacaaagctgcaagacgcttgtatcccaaatacctgtaatttgttaagtgttattctgatctacttctatcacagaagggatgcagagtggctgacacaaaggggctcagatcagagcctgctgatagaaggacagcaagtgagaaacagtaaagattattcagagggaaatgcatgaaagtaaactctatttacaaaagggataagtcatgtccacttattattgttaaagatggtggcagttttgaaacaaaataagtaagtctctagaaatggacgagagtttaggaatggtgatctcacttcagattctcaggagtcaccaaaggtgaagatgccttttttttttttgtaaagaaagtactgacaaaattctgactctgttcttccttcctgcctaagttcccataacttatctgctttgtctacctactccccaggttatcccgaggctgtcttattcatctttgtatcacttattagactactctagtagagtgcctggcatacagcaggtactcaataaatgcttgctgaataagttgataatgttgactttgtaagctctaaagggctacataaggaattattgtatctcttgagaagatgcctccctgaagctatttcaattccaggagtcagttatcacacttaatgtgaacagaaagggtgtttaacttcaattgtccaattctctctgggagagttgaagcaaactcaggggagtttggacctggcagactggcccttgggcagcatcctatactgaggttgcattaggcttcatcattaactggagggactggaagcaattttctagcaatttacagccaaggaaggaaatcaatttcagtttaaaagaaacataatcaaaggacgcaaagtatgaatgtgaagccctgggcaggatctgaggaggttagaaatgagtgaaaaaaatttggtgcaagcaggatgaaggtaaatggttcatgaacacagtggtgctggaagtccatactttggaaacaggtggccagtttaaaagcccaggccaaactagatatgaagttaaaaagcataatagaaatacactagttttattctctttaattttccatttatatatggatacatcttgatgttgacatatacttattttaggttagacatgttggaacttgaatagttcatccttttttttttttttaagttgctgaaatttgcccagacataaagtgtgggcataagcctgacaagctgatcatttaacttattccaaaaaggcagggctttatgttttttaagcaatgcctaaagactgactctactatgacctgtggatatgaatgatatcctggagaaagaaggggtgtccctggaatgtcctcagtctctgacttgggggtgaaatataatttggtccagggacccgttcctcccaacttcctgcagttactaatatgcatatatgtggaaaacctgtccctgagattctctcaaggcctgtgatatcaagaaatgcaggttttgggatcatgcctgtaatcccagcactttgagaggccgaagtgggcaaatcacttgaggtcaggagttcgagaccagcctggccaacatggcaaaacccatctctactcaaaatacaaaaattagctgggcatggtggagcatgcgtgtaatcccagctactccggaagctgaggcaggacaatcgcttgaacctcggaggtggaaattgcagtgagccgagatcgtgccattgcactccagcctgggcaacagagcaagattccatctcaaaaaaaaaaaaaaaaaaaatgcaggttttagttctggctccacctcttaccagttctgtgaccactgatgaattatctttctgagactcagttttctctcaattgaatgggaagggcaatagtatgtagctcatgaggttgttgtgagggagataaatgtgataacgtgaatgtttaacaagaccctgacgtattgcaaactctcaacaaatatttgatactatcaatgttattatgtacattctctgggcattcagaaaaattcagaaatatcaaatatggaagagaagctaaactcactgttagcgggtatgtgatcaaactgcagaatgctctgctaattctgttaattcagaagaaccactgggagttggctgaactgtaagctttggttagagagatttgtgtattcagttgggaacaactgacagtatggaaagatacctcacagggtcagaggcactgacaggaaagtcctataaagcataagagaggggcaggcagttctggcatcttatccagatctcaatcagtgctgttggaccactacaggtcttggacttgctacctgaaaagttgacttctgttctcccagggccctggtctcctggtcaggttggtttagttgtcatcctaccatgaaagggaagctcactaagccaagggccctttgtaacaccagtgataggaaaaaaacttcatcaactaaacacacagagtacttgacaaatgccaactgcatatagtgtttagtaaataatcaccacatgaggaagaggcaggtcccagttggatataacaataaaacccatgacagcagtatggtgtggtttccagatatgcttgatttacagtaggactcagaaaccagaaa

SEQ ID NO: 1337 - DNA, 4030 bp, Homo sapiens
gactaagtaagtttggagaaaaatgagataagcacaaatgatgaaataggatcacatccctgagtaactttccaggagtagaaaagttctcaatttaatagagggtgagatgccaagtttcaagtgtatatactattttttgtaggtagagtgtatccccatagaaaagctcattttgaagaagcataattgtaactctggatggaggtagtcaccctgtgtataaaaggacagcacaggtagagggagaaagtggatgagagagagtgggacccccctagacctgaggctaatggaggtgactggtaggtgcctcttgcaaagagttgtcaagaacacagattcatcccaaagctgatctcatctcttttgcttcttggacagacagcgctcacgtgattcataacttctcttagaaatagtaatctgtctgtttgtgtcacgggcagcattgcttgatgcctcctgcccaacactttttatatgaaaaataagaaactgcatttcctttctgcagtttctcccccattttggcccatcatgtttcccaaaataacctcactaattcactggaaagattttgttgatacaaatgtgtctttaatgttctctgactgctagatctaaagatgtgaatactgttagggtccatgtctgggtgaagccacccatctttattatgtctgattcctgcccactctctttaaggaaaaatcacaggaaggagactgattggaatgaaaaggcaatattaatatgcattgccattatcagagtctatcccagaggctggtgtgagtgatgatgcaacaacaattttgggtgattaatgaaaaaattcacagatagccagttccatgcataaggcctatacctgtttccaaggcactcacagtctattgcaaggaacagataaataagaatatgaaatcaatactgactgtatggtaagtgctatgcacgtattgttagcagtatgtgtggaatgtggcaagaacttttaaaagtagcatttaacctggcctggaggggattatattagttttctattcttgctgtaacaaattaccacaaacttagtagcttaaaagaacacaaatttattatcttatagttttagaggttagaattctgacacaagtctcatggggctaaaataaaggtgtgtgcagtgatgcattccttcctagaggctctaagggaaaaccattttcttttcttttctagctactagaggttgcccactttttttggctcatgactcccttcctccatcttcaaagccagcaatgttgcatctctctgacttttcttccttagtcatgtctctctctgaccatagccaagaaaagttttctccacttctaaaaactcatttaattagattgggctcacaaggataatacaagataatttccaaatctcaaggttattaacttaatcacatctgcaaatttcctcttgccaagtagggtaacatcttctcaggttctagagattaggacatagacatctttagggtgtctactactctgcctaccacggtggagaaagaggacactaataaaagccttctaaatgggagtgacaatttatttgagtcctaaaaggcgaaactaaaattattcaggtatataggggaaggggaaaaatatggggaagagaatcttgaccagatgggaactttggattagatgagagcaatatgtattgaggccagtacgtagattcaagaacattgagagctagaatagatatttccttggtatttcaaaagggtatatggctatttcctgttacttcaatacacacctaaatagcaagagttttgctgttattagcttacttattctaatttaattagcagcctgacgagggaggcaggtggtgttattaatgaagatagagtttgttgtttgtttgttttttagatctctagccagggtagtaatgaaaatgtgatcgcaacagaatggaaaaatcaatgaaagaacagctgaaactgtaatgaaagagacaatatatcttttcaataaattatgggagaaagacaaattaataaaaatagtgacaggctgtgatcttgagctacattggctcaatgtctcatattatcataagtaaacattttatgtttgctatagaaacttttctactttgaaatcttcagggcaagtgcagaagtgcaagtaagtaatatatttgaatgtctattttatttcatatattcttatcataaagagaaaaaatggagcagactctggtctgtaaaagcaattccagtgttctttagatgcagtgtatatctaaaaaatatctaaagaaatatttgaaaaaaaacctgtcaaccaaaattcaatatacagtgaaaatattcttcaggaacgaaggtaaaataaaaacactttcaagtcaagtcaaagaaaactgaaagaatttgttgccatcagacctactctaaaagaatcagtaaagaaaatcttctgacagaagataaatgataccagaaggaaactcagaacatcacaaatgagaaaagaccaacagaaatggtaaacacagtagattatttttttcctcttgaattctttaagtatggttgatggttgaaagtagaagttagggcattgtcatatgaggttttcagtatgtgcagatgtcatatataaaataattgtaagataaagggggaagataaaggaacctatttggtggtgagagttttacattctacttgaactagtaaaatattgattgtatgtagactatgaaaagttatatatgtagactgtaatctttaaaagggccactaaaatattattcactgagataattaaaaacacattaaataaattaaatttaagcattaaaaatatttaaattatccaaaaaagtcaaggaatagaaaacaaaggaatgaaaaatagagaaaacaaataaaatgggagagctaaattcataataattatattaaaagcaaatgatctaaatataccaactaaaacatagagattgttaggatagatggattaaaaaaataaaccaactacatgctatgtacaagaaactcacttcaaaggaaataatataggtaggttaaaggtaaaaggttagaaaatgatacgtcatgaaaacactaatcaaaagtaaatggacatgtttatattaatatctgacaacattccatcgaataacagcacatgaaatattcctttttaagtgcaaatgggaaattcactaagatagattatattctggggaaaaacaaactttaacaagttgaaaagctgaaataataaaagatgatctctgaccacagtagaattaaactagaaataaatctagttgaaagatatcacgtgtatagaaatgctactgatttttatatgttgactatttttatcctgagactttactaaagttgtttatcaagtctaggagtctttttgcagaatctttagggtttcctagatatagaatcatattgttagtggtgataactttttcgttttttggtggggggagggcagtgccttttattactttctcttgcctgattgctctggctaagacttctagtactatgttgaataggagtggtgagaacaaaatcaagaatgtaatctcatttacaatagccacacacacatacaaatacctgagactacatgtaaccaaagagatggaagatttctatgaggagaactataaaacattgcctaaacaaatcagagatgacacaaacaagtggagaagcattccatgcacatgggttggaagaatcaatattgttaaaatgtccatacttgccaaagcaatatacagattcaatactattcttttcaaattaccaatgtcatttttaacagactttgaaaaaagtattctaaaattcatttctcaccaaaaaagagtctgaatagccaaagcaaccctgagcaaaaatgaaaaaataaaaataaagctggaggcatcagattacccaacttcgaactatactacaaagctacagtaaccaaaacagcattgt

SEQ ID NO: 1338 - DNA, 4025 bp, Homo sapiens
tggatttatcttaaagcttcagttgtatcaaggtcaaaagatgactcaatttctttgtttctgaactttttcaccttcttgaaactgatacatagggtcaaaataaaactcctctcaaattccctttggcatattgctttcaaaacacgttaaatgaatgaaaagaaacactgcaagcaaattgtagaggtaaaaaaatagtcattgtgtttttcaagaaaaattccatgggaacaaaaggaaatgcagctgcagtagccagggacagctaccacttgagagcatttgtctagagctgtccacgatgaatcatggagctggggaaataatttcagatgatgtgacacatccctagatctgtattttactcatcactgggtaaacagggttattaagggaaactagatgacaaatcaacctaagctcatgccatgactatttatactttatggaatttactaaaaataattactataagcacctatttactgttaggtgacatatgaagccctttgtcatctgagacccctaagtcccttagaagtcatttttctcccctgcatttttttgatcaatttctttgaaatattgtaaatgaagagttatccagctattggttaaacacctttagtggaggggaacccactttctctgatgacaaaccctcttattgttagacatttcttttatgaaaagtgtttctagaatttgagctagaatttgtttcccaagagttccactaatgttcctggttcaacactctggattgctttccagatattttagtacatcttgccatgtaatgtcttgccaacatttctgacttttttgtttttgagacggagtcttgcactgtcacccgggctggagtgcagtggcgtgatctcagctcactgcaacctctgcctcccaggttcaaggaattctcctgcctcagcctctgagtagcttggattacaggcgcccgtcatcacacccagctaattttttgtatttttagtagagatgggatttcacaatgttggccaggctggtcttgaactcctgaccttgtgatctgcctgccttgacctgccaaagtgctgggattacaggcgtgagccaccgtgcctggccaacatttctttactgtaagttgcatataactacaattattcttcacatggcataatctcagtttgtcttcatattctggtcaccttgtcaggctatgctccattggttaatatctctcttaaagtattatgggcattacaatattaacatttattatttcatgttgctttgtatattttaattaatgtagttgccggaaacccccataagataggtatttttattattcctattttactgatgaaggttgcatagcttcataacttgctcaaaaccggcaagtagaggagccagggtttgaactccagcagcctacattaggagtctacacttttaaacactgtacgattctgtttttctgattatacaacttctggtgtcatctaattacttctgaggatggcaaaactatcacctccttttatttatgtattctgtgatcatgtcaacattcctggctgggagggtcgtctatgatacatacaggaaattgtgagtgaagagtcagattctgaaattccccacctgccttgtgaagaccatgcagaagtaccaggctctatcttgaaaggtgatggtgtcccattaaacatttaaattattttttaaaaatttgaacttcatcacatgcttttaagcaagggagtcagccactcgatcatatttacatatttgaaatgttactgtgaaggtaatgttgaggataaattagagcagatgaaactatgagcagggaattggatggtaatggccatactccaaccaagggtaggggtgaaaagaatgaacaaatacaggcagtatttagaagatatagggtcagggcttgatgactgattagactaaagagagtgaagatgatggagggaggaattaaaaatgatttttaaactctctttggggactgtgtggatggtggcattattaaccagtatgggaaatataataaaataataaaatgagaggtgctttggagcagggattgagtggatgagtggatggagttgttggggaaggcagggagtggttgggaaaggtaaagaaaatgacaaagaagacacttggggaaagtgttgtaggcagttgacacatgctaggactcagaataaaggtccaggttgtagatacagacttcggagtgttaagaatttttaagaaaattctgcagggtgagaagggaaggggtgcttaagatggaaccctggggagaagcatcagttactggatacctctgaaaattataaatgaaagcaggatccattgacttaaaccagtctggaggcaggtaatctccctcgagatacatagagagtgctgcagtttagcttttgttcttgggagccccagaggagaaagtccctgagttgtccttgatgacttcctgtgtcaaaactcaagcaaaatgattctaattttctttattgcttgtcatttgtaaatgaatttgcatttagatagagaataacatgtttgacaagagccatattcattatatcaaaatgtttcccaaatactctagaagggtagctatttggtatgaaatggacatgttttgcatagtatatctgaggataagtgattatcgcttaagaaaaagaactcctattttaagaatctaatatttttagcgtgaaaatccaggaagtttaggtttcagtaaaaagatagttaaaattcgattttatctagaatataagtgttaggtcattcctcctcaatattttctctaaaaaaagttaatctccttttctttgtctttaaaacaatttctctgggtgttttatttactgatgcatttatttacataacatttgttatataacacatagtaggtgtcagatatcacactagatgtgaaggattaattccctgttttcagacagtatcaggaatatggtaaaccttaaaagaaatcaagtgtttaaaaaaaatgtaatttatgatttggcagtgaatattaactggtagactgtagacagtttttaatagcattcttatttttgtatgaatcatatattagttcttggtccagaaagtcaagatgctacaatatgtccttgaactttagatgcatttctggaattaggatattaatatcatgtggcataaagaaagtgaatctgtttctgatagcagatctatacctgcatttgtgtaaagatggttctgggaggcttggtaacctccagaagttgaactcttttgcaacctcacagaagagcttctagtcaaaactaaggtcaaaggaacaaggaaaatactgagatgctaggtagaaggaatgcacaacatttaaaattgcactaagtgttaaaatggtatttaaactgttggtataatttagagctattgttcttactgtctgctcattttggacatatcctaaattacaaagggggaaagaaggatagtgaagtcatttcaagtttaaatggggaacaaggaagtagaagtgtttcttggcaagcctaacgcttttgccttcattacagtccagagcgggggtgccctcagtgtgtgcttttcctggcttctgttacacagatctggccaggaatgtccacaactcttctggaatataaatgagagtagagtgctcaagtccccatgatggttcagagcccatctccatgtaacttcccacacagccactgtcttagattacctaattgcttgacttcaagtattttcttactcacctgctctagatttaatggattccccaaaaccgtgagatggaaacaaggcaatatatggaacaggaacctgggacatagaaagggctctgtagatatgtttcctatcctgtctttcttttctttctttctttcttttttcaccttgtatctttccaaggctcagtccaaagaaaggtgtagacatgaaaggtaggactgtaactggtaggt

SEQ ID NO: 1339 - DNA, 4024 bp, Homo sapiens
aatttatttccaaataattaactggaggaccttaattatgtagattaattatcagccatcatcatcttcattatcaccatgtttattgccaccaagaacaccttaaacagagccacagatactgctcaaagtcagtttaaaatctgagtcatatcttccaagagtttgtgaattaagcagcaaagacgaagatgtggtcaaaaaaaaagcacagacaaattaacttccaacattaaactaaggaatggcagattctattgcttaatggcagattctattgcttgtattttttggccatgcagacttatttaataagcttttgcatccccatcccataaataaagctgaaaaatgatttcttcgtagtcaatattttaattattataaatcccatagttctgaaatcatactttaaaaataaaaaattaaaacagtaatttcagtttcatagaatcttactgatgcagaatactaagctaattgttcacacctttcaaactccacaaatattaccaatacgtcagtcacatgtttattatcttctttgatatgcaatatccaactctattttaacatacttttccccttgtgggcttggctgttcactatcactccaaatatttcaagtttgacaagagcctgggcaggtactggggtacagggagagagcatcagctgggttcaaatcctgattccatcactggctagttgttgggcctttggaagttattgaaaatcactcagttatttaaaaagcctcagtttcctcatctgtgaagccagcataataatatctatcttaagagaacacaattaaaacctacagtacacagtaattgcttcttaaatgttaattcctttgttcataaaaagtagcaaaatatattaaattatttgctgagagtaaatagaaggtgaaagaaatatattacacttcgcttgctctaataaagccttcagaatttcaggacagctggctgttgacagttacaatattcctgtagggcaacaaaactcttggatttggtcctggcatgaaagttgcaggaccaaacctctgtctttctgcactttcaaatatagaatttgaaatgacatatgaaattttatagtgttacagaaaagatcttgctgaaagatgattcaacttgaaagcaaatgaaaaataatttgattaagccttgagaaaaagcagtgaaaacctagagatgatcaagtaaagtaaattttcagttaatctgcttggtgtcatgatgagcactgggacttgttttttaaatgctgacaaggcaacattatttgccttctgggctataattttacttaaatatcatataattattttttccataattaaggtaacaatatgttacaaagcatttggaaagcagagcagtaaaaaccatgctatttcttccagacttttgcctatatatattttttgtggctgcaatcgtagtttgcatgcaaattttcaacttgcttttttcagttaatattgtgtcaaagcattttaaagtgctaagtggtatattacattcagtgatttatttagcacattttctattgtgaattttcaagttgcttcccaatttttgctataatatataattattgtgaagaacaactttgcttttgaaatttttaaaagaatttttatctgtgaggcaattcaggttttagaaggaaaataaaagtatcagctctgaaaacagtattcaggcaaacctccttcaggttcttctccttgtgcccagcaccatttatcaattgtagtttttaatttttattttattattattttttcacaaatttccttcaaccaaatcaatcctgacttctatcagattctgcctgatgcgcaacttgcttacattgcaatatgctggtaaaggcaattatacttaaaatttagcttcacttaacccagataatagtgcaaggtcaatgagaaagaggaagactaaatatttaaaaatgactagagaattttatgaatacatttactccctaaacccaagtgagaggactggattgagttgcacaaaggtcatcttgtctttcattaatgctgcctttgccctttatctttcttcttattccctcatttttcccttcctcccaggctattcttccaaggattttaagggctcaatggatttgtatgtcctcttttcctcctctcatactttctgttttccttccctgccatatgtccagtgcccagaaatgcagttttcatcacttcagaagaagaaactgaattgccagtagttctcagtatttattattttattaattatattatatttttattattttttgttgttaataaaattaattcagttaataaattattattaatacatttggtgctcagtatttattgagcgccatgtgccaggtacagtgctaggtgctggaaattcaacaacatagtctgtttggttaaagaagatgatgggagtggtggttcttattgatatctgaaagcagagctggagttagctaagcaaagagcttgtgacatgggaatttctgacagggaacaacttttgcaaagctatgtgctgaaagcgaacatgtaaagtgcaaggagaaggaaggccaaagtgtctgaaaccctactcctgtactgtagagtctgtccccacattgcaaagcataaggctcagttgcctactactttcctgtcagtatcctctttggagagtcaggttaaatgcttctgaaaagtgcccagaatcccagtgcatttaccttttttcatcatgtctataagatgaagaggtccggccactggtccatataaacatcttagagaatgttggtccagggtctcctttccttatggtggatgtcctggaggaatggcaaaaagacctagaagaggtacacaatgaagttaacagcaacaaatagctctcagtggattgactcttacataacaacagggttttgattccataggggcagtggttttcaatcccggctgcatattaaaattgactgggaatttttaagaaaacactagagcctggtcctctctcagaaatttgcattcaatctttttaaatcttccttagctgattgtaacatactgccgggattgagaattactgccttaggagaacgtggttttctaattgatgttaaaatcacattttcccaaaagtatctccttcaaaatatcactttggtatggtttcatactctgtactatgctgtatttttccaaaattttagttcaaatttggatactaaaactcaacttcttctttcctcttcaatctgtttttttctttaaaatgctgacaagtgtgacatgttggtgatgaaacgtcatctttaactgtgccccacttttgccaatgttgtggcatctgcccatggcagttgagtctctgcctaagaaaattacagcatcagtggcagctgatactcactggcttctggagaagccaggtttataggctctagagtcaagatattttaagaatgttgtgggttattattattattattattattattattattatgacttggctttgggagaagttctttcctctctaagcacagcactaaaagtagttagctattattgttttccacataataataattttcttgagagttaggaacattaaataaaaaagccttaatcatatataaaagttaaaatgatatttaacacattagaacaaaggaaggaagactggtgattccttcatggatgcatagtcattagtggctttcagtttggttaagcacaatattaatgataagcatgagatgggaaataacattagctactatataccatattatctactatatgccacacactttgaatgtattatttatgcacatacgtatttcatgaaatgaacatgcatatatctgtgttatgcttatacaatgaaaactctgcaaggtgggtagtgatattatttccaggttctaaatgatgctttcagaaggttgagatttttgcttacatttagaagaggtagacccatgc

SEQ ID NO: 1340 - DNA, 4053 bp, Homo sapiens
tcacctgtcctcaccctgtatttctacattgtaggcagcttcttgacatgctccagcccctacctctgtatgttttactttgtactttctgcatcccagctccctccccagcccagtttgtaggcacagaaggtgtgagggagaaggaggggagagatggcaaaggagtggagggtcatgtggtccagcttgacagagatggaaggacagtgacagaatgccttaaggtctttctaataagggaaaaaagataactcaaccctttcattatgtcatgagcaatcacttactgcacattcctttcaccctaattggtaatttacatacattaccttcttttgttctctcaacagctgtgcaagttgggtagtaatttctttttaaaagtgagtgaactgagaaatcccatgacatatgcaaggacatatgggcagtaagtgttggaaattgtgatccaatcttgtaattctctaaggcccaggctcattctattgtgttttgctgtctccccacaaacacaatggaaaagaaacccttttatgcagactaatggatgaataagggtgccctgttatctctcacctggaaggattccagctgcccattggtcaactggtcatttaaaaatacctttaattttatgatcaagattaacatttgtaattaggaattaacacaccagcaattgatggtttggttttgggtataagctgatcaccatagcaatgggaaaacatgttttctttgcagattaatacgctttccttttgttggacaggcatccacagcttcctacccctttgcatgtgtgaagttttattccagaagcaggatactagacctgatcccctcccttggtgtggcaaactgtattttcctggaacatgggtggtcacattttgcttatatactgaggaaaaagtctctgatggttctaaccagatgtgaagagctgaaagcattttggaatcaacgaccacttggggcctgaggcatcagcactttcatagaaaatgagcacagctgaaggccatcagagaaacagagcagagcagccacaaatgtgaaagacgatgccttaatttcagcaaattactgtatttcagctagattttgcttctaaaatgaaagtattaatttagatggagaaacaaatgccacaaaatggtttcattttcttttggattgaaacctcaatttttcatttgaaaaggtcttgtttctttaagctgaactgctgtgagacttcattcgatacatcagggctgggcttgcctgtgtttagagtgtccaatttatggacaacagttagctagagatgctggtgggatttactacatggcttactgaggacaggagtacacttgctatcccacaatttatttgcctccctatccattcaatacacctacagcaaatattgaaatgaaaagattcaaaatctgttatttttaaaagttgatgcatagcagtgtttctcagcctagaaggcccattagaacaacctggggagctttaatagatactggtgactgggtcccactccggaccaattaaatctgaccttctgggttgatgatgatgggggctgggtattagcatttttaagagtttctggggaaattggaatatacagttgagaaccactcacgtggaaggtgagggaggggttggttggggtggaaaagggaggagggtggggaacggacagaagtgtgaagtggcaggaacagtgactttggaataagcgagatgtgggcttgaatcttagctctgccacaagcaagagctgtatgacactggggaaatcatatctctcttgagcctcagttttgccgtttttataatgagtatatttatacttaccttatagagtaattgtgataattaaagaagtagaagtctttgacacctggtatccagattatacatagagctatatgtatcattattattagataacattattgaaaagtattatttaccaggaacttctcaaagttcttatcaggaaagaaggtgaggaagatgaccttagggttgcctaagtgatgggggaggatggagcaggagacaaacagcagggtcccacccacccagtggtattacctctgcatgtatgagcgcaggagtgtgattcccagcagaaaatacatcatgatggagcacaccatcatagccagtcccaggagaatagctcggtcctctcctgccttcagtgctgtgactgttttccttttgtccaggaggtcatggtccctgattttctggtaaatatttctgaggttaaaaacaatatggtcttacattaagtttagttaatcagcatgcccctagagagcaggtcagtttctgcccatgccttcctagggccctccaaacctgcttcagtgcagctggacctcagtgtgtgtccactacctcccacacaagcacacacatgcatgtacacacactcacaagcacatgcacgcttgtatgtgtaccagtcctgagcagaaataagccctccttctttactctggggccaatgtcttaactgcaaattaattttccttctatctaattctaaagaaagaaaccaatcccctcaaccctcaaaataatgctttgggtttgttgactttaccatttaacccaaatctgatcattattgatttttagataattttggaatacctaatggagcattgattcaaataaatggcaacatatactaggaatatatcaaattaatctttcatttttcttcagtagtgataggtagaagttattttggttaacatttttctcaagctgagagctgcttagggctttgttggcttgagattgataagcagtgtgaagatgtagagtggtgacccagctattcttatatgtgaaaactttcgattgagttagaaaagtgtcattcaaatcgagcccaggccctataactttggacaattttattagtatttttgttttttattttagagcagcaatgtagggtaagaaagaacaagaaattgaaatcaactgtctcctgagttcagactgatttcactgcttgttagctgtgtgatcaataacaagtgccttagtctttctgatccccagtcgcctgcaaagtgaaaataatgtttaaatgcattttaatggctaagtgacatgatacacgcaaattatttaagagaatgactgacatgagatttggccgggtgtggtggctcatgcctgtaatcccagcactttcggatgccgaggcgggcggatcacaagatcagacgattgagatcatcctggctaacatggtgaaaccccgtctctactaaaaaaaaaaaatacaaaaaattagccgggcgtggtggcgggcgcctgtagtcccagctactcgggaggctgaggcaagagaatggcgtgaacctgggaggcggagcttgcagtgagccaagatcatgccactgcactccagcctgggtgaaagagcgagtctccatctcgaaaaaaaaaagacaatgagtgacaagagattagtaataaatgctcccattcaaaaatggggtggggagctacagctcaatgacacggacatcagaacatcctaaaattgctactattctacagagaatttttaatggacaaaatggcaagaaaatgagtagtgtataaagcttggggatggaggattggatttgaaaccaggtctggaggagaaggtagaaaagaaatgcggaagtgctgggtgcttggggagatgatgagaagcttgagtaggaaggcaatgctcaggaattcctgcaaggcctgtgaccaagaaacagctcatgatttttcaatgtctattttgagaagggagctttggattgcagggcagtggaaatgggaaaatcgctggcctttagagcctagaaacagcaaggaggacaaataaaatgctgaaaatggaaaaagaaactgaagtcatttttttttagcttcaggcaaaaagccaatatgcacaagaataacttcagatttttcattcaaatttttatggctaatcgctcttgttgcttgggagaggaaccagag

SEQ ID NO: 1341 - DNA, 4050 bp, Homo sapiens
atatgtcccactttttgatgcctattcaggtttaagagttttataggcatttgtcattactggtcagctttgattttaagatctgacttaagggaagatcttgaaagacaagcactttgtgagagagctaggctttacatactgcagcacagcgctgggactggtattatttgtggctactacaaatgaaagaaaatcagagccagcattttcaaacaacattctctgaaatatttattatgttgagtcctcagagatatttgcaagaattcctttaagttattgtaacaaaagttcaaggtgggtttatcagaaacaaatcccattcactctctatgtgctagtattgaaccttgaatctactgcatttttttcaataactataagttatatcatttaagtgctgacaatttaatgaaaagaaaagcttttacaagaaagattagaggtcagaagggtttatcctggtaataagagccaagagtggcatcgagttgtcttggcatatgagattattctgcatatcgaattgttaccacaaatccaaaactcaatatatttaacttaaaattgtaatggcaagttggttctgctgacaccttcctggtcatcccagaccttataaatgtaaattttatgtaaagctttaataaaatacacattcgttgaatatctaccatgtggacttgaatatcttagtggactggaaaattcagcctctatgaatataacatatgtgaagaacacacacacacacacacacacacacacacacacacacacacacacacagtgaccatgggttgaaagtagcatgctctgcttaacattgtacatgctcaggactcatcttcataaggaccttgcaaggtggccatttgttactttttagagaaaaggaagctgaggatcagaaaggttgttatatccctgaggtcacagaactaaatgacattgaccatggacaaacagaatacacctttacctgatggttcccaggtacaggacaaacacatggttttgtcttgtacatctctaagttgcatacttgctttgaaagactcagtctatttgtgtaaagatatattaatatttaccctttcaaatggaagtgaaagctaaatctgcactaccacaaatgtaggaatgatttgtccacaacttgcacagaaaataaatattttctaggcaagagtcacatagcaagttctctgaatggaagaggcaggctctgcttcctggaagtattttcctttgaaatgctggcaaaggggaacttcagaggcagagagcctggtgtgaagctctgtggggtaactgaaatgcagtacgccaagttcctaccttctgattgatttttattgtctcttctgtgtggtagaggaggagcttttccccggaagaagtcaggttaacgtacacctggaggcaggggtactgagaaagtttccagcagtctggaccacagctgaaggagcaattaaatgtttccgtgatggacgcattcagcaaggtgcattgagactcttcggtccacacgctgcagagaaaggggtgagagtaaacacaggcccaagagctaatagtgagaaaggtatagtccgagggaattatttctcatctcctgaagctgaaaaatcttttctaaatctctaatatgatctatctgtgtaaagtttaggccttcgaatagaacagctttaagcaaactaccgtataacatagacaaacgtggacacgtgagaacgttttcaatgacttccattggatatggtattctccagtgcttgacttaagttcttttttcccttatggaactcactggtaacatgaggcatactttaaaatcatcacctgtcctcaccctgtatttctacattgtaggcagcttcttgacatgctccagcccctacctctgtatgttttactttgtactttctgcatcccagctccctccccagcccagtttgtaggcacagaaggtgtgagggagaaggaggggagagatggcaaaggagtggagggtcatgtggtccagcttgacagagatggaaggacagtgacagaatgccttaaggtctttctaataagggaaaaaagataactcaaccctttcattatgtcatgagcaatcacttactgcacattcctttcaccctaattggtaatttacatacattaccttcttttgttctctcaacagctgtgcaagttgggtagtaatttctttttaaaagtgagtgaactgagaaatcccatgacatatgcaaggacatatgggcagtaagtgttggaaattgtgatccaatcttgtaattctctaaggcccaggctcattctattgtgttttgctgtctccccacaaacacaatggaaaagaaacccttttatgcagactaatggatgaataagggtgccctgttatctctcacctggaaggattccagctgcccattggtcaactggtcatttaaaaatacctttaattttatgatcaagattaacatttgtaattaggaattaacacaccagcaattgatggtttggttttgggtataagctgatcaccatagcaatgggaaaacatgttttctttgcagattaatacgctttccttttgttggacaggcatccacagcttcctacccctttgcatgtgtgaagttttattccagaagcaggatactagacctgatcccctcccttggtgtggcaaactgtattttcctggaacatgggtggtcacattttgcttatatactgaggaaaaagtctctgatggttctaaccagatgtgaagagctgaaagcattttggaatcaacgaccacttggggcctgaggcatcagcactttcatagaaaatgagcacagctgaaggccatcagagaaacagagcagagcagccacaaatgtgaaagacgatgccttaatttcagcaaattactgtatttcagctagattttgcttctaaaatgaaagtattaatttagatggagaaacaaatgccacaaaatggtttcattttcttttggattgaaacctcaatttttcatttgaaaaggtcttgtttctttaagctgaactgctgtgagacttcattcgatacatcagggctgggcttgcctgtgtttagagtgtccaatttatggacaacagttagctagagatgctggtgggatttactacatggcttactgaggacaggagtacacttgctatcccacaatttatttgcctccctatccattcaatacacctacagcaaatattgaaatgaaaagattcaaaatctgttatttttaaaagttgatgcatagcagtgtttctcagcctagaaggcccattagaacaacctggggagctttaatagatactggtgactgggtcccactccggaccaattaaatctgaccttctgggttgatgatgatgggggctgggtattagcatttttaagagtttctggggaaattggaatatacagttgagaaccactcacgtggaaggtgagggaggggttggttggggtggaaaagggaggagggtggggaacggacagaagtgtgaagtggcaggaacagtgactttggaataagcgagatgtgggcttgaatcttagctctgccacaagcaagagctgtatgacactggggaaatcatatctctcttgagcctcagttttgccgtttttataatgagtatatttatacttaccttatagagtaattgtgataattaaagaagtagaagtctttgacacctggtatccagattatacatagagctatatgtatcattattattagataacattattgaaaagtattatttaccaggaacttctcaaagttcttatcaggaaagaaggtgaggaagatgaccttagggttgcctaagtgatgggggaggatggagcaggagacaaacagcagggtcccacccacccagtggtattacctctgcatgtatgagcgcaggagtgtgattcccagcagaaaatacatcatgatggagcacaccatcatagccagtcccaggagaatagctc

SEQ ID NO: 1342 - DNA, 4024 bp, Homo sapiens
atgtgtactcaatgtttagctaccacttttaagtgagaatatgtggtatttggttttctgttcctgtgttagtttacttagcatgatgacctccagctccatccatggttgctgcaaaggacatgatctcattctttttcatgactgcgtagtattattccatggtgtatatgtaccacattttctttatcctgtccactgttgatgggcatttaggttgattccatatctttgctattgtgagaactgctgccatgaacatacatgtacatgtgtctttgtggcagaacaatttgtattgttcagggtatatacccaatactgggattgctgggatgaatgatagttctgctttgtgttctctgaacacaatggctgaaccagtttactttcccaccaaaagtggataggcgttcctttttctttgcaacctcaccattatctgttattttttgactttaaaaagaatagtaacagaatagataacttctgataaaacagaggaagaaatgagattctaaaaataattcaatgaggaaaagtgtgatctcttcaaaaatggactggagcacgtgggtgtccatatgaaaaaacaaacaaaaaagaaacttgatccatatataaaaattaattccagtcagattttactgtatacatgaaagggaaaacaatagtacacctagaatgacatttaggagaatgactttatgatattagggtggacataagacttaaacagaacagcaaaagcactgaacagaaagaaaaagattgacaaaatctggttacactgaaattagaagtttcttccactgaaagacattcagagagtgaaaaggccacataatgcgagaagatatttacaacacatataaccaacagaggttcatatttaaatgattcctatattgaatgtaaagaagaaacaattccacagaaaaatgggcaaacaacttgcacggacactgcccaaaatggatacccaaatggccaataaataaatgaaaaggcacttgataacattagtcatcagaatcatgaggaaatatcactacattagctaaattaaaattacagatattaccaaatgttggcaaagatttggagcagtaagaactctcatacccatagggttggtgagaatgtatatttgcatatacattttggaaaactacttggcattatctacttaactttaagatatggatactctatgatttaaatattccattcccaggtttatacccgatggaagtgtgtgtgcttgtgcaccagagacatatatgagaatattcatggtagaattacttgtagtagtcccaaactatagacaattcaaaatgtccatcagcagtagaatgaataaataaacagacatactcatacaatggaatatgatacagtaatgaaaatgaatgaactgtaaccaaatggaataaatctaacaaacataacgctatgtgaagaaaaccagacagaaaggaaagtattctatgtgattccatttatataatgcttaaaaatgaggcaaaactattaacaaaatatatatgtttaaggatatatccttaggtgataaaagtacaaaggaaagtaagaaagtaattgccataaacagtcaggatagttgtctttggtggaggcagagcctgtagttattgagagggggcatgtagggtgtttttggggtacagaaaatgttgtatttctttacccttaaggtggttacacggtggttacgaatctgtttgtcatacttgagctgtactttttcatttcatgcacagttctgtatgttataatttactttaaaaaacaagatagtggggccaataaaacaaatgatgacctagtattatgctgagagcaaataaggtaccagtcctgaatacatatctgggacatttattggtagcttccctctccgtttatagcctaaataatgcattcacagggctgtagtgataaattgtcaaaatgaggaaatgaaaatatgtcccactttttgatgcctattcaggtttaagagttttataggcatttgtcattactggtcagctttgattttaagatctgacttaagggaagatcttgaaagacaagcactttgtgagagagctaggctttacatactgcagcacagcgctgggactggtattatttgtggctactacaaatgaaagaaaatcagagccagcattttcaaacaacattctctgaaatatttattatgttgagtcctcagagatatttgcaagaattcctttaagttattgtaacaaaagttcaaggtgggtttatcagaaacaaatcccattcactctctatgtgctagtattgaaccttgaatctactgcatttttttcaataactataagttatatcatttaagtgctgacaatttaatgaaaagaaaagcttttacaagaaagattagaggtcagaagggtttatcctggtaataagagccaagagtggcatcgagttgtcttggcatatgagattattctgcatatcgaattgttaccacaaatccaaaactcaatatatttaacttaaaattgtaatggcaagttggttctgctgacaccttcctggtcatcccagaccttataaatgtaaattttatgtaaagctttaataaaatacacattcgttgaatatctaccatgtggacttgaatatcttagtggactggaaaattcagcctctatgaatataacatatgtgaagaacacacacacacacacacacacacacacacacacacacacacacacacagtgaccatgggttgaaagtagcatgctctgcttaacattgtacatgctcaggactcatcttcataaggaccttgcaaggtggccatttgttactttttagagaaaaggaagctgaggatcagaaaggttgttatatccctgaggtcacagaactaaatgacattgaccatggacaaacagaatacacctttacctgatggttcccaggtacaggacaaacacatggttttgtcttgtacatctctaagttgcatacttgctttgaaagactcagtctatttgtgtaaagatatattaatatttaccctttcaaatggaagtgaaagctaaatctgcactaccacaaatgtaggaatgatttgtccacaacttgcacagaaaataaatattttctaggcaagagtcacatagcaagttctctgaatggaagaggcaggctctgcttcctggaagtattttcctttgaaatgctggcaaaggggaacttcagaggcagagagcctggtgtgaagctctgtggggtaactgaaatgcagtacgccaagttcctaccttctgattgatttttattgtctcttctgtgtggtagaggaggagcttttccccggaagaagtcaggttaacgtacacctggaggcaggggtactgagaaagtttccagcagtctggaccacagctgaaggagcaattaaatgtttccgtgatggacgcattcagcaaggtgcattgagactcttcggtccacacgctgcagagaaaggggtgagagtaaacacaggcccaagagctaatagtgagaaaggtatagtccgagggaattatttctcatctcctgaagctgaaaaatcttttctaaatctctaatatgatctatctgtgtaaagtttaggccttcgaatagaacagctttaagcaaactaccgtataacatagacaaacgtggacacgtgagaacgttttcaatgacttccattggatatggtattctccagtgcttgacttaagttcttttttcccttatggaactcactggtaacatgaggcatactttaaaatcatcacctgtcctcaccctgtatttctacattgtaggcagcttcttgacatgctccagcccctacctctgtatgttttactttgtactttctgcatcccagctccctccccagcccagtttgtaggcacagaaggtgtgagggagaaggaggggagagatggcaaaggagtggagggtcatgtgg

SEQ ID NO: 1343 - DNA, 4045 bp, Homo sapiens
gaccatgcaggatactataaaatcatgtatgggtaagagatccattaaaaggcaagaaagacaaattgattttaatgtaactgagtatgaaaagtttattgatacagttttagattacattttgcaacttaagaaacttatcttgtcaggttttagaatagtaccaaagaaaaatatcacaattatctgaaaagtctattataatactccttctttttctacctacctatctttgtgaggccagattttctttttatactttaattaaaacattgcattagattgcatacaaaagcatatatgagaatccagctgggtactatgaagccagacatttaaaaatttttttaaatgtgaaagaatttcactcttctcactaaattttttaaatgcattttttgtttcatgaaatatgttacttatattaacatgtcatagtttgttgcttttaaatgaattagtaaatatttaaaatttttattttccctatttcaatttctaatatcattagatgtaattcacataactaaaagctctttggagtcctcagtaatttctacaagtgtaaaggagtcctgagaccaaaattgagaacttctgccctacagttttatttcgatgtcaattaaacatctttaaattaacacatatttttaaaatcataaatgtttgtaaaattttaattgccacaataattttcttaattcttttctgataaaaatacagtgctttctcagttgaaggttataataaatgatgacaggtaattttgaggattattccaggagtatgtttatcacaccataaaaaagaaaattaaaattggggaaaggcagtaaaggtcatgcatgacaaatttactaataaaatactcatgttttagcctgttaaaacatttgctattttaaaattccatcatttaattgtaaacgtgttactcctctttcagaatgttaccttatggttgtctgtcaatcggtgactgtgtgggacttattgaggtggtgcgaaattctcacactattatgcaaattcagtgcaaaggcggcttgaaaggtgcactgcagttcaacagccacacactacatcagtggctcaaagacaagaacaaaggagaaatgtgagttgtattattctttcttcctatgttaatctaagtttttgttagatgagtctgtcggtgtttgtgtattcctctgagttagaacagagaaaacaattgtactttctatggaaaaaaatatgctcaacctttgaaatatttgatgttaatggatttaaatgattataattacttttaatttggtaaaatcttaaacattcatcttatgtattatctaaaatgtattgttattgcttattctttttaaaacaaatgaatattgcacattcaaaattttatttctaattcattgttaaaatgattagaaaaaaataattttaatgacatgctaagtattttttcacatgaagaattatgctttggtcagggaacatctggaaatttccttagaaacccatgaaaacttcacaatctcaaaatctttggacataatttccttattcgttgtcagtgattgttttcattgtttaaatggaaacttgcaccctgttttcttttctcaagttggcctgaatcactatatttccatactactcatgaggtgtttattctttgtagatatgatgcagccattgacctgtttacacgttcatgtgctggatactgtgtagctaccttcattttgggaattggagatcgtcacaatagtaacatcatggtgaaagacgatggacaagtaatggttttctctgtttaaaatgttttggtgttcttaatttattcaagacattttgtatctgcatatatcaaactataacataatttcttatttttgaaagctgtttcatatagattttggacactttttggatcacaagaagaaaaaatttggttataaacgagaacgtgtgccatttgttttgacacaggatttcttaatagtgattagtaaaggagcccaagaatgcacaaagacaagagaatttgagaggtgagctcgagcaattaaaaacacaaaataaagagttctggctgctctattagaaacaatcaatatttttcaagcaatttcaaaataataaatgttggctgggtgtggtggttcatgcctgtaatcccaactctttgggaggccgaggctggaggatcacttgagctcaggaattgaaaccagcctgggtaacatagagagaattcatgtctacaaaaaaatttaaaaagtagccaggcgtggtggcatgcactgtagtcccagctactcaggaggctgagatgggaggatcacttgagcccaggaggttgaggttgcagtgagccattatcacgccactgtactccaacctgggcaacagagtgagaccctgtatcaaaataaataaaatgaaataatagaagttcttttaccacttcagcaaaaactattttttgtttgttttttattctatcttatttcaatagcttttggggtacacgtggtttttgattacatggatgaattaaatagtggtaaagtctgagattttagcgcacctgtaacccaagtagtgtgctttgcccccagtatatacttttttatccctcactgttcttcccaccgtctcccatctgagtctctgtagtccattatatcactctgtatgcctttgtgtacctatagcttagctcccacttacaagtgagaacatactgtattttcaggttttccattcctggcctccagctccatcccagttgctgcaaaagacattatttcattcttttctgtggtggagtagtattctgtggtgtatatgtacactttctttatccactcattggtcagtgggtacttaacgttggtttcatatctttgcaattgtgaattgtgctgcagtaaacatacgatatgcatgcagatgcctttttgatataatgacttcttttcctctgggtagagggattcctggaccaaatggtagatctacttttagttctttaagaaatctccatactgttttccatagaggctgtactaatttacattcccaccaggagtgtataagcattctcatttcaccacatccatgtcaacatctgttgttttttgactttttaattatggccattcttgcaggagtaaggtggtatctcattgtggttttaatttgcatttccctgatgattaatgatgttgagcattttttcatgtttgttgaccatttatatatcttcttttgagaattgtctattcatgtccttagcccacttttttttttttttttttttttttttttgagatggagtctcactcttgttgcccaggctggagtacaatggcatgatctcagctcaccgcaacctccacctcctgggttcaaagcaattctcctgcctcagcctcccaagtagctgggactacaggcacatgccaccacacacggctaatttttgaatttttagtagagacggggtttcaccatgttggtcaggctggtcttgaattcctgacctcaggtgatccacccgcctcagcctccctaagtgctgggattacaggcttgagccactgcatcctgctttaacccactttttgatgggattctttgtttcttgctgatttgagttccttatagattctggatattagtcctttgtcagatgcatagtttgggaatattttctcccattctacgggttgtctgttaactttgatgattctttcttttgttatgcagaggctttttagtttaattaggtcccatttattttgtttgtttttgtcgcatttgcttttggggtcttagtcatttattatttgcctaggccagtgtttaaaagagtttttcctaagttatcttctagaatttttatggtttcaggtcttagatttaagtcttcgatccatcttgagttgatttttgtataaggtgagagacagggatccagtttcattcttttacatgtggctagctagttttcccaccaccatttattaaacagaat

SEQ ID NO: 1344 - DNA, 4046 bp, Homo sapiens
aaaagagtttttcctaagttatcttctagaatttttatggtttcaggtcttagatttaagtcttcgatccatcttgagttgatttttgtataaggtgagagacagggatccagtttcattcttttacatgtggctagctagttttcccaccaccatttattaaacagaatgtcctttctccaatttatgtttttatatgtctaagatcagttcgttgtaagtttttggctttatttctaggttctccattctgttccattggtctgtgtgtctgcttttgtgtgtatctgctgttttggtaattatagtttcctggtataatttgaagtccagtaatgtgatgcctccagatttgttctttttgcttagtcttgctttggctattcagactctttttggtcggttttatatgaattttaggatttttttttctaattctgtgaaaaatgatggtgacagtgttttgtagttttccttgaaaagatctttcacccccttggttaagtacattcctaggtatttttttgaagctaaaagggcttgtgttcttaatttgattctcagcttggttgttgttggtgtatagcaatgctgctgatttgtgtacactgattttgtaacctgagactttactgaattcatttatcaaatctaggagtctttttttttatcttttttaagacagagtcttgctctgtcccccaggctagagcgtagtggtgcgatctcagctcactgcaacctccacctcctgggtttaagcaattctcctgcctcagctttccaagtagctgggattacaggcatgcaccaccatgctcagctaatttttatattttttagtagagatggggtttcactttgttggccaggctggtcttgaactcccaatctcgggtgatcctcctgcctcggcttcccaaagtgctgggattatagaaatgagccaccacacctggctgaaatctaggaattttttggagaactcttgggttttctaggtatatgattatgtcattggtaaacagctatagtttgacttcctcttttccaatttggatgccaatgtgggcttccttgtcttgttctagttctcagggggagtgctttcagcttttccccattcagtatgatattggccgtgggtttgtcacatgacttttattattttgaggtaagtcccttctatgcctagtttgttgagtgaaaaactattttaattttttttttttgtatttatttgtgtgatgctgtgaaggaaaatggaaagggaatacaatttaatttgttgagctaattaaggcctaaaaagaaagtaatccttaaacttcataacacattaaaggtttttatttactgagctttaaatagttggactccacctctatattgacaaataatgtatagtgcttaatacgacattttttggtcatacactttgaggaaagtcagtcaaccataatcaccttgtttattcataacttttttaccaccttatggtatctcattagactatatcagactttaaagtactttttacaatcttctataaaattctgctttgtctacaacacagtcctgactctagcttaagcacaaaaggatttagtatgaaccaattcatacatttaatacttattaaactcctgacatgccaggcattgttgtaggtgctggtaataaagcagtttttaaaaagtccttattctcttgaagtttacattctagtggggtaaagggaatcaaaagatgttggtaagagaagtgagagaggaatgctatttttttatagctttgtctacgaaagcctctctaattttgtgacatttgagcaaagacctgaaggtattaacatcatttgctccaaactgaccaaactgttcttattacttataggtttcaggagatgtgttacaaggcttatctagctattcgacagcatgccaatctcttcataaatcttttctcaatgatgcttggctctggaatgccagaactacaatcttttgatgacattgcatacattcgaaagaccctagccttagataaaactgagcaagaggctttggagtatttcatgaaacaaatgaatgatgcacatcatggtggctggacaacaaaaatggattggatcttccacacaattaaacagcatgcattgaactgaaaagataactgagaaaatgaaagctcactctggattccacactgcactgttaataactctcagcaggcaaagaccgattgcataggaattgcacaatccatgaacagcattagaatttacagcaagaacagaaataaaatactatataatttaaataatgtaaacgcaaacagggtttgatagcacttaaactagttcatttcaaaattaagctttagaataatgcgcaatttcatgttatgccttaagtccaaaaaggtaaactttgaagattgtttgtatctttttttaaaaaacaaaacaaaacaaaaatccccaaaatatatagaaatgatggagaaggaaaaagtgatggttttttttgtcttgcaaatgttctatgttttgaaatgtggacacaacaaaggctgttattgcattaggtgtaagtaaactggagtttatgttaaattacattgattggaaaagaatgaaaatttcttatttttccattgctgttcaatttatagtttgaagtgggtttttgactgcttgtttaatgaagaaaaatgcttggggtggaagggactcttgagatttcaccagagactttttctttttaataaatcaaaccttttgatgatttgaggttttatctgcagttttggaagcagtcacaaatgagacctgttataaggtggtatttttttttttcttctggacagtatttaaaggatcttattcttatttcccagggaaattctgggctcccacaaagtaaaaaaaaaaaaaaatcatagaaaaagaatgagcaggaatagttcttattccagaattgtacagtattcaccttaagttgattttttttctccttctgcaattgaactgaatacatttttcatgcatgttttccagaaaatagaagtattaatgttattaaaaagattattttttttattaaaggctatttatattatagaaactatcattaatatatattctttatttacatgatctgtcccatagtcatgcattgttttgcaccccaaattttttattgttcatagcagcatggtcagctttcttcttgatctatagatgaggctcaggcactatcccatttataccaataaccagtgtataactacttaaggaaaacataaaaacttcatcttctttccttttatttcttatgtgaatctcccgtcttccattctcttttataattgagaatgtctcaatcatatgaaattagttaccagaattaacacaatttagactatcttcctgattccttaaacccctttactgaagtatactcatgaataatactttaaaatatgggggaatagaaaccatgaactttttacctttttaaactatttatccatatctccaaagtagaacattaaaccattttaagatatgtctcattcccaagtagtcagagctcactctccaactttattaaatactatttgagcacaggacacattcttaaacattttgaaaaacattaacccaagatgtagaggctactgctagtcgtcattctagaatctgatattttactctgtatttgaaatgaatgattaatgtcctaggaaattagctttagcagatgtccaggtgccacatcaaaaaagtgcaataattattgacagttttttagattaggcatattattggaaaacaactttataaagagtgaacattgtatactctagtaaaacagcatcactttaaaaatattcatttatgaaatctgttacctatagttgaagtcttgagtagtgaacaagggactctaataccaatactcttaatatctggctattttagatcccttaaagggcataattattggaaatttaggtatttcactaaagcatgtatataa

SEQ ID NO: 1345 - DNA, 4021 bp, Homo sapiens
aaaactccatctcaaaaaggaaaaaaaaaaaaaactataataaatatgttagctccatgttttcttaagttttctaccagatttttgtctttgtatagtgaacaaactgttaagaacttttttatgagaaatattttagtatgactatattgcatagagttaggctgatggttcagtgttcagtagattagataccctcattgtttatttccatattgactggttctagctagagctgaaattaggcaaagaatatcttgaactcattttgctatacaggaaaaaaaacagtgcttccttagctcatttggaaagagattgggattagaaaagatggtgaatttgtatgtatttatagaaataaatagaatacaaaatgaggcttttaaattttttcccacatgaaaatatgatactttaattattaccttttacattattagtttgcagacaggcataattaggtcctcagttgcagaaatcacagacatctgaaggccagcactttaatttggccaccgtcttaagatttctctgctcttcctttgctcctcctcataatgcacagtttgaactgatgctgttctatataaggtacttttccacctacctcatctctgactacagtgctatatttttcacacagtaaggacaggtgttgtgttaatctcaccatgccaacaatcagggcaccacctagcagagtcagtgaaggccaaaataaacagtggaagatagccatttggtcatacttttttataagaatgacatcttcagattggctggctggactgtagaagcatgaaaagggggttccatttttgtgatcgaagaattcttttatgtccagagcactgttgagcaaatcatttctatcttggtggcacttaggtgtgtaaaagcactaggaatatggaagagggaaaaagataaaggcactgtcaccaataccaaatacttaacagtttttaattatgaaatagcttcaggctgaagttattagtgggcagtttcaatcttagaaggtggtaaaatattacatagctcatgggaaagggttgattggagggccacagtgaaatggccatttccagtcattaagcaaggatgtggaagagaattcttagttatatgacattgcaggagagtcagtgaccaacttcataaggaatatgactcctccctacatgcaggttcttggactcttggacagtatgaatccgtttgtccattgaacaaaaatgtattgggcctcactatgagctttcaacgcttagtaatgcctctgttgtctctgtcttgatctcctgtagcaaaatatcaccctgaagaaaagcacgttgaggcttttgctctagactcacagagagggagccccacctggactttggttcctgggagacagaaccagtggagaagggagctctgtcagctggtgacttttttcaaaaaagcttgaggtttattaccatatccattaggtacttgaggtactgtgctaaaggccaaaaactgtttgaaatcttaaaaatcattgcatcccaaacagaaaacaaaagtcatcggattgaaattgatgcttaaagacaataaaatgtaacatgtcaactaatctaacacaactcaacttttatagttaggtataaatataaattttaaatcatatgaaagactatttcagggatcatttctataattcgttaaatcatatgaacccattgtgtaacttactaaaataaaaataatctttacatttatttgataagaaaaattacttgattcaagggagactgtgagtacactgtagcatatgtcatatggcgcggagtggaatctccaaaagaaagactccccacaaatgactactcattggctcagcctataaattccagacaccaagttgtgaaattggaataatttctctcctttctatataccccatttctccaccaagaagaaagcttcatttatcctgatttgatcactataaaaatgttcactccaaaaaaatagatttatccctaaagacagccctgggttatttatgtaccctgctagggacagtctggcagggaagggttgctgtcataagaactctttaaactttacaataccttgggatttatctggacagcctcttcattataatgtaggagagctttctgacctggatggctgaggttcacaaacacctgaagacacgggtacttcccctgaccgtggcagtgcacaccacaggtgaaggcacagtccagccagtcgtccatgatatctgtgtggatggcagtgcaggtcgattcttctctctgaatgcttcaatttgaaaaaaaaaaaatgttcttcacttattagaaaatttcattctacattttggtgtggttatgagcttatgtacacaatgcccaaggcatttgtgtacaaggcatttgtgtattttgaggtggtgcaggatccttacagcaggcacataataaacagggagcatggaagacacagagttggggtaaagagccacaaagtgccaagttccacctcacttctgatgaccctactggcatatttctcactacaccagtggttttcaaacttcagaatcatctgtgagtttgttagaatgaagaatttgttaaactgtggattccagggcttcattccagaaattctgatttggtaggtctgacttgaggcccaggaatctttaatagtatttaagatgcaggtatttggagaaccacagtgtaaacagtgttagcattaccataatgctgtaaccaccaagattcaccctcactcaggaatctcatcacctctcatgctcatcatctcaagatgcactggcttgtcctgatgaaaatgtgcctttggaaggagtctaactacagggccgttggtcaacatagcctacacaatttctggcaacaaggtacaattccacatacccactacttccaaagaggcaagtgcaaatcatacatggaatctctcagtagaatacttaccatatttttgctatcaattaagttcctagaggtcaagagctatatccaattcatccgtatgttcctcaaagcatgaaacagaatgcttctcactgagtagatgtttaataagtgctgtactgaattaatttttttggggggggggatggagtttcgctcttgttgcccaggctggagtggtgcaatctcggctcactgcaacctccgccttctggtttcaagcgattcgcctgcctcagcctcctgagtagctgggattacaggtgcgcaccatcacgcccagctaattttttgtatttttagtagagatggggtttcaccgcattggcctggctggccttgaactcctgacctcgtcatcctcccaccttggcctcccaaagtgctgggattacaggcgtgagccacggctcctggtctgaattaaattttacttggaaaatttcttgagaattttcacatgtaatacatatgcaaaacatcccagaagggacagacaaaattcctgccatgaagaccttgtggtgatgttgaagagaaaggacatgtgtatatgtatgaaataatttgaaaacaagtccaagacaaagtaaacgaggggaagaggaaacgctttgattgaatatatgagaccagctcttcatataccctcacactcacatataggtggactcctgtgtttacttaccggttccttaaacataataagttagattagcaagctctaaagtcagaatgtttgaaaagcagggccaggcgcagtggctcatgcctataatcccagcactttgggaggccgaggcgggcagatcacttgaggccaggagtttgagaccagcctggccaacatggcgaaaccacgtcttcactgaaaatacaaaaattagctgggcatggtggccggcacctgtaatcccagctatataggaggctgaggcaggagaattgcttaaacccgggaggcagaagttgcagtgagccaagattgtgccactgcactccagccagggcaacagaggccg

SEQ ID NO: 1346 - DNA, 4039 bp, Homo sapiens
ttggttgattttggtggtgtagatggtaggaatgatgagcaaatacagttcaattgacagtttctagagagcatgcataatgtctattattttcattttatttcctgttgtgttgatttgctgttgactagcaggtgaggagtgtgggtgacggggcagctagtatttttcttgactcggctattaaagtatgctcccagaaccaactaagtaatatgaaaacagaggctcaggcaaaaacatgagatgaagatcagagctggagctatgcaaaaataagaagtaacttcaacttagttggtgactgaatttaactataagacataaaaggacaagcaaatagttttagatcattggggggaagataaaattaaataaagggattatatatgttgtatacttatatcaaaatatctcatataccccgtaaatatgtatacctactctgtatccacaaaaattaaaaataactttaaaaaattaaataaagaaccatgcctacagctctataaaaataatgaaccattagaataagagtccaagattttataaataaatagaacttaaatatctgtccctttttttaggacaaaaaggacagcgtcctctaaattattcaactatttagaaaagaaaagattaaaaataatgtcaaattgtcattgatattctgatttttacctctattagagttctacctgttagacaaccaaagaaatgtatttgacagcactttgcaaaatacataaaaatgtacaatttgtcactgaagcattatcatttacatcgttataaagatgccaactatgtttaaaagtatttaccatgctttgaaagctctttctccaaatttttggagactggcacacttgagtctctgtttggcagacgaagccttcccttcatcccgaagttcatcgagctacaaaaaggaataatttgatgaaaattagaagaaaaattctacatgaaacacccctccataagctcagatgagactgtgccaaattaaattttgaaggcataatttatgcctaaattcccaagtactccctttagcgaataatgattttgctctctaagaaaaggaaagatcattcgatcattctggtcacagcggaattccctatgtagttagaaaccaactggaaacattgccaggaaaaagagccttaaaagtgggagaaaagtcagagaaagagtacgctaatatcccaggggctgcaattttgctaatttttaaattttgtgtataattcatttcagtctctcctccaccaacatcagtaaactcctcagaaaagaaaataaagcattccataatatatatttatggaatgaatgcatgaactcaggcatctagatgcagtaaaattctctactttgaattccctccctactaaaaattatcatgaaaagataaacaagaactgtggccccttgctgtgcaatttgacaaacaagtttcagtatttcactatagtgatcaccaccataaaaagtggtgaaatctttaaacacatgcacagtgattacctctgacagatcatcattggcaaatcttaaaagaagaaacgagagtgtaggccttcaaagatgaaagattttcaagacagataaaaggaaggcttttttgaccatgtcggaaagtttgtatcagacactcaggttccctaaatctagccacaaaatggacaaaatcaggttggataatgaactctttttttctattcttttgcataatacctttggcaacaggcaggcagctttatcagcagcttggcaacattctgtaaaagcagctttataccttttagcaaagaaaaggagttccggggcataaaagtaaggatgtcttctggcaatttcatataagtatctaaattttgaaaaagaaaaacagtcacttttctatagcagacaatattacagaaataattgtaatcgacattctccccagaacctccaaattccaaagatatctaattaaccaattaagctcaatttgcacatgatggtcttgtctctgtcattctttaagtatgtggaaaaaagggttaagtgtgtgtgtgtgtgtgtgtgtgtgcataaatggttaaattttggcaatataatgttgctgactaaaacgaaatcaattataacaaccatatatacatatcttcgtaatacattaaataatttgtctatcttaaatttttcagaaagattgtatcctgtttcaataaacttcaaaatatctttgatcatattttttgctgtgtagaattttgtggtatcaaatactacttctttaaaaaatcatcataacaaaacttccaagtcttaatgttgaaaatatttttgttatggtaatttttatagagtgttggcctatggagttactccatgctttttaattttgaactataaacatctgattacttactttttcaaaaatgtctcttcattgtcatgaaaagcagtgcacatcacatcaacctctggtctcaccaatcgggggaggtttgggttgtcatctttgtgttgcaagaagcattcatttctctcaggttcttgttttgcacagcagtcagccatttcaccataggtttcacgaagagttgcaactgtgcataatttgtctccaaaaagggtatgctaaatggaagaaagcaggtttcagttgctggacagtaccttttttctttatagccaaagaacagtacaaaggatttaatatactggttaagcttggtcaggaaatcatttaaaaatccgcttcccctcccaatcgaggtttacagtttctgatgatttaaccatctctatataattttcataagaattaactgtcacactataactcatggtgaataaaacaggacaaaaagacagtcaatagctttaaggaaagttatatgactcctattttgaaacttaaaactaaagggtaagagcaatcattataacagaaatcaagagaaaataagcttctaagcagcaggtgaattcacctaggggagaaaaacattcagagagtttctcatttcatttgccccctttttagagggccatgttttagtatatgccattgaaaactgaggagtaacacaatccatcatatattaagtgactattaagatatagacatttttcttccagaaatgttacctaaaatcactttccaataaatgagtcctttccttatctctaatttttattatgaaagtaactgtaaccccagggaaaatatactactctagacagaatttattaatttttatgtatttttaagatttcatatgtagagccatagtattgtgtaaagttaaagtcctgactctgctgtgagggagaggtacataataaaaaggggaaaggctccagtgataaaaactggccttgcccacaagaggtatatatagattgagtggtgagagaaagataaacctgtccttgttttgaagattgatctggaaatactaaaagtttaaagttcttcaacatgactaagtactctgcttttttattgtatgtagaaatacaaagatatctaaaatgaggaatatatagctgtactattattccacccaggtaacaaaattagcatagaaatcagtgggtgttttctgatgataaaaaccatgatatcatctctaagagatagtagctctcctgtgttcattgcaacactattcatgatagtcaagatgtagaaaaccaacctaaatgtctatcaatcaacaaattaatggataaagaaaatgtggtacacacatgcactggaatattattcagccttgaaaagaaggaaattctgcaataggcaacaacatggttggactttgaatgcactatgctaagggaaataagtcagtcataaaaagataaacagtacataataccacttatataaggtagctaaagtagtcaaactcatagaatcaaagagtataatgctggttgccagtggctgggggaggacgaaacgaggggttactaatcaatgggcacaaagttttaatacagcaagatgagtaagctatacaacagtgta

SEQ ID NO: 1347 - DNA, 4045 bp, Homo sapiens
tagagattgctctattcagatctttctattctaactagtctaaattttgttaatcattctaaggctactttttctttcatgtttaagattccagaattgaaaccatctcaagaaaagatctaaattgcactgtatatcattttacattcttgcattatttttctttctcattattggaatcatcagtcaaagaactacatttttttccaacaataaacctaccactttggcatagcattcatgaggatctgcagcggcacagcacttctctagagtggtttcatatgtcttggcaagtctcagcagcagcacgacagagtaatcaggatgccttcttgcatattcatacaaaaacctaattaagatgaaaataaaatagactttgttggacaaatgagcacaaaaaatatcacaaagctaatctcaaaagtaactcatattccaaaagtcttaatttgactaaaccccatgcagtaaagcttagtagctaaggacttggggtccagagttaaagttaccaaggctcaattcctagctctgctacttatatcactgcatcaccttaggcaacttatttaaatgatcagagccttagtctccttctcggtagaatggaaataataatagtatctgtcggctgggcacagtggctcatgcctgtaatcccagcactttaggaggctgaggcaggcatatcaccagaggtcaggagtttgagaccagtctgaccaacatggtgaaaccccatctctactaaaaatacaaaattagccaggcatggtggtgcatgcctgtaatcccaggaggctgaggcaggagaatcgcttgaacctgggaggcggaggttgtggtgagccgagatggcaccattgcactccagcctgggcaacaagagtaaaactctgtctcaaaaaataaatagtatctgtctcggaaggtggattatgagaactatatgacataatctacacaaagcacacactgcttggcacatatgaagtctttgatgaatgatacttgttatttttattaacattttgtttgatttaaactacatctcaaaaggattctgataaatagatgggcagagatatgttcttaaaatattctctttcttctctgtatgagtgaaatcttgtagggtacataattttaggaaatattatttagtgcattatcataatccaacaacaaaaatgcagtttatcaccacaacttctgacaatatgtaaacatttattttgtaattgagttgcctaccatattgccattatactgaacttctggtcttttcaccaaatataaagcacctggtgtcagactctatatttctttttatacttctttgctatcattgcatagattagatagatagactagattagattagattagttagatagacaggcaatacatagtcacacacatatattatagatgttcaagaaatacacttggaatgaatgactgaagtatacataatttatatatacacaaaatgtttctagacgtattttcagaaatacccctaaggagtaaggaatgttgagctttgccatgaacatgtattattttatgacaatgtattcaactaattaactatttcaaaaattgttaaagcctgggaaagggaaggatgaagaaacattctgggcagcagggaaattgtagcaactccacagaaaagcctaggctatcctcctaagttgtgaggtcatgccaaagctataaaagaataatttcttatctacttacatgcccaggaagacatcctttgcctcagcatagtttttgcaaacatccttactttcaacaaaatcagcagctaatgaaggcaagtcagcaggcatctcatcattttccacttcggcaatgcagtgggatttttccaacagaggtttttcacagcattccttcagtttactggagatcgaatcttgattttcacagatatacttggcaaggtccgcctataagtaagttggtggaaattgttcaacacgaattgacattgctacactttctcctcagacctttattaagttggcagaacatattcattgtattctaagaccatacacatattccttctatgaacatactctgtttgctcctaaacctggagatgtagataggactacaaaaacattcccacttaattaaaatagactaatcagtagcaggtgctcagctcagttatttattaattttatgtttctactgttagggcatttaagtttttttcattaaaactcaatgctgtttttccaaataatcccccaaaattaagtgcaggccttttgaaaccaaataactaaataaaatatagaagatttttgaaaaatgagtcaagatcatagtcataggccctgcttacatatataaaataaccgccttaaattttccagaaagtgccatgagagattaggattctagtatttgcccataagtttaatcttgaagaaagggagaaagaaaatattataagttttgagaaaagagatatcattccaaatatttgcacatctaacaaacagagttaattaagggaaggaatatagagaagaaaaatacatcatttccaaaaatctcttcaagtagtgaccttctccaagtccacctacctccctcaaaaaatcttcttaggctgggcaaggtggctcatgcctgtaatcccagcactttgggaggccaaggcgggtggatcacctgaggtcaggagttcgagaccagtctggacaatatggtgaaaccccgcctctactaaaaatacaaaattagccaggtgtggtggcgcatgcctgtaatcccagctacttgggaggctgaggcatgagaatcacttgaacccaggaggcagaggttgcgctgagccaagatcacaccattgcaccccagcctgggaaacaagagcgaaactctgtcttaaaaaaagaaaaaaaaatcttcttagacatctaccttgcaagatgttctgccaagtaaaaccttgtaactgttctacttcagtttaagccttcatttacagttagagcatgactgaaaggagttacaaatcagtgaatgggtttatctggtaatttatagccaggttaaaaacagaaaggtaccaccaccataggcagggaaagattgaagataggacagacgaaagcacagaagacaatctcaacccactgtcagctatcaccaatgataccaaacgcatccattctaccaacttgagcatgcaagctaccaaaaagcatatcgacgactctttaccctgtcatcagcacattcaagcagatctccatggcagcattccgtgtggactttggtaagatctgtcactaacttggaaacttctgcaaactcagctttgggaaatctctggctcaggcgagctactgccctaaaaagaaaatcgccaatcaaaatggtattatcatgcgatattttatatgaaaacactaggcaaatactatttctcataagaaaattcaaaatggacatacagaaataatttttaaaattcattagttctagttctgaaccaaatggtaatcacttatccttagggcagaattatccatttaagagtgtgtgtggtaggtagaaatctagcaagtcataaaagcagaaattaaaaaggaactctaaaaggggcaacaggctgagaagcatcaggtttggagtccagatgtgacttccagctctggctttatcacttgttagcagtaggacttgttagcagagggctcagcctctctgagcttcagcctctgcagtgtcatgacaacatgctaaattgaagaagttttgaggattaaattagataatacatacaaaagcattttataatctgggaagtactacacaaactccagttatcttttttctcaattgaaacacattttttctgacttctaaaggtctcttagaaaagaaatcataacttctacagaatgagggagtttttattgatcttacttataaaaagaaagatccagcactatcttcaaactctatgacaagatgtaaacgtctaattttcttcattctc

SEQ ID NO: 1348 - DNA, 4042 bp, Homo sapiens
ctgggcaacatggtgaaactccccgctacaaaaaaaaaaagcccggtgtggcacacactgttgtcccagctactcagtagatgcaggtgggaggatcctttggacagatccgcccacgaggcgaaatttacagtgagctgagattgtgccactgaattccagcccacgcaacagagccagaccctgtctcaagaaaacaaaatcatccttcaagtaggacacagtaggaactttggcctggggcgtcagtgtatgtcgctactaactgcacagaacaatgtgcagggaaagactactgttcccttcctaagagctgtaaggagccaggagatcacaggcctgagggtattaataacagaagctggtaccccccacttcatttttggctgtcacacgactggcatgcccaactgatatttagtaggcggaaaccaaaaatgctgaacatcctacaatgcaggagatggtacacacaaaatgctaatagcaatgacctcaagaatggaggaaaggacaattcatctcttgtcagttttacctgcaccaggcagtgtaggacagagattcacaaatgaaacaggacattcatatcaaggtgacagagatattcagggagagatttttaagtcacaaggtgcctcttgcagcctcccttaacaaacttaactgccaaaagtgaccagaccagccgctgcacatccactgggcacagcacgtgctttttggggccaatgcttcaaaataaacccaagcattagctagaggggggcacttaccaatccgcccgatcttcatacccgagcgggcaagggctctgagggccgactgggccccaggtccaggggtcttggtcctagaaaatgaaggtttaagttaagaagagcctttggccaagtcaatggaagatctcctttctaagatcccaacaccccgctagttcagaggtctgcaaactttctgtaaagagccagacagggctgtacacagtggttcacacccataatctcagcaccttgggaggctaaggcagggcggactgcttcagctcaggagttcaagaccagcctgagcaacatggtgaaaccccatctctacaaaaatacacaatttagccaggcgtggtggcactactactagcagtcccagctactcgggaggctgaggtgggaggactgctagagcctgaaagccagagactgcagtaagctgagatagcgccactgcactccagcctgggtgagagtgagaccctgtctcaaaaaagaggaaaaaaaaaaaagccagacagtaaatattttaggctgagggggccactatggtttgttgttatgttctgaccactgtctggcttgttcacgcaacagtcatctatttcagctttcatgcccccatcactcaaatccaggtccttcccctctcctacaggactccacctcttcccctctgactgcacctcatgccactctttccttcacaggtgcccaggttcacccccacctcaagacctttccctgcagttgtctctagctggaataccctcctcctgtccttatttcactggaaggactccggacttatcatttagaccctagtttaaattacactttatcaccaactccttacttgtgcttcctggcatttgtcacaaatgaaaaccacatactccctggtgctctgttgtttaaagtctgactctcccaccagcctcggtcccacacaaggagggtagagaccatgtctgtttccccatcactctcttctagtacctgaaacacagctcctagtatacagtgggtgctcaacactgagctgctggggggtgtacacaggagccaattattaagtatgtatatgcctaaaatatcttgttcaaggtcacaacaaaaaacccaaacctcaaatccaggtgctccagcacccaagcccagcaggttttctaccacccagccatcccctctgcgactcgtacctatttcctcctgtggcccggagtttgatgtgtagggcggtgatacccagctccttgcacctctgggccacatcctgggcagccaacatagcagcatatggtgaggattcatctcggtctgcctttaccttcatcccaccagtcacacggcagatggtttccctggggacaaaagcacagggtcatttcttcctcgtccaacaaggagtgcttacgatatcctaatgagtgaagagcaacacagctcagtcatggtggaggatgatggtcatgggctctgccctcatggagttcagtccagtggggttgaatggcccaatatagctatactcagtattaacattttatatatctacttttgcatttaatccttaccattactccacaaggtagacattactgtcctaattttacatatgaggaaaccaaaactcagaatctgagtgatttcacacaagtcacaacttgctaaatggccgtcgaacccgcacccagagcccacttgcagtccactgctgctcctgcaaagggaactagggaaagaagataattcccaagaaaccaaggattcaatgaccatcacgctgtaaggacgaagaatgtgtctcctctcttgtaacccctgggaaatcacaatatttgtgggctaaatggacaagcacattttcttacctggacaaaacagcatttctttagagagaatcccctgaactgctagcccgtcccagccattgccttcctcagccttttgccagctggatgcctctccacccaggtactcacttgccagaaagatcagtgacatggacaaaagtgtcattgaaggatgcaaagatatggcagacaccaaatacattctctccttcagccacctgaggtccgaggctgatgacctgttcttccttcttttccttcccctttcgaggtgccatttctgagtggaaggaaaagaaactcaaggttaacagacaaaacatttccagaatccctttcccctggctattaaatgaaaccctagtcctgcttcatgtccctgtcttcttccatccaatactctactgtattctctcatttctgcctcactaaaacttctttctccttgcacttgggggggtatcaactgtggccacatggcaaagtaccatgagaagtatcctttccccagaaactaccaacagctcagctcacagcacctacaagatagaagcctagggatctagcagcagatgcctgaaggctgcaccccaaaaggcaagaagaaacccaagaccaacagctacccatgtactggtaccattcctaacacccttcatggggcgagggagctgcttgattcctgcatgaactcctcagcttagaattcaagggacccttaccaacacagccctcaagcctctcatctcctgttttcctgtgctccacctgatcccttcaaaatgttcaaaaatgcaactgatttgactcccacaactatttagaactaaatctttgtcaccaacatcaaatatcaaaggcactaaaatatatccaaaaggcaggctaatggaaaagacccatctcagaaatctgatgggtcctgagactaaataactctaacctattatgaccttcataataattgcaatcatactgtcacaagatctaagggagagagaaactgacaggaggaaggcgggtgagaatgaatgagaaagtggaaggctaggataagactgcttccggcctaaagccccaggccttctgaacctcctggtgttcagaacaatttaacattttcagaagacactaacactaatcgatatcctgcagatggtgaagatagagagtgtctcagcctatggtcacagtaaagacagtggcaaaaccaaacatagaaacaacgtgtcctgactcccagcccagcactctctgcctcctgccaagatgcctctacaccacaaataactaccctagtctgtctcaggtgttcctagatctctcctctgccttccctatataaactttagttaagtgtgtgaccacagtaagtacttcaagtgtaagtcttgggtgtacgaagttaaatgttcctat

SEQ ID NO: 1349 - DNA, 4047 bp, Homo sapiens
catacctccaggccctggcacagagcctggcaagggggaagaagccattaaatgcactgaaccccaaatgagaatctcaaagggttcaagctgtactttaaagaaaactcttctcatcaggaccaagtttgcacttttgctgatgcagccactctattcccatgggcttccttgagataaggcatcaccttgataaattagctgtagatataggcgtcttgcagttggcatgggaaagcaatttaatttccaattaagcctgatttctgggccaggaggttggcctacctcgcactggaaggattattctggccaggcctattattatcacgggtcatgattctcccatgaagtggactctcaaggaagctggtccttcaaccattggaatggttcagtgaggcagaaatacggcctctgtgggtaggaccctttttccccaggaattaagtttatacaagtagagtcagggaagttcaaagcaaagataggcagtctgtttgtggccaaaattgttaagtcagggtacccctagaaatgaagcaagaggggagagagagagggaggtgaggcagtcatcaatcaggcccacaagcaagagaggcgggaagttgctagtaagaaaaagacggcaggaggtagttctctgagcccaaatcgaaaagaatctgaattatcggttgaaggagacacacttacttgaagagagaacagacatttgtgaagcatcttttatgcaccgtgctgagtacttcacattcatgattgatgatacaatgcaccctgtaaaacaaacactgtgaggctcactttccaattgaggaaactgagattcaggaagattaaataaactgcccaaagtcatgaacaaggcagattcaaactcttgttttcctgagcttttctccctgcaggctccctctcaaagacaaatacaaaaacatcatttagggccataaggataatgccatactcagctgtatcttacccaccaaaattgtaagcatgagaaaaaggcctttcaaacaagtcctgagagagtgaaaataaatggtggctgaggctgcttggggcgaatgatctgatggaagagctaacaatatctacttctcttttgggtgttgtttttgctcccatctgtccctcaaggagggagacctgagacctgggcgcaatggcccagcatggctgagaggctcctgtgaggtcaggatctcctcccacagctcagactgcttcaaaccagcggggttctggcttgtggctgaggggatttcaattcagaagggttggaaagaaacaacagaggggaatgagggatcatgaccagtggagccacagaaaatttagttaggtgccaagaaggtatgacatggcctaagtttagttaacgatagtaaaagaggactctgaggcaatatgtaagcaagcatgctgtcaactcctggacaaattctagagcgcatgattaaacccatggtttgggaacacttgtgaaagaaagtagagatgaatgagaggcgggtgcatttgctgagaaggagctgtgccggtgtaccagtctcccttctgttctgcttttgcatagtgaccagttcaaggatcgctgcaaccatggtgtgcctgggttccagttgggcgtgtgatgagctatgggctggaaagcatagatttaggcaggtgccagctggcctcgtggtcctgtctgtcttggcagtgcccacagcagaacctttgtgggacattttcagatccttctgcttggccatcacccccacatctattgagacttcagaggtgtggccccagggagtcaattgagagcctgggctctgtgatggaaaggtatctggaagcatctaacaagctctcaatagttgaccttgacctgcttggcattttccacttttgatatggggtaaagacaagaacaggattcccagtggttagagtgttttctggagcaataccacctagatttgaattccagctctgctatttgctaacttctgccttggggcaagttaaatcttttccttgtgcctccattggctcattggtgaaatggagatactaataataacctcaaaggatgttgttactgttcaatgagctgtgcctggaaagatcctggcattcaggtaggtgttcaacaaatgctagcccttattaccgttaggaatgatagattcttgcacagcaagtgatcagctaaatatatgcccaaatgaaagtggctccatcttgctatagtgagttattcatccaaagaggtgttgctgcaggttgtcattgaagagaactattgtagaaagagtgtgactgtgttctccccgacaatacttctgacaccacgtaagagggttttcttcccccctactgataccaactagtttggacaccaactgggtgtcctacaatttaattcaattctgacactaactacccagagttagctcagaccccacaggttaagaactcagtcccacaagactgcccccattcaaatgccagccaccaatagggtgtcctgactatccacacttccacctgactgacagaacattcctacaacctcccctacacctccagataggatataataatttactagagtgatccacagaactcaaaagaacattttacttactattgacacttactattacatgttgattacagaggatataactcagaaacaggcagacggaagagacacacagggcaaggtatgagggatgcagggtggaggtgcagagtttccgggccctctcccagcaccttgacgtgttcaccaacccagaagccccccaaaccctattatttagggggttttatgaagatttcactacataggcatgattgttaaaccactggccattggtgattaaactcaacctccagcccctcttccctctgcagaggttgccgggtagagctgaaggttctaactctctaatcatggcttggtccttctggcaagcagctcccatgccgaagctatttacaggcccaccaagagttatctcactggaaaaaagacactcctatcgcccctaaaggacctctgtaccaaagaccaaatatctttctgtgagacaacagagagttcaagcaccaaatataaagtggagaagcactagatgatctctaaagtcttactggcacttggagaacaagtgtttgtatttgaacatgcggaatcaaaggggagttgagtaaaaggggctccagaattgacacaggaggaggactcagtgcagcaatctcatggggcgtggggacagaagacacatcccaaagcttcatgtgcctctcaagcccctgcttttgttttatgtgtactggggataggggaggttggtatggaatgatggagattatgggagaacagagtccatctaagccacttttgactctgcaactgggggagatgcagctggcctgggaaggaatcacaaacgtggtccagtactcagtttagagttgttggctttgcttccatatacctccctttctcatctcccaaatcctttgaggaagttggctggtgaaaatgtacttatgtaagtggggagggagagttgtgcaaagctaggaagaagctgagttctgcatcagaggtgacatgagaaagaaccaggaaagcactgtggagaggaggatgacccatcaactgactcatctgggggacaggatctgggagccagaggtgatggagaaaactaaagccctcctcctggcccccagtgggaatctgatggagcctggtggagagcctcacatttctacagggcacggtgtgggaggggcctggaggccttgtctctggatgcactaggctggcagttctgaagcttttcatcatcaggacccttttacatgcttaaaaaatattaaggatcctaagagctttggtgtatatgggttatatctattaacagttaccattttagagattagaactaagaatggtaaaaatatttaatttgaatttacttattttaaaataataatacatccattagttgctaacaaaaataacat

SEQ ID NO: 1350 - DNA, 4055 bp, Homo sapiens
cccgccctccaataggcctcagtgtgtgttgttcccctctttgtgtccatgtgttttcatcatttagctcccacttataagtgagaatatacagtatttagttttgtgtccctgtgttagtttgctaaggataatatttggcctccagctccatccatgtccctgcaaaggacatgatctccttcctttttatggctgcataatattccatgacgtatacgtaccacattttctttaataatgggtactagacttaatacctgggtgatgaaataatctgcacaacaaactcccttgacacaagtgtacctatgtaacaaacctgaacgtgtaccctgcaacttaaaatgaaagttaagaaaaaaacacacacacaaaacaaacaaaaaaaactatagttgccattttaaacacctatgatgtgtcaaacattccttcagccctcccaactatccagaaagagtccttcttttatagatgaaaaaactaagaatcaaagagatgaaatcgggcagagtagagacaggattcaaacccaagatctgcatcttggactcacaacactggaagaaacttcagacaccagcctaacttcacacccagctcaggactggccctgccgaatggtcactcacctgctctgaaaatcctcgcgacaggacgctcacttcctacaccggtagttctctggctcgaggtgtgccacagaatcccctacgcattgttagaacacagaacattgctacccccaccccgtgcagggcttctggcgtggtggggctgggacaggggcctgagagtgtgcatttctcacaagctgccacaggatcctgatgctgctggcccagggaccacacttggacagtcatcgttctaggaaaacttcctggagtgggaatggtaaaggtgatggcttcttcccattttgcccttttcaaatctgagataggcttccccagcaggctcagtgccagagtccataccctcaatttaaataacaaatcctcctctatatcatgacctttcctccagagggttgtttttcattttttgttttttgttttttttttgagacggagtcttgttctatcaccaggctggagtgcagtggcacaatctcggctcactgcaagctccgaaccccgggttcacgccattctcctgcctcagcctcctgagtagctgggaccacaggtgcccaccaccacgcctggctaattttttgtatttttagtagagacggggtttcaccatgttagccaggatggtcttgatctcctgacctcgtgatccaccagcctcggcctcccaaagtgctgggattacaggagtgagccaccgcgcccggcccagaggggtttttaagattgtgtgttctgaatggcctgtctctgactggaacccaactccgtccccagacccacttccatctttttctgtgagggggacacactctttcaacttttccaaaatggcatctaccatggcttttctgattaaaagcaaacgaaacacacccttcctataatcaaaaatttagaaaagcagcaaaaataaaaaggggataaggaagaaaacagaaattaaccaccatcccaccgctaaaattttgatgagttctcatgtgtttccttgcagctgattgttgtttggcatacatttattaatattggaattaaaaatatatatggcactttatatcctagaaaatagtaatactgtaaatgtgttctagaaatgggagctgctgttgctcttattagagaattcaaacaaagaagggaggctcgctggggacagcttctgggggaggatgggtaccgctttgagacaacagggagaactcaggcacagaggtgacgatcatcgttctctgtggggcacatagtgatgcagccggaaacaggtatgagtcagttgagtggggacaggtaatagagagctagaactggctggccttatggcctccaaggcattggggagccactgtacattcttgagcaggcaatgacttcacaaaaggatttctcaaaggttagtcctgcaacagaagacagcgtggattggactggaagagtgggagggcaggtggagaaggcattgtgctgcaagtggggagcagccctgggggcccagccagtcccctgtgccctgacaagtggtatggcatggatggatggctctacttctgggccgccaggatggacaggtactggttgctcttcaccatggcgataatgaggaggccaccggtcagcaggaaggtgggccagaagagggagaagaggagggcctggggcccgtagaggcgctggaataggacgctggtttcgttcccccgaggtgcggagaagcagtagaagacctgctgctcttggaatttggctctgaccttctccacgtcggcccgggccgtctggtaattgtccacgctgcctgggatgtaggagcactgtggggagaaacaagagcagctgtgggcttggaaatccccatttcttagccaagggcttgatatggagtaaagaaaaataccagctttgtagtcgggcccctggattggagtcggggctttggtctaaagcttggcaggccatgcgctgtacaggtctggagagcacgctctcatttgtgtcttgtgtgtggatggcggtgctggagctgctcggggtacaggctacacacctgggcgcaggtcctaccttggagtcctggctctgcttggattggctgtagaatttttggcaaatttctcactctttctgagccctgaagcttcatcacttaaatgggtgaatatcggtttcaaaggatattatgaaagaaggacttcacacagagctatctaaggaaaccagggagggacacaggccaagtgggctgtgtatttgaaatcgagatcatgtgctcaattgcctacagggctcatgaaggtattgtcagagggtgaagcaggcaaagcaatgagatgacaggtgcccactgactcttgccttggtgccaggaagaattgccagggtgtggcagggcctgtcaatagggagagagccagctgcctccagacaggcagtcaccactccctccaggcaatggatgtcaggccatccagaagatctataatagccagacctccaacactttaagagaagttagaaaccagatcacacctgtaatcctaacactttgggaagccgaaggggaaggatcccttgagcccaggagttcgagactagcctaggcaacatagcaagactttatctctacaaaaaaagttaaaaattatccaggtgggcatggtggtgtacctgtagtcccagctacacaggagactgaggtgggaggatcacctgagcccaggagttggaggctgcagtgagctatgatctcgcaactacactccaggtaaggcaacaaagcgagatcccatttcaaaaaaaaaaaaaaagtaaaatattagctaaatttaaaattgaaaacctttgcagtttcaacctgtgtacagcaaacaaactatgttggcaagcgggtatttgacactgggatccaaaggaaagaaagaatgcattgaaaagagttttgtgccagcagagcatgacacacatttaattctgacgttgattattgttattaggaactttctgccctgttcagatgaggccagctggaaagtgatgcaaagcagtcataaagcggagttttatctggttttatctctgttctgagctgcaagtgtggtgcccccatctgcagcagaatacctacagggcccccatagcccaggtccctacccactctgcatcactgagggcgagacccaggaatgtgtgattccttcatgcacttaattttgccctagtgaaatcatgtgcaagatcaaaatgtgtaaaactgagacccaaatggcaggtgttgagccagattccttgcaggcctcggccactccctggatttatatgaggtgccaccctggaagctgcctgccctgagggcattcactccagcaacacagaggagggttgcactgtagttctcacagcctgggaaatgcagatgct

SEQ ID NO: 1351 - DNA, 4040 bp, Homo sapiens
ttaaaattgaaaacctttgcagtttcaacctgtgtacagcaaacaaactatgttggcaagcgggtatttgacactgggatccaaaggaaagaaagaatgcattgaaaagagttttgtgccagcagagcatgacacacatttaattctgacgttgattattgttattaggaactttctgccctgttcagatgaggccagctggaaagtgatgcaaagcagtcataaagcggagttttatctggttttatctctgttctgagctgcaagtgtggtgcccccatctgcagcagaatacctacagggcccccatagcccaggtccctacccactctgcatcactgagggcgagacccaggaatgtgtgattccttcatgcacttaattttgccctagtgaaatcatgtgcaagatcaaaatgtgtaaaactgagacccaaatggcaggtgttgagccagattccttgcaggcctcggccactccctggatttatatgaggtgccaccctggaagctgcctgccctgagggcattcactccagcaacacagaggagggttgcactgtagttctcacagcctgggaaatgcagatgctgcactcagatctagggccccagccagccagggagtagctgaggctggggagacgctggctcctcaggaatctggcattcagagctgttggacactgccaggtcctcagtagcatataatccagcatcctgagctgacggtgagggggcctggcctgagtctctccaatgcctctgactgtgaccttggctaacctagctccttaaatagcagtgtggctatggagtcagacaggcctgagttctgagctgtgtgaccttggcaactgccacaacctcactgggccttgtaaaatgggtttgtgaggctacctgcctaggagaactgtcatggggattaaatgagatgatgcatgtaaagcactgagcacagaagcccagcacacgataagaactcaaaaaagtggaagatgctattattaataataatatgttttgacttatctatgaaattgcaacaacagctccttctttaccttcttaaaaagaggtctatggatgagctctgaagtagaggcttctgtccatcctgggcctagtgtatcctctgcctgctcagggttcctctggatcttttatgctgggcctgtttggcaagacactgggcaggaattcactcttcatggccaaacccagaagccggggcctgaatgcatcctttctctcctgtcctgggtccagctaagcctgagttatctgaatgatctgaaaccaaccagctttttcccaagccctgcagtgtaaggtccccaggacagacaatgggagggaatttagaactcacctgctccaggctaagactcacaggaaaagctgagggcagactatggcccctaccttcagagttggagggtgggatgagagtcttcttggcccttcacagtgattccagaggacacccagctagcctggagccccagccacttgaacccctatgatggacataggcggaaggagcagctagcccacaacccagctgcttggcaaaaacacgaagggcatttccactgcttcctcccagctcctgcagcctgctatcagcaccacacctggtcaagcctgggcggcaggggagaggacagcagtggctccagcatgtccttccttcacatcctgctgacagttcattcaggggatgctcctctgagctggcaatctcaggaccagggaggcagcctgaaaaccagcctgctctggcccatatcactcccggagaatgttaccagttattgaaaatttgtttcttgcattgggataaatcaagggctactgaatgccaacgcagaggcaggggtcatgggtaggagctgcctccagtgggccctgagacctctctccaccgggtggggccgagtcatactagcgatgacagaacacctgaccatcctgcactgcccagacccacttctcattgaccttcagcactctcaagatcccccagcctccacgccccatcccaggcaccctgccccttcccgtcccatcagccatcaagtccggactgtcagcatctcccctgctgcaggccacatcttggtcgtgagtgcttgctgcggccttggctcctctgtctagtaactggacccacacacctgtaggctccatcttcccagcccaactctgaaactctgatcatgccctaaagattcccattgccaacagcaataatttccaaccttagaatcaccttgggagctccatgaatggatctctgaccagagattccaccttgatatgtctagtgttggaccctagttttgttttttaagactcttacagggttctaatgcatagccaaagttgacatatcttgagacatacacactcacattttaattccatattgtggtgatcaaaggcctctgggaacagaccttagtctgccctgacagccttttccagctgcatacaccccatcatgggtcattttctgtagtcagccctctgatccctgtctccacctagcccttccctccgccatgcctcgtcctataggcatacccgcttcctatatcacctcattctctatgccttgcatcctgcgcctgcctgatgttaaaagcctaatccaagagcctttcttttttttttttttttttttgagatggagtttcactcttgttgccaggctggagtgcaatggtgcaatctcaccaagagcctttctgatacccccatcattgtcagctggaaaacatccccctcctctaacccctgtaacttcctctgttcttctccccggtgccaattcttccctgctaggcactgttcatgcatgagctctctcctcttgagtcctacaggcttgacacaggaggtgctcaatggctgttgaataaataaatgagaggaggaaagaaggaaacaaggaaggaaggaaggaaggaaggaagggagggagagagggagggaaggagggaggggaaaaaaaagaaaagaaagaaggagggaagaaagggaaaaaagaaggaaagaaagaaggaaggaagagagacagaatatgggccaactgatcgctttaggaaaggatatggtggtgagttttgtgttttggagggggagggtgggatgttgggatgcaaggatggaaaaaccatctaaatgtttgtttatggaggttactccagccctgagtccctggtttcctggggagtcaccgggattccactttgaggatctggccctgggcctggtccctcatttgactgaggttgtagaatgaaagtactaacactaatcactgcttttgtttgagtgcccactatccactcagcatcaagcgtggcactttatatacagcgtctctgacttgataacagctcttcaaggtgcagcattagcattccactttacaagggtggaaactgaggaggtgagaggctaagtggcctgcctatgtttacacagccagttagcggcagattcaaacccaggtctgtgtgactccaacacagaagagctagggctggctcagtctcattccagctgtgagacctggtcaagtgggttgatctttctcagcctcggggacagggacagttaggaacaggctcacacacctgacagggataaagggatgtgtccccatccctccagttcagtacctgctggttctggtcccgagtgtcctccgtgtggtacagcacagcccacctgccggcagctgacacgttgacccacaggcatgggtactggggcaccttcttgcccttcagctcctcctggtccctgatgttggtctcaatcaggtggcacttggattcctgggtccacacgctgaggagaccacacacatgcacacatacacatctcagaactgggtgacacacagaacacccatttgaacccattatcccctgggagcctctagagggatccaggactgggatcctcatcttgtcttcagcatccagcaataaaggcacatgaccccacagtccccggacacag

SEQ ID NO: 1352 - DNA, 4049 bp, Homo sapiens
gcagattcaaacccaggtctgtgtgactccaacacagaagagctagggctggctcagtctcattccagctgtgagacctggtcaagtgggttgatctttctcagcctcggggacagggacagttaggaacaggctcacacacctgacagggataaagggatgtgtccccatccctccagttcagtacctgctggttctggtcccgagtgtcctccgtgtggtacagcacagcccacctgccggcagctgacacgttgacccacaggcatgggtactggggcaccttcttgcccttcagctcctcctggtccctgatgttggtctcaatcaggtggcacttggattcctgggtccacacgctgaggagaccacacacatgcacacatacacatctcagaactgggtgacacacagaacacccatttgaacccattatcccctgggagcctctagagggatccaggactgggatcctcatcttgtcttcagcatccagcaataaaggcacatgaccccacagtccccggacacagggaggaattgtagaagctggatggggtcttagacattatctatatgactggttctcaaccttggctactcttgcaacaacctggggagcttctaaaaagattcccgtgtccaagctacaccccagagcaagtgaatcagaacttcttgggtggtttggcccaggccctgggtgttttttcaaagctccctgatgtgattctgacgagcagccaaacctgagactttcttatccatatcgtcttcattttgcagaggcagaagagaaactcagaaaggtcaagtgactttgctgagaccttgcaggacctgaagctaggtctgagtgggttggagagctgtgttctttcccctaaaaggagcagatgtagaaggggtttgagttgagccaggatgggaaagatggtggggacagtctctagatggtgcttcaccagattaagagtccagcctggaatcgcttcagcgttgtgaagagtgaggctgcagcaggcccgggagaggctaacaggttcatcaacatattagtaaatcagttgtgcttcaactcccaagtatcctgtgggagacccattgccagtcagaagggggctgtcagctgctggaacgtgcccagagcacaggtctgagacttatcctaaggacaggctgggggaactgagtgtctttgttccaaatagaacacgaattaggaattcacagcttttccttaaaatctcaagtggttgatatgtcatggagcaagggcatggaccattctctgagattcctgagcagaacttcagggaagcagatgctggctcaatgcagacacatcagaaaacctcaaacatgaaatgtatgttcagtgaggcaaggagctccccgtctcttgaggtattcatcaggaggctggatgcccacctgacagggaggcttcagaggggagagaattatgcagctgagctgtaaacatctgcaattctctgattcctcctgggatcaaacttgcactggaacctttgctctgattctttgctatttcttctgagaagggcatcatgtgtctgttaccaccacgtcctagatcatgtgtctgttaccaccaggtcctagaatctcagaccagtggggctcagttcatcctaccttccctgcacttgaaccctagaacctaagaatgagcatcgtcttgaccctgctgccttgaatgagggtcaaggagaggggtgagtagaaggccagggttccttacagatgccagacccttaggagagggttggggggtgggcaggccgggagagctcagtaccttttctggtagaggggcagcacagtcgtgaccaggatgtagtaggtgatgacggcacacaccaccatggttacacccaggcaaagggctcgtgtctctccccgcttctgggccatcaccagcttcttcaccatattcactgggggcagtgatcatttctaggtccacagaagcaaacagaagtgagatcagcccagttcacaggtgatccacagaaagagaggacaggtgagaggggaaggtactcaactattaatatcactcttgtttatatttggagctttgcaacttccagaagtcttgctttttggaccccatgtaagccttccctgtgcaattgagaggcaattgcagataaaagacctacggctcagagaggtaaagtgacttgccctaggtcacacagtatgtaataggctcagtaatggccccccaagatgtctatgttctagtctctggaagctatcaatgttactttatgtggcaatgactttgcagaaatgattaagataaaggctcttgaaggccaggtgcggtggctcatgcctgaaatcccagcactttcggagaccgaggtgggcggatcatgaggtcaggagatcaagaccatcctggctaacatggtgaaaccccatctctactaaaaaaaaaaaatacaaaaaattagccgggtgtggtcgtgggagccagtagtcccagctacaggggaggctgaggcaggagaatggcatgaacccaggaggcggagcttgcagtgagcagagatgcgccactgcactccagcctgggcaacaaagcaagactccgtcaaaaaaaaaaacaaaaaacaaaaaaagataaaggctcttgaaatggggagacaatattggattatccatgtagctcctaaatgtaatcccaagggtcctaataagagggaagtgaagggagattaaacagatgagaaagctaaggtgatatgaccagggagacagcaattagagtgatgtgaccacaggccaaggagtgcgtcagaagctggcgggggcaaggaacaatggctcatcccccacggccactgcagggagtgcagcctgcagacaccttggtgattttggacttctggtgaaatttctgtcgtttgaggccgtcaggtttatgatcatttgctacaacagtcataggtcccatgcggtgagcgagcagtacatgtgcatcatccatgcacctccttccacggcacttatctcacagggatacttggagtatttctgcccagaaacagttctgtggcagggctagctgggccgggcacaggcagggaaaggagaggagggccccagaaggcagctgcaggttgtcaggagaggcaggaggtttaccatattccggtgttttttttttttgtaaggaacattcccctacttcaagcaaagaaagaagaaagaaggcatcatggtggcctcagcgactgctttcttatttcagggcttgaagccacctgggacaaagcagaatgggcacattctgctggtggttgctttccttctctcctctttctttaggcagcaactccttgtttttcccctggacattgactccaccccaatgcaagcaaagattccaccctcccctgctaggctcctgatcgctcccccaggagtgtgagtcttgacaaagacttcaagaaacagcccctcaatctatgccgcctggagccacagagatgcccagccatggtccccgcgtgatttcccatggttccgcaagctgtcctagagcctctggtaaatttatttgctgttgtttttatttgtttaaagtaaccagagtccatttctaccaaaaataccaggaagctatcaatgtaatcctccattttaggggaaattttaggggaatttaggggaaattttagccagatatcagggggactttattctccttgccaggtccctaaagtaataaacatattatggtttttgtttgtttaattagccagtgtccgggtgacaggccttagtccaaagagattttctgcaaagtgctctattttctgctcaggcgtctcttaactactagactgtttcaaatattcagagattcttgactccctccccttagccaggctgccctcatacccgggcatctccgctaaagggaagagaccagggtcaggcaccacggatacccatcacaccttcccagtgagctggtccacctcccctatcgatcggcagaggtgaca

SEQ ID NO: 1353 - DNA, 4026 bp, Homo sapiens
agagatacacagtgcaacaggctgccatttatgagtataaccgaagggctccttgctcgtgatactctgaataagttattaagggctacatattatttggaaatcataaacaaactttagcattcttcccaagggaaggtgggaacaaacagggaaggggggccgtggggtcttctgctccccctaaatgagccacaaccaaaaggcattgacaagccctgtcctcgagggtttgtgggtgaaaacccaggtcctttgctggctgcggggttgtgtgtgacagatggctacaggtggagggcaagaaaataacaatgctgcaacaataaatattgacggtttgcattagtacggggtgtcagagatcacaaaatatcttctctgactcttccaacagcttcttaaggtactagcacaataggctcacaatagaccactgaggtggagatttttctacccatttgatagagggagtaactgagcctcagagaggtgaaataaattgcccaagcaagttactttgcctctctaagcttcagtttgtctgtctctaaaatagagataattatacctagcccctcagtgtttttgaggaatgagagatcacctaagctacctgacacatagtatggagattgtcctttccaaagatggtcacaccaaatacttcccattccatgtgcccttttcacagtgtggcatcaacactccaccatcaagaggggcattgatgtctcttccccttcaccctgggtggagcttcgtaagggcctcaatagtagaatatggtagaaggacacagcacgatgttcaaggctaagtcatagacgggggctcgagttccccccacacgctctcgggacatgtacctgggaaccagccaccatgttgtaggaagccgaggccccgtgctccagctgacagcctcagctcagatctcagccaacagctagcaaatctcaccgggcatgggagagaacaagcctgcagacagttccagcccccagcctgccagcctcccagctgaggcctcagagaatgtggagcagagacagcccacctgctctgtgctctctctgaattccagagccacaaaatccacgagaagaaaaaaactaatgtttcatgcccctgcgttttggggtaatttgttatgcagtcatagtaactggaacacacttgcaagtgatttcaaagggggactgttacagttgctggtgatagtggtaggattaaaccagtgagaattaaaacacctgagattgctatatggagtgttacaggagagtttagaaatgctttatctaggtagggcatggtggctcatgcctgtaatcctagcacttttcgagaccaaggcaggcggttcatttgaggccagtagttcgagaccagcctggccaacatggcgaaaccccgtttctactaaaaatacaaaaattagctgggcacgatggcaggtgcctataatcccagctattctgggaagccgaggcatgaaaatcacttgaatccaggaggcggaggtcgcagtgagctgagattgagccactgtactccagcctgggcgacagagtgagactccatctaaaccaaaacaaacaaacaaaaaaagtgctttatctactcttaggtcacacactatggcacaaatggaatagaagggcagtgatatgggagggtatttttgtttatgaagcacctactatgtaccagggaatgaccacatagatatgcaatacatacacatacacatacacatggacattcctctccacaatcccccacaaaaggccttgttctttctgtaaaagcacaaggcaaagtgattttcccaaggtcacgcccctagcgtgtgatgtgatggagcctggagtgcacctgtgcccgctgactccacagcccgtccctgcccctctgtcaccccatgactcccttgggagcagttttcaagagaccccaggtttcttcatgatgtctgcttccactgctttccagacaccctcagctcagtctgtacccctctctggattatgcacctgcttgtttatttaagtctttctgaatcaatatctcctctctgctgacacttgggataataagtcccataaatcaaattggcaactgagtcttgagcccctgtgtgtgcctctctgagtgctgcagggatgggtgttagtcactctcagtcctagcgaagctgtgcgttcacagacatcccagcacttgctatgcagaggctctggatacaccactgtgccgaggtgactcagacacggtcccttcactgcagaaaagcgatgccagatttcctcaactacaaaaatacagaacagaaagtgaaagatgtgttttaaatgagagacagtaataaaaggcagaggaaataacggtgggaggttttttagtagagttgagatgacaaagtataacaacagcaaaagtaaatgccgatattacaattaaatggtcacacaacaagacacgacaaaaaacatggtaaagttgttccctgctgtgtagggtgatactcactcctttttcctctgactcttttcaccatattttcccttggcctgatttttcttcctttatcctgccatgctgttaacataattgtaagcaccttgaaaatcctctttgagacaaagaggagcataaataaataaacagccctgctgtctgtctgtgtggtaaggttggtttttttaaaaaaatgctttttccttagtgcaaatcatcccagctctgtgggaaagtggcatgatgtggaagtgcagggagaagatgaggtacagtgttagcctcactgctcagagagagttgctgtaagagtggtggtggccttttcaacacacataaaggaagcatgtgccctctccttccatggcacatgtctcctctgtccttgcctcctggccagctcttcctcttccacaggactccccgctggggccttccctcgcccccagccccttagccactctccgcgcctcctgggccaggcggaagctctgcttccgcatgctgggagcaccgcatgcctcttctgcagaacacttcctccgcctgtaatttaacatttattcatgtgcatcctccattaacatgtctcctaacccaagggtaagctctctaaaatcagggactggaaccgttcttattcactgccgcatctctagcgccaggaggaataaacaaagatcttgcggttttgttgtcatcgtgctttggttttcgggaaaaaaaatctctcgcttttttacataacagaatattataatcattttcccatgccatgaaacatttttcttctttaaattgatatattatagtttcacagttgtacataaaacacttttctttcttgaattttaattatagattcgggggatacacgtgcaggtttgttgtgagggtgtaatgcgtgatgctgacgtttgagcttctattgatcccatcactgatagagtgaacatagtacccaaaaagaagattttcagcctttgccccactccctccttccttttggagtccccagtatctattattcctgtctttatgtctgtgtctacccggggattagctcccacttagaagtgagaacatgtgatatttggttttctgtttccgcattaatttgcttagcataatggcctccagctgtatccatcttgctgtaaaggacatgatttcatcctttgttatggctgtgtaatattccaaggtgtatacgtagcacactgtctttatctaatctgctgttgttgggcaccaaggttgtttccacacctttgctattgtgaatagtgcggcaataaatgtacaagtgcaggtctctttatggtagaatactttattttcctttgtgtatgcatccagcagtgggattgctgggtcaaatgatggttctatttttagttatttaagaaatctccaaagtgctttccacaggggctaaattaatttatatttccaccaacagtgtaaaagcattcccttttctctgcagccttgccagcatct

SEQ ID NO: 1354 - DNA, 4066 bp, Homo sapiens
catcaacactccaccatcaagaggggcattgatgtctcttccccttcaccctgggtggagcttcgtaagggcctcaatagtagaatatggtagaaggacacagcacgatgttcaaggctaagtcatagacgggggctcgagttccccccacacgctctcgggacatgtacctgggaaccagccaccatgttgtaggaagccgaggccccgtgctccagctgacagcctcagctcagatctcagccaacagctagcaaatctcaccgggcatgggagagaacaagcctgcagacagttccagcccccagcctgccagcctcccagctgaggcctcagagaatgtggagcagagacagcccacctgctctgtgctctctctgaattccagagccacaaaatccacgagaagaaaaaaactaatgtttcatgcccctgcgttttggggtaatttgttatgcagtcatagtaactggaacacacttgcaagtgatttcaaagggggactgttacagttgctggtgatagtggtaggattaaaccagtgagaattaaaacacctgagattgctatatggagtgttacaggagagtttagaaatgctttatctaggtagggcatggtggctcatgcctgtaatcctagcacttttcgagaccaaggcaggcggttcatttgaggccagtagttcgagaccagcctggccaacatggcgaaaccccgtttctactaaaaatacaaaaattagctgggcacgatggcaggtgcctataatcccagctattctgggaagccgaggcatgaaaatcacttgaatccaggaggcggaggtcgcagtgagctgagattgagccactgtactccagcctgggcgacagagtgagactccatctaaaccaaaacaaacaaacaaaaaaagtgctttatctactcttaggtcacacactatggcacaaatggaatagaagggcagtgatatgggagggtatttttgtttatgaagcacctactatgtaccagggaatgaccacatagatatgcaatacatacacatacacatacacatggacattcctctccacaatcccccacaaaaggccttgttctttctgtaaaagcacaaggcaaagtgattttcccaaggtcacgcccctagcgtgtgatgtgatggagcctggagtgcacctgtgcccgctgactccacagcccgtccctgcccctctgtcaccccatgactcccttgggagcagttttcaagagaccccaggtttcttcatgatgtctgcttccactgctttccagacaccctcagctcagtctgtacccctctctggattatgcacctgcttgtttatttaagtctttctgaatcaatatctcctctctgctgacacttgggataataagtcccataaatcaaattggcaactgagtcttgagcccctgtgtgtgcctctctgagtgctgcagggatgggtgttagtcactctcagtcctagcgaagctgtgcgttcacagacatcccagcacttgctatgcagaggctctggatacaccactgtgccgaggtgactcagacacggtcccttcactgcagaaaagcgatgccagatttcctcaactacaaaaatacagaacagaaagtgaaagatgtgttttaaatgagagacagtaataaaaggcagaggaaataacggtgggaggttttttagtagagttgagatgacaaagtataacaacagcaaaagtaaatgccgatattacaattaaatggtcacacaacaagacacgacaaaaaacatggtaaagttgttccctgctgtgtagggtgatactcactcctttttcctctgactcttttcaccatattttcccttggcctgatttttcttcctttatcctgccatgctgttaacataattgtaagcaccttgaaaatcctctttgagacaaagaggagcataaataaataaacagccctgctgtctgtctgtgtggtaaggttggtttttttaaaaaaatgctttttccttagtgcaaatcatcccagctctgtgggaaagtggcatgatgtggaagtgcagggagaagatgaggtacagtgttagcctcactgctcagagagagttgctgtaagagtggtggtggccttttcaacacacataaaggaagcatgtgccctctccttccatggcacatgtctcctctgtccttgcctcctggccagctcttcctcttccacaggactccccgctggggccttccctcgcccccagccccttagccactctccgcgcctcctgggccaggcggaagctctgcttccgcatgctgggagcaccgcatgcctcttctgcagaacacttcctccgcctgtaatttaacatttattcatgtgcatcctccattaacatgtctcctaacccaagggtaagctctctaaaatcagggactggaaccgttcttattcactgccgcatctctagcgccaggaggaataaacaaagatcttgcggttttgttgtcatcgtgctttggttttcgggaaaaaaaatctctcgcttttttacataacagaatattataatcattttcccatgccatgaaacatttttcttctttaaattgatatattatagtttcacagttgtacataaaacacttttctttcttgaattttaattatagattcgggggatacacgtgcaggtttgttgtgagggtgtaatgcgtgatgctgacgtttgagcttctattgatcccatcactgatagagtgaacatagtacccaaaaagaagattttcagcctttgccccactccctccttccttttggagtccccagtatctattattcctgtctttatgtctgtgtctacccggggattagctcccacttagaagtgagaacatgtgatatttggttttctgtttccgcattaatttgcttagcataatggcctccagctgtatccatcttgctgtaaaggacatgatttcatcctttgttatggctgtgtaatattccaaggtgtatacgtagcacactgtctttatctaatctgctgttgttgggcaccaaggttgtttccacacctttgctattgtgaatagtgcggcaataaatgtacaagtgcaggtctctttatggtagaatactttattttcctttgtgtatgcatccagcagtgggattgctgggtcaaatgatggttctatttttagttatttaagaaatctccaaagtgctttccacaggggctaaattaatttatatttccaccaacagtgtaaaagcattcccttttctctgcagccttgccagcatctgttatttttttactttttagtaatagctattctgactggtacgaggtgacatctcattgtggtttaatttgcatttctctgatgattagtgatgctgagcatttcaaaaacatttttctagaaaggctatacagttttctaggttatggctaagtcgggatagatttcatcaaagccatgttgtcagatatttaagaagggtacttgcttccctgcatgcttgtttgtgtttagcggaaggcagagtccgcctctgctatgggcagacctgttttattctctacccctgaaccacacccatgcccagatgtcatttttcatgaatggacaggtataagggagactgtatctataagcacaaagtttggggaccagaacaggtggatagagatggcaacatcatagaagtgggagatggtgacaggttggcaattgctcaaccctgtcccaggcctgacttgagccttagtgagtgagagagagcaagagagagaaagctgttgttagggcttgtgggactcagaacacaagaaatgccactttgggacctacgaagagggtgtttccacttctgcttagctgtggccttgggcagtggccctgacagataatggccatcattatcatctaaaatagctgcagcaaaggtagactcctgtgtgaatcggtgtccctaggtgtgctgcagctggctcacactggcaccgtgagagcctttgcaagccaagtgttcaaccat

SEQ ID NO: 1355 - DNA, 4035 bp, Homo sapiens
tataaactttactaagacgaagggaaaaattagctagcccataaatgtaaatgtcaggggaaatcatgctgcctccaaattgagagcacgtgatgacatcttagtcatcccctctacccattctatggcttcgggcaaatgtgtaaatgatttgtttgtcagggggaaaaacaagcaaaataaaggtatgccaacagcatccagactccacatttaaaatggattcaattacagcaaatcacggactgggacatccttgtgattccatagcatcaactaactttgggcttgtcttcctcaagggtgggtgggcggaggaggatagagctgtggtgatagaatacttaacaattaattttctgcatttggcttttacgagctatgctaattttccaaatgtggccacagtattaactctaatgtattcatgggagaatgttgcatttcttgtttagttactttggtggcccaagaaagagtttacacttcatacttgagggtgacacagcacaagtcccaacccagcttccatttccaacaagagatggatttgttccagtgtcgcattattacccatcactttactgaatcaaaaagagataagaggctttgtaaccaaccaaagaacagaaatctgggaaagggaaggataagaaactaccataaaagtctatacttttgcatttgctaatccctaagttactagacagccggggagccagcttcttaatttacaaattaacaacactgtcagagactctcaagagacctgcaaaattctcgccctttctaaactaggccgggccctcaggaggactcaggtgtctcagctcagataccaagttcctagcgtgtatatactcttgctcctggctctacgtggggttttgaagcactgtgcgcctgggcagggtaattccagctggtccttcgggttacatttgaattatgaaatccaggtgaccgggatcgcacatgtgtatcaaaaccatgaagctatgaggcttcctcccaatgcaacactccccatccctccacccccacctaattttaaaccagccagaggaaggatgcgattatataaggcaaaacagcgtttatcctacttcctccaaataacaaaatcaggcccgggcgggtagctccctctcgccccaggctccgtcgcctggcattctcaggacccactactctgaccacagggttcccgctgccacctccaggcccaaagcaccaacaattcttcatggtgttttttttttgtttttttgtttttttttactttaagttccgggatacatgtgcagaatgtgcaggttataaactcggttctcagaatttctggttcttttcatgggaaggtcacagcctgggcccgaggttgccttacccagagcagggaagcttgagcacagggcagagatgtttagaggggtagtagtcattgcctttccagacccacaggcctaaaggatggcaggattcctaacctctggacactactccatttaaggcctgtatcattggctgggcataggcgtaggctatgtactcaatatttgttaaacaaattaagtcttttaattttctgagcctctacctcactgtcgataaagtgggtaagtaacactaatccctcaatgtggtccacagtactaaaattttaagagtacccagagccctgtctgtctgccacctggtaggtgatcattaaatggtccccagcttttttttttttttttttttggtcaggcccaaactgccgattcctctctgaactttgctgaaatgtcctcatctgttaagaggccggctgctgccctacagaggagataagataatacggtgaaaagtgctataaagcactatccaaacttgagtttaaattctttgagtcccttaatctcctcgccctttgaatctttcagagtttctaacagggtggagagagactgccagaggggacagccactgacgcctgggtatatggccttgttttgttaacaaaatacagtgcgtctagtcttgagggctgaatgatgtaaatagtgaaaggatctctctcagctttggagaaagtccctccacagcccccaccctcacctttcctacaggtaggggatggcgtggtgggaaattagggggtagagaaaccataaaagccaagagataaaagtaaaagaggctgtaaaggatgacgtctccaaattgtaaaaggactcagggaccaaaaatggatgctgaagcggagaattctctgcagcctcaattctcaagtggggtgcaggtgcggatctctacctagtctctctggggagaggacgcaaaagtggtcagggcatatcaaacagaggagcagggcgtgggcaacaggtgcccctggccaatcagtggttgttggtaacctgggacaagcaaaggccgtcttctttaaaagcctcagcgtccacgtctgaaaaatagggtagtcacaagtccagtgtctacacttgggggttctagtgaggatctcgatctggtgagctagtgaacatcactctgcaaactctcaagccctgctggaatgcggttaattattactgtgagccaagaagagcccgtgcgcttctggccccagcccgctcccggcgaagctcagaaccttgccggggaggtgctggctgcggagaccacagagagacatttcctccccgcaccagactctgatgccaccatccctggtgccaccatcccttcgtgggatccggcttcgacacccgcgggactcacgaaagaaaatggtttctcctcaatgtctggctaagcccagttagctcatctttaaaatgggggcacaactctcagggttgagttttgaacctgtctcgttcctggtacatccaagtgctcactgaacatggatccaactccttcactccccaggcagagactccggggaacagtgaaacaaaaacaagccaagtggccagagcgcagggccgagggctgtagaaacggaccaccgagcgaccccgtaaacccagctggggttcgctcttgaaaaaacaatctgtatgtcgagggagtctcagacacacacagcgcggttattacccagagggtgtcttggatgcggacggcgcactgggcgcgccgaacgccccgggcacccaggagtccagaggccctgggcttgctttcccgggagtgtagcgcacgcagaagggtctcggtaccctcagccctggaacacccgccccccgctccctccagtaccccgcgctacctcctactcctgccccggcgcgcactcacttggcggcggcgaatatcggccgggttcctgcatccacgccgctccatcttctgaattttccgacttgaccgaggcggtctcgaagggcttcaccagcggcccggggctgtgcgcttcccgagcgccgtgccccgacagcagcagtggccgcagggtggccccggccgaggcgctttcggccggcagcggggacgcctccttgggcggcttcttgtcggacatgagcgcctccacgctgaagggcaggctggagaccttgacgcggcgctcctccgcggccccctcggcgcccccaggccccgggcctggtccggccaccactgctgggccctcctcgtcgggcgaaaacaagtcattgcctttggacggagaagccatgacttctctgccctacgtagctcccgacgcgcgactccgctggcaacccggcagcggcgactcaaacttttttgctgcggagacgggaggggcgcgctgggagctgagcctttcctccgaggggaagtgggagacgcgcgccgccaatccgcgccgggcctggcgctgacgccagagacgctcgcccctgattggctcttcccgaaggggctgccccccctcctttttttttttttttttttttttcctgtttgaaataaattaggagttaattacaggagcagtcagcagagttgttattaggcgatccctgaagggttataatcacgccgaaactgaaaagcccgagacctaattaagag

SEQ ID NO: 1356 - DNA, 4041 bp, Homo sapiens
catgtacaaatgatttagatgctggccgatctccgcctcaccacttatttaaagcttatctttcactgtactttttctgaaaaactcctcgcagcaattccacctcttttccataagtaacaagctgccagaggaaacatttcaaagtatttcagtagtttcagttcactccccaccaccaccaatcaccccaacatggctgaatctggccacaactcttggttgacttacattaaaatattaaaaaagaccagcttccccctcatgtgggtagcactttcgagctaagcccagctaagaacagagaacacctcttaaaataattgtgagtttggacaaactttactgcaataaaacaaatgcttaatttaattcagaataagagataactcttcaataaaatatatcaaattgtacaagcaccctttcaaagggataaaggtataccggagggaggggacagatggacaggaaggtgaaataccagggaacttaatgggctgtttgacaatcccattttcaccaagtcaaaacatggctttaccttctgccccccaacatgtaaaaaagtatataaaattttctaataagtttaggacatacaacaggtacacacacagagaaagcatatttttttttctttctggatctactaattgttcaagaatatttagcatataggtaatggttacaagatactcattttttaagcagaaaattactaaacccccacccaaatcacctttgcaatctgtgaggatgaatgtacctagtatttctcagaaaccatcaattcctctcaacaggttttaacattttactctccaattatctgaaataaagttaccaacagccttgagaagaattaggaagtatttctaattttctacctcacctccaggcagtctcaggattcttctcatcccaggtattggtcttacaaaaatattcttaaaaaaggaaaaactttaaaaatatgtgtgtggtggggcggtggggggcgggggagagataggaacaactgtagtatataaagaggtttcttttaatgcaagtaaaatgcagaaatatgatgtgtccccttcactttgaataatctctccatatctaatattttctgtgtgcattgtgtctgtttctttgttttccataagcagaagtcaataatcccgtaaaaatcattgactttagcacattttgcaaataatttgtctccctctttaagaaaatacaacaaatggacttacacagtgtcttttgggaaggtgagatatagaaaaaaagcacatatgtatataaattttgccttttaaaataatttgaatttttacgtctgctgtataaaaatgtattatattttattatatatatatatttatacataaaaaccatcagagccaatctttgtgaaaggaaaagggggcatctggaagattacaccaagaaaacagggcttggtgcctccgcctacagaacaaatttcagctatgtcgtgtggccctgtcagcctagccgcttagggtggtgcacgcagggttagcagagcaggagtactggctggtactgccttcgtggagagggagaggaaaccctttgaaacaagcatccatcatggagtctattgatctggtcttccttaggacaggtggtacatgccatatcccactggcgtggcatagagtcccacaggcgggatgggaagcacaggtctatggaacgggtaggatgctccatatatggacgctgcctgcaggggcgagctgatggggaaagggagactgaagctggagggcagcataggttttgcagccattttcagcttttccagttctgcctcctgcagtcttttcgccttggcccttcggttctggaaccagattttgacctgggtctctgtgaggttcagagagctggagaactctgcacgctctgcaatggagaggtactgtttctgacggaacttgcgctccagggcgaggagctgggatgtggtaaagggcgtgcgcggcttccgattggtcttgtgtttcctcagggtgcaggtggtagggctcatatgtcctagagaacagagagaggagcggattagcaaaagaaagttacattaaaataatactaaaaaaaacccatctcccccgtcatctctctaggttttttcctttcgggcctcccctctcaactgaaagcacttagctttaaaaaaatctatatatacatacatatacacacacacacacacacacacacacacatatctatgtatggaaagacatactttgtttcatctttgaaaaaggtacctttgtcaaaactatgtgtgtttcttggggggagggggaccatatataaatgggtaagttgcttcgttttttaaaaatgagttttttaagaaaagttttggaaatgtaatggtgtaactgaaccttctatatggaaaacaaacagcattagagataacagaaatagaacatttaatgtaagacaagggaatcaagtggtcggtgagaaatgaaccgctatctcttctgagcataatttatcttctctttaaaaatgggagaccaggttcatgattagcccagcctcccttggacatggagacaatcacatatgggaaggaaaatgaaaaaggttttagcaaccgggttagctgtttcccttggtctcctctctgaaccagaaaaagtggattgcgtcagcatatttatgaaggataatcgtgcagataaggtctgtggtaaattaatagcatctttgaatttgggggcagtcccacgcaataaacagtcacaagctgtcattgcatccagtccacagattataaaatctgaacatcattttacagatctggatgtgggataaggttcttggctgggcgcttctgtaatataaactttactaagacgaagggaaaaattagctagcccataaatgtaaatgtcaggggaaatcatgctgcctccaaattgagagcacgtgatgacatcttagtcatcccctctacccattctatggcttcgggcaaatgtgtaaatgatttgtttgtcagggggaaaaacaagcaaaataaaggtatgccaacagcatccagactccacatttaaaatggattcaattacagcaaatcacggactgggacatccttgtgattccatagcatcaactaactttgggcttgtcttcctcaagggtgggtgggcggaggaggatagagctgtggtgatagaatacttaacaattaattttctgcatttggcttttacgagctatgctaattttccaaatgtggccacagtattaactctaatgtattcatgggagaatgttgcatttcttgtttagttactttggtggcccaagaaagagtttacacttcatacttgagggtgacacagcacaagtcccaacccagcttccatttccaacaagagatggatttgttccagtgtcgcattattacccatcactttactgaatcaaaaagagataagaggctttgtaaccaaccaaagaacagaaatctgggaaagggaaggataagaaactaccataaaagtctatacttttgcatttgctaatccctaagttactagacagccggggagccagcttcttaatttacaaattaacaacactgtcagagactctcaagagacctgcaaaattctcgccctttctaaactaggccgggccctcaggaggactcaggtgtctcagctcagataccaagttcctagcgtgtatatactcttgctcctggctctacgtggggttttgaagcactgtgcgcctgggcagggtaattccagctggtccttcgggttacatttgaattatgaaatccaggtgaccgggatcgcacatgtgtatcaaaaccatgaagctatgaggcttcctcccaatgcaacactccccatccctccacccccacctaattttaaaccagccagaggaaggatgcgattatataaggcaaaacagcgtttatcctacttcctccaaataacaaaatcaggcccgggcgggtagctccctctcgcc

SEQ ID NO: 1357 - DNA, 4024 bp, Homo sapiens
tcgtaagaagtttgtaaactgaaacagtgggtgatttaacagcttcttctggggttgagtcccactgagcagacaccaggctctaaggctctgggaaatgtcctgctttgatggtggtattacttgaagagagaattttagggacatgtggtgtgtcaatttagaaagagccagctgatgttggagggcagccaggcctggtgaccaaagctcttgacagtttcctgcctggtctggtctcagtcctggctttgcagcctcagctctgatgtcctgttgtagctccttggtctggtgaattcttagtctggcctcagcttttctgagggggaggatgttcaggggctggacctagctcctcctagactagagaaggggcacatctgccctgctgtgtttctcattcaaaactctatagggaggtcatctgttctgtgccctcattattttgctatgtgacttaccttccccctgctgaagtggaaaatcccaggcatcttgggagggaagtagcctctccgggggcaaaaagtgtagattctctttgccttgggacacccccgtacccctttccctgggtctctaggcttggaagagagtgccctgattgcaaacttctctgaagctagtttgctgatgagaaaaatggctttgctggtcctgaagaagccccatttggccctgcccccatggctggggaggtccctcggactgagtttcagtgctttgcctcttctccatctgtggggtaggctttctatggtggtggccactggttctgctttataattaggaaacttcaatttgtcagcgagcagtaatacgttcatttattatcacgagtcatttgagccatctttggtttctccaaagatctcagttctctgagttcagtgtcatcagcagaaactaagcatgcaaagcattggctggtttcctctactcttttccctcaaaattaaggtactaagaacccatttgaaatcatcacatgtaatggccagaccaggggattctactggcctggttatgacgtcttttacctcccttccttgcccttttggttagttatttgctaaaaggagagtgtcttagtccctctgaactaagcctccttagcaagctgaatccatgaagagaggccattctagtcttcatggtggaataatttccacgaaatgctttggacatgttgaggactctgactctgtaattctgagacattggggtccattatttctgaagatgggtacacctggattgatttaaaatgttatggaagaattcagatccaggtaagcaagttgaagaatcataggcaatttcttcaagctattgaattctatgtcatgtgtacctatgtatgtgtgtggatgtctgcggcacagagcagagcccttggtctatagacctaccatagatattgttccaaggggtgctgcctgcctcatatgagtgtggccttacaggcctgggtacccagaaagcctggaccggccatctgctgtcacttttctcccaggcctgcagcccttcctgtgctgctggatctgtacagtggtctatgtctgagccacattactgtgtcccccaagggcactgtgggattccctatatctctcaccctggaagccatattttctatgtgctacttttctgtgggtgagacgggggtcggggagaggtggggacaggagggaaggcacccatcagcttggcaagtgatctggatgtgtggaaatggcttcctattgctaaaggcttgtttggaggcttgctgcctaagcagttgccaccaagtgcctcagatcctcctatctctctaggacaaccaatagagaggctgtcatgcacattctttctctgtgttaagtttgtccaccatgggcccagtgaaactactgaagacaccaggtatgtagtcaggggcaggtcaggtgtcagagggaaatttgagtcctgggctgtttctgtctgacattgtgtgggtaatcggttggccaggcttgtaaaagccctgttgcccttcttggcttgatttagactgcaggattcagaaggaagtgggggttttatactgccagcaaaaaattttggctgaatgtagggtttccctgaattaggcttgtctttttactgcattgccaaatcctcggcttcttgtgtcttgggagtgtagctgttggcagatgaaagtgttcagatgacgatgaactgaggatttggggcaaagtactctcccaccttaggggtttgctgaattccctcctagctccaggattctgtggttctgtgattctgtggattttcattagccatgcttattaatcaagagtctactgttaatgggactacaggaataggagtctctacattaagaaatactttttgaaagcccaaaagcctgatgctgtcttctagttcccacccaaggacctgttagtggaagtgctttgactgggcagggtgccacccattttgacatgcccagatcttagtggcttcagggagactaaactgattcaggagattctagagccctggtaagggctgctacctgaaaggaggtagcagatttcttaattattatacaagcacaattattatacaattaattatttcttaattattatacaggccagaccaggcttcctgggtacccaggcctgtaaggccacactcatatgaggtattcaaattaaatgtttttaatttaaaaacaagtaatacattttcaatgtagaaaacagaaaagagagataaacaaaaggaaaaaattataaaatacattatcttagtacccagtagtaatcattgttatcactatggtgtaatcattctagtcgtttgtacattttttcatatgtatctaggtgtaatgggaaaatgccatccacggcgtttgataacctgctttccctatttatactcctttgtatgcgtaacattctggataactctgagtagaggtgaagtaaataatagctgtaggtataccaatcagagttcagaggggaaacatcaagtgaggtttacagatgactcctgcatatgcacacaattcacttgttaaggcgcggggaaagagttcatatcttaatggggatgagatgcatttaaaacaatcactgagtttcctggagggttaacttaccagttgttcatggagcagtgtaatccctaaatcaagctgtgcaaattgtttggcatcatgaaaatgagtttgcagttcagctgaactttgcttttcagctggttctgggacataaccatgcttttgttggaccccacaatgggcatcagtagctcattgctcttccttggtggcaggacctacggagaattgtcatgaatgatggcatcatcatcttttctcatcttgtgtggcccgttacctctaatacattgacatttcttataaaggtctgttttgcaaggcaaaaaaaatgtaaaccttgataaggactttgtagtcttgtaccatttctctcctttccatctccaggtctggttgtatctccctcaggtgacctctcacttattgtgattgtgttacttgtgcaagagaaactgcatttcctgtgggtgcagaagcaagacccaccacaaagcagagagtttctcttgataacggtcagggaaggagtttgagtgtttggccatggtcttgcttgaggattctgagatgctaaaatgagctactgttgggttttttagcatttcttctctctctagaactcatcaaaaatataatagtaagcaccaatgtggaatagttttgaggtactgagtgaagtcctttgaggattcgtggcctttgaattctataacgacaccattgttttccttctaaggtactttgagtaattgacatgtaggattaatcaggtatttattggatgccaggtgctggactagaggctttacacacattaattcatttaaacttcactctatggaggtgactattttattctcactttatggataagaaactgaagttcggagaggttaaatgatttat

SEQ ID NO: 1358 - DNA, 4090 bp, Homo sapiens
ctcttctttcatctcttctaccccaagactagaccactgcattttaaatgtattacatgctgattgtaaaaaaaaaaaagttgttaaatataaaaactacataagaacaaagttatctacatttccattacatggcataagactataattatatgatgctcccaacctataatgtatgtagactgtatatttacactgtaaatatttgtgtccttttttgtgaatttcattcttgcttattatttcaagcagtttacaatgctattaagtatgctttgagatattttgatggttgtataatttccagtcttaggattcctatgatttatctaactgcttctctactattttgtttttccatcattacaaataatgtataaggttataaacgtatcctttctcatttcatcacaccattgccaactctagttattataaaaattctgtaggctaggcatggtggctcacgcctgtaatcccagcactttgggagggattacactagatcacttgaggccaggagttcaagaccagtctggccaacatggtgaaaccccatttctactaaaaatacaaaaattagctggtgtggtagcacacacctgtagtctgagttacttgggaacctgaggcacgagaattgcttcacactgggagatggaggttgcagtgagctgagatcatgccactgcactccagtctgggcaacagagtgagactctttctcaaaaaaaaaaaaagtatttactcatttgacaggcaaaaaataacataaattacttgtttacctatgaagtaaaacatgttttcattgtttttggcattgtgtttctttcatgaattgtctgtacatgtaggaaaggctgttctttagaaagataactgaaatttttttaaaaaattgacacttgaataagaatggttaatctgtggagagaaacatgtttagatgctgctaaatatctgggaattccatgccaagtgtagctggagaatgattcgtgatcatgaatcacgaggtgaaaacaaggcaggacttcctaaaggtttctgtattacttttctgcaaatataatccactcagacattggtttcatcattatatactgggctagagcatgttcttatttttatttctctttgtttaacttaaagcacatgttgaagacataatttactctttttttaagtgatgtgaaaattgcatggttttccagaagcattacattgcacattttaattttgagcctaattcatatttcgctatagaaacttctgtctgtaaagtggaagactagctctaagtcaggcttctctcctatttatttcagcttcccagggccacttttctcacttgccagatctgggatttcttattaggagtatctcgagaaagatggtggaaggcatgacttgatcccaagagtttctctttttgactcctagaaatagcctttctcacctatcatccttctctgcctttttttttttttcaaactttcttcaagtactctttaaaaacagtttaaatttcattaaaaactgtagcatgaattcatattccaactcattccagtagcactttaggaaggacttttctaggaaggaggttttttgttctgttttaaacgcagtaagacctagcttcagagcactctagggctctagctaatttgttcccctttgtccctaggtgctagtcatctaatgaatgaggtgtttcttagcattatctacagatatggctttaccttcaattgtgtcaggttacatttacctaatgtcagcaagacttcacatttcatgtatgaatatccagatgaaataaagtcctggttgtattcaccatcactatttggagccttttgtgtaatcattaatcattatttatgcttcacaggtttgttgtggcctgttcagcctggaaatcctgtcccgagactgatgcggaaaagctagttcagctgactttttgtgcttttcatgatatgatacagctgatgaactctactcatctttagagatgaatcatctattaagcacttaccaaaacatatcattaaactgagtgctgggagtgagttggtaatatgagatgggaaggaatgttgacttgctaacattcctttaacaagttaagaaaacttgttaaatgtagaaattagtagaatcatgctctctaaatttattctgccatagaaggtagaaatatttttaagctcctctgatgcagcagcaatgcaaattatgacatagtgaatatagaactatgcagtatttaagcctcaacaatccaaatctacaaactttaacaatgcaagtcttactctaatttttaagtatttttgttggtacttacatgggttataaatcctctctctggacatcaatgtagagtccatctttcaagcactttaatttttttagctgccaaagggtatgaattacattattgtatgctaatttccctgaaatcaatgccttctatgttcaccacagggatacaagcctgttatgtttgatgggaaagaccactacaatctaatggtgatctaaaataacttttttgggctgggtgcagtggctcatgcctataatcttagcactttgggaggccaaggtaggaggattgcttgaagctaggagtttgagaccagcctgggcaacagggtaaggtcctgtctctacaagatcaaaaacttagccgggtatggtggtgcatgtgtgcctgtagtccaagctacttgaaggctgagacaggaggatcggttgagcccaggaggttgtggctgcagtgagctgtgatgtgcccttatgctatagcctgggcaagagcgtgagaccctgtctcaaagaagaaaaaaagagaaaaataactcttttgaacaaacagacaaattagctagtagtatggagatgtataccctctattacacacataaaaccgtaacaaaattcattgtggtgtattataattagttttgtgaatagaaaaataaagcacttatgtttaaatttgttacagtgacttttaaaggattaatgttgaatcacattgtcagaattttttcctcctcgctgttcaattttgtagtttttactctcaaaaaatgaaattctcaaaattatatagctttttgttttgtttgaataaatgattcattcctgtttgcttttctggtgctttttgacctcagttatatattgctgtgtaattaaccatccaaaacttagtgtcttgaatcagtttattgtttctcattactttgtcagttgattgataacagctagacagttcttctgctcatcttgcctgtgtttatttgtacagctataatcatcaggcaaccaggactgaggctggaaagtttaagatcacctcaccaactatctgtaaatttggtggctgggactgtctctcctgacatggtctctgatcatctagtattcagaattgagcttccttacttggtagtgagagtgttctgagaggtgaaggtcccttgaggcctaggccctgaagtcacatgccatcacctggctgcattttgttgattaaaccaagtcacaagagaagtccagattcaaggagtggggaaaaagtaatatcttgataagagaaagtcactttgtaaaagagtgggcacagagggcatgattatgggtactatagcaatctgccagacattttaatatatgtaaagattacatcatactcagggtactgattctatacatcccttttaagaaacatgtacgctctgaatttgataagactggtttattgctaacaattaagccctttacactgtgccagcctctgtcctgaaaagcatcagtactatttctctgtgaaaacattcagagttggcttcagtagcatttgatacatttcttcacagttggtatagaaaaggaagatgagatctgaactaagaaccttttcccctcattctaatgcagggttttaaactagatagcgaggacatttagaatcatttggttggtttataaatacaggttgaacattccaaatttgaacaccagaaatgctccaaaatccaaaacattttgagtgctgacataagga

SEQ ID NO: 1359 - DNA, 4047 bp, Homo sapiens
caagcagtttacaatgctattaagtatgctttgagatattttgatggttgtataatttccagtcttaggattcctatgatttatctaactgcttctctactattttgtttttccatcattacaaataatgtataaggttataaacgtatcctttctcatttcatcacaccattgccaactctagttattataaaaattctgtaggctaggcatggtggctcacgcctgtaatcccagcactttgggagggattacactagatcacttgaggccaggagttcaagaccagtctggccaacatggtgaaaccccatttctactaaaaatacaaaaattagctggtgtggtagcacacacctgtagtctgagttacttgggaacctgaggcacgagaattgcttcacactgggagatggaggttgcagtgagctgagatcatgccactgcactccagtctgggcaacagagtgagactctttctcaaaaaaaaaaaaagtatttactcatttgacaggcaaaaaataacataaattacttgtttacctatgaagtaaaacatgttttcattgtttttggcattgtgtttctttcatgaattgtctgtacatgtaggaaaggctgttctttagaaagataactgaaatttttttaaaaaattgacacttgaataagaatggttaatctgtggagagaaacatgtttagatgctgctaaatatctgggaattccatgccaagtgtagctggagaatgattcgtgatcatgaatcacgaggtgaaaacaaggcaggacttcctaaaggtttctgtattacttttctgcaaatataatccactcagacattggtttcatcattatatactgggctagagcatgttcttatttttatttctctttgtttaacttaaagcacatgttgaagacataatttactctttttttaagtgatgtgaaaattgcatggttttccagaagcattacattgcacattttaattttgagcctaattcatatttcgctatagaaacttctgtctgtaaagtggaagactagctctaagtcaggcttctctcctatttatttcagcttcccagggccacttttctcacttgccagatctgggatttcttattaggagtatctcgagaaagatggtggaaggcatgacttgatcccaagagtttctctttttgactcctagaaatagcctttctcacctatcatccttctctgcctttttttttttttcaaactttcttcaagtactctttaaaaacagtttaaatttcattaaaaactgtagcatgaattcatattccaactcattccagtagcactttaggaaggacttttctaggaaggaggttttttgttctgttttaaacgcagtaagacctagcttcagagcactctagggctctagctaatttgttcccctttgtccctaggtgctagtcatctaatgaatgaggtgtttcttagcattatctacagatatggctttaccttcaattgtgtcaggttacatttacctaatgtcagcaagacttcacatttcatgtatgaatatccagatgaaataaagtcctggttgtattcaccatcactatttggagccttttgtgtaatcattaatcattatttatgcttcacaggtttgttgtggcctgttcagcctggaaatcctgtcccgagactgatgcggaaaagctagttcagctgactttttgtgcttttcatgatatgatacagctgatgaactctactcatctttagagatgaatcatctattaagcacttaccaaaacatatcattaaactgagtgctgggagtgagttggtaatatgagatgggaaggaatgttgacttgctaacattcctttaacaagttaagaaaacttgttaaatgtagaaattagtagaatcatgctctctaaatttattctgccatagaaggtagaaatatttttaagctcctctgatgcagcagcaatgcaaattatgacatagtgaatatagaactatgcagtatttaagcctcaacaatccaaatctacaaactttaacaatgcaagtcttactctaatttttaagtatttttgttggtacttacatgggttataaatcctctctctggacatcaatgtagagtccatctttcaagcactttaatttttttagctgccaaagggtatgaattacattattgtatgctaatttccctgaaatcaatgccttctatgttcaccacagggatacaagcctgttatgtttgatgggaaagaccactacaatctaatggtgatctaaaataacttttttgggctgggtgcagtggctcatgcctataatcttagcactttgggaggccaaggtaggaggattgcttgaagctaggagtttgagaccagcctgggcaacagggtaaggtcctgtctctacaagatcaaaaacttagccgggtatggtggtgcatgtgtgcctgtagtccaagctacttgaaggctgagacaggaggatcggttgagcccaggaggttgtggctgcagtgagctgtgatgtgcccttatgctatagcctgggcaagagcgtgagaccctgtctcaaagaagaaaaaaagagaaaaataactcttttgaacaaacagacaaattagctagtagtatggagatgtataccctctattacacacataaaaccgtaacaaaattcattgtggtgtattataattagttttgtgaatagaaaaataaagcacttatgtttaaatttgttacagtgacttttaaaggattaatgttgaatcacattgtcagaattttttcctcctcgctgttcaattttgtagtttttactctcaaaaaatgaaattctcaaaattatatagctttttgttttgtttgaataaatgattcattcctgtttgcttttctggtgctttttgacctcagttatatattgctgtgtaattaaccatccaaaacttagtgtcttgaatcagtttattgtttctcattactttgtcagttgattgataacagctagacagttcttctgctcatcttgcctgtgtttatttgtacagctataatcatcaggcaaccaggactgaggctggaaagtttaagatcacctcaccaactatctgtaaatttggtggctgggactgtctctcctgacatggtctctgatcatctagtattcagaattgagcttccttacttggtagtgagagtgttctgagaggtgaaggtcccttgaggcctaggccctgaagtcacatgccatcacctggctgcattttgttgattaaaccaagtcacaagagaagtccagattcaaggagtggggaaaaagtaatatcttgataagagaaagtcactttgtaaaagagtgggcacagagggcatgattatgggtactatagcaatctgccagacattttaatatatgtaaagattacatcatactcagggtactgattctatacatcccttttaagaaacatgtacgctctgaatttgataagactggtttattgctaacaattaagccctttacactgtgccagcctctgtcctgaaaagcatcagtactatttctctgtgaaaacattcagagttggcttcagtagcatttgatacatttcttcacagttggtatagaaaaggaagatgagatctgaactaagaaccttttcccctcattctaatgcagggttttaaactagatagcgaggacatttagaatcatttggttggtttataaatacaggttgaacattccaaatttgaacaccagaaatgctccaaaatccaaaacattttgagtgctgacataaggaaatgctcattggaacatttaggatttctggacttgggatgctcagccagtgagtataatgcaaatattctgaaatatgaaacacttctgatcccaagcattttagataagaatactcaacctataatgtgtaatgagttgcgtattttggagactgcatcacctgcacagaaacctcctctcactcacacttcaccactttt

SEQ ID NO: 1360 - DNA, 4042 bp, Homo sapiens
gagaaactacatcacttacacattgctggtaggaatgtaaaatgggatggccactctggaaaacagtttagcagtggcttataaactaaacatgaaattgccatactgctccacaattctactcctgggtgtttatcccaaagaaataaaaacttgaattcatacagaaacctgtatacaagtatttacagcagctttatttgcaatagccagaaacaggaaataacccagctatccttcaacaggtgaatggttaaactgtggtacatccacactgtggaatatcactcagtaataaaaagcaatgcctatgaatacacacaacttcagggaattagctgaaagacaaaagttaatcccaaaagtttacatactgtatatatttttataaaacatttttaaaatataaaattatacaaacggagaacagattcatgtttgccagagtttgagaggaatgagggtgggaggaagggatatatgcatggctctaaaagggcaatatgagggatctttatggagatgagaatgttctgtatctttttttttttttttttgagacggagtctcactctgtcgcccaggctggagtgcaatggtgtgatcttggatcactttaacctccgtttctcaggttcaggcgattctcccgcctcagcctcctgagtagctgcaactacaggtgcccaccacgacgcctggttgatttttgtgtttttagtagagacagggtttcaccatgttggccaggatggtctcaatctcctgacctcgtaatccacccaccttggcctcccaaagtgctgagattacaggtgtgagccaccgtgcctggccagtgttcttaattagtggatctatgaatccccatctgcaatacagctgcacagaactaaatccatatgcaaatgaatgcaagtaaaacaagggaagtctgaataagatgagtggagtgtatcaatatcagtatcctgcttgtgatactgtatactagttttgcaagatattgtcattggcagaaactaggtaaagggtacataagatctctgtattccttacaattacatgtaaatccataattatctcaaaataaaaactataattgttttaaaagtaccatagggctaaaccaaacatgactgcagtctaaatgcagccctcaaccaccagtctgtaacctgaagtatggtggttttgagcttctcactacatttgtatgaggtaggcataatgtattcccatttacaaataaggaagcttggtatcctgaagtgccttgtccaagttgttaatgttagtaaatcaacatattttgttacaagattttgttggcataactttggtaattgtttgggggataaaaagtagtctcttctgatttcagctactctttaacttacgtggggtaacgtctcgatgaaaggatgtatgttggcagctttggctgcactcacaatttcatcctgtgatacaacccggctgttgtctccataggcaatattctcggcaatgctgcagtcaaataggataggctcctgagacacgattccgagttgagctctgagccactggacattgagtttctttgcttcttgaccatcgagaagctgaaaaccaaagtccacaaactataagaagggtataaaaaagaaaaaaaaactaaaaagttactagattgtccatttggaggatcgttgcatgagggtgtcagcagcttcaaaacaacaaccctccaagacttataccattgaggccagcatggccaacatgatgatttttatggtgattaagccatccctatcttggtctaactggcaaaatggtagcacatttgaccctcttttttcacacttctctttgtccttgtctgccctcctccagccatctgtgtcctactctgcgttaaagaagcctgcatcaaggtgtcccactcaggtctgctgtccccagaataatcctaacccttcaccttgacttgatttccccttcccccatgcacagcagtgaaaaagctgatcagaagcagggccccaaaagctggttgactctggtcctacctctacctctcttttccctgaaaactactagccttaactttccctcacctctctgatagcactaaggacaagaatcccatggaaaaggaacaagttacaaagggcagtgtctttgggaggattatttttgctggcagtgatggttttgtttttgttttacttgctataggcaggaggcatggtgctcctagggaagtgttgtaatatgtacttgaaaatacagcctcgtgtaaggtaaagcttacaggcaaaggaatagacacaagtccagctagtcttgatctcaataaagaaaaaaattcccaccatcgtatcagcacaccatatttacagagttttggtgagctggtttgcctatgttacctgcagaatagctataatagcaaagcagaagatttccagagagaaacaactaaattaggcttaacaaggctgatttaggcttaacaactattaataaaagaaacaaggcttaacactttggtgactgtctaatggggacaggctcccagggctctgtcatgggtgctgtcccaaggttatggcagatacaagcattatcagtaagagttggtcttcactcaaggaagagagccacggggctacatgctagaaaatcaatgacaaaagccaaatatgaaagggctggaggttgaggatcaaagtcaaagttcgagagccgagaattcaaggtaagagaaggcagcaaaactgaaagcggtggggaggcaataagcaggtagcaccctgttttggaagtcagctttgaatttgggcaggagtctgtagttcacctttataagccagtaagtcagtatttgcttagaacaatcagactgactggaaaggcccatgacagggtaaaaattaaacttatattcagtattttctgagctagactgaattccagacattctgtcctattgtccccatatatttcccagatatggtgccagttggggtttatagaatgtggtcattgtatcaaacaggattctaggtctacatttgtccaatattttccattatgacaatattggttgggccaattaaaatatagccttcaatcaagttataaggaaatgtgctcaccactgtccccgccaaggggtcgtagaaccgctccaggagctggaccaccgtgctcttcccacagccactgctgcccaccagggctagtgtctggcctttcttcacctccaggctcagcccctgaagcactggcacgtttgctcgggtgggatagttgaacacgacttcattaaatgttatatttccttcaaatttatcctgaataaatgtttaaatgttgctattataattggcctgataattattggaataagaaatattatttcaaggaaactttaccaaagactgtagtagagaaacataaaattcatatttggtatagttctggtgccagttaatattgatagcaagttattatggtgtgaaatgaaggtgagagataggggtataggtgagattagacaaaaagtcattaccatgagttgttatctaacttagtttctgatttctttaagatattcatttagctttcccaactgcttattctgaagctggaatcaagccagtgtccaaaagactctaaaggcttggaaatttagcaacagtttctacccaaagtttcagtgggcagccctgatggcaaaccctggcagtttcttaagttcactttctttatctcactcactgggcacagcaattttatcagaacatgaaatacctgggaaagtcctggaaagactgtgttaagtcctagcctctttacctacacagctgcttgtatattacaacgtgtagcatcttgtgtcatacaaagaacactcagatgtgagtttaagttacctttatagataataaagcacaggattattactctcattgtgaacgaactgcccttcttaccaattacatcttaactattataaaaagtgattaaagtcaaattactaattgca

SEQ ID NO: 1361 - DNA, 4044 bp, Homo sapiens
aaaactcaacggcagagggaggatggctcccatccatatttgtttattcctaaattcatcccatttttatttccttttatacattgtatatgtttcacaaatggtctaaccacatgctattttcttatccacactcataattatgacttgtatatactagaaagtcagctctgcccactggacagtggaaagattcaccaaaaacaaaaacctataatcatgttcatctttcaaaaaggagcgatatcaaagaaaagagaaggtagatggagaaataagattttcatattcttcataaatgttaggagaactacttactgtcattgcatttccaatagtatattcttttgatatgactagagtggatccataccagaaggccagtgcatatgatgcatatattaacaggaaggcaatacccatggaaatgtttgctgaaatagcttttttaattccaatctctttggcattttctaaatgtttctgatacctaccagaaaaatgagagggaaaacattataattaagaataacaatccatagtccgagtcacactcggctcctatatagttggaggtttaagtaacaaagtcagtcaaggtaatgaacccatggtgagacccagatctttgggaattgaactaattcaggatcagccaggcctagaacagatccaagccttctctttactggcccggttccatttcccttcatccattccaagccaaccaacattcctgtggttattccagaattgagggctcaccctgggatatggaagagcttctccatcaccttcacggcaatatcacaagtcagggttaagagggaatgagagaaaccaagccaaaccagaattgattgtaaatgtcactggaactcataaacagttagattcttaactctggtcaatgtctcttctctggagaaaagaaaatcgtccctctattgtccactgggtgagggatgaaaattttacatgttgttgtacataaacataggcttctctctttgacttttttaaaaatcaggctgaccttcatctgtcaagctagatacaggttataaggtagtcactacttatggaatatgagttcttattcaatttttccagactttagtttcatatatgaaaaatggatttaataatgcctaatttgcaagataattgtgaggttggtagataattgtagaaagtagtacagtagctggttcatagttagcaagcctgatcatttctcttactattatattagtatcattgtgttcaacttttatctcttcctgagttttgctcattctattactatcatatctttgaatcataattcaaatgcattattactggctgctggcatttgatataaagtttaaaatatctagaatgattctgttaaattacaattttttttcatcaagttaaatcaaatctactttttcatactagacccagagggtatgtaaaatttaatttgggctccctgaaatttaaagaaaaatccaatgggtatgcaatgacacttcgaggggaaaatatcacacaaactaggatatttttctttgtgacaaaaaaaaacaaaaaacaaaacacagcaacaccagttttagtgttgaaccaaataaaacatgagaattcattagtcttttaaaaaacatattctgccatcagaaggtttgtcttttttattgcgtaaagcacccaggtcttcagggtgctttcctctggttgggggctgcattcatagagcacagctgcatctctgggggtagccagcaggccacagctagcgctgtgatttctcctgtgtggctgagcctcaaggcgtggcaggaagacttgcatctgcccagtgtgacacacagctccagtgacagcagcggacacactgtaattacctttgcttaggtggctcgcttaccggggctaatggagcggcacagattacactgacatcctgaggtccaactgagggttagtgtggtctgtgtggactattatgtacaggaagcagcagtgagagagaaaaaaggaagaggttagaggatcagaaacatgttggctttgaagagggattaaggaatagaaaagtagaaaattaaatggggggaataagggaaactttgtttttaatgctagagaatttccagagaatttttatatccaagagttgtgagtatcaagagtcccatagaatagccaaagaaaatactttatatggaatcatacttcaactacagtaggggatattgttatttaaataaaaccctaagtaattattttcatttaagtagagcagaatagcctttttcataggtgtattcttatccccaaactcattgagatatacacactaaagatgtatacacagcttttcatatgtcaatcatgccttgataattttttcagagaagagtttgcaacatgcctccagatactggtcaattttccaggcttatcctggatcattaaagttgaatgccagaggcctgggtgggaagccctgcctcattgttatggaggacccacaaggccctacaaagaattctgggctataactaggaagtcgatgttttctcaggtttttctcttctatattccagttcatagtcattaaggagtaaaataaaataaaaaatattttgataagtatttttaatataattattttcctttgtaaccctacttattttgttttttggggcttttatttatttattttttggtttttaaaaaatttttactctttttttgtgatagaggctcactctatcatccaggctggagttcagctcactgcacccttgacattctgggctcaagggattctcctgcctcagcctcctgagtagctgggaccacaggtgcacaccaccacactcagcttattaaaaaaaaaaaaaattgtagagccagggtcttactacattgcccaggctggtcttgagctcctggattccagctaccctcctgccttggcttcccaaagggctagcatattttggtttatgcatttaaaaacaagggagtccatttgtattatcacatagccaaaagagtccatggaacataaatgattaagaatcttgctttagagtctgacattcaactatagccatcagtaaagggtgcttataatttatgcgagaagggttaatattaggaaagggaaggtaaaaaacacataccacaaagaagaagcaacaaaatgtaaaaacacattccttaaaccagtggctaaagaaccttcctgacctttccagctctttgttctggcccccgaaagctatcacagtcctgatggcccccagagcctcttctgccacggcgcctgcttttgcataagcagctagttctttgtcactaaatgccgagagtatctggacagaaaagaaacagtgatcacttttgtatagggagaaaagtttaaaggcactctggtcaaccctttaacctactttttcttcccaaaccctctcctttaacaaatattaaagtcatgtagcaaatgccagtgttctggatccaatggctgcgtccacatccctcaaaggctatatctgacccaccctggtgataggctccccaagagtactcaggaaaaaagaaaatccacacataattctctaaatagcactcttgggaacactgtcaagttccacatctactgtttttctttgttagttgtaaggtaaaataaaataaaactttactgctttgaaagaatttaccattcttaactttattgtgtcacaattttttttttttttttttttgagacggggtctcactctgttgcccagactggagtgcagtggcacgatctcggctcactgtaacctctgcctcccagtttcaagtgattcttctgcctcagcctcccgagtagctgggactacaagtgcacaccaccacgcctggctaattatttgtatttttagtagagacagggtttcactgtgttagccaggatggtctcaatctcctgacctcgtgatccacccactttggacttgtgtcacaatttttaattactataaaaacaat

SEQ ID NO: 1362 - DNA, 4041 bp, Homo sapiens
aggctatatctgacccaccctggtgataggctccccaagagtactcaggaaaaaagaaaatccacacataattctctaaatagcactcttgggaacactgtcaagttccacatctactgtttttctttgttagttgtaaggtaaaataaaataaaactttactgctttgaaagaatttaccattcttaactttattgtgtcacaattttttttttttttttttttgagacggggtctcactctgttgcccagactggagtgcagtggcacgatctcggctcactgtaacctctgcctcccagtttcaagtgattcttctgcctcagcctcccgagtagctgggactacaagtgcacaccaccacgcctggctaattatttgtatttttagtagagacagggtttcactgtgttagccaggatggtctcaatctcctgacctcgtgatccacccactttggacttgtgtcacaatttttaattactataaaaacaatacttccagacctcctcatgggcattctgctgaataataagatagccaaacaagatgtttcaggagaaaagcaaaggaagaatcaaaacaaaagagatacaggtagttcactgtgtaaatcatcaacgtcaggatgagcaaaaattgccagtaaaatttctcaactctgaagtgttggctaaagtagaatacattttgtgtattttattgccaggcaaaactggcagagtgccacttaaccatcacaggtaatgattaaaacaaatagaacaaatacaaactctatttaaaatttttatgttcatgcaataatttgagggaaatgttatattttaaagttgcacttccttaactaagggtaatcgaagtaagaactgtgaattttttttttttttgagatgaagtcttactctgtcacccaagctggagtgaagtggcatgatctgggctcactgcgacctccacctcctgagttcagcgattctcctgtctcagcctcccaagtagctgggattacagtcatgcaccaccacgcaaggctagtttttcatatttttagtagagacagagttttgccatgttgtccaggctggtctggaactcctgacctcaagtgatttatgtaccttggcctcccaaagtgctgggatacaggaatgagtcaccacacccagcctgtgacattttgaattatgttaaaaattaatttccttatgaaagcatcatattaacaccatgttactggatgtagtttcaactgacatttaatgtagacctgaacaggtacaagtacgagacttctgcatattaaagattactgtgtgcaggggttaacacacataaaaaggcccagctttcacatacctttgcccaaacggctgcagagagtcctagaatagggctgatggccattatcacaagggtgagcttccatcctctgatgaatcccactatgaatcctgcaaaaaacgtggctactgcttgaaagaacattccaaccttgtcaccaattccttcactgattttggagatgtcactaaaaaagatcacacctaagtggttacaggcaggaggtttcagttagaaagatgaagtagacatccaacaaacacatagacaagtaaaatttgttcactgactgcaagcctctttcagagtcttagcctcttgaataacatcttccccacctaaacaccgcacaaaggaagaaattcaggattgatcaatgcttctaataagttagtatcattaagttgatactattaaatgagtcaatcctatgagagaagcattaacattttgagcataaaaatgtatctgtttaaaagcaagaattaagaagaacattgcaacaataataagcaacagtagtagggaagtattactgcatttcttcttatagggaagtaatagggaagagatctttgcttctactcttgtccctattcccaaccaagtctattctcaacacagcagccagtgggatgctttgaaaatgcaagtctgaccatgctactcctcagctcagaaacttccagcggctgccatttcactgggtgaaagctgaagtcttgaagtctttgtggaggtttacaaggccctaaatgtcttgcttttcccttttttttttttttttttttgacttatttgctcaggatgcctttgccaggactcccagtcaggaaagtttatcatctatctccctctactggaatgtaagcaccaaaaggacagagatctgtgctttgttcactgatatattacgaacacacagaatggtacttcgcacatgaaacaccctcaaatatttgttgaataagtgaagagttgacaattactaaagcaagtctctttgtaaattaattcaatcatctattcattgattcaaccatctttactgacagtctagcacctgtcacgtcctgcagtagaaagttccatgagaaataaacaggtataagatgtgaattcagtcctcaaataaacctactatgcaccttgggggaaagccaacatgcaatggcataggctatagatgctgctagacatggctgccagatgatcgatttctaatatagatcagatgctcaatctagtaacatttttcatttaaaatctttccttgacatattttcacacagtaattaatttctatatgaaagtgtgacattaacaatgtacctactctgttagccgcgtattgagttcagtggtgtcgttgatgtcaaaccatcctatttcctgtcgtagaatagcatgaaaaaacttctgcctaattttcctgatctgtcgaccagctgccaaagtccaaaatgaaacttgtatataggcagcaacaagaactccagcacccaatcctgagtagtaatatgcatatctgaaaaaaaagagaaaggctctattaaataccttctcttttcttttttcttttcttttcttttctgaaactgagtctcactctgtcacccaggctggagtgcagtggcaccatctcagctcactgcaacctccgcctcctggattcaagtgattctcctgcctcagcctcccgagtagctgggattacaggcatgcaccaccatacctggctaatttttgtatttttagtggagatggggtttcaccatgttggccaggctggtctcgaactcctgacctcaagtgatctgctcacctccgcctcccaaagtgctgggattatagcatgagccaccacccccaccctaccatcctttattcatctctttcaggagaaattttcagaactggaaattaatcaatttactaaacttaaaacaaaaactgtataggacattataacaaacagacattacatttttctttttttaaattataaagtgatgagctccatgatggcaaatctatttacttgaactgttagccaaagaaaatggataaatttttgttgttaactgcaaaaaagttaatgatttgtttttaactgatattgataacttgtggatacaatttaactcctctttaataattatattctagacttgtatatcttattgtactgaaaagttcactactatttacatattgcaaatatagtaataagcagattgaacatgtgaaatcgccctttccatattgatttttccacattctttataaaaagaaccaaaaaactttgttcctatttgtcagaatttgaaatattttaaaaaaagatatgataaaatgtcatgaattcaaacgaatttggaatgttttaccaaattagtagaaagttagtattttaaaaaataataagtacatatcaatactttcaaatttttattatctaattttataaactgcttccagatagacacctttcaggccttttagcatacagacagcactcgttacaatcagcaacactgctatgcagacatacaaacatcatgcttacaggctttagagatttctattgagaaactagaaggaggagaaaatgccataaatgacattattggatcaaatgacaaaattggaatatagatgttatattagataaaagtactgaaatttactgaagct

SEQ ID NO: 1363 - DNA, 4045 bp, Homo sapiens
tacatttccactgttctcaagtagagtgacttccttactttatttagaagcttcctgtgtatttccttcacctgtattaaaagtcaaacaacaatacacatatttctttaaatttaaacgagtatttgaacaattttctgagaattttacaactccttctatgatatctggagtcaaccagatatccaaatcattaaataagatggtaatgaatagcaaaatcaactcccaaatttttacccagttaaagaaatgctatggatttttttaaaaggtaaagaaatgcttacctggaaaggagaagtttcctgcagtatcaacaaatttgtcagtcatctctccaaatactatcatcatgagggggagacctgatccgtgagctatggccatgatggtacccagcgacataaacaatttatcctgccaatcggagtatcgaaactaaaaaaaggaaataaaataatacttagctgtggaatggaatttctcctcttccataattatatattctttggatttttatttaaagtcagtacttttttaagagttgtaaatgaatgtcttagaaaaggaggccttcaaatcattaacaacttaatttcatgattctgtttattttgtattctgtgaagaaatcaatctaattatgtttaattggtatctgatttgaataaataattactatacaatcaaaagggataaaggtttaagaaatattatttgatatcccagagctcctgtggtaataaagaacggctagggaaagacattaagtttaaacacacacacacacacacacacacacacaccacatcctttaaaaaagcattcagaatatttcagagggagaatttaaaatagaggaaaatagatgctctgagttttgagataagatccctttagaaggtttaagttagctttaaaaaggcaactcagtagtgaagcacaataaacattacagtgtgtctatatatgcaccttagggaagtcttgcctatggagatccttatgcagaaccttttttaaaaatttagttttcaccagtgtcacctgccaagtatgcagaaccttgaagggtaagagggagttcgctggagaagaatcggcgagtgtaaaagaagtaggaagaatttaggcttagaataagaaggtaactagaaactacatggaatgcttaagtaacccctggcagtggaattcctgaagggcacagtacaaagtgtgggagaggatgttggagagagatagaaggcctgcgctggtgggccacaccaagaatcttggacacagtactacctacagaggggaagggtgataccagttgtcacagtgaagtgcacaaccctcaagaactaaccagcagttcagtgttctaacacttcaaaggactttgttactgtcttattagtcctcttccatttctcaccttttctttctgtttttgattgacccatttatggctctctttctctttgttcttctttcctcctctgccttctagactacattttcctcatcttacatttccatttctatagcttcctatcttttttttctctcctctcttttaaaatgctttactctgcccattccccccacctcagccccttttggggacaaagaacagttattgggagagagggtgatgagccaggcttggcacagtggagcctttgagggctgaagctaggtcagactgggtcaataacccgggtgaggctgaggttagaggcacatggtggaaagtggatatgtgtgtacaccattctcaaagatttccaggagttcaggcaaggtttcagggacagggacaaactccatcatcaaacacacagggcaagcaagagaaccgaaagagacaaagggtcagaaaccaggcagagcttggataaaacaatgggagcaggtaaagtcaagagccaatggagctgggtccctaaaattgtcacaaagggaccagtgtcccaaaggttcatttttagtggttctgggaaaaggaaaacagaacacttgagtctgtcagctatagttaaaagcacagggtcaggttgttaacattaaaaagcattttaaatgttttcatattaattgaatacaattttacagcctctaagcataaatttaaaacgaggtgaatttcacagcaacatcctaagtaaacctaggtttgttttcagtgattttccagaaaataatatatttctaactcctgttagagcacagttttatcctcaacctctttcaggacaaaaaatatctattaagatatctagtaagaggtgaaaataaatattaaatttaagtttaacttaagctaaaacttctaaattcaaatgaaaatttctgttcctacattaaggtttgtaggattgtattttctgtaggaggcagatttaaaacctatgcattaaaaccagctttcagaggcggttccaagatagctgattaggaacagctccagtcaacagctcccagtgcaagtgacacagataacaggtgatttctgcatttcctactgaggccccaggttcatctcactgcggcttgtcggacagtgggtgcaggacagtaggtgcagcgcaccgagcatgagccaaagcagggggaagcatcccctcacccgagaagcacaagaggtcagggaattccctttcctagccaagcaaagctgtgacagacggcacctggaaaatcgggtcactctcaccctaatactgcgcttttccaatggtcttagcaaacggcacatcaggagattacatcccacgcctggctcagagggtcccacacccacgaagcctcgctcattgctagcacagcagtctgaaatcaatctgcaaggtggcagcgaggctgggggaagggtgccctccatagctgagacttgagtaggtaaacaaagcggccaggaagctcttgagtaggtaaacaaagcggccaggaactgggtggagcccaccacagctcaaagagacctgcctgcctctgtagactctgcctctaggggtagggcatagctgaacaaaaggcagcagaaacctctgcagacttaaatgtccctgtctgacaggtttcaagagagtagtggttctcccagcacagcatttgagatctgagaatggacagactgccttctcaagtgggtccctgacccccgagtagcctaactgggaggcaccacccagtaggggcagactgacacctcacatggccgggcagccctctgagacgaaacttccagaggaacaatcaggcagcaacattcgctgttcatcaatattcgctgttctgcagcctccgctgctgatacccaggaaaacagggtctggagtggacctccagcaaactccaacagacctgcggctgagggtcctgactgttagaaggaaaactaacaaacagaaaggacatccacgccaaaacccatctgtacgtcaccatcatcaaaaaccaaaggtagataaaaccacaaagatggggaaaaaacagaacagaaaaactgaaaattctaaaaatcagagcgcctctcctcctccaaaggaatgcagctcctcaccagcaatggaacaaagcaggacggagaatgactttgatgagttgagagaagaaggctacagatgatcaaacttctctgagctaaagacggaagttcgaacccatggcaaagaagttaaaaacctagaaaaaagaatagatgaatggctaactagaataaccgatgcagagaagtccttaaaggacctgatggagctgaaaaccatggcacaagaactatgtgacgaaagcacaagcttcagtagccaattcgatcaagtggaagaaagggtatcagtgattgaagatcaaatgaatgaaatgaaacaagaagaggagtttagagaaaaaagaataaaaagaaacaagcaaagcctccaagaaatatgggactatgtgaaaagaccaaatctatgtgtgattggtgtacctgaaagtgacaggattaatggaaccaagttggaaaacactctgcaggatattatccaggagaacttccccaatctagcaa

SEQ ID NO: 1364 - DNA, 4052 bp, Homo sapiens
cacgttatgcacatgtaccctagaacttaaagtataatttaaacaaatttaaaaaaataaagaaaaaaaaacttctaaaaaaataaataaaaccagctttcatttgataaacaatttattctccaaagtgctaatttttttttaaattgcccttactgaggctttttaaacaaataaaaaaagaggagagaagacaatgaataggggcttttggttacatgagaagtatgcagcagtgtttgagagtgtggatgttttggtgtctttttatccatttaattactaagttggatttcagctgacatgacacttaattctaacttctttgctaccaaataatggctgtcacagtttgaaacacgtcatatttaccaaaaatgggcaaatgctttcttgagctgcctctgtaagacatatttcaaatgaaaaccagatgaggagacttcttccaaaaatattgtcttgtcttgtaccaacagaaaagcaccgaaaactgttttaagcataatcagaattcctaatagttaccccctatttagccaattttttggaaaccaaatgtgaatgtagattccttaaattaaaatttatgtacttaacaattactttcttgaaatgcaagcttattttaagctaaatttggggtgggggtctgtgaagcaaatgcagaaatgcattttcttgaaattgttgagtttgcattgtgctactaacacaattcccattttcactttccttgcacaccagttagctctgtccggtgtcatcgccagcctgtctctactttttaaaaaatcatccatcttaagaatgtgggtcattgactataataagccaaacttatacagcacaggtgcagcaaggacaatttattgctgtctgcagacagttttttgttgtcgttgtttttgagacagggtcttgctctgccacccaggctggagtgcagtggtgtgatcataactcactgcagcctcagactcctaagaccctcctgcctcagcctcccaagtagctgggactacaggttcatgccatgacatatgctattttttaagatttttatttttattattttgtagagatgagatctcactatgttgtccaggctggtctcaaactcttgtgctcaagcaaccctcccacctcagtctcccaaagtgctgggattacaagtatgagtcagctcgcctagctagacaatcttaaagtatttgctttaaaggtaattgattcaatacctcaaatttgaataaaaggtaggattattcacatttaacatttcacagcttaccaatgttaatactccaatcattttcactgtcttcgtttttttccttttttgtttgctgtaaaaaatagaattgcttcaatttaaaactgttacaaaatgttttacaatcaattgaacataaatatgtttagttacaatattcaactattatattttcaaatataagagtgatgttcacaaaatgtcaaaattattcagttcaacaaacatagcaagcacaaaagtaactgtcgaaggtactacaaagatacatggatacataagaaatggtcgcctgccttacagagctcacatacacaggaaagataagtatgctaacagtgtcgctaagtcaattaagttatttgttttctaaaattaaaaaaaatcatgatttaaaattaggaatgtctattcttctgaaggattgtggagagtggtgtcaggcaatcttgttggtgatacattcaaagtacatctagaatttaaccacttatcaccagtttcattgctgtcaccagtagggcagcctcctgcctagtctctccacttccacctatgccgcttcagtctatcttcaactagcagtcagagtaattatttcaaaatgccaagccatacactacttctttgctcaaaaacctacaatggctttcctttttcttacaataaaagccaaaatccttgcattaacctctgaggtcctacacgatctgtttgcttatttcctctctgaccacatccctactcccaaacctgcttactctgctccaaccagcctggactctctgctgttccatgaactcaccaaacatgtacctgactcagggtctttgcattgccagttaccttttccgggaatgctctccccttagatacccacacagctgtctcctctcatttctttcaagtctttgctcaaatattacctttaaaataagatctaccctaaccaccctacttaaaattacaaagtactccccttttgtactcctgatccccttaacctggattaatgcttttttccatggcgttaattaccttctaacattggctgtggtttacttatttagtatgtacattatttatgtctgtcctccgtactataatataaactctatgagggagtgtgtgtgtgtgtgtgtgtatgatgatttatatatatatgatgatttttacataaatatgatgcatttatccaggtaaatgataaagttttactcataagatgattccaaattatgtaaagtattgactaaaatcactggacaaacatctgccactaaatatgttcaaaagaatgtgccatgggcaatagcaacataattagaacaagaatataactaatttgattgaagcaggcttaacttcctttaaatatattatctttggtctgcttttataaaaattagtttcactacatttgatttcataatcatgtggtcttaacttattgttaactttctgtatttctcttttgagctgctttcttctttccagcagaagctgtgggcttcccctctgaggactttcctgggttctgaagtgttactacaccttttgtaggaatagctcctttgcacacgcatcaaatgttaagccagtgcaatacataaatagacttcttcatgaaaatgccatctattaatagactcacagtcaatccctgcctaaacagccagctgatgaaaaccatatttttctattgcgtgtgtaagtacttccattggaagtaacaccatctatcactttttcaattctacatggcaaaactaaattttctatgaaaaaatacaatggtgcttagaagaaatacagcaaggttactgcacaaccacattaacaggctaaaataatgcttcagtttaagcatcaggtaggcatgttttcagttagctaatcaagcccctagcagcttgaggacaaactacagagactgataaatttgtccctctgggtgatcacttgacacaggtcaattttttctgggtagcctggtatgaactcagagaccgtaatagcctcataaactatttcaggctaaaggcgaaaatgattcactattcccacagtgaaagaggaaacaaagacacacgccattgactgggaacttctgccccgctcataaagcctgtgaagtgagtttaacaagggccaggggaaccgagaaagacatgaaggcaaaggaagcgctgcttccccctaccacttgaacaaaactgattcggatgtacagaagttccccctccccacctatcctcccagaaaggagaaatacaaataagcctggcgatgagaggagggggaggggtaagacaaggaggaagagacataacaggggatgggcaggaggggagggagtttttgcttcactgcccttgttcaaaaagcacagccatcaacagcagatgtctgacaccctttaagtctgaacaatcagatgatgtatatgaaagtcatttgtaaaagtttcaagagttacgtaatacaatgaatgttatacaatgcagatattcattgaatcccccctgcacaaagggaagggagcacttttcaagacagccttttcttcctgaatctgttccaaaaggagcctcagtgacattctttgaggccacacaacacgtttgctccaaggtcagaaccggatgcaagacccttcaaagaagcctccaaaacaaaggtcttcaaaggcatcaaccgatttttacaacttctttccaagggtgaacttagtcctgctgattggcgtgtaacggaaaagccagtggctgctggg

SEQ ID NO: 1365 - DNA, 4039 bp, Homo sapiens
tacaaagatacatggatacataagaaatggtcgcctgccttacagagctcacatacacaggaaagataagtatgctaacagtgtcgctaagtcaattaagttatttgttttctaaaattaaaaaaaatcatgatttaaaattaggaatgtctattcttctgaaggattgtggagagtggtgtcaggcaatcttgttggtgatacattcaaagtacatctagaatttaaccacttatcaccagtttcattgctgtcaccagtagggcagcctcctgcctagtctctccacttccacctatgccgcttcagtctatcttcaactagcagtcagagtaattatttcaaaatgccaagccatacactacttctttgctcaaaaacctacaatggctttcctttttcttacaataaaagccaaaatccttgcattaacctctgaggtcctacacgatctgtttgcttatttcctctctgaccacatccctactcccaaacctgcttactctgctccaaccagcctggactctctgctgttccatgaactcaccaaacatgtacctgactcagggtctttgcattgccagttaccttttccgggaatgctctccccttagatacccacacagctgtctcctctcatttctttcaagtctttgctcaaatattacctttaaaataagatctaccctaaccaccctacttaaaattacaaagtactccccttttgtactcctgatccccttaacctggattaatgcttttttccatggcgttaattaccttctaacattggctgtggtttacttatttagtatgtacattatttatgtctgtcctccgtactataatataaactctatgagggagtgtgtgtgtgtgtgtgtgtatgatgatttatatatatatgatgatttttacataaatatgatgcatttatccaggtaaatgataaagttttactcataagatgattccaaattatgtaaagtattgactaaaatcactggacaaacatctgccactaaatatgttcaaaagaatgtgccatgggcaatagcaacataattagaacaagaatataactaatttgattgaagcaggcttaacttcctttaaatatattatctttggtctgcttttataaaaattagtttcactacatttgatttcataatcatgtggtcttaacttattgttaactttctgtatttctcttttgagctgctttcttctttccagcagaagctgtgggcttcccctctgaggactttcctgggttctgaagtgttactacaccttttgtaggaatagctcctttgcacacgcatcaaatgttaagccagtgcaatacataaatagacttcttcatgaaaatgccatctattaatagactcacagtcaatccctgcctaaacagccagctgatgaaaaccatatttttctattgcgtgtgtaagtacttccattggaagtaacaccatctatcactttttcaattctacatggcaaaactaaattttctatgaaaaaatacaatggtgcttagaagaaatacagcaaggttactgcacaaccacattaacaggctaaaataatgcttcagtttaagcatcaggtaggcatgttttcagttagctaatcaagcccctagcagcttgaggacaaactacagagactgataaatttgtccctctgggtgatcacttgacacaggtcaattttttctgggtagcctggtatgaactcagagaccgtaatagcctcataaactatttcaggctaaaggcgaaaatgattcactattcccacagtgaaagaggaaacaaagacacacgccattgactgggaacttctgccccgctcataaagcctgtgaagtgagtttaacaagggccaggggaaccgagaaagacatgaaggcaaaggaagcgctgcttccccctaccacttgaacaaaactgattcggatgtacagaagttccccctccccacctatcctcccagaaaggagaaatacaaataagcctggcgatgagaggagggggaggggtaagacaaggaggaagagacataacaggggatgggcaggaggggagggagtttttgcttcactgcccttgttcaaaaagcacagccatcaacagcagatgtctgacaccctttaagtctgaacaatcagatgatgtatatgaaagtcatttgtaaaagtttcaagagttacgtaatacaatgaatgttatacaatgcagatattcattgaatcccccctgcacaaagggaagggagcacttttcaagacagccttttcttcctgaatctgttccaaaaggagcctcagtgacattctttgaggccacacaacacgtttgctccaaggtcagaaccggatgcaagacccttcaaagaagcctccaaaacaaaggtcttcaaaggcatcaaccgatttttacaacttctttccaagggtgaacttagtcctgctgattggcgtgtaacggaaaagccagtggctgctggggatgtacctgctgatgcccagttcaaagtcgccctccgcgctcgtggggcgccaggctgttccgttctttgccgcctcaagatccatctcagcctgaggagaaaccacagcctcagaaccaagtacaccctctccggcggcccggcgcacgagtcgcggggcccgggggcactgggtggaggtccggccactcccgccccgcgccccacgtcccgggtctcccttcgaggccagacgcgcccggacctctctcacctcgaacctcgcgcgtgtctggcagggcctctggacgcgcgggcgctgcagcagaggggcctggactttgctcgccgcggcctcgcccccgcccccgcccccgccccccacgcgcgtccggcccgggaaacgcctaccgttgcagccagggcgagggccgcggcccgcgagagcagctcccgccgcccgcccagctctctccccaggctaggcgcgggccaggggcgcagcctgccgctcttgccgccggggcgcccggctggggccgccgcccaccctggcgacccgccagaaccagcccggtcgcaggataagaccgagatcaggctggagcctcgggtgccgagaaagcctcgcctgatgggccacccaagcccctgcagatgactgtcacaccccatgggcgctcagttttgtttttaaacccataggggagacagtttccggacgcccaacaatcacagggcggcccaggaccgagagagagcaatagactcgcctcttgcttccgcatccccagttctggtccaggtggcactgaacccaattatctccaaggacggcgagagtcagccagggccggcaggaaccatcacattatgctccttggggaggaggaacgctgttggtgccctcttagcacttaagagacacagagttttagggctagaggggtcttcagcgatcatctaattaaaaccccgtatgtttaacatatgaagaaacggatgcccagagaggtgaagtcctgcctgaggctgcatcggtggaaccagagtctaggggaagcctcctgagtcccagtccagtgccctggctcactgctctcatctaagacttctgtctgtattgaattgtctctgctcctaccacctatttgagtatgactttcttctttctgattaattcctccacactcttcccaaaaggaagtgtctaaaacggggagccataagtttcatggctttgaaaccggagactttcaaactcagagcttcacatcttattaactatgtgactttggacactgtgctcatttctctaggcctgtttccttatatgtaaaatgaggataaaaacatctcccttatcaggttattgcgaggaataaatgagttgaggataagggaattaagtactaggtaaaagcacctagtactatgcctaaaacatagtaggtgagcaacaaatacaactttccttccttctgatcaggtagcaggatgaccagtgggtccttgcacctgctatgtcctgttaacacaa

SEQ ID NO: 1366 - DNA, 4047 bp, Homo sapiens
aaggaatacggacagttcctgtactccttagcaagacccttctccccttcttacagaaagggcaagcagaagtgtccgctcctactcacctgggctcccagagcccgaagcagagtggtgaggctgcgaaggccactgacggctttatccacatgcagctgcaggggctcccacggctgggaagagttgaccaacagggcctggccccgcaggacagcttccgacagcagggccaggccctgccagacttctacggcctgctgcccgacctacagggagtggactctgggagtcagctgacccatgtcaccctctccctcctgcccctcagcagccccaagcaccaagctgagcaaacagaaggtatgcaataagacttgttgaatgaatgaatgaatgaatgagtgagtgagtgagtgagtgaatgaataatgaatgtattccatacagccctcattatttttcttttttcttttcttttttgagacagggcctcactctgtcactgaggctggagtgcagtggtgtgatcacagctcactgcagcctcaaattcctgggctcaagcgatcctcccgcctcagccttccaaatatctgggactaccaccatgcaccacctcacctgactaatttttttaaatgtttgtagagatgggggatctcactatgctgcctaggttggtctgaaactccagggctcaagcaattctcccatctcggccatctcagcctgggattatagacgtgagcctctgcgcccaggcagcctcatctctgctgctccattttacctttccctcgatcattctccctttcatccaaaatcaggctcgcaaatgagattctccaaaagaaaggaaaaaaaaaaaaaaaggaactcacctccatcctcttccaggcatagaaattaactttggtgtctgggacagtgatattctcattcaagctgcagtgttcagcacagcccgtctgaaatgcacacagcccggggagtcaagggtccctgaaggctctggccctggcccacaggccgtaggatctgctggctttgctccttgcctagtttccaggtatggtttggggccaccagacttattcttatgtaggggggcagtgtctagcttcccaactccaccccaaaccaagtgccaggttcctggatctgggaggagttccctgaagccctgagcgtgagttctgtggaatgtgctggggaaggggtctcaccgtgatattctcggcctccttggcctccaagaggtacctctccaggactcggctgtcacagatgaggcgtggtggggcgcccaggactgggaggcccagagggagcgacagcagggacaggagaagccacagccaggcaggacattctagaacagatagccaggctgagagtcaggcggggagggagaagggtggctgtggaaggacagcttccttcatccccacgtctctgccccagctcgtccttcctgtccccaaccatgcaagcactcaggtgctgcctccctggccttcattcaatcctgctgccgtgtgcacaccccacccccagctaccagcatccacttctccggccaaacttcaatcctggtgtgacagaggcttcccctctggcagataagtggtggctccagcgcccaggttatcagcttatcagcttcctctccactggcacagcagaacccccaaaccttcttcccctcaacccccaaactgtgtccccttcacaggtcaggtttttgccatccccaaggactcccccaagtccccgctggcacgtggaggctgccccacccccctcccccttccggggtccttgacaagtcgccggtccttgaacccagccacctcctggccaatagccggggcgctaaatccccgctcaaacagggacccgggcgggcgggagcgcccagcccgcgagtactcaccgtgcacccccatctccgcgcctggccggggtccctcagcgacctggggcgcgccgggtgaccacaccgggggccctcatcccgggaagctcggcggtgcagggccagccccacgggcctggaggagagggcggctgtccagggggcgcggtgtcggagcagagcgggcgcggtggccccggtccggctccgggaggacagcgcggtgcggcgcagcgcagcgagcggccggggtggcccagggactctgcggctctggccgggggtcggggctgttatctgcatgtgtgcgtgcgcgggtgggggtgggggagaggctgtgtgcgtgaggggtcgccaggggtaggggccacccggggtcagagcaggggcaggacgcctgggttgaggctcgccggggcgtgagcggggctgctgcagacgtgcgtgtgggtcatgggggctgctcccgggccctgggtcgcgggaggggagtgcagccggttgcgcacccttgggactggcggagcgtgctatctgggaaaggctgggctcccggacacctcccctggggggcatcccggtcttgggcggagactcagagatgcctgggttgctgagttccgcaaagtagctgggtctggaagcccagaagctttagggaggggcaaatgagtggtctcccttcccacaatcccaggacatgttctagaaacaatgttgaccatgttgaggaatttgatgggggcaaatagggcaagaaatttggggttcttcctccccacctcactcctcaccgtctagtactctgcaaacccagacacttaacttttttttttttttctggagatgtagcctccctatgttgcccaggcagtgcagtggtgccatctcccgttcactacaacctctgcctcctgggttcaagcaattctcctgcttcagcctctggagcagctgggactacaggcacacctttacacccggctatgttttgtatttttagtagagatggggtgttgccatattgcccataccggtcttgaactcctgacctcaggtgatccaccctcctcggcctctcaaagtgctgggattgcaggcgtgagccaccgcacccagcccccaccccagacacttaacttttagtgcacagagcacacagtccattgtgcaggacacacatgcaccttgacatctgtttatttgacctgtggtgtaggttagctaggctgcattgctgagttcttaagaacactgaaatacagctaacaccaagagtgatgggggctgggatttacagctaaggttttatggcttctggaaaccctgagccagaggagtgagattcccagagcaggagaccaagactagctggtctctcacaccttagaaagtggcctcgtccttgagccctcaatgtcctcatctgtcaaatgggtgtggtgaaactaccagcctatcccattcaggtttcataaaagacaggaaaggtccaggcgccgcagctgacacctataatcccagcactttgggagaccaaggcaggaagatcctttgagcccaggagttcgagaccagcccggacaacatggcaagaccttgtctctaaaataaataaataaataaaaaataattagtcaggtgtggtggctcacgcctgtagtcccaaatatgcaggaggctaaggcaggaggatcacctgagcccaggagttcgaggccgtagtgagccatgatcgtgccactgcactgcagcctgggcgacagagtgagagcctgtctcaaaaacaaaaaaagactggaatgtgtagatctgagctgtaagagttagccgggagaaatcaagaaagatttgagggaggaggtgacaatgacctcagccttgaaggggggtaggacatcaatgggaagaggtatgaggtgggtgggggattgtcgattcagcaaagtgaatggagagtcaggtgagtattgcgggatctggccagcagcccgcaatgcaacagggctctctctttgttcccaggcggatcagcaggttgagaaataatagacacacacaagatagtgaaagctggtccggggggtcaccgccttctggtcccgtggtgtcaacaatgcaccaga

SEQ ID NO: 1367 - DNA, 4045 bp, Homo sapiens
cccaggctggagtccagtggcacgacctcggctcactgcaacctccgcctcccaggttcagtgattctcctgcctcagcctccagaatagctgggattacaggagcccaccaccacacccggctaattttttgtatttttagtagacatggggtttcaccacgttggccaggctggtctcaaacacctgacctcagatgatccacccacctcagcctcccaaagtgctgggattacaggcatgagccaccgtgcctggcctcccatacagttttatgacagcttttgctgtctgcacaggtccctcctcagtggtcctttcccgctgaagcattatttttgagaaggaatctgaagttgtggtcagagtaaaggggaaaatgagaagtagaaatcaagagtggaagtagagttcatttgttccatgtcccccaccccaggggagtaaaggagcaggtagggattaggtagaaggaataaaccaggcgcaatggctcacacctataatcccagcactttgggaggctaaggagggaggatcacttgaacccagagtttgagaccagcctgggcaacatagcaagaccccatctctaaaaaaaataagataaaaataatttaaaaattagcagggcatggcgatgcatgcctttagtcacatctactcatgaggctgggactagaggattgcttgagcccaggagtttgaggctgcagtgacccatgattgcaccactgcactccagcctgggcaacagagcaagacactgtcactaaaaacaaacaaacaaacaaaatcacaaatatataaatggaccacctagagtggcccttgtccccgagcagatgctgtttatagaggtggctccaaccgcacctgtgtgtaccgccccttttgtgaatttcagaggcgagtattcatggtgacagtccccaggtgagtaaaggaggcagctggacttagcgaggatgtgcattgaggcggaaggctgatgctgggagtgtggcatcagccgaagagaccaaagaagaggcagaaattaacaagggccagtgaccagggttggcagctgttaccagcccccaaaactcccaaaaggacccgtcctctggcctccctctccttgatgacaatctcagcgcactgcagccttgccctgggcagggttggcagctgccttactgcggtgaggccttgaatggagccaccttattgaccagcgtaggcagagcttgtggcctcaggcccggtagggtcgagaggtcagacaggctgtgtgagacagcacgtagggcccagccccctccacccctcgtttcccggacctggacctgctgcactgctgccaggagtgggacagagccaggggatttggaggttcccagaaaacagaaaagccaagagtcatattggtggtttcagttcttgtcaatgaggttgaagaatacacaaaacttggaccccatgagagccagaggccagcccccatcctgtcttcatggttcccaccaccccggtgtcaagggggctcttgccaccaagggagtgcccatgcccgtgagacctggagaagtcacagcttgccacctaagttatccaggtcatcctgtccctgatggtaggtgcgaaaacaggtaaatcgcctccaaagcgtgtcctggcatcaaattttgcagggtgccgagtgagctcaggcgtcttcccagcatggctctgtccctgagtttaaagctgctctctgaatgcttcctgctctgggccctcaagttggccctgtgacatccttagatctcagagttgctctctggacagttcctctggcccctgagatgtcattgctggcactggagtgtccatgggacaggctggcgctgagctgagagcccctcgacggggttcaggagtggcgggggagggtgtggcacaagcaatgttggtgagggaggtggtggatatgcccaggtggacacacctggtcatctgtcccctgtcctgcaggcctcccctgtgtacagcttcagctttccccggaggaaattggagtagactcggaagagtttgcggaaagtgtcagcagtgattgttcggagtggagcagctgaggccgcatctggaggggagatggcttccttctgccaaggagaaaacaggaggtcgctgcagtgccacagaaagggaaggaatacggacagttcctgtactccttagcaagacccttctccccttcttacagaaagggcaagcagaagtgtccgctcctactcacctgggctcccagagcccgaagcagagtggtgaggctgcgaaggccactgacggctttatccacatgcagctgcaggggctcccacggctgggaagagttgaccaacagggcctggccccgcaggacagcttccgacagcagggccaggccctgccagacttctacggcctgctgcccgacctacagggagtggactctgggagtcagctgacccatgtcaccctctccctcctgcccctcagcagccccaagcaccaagctgagcaaacagaaggtatgcaataagacttgttgaatgaatgaatgaatgaatgagtgagtgagtgagtgagtgaatgaataatgaatgtattccatacagccctcattatttttcttttttcttttcttttttgagacagggcctcactctgtcactgaggctggagtgcagtggtgtgatcacagctcactgcagcctcaaattcctgggctcaagcgatcctcccgcctcagccttccaaatatctgggactaccaccatgcaccacctcacctgactaatttttttaaatgtttgtagagatgggggatctcactatgctgcctaggttggtctgaaactccagggctcaagcaattctcccatctcggccatctcagcctgggattatagacgtgagcctctgcgcccaggcagcctcatctctgctgctccattttacctttccctcgatcattctccctttcatccaaaatcaggctcgcaaatgagattctccaaaagaaaggaaaaaaaaaaaaaaaggaactcacctccatcctcttccaggcatagaaattaactttggtgtctgggacagtgatattctcattcaagctgcagtgttcagcacagcccgtctgaaatgcacacagcccggggagtcaagggtccctgaaggctctggccctggcccacaggccgtaggatctgctggctttgctccttgcctagtttccaggtatggtttggggccaccagacttattcttatgtaggggggcagtgtctagcttcccaactccaccccaaaccaagtgccaggttcctggatctgggaggagttccctgaagccctgagcgtgagttctgtggaatgtgctggggaaggggtctcaccgtgatattctcggcctccttggcctccaagaggtacctctccaggactcggctgtcacagatgaggcgtggtggggcgcccaggactgggaggcccagagggagcgacagcagggacaggagaagccacagccaggcaggacattctagaacagatagccaggctgagagtcaggcggggagggagaagggtggctgtggaaggacagcttccttcatccccacgtctctgccccagctcgtccttcctgtccccaaccatgcaagcactcaggtgctgcctccctggccttcattcaatcctgctgccgtgtgcacaccccacccccagctaccagcatccacttctccggccaaacttcaatcctggtgtgacagaggcttcccctctggcagataagtggtggctccagcgcccaggttatcagcttatcagcttcctctccactggcacagcagaacccccaaaccttcttcccctcaacccccaaactgtgtccccttcacaggtcaggtttttgccatccccaaggactcccccaagtccccgctggcacgtggaggctgccccacccccctcccccttccggggtccttgacaagtcgccggtccttgaacccagccacctcctggccaat

SEQ ID NO: 1368 - DNA, 4045 bp, Homo sapiens
aatttaggctgggcacggtggcttatgcctgtaatcccagcactttgggaggcctaggtggacggatcacttgaggtcagcagttcgaaaccagcctggccaacatggtgagaccctgtctctactgaatatacaaaaattcgtcgggtgtggtggtgggcgcctgtaatcccagctactcaggaggctgaggcaggagaatcgtttgaacctgtgaagtggagattgcagtgagccgagatcacaccactgcactccagccttggtgacaagcaagaatccatctcaaaaaaaaagaaaagaaaattaaaactgagaaaaccagtatgaatattttggcagttccttctagggttttctcttaatttccttttgtttctctctctctccttcaaagcacacatacacttaaatgtacacagttgaattggtactgttgatagtcttatatcctgctttttccacttaacattactatgagcatttttccatgtcattaaatatgctttgaatatgttcttggccacataaaattccatcctattgatgcacctgttttcttttaagcagagacacatgctatgctttccagtcatggtggactctcaaaagccaaagaaaataccttgtgctgatctaccataagcctcttataaacatccattttttatttcatttattacatgtacccatggtacaaacgcacctctggacactagatacaatcaatagttaataagcactctaaaaaaaatgccagtgagcagtgagctctgtccccttgatgatgtttagtcacccacatcactattacaagtatataaggtgtcaacaagtgtcacaaatgctttttccattttgcgatagccccaaatgaatttcaatctttcaggcacccatctcaagaacttcagattctaacagggcagttttgagttttaatattaaaacttctaatataaacgctacaaacttaccataacaccatcttactttacacttagttttatgaatttgaataatttttaaattattttatttcagtttgttttcccaccttcagtcaggggaactgatttagctttaaaacaatctgccagaaactttggttctgacctctttaaggctgtaactagtagaagtgatgtatctttaacacacaccaagcataaatgaaccctttaatcctcaggagggcactgtggaactacgttcttagggttgtctgctgtaggaaggttcttttgttactcagatgtgaggggtgctgggacaggcctccacagaaaacttttttatttttatttactttaaaagacaaaccataaagatttttttcaaatatgaaactgaaatgtatatatttcataaatattttcatactaaactgagcaaatttaaggatgattaagctgtttctactgggaaaatcataggtaaggaaactgctttcacgtagctttacgtacatttggaaagagcaaacctgaactgggtttttaatcttgtaatttttaaacgtacaataatcaagagttctcagccctatattgatagtatttatggtaaaactaaatagtttttttttaataaaaaaaggtattttaatttgttgacataaagttggcttttttgtgcgtgcttcttacatgccttattaacccggtgtgtttaaaccaaacactgttcatatttttccaggaggaaaacaaaacaataaaaaacattattcagataaaatattataggtttatttaaaacttaattctcaccttgagtatgcaaaatacaaactccacaaaatgttcattttactttgtagtttacaaatatacaaaatagacgtttgcttaaatttatattacatatttattaaggcaaggaactatatagaaaaacacatttgttctgcttaaggcatacttgggaataaaccattgtacaaattattgcacatctgaaaccacagtgcataacagactgtctgcataaaaatgctaaagaagtaaaccaggtatattacctgacttaggtcataaatgttgatcggaagacaaatatagattttccttgtcaaagtatgcagcagtttgaaaactttggcttccttgtttggtacctttagaaccaagactcaccaagcaccatcatttaggctatttaaacatgttttctgtacctgaatttcttcctcttcttctaacatcataataatggcttttagaaggtaaagagaatacaaggtgatcttttatgcttatattgcatcaatacacaattcaagggaattctggtcttccctcccccaactcacggatataatttataccctgatatccacaacttccagtcacccccttggcattttgtaagtccaggaatattcaagtcggatttagaattggaatgatagaagatccagtcacagaccccatctgttctttgatttttgtcttttggattcctcatttttcctgattatccactcacaagatgactcagttgggaacttgaccatgattgtagtgctttctggctgggctccttccctcatcgggaagacagtgtgaaaagtaaaaaatactgaattctcttctggcagtgtgggtcatatccactgtctgggatttaaaaatgcctcttcatgtgtaaggcgaggtggtccgacctggaaaatgctcggtcgcatttttggcactggaacgggcggtgccccgtgtgtttacggtagtgcctggtcagttcatctgagcgggcgaatttccatccacagccgtcccagtcacagtggtaaggtttctcacctgtaaaggtaaaagaaaaaaaaaattgacgctattgctatatcaaagaatcgccccttttaaaaactgaaggccagatagtaaaccaactctgaccctatcctaaagaaatccaggaatgtctttataccactgaaggggtgtattgaattccatatcataaacagaaatacattccgtgcttaagtatttggtcttgtttttagggggtcagttaagcacacaaccaccacctacacctatactaatgtttcaccaaaaacacacaaacaccacctaaacctatactaatgtttcatttgagtcaaggcatctcagtggtggaaatgaaatttggaaattgtgattggtagtgtgcccaaaccatgcaatcttattcctactacgactggggataaaaagccacaggtggctactttttttttctttacctttacgttactgaatgctgcacctaaacgactttgggtacctacttacattgacatggaaatgctctgcagtgacaaccctaaatcagaatcttcccagcaattttgaccatcatattcttggaatttaaaataaaaccttctgcttgtgggggaaaaaaaataaaaatgtaaatcaaaacgaacaaaaaataaaaaataaaaaagtaagaccgaattgttacgaccagaattcaaaataacaaaaagggagggtgaacctgggaagggaacattaaaaaacgatttttttaaaaaagccatcatgcttttgcatagcaaagtataatttcttgattataatgccaagctaggagaggcccacagaccgcggggaatctcctgccttttaaaagcctaacaaaattgcacattcaaacacagataccatccatcaagcaaaaggctcctgggcagaaaagtaggcgccggtttgctgttctctccagtgatcccggagatcaaggcgatagactgccctgggaagccaaggaggcactgaggagtgtccactggtagcctatggggctggaagctaacctgggaagtcaaggaggcactgaggagtgtccactggtagcctatggggctggaagctaacccccctcccttctgcagtttgtccccctacctgtgtgggttcgcaggtgtgccttgagatgggaactctttgtgtaggttttgccgcagcccgcgtaatcacaagtgtgggtggcggtccttttccggggccacgatcgtcttcccctctttggcttgggctcctctggc

SEQ ID NO: 1369 - DNA, 4046 bp, Homo sapiens
catatttttccaggaggaaaacaaaacaataaaaaacattattcagataaaatattataggtttatttaaaacttaattctcaccttgagtatgcaaaatacaaactccacaaaatgttcattttactttgtagtttacaaatatacaaaatagacgtttgcttaaatttatattacatatttattaaggcaaggaactatatagaaaaacacatttgttctgcttaaggcatacttgggaataaaccattgtacaaattattgcacatctgaaaccacagtgcataacagactgtctgcataaaaatgctaaagaagtaaaccaggtatattacctgacttaggtcataaatgttgatcggaagacaaatatagattttccttgtcaaagtatgcagcagtttgaaaactttggcttccttgtttggtacctttagaaccaagactcaccaagcaccatcatttaggctatttaaacatgttttctgtacctgaatttcttcctcttcttctaacatcataataatggcttttagaaggtaaagagaatacaaggtgatcttttatgcttatattgcatcaatacacaattcaagggaattctggtcttccctcccccaactcacggatataatttataccctgatatccacaacttccagtcacccccttggcattttgtaagtccaggaatattcaagtcggatttagaattggaatgatagaagatccagtcacagaccccatctgttctttgatttttgtcttttggattcctcatttttcctgattatccactcacaagatgactcagttgggaacttgaccatgattgtagtgctttctggctgggctccttccctcatcgggaagacagtgtgaaaagtaaaaaatactgaattctcttctggcagtgtgggtcatatccactgtctgggatttaaaaatgcctcttcatgtgtaaggcgaggtggtccgacctggaaaatgctcggtcgcatttttggcactggaacgggcggtgccccgtgtgtttacggtagtgcctggtcagttcatctgagcgggcgaatttccatccacagccgtcccagtcacagtggtaaggtttctcacctgtaaaggtaaaagaaaaaaaaaattgacgctattgctatatcaaagaatcgccccttttaaaaactgaaggccagatagtaaaccaactctgaccctatcctaaagaaatccaggaatgtctttataccactgaaggggtgtattgaattccatatcataaacagaaatacattccgtgcttaagtatttggtcttgtttttagggggtcagttaagcacacaaccaccacctacacctatactaatgtttcaccaaaaacacacaaacaccacctaaacctatactaatgtttcatttgagtcaaggcatctcagtggtggaaatgaaatttggaaattgtgattggtagtgtgcccaaaccatgcaatcttattcctactacgactggggataaaaagccacaggtggctactttttttttctttacctttacgttactgaatgctgcacctaaacgactttgggtacctacttacattgacatggaaatgctctgcagtgacaaccctaaatcagaatcttcccagcaattttgaccatcatattcttggaatttaaaataaaaccttctgcttgtgggggaaaaaaaataaaaatgtaaatcaaaacgaacaaaaaataaaaaataaaaaagtaagaccgaattgttacgaccagaattcaaaataacaaaaagggagggtgaacctgggaagggaacattaaaaaacgatttttttaaaaaagccatcatgcttttgcatagcaaagtataatttcttgattataatgccaagctaggagaggcccacagaccgcggggaatctcctgccttttaaaagcctaacaaaattgcacattcaaacacagataccatccatcaagcaaaaggctcctgggcagaaaagtaggcgccggtttgctgttctctccagtgatcccggagatcaaggcgatagactgccctgggaagccaaggaggcactgaggagtgtccactggtagcctatggggctggaagctaacctgggaagtcaaggaggcactgaggagtgtccactggtagcctatggggctggaagctaacccccctcccttctgcagtttgtccccctacctgtgtgggttcgcaggtgtgccttgagatgggaactctttgtgtaggttttgccgcagcccgcgtaatcacaagtgtgggtggcggtccttttccggggccacgatcgtcttcccctctttggcttgggctcctctggcatgcaggaaccgggtggcatgagctctaggggtgaagaaggtggggtgagcatcatcccgtgtgtcccgaagtggggccagcacacacagggctccccagcccgagctacaaatccccgggactgaccttggtaatggagcggcgggacttgcggctgcatctgatcgggcaggaaggatgggtaattgggccccgggtggggatggaagccgggaggaagcggcagggcagggtgacagtccctgctgctcagcacttcctcaagacccagggtcggggtagtcctgctggggagctgccgccccagggggaagtcgtgtgcagccggccggtggccattgctgagagggggtccagcgcccaagtgggtgcacgaagagaccgcctcctgcttgatcttggggcacgtgcgcggcggcccgccgttgtagggcgccaccaccaccgggtggctgccgtcagggctgcctttgctgacgctgatgaccgacgggctgccgtactcgctgccaggggcgctcagcgacgccttcagcacgaacttgcccatcagcccgccacctggcggctgcggctgctgcggcggaatgtacaccgggtccaattctggccgcaggagctcggccacgaagccgcccgaggggctcacgtcgttgatgtccgccaggttgaagggagccgtcggagggggagcggactccctgccatagaggaggcctccgcccgtgccgcccggcgccacgcccgggtcgttcccggcccggatcggataggtgaagctgcaggtggagggcgcgctggcagggccgctgctcgacggcgacgacgaagaggaggctgacgctgacgaggacacggtggcggccactgactccggaggatgggtcagcgaattggagagaataaagtccaggtccaggagatcgttgaactcctcggtctctctccgaggtaggggcgccaggttgctaccgccgcaagccgcaccggctccgccgctctccaggtctgtggccacggtcgccgccgccaggtcataggggcggccgggaagcactgggggaagtcgcttcatgtgggagagctcctcccgccagcgctgcggggacagggcgggagagacctgtcagtggtggtcccctgttgccacccgacatactgacgtgctggcgggccacgcgcgactgcaccgcccagacatggggactggtcaggcaggaagcacccgggaacccagggcgccagcgctgcaatctcggcccactcccgggtcgaagaagaggtgatgcgtctgtattgcgggtgttatgtcctgtctgcccaattgcgtgtgagcgagcgccgcggctggtccctccccctccaggtcccgtggacgtccccggaattggcacaccgaggctctctcggtgcgctctcgccacggggccgcctacgcgctaaactcactctggcccagccagtgtctggggacgcggccacctcccgcccggtggcccgagagcgcccgccctaccgacagcgcgcccggggactggtgaagacccggcttgcgccccaggcggctccgcagtgctcgcaccacgggcatacacagctgagccaaggacacggaagctatcccgggaaggttgcggagtccgcgcggtggccgctccttaccctcgttcagtggctcttggtgaccc

SEQ ID NO: 1370 - DNA, 4042 bp, Homo sapiens
aattattgcacatctgaaaccacagtgcataacagactgtctgcataaaaatgctaaagaagtaaaccaggtatattacctgacttaggtcataaatgttgatcggaagacaaatatagattttccttgtcaaagtatgcagcagtttgaaaactttggcttccttgtttggtacctttagaaccaagactcaccaagcaccatcatttaggctatttaaacatgttttctgtacctgaatttcttcctcttcttctaacatcataataatggcttttagaaggtaaagagaatacaaggtgatcttttatgcttatattgcatcaatacacaattcaagggaattctggtcttccctcccccaactcacggatataatttataccctgatatccacaacttccagtcacccccttggcattttgtaagtccaggaatattcaagtcggatttagaattggaatgatagaagatccagtcacagaccccatctgttctttgatttttgtcttttggattcctcatttttcctgattatccactcacaagatgactcagttgggaacttgaccatgattgtagtgctttctggctgggctccttccctcatcgggaagacagtgtgaaaagtaaaaaatactgaattctcttctggcagtgtgggtcatatccactgtctgggatttaaaaatgcctcttcatgtgtaaggcgaggtggtccgacctggaaaatgctcggtcgcatttttggcactggaacgggcggtgccccgtgtgtttacggtagtgcctggtcagttcatctgagcgggcgaatttccatccacagccgtcccagtcacagtggtaaggtttctcacctgtaaaggtaaaagaaaaaaaaaattgacgctattgctatatcaaagaatcgccccttttaaaaactgaaggccagatagtaaaccaactctgaccctatcctaaagaaatccaggaatgtctttataccactgaaggggtgtattgaattccatatcataaacagaaatacattccgtgcttaagtatttggtcttgtttttagggggtcagttaagcacacaaccaccacctacacctatactaatgtttcaccaaaaacacacaaacaccacctaaacctatactaatgtttcatttgagtcaaggcatctcagtggtggaaatgaaatttggaaattgtgattggtagtgtgcccaaaccatgcaatcttattcctactacgactggggataaaaagccacaggtggctactttttttttctttacctttacgttactgaatgctgcacctaaacgactttgggtacctacttacattgacatggaaatgctctgcagtgacaaccctaaatcagaatcttcccagcaattttgaccatcatattcttggaatttaaaataaaaccttctgcttgtgggggaaaaaaaataaaaatgtaaatcaaaacgaacaaaaaataaaaaataaaaaagtaagaccgaattgttacgaccagaattcaaaataacaaaaagggagggtgaacctgggaagggaacattaaaaaacgatttttttaaaaaagccatcatgcttttgcatagcaaagtataatttcttgattataatgccaagctaggagaggcccacagaccgcggggaatctcctgccttttaaaagcctaacaaaattgcacattcaaacacagataccatccatcaagcaaaaggctcctgggcagaaaagtaggcgccggtttgctgttctctccagtgatcccggagatcaaggcgatagactgccctgggaagccaaggaggcactgaggagtgtccactggtagcctatggggctggaagctaacctgggaagtcaaggaggcactgaggagtgtccactggtagcctatggggctggaagctaacccccctcccttctgcagtttgtccccctacctgtgtgggttcgcaggtgtgccttgagatgggaactctttgtgtaggttttgccgcagcccgcgtaatcacaagtgtgggtggcggtccttttccggggccacgatcgtcttcccctctttggcttgggctcctctggcatgcaggaaccgggtggcatgagctctaggggtgaagaaggtggggtgagcatcatcccgtgtgtcccgaagtggggccagcacacacagggctccccagcccgagctacaaatccccgggactgaccttggtaatggagcggcgggacttgcggctgcatctgatcgggcaggaaggatgggtaattgggccccgggtggggatggaagccgggaggaagcggcagggcagggtgacagtccctgctgctcagcacttcctcaagacccagggtcggggtagtcctgctggggagctgccgccccagggggaagtcgtgtgcagccggccggtggccattgctgagagggggtccagcgcccaagtgggtgcacgaagagaccgcctcctgcttgatcttggggcacgtgcgcggcggcccgccgttgtagggcgccaccaccaccgggtggctgccgtcagggctgcctttgctgacgctgatgaccgacgggctgccgtactcgctgccaggggcgctcagcgacgccttcagcacgaacttgcccatcagcccgccacctggcggctgcggctgctgcggcggaatgtacaccgggtccaattctggccgcaggagctcggccacgaagccgcccgaggggctcacgtcgttgatgtccgccaggttgaagggagccgtcggagggggagcggactccctgccatagaggaggcctccgcccgtgccgcccggcgccacgcccgggtcgttcccggcccggatcggataggtgaagctgcaggtggagggcgcgctggcagggccgctgctcgacggcgacgacgaagaggaggctgacgctgacgaggacacggtggcggccactgactccggaggatgggtcagcgaattggagagaataaagtccaggtccaggagatcgttgaactcctcggtctctctccgaggtaggggcgccaggttgctaccgccgcaagccgcaccggctccgccgctctccaggtctgtggccacggtcgccgccgccaggtcataggggcggccgggaagcactgggggaagtcgcttcatgtgggagagctcctcccgccagcgctgcggggacagggcgggagagacctgtcagtggtggtcccctgttgccacccgacatactgacgtgctggcgggccacgcgcgactgcaccgcccagacatggggactggtcaggcaggaagcacccgggaacccagggcgccagcgctgcaatctcggcccactcccgggtcgaagaagaggtgatgcgtctgtattgcgggtgttatgtcctgtctgcccaattgcgtgtgagcgagcgccgcggctggtccctccccctccaggtcccgtggacgtccccggaattggcacaccgaggctctctcggtgcgctctcgccacggggccgcctacgcgctaaactcactctggcccagccagtgtctggggacgcggccacctcccgcccggtggcccgagagcgcccgccctaccgacagcgcgcccggggactggtgaagacccggcttgcgccccaggcggctccgcagtgctcgcaccacgggcatacacagctgagccaaggacacggaagctatcccgggaaggttgcggagtccgcgcggtggccgctccttaccctcgttcagtggctcttggtgaccccaaggctccgcccgcccccaccacacccacgaaaacccaccgggcgttcccggcggcccggagcgatactcacgttattcggggcacctgcttgacgcagtgtcttctcccttcccgccgggccagacgcgaacgtggagaaagatgggagcagcgcgtcgctgacagccatgtcagactcgccaggtggctgcctgcgagcaaggcagggagcggagacaggagagtcaggggcggctttcggccgtcgtt

SEQ ID NO: 1371 - DNA, 4045 bp, Homo sapiens
ttctaacatcataataatggcttttagaaggtaaagagaatacaaggtgatcttttatgcttatattgcatcaatacacaattcaagggaattctggtcttccctcccccaactcacggatataatttataccctgatatccacaacttccagtcacccccttggcattttgtaagtccaggaatattcaagtcggatttagaattggaatgatagaagatccagtcacagaccccatctgttctttgatttttgtcttttggattcctcatttttcctgattatccactcacaagatgactcagttgggaacttgaccatgattgtagtgctttctggctgggctccttccctcatcgggaagacagtgtgaaaagtaaaaaatactgaattctcttctggcagtgtgggtcatatccactgtctgggatttaaaaatgcctcttcatgtgtaaggcgaggtggtccgacctggaaaatgctcggtcgcatttttggcactggaacgggcggtgccccgtgtgtttacggtagtgcctggtcagttcatctgagcgggcgaatttccatccacagccgtcccagtcacagtggtaaggtttctcacctgtaaaggtaaaagaaaaaaaaaattgacgctattgctatatcaaagaatcgccccttttaaaaactgaaggccagatagtaaaccaactctgaccctatcctaaagaaatccaggaatgtctttataccactgaaggggtgtattgaattccatatcataaacagaaatacattccgtgcttaagtatttggtcttgtttttagggggtcagttaagcacacaaccaccacctacacctatactaatgtttcaccaaaaacacacaaacaccacctaaacctatactaatgtttcatttgagtcaaggcatctcagtggtggaaatgaaatttggaaattgtgattggtagtgtgcccaaaccatgcaatcttattcctactacgactggggataaaaagccacaggtggctactttttttttctttacctttacgttactgaatgctgcacctaaacgactttgggtacctacttacattgacatggaaatgctctgcagtgacaaccctaaatcagaatcttcccagcaattttgaccatcatattcttggaatttaaaataaaaccttctgcttgtgggggaaaaaaaataaaaatgtaaatcaaaacgaacaaaaaataaaaaataaaaaagtaagaccgaattgttacgaccagaattcaaaataacaaaaagggagggtgaacctgggaagggaacattaaaaaacgatttttttaaaaaagccatcatgcttttgcatagcaaagtataatttcttgattataatgccaagctaggagaggcccacagaccgcggggaatctcctgccttttaaaagcctaacaaaattgcacattcaaacacagataccatccatcaagcaaaaggctcctgggcagaaaagtaggcgccggtttgctgttctctccagtgatcccggagatcaaggcgatagactgccctgggaagccaaggaggcactgaggagtgtccactggtagcctatggggctggaagctaacctgggaagtcaaggaggcactgaggagtgtccactggtagcctatggggctggaagctaacccccctcccttctgcagtttgtccccctacctgtgtgggttcgcaggtgtgccttgagatgggaactctttgtgtaggttttgccgcagcccgcgtaatcacaagtgtgggtggcggtccttttccggggccacgatcgtcttcccctctttggcttgggctcctctggcatgcaggaaccgggtggcatgagctctaggggtgaagaaggtggggtgagcatcatcccgtgtgtcccgaagtggggccagcacacacagggctccccagcccgagctacaaatccccgggactgaccttggtaatggagcggcgggacttgcggctgcatctgatcgggcaggaaggatgggtaattgggccccgggtggggatggaagccgggaggaagcggcagggcagggtgacagtccctgctgctcagcacttcctcaagacccagggtcggggtagtcctgctggggagctgccgccccagggggaagtcgtgtgcagccggccggtggccattgctgagagggggtccagcgcccaagtgggtgcacgaagagaccgcctcctgcttgatcttggggcacgtgcgcggcggcccgccgttgtagggcgccaccaccaccgggtggctgccgtcagggctgcctttgctgacgctgatgaccgacgggctgccgtactcgctgccaggggcgctcagcgacgccttcagcacgaacttgcccatcagcccgccacctggcggctgcggctgctgcggcggaatgtacaccgggtccaattctggccgcaggagctcggccacgaagccgcccgaggggctcacgtcgttgatgtccgccaggttgaagggagccgtcggagggggagcggactccctgccatagaggaggcctccgcccgtgccgcccggcgccacgcccgggtcgttcccggcccggatcggataggtgaagctgcaggtggagggcgcgctggcagggccgctgctcgacggcgacgacgaagaggaggctgacgctgacgaggacacggtggcggccactgactccggaggatgggtcagcgaattggagagaataaagtccaggtccaggagatcgttgaactcctcggtctctctccgaggtaggggcgccaggttgctaccgccgcaagccgcaccggctccgccgctctccaggtctgtggccacggtcgccgccgccaggtcataggggcggccgggaagcactgggggaagtcgcttcatgtgggagagctcctcccgccagcgctgcggggacagggcgggagagacctgtcagtggtggtcccctgttgccacccgacatactgacgtgctggcgggccacgcgcgactgcaccgcccagacatggggactggtcaggcaggaagcacccgggaacccagggcgccagcgctgcaatctcggcccactcccgggtcgaagaagaggtgatgcgtctgtattgcgggtgttatgtcctgtctgcccaattgcgtgtgagcgagcgccgcggctggtccctccccctccaggtcccgtggacgtccccggaattggcacaccgaggctctctcggtgcgctctcgccacggggccgcctacgcgctaaactcactctggcccagccagtgtctggggacgcggccacctcccgcccggtggcccgagagcgcccgccctaccgacagcgcgcccggggactggtgaagacccggcttgcgccccaggcggctccgcagtgctcgcaccacgggcatacacagctgagccaaggacacggaagctatcccgggaaggttgcggagtccgcgcggtggccgctccttaccctcgttcagtggctcttggtgaccccaaggctccgcccgcccccaccacacccacgaaaacccaccgggcgttcccggcggcccggagcgatactcacgttattcggggcacctgcttgacgcagtgtcttctcccttcccgccgggccagacgcgaacgtggagaaagatgggagcagcgcgtcgctgacagccatgtcagactcgccaggtggctgcctgcgagcaaggcagggagcggagacaggagagtcaggggcggctttcggccgtcgttccggcgcgtcccaccggtcctcacccctccctgctcccagcgccgcgcgcctcacctacctcattaatgtgggggcccagaaggtcctcggcagcccgaagcagctggggcacctgaaccccaaagtcaacgaagagaagaaacgaagccaaaacccaaaaccccaaattggccgagatccttcttctttggattaaatataacttggaagcgtcttttttaaaaagttcctttgtatacaaaagttcttagaaaa

SEQ ID NO: 1372 - DNA, 4047 bp, Homo sapiens
accatgattgtagtgctttctggctgggctccttccctcatcgggaagacagtgtgaaaagtaaaaaatactgaattctcttctggcagtgtgggtcatatccactgtctgggatttaaaaatgcctcttcatgtgtaaggcgaggtggtccgacctggaaaatgctcggtcgcatttttggcactggaacgggcggtgccccgtgtgtttacggtagtgcctggtcagttcatctgagcgggcgaatttccatccacagccgtcccagtcacagtggtaaggtttctcacctgtaaaggtaaaagaaaaaaaaaattgacgctattgctatatcaaagaatcgccccttttaaaaactgaaggccagatagtaaaccaactctgaccctatcctaaagaaatccaggaatgtctttataccactgaaggggtgtattgaattccatatcataaacagaaatacattccgtgcttaagtatttggtcttgtttttagggggtcagttaagcacacaaccaccacctacacctatactaatgtttcaccaaaaacacacaaacaccacctaaacctatactaatgtttcatttgagtcaaggcatctcagtggtggaaatgaaatttggaaattgtgattggtagtgtgcccaaaccatgcaatcttattcctactacgactggggataaaaagccacaggtggctactttttttttctttacctttacgttactgaatgctgcacctaaacgactttgggtacctacttacattgacatggaaatgctctgcagtgacaaccctaaatcagaatcttcccagcaattttgaccatcatattcttggaatttaaaataaaaccttctgcttgtgggggaaaaaaaataaaaatgtaaatcaaaacgaacaaaaaataaaaaataaaaaagtaagaccgaattgttacgaccagaattcaaaataacaaaaagggagggtgaacctgggaagggaacattaaaaaacgatttttttaaaaaagccatcatgcttttgcatagcaaagtataatttcttgattataatgccaagctaggagaggcccacagaccgcggggaatctcctgccttttaaaagcctaacaaaattgcacattcaaacacagataccatccatcaagcaaaaggctcctgggcagaaaagtaggcgccggtttgctgttctctccagtgatcccggagatcaaggcgatagactgccctgggaagccaaggaggcactgaggagtgtccactggtagcctatggggctggaagctaacctgggaagtcaaggaggcactgaggagtgtccactggtagcctatggggctggaagctaacccccctcccttctgcagtttgtccccctacctgtgtgggttcgcaggtgtgccttgagatgggaactctttgtgtaggttttgccgcagcccgcgtaatcacaagtgtgggtggcggtccttttccggggccacgatcgtcttcccctctttggcttgggctcctctggcatgcaggaaccgggtggcatgagctctaggggtgaagaaggtggggtgagcatcatcccgtgtgtcccgaagtggggccagcacacacagggctccccagcccgagctacaaatccccgggactgaccttggtaatggagcggcgggacttgcggctgcatctgatcgggcaggaaggatgggtaattgggccccgggtggggatggaagccgggaggaagcggcagggcagggtgacagtccctgctgctcagcacttcctcaagacccagggtcggggtagtcctgctggggagctgccgccccagggggaagtcgtgtgcagccggccggtggccattgctgagagggggtccagcgcccaagtgggtgcacgaagagaccgcctcctgcttgatcttggggcacgtgcgcggcggcccgccgttgtagggcgccaccaccaccgggtggctgccgtcagggctgcctttgctgacgctgatgaccgacgggctgccgtactcgctgccaggggcgctcagcgacgccttcagcacgaacttgcccatcagcccgccacctggcggctgcggctgctgcggcggaatgtacaccgggtccaattctggccgcaggagctcggccacgaagccgcccgaggggctcacgtcgttgatgtccgccaggttgaagggagccgtcggagggggagcggactccctgccatagaggaggcctccgcccgtgccgcccggcgccacgcccgggtcgttcccggcccggatcggataggtgaagctgcaggtggagggcgcgctggcagggccgctgctcgacggcgacgacgaagaggaggctgacgctgacgaggacacggtggcggccactgactccggaggatgggtcagcgaattggagagaataaagtccaggtccaggagatcgttgaactcctcggtctctctccgaggtaggggcgccaggttgctaccgccgcaagccgcaccggctccgccgctctccaggtctgtggccacggtcgccgccgccaggtcataggggcggccgggaagcactgggggaagtcgcttcatgtgggagagctcctcccgccagcgctgcggggacagggcgggagagacctgtcagtggtggtcccctgttgccacccgacatactgacgtgctggcgggccacgcgcgactgcaccgcccagacatggggactggtcaggcaggaagcacccgggaacccagggcgccagcgctgcaatctcggcccactcccgggtcgaagaagaggtgatgcgtctgtattgcgggtgttatgtcctgtctgcccaattgcgtgtgagcgagcgccgcggctggtccctccccctccaggtcccgtggacgtccccggaattggcacaccgaggctctctcggtgcgctctcgccacggggccgcctacgcgctaaactcactctggcccagccagtgtctggggacgcggccacctcccgcccggtggcccgagagcgcccgccctaccgacagcgcgcccggggactggtgaagacccggcttgcgccccaggcggctccgcagtgctcgcaccacgggcatacacagctgagccaaggacacggaagctatcccgggaaggttgcggagtccgcgcggtggccgctccttaccctcgttcagtggctcttggtgaccccaaggctccgcccgcccccaccacacccacgaaaacccaccgggcgttcccggcggcccggagcgatactcacgttattcggggcacctgcttgacgcagtgtcttctcccttcccgccgggccagacgcgaacgtggagaaagatgggagcagcgcgtcgctgacagccatgtcagactcgccaggtggctgcctgcgagcaaggcagggagcggagacaggagagtcaggggcggctttcggccgtcgttccggcgcgtcccaccggtcctcacccctccctgctcccagcgccgcgcgcctcacctacctcattaatgtgggggcccagaaggtcctcggcagcccgaagcagctggggcacctgaaccccaaagtcaacgaagagaagaaacgaagccaaaacccaaaaccccaaattggccgagatccttcttctttggattaaatataacttggaagcgtcttttttaaaaagttcctttgtatacaaaagttcttagaaaagttgtaaacgcaaaaatagacaatcagcaaggcgagtaagtaggtccggtggccgggctgcgctctcttccactcagcagcgtcccccaccactgtcgcggtcgcctcgagtgctgccgtgggcgcaggggctgtggccggggcggtgggcgggcggtgccgccaggtgagactggctgccgtggcgcggagctgcgaactggtcggcggcgcaaggcgcggactccggtgagttgtgtggagcgcgcgcggccatgggcgcgggccacgggcgggtgggagggtggggggccagaggggcgggggagggtcactcgg

SEQ ID NO: 1373 - DNA, 4044 bp, Homo sapiens
tggaaaatgctcggtcgcatttttggcactggaacgggcggtgccccgtgtgtttacggtagtgcctggtcagttcatctgagcgggcgaatttccatccacagccgtcccagtcacagtggtaaggtttctcacctgtaaaggtaaaagaaaaaaaaaattgacgctattgctatatcaaagaatcgccccttttaaaaactgaaggccagatagtaaaccaactctgaccctatcctaaagaaatccaggaatgtctttataccactgaaggggtgtattgaattccatatcataaacagaaatacattccgtgcttaagtatttggtcttgtttttagggggtcagttaagcacacaaccaccacctacacctatactaatgtttcaccaaaaacacacaaacaccacctaaacctatactaatgtttcatttgagtcaaggcatctcagtggtggaaatgaaatttggaaattgtgattggtagtgtgcccaaaccatgcaatcttattcctactacgactggggataaaaagccacaggtggctactttttttttctttacctttacgttactgaatgctgcacctaaacgactttgggtacctacttacattgacatggaaatgctctgcagtgacaaccctaaatcagaatcttcccagcaattttgaccatcatattcttggaatttaaaataaaaccttctgcttgtgggggaaaaaaaataaaaatgtaaatcaaaacgaacaaaaaataaaaaataaaaaagtaagaccgaattgttacgaccagaattcaaaataacaaaaagggagggtgaacctgggaagggaacattaaaaaacgatttttttaaaaaagccatcatgcttttgcatagcaaagtataatttcttgattataatgccaagctaggagaggcccacagaccgcggggaatctcctgccttttaaaagcctaacaaaattgcacattcaaacacagataccatccatcaagcaaaaggctcctgggcagaaaagtaggcgccggtttgctgttctctccagtgatcccggagatcaaggcgatagactgccctgggaagccaaggaggcactgaggagtgtccactggtagcctatggggctggaagctaacctgggaagtcaaggaggcactgaggagtgtccactggtagcctatggggctggaagctaacccccctcccttctgcagtttgtccccctacctgtgtgggttcgcaggtgtgccttgagatgggaactctttgtgtaggttttgccgcagcccgcgtaatcacaagtgtgggtggcggtccttttccggggccacgatcgtcttcccctctttggcttgggctcctctggcatgcaggaaccgggtggcatgagctctaggggtgaagaaggtggggtgagcatcatcccgtgtgtcccgaagtggggccagcacacacagggctccccagcccgagctacaaatccccgggactgaccttggtaatggagcggcgggacttgcggctgcatctgatcgggcaggaaggatgggtaattgggccccgggtggggatggaagccgggaggaagcggcagggcagggtgacagtccctgctgctcagcacttcctcaagacccagggtcggggtagtcctgctggggagctgccgccccagggggaagtcgtgtgcagccggccggtggccattgctgagagggggtccagcgcccaagtgggtgcacgaagagaccgcctcctgcttgatcttggggcacgtgcgcggcggcccgccgttgtagggcgccaccaccaccgggtggctgccgtcagggctgcctttgctgacgctgatgaccgacgggctgccgtactcgctgccaggggcgctcagcgacgccttcagcacgaacttgcccatcagcccgccacctggcggctgcggctgctgcggcggaatgtacaccgggtccaattctggccgcaggagctcggccacgaagccgcccgaggggctcacgtcgttgatgtccgccaggttgaagggagccgtcggagggggagcggactccctgccatagaggaggcctccgcccgtgccgcccggcgccacgcccgggtcgttcccggcccggatcggataggtgaagctgcaggtggagggcgcgctggcagggccgctgctcgacggcgacgacgaagaggaggctgacgctgacgaggacacggtggcggccactgactccggaggatgggtcagcgaattggagagaataaagtccaggtccaggagatcgttgaactcctcggtctctctccgaggtaggggcgccaggttgctaccgccgcaagccgcaccggctccgccgctctccaggtctgtggccacggtcgccgccgccaggtcataggggcggccgggaagcactgggggaagtcgcttcatgtgggagagctcctcccgccagcgctgcggggacagggcgggagagacctgtcagtggtggtcccctgttgccacccgacatactgacgtgctggcgggccacgcgcgactgcaccgcccagacatggggactggtcaggcaggaagcacccgggaacccagggcgccagcgctgcaatctcggcccactcccgggtcgaagaagaggtgatgcgtctgtattgcgggtgttatgtcctgtctgcccaattgcgtgtgagcgagcgccgcggctggtccctccccctccaggtcccgtggacgtccccggaattggcacaccgaggctctctcggtgcgctctcgccacggggccgcctacgcgctaaactcactctggcccagccagtgtctggggacgcggccacctcccgcccggtggcccgagagcgcccgccctaccgacagcgcgcccggggactggtgaagacccggcttgcgccccaggcggctccgcagtgctcgcaccacgggcatacacagctgagccaaggacacggaagctatcccgggaaggttgcggagtccgcgcggtggccgctccttaccctcgttcagtggctcttggtgaccccaaggctccgcccgcccccaccacacccacgaaaacccaccgggcgttcccggcggcccggagcgatactcacgttattcggggcacctgcttgacgcagtgtcttctcccttcccgccgggccagacgcgaacgtggagaaagatgggagcagcgcgtcgctgacagccatgtcagactcgccaggtggctgcctgcgagcaaggcagggagcggagacaggagagtcaggggcggctttcggccgtcgttccggcgcgtcccaccggtcctcacccctccctgctcccagcgccgcgcgcctcacctacctcattaatgtgggggcccagaaggtcctcggcagcccgaagcagctggggcacctgaaccccaaagtcaacgaagagaagaaacgaagccaaaacccaaaaccccaaattggccgagatccttcttctttggattaaatataacttggaagcgtcttttttaaaaagttcctttgtatacaaaagttcttagaaaagttgtaaacgcaaaaatagacaatcagcaaggcgagtaagtaggtccggtggccgggctgcgctctcttccactcagcagcgtcccccaccactgtcgcggtcgcctcgagtgctgccgtgggcgcaggggctgtggccggggcggtgggcgggcggtgccgccaggtgagactggctgccgtggcgcggagctgcgaactggtcggcggcgcaaggcgcggactccggtgagttgtgtggagcgcgcgcggccatgggcgcgggccacgggcgggtgggagggtggggggccagaggggcgggggagggtcactcggcggctcccggtgccgccgccgcccgccaccgcctctgctccccgcgcgcccgcagacacgttcgttctctctggtcgggaaactgccggccgccggcgcgcgttccttacttataacttccttcgctacagccttttcctccgccttctccca

SEQ ID NO: 1374 - DNA, 4046 bp, Homo sapiens
gggcgaatttccatccacagccgtcccagtcacagtggtaaggtttctcacctgtaaaggtaaaagaaaaaaaaaattgacgctattgctatatcaaagaatcgccccttttaaaaactgaaggccagatagtaaaccaactctgaccctatcctaaagaaatccaggaatgtctttataccactgaaggggtgtattgaattccatatcataaacagaaatacattccgtgcttaagtatttggtcttgtttttagggggtcagttaagcacacaaccaccacctacacctatactaatgtttcaccaaaaacacacaaacaccacctaaacctatactaatgtttcatttgagtcaaggcatctcagtggtggaaatgaaatttggaaattgtgattggtagtgtgcccaaaccatgcaatcttattcctactacgactggggataaaaagccacaggtggctactttttttttctttacctttacgttactgaatgctgcacctaaacgactttgggtacctacttacattgacatggaaatgctctgcagtgacaaccctaaatcagaatcttcccagcaattttgaccatcatattcttggaatttaaaataaaaccttctgcttgtgggggaaaaaaaataaaaatgtaaatcaaaacgaacaaaaaataaaaaataaaaaagtaagaccgaattgttacgaccagaattcaaaataacaaaaagggagggtgaacctgggaagggaacattaaaaaacgatttttttaaaaaagccatcatgcttttgcatagcaaagtataatttcttgattataatgccaagctaggagaggcccacagaccgcggggaatctcctgccttttaaaagcctaacaaaattgcacattcaaacacagataccatccatcaagcaaaaggctcctgggcagaaaagtaggcgccggtttgctgttctctccagtgatcccggagatcaaggcgatagactgccctgggaagccaaggaggcactgaggagtgtccactggtagcctatggggctggaagctaacctgggaagtcaaggaggcactgaggagtgtccactggtagcctatggggctggaagctaacccccctcccttctgcagtttgtccccctacctgtgtgggttcgcaggtgtgccttgagatgggaactctttgtgtaggttttgccgcagcccgcgtaatcacaagtgtgggtggcggtccttttccggggccacgatcgtcttcccctctttggcttgggctcctctggcatgcaggaaccgggtggcatgagctctaggggtgaagaaggtggggtgagcatcatcccgtgtgtcccgaagtggggccagcacacacagggctccccagcccgagctacaaatccccgggactgaccttggtaatggagcggcgggacttgcggctgcatctgatcgggcaggaaggatgggtaattgggccccgggtggggatggaagccgggaggaagcggcagggcagggtgacagtccctgctgctcagcacttcctcaagacccagggtcggggtagtcctgctggggagctgccgccccagggggaagtcgtgtgcagccggccggtggccattgctgagagggggtccagcgcccaagtgggtgcacgaagagaccgcctcctgcttgatcttggggcacgtgcgcggcggcccgccgttgtagggcgccaccaccaccgggtggctgccgtcagggctgcctttgctgacgctgatgaccgacgggctgccgtactcgctgccaggggcgctcagcgacgccttcagcacgaacttgcccatcagcccgccacctggcggctgcggctgctgcggcggaatgtacaccgggtccaattctggccgcaggagctcggccacgaagccgcccgaggggctcacgtcgttgatgtccgccaggttgaagggagccgtcggagggggagcggactccctgccatagaggaggcctccgcccgtgccgcccggcgccacgcccgggtcgttcccggcccggatcggataggtgaagctgcaggtggagggcgcgctggcagggccgctgctcgacggcgacgacgaagaggaggctgacgctgacgaggacacggtggcggccactgactccggaggatgggtcagcgaattggagagaataaagtccaggtccaggagatcgttgaactcctcggtctctctccgaggtaggggcgccaggttgctaccgccgcaagccgcaccggctccgccgctctccaggtctgtggccacggtcgccgccgccaggtcataggggcggccgggaagcactgggggaagtcgcttcatgtgggagagctcctcccgccagcgctgcggggacagggcgggagagacctgtcagtggtggtcccctgttgccacccgacatactgacgtgctggcgggccacgcgcgactgcaccgcccagacatggggactggtcaggcaggaagcacccgggaacccagggcgccagcgctgcaatctcggcccactcccgggtcgaagaagaggtgatgcgtctgtattgcgggtgttatgtcctgtctgcccaattgcgtgtgagcgagcgccgcggctggtccctccccctccaggtcccgtggacgtccccggaattggcacaccgaggctctctcggtgcgctctcgccacggggccgcctacgcgctaaactcactctggcccagccagtgtctggggacgcggccacctcccgcccggtggcccgagagcgcccgccctaccgacagcgcgcccggggactggtgaagacccggcttgcgccccaggcggctccgcagtgctcgcaccacgggcatacacagctgagccaaggacacggaagctatcccgggaaggttgcggagtccgcgcggtggccgctccttaccctcgttcagtggctcttggtgaccccaaggctccgcccgcccccaccacacccacgaaaacccaccgggcgttcccggcggcccggagcgatactcacgttattcggggcacctgcttgacgcagtgtcttctcccttcccgccgggccagacgcgaacgtggagaaagatgggagcagcgcgtcgctgacagccatgtcagactcgccaggtggctgcctgcgagcaaggcagggagcggagacaggagagtcaggggcggctttcggccgtcgttccggcgcgtcccaccggtcctcacccctccctgctcccagcgccgcgcgcctcacctacctcattaatgtgggggcccagaaggtcctcggcagcccgaagcagctggggcacctgaaccccaaagtcaacgaagagaagaaacgaagccaaaacccaaaaccccaaattggccgagatccttcttctttggattaaatataacttggaagcgtcttttttaaaaagttcctttgtatacaaaagttcttagaaaagttgtaaacgcaaaaatagacaatcagcaaggcgagtaagtaggtccggtggccgggctgcgctctcttccactcagcagcgtcccccaccactgtcgcggtcgcctcgagtgctgccgtgggcgcaggggctgtggccggggcggtgggcgggcggtgccgccaggtgagactggctgccgtggcgcggagctgcgaactggtcggcggcgcaaggcgcggactccggtgagttgtgtggagcgcgcgcggccatgggcgcgggccacgggcgggtgggagggtggggggccagaggggcgggggagggtcactcggcggctcccggtgccgccgccgcccgccaccgcctctgctccccgcgcgcccgcagacacgttcgttctctctggtcgggaaactgccggccgccggcgcgcgttccttacttataacttccttcgctacagccttttcctccgccttctcccatgccccgcccctccctttcttctctccgccccccccgaggctcccttccatcgttgctatggcagctaaatcaacaaactcggcgc

SEQ ID NO: 1375 - DNA, 4041 bp, Homo sapiens
aaggccagatagtaaaccaactctgaccctatcctaaagaaatccaggaatgtctttataccactgaaggggtgtattgaattccatatcataaacagaaatacattccgtgcttaagtatttggtcttgtttttagggggtcagttaagcacacaaccaccacctacacctatactaatgtttcaccaaaaacacacaaacaccacctaaacctatactaatgtttcatttgagtcaaggcatctcagtggtggaaatgaaatttggaaattgtgattggtagtgtgcccaaaccatgcaatcttattcctactacgactggggataaaaagccacaggtggctactttttttttctttacctttacgttactgaatgctgcacctaaacgactttgggtacctacttacattgacatggaaatgctctgcagtgacaaccctaaatcagaatcttcccagcaattttgaccatcatattcttggaatttaaaataaaaccttctgcttgtgggggaaaaaaaataaaaatgtaaatcaaaacgaacaaaaaataaaaaataaaaaagtaagaccgaattgttacgaccagaattcaaaataacaaaaagggagggtgaacctgggaagggaacattaaaaaacgatttttttaaaaaagccatcatgcttttgcatagcaaagtataatttcttgattataatgccaagctaggagaggcccacagaccgcggggaatctcctgccttttaaaagcctaacaaaattgcacattcaaacacagataccatccatcaagcaaaaggctcctgggcagaaaagtaggcgccggtttgctgttctctccagtgatcccggagatcaaggcgatagactgccctgggaagccaaggaggcactgaggagtgtccactggtagcctatggggctggaagctaacctgggaagtcaaggaggcactgaggagtgtccactggtagcctatggggctggaagctaacccccctcccttctgcagtttgtccccctacctgtgtgggttcgcaggtgtgccttgagatgggaactctttgtgtaggttttgccgcagcccgcgtaatcacaagtgtgggtggcggtccttttccggggccacgatcgtcttcccctctttggcttgggctcctctggcatgcaggaaccgggtggcatgagctctaggggtgaagaaggtggggtgagcatcatcccgtgtgtcccgaagtggggccagcacacacagggctccccagcccgagctacaaatccccgggactgaccttggtaatggagcggcgggacttgcggctgcatctgatcgggcaggaaggatgggtaattgggccccgggtggggatggaagccgggaggaagcggcagggcagggtgacagtccctgctgctcagcacttcctcaagacccagggtcggggtagtcctgctggggagctgccgccccagggggaagtcgtgtgcagccggccggtggccattgctgagagggggtccagcgcccaagtgggtgcacgaagagaccgcctcctgcttgatcttggggcacgtgcgcggcggcccgccgttgtagggcgccaccaccaccgggtggctgccgtcagggctgcctttgctgacgctgatgaccgacgggctgccgtactcgctgccaggggcgctcagcgacgccttcagcacgaacttgcccatcagcccgccacctggcggctgcggctgctgcggcggaatgtacaccgggtccaattctggccgcaggagctcggccacgaagccgcccgaggggctcacgtcgttgatgtccgccaggttgaagggagccgtcggagggggagcggactccctgccatagaggaggcctccgcccgtgccgcccggcgccacgcccgggtcgttcccggcccggatcggataggtgaagctgcaggtggagggcgcgctggcagggccgctgctcgacggcgacgacgaagaggaggctgacgctgacgaggacacggtggcggccactgactccggaggatgggtcagcgaattggagagaataaagtccaggtccaggagatcgttgaactcctcggtctctctccgaggtaggggcgccaggttgctaccgccgcaagccgcaccggctccgccgctctccaggtctgtggccacggtcgccgccgccaggtcataggggcggccgggaagcactgggggaagtcgcttcatgtgggagagctcctcccgccagcgctgcggggacagggcgggagagacctgtcagtggtggtcccctgttgccacccgacatactgacgtgctggcgggccacgcgcgactgcaccgcccagacatggggactggtcaggcaggaagcacccgggaacccagggcgccagcgctgcaatctcggcccactcccgggtcgaagaagaggtgatgcgtctgtattgcgggtgttatgtcctgtctgcccaattgcgtgtgagcgagcgccgcggctggtccctccccctccaggtcccgtggacgtccccggaattggcacaccgaggctctctcggtgcgctctcgccacggggccgcctacgcgctaaactcactctggcccagccagtgtctggggacgcggccacctcccgcccggtggcccgagagcgcccgccctaccgacagcgcgcccggggactggtgaagacccggcttgcgccccaggcggctccgcagtgctcgcaccacgggcatacacagctgagccaaggacacggaagctatcccgggaaggttgcggagtccgcgcggtggccgctccttaccctcgttcagtggctcttggtgaccccaaggctccgcccgcccccaccacacccacgaaaacccaccgggcgttcccggcggcccggagcgatactcacgttattcggggcacctgcttgacgcagtgtcttctcccttcccgccgggccagacgcgaacgtggagaaagatgggagcagcgcgtcgctgacagccatgtcagactcgccaggtggctgcctgcgagcaaggcagggagcggagacaggagagtcaggggcggctttcggccgtcgttccggcgcgtcccaccggtcctcacccctccctgctcccagcgccgcgcgcctcacctacctcattaatgtgggggcccagaaggtcctcggcagcccgaagcagctggggcacctgaaccccaaagtcaacgaagagaagaaacgaagccaaaacccaaaaccccaaattggccgagatccttcttctttggattaaatataacttggaagcgtcttttttaaaaagttcctttgtatacaaaagttcttagaaaagttgtaaacgcaaaaatagacaatcagcaaggcgagtaagtaggtccggtggccgggctgcgctctcttccactcagcagcgtcccccaccactgtcgcggtcgcctcgagtgctgccgtgggcgcaggggctgtggccggggcggtgggcgggcggtgccgccaggtgagactggctgccgtggcgcggagctgcgaactggtcggcggcgcaaggcgcggactccggtgagttgtgtggagcgcgcgcggccatgggcgcgggccacgggcgggtgggagggtggggggccagaggggcgggggagggtcactcggcggctcccggtgccgccgccgcccgccaccgcctctgctccccgcgcgcccgcagacacgttcgttctctctggtcgggaaactgccggccgccggcgcgcgttccttacttataacttccttcgctacagccttttcctccgccttctcccatgccccgcccctccctttcttctctccgccccccccgaggctcccttccatcgttgctatggcagctaaatcaacaaactcggcgcacgtgggggcgggggaggggaaggaggggcgcgggcggggctgggccgggccgtgacgccagccaggcagctggcgggctggagccgagctgacgccggcggcagtggtgtcggc

SEQ ID NO: 1376 - DNA, 4035 bp, Homo sapiens
ggggccagcacacacagggctccccagcccgagctacaaatccccgggactgaccttggtaatggagcggcgggacttgcggctgcatctgatcgggcaggaaggatgggtaattgggccccgggtggggatggaagccgggaggaagcggcagggcagggtgacagtccctgctgctcagcacttcctcaagacccagggtcggggtagtcctgctggggagctgccgccccagggggaagtcgtgtgcagccggccggtggccattgctgagagggggtccagcgcccaagtgggtgcacgaagagaccgcctcctgcttgatcttggggcacgtgcgcggcggcccgccgttgtagggcgccaccaccaccgggtggctgccgtcagggctgcctttgctgacgctgatgaccgacgggctgccgtactcgctgccaggggcgctcagcgacgccttcagcacgaacttgcccatcagcccgccacctggcggctgcggctgctgcggcggaatgtacaccgggtccaattctggccgcaggagctcggccacgaagccgcccgaggggctcacgtcgttgatgtccgccaggttgaagggagccgtcggagggggagcggactccctgccatagaggaggcctccgcccgtgccgcccggcgccacgcccgggtcgttcccggcccggatcggataggtgaagctgcaggtggagggcgcgctggcagggccgctgctcgacggcgacgacgaagaggaggctgacgctgacgaggacacggtggcggccactgactccggaggatgggtcagcgaattggagagaataaagtccaggtccaggagatcgttgaactcctcggtctctctccgaggtaggggcgccaggttgctaccgccgcaagccgcaccggctccgccgctctccaggtctgtggccacggtcgccgccgccaggtcataggggcggccgggaagcactgggggaagtcgcttcatgtgggagagctcctcccgccagcgctgcggggacagggcgggagagacctgtcagtggtggtcccctgttgccacccgacatactgacgtgctggcgggccacgcgcgactgcaccgcccagacatggggactggtcaggcaggaagcacccgggaacccagggcgccagcgctgcaatctcggcccactcccgggtcgaagaagaggtgatgcgtctgtattgcgggtgttatgtcctgtctgcccaattgcgtgtgagcgagcgccgcggctggtccctccccctccaggtcccgtggacgtccccggaattggcacaccgaggctctctcggtgcgctctcgccacggggccgcctacgcgctaaactcactctggcccagccagtgtctggggacgcggccacctcccgcccggtggcccgagagcgcccgccctaccgacagcgcgcccggggactggtgaagacccggcttgcgccccaggcggctccgcagtgctcgcaccacgggcatacacagctgagccaaggacacggaagctatcccgggaaggttgcggagtccgcgcggtggccgctccttaccctcgttcagtggctcttggtgaccccaaggctccgcccgcccccaccacacccacgaaaacccaccgggcgttcccggcggcccggagcgatactcacgttattcggggcacctgcttgacgcagtgtcttctcccttcccgccgggccagacgcgaacgtggagaaagatgggagcagcgcgtcgctgacagccatgtcagactcgccaggtggctgcctgcgagcaaggcagggagcggagacaggagagtcaggggcggctttcggccgtcgttccggcgcgtcccaccggtcctcacccctccctgctcccagcgccgcgcgcctcacctacctcattaatgtgggggcccagaaggtcctcggcagcccgaagcagctggggcacctgaaccccaaagtcaacgaagagaagaaacgaagccaaaacccaaaaccccaaattggccgagatccttcttctttggattaaatataacttggaagcgtcttttttaaaaagttcctttgtatacaaaagttcttagaaaagttgtaaacgcaaaaatagacaatcagcaaggcgagtaagtaggtccggtggccgggctgcgctctcttccactcagcagcgtcccccaccactgtcgcggtcgcctcgagtgctgccgtgggcgcaggggctgtggccggggcggtgggcgggcggtgccgccaggtgagactggctgccgtggcgcggagctgcgaactggtcggcggcgcaaggcgcggactccggtgagttgtgtggagcgcgcgcggccatgggcgcgggccacgggcgggtgggagggtggggggccagaggggcgggggagggtcactcggcggctcccggtgccgccgccgcccgccaccgcctctgctccccgcgcgcccgcagacacgttcgttctctctggtcgggaaactgccggccgccggcgcgcgttccttacttataacttccttcgctacagccttttcctccgccttctcccatgccccgcccctccctttcttctctccgccccccccgaggctcccttccatcgttgctatggcagctaaatcaacaaactcggcgcacgtgggggcgggggaggggaaggaggggcgcgggcggggctgggccgggccgtgacgccagccaggcagctggcgggctggagccgagctgacgccggcggcagtggtgtcggcggcggcggcggcgtccgccccagcgcggggcgcgaggaaccgggcgcaggttcggtcgctgcgcgaccagggccgtactcaccgccattgtcggctccctgggttcgaagcccgcgaagactggtggggtcagcgggcggcacggtcacgcgtccgcacccctgctagcatacgcgcttgccgcgctgtctgcgcgctggagaagagcgcgattatccgcgtgactcatccagccctccatctccccctccctctctgcgctcgcaggagtccgctctcgtcgctcagcgccagtgccggtggcggtgccggcgctcggcctgacctcgcacggttcctcgcgggcccttctgctgaggggtggggggcgctaggggtgtggagaggaggcagtgcccagcactgtgcagcgtgaactgggagcctcaagagaaggccagaggagtgttccgccgggaacaggcggaaagaggcacgaatggggagttatggttttgatactttaaatagcgagaaagggagtgaaagggctcaagatttactcagaggcataagggagagaagagggactgtgaggcgcggagacagttttcaaccagccatctcgaagccctttcctttttttttctttcttttttttttttttgtgagacagagtctcgctgtgtcgcccaagctggaatgcagtggcacgatctcagctcagtgcaacctccgcctcctgcgtccaagcgattctcctgcgtcagcctcccgagtagcggggattacaggcgtgcgccacgacgccggctaatttttgtatttttcgtggagacggggtttcaccatgttggccaggcaggtctcgaacacctgacctcaagtgatcagcctgcctcggcctcccgaagtgctgggattacaggcgtgagccactgcctgtaatatttgatgactaaattgcactgtagaataataataataatagaagacacccattaaagaagaattaaacactcactgatgacttttcaagccacgcactctcctttccactttatggatgagaaattgagtcataaagaggtgaaatggccagtaaaggtcaaaggacaactcgttccttcggctcaggctccgggtaggtcaggcccccctaaagggacttccctgggaagtgaccatgtgccaggaagtggagcgatgcggtgggatcctagctctcaaaaagtgcacaccgagcccgccgcaggcgtc

SEQ ID NO: 1377 - DNA, 4134 bp, Homo sapiens
tccctggcattctaccatttataccacattttatgtgtatttaaaaatatccagccatagccagtcactcttctcacatggtggacagtggttccacttttaattgcttatttacaaagagattgacatctgtattaagctctatctcaaagatgttttcatgttccttctccacattgcttgtgtgagtctaaaaaaaaaaaaagaacagcaaagagatagccctgaacaatgctatatccacatgggacctggacttagggaatgacataaaaatagaattaggggttgtgatttccactagctactttgctgtcatagactgcatatcatctttatatgaaattgccttccatctaggtgttatagactgaattgtgtcctctcaaaattcatatgttgtaggtctgactccaaatgtgactgtatttggagatagaacctttaaggaggtaattaaggttaaatgaggtcataagggtggagccctaatccagtaggactggtgtccttataagaaggtgaagaggcatcaaacctctctctcctcacatactcagaggaaggacatttgaagacacagtgagaaagcggccattggcaagcaaggaagagagacttcaccagaaatcaaacttgctggcactttcatcttagacttctagcctccagaactgtgagaaaataaattgttatttaagccacttggtctgatattttgttatggcagctgaggcaaactcataaagtaggtgaaggtgtttttacagagaagttgtaaaagatacactttcctatccattatacattagtctattccatgcctcctcttctggttgtgtctataacctccttaattccctataaaggatatatgtacatagcactagaatcacaggagcattgtatagtttctttcttttttatttttttgagagaagttctggctctactgtccaggctggagtgcagtggcatgatcttggctcattgtaatctccaccttatgggtttaagccatcctcccacctcagcctccagagtagctgggactacaggtccacacaaccacaccaggctaatttttgtgtttttgtagagacaaggtttcaccatgtttcccaggctggtctcgaactcttggactcaagcgatccacccaccttggcctcccaaagtgctgggattacaagcatgaggcactgcacatggtcattgtacattttcttaatgctgctgtaacaaattaccacaaacttgagggctgaaaataacacaattctagatgtcagaagtctaaaatgcatctcattgagttaaaatcaccatgttggcagggctgcatttctggagattctagggaagaatccgttttcttgcctttttcagcttctagaggctactcacatttcttggctcatggcccccttcttctatcttcaaagccatcaactgctggtagtctttccctcattgtatcagtctgacactgaatctcctgtctgccttttccatttataaggaccctgtgattacattgggcccacccatacaaaccaggagaatctcccatctcaaggtcagctgattagtaaccttaattccctcttgccatgtgatatagtatagttataagttttggagattacagtgtagacatctttatggggcattattctgtttatcattgatgtctattcacattaatgcaggtaagaatatgtataggtattataaaattgataatttccatattcttcctctttcccacatttaaatactgaatactaattttccttcttttgaagcttgggcccattactacattagcactattactggtgactttaggttcatctgggcacagtgagtgcaataggaggagggatgtagagtacccatcatgccatgcactatgaatttgcggatacaggctaatcaaaaatttttgccttgggcttttttttttgagagcaggagagatttggtatcaatgtattaaaaaagcacttggattatctgtgaattctatatgaataatatagaatatattaacatatattaatatgaatgtaatatatataattatatatagaatatatataattctatagcatctgtgaatgctatagctgggttcaccctgccccttagaaacaaagaacccagaatcaaatttctaggtctcaacttcaagtgcctctcttagataataaagtgttaagtataatatgttctcagttatttcaaatgctgccagtgctttttggcttcagctaatctgtggcttgacttggttaagctactcaattaagagtaaatatccacccttacctcagtccttcaaaccttaattctttcataatgggataaaaacactcaatgataaagtttaacccaaaggtagacaattagaaaagcttatcagctgtgggtaaaagcacattgttttcccttttcccttcccttcccttcccttcccttaccttcccttcccttcccttccctcccctcccccctttccttcccttcccttttttctttcttttcttttttcttttcttttttttttgagacagagtctcgctctgtcacccaggctggattgcagtggtgtgatcttggctcactgcaaactccacctcccgggttccagcaattctcctgcctacctcctgagtagcacggattataggtgcgtgccactatgtctggctaatttttgtatttttagtagagacggggcttcaccatgttgatcaggctggtctccaactcctgatctcgtgatctgcccacctcggcctctcaacgtgttgggattacaggcatgagccaccatgcccagcatgttttctagcaagataacaaagaagggtgcatttggattcttgaatcttattccaagatcaactgagaatttagccataagtattttggaaagttattccacctccttcaaattgggttctctaccttatatattacataacaaatgaacacactttgatacttttcccaacaaagcctttggatagaaaccaagaagcttggtttgctattttcatgcttatggcatttgctcacctaacttttagttatgacctcaaaagaaaaggccctcctctcttcctcacactactttgctcattatatgtgaaattcaactgtccctttgaggccaactactaatttttcctttctgcttcccaagaaaattagagaaatttcagaattcaaatatgacaacttttacaagtcataggccaaccatcaagttgtcatctgtgatatggaaaggggaaggggatggatctaggttcatcaagccatggatttggcactgcttgacacaataagccttccagatgtctttagtgaattcataattaaaatagtcaaaaggatcaatacctttgaagaaacaatccaagctccaaggggcagaagtaggctgagtagtcactttaaattcaatcaatacatttaacaaatattcattgaatacatattaaatggtagtgttaggcactggctaataaaccaacagacattgtaccttatcaaatggaacttatgatctattgagggagacaggcaataaccaaaaaaaaaaaaaaacatataattatacattgtgataagaaaattaaagggaaagaaataggatgcaatgactaataatgaaaaacagcatatttactttagaaagagtgattagagaagaaatctgtgaaaaggtagtatttaaagccagatgtgaagggtaaaaagaagccagccagccgggcacggtggctcacacctgtaatcccagcactttgggaggccgagatgggcggatcatgaggtcaggagatcgagaccatcctggctaactaacacagtgaaaccccgtctctactaaaaatataaaaaattagccaagcgtggtggcgtgcacctgtagttccagctattcgggaggctgaggcaggagaatggtgtgaacccaggaggtggagcttgcagtgagcagagatcgtgccactgcactccagcccgggccacagcgagaccccgtctcaaaaaataaataaataaataaataaataaataaataaataaataaaagaagccagacattgaagccat

SEQ ID NO: 1378 - DNA, 4059 bp, Homo sapiens
atgataagaatgataaatattagcaatgagaaagaatttattgatgtgtagataaatgaggcaatgtaactataacactacctagataaagatgattccatgttttcctgatttagttgaaactgattatctggctgagtttagatagttttctgcccagaagccagaacgttgactaggtaacttataagatactccttctatccctggcattctaccatttataccacattttatgtgtatttaaaaatatccagccatagccagtcactcttctcacatggtggacagtggttccacttttaattgcttatttacaaagagattgacatctgtattaagctctatctcaaagatgttttcatgttccttctccacattgcttgtgtgagtctaaaaaaaaaaaaagaacagcaaagagatagccctgaacaatgctatatccacatgggacctggacttagggaatgacataaaaatagaattaggggttgtgatttccactagctactttgctgtcatagactgcatatcatctttatatgaaattgccttccatctaggtgttatagactgaattgtgtcctctcaaaattcatatgttgtaggtctgactccaaatgtgactgtatttggagatagaacctttaaggaggtaattaaggttaaatgaggtcataagggtggagccctaatccagtaggactggtgtccttataagaaggtgaagaggcatcaaacctctctctcctcacatactcagaggaaggacatttgaagacacagtgagaaagcggccattggcaagcaaggaagagagacttcaccagaaatcaaacttgctggcactttcatcttagacttctagcctccagaactgtgagaaaataaattgttatttaagccacttggtctgatattttgttatggcagctgaggcaaactcataaagtaggtgaaggtgtttttacagagaagttgtaaaagatacactttcctatccattatacattagtctattccatgcctcctcttctggttgtgtctataacctccttaattccctataaaggatatatgtacatagcactagaatcacaggagcattgtatagtttctttcttttttatttttttgagagaagttctggctctactgtccaggctggagtgcagtggcatgatcttggctcattgtaatctccaccttatgggtttaagccatcctcccacctcagcctccagagtagctgggactacaggtccacacaaccacaccaggctaatttttgtgtttttgtagagacaaggtttcaccatgtttcccaggctggtctcgaactcttggactcaagcgatccacccaccttggcctcccaaagtgctgggattacaagcatgaggcactgcacatggtcattgtacattttcttaatgctgctgtaacaaattaccacaaacttgagggctgaaaataacacaattctagatgtcagaagtctaaaatgcatctcattgagttaaaatcaccatgttggcagggctgcatttctggagattctagggaagaatccgttttcttgcctttttcagcttctagaggctactcacatttcttggctcatggcccccttcttctatcttcaaagccatcaactgctggtagtctttccctcattgtatcagtctgacactgaatctcctgtctgccttttccatttataaggaccctgtgattacattgggcccacccatacaaaccaggagaatctcccatctcaaggtcagctgattagtaaccttaattccctcttgccatgtgatatagtatagttataagttttggagattacagtgtagacatctttatggggcattattctgtttatcattgatgtctattcacattaatgcaggtaagaatatgtataggtattataaaattgataatttccatattcttcctctttcccacatttaaatactgaatactaattttccttcttttgaagcttgggcccattactacattagcactattactggtgactttaggttcatctgggcacagtgagtgcaataggaggagggatgtagagtacccatcatgccatgcactatgaatttgcggatacaggctaatcaaaaatttttgccttgggcttttttttttgagagcaggagagatttggtatcaatgtattaaaaaagcacttggattatctgtgaattctatatgaataatatagaatatattaacatatattaatatgaatgtaatatatataattatatatagaatatatataattctatagcatctgtgaatgctatagctgggttcaccctgccccttagaaacaaagaacccagaatcaaatttctaggtctcaacttcaagtgcctctcttagataataaagtgttaagtataatatgttctcagttatttcaaatgctgccagtgctttttggcttcagctaatctgtggcttgacttggttaagctactcaattaagagtaaatatccacccttacctcagtccttcaaaccttaattctttcataatgggataaaaacactcaatgataaagtttaacccaaaggtagacaattagaaaagcttatcagctgtgggtaaaagcacattgttttcccttttcccttcccttcccttcccttcccttaccttcccttcccttcccttccctcccctcccccctttccttcccttcccttttttctttcttttcttttttcttttcttttttttttgagacagagtctcgctctgtcacccaggctggattgcagtggtgtgatcttggctcactgcaaactccacctcccgggttccagcaattctcctgcctacctcctgagtagcacggattataggtgcgtgccactatgtctggctaatttttgtatttttagtagagacggggcttcaccatgttgatcaggctggtctccaactcctgatctcgtgatctgcccacctcggcctctcaacgtgttgggattacaggcatgagccaccatgcccagcatgttttctagcaagataacaaagaagggtgcatttggattcttgaatcttattccaagatcaactgagaatttagccataagtattttggaaagttattccacctccttcaaattgggttctctaccttatatattacataacaaatgaacacactttgatacttttcccaacaaagcctttggatagaaaccaagaagcttggtttgctattttcatgcttatggcatttgctcacctaacttttagttatgacctcaaaagaaaaggccctcctctcttcctcacactactttgctcattatatgtgaaattcaactgtccctttgaggccaactactaatttttcctttctgcttcccaagaaaattagagaaatttcagaattcaaatatgacaacttttacaagtcataggccaaccatcaagttgtcatctgtgatatggaaaggggaaggggatggatctaggttcatcaagccatggatttggcactgcttgacacaataagccttccagatgtctttagtgaattcataattaaaatagtcaaaaggatcaatacctttgaagaaacaatccaagctccaaggggcagaagtaggctgagtagtcactttaaattcaatcaatacatttaacaaatattcattgaatacatattaaatggtagtgttaggcactggctaataaaccaacagacattgtaccttatcaaatggaacttatgatctattgagggagacaggcaataaccaaaaaaaaaaaaaaacatataattatacattgtgataagaaaattaaagggaaagaaataggatgcaatgactaataatgaaaaacagcatatttactttagaaagagtgattagagaagaaatctgtgaaaaggtagtatttaaagccagatgtgaagggtaaaaagaagccagccagccgggcacggtggctcacacctgtaatcccagcactttgggaggccgagatgggcggatcatgaggtcagg

SEQ ID NO: 1379 - DNA, 4053 bp, Homo sapiens
tgaagttaagcattattaaacatatgtaaagataggcctgatgttgttaccatggttggggtttcctgtaatatatttgaagtaatgtcatccttccatcttcctaataaatcttacttgttcactgatcacatcagtgatttctcttaatttcttgactccaaagtagatatatttgtcagtttatgcagattatacctgcatttgtgggattgtttgattaatatatgtcttcatccctcttcagactggaagcttcctgaagacagaggccaaggtctattttaaccacctttgtgtttctattacctggcacattcaggctctcaacaaatacatgttgcctgaatgaatgaataacccagcaattaagcccaatgtgatatctaggttactggtcctggtttagttagccactgttcacaacccacatgttctagctccatacctttccatctctatactaaagaatccacttctctcttatttcatctctacagtagagatgctcaaagggaattttttttttttagagaagtctccctcttgtcccccaggtttgagtgcaatggctcgatctcagctcagtgcaacctccacctcccgggttcaaacaattctcctgcctctgcctcccaagtagctgggattaagttgcctgccaccacttccggctaatttttgtatcttttagtagagacaatgtttagtagagtcaccatgttggccaggcttgtcttgaactcctgacctcaggtgatcctcccacctcggcctcccaaagtgctgggattatgggtgtgagccactgcacccggccttttttttttttggctcaaagggaatttcttcagactttctgttttgggttcatcactatttaattccccaatccactatagtcagcctaccactcccacaactccaccgatagtgttttgataaaaatcaccaatgatctatctaagggactcattatgctcatctaaactggcagctggctaacctgtttctgttgttataattcctcttctctcttttaaaaaactcctgcctctctcccttagttgctgtaacatatcactctattggtttacctttaacctctctggctattatttttgaacctacttgggcttttgcttgaagggtttactgctgtctttccagattaaagtgttttaattacagaagctttatctttaccataatagaattaaaacatttgcttatactatgataagaatgataaatattagcaatgagaaagaatttattgatgtgtagataaatgaggcaatgtaactataacactacctagataaagatgattccatgttttcctgatttagttgaaactgattatctggctgagtttagatagttttctgcccagaagccagaacgttgactaggtaacttataagatactccttctatccctggcattctaccatttataccacattttatgtgtatttaaaaatatccagccatagccagtcactcttctcacatggtggacagtggttccacttttaattgcttatttacaaagagattgacatctgtattaagctctatctcaaagatgttttcatgttccttctccacattgcttgtgtgagtctaaaaaaaaaaaaagaacagcaaagagatagccctgaacaatgctatatccacatgggacctggacttagggaatgacataaaaatagaattaggggttgtgatttccactagctactttgctgtcatagactgcatatcatctttatatgaaattgccttccatctaggtgttatagactgaattgtgtcctctcaaaattcatatgttgtaggtctgactccaaatgtgactgtatttggagatagaacctttaaggaggtaattaaggttaaatgaggtcataagggtggagccctaatccagtaggactggtgtccttataagaaggtgaagaggcatcaaacctctctctcctcacatactcagaggaaggacatttgaagacacagtgagaaagcggccattggcaagcaaggaagagagacttcaccagaaatcaaacttgctggcactttcatcttagacttctagcctccagaactgtgagaaaataaattgttatttaagccacttggtctgatattttgttatggcagctgaggcaaactcataaagtaggtgaaggtgtttttacagagaagttgtaaaagatacactttcctatccattatacattagtctattccatgcctcctcttctggttgtgtctataacctccttaattccctataaaggatatatgtacatagcactagaatcacaggagcattgtatagtttctttcttttttatttttttgagagaagttctggctctactgtccaggctggagtgcagtggcatgatcttggctcattgtaatctccaccttatgggtttaagccatcctcccacctcagcctccagagtagctgggactacaggtccacacaaccacaccaggctaatttttgtgtttttgtagagacaaggtttcaccatgtttcccaggctggtctcgaactcttggactcaagcgatccacccaccttggcctcccaaagtgctgggattacaagcatgaggcactgcacatggtcattgtacattttcttaatgctgctgtaacaaattaccacaaacttgagggctgaaaataacacaattctagatgtcagaagtctaaaatgcatctcattgagttaaaatcaccatgttggcagggctgcatttctggagattctagggaagaatccgttttcttgcctttttcagcttctagaggctactcacatttcttggctcatggcccccttcttctatcttcaaagccatcaactgctggtagtctttccctcattgtatcagtctgacactgaatctcctgtctgccttttccatttataaggaccctgtgattacattgggcccacccatacaaaccaggagaatctcccatctcaaggtcagctgattagtaaccttaattccctcttgccatgtgatatagtatagttataagttttggagattacagtgtagacatctttatggggcattattctgtttatcattgatgtctattcacattaatgcaggtaagaatatgtataggtattataaaattgataatttccatattcttcctctttcccacatttaaatactgaatactaattttccttcttttgaagcttgggcccattactacattagcactattactggtgactttaggttcatctgggcacagtgagtgcaataggaggagggatgtagagtacccatcatgccatgcactatgaatttgcggatacaggctaatcaaaaatttttgccttgggcttttttttttgagagcaggagagatttggtatcaatgtattaaaaaagcacttggattatctgtgaattctatatgaataatatagaatatattaacatatattaatatgaatgtaatatatataattatatatagaatatatataattctatagcatctgtgaatgctatagctgggttcaccctgccccttagaaacaaagaacccagaatcaaatttctaggtctcaacttcaagtgcctctcttagataataaagtgttaagtataatatgttctcagttatttcaaatgctgccagtgctttttggcttcagctaatctgtggcttgacttggttaagctactcaattaagagtaaatatccacccttacctcagtccttcaaaccttaattctttcataatgggataaaaacactcaatgataaagtttaacccaaaggtagacaattagaaaagcttatcagctgtgggtaaaagcacattgttttcccttttcccttcccttcccttcccttcccttaccttcccttcccttcccttccctcccctcccccctttccttcccttcccttttttctttcttttcttttttcttttcttttttttttgagacagagtctcgctctgtcacccaggctggattgcagtgg

SEQ ID NO: 1380 - DNA, 4043 bp, Homo sapiens
taaagaaatgccaaaaaagtttccttcattagacttttgaaaattttccaaatcacaaaatgtcattttcagggatttaggtatttgatataagcccctatcttatttcactagcagtctcgagatggtcagattgatggtgatctgaaccaaactcagagccaggactaaagtctaagcatttctgcccaaaaccataatgatttccttctgcatcctccataagaaagcaaattccttgatataaatcctgtctttggttttgctatttattccagcacctggtacaataatatttgttgaactaacacaagaattatctctattttgaagatgcccacatttccagagcatccctttttacaattgctagagatttttcttaagggtggaaattatttcaagcaatgaatttaaatacagcttcaagattcacctttggatgctatctagtataatcaatccacctaaaatcaagccatccttcctcttgacttaaggtacagaatcacctccaaattcattcatttaaaacaaattccaataataattataattgtatgttgacaatgaatgacaatttaattaccaatagaagatttcataagcatagaccagggtttctcaaattggggtgataaccctggggatttgtgaatatattctaatggatccccaagttctacataagttatataaaacacatctttgacaaagacaacgtgaaattggaaaacatatttacatttcaaatatctttgttaagtcagtgttcctcaaaacacatttttttaggatctcagaaaattttgttcctttagaaggtgtttcatcatgaagcattacttgggtttgagaaacaatggcacagaccatgtttccaagaaggttcaagaccatgatgtatataaccctcagtcagccagacaatgttgttaagcatatggagtggggctgggaggcatggaaacaagccctgaggaaatatggatatgaattaaaacgggctataagtgaagccagttcacttatatggttcttgttgctcctgctgtgatgcatgaatgtgcaccagaaaaaaagtttcgaatgttatgttaaacaatattttgtcagctggaaaacattaaggaggctaagcttcttttagctttacgaaaggtgggaggaaagaaggtatataaactacagcataaagtaggcaaggaaggtcaaggttttgacttcacttctccactaccctcttggcaaaaaggttccaaacttaaaaagtatctacgatatgcattatccatggtcatctgttcttgggcagaaatgtagtaaaattgtggaaggagccgaagtattagatttatgccctcaatctctgaactttaaaatactcaagcttatgagatttagcaatcactaatttgccaaccttcgcaaatagccaaacacaatggctatgctctatccctttcatctctttccatggctccaaaagaggtaaaaaacaaatgaaattaaaataaaccaactggactatccagatggctgcaatattaatcctatcttggcttaaagagaaaaagcaaacccacttccttaagtttattctatcaacttcaaatccttgtgggttcccttcctaaaactactacttatgattcacacaaaacagcacttattattttctaaagttatttcaaatgtgctcacattagctcctcaacgataaaatcatctcaggaatgaaattatataggatgatatcattcctacccaggttatcagtgtaacctagcatagagctgggtccacaatattaattctacagttctgctggttaactcacatatgtgtatttatgcatgtatgtatgtatctatttctctctctatatatatatattgcagatgaggtgggaagaaggaaagaaacttactggaccctctgacttttctataggtggcatctaagagaaagaaaatagaataggaaaaagattacttaatagctacgaagtagtacttacagtattctaaagagccagagactcttctttacagctgtccgaggagctagtagggcaaactgctccctgagctgggccgatcttttgacatccttctccgagaaacaatattctttttcagttattacaaagaactgctgttgtgatgactagttatttgcttgagcagttccatattacataatcctgtgccacaaaacaccctgtacactagtggctgggatattattcatttccactaggcagctatctcactgttgaaatttatatccaaaagaatatttaattttggcttatttttcttataaaatagggaactcgtcttatcatttttaagtcctcacctcagtgtggtacttcaaactacttcaaattattactataattaaatgcttcattttatataataattaataaaaaaggtggcatatgctttttaaaagcacctctgcatatgttccctcatttaatcgttttactgcaatcttcttgaaataagtaggggcaggtgctccagatgaagaaattaaaggattataaaatttaggtagtttttctaaaagtgaatgctggtaaagcccacacaaagatactggtcttaagagttccactctagaatatctttgatattaaaatagcaagagtcagtgttctatccacagacccaccaccctcagttaaaatgagagacactggtcaccaggtacatagtataaatggatattttggcttcaaaaaaataatgaccaggttatcgagtccaccctacaatccagatgtctttcttaaaaaaatttttttaataataataagcaatttttctggctgtatcctggcatttggcactttacaataacaatatacaaaggggacaacaagagattcttaaccaggcaatctgctctggaaagaagaatgcagagaaagtgccaaccttccttcctggggagacaattttatagtgtacactggaaacacaaaataaaggatggcaatccagctccctgggtctgacttgccttcagtattttgcacagtaaagcagtaacacaggtgggcaagaatggttcttgtccccagaatctgacaataattgaaactaggatcattaataaatgaaagaaaatgagtgaaggcttatccacctagttcaggcctgcttttcatagtcaacactgcaccaacacaccaaagtggtagggagatcttggactgatgggctgaaaaatgggacaatcagtactgtgtttattaataacacagaaggggctttgggtagtcagcatactcagaagcaatgcgaaaggaagtagaggggttcatgtataatgggtgggaccaaggaaagtgcaactgagaattgtttaagtccaagagaaagggccttgtctggtcaacattacccagcaaagaggcaaaaggggcagggcagagggaagggaagagggagacagcacaatcttacctaatagctgcaaatatggacacctgagattgtgagcaatagtctgtaaaaaggggccaagggcacacaaggggcagagagagggaagacttcgtatataaagcatgacaccatggctacctgtgattttacacactggcgcaatgcaaaagggttgggagtatggaccactgtttgatagacaagtgcatggaatactccaatgcttatactttattatgccatgggaaactaagggtggggtggggcgcttgcttaacaaggtcagggagggagaaaaccattgataactgccattgtgcctattaacagtcccaggagaagttttgagtagtcagcagcccctgcagtaatgcaaaggggatactagggcataatatcccactctaccagaaggagacatatataattgcaaatattcacattaacagtacaaggggccttagtgggtcagtacccccgatgtaagcaacgaggaagcaggagtcttatctaatgatcagtgcccttgataattgttattaatgctattaattgtccaagagctgagattatgag

SEQ ID NO: 1381 - DNA, 4041 bp, Homo sapiens
gcatggaaacaagccctgaggaaatatggatatgaattaaaacgggctataagtgaagccagttcacttatatggttcttgttgctcctgctgtgatgcatgaatgtgcaccagaaaaaaagtttcgaatgttatgttaaacaatattttgtcagctggaaaacattaaggaggctaagcttcttttagctttacgaaaggtgggaggaaagaaggtatataaactacagcataaagtaggcaaggaaggtcaaggttttgacttcacttctccactaccctcttggcaaaaaggttccaaacttaaaaagtatctacgatatgcattatccatggtcatctgttcttgggcagaaatgtagtaaaattgtggaaggagccgaagtattagatttatgccctcaatctctgaactttaaaatactcaagcttatgagatttagcaatcactaatttgccaaccttcgcaaatagccaaacacaatggctatgctctatccctttcatctctttccatggctccaaaagaggtaaaaaacaaatgaaattaaaataaaccaactggactatccagatggctgcaatattaatcctatcttggcttaaagagaaaaagcaaacccacttccttaagtttattctatcaacttcaaatccttgtgggttcccttcctaaaactactacttatgattcacacaaaacagcacttattattttctaaagttatttcaaatgtgctcacattagctcctcaacgataaaatcatctcaggaatgaaattatataggatgatatcattcctacccaggttatcagtgtaacctagcatagagctgggtccacaatattaattctacagttctgctggttaactcacatatgtgtatttatgcatgtatgtatgtatctatttctctctctatatatatatattgcagatgaggtgggaagaaggaaagaaacttactggaccctctgacttttctataggtggcatctaagagaaagaaaatagaataggaaaaagattacttaatagctacgaagtagtacttacagtattctaaagagccagagactcttctttacagctgtccgaggagctagtagggcaaactgctccctgagctgggccgatcttttgacatccttctccgagaaacaatattctttttcagttattacaaagaactgctgttgtgatgactagttatttgcttgagcagttccatattacataatcctgtgccacaaaacaccctgtacactagtggctgggatattattcatttccactaggcagctatctcactgttgaaatttatatccaaaagaatatttaattttggcttatttttcttataaaatagggaactcgtcttatcatttttaagtcctcacctcagtgtggtacttcaaactacttcaaattattactataattaaatgcttcattttatataataattaataaaaaaggtggcatatgctttttaaaagcacctctgcatatgttccctcatttaatcgttttactgcaatcttcttgaaataagtaggggcaggtgctccagatgaagaaattaaaggattataaaatttaggtagtttttctaaaagtgaatgctggtaaagcccacacaaagatactggtcttaagagttccactctagaatatctttgatattaaaatagcaagagtcagtgttctatccacagacccaccaccctcagttaaaatgagagacactggtcaccaggtacatagtataaatggatattttggcttcaaaaaaataatgaccaggttatcgagtccaccctacaatccagatgtctttcttaaaaaaatttttttaataataataagcaatttttctggctgtatcctggcatttggcactttacaataacaatatacaaaggggacaacaagagattcttaaccaggcaatctgctctggaaagaagaatgcagagaaagtgccaaccttccttcctggggagacaattttatagtgtacactggaaacacaaaataaaggatggcaatccagctccctgggtctgacttgccttcagtattttgcacagtaaagcagtaacacaggtgggcaagaatggttcttgtccccagaatctgacaataattgaaactaggatcattaataaatgaaagaaaatgagtgaaggcttatccacctagttcaggcctgcttttcatagtcaacactgcaccaacacaccaaagtggtagggagatcttggactgatgggctgaaaaatgggacaatcagtactgtgtttattaataacacagaaggggctttgggtagtcagcatactcagaagcaatgcgaaaggaagtagaggggttcatgtataatgggtgggaccaaggaaagtgcaactgagaattgtttaagtccaagagaaagggccttgtctggtcaacattacccagcaaagaggcaaaaggggcagggcagagggaagggaagagggagacagcacaatcttacctaatagctgcaaatatggacacctgagattgtgagcaatagtctgtaaaaaggggccaagggcacacaaggggcagagagagggaagacttcgtatataaagcatgacaccatggctacctgtgattttacacactggcgcaatgcaaaagggttgggagtatggaccactgtttgatagacaagtgcatggaatactccaatgcttatactttattatgccatgggaaactaagggtggggtggggcgcttgcttaacaaggtcagggagggagaaaaccattgataactgccattgtgcctattaacagtcccaggagaagttttgagtagtcagcagcccctgcagtaatgcaaaggggatactagggcataatatcccactctaccagaaggagacatatataattgcaaatattcacattaacagtacaaggggccttagtgggtcagtacccccgatgtaagcaacgaggaagcaggagtcttatctaatgatcagtgcccttgataattgttattaatgctattaattgtccaagagctgagattatgagtagttaacacttctcagcagcaatccaaagggtaatgggaggaacatagggtctttttctcctacacaggtccacaaatacaattatgacattaatattaaaagaaaagggttcattcataattaacatgcccctgatgcaaggggaatatgtggagatcaactcttagtctaaaagaagaggtggacaattgcattaatgcatattaagtccaaaagaaggggcacttagtgaatatcatccccctgctctaaagcaaaggtggtacaggaacatgcttagagaattgagtttgtgcacatgaacattccaagtgacagtcttgagtagtgggcactacctgctaaaaacactaagaaagtaggtaggatccttatctagtgcacagatcaggagcaaatgtaattgcacatattaacagtccaaaacaacaggactttggttgatcaggacaccctgttgtactacaaaggaaaggtgatggggtatgaccttaatctactgacaaagacaaaagaaaatttcaattatatgttgatagtccaccagaaggggccttggagggaaacagtataccccacagtaatgcaaaagaggtataatggtcctagaagtgatagggttgtggacaactgcaattattcacattaactgttcaaatgtaaagatcataaggagtgggcacccactattgaaaagaggtggggcatccttgtctagggcacaagaaccaacataaatgcaattatgcatgtcaacaagccaagaaaaggggacttagggggtcagcaaccctggtatactgcaaatggagggtgagaaggtagaactttgtttaattaggatgaaccatgtggtgattacatacattaatgtccaagggacattgttgtggtcaattaaaaccatgtactttggacaaatataagaatcttaaaaagtagtgggtactccttgtt

SEQ ID NO: 1382 - DNA, 4042 bp, Homo sapiens
ccagaaaaaaagtttcgaatgttatgttaaacaatattttgtcagctggaaaacattaaggaggctaagcttcttttagctttacgaaaggtgggaggaaagaaggtatataaactacagcataaagtaggcaaggaaggtcaaggttttgacttcacttctccactaccctcttggcaaaaaggttccaaacttaaaaagtatctacgatatgcattatccatggtcatctgttcttgggcagaaatgtagtaaaattgtggaaggagccgaagtattagatttatgccctcaatctctgaactttaaaatactcaagcttatgagatttagcaatcactaatttgccaaccttcgcaaatagccaaacacaatggctatgctctatccctttcatctctttccatggctccaaaagaggtaaaaaacaaatgaaattaaaataaaccaactggactatccagatggctgcaatattaatcctatcttggcttaaagagaaaaagcaaacccacttccttaagtttattctatcaacttcaaatccttgtgggttcccttcctaaaactactacttatgattcacacaaaacagcacttattattttctaaagttatttcaaatgtgctcacattagctcctcaacgataaaatcatctcaggaatgaaattatataggatgatatcattcctacccaggttatcagtgtaacctagcatagagctgggtccacaatattaattctacagttctgctggttaactcacatatgtgtatttatgcatgtatgtatgtatctatttctctctctatatatatatattgcagatgaggtgggaagaaggaaagaaacttactggaccctctgacttttctataggtggcatctaagagaaagaaaatagaataggaaaaagattacttaatagctacgaagtagtacttacagtattctaaagagccagagactcttctttacagctgtccgaggagctagtagggcaaactgctccctgagctgggccgatcttttgacatccttctccgagaaacaatattctttttcagttattacaaagaactgctgttgtgatgactagttatttgcttgagcagttccatattacataatcctgtgccacaaaacaccctgtacactagtggctgggatattattcatttccactaggcagctatctcactgttgaaatttatatccaaaagaatatttaattttggcttatttttcttataaaatagggaactcgtcttatcatttttaagtcctcacctcagtgtggtacttcaaactacttcaaattattactataattaaatgcttcattttatataataattaataaaaaaggtggcatatgctttttaaaagcacctctgcatatgttccctcatttaatcgttttactgcaatcttcttgaaataagtaggggcaggtgctccagatgaagaaattaaaggattataaaatttaggtagtttttctaaaagtgaatgctggtaaagcccacacaaagatactggtcttaagagttccactctagaatatctttgatattaaaatagcaagagtcagtgttctatccacagacccaccaccctcagttaaaatgagagacactggtcaccaggtacatagtataaatggatattttggcttcaaaaaaataatgaccaggttatcgagtccaccctacaatccagatgtctttcttaaaaaaatttttttaataataataagcaatttttctggctgtatcctggcatttggcactttacaataacaatatacaaaggggacaacaagagattcttaaccaggcaatctgctctggaaagaagaatgcagagaaagtgccaaccttccttcctggggagacaattttatagtgtacactggaaacacaaaataaaggatggcaatccagctccctgggtctgacttgccttcagtattttgcacagtaaagcagtaacacaggtgggcaagaatggttcttgtccccagaatctgacaataattgaaactaggatcattaataaatgaaagaaaatgagtgaaggcttatccacctagttcaggcctgcttttcatagtcaacactgcaccaacacaccaaagtggtagggagatcttggactgatgggctgaaaaatgggacaatcagtactgtgtttattaataacacagaaggggctttgggtagtcagcatactcagaagcaatgcgaaaggaagtagaggggttcatgtataatgggtgggaccaaggaaagtgcaactgagaattgtttaagtccaagagaaagggccttgtctggtcaacattacccagcaaagaggcaaaaggggcagggcagagggaagggaagagggagacagcacaatcttacctaatagctgcaaatatggacacctgagattgtgagcaatagtctgtaaaaaggggccaagggcacacaaggggcagagagagggaagacttcgtatataaagcatgacaccatggctacctgtgattttacacactggcgcaatgcaaaagggttgggagtatggaccactgtttgatagacaagtgcatggaatactccaatgcttatactttattatgccatgggaaactaagggtggggtggggcgcttgcttaacaaggtcagggagggagaaaaccattgataactgccattgtgcctattaacagtcccaggagaagttttgagtagtcagcagcccctgcagtaatgcaaaggggatactagggcataatatcccactctaccagaaggagacatatataattgcaaatattcacattaacagtacaaggggccttagtgggtcagtacccccgatgtaagcaacgaggaagcaggagtcttatctaatgatcagtgcccttgataattgttattaatgctattaattgtccaagagctgagattatgagtagttaacacttctcagcagcaatccaaagggtaatgggaggaacatagggtctttttctcctacacaggtccacaaatacaattatgacattaatattaaaagaaaagggttcattcataattaacatgcccctgatgcaaggggaatatgtggagatcaactcttagtctaaaagaagaggtggacaattgcattaatgcatattaagtccaaaagaaggggcacttagtgaatatcatccccctgctctaaagcaaaggtggtacaggaacatgcttagagaattgagtttgtgcacatgaacattccaagtgacagtcttgagtagtgggcactacctgctaaaaacactaagaaagtaggtaggatccttatctagtgcacagatcaggagcaaatgtaattgcacatattaacagtccaaaacaacaggactttggttgatcaggacaccctgttgtactacaaaggaaaggtgatggggtatgaccttaatctactgacaaagacaaaagaaaatttcaattatatgttgatagtccaccagaaggggccttggagggaaacagtataccccacagtaatgcaaaagaggtataatggtcctagaagtgatagggttgtggacaactgcaattattcacattaactgttcaaatgtaaagatcataaggagtgggcacccactattgaaaagaggtggggcatccttgtctagggcacaagaaccaacataaatgcaattatgcatgtcaacaagccaagaaaaggggacttagggggtcagcaaccctggtatactgcaaatggagggtgagaaggtagaactttgtttaattaggatgaaccatgtggtgattacatacattaatgtccaagggacattgttgtggtcaattaaaaccatgtactttggacaaatataagaatcttaaaaagtagtgggtactccttgttgaaaagcaaagggagtccatgagaaggtgcccttatctagtacacaagaatatagacaagccaagcaaagaggcctcagtgatcagcaccccagctatactgcaaaggggg

SEQ ID NO: 1383 - DNA, 4026 bp, Homo sapiens
tgccctcaatctctgaactttaaaatactcaagcttatgagatttagcaatcactaatttgccaaccttcgcaaatagccaaacacaatggctatgctctatccctttcatctctttccatggctccaaaagaggtaaaaaacaaatgaaattaaaataaaccaactggactatccagatggctgcaatattaatcctatcttggcttaaagagaaaaagcaaacccacttccttaagtttattctatcaacttcaaatccttgtgggttcccttcctaaaactactacttatgattcacacaaaacagcacttattattttctaaagttatttcaaatgtgctcacattagctcctcaacgataaaatcatctcaggaatgaaattatataggatgatatcattcctacccaggttatcagtgtaacctagcatagagctgggtccacaatattaattctacagttctgctggttaactcacatatgtgtatttatgcatgtatgtatgtatctatttctctctctatatatatatattgcagatgaggtgggaagaaggaaagaaacttactggaccctctgacttttctataggtggcatctaagagaaagaaaatagaataggaaaaagattacttaatagctacgaagtagtacttacagtattctaaagagccagagactcttctttacagctgtccgaggagctagtagggcaaactgctccctgagctgggccgatcttttgacatccttctccgagaaacaatattctttttcagttattacaaagaactgctgttgtgatgactagttatttgcttgagcagttccatattacataatcctgtgccacaaaacaccctgtacactagtggctgggatattattcatttccactaggcagctatctcactgttgaaatttatatccaaaagaatatttaattttggcttatttttcttataaaatagggaactcgtcttatcatttttaagtcctcacctcagtgtggtacttcaaactacttcaaattattactataattaaatgcttcattttatataataattaataaaaaaggtggcatatgctttttaaaagcacctctgcatatgttccctcatttaatcgttttactgcaatcttcttgaaataagtaggggcaggtgctccagatgaagaaattaaaggattataaaatttaggtagtttttctaaaagtgaatgctggtaaagcccacacaaagatactggtcttaagagttccactctagaatatctttgatattaaaatagcaagagtcagtgttctatccacagacccaccaccctcagttaaaatgagagacactggtcaccaggtacatagtataaatggatattttggcttcaaaaaaataatgaccaggttatcgagtccaccctacaatccagatgtctttcttaaaaaaatttttttaataataataagcaatttttctggctgtatcctggcatttggcactttacaataacaatatacaaaggggacaacaagagattcttaaccaggcaatctgctctggaaagaagaatgcagagaaagtgccaaccttccttcctggggagacaattttatagtgtacactggaaacacaaaataaaggatggcaatccagctccctgggtctgacttgccttcagtattttgcacagtaaagcagtaacacaggtgggcaagaatggttcttgtccccagaatctgacaataattgaaactaggatcattaataaatgaaagaaaatgagtgaaggcttatccacctagttcaggcctgcttttcatagtcaacactgcaccaacacaccaaagtggtagggagatcttggactgatgggctgaaaaatgggacaatcagtactgtgtttattaataacacagaaggggctttgggtagtcagcatactcagaagcaatgcgaaaggaagtagaggggttcatgtataatgggtgggaccaaggaaagtgcaactgagaattgtttaagtccaagagaaagggccttgtctggtcaacattacccagcaaagaggcaaaaggggcagggcagagggaagggaagagggagacagcacaatcttacctaatagctgcaaatatggacacctgagattgtgagcaatagtctgtaaaaaggggccaagggcacacaaggggcagagagagggaagacttcgtatataaagcatgacaccatggctacctgtgattttacacactggcgcaatgcaaaagggttgggagtatggaccactgtttgatagacaagtgcatggaatactccaatgcttatactttattatgccatgggaaactaagggtggggtggggcgcttgcttaacaaggtcagggagggagaaaaccattgataactgccattgtgcctattaacagtcccaggagaagttttgagtagtcagcagcccctgcagtaatgcaaaggggatactagggcataatatcccactctaccagaaggagacatatataattgcaaatattcacattaacagtacaaggggccttagtgggtcagtacccccgatgtaagcaacgaggaagcaggagtcttatctaatgatcagtgcccttgataattgttattaatgctattaattgtccaagagctgagattatgagtagttaacacttctcagcagcaatccaaagggtaatgggaggaacatagggtctttttctcctacacaggtccacaaatacaattatgacattaatattaaaagaaaagggttcattcataattaacatgcccctgatgcaaggggaatatgtggagatcaactcttagtctaaaagaagaggtggacaattgcattaatgcatattaagtccaaaagaaggggcacttagtgaatatcatccccctgctctaaagcaaaggtggtacaggaacatgcttagagaattgagtttgtgcacatgaacattccaagtgacagtcttgagtagtgggcactacctgctaaaaacactaagaaagtaggtaggatccttatctagtgcacagatcaggagcaaatgtaattgcacatattaacagtccaaaacaacaggactttggttgatcaggacaccctgttgtactacaaaggaaaggtgatggggtatgaccttaatctactgacaaagacaaaagaaaatttcaattatatgttgatagtccaccagaaggggccttggagggaaacagtataccccacagtaatgcaaaagaggtataatggtcctagaagtgatagggttgtggacaactgcaattattcacattaactgttcaaatgtaaagatcataaggagtgggcacccactattgaaaagaggtggggcatccttgtctagggcacaagaaccaacataaatgcaattatgcatgtcaacaagccaagaaaaggggacttagggggtcagcaaccctggtatactgcaaatggagggtgagaaggtagaactttgtttaattaggatgaaccatgtggtgattacatacattaatgtccaagggacattgttgtggtcaattaaaaccatgtactttggacaaatataagaatcttaaaaagtagtgggtactccttgttgaaaagcaaagggagtccatgagaaggtgcccttatctagtacacaagaatatagacaagccaagcaaagaggcctcagtgatcagcaccccagctatactgcaaagggggtctgagagtaggactttattcaaataggataagccatgtgcagttatgcacataaatttccaagatgcatggttgtggtcacttacaattgtgcaccttgattgtccaaatgtaagggtcttatggagtgagcactccctgctgggaggaaaagaaagattatgcgtagatgggatggggcagaggaggcttccttgtctagtacacagaaacctggacaaatataatcacacacataacaggccaggaaaatgggccttggttatcagc

SEQ ID NO: 1384 - DNA, 4049 bp, Homo sapiens
agcaatcactaatttgccaaccttcgcaaatagccaaacacaatggctatgctctatccctttcatctctttccatggctccaaaagaggtaaaaaacaaatgaaattaaaataaaccaactggactatccagatggctgcaatattaatcctatcttggcttaaagagaaaaagcaaacccacttccttaagtttattctatcaacttcaaatccttgtgggttcccttcctaaaactactacttatgattcacacaaaacagcacttattattttctaaagttatttcaaatgtgctcacattagctcctcaacgataaaatcatctcaggaatgaaattatataggatgatatcattcctacccaggttatcagtgtaacctagcatagagctgggtccacaatattaattctacagttctgctggttaactcacatatgtgtatttatgcatgtatgtatgtatctatttctctctctatatatatatattgcagatgaggtgggaagaaggaaagaaacttactggaccctctgacttttctataggtggcatctaagagaaagaaaatagaataggaaaaagattacttaatagctacgaagtagtacttacagtattctaaagagccagagactcttctttacagctgtccgaggagctagtagggcaaactgctccctgagctgggccgatcttttgacatccttctccgagaaacaatattctttttcagttattacaaagaactgctgttgtgatgactagttatttgcttgagcagttccatattacataatcctgtgccacaaaacaccctgtacactagtggctgggatattattcatttccactaggcagctatctcactgttgaaatttatatccaaaagaatatttaattttggcttatttttcttataaaatagggaactcgtcttatcatttttaagtcctcacctcagtgtggtacttcaaactacttcaaattattactataattaaatgcttcattttatataataattaataaaaaaggtggcatatgctttttaaaagcacctctgcatatgttccctcatttaatcgttttactgcaatcttcttgaaataagtaggggcaggtgctccagatgaagaaattaaaggattataaaatttaggtagtttttctaaaagtgaatgctggtaaagcccacacaaagatactggtcttaagagttccactctagaatatctttgatattaaaatagcaagagtcagtgttctatccacagacccaccaccctcagttaaaatgagagacactggtcaccaggtacatagtataaatggatattttggcttcaaaaaaataatgaccaggttatcgagtccaccctacaatccagatgtctttcttaaaaaaatttttttaataataataagcaatttttctggctgtatcctggcatttggcactttacaataacaatatacaaaggggacaacaagagattcttaaccaggcaatctgctctggaaagaagaatgcagagaaagtgccaaccttccttcctggggagacaattttatagtgtacactggaaacacaaaataaaggatggcaatccagctccctgggtctgacttgccttcagtattttgcacagtaaagcagtaacacaggtgggcaagaatggttcttgtccccagaatctgacaataattgaaactaggatcattaataaatgaaagaaaatgagtgaaggcttatccacctagttcaggcctgcttttcatagtcaacactgcaccaacacaccaaagtggtagggagatcttggactgatgggctgaaaaatgggacaatcagtactgtgtttattaataacacagaaggggctttgggtagtcagcatactcagaagcaatgcgaaaggaagtagaggggttcatgtataatgggtgggaccaaggaaagtgcaactgagaattgtttaagtccaagagaaagggccttgtctggtcaacattacccagcaaagaggcaaaaggggcagggcagagggaagggaagagggagacagcacaatcttacctaatagctgcaaatatggacacctgagattgtgagcaatagtctgtaaaaaggggccaagggcacacaaggggcagagagagggaagacttcgtatataaagcatgacaccatggctacctgtgattttacacactggcgcaatgcaaaagggttgggagtatggaccactgtttgatagacaagtgcatggaatactccaatgcttatactttattatgccatgggaaactaagggtggggtggggcgcttgcttaacaaggtcagggagggagaaaaccattgataactgccattgtgcctattaacagtcccaggagaagttttgagtagtcagcagcccctgcagtaatgcaaaggggatactagggcataatatcccactctaccagaaggagacatatataattgcaaatattcacattaacagtacaaggggccttagtgggtcagtacccccgatgtaagcaacgaggaagcaggagtcttatctaatgatcagtgcccttgataattgttattaatgctattaattgtccaagagctgagattatgagtagttaacacttctcagcagcaatccaaagggtaatgggaggaacatagggtctttttctcctacacaggtccacaaatacaattatgacattaatattaaaagaaaagggttcattcataattaacatgcccctgatgcaaggggaatatgtggagatcaactcttagtctaaaagaagaggtggacaattgcattaatgcatattaagtccaaaagaaggggcacttagtgaatatcatccccctgctctaaagcaaaggtggtacaggaacatgcttagagaattgagtttgtgcacatgaacattccaagtgacagtcttgagtagtgggcactacctgctaaaaacactaagaaagtaggtaggatccttatctagtgcacagatcaggagcaaatgtaattgcacatattaacagtccaaaacaacaggactttggttgatcaggacaccctgttgtactacaaaggaaaggtgatggggtatgaccttaatctactgacaaagacaaaagaaaatttcaattatatgttgatagtccaccagaaggggccttggagggaaacagtataccccacagtaatgcaaaagaggtataatggtcctagaagtgatagggttgtggacaactgcaattattcacattaactgttcaaatgtaaagatcataaggagtgggcacccactattgaaaagaggtggggcatccttgtctagggcacaagaaccaacataaatgcaattatgcatgtcaacaagccaagaaaaggggacttagggggtcagcaaccctggtatactgcaaatggagggtgagaaggtagaactttgtttaattaggatgaaccatgtggtgattacatacattaatgtccaagggacattgttgtggtcaattaaaaccatgtactttggacaaatataagaatcttaaaaagtagtgggtactccttgttgaaaagcaaagggagtccatgagaaggtgcccttatctagtacacaagaatatagacaagccaagcaaagaggcctcagtgatcagcaccccagctatactgcaaagggggtctgagagtaggactttattcaaataggataagccatgtgcagttatgcacataaatttccaagatgcatggttgtggtcacttacaattgtgcaccttgattgtccaaatgtaagggtcttatggagtgagcactccctgctgggaggaaaagaaagattatgcgtagatgggatggggcagaggaggcttccttgtctagtacacagaaacctggacaaatataatcacacacataacaggccaggaaaatgggccttggttatcagcacccctgctgtactgcaaaaggggtctgagagtaaggccttattcagatgagataggccgtgtgcagt

SEQ ID NO: 1385 - DNA, 4041 bp, Homo sapiens
ggactatccagatggctgcaatattaatcctatcttggcttaaagagaaaaagcaaacccacttccttaagtttattctatcaacttcaaatccttgtgggttcccttcctaaaactactacttatgattcacacaaaacagcacttattattttctaaagttatttcaaatgtgctcacattagctcctcaacgataaaatcatctcaggaatgaaattatataggatgatatcattcctacccaggttatcagtgtaacctagcatagagctgggtccacaatattaattctacagttctgctggttaactcacatatgtgtatttatgcatgtatgtatgtatctatttctctctctatatatatatattgcagatgaggtgggaagaaggaaagaaacttactggaccctctgacttttctataggtggcatctaagagaaagaaaatagaataggaaaaagattacttaatagctacgaagtagtacttacagtattctaaagagccagagactcttctttacagctgtccgaggagctagtagggcaaactgctccctgagctgggccgatcttttgacatccttctccgagaaacaatattctttttcagttattacaaagaactgctgttgtgatgactagttatttgcttgagcagttccatattacataatcctgtgccacaaaacaccctgtacactagtggctgggatattattcatttccactaggcagctatctcactgttgaaatttatatccaaaagaatatttaattttggcttatttttcttataaaatagggaactcgtcttatcatttttaagtcctcacctcagtgtggtacttcaaactacttcaaattattactataattaaatgcttcattttatataataattaataaaaaaggtggcatatgctttttaaaagcacctctgcatatgttccctcatttaatcgttttactgcaatcttcttgaaataagtaggggcaggtgctccagatgaagaaattaaaggattataaaatttaggtagtttttctaaaagtgaatgctggtaaagcccacacaaagatactggtcttaagagttccactctagaatatctttgatattaaaatagcaagagtcagtgttctatccacagacccaccaccctcagttaaaatgagagacactggtcaccaggtacatagtataaatggatattttggcttcaaaaaaataatgaccaggttatcgagtccaccctacaatccagatgtctttcttaaaaaaatttttttaataataataagcaatttttctggctgtatcctggcatttggcactttacaataacaatatacaaaggggacaacaagagattcttaaccaggcaatctgctctggaaagaagaatgcagagaaagtgccaaccttccttcctggggagacaattttatagtgtacactggaaacacaaaataaaggatggcaatccagctccctgggtctgacttgccttcagtattttgcacagtaaagcagtaacacaggtgggcaagaatggttcttgtccccagaatctgacaataattgaaactaggatcattaataaatgaaagaaaatgagtgaaggcttatccacctagttcaggcctgcttttcatagtcaacactgcaccaacacaccaaagtggtagggagatcttggactgatgggctgaaaaatgggacaatcagtactgtgtttattaataacacagaaggggctttgggtagtcagcatactcagaagcaatgcgaaaggaagtagaggggttcatgtataatgggtgggaccaaggaaagtgcaactgagaattgtttaagtccaagagaaagggccttgtctggtcaacattacccagcaaagaggcaaaaggggcagggcagagggaagggaagagggagacagcacaatcttacctaatagctgcaaatatggacacctgagattgtgagcaatagtctgtaaaaaggggccaagggcacacaaggggcagagagagggaagacttcgtatataaagcatgacaccatggctacctgtgattttacacactggcgcaatgcaaaagggttgggagtatggaccactgtttgatagacaagtgcatggaatactccaatgcttatactttattatgccatgggaaactaagggtggggtggggcgcttgcttaacaaggtcagggagggagaaaaccattgataactgccattgtgcctattaacagtcccaggagaagttttgagtagtcagcagcccctgcagtaatgcaaaggggatactagggcataatatcccactctaccagaaggagacatatataattgcaaatattcacattaacagtacaaggggccttagtgggtcagtacccccgatgtaagcaacgaggaagcaggagtcttatctaatgatcagtgcccttgataattgttattaatgctattaattgtccaagagctgagattatgagtagttaacacttctcagcagcaatccaaagggtaatgggaggaacatagggtctttttctcctacacaggtccacaaatacaattatgacattaatattaaaagaaaagggttcattcataattaacatgcccctgatgcaaggggaatatgtggagatcaactcttagtctaaaagaagaggtggacaattgcattaatgcatattaagtccaaaagaaggggcacttagtgaatatcatccccctgctctaaagcaaaggtggtacaggaacatgcttagagaattgagtttgtgcacatgaacattccaagtgacagtcttgagtagtgggcactacctgctaaaaacactaagaaagtaggtaggatccttatctagtgcacagatcaggagcaaatgtaattgcacatattaacagtccaaaacaacaggactttggttgatcaggacaccctgttgtactacaaaggaaaggtgatggggtatgaccttaatctactgacaaagacaaaagaaaatttcaattatatgttgatagtccaccagaaggggccttggagggaaacagtataccccacagtaatgcaaaagaggtataatggtcctagaagtgatagggttgtggacaactgcaattattcacattaactgttcaaatgtaaagatcataaggagtgggcacccactattgaaaagaggtggggcatccttgtctagggcacaagaaccaacataaatgcaattatgcatgtcaacaagccaagaaaaggggacttagggggtcagcaaccctggtatactgcaaatggagggtgagaaggtagaactttgtttaattaggatgaaccatgtggtgattacatacattaatgtccaagggacattgttgtggtcaattaaaaccatgtactttggacaaatataagaatcttaaaaagtagtgggtactccttgttgaaaagcaaagggagtccatgagaaggtgcccttatctagtacacaagaatatagacaagccaagcaaagaggcctcagtgatcagcaccccagctatactgcaaagggggtctgagagtaggactttattcaaataggataagccatgtgcagttatgcacataaatttccaagatgcatggttgtggtcacttacaattgtgcaccttgattgtccaaatgtaagggtcttatggagtgagcactccctgctgggaggaaaagaaagattatgcgtagatgggatggggcagaggaggcttccttgtctagtacacagaaacctggacaaatataatcacacacataacaggccaggaaaatgggccttggttatcagcacccctgctgtactgcaaaaggggtctgagagtaaggccttattcagatgagataggccgtgtgcagttacacacattattgaccaaggtgcatggctgcggtcacttagaattgtgcaccttgactgtccaaatgtaaggttcttatggagctggcactccctgccagaagggaaaggaag

SEQ ID NO: 1386 - DNA, 4042 bp, Homo sapiens
tcctacccaggttatcagtgtaacctagcatagagctgggtccacaatattaattctacagttctgctggttaactcacatatgtgtatttatgcatgtatgtatgtatctatttctctctctatatatatatattgcagatgaggtgggaagaaggaaagaaacttactggaccctctgacttttctataggtggcatctaagagaaagaaaatagaataggaaaaagattacttaatagctacgaagtagtacttacagtattctaaagagccagagactcttctttacagctgtccgaggagctagtagggcaaactgctccctgagctgggccgatcttttgacatccttctccgagaaacaatattctttttcagttattacaaagaactgctgttgtgatgactagttatttgcttgagcagttccatattacataatcctgtgccacaaaacaccctgtacactagtggctgggatattattcatttccactaggcagctatctcactgttgaaatttatatccaaaagaatatttaattttggcttatttttcttataaaatagggaactcgtcttatcatttttaagtcctcacctcagtgtggtacttcaaactacttcaaattattactataattaaatgcttcattttatataataattaataaaaaaggtggcatatgctttttaaaagcacctctgcatatgttccctcatttaatcgttttactgcaatcttcttgaaataagtaggggcaggtgctccagatgaagaaattaaaggattataaaatttaggtagtttttctaaaagtgaatgctggtaaagcccacacaaagatactggtcttaagagttccactctagaatatctttgatattaaaatagcaagagtcagtgttctatccacagacccaccaccctcagttaaaatgagagacactggtcaccaggtacatagtataaatggatattttggcttcaaaaaaataatgaccaggttatcgagtccaccctacaatccagatgtctttcttaaaaaaatttttttaataataataagcaatttttctggctgtatcctggcatttggcactttacaataacaatatacaaaggggacaacaagagattcttaaccaggcaatctgctctggaaagaagaatgcagagaaagtgccaaccttccttcctggggagacaattttatagtgtacactggaaacacaaaataaaggatggcaatccagctccctgggtctgacttgccttcagtattttgcacagtaaagcagtaacacaggtgggcaagaatggttcttgtccccagaatctgacaataattgaaactaggatcattaataaatgaaagaaaatgagtgaaggcttatccacctagttcaggcctgcttttcatagtcaacactgcaccaacacaccaaagtggtagggagatcttggactgatgggctgaaaaatgggacaatcagtactgtgtttattaataacacagaaggggctttgggtagtcagcatactcagaagcaatgcgaaaggaagtagaggggttcatgtataatgggtgggaccaaggaaagtgcaactgagaattgtttaagtccaagagaaagggccttgtctggtcaacattacccagcaaagaggcaaaaggggcagggcagagggaagggaagagggagacagcacaatcttacctaatagctgcaaatatggacacctgagattgtgagcaatagtctgtaaaaaggggccaagggcacacaaggggcagagagagggaagacttcgtatataaagcatgacaccatggctacctgtgattttacacactggcgcaatgcaaaagggttgggagtatggaccactgtttgatagacaagtgcatggaatactccaatgcttatactttattatgccatgggaaactaagggtggggtggggcgcttgcttaacaaggtcagggagggagaaaaccattgataactgccattgtgcctattaacagtcccaggagaagttttgagtagtcagcagcccctgcagtaatgcaaaggggatactagggcataatatcccactctaccagaaggagacatatataattgcaaatattcacattaacagtacaaggggccttagtgggtcagtacccccgatgtaagcaacgaggaagcaggagtcttatctaatgatcagtgcccttgataattgttattaatgctattaattgtccaagagctgagattatgagtagttaacacttctcagcagcaatccaaagggtaatgggaggaacatagggtctttttctcctacacaggtccacaaatacaattatgacattaatattaaaagaaaagggttcattcataattaacatgcccctgatgcaaggggaatatgtggagatcaactcttagtctaaaagaagaggtggacaattgcattaatgcatattaagtccaaaagaaggggcacttagtgaatatcatccccctgctctaaagcaaaggtggtacaggaacatgcttagagaattgagtttgtgcacatgaacattccaagtgacagtcttgagtagtgggcactacctgctaaaaacactaagaaagtaggtaggatccttatctagtgcacagatcaggagcaaatgtaattgcacatattaacagtccaaaacaacaggactttggttgatcaggacaccctgttgtactacaaaggaaaggtgatggggtatgaccttaatctactgacaaagacaaaagaaaatttcaattatatgttgatagtccaccagaaggggccttggagggaaacagtataccccacagtaatgcaaaagaggtataatggtcctagaagtgatagggttgtggacaactgcaattattcacattaactgttcaaatgtaaagatcataaggagtgggcacccactattgaaaagaggtggggcatccttgtctagggcacaagaaccaacataaatgcaattatgcatgtcaacaagccaagaaaaggggacttagggggtcagcaaccctggtatactgcaaatggagggtgagaaggtagaactttgtttaattaggatgaaccatgtggtgattacatacattaatgtccaagggacattgttgtggtcaattaaaaccatgtactttggacaaatataagaatcttaaaaagtagtgggtactccttgttgaaaagcaaagggagtccatgagaaggtgcccttatctagtacacaagaatatagacaagccaagcaaagaggcctcagtgatcagcaccccagctatactgcaaagggggtctgagagtaggactttattcaaataggataagccatgtgcagttatgcacataaatttccaagatgcatggttgtggtcacttacaattgtgcaccttgattgtccaaatgtaagggtcttatggagtgagcactccctgctgggaggaaaagaaagattatgcgtagatgggatggggcagaggaggcttccttgtctagtacacagaaacctggacaaatataatcacacacataacaggccaggaaaatgggccttggttatcagcacccctgctgtactgcaaaaggggtctgagagtaaggccttattcagatgagataggccgtgtgcagttacacacattattgaccaaggtgcatggctgcggtcacttagaattgtgcaccttgactgtccaaatgtaaggttcttatggagctggcactccctgccagaagggaaaggaagattgagggtggggtggggcaggggaggcttccatgtcttatacactggaacccagacaaatataatcacatacgttaacaggccaggaagaggggccttggttatcagcacacctactgtactgcaaaaggggtctgagagtaggaccttattcagatgggatgggccatgtgcagttacacacatttatgtccaaggtgcatggttgtggtcacatacaattgtgcaccttgactgt

SEQ ID NO: 1387 - DNA, 4040 bp, Homo sapiens
gagccagagactcttctttacagctgtccgaggagctagtagggcaaactgctccctgagctgggccgatcttttgacatccttctccgagaaacaatattctttttcagttattacaaagaactgctgttgtgatgactagttatttgcttgagcagttccatattacataatcctgtgccacaaaacaccctgtacactagtggctgggatattattcatttccactaggcagctatctcactgttgaaatttatatccaaaagaatatttaattttggcttatttttcttataaaatagggaactcgtcttatcatttttaagtcctcacctcagtgtggtacttcaaactacttcaaattattactataattaaatgcttcattttatataataattaataaaaaaggtggcatatgctttttaaaagcacctctgcatatgttccctcatttaatcgttttactgcaatcttcttgaaataagtaggggcaggtgctccagatgaagaaattaaaggattataaaatttaggtagtttttctaaaagtgaatgctggtaaagcccacacaaagatactggtcttaagagttccactctagaatatctttgatattaaaatagcaagagtcagtgttctatccacagacccaccaccctcagttaaaatgagagacactggtcaccaggtacatagtataaatggatattttggcttcaaaaaaataatgaccaggttatcgagtccaccctacaatccagatgtctttcttaaaaaaatttttttaataataataagcaatttttctggctgtatcctggcatttggcactttacaataacaatatacaaaggggacaacaagagattcttaaccaggcaatctgctctggaaagaagaatgcagagaaagtgccaaccttccttcctggggagacaattttatagtgtacactggaaacacaaaataaaggatggcaatccagctccctgggtctgacttgccttcagtattttgcacagtaaagcagtaacacaggtgggcaagaatggttcttgtccccagaatctgacaataattgaaactaggatcattaataaatgaaagaaaatgagtgaaggcttatccacctagttcaggcctgcttttcatagtcaacactgcaccaacacaccaaagtggtagggagatcttggactgatgggctgaaaaatgggacaatcagtactgtgtttattaataacacagaaggggctttgggtagtcagcatactcagaagcaatgcgaaaggaagtagaggggttcatgtataatgggtgggaccaaggaaagtgcaactgagaattgtttaagtccaagagaaagggccttgtctggtcaacattacccagcaaagaggcaaaaggggcagggcagagggaagggaagagggagacagcacaatcttacctaatagctgcaaatatggacacctgagattgtgagcaatagtctgtaaaaaggggccaagggcacacaaggggcagagagagggaagacttcgtatataaagcatgacaccatggctacctgtgattttacacactggcgcaatgcaaaagggttgggagtatggaccactgtttgatagacaagtgcatggaatactccaatgcttatactttattatgccatgggaaactaagggtggggtggggcgcttgcttaacaaggtcagggagggagaaaaccattgataactgccattgtgcctattaacagtcccaggagaagttttgagtagtcagcagcccctgcagtaatgcaaaggggatactagggcataatatcccactctaccagaaggagacatatataattgcaaatattcacattaacagtacaaggggccttagtgggtcagtacccccgatgtaagcaacgaggaagcaggagtcttatctaatgatcagtgcccttgataattgttattaatgctattaattgtccaagagctgagattatgagtagttaacacttctcagcagcaatccaaagggtaatgggaggaacatagggtctttttctcctacacaggtccacaaatacaattatgacattaatattaaaagaaaagggttcattcataattaacatgcccctgatgcaaggggaatatgtggagatcaactcttagtctaaaagaagaggtggacaattgcattaatgcatattaagtccaaaagaaggggcacttagtgaatatcatccccctgctctaaagcaaaggtggtacaggaacatgcttagagaattgagtttgtgcacatgaacattccaagtgacagtcttgagtagtgggcactacctgctaaaaacactaagaaagtaggtaggatccttatctagtgcacagatcaggagcaaatgtaattgcacatattaacagtccaaaacaacaggactttggttgatcaggacaccctgttgtactacaaaggaaaggtgatggggtatgaccttaatctactgacaaagacaaaagaaaatttcaattatatgttgatagtccaccagaaggggccttggagggaaacagtataccccacagtaatgcaaaagaggtataatggtcctagaagtgatagggttgtggacaactgcaattattcacattaactgttcaaatgtaaagatcataaggagtgggcacccactattgaaaagaggtggggcatccttgtctagggcacaagaaccaacataaatgcaattatgcatgtcaacaagccaagaaaaggggacttagggggtcagcaaccctggtatactgcaaatggagggtgagaaggtagaactttgtttaattaggatgaaccatgtggtgattacatacattaatgtccaagggacattgttgtggtcaattaaaaccatgtactttggacaaatataagaatcttaaaaagtagtgggtactccttgttgaaaagcaaagggagtccatgagaaggtgcccttatctagtacacaagaatatagacaagccaagcaaagaggcctcagtgatcagcaccccagctatactgcaaagggggtctgagagtaggactttattcaaataggataagccatgtgcagttatgcacataaatttccaagatgcatggttgtggtcacttacaattgtgcaccttgattgtccaaatgtaagggtcttatggagtgagcactccctgctgggaggaaaagaaagattatgcgtagatgggatggggcagaggaggcttccttgtctagtacacagaaacctggacaaatataatcacacacataacaggccaggaaaatgggccttggttatcagcacccctgctgtactgcaaaaggggtctgagagtaaggccttattcagatgagataggccgtgtgcagttacacacattattgaccaaggtgcatggctgcggtcacttagaattgtgcaccttgactgtccaaatgtaaggttcttatggagctggcactccctgccagaagggaaaggaagattgagggtggggtggggcaggggaggcttccatgtcttatacactggaacccagacaaatataatcacatacgttaacaggccaggaagaggggccttggttatcagcacacctactgtactgcaaaaggggtctgagagtaggaccttattcagatgggatgggccatgtgcagttacacacatttatgtccaaggtgcatggttgtggtcacatacaattgtgcaccttgactgtccaaatgtaagggtcttatggagcgggtacttcctgccagaagggaaaggaagattgggggtggagtgtggcaggggaggcttccatgtctattacacaggaactggaacaaatataatcacacacataacaggccaggaaaaggggccttggtgatcagcacccctgctgtactgcaaaaagggtctgagagtaggaccttattcagatgggatgggccatgtgcagttatgcacattcatgtccaaggtgagtgcctatgctcact

SEQ ID NO: 1388 - DNA, 4046 bp, Homo sapiens
tcacttaacaattacgcaccttgactgtccaaatgtgagagtcttatggagtgggcactccctgctggaagggaaaggtgagactgaggtatgtggagaggaccctccttttctagtgcataggatcccagacgattataatcacacacaacatgccaagaaaaggggactgcgttatcagcaacccttctgtattgcaaaaggggtcggagagtaggaccttattcacatggaatgagcagtgtgcgattacgcacataaatgtccaagatgcatgcttgtggtcacttacaattgtgcacctagactctccaaataaaagggtcttatggggtgggcacttcctgctggaagggaaaagtggggatgaggggagcactttccttctctagtgcatagcaacctcgacaaatacaatcacacatattgggaggccaagaaatggggccttaggtgtcaccaaccatgctgtccttcaaaaggaaggatactgatgtaattgtcattaggcacattaacagtttgagaaaggggccttaagtgaatagtaccccatgcaataaagcaaagagggtgtgataggtcagaaacccaagtctaattgaaggaccattgacaactgcaattacatgccatctacagttcgaagagaagggcttaatattgattagcactctctgctttgataagtacaggagtcctgataaaaggcacaactgtatgcaactgaaaatgtgtatataacacctaagattatgcacgctaactttactagtctaagggtcttaagtagtaggtacttccagctgggatgtaaatacagtgggtggggtccttacatggtaaaaaagtacagcagcaaatataagtatgcacattaacagtccaagagagtgaattcaggctagttagaagctcctgcagtaatgcaaatggagcaaggaagcgggattctactctaacataggggcacatcaactactgctaattatgcgcatttaagcagtataagagaagaagcactagctagttagcactcctgctgctttgccaaggaggtgtgagggggatgggattccagggcaattgtcttacttttttttttttttaatgttggccaggctggtctcaaactcctggcagtaagggatcttcccacctcagcctcccaaagtgctgggattacaggtgtgagccaccacacccggcctcagggcaattttgcataatagaaattcaagaaagactttaggaaatcagtacccccttctatgatgctgagaagtcaagatattagcttgatataaaagctagatattagcttgatataaaagactcagttctaatcaattagacatttgaaatgtcttagacaattgaaatcaattaggcaattgaaaatatgcacattaagagtcatggataattagaaatacacattaagagtcccaagagaaggactctgggtttccagcatccctttctataatgtaaaaggggtagaatataggtttaaagggagagaccatgaacattggaattttgcacattcatagtcccagggaaaggtaacataggtaattaatatcccttgctgtaaaacaaggaggataaaatggatctgatctgaaagacattgttgtgatcagttgccatggttcacattaactatcctagtgcaaaggtcttgactagaggtcatccactgctgaacactagggaagtgagtggggtctttagtgcacaggaagagggacaaatgcaagtagcacattaacagtacaaaagaaatgtccttgtgattagcaccctctactgtaatgctaagagggtgtgagcagttgggatcttaatttaatggaaaagaccataattgcaattatgcgcattaacagtcccaagtaccccctgctgtaagacaaaaggaatatgaggggatgagaccccagactaacagcagatagggaaattgcattttgcacatcaataatttctggaggaggggcattaggtaaccagcaccctcttgatgtaaagcaaagatgatgcagggaccttgatataaaagactcagttctaatcaattaggattgtgcacataaactgtcctagtacagaggtcttgagtagtaagggtcccctgctggaatacaaagggagtggaagggttagtgcacaagatcgtggacaaatacaattatgaacatcaatgcacaagaagagtccttgggtgatcagcccacattgtagcgtgcaaataggatacagagtccctttctaatggacaggactctggacaattgcaactgtgcaaattaactgttcaagagctgttattgaataatctgcactcgttagcaacatcccacagaaggtgggatggggtgagaatccatttttattgcacagaaccatgaatatatgcaattatgcatatcaactgtttaagagaaggaaacttgggtagtcagaactcagcagcaatggcaaagaggacatcctagactaatgagtgggactatgggcaattagtgttttacatattaatgcaaggtggtaggtagttcacactatctaggagcaatgataaaggcatacacataagtgggtcttctctgttacgcagaaccatgaataattactattgtatccattaatattccaagggaaggggctctaagaatgagtcagtcccactgctgttatgcaaagatgtttgcaaaggccatagtgtaactaacagaactatggataattgggattttactcaataatttaagaaactcttaaatctcaggtagtcagcgctgcctcaaggcaaatgcaagggcgactggtagtcttcatgattaatgggtgagacaattagcaattactactttgttctttaattgtccaagaacagcaggattctccagaagcacagcaaaaagcgcagtagggtgcctttgtttaataggcaaagctatgacaattgggactgagcattttaactgtccaacaaaagacgggttgtctgcgaccccctgctgaatgcaaatggggttcagagtgctgtctaatccaatgggtaggattattggcaattagaattttactcaatgcaaagagttttaggtggccaacacagtacacaagaaaagatcactactcaaaattgggactgtgactacagaagcaatgacagagaaatggtttctcctttaagggcaggggatcgagaaaatgataagtaactcaaattgtgggcaataatgctctgatagaaagctctcaattgacattccctaacttcaacgtaccgagtaaggaaattctttgtcctgagatcacagacaaatgggattgtatgcattaactgaaaatggtcaaggagtcagtactgaagatcagcaatgccaagggtaaacggaatatcccagtataataggataagcaatggacaacttattttgagcactgaatcaatgaaaattagagtgactttcgagagaagctgggcgggactgaggaactaggactgggactggggctagggctggggggttaggggactggggctggggcagggctggggcggggtgggagtagggctggggctagactaggggtttgctgggagcagggctggggaggaactggatgctaggcaggcaggatacaacgaaaaattgaaatactccaatataataagtctgaatagaggacaccagaccacagcaattcaagtttcctgtctgataagtaggtgattagtcaattagtgcagcatcaaggatgggaacaaagcaaggcctggacctgtgtaaaccttcaaacactcttttttacattaggtcatgaagttaaattttttactgtttctgtgctacagactcttcaaaggaaaatagttaagtcaatttcaaagaaaatgaccagcacatttttaaaacattagaaatgatttgactttgactatctactgccaaaaaaaggttaaggaatttgtaatgagaagctaaaaactttaaggaattttaaggaactcaaaacaaaaactcatt

SEQ ID NO: 1389 - DNA, 4049 bp, Homo sapiens
catttgaaatgtcttagacaattgaaatcaattaggcaattgaaaatatgcacattaagagtcatggataattagaaatacacattaagagtcccaagagaaggactctgggtttccagcatccctttctataatgtaaaaggggtagaatataggtttaaagggagagaccatgaacattggaattttgcacattcatagtcccagggaaaggtaacataggtaattaatatcccttgctgtaaaacaaggaggataaaatggatctgatctgaaagacattgttgtgatcagttgccatggttcacattaactatcctagtgcaaaggtcttgactagaggtcatccactgctgaacactagggaagtgagtggggtctttagtgcacaggaagagggacaaatgcaagtagcacattaacagtacaaaagaaatgtccttgtgattagcaccctctactgtaatgctaagagggtgtgagcagttgggatcttaatttaatggaaaagaccataattgcaattatgcgcattaacagtcccaagtaccccctgctgtaagacaaaaggaatatgaggggatgagaccccagactaacagcagatagggaaattgcattttgcacatcaataatttctggaggaggggcattaggtaaccagcaccctcttgatgtaaagcaaagatgatgcagggaccttgatataaaagactcagttctaatcaattaggattgtgcacataaactgtcctagtacagaggtcttgagtagtaagggtcccctgctggaatacaaagggagtggaagggttagtgcacaagatcgtggacaaatacaattatgaacatcaatgcacaagaagagtccttgggtgatcagcccacattgtagcgtgcaaataggatacagagtccctttctaatggacaggactctggacaattgcaactgtgcaaattaactgttcaagagctgttattgaataatctgcactcgttagcaacatcccacagaaggtgggatggggtgagaatccatttttattgcacagaaccatgaatatatgcaattatgcatatcaactgtttaagagaaggaaacttgggtagtcagaactcagcagcaatggcaaagaggacatcctagactaatgagtgggactatgggcaattagtgttttacatattaatgcaaggtggtaggtagttcacactatctaggagcaatgataaaggcatacacataagtgggtcttctctgttacgcagaaccatgaataattactattgtatccattaatattccaagggaaggggctctaagaatgagtcagtcccactgctgttatgcaaagatgtttgcaaaggccatagtgtaactaacagaactatggataattgggattttactcaataatttaagaaactcttaaatctcaggtagtcagcgctgcctcaaggcaaatgcaagggcgactggtagtcttcatgattaatgggtgagacaattagcaattactactttgttctttaattgtccaagaacagcaggattctccagaagcacagcaaaaagcgcagtagggtgcctttgtttaataggcaaagctatgacaattgggactgagcattttaactgtccaacaaaagacgggttgtctgcgaccccctgctgaatgcaaatggggttcagagtgctgtctaatccaatgggtaggattattggcaattagaattttactcaatgcaaagagttttaggtggccaacacagtacacaagaaaagatcactactcaaaattgggactgtgactacagaagcaatgacagagaaatggtttctcctttaagggcaggggatcgagaaaatgataagtaactcaaattgtgggcaataatgctctgatagaaagctctcaattgacattccctaacttcaacgtaccgagtaaggaaattctttgtcctgagatcacagacaaatgggattgtatgcattaactgaaaatggtcaaggagtcagtactgaagatcagcaatgccaagggtaaacggaatatcccagtataataggataagcaatggacaacttattttgagcactgaatcaatgaaaattagagtgactttcgagagaagctgggcgggactgaggaactaggactgggactggggctagggctggggggttaggggactggggctggggcagggctggggcggggtgggagtagggctggggctagactaggggtttgctgggagcagggctggggaggaactggatgctaggcaggcaggatacaacgaaaaattgaaatactccaatataataagtctgaatagaggacaccagaccacagcaattcaagtttcctgtctgataagtaggtgattagtcaattagtgcagcatcaaggatgggaacaaagcaaggcctggacctgtgtaaaccttcaaacactcttttttacattaggtcatgaagttaaattttttactgtttctgtgctacagactcttcaaaggaaaatagttaagtcaatttcaaagaaaatgaccagcacatttttaaaacattagaaatgatttgactttgactatctactgccaaaaaaaggttaaggaatttgtaatgagaagctaaaaactttaaggaattttaaggaactcaaaacaaaaactcattaaatgtaattaaagtgaattctacaaataaagcctcttaatacatttctataatagtcacttaagacttaaattcaaacactagcaaaccacaaaatcagactgtatgactgacatccaaaagataaatataaatcaaaatccgaccccagcattagccaaggggtaggtgttcctcttgaggaaggcaggaattcctcttctgccacctgttggccaacgatcatctgtgatccattctggtccttgccacggctcaccaccatgtccacaccaagcaggcctggagcactgcccatggcaacagtgcagtgcagggcagaccagaggggggtaggggggtaggggggtaggggggtggggaggtggggggtggggggtgggggtggggagttgggggggttggggggtggggggggaggtatacttagccttaggtgaggcaccaatacagaggaatggagggaggttcagaccacacagccagatatccagcactgcaagaggcagcactggacaggaggggacaaataagaggggacagaggtggaaaggctaaatgtccttgaaaagaccttgaaaacacctggtgtaccgcccactgggagacatacacgtggcccctccacttctttctcctgactggctaaagacagctgcgaagtgccatgctaattcacccaggtcttcgctgagtagctggacagtgtgtcatcagtctaattccatcttctgctctaattggctgtgatcaattccacccccatttctaattggttgggttatgcagcaatccagcactgtccatcccaccttttctcccgctctgcgtggcactaggcggcaaaacccgccatctttaacaatgcggcaagcccgccatgatgtccacgtgacaaaagccatgatatacatatgacaacgcctgccatattgtccctgcggcaaaacccaacacgaaaagcacacagcaaagacaaagaggcccgccatgttttacactgcggcaagaccttcagccgccatcttttcctgtgtgaccgcacatgtccaccaccatgctaaccacttaacaaagcctcgcccatcatgatgtggccttcccgccacttgaacactgcgacagaactggatccgccattttggacaacctaacaaagcacagcccgccatgctgagcaatgccgcaatgtcaaaatcgccattttaagccctgcaccttagtctttcctaaccttccatttttaactagtcccttgtactgataaaagatgattcttactgcctcccgatacaacaatcacgcaaagctcctaacaagccccaaatcaattcattcagataggtttagctcatgca

SEQ ID NO: 1390 - DNA, 4034 bp, Homo sapiens
ctgggtttccagcatccctttctataatgtaaaaggggtagaatataggtttaaagggagagaccatgaacattggaattttgcacattcatagtcccagggaaaggtaacataggtaattaatatcccttgctgtaaaacaaggaggataaaatggatctgatctgaaagacattgttgtgatcagttgccatggttcacattaactatcctagtgcaaaggtcttgactagaggtcatccactgctgaacactagggaagtgagtggggtctttagtgcacaggaagagggacaaatgcaagtagcacattaacagtacaaaagaaatgtccttgtgattagcaccctctactgtaatgctaagagggtgtgagcagttgggatcttaatttaatggaaaagaccataattgcaattatgcgcattaacagtcccaagtaccccctgctgtaagacaaaaggaatatgaggggatgagaccccagactaacagcagatagggaaattgcattttgcacatcaataatttctggaggaggggcattaggtaaccagcaccctcttgatgtaaagcaaagatgatgcagggaccttgatataaaagactcagttctaatcaattaggattgtgcacataaactgtcctagtacagaggtcttgagtagtaagggtcccctgctggaatacaaagggagtggaagggttagtgcacaagatcgtggacaaatacaattatgaacatcaatgcacaagaagagtccttgggtgatcagcccacattgtagcgtgcaaataggatacagagtccctttctaatggacaggactctggacaattgcaactgtgcaaattaactgttcaagagctgttattgaataatctgcactcgttagcaacatcccacagaaggtgggatggggtgagaatccatttttattgcacagaaccatgaatatatgcaattatgcatatcaactgtttaagagaaggaaacttgggtagtcagaactcagcagcaatggcaaagaggacatcctagactaatgagtgggactatgggcaattagtgttttacatattaatgcaaggtggtaggtagttcacactatctaggagcaatgataaaggcatacacataagtgggtcttctctgttacgcagaaccatgaataattactattgtatccattaatattccaagggaaggggctctaagaatgagtcagtcccactgctgttatgcaaagatgtttgcaaaggccatagtgtaactaacagaactatggataattgggattttactcaataatttaagaaactcttaaatctcaggtagtcagcgctgcctcaaggcaaatgcaagggcgactggtagtcttcatgattaatgggtgagacaattagcaattactactttgttctttaattgtccaagaacagcaggattctccagaagcacagcaaaaagcgcagtagggtgcctttgtttaataggcaaagctatgacaattgggactgagcattttaactgtccaacaaaagacgggttgtctgcgaccccctgctgaatgcaaatggggttcagagtgctgtctaatccaatgggtaggattattggcaattagaattttactcaatgcaaagagttttaggtggccaacacagtacacaagaaaagatcactactcaaaattgggactgtgactacagaagcaatgacagagaaatggtttctcctttaagggcaggggatcgagaaaatgataagtaactcaaattgtgggcaataatgctctgatagaaagctctcaattgacattccctaacttcaacgtaccgagtaaggaaattctttgtcctgagatcacagacaaatgggattgtatgcattaactgaaaatggtcaaggagtcagtactgaagatcagcaatgccaagggtaaacggaatatcccagtataataggataagcaatggacaacttattttgagcactgaatcaatgaaaattagagtgactttcgagagaagctgggcgggactgaggaactaggactgggactggggctagggctggggggttaggggactggggctggggcagggctggggcggggtgggagtagggctggggctagactaggggtttgctgggagcagggctggggaggaactggatgctaggcaggcaggatacaacgaaaaattgaaatactccaatataataagtctgaatagaggacaccagaccacagcaattcaagtttcctgtctgataagtaggtgattagtcaattagtgcagcatcaaggatgggaacaaagcaaggcctggacctgtgtaaaccttcaaacactcttttttacattaggtcatgaagttaaattttttactgtttctgtgctacagactcttcaaaggaaaatagttaagtcaatttcaaagaaaatgaccagcacatttttaaaacattagaaatgatttgactttgactatctactgccaaaaaaaggttaaggaatttgtaatgagaagctaaaaactttaaggaattttaaggaactcaaaacaaaaactcattaaatgtaattaaagtgaattctacaaataaagcctcttaatacatttctataatagtcacttaagacttaaattcaaacactagcaaaccacaaaatcagactgtatgactgacatccaaaagataaatataaatcaaaatccgaccccagcattagccaaggggtaggtgttcctcttgaggaaggcaggaattcctcttctgccacctgttggccaacgatcatctgtgatccattctggtccttgccacggctcaccaccatgtccacaccaagcaggcctggagcactgcccatggcaacagtgcagtgcagggcagaccagaggggggtaggggggtaggggggtaggggggtggggaggtggggggtggggggtgggggtggggagttgggggggttggggggtggggggggaggtatacttagccttaggtgaggcaccaatacagaggaatggagggaggttcagaccacacagccagatatccagcactgcaagaggcagcactggacaggaggggacaaataagaggggacagaggtggaaaggctaaatgtccttgaaaagaccttgaaaacacctggtgtaccgcccactgggagacatacacgtggcccctccacttctttctcctgactggctaaagacagctgcgaagtgccatgctaattcacccaggtcttcgctgagtagctggacagtgtgtcatcagtctaattccatcttctgctctaattggctgtgatcaattccacccccatttctaattggttgggttatgcagcaatccagcactgtccatcccaccttttctcccgctctgcgtggcactaggcggcaaaacccgccatctttaacaatgcggcaagcccgccatgatgtccacgtgacaaaagccatgatatacatatgacaacgcctgccatattgtccctgcggcaaaacccaacacgaaaagcacacagcaaagacaaagaggcccgccatgttttacactgcggcaagaccttcagccgccatcttttcctgtgtgaccgcacatgtccaccaccatgctaaccacttaacaaagcctcgcccatcatgatgtggccttcccgccacttgaacactgcgacagaactggatccgccattttggacaacctaacaaagcacagcccgccatgctgagcaatgccgcaatgtcaaaatcgccattttaagccctgcaccttagtctttcctaaccttccatttttaactagtcccttgtactgataaaagatgattcttactgcctcccgatacaacaatcacgcaaagctcctaacaagccccaaatcaattcattcagataggtttagctcatgcaatgcacatgacttcctctgcctgacctgctatcatccatcttgcctccctagtttaacttagcacaaacgactagccctaagccgagttatg

SEQ ID NO: 1391 - DNA, 4065 bp, Homo sapiens
gaaaagaccataattgcaattatgcgcattaacagtcccaagtaccccctgctgtaagacaaaaggaatatgaggggatgagaccccagactaacagcagatagggaaattgcattttgcacatcaataatttctggaggaggggcattaggtaaccagcaccctcttgatgtaaagcaaagatgatgcagggaccttgatataaaagactcagttctaatcaattaggattgtgcacataaactgtcctagtacagaggtcttgagtagtaagggtcccctgctggaatacaaagggagtggaagggttagtgcacaagatcgtggacaaatacaattatgaacatcaatgcacaagaagagtccttgggtgatcagcccacattgtagcgtgcaaataggatacagagtccctttctaatggacaggactctggacaattgcaactgtgcaaattaactgttcaagagctgttattgaataatctgcactcgttagcaacatcccacagaaggtgggatggggtgagaatccatttttattgcacagaaccatgaatatatgcaattatgcatatcaactgtttaagagaaggaaacttgggtagtcagaactcagcagcaatggcaaagaggacatcctagactaatgagtgggactatgggcaattagtgttttacatattaatgcaaggtggtaggtagttcacactatctaggagcaatgataaaggcatacacataagtgggtcttctctgttacgcagaaccatgaataattactattgtatccattaatattccaagggaaggggctctaagaatgagtcagtcccactgctgttatgcaaagatgtttgcaaaggccatagtgtaactaacagaactatggataattgggattttactcaataatttaagaaactcttaaatctcaggtagtcagcgctgcctcaaggcaaatgcaagggcgactggtagtcttcatgattaatgggtgagacaattagcaattactactttgttctttaattgtccaagaacagcaggattctccagaagcacagcaaaaagcgcagtagggtgcctttgtttaataggcaaagctatgacaattgggactgagcattttaactgtccaacaaaagacgggttgtctgcgaccccctgctgaatgcaaatggggttcagagtgctgtctaatccaatgggtaggattattggcaattagaattttactcaatgcaaagagttttaggtggccaacacagtacacaagaaaagatcactactcaaaattgggactgtgactacagaagcaatgacagagaaatggtttctcctttaagggcaggggatcgagaaaatgataagtaactcaaattgtgggcaataatgctctgatagaaagctctcaattgacattccctaacttcaacgtaccgagtaaggaaattctttgtcctgagatcacagacaaatgggattgtatgcattaactgaaaatggtcaaggagtcagtactgaagatcagcaatgccaagggtaaacggaatatcccagtataataggataagcaatggacaacttattttgagcactgaatcaatgaaaattagagtgactttcgagagaagctgggcgggactgaggaactaggactgggactggggctagggctggggggttaggggactggggctggggcagggctggggcggggtgggagtagggctggggctagactaggggtttgctgggagcagggctggggaggaactggatgctaggcaggcaggatacaacgaaaaattgaaatactccaatataataagtctgaatagaggacaccagaccacagcaattcaagtttcctgtctgataagtaggtgattagtcaattagtgcagcatcaaggatgggaacaaagcaaggcctggacctgtgtaaaccttcaaacactcttttttacattaggtcatgaagttaaattttttactgtttctgtgctacagactcttcaaaggaaaatagttaagtcaatttcaaagaaaatgaccagcacatttttaaaacattagaaatgatttgactttgactatctactgccaaaaaaaggttaaggaatttgtaatgagaagctaaaaactttaaggaattttaaggaactcaaaacaaaaactcattaaatgtaattaaagtgaattctacaaataaagcctcttaatacatttctataatagtcacttaagacttaaattcaaacactagcaaaccacaaaatcagactgtatgactgacatccaaaagataaatataaatcaaaatccgaccccagcattagccaaggggtaggtgttcctcttgaggaaggcaggaattcctcttctgccacctgttggccaacgatcatctgtgatccattctggtccttgccacggctcaccaccatgtccacaccaagcaggcctggagcactgcccatggcaacagtgcagtgcagggcagaccagaggggggtaggggggtaggggggtaggggggtggggaggtggggggtggggggtgggggtggggagttgggggggttggggggtggggggggaggtatacttagccttaggtgaggcaccaatacagaggaatggagggaggttcagaccacacagccagatatccagcactgcaagaggcagcactggacaggaggggacaaataagaggggacagaggtggaaaggctaaatgtccttgaaaagaccttgaaaacacctggtgtaccgcccactgggagacatacacgtggcccctccacttctttctcctgactggctaaagacagctgcgaagtgccatgctaattcacccaggtcttcgctgagtagctggacagtgtgtcatcagtctaattccatcttctgctctaattggctgtgatcaattccacccccatttctaattggttgggttatgcagcaatccagcactgtccatcccaccttttctcccgctctgcgtggcactaggcggcaaaacccgccatctttaacaatgcggcaagcccgccatgatgtccacgtgacaaaagccatgatatacatatgacaacgcctgccatattgtccctgcggcaaaacccaacacgaaaagcacacagcaaagacaaagaggcccgccatgttttacactgcggcaagaccttcagccgccatcttttcctgtgtgaccgcacatgtccaccaccatgctaaccacttaacaaagcctcgcccatcatgatgtggccttcccgccacttgaacactgcgacagaactggatccgccattttggacaacctaacaaagcacagcccgccatgctgagcaatgccgcaatgtcaaaatcgccattttaagccctgcaccttagtctttcctaaccttccatttttaactagtcccttgtactgataaaagatgattcttactgcctcccgatacaacaatcacgcaaagctcctaacaagccccaaatcaattcattcagataggtttagctcatgcaatgcacatgacttcctctgcctgacctgctatcatccatcttgcctccctagtttaacttagcacaaacgactagccctaagccgagttatgcggcaagtctaaaatggcggccacttttcctccacaatctgaacacgcccttagcttaactgcagagtcattctctgccaaagcggtaggtacactcacacaccaccaaatgatcagcagcaaaaaaaagtgtagatattccagagagtgcaacaacccacaaaaccaacattttttcatccataaaaagcaccgatgggcgatgaaaaaaaaaaatcaaagcaggtatccgcggccccgatgggccagaaaaacaaaaattaaagcaggtatccgaggccccgatgggcaaggaaaaataaaaaaaaaaaaagcaggtatccgaagccccgatgggccaaaaaaagaaaatttttaaaaagcagatatccgtcaccccgatgggccagagtgttgggggttcagaggggaagggaatcagcaggtatc

SEQ ID NO: 1392 - DNA, 4062 bp, Homo sapiens
actctggacaattgcaactgtgcaaattaactgttcaagagctgttattgaataatctgcactcgttagcaacatcccacagaaggtgggatggggtgagaatccatttttattgcacagaaccatgaatatatgcaattatgcatatcaactgtttaagagaaggaaacttgggtagtcagaactcagcagcaatggcaaagaggacatcctagactaatgagtgggactatgggcaattagtgttttacatattaatgcaaggtggtaggtagttcacactatctaggagcaatgataaaggcatacacataagtgggtcttctctgttacgcagaaccatgaataattactattgtatccattaatattccaagggaaggggctctaagaatgagtcagtcccactgctgttatgcaaagatgtttgcaaaggccatagtgtaactaacagaactatggataattgggattttactcaataatttaagaaactcttaaatctcaggtagtcagcgctgcctcaaggcaaatgcaagggcgactggtagtcttcatgattaatgggtgagacaattagcaattactactttgttctttaattgtccaagaacagcaggattctccagaagcacagcaaaaagcgcagtagggtgcctttgtttaataggcaaagctatgacaattgggactgagcattttaactgtccaacaaaagacgggttgtctgcgaccccctgctgaatgcaaatggggttcagagtgctgtctaatccaatgggtaggattattggcaattagaattttactcaatgcaaagagttttaggtggccaacacagtacacaagaaaagatcactactcaaaattgggactgtgactacagaagcaatgacagagaaatggtttctcctttaagggcaggggatcgagaaaatgataagtaactcaaattgtgggcaataatgctctgatagaaagctctcaattgacattccctaacttcaacgtaccgagtaaggaaattctttgtcctgagatcacagacaaatgggattgtatgcattaactgaaaatggtcaaggagtcagtactgaagatcagcaatgccaagggtaaacggaatatcccagtataataggataagcaatggacaacttattttgagcactgaatcaatgaaaattagagtgactttcgagagaagctgggcgggactgaggaactaggactgggactggggctagggctggggggttaggggactggggctggggcagggctggggcggggtgggagtagggctggggctagactaggggtttgctgggagcagggctggggaggaactggatgctaggcaggcaggatacaacgaaaaattgaaatactccaatataataagtctgaatagaggacaccagaccacagcaattcaagtttcctgtctgataagtaggtgattagtcaattagtgcagcatcaaggatgggaacaaagcaaggcctggacctgtgtaaaccttcaaacactcttttttacattaggtcatgaagttaaattttttactgtttctgtgctacagactcttcaaaggaaaatagttaagtcaatttcaaagaaaatgaccagcacatttttaaaacattagaaatgatttgactttgactatctactgccaaaaaaaggttaaggaatttgtaatgagaagctaaaaactttaaggaattttaaggaactcaaaacaaaaactcattaaatgtaattaaagtgaattctacaaataaagcctcttaatacatttctataatagtcacttaagacttaaattcaaacactagcaaaccacaaaatcagactgtatgactgacatccaaaagataaatataaatcaaaatccgaccccagcattagccaaggggtaggtgttcctcttgaggaaggcaggaattcctcttctgccacctgttggccaacgatcatctgtgatccattctggtccttgccacggctcaccaccatgtccacaccaagcaggcctggagcactgcccatggcaacagtgcagtgcagggcagaccagaggggggtaggggggtaggggggtaggggggtggggaggtggggggtggggggtgggggtggggagttgggggggttggggggtggggggggaggtatacttagccttaggtgaggcaccaatacagaggaatggagggaggttcagaccacacagccagatatccagcactgcaagaggcagcactggacaggaggggacaaataagaggggacagaggtggaaaggctaaatgtccttgaaaagaccttgaaaacacctggtgtaccgcccactgggagacatacacgtggcccctccacttctttctcctgactggctaaagacagctgcgaagtgccatgctaattcacccaggtcttcgctgagtagctggacagtgtgtcatcagtctaattccatcttctgctctaattggctgtgatcaattccacccccatttctaattggttgggttatgcagcaatccagcactgtccatcccaccttttctcccgctctgcgtggcactaggcggcaaaacccgccatctttaacaatgcggcaagcccgccatgatgtccacgtgacaaaagccatgatatacatatgacaacgcctgccatattgtccctgcggcaaaacccaacacgaaaagcacacagcaaagacaaagaggcccgccatgttttacactgcggcaagaccttcagccgccatcttttcctgtgtgaccgcacatgtccaccaccatgctaaccacttaacaaagcctcgcccatcatgatgtggccttcccgccacttgaacactgcgacagaactggatccgccattttggacaacctaacaaagcacagcccgccatgctgagcaatgccgcaatgtcaaaatcgccattttaagccctgcaccttagtctttcctaaccttccatttttaactagtcccttgtactgataaaagatgattcttactgcctcccgatacaacaatcacgcaaagctcctaacaagccccaaatcaattcattcagataggtttagctcatgcaatgcacatgacttcctctgcctgacctgctatcatccatcttgcctccctagtttaacttagcacaaacgactagccctaagccgagttatgcggcaagtctaaaatggcggccacttttcctccacaatctgaacacgcccttagcttaactgcagagtcattctctgccaaagcggtaggtacactcacacaccaccaaatgatcagcagcaaaaaaaagtgtagatattccagagagtgcaacaacccacaaaaccaacattttttcatccataaaaagcaccgatgggcgatgaaaaaaaaaaatcaaagcaggtatccgcggccccgatgggccagaaaaacaaaaattaaagcaggtatccgaggccccgatgggcaaggaaaaataaaaaaaaaaaaagcaggtatccgaagccccgatgggccaaaaaaagaaaatttttaaaaagcagatatccgtcaccccgatgggccagagtgttgggggttcagaggggaagggaatcagcaggtatccgataccccgatgggctaaggaaaaaaaaataaaaagcaggtatccgcggccccgatgggcgaataaaaaagaattaaaaggcaggtatccacggccccgttgggcaaagaaaaaataataaaaccaggtatccgcagccccgatgggcaaaatatagaaaagagagtggaagagtaaaaaactgatccacaaaaaacagagatgtcaaccaaaaatgattccaaagaaaaattccttaaatattaaaaattgcctcaaaatattccaaatactttctttaaaaaaatatggaggacgtgtcaagaagacactaggagaaagtatagaatttaaaaaaatattttatggaatttaggtgatttttttaaagaaatacgccataaagggtgttgggggactagaaaatgttctagaaagaaccccaa

SEQ ID NO: 1393 - DNA, 4034 bp, Homo sapiens
attactattgtatccattaatattccaagggaaggggctctaagaatgagtcagtcccactgctgttatgcaaagatgtttgcaaaggccatagtgtaactaacagaactatggataattgggattttactcaataatttaagaaactcttaaatctcaggtagtcagcgctgcctcaaggcaaatgcaagggcgactggtagtcttcatgattaatgggtgagacaattagcaattactactttgttctttaattgtccaagaacagcaggattctccagaagcacagcaaaaagcgcagtagggtgcctttgtttaataggcaaagctatgacaattgggactgagcattttaactgtccaacaaaagacgggttgtctgcgaccccctgctgaatgcaaatggggttcagagtgctgtctaatccaatgggtaggattattggcaattagaattttactcaatgcaaagagttttaggtggccaacacagtacacaagaaaagatcactactcaaaattgggactgtgactacagaagcaatgacagagaaatggtttctcctttaagggcaggggatcgagaaaatgataagtaactcaaattgtgggcaataatgctctgatagaaagctctcaattgacattccctaacttcaacgtaccgagtaaggaaattctttgtcctgagatcacagacaaatgggattgtatgcattaactgaaaatggtcaaggagtcagtactgaagatcagcaatgccaagggtaaacggaatatcccagtataataggataagcaatggacaacttattttgagcactgaatcaatgaaaattagagtgactttcgagagaagctgggcgggactgaggaactaggactgggactggggctagggctggggggttaggggactggggctggggcagggctggggcggggtgggagtagggctggggctagactaggggtttgctgggagcagggctggggaggaactggatgctaggcaggcaggatacaacgaaaaattgaaatactccaatataataagtctgaatagaggacaccagaccacagcaattcaagtttcctgtctgataagtaggtgattagtcaattagtgcagcatcaaggatgggaacaaagcaaggcctggacctgtgtaaaccttcaaacactcttttttacattaggtcatgaagttaaattttttactgtttctgtgctacagactcttcaaaggaaaatagttaagtcaatttcaaagaaaatgaccagcacatttttaaaacattagaaatgatttgactttgactatctactgccaaaaaaaggttaaggaatttgtaatgagaagctaaaaactttaaggaattttaaggaactcaaaacaaaaactcattaaatgtaattaaagtgaattctacaaataaagcctcttaatacatttctataatagtcacttaagacttaaattcaaacactagcaaaccacaaaatcagactgtatgactgacatccaaaagataaatataaatcaaaatccgaccccagcattagccaaggggtaggtgttcctcttgaggaaggcaggaattcctcttctgccacctgttggccaacgatcatctgtgatccattctggtccttgccacggctcaccaccatgtccacaccaagcaggcctggagcactgcccatggcaacagtgcagtgcagggcagaccagaggggggtaggggggtaggggggtaggggggtggggaggtggggggtggggggtgggggtggggagttgggggggttggggggtggggggggaggtatacttagccttaggtgaggcaccaatacagaggaatggagggaggttcagaccacacagccagatatccagcactgcaagaggcagcactggacaggaggggacaaataagaggggacagaggtggaaaggctaaatgtccttgaaaagaccttgaaaacacctggtgtaccgcccactgggagacatacacgtggcccctccacttctttctcctgactggctaaagacagctgcgaagtgccatgctaattcacccaggtcttcgctgagtagctggacagtgtgtcatcagtctaattccatcttctgctctaattggctgtgatcaattccacccccatttctaattggttgggttatgcagcaatccagcactgtccatcccaccttttctcccgctctgcgtggcactaggcggcaaaacccgccatctttaacaatgcggcaagcccgccatgatgtccacgtgacaaaagccatgatatacatatgacaacgcctgccatattgtccctgcggcaaaacccaacacgaaaagcacacagcaaagacaaagaggcccgccatgttttacactgcggcaagaccttcagccgccatcttttcctgtgtgaccgcacatgtccaccaccatgctaaccacttaacaaagcctcgcccatcatgatgtggccttcccgccacttgaacactgcgacagaactggatccgccattttggacaacctaacaaagcacagcccgccatgctgagcaatgccgcaatgtcaaaatcgccattttaagccctgcaccttagtctttcctaaccttccatttttaactagtcccttgtactgataaaagatgattcttactgcctcccgatacaacaatcacgcaaagctcctaacaagccccaaatcaattcattcagataggtttagctcatgcaatgcacatgacttcctctgcctgacctgctatcatccatcttgcctccctagtttaacttagcacaaacgactagccctaagccgagttatgcggcaagtctaaaatggcggccacttttcctccacaatctgaacacgcccttagcttaactgcagagtcattctctgccaaagcggtaggtacactcacacaccaccaaatgatcagcagcaaaaaaaagtgtagatattccagagagtgcaacaacccacaaaaccaacattttttcatccataaaaagcaccgatgggcgatgaaaaaaaaaaatcaaagcaggtatccgcggccccgatgggccagaaaaacaaaaattaaagcaggtatccgaggccccgatgggcaaggaaaaataaaaaaaaaaaaagcaggtatccgaagccccgatgggccaaaaaaagaaaatttttaaaaagcagatatccgtcaccccgatgggccagagtgttgggggttcagaggggaagggaatcagcaggtatccgataccccgatgggctaaggaaaaaaaaataaaaagcaggtatccgcggccccgatgggcgaataaaaaagaattaaaaggcaggtatccacggccccgttgggcaaagaaaaaataataaaaccaggtatccgcagccccgatgggcaaaatatagaaaagagagtggaagagtaaaaaactgatccacaaaaaacagagatgtcaaccaaaaatgattccaaagaaaaattccttaaatattaaaaattgcctcaaaatattccaaatactttctttaaaaaaatatggaggacgtgtcaagaagacactaggagaaagtatagaatttaaaaaaatattttatggaatttaggtgatttttttaaagaaatacgccataaagggtgttgggggactagaaaatgttctagaaagaaccccaagtgcagagagatcttcagtcaggaagcttccagccccgagagagtaagaaatatggctgcagcagcgaattgcagcgctttaagaactgaagggggggctgagggcggagagagcataagaggcgtggcctagaagattgaaagccggacatctttgtgatttggttggttcaaaatttacccagtaaggacaaaaaagggaaatttcaagaaagcaaagacataccagaaagaacattaactggaagtagacttcatttctagaccaggagtcacaacttcaatgggttttccagttctcatctataacatggggacat

SEQ ID NO: 1394 - DNA, 4028 bp, Homo sapiens
cagtcccactgctgttatgcaaagatgtttgcaaaggccatagtgtaactaacagaactatggataattgggattttactcaataatttaagaaactcttaaatctcaggtagtcagcgctgcctcaaggcaaatgcaagggcgactggtagtcttcatgattaatgggtgagacaattagcaattactactttgttctttaattgtccaagaacagcaggattctccagaagcacagcaaaaagcgcagtagggtgcctttgtttaataggcaaagctatgacaattgggactgagcattttaactgtccaacaaaagacgggttgtctgcgaccccctgctgaatgcaaatggggttcagagtgctgtctaatccaatgggtaggattattggcaattagaattttactcaatgcaaagagttttaggtggccaacacagtacacaagaaaagatcactactcaaaattgggactgtgactacagaagcaatgacagagaaatggtttctcctttaagggcaggggatcgagaaaatgataagtaactcaaattgtgggcaataatgctctgatagaaagctctcaattgacattccctaacttcaacgtaccgagtaaggaaattctttgtcctgagatcacagacaaatgggattgtatgcattaactgaaaatggtcaaggagtcagtactgaagatcagcaatgccaagggtaaacggaatatcccagtataataggataagcaatggacaacttattttgagcactgaatcaatgaaaattagagtgactttcgagagaagctgggcgggactgaggaactaggactgggactggggctagggctggggggttaggggactggggctggggcagggctggggcggggtgggagtagggctggggctagactaggggtttgctgggagcagggctggggaggaactggatgctaggcaggcaggatacaacgaaaaattgaaatactccaatataataagtctgaatagaggacaccagaccacagcaattcaagtttcctgtctgataagtaggtgattagtcaattagtgcagcatcaaggatgggaacaaagcaaggcctggacctgtgtaaaccttcaaacactcttttttacattaggtcatgaagttaaattttttactgtttctgtgctacagactcttcaaaggaaaatagttaagtcaatttcaaagaaaatgaccagcacatttttaaaacattagaaatgatttgactttgactatctactgccaaaaaaaggttaaggaatttgtaatgagaagctaaaaactttaaggaattttaaggaactcaaaacaaaaactcattaaatgtaattaaagtgaattctacaaataaagcctcttaatacatttctataatagtcacttaagacttaaattcaaacactagcaaaccacaaaatcagactgtatgactgacatccaaaagataaatataaatcaaaatccgaccccagcattagccaaggggtaggtgttcctcttgaggaaggcaggaattcctcttctgccacctgttggccaacgatcatctgtgatccattctggtccttgccacggctcaccaccatgtccacaccaagcaggcctggagcactgcccatggcaacagtgcagtgcagggcagaccagaggggggtaggggggtaggggggtaggggggtggggaggtggggggtggggggtgggggtggggagttgggggggttggggggtggggggggaggtatacttagccttaggtgaggcaccaatacagaggaatggagggaggttcagaccacacagccagatatccagcactgcaagaggcagcactggacaggaggggacaaataagaggggacagaggtggaaaggctaaatgtccttgaaaagaccttgaaaacacctggtgtaccgcccactgggagacatacacgtggcccctccacttctttctcctgactggctaaagacagctgcgaagtgccatgctaattcacccaggtcttcgctgagtagctggacagtgtgtcatcagtctaattccatcttctgctctaattggctgtgatcaattccacccccatttctaattggttgggttatgcagcaatccagcactgtccatcccaccttttctcccgctctgcgtggcactaggcggcaaaacccgccatctttaacaatgcggcaagcccgccatgatgtccacgtgacaaaagccatgatatacatatgacaacgcctgccatattgtccctgcggcaaaacccaacacgaaaagcacacagcaaagacaaagaggcccgccatgttttacactgcggcaagaccttcagccgccatcttttcctgtgtgaccgcacatgtccaccaccatgctaaccacttaacaaagcctcgcccatcatgatgtggccttcccgccacttgaacactgcgacagaactggatccgccattttggacaacctaacaaagcacagcccgccatgctgagcaatgccgcaatgtcaaaatcgccattttaagccctgcaccttagtctttcctaaccttccatttttaactagtcccttgtactgataaaagatgattcttactgcctcccgatacaacaatcacgcaaagctcctaacaagccccaaatcaattcattcagataggtttagctcatgcaatgcacatgacttcctctgcctgacctgctatcatccatcttgcctccctagtttaacttagcacaaacgactagccctaagccgagttatgcggcaagtctaaaatggcggccacttttcctccacaatctgaacacgcccttagcttaactgcagagtcattctctgccaaagcggtaggtacactcacacaccaccaaatgatcagcagcaaaaaaaagtgtagatattccagagagtgcaacaacccacaaaaccaacattttttcatccataaaaagcaccgatgggcgatgaaaaaaaaaaatcaaagcaggtatccgcggccccgatgggccagaaaaacaaaaattaaagcaggtatccgaggccccgatgggcaaggaaaaataaaaaaaaaaaaagcaggtatccgaagccccgatgggccaaaaaaagaaaatttttaaaaagcagatatccgtcaccccgatgggccagagtgttgggggttcagaggggaagggaatcagcaggtatccgataccccgatgggctaaggaaaaaaaaataaaaagcaggtatccgcggccccgatgggcgaataaaaaagaattaaaaggcaggtatccacggccccgttgggcaaagaaaaaataataaaaccaggtatccgcagccccgatgggcaaaatatagaaaagagagtggaagagtaaaaaactgatccacaaaaaacagagatgtcaaccaaaaatgattccaaagaaaaattccttaaatattaaaaattgcctcaaaatattccaaatactttctttaaaaaaatatggaggacgtgtcaagaagacactaggagaaagtatagaatttaaaaaaatattttatggaatttaggtgatttttttaaagaaatacgccataaagggtgttgggggactagaaaatgttctagaaagaaccccaagtgcagagagatcttcagtcaggaagcttccagccccgagagagtaagaaatatggctgcagcagcgaattgcagcgctttaagaactgaagggggggctgagggcggagagagcataagaggcgtggcctagaagattgaaagccggacatctttgtgatttggttggttcaaaatttacccagtaaggacaaaaaagggaaatttcaagaaagcaaagacataccagaaagaacattaactggaagtagacttcatttctagaccaggagtcacaacttcaatgggttttccagttctcatctataacatggggacattgagtaaatcaagcaataattaatgctaaaatcctccataaactg

SEQ ID NO: 1395 - DNA, 4050 bp, Homo sapiens
caataatttaagaaactcttaaatctcaggtagtcagcgctgcctcaaggcaaatgcaagggcgactggtagtcttcatgattaatgggtgagacaattagcaattactactttgttctttaattgtccaagaacagcaggattctccagaagcacagcaaaaagcgcagtagggtgcctttgtttaataggcaaagctatgacaattgggactgagcattttaactgtccaacaaaagacgggttgtctgcgaccccctgctgaatgcaaatggggttcagagtgctgtctaatccaatgggtaggattattggcaattagaattttactcaatgcaaagagttttaggtggccaacacagtacacaagaaaagatcactactcaaaattgggactgtgactacagaagcaatgacagagaaatggtttctcctttaagggcaggggatcgagaaaatgataagtaactcaaattgtgggcaataatgctctgatagaaagctctcaattgacattccctaacttcaacgtaccgagtaaggaaattctttgtcctgagatcacagacaaatgggattgtatgcattaactgaaaatggtcaaggagtcagtactgaagatcagcaatgccaagggtaaacggaatatcccagtataataggataagcaatggacaacttattttgagcactgaatcaatgaaaattagagtgactttcgagagaagctgggcgggactgaggaactaggactgggactggggctagggctggggggttaggggactggggctggggcagggctggggcggggtgggagtagggctggggctagactaggggtttgctgggagcagggctggggaggaactggatgctaggcaggcaggatacaacgaaaaattgaaatactccaatataataagtctgaatagaggacaccagaccacagcaattcaagtttcctgtctgataagtaggtgattagtcaattagtgcagcatcaaggatgggaacaaagcaaggcctggacctgtgtaaaccttcaaacactcttttttacattaggtcatgaagttaaattttttactgtttctgtgctacagactcttcaaaggaaaatagttaagtcaatttcaaagaaaatgaccagcacatttttaaaacattagaaatgatttgactttgactatctactgccaaaaaaaggttaaggaatttgtaatgagaagctaaaaactttaaggaattttaaggaactcaaaacaaaaactcattaaatgtaattaaagtgaattctacaaataaagcctcttaatacatttctataatagtcacttaagacttaaattcaaacactagcaaaccacaaaatcagactgtatgactgacatccaaaagataaatataaatcaaaatccgaccccagcattagccaaggggtaggtgttcctcttgaggaaggcaggaattcctcttctgccacctgttggccaacgatcatctgtgatccattctggtccttgccacggctcaccaccatgtccacaccaagcaggcctggagcactgcccatggcaacagtgcagtgcagggcagaccagaggggggtaggggggtaggggggtaggggggtggggaggtggggggtggggggtgggggtggggagttgggggggttggggggtggggggggaggtatacttagccttaggtgaggcaccaatacagaggaatggagggaggttcagaccacacagccagatatccagcactgcaagaggcagcactggacaggaggggacaaataagaggggacagaggtggaaaggctaaatgtccttgaaaagaccttgaaaacacctggtgtaccgcccactgggagacatacacgtggcccctccacttctttctcctgactggctaaagacagctgcgaagtgccatgctaattcacccaggtcttcgctgagtagctggacagtgtgtcatcagtctaattccatcttctgctctaattggctgtgatcaattccacccccatttctaattggttgggttatgcagcaatccagcactgtccatcccaccttttctcccgctctgcgtggcactaggcggcaaaacccgccatctttaacaatgcggcaagcccgccatgatgtccacgtgacaaaagccatgatatacatatgacaacgcctgccatattgtccctgcggcaaaacccaacacgaaaagcacacagcaaagacaaagaggcccgccatgttttacactgcggcaagaccttcagccgccatcttttcctgtgtgaccgcacatgtccaccaccatgctaaccacttaacaaagcctcgcccatcatgatgtggccttcccgccacttgaacactgcgacagaactggatccgccattttggacaacctaacaaagcacagcccgccatgctgagcaatgccgcaatgtcaaaatcgccattttaagccctgcaccttagtctttcctaaccttccatttttaactagtcccttgtactgataaaagatgattcttactgcctcccgatacaacaatcacgcaaagctcctaacaagccccaaatcaattcattcagataggtttagctcatgcaatgcacatgacttcctctgcctgacctgctatcatccatcttgcctccctagtttaacttagcacaaacgactagccctaagccgagttatgcggcaagtctaaaatggcggccacttttcctccacaatctgaacacgcccttagcttaactgcagagtcattctctgccaaagcggtaggtacactcacacaccaccaaatgatcagcagcaaaaaaaagtgtagatattccagagagtgcaacaacccacaaaaccaacattttttcatccataaaaagcaccgatgggcgatgaaaaaaaaaaatcaaagcaggtatccgcggccccgatgggccagaaaaacaaaaattaaagcaggtatccgaggccccgatgggcaaggaaaaataaaaaaaaaaaaagcaggtatccgaagccccgatgggccaaaaaaagaaaatttttaaaaagcagatatccgtcaccccgatgggccagagtgttgggggttcagaggggaagggaatcagcaggtatccgataccccgatgggctaaggaaaaaaaaataaaaagcaggtatccgcggccccgatgggcgaataaaaaagaattaaaaggcaggtatccacggccccgttgggcaaagaaaaaataataaaaccaggtatccgcagccccgatgggcaaaatatagaaaagagagtggaagagtaaaaaactgatccacaaaaaacagagatgtcaaccaaaaatgattccaaagaaaaattccttaaatattaaaaattgcctcaaaatattccaaatactttctttaaaaaaatatggaggacgtgtcaagaagacactaggagaaagtatagaatttaaaaaaatattttatggaatttaggtgatttttttaaagaaatacgccataaagggtgttgggggactagaaaatgttctagaaagaaccccaagtgcagagagatcttcagtcaggaagcttccagccccgagagagtaagaaatatggctgcagcagcgaattgcagcgctttaagaactgaagggggggctgagggcggagagagcataagaggcgtggcctagaagattgaaagccggacatctttgtgatttggttggttcaaaatttacccagtaaggacaaaaaagggaaatttcaagaaagcaaagacataccagaaagaacattaactggaagtagacttcatttctagaccaggagtcacaacttcaatgggttttccagttctcatctataacatggggacattgagtaaatcaagcaataattaatgctaaaatcctccataaactgcataataaatgtaaagatgttaattcagcttggttttgagaatgggggaagggataggtagagctttgatgtgttgataaagtatccaaatatatcattcaa

SEQ ID NO: 1396 - DNA, 4075 bp, Homo sapiens
attactactttgttctttaattgtccaagaacagcaggattctccagaagcacagcaaaaagcgcagtagggtgcctttgtttaataggcaaagctatgacaattgggactgagcattttaactgtccaacaaaagacgggttgtctgcgaccccctgctgaatgcaaatggggttcagagtgctgtctaatccaatgggtaggattattggcaattagaattttactcaatgcaaagagttttaggtggccaacacagtacacaagaaaagatcactactcaaaattgggactgtgactacagaagcaatgacagagaaatggtttctcctttaagggcaggggatcgagaaaatgataagtaactcaaattgtgggcaataatgctctgatagaaagctctcaattgacattccctaacttcaacgtaccgagtaaggaaattctttgtcctgagatcacagacaaatgggattgtatgcattaactgaaaatggtcaaggagtcagtactgaagatcagcaatgccaagggtaaacggaatatcccagtataataggataagcaatggacaacttattttgagcactgaatcaatgaaaattagagtgactttcgagagaagctgggcgggactgaggaactaggactgggactggggctagggctggggggttaggggactggggctggggcagggctggggcggggtgggagtagggctggggctagactaggggtttgctgggagcagggctggggaggaactggatgctaggcaggcaggatacaacgaaaaattgaaatactccaatataataagtctgaatagaggacaccagaccacagcaattcaagtttcctgtctgataagtaggtgattagtcaattagtgcagcatcaaggatgggaacaaagcaaggcctggacctgtgtaaaccttcaaacactcttttttacattaggtcatgaagttaaattttttactgtttctgtgctacagactcttcaaaggaaaatagttaagtcaatttcaaagaaaatgaccagcacatttttaaaacattagaaatgatttgactttgactatctactgccaaaaaaaggttaaggaatttgtaatgagaagctaaaaactttaaggaattttaaggaactcaaaacaaaaactcattaaatgtaattaaagtgaattctacaaataaagcctcttaatacatttctataatagtcacttaagacttaaattcaaacactagcaaaccacaaaatcagactgtatgactgacatccaaaagataaatataaatcaaaatccgaccccagcattagccaaggggtaggtgttcctcttgaggaaggcaggaattcctcttctgccacctgttggccaacgatcatctgtgatccattctggtccttgccacggctcaccaccatgtccacaccaagcaggcctggagcactgcccatggcaacagtgcagtgcagggcagaccagaggggggtaggggggtaggggggtaggggggtggggaggtggggggtggggggtgggggtggggagttgggggggttggggggtggggggggaggtatacttagccttaggtgaggcaccaatacagaggaatggagggaggttcagaccacacagccagatatccagcactgcaagaggcagcactggacaggaggggacaaataagaggggacagaggtggaaaggctaaatgtccttgaaaagaccttgaaaacacctggtgtaccgcccactgggagacatacacgtggcccctccacttctttctcctgactggctaaagacagctgcgaagtgccatgctaattcacccaggtcttcgctgagtagctggacagtgtgtcatcagtctaattccatcttctgctctaattggctgtgatcaattccacccccatttctaattggttgggttatgcagcaatccagcactgtccatcccaccttttctcccgctctgcgtggcactaggcggcaaaacccgccatctttaacaatgcggcaagcccgccatgatgtccacgtgacaaaagccatgatatacatatgacaacgcctgccatattgtccctgcggcaaaacccaacacgaaaagcacacagcaaagacaaagaggcccgccatgttttacactgcggcaagaccttcagccgccatcttttcctgtgtgaccgcacatgtccaccaccatgctaaccacttaacaaagcctcgcccatcatgatgtggccttcccgccacttgaacactgcgacagaactggatccgccattttggacaacctaacaaagcacagcccgccatgctgagcaatgccgcaatgtcaaaatcgccattttaagccctgcaccttagtctttcctaaccttccatttttaactagtcccttgtactgataaaagatgattcttactgcctcccgatacaacaatcacgcaaagctcctaacaagccccaaatcaattcattcagataggtttagctcatgcaatgcacatgacttcctctgcctgacctgctatcatccatcttgcctccctagtttaacttagcacaaacgactagccctaagccgagttatgcggcaagtctaaaatggcggccacttttcctccacaatctgaacacgcccttagcttaactgcagagtcattctctgccaaagcggtaggtacactcacacaccaccaaatgatcagcagcaaaaaaaagtgtagatattccagagagtgcaacaacccacaaaaccaacattttttcatccataaaaagcaccgatgggcgatgaaaaaaaaaaatcaaagcaggtatccgcggccccgatgggccagaaaaacaaaaattaaagcaggtatccgaggccccgatgggcaaggaaaaataaaaaaaaaaaaagcaggtatccgaagccccgatgggccaaaaaaagaaaatttttaaaaagcagatatccgtcaccccgatgggccagagtgttgggggttcagaggggaagggaatcagcaggtatccgataccccgatgggctaaggaaaaaaaaataaaaagcaggtatccgcggccccgatgggcgaataaaaaagaattaaaaggcaggtatccacggccccgttgggcaaagaaaaaataataaaaccaggtatccgcagccccgatgggcaaaatatagaaaagagagtggaagagtaaaaaactgatccacaaaaaacagagatgtcaaccaaaaatgattccaaagaaaaattccttaaatattaaaaattgcctcaaaatattccaaatactttctttaaaaaaatatggaggacgtgtcaagaagacactaggagaaagtatagaatttaaaaaaatattttatggaatttaggtgatttttttaaagaaatacgccataaagggtgttgggggactagaaaatgttctagaaagaaccccaagtgcagagagatcttcagtcaggaagcttccagccccgagagagtaagaaatatggctgcagcagcgaattgcagcgctttaagaactgaagggggggctgagggcggagagagcataagaggcgtggcctagaagattgaaagccggacatctttgtgatttggttggttcaaaatttacccagtaaggacaaaaaagggaaatttcaagaaagcaaagacataccagaaagaacattaactggaagtagacttcatttctagaccaggagtcacaacttcaatgggttttccagttctcatctataacatggggacattgagtaaatcaagcaataattaatgctaaaatcctccataaactgcataataaatgtaaagatgttaattcagcttggttttgagaatgggggaagggataggtagagctttgatgtgttgataaagtatccaaatatatcattcaaaccagaatttgtaactcctccaccaaacttttgaaccaaagaagctagaaaggagtaatacattgaggttagtaccatcttcaagggacttcccattccattatcccatgtaatagataatggaatat

SEQ ID NO: 1397 - DNA, 4079 bp, Homo sapiens
agacgggttgtctgcgaccccctgctgaatgcaaatggggttcagagtgctgtctaatccaatgggtaggattattggcaattagaattttactcaatgcaaagagttttaggtggccaacacagtacacaagaaaagatcactactcaaaattgggactgtgactacagaagcaatgacagagaaatggtttctcctttaagggcaggggatcgagaaaatgataagtaactcaaattgtgggcaataatgctctgatagaaagctctcaattgacattccctaacttcaacgtaccgagtaaggaaattctttgtcctgagatcacagacaaatgggattgtatgcattaactgaaaatggtcaaggagtcagtactgaagatcagcaatgccaagggtaaacggaatatcccagtataataggataagcaatggacaacttattttgagcactgaatcaatgaaaattagagtgactttcgagagaagctgggcgggactgaggaactaggactgggactggggctagggctggggggttaggggactggggctggggcagggctggggcggggtgggagtagggctggggctagactaggggtttgctgggagcagggctggggaggaactggatgctaggcaggcaggatacaacgaaaaattgaaatactccaatataataagtctgaatagaggacaccagaccacagcaattcaagtttcctgtctgataagtaggtgattagtcaattagtgcagcatcaaggatgggaacaaagcaaggcctggacctgtgtaaaccttcaaacactcttttttacattaggtcatgaagttaaattttttactgtttctgtgctacagactcttcaaaggaaaatagttaagtcaatttcaaagaaaatgaccagcacatttttaaaacattagaaatgatttgactttgactatctactgccaaaaaaaggttaaggaatttgtaatgagaagctaaaaactttaaggaattttaaggaactcaaaacaaaaactcattaaatgtaattaaagtgaattctacaaataaagcctcttaatacatttctataatagtcacttaagacttaaattcaaacactagcaaaccacaaaatcagactgtatgactgacatccaaaagataaatataaatcaaaatccgaccccagcattagccaaggggtaggtgttcctcttgaggaaggcaggaattcctcttctgccacctgttggccaacgatcatctgtgatccattctggtccttgccacggctcaccaccatgtccacaccaagcaggcctggagcactgcccatggcaacagtgcagtgcagggcagaccagaggggggtaggggggtaggggggtaggggggtggggaggtggggggtggggggtgggggtggggagttgggggggttggggggtggggggggaggtatacttagccttaggtgaggcaccaatacagaggaatggagggaggttcagaccacacagccagatatccagcactgcaagaggcagcactggacaggaggggacaaataagaggggacagaggtggaaaggctaaatgtccttgaaaagaccttgaaaacacctggtgtaccgcccactgggagacatacacgtggcccctccacttctttctcctgactggctaaagacagctgcgaagtgccatgctaattcacccaggtcttcgctgagtagctggacagtgtgtcatcagtctaattccatcttctgctctaattggctgtgatcaattccacccccatttctaattggttgggttatgcagcaatccagcactgtccatcccaccttttctcccgctctgcgtggcactaggcggcaaaacccgccatctttaacaatgcggcaagcccgccatgatgtccacgtgacaaaagccatgatatacatatgacaacgcctgccatattgtccctgcggcaaaacccaacacgaaaagcacacagcaaagacaaagaggcccgccatgttttacactgcggcaagaccttcagccgccatcttttcctgtgtgaccgcacatgtccaccaccatgctaaccacttaacaaagcctcgcccatcatgatgtggccttcccgccacttgaacactgcgacagaactggatccgccattttggacaacctaacaaagcacagcccgccatgctgagcaatgccgcaatgtcaaaatcgccattttaagccctgcaccttagtctttcctaaccttccatttttaactagtcccttgtactgataaaagatgattcttactgcctcccgatacaacaatcacgcaaagctcctaacaagccccaaatcaattcattcagataggtttagctcatgcaatgcacatgacttcctctgcctgacctgctatcatccatcttgcctccctagtttaacttagcacaaacgactagccctaagccgagttatgcggcaagtctaaaatggcggccacttttcctccacaatctgaacacgcccttagcttaactgcagagtcattctctgccaaagcggtaggtacactcacacaccaccaaatgatcagcagcaaaaaaaagtgtagatattccagagagtgcaacaacccacaaaaccaacattttttcatccataaaaagcaccgatgggcgatgaaaaaaaaaaatcaaagcaggtatccgcggccccgatgggccagaaaaacaaaaattaaagcaggtatccgaggccccgatgggcaaggaaaaataaaaaaaaaaaaagcaggtatccgaagccccgatgggccaaaaaaagaaaatttttaaaaagcagatatccgtcaccccgatgggccagagtgttgggggttcagaggggaagggaatcagcaggtatccgataccccgatgggctaaggaaaaaaaaataaaaagcaggtatccgcggccccgatgggcgaataaaaaagaattaaaaggcaggtatccacggccccgttgggcaaagaaaaaataataaaaccaggtatccgcagccccgatgggcaaaatatagaaaagagagtggaagagtaaaaaactgatccacaaaaaacagagatgtcaaccaaaaatgattccaaagaaaaattccttaaatattaaaaattgcctcaaaatattccaaatactttctttaaaaaaatatggaggacgtgtcaagaagacactaggagaaagtatagaatttaaaaaaatattttatggaatttaggtgatttttttaaagaaatacgccataaagggtgttgggggactagaaaatgttctagaaagaaccccaagtgcagagagatcttcagtcaggaagcttccagccccgagagagtaagaaatatggctgcagcagcgaattgcagcgctttaagaactgaagggggggctgagggcggagagagcataagaggcgtggcctagaagattgaaagccggacatctttgtgatttggttggttcaaaatttacccagtaaggacaaaaaagggaaatttcaagaaagcaaagacataccagaaagaacattaactggaagtagacttcatttctagaccaggagtcacaacttcaatgggttttccagttctcatctataacatggggacattgagtaaatcaagcaataattaatgctaaaatcctccataaactgcataataaatgtaaagatgttaattcagcttggttttgagaatgggggaagggataggtagagctttgatgtgttgataaagtatccaaatatatcattcaaaccagaatttgtaactcctccaccaaacttttgaaccaaagaagctagaaaggagtaatacattgaggttagtaccatcttcaagggacttcccattccattatcccatgtaatagataatggaatatgtattgcatagataataataaaggattattcctgttttatacattaaaatagagtcctatagaggttacatcatgtgcccgaggtcacacaccatgattcagagtcaatgtagtttttactccaacactctaccttgt

SEQ ID NO: 1398 - DNA, 4103 bp, Homo sapiens
aattagaattttactcaatgcaaagagttttaggtggccaacacagtacacaagaaaagatcactactcaaaattgggactgtgactacagaagcaatgacagagaaatggtttctcctttaagggcaggggatcgagaaaatgataagtaactcaaattgtgggcaataatgctctgatagaaagctctcaattgacattccctaacttcaacgtaccgagtaaggaaattctttgtcctgagatcacagacaaatgggattgtatgcattaactgaaaatggtcaaggagtcagtactgaagatcagcaatgccaagggtaaacggaatatcccagtataataggataagcaatggacaacttattttgagcactgaatcaatgaaaattagagtgactttcgagagaagctgggcgggactgaggaactaggactgggactggggctagggctggggggttaggggactggggctggggcagggctggggcggggtgggagtagggctggggctagactaggggtttgctgggagcagggctggggaggaactggatgctaggcaggcaggatacaacgaaaaattgaaatactccaatataataagtctgaatagaggacaccagaccacagcaattcaagtttcctgtctgataagtaggtgattagtcaattagtgcagcatcaaggatgggaacaaagcaaggcctggacctgtgtaaaccttcaaacactcttttttacattaggtcatgaagttaaattttttactgtttctgtgctacagactcttcaaaggaaaatagttaagtcaatttcaaagaaaatgaccagcacatttttaaaacattagaaatgatttgactttgactatctactgccaaaaaaaggttaaggaatttgtaatgagaagctaaaaactttaaggaattttaaggaactcaaaacaaaaactcattaaatgtaattaaagtgaattctacaaataaagcctcttaatacatttctataatagtcacttaagacttaaattcaaacactagcaaaccacaaaatcagactgtatgactgacatccaaaagataaatataaatcaaaatccgaccccagcattagccaaggggtaggtgttcctcttgaggaaggcaggaattcctcttctgccacctgttggccaacgatcatctgtgatccattctggtccttgccacggctcaccaccatgtccacaccaagcaggcctggagcactgcccatggcaacagtgcagtgcagggcagaccagaggggggtaggggggtaggggggtaggggggtggggaggtggggggtggggggtgggggtggggagttgggggggttggggggtggggggggaggtatacttagccttaggtgaggcaccaatacagaggaatggagggaggttcagaccacacagccagatatccagcactgcaagaggcagcactggacaggaggggacaaataagaggggacagaggtggaaaggctaaatgtccttgaaaagaccttgaaaacacctggtgtaccgcccactgggagacatacacgtggcccctccacttctttctcctgactggctaaagacagctgcgaagtgccatgctaattcacccaggtcttcgctgagtagctggacagtgtgtcatcagtctaattccatcttctgctctaattggctgtgatcaattccacccccatttctaattggttgggttatgcagcaatccagcactgtccatcccaccttttctcccgctctgcgtggcactaggcggcaaaacccgccatctttaacaatgcggcaagcccgccatgatgtccacgtgacaaaagccatgatatacatatgacaacgcctgccatattgtccctgcggcaaaacccaacacgaaaagcacacagcaaagacaaagaggcccgccatgttttacactgcggcaagaccttcagccgccatcttttcctgtgtgaccgcacatgtccaccaccatgctaaccacttaacaaagcctcgcccatcatgatgtggccttcccgccacttgaacactgcgacagaactggatccgccattttggacaacctaacaaagcacagcccgccatgctgagcaatgccgcaatgtcaaaatcgccattttaagccctgcaccttagtctttcctaaccttccatttttaactagtcccttgtactgataaaagatgattcttactgcctcccgatacaacaatcacgcaaagctcctaacaagccccaaatcaattcattcagataggtttagctcatgcaatgcacatgacttcctctgcctgacctgctatcatccatcttgcctccctagtttaacttagcacaaacgactagccctaagccgagttatgcggcaagtctaaaatggcggccacttttcctccacaatctgaacacgcccttagcttaactgcagagtcattctctgccaaagcggtaggtacactcacacaccaccaaatgatcagcagcaaaaaaaagtgtagatattccagagagtgcaacaacccacaaaaccaacattttttcatccataaaaagcaccgatgggcgatgaaaaaaaaaaatcaaagcaggtatccgcggccccgatgggccagaaaaacaaaaattaaagcaggtatccgaggccccgatgggcaaggaaaaataaaaaaaaaaaaagcaggtatccgaagccccgatgggccaaaaaaagaaaatttttaaaaagcagatatccgtcaccccgatgggccagagtgttgggggttcagaggggaagggaatcagcaggtatccgataccccgatgggctaaggaaaaaaaaataaaaagcaggtatccgcggccccgatgggcgaataaaaaagaattaaaaggcaggtatccacggccccgttgggcaaagaaaaaataataaaaccaggtatccgcagccccgatgggcaaaatatagaaaagagagtggaagagtaaaaaactgatccacaaaaaacagagatgtcaaccaaaaatgattccaaagaaaaattccttaaatattaaaaattgcctcaaaatattccaaatactttctttaaaaaaatatggaggacgtgtcaagaagacactaggagaaagtatagaatttaaaaaaatattttatggaatttaggtgatttttttaaagaaatacgccataaagggtgttgggggactagaaaatgttctagaaagaaccccaagtgcagagagatcttcagtcaggaagcttccagccccgagagagtaagaaatatggctgcagcagcgaattgcagcgctttaagaactgaagggggggctgagggcggagagagcataagaggcgtggcctagaagattgaaagccggacatctttgtgatttggttggttcaaaatttacccagtaaggacaaaaaagggaaatttcaagaaagcaaagacataccagaaagaacattaactggaagtagacttcatttctagaccaggagtcacaacttcaatgggttttccagttctcatctataacatggggacattgagtaaatcaagcaataattaatgctaaaatcctccataaactgcataataaatgtaaagatgttaattcagcttggttttgagaatgggggaagggataggtagagctttgatgtgttgataaagtatccaaatatatcattcaaaccagaatttgtaactcctccaccaaacttttgaaccaaagaagctagaaaggagtaatacattgaggttagtaccatcttcaagggacttcccattccattatcccatgtaatagataatggaatatgtattgcatagataataataaaggattattcctgttttatacattaaaatagagtcctatagaggttacatcatgtgcccgaggtcacacaccatgattcagagtcaatgtagtttttactccaacactctaccttgtatggctcccaaccataagagaacggaagtgcttacgagtcaattggtgagcaagagagaaaaaggaaagaaagacatttcatagaatggctatttggttccta

SEQ ID NO: 1399 - DNA, 4038 bp, Homo sapiens
aatgataagtaactcaaattgtgggcaataatgctctgatagaaagctctcaattgacattccctaacttcaacgtaccgagtaaggaaattctttgtcctgagatcacagacaaatgggattgtatgcattaactgaaaatggtcaaggagtcagtactgaagatcagcaatgccaagggtaaacggaatatcccagtataataggataagcaatggacaacttattttgagcactgaatcaatgaaaattagagtgactttcgagagaagctgggcgggactgaggaactaggactgggactggggctagggctggggggttaggggactggggctggggcagggctggggcggggtgggagtagggctggggctagactaggggtttgctgggagcagggctggggaggaactggatgctaggcaggcaggatacaacgaaaaattgaaatactccaatataataagtctgaatagaggacaccagaccacagcaattcaagtttcctgtctgataagtaggtgattagtcaattagtgcagcatcaaggatgggaacaaagcaaggcctggacctgtgtaaaccttcaaacactcttttttacattaggtcatgaagttaaattttttactgtttctgtgctacagactcttcaaaggaaaatagttaagtcaatttcaaagaaaatgaccagcacatttttaaaacattagaaatgatttgactttgactatctactgccaaaaaaaggttaaggaatttgtaatgagaagctaaaaactttaaggaattttaaggaactcaaaacaaaaactcattaaatgtaattaaagtgaattctacaaataaagcctcttaatacatttctataatagtcacttaagacttaaattcaaacactagcaaaccacaaaatcagactgtatgactgacatccaaaagataaatataaatcaaaatccgaccccagcattagccaaggggtaggtgttcctcttgaggaaggcaggaattcctcttctgccacctgttggccaacgatcatctgtgatccattctggtccttgccacggctcaccaccatgtccacaccaagcaggcctggagcactgcccatggcaacagtgcagtgcagggcagaccagaggggggtaggggggtaggggggtaggggggtggggaggtggggggtggggggtgggggtggggagttgggggggttggggggtggggggggaggtatacttagccttaggtgaggcaccaatacagaggaatggagggaggttcagaccacacagccagatatccagcactgcaagaggcagcactggacaggaggggacaaataagaggggacagaggtggaaaggctaaatgtccttgaaaagaccttgaaaacacctggtgtaccgcccactgggagacatacacgtggcccctccacttctttctcctgactggctaaagacagctgcgaagtgccatgctaattcacccaggtcttcgctgagtagctggacagtgtgtcatcagtctaattccatcttctgctctaattggctgtgatcaattccacccccatttctaattggttgggttatgcagcaatccagcactgtccatcccaccttttctcccgctctgcgtggcactaggcggcaaaacccgccatctttaacaatgcggcaagcccgccatgatgtccacgtgacaaaagccatgatatacatatgacaacgcctgccatattgtccctgcggcaaaacccaacacgaaaagcacacagcaaagacaaagaggcccgccatgttttacactgcggcaagaccttcagccgccatcttttcctgtgtgaccgcacatgtccaccaccatgctaaccacttaacaaagcctcgcccatcatgatgtggccttcccgccacttgaacactgcgacagaactggatccgccattttggacaacctaacaaagcacagcccgccatgctgagcaatgccgcaatgtcaaaatcgccattttaagccctgcaccttagtctttcctaaccttccatttttaactagtcccttgtactgataaaagatgattcttactgcctcccgatacaacaatcacgcaaagctcctaacaagccccaaatcaattcattcagataggtttagctcatgcaatgcacatgacttcctctgcctgacctgctatcatccatcttgcctccctagtttaacttagcacaaacgactagccctaagccgagttatgcggcaagtctaaaatggcggccacttttcctccacaatctgaacacgcccttagcttaactgcagagtcattctctgccaaagcggtaggtacactcacacaccaccaaatgatcagcagcaaaaaaaagtgtagatattccagagagtgcaacaacccacaaaaccaacattttttcatccataaaaagcaccgatgggcgatgaaaaaaaaaaatcaaagcaggtatccgcggccccgatgggccagaaaaacaaaaattaaagcaggtatccgaggccccgatgggcaaggaaaaataaaaaaaaaaaaagcaggtatccgaagccccgatgggccaaaaaaagaaaatttttaaaaagcagatatccgtcaccccgatgggccagagtgttgggggttcagaggggaagggaatcagcaggtatccgataccccgatgggctaaggaaaaaaaaataaaaagcaggtatccgcggccccgatgggcgaataaaaaagaattaaaaggcaggtatccacggccccgttgggcaaagaaaaaataataaaaccaggtatccgcagccccgatgggcaaaatatagaaaagagagtggaagagtaaaaaactgatccacaaaaaacagagatgtcaaccaaaaatgattccaaagaaaaattccttaaatattaaaaattgcctcaaaatattccaaatactttctttaaaaaaatatggaggacgtgtcaagaagacactaggagaaagtatagaatttaaaaaaatattttatggaatttaggtgatttttttaaagaaatacgccataaagggtgttgggggactagaaaatgttctagaaagaaccccaagtgcagagagatcttcagtcaggaagcttccagccccgagagagtaagaaatatggctgcagcagcgaattgcagcgctttaagaactgaagggggggctgagggcggagagagcataagaggcgtggcctagaagattgaaagccggacatctttgtgatttggttggttcaaaatttacccagtaaggacaaaaaagggaaatttcaagaaagcaaagacataccagaaagaacattaactggaagtagacttcatttctagaccaggagtcacaacttcaatgggttttccagttctcatctataacatggggacattgagtaaatcaagcaataattaatgctaaaatcctccataaactgcataataaatgtaaagatgttaattcagcttggttttgagaatgggggaagggataggtagagctttgatgtgttgataaagtatccaaatatatcattcaaaccagaatttgtaactcctccaccaaacttttgaaccaaagaagctagaaaggagtaatacattgaggttagtaccatcttcaagggacttcccattccattatcccatgtaatagataatggaatatgtattgcatagataataataaaggattattcctgttttatacattaaaatagagtcctatagaggttacatcatgtgcccgaggtcacacaccatgattcagagtcaatgtagtttttactccaacactctaccttgtatggctcccaaccataagagaacggaagtgcttacgagtcaattggtgagcaagagagaaaaaggaaagaaagacatttcatagaatggctatttggttcctaaataatcaagaaagagtactgtttgtgacctgtttgtaattttttaactatgactccttaatctttactattttc

SEQ ID NO: 1400 - DNA, 4055 bp, Homo sapiens
ctttgtcctgagatcacagacaaatgggattgtatgcattaactgaaaatggtcaaggagtcagtactgaagatcagcaatgccaagggtaaacggaatatcccagtataataggataagcaatggacaacttattttgagcactgaatcaatgaaaattagagtgactttcgagagaagctgggcgggactgaggaactaggactgggactggggctagggctggggggttaggggactggggctggggcagggctggggcggggtgggagtagggctggggctagactaggggtttgctgggagcagggctggggaggaactggatgctaggcaggcaggatacaacgaaaaattgaaatactccaatataataagtctgaatagaggacaccagaccacagcaattcaagtttcctgtctgataagtaggtgattagtcaattagtgcagcatcaaggatgggaacaaagcaaggcctggacctgtgtaaaccttcaaacactcttttttacattaggtcatgaagttaaattttttactgtttctgtgctacagactcttcaaaggaaaatagttaagtcaatttcaaagaaaatgaccagcacatttttaaaacattagaaatgatttgactttgactatctactgccaaaaaaaggttaaggaatttgtaatgagaagctaaaaactttaaggaattttaaggaactcaaaacaaaaactcattaaatgtaattaaagtgaattctacaaataaagcctcttaatacatttctataatagtcacttaagacttaaattcaaacactagcaaaccacaaaatcagactgtatgactgacatccaaaagataaatataaatcaaaatccgaccccagcattagccaaggggtaggtgttcctcttgaggaaggcaggaattcctcttctgccacctgttggccaacgatcatctgtgatccattctggtccttgccacggctcaccaccatgtccacaccaagcaggcctggagcactgcccatggcaacagtgcagtgcagggcagaccagaggggggtaggggggtaggggggtaggggggtggggaggtggggggtggggggtgggggtggggagttgggggggttggggggtggggggggaggtatacttagccttaggtgaggcaccaatacagaggaatggagggaggttcagaccacacagccagatatccagcactgcaagaggcagcactggacaggaggggacaaataagaggggacagaggtggaaaggctaaatgtccttgaaaagaccttgaaaacacctggtgtaccgcccactgggagacatacacgtggcccctccacttctttctcctgactggctaaagacagctgcgaagtgccatgctaattcacccaggtcttcgctgagtagctggacagtgtgtcatcagtctaattccatcttctgctctaattggctgtgatcaattccacccccatttctaattggttgggttatgcagcaatccagcactgtccatcccaccttttctcccgctctgcgtggcactaggcggcaaaacccgccatctttaacaatgcggcaagcccgccatgatgtccacgtgacaaaagccatgatatacatatgacaacgcctgccatattgtccctgcggcaaaacccaacacgaaaagcacacagcaaagacaaagaggcccgccatgttttacactgcggcaagaccttcagccgccatcttttcctgtgtgaccgcacatgtccaccaccatgctaaccacttaacaaagcctcgcccatcatgatgtggccttcccgccacttgaacactgcgacagaactggatccgccattttggacaacctaacaaagcacagcccgccatgctgagcaatgccgcaatgtcaaaatcgccattttaagccctgcaccttagtctttcctaaccttccatttttaactagtcccttgtactgataaaagatgattcttactgcctcccgatacaacaatcacgcaaagctcctaacaagccccaaatcaattcattcagataggtttagctcatgcaatgcacatgacttcctctgcctgacctgctatcatccatcttgcctccctagtttaacttagcacaaacgactagccctaagccgagttatgcggcaagtctaaaatggcggccacttttcctccacaatctgaacacgcccttagcttaactgcagagtcattctctgccaaagcggtaggtacactcacacaccaccaaatgatcagcagcaaaaaaaagtgtagatattccagagagtgcaacaacccacaaaaccaacattttttcatccataaaaagcaccgatgggcgatgaaaaaaaaaaatcaaagcaggtatccgcggccccgatgggccagaaaaacaaaaattaaagcaggtatccgaggccccgatgggcaaggaaaaataaaaaaaaaaaaagcaggtatccgaagccccgatgggccaaaaaaagaaaatttttaaaaagcagatatccgtcaccccgatgggccagagtgttgggggttcagaggggaagggaatcagcaggtatccgataccccgatgggctaaggaaaaaaaaataaaaagcaggtatccgcggccccgatgggcgaataaaaaagaattaaaaggcaggtatccacggccccgttgggcaaagaaaaaataataaaaccaggtatccgcagccccgatgggcaaaatatagaaaagagagtggaagagtaaaaaactgatccacaaaaaacagagatgtcaaccaaaaatgattccaaagaaaaattccttaaatattaaaaattgcctcaaaatattccaaatactttctttaaaaaaatatggaggacgtgtcaagaagacactaggagaaagtatagaatttaaaaaaatattttatggaatttaggtgatttttttaaagaaatacgccataaagggtgttgggggactagaaaatgttctagaaagaaccccaagtgcagagagatcttcagtcaggaagcttccagccccgagagagtaagaaatatggctgcagcagcgaattgcagcgctttaagaactgaagggggggctgagggcggagagagcataagaggcgtggcctagaagattgaaagccggacatctttgtgatttggttggttcaaaatttacccagtaaggacaaaaaagggaaatttcaagaaagcaaagacataccagaaagaacattaactggaagtagacttcatttctagaccaggagtcacaacttcaatgggttttccagttctcatctataacatggggacattgagtaaatcaagcaataattaatgctaaaatcctccataaactgcataataaatgtaaagatgttaattcagcttggttttgagaatgggggaagggataggtagagctttgatgtgttgataaagtatccaaatatatcattcaaaccagaatttgtaactcctccaccaaacttttgaaccaaagaagctagaaaggagtaatacattgaggttagtaccatcttcaagggacttcccattccattatcccatgtaatagataatggaatatgtattgcatagataataataaaggattattcctgttttatacattaaaatagagtcctatagaggttacatcatgtgcccgaggtcacacaccatgattcagagtcaatgtagtttttactccaacactctaccttgtatggctcccaaccataagagaacggaagtgcttacgagtcaattggtgagcaagagagaaaaaggaaagaaagacatttcatagaatggctatttggttcctaaataatcaagaaagagtactgtttgtgacctgtttgtaattttttaactatgactccttaatctttactattttcctatttcctccatgaatctgaggaacccaacattggaccaaccatatgacacagtagtgaagttgaccctctgtcagtaactgataagtggtaggaagaaaaagctcat

SEQ ID NO: 1401 - DNA, 4043 bp, Homo sapiens
gaggaactaggactgggactggggctagggctggggggttaggggactggggctggggcagggctggggcggggtgggagtagggctggggctagactaggggtttgctgggagcagggctggggaggaactggatgctaggcaggcaggatacaacgaaaaattgaaatactccaatataataagtctgaatagaggacaccagaccacagcaattcaagtttcctgtctgataagtaggtgattagtcaattagtgcagcatcaaggatgggaacaaagcaaggcctggacctgtgtaaaccttcaaacactcttttttacattaggtcatgaagttaaattttttactgtttctgtgctacagactcttcaaaggaaaatagttaagtcaatttcaaagaaaatgaccagcacatttttaaaacattagaaatgatttgactttgactatctactgccaaaaaaaggttaaggaatttgtaatgagaagctaaaaactttaaggaattttaaggaactcaaaacaaaaactcattaaatgtaattaaagtgaattctacaaataaagcctcttaatacatttctataatagtcacttaagacttaaattcaaacactagcaaaccacaaaatcagactgtatgactgacatccaaaagataaatataaatcaaaatccgaccccagcattagccaaggggtaggtgttcctcttgaggaaggcaggaattcctcttctgccacctgttggccaacgatcatctgtgatccattctggtccttgccacggctcaccaccatgtccacaccaagcaggcctggagcactgcccatggcaacagtgcagtgcagggcagaccagaggggggtaggggggtaggggggtaggggggtggggaggtggggggtggggggtgggggtggggagttgggggggttggggggtggggggggaggtatacttagccttaggtgaggcaccaatacagaggaatggagggaggttcagaccacacagccagatatccagcactgcaagaggcagcactggacaggaggggacaaataagaggggacagaggtggaaaggctaaatgtccttgaaaagaccttgaaaacacctggtgtaccgcccactgggagacatacacgtggcccctccacttctttctcctgactggctaaagacagctgcgaagtgccatgctaattcacccaggtcttcgctgagtagctggacagtgtgtcatcagtctaattccatcttctgctctaattggctgtgatcaattccacccccatttctaattggttgggttatgcagcaatccagcactgtccatcccaccttttctcccgctctgcgtggcactaggcggcaaaacccgccatctttaacaatgcggcaagcccgccatgatgtccacgtgacaaaagccatgatatacatatgacaacgcctgccatattgtccctgcggcaaaacccaacacgaaaagcacacagcaaagacaaagaggcccgccatgttttacactgcggcaagaccttcagccgccatcttttcctgtgtgaccgcacatgtccaccaccatgctaaccacttaacaaagcctcgcccatcatgatgtggccttcccgccacttgaacactgcgacagaactggatccgccattttggacaacctaacaaagcacagcccgccatgctgagcaatgccgcaatgtcaaaatcgccattttaagccctgcaccttagtctttcctaaccttccatttttaactagtcccttgtactgataaaagatgattcttactgcctcccgatacaacaatcacgcaaagctcctaacaagccccaaatcaattcattcagataggtttagctcatgcaatgcacatgacttcctctgcctgacctgctatcatccatcttgcctccctagtttaacttagcacaaacgactagccctaagccgagttatgcggcaagtctaaaatggcggccacttttcctccacaatctgaacacgcccttagcttaactgcagagtcattctctgccaaagcggtaggtacactcacacaccaccaaatgatcagcagcaaaaaaaagtgtagatattccagagagtgcaacaacccacaaaaccaacattttttcatccataaaaagcaccgatgggcgatgaaaaaaaaaaatcaaagcaggtatccgcggccccgatgggccagaaaaacaaaaattaaagcaggtatccgaggccccgatgggcaaggaaaaataaaaaaaaaaaaagcaggtatccgaagccccgatgggccaaaaaaagaaaatttttaaaaagcagatatccgtcaccccgatgggccagagtgttgggggttcagaggggaagggaatcagcaggtatccgataccccgatgggctaaggaaaaaaaaataaaaagcaggtatccgcggccccgatgggcgaataaaaaagaattaaaaggcaggtatccacggccccgttgggcaaagaaaaaataataaaaccaggtatccgcagccccgatgggcaaaatatagaaaagagagtggaagagtaaaaaactgatccacaaaaaacagagatgtcaaccaaaaatgattccaaagaaaaattccttaaatattaaaaattgcctcaaaatattccaaatactttctttaaaaaaatatggaggacgtgtcaagaagacactaggagaaagtatagaatttaaaaaaatattttatggaatttaggtgatttttttaaagaaatacgccataaagggtgttgggggactagaaaatgttctagaaagaaccccaagtgcagagagatcttcagtcaggaagcttccagccccgagagagtaagaaatatggctgcagcagcgaattgcagcgctttaagaactgaagggggggctgagggcggagagagcataagaggcgtggcctagaagattgaaagccggacatctttgtgatttggttggttcaaaatttacccagtaaggacaaaaaagggaaatttcaagaaagcaaagacataccagaaagaacattaactggaagtagacttcatttctagaccaggagtcacaacttcaatgggttttccagttctcatctataacatggggacattgagtaaatcaagcaataattaatgctaaaatcctccataaactgcataataaatgtaaagatgttaattcagcttggttttgagaatgggggaagggataggtagagctttgatgtgttgataaagtatccaaatatatcattcaaaccagaatttgtaactcctccaccaaacttttgaaccaaagaagctagaaaggagtaatacattgaggttagtaccatcttcaagggacttcccattccattatcccatgtaatagataatggaatatgtattgcatagataataataaaggattattcctgttttatacattaaaatagagtcctatagaggttacatcatgtgcccgaggtcacacaccatgattcagagtcaatgtagtttttactccaacactctaccttgtatggctcccaaccataagagaacggaagtgcttacgagtcaattggtgagcaagagagaaaaaggaaagaaagacatttcatagaatggctatttggttcctaaataatcaagaaagagtactgtttgtgacctgtttgtaattttttaactatgactccttaatctttactattttcctatttcctccatgaatctgaggaacccaacattggaccaaccatatgacacagtagtgaagttgaccctctgtcagtaactgataagtggtaggaagaaaaagctcatataaaagccaaagctgccctcagaaacctggctatttcagtaggaagcaattaatctcataaactcttctatgtcattcgagaaacaacagagaaccagaagggagacaatggcaacttaagtattatagagcaacttctagaaagtcaaaggatacattaccctcccactggctgaact

SEQ ID NO: 1402 - DNA, 4055 bp, Homo sapiens
ctacagactcttcaaaggaaaatagttaagtcaatttcaaagaaaatgaccagcacatttttaaaacattagaaatgatttgactttgactatctactgccaaaaaaaggttaaggaatttgtaatgagaagctaaaaactttaaggaattttaaggaactcaaaacaaaaactcattaaatgtaattaaagtgaattctacaaataaagcctcttaatacatttctataatagtcacttaagacttaaattcaaacactagcaaaccacaaaatcagactgtatgactgacatccaaaagataaatataaatcaaaatccgaccccagcattagccaaggggtaggtgttcctcttgaggaaggcaggaattcctcttctgccacctgttggccaacgatcatctgtgatccattctggtccttgccacggctcaccaccatgtccacaccaagcaggcctggagcactgcccatggcaacagtgcagtgcagggcagaccagaggggggtaggggggtaggggggtaggggggtggggaggtggggggtggggggtgggggtggggagttgggggggttggggggtggggggggaggtatacttagccttaggtgaggcaccaatacagaggaatggagggaggttcagaccacacagccagatatccagcactgcaagaggcagcactggacaggaggggacaaataagaggggacagaggtggaaaggctaaatgtccttgaaaagaccttgaaaacacctggtgtaccgcccactgggagacatacacgtggcccctccacttctttctcctgactggctaaagacagctgcgaagtgccatgctaattcacccaggtcttcgctgagtagctggacagtgtgtcatcagtctaattccatcttctgctctaattggctgtgatcaattccacccccatttctaattggttgggttatgcagcaatccagcactgtccatcccaccttttctcccgctctgcgtggcactaggcggcaaaacccgccatctttaacaatgcggcaagcccgccatgatgtccacgtgacaaaagccatgatatacatatgacaacgcctgccatattgtccctgcggcaaaacccaacacgaaaagcacacagcaaagacaaagaggcccgccatgttttacactgcggcaagaccttcagccgccatcttttcctgtgtgaccgcacatgtccaccaccatgctaaccacttaacaaagcctcgcccatcatgatgtggccttcccgccacttgaacactgcgacagaactggatccgccattttggacaacctaacaaagcacagcccgccatgctgagcaatgccgcaatgtcaaaatcgccattttaagccctgcaccttagtctttcctaaccttccatttttaactagtcccttgtactgataaaagatgattcttactgcctcccgatacaacaatcacgcaaagctcctaacaagccccaaatcaattcattcagataggtttagctcatgcaatgcacatgacttcctctgcctgacctgctatcatccatcttgcctccctagtttaacttagcacaaacgactagccctaagccgagttatgcggcaagtctaaaatggcggccacttttcctccacaatctgaacacgcccttagcttaactgcagagtcattctctgccaaagcggtaggtacactcacacaccaccaaatgatcagcagcaaaaaaaagtgtagatattccagagagtgcaacaacccacaaaaccaacattttttcatccataaaaagcaccgatgggcgatgaaaaaaaaaaatcaaagcaggtatccgcggccccgatgggccagaaaaacaaaaattaaagcaggtatccgaggccccgatgggcaaggaaaaataaaaaaaaaaaaagcaggtatccgaagccccgatgggccaaaaaaagaaaatttttaaaaagcagatatccgtcaccccgatgggccagagtgttgggggttcagaggggaagggaatcagcaggtatccgataccccgatgggctaaggaaaaaaaaataaaaagcaggtatccgcggccccgatgggcgaataaaaaagaattaaaaggcaggtatccacggccccgttgggcaaagaaaaaataataaaaccaggtatccgcagccccgatgggcaaaatatagaaaagagagtggaagagtaaaaaactgatccacaaaaaacagagatgtcaaccaaaaatgattccaaagaaaaattccttaaatattaaaaattgcctcaaaatattccaaatactttctttaaaaaaatatggaggacgtgtcaagaagacactaggagaaagtatagaatttaaaaaaatattttatggaatttaggtgatttttttaaagaaatacgccataaagggtgttgggggactagaaaatgttctagaaagaaccccaagtgcagagagatcttcagtcaggaagcttccagccccgagagagtaagaaatatggctgcagcagcgaattgcagcgctttaagaactgaagggggggctgagggcggagagagcataagaggcgtggcctagaagattgaaagccggacatctttgtgatttggttggttcaaaatttacccagtaaggacaaaaaagggaaatttcaagaaagcaaagacataccagaaagaacattaactggaagtagacttcatttctagaccaggagtcacaacttcaatgggttttccagttctcatctataacatggggacattgagtaaatcaagcaataattaatgctaaaatcctccataaactgcataataaatgtaaagatgttaattcagcttggttttgagaatgggggaagggataggtagagctttgatgtgttgataaagtatccaaatatatcattcaaaccagaatttgtaactcctccaccaaacttttgaaccaaagaagctagaaaggagtaatacattgaggttagtaccatcttcaagggacttcccattccattatcccatgtaatagataatggaatatgtattgcatagataataataaaggattattcctgttttatacattaaaatagagtcctatagaggttacatcatgtgcccgaggtcacacaccatgattcagagtcaatgtagtttttactccaacactctaccttgtatggctcccaaccataagagaacggaagtgcttacgagtcaattggtgagcaagagagaaaaaggaaagaaagacatttcatagaatggctatttggttcctaaataatcaagaaagagtactgtttgtgacctgtttgtaattttttaactatgactccttaatctttactattttcctatttcctccatgaatctgaggaacccaacattggaccaaccatatgacacagtagtgaagttgaccctctgtcagtaactgataagtggtaggaagaaaaagctcatataaaagccaaagctgccctcagaaacctggctatttcagtaggaagcaattaatctcataaactcttctatgtcattcgagaaacaacagagaaccagaagggagacaatggcaacttaagtattatagagcaacttctagaaagtcaaaggatacattaccctcccactggctgaactggaaagtgtaactatcgacccaaatctatcaggtaagcttgctcttcagtttccagaaaaataataaagtatgcaaattttcttccttaagaaataccttccatcttctaagtgtccttggatcaaacaaaaaaagtaatctgacttgtcattccaaatgagggttattgtattgtaaagtggtgcaatacaatggtacctttgagaaaacaatgcttaacaaagagagaaactacctacagtgacacctatgaagcagctatcagaaagactggattaccaaacctctaatacaactttatctactagaagtttctacaagtgtggaaatgttctatacttttaagaaatttggttggccgggcgcggtgg

SEQ ID NO: 1403 - DNA, 4066 bp, Homo sapiens
gatttgactttgactatctactgccaaaaaaaggttaaggaatttgtaatgagaagctaaaaactttaaggaattttaaggaactcaaaacaaaaactcattaaatgtaattaaagtgaattctacaaataaagcctcttaatacatttctataatagtcacttaagacttaaattcaaacactagcaaaccacaaaatcagactgtatgactgacatccaaaagataaatataaatcaaaatccgaccccagcattagccaaggggtaggtgttcctcttgaggaaggcaggaattcctcttctgccacctgttggccaacgatcatctgtgatccattctggtccttgccacggctcaccaccatgtccacaccaagcaggcctggagcactgcccatggcaacagtgcagtgcagggcagaccagaggggggtaggggggtaggggggtaggggggtggggaggtggggggtggggggtgggggtggggagttgggggggttggggggtggggggggaggtatacttagccttaggtgaggcaccaatacagaggaatggagggaggttcagaccacacagccagatatccagcactgcaagaggcagcactggacaggaggggacaaataagaggggacagaggtggaaaggctaaatgtccttgaaaagaccttgaaaacacctggtgtaccgcccactgggagacatacacgtggcccctccacttctttctcctgactggctaaagacagctgcgaagtgccatgctaattcacccaggtcttcgctgagtagctggacagtgtgtcatcagtctaattccatcttctgctctaattggctgtgatcaattccacccccatttctaattggttgggttatgcagcaatccagcactgtccatcccaccttttctcccgctctgcgtggcactaggcggcaaaacccgccatctttaacaatgcggcaagcccgccatgatgtccacgtgacaaaagccatgatatacatatgacaacgcctgccatattgtccctgcggcaaaacccaacacgaaaagcacacagcaaagacaaagaggcccgccatgttttacactgcggcaagaccttcagccgccatcttttcctgtgtgaccgcacatgtccaccaccatgctaaccacttaacaaagcctcgcccatcatgatgtggccttcccgccacttgaacactgcgacagaactggatccgccattttggacaacctaacaaagcacagcccgccatgctgagcaatgccgcaatgtcaaaatcgccattttaagccctgcaccttagtctttcctaaccttccatttttaactagtcccttgtactgataaaagatgattcttactgcctcccgatacaacaatcacgcaaagctcctaacaagccccaaatcaattcattcagataggtttagctcatgcaatgcacatgacttcctctgcctgacctgctatcatccatcttgcctccctagtttaacttagcacaaacgactagccctaagccgagttatgcggcaagtctaaaatggcggccacttttcctccacaatctgaacacgcccttagcttaactgcagagtcattctctgccaaagcggtaggtacactcacacaccaccaaatgatcagcagcaaaaaaaagtgtagatattccagagagtgcaacaacccacaaaaccaacattttttcatccataaaaagcaccgatgggcgatgaaaaaaaaaaatcaaagcaggtatccgcggccccgatgggccagaaaaacaaaaattaaagcaggtatccgaggccccgatgggcaaggaaaaataaaaaaaaaaaaagcaggtatccgaagccccgatgggccaaaaaaagaaaatttttaaaaagcagatatccgtcaccccgatgggccagagtgttgggggttcagaggggaagggaatcagcaggtatccgataccccgatgggctaaggaaaaaaaaataaaaagcaggtatccgcggccccgatgggcgaataaaaaagaattaaaaggcaggtatccacggccccgttgggcaaagaaaaaataataaaaccaggtatccgcagccccgatgggcaaaatatagaaaagagagtggaagagtaaaaaactgatccacaaaaaacagagatgtcaaccaaaaatgattccaaagaaaaattccttaaatattaaaaattgcctcaaaatattccaaatactttctttaaaaaaatatggaggacgtgtcaagaagacactaggagaaagtatagaatttaaaaaaatattttatggaatttaggtgatttttttaaagaaatacgccataaagggtgttgggggactagaaaatgttctagaaagaaccccaagtgcagagagatcttcagtcaggaagcttccagccccgagagagtaagaaatatggctgcagcagcgaattgcagcgctttaagaactgaagggggggctgagggcggagagagcataagaggcgtggcctagaagattgaaagccggacatctttgtgatttggttggttcaaaatttacccagtaaggacaaaaaagggaaatttcaagaaagcaaagacataccagaaagaacattaactggaagtagacttcatttctagaccaggagtcacaacttcaatgggttttccagttctcatctataacatggggacattgagtaaatcaagcaataattaatgctaaaatcctccataaactgcataataaatgtaaagatgttaattcagcttggttttgagaatgggggaagggataggtagagctttgatgtgttgataaagtatccaaatatatcattcaaaccagaatttgtaactcctccaccaaacttttgaaccaaagaagctagaaaggagtaatacattgaggttagtaccatcttcaagggacttcccattccattatcccatgtaatagataatggaatatgtattgcatagataataataaaggattattcctgttttatacattaaaatagagtcctatagaggttacatcatgtgcccgaggtcacacaccatgattcagagtcaatgtagtttttactccaacactctaccttgtatggctcccaaccataagagaacggaagtgcttacgagtcaattggtgagcaagagagaaaaaggaaagaaagacatttcatagaatggctatttggttcctaaataatcaagaaagagtactgtttgtgacctgtttgtaattttttaactatgactccttaatctttactattttcctatttcctccatgaatctgaggaacccaacattggaccaaccatatgacacagtagtgaagttgaccctctgtcagtaactgataagtggtaggaagaaaaagctcatataaaagccaaagctgccctcagaaacctggctatttcagtaggaagcaattaatctcataaactcttctatgtcattcgagaaacaacagagaaccagaagggagacaatggcaacttaagtattatagagcaacttctagaaagtcaaaggatacattaccctcccactggctgaactggaaagtgtaactatcgacccaaatctatcaggtaagcttgctcttcagtttccagaaaaataataaagtatgcaaattttcttccttaagaaataccttccatcttctaagtgtccttggatcaaacaaaaaaagtaatctgacttgtcattccaaatgagggttattgtattgtaaagtggtgcaatacaatggtacctttgagaaaacaatgcttaacaaagagagaaactacctacagtgacacctatgaagcagctatcagaaagactggattaccaaacctctaatacaactttatctactagaagtttctacaagtgtggaaatgttctatacttttaagaaatttggttggccgggcgcggtggctcatgcttgtaatcccagcactttgggaggccgaggtggctggatcacctgaggtgaggagtttgagaccagcctggccaacatag

SEQ ID NO: 1404 - DNA, 4052 bp, Homo sapiens
ataatagtcacttaagacttaaattcaaacactagcaaaccacaaaatcagactgtatgactgacatccaaaagataaatataaatcaaaatccgaccccagcattagccaaggggtaggtgttcctcttgaggaaggcaggaattcctcttctgccacctgttggccaacgatcatctgtgatccattctggtccttgccacggctcaccaccatgtccacaccaagcaggcctggagcactgcccatggcaacagtgcagtgcagggcagaccagaggggggtaggggggtaggggggtaggggggtggggaggtggggggtggggggtgggggtggggagttgggggggttggggggtggggggggaggtatacttagccttaggtgaggcaccaatacagaggaatggagggaggttcagaccacacagccagatatccagcactgcaagaggcagcactggacaggaggggacaaataagaggggacagaggtggaaaggctaaatgtccttgaaaagaccttgaaaacacctggtgtaccgcccactgggagacatacacgtggcccctccacttctttctcctgactggctaaagacagctgcgaagtgccatgctaattcacccaggtcttcgctgagtagctggacagtgtgtcatcagtctaattccatcttctgctctaattggctgtgatcaattccacccccatttctaattggttgggttatgcagcaatccagcactgtccatcccaccttttctcccgctctgcgtggcactaggcggcaaaacccgccatctttaacaatgcggcaagcccgccatgatgtccacgtgacaaaagccatgatatacatatgacaacgcctgccatattgtccctgcggcaaaacccaacacgaaaagcacacagcaaagacaaagaggcccgccatgttttacactgcggcaagaccttcagccgccatcttttcctgtgtgaccgcacatgtccaccaccatgctaaccacttaacaaagcctcgcccatcatgatgtggccttcccgccacttgaacactgcgacagaactggatccgccattttggacaacctaacaaagcacagcccgccatgctgagcaatgccgcaatgtcaaaatcgccattttaagccctgcaccttagtctttcctaaccttccatttttaactagtcccttgtactgataaaagatgattcttactgcctcccgatacaacaatcacgcaaagctcctaacaagccccaaatcaattcattcagataggtttagctcatgcaatgcacatgacttcctctgcctgacctgctatcatccatcttgcctccctagtttaacttagcacaaacgactagccctaagccgagttatgcggcaagtctaaaatggcggccacttttcctccacaatctgaacacgcccttagcttaactgcagagtcattctctgccaaagcggtaggtacactcacacaccaccaaatgatcagcagcaaaaaaaagtgtagatattccagagagtgcaacaacccacaaaaccaacattttttcatccataaaaagcaccgatgggcgatgaaaaaaaaaaatcaaagcaggtatccgcggccccgatgggccagaaaaacaaaaattaaagcaggtatccgaggccccgatgggcaaggaaaaataaaaaaaaaaaaagcaggtatccgaagccccgatgggccaaaaaaagaaaatttttaaaaagcagatatccgtcaccccgatgggccagagtgttgggggttcagaggggaagggaatcagcaggtatccgataccccgatgggctaaggaaaaaaaaataaaaagcaggtatccgcggccccgatgggcgaataaaaaagaattaaaaggcaggtatccacggccccgttgggcaaagaaaaaataataaaaccaggtatccgcagccccgatgggcaaaatatagaaaagagagtggaagagtaaaaaactgatccacaaaaaacagagatgtcaaccaaaaatgattccaaagaaaaattccttaaatattaaaaattgcctcaaaatattccaaatactttctttaaaaaaatatggaggacgtgtcaagaagacactaggagaaagtatagaatttaaaaaaatattttatggaatttaggtgatttttttaaagaaatacgccataaagggtgttgggggactagaaaatgttctagaaagaaccccaagtgcagagagatcttcagtcaggaagcttccagccccgagagagtaagaaatatggctgcagcagcgaattgcagcgctttaagaactgaagggggggctgagggcggagagagcataagaggcgtggcctagaagattgaaagccggacatctttgtgatttggttggttcaaaatttacccagtaaggacaaaaaagggaaatttcaagaaagcaaagacataccagaaagaacattaactggaagtagacttcatttctagaccaggagtcacaacttcaatgggttttccagttctcatctataacatggggacattgagtaaatcaagcaataattaatgctaaaatcctccataaactgcataataaatgtaaagatgttaattcagcttggttttgagaatgggggaagggataggtagagctttgatgtgttgataaagtatccaaatatatcattcaaaccagaatttgtaactcctccaccaaacttttgaaccaaagaagctagaaaggagtaatacattgaggttagtaccatcttcaagggacttcccattccattatcccatgtaatagataatggaatatgtattgcatagataataataaaggattattcctgttttatacattaaaatagagtcctatagaggttacatcatgtgcccgaggtcacacaccatgattcagagtcaatgtagtttttactccaacactctaccttgtatggctcccaaccataagagaacggaagtgcttacgagtcaattggtgagcaagagagaaaaaggaaagaaagacatttcatagaatggctatttggttcctaaataatcaagaaagagtactgtttgtgacctgtttgtaattttttaactatgactccttaatctttactattttcctatttcctccatgaatctgaggaacccaacattggaccaaccatatgacacagtagtgaagttgaccctctgtcagtaactgataagtggtaggaagaaaaagctcatataaaagccaaagctgccctcagaaacctggctatttcagtaggaagcaattaatctcataaactcttctatgtcattcgagaaacaacagagaaccagaagggagacaatggcaacttaagtattatagagcaacttctagaaagtcaaaggatacattaccctcccactggctgaactggaaagtgtaactatcgacccaaatctatcaggtaagcttgctcttcagtttccagaaaaataataaagtatgcaaattttcttccttaagaaataccttccatcttctaagtgtccttggatcaaacaaaaaaagtaatctgacttgtcattccaaatgagggttattgtattgtaaagtggtgcaatacaatggtacctttgagaaaacaatgcttaacaaagagagaaactacctacagtgacacctatgaagcagctatcagaaagactggattaccaaacctctaatacaactttatctactagaagtttctacaagtgtggaaatgttctatacttttaagaaatttggttggccgggcgcggtggctcatgcttgtaatcccagcactttgggaggccgaggtggctggatcacctgaggtgaggagtttgagaccagcctggccaacatagcgaaaccccgtctctactataaatacaaaaattagccgggcatggtggcaggcacctataatcccagctacttgggaggctgaggcaggagaatcacttgaatccaggaggcggaggttgcagtgaaccgagatggt

SEQ ID NO: 1405 - DNA, 4049 bp, Homo sapiens
aggggggtaggggggtggggaggtggggggtggggggtgggggtggggagttgggggggttggggggtggggggggaggtatacttagccttaggtgaggcaccaatacagaggaatggagggaggttcagaccacacagccagatatccagcactgcaagaggcagcactggacaggaggggacaaataagaggggacagaggtggaaaggctaaatgtccttgaaaagaccttgaaaacacctggtgtaccgcccactgggagacatacacgtggcccctccacttctttctcctgactggctaaagacagctgcgaagtgccatgctaattcacccaggtcttcgctgagtagctggacagtgtgtcatcagtctaattccatcttctgctctaattggctgtgatcaattccacccccatttctaattggttgggttatgcagcaatccagcactgtccatcccaccttttctcccgctctgcgtggcactaggcggcaaaacccgccatctttaacaatgcggcaagcccgccatgatgtccacgtgacaaaagccatgatatacatatgacaacgcctgccatattgtccctgcggcaaaacccaacacgaaaagcacacagcaaagacaaagaggcccgccatgttttacactgcggcaagaccttcagccgccatcttttcctgtgtgaccgcacatgtccaccaccatgctaaccacttaacaaagcctcgcccatcatgatgtggccttcccgccacttgaacactgcgacagaactggatccgccattttggacaacctaacaaagcacagcccgccatgctgagcaatgccgcaatgtcaaaatcgccattttaagccctgcaccttagtctttcctaaccttccatttttaactagtcccttgtactgataaaagatgattcttactgcctcccgatacaacaatcacgcaaagctcctaacaagccccaaatcaattcattcagataggtttagctcatgcaatgcacatgacttcctctgcctgacctgctatcatccatcttgcctccctagtttaacttagcacaaacgactagccctaagccgagttatgcggcaagtctaaaatggcggccacttttcctccacaatctgaacacgcccttagcttaactgcagagtcattctctgccaaagcggtaggtacactcacacaccaccaaatgatcagcagcaaaaaaaagtgtagatattccagagagtgcaacaacccacaaaaccaacattttttcatccataaaaagcaccgatgggcgatgaaaaaaaaaaatcaaagcaggtatccgcggccccgatgggccagaaaaacaaaaattaaagcaggtatccgaggccccgatgggcaaggaaaaataaaaaaaaaaaaagcaggtatccgaagccccgatgggccaaaaaaagaaaatttttaaaaagcagatatccgtcaccccgatgggccagagtgttgggggttcagaggggaagggaatcagcaggtatccgataccccgatgggctaaggaaaaaaaaataaaaagcaggtatccgcggccccgatgggcgaataaaaaagaattaaaaggcaggtatccacggccccgttgggcaaagaaaaaataataaaaccaggtatccgcagccccgatgggcaaaatatagaaaagagagtggaagagtaaaaaactgatccacaaaaaacagagatgtcaaccaaaaatgattccaaagaaaaattccttaaatattaaaaattgcctcaaaatattccaaatactttctttaaaaaaatatggaggacgtgtcaagaagacactaggagaaagtatagaatttaaaaaaatattttatggaatttaggtgatttttttaaagaaatacgccataaagggtgttgggggactagaaaatgttctagaaagaaccccaagtgcagagagatcttcagtcaggaagcttccagccccgagagagtaagaaatatggctgcagcagcgaattgcagcgctttaagaactgaagggggggctgagggcggagagagcataagaggcgtggcctagaagattgaaagccggacatctttgtgatttggttggttcaaaatttacccagtaaggacaaaaaagggaaatttcaagaaagcaaagacataccagaaagaacattaactggaagtagacttcatttctagaccaggagtcacaacttcaatgggttttccagttctcatctataacatggggacattgagtaaatcaagcaataattaatgctaaaatcctccataaactgcataataaatgtaaagatgttaattcagcttggttttgagaatgggggaagggataggtagagctttgatgtgttgataaagtatccaaatatatcattcaaaccagaatttgtaactcctccaccaaacttttgaaccaaagaagctagaaaggagtaatacattgaggttagtaccatcttcaagggacttcccattccattatcccatgtaatagataatggaatatgtattgcatagataataataaaggattattcctgttttatacattaaaatagagtcctatagaggttacatcatgtgcccgaggtcacacaccatgattcagagtcaatgtagtttttactccaacactctaccttgtatggctcccaaccataagagaacggaagtgcttacgagtcaattggtgagcaagagagaaaaaggaaagaaagacatttcatagaatggctatttggttcctaaataatcaagaaagagtactgtttgtgacctgtttgtaattttttaactatgactccttaatctttactattttcctatttcctccatgaatctgaggaacccaacattggaccaaccatatgacacagtagtgaagttgaccctctgtcagtaactgataagtggtaggaagaaaaagctcatataaaagccaaagctgccctcagaaacctggctatttcagtaggaagcaattaatctcataaactcttctatgtcattcgagaaacaacagagaaccagaagggagacaatggcaacttaagtattatagagcaacttctagaaagtcaaaggatacattaccctcccactggctgaactggaaagtgtaactatcgacccaaatctatcaggtaagcttgctcttcagtttccagaaaaataataaagtatgcaaattttcttccttaagaaataccttccatcttctaagtgtccttggatcaaacaaaaaaagtaatctgacttgtcattccaaatgagggttattgtattgtaaagtggtgcaatacaatggtacctttgagaaaacaatgcttaacaaagagagaaactacctacagtgacacctatgaagcagctatcagaaagactggattaccaaacctctaatacaactttatctactagaagtttctacaagtgtggaaatgttctatacttttaagaaatttggttggccgggcgcggtggctcatgcttgtaatcccagcactttgggaggccgaggtggctggatcacctgaggtgaggagtttgagaccagcctggccaacatagcgaaaccccgtctctactataaatacaaaaattagccgggcatggtggcaggcacctataatcccagctacttgggaggctgaggcaggagaatcacttgaatccaggaggcggaggttgcagtgaaccgagatggtgccactgcactccagcccgggcgacagagcaagactccatctcaaaaaaagaaaaaagaaatttagttggggaaaaattttctaaagactcaagtagcatcaaatataaaagattgataaatttgactctgaaattaaaaccttttgtttcacaaaaataccttttcaaataaaaaggcaaaaagacaatttataaactggttgtcctgggtttctgtgaccaggccctggttccaggtgggcagccacgctagcagatcactctcattggttgtcattggagtttttta

SEQ ID NO: 1406 - DNA, 4018 bp, Homo sapiens
acaaagcctcgcccatcatgatgtggccttcccgccacttgaacactgcgacagaactggatccgccattttggacaacctaacaaagcacagcccgccatgctgagcaatgccgcaatgtcaaaatcgccattttaagccctgcaccttagtctttcctaaccttccatttttaactagtcccttgtactgataaaagatgattcttactgcctcccgatacaacaatcacgcaaagctcctaacaagccccaaatcaattcattcagataggtttagctcatgcaatgcacatgacttcctctgcctgacctgctatcatccatcttgcctccctagtttaacttagcacaaacgactagccctaagccgagttatgcggcaagtctaaaatggcggccacttttcctccacaatctgaacacgcccttagcttaactgcagagtcattctctgccaaagcggtaggtacactcacacaccaccaaatgatcagcagcaaaaaaaagtgtagatattccagagagtgcaacaacccacaaaaccaacattttttcatccataaaaagcaccgatgggcgatgaaaaaaaaaaatcaaagcaggtatccgcggccccgatgggccagaaaaacaaaaattaaagcaggtatccgaggccccgatgggcaaggaaaaataaaaaaaaaaaaagcaggtatccgaagccccgatgggccaaaaaaagaaaatttttaaaaagcagatatccgtcaccccgatgggccagagtgttgggggttcagaggggaagggaatcagcaggtatccgataccccgatgggctaaggaaaaaaaaataaaaagcaggtatccgcggccccgatgggcgaataaaaaagaattaaaaggcaggtatccacggccccgttgggcaaagaaaaaataataaaaccaggtatccgcagccccgatgggcaaaatatagaaaagagagtggaagagtaaaaaactgatccacaaaaaacagagatgtcaaccaaaaatgattccaaagaaaaattccttaaatattaaaaattgcctcaaaatattccaaatactttctttaaaaaaatatggaggacgtgtcaagaagacactaggagaaagtatagaatttaaaaaaatattttatggaatttaggtgatttttttaaagaaatacgccataaagggtgttgggggactagaaaatgttctagaaagaaccccaagtgcagagagatcttcagtcaggaagcttccagccccgagagagtaagaaatatggctgcagcagcgaattgcagcgctttaagaactgaagggggggctgagggcggagagagcataagaggcgtggcctagaagattgaaagccggacatctttgtgatttggttggttcaaaatttacccagtaaggacaaaaaagggaaatttcaagaaagcaaagacataccagaaagaacattaactggaagtagacttcatttctagaccaggagtcacaacttcaatgggttttccagttctcatctataacatggggacattgagtaaatcaagcaataattaatgctaaaatcctccataaactgcataataaatgtaaagatgttaattcagcttggttttgagaatgggggaagggataggtagagctttgatgtgttgataaagtatccaaatatatcattcaaaccagaatttgtaactcctccaccaaacttttgaaccaaagaagctagaaaggagtaatacattgaggttagtaccatcttcaagggacttcccattccattatcccatgtaatagataatggaatatgtattgcatagataataataaaggattattcctgttttatacattaaaatagagtcctatagaggttacatcatgtgcccgaggtcacacaccatgattcagagtcaatgtagtttttactccaacactctaccttgtatggctcccaaccataagagaacggaagtgcttacgagtcaattggtgagcaagagagaaaaaggaaagaaagacatttcatagaatggctatttggttcctaaataatcaagaaagagtactgtttgtgacctgtttgtaattttttaactatgactccttaatctttactattttcctatttcctccatgaatctgaggaacccaacattggaccaaccatatgacacagtagtgaagttgaccctctgtcagtaactgataagtggtaggaagaaaaagctcatataaaagccaaagctgccctcagaaacctggctatttcagtaggaagcaattaatctcataaactcttctatgtcattcgagaaacaacagagaaccagaagggagacaatggcaacttaagtattatagagcaacttctagaaagtcaaaggatacattaccctcccactggctgaactggaaagtgtaactatcgacccaaatctatcaggtaagcttgctcttcagtttccagaaaaataataaagtatgcaaattttcttccttaagaaataccttccatcttctaagtgtccttggatcaaacaaaaaaagtaatctgacttgtcattccaaatgagggttattgtattgtaaagtggtgcaatacaatggtacctttgagaaaacaatgcttaacaaagagagaaactacctacagtgacacctatgaagcagctatcagaaagactggattaccaaacctctaatacaactttatctactagaagtttctacaagtgtggaaatgttctatacttttaagaaatttggttggccgggcgcggtggctcatgcttgtaatcccagcactttgggaggccgaggtggctggatcacctgaggtgaggagtttgagaccagcctggccaacatagcgaaaccccgtctctactataaatacaaaaattagccgggcatggtggcaggcacctataatcccagctacttgggaggctgaggcaggagaatcacttgaatccaggaggcggaggttgcagtgaaccgagatggtgccactgcactccagcccgggcgacagagcaagactccatctcaaaaaaagaaaaaagaaatttagttggggaaaaattttctaaagactcaagtagcatcaaatataaaagattgataaatttgactctgaaattaaaaccttttgtttcacaaaaataccttttcaaataaaaaggcaaaaagacaatttataaactggttgtcctgggtttctgtgaccaggccctggttccaggtgggcagccacgctagcagatcactctcattggttgtcattggagttttttaaatggtaactcttaaggctaggcatgcaaaatggtgctgatgtgccgttatggggtgacactcacattggacacaggacatgttcagagctgtggcctacctaaatccactgttgacccttaggctaaagaaactgcaaaagcaagaaatttataatttcaatacaaagaggttccagagtgccattgcaaaaatggaagtagtacagtgttgctatgtttttctcatagagggagatgtgaaattagccaggaatggtgcatttgacaataaacacaaagagatgatttctggacctaaaaaggaagatatggtgcaaggtcattataaaaattgatatgtgaactgttgaataaacaaatacgtaagcatctcttctccacctggtattctaaattttcattgataaatcactacacctcacatgggcccatgtatttgtaatatatttttaatcaaactgtttacattaaaaggaacttctgaaaaatatttgcctaggcctttgccctagagcagtcctgccctcttctgccatttatcaccttcaggttttacttactcccctgccctcactagctttcaattcactttacttcctcctcttcccgacctggcctcaccttcactactgcttggctccattttataaacctgttaggatcagaagtatggaaactgagacactagaaggaaaa

SEQ ID NO: 1407 - DNA, 15 bp, Homo sapiens
cccgagtggctccat

SEQ ID NO: 1408 - DNA, 15 bp, Homo sapiens
gcccgagtggctcca

SEQ ID NO: 1409 - DNA, 15 bp, Homo sapiens
agcccgagtggctcc

SEQ ID NO: 1410 - DNA, 15 bp, Homo sapiens
cagcccgagtggctc

SEQ ID NO: 1411 - DNA, 15 bp, Homo sapiens
tcagcccgagtggct

SEQ ID NO: 1412 - DNA, 15 bp, Homo sapiens
ctcagcccgagtggc

SEQ ID NO: 1413 - DNA, 15 bp, Homo sapiens
cctcagcccgagtgg

SEQ ID NO: 1414 - DNA, 15 bp, Homo sapiens
ccctcagcccgagtg

SEQ ID NO: 1415 - DNA, 15 bp, Homo sapiens
gccctcagcccgagt

SEQ ID NO: 1416 - DNA, 15 bp, Homo sapiens
ggccctcagcccgag

SEQ ID NO: 1417 - DNA, 15 bp, Homo sapiens
aggccctcagcccga

SEQ ID NO: 1418 - DNA, 15 bp, Homo sapiens
aaggccctcagcccg

SEQ ID NO: 1419 - DNA, 15 bp, Homo sapiens
caaggccctcagccc

SEQ ID NO: 1420 - DNA, 15 bp, Homo sapiens
ccaaggccctcagcc

SEQ ID NO: 1421 - DNA, 15 bp, Homo sapiens
gccaaggccctcagc

SEQ ID NO: 1422 - DNA, 15 bp, Homo sapiens
ggccaaggccctcag

SEQ ID NO: 1423 - DNA, 15 bp, Homo sapiens
tggccaaggccctca

SEQ ID NO: 1424 - DNA, 15 bp, Homo sapiens
ctggccaaggccctc

SEQ ID NO: 1425 - DNA, 15 bp, Homo sapiens
cctggccaaggccct

SEQ ID NO: 1426 - DNA, 15 bp, Homo sapiens
ccctggccaaggccc

SEQ ID NO: 1427 - DNA, 15 bp, Homo sapiens
gccctggccaaggcc

SEQ ID NO: 1428 - DNA, 15 bp, Homo sapiens
tgccctggccaaggc

SEQ ID NO: 1429 - DNA, 15 bp, Homo sapiens
gtgccctggccaagg

SEQ ID NO: 1430 - DNA, 15 bp, Homo sapiens
ggtgccctggccaag

SEQ ID NO: 1431 - DNA, 15 bp, Homo sapiens
aggtgccctggccaa

SEQ ID NO: 1432 - DNA, 15 bp, Homo sapiens
gaggtgccctggcca

SEQ ID NO: 1433 - DNA, 15 bp, Homo sapiens
ggaggtgccctggcc

SEQ ID NO: 1434 - DNA, 15 bp, Homo sapiens
gggaggtgccctggc

SEQ ID NO: 1435 - DNA, 15 bp, Homo sapiens
tgggaggtgccctgg

SEQ ID NO: 1436 - DNA, 15 bp, Homo sapiens
ctgggaggtgccctg

SEQ ID NO: 1437 - DNA, 15 bp, Homo sapiens
cctgggaggtgccct

SEQ ID NO: 1438 - DNA, 15 bp, Homo sapiens
ccctgggaggtgccc

SEQ ID NO: 1439 - DNA, 15 bp, Homo sapiens
gccctgggaggtgcc

SEQ ID NO: 1440 - DNA, 15 bp, Homo sapiens
agccctgggaggtgc

SEQ ID NO: 1441 - DNA, 15 bp, Homo sapiens
cagccctgggaggtg

SEQ ID NO: 1442 - DNA, 15 bp, Homo sapiens
ccagccctgggaggt

SEQ ID NO: 1443 - DNA, 15 bp, Homo sapiens
cccagccctgggagg

SEQ ID NO: 1444 - DNA, 15 bp, Homo sapiens
gcccagccctgggag

SEQ ID NO: 1445 - DNA, 15 bp, Homo sapiens
ggcccagccctggga

SEQ ID NO: 1446 - DNA, 15 bp, Homo sapiens
aggcccagccctggg

SEQ ID NO: 1447 - DNA, 15 bp, Homo sapiens
caggcccagccctgg

SEQ ID NO: 1448 - DNA, 15 bp, Homo sapiens
ccaggcccagccctg

SEQ ID NO: 1449 - DNA, 15 bp, Homo sapiens
accaggcccagccct

SEQ ID NO: 1450 - DNA, 15 bp, Homo sapiens
gaccaggcccagccc

SEQ ID NO: 1451 - DNA, 15 bp, Homo sapiens
agaccaggcccagcc

SEQ ID NO: 1452 - DNA, 15 bp, Homo sapiens
cagaccaggcccagc

SEQ ID NO: 1453 - DNA, 15 bp, Homo sapiens
ccagaccaggcccag

SEQ ID NO: 1454 - DNA, 15 bp, Homo sapiens
cccagaccaggccca

SEQ ID NO: 1455 - DNA, 15 bp, Homo sapiens
gcccagaccaggccc

SEQ ID NO: 1456 - DNA, 15 bp, Homo sapiens
agcccagaccaggcc

SEQ ID NO: 1457 - DNA, 15 bp, Homo sapiens
cagcccagaccaggc

SEQ ID NO: 1458 - DNA, 15 bp, Homo sapiens
ccagcccagaccagg

SEQ ID NO: 1459 - DNA, 15 bp, Homo sapiens
gccagcccagaccag

SEQ ID NO: 1460 - DNA, 15 bp, Homo sapiens
cgccagcccagacca

SEQ ID NO: 1461 - DNA, 15 bp, Homo sapiens
acgccagcccagacc

SEQ ID NO: 1462 - DNA, 15 bp, Homo sapiens
aacgccagcccagac

SEQ ID NO: 1463 - DNA, 15 bp, Homo sapiens
gaacgccagcccaga

SEQ ID NO: 1464 - DNA, 15 bp, Homo sapiens
tgaacgccagcccag

SEQ ID NO: 1465 - DNA, 15 bp, Homo sapiens
gtgaacgccagccca

SEQ ID NO: 1466 - DNA, 15 bp, Homo sapiens
agtgaacgccagccc

SEQ ID NO: 1467 - DNA, 15 bp, Homo sapiens
cagtgaacgccagcc

SEQ ID NO: 1468 - DNA, 15 bp, Homo sapiens
ccagtgaacgccagc

SEQ ID NO: 1469 - DNA, 15 bp, Homo sapiens
tccagtgaacgccag

SEQ ID NO: 1470 - DNA, 15 bp, Homo sapiens
atccagtgaacgcca

SEQ ID NO: 1471 - DNA, 15 bp, Homo sapiens
catccagtgaacgcc

SEQ ID NO: 1472 - DNA, 15 bp, Homo sapiens
gcatccagtgaacgc

SEQ ID NO: 1473 - DNA, 15 bp, Homo sapiens
ggcatccagtgaacg

SEQ ID NO: 1474 - DNA, 15 bp, Homo sapiens
tggcatccagtgaac

SEQ ID NO: 1475 - DNA, 15 bp, Homo sapiens
atggcatccagtgaa

SEQ ID NO: 1476 - DNA, 15 bp, Homo sapiens
gatggcatccagtga

SEQ ID NO: 1477 - DNA, 15 bp, Homo sapiens
ggatggcatccagtg

SEQ ID NO: 1478 - DNA, 15 bp, Homo sapiens
aggatggcatccagt

SEQ ID NO: 1479 - DNA, 15 bp, Homo sapiens
caggatggcatccag

SEQ ID NO: 1480 - DNA, 15 bp, Homo sapiens
tcaggatggcatcca

SEQ ID NO: 1481 - DNA, 15 bp, Homo sapiens
atcaggatggcatcc

SEQ ID NO: 1482 - DNA, 15 bp, Homo sapiens
catcaggatggcatc

SEQ ID NO: 1483 - DNA, 15 bp, Homo sapiens
ccatcaggatggcat

SEQ ID NO: 1484 - DNA, 15 bp, Homo sapiens
gccatcaggatggca

SEQ ID NO: 1485 - DNA, 15 bp, Homo sapiens
ggccatcaggatggc

SEQ ID NO: 1486 - DNA, 15 bp, Homo sapiens
aggccatcaggatgg

SEQ ID NO: 1487 - DNA, 15 bp, Homo sapiens
caggccatcaggatg

SEQ ID NO: 1488 - DNA, 15 bp, Homo sapiens
ccaggccatcaggat

SEQ ID NO: 1489 - DNA, 15 bp, Homo sapiens
tccaggccatcagga

SEQ ID NO: 1490 - DNA, 15 bp, Homo sapiens
ttccaggccatcagg

SEQ ID NO: 1491 - DNA, 15 bp, Homo sapiens
tttccaggccatcag

SEQ ID NO: 1492 - DNA, 15 bp, Homo sapiens
atttccaggccatca

SEQ ID NO: 1493 - DNA, 15 bp, Homo sapiens
aatttccaggccatc

SEQ ID NO: 1494 - DNA, 15 bp, Homo sapiens
caatttccaggccat

SEQ ID NO: 1495 - DNA, 15 bp, Homo sapiens
tcaatttccaggcca

SEQ ID NO: 1496 - DNA, 15 bp, Homo sapiens
ctcaatttccaggcc

SEQ ID NO: 1497 - DNA, 15 bp, Homo sapiens
tctcaatttccaggc

SEQ ID NO: 1498 - DNA, 15 bp, Homo sapiens
atctcaatttccagg

SEQ ID NO: 1499 - DNA, 15 bp, Homo sapiens
aatctcaatttccag

SEQ ID NO: 1500 - DNA, 15 bp, Homo sapiens
aaatctcaatttcca

SEQ ID NO: 1501 - DNA, 15 bp, Homo sapiens
gaaatctcaatttcc

SEQ ID NO: 1502 - DNA, 15 bp, Homo sapiens
agaaatctcaatttc

SEQ ID NO: 1503 - DNA, 15 bp, Homo sapiens
cagaaatctcaattt

SEQ ID NO: 1504 - DNA, 15 bp, Homo sapiens
acagaaatctcaatt

SEQ ID NO: 1505 - DNA, 15 bp, Homo sapiens
gacagaaatctcaat

SEQ ID NO: 1506 - DNA, 15 bp, Homo sapiens
agacagaaatctcaa

SEQ ID NO: 1507 - DNA, 15 bp, Homo sapiens
cagacagaaatctca

SEQ ID NO: 1508 - DNA, 15 bp, Homo sapiens
ccagacagaaatctc

SEQ ID NO: 1509 - DNA, 15 bp, Homo sapiens
gccagacagaaatct

SEQ ID NO: 1510 - DNA, 15 bp, Homo sapiens
tgccagacagaaatc

SEQ ID NO: 1511 - DNA, 15 bp, Homo sapiens
gtgccagacagaaat

SEQ ID NO: 1512 - DNA, 15 bp, Homo sapiens
cgtgccagacagaaa

SEQ ID NO: 1513 - DNA, 15 bp, Homo sapiens
gcgtgccagacagaa

SEQ ID NO: 1514 - DNA, 15 bp, Homo sapiens
ggcgtgccagacaga

SEQ ID NO: 1515 - DNA, 15 bp, Homo sapiens
aggcgtgccagacag

SEQ ID NO: 1516 - DNA, 15 bp, Homo sapiens
gaggcgtgccagaca

SEQ ID NO: 1517 - DNA, 15 bp, Homo sapiens
ggaggcgtgccagac

SEQ ID NO: 1518 - DNA, 15 bp, Homo sapiens
gggaggcgtgccaga

SEQ ID NO: 1519 - DNA, 15 bp, Homo sapiens
cgggaggcgtgccag

SEQ ID NO: 1520 - DNA, 15 bp, Homo sapiens
tcgggaggcgtgcca

SEQ ID NO: 1521 - DNA, 15 bp, Homo sapiens
atcgggaggcgtgcc

SEQ ID NO: 1522 - DNA, 15 bp, Homo sapiens
catcgggaggcgtgc

SEQ ID NO: 1523 - DNA, 15 bp, Homo sapiens
ccatcgggaggcgtg

SEQ ID NO: 1524 - DNA, 15 bp, Homo sapiens
gccatcgggaggcgt

SEQ ID NO: 1525 - DNA, 15 bp, Homo sapiens
agccatcgggaggcg

SEQ ID NO: 1526 - DNA, 15 bp, Homo sapiens
gagccatcgggaggc

SEQ ID NO: 1527 - DNA, 15 bp, Homo sapiens
ggagccatcgggagg

SEQ ID NO: 1528 - DNA, 15 bp, Homo sapiens
gggagccatcgggag

SEQ ID NO: 1529 - DNA, 15 bp, Homo sapiens
ggggagccatcggga

SEQ ID NO: 1530 - DNA, 15 bp, Homo sapiens
tggggagccatcggg

SEQ ID NO: 1531 - DNA, 15 bp, Homo sapiens
gtggggagccatcgg

SEQ ID NO: 1532 - DNA, 15 bp, Homo sapiens
ggtggggagccatcg

SEQ ID NO: 1533 - DNA, 15 bp, Homo sapiens
aggtggggagccatc

SEQ ID NO: 1534 - DNA, 15 bp, Homo sapiens
caggtggggagccat

SEQ ID NO: 1535 - DNA, 15 bp, Homo sapiens
gcaggtggggagcca

SEQ ID NO: 1536 - DNA, 15 bp, Homo sapiens
agcaggtggggagcc

SEQ ID NO: 1537 - DNA, 15 bp, Homo sapiens
tagcaggtggggagc

SEQ ID NO: 1538 - DNA, 15 bp, Homo sapiens
gtagcaggtggggag

SEQ ID NO: 1539 - DNA, 15 bp, Homo sapiens
ggtagcaggtgggga

SEQ ID NO: 1540 - DNA, 15 bp, Homo sapiens
tggtagcaggtgggg

SEQ ID NO: 1541 - DNA, 15 bp, Homo sapiens
gtggtagcaggtggg

SEQ ID NO: 1542 - DNA, 15 bp, Homo sapiens
tgtggtagcaggtgg

SEQ ID NO: 1543 - DNA, 15 bp, Homo sapiens
atgtggtagcaggtg

SEQ ID NO: 1544 - DNA, 15 bp, Homo sapiens
aatgtggtagcaggt

SEQ ID NO: 1545 - DNA, 15 bp, Homo sapiens
gaatgtggtagcagg

SEQ ID NO: 1546 - DNA, 15 bp, Homo sapiens
ggaatgtggtagcag

SEQ ID NO: 1547 - DNA, 15 bp, Homo sapiens
tggaatgtggtagca

SEQ ID NO: 1548 - DNA, 15 bp, Homo sapiens
ctggaatgtggtagc

SEQ ID NO: 1549 - DNA, 15 bp, Homo sapiens
cctggaatgtggtag

SEQ ID NO: 1550 - DNA, 15 bp, Homo sapiens
tcctggaatgtggta

SEQ ID NO: 1551 - DNA, 15 bp, Homo sapiens
ctcctggaatgtggt

SEQ ID NO: 1552 - DNA, 15 bp, Homo sapiens
gctcctggaatgtgg

SEQ ID NO: 1553 - DNA, 15 bp, Homo sapiens
agctcctggaatgtg

SEQ ID NO: 1554 - DNA, 15 bp, Homo sapiens
aagctcctggaatgt

SEQ ID NO: 1555 - DNA, 15 bp, Homo sapiens
gaagctcctggaatg

SEQ ID NO: 1556 - DNA, 15 bp, Homo sapiens
ggaagctcctggaat

SEQ ID NO: 1557 - DNA, 15 bp, Homo sapiens
tggaagctcctggaa

SEQ ID NO: 1558 - DNA, 15 bp, Homo sapiens
ctggaagctcctgga

SEQ ID NO: 1559 - DNA, 15 bp, Homo sapiens
cctggaagctcctgg

SEQ ID NO: 1560 - DNA, 15 bp, Homo sapiens
tcctggaagctcctg

SEQ ID NO: 1561 - DNA, 15 bp, Homo sapiens
atcctggaagctcct

SEQ ID NO: 1562 - DNA, 15 bp, Homo sapiens
catcctggaagctcc

SEQ ID NO: 1563 - DNA, 15 bp, Homo sapiens
acatcctggaagctc

SEQ ID NO: 1564 - DNA, 15 bp, Homo sapiens
gacatcctggaagct

SEQ ID NO: 1565 - DNA, 15 bp, Homo sapiens
agacatcctggaagc

SEQ ID NO: 1566 - DNA, 15 bp, Homo sapiens
cagacatcctggaag

SEQ ID NO: 1567 - DNA, 15 bp, Homo sapiens
ccagacatcctggaa

SEQ ID NO: 1568 - DNA, 15 bp, Homo sapiens
cccagacatcctgga

SEQ ID NO: 1569 - DNA, 15 bp, Homo sapiens
acccagacatcctgg

SEQ ID NO: 1570 - DNA, 15 bp, Homo sapiens
tacccagacatcctg

SEQ ID NO: 1571 - DNA, 15 bp, Homo sapiens
ttacccagacatcct

SEQ ID NO: 1572 - DNA, 15 bp, Homo sapiens
cttacccagacatcc

SEQ ID NO: 1573 - DNA, 15 bp, Homo sapiens
tcttacccagacatc

SEQ ID NO: 1574 - DNA, 15 bp, Homo sapiens
gtcttacccagacat

SEQ ID NO: 1575 - DNA, 15 bp, Homo sapiens
tgtcttacccagaca

SEQ ID NO: 1576 - DNA, 15 bp, Homo sapiens
ctgtcttacccagac

SEQ ID NO: 1577 - DNA, 15 bp, Homo sapiens
tctgtcttacccaga

SEQ ID NO: 1578 - DNA, 15 bp, Homo sapiens
ctctgtcttacccag

SEQ ID NO: 1579 - DNA, 15 bp, Homo sapiens
cctctgtcttaccca

SEQ ID NO: 1580 - DNA, 15 bp, Homo sapiens
gcctctgtcttaccc

SEQ ID NO: 1581 - DNA, 15 bp, Homo sapiens
tgcctctgtcttacc

SEQ ID NO: 1582 - DNA, 15 bp, Homo sapiens
gtgcctctgtcttac

SEQ ID NO: 1583 - DNA, 15 bp, Homo sapiens
ggtgcctctgtctta

SEQ ID NO: 1584 - DNA, 15 bp, Homo sapiens
gggtgcctctgtctt

SEQ ID NO: 1585 - DNA, 15 bp, Homo sapiens
ggggtgcctctgtct

SEQ ID NO: 1586 - DNA, 15 bp, Homo sapiens
gggggtgcctctgtc

SEQ ID NO: 1587 - DNA, 15 bp, Homo sapiens
tgggggtgcctctgt

SEQ ID NO: 1588 - DNA, 15 bp, Homo sapiens
ttgggggtgcctctg

SEQ ID NO: 1589 - DNA, 15 bp, Homo sapiens
gttgggggtgcctct

SEQ ID NO: 1590 - DNA, 15 bp, Homo sapiens
tgttgggggtgcctc

SEQ ID NO: 1591 - DNA, 15 bp, Homo sapiens
ctgttgggggtgcct

SEQ ID NO: 1592 - DNA, 15 bp, Homo sapiens
tctgttgggggtgcc

SEQ ID NO: 1593 - DNA, 15 bp, Homo sapiens
atctgttgggggtgc

SEQ ID NO: 1594 - DNA, 15 bp, Homo sapiens
aatctgttgggggtg

SEQ ID NO: 1595 - DNA, 15 bp, Homo sapiens
gaatctgttgggggt

SEQ ID NO: 1596 - DNA, 15 bp, Homo sapiens
tgaatctgttggggg

SEQ ID NO: 1597 - DNA, 15 bp, Homo sapiens
ctgaatctgttgggg

SEQ ID NO: 1598 - DNA, 15 bp, Homo sapiens
actgaatctgttggg

SEQ ID NO: 1599 - DNA, 15 bp, Homo sapiens
tactgaatctgttgg

SEQ ID NO: 1600 - DNA, 15 bp, Homo sapiens
ctactgaatctgttg

SEQ ID NO: 1601 - DNA, 15 bp, Homo sapiens
gctactgaatctgtt

SEQ ID NO: 1602 - DNA, 15 bp, Homo sapiens
agctactgaatctgt

SEQ ID NO: 1603 - DNA, 15 bp, Homo sapiens
gagctactgaatctg

SEQ ID NO: 1604 - DNA, 15 bp, Homo sapiens
agagctactgaatct

SEQ ID NO: 1605 - DNA, 15 bp, Homo sapiens
cagagctactgaatc

SEQ ID NO: 1606 - DNA, 15 bp, Homo sapiens
tcagagctactgaat

SEQ ID NO: 1607 - DNA, 15 bp, Homo sapiens
ctcagagctactgaa

SEQ ID NO: 1608 - DNA, 15 bp, Homo sapiens
tctcagagctactga

SEQ ID NO: 1609 - DNA, 15 bp, Homo sapiens
ctctcagagctactg

SEQ ID NO: 1610 - DNA, 15 bp, Homo sapiens
cctctcagagctact

SEQ ID NO: 1611 - DNA, 15 bp, Homo sapiens
ccctctcagagctac

SEQ ID NO: 1612 - DNA, 15 bp, Homo sapiens
tccctctcagagcta

SEQ ID NO: 1613 - DNA, 15 bp, Homo sapiens
atccctctcagagct

SEQ ID NO: 1614 - DNA, 15 bp, Homo sapiens
gatccctctcagagc

SEQ ID NO: 1615 - DNA, 15 bp, Homo sapiens
agatccctctcagag

SEQ ID NO: 1616 - DNA, 15 bp, Homo sapiens
cagatccctctcaga

SEQ ID NO: 1617 - DNA, 15 bp, Homo sapiens
acagatccctctcag

SEQ ID NO: 1618 - DNA, 15 bp, Homo sapiens
cacagatccctctca

SEQ ID NO: 1619 - DNA, 15 bp, Homo sapiens
ccacagatccctctc

SEQ ID NO: 1620 - DNA, 15 bp, Homo sapiens
gccacagatccctct

SEQ ID NO: 1621 - DNA, 15 bp, Homo sapiens
agccacagatccctc

SEQ ID NO: 1622 - DNA, 15 bp, Homo sapiens
gagccacagatccct

SEQ ID NO: 1623 - DNA, 15 bp, Homo sapiens
ggagccacagatccc

SEQ ID NO: 1624 - DNA, 15 bp, Homo sapiens
aggagccacagatcc

SEQ ID NO: 1625 - DNA, 15 bp, Homo sapiens
aaggagccacagatc

SEQ ID NO: 1626 - DNA, 15 bp, Homo sapiens
gaaggagccacagat

SEQ ID NO: 1627 - DNA, 15 bp, Homo sapiens
ggaaggagccacaga

SEQ ID NO: 1628 - DNA, 15 bp, Homo sapiens
aggaaggagccacag

SEQ ID NO: 1629 - DNA, 15 bp, Homo sapiens
taggaaggagccaca

SEQ ID NO: 1630 - DNA, 15 bp, Homo sapiens
ttaggaaggagccac

SEQ ID NO: 1631 - DNA, 15 bp, Homo sapiens
cttaggaaggagcca

SEQ ID NO: 1632 - DNA, 15 bp, Homo sapiens
gcttaggaaggagcc

SEQ ID NO: 1633 - DNA, 15 bp, Homo sapiens
agcttaggaaggagc

SEQ ID NO: 1634 - DNA, 15 bp, Homo sapiens
aagcttaggaaggag

SEQ ID NO: 1635 - DNA, 15 bp, Homo sapiens
caagcttaggaagga

SEQ ID NO: 1636 - DNA, 15 bp, Homo sapiens
gcaagcttaggaagg

SEQ ID NO: 1637 - DNA, 15 bp, Homo sapiens
cgcaagcttaggaag

SEQ ID NO: 1638 - DNA, 15 bp, Homo sapiens
ccgcaagcttaggaa

SEQ ID NO: 1639 - DNA, 15 bp, Homo sapiens
accgcaagcttagga

SEQ ID NO: 1640 - DNA, 15 bp, Homo sapiens
aaccgcaagcttagg

SEQ ID NO: 1641 - DNA, 15 bp, Homo sapiens
gaaccgcaagcttag

SEQ ID NO: 1642 - DNA, 15 bp, Homo sapiens
agaaccgcaagctta

SEQ ID NO: 1643 - DNA, 15 bp, Homo sapiens
aagaaccgcaagctt

SEQ ID NO: 1644 - DNA, 15 bp, Homo sapiens
gaagaaccgcaagct

SEQ ID NO: 1645 - DNA, 15 bp, Homo sapiens
agaagaaccgcaagc

SEQ ID NO: 1646 - DNA, 15 bp, Homo sapiens
cagaagaaccgcaag

SEQ ID NO: 1647 - DNA, 15 bp, Homo sapiens
ccagaagaaccgcaa

SEQ ID NO: 1648 - DNA, 15 bp, Homo sapiens
tccagaagaaccgca

SEQ ID NO: 1649 - DNA, 15 bp, Homo sapiens
ttccagaagaaccgc

SEQ ID NO: 1650 - DNA, 15 bp, Homo sapiens
tttccagaagaaccg

SEQ ID NO: 1651 - DNA, 15 bp, Homo sapiens
gtttccagaagaacc

SEQ ID NO: 1652 - DNA, 15 bp, Homo sapiens
agtttccagaagaac

SEQ ID NO: 1653 - DNA, 15 bp, Homo sapiens
aagtttccagaagaa

SEQ ID NO: 1654 - DNA, 15 bp, Homo sapiens
gaagtttccagaaga

SEQ ID NO: 1655 - DNA, 15 bp, Homo sapiens
agaagtttccagaag

SEQ ID NO: 1656 - DNA, 15 bp, Homo sapiens
cagaagtttccagaa

SEQ ID NO: 1657 - DNA, 15 bp, Homo sapiens
gcagaagtttccaga

SEQ ID NO: 1658 - DNA, 15 bp, Homo sapiens
ggcagaagtttccag

SEQ ID NO: 1659 - DNA, 15 bp, Homo sapiens
aggcagaagtttcca

SEQ ID NO: 1660 - DNA, 15 bp, Homo sapiens
gaggcagaagtttcc

SEQ ID NO: 1661 - DNA, 15 bp, Homo sapiens
agaggcagaagtttc

SEQ ID NO: 1662 - DNA, 15 bp, Homo sapiens
tagaggcagaagttt

SEQ ID NO: 1663 - DNA, 15 bp, Homo sapiens
ctagaggcagaagtt

SEQ ID NO: 1664 - DNA, 15 bp, Homo sapiens
tctagaggcagaagt

SEQ ID NO: 1665 - DNA, 15 bp, Homo sapiens
ttctagaggcagaag

SEQ ID NO: 1666 - DNA, 15 bp, Homo sapiens
cttctagaggcagaa

SEQ ID NO: 1667 - DNA, 15 bp, Homo sapiens
tcttctagaggcaga

SEQ ID NO: 1668 - DNA, 15 bp, Homo sapiens
atcttctagaggcag

SEQ ID NO: 1669 - DNA, 15 bp, Homo sapiens
catcttctagaggca

SEQ ID NO: 1670 - DNA, 15 bp, Homo sapiens
ccatcttctagaggc

SEQ ID NO: 1671 - DNA, 15 bp, Homo sapiens
accatcttctagagg

SEQ ID NO: 1672 - DNA, 15 bp, Homo sapiens
gaccatcttctagag

SEQ ID NO: 1673 - DNA, 15 bp, Homo sapiens
ggaccatcttctaga

SEQ ID NO: 1674 - DNA, 15 bp, Homo sapiens
gggaccatcttctag

SEQ ID NO: 1675 - DNA, 15 bp, Homo sapiens
agggaccatcttcta

SEQ ID NO: 1676 - DNA, 15 bp, Homo sapiens
gagggaccatcttct

SEQ ID NO: 1677 - DNA, 15 bp, Homo sapiens
agagggaccatcttc

SEQ ID NO: 1678 - DNA, 15 bp, Homo sapiens
tagagggaccatctt

SEQ ID NO: 1679 - DNA, 15 bp, Homo sapiens
ttagagggaccatct

SEQ ID NO: 1680 - DNA, 15 bp, Homo sapiens
cttagagggaccatc

SEQ ID NO: 1681 - DNA, 15 bp, Homo sapiens
tcttagagggaccat

SEQ ID NO: 1682 - DNA, 15 bp, Homo sapiens
ttcttagagggacca

SEQ ID NO: 1683 - DNA, 15 bp, Homo sapiens
tttcttagagggacc

SEQ ID NO: 1684 - DNA, 15 bp, Homo sapiens
ttttcttagagggac

SEQ ID NO: 1685 - DNA, 15 bp, Homo sapiens
cttttcttagaggga

SEQ ID NO: 1686 - DNA, 15 bp, Homo sapiens
acttttcttagaggg

SEQ ID NO: 1687 - DNA, 15 bp, Homo sapiens
tacttttcttagagg

SEQ ID NO: 1688 - DNA, 15 bp, Homo sapiens
gtacttttcttagag

SEQ ID NO: 1689 - DNA, 15 bp, Homo sapiens
tgtacttttcttaga

SEQ ID NO: 1690 - DNA, 15 bp, Homo sapiens
ttgtacttttcttag

SEQ ID NO: 1691 - DNA, 15 bp, Homo sapiens
gttgtacttttctta

SEQ ID NO: 1692 - DNA, 15 bp, Homo sapiens
ggttgtacttttctt

SEQ ID NO: 1693 - DNA, 15 bp, Homo sapiens
tggttgtacttttct

SEQ ID NO: 1694 - DNA, 15 bp, Homo sapiens
gtggttgtacttttc

SEQ ID NO: 1695 - DNA, 15 bp, Homo sapiens
ggtggttgtactttt

SEQ ID NO: 1696 - DNA, 15 bp, Homo sapiens
gggtggttgtacttt

SEQ ID NO: 1697 - DNA, 15 bp, Homo sapiens
tgggtggttgtactt

SEQ ID NO: 1698 - DNA, 15 bp, Homo sapiens
ctgggtggttgtact

SEQ ID NO: 1699 - DNA, 15 bp, Homo sapiens
gctgggtggttgtac

SEQ ID NO: 1700 - DNA, 15 bp, Homo sapiens
ggctgggtggttgta

SEQ ID NO: 1701 - DNA, 15 bp, Homo sapiens
gggctgggtggttgt

SEQ ID NO: 1702 - DNA, 15 bp, Homo sapiens
tgggctgggtggttg

SEQ ID NO: 1703 - DNA, 15 bp, Homo sapiens
atgggctgggtggtt

SEQ ID NO: 1704 - DNA, 15 bp, Homo sapiens
tatgggctgggtggt

SEQ ID NO: 1705 - DNA, 15 bp, Homo sapiens
ttatgggctgggtgg

SEQ ID NO: 1706 - DNA, 15 bp, Homo sapiens
attatgggctgggtg

SEQ ID NO: 1707 - DNA, 15 bp, Homo sapiens
aattatgggctgggt

SEQ ID NO: 1708 - DNA, 15 bp, Homo sapiens
gaattatgggctggg

SEQ ID NO: 1709 - DNA, 15 bp, Homo sapiens
tgaattatgggctgg

SEQ ID NO: 1710 - DNA, 15 bp, Homo sapiens
ctgaattatgggctg

SEQ ID NO: 1711 - DNA, 15 bp, Homo sapiens
gctgaattatgggct

SEQ ID NO: 1712 - DNA, 15 bp, Homo sapiens
agctgaattatgggc

SEQ ID NO: 1713 - DNA, 15 bp, Homo sapiens
gagctgaattatggg

SEQ ID NO: 1714 - DNA, 15 bp, Homo sapiens
ggagctgaattatgg

SEQ ID NO: 1715 - DNA, 15 bp, Homo sapiens
gggagctgaattatg

SEQ ID NO: 1716 - DNA, 15 bp, Homo sapiens
tgggagctgaattat

SEQ ID NO: 1717 - DNA, 15 bp, Homo sapiens
ctgggagctgaatta

SEQ ID NO: 1718 - DNA, 15 bp, Homo sapiens
cctgggagctgaatt

SEQ ID NO: 1719 - DNA, 15 bp, Homo sapiens
acctgggagctgaat

SEQ ID NO: 1720 - DNA, 15 bp, Homo sapiens
aacctgggagctgaa

SEQ ID NO: 1721 - DNA, 15 bp, Homo sapiens
aaacctgggagctga

SEQ ID NO: 1722 - DNA, 15 bp, Homo sapiens
aaaacctgggagctg

SEQ ID NO: 1723 - DNA, 15 bp, Homo sapiens
gaaaacctgggagct

SEQ ID NO: 1724 - DNA, 15 bp, Homo sapiens
ggaaaacctgggagc

SEQ ID NO: 1725 - DNA, 15 bp, Homo sapiens
gggaaaacctgggag

SEQ ID NO: 1726 - DNA, 15 bp, Homo sapiens
agggaaaacctggga

SEQ ID NO: 1727 - DNA, 15 bp, Homo sapiens
gagggaaaacctggg

SEQ ID NO: 1728 - DNA, 15 bp, Homo sapiens
tgagggaaaacctgg

SEQ ID NO: 1729 - DNA, 15 bp, Homo sapiens
ttgagggaaaacctg

SEQ ID NO: 1730 - DNA, 15 bp, Homo sapiens
tttgagggaaaacct

SEQ ID NO: 1731 - DNA, 15 bp, Homo sapiens
gtttgagggaaaacc

SEQ ID NO: 1732 - DNA, 15 bp, Homo sapiens
ggtttgagggaaaac

SEQ ID NO: 1733 - DNA, 15 bp, Homo sapiens
aggtttgagggaaaa

SEQ ID NO: 1734 - DNA, 15 bp, Homo sapiens
gaggtttgagggaaa

SEQ ID NO: 1735 - DNA, 15 bp, Homo sapiens
ggaggtttgagggaa

SEQ ID NO: 1736 - DNA, 15 bp, Homo sapiens
tggaggtttgaggga

SEQ ID NO: 1737 - DNA, 15 bp, Homo sapiens
atggaggtttgaggg

SEQ ID NO: 1738 - DNA, 15 bp, Homo sapiens
catggaggtttgagg

SEQ ID NO: 1739 - DNA, 15 bp, Homo sapiens
acatggaggtttgag

SEQ ID NO: 1740 - DNA, 15 bp, Homo sapiens
gacatggaggtttga

SEQ ID NO: 1741 - DNA, 15 bp, Homo sapiens
agacatggaggtttg

SEQ ID NO: 1742 - DNA, 15 bp, Homo sapiens
gagacatggaggttt

SEQ ID NO: 1743 - DNA, 15 bp, Homo sapiens
ggagacatggaggtt

SEQ ID NO: 1744 - DNA, 15 bp, Homo sapiens
aggagacatggaggt

SEQ ID NO: 1745 - DNA, 15 bp, Homo sapiens
caggagacatggagg

SEQ ID NO: 1746 - DNA, 15 bp, Homo sapiens
acaggagacatggag

SEQ ID NO: 1747 - DNA, 15 bp, Homo sapiens
tacaggagacatgga

SEQ ID NO: 1748 - DNA, 15 bp, Homo sapiens
ttacaggagacatgg

SEQ ID NO: 1749 - DNA, 15 bp, Homo sapiens
cttacaggagacatg

SEQ ID NO: 1750 - DNA, 15 bp, Homo sapiens
gcttacaggagacat

SEQ ID NO: 1751 - DNA, 15 bp, Homo sapiens
tgcttacaggagaca

SEQ ID NO: 1752 - DNA, 15 bp, Homo sapiens
ctgcttacaggagac

SEQ ID NO: 1753 - DNA, 15 bp, Homo sapiens
tctgcttacaggaga

SEQ ID NO: 1754 - DNA, 15 bp, Homo sapiens
ctctgcttacaggag

SEQ ID NO: 1755 - DNA, 15 bp, Homo sapiens
gctctgcttacagga

SEQ ID NO: 1756 - DNA, 15 bp, Homo sapiens
tgctctgcttacagg

SEQ ID NO: 1757 - DNA, 15 bp, Homo sapiens
ttgctctgcttacag

SEQ ID NO: 1758 - DNA, 15 bp, Homo sapiens
cttgctctgcttaca

SEQ ID NO: 1759 - DNA, 15 bp, Homo sapiens
tcttgctctgcttac

SEQ ID NO: 1760 - DNA, 15 bp, Homo sapiens
ctcttgctctgctta

SEQ ID NO: 1761 - DNA, 15 bp, Homo sapiens
actcttgctctgctt

SEQ ID NO: 1762 - DNA, 15 bp, Homo sapiens
tactcttgctctgct

SEQ ID NO: 1763 - DNA, 15 bp, Homo sapiens
ttactcttgctctgc

SEQ ID NO: 1764 - DNA, 15 bp, Homo sapiens
tttactcttgctctg

SEQ ID NO: 1765 - DNA, 15 bp, Homo sapiens
ttttactcttgctct

SEQ ID NO: 1766 - DNA, 15 bp, Homo sapiens
attttactcttgctc

SEQ ID NO: 1767 - DNA, 15 bp, Homo sapiens
gattttactcttgct

SEQ ID NO: 1768 - DNA, 15 bp, Homo sapiens
tgattttactcttgc

SEQ ID NO: 1769 - DNA, 15 bp, Homo sapiens
ctgattttactcttg

SEQ ID NO: 1770 - DNA, 15 bp, Homo sapiens
tctgattttactctt

SEQ ID NO: 1771 - DNA, 15 bp, Homo sapiens
atctgattttactct

SEQ ID NO: 1772 - DNA, 15 bp, Homo sapiens
tatctgattttactc

SEQ ID NO: 1773 - DNA, 15 bp, Homo sapiens
gtatctgattttact

SEQ ID NO: 1774 - DNA, 15 bp, Homo sapiens
ggtatctgattttac

SEQ ID NO: 1775 - DNA, 15 bp, Homo sapiens
tggtatctgatttta

SEQ ID NO: 1776 - DNA, 15 bp, Homo sapiens
ttggtatctgatttt

SEQ ID NO: 1777 - DNA, 15 bp, Homo sapiens
tttggtatctgattt

SEQ ID NO: 1778 - DNA, 15 bp, Homo sapiens
atttggtatctgatt

SEQ ID NO: 1779 - DNA, 15 bp, Homo sapiens
aatttggtatctgat

SEQ ID NO: 1780 - DNA, 15 bp, Homo sapiens
aaatttggtatctga

SEQ ID NO: 1781 - DNA, 15 bp, Homo sapiens
gaaatttggtatctg

SEQ ID NO: 1782 - DNA, 15 bp, Homo sapiens
ggaaatttggtatct

SEQ ID NO: 1783 - DNA, 15 bp, Homo sapiens
aggaaatttggtatc

SEQ ID NO: 1784 - DNA, 15 bp, Homo sapiens
gaggaaatttggtat

SEQ ID NO: 1785 - DNA, 15 bp, Homo sapiens
tgaggaaatttggta

SEQ ID NO: 1786 - DNA, 15 bp, Homo sapiens
atgaggaaatttggt

SEQ ID NO: 1787 - DNA, 15 bp, Homo sapiens
aatgaggaaatttgg

SEQ ID NO: 1788 - DNA, 15 bp, Homo sapiens
gaatgaggaaatttg

SEQ ID NO: 1789 - DNA, 15 bp, Homo sapiens
ggaatgaggaaattt

SEQ ID NO: 1790 - DNA, 15 bp, Homo sapiens
aggaatgaggaaatt

SEQ ID NO: 1791 - DNA, 15 bp, Homo sapiens
gaggaatgaggaaat

SEQ ID NO: 1792 - DNA, 15 bp, Homo sapiens
tgaggaatgaggaaa

SEQ ID NO: 1793 - DNA, 15 bp, Homo sapiens
ctgaggaatgaggaa

SEQ ID NO: 1794 - DNA, 15 bp, Homo sapiens
gctgaggaatgagga

SEQ ID NO: 1795 - DNA, 15 bp, Homo sapiens
agctgaggaatgagg

SEQ ID NO: 1796 - DNA, 15 bp, Homo sapiens
gagctgaggaatgag

SEQ ID NO: 1797 - DNA, 15 bp, Homo sapiens
ggagctgaggaatga

SEQ ID NO: 1798 - DNA, 15 bp, Homo sapiens
gggagctgaggaatg

SEQ ID NO: 1799 - DNA, 15 bp, Homo sapiens
tgggagctgaggaat

SEQ ID NO: 1800 - DNA, 15 bp, Homo sapiens
ttgggagctgaggaa

SEQ ID NO: 1801 - DNA, 15 bp, Homo sapiens
attgggagctgagga

SEQ ID NO: 1802 - DNA, 15 bp, Homo sapiens
gattgggagctgagg

SEQ ID NO: 1803 - DNA, 15 bp, Homo sapiens
ggattgggagctgag

SEQ ID NO: 1804 - DNA, 15 bp, Homo sapiens
gggattgggagctga

SEQ ID NO: 1805 - DNA, 15 bp, Homo sapiens
agggattgggagctg

SEQ ID NO: 1806 - DNA, 15 bp, Homo sapiens
tagggattgggagct

SEQ ID NO: 1807 - DNA, 15 bp, Homo sapiens
ttagggattgggagc

SEQ ID NO: 1808 - DNA, 15 bp, Homo sapiens
cttagggattgggag

SEQ ID NO: 1809 - DNA, 15 bp, Homo sapiens
ccttagggattggga

SEQ ID NO: 1810 - DNA, 15 bp, Homo sapiens
cccttagggattggg

SEQ ID NO: 1811 - DNA, 15 bp, Homo sapiens
gcccttagggattgg

SEQ ID NO: 1812 - DNA, 15 bp, Homo sapiens
tgcccttagggattg

SEQ ID NO: 1813 - DNA, 15 bp, Homo sapiens
atgcccttagggatt

SEQ ID NO: 1814 - DNA, 15 bp, Homo sapiens
tatgcccttagggat

SEQ ID NO: 1815 - DNA, 15 bp, Homo sapiens
ttatgcccttaggga

SEQ ID NO: 1816 - DNA, 15 bp, Homo sapiens
cttatgcccttaggg

SEQ ID NO: 1817 - DNA, 15 bp, Homo sapiens
tcttatgcccttagg

SEQ ID NO: 1818 - DNA, 15 bp, Homo sapiens
atcttatgcccttag

SEQ ID NO: 1819 - DNA, 15 bp, Homo sapiens
catcttatgccctta

SEQ ID NO: 1820 - DNA, 15 bp, Homo sapiens
tcatcttatgccctt

SEQ ID NO: 1821 - DNA, 15 bp, Homo sapiens
ttcatcttatgccct

SEQ ID NO: 1822 - DNA, 15 bp, Homo sapiens
tttcatcttatgccc

SEQ ID NO: 1823 - DNA, 15 bp, Homo sapiens
ttttcatcttatgcc

SEQ ID NO: 1824 - DNA, 15 bp, Homo sapiens
attttcatcttatgc

SEQ ID NO: 1825 - DNA, 15 bp, Homo sapiens
gattttcatcttatg

SEQ ID NO: 1826 - DNA, 15 bp, Homo sapiens
agattttcatcttat

SEQ ID NO: 1827 - DNA, 15 bp, Homo sapiens
aagattttcatctta

SEQ ID NO: 1828 - DNA, 15 bp, Homo sapiens
gaagattttcatctt

SEQ ID NO: 1829 - DNA, 15 bp, Homo sapiens
tgaagattttcatct

SEQ ID NO: 1830 - DNA, 15 bp, Homo sapiens
ctgaagattttcatc

SEQ ID NO: 1831 - DNA, 15 bp, Homo sapiens
tctgaagattttcat

SEQ ID NO: 1832 - DNA, 15 bp, Homo sapiens
atctgaagattttca

SEQ ID NO: 1833 - DNA, 15 bp, Homo sapiens
gatctgaagattttc

SEQ ID NO: 1834 - DNA, 15 bp, Homo sapiens
agatctgaagatttt

SEQ ID NO: 1835 - DNA, 15 bp, Homo sapiens
gagatctgaagattt

SEQ ID NO: 1836 - DNA, 15 bp, Homo sapiens
agagatctgaagatt

SEQ ID NO: 1837 - DNA, 15 bp, Homo sapiens
cagagatctgaagat

SEQ ID NO: 1838 - DNA, 15 bp, Homo sapiens
gcagagatctgaaga

SEQ ID NO: 1839 - DNA, 15 bp, Homo sapiens
agcagagatctgaag

SEQ ID NO: 1840 - DNA, 15 bp, Homo sapiens
aagcagagatctgaa

SEQ ID NO: 1841 - DNA, 15 bp, Homo sapiens
aaagcagagatctga

SEQ ID NO: 1842 - DNA, 15 bp, Homo sapiens
gaaagcagagatctg

SEQ ID NO: 1843 - DNA, 15 bp, Homo sapiens
ggaaagcagagatct

SEQ ID NO: 1844 - DNA, 15 bp, Homo sapiens
aggaaagcagagatc

SEQ ID NO: 1845 - DNA, 15 bp, Homo sapiens
gaggaaagcagagat

SEQ ID NO: 1846 - DNA, 15 bp, Homo sapiens
ggaggaaagcagaga

SEQ ID NO: 1847 - DNA, 15 bp, Homo sapiens
gggaggaaagcagag

SEQ ID NO: 1848 - DNA, 15 bp, Homo sapiens
agggaggaaagcaga

SEQ ID NO: 1849 - DNA, 15 bp, Homo sapiens
gagggaggaaagcag

SEQ ID NO: 1850 - DNA, 15 bp, Homo sapiens
agagggaggaaagca

SEQ ID NO: 1851 - DNA, 15 bp, Homo sapiens
aagagggaggaaagc

SEQ ID NO: 1852 - DNA, 15 bp, Homo sapiens
aaagagggaggaaag

SEQ ID NO: 1853 - DNA, 15 bp, Homo sapiens
aaaagagggaggaaa

SEQ ID NO: 1854 - DNA, 15 bp, Homo sapiens
aaaaagagggaggaa

SEQ ID NO: 1855 - DNA, 15 bp, Homo sapiens
aaaaaagagggagga

SEQ ID NO: 1856 - DNA, 15 bp, Homo sapiens
aaaaaaagagggagg

SEQ ID NO: 1857 - DNA, 15 bp, Homo sapiens
gaaaaaaagagggag

SEQ ID NO: 1858 - DNA, 15 bp, Homo sapiens
agaaaaaaagaggga

SEQ ID NO: 1859 - DNA, 15 bp, Homo sapiens
aagaaaaaaagaggg

SEQ ID NO: 1860 - DNA, 15 bp, Homo sapiens
gaagaaaaaaagagg

SEQ ID NO: 1861 - DNA, 15 bp, Homo sapiens
ggaagaaaaaaagag

SEQ ID NO: 1862 - DNA, 15 bp, Homo sapiens
aggaagaaaaaaaga

SEQ ID NO: 1863 - DNA, 15 bp, Homo sapiens
gaggaagaaaaaaag

SEQ ID NO: 1864 - DNA, 15 bp, Homo sapiens
agaggaagaaaaaaa

SEQ ID NO: 1865 - DNA, 15 bp, Homo sapiens
cagaggaagaaaaaa

SEQ ID NO: 1866 - DNA, 15 bp, Homo sapiens
acagaggaagaaaaa

SEQ ID NO: 1867 - DNA, 15 bp, Homo sapiens
aacagaggaagaaaa

SEQ ID NO: 1868 - DNA, 15 bp, Homo sapiens
taacagaggaagaaa

SEQ ID NO: 1869 - DNA, 15 bp, Homo sapiens
ttaacagaggaagaa

SEQ ID NO: 1870 - DNA, 15 bp, Homo sapiens
gttaacagaggaaga

SEQ ID NO: 1871 - DNA, 15 bp, Homo sapiens
tgttaacagaggaag

SEQ ID NO: 1872 - DNA, 15 bp, Homo sapiens
atgttaacagaggaa

SEQ ID NO: 1873 - DNA, 15 bp, Homo sapiens
aatgttaacagagga

SEQ ID NO: 1874 - DNA, 15 bp, Homo sapiens
aaatgttaacagagg

SEQ ID NO: 1875 - DNA, 15 bp, Homo sapiens
caaatgttaacagag

SEQ ID NO: 1876 - DNA, 15 bp, Homo sapiens
acaaatgttaacaga

SEQ ID NO: 1877 - DNA, 15 bp, Homo sapiens
gacaaatgttaacag

SEQ ID NO: 1878 - DNA, 15 bp, Homo sapiens
tgacaaatgttaaca

SEQ ID NO: 1879 - DNA, 15 bp, Homo sapiens
ttgacaaatgttaac

SEQ ID NO: 1880 - DNA, 15 bp, Homo sapiens
cttgacaaatgttaa

SEQ ID NO: 1881 - DNA, 15 bp, Homo sapiens
acttgacaaatgtta

SEQ ID NO: 1882 - DNA, 15 bp, Homo sapiens
cacttgacaaatgtt

SEQ ID NO: 1883 - DNA, 15 bp, Homo sapiens
acacttgacaaatgt

SEQ ID NO: 1884 - DNA, 15 bp, Homo sapiens
aacacttgacaaatg

SEQ ID NO: 1885 - DNA, 15 bp, Homo sapiens
taacacttgacaaat

SEQ ID NO: 1886 - DNA, 15 bp, Homo sapiens
gtaacacttgacaaa

SEQ ID NO: 1887 - DNA, 15 bp, Homo sapiens
agtaacacttgacaa

SEQ ID NO: 1888 - DNA, 15 bp, Homo sapiens
tagtaacacttgaca

SEQ ID NO: 1889 - DNA, 15 bp, Homo sapiens
ttagtaacacttgac

SEQ ID NO: 1890 - DNA, 15 bp, Homo sapiens
cttagtaacacttga

SEQ ID NO: 1891 - DNA, 15 bp, Homo sapiens
acttagtaacacttg

SEQ ID NO: 1892 - DNA, 15 bp, Homo sapiens
cacttagtaacactt

SEQ ID NO: 1893 - DNA, 15 bp, Homo sapiens
acacttagtaacact

SEQ ID NO: 1894 - DNA, 15 bp, Homo sapiens
gacacttagtaacac

SEQ ID NO: 1895 - DNA, 15 bp, Homo sapiens
agacacttagtaaca

SEQ ID NO: 1896 - DNA, 15 bp, Homo sapiens
cagacacttagtaac

SEQ ID NO: 1897 - DNA, 15 bp, Homo sapiens
ccagacacttagtaa

SEQ ID NO: 1898 - DNA, 15 bp, Homo sapiens
gccagacacttagta

SEQ ID NO: 1899 - DNA, 15 bp, Homo sapiens
tgccagacacttagt

SEQ ID NO: 1900 - DNA, 15 bp, Homo sapiens
gtgccagacacttag

SEQ ID NO: 1901 - DNA, 15 bp, Homo sapiens
agtgccagacactta

SEQ ID NO: 1902 - DNA, 15 bp, Homo sapiens
cagtgccagacactt

SEQ ID NO: 1903 - DNA, 15 bp, Homo sapiens
acagtgccagacact

SEQ ID NO: 1904 - DNA, 15 bp, Homo sapiens
tacagtgccagacac

SEQ ID NO: 1905 - DNA, 15 bp, Homo sapiens
gtacagtgccagaca

SEQ ID NO: 1906 - DNA, 15 bp, Homo sapiens
agtacagtgccagac

SEQ ID NO: 1907 - DNA, 15 bp, Homo sapiens
tagtacagtgccaga

SEQ ID NO: 1908 - DNA, 15 bp, Homo sapiens
ttagtacagtgccag

SEQ ID NO: 1909 - DNA, 15 bp, Homo sapiens
cttagtacagtgcca

SEQ ID NO: 1910 - DNA, 15 bp, Homo sapiens
acttagtacagtgcc

SEQ ID NO: 1911 - DNA, 15 bp, Homo sapiens
cacttagtacagtgc

SEQ ID NO: 1912 - DNA, 15 bp, Homo sapiens
gcacttagtacagtg

SEQ ID NO: 1913 - DNA, 15 bp, Homo sapiens
tgcacttagtacagt

SEQ ID NO: 1914 - DNA, 15 bp, Homo sapiens
atgcacttagtacag

SEQ ID NO: 1915 - DNA, 15 bp, Homo sapiens
gatgcacttagtaca

SEQ ID NO: 1916 - DNA, 15 bp, Homo sapiens
tgatgcacttagtac

SEQ ID NO: 1917 - DNA, 15 bp, Homo sapiens
gtgatgcacttagta

SEQ ID NO: 1918 - DNA, 15 bp, Homo sapiens
ggtgatgcacttagt

SEQ ID NO: 1919 - DNA, 15 bp, Homo sapiens
aggtgatgcacttag

SEQ ID NO: 1920 - DNA, 15 bp, Homo sapiens
gaggtgatgcactta

SEQ ID NO: 1921 - DNA, 15 bp, Homo sapiens
ggaggtgatgcactt

SEQ ID NO: 1922 - DNA, 15 bp, Homo sapiens
gggaggtgatgcact

SEQ ID NO: 1923 - DNA, 15 bp, Homo sapiens
agggaggtgatgcac

SEQ ID NO: 1924 - DNA, 15 bp, Homo sapiens
cagggaggtgatgca

SEQ ID NO: 1925 - DNA, 15 bp, Homo sapiens
tcagggaggtgatgc

SEQ ID NO: 1926 - DNA, 15 bp, Homo sapiens
ttcagggaggtgatg

SEQ ID NO: 1927 - DNA, 15 bp, Homo sapiens
gttcagggaggtgat

SEQ ID NO: 1928 - DNA, 15 bp, Homo sapiens
agttcagggaggtga

SEQ ID NO: 1929 - DNA, 15 bp, Homo sapiens
gagttcagggaggtg

SEQ ID NO: 1930 - DNA, 15 bp, Homo sapiens
agagttcagggaggt

SEQ ID NO: 1931 - DNA, 15 bp, Homo sapiens
gagagttcagggagg

SEQ ID NO: 1932 - DNA, 15 bp, Homo sapiens
ggagagttcagggag

SEQ ID NO: 1933 - DNA, 15 bp, Homo sapiens
cggagagttcaggga

SEQ ID NO: 1934 - DNA, 15 bp, Homo sapiens
tcggagagttcaggg

SEQ ID NO: 1935 - DNA, 15 bp, Homo sapiens
ttcggagagttcagg

SEQ ID NO: 1936 - DNA, 15 bp, Homo sapiens
gttcggagagttcag

SEQ ID NO: 1937 - DNA, 15 bp, Homo sapiens
tgttcggagagttca

SEQ ID NO: 1938 - DNA, 15 bp, Homo sapiens
ctgttcggagagttc

SEQ ID NO: 1939 - DNA, 15 bp, Homo sapiens
actgttcggagagtt

SEQ ID NO: 1940 - DNA, 15 bp, Homo sapiens
aactgttcggagagt

SEQ ID NO: 1941 - DNA, 15 bp, Homo sapiens
gaactgttcggagag

SEQ ID NO: 1942 - DNA, 15 bp, Homo sapiens
ggaactgttcggaga

SEQ ID NO: 1943 - DNA, 15 bp, Homo sapiens
tggaactgttcggag

SEQ ID NO: 1944 - DNA, 15 bp, Homo sapiens
gtggaactgttcgga

SEQ ID NO: 1945 - DNA, 15 bp, Homo sapiens
cgtggaactgttcgg

SEQ ID NO: 1946 - DNA, 15 bp, Homo sapiens
tcgtggaactgttcg

SEQ ID NO: 1947 - DNA, 15 bp, Homo sapiens
ctcgtggaactgttc

SEQ ID NO: 1948 - DNA, 15 bp, Homo sapiens
tctcgtggaactgtt

SEQ ID NO: 1949 - DNA, 15 bp, Homo sapiens
ctctcgtggaactgt

SEQ ID NO: 1950 - DNA, 15 bp, Homo sapiens
tctctcgtggaactg

SEQ ID NO: 1951 - DNA, 15 bp, Homo sapiens
ctctctcgtggaact

SEQ ID NO: 1952 - DNA, 15 bp, Homo sapiens
cctctctcgtggaac

SEQ ID NO: 1953 - DNA, 15 bp, Homo sapiens
gcctctctcgtggaa

SEQ ID NO: 1954 - DNA, 15 bp, Homo sapiens
ggcctctctcgtgga

SEQ ID NO: 1955 - DNA, 15 bp, Homo sapiens
aggcctctctcgtgg

SEQ ID NO: 1956 - DNA, 15 bp, Homo sapiens
gaggcctctctcgtg

SEQ ID NO: 1957 - DNA, 15 bp, Homo sapiens
agaggcctctctcgt

SEQ ID NO: 1958 - DNA, 15 bp, Homo sapiens
gagaggcctctctcg

SEQ ID NO: 1959 - DNA, 15 bp, Homo sapiens
agagaggcctctctc

SEQ ID NO: 1960 - DNA, 15 bp, Homo sapiens
cagagaggcctctct

SEQ ID NO: 1961 - DNA, 15 bp, Homo sapiens
acagagaggcctctc

SEQ ID NO: 1962 - DNA, 15 bp, Homo sapiens
cacagagaggcctct

SEQ ID NO: 1963 - DNA, 15 bp, Homo sapiens
tcacagagaggcctc

SEQ ID NO: 1964 - DNA, 15 bp, Homo sapiens
atcacagagaggcct

SEQ ID NO: 1965 - DNA, 15 bp, Homo sapiens
gatcacagagaggcc

SEQ ID NO: 1966 - DNA, 15 bp, Homo sapiens
ggatcacagagaggc

SEQ ID NO: 1967 - DNA, 15 bp, Homo sapiens
gggatcacagagagg

SEQ ID NO: 1968 - DNA, 15 bp, Homo sapiens
ggggatcacagagag

SEQ ID NO: 1969 - DNA, 15 bp, Homo sapiens
gggggatcacagaga

SEQ ID NO: 1970 - DNA, 15 bp, Homo sapiens
ggggggatcacagag

SEQ ID NO: 1971 - DNA, 15 bp, Homo sapiens
cggggggatcacaga

SEQ ID NO: 1972 - DNA, 15 bp, Homo sapiens
ccggggggatcacag

SEQ ID NO: 1973 - DNA, 15 bp, Homo sapiens
accggggggatcaca

SEQ ID NO: 1974 - DNA, 15 bp, Homo sapiens
taccggggggatcac

SEQ ID NO: 1975 - DNA, 15 bp, Homo sapiens
gtaccggggggatca

SEQ ID NO: 1976 - DNA, 15 bp, Homo sapiens
agtaccggggggatc

SEQ ID NO: 1977 - DNA, 15 bp, Homo sapiens
cagtaccggggggat

SEQ ID NO: 1978 - DNA, 15 bp, Homo sapiens
tcagtaccgggggga

SEQ ID NO: 1979 - DNA, 15 bp, Homo sapiens
atcagtaccgggggg

SEQ ID NO: 1980 - DNA, 15 bp, Homo sapiens
catcagtaccggggg

SEQ ID NO: 1981 - DNA, 15 bp, Homo sapiens
tcatcagtaccgggg

SEQ ID NO: 1982 - DNA, 15 bp, Homo sapiens
ctcatcagtaccggg

SEQ ID NO: 1983 - DNA, 15 bp, Homo sapiens
cctcatcagtaccgg

SEQ ID NO: 1984 - DNA, 15 bp, Homo sapiens
acctcatcagtaccg

SEQ ID NO: 1985 - DNA, 15 bp, Homo sapiens
gacctcatcagtacc

SEQ ID NO: 1986 - DNA, 15 bp, Homo sapiens
tgacctcatcagtac

SEQ ID NO: 1987 - DNA, 15 bp, Homo sapiens
gtgacctcatcagta

SEQ ID NO: 1988 - DNA, 15 bp, Homo sapiens
agtgacctcatcagt

SEQ ID NO: 1989 - DNA, 15 bp, Homo sapiens
cagtgacctcatcag

SEQ ID NO: 1990 - DNA, 15 bp, Homo sapiens
tcagtgacctcatca

SEQ ID NO: 1991 - DNA, 15 bp, Homo sapiens
ctcagtgacctcatc

SEQ ID NO: 1992 - DNA, 15 bp, Homo sapiens
cctcagtgacctcat

SEQ ID NO: 1993 - DNA, 15 bp, Homo sapiens
gcctcagtgacctca

SEQ ID NO: 1994 - DNA, 15 bp, Homo sapiens
agcctcagtgacctc

SEQ ID NO: 1995 - DNA, 15 bp, Homo sapiens
gagcctcagtgacct

SEQ ID NO: 1996 - DNA, 15 bp, Homo sapiens
ggagcctcagtgacc

SEQ ID NO: 1997 - DNA, 15 bp, Homo sapiens
tggagcctcagtgac

SEQ ID NO: 1998 - DNA, 15 bp, Homo sapiens
ctggagcctcagtga

SEQ ID NO: 1999 - DNA, 15 bp, Homo sapiens
tctggagcctcagtg

SEQ ID NO: 2000 - DNA, 15 bp, Homo sapiens
ctctggagcctcagt

SEQ ID NO: 2001 - DNA, 15 bp, Homo sapiens
tctctggagcctcag

SEQ ID NO: 2002 - DNA, 15 bp, Homo sapiens
ttctctggagcctca

SEQ ID NO: 2003 - DNA, 15 bp, Homo sapiens
cttctctggagcctc

SEQ ID NO: 2004 - DNA, 15 bp, Homo sapiens
ccttctctggagcct

SEQ ID NO: 2005 - DNA, 15 bp, Homo sapiens
tccttctctggagcc

SEQ ID NO: 2006 - DNA, 15 bp, Homo sapiens
atccttctctggagc

SEQ ID NO: 2007 - DNA, 15 bp, Homo sapiens
aatccttctctggag

SEQ ID NO: 2008 - DNA, 15 bp, Homo sapiens
taatccttctctgga

SEQ ID NO: 2009 - DNA, 15 bp, Homo sapiens
ctaatccttctctgg

SEQ ID NO: 2010 - DNA, 15 bp, Homo sapiens
actaatccttctctg

SEQ ID NO: 2011 - DNA, 15 bp, Homo sapiens
tactaatccttctct

SEQ ID NO: 2012 - DNA, 15 bp, Homo sapiens
ttactaatccttctc

SEQ ID NO: 2013 - DNA, 15 bp, Homo sapiens
gttactaatccttct

SEQ ID NO: 2014 - DNA, 15 bp, Homo sapiens
agttactaatccttc

SEQ ID NO: 2015 - DNA, 15 bp, Homo sapiens
cagttactaatcctt

SEQ ID NO: 2016 - DNA, 15 bp, Homo sapiens
ccagttactaatcct

SEQ ID NO: 2017 - DNA, 15 bp, Homo sapiens
accagttactaatcc

SEQ ID NO: 2018 - DNA, 15 bp, Homo sapiens
caccagttactaatc

SEQ ID NO: 2019 - DNA, 15 bp, Homo sapiens
ccaccagttactaat

SEQ ID NO: 2020 - DNA, 15 bp, Homo sapiens
cccaccagttactaa

SEQ ID NO: 2021 - DNA, 15 bp, Homo sapiens
ccccaccagttacta

SEQ ID NO: 2022 - DNA, 15 bp, Homo sapiens
accccaccagttact

SEQ ID NO: 2023 - DNA, 15 bp, Homo sapiens
aaccccaccagttac

SEQ ID NO: 2024 - DNA, 15 bp, Homo sapiens
caaccccaccagtta

SEQ ID NO: 2025 - DNA, 15 bp, Homo sapiens
ccaaccccaccagtt

SEQ ID NO: 2026 - DNA, 15 bp, Homo sapiens
tccaaccccaccagt

SEQ ID NO: 2027 - DNA, 15 bp, Homo sapiens
gtccaaccccaccag

SEQ ID NO: 2028 - DNA, 15 bp, Homo sapiens
ggtccaaccccacca

SEQ ID NO: 2029 - DNA, 15 bp, Homo sapiens
aggtccaaccccacc

SEQ ID NO: 2030 - DNA, 15 bp, Homo sapiens
caggtccaaccccac

SEQ ID NO: 2031 - DNA, 15 bp, Homo sapiens
ccaggtccaacccca

SEQ ID NO: 2032 - DNA, 15 bp, Homo sapiens
cccaggtccaacccc

SEQ ID NO: 2033 - DNA, 15 bp, Homo sapiens
tcccaggtccaaccc

SEQ ID NO: 2034 - DNA, 15 bp, Homo sapiens
atcccaggtccaacc

SEQ ID NO: 2035 - DNA, 15 bp, Homo sapiens
aatcccaggtccaac

SEQ ID NO: 2036 - DNA, 15 bp, Homo sapiens
gaatcccaggtccaa

SEQ ID NO: 2037 - DNA, 15 bp, Homo sapiens
tgaatcccaggtcca

SEQ ID NO: 2038 - DNA, 15 bp, Homo sapiens
gtgaatcccaggtcc

SEQ ID NO: 2039 - DNA, 15 bp, Homo sapiens
tgtgaatcccaggtc

SEQ ID NO: 2040 - DNA, 15 bp, Homo sapiens
gtgtgaatcccaggt

SEQ ID NO: 2041 - DNA, 15 bp, Homo sapiens
ggtgtgaatcccagg

SEQ ID NO: 2042 - DNA, 15 bp, Homo sapiens
gggtgtgaatcccag

SEQ ID NO: 2043 - DNA, 15 bp, Homo sapiens
tgggtgtgaatccca

SEQ ID NO: 2044 - DNA, 15 bp, Homo sapiens
atgggtgtgaatccc

SEQ ID NO: 2045 - DNA, 15 bp, Homo sapiens
catgggtgtgaatcc

SEQ ID NO: 2046 - DNA, 15 bp, Homo sapiens
gcatgggtgtgaatc

SEQ ID NO: 2047 - DNA, 15 bp, Homo sapiens
agcatgggtgtgaat

SEQ ID NO: 2048 - DNA, 15 bp, Homo sapiens
cagcatgggtgtgaa

SEQ ID NO: 2049 - DNA, 15 bp, Homo sapiens
gcagcatgggtgtga

SEQ ID NO: 2050 - DNA, 15 bp, Homo sapiens
cgcagcatgggtgtg

SEQ ID NO: 2051 - DNA, 15 bp, Homo sapiens
acgcagcatgggtgt

SEQ ID NO: 2052 - DNA, 15 bp, Homo sapiens
cacgcagcatgggtg

SEQ ID NO: 2053 - DNA, 15 bp, Homo sapiens
tcacgcagcatgggt

SEQ ID NO: 2054 - DNA, 15 bp, Homo sapiens
gtcacgcagcatggg

SEQ ID NO: 2055 - DNA, 15 bp, Homo sapiens
ggtcacgcagcatgg

SEQ ID NO: 2056 - DNA, 15 bp, Homo sapiens
gggtcacgcagcatg

SEQ ID NO: 2057 - DNA, 15 bp, Homo sapiens
tgggtcacgcagcat

SEQ ID NO: 2058 - DNA, 15 bp, Homo sapiens
ctgggtcacgcagca

SEQ ID NO: 2059 - DNA, 15 bp, Homo sapiens
cctgggtcacgcagc

SEQ ID NO: 2060 - DNA, 15 bp, Homo sapiens
tcctgggtcacgcag

SEQ ID NO: 2061 - DNA, 15 bp, Homo sapiens
gtcctgggtcacgca

SEQ ID NO: 2062 - DNA, 15 bp, Homo sapiens
tgtcctgggtcacgc

SEQ ID NO: 2063 - DNA, 15 bp, Homo sapiens
ctgtcctgggtcacg

SEQ ID NO: 2064 - DNA, 15 bp, Homo sapiens
cctgtcctgggtcac

SEQ ID NO: 2065 - DNA, 15 bp, Homo sapiens
gcctgtcctgggtca

SEQ ID NO: 2066 - DNA, 15 bp, Homo sapiens
tgcctgtcctgggtc

SEQ ID NO: 2067 - DNA, 15 bp, Homo sapiens
ctgcctgtcctgggt

SEQ ID NO: 2068 - DNA, 15 bp, Homo sapiens
cctgcctgtcctggg

SEQ ID NO: 2069 - DNA, 15 bp, Homo sapiens
gcctgcctgtcctgg

SEQ ID NO: 2070 - DNA, 15 bp, Homo sapiens
tgcctgcctgtcctg

SEQ ID NO: 2071 - DNA, 15 bp, Homo sapiens
atgcctgcctgtcct

SEQ ID NO: 2072 - DNA, 15 bp, Homo sapiens
catgcctgcctgtcc

SEQ ID NO: 2073 - DNA, 15 bp, Homo sapiens
ccatgcctgcctgtc

SEQ ID NO: 2074 - DNA, 15 bp, Homo sapiens
gccatgcctgcctgt

SEQ ID NO: 2075 - DNA, 15 bp, Homo sapiens
ggccatgcctgcctg

SEQ ID NO: 2076 - DNA, 15 bp, Homo sapiens
cggccatgcctgcct

SEQ ID NO: 2077 - DNA, 15 bp, Homo sapiens
acggccatgcctgcc

SEQ ID NO: 2078 - DNA, 15 bp, Homo sapiens
aacggccatgcctgc

SEQ ID NO: 2079 - DNA, 15 bp, Homo sapiens
taacggccatgcctg

SEQ ID NO: 2080 - DNA, 15 bp, Homo sapiens
gtaacggccatgcct

SEQ ID NO: 2081 - DNA, 15 bp, Homo sapiens
tgtaacggccatgcc

SEQ ID NO: 2082 - DNA, 15 bp, Homo sapiens
gtgtaacggccatgc

SEQ ID NO: 2083 - DNA, 15 bp, Homo sapiens
ggtgtaacggccatg

SEQ ID NO: 2084 - DNA, 15 bp, Homo sapiens
tggtgtaacggccat

SEQ ID NO: 2085 - DNA, 15 bp, Homo sapiens
gtggtgtaacggcca

SEQ ID NO: 2086 - DNA, 15 bp, Homo sapiens
tgtggtgtaacggcc

SEQ ID NO: 2087 - DNA, 15 bp, Homo sapiens
gtgtggtgtaacggc

SEQ ID NO: 2088 - DNA, 15 bp, Homo sapiens
agtgtggtgtaacgg

SEQ ID NO: 2089 - DNA, 15 bp, Homo sapiens
cagtgtggtgtaacg

SEQ ID NO: 2090 - DNA, 15 bp, Homo sapiens
tcagtgtggtgtaac

SEQ ID NO: 2091 - DNA, 15 bp, Homo sapiens
gtcagtgtggtgtaa

SEQ ID NO: 2092 - DNA, 15 bp, Homo sapiens
ggtcagtgtggtgta

SEQ ID NO: 2093 - DNA, 15 bp, Homo sapiens
gggtcagtgtggtgt

SEQ ID NO: 2094 - DNA, 15 bp, Homo sapiens
ggggtcagtgtggtg

SEQ ID NO: 2095 - DNA, 15 bp, Homo sapiens
gggggtcagtgtggt

SEQ ID NO: 2096 - DNA, 15 bp, Homo sapiens
cgggggtcagtgtgg

SEQ ID NO: 2097 - DNA, 15 bp, Homo sapiens
acgggggtcagtgtg

SEQ ID NO: 2098 - DNA, 15 bp, Homo sapiens
cacgggggtcagtgt

SEQ ID NO: 2099 - DNA, 15 bp, Homo sapiens
ccacgggggtcagtg

SEQ ID NO: 2100 - DNA, 15 bp, Homo sapiens
tccacgggggtcagt

SEQ ID NO: 2101 - DNA, 15 bp, Homo sapiens
atccacgggggtcag

SEQ ID NO: 2102 - DNA, 15 bp, Homo sapiens
gatccacgggggtca

SEQ ID NO: 2103 - DNA, 15 bp, Homo sapiens
cgatccacgggggtc

SEQ ID NO: 2104 - DNA, 15 bp, Homo sapiens
tcgatccacgggggt

SEQ ID NO: 2105 - DNA, 15 bp, Homo sapiens
ctcgatccacggggg

SEQ ID NO: 2106 - DNA, 15 bp, Homo sapiens
tctcgatccacgggg

SEQ ID NO: 2107 - DNA, 15 bp, Homo sapiens
atctcgatccacggg

SEQ ID NO: 2108 - DNA, 15 bp, Homo sapiens
gatctcgatccacgg

SEQ ID NO: 2109 - DNA, 15 bp, Homo sapiens
agatctcgatccacg

SEQ ID NO: 2110 - DNA, 15 bp, Homo sapiens
tagatctcgatccac

SEQ ID NO: 2111 - DNA, 15 bp, Homo sapiens
atagatctcgatcca

SEQ ID NO: 2112 - DNA, 15 bp, Homo sapiens
gatagatctcgatcc

SEQ ID NO: 2113 - DNA, 15 bp, Homo sapiens
ggatagatctcgatc

SEQ ID NO: 2114 - DNA, 15 bp, Homo sapiens
tggatagatctcgat

SEQ ID NO: 2115 - DNA, 15 bp, Homo sapiens
ttggatagatctcga

SEQ ID NO: 2116 - DNA, 15 bp, Homo sapiens
attggatagatctcg

SEQ ID NO: 2117 - DNA, 15 bp, Homo sapiens
tattggatagatctc

SEQ ID NO: 2118 - DNA, 15 bp, Homo sapiens
ctattggatagatct

SEQ ID NO: 2119 - DNA, 15 bp, Homo sapiens
actattggatagatc

SEQ ID NO: 2120 - DNA, 15 bp, Homo sapiens
gactattggatagat

SEQ ID NO: 2121 - DNA, 15 bp, Homo sapiens
agactattggataga

SEQ ID NO: 2122 - DNA, 15 bp, Homo sapiens
cagactattggatag

SEQ ID NO: 2123 - DNA, 15 bp, Homo sapiens
ccagactattggata

SEQ ID NO: 2124 - DNA, 15 bp, Homo sapiens
accagactattggat

SEQ ID NO: 2125 - DNA, 15 bp, Homo sapiens
gaccagactattgga

SEQ ID NO: 2126 - DNA, 15 bp, Homo sapiens
tgaccagactattgg

SEQ ID NO: 2127 - DNA, 15 bp, Homo sapiens
gtgaccagactattg

SEQ ID NO: 2128 - DNA, 15 bp, Homo sapiens
agtgaccagactatt

SEQ ID NO: 2129 - DNA, 15 bp, Homo sapiens
cagtgaccagactat

SEQ ID NO: 2130 - DNA, 15 bp, Homo sapiens
tcagtgaccagacta

SEQ ID NO: 2131 - DNA, 15 bp, Homo sapiens
atcagtgaccagact

SEQ ID NO: 2132 - DNA, 15 bp, Homo sapiens
tatcagtgaccagac

SEQ ID NO: 2133 - DNA, 15 bp, Homo sapiens
atatcagtgaccaga

SEQ ID NO: 2134 - DNA, 15 bp, Homo sapiens
gatatcagtgaccag

SEQ ID NO: 2135 - DNA, 15 bp, Homo sapiens
tgatatcagtgacca

SEQ ID NO: 2136 - DNA, 15 bp, Homo sapiens
gtgatatcagtgacc

SEQ ID NO: 2137 - DNA, 15 bp, Homo sapiens
agtgatatcagtgac

SEQ ID NO: 2138 - DNA, 15 bp, Homo sapiens
tagtgatatcagtga

SEQ ID NO: 2139 - DNA, 15 bp, Homo sapiens
ttagtgatatcagtg

SEQ ID NO: 2140 - DNA, 15 bp, Homo sapiens
cttagtgatatcagt

SEQ ID NO: 2141 - DNA, 15 bp, Homo sapiens
tcttagtgatatcag

SEQ ID NO: 2142 - DNA, 15 bp, Homo sapiens
atcttagtgatatca

SEQ ID NO: 2143 - DNA, 15 bp, Homo sapiens
tatcttagtgatatc

SEQ ID NO: 2144 - DNA, 15 bp, Homo sapiens
ctatcttagtgatat

SEQ ID NO: 2145 - DNA, 15 bp, Homo sapiens
tctatcttagtgata

SEQ ID NO: 2146 - DNA, 15 bp, Homo sapiens
ctctatcttagtgat

SEQ ID NO: 2147 - DNA, 15 bp, Homo sapiens
actctatcttagtga

SEQ ID NO: 2148 - DNA, 15 bp, Homo sapiens
cactctatcttagtg

SEQ ID NO: 2149 - DNA, 15 bp, Homo sapiens
ccactctatcttagt

SEQ ID NO: 2150 - DNA, 15 bp, Homo sapiens
gccactctatcttag

SEQ ID NO: 2151 - DNA, 15 bp, Homo sapiens
ggccactctatctta

SEQ ID NO: 2152 - DNA, 15 bp, Homo sapiens
tggccactctatctt

SEQ ID NO: 2153 - DNA, 15 bp, Homo sapiens
atggccactctatct

SEQ ID NO: 2154 - DNA, 15 bp, Homo sapiens
tatggccactctatc

SEQ ID NO: 2155 - DNA, 15 bp, Homo sapiens
atatggccactctat

SEQ ID NO: 2156 - DNA, 15 bp, Homo sapiens
tatatggccactcta

SEQ ID NO: 2157 - DNA, 15 bp, Homo sapiens
ttatatggccactct

SEQ ID NO: 2158 - DNA, 15 bp, Homo sapiens
attatatggccactc

SEQ ID NO: 2159 - DNA, 15 bp, Homo sapiens
aattatatggccact

SEQ ID NO: 2160 - DNA, 15 bp, Homo sapiens
aaattatatggccac

SEQ ID NO: 2161 - DNA, 15 bp, Homo sapiens
taaattatatggcca

SEQ ID NO: 2162 - DNA, 15 bp, Homo sapiens
ataaattatatggcc

SEQ ID NO: 2163 - DNA, 15 bp, Homo sapiens
gataaattatatggc

SEQ ID NO: 2164 - DNA, 15 bp, Homo sapiens
tgataaattatatgg

SEQ ID NO: 2165 - DNA, 15 bp, Homo sapiens
atgataaattatatg

SEQ ID NO: 2166 - DNA, 15 bp, Homo sapiens
gatgataaattatat

SEQ ID NO: 2167 - DNA, 15 bp, Homo sapiens
ggatgataaattata

SEQ ID NO: 2168 - DNA, 15 bp, Homo sapiens
tggatgataaattat

SEQ ID NO: 2169 - DNA, 15 bp, Homo sapiens
ttggatgataaatta

SEQ ID NO: 2170 - DNA, 15 bp, Homo sapiens
attggatgataaatt

SEQ ID NO: 2171 - DNA, 15 bp, Homo sapiens
gattggatgataaat

SEQ ID NO: 2172 - DNA, 15 bp, Homo sapiens
tgattggatgataaa

SEQ ID NO: 2173 - DNA, 15 bp, Homo sapiens
ctgattggatgataa

SEQ ID NO: 2174 - DNA, 15 bp, Homo sapiens
cctgattggatgata

SEQ ID NO: 2175 - DNA, 15 bp, Homo sapiens
ccctgattggatgat

SEQ ID NO: 2176 - DNA, 15 bp, Homo sapiens
gccctgattggatga

SEQ ID NO: 2177 - DNA, 15 bp, Homo sapiens
tgccctgattggatg

SEQ ID NO: 2178 - DNA, 15 bp, Homo sapiens
ctgccctgattggat

SEQ ID NO: 2179 - DNA, 15 bp, Homo sapiens
actgccctgattgga

SEQ ID NO: 2180 - DNA, 15 bp, Homo sapiens
aactgccctgattgg

SEQ ID NO: 2181 - DNA, 15 bp, Homo sapiens
aaactgccctgattg

SEQ ID NO: 2182 - DNA, 15 bp, Homo sapiens
aaaactgccctgatt

SEQ ID NO: 2183 - DNA, 15 bp, Homo sapiens
caaaactgccctgat

SEQ ID NO: 2184 - DNA, 15 bp, Homo sapiens
gcaaaactgccctga

SEQ ID NO: 2185 - DNA, 15 bp, Homo sapiens
tgcaaaactgccctg

SEQ ID NO: 2186 - DNA, 15 bp, Homo sapiens
ttgcaaaactgccct

SEQ ID NO: 2187 - DNA, 15 bp, Homo sapiens
cttgcaaaactgccc

SEQ ID NO: 2188 - DNA, 15 bp, Homo sapiens
acttgcaaaactgcc

SEQ ID NO: 2189 - DNA, 15 bp, Homo sapiens
cacttgcaaaactgc

SEQ ID NO: 2190 - DNA, 15 bp, Homo sapiens
tcacttgcaaaactg

SEQ ID NO: 2191 - DNA, 15 bp, Homo sapiens
ttcacttgcaaaact

SEQ ID NO: 2192 - DNA, 15 bp, Homo sapiens
tttcacttgcaaaac

SEQ ID NO: 2193 - DNA, 15 bp, Homo sapiens
ctttcacttgcaaaa

SEQ ID NO: 2194 - DNA, 15 bp, Homo sapiens
cctttcacttgcaaa

SEQ ID NO: 2195 - DNA, 15 bp, Homo sapiens
ccctttcacttgcaa

SEQ ID NO: 2196 - DNA, 15 bp, Homo sapiens
tccctttcacttgca

SEQ ID NO: 2197 - DNA, 15 bp, Homo sapiens
ctccctttcacttgc

SEQ ID NO: 2198 - DNA, 15 bp, Homo sapiens
gctccctttcacttg

SEQ ID NO: 2199 - DNA, 15 bp, Homo sapiens
tgctccctttcactt

SEQ ID NO: 2200 - DNA, 15 bp, Homo sapiens
gtgctccctttcact

SEQ ID NO: 2201 - DNA, 15 bp, Homo sapiens
agtgctccctttcac

SEQ ID NO: 2202 - DNA, 15 bp, Homo sapiens
tagtgctccctttca

SEQ ID NO: 2203 - DNA, 15 bp, Homo sapiens
atagtgctccctttc

SEQ ID NO: 2204 - DNA, 15 bp, Homo sapiens
aatagtgctcccttt

SEQ ID NO: 2205 - DNA, 15 bp, Homo sapiens
taatagtgctccctt

SEQ ID NO: 2206 - DNA, 15 bp, Homo sapiens
ttaatagtgctccct

SEQ ID NO: 2207 - DNA, 15 bp, Homo sapiens
attaatagtgctccc

SEQ ID NO: 2208 - DNA, 15 bp, Homo sapiens
tattaatagtgctcc

SEQ ID NO: 2209 - DNA, 15 bp, Homo sapiens
ttattaatagtgctc

SEQ ID NO: 2210 - DNA, 15 bp, Homo sapiens
attattaatagtgct

SEQ ID NO: 2211 - DNA, 15 bp, Homo sapiens
aattattaatagtgc

SEQ ID NO: 2212 - DNA, 15 bp, Homo sapiens
caattattaatagtg

SEQ ID NO: 2213 - DNA, 15 bp, Homo sapiens
gcaattattaatagt

SEQ ID NO: 2214 - DNA, 15 bp, Homo sapiens
tgcaattattaatag

SEQ ID NO: 2215 - DNA, 15 bp, Homo sapiens
gtgcaattattaata

SEQ ID NO: 2216 - DNA, 15 bp, Homo sapiens
agtgcaattattaat

SEQ ID NO: 2217 - DNA, 15 bp, Homo sapiens
cagtgcaattattaa

SEQ ID NO: 2218 - DNA, 15 bp, Homo sapiens
ccagtgcaattatta

SEQ ID NO: 2219 - DNA, 15 bp, Homo sapiens
cccagtgcaattatt

SEQ ID NO: 2220 - DNA, 15 bp, Homo sapiens
tcccagtgcaattat

SEQ ID NO: 2221 - DNA, 15 bp, Homo sapiens
gtcccagtgcaatta

SEQ ID NO: 2222 - DNA, 15 bp, Homo sapiens
tgtcccagtgcaatt

SEQ ID NO: 2223 - DNA, 15 bp, Homo sapiens
ttgtcccagtgcaat

SEQ ID NO: 2224 - DNA, 15 bp, Homo sapiens
attgtcccagtgcaa

SEQ ID NO: 2225 - DNA, 15 bp, Homo sapiens
tattgtcccagtgca

SEQ ID NO: 2226 - DNA, 15 bp, Homo sapiens
ttattgtcccagtgc

SEQ ID NO: 2227 - DNA, 15 bp, Homo sapiens
tttattgtcccagtg

SEQ ID NO: 2228 - DNA, 15 bp, Homo sapiens
atttattgtcccagt

SEQ ID NO: 2229 - DNA, 15 bp, Homo sapiens
catttattgtcccag

SEQ ID NO: 2230 - DNA, 15 bp, Homo sapiens
acatttattgtccca

SEQ ID NO: 2231 - DNA, 15 bp, Homo sapiens
tacatttattgtccc

SEQ ID NO: 2232 - DNA, 15 bp, Homo sapiens
ttacatttattgtcc

SEQ ID NO: 2233 - DNA, 15 bp, Homo sapiens
tttacatttattgtc

SEQ ID NO: 2234 - DNA, 15 bp, Homo sapiens
gtttacatttattgt

SEQ ID NO: 2235 - DNA, 15 bp, Homo sapiens
ggtttacatttattg

SEQ ID NO: 2236 - DNA, 15 bp, Homo sapiens
tggtttacatttatt

SEQ ID NO: 2237 - DNA, 15 bp, Homo sapiens
ttggtttacatttat

SEQ ID NO: 2238 - DNA, 15 bp, Homo sapiens
gttggtttacattta

SEQ ID NO: 2239 - DNA, 15 bp, Homo sapiens
tgttggtttacattt

SEQ ID NO: 2240 - DNA, 15 bp, Homo sapiens
gtgttggtttacatt

SEQ ID NO: 2241 - DNA, 15 bp, Homo sapiens
agtgttggtttacat

SEQ ID NO: 2242 - DNA, 15 bp, Homo sapiens
cagtgttggtttaca

SEQ ID NO: 2243 - DNA, 15 bp, Homo sapiens
ccagtgttggtttac

SEQ ID NO: 2244 - DNA, 15 bp, Homo sapiens
tccagtgttggttta

SEQ ID NO: 2245 - DNA, 15 bp, Homo sapiens
gtccagtgttggttt

SEQ ID NO: 2246 - DNA, 15 bp, Homo sapiens
ggtccagtgttggtt

SEQ ID NO: 2247 - DNA, 15 bp, Homo sapiens
aggtccagtgttggt

SEQ ID NO: 2248 - DNA, 15 bp, Homo sapiens
caggtccagtgttgg

SEQ ID NO: 2249 - DNA, 15 bp, Homo sapiens
ccaggtccagtgttg

SEQ ID NO: 2250 - DNA, 15 bp, Homo sapiens
tccaggtccagtgtt

SEQ ID NO: 2251 - DNA, 15 bp, Homo sapiens
ttccaggtccagtgt

SEQ ID NO: 2252 - DNA, 15 bp, Homo sapiens
tttccaggtccagtg

SEQ ID NO: 2253 - DNA, 15 bp, Homo sapiens
ttttccaggtccagt

SEQ ID NO: 2254 - DNA, 15 bp, Homo sapiens
gttttccaggtccag

SEQ ID NO: 2255 - DNA, 15 bp, Homo sapiens
agttttccaggtcca

SEQ ID NO: 2256 - DNA, 15 bp, Homo sapiens
cagttttccaggtcc

SEQ ID NO: 2257 - DNA, 15 bp, Homo sapiens
ccagttttccaggtc

SEQ ID NO: 2258 - DNA, 15 bp, Homo sapiens
cccagttttccaggt

SEQ ID NO: 2259 - DNA, 15 bp, Homo sapiens
tcccagttttccagg

SEQ ID NO: 2260 - DNA, 15 bp, Homo sapiens
gtcccagttttccag

SEQ ID NO: 2261 - DNA, 15 bp, Homo sapiens
cgtcccagttttcca

SEQ ID NO: 2262 - DNA, 15 bp, Homo sapiens
acgtcccagttttcc

SEQ ID NO: 2263 - DNA, 15 bp, Homo sapiens
cacgtcccagttttc

SEQ ID NO: 2264 - DNA, 15 bp, Homo sapiens
acacgtcccagtttt

SEQ ID NO: 2265 - DNA, 15 bp, Homo sapiens
cacacgtcccagttt

SEQ ID NO: 2266 - DNA, 15 bp, Homo sapiens
acacacgtcccagtt

SEQ ID NO: 2267 - DNA, 15 bp, Homo sapiens
aacacacgtcccagt

SEQ ID NO: 2268 - DNA, 15 bp, Homo sapiens
aaacacacgtcccag

SEQ ID NO: 2269 - DNA, 15 bp, Homo sapiens
caaacacacgtccca

SEQ ID NO: 2270 - DNA, 15 bp, Homo sapiens
gcaaacacacgtccc

SEQ ID NO: 2271 - DNA, 15 bp, Homo sapiens
ggcaaacacacgtcc

SEQ ID NO: 2272 - DNA, 15 bp, Homo sapiens
gggcaaacacacgtc

SEQ ID NO: 2273 - DNA, 15 bp, Homo sapiens
agggcaaacacacgt

SEQ ID NO: 2274 - DNA, 15 bp, Homo sapiens
tagggcaaacacacg

SEQ ID NO: 2275 - DNA, 15 bp, Homo sapiens
atagggcaaacacac

SEQ ID NO: 2276 - DNA, 15 bp, Homo sapiens
tatagggcaaacaca

SEQ ID NO: 2277 - DNA, 15 bp, Homo sapiens
gtatagggcaaacac

SEQ ID NO: 2278 - DNA, 15 bp, Homo sapiens
ggtatagggcaaaca

SEQ ID NO: 2279 - DNA, 15 bp, Homo sapiens
tggtatagggcaaac

SEQ ID NO: 2280 - DNA, 15 bp, Homo sapiens
ttggtatagggcaaa

SEQ ID NO: 2281 - DNA, 15 bp, Homo sapiens
cttggtatagggcaa

SEQ ID NO: 2282 - DNA, 15 bp, Homo sapiens
ccttggtatagggca

SEQ ID NO: 2283 - DNA, 15 bp, Homo sapiens
accttggtatagggc

SEQ ID NO: 2284 - DNA, 15 bp, Homo sapiens
taccttggtataggg

SEQ ID NO: 2285 - DNA, 15 bp, Homo sapiens
ttaccttggtatagg

SEQ ID NO: 2286 - DNA, 15 bp, Homo sapiens
cttaccttggtatag

SEQ ID NO: 2287 - DNA, 15 bp, Homo sapiens
gcttaccttggtata

SEQ ID NO: 2288 - DNA, 15 bp, Homo sapiens
agcttaccttggtat

SEQ ID NO: 2289 - DNA, 15 bp, Homo sapiens
tagcttaccttggta

SEQ ID NO: 2290 - DNA, 15 bp, Homo sapiens
ctagcttaccttggt

SEQ ID NO: 2291 - DNA, 15 bp, Homo sapiens
tctagcttaccttgg

SEQ ID NO: 2292 - DNA, 15 bp, Homo sapiens
gtctagcttaccttg

SEQ ID NO: 2293 - DNA, 15 bp, Homo sapiens
tgtctagcttacctt

SEQ ID NO: 2294 - DNA, 15 bp, Homo sapiens
gtgtctagcttacct

SEQ ID NO: 2295 - DNA, 15 bp, Homo sapiens
tgtgtctagcttacc

SEQ ID NO: 2296 - DNA, 15 bp, Homo sapiens
ctgtgtctagcttac

SEQ ID NO: 2297 - DNA, 15 bp, Homo sapiens
gctgtgtctagctta

SEQ ID NO: 2298 - DNA, 15 bp, Homo sapiens
ggctgtgtctagctt

SEQ ID NO: 2299 - DNA, 15 bp, Homo sapiens
tggctgtgtctagct

SEQ ID NO: 2300 - DNA, 15 bp, Homo sapiens
gtggctgtgtctagc

SEQ ID NO: 2301 - DNA, 15 bp, Homo sapiens
agtggctgtgtctag

SEQ ID NO: 2302 - DNA, 15 bp, Homo sapiens
cagtggctgtgtcta

SEQ ID NO: 2303 - DNA, 15 bp, Homo sapiens
gcagtggctgtgtct

SEQ ID NO: 2304 - DNA, 15 bp, Homo sapiens
ggcagtggctgtgtc

SEQ ID NO: 2305 - DNA, 15 bp, Homo sapiens
aggcagtggctgtgt

SEQ ID NO: 2306 - DNA, 15 bp, Homo sapiens
aaggcagtggctgtg

SEQ ID NO: 2307 - DNA, 15 bp, Homo sapiens
gaaggcagtggctgt

SEQ ID NO: 2308 - DNA, 15 bp, Homo sapiens
tgaaggcagtggctg

SEQ ID NO: 2309 - DNA, 15 bp, Homo sapiens
atgaaggcagtggct

SEQ ID NO: 2310 - DNA, 15 bp, Homo sapiens
catgaaggcagtggc

SEQ ID NO: 2311 - DNA, 15 bp, Homo sapiens
ccatgaaggcagtgg

SEQ ID NO: 2312 - DNA, 15 bp, Homo sapiens
tccatgaaggcagtg

SEQ ID NO: 2313 - DNA, 15 bp, Homo sapiens
ctccatgaaggcagt

SEQ ID NO: 2314 - DNA, 15 bp, Homo sapiens
actccatgaaggcag

SEQ ID NO: 2315 - DNA, 15 bp, Homo sapiens
aactccatgaaggca

SEQ ID NO: 2316 - DNA, 15 bp, Homo sapiens
gaactccatgaaggc

SEQ ID NO: 2317 - DNA, 15 bp, Homo sapiens
tgaactccatgaagg

SEQ ID NO: 2318 - DNA, 15 bp, Homo sapiens
ctgaactccatgaag

SEQ ID NO: 2319 - DNA, 15 bp, Homo sapiens
tctgaactccatgaa

SEQ ID NO: 2320 - DNA, 15 bp, Homo sapiens
ttctgaactccatga

SEQ ID NO: 2321 - DNA, 15 bp, Homo sapiens
gttctgaactccatg

SEQ ID NO: 2322 - DNA, 15 bp, Homo sapiens
ggttctgaactccat

SEQ ID NO: 2323 - DNA, 15 bp, Homo sapiens
tggttctgaactcca

SEQ ID NO: 2324 - DNA, 15 bp, Homo sapiens
ctggttctgaactcc

SEQ ID NO: 2325 - DNA, 15 bp, Homo sapiens
cctggttctgaactc

SEQ ID NO: 2326 - DNA, 15 bp, Homo sapiens
gcctggttctgaact

SEQ ID NO: 2327 - DNA, 15 bp, Homo sapiens
tgcctggttctgaac

SEQ ID NO: 2328 - DNA, 15 bp, Homo sapiens
ctgcctggttctgaa

SEQ ID NO: 2329 - DNA, 15 bp, Homo sapiens
cctgcctggttctga

SEQ ID NO: 2330 - DNA, 15 bp, Homo sapiens
ccctgcctggttctg

SEQ ID NO: 2331 - DNA, 15 bp, Homo sapiens
cccctgcctggttct

SEQ ID NO: 2332 - DNA, 15 bp, Homo sapiens
gcccctgcctggttc

SEQ ID NO: 2333 - DNA, 15 bp, Homo sapiens
cgcccctgcctggtt

SEQ ID NO: 2334 - DNA, 15 bp, Homo sapiens
ccgcccctgcctggt

SEQ ID NO: 2335 - DNA, 15 bp, Homo sapiens
gccgcccctgcctgg

SEQ ID NO: 2336 - DNA, 15 bp, Homo sapiens
agccgcccctgcctg

SEQ ID NO: 2337 - DNA, 15 bp, Homo sapiens
gagccgcccctgcct

SEQ ID NO: 2338 - DNA, 15 bp, Homo sapiens
ggagccgcccctgcc

SEQ ID NO: 2339 - DNA, 15 bp, Homo sapiens
gggagccgcccctgc

SEQ ID NO: 2340 - DNA, 15 bp, Homo sapiens
tgggagccgcccctg

SEQ ID NO: 2341 - DNA, 15 bp, Homo sapiens
gtgggagccgcccct

SEQ ID NO: 2342 - DNA, 15 bp, Homo sapiens
cgtgggagccgcccc

SEQ ID NO: 2343 - DNA, 15 bp, Homo sapiens
acgtgggagccgccc

SEQ ID NO: 2344 - DNA, 15 bp, Homo sapiens
tacgtgggagccgcc

SEQ ID NO: 2345 - DNA, 15 bp, Homo sapiens
atacgtgggagccgc

SEQ ID NO: 2346 - DNA, 15 bp, Homo sapiens
tatacgtgggagccg

SEQ ID NO: 2347 - DNA, 15 bp, Homo sapiens
ttatacgtgggagcc

SEQ ID NO: 2348 - DNA, 15 bp, Homo sapiens
attatacgtgggagc

SEQ ID NO: 2349 - DNA, 15 bp, Homo sapiens
aattatacgtgggag

SEQ ID NO: 2350 - DNA, 15 bp, Homo sapiens
taattatacgtggga

SEQ ID NO: 2351 - DNA, 15 bp, Homo sapiens
gtaattatacgtggg

SEQ ID NO: 2352 - DNA, 15 bp, Homo sapiens
agtaattatacgtgg

SEQ ID NO: 2353 - DNA, 15 bp, Homo sapiens
cagtaattatacgtg

SEQ ID NO: 2354 - DNA, 15 bp, Homo sapiens
acagtaattatacgt

SEQ ID NO: 2355 - DNA, 15 bp, Homo sapiens
cacagtaattatacg

SEQ ID NO: 2356 - DNA, 15 bp, Homo sapiens
gcacagtaattatac

SEQ ID NO: 2357 - DNA, 15 bp, Homo sapiens
tgcacagtaattata

SEQ ID NO: 2358 - DNA, 15 bp, Homo sapiens
ctgcacagtaattat

SEQ ID NO: 2359 - DNA, 15 bp, Homo sapiens
gctgcacagtaatta

SEQ ID NO: 2360 - DNA, 15 bp, Homo sapiens
tgctgcacagtaatt

SEQ ID NO: 2361 - DNA, 15 bp, Homo sapiens
gtgctgcacagtaat

SEQ ID NO: 2362 - DNA, 15 bp, Homo sapiens
tgtgctgcacagtaa

SEQ ID NO: 2363 - DNA, 15 bp, Homo sapiens
ttgtgctgcacagta

SEQ ID NO: 2364 - DNA, 15 bp, Homo sapiens
gttgtgctgcacagt

SEQ ID NO: 2365 - DNA, 15 bp, Homo sapiens
cgttgtgctgcacag

SEQ ID NO: 2366 - DNA, 15 bp, Homo sapiens
acgttgtgctgcaca

SEQ ID NO: 2367 - DNA, 15 bp, Homo sapiens
cacgttgtgctgcac

SEQ ID NO: 2368 - DNA, 15 bp, Homo sapiens
ccacgttgtgctgca

SEQ ID NO: 2369 - DNA, 15 bp, Homo sapiens
tccacgttgtgctgc

SEQ ID NO: 2370 - DNA, 15 bp, Homo sapiens
ctccacgttgtgctg

SEQ ID NO: 2371 - DNA, 15 bp, Homo sapiens
tctccacgttgtgct

SEQ ID NO: 2372 - DNA, 15 bp, Homo sapiens
gtctccacgttgtgc

SEQ ID NO: 2373 - DNA, 15 bp, Homo sapiens
ggtctccacgttgtg

SEQ ID NO: 2374 - DNA, 15 bp, Homo sapiens
cggtctccacgttgt

SEQ ID NO: 2375 - DNA, 15 bp, Homo sapiens
acggtctccacgttg

SEQ ID NO: 2376 - DNA, 15 bp, Homo sapiens
cacggtctccacgtt

SEQ ID NO: 2377 - DNA, 15 bp, Homo sapiens
ccacggtctccacgt

SEQ ID NO: 2378 - DNA, 15 bp, Homo sapiens
tccacggtctccacg

SEQ ID NO: 2379 - DNA, 15 bp, Homo sapiens
ctccacggtctccac

SEQ ID NO: 2380 - DNA, 15 bp, Homo sapiens
actccacggtctcca

SEQ ID NO: 2381 - DNA, 15 bp, Homo sapiens
tactccacggtctcc

SEQ ID NO: 2382 - DNA, 15 bp, Homo sapiens
ctactccacggtctc

SEQ ID NO: 2383 - DNA, 15 bp, Homo sapiens
tctactccacggtct

SEQ ID NO: 2384 - DNA, 15 bp, Homo sapiens
ttctactccacggtc

SEQ ID NO: 2385 - DNA, 15 bp, Homo sapiens
cttctactccacggt

SEQ ID NO: 2386 - DNA, 15 bp, Homo sapiens
ccttctactccacgg

SEQ ID NO: 2387 - DNA, 15 bp, Homo sapiens
tccttctactccacg

SEQ ID NO: 2388 - DNA, 15 bp, Homo sapiens
ttccttctactccac

SEQ ID NO: 2389 - DNA, 15 bp, Homo sapiens
tttccttctactcca

SEQ ID NO: 2390 - DNA, 15 bp, Homo sapiens
gtttccttctactcc

SEQ ID NO: 2391 - DNA, 15 bp, Homo sapiens
tgtttccttctactc

SEQ ID NO: 2392 - DNA, 15 bp, Homo sapiens
gtgtttccttctact

SEQ ID NO: 2393 - DNA, 15 bp, Homo sapiens
cgtgtttccttctac

SEQ ID NO: 2394 - DNA, 15 bp, Homo sapiens
ccgtgtttccttcta

SEQ ID NO: 2395 - DNA, 15 bp, Homo sapiens
tccgtgtttccttct

SEQ ID NO: 2396 - DNA, 15 bp, Homo sapiens
atccgtgtttccttc

SEQ ID NO: 2397 - DNA, 15 bp, Homo sapiens
catccgtgtttcctt

SEQ ID NO: 2398 - DNA, 15 bp, Homo sapiens
ccatccgtgtttcct

SEQ ID NO: 2399 - DNA, 15 bp, Homo sapiens
cccatccgtgtttcc

SEQ ID NO: 2400 - DNA, 15 bp, Homo sapiens
tcccatccgtgtttc

SEQ ID NO: 2401 - DNA, 15 bp, Homo sapiens
ctcccatccgtgttt

SEQ ID NO: 2402 - DNA, 15 bp, Homo sapiens
cctcccatccgtgtt

SEQ ID NO: 2403 - DNA, 15 bp, Homo sapiens
acctcccatccgtgt

SEQ ID NO: 2404 - DNA, 15 bp, Homo sapiens
cacctcccatccgtg

SEQ ID NO: 2405 - DNA, 15 bp, Homo sapiens
tcacctcccatccgt

SEQ ID NO: 2406 - DNA, 15 bp, Homo sapiens
ctcacctcccatccg

SEQ ID NO: 2407 - DNA, 15 bp, Homo sapiens
cctcacctcccatcc

SEQ ID NO: 2408 - DNA, 15 bp, Homo sapiens
tcctcacctcccatc

SEQ ID NO: 2409 - DNA, 15 bp, Homo sapiens
ctcctcacctcccat

SEQ ID NO: 2410 - DNA, 15 bp, Homo sapiens
cctcctcacctccca

SEQ ID NO: 2411 - DNA, 15 bp, Homo sapiens
tcctcctcacctccc

SEQ ID NO: 2412 - DNA, 15 bp, Homo sapiens
ctcctcctcacctcc

SEQ ID NO: 2413 - DNA, 15 bp, Homo sapiens
cctcctcctcacctc

SEQ ID NO: 2414 - DNA, 15 bp, Homo sapiens
acctcctcctcacct

SEQ ID NO: 2415 - DNA, 15 bp, Homo sapiens
gacctcctcctcacc

SEQ ID NO: 2416 - DNA, 15 bp, Homo sapiens
agacctcctcctcac

SEQ ID NO: 2417 - DNA, 15 bp, Homo sapiens
cagacctcctcctca

SEQ ID NO: 2418 - DNA, 15 bp, Homo sapiens
acagacctcctcctc

SEQ ID NO: 2419 - DNA, 15 bp, Homo sapiens
cacagacctcctcct

SEQ ID NO: 2420 - DNA, 15 bp, Homo sapiens
tcacagacctcctcc

SEQ ID NO: 2421 - DNA, 15 bp, Homo sapiens
ctcacagacctcctc

SEQ ID NO: 2422 - DNA, 15 bp, Homo sapiens
gctcacagacctcct

SEQ ID NO: 2423 - DNA, 15 bp, Homo sapiens
agctcacagacctcc

SEQ ID NO: 2424 - DNA, 15 bp, Homo sapiens
gagctcacagacctc

SEQ ID NO: 2425 - DNA, 15 bp, Homo sapiens
tgagctcacagacct

SEQ ID NO: 2426 - DNA, 15 bp, Homo sapiens
ctgagctcacagacc

SEQ ID NO: 2427 - DNA, 15 bp, Homo sapiens
tctgagctcacagac

SEQ ID NO: 2428 - DNA, 15 bp, Homo sapiens
ctctgagctcacaga

SEQ ID NO: 2429 - DNA, 15 bp, Homo sapiens
cctctgagctcacag

SEQ ID NO: 2430 - DNA, 15 bp, Homo sapiens
tcctctgagctcaca

SEQ ID NO: 2431 - DNA, 15 bp, Homo sapiens
ctcctctgagctcac

SEQ ID NO: 2432 - DNA, 15 bp, Homo sapiens
cctcctctgagctca

SEQ ID NO: 2433 - DNA, 15 bp, Homo sapiens
gcctcctctgagctc

SEQ ID NO: 2434 - DNA, 15 bp, Homo sapiens
tgcctcctctgagct

SEQ ID NO: 2435 - DNA, 15 bp, Homo sapiens
gtgcctcctctgagc

SEQ ID NO: 2436 - DNA, 15 bp, Homo sapiens
ggtgcctcctctgag

SEQ ID NO: 2437 - DNA, 15 bp, Homo sapiens
cggtgcctcctctga

SEQ ID NO: 2438 - DNA, 15 bp, Homo sapiens
ccggtgcctcctctg

SEQ ID NO: 2439 - DNA, 15 bp, Homo sapiens
cccggtgcctcctct

SEQ ID NO: 2440 - DNA, 15 bp, Homo sapiens
ccccggtgcctcctc

SEQ ID NO: 2441 - DNA, 15 bp, Homo sapiens
gccccggtgcctcct

SEQ ID NO: 2442 - DNA, 15 bp, Homo sapiens
agccccggtgcctcc

SEQ ID NO: 2443 - DNA, 15 bp, Homo sapiens
cagccccggtgcctc

SEQ ID NO: 2444 - DNA, 15 bp, Homo sapiens
ccagccccggtgcct

SEQ ID NO: 2445 - DNA, 15 bp, Homo sapiens
tccagccccggtgcc

SEQ ID NO: 2446 - DNA, 15 bp, Homo sapiens
ctccagccccggtgc

SEQ ID NO: 2447 - DNA, 15 bp, Homo sapiens
tctccagccccggtg

SEQ ID NO: 2448 - DNA, 15 bp, Homo sapiens
ctctccagccccggt

SEQ ID NO: 2449 - DNA, 15 bp, Homo sapiens
cctctccagccccgg

SEQ ID NO: 2450 - DNA, 15 bp, Homo sapiens
ccctctccagccccg

SEQ ID NO: 2451 - DNA, 15 bp, Homo sapiens
accctctccagcccc

SEQ ID NO: 2452 - DNA, 15 bp, Homo sapiens
caccctctccagccc

SEQ ID NO: 2453 - DNA, 15 bp, Homo sapiens
tcaccctctccagcc

SEQ ID NO: 2454 - DNA, 15 bp, Homo sapiens
ctcaccctctccagc

SEQ ID NO: 2455 - DNA, 15 bp, Homo sapiens
tctcaccctctccag

SEQ ID NO: 2456 - DNA, 15 bp, Homo sapiens
ctctcaccctctcca

SEQ ID NO: 2457 - DNA, 15 bp, Homo sapiens
tctctcaccctctcc

SEQ ID NO: 2458 - DNA, 15 bp, Homo sapiens
ttctctcaccctctc

SEQ ID NO: 2459 - DNA, 15 bp, Homo sapiens
cttctctcaccctct

SEQ ID NO: 2460 - DNA, 15 bp, Homo sapiens
tcttctctcaccctc

SEQ ID NO: 2461 - DNA, 15 bp, Homo sapiens
gtcttctctcaccct

SEQ ID NO: 2462 - DNA, 15 bp, Homo sapiens
agtcttctctcaccc

SEQ ID NO: 2463 - DNA, 15 bp, Homo sapiens
aagtcttctctcacc

SEQ ID NO: 2464 - DNA, 15 bp, Homo sapiens
gaagtcttctctcac

SEQ ID NO: 2465 - DNA, 15 bp, Homo sapiens
ggaagtcttctctca

SEQ ID NO: 2466 - DNA, 15 bp, Homo sapiens
gggaagtcttctctc

SEQ ID NO: 2467 - DNA, 15 bp, Homo sapiens
tgggaagtcttctct

SEQ ID NO: 2468 - DNA, 15 bp, Homo sapiens
ttgggaagtcttctc

SEQ ID NO: 2469 - DNA, 15 bp, Homo sapiens
cttgggaagtcttct

SEQ ID NO: 2470 - DNA, 15 bp, Homo sapiens
ccttgggaagtcttc

SEQ ID NO: 2471 - DNA, 15 bp, Homo sapiens
tccttgggaagtctt

SEQ ID NO: 2472 - DNA, 15 bp, Homo sapiens
ctccttgggaagtct

SEQ ID NO: 2473 - DNA, 15 bp, Homo sapiens
actccttgggaagtc

SEQ ID NO: 2474 - DNA, 15 bp, Homo sapiens
aactccttgggaagt

SEQ ID NO: 2475 - DNA, 15 bp, Homo sapiens
gaactccttgggaag

SEQ ID NO: 2476 - DNA, 15 bp, Homo sapiens
tgaactccttgggaa

SEQ ID NO: 2477 - DNA, 15 bp, Homo sapiens
atgaactccttggga

SEQ ID NO: 2478 - DNA, 15 bp, Homo sapiens
gatgaactccttggg

SEQ ID NO: 2479 - DNA, 15 bp, Homo sapiens
ggatgaactccttgg

SEQ ID NO: 2480 - DNA, 15 bp, Homo sapiens
aggatgaactccttg

SEQ ID NO: 2481 - DNA, 15 bp, Homo sapiens
caggatgaactcctt

SEQ ID NO: 2482 - DNA, 15 bp, Homo sapiens
tcaggatgaactcct

SEQ ID NO: 2483 - DNA, 15 bp, Homo sapiens
atcaggatgaactcc

SEQ ID NO: 2484 - DNA, 15 bp, Homo sapiens
tatcaggatgaactc

SEQ ID NO: 2485 - DNA, 15 bp, Homo sapiens
ttatcaggatgaact

SEQ ID NO: 2486 - DNA, 15 bp, Homo sapiens
gttatcaggatgaac

SEQ ID NO: 2487 - DNA, 15 bp, Homo sapiens
cgttatcaggatgaa

SEQ ID NO: 2488 - DNA, 15 bp, Homo sapiens
acgttatcaggatga

SEQ ID NO: 2489 - DNA, 15 bp, Homo sapiens
cacgttatcaggatg

SEQ ID NO: 2490 - DNA, 15 bp, Homo sapiens
gcacgttatcaggat

SEQ ID NO: 2491 - DNA, 15 bp, Homo sapiens
tgcacgttatcagga

SEQ ID NO: 2492 - DNA, 15 bp, Homo sapiens
atgcacgttatcagg

SEQ ID NO: 2493 - DNA, 15 bp, Homo sapiens
aatgcacgttatcag

SEQ ID NO: 2494 - DNA, 15 bp, Homo sapiens
gaatgcacgttatca

SEQ ID NO: 2495 - DNA, 15 bp, Homo sapiens
ggaatgcacgttatc

SEQ ID NO: 2496 - DNA, 15 bp, Homo sapiens
gggaatgcacgttat

SEQ ID NO: 2497 - DNA, 15 bp, Homo sapiens
tgggaatgcacgtta

SEQ ID NO: 2498 - DNA, 15 bp, Homo sapiens
ttgggaatgcacgtt

SEQ ID NO: 2499 - DNA, 15 bp, Homo sapiens
attgggaatgcacgt

SEQ ID NO: 2500 - DNA, 15 bp, Homo sapiens
cattgggaatgcacg

SEQ ID NO: 2501 - DNA, 15 bp, Homo sapiens
tcattgggaatgcac

SEQ ID NO: 2502 - DNA, 15 bp, Homo sapiens
gtcattgggaatgca

SEQ ID NO: 2503 - DNA, 15 bp, Homo sapiens
cgtcattgggaatgc

SEQ ID NO: 2504 - DNA, 15 bp, Homo sapiens
tcgtcattgggaatg

SEQ ID NO: 2505 - DNA, 15 bp, Homo sapiens
ctcgtcattgggaat

SEQ ID NO: 2506 - DNA, 15 bp, Homo sapiens
gctcgtcattgggaa

SEQ ID NO: 2507 - DNA, 15 bp, Homo sapiens
cgctcgtcattggga

SEQ ID NO: 2508 - DNA, 15 bp, Homo sapiens
gcgctcgtcattggg

SEQ ID NO: 2509 - DNA, 15 bp, Homo sapiens
agcgctcgtcattgg

SEQ ID NO: 2510 - DNA, 15 bp, Homo sapiens
gagcgctcgtcattg

SEQ ID NO: 2511 - DNA, 15 bp, Homo sapiens
agagcgctcgtcatt

SEQ ID NO: 2512 - DNA, 15 bp, Homo sapiens
gagagcgctcgtcat

SEQ ID NO: 2513 - DNA, 15 bp, Homo sapiens
agagagcgctcgtca

SEQ ID NO: 2514 - DNA, 15 bp, Homo sapiens
gagagagcgctcgtc

SEQ ID NO: 2515 - DNA, 15 bp, Homo sapiens
ggagagagcgctcgt

SEQ ID NO: 2516 - DNA, 15 bp, Homo sapiens
tggagagagcgctcg

SEQ ID NO: 2517 - DNA, 15 bp, Homo sapiens
gtggagagagcgctc

SEQ ID NO: 2518 - DNA, 15 bp, Homo sapiens
agtggagagagcgct

SEQ ID NO: 2519 - DNA, 15 bp, Homo sapiens
cagtggagagagcgc

SEQ ID NO: 2520 - DNA, 15 bp, Homo sapiens
gcagtggagagagcg

SEQ ID NO: 2521 - DNA, 15 bp, Homo sapiens
tgcagtggagagagc

SEQ ID NO: 2522 - DNA, 15 bp, Homo sapiens
gtgcagtggagagag

SEQ ID NO: 2523 - DNA, 15 bp, Homo sapiens
tgtgcagtggagaga

SEQ ID NO: 2524 - DNA, 15 bp, Homo sapiens
ttgtgcagtggagag

SEQ ID NO: 2525 - DNA, 15 bp, Homo sapiens
cttgtgcagtggaga

SEQ ID NO: 2526 - DNA, 15 bp, Homo sapiens
tcttgtgcagtggag

SEQ ID NO: 2527 - DNA, 15 bp, Homo sapiens
gtcttgtgcagtgga

SEQ ID NO: 2528 - DNA, 15 bp, Homo sapiens
tgtcttgtgcagtgg

SEQ ID NO: 2529 - DNA, 15 bp, Homo sapiens
ttgtcttgtgcagtg

SEQ ID NO: 2530 - DNA, 15 bp, Homo sapiens
cttgtcttgtgcagt

SEQ ID NO: 2531 - DNA, 15 bp, Homo sapiens
acttgtcttgtgcag

SEQ ID NO: 2532 - DNA, 15 bp, Homo sapiens
tacttgtcttgtgca

SEQ ID NO: 2533 - DNA, 15 bp, Homo sapiens
atacttgtcttgtgc

SEQ ID NO: 2534 - DNA, 15 bp, Homo sapiens
tatacttgtcttgtg

SEQ ID NO: 2535 - DNA, 15 bp, Homo sapiens
gtatacttgtcttgt

SEQ ID NO: 2536 - DNA, 15 bp, Homo sapiens
tgtatacttgtcttg

SEQ ID NO: 2537 - DNA, 15 bp, Homo sapiens
atgtatacttgtctt

SEQ ID NO: 2538 - DNA, 15 bp, Homo sapiens
gatgtatacttgtct

SEQ ID NO: 2539 - DNA, 15 bp, Homo sapiens
agatgtatacttgtc

SEQ ID NO: 2540 - DNA, 15 bp, Homo sapiens
cagatgtatacttgt

SEQ ID NO: 2541 - DNA, 15 bp, Homo sapiens
gcagatgtatacttg

SEQ ID NO: 2542 - DNA, 15 bp, Homo sapiens
ggcagatgtatactt

SEQ ID NO: 2543 - DNA, 15 bp, Homo sapiens
gggcagatgtatact

SEQ ID NO: 2544 - DNA, 15 bp, Homo sapiens
cgggcagatgtatac

SEQ ID NO: 2545 - DNA, 15 bp, Homo sapiens
acgggcagatgtata

SEQ ID NO: 2546 - DNA, 15 bp, Homo sapiens
cacgggcagatgtat

SEQ ID NO: 2547 - DNA, 15 bp, Homo sapiens
acacgggcagatgta

SEQ ID NO: 2548 - DNA, 15 bp, Homo sapiens
aacacgggcagatgt

SEQ ID NO: 2549 - DNA, 15 bp, Homo sapiens
caacacgggcagatg

SEQ ID NO: 2550 - DNA, 15 bp, Homo sapiens
ccaacacgggcagat

SEQ ID NO: 2551 - DNA, 15 bp, Homo sapiens
gccaacacgggcaga

SEQ ID NO: 2552 - DNA, 15 bp, Homo sapiens
agccaacacgggcag

SEQ ID NO: 2553 - DNA, 15 bp, Homo sapiens
cagccaacacgggca

SEQ ID NO: 2554 - DNA, 15 bp, Homo sapiens
acagccaacacgggc

SEQ ID NO: 2555 - DNA, 15 bp, Homo sapiens
cacagccaacacggg

SEQ ID NO: 2556 - DNA, 15 bp, Homo sapiens
ccacagccaacacgg

SEQ ID NO: 2557 - DNA, 15 bp, Homo sapiens
tccacagccaacacg

SEQ ID NO: 2558 - DNA, 15 bp, Homo sapiens
gtccacagccaacac

SEQ ID NO: 2559 - DNA, 15 bp, Homo sapiens
ggtccacagccaaca

SEQ ID NO: 2560 - DNA, 15 bp, Homo sapiens
aggtccacagccaac

SEQ ID NO: 2561 - DNA, 15 bp, Homo sapiens
caggtccacagccaa

SEQ ID NO: 2562 - DNA, 15 bp, Homo sapiens
ccaggtccacagcca

SEQ ID NO: 2563 - DNA, 15 bp, Homo sapiens
gccaggtccacagcc

SEQ ID NO: 2564 - DNA, 15 bp, Homo sapiens
cgccaggtccacagc

SEQ ID NO: 2565 - DNA, 15 bp, Homo sapiens
gcgccaggtccacag

SEQ ID NO: 2566 - DNA, 15 bp, Homo sapiens
agcgccaggtccaca

SEQ ID NO: 2567 - DNA, 15 bp, Homo sapiens
cagcgccaggtccac

SEQ ID NO: 2568 - DNA, 15 bp, Homo sapiens
acagcgccaggtcca

SEQ ID NO: 2569 - DNA, 15 bp, Homo sapiens
cacagcgccaggtcc

SEQ ID NO: 2570 - DNA, 15 bp, Homo sapiens
acacagcgccaggtc

SEQ ID NO: 2571 - DNA, 15 bp, Homo sapiens
gacacagcgccaggt

SEQ ID NO: 2572 - DNA, 15 bp, Homo sapiens
tgacacagcgccagg

SEQ ID NO: 2573 - DNA, 15 bp, Homo sapiens
ctgacacagcgccag

SEQ ID NO: 2574 - DNA, 15 bp, Homo sapiens
cctgacacagcgcca

SEQ ID NO: 2575 - DNA, 15 bp, Homo sapiens
ccctgacacagcgcc

SEQ ID NO: 2576 - DNA, 15 bp, Homo sapiens
tccctgacacagcgc

SEQ ID NO: 2577 - DNA, 15 bp, Homo sapiens
ctccctgacacagcg

SEQ ID NO: 2578 - DNA, 15 bp, Homo sapiens
cctccctgacacagc

SEQ ID NO: 2579 - DNA, 15 bp, Homo sapiens
ccctccctgacacag

SEQ ID NO: 2580 - DNA, 15 bp, Homo sapiens
accctccctgacaca

SEQ ID NO: 2581 - DNA, 15 bp, Homo sapiens
aaccctccctgacac

SEQ ID NO: 2582 - DNA, 15 bp, Homo sapiens
aaaccctccctgaca

SEQ ID NO: 2583 - DNA, 15 bp, Homo sapiens
taaaccctccctgac

SEQ ID NO: 2584 - DNA, 15 bp, Homo sapiens
ataaaccctccctga

SEQ ID NO: 2585 - DNA, 15 bp, Homo sapiens
cataaaccctccctg

SEQ ID NO: 2586 - DNA, 15 bp, Homo sapiens
tcataaaccctccct

SEQ ID NO: 2587 - DNA, 15 bp, Homo sapiens
ttcataaaccctccc

SEQ ID NO: 2588 - DNA, 15 bp, Homo sapiens
cttcataaaccctcc

SEQ ID NO: 2589 - DNA, 15 bp, Homo sapiens
tcttcataaaccctc

SEQ ID NO: 2590 - DNA, 15 bp, Homo sapiens
atcttcataaaccct

SEQ ID NO: 2591 - DNA, 15 bp, Homo sapiens
gatcttcataaaccc

SEQ ID NO: 2592 - DNA, 15 bp, Homo sapiens
tgatcttcataaacc

SEQ ID NO: 2593 - DNA, 15 bp, Homo sapiens
gtgatcttcataaac

SEQ ID NO: 2594 - DNA, 15 bp, Homo sapiens
agtgatcttcataaa

SEQ ID NO: 2595 - DNA, 15 bp, Homo sapiens
tagtgatcttcataa

SEQ ID NO: 2596 - DNA, 15 bp, Homo sapiens
ctagtgatcttcata

SEQ ID NO: 2597 - DNA, 15 bp, Homo sapiens
cctagtgatcttcat

SEQ ID NO: 2598 - DNA, 15 bp, Homo sapiens
acctagtgatcttca

SEQ ID NO: 2599 - DNA, 15 bp, Homo sapiens
cacctagtgatcttc

SEQ ID NO: 2600 - DNA, 15 bp, Homo sapiens
ccacctagtgatctt

SEQ ID NO: 2601 - DNA, 15 bp, Homo sapiens
cccacctagtgatct

SEQ ID NO: 2602 - DNA, 15 bp, Homo sapiens
acccacctagtgatc

SEQ ID NO: 2603 - DNA, 15 bp, Homo sapiens
gacccacctagtgat

SEQ ID NO: 2604 - DNA, 15 bp, Homo sapiens
agacccacctagtga

SEQ ID NO: 2605 - DNA, 15 bp, Homo sapiens
gagacccacctagtg

SEQ ID NO: 2606 - DNA, 15 bp, Homo sapiens
agagacccacctagt

SEQ ID NO: 2607 - DNA, 15 bp, Homo sapiens
aagagacccacctag

SEQ ID NO: 2608 - DNA, 15 bp, Homo sapiens
caagagacccaccta

SEQ ID NO: 2609 - DNA, 15 bp, Homo sapiens
ccaagagacccacct

SEQ ID NO: 2610 - DNA, 15 bp, Homo sapiens
accaagagacccacc

SEQ ID NO: 2611 - DNA, 15 bp, Homo sapiens
caccaagagacccac

SEQ ID NO: 2612 - DNA, 15 bp, Homo sapiens
acaccaagagaccca

SEQ ID NO: 2613 - DNA, 15 bp, Homo sapiens
gacaccaagagaccc

SEQ ID NO: 2614 - DNA, 15 bp, Homo sapiens
tgacaccaagagacc

SEQ ID NO: 2615 - DNA, 15 bp, Homo sapiens
atgacaccaagagac

SEQ ID NO: 2616 - DNA, 15 bp, Homo sapiens
gatgacaccaagaga

SEQ ID NO: 2617 - DNA, 15 bp, Homo sapiens
ggatgacaccaagag

SEQ ID NO: 2618 - DNA, 15 bp, Homo sapiens
gggatgacaccaaga

SEQ ID NO: 2619 - DNA, 15 bp, Homo sapiens
agggatgacaccaag

SEQ ID NO: 2620 - DNA, 15 bp, Homo sapiens
aagggatgacaccaa

SEQ ID NO: 2621 - DNA, 15 bp, Homo sapiens
gaagggatgacacca

SEQ ID NO: 2622 - DNA, 15 bp, Homo sapiens
tgaagggatgacacc

SEQ ID NO: 2623 - DNA, 15 bp, Homo sapiens
atgaagggatgacac

SEQ ID NO: 2624 - DNA, 15 bp, Homo sapiens
gatgaagggatgaca

SEQ ID NO: 2625 - DNA, 15 bp, Homo sapiens
ggatgaagggatgac

SEQ ID NO: 2626 - DNA, 15 bp, Homo sapiens
gggatgaagggatga

SEQ ID NO: 2627 - DNA, 15 bp, Homo sapiens
tgggatgaagggatg

SEQ ID NO: 2628 - DNA, 15 bp, Homo sapiens
ctgggatgaagggat

SEQ ID NO: 2629 - DNA, 15 bp, Homo sapiens
gctgggatgaaggga

SEQ ID NO: 2630 - DNA, 15 bp, Homo sapiens
agctgggatgaaggg

SEQ ID NO: 2631 - DNA, 15 bp, Homo sapiens
aagctgggatgaagg

SEQ ID NO: 2632 - DNA, 15 bp, Homo sapiens
gaagctgggatgaag

SEQ ID NO: 2633 - DNA, 15 bp, Homo sapiens
agaagctgggatgaa

SEQ ID NO: 2634 - DNA, 15 bp, Homo sapiens
cagaagctgggatga

SEQ ID NO: 2635 - DNA, 15 bp, Homo sapiens
ccagaagctgggatg

SEQ ID NO: 2636 - DNA, 15 bp, Homo sapiens
cccagaagctgggat

SEQ ID NO: 2637 - DNA, 15 bp, Homo sapiens
acccagaagctggga

SEQ ID NO: 2638 - DNA, 15 bp, Homo sapiens
aacccagaagctggg

SEQ ID NO: 2639 - DNA, 15 bp, Homo sapiens
taacccagaagctgg

SEQ ID NO: 2640 - DNA, 15 bp, Homo sapiens
ctaacccagaagctg

SEQ ID NO: 2641 - DNA, 15 bp, Homo sapiens
cctaacccagaagct

SEQ ID NO: 2642 - DNA, 15 bp, Homo sapiens
tcctaacccagaagc

SEQ ID NO: 2643 - DNA, 15 bp, Homo sapiens
atcctaacccagaag

SEQ ID NO: 2644 - DNA, 15 bp, Homo sapiens
catcctaacccagaa

SEQ ID NO: 2645 - DNA, 15 bp, Homo sapiens
ccatcctaacccaga

SEQ ID NO: 2646 - DNA, 15 bp, Homo sapiens
tccatcctaacccag

SEQ ID NO: 2647 - DNA, 15 bp, Homo sapiens
atccatcctaaccca

SEQ ID NO: 2648 - DNA, 15 bp, Homo sapiens
tatccatcctaaccc

SEQ ID NO: 2649 - DNA, 15 bp, Homo sapiens
atatccatcctaacc

SEQ ID NO: 2650 - DNA, 15 bp, Homo sapiens
gatatccatcctaac

SEQ ID NO: 2651 - DNA, 15 bp, Homo sapiens
agatatccatcctaa

SEQ ID NO: 2652 - DNA, 15 bp, Homo sapiens
cagatatccatccta

SEQ ID NO: 2653 - DNA, 15 bp, Homo sapiens
acagatatccatcct

SEQ ID NO: 2654 - DNA, 15 bp, Homo sapiens
cacagatatccatcc

SEQ ID NO: 2655 - DNA, 15 bp, Homo sapiens
ccacagatatccatc

SEQ ID NO: 2656 - DNA, 15 bp, Homo sapiens
cccacagatatccat

SEQ ID NO: 2657 - DNA, 15 bp, Homo sapiens
ccccacagatatcca

SEQ ID NO: 2658 - DNA, 15 bp, Homo sapiens
cccccacagatatcc

SEQ ID NO: 2659 - DNA, 15 bp, Homo sapiens
ccccccacagatatc

SEQ ID NO: 2660 - DNA, 15 bp, Homo sapiens
cccccccacagatat

SEQ ID NO: 2661 - DNA, 15 bp, Homo sapiens
gcccccccacagata

SEQ ID NO: 2662 - DNA, 15 bp, Homo sapiens
ggcccccccacagat

SEQ ID NO: 2663 - DNA, 15 bp, Homo sapiens
aggcccccccacaga

SEQ ID NO: 2664 - DNA, 15 bp, Homo sapiens
caggcccccccacag

SEQ ID NO: 2665 - DNA, 15 bp, Homo sapiens
tcaggcccccccaca

SEQ ID NO: 2666 - DNA, 15 bp, Homo sapiens
ctcaggcccccccac

SEQ ID NO: 2667 - DNA, 15 bp, Homo sapiens
cctcaggccccccca

SEQ ID NO: 2668 - DNA, 15 bp, Homo sapiens
tcctcaggccccccc

SEQ ID NO: 2669 - DNA, 15 bp, Homo sapiens
gtcctcaggcccccc

SEQ ID NO: 2670 - DNA, 15 bp, Homo sapiens
agtcctcaggccccc

SEQ ID NO: 2671 - DNA, 15 bp, Homo sapiens
gagtcctcaggcccc

SEQ ID NO: 2672 - DNA, 15 bp, Homo sapiens
tgagtcctcaggccc

SEQ ID NO: 2673 - DNA, 15 bp, Homo sapiens
atgagtcctcaggcc

SEQ ID NO: 2674 - DNA, 15 bp, Homo sapiens
catgagtcctcaggc

SEQ ID NO: 2675 - DNA, 15 bp, Homo sapiens
tcatgagtcctcagg

SEQ ID NO: 2676 - DNA, 15 bp, Homo sapiens
ttcatgagtcctcag

SEQ ID NO: 2677 - DNA, 15 bp, Homo sapiens
tttcatgagtcctca

SEQ ID NO: 2678 - DNA, 15 bp, Homo sapiens
ctttcatgagtcctc

SEQ ID NO: 2679 - DNA, 15 bp, Homo sapiens
actttcatgagtcct

SEQ ID NO: 2680 - DNA, 15 bp, Homo sapiens
cactttcatgagtcc

SEQ ID NO: 2681 - DNA, 15 bp, Homo sapiens
ccactttcatgagtc

SEQ ID NO: 2682 - DNA, 15 bp, Homo sapiens
cccactttcatgagt

SEQ ID NO: 2683 - DNA, 15 bp, Homo sapiens
ccccactttcatgag

SEQ ID NO: 2684 - DNA, 15 bp, Homo sapiens
gccccactttcatga

SEQ ID NO: 2685 - DNA, 15 bp, Homo sapiens
cgccccactttcatg

SEQ ID NO: 2686 - DNA, 15 bp, Homo sapiens
gcgccccactttcat

SEQ ID NO: 2687 - DNA, 15 bp, Homo sapiens
agcgccccactttca

SEQ ID NO: 2688 - DNA, 15 bp, Homo sapiens
tagcgccccactttc

SEQ ID NO: 2689 - DNA, 15 bp, Homo sapiens
ttagcgccccacttt

SEQ ID NO: 2690 - DNA, 15 bp, Homo sapiens
attagcgccccactt

SEQ ID NO: 2691 - DNA, 15 bp, Homo sapiens
gattagcgccccact

SEQ ID NO: 2692 - DNA, 15 bp, Homo sapiens
tgattagcgccccac

SEQ ID NO: 2693 - DNA, 15 bp, Homo sapiens
atgattagcgcccca

SEQ ID NO: 2694 - DNA, 15 bp, Homo sapiens
catgattagcgcccc

SEQ ID NO: 2695 - DNA, 15 bp, Homo sapiens
acatgattagcgccc

SEQ ID NO: 2696 - DNA, 15 bp, Homo sapiens
aacatgattagcgcc

SEQ ID NO: 2697 - DNA, 15 bp, Homo sapiens
aaacatgattagcgc

SEQ ID NO: 2698 - DNA, 15 bp, Homo sapiens
aaaacatgattagcg

SEQ ID NO: 2699 - DNA, 15 bp, Homo sapiens
caaaacatgattagc

SEQ ID NO: 2700 - DNA, 15 bp, Homo sapiens
ccaaaacatgattag

SEQ ID NO: 2701 - DNA, 15 bp, Homo sapiens
tccaaaacatgatta

SEQ ID NO: 2702 - DNA, 15 bp, Homo sapiens
gtccaaaacatgatt

SEQ ID NO: 2703 - DNA, 15 bp, Homo sapiens
tgtccaaaacatgat

SEQ ID NO: 2704 - DNA, 15 bp, Homo sapiens
gtgtccaaaacatga

SEQ ID NO: 2705 - DNA, 15 bp, Homo sapiens
ggtgtccaaaacatg

SEQ ID NO: 2706 - DNA, 15 bp, Homo sapiens
tggtgtccaaaacat

SEQ ID NO: 2707 - DNA, 15 bp, Homo sapiens
gtggtgtccaaaaca

SEQ ID NO: 2708 - DNA, 15 bp, Homo sapiens
tgtggtgtccaaaac

SEQ ID NO: 2709 - DNA, 15 bp, Homo sapiens
gtgtggtgtccaaaa

SEQ ID NO: 2710 - DNA, 15 bp, Homo sapiens
ggtgtggtgtccaaa

SEQ ID NO: 2711 - DNA, 15 bp, Homo sapiens
gggtgtggtgtccaa

SEQ ID NO: 2712 - DNA, 15 bp, Homo sapiens
agggtgtggtgtcca

SEQ ID NO: 2713 - DNA, 15 bp, Homo sapiens
cagggtgtggtgtcc

SEQ ID NO: 2714 - DNA, 15 bp, Homo sapiens
ccagggtgtggtgtc

SEQ ID NO: 2715 - DNA, 15 bp, Homo sapiens
tccagggtgtggtgt

SEQ ID NO: 2716 - DNA, 15 bp, Homo sapiens
ctccagggtgtggtg

SEQ ID NO: 2717 - DNA, 15 bp, Homo sapiens
gctccagggtgtggt

SEQ ID NO: 2718 - DNA, 15 bp, Homo sapiens
tgctccagggtgtgg

SEQ ID NO: 2719 - DNA, 15 bp, Homo sapiens
gtgctccagggtgtg

SEQ ID NO: 2720 - DNA, 15 bp, Homo sapiens
ggtgctccagggtgt

SEQ ID NO: 2721 - DNA, 15 bp, Homo sapiens
aggtgctccagggtg

SEQ ID NO: 2722 - DNA, 15 bp, Homo sapiens
caggtgctccagggt

SEQ ID NO: 2723 - DNA, 15 bp, Homo sapiens
ccaggtgctccaggg

SEQ ID NO: 2724 - DNA, 15 bp, Homo sapiens
cccaggtgctccagg

SEQ ID NO: 2725 - DNA, 15 bp, Homo sapiens
tcccaggtgctccag

SEQ ID NO: 2726 - DNA, 15 bp, Homo sapiens
gtcccaggtgctcca

SEQ ID NO: 2727 - DNA, 15 bp, Homo sapiens
tgtcccaggtgctcc

SEQ ID NO: 2728 - DNA, 15 bp, Homo sapiens
ctgtcccaggtgctc

SEQ ID NO: 2729 - DNA, 15 bp, Homo sapiens
gctgtcccaggtgct

SEQ ID NO: 2730 - DNA, 15 bp, Homo sapiens
agctgtcccaggtgc

SEQ ID NO: 2731 - DNA, 15 bp, Homo sapiens
cagctgtcccaggtg

SEQ ID NO: 2732 - DNA, 15 bp, Homo sapiens
acagctgtcccaggt

SEQ ID NO: 2733 - DNA, 15 bp, Homo sapiens
cacagctgtcccagg

SEQ ID NO: 2734 - DNA, 15 bp, Homo sapiens
ccacagctgtcccag

SEQ ID NO: 2735 - DNA, 15 bp, Homo sapiens
gccacagctgtccca

SEQ ID NO: 2736 - DNA, 15 bp, Homo sapiens
ggccacagctgtccc

SEQ ID NO: 2737 - DNA, 15 bp, Homo sapiens
aggccacagctgtcc

SEQ ID NO: 2738 - DNA, 15 bp, Homo sapiens
aaggccacagctgtc

SEQ ID NO: 2739 - DNA, 15 bp, Homo sapiens
aaaggccacagctgt

SEQ ID NO: 2740 - DNA, 15 bp, Homo sapiens
caaaggccacagctg

SEQ ID NO: 2741 - DNA, 15 bp, Homo sapiens
acaaaggccacagct

SEQ ID NO: 2742 - DNA, 15 bp, Homo sapiens
gacaaaggccacagc

SEQ ID NO: 2743 - DNA, 15 bp, Homo sapiens
ggacaaaggccacag

SEQ ID NO: 2744 - DNA, 15 bp, Homo sapiens
aggacaaaggccaca

SEQ ID NO: 2745 - DNA, 15 bp, Homo sapiens
caggacaaaggccac

SEQ ID NO: 2746 - DNA, 15 bp, Homo sapiens
ccaggacaaaggcca

SEQ ID NO: 2747 - DNA, 15 bp, Homo sapiens
cccaggacaaaggcc

SEQ ID NO: 2748 - DNA, 15 bp, Homo sapiens
acccaggacaaaggc

SEQ ID NO: 2749 - DNA, 15 bp, Homo sapiens
aacccaggacaaagg

SEQ ID NO: 2750 - DNA, 15 bp, Homo sapiens
gaacccaggacaaag

SEQ ID NO: 2751 - DNA, 15 bp, Homo sapiens
tgaacccaggacaaa

SEQ ID NO: 2752 - DNA, 15 bp, Homo sapiens
ctgaacccaggacaa

SEQ ID NO: 2753 - DNA, 15 bp, Homo sapiens
gctgaacccaggaca

SEQ ID NO: 2754 - DNA, 15 bp, Homo sapiens
tgctgaacccaggac

SEQ ID NO: 2755 - DNA, 15 bp, Homo sapiens
atgctgaacccagga

SEQ ID NO: 2756 - DNA, 15 bp, Homo sapiens
gatgctgaacccagg

SEQ ID NO: 2757 - DNA, 15 bp, Homo sapiens
tgatgctgaacccag

SEQ ID NO: 2758 - DNA, 15 bp, Homo sapiens
ttgatgctgaaccca

SEQ ID NO: 2759 - DNA, 15 bp, Homo sapiens
cttgatgctgaaccc

SEQ ID NO: 2760 - DNA, 15 bp, Homo sapiens
gcttgatgctgaacc

SEQ ID NO: 2761 - DNA, 15 bp, Homo sapiens
ggcttgatgctgaac

SEQ ID NO: 2762 - DNA, 15 bp, Homo sapiens
cggcttgatgctgaa

SEQ ID NO: 2763 - DNA, 15 bp, Homo sapiens
tcggcttgatgctga

SEQ ID NO: 2764 - DNA, 15 bp, Homo sapiens
ctcggcttgatgctg

SEQ ID NO: 2765 - DNA, 15 bp, Homo sapiens
cctcggcttgatgct

SEQ ID NO: 2766 - DNA, 15 bp, Homo sapiens
tcctcggcttgatgc

SEQ ID NO: 2767 - DNA, 15 bp, Homo sapiens
atcctcggcttgatg

SEQ ID NO: 2768 - DNA, 15 bp, Homo sapiens
catcctcggcttgat

SEQ ID NO: 2769 - DNA, 15 bp, Homo sapiens
acatcctcggcttga

SEQ ID NO: 2770 - DNA, 15 bp, Homo sapiens
cacatcctcggcttg

SEQ ID NO: 2771 - DNA, 15 bp, Homo sapiens
ccacatcctcggctt

SEQ ID NO: 2772 - DNA, 15 bp, Homo sapiens
gccacatcctcggct

SEQ ID NO: 2773 - DNA, 15 bp, Homo sapiens
tgccacatcctcggc

SEQ ID NO: 2774 - DNA, 15 bp, Homo sapiens
ttgccacatcctcgg

SEQ ID NO: 2775 - DNA, 15 bp, Homo sapiens
cttgccacatcctcg

SEQ ID NO: 2776 - DNA, 15 bp, Homo sapiens
acttgccacatcctc

SEQ ID NO: 2777 - DNA, 15 bp, Homo sapiens
tacttgccacatcct

SEQ ID NO: 2778 - DNA, 15 bp, Homo sapiens
ttacttgccacatcc

SEQ ID NO: 2779 - DNA, 15 bp, Homo sapiens
tttacttgccacatc

SEQ ID NO: 2780 - DNA, 15 bp, Homo sapiens
ctttacttgccacat

SEQ ID NO: 2781 - DNA, 15 bp, Homo sapiens
tctttacttgccaca

SEQ ID NO: 2782 - DNA, 15 bp, Homo sapiens
ctctttacttgccac

SEQ ID NO: 2783 - DNA, 15 bp, Homo sapiens
tctctttacttgcca

SEQ ID NO: 2784 - DNA, 15 bp, Homo sapiens
ctctctttacttgcc

SEQ ID NO: 2785 - DNA, 15 bp, Homo sapiens
cctctctttacttgc

SEQ ID NO: 2786 - DNA, 15 bp, Homo sapiens
gcctctctttacttg

SEQ ID NO: 2787 - DNA, 15 bp, Homo sapiens
agcctctctttactt

SEQ ID NO: 2788 - DNA, 15 bp, Homo sapiens
cagcctctctttact

SEQ ID NO: 2789 - DNA, 15 bp, Homo sapiens
ccagcctctctttac

SEQ ID NO: 2790 - DNA, 15 bp, Homo sapiens
cccagcctctcttta

SEQ ID NO: 2791 - DNA, 15 bp, Homo sapiens
gcccagcctctcttt

SEQ ID NO: 2792 - DNA, 15 bp, Homo sapiens
tgcccagcctctctt

SEQ ID NO: 2793 - DNA, 15 bp, Homo sapiens
gtgcccagcctctct

SEQ ID NO: 2794 - DNA, 15 bp, Homo sapiens
ggtgcccagcctctc

SEQ ID NO: 2795 - DNA, 15 bp, Homo sapiens
tggtgcccagcctct

SEQ ID NO: 2796 - DNA, 15 bp, Homo sapiens
ttggtgcccagcctc

SEQ ID NO: 2797 - DNA, 15 bp, Homo sapiens
gttggtgcccagcct

SEQ ID NO: 2798 - DNA, 15 bp, Homo sapiens
agttggtgcccagcc

SEQ ID NO: 2799 - DNA, 15 bp, Homo sapiens
gagttggtgcccagc

SEQ ID NO: 2800 - DNA, 15 bp, Homo sapiens
ggagttggtgcccag

SEQ ID NO: 2801 - DNA, 15 bp, Homo sapiens
tggagttggtgccca

SEQ ID NO: 2802 - DNA, 15 bp, Homo sapiens
ctggagttggtgccc

SEQ ID NO: 2803 - DNA, 15 bp, Homo sapiens
actggagttggtgcc

SEQ ID NO: 2804 - DNA, 15 bp, Homo sapiens
cactggagttggtgc

SEQ ID NO: 2805 - DNA, 15 bp, Homo sapiens
acactggagttggtg

SEQ ID NO: 2806 - DNA, 15 bp, Homo sapiens
tacactggagttggt

SEQ ID NO: 2807 - DNA, 15 bp, Homo sapiens
gtacactggagttgg

SEQ ID NO: 2808 - DNA, 15 bp, Homo sapiens
ggtacactggagttg

SEQ ID NO: 2809 - DNA, 15 bp, Homo sapiens
gggtacactggagtt

SEQ ID NO: 2810 - DNA, 15 bp, Homo sapiens
tgggtacactggagt

SEQ ID NO: 2811 - DNA, 15 bp, Homo sapiens
ctgggtacactggag

SEQ ID NO: 2812 - DNA, 15 bp, Homo sapiens
cctgggtacactgga

SEQ ID NO: 2813 - DNA, 15 bp, Homo sapiens
gcctgggtacactgg

SEQ ID NO: 2814 - DNA, 15 bp, Homo sapiens
agcctgggtacactg

SEQ ID NO: 2815 - DNA, 15 bp, Homo sapiens
gagcctgggtacact

SEQ ID NO: 2816 - DNA, 15 bp, Homo sapiens
ggagcctgggtacac

SEQ ID NO: 2817 - DNA, 15 bp, Homo sapiens
cggagcctgggtaca

SEQ ID NO: 2818 - DNA, 15 bp, Homo sapiens
ccggagcctgggtac

SEQ ID NO: 2819 - DNA, 15 bp, Homo sapiens
cccggagcctgggta

SEQ ID NO: 2820 - DNA, 15 bp, Homo sapiens
acccggagcctgggt

SEQ ID NO: 2821 - DNA, 15 bp, Homo sapiens
gacccggagcctggg

SEQ ID NO: 2822 - DNA, 15 bp, Homo sapiens
tgacccggagcctgg

SEQ ID NO: 2823 - DNA, 15 bp, Homo sapiens
atgacccggagcctg

SEQ ID NO: 2824 - DNA, 15 bp, Homo sapiens
catgacccggagcct

SEQ ID NO: 2825 - DNA, 15 bp, Homo sapiens
acatgacccggagcc

SEQ ID NO: 2826 - DNA, 15 bp, Homo sapiens
aacatgacccggagc

SEQ ID NO: 2827 - DNA, 15 bp, Homo sapiens
aaacatgacccggag

SEQ ID NO: 2828 - DNA, 15 bp, Homo sapiens
caaacatgacccgga

SEQ ID NO: 2829 - DNA, 15 bp, Homo sapiens
acaaacatgacccgg

SEQ ID NO: 2830 - DNA, 15 bp, Homo sapiens
gacaaacatgacccg

SEQ ID NO: 2831 - DNA, 15 bp, Homo sapiens
ggacaaacatgaccc

SEQ ID NO: 2832 - DNA, 15 bp, Homo sapiens
tggacaaacatgacc

SEQ ID NO: 2833 - DNA, 15 bp, Homo sapiens
ctggacaaacatgac

SEQ ID NO: 2834 - DNA, 15 bp, Homo sapiens
cctggacaaacatga

SEQ ID NO: 2835 - DNA, 15 bp, Homo sapiens
gcctggacaaacatg

SEQ ID NO: 2836 - DNA, 15 bp, Homo sapiens
agcctggacaaacat

SEQ ID NO: 2837 - DNA, 15 bp, Homo sapiens
tagcctggacaaaca

SEQ ID NO: 2838 - DNA, 15 bp, Homo sapiens
ttagcctggacaaac

SEQ ID NO: 2839 - DNA, 15 bp, Homo sapiens
cttagcctggacaaa

SEQ ID NO: 2840 - DNA, 15 bp, Homo sapiens
tcttagcctggacaa

SEQ ID NO: 2841 - DNA, 15 bp, Homo sapiens
ttcttagcctggaca

SEQ ID NO: 2842 - DNA, 15 bp, Homo sapiens
attcttagcctggac

SEQ ID NO: 2843 - DNA, 15 bp, Homo sapiens
aattcttagcctgga

SEQ ID NO: 2844 - DNA, 15 bp, Homo sapiens
gaattcttagcctgg

SEQ ID NO: 2845 - DNA, 15 bp, Homo sapiens
agaattcttagcctg

SEQ ID NO: 2846 - DNA, 15 bp, Homo sapiens
cagaattcttagcct

SEQ ID NO: 2847 - DNA, 15 bp, Homo sapiens
acagaattcttagcc

SEQ ID NO: 2848 - DNA, 15 bp, Homo sapiens
gacagaattcttagc

SEQ ID NO: 2849 - DNA, 15 bp, Homo sapiens
ggacagaattcttag

SEQ ID NO: 2850 - DNA, 15 bp, Homo sapiens
aggacagaattctta

SEQ ID NO: 2851 - DNA, 15 bp, Homo sapiens
caggacagaattctt

SEQ ID NO: 2852 - DNA, 15 bp, Homo sapiens
ccaggacagaattct

SEQ ID NO: 2853 - DNA, 15 bp, Homo sapiens
accaggacagaattc

SEQ ID NO: 2854 - DNA, 15 bp, Homo sapiens
aaccaggacagaatt

SEQ ID NO: 2855 - DNA, 15 bp, Homo sapiens
gaaccaggacagaat

SEQ ID NO: 2856 - DNA, 15 bp, Homo sapiens
agaaccaggacagaa

SEQ ID NO: 2857 - DNA, 15 bp, Homo sapiens
gagaaccaggacaga

SEQ ID NO: 2858 - DNA, 15 bp, Homo sapiens
tgagaaccaggacag

SEQ ID NO: 2859 - DNA, 15 bp, Homo sapiens
ctgagaaccaggaca

SEQ ID NO: 2860 - DNA, 15 bp, Homo sapiens
actgagaaccaggac

SEQ ID NO: 2861 - DNA, 15 bp, Homo sapiens
cactgagaaccagga

SEQ ID NO: 2862 - DNA, 15 bp, Homo sapiens
gcactgagaaccagg

SEQ ID NO: 2863 - DNA, 15 bp, Homo sapiens
tgcactgagaaccag

SEQ ID NO: 2864 - DNA, 15 bp, Homo sapiens
ctgcactgagaacca

SEQ ID NO: 2865 - DNA, 15 bp, Homo sapiens
tctgcactgagaacc

SEQ ID NO: 2866 - DNA, 15 bp, Homo sapiens
ttctgcactgagaac

SEQ ID NO: 2867 - DNA, 15 bp, Homo sapiens
cttctgcactgagaa

SEQ ID NO: 2868 - DNA, 15 bp, Homo sapiens
ccttctgcactgaga

SEQ ID NO: 2869 - DNA, 15 bp, Homo sapiens
tccttctgcactgag

SEQ ID NO: 2870 - DNA, 15 bp, Homo sapiens
ttccttctgcactga

SEQ ID NO: 2871 - DNA, 15 bp, Homo sapiens
cttccttctgcactg

SEQ ID NO: 2872 - DNA, 15 bp, Homo sapiens
tcttccttctgcact

SEQ ID NO: 2873 - DNA, 15 bp, Homo sapiens
ttcttccttctgcac

SEQ ID NO: 2874 - DNA, 15 bp, Homo sapiens
attcttccttctgca

SEQ ID NO: 2875 - DNA, 15 bp, Homo sapiens
gattcttccttctgc

SEQ ID NO: 2876 - DNA, 15 bp, Homo sapiens
tgattcttccttctg

SEQ ID NO: 2877 - DNA, 15 bp, Homo sapiens
atgattcttccttct

SEQ ID NO: 2878 - DNA, 15 bp, Homo sapiens
catgattcttccttc

SEQ ID NO: 2879 - DNA, 15 bp, Homo sapiens
ccatgattcttcctt

SEQ ID NO: 2880 - DNA, 15 bp, Homo sapiens
cccatgattcttcct

SEQ ID NO: 2881 - DNA, 15 bp, Homo sapiens
ccccatgattcttcc

SEQ ID NO: 2882 - DNA, 15 bp, Homo sapiens
gccccatgattcttc

SEQ ID NO: 2883 - DNA, 15 bp, Homo sapiens
agccccatgattctt

SEQ ID NO: 2884 - DNA, 15 bp, Homo sapiens
gagccccatgattct

SEQ ID NO: 2885 - DNA, 15 bp, Homo sapiens
tgagccccatgattc

SEQ ID NO: 2886 - DNA, 15 bp, Homo sapiens
atgagccccatgatt

SEQ ID NO: 2887 - DNA, 15 bp, Homo sapiens
aatgagccccatgat

SEQ ID NO: 2888 - DNA, 15 bp, Homo sapiens
aaatgagccccatga

SEQ ID NO: 2889 - DNA, 15 bp, Homo sapiens
aaaatgagccccatg

SEQ ID NO: 2890 - DNA, 15 bp, Homo sapiens
taaaatgagccccat

SEQ ID NO: 2891 - DNA, 15 bp, Homo sapiens
ctaaaatgagcccca

SEQ ID NO: 2892 - DNA, 15 bp, Homo sapiens
cctaaaatgagcccc

SEQ ID NO: 2893 - DNA, 15 bp, Homo sapiens
gcctaaaatgagccc

SEQ ID NO: 2894 - DNA, 15 bp, Homo sapiens
ggcctaaaatgagcc

SEQ ID NO: 2895 - DNA, 15 bp, Homo sapiens
aggcctaaaatgagc

SEQ ID NO: 2896 - DNA, 15 bp, Homo sapiens
aaggcctaaaatgag

SEQ ID NO: 2897 - DNA, 15 bp, Homo sapiens
caaggcctaaaatga

SEQ ID NO: 2898 - DNA, 15 bp, Homo sapiens
ccaaggcctaaaatg

SEQ ID NO: 2899 - DNA, 15 bp, Homo sapiens
gccaaggcctaaaat

SEQ ID NO: 2900 - DNA, 15 bp, Homo sapiens
agccaaggcctaaaa

SEQ ID NO: 2901 - DNA, 15 bp, Homo sapiens
cagccaaggcctaaa

SEQ ID NO: 2902 - DNA, 15 bp, Homo sapiens
gcagccaaggcctaa

SEQ ID NO: 2903 - DNA, 15 bp, Homo sapiens
ggcagccaaggccta

SEQ ID NO: 2904 - DNA, 15 bp, Homo sapiens
aggcagccaaggcct

SEQ ID NO: 2905 - DNA, 15 bp, Homo sapiens
aaggcagccaaggcc

SEQ ID NO: 2906 - DNA, 15 bp, Homo sapiens
gaaggcagccaaggc

SEQ ID NO: 2907 - DNA, 15 bp, Homo sapiens
agaaggcagccaagg

SEQ ID NO: 2908 - DNA, 15 bp, Homo sapiens
cagaaggcagccaag

SEQ ID NO: 2909 - DNA, 15 bp, Homo sapiens
acagaaggcagccaa

SEQ ID NO: 2910 - DNA, 15 bp, Homo sapiens
aacagaaggcagcca

SEQ ID NO: 2911 - DNA, 15 bp, Homo sapiens
taacagaaggcagcc

SEQ ID NO: 2912 - DNA, 15 bp, Homo sapiens
ttaacagaaggcagc

SEQ ID NO: 2913 - DNA, 15 bp, Homo sapiens
tttaacagaaggcag

SEQ ID NO: 2914 - DNA, 15 bp, Homo sapiens
atttaacagaaggca

SEQ ID NO: 2915 - DNA, 15 bp, Homo sapiens
aatttaacagaaggc

SEQ ID NO: 2916 - DNA, 15 bp, Homo sapiens
caatttaacagaagg

SEQ ID NO: 2917 - DNA, 15 bp, Homo sapiens
tcaatttaacagaag

SEQ ID NO: 2918 - DNA, 15 bp, Homo sapiens
ttcaatttaacagaa

SEQ ID NO: 2919 - DNA, 15 bp, Homo sapiens
tttcaatttaacaga

SEQ ID NO: 2920 - DNA, 15 bp, Homo sapiens
ttttcaatttaacag

SEQ ID NO: 2921 - DNA, 15 bp, Homo sapiens
gttttcaatttaaca

SEQ ID NO: 2922 - DNA, 15 bp, Homo sapiens
tgttttcaatttaac

SEQ ID NO: 2923 - DNA, 15 bp, Homo sapiens
ctgttttcaatttaa

SEQ ID NO: 2924 - DNA, 15 bp, Homo sapiens
tctgttttcaattta

SEQ ID NO: 2925 - DNA, 15 bp, Homo sapiens
ctctgttttcaattt

SEQ ID NO: 2926 - DNA, 15 bp, Homo sapiens
gctctgttttcaatt

SEQ ID NO: 2927 - DNA, 15 bp, Homo sapiens
tgctctgttttcaat

SEQ ID NO: 2928 - DNA, 15 bp, Homo sapiens
ctgctctgttttcaa

SEQ ID NO: 2929 - DNA, 15 bp, Homo sapiens
cctgctctgttttca

SEQ ID NO: 2930 - DNA, 15 bp, Homo sapiens
tcctgctctgttttc

SEQ ID NO: 2931 - DNA, 15 bp, Homo sapiens
ttcctgctctgtttt

SEQ ID NO: 2932 - DNA, 15 bp, Homo sapiens
cttcctgctctgttt

SEQ ID NO: 2933 - DNA, 15 bp, Homo sapiens
ccttcctgctctgtt

SEQ ID NO: 2934 - DNA, 15 bp, Homo sapiens
tccttcctgctctgt

SEQ ID NO: 2935 - DNA, 15 bp, Homo sapiens
ttccttcctgctctg

SEQ ID NO: 2936 - DNA, 15 bp, Homo sapiens
cttccttcctgctct

SEQ ID NO: 2937 - DNA, 15 bp, Homo sapiens
tcttccttcctgctc

SEQ ID NO: 2938 - DNA, 15 bp, Homo sapiens
ttcttccttcctgct

SEQ ID NO: 2939 - DNA, 15 bp, Homo sapiens
tttcttccttcctgc

SEQ ID NO: 2940 - DNA, 15 bp, Homo sapiens
ttttcttccttcctg

SEQ ID NO: 2941 - DNA, 15 bp, Homo sapiens
attttcttccttcct

SEQ ID NO: 2942 - DNA, 15 bp, Homo sapiens
aattttcttccttcc

SEQ ID NO: 2943 - DNA, 15 bp, Homo sapiens
aaattttcttccttc

SEQ ID NO: 2944 - DNA, 15 bp, Homo sapiens
taaattttcttcctt

SEQ ID NO: 2945 - DNA, 15 bp, Homo sapiens
ttaaattttcttcct

SEQ ID NO: 2946 - DNA, 15 bp, Homo sapiens
gttaaattttcttcc

SEQ ID NO: 2947 - DNA, 15 bp, Homo sapiens
tgttaaattttcttc

SEQ ID NO: 2948 - DNA, 15 bp, Homo sapiens
ctgttaaattttctt

SEQ ID NO: 2949 - DNA, 15 bp, Homo sapiens
cctgttaaattttct

SEQ ID NO: 2950 - DNA, 15 bp, Homo sapiens
gcctgttaaattttc

SEQ ID NO: 2951 - DNA, 15 bp, Homo sapiens
agcctgttaaatttt

SEQ ID NO: 2952 - DNA, 15 bp, Homo sapiens
gagcctgttaaattt

SEQ ID NO: 2953 - DNA, 15 bp, Homo sapiens
tgagcctgttaaatt

SEQ ID NO: 2954 - DNA, 15 bp, Homo sapiens
ctgagcctgttaaat

SEQ ID NO: 2955 - DNA, 15 bp, Homo sapiens
actgagcctgttaaa

SEQ ID NO: 2956 - DNA, 15 bp, Homo sapiens
aactgagcctgttaa

SEQ ID NO: 2957 - DNA, 15 bp, Homo sapiens
gaactgagcctgtta

SEQ ID NO: 2958 - DNA, 15 bp, Homo sapiens
agaactgagcctgtt

SEQ ID NO: 2959 - DNA, 15 bp, Homo sapiens
tagaactgagcctgt

SEQ ID NO: 2960 - DNA, 15 bp, Homo sapiens
ttagaactgagcctg

SEQ ID NO: 2961 - DNA, 15 bp, Homo sapiens
tttagaactgagcct

SEQ ID NO: 2962 - DNA, 15 bp, Homo sapiens
ttttagaactgagcc

SEQ ID NO: 2963 - DNA, 15 bp, Homo sapiens
gttttagaactgagc

SEQ ID NO: 2964 - DNA, 15 bp, Homo sapiens
tgttttagaactgag

SEQ ID NO: 2965 - DNA, 15 bp, Homo sapiens
ttgttttagaactga

SEQ ID NO: 2966 - DNA, 15 bp, Homo sapiens
gttgttttagaactg

SEQ ID NO: 2967 - DNA, 15 bp, Homo sapiens
tgttgttttagaact

SEQ ID NO: 2968 - DNA, 15 bp, Homo sapiens
ttgttgttttagaac

SEQ ID NO: 2969 - DNA, 15 bp, Homo sapiens
cttgttgttttagaa

SEQ ID NO: 2970 - DNA, 15 bp, Homo sapiens
gcttgttgttttaga

SEQ ID NO: 2971 - DNA, 15 bp, Homo sapiens
tgcttgttgttttag

SEQ ID NO: 2972 - DNA, 15 bp, Homo sapiens
gtgcttgttgtttta

SEQ ID NO: 2973 - DNA, 15 bp, Homo sapiens
tgtgcttgttgtttt

SEQ ID NO: 2974 - DNA, 15 bp, Homo sapiens
ttgtgcttgttgttt

SEQ ID NO: 2975 - DNA, 15 bp, Homo sapiens
gttgtgcttgttgtt

SEQ ID NO: 2976 - DNA, 15 bp, Homo sapiens
agttgtgcttgttgt

SEQ ID NO: 2977 - DNA, 15 bp, Homo sapiens
cagttgtgcttgttg

SEQ ID NO: 2978 - DNA, 15 bp, Homo sapiens
acagttgtgcttgtt

SEQ ID NO: 2979 - DNA, 15 bp, Homo sapiens
cacagttgtgcttgt

SEQ ID NO: 2980 - DNA, 15 bp, Homo sapiens
gcacagttgtgcttg

SEQ ID NO: 2981 - DNA, 15 bp, Homo sapiens
ggcacagttgtgctt

SEQ ID NO: 2982 - DNA, 15 bp, Homo sapiens
gggcacagttgtgct

SEQ ID NO: 2983 - DNA, 15 bp, Homo sapiens
agggcacagttgtgc

SEQ ID NO: 2984 - DNA, 15 bp, Homo sapiens
aagggcacagttgtg

SEQ ID NO: 2985 - DNA, 15 bp, Homo sapiens
caagggcacagttgt

SEQ ID NO: 2986 - DNA, 15 bp, Homo sapiens
gcaagggcacagttg

SEQ ID NO: 2987 - DNA, 15 bp, Homo sapiens
ggcaagggcacagtt

SEQ ID NO: 2988 - DNA, 15 bp, Homo sapiens
tggcaagggcacagt

SEQ ID NO: 2989 - DNA, 15 bp, Homo sapiens
ctggcaagggcacag

SEQ ID NO: 2990 - DNA, 15 bp, Homo sapiens
tctggcaagggcaca

SEQ ID NO: 2991 - DNA, 15 bp, Homo sapiens
ttctggcaagggcac

SEQ ID NO: 2992 - DNA, 15 bp, Homo sapiens
tttctggcaagggca

SEQ ID NO: 2993 - DNA, 15 bp, Homo sapiens
gtttctggcaagggc

SEQ ID NO: 2994 - DNA, 15 bp, Homo sapiens
ggtttctggcaaggg

SEQ ID NO: 2995 - DNA, 15 bp, Homo sapiens
gggtttctggcaagg

SEQ ID NO: 2996 - DNA, 15 bp, Homo sapiens
ggggtttctggcaag

SEQ ID NO: 2997 - DNA, 15 bp, Homo sapiens
aggggtttctggcaa

SEQ ID NO: 2998 - DNA, 15 bp, Homo sapiens
gaggggtttctggca

SEQ ID NO: 2999 - DNA, 15 bp, Homo sapiens
ggaggggtttctggc

SEQ ID NO: 3000 - DNA, 15 bp, Homo sapiens
aggaggggtttctgg

SEQ ID NO: 3001 - DNA, 15 bp, Homo sapiens
gaggaggggtttctg

SEQ ID NO: 3002 - DNA, 15 bp, Homo sapiens
ggaggaggggtttct

SEQ ID NO: 3003 - DNA, 15 bp, Homo sapiens
gggaggaggggtttc

SEQ ID NO: 3004 - DNA, 15 bp, Homo sapiens
ggggaggaggggttt

SEQ ID NO: 3005 - DNA, 15 bp, Homo sapiens
tggggaggaggggtt

SEQ ID NO: 3006 - DNA, 15 bp, Homo sapiens
atggggaggaggggt

SEQ ID NO: 3007 - DNA, 15 bp, Homo sapiens
catggggaggagggg

SEQ ID NO: 3008 - DNA, 15 bp, Homo sapiens
acatggggaggaggg

SEQ ID NO: 3009 - DNA, 15 bp, Homo sapiens
aacatggggaggagg

SEQ ID NO: 3010 - DNA, 15 bp, Homo sapiens
caacatggggaggag

SEQ ID NO: 3011 - DNA, 15 bp, Homo sapiens
tcaacatggggagga

SEQ ID NO: 3012 - DNA, 15 bp, Homo sapiens
atcaacatggggagg

SEQ ID NO: 3013 - DNA, 15 bp, Homo sapiens
aatcaacatggggag

SEQ ID NO: 3014 - DNA, 15 bp, Homo sapiens
caatcaacatgggga

SEQ ID NO: 3015 - DNA, 15 bp, Homo sapiens
tcaatcaacatgggg

SEQ ID NO: 3016 - DNA, 15 bp, Homo sapiens
ttcaatcaacatggg

SEQ ID NO: 3017 - DNA, 15 bp, Homo sapiens
attcaatcaacatgg

SEQ ID NO: 3018 - DNA, 15 bp, Homo sapiens
cattcaatcaacatg

SEQ ID NO: 3019 - DNA, 15 bp, Homo sapiens
ccattcaatcaacat

SEQ ID NO: 3020 - DNA, 15 bp, Homo sapiens
accattcaatcaaca

SEQ ID NO: 3021 - DNA, 15 bp, Homo sapiens
taccattcaatcaac

SEQ ID NO: 3022 - DNA, 15 bp, Homo sapiens
ttaccattcaatcaa

SEQ ID NO: 3023 - DNA, 15 bp, Homo sapiens
tttaccattcaatca

SEQ ID NO: 3024 - DNA, 15 bp, Homo sapiens
ctttaccattcaatc

SEQ ID NO: 3025 - DNA, 15 bp, Homo sapiens
tctttaccattcaat

SEQ ID NO: 3026 - DNA, 15 bp, Homo sapiens
ctctttaccattcaa

SEQ ID NO: 3027 - DNA, 15 bp, Homo sapiens
tctctttaccattca

SEQ ID NO: 3028 - DNA, 15 bp, Homo sapiens
ctctctttaccattc

SEQ ID NO: 3029 - DNA, 15 bp, Homo sapiens
cctctctttaccatt

SEQ ID NO: 3030 - DNA, 15 bp, Homo sapiens
tcctctctttaccat

SEQ ID NO: 3031 - DNA, 15 bp, Homo sapiens
ctcctctctttacca

SEQ ID NO: 3032 - DNA, 15 bp, Homo sapiens
cctcctctctttacc

SEQ ID NO: 3033 - DNA, 15 bp, Homo sapiens
ccctcctctctttac

SEQ ID NO: 3034 - DNA, 15 bp, Homo sapiens
cccctcctctcttta

SEQ ID NO: 3035 - DNA, 15 bp, Homo sapiens
tcccctcctctcttt

SEQ ID NO: 3036 - DNA, 15 bp, Homo sapiens
ctcccctcctctctt

SEQ ID NO: 3037 - DNA, 15 bp, Homo sapiens
cctcccctcctctct

SEQ ID NO: 3038 - DNA, 15 bp, Homo sapiens
acctcccctcctctc

SEQ ID NO: 3039 - DNA, 15 bp, Homo sapiens
cacctcccctcctct

SEQ ID NO: 3040 - DNA, 15 bp, Homo sapiens
tcacctcccctcctc

SEQ ID NO: 3041 - DNA, 15 bp, Homo sapiens
ctcacctcccctcct

SEQ ID NO: 3042 - DNA, 15 bp, Homo sapiens
tctcacctcccctcc

SEQ ID NO: 3043 - DNA, 15 bp, Homo sapiens
ctctcacctcccctc

SEQ ID NO: 3044 - DNA, 15 bp, Homo sapiens
cctctcacctcccct

SEQ ID NO: 3045 - DNA, 15 bp, Homo sapiens
ccctctcacctcccc

SEQ ID NO: 3046 - DNA, 15 bp, Homo sapiens
tccctctcacctccc

SEQ ID NO: 3047 - DNA, 15 bp, Homo sapiens
ctccctctcacctcc

SEQ ID NO: 3048 - DNA, 15 bp, Homo sapiens
tctccctctcacctc

SEQ ID NO: 3049 - DNA, 15 bp, Homo sapiens
ctctccctctcacct

SEQ ID NO: 3050 - DNA, 15 bp, Homo sapiens
tctctccctctcacc

SEQ ID NO: 3051 - DNA, 15 bp, Homo sapiens
ctctctccctctcac

SEQ ID NO: 3052 - DNA, 15 bp, Homo sapiens
tctctctccctctca

SEQ ID NO: 3053 - DNA, 15 bp, Homo sapiens
ctctctctccctctc

SEQ ID NO: 3054 - DNA, 15 bp, Homo sapiens
tctctctctccctct

SEQ ID NO: 3055 - DNA, 15 bp, Homo sapiens
ctctctctctccctc

SEQ ID NO: 3056 - DNA, 15 bp, Homo sapiens
tctctctctctccct

SEQ ID NO: 3057 - DNA, 15 bp, Homo sapiens
ctctctctctctccc

SEQ ID NO: 3058 - DNA, 15 bp, Homo sapiens
tctctctctctctcc

SEQ ID NO: 3059 - DNA, 15 bp, Homo sapiens
ctctctctctctctc

SEQ ID NO: 3060 - DNA, 15 bp, Homo sapiens
cctctctctctctct

SEQ ID NO: 3061 - DNA, 15 bp, Homo sapiens
tcctctctctctctc

SEQ ID NO: 3062 - DNA, 15 bp, Homo sapiens
ttcctctctctctct

SEQ ID NO: 3063 - DNA, 15 bp, Homo sapiens
cttcctctctctctc

SEQ ID NO: 3064 - DNA, 15 bp, Homo sapiens
tcttcctctctctct

SEQ ID NO: 3065 - DNA, 15 bp, Homo sapiens
ctcttcctctctctc

SEQ ID NO: 3066 - DNA, 15 bp, Homo sapiens
tctcttcctctctct

SEQ ID NO: 3067 - DNA, 15 bp, Homo sapiens
ctctcttcctctctc

SEQ ID NO: 3068 - DNA, 15 bp, Homo sapiens
tctctcttcctctct

SEQ ID NO: 3069 - DNA, 15 bp, Homo sapiens
ctctctcttcctctc

SEQ ID NO: 3070 - DNA, 15 bp, Homo sapiens
tctctctcttcctct

SEQ ID NO: 3071 - DNA, 15 bp, Homo sapiens
ctctctctcttcctc

SEQ ID NO: 3072 - DNA, 15 bp, Homo sapiens
tctctctctcttcct

SEQ ID NO: 3073 - DNA, 15 bp, Homo sapiens
ttctctctctcttcc

SEQ ID NO: 3074 - DNA, 15 bp, Homo sapiens
tttctctctctcttc

SEQ ID NO: 3075 - DNA, 15 bp, Homo sapiens
ctttctctctctctt

SEQ ID NO: 3076 - DNA, 15 bp, Homo sapiens
cctttctctctctct

SEQ ID NO: 3077 - DNA, 15 bp, Homo sapiens
tcctttctctctctc

SEQ ID NO: 3078 - DNA, 15 bp, Homo sapiens
ttcctttctctctct

SEQ ID NO: 3079 - DNA, 15 bp, Homo sapiens
tttcctttctctctc

SEQ ID NO: 3080 - DNA, 15 bp, Homo sapiens
ctttcctttctctct

SEQ ID NO: 3081 - DNA, 15 bp, Homo sapiens
tctttcctttctctc

SEQ ID NO: 3082 - DNA, 15 bp, Homo sapiens
ttctttcctttctct

SEQ ID NO: 3083 - DNA, 15 bp, Homo sapiens
tttctttcctttctc

SEQ ID NO: 3084 - DNA, 15 bp, Homo sapiens
ctttctttcctttct

SEQ ID NO: 3085 - DNA, 15 bp, Homo sapiens
cctttctttcctttc

SEQ ID NO: 3086 - DNA, 15 bp, Homo sapiens
tcctttctttccttt

SEQ ID NO: 3087 - DNA, 15 bp, Homo sapiens
ttcctttctttcctt

SEQ ID NO: 3088 - DNA, 15 bp, Homo sapiens
tttcctttctttcct

SEQ ID NO: 3089 - DNA, 15 bp, Homo sapiens
ctttcctttctttcc

SEQ ID NO: 3090 - DNA, 15 bp, Homo sapiens
tctttcctttctttc

SEQ ID NO: 3091 - DNA, 15 bp, Homo sapiens
ttctttcctttcttt

SEQ ID NO: 3092 - DNA, 15 bp, Homo sapiens
cttctttcctttctt

SEQ ID NO: 3093 - DNA, 15 bp, Homo sapiens
tcttctttcctttct

SEQ ID NO: 3094 - DNA, 15 bp, Homo sapiens
ttcttctttcctttc

SEQ ID NO: 3095 - DNA, 15 bp, Homo sapiens
cttcttctttccttt

SEQ ID NO: 3096 - DNA, 15 bp, Homo sapiens
tcttcttctttcctt

SEQ ID NO: 3097 - DNA, 15 bp, Homo sapiens
ttcttcttctttcct

SEQ ID NO: 3098 - DNA, 15 bp, Homo sapiens
tttcttcttctttcc

SEQ ID NO: 3099 - DNA, 15 bp, Homo sapiens
ctttcttcttctttc

SEQ ID NO: 3100 - DNA, 15 bp, Homo sapiens
tctttcttcttcttt

SEQ ID NO: 3101 - DNA, 15 bp, Homo sapiens
ttctttcttcttctt

SEQ ID NO: 3102 - DNA, 15 bp, Homo sapiens
tttctttcttcttct

SEQ ID NO: 3103 - DNA, 15 bp, Homo sapiens
ctttctttcttcttc

SEQ ID NO: 3104 - DNA, 15 bp, Homo sapiens
tctttctttcttctt

SEQ ID NO: 3105 - DNA, 15 bp, Homo sapiens
ttctttctttcttct

SEQ ID NO: 3106 - DNA, 15 bp, Homo sapiens
tttctttctttcttc

SEQ ID NO: 3107 - DNA, 15 bp, Homo sapiens
ttttctttctttctt

SEQ ID NO: 3108 - DNA, 15 bp, Homo sapiens
cttttctttctttct

SEQ ID NO: 3109 - DNA, 15 bp, Homo sapiens
ccttttctttctttc

SEQ ID NO: 3110 - DNA, 15 bp, Homo sapiens
tccttttctttcttt

SEQ ID NO: 3111 - DNA, 15 bp, Homo sapiens
ttccttttctttctt

SEQ ID NO: 3112 - DNA, 15 bp, Homo sapiens
tttccttttctttct

SEQ ID NO: 3113 - DNA, 15 bp, Homo sapiens
ctttccttttctttc

SEQ ID NO: 3114 - DNA, 15 bp, Homo sapiens
tctttccttttcttt

SEQ ID NO: 3115 - DNA, 15 bp, Homo sapiens
ttctttccttttctt

SEQ ID NO: 3116 - DNA, 15 bp, Homo sapiens
tttctttccttttct

SEQ ID NO: 3117 - DNA, 15 bp, Homo sapiens
ctttctttccttttc

SEQ ID NO: 3118 - DNA, 15 bp, Homo sapiens
tctttctttcctttt

SEQ ID NO: 3119 - DNA, 15 bp, Homo sapiens
ttctttctttccttt

SEQ ID NO: 3120 - DNA, 15 bp, Homo sapiens
tttctttctttcctt

SEQ ID NO: 3121 - DNA, 15 bp, Homo sapiens
ctttctttctttcct

SEQ ID NO: 3122 - DNA, 15 bp, Homo sapiens
tctttctttctttcc

SEQ ID NO: 3123 - DNA, 15 bp, Homo sapiens
ttctttctttctttc

SEQ ID NO: 3124 - DNA, 15 bp, Homo sapiens
tttctttctttcttt

SEQ ID NO: 3125 - DNA, 15 bp, Homo sapiens
ctttctttctttctt

SEQ ID NO: 3126 - DNA, 15 bp, Homo sapiens
tctttctttctttct

SEQ ID NO: 3127 - DNA, 15 bp, Homo sapiens
ctctttctttctttc

SEQ ID NO: 3128 - DNA, 15 bp, Homo sapiens
tctctttctttcttt

SEQ ID NO: 3129 - DNA, 15 bp, Homo sapiens
ttctctttctttctt

SEQ ID NO: 3130 - DNA, 15 bp, Homo sapiens
tttctctttctttct

SEQ ID NO: 3131 - DNA, 15 bp, Homo sapiens
ctttctctttctttc

SEQ ID NO: 3132 - DNA, 15 bp, Homo sapiens
tctttctctttcttt

SEQ ID NO: 3133 - DNA, 15 bp, Homo sapiens
ttctttctctttctt

SEQ ID NO: 3134 - DNA, 15 bp, Homo sapiens
tttctttctctttct

SEQ ID NO: 3135 - DNA, 15 bp, Homo sapiens
ctttctttctctttc

SEQ ID NO: 3136 - DNA, 15 bp, Homo sapiens
tctttctttctcttt

SEQ ID NO: 3137 - DNA, 15 bp, Homo sapiens
ttctttctttctctt

SEQ ID NO: 3138 - DNA, 15 bp, Homo sapiens
tttctttctttctct

SEQ ID NO: 3139 - DNA, 15 bp, Homo sapiens
ctttctttctttctc

SEQ ID NO: 3140 - DNA, 15 bp, Homo sapiens
cctttctttctttct

SEQ ID NO: 3141 - DNA, 15 bp, Homo sapiens
tcctttctttctttc

SEQ ID NO: 3142 - DNA, 15 bp, Homo sapiens
ctcctttctttcttt

SEQ ID NO: 3143 - DNA, 15 bp, Homo sapiens
cctcctttctttctt

SEQ ID NO: 3144 - DNA, 15 bp, Homo sapiens
ccctcctttctttct

SEQ ID NO: 3145 - DNA, 15 bp, Homo sapiens
tccctcctttctttc

SEQ ID NO: 3146 - DNA, 15 bp, Homo sapiens
ctccctcctttcttt

SEQ ID NO: 3147 - DNA, 15 bp, Homo sapiens
cctccctcctttctt

SEQ ID NO: 3148 - DNA, 15 bp, Homo sapiens
ccctccctcctttct

SEQ ID NO: 3149 - DNA, 15 bp, Homo sapiens
tccctccctcctttc

SEQ ID NO: 3150 - DNA, 15 bp, Homo sapiens
ctccctccctccttt

SEQ ID NO: 3151 - DNA, 15 bp, Homo sapiens
cctccctccctcctt

SEQ ID NO: 3152 - DNA, 15 bp, Homo sapiens
ccctccctccctcct

SEQ ID NO: 3153 - DNA, 15 bp, Homo sapiens
tccctccctccctcc

SEQ ID NO: 3154 - DNA, 15 bp, Homo sapiens
ttccctccctccctc

SEQ ID NO: 3155 - DNA, 15 bp, Homo sapiens
cttccctccctccct

SEQ ID NO: 3156 - DNA, 15 bp, Homo sapiens
ccttccctccctccc

SEQ ID NO: 3157 - DNA, 15 bp, Homo sapiens
cccttccctccctcc

SEQ ID NO: 3158 - DNA, 15 bp, Homo sapiens
ccccttccctccctc

SEQ ID NO: 3159 - DNA, 15 bp, Homo sapiens
tccccttccctccct

SEQ ID NO: 3160 - DNA, 15 bp, Homo sapiens
ttccccttccctccc

SEQ ID NO: 3161 - DNA, 15 bp, Homo sapiens
tttccccttccctcc

SEQ ID NO: 3162 - DNA, 15 bp, Homo sapiens
ttttccccttccctc

SEQ ID NO: 3163 - DNA, 15 bp, Homo sapiens
cttttccccttccct

SEQ ID NO: 3164 - DNA, 15 bp, Homo sapiens
tcttttccccttccc

SEQ ID NO: 3165 - DNA, 15 bp, Homo sapiens
ttcttttccccttcc

SEQ ID NO: 3166 - DNA, 15 bp, Homo sapiens
tttcttttccccttc

SEQ ID NO: 3167 - DNA, 15 bp, Homo sapiens
ttttcttttcccctt

SEQ ID NO: 3168 - DNA, 15 bp, Homo sapiens
cttttcttttcccct

SEQ ID NO: 3169 - DNA, 15 bp, Homo sapiens
tcttttcttttcccc

SEQ ID NO: 3170 - DNA, 15 bp, Homo sapiens
ttcttttcttttccc

SEQ ID NO: 3171 - DNA, 15 bp, Homo sapiens
tttcttttcttttcc

SEQ ID NO: 3172 - DNA, 15 bp, Homo sapiens
ttttcttttcttttc

SEQ ID NO: 3173 - DNA, 15 bp, Homo sapiens
cttttcttttctttt

SEQ ID NO: 3174 - DNA, 15 bp, Homo sapiens
tcttttcttttcttt

SEQ ID NO: 3175 - DNA, 15 bp, Homo sapiens
ttcttttcttttctt

SEQ ID NO: 3176 - DNA, 15 bp, Homo sapiens
tttcttttcttttct

SEQ ID NO: 3177 - DNA, 15 bp, Homo sapiens
tttttcttttctttt

SEQ ID NO: 3178 - DNA, 15 bp, Homo sapiens
ctttttcttttcttt

SEQ ID NO: 3179 - DNA, 15 bp, Homo sapiens
tctttttcttttctt

SEQ ID NO: 3180 - DNA, 15 bp, Homo sapiens
ttctttttcttttct

SEQ ID NO: 3181 - DNA, 15 bp, Homo sapiens
tttctttttcttttc

SEQ ID NO: 3182 - DNA, 15 bp, Homo sapiens
ttttctttttctttt

SEQ ID NO: 3183 - DNA, 15 bp, Homo sapiens
tttttctttttcttt

SEQ ID NO: 3184 - DNA, 15 bp, Homo sapiens
ttttttctttttctt

SEQ ID NO: 3185 - DNA, 15 bp, Homo sapiens
tttttttctttttct

SEQ ID NO: 3186 - DNA, 15 bp, Homo sapiens
ctttttttctttttc

SEQ ID NO: 3187 - DNA, 15 bp, Homo sapiens
tctttttttcttttt

SEQ ID NO: 3188 - DNA, 15 bp, Homo sapiens
ttctttttttctttt

SEQ ID NO: 3189 - DNA, 15 bp, Homo sapiens
cttctttttttcttt

SEQ ID NO: 3190 - DNA, 15 bp, Homo sapiens
ccttctttttttctt

SEQ ID NO: 3191 - DNA, 15 bp, Homo sapiens
tccttctttttttct

SEQ ID NO: 3192 - DNA, 15 bp, Homo sapiens
ttccttctttttttc

SEQ ID NO: 3193 - DNA, 15 bp, Homo sapiens
tttccttcttttttt

SEQ ID NO: 3194 - DNA, 15 bp, Homo sapiens
atttccttctttttt

SEQ ID NO: 3195 - DNA, 15 bp, Homo sapiens
tatttccttcttttt

SEQ ID NO: 3196 - DNA, 15 bp, Homo sapiens
gtatttccttctttt

SEQ ID NO: 3197 - DNA, 15 bp, Homo sapiens
ggtatttccttcttt

SEQ ID NO: 3198 - DNA, 15 bp, Homo sapiens
tggtatttccttctt

SEQ ID NO: 3199 - DNA, 15 bp, Homo sapiens
ctggtatttccttct

SEQ ID NO: 3200 - DNA, 15 bp, Homo sapiens
actggtatttccttc

SEQ ID NO: 3201 - DNA, 15 bp, Homo sapiens
aactggtatttcctt

SEQ ID NO: 3202 - DNA, 15 bp, Homo sapiens
aaactggtatttcct

SEQ ID NO: 3203 - DNA, 15 bp, Homo sapiens
caaactggtatttcc

SEQ ID NO: 3204 - DNA, 15 bp, Homo sapiens
ccaaactggtatttc

SEQ ID NO: 3205 - DNA, 15 bp, Homo sapiens
cccaaactggtattt

SEQ ID NO: 3206 - DNA, 15 bp, Homo sapiens
tcccaaactggtatt

SEQ ID NO: 3207 - DNA, 15 bp, Homo sapiens
ttcccaaactggtat

SEQ ID NO: 3208 - DNA, 15 bp, Homo sapiens
tttcccaaactggta

SEQ ID NO: 3209 - DNA, 15 bp, Homo sapiens
ttttcccaaactggt

SEQ ID NO: 3210 - DNA, 15 bp, Homo sapiens
tttttcccaaactgg

SEQ ID NO: 3211 - DNA, 15 bp, Homo sapiens
ttttttcccaaactg

SEQ ID NO: 3212 - DNA, 15 bp, Homo sapiens
cttttttcccaaact

SEQ ID NO: 3213 - DNA, 15 bp, Homo sapiens
tcttttttcccaaac

SEQ ID NO: 3214 - DNA, 15 bp, Homo sapiens
ttcttttttcccaaa

SEQ ID NO: 3215 - DNA, 15 bp, Homo sapiens
attcttttttcccaa

SEQ ID NO: 3216 - DNA, 15 bp, Homo sapiens
aattcttttttccca

SEQ ID NO: 3217 - DNA, 15 bp, Homo sapiens
aaattcttttttccc

SEQ ID NO: 3218 - DNA, 15 bp, Homo sapiens
aaaattcttttttcc

SEQ ID NO: 3219 - DNA, 15 bp, Homo sapiens
gaaaattcttttttc

SEQ ID NO: 3220 - DNA, 15 bp, Homo sapiens
ggaaaattctttttt

SEQ ID NO: 3221 - DNA, 15 bp, Homo sapiens
tggaaaattcttttt

SEQ ID NO: 3222 - DNA, 15 bp, Homo sapiens
gtggaaaattctttt

SEQ ID NO: 3223 - DNA, 15 bp, Homo sapiens
ggtggaaaattcttt

SEQ ID NO: 3224 - DNA, 15 bp, Homo sapiens
tggtggaaaattctt

SEQ ID NO: 3225 - DNA, 15 bp, Homo sapiens
ctggtggaaaattct

SEQ ID NO: 3226 - DNA, 15 bp, Homo sapiens
gctggtggaaaattc

SEQ ID NO: 3227 - DNA, 15 bp, Homo sapiens
ggctggtggaaaatt

SEQ ID NO: 3228 - DNA, 15 bp, Homo sapiens
gggctggtggaaaat

SEQ ID NO: 3229 - DNA, 15 bp, Homo sapiens
agggctggtggaaaa

SEQ ID NO: 3230 - DNA, 15 bp, Homo sapiens
aagggctggtggaaa

SEQ ID NO: 3231 - DNA, 15 bp, Homo sapiens
gaagggctggtggaa

SEQ ID NO: 3232 - DNA, 15 bp, Homo sapiens
agaagggctggtgga

SEQ ID NO: 3233 - DNA, 15 bp, Homo sapiens
cagaagggctggtgg

SEQ ID NO: 3234 - DNA, 15 bp, Homo sapiens
tcagaagggctggtg

SEQ ID NO: 3235 - DNA, 15 bp, Homo sapiens
ctcagaagggctggt

SEQ ID NO: 3236 - DNA, 15 bp, Homo sapiens
gctcagaagggctgg

SEQ ID NO: 3237 - DNA, 15 bp, Homo sapiens
ggctcagaagggctg

SEQ ID NO: 3238 - DNA, 15 bp, Homo sapiens
aggctcagaagggct

SEQ ID NO: 3239 - DNA, 15 bp, Homo sapiens
aaggctcagaagggc

SEQ ID NO: 3240 - DNA, 15 bp, Homo sapiens
caaggctcagaaggg

SEQ ID NO: 3241 - DNA, 15 bp, Homo sapiens
ccaaggctcagaagg

SEQ ID NO: 3242 - DNA, 15 bp, Homo sapiens
gccaaggctcagaag

SEQ ID NO: 3243 - DNA, 15 bp, Homo sapiens
agccaaggctcagaa

SEQ ID NO: 3244 - DNA, 15 bp, Homo sapiens
cagccaaggctcaga

SEQ ID NO: 3245 - DNA, 15 bp, Homo sapiens
ccagccaaggctcag

SEQ ID NO: 3246 - DNA, 15 bp, Homo sapiens
cccagccaaggctca

SEQ ID NO: 3247 - DNA, 15 bp, Homo sapiens
gcccagccaaggctc

SEQ ID NO: 3248 - DNA, 15 bp, Homo sapiens
agcccagccaaggct

SEQ ID NO: 3249 - DNA, 15 bp, Homo sapiens
aagcccagccaaggc

SEQ ID NO: 3250 - DNA, 15 bp, Homo sapiens
taagcccagccaagg

SEQ ID NO: 3251 - DNA, 15 bp, Homo sapiens
ttaagcccagccaag

SEQ ID NO: 3252 - DNA, 15 bp, Homo sapiens
attaagcccagccaa

SEQ ID NO: 3253 - DNA, 15 bp, Homo sapiens
aattaagcccagcca

SEQ ID NO: 3254 - DNA, 15 bp, Homo sapiens
taattaagcccagcc

SEQ ID NO: 3255 - DNA, 15 bp, Homo sapiens
ttaattaagcccagc

SEQ ID NO: 3256 - DNA, 15 bp, Homo sapiens
tttaattaagcccag

SEQ ID NO: 3257 - DNA, 15 bp, Homo sapiens
ctttaattaagccca

SEQ ID NO: 3258 - DNA, 15 bp, Homo sapiens
actttaattaagccc

SEQ ID NO: 3259 - DNA, 15 bp, Homo sapiens
aactttaattaagcc

SEQ ID NO: 3260 - DNA, 15 bp, Homo sapiens
taactttaattaagc

SEQ ID NO: 3261 - DNA, 15 bp, Homo sapiens
gtaactttaattaag

SEQ ID NO: 3262 - DNA, 15 bp, Homo sapiens
tgtaactttaattaa

SEQ ID NO: 3263 - DNA, 15 bp, Homo sapiens
ctgtaactttaatta

SEQ ID NO: 3264 - DNA, 15 bp, Homo sapiens
tctgtaactttaatt

SEQ ID NO: 3265 - DNA, 15 bp, Homo sapiens
gtctgtaactttaat

SEQ ID NO: 3266 - DNA, 15 bp, Homo sapiens
tgtctgtaactttaa

SEQ ID NO: 3267 - DNA, 15 bp, Homo sapiens
atgtctgtaacttta

SEQ ID NO: 3268 - DNA, 15 bp, Homo sapiens
catgtctgtaacttt

SEQ ID NO: 3269 - DNA, 15 bp, Homo sapiens
acatgtctgtaactt

SEQ ID NO: 3270 - DNA, 15 bp, Homo sapiens
cacatgtctgtaact

SEQ ID NO: 3271 - DNA, 15 bp, Homo sapiens
acacatgtctgtaac

SEQ ID NO: 3272 - DNA, 15 bp, Homo sapiens
tacacatgtctgtaa

SEQ ID NO: 3273 - DNA, 15 bp, Homo sapiens
ttacacatgtctgta

SEQ ID NO: 3274 - DNA, 15 bp, Homo sapiens
tttacacatgtctgt

SEQ ID NO: 3275 - DNA, 15 bp, Homo sapiens
ctttacacatgtctg

SEQ ID NO: 3276 - DNA, 15 bp, Homo sapiens
cctttacacatgtct

SEQ ID NO: 3277 - DNA, 15 bp, Homo sapiens
ccctttacacatgtc

SEQ ID NO: 3278 - DNA, 15 bp, Homo sapiens
gccctttacacatgt

SEQ ID NO: 3279 - DNA, 15 bp, Homo sapiens
tgccctttacacatg

SEQ ID NO: 3280 - DNA, 15 bp, Homo sapiens
ctgccctttacacat

SEQ ID NO: 3281 - DNA, 15 bp, Homo sapiens
cctgccctttacaca

SEQ ID NO: 3282 - DNA, 15 bp, Homo sapiens
ccctgccctttacac

SEQ ID NO: 3283 - DNA, 15 bp, Homo sapiens
accctgccctttaca

SEQ ID NO: 3284 - DNA, 15 bp, Homo sapiens
taccctgccctttac

SEQ ID NO: 3285 - DNA, 15 bp, Homo sapiens
ctaccctgcccttta

SEQ ID NO: 3286 - DNA, 15 bp, Homo sapiens
cctaccctgcccttt

SEQ ID NO: 3287 - DNA, 15 bp, Homo sapiens
ccctaccctgccctt

SEQ ID NO: 3288 - DNA, 15 bp, Homo sapiens
cccctaccctgccct

SEQ ID NO: 3289 - DNA, 15 bp, Homo sapiens
ccccctaccctgccc

SEQ ID NO: 3290 - DNA, 15 bp, Homo sapiens
tccccctaccctgcc

SEQ ID NO: 3291 - DNA, 15 bp, Homo sapiens
ctccccctaccctgc

SEQ ID NO: 3292 - DNA, 15 bp, Homo sapiens
actccccctaccctg

SEQ ID NO: 3293 - DNA, 15 bp, Homo sapiens
gactccccctaccct

SEQ ID NO: 3294 - DNA, 15 bp, Homo sapiens
agactccccctaccc

SEQ ID NO: 3295 - DNA, 15 bp, Homo sapiens
cagactccccctacc

SEQ ID NO: 3296 - DNA, 15 bp, Homo sapiens
tcagactccccctac

SEQ ID NO: 3297 - DNA, 15 bp, Homo sapiens
ctcagactcccccta

SEQ ID NO: 3298 - DNA, 15 bp, Homo sapiens
gctcagactccccct

SEQ ID NO: 3299 - DNA, 15 bp, Homo sapiens
agctcagactccccc

SEQ ID NO: 3300 - DNA, 15 bp, Homo sapiens
cagctcagactcccc

SEQ ID NO: 3301 - DNA, 15 bp, Homo sapiens
gcagctcagactccc

SEQ ID NO: 3302 - DNA, 15 bp, Homo sapiens
agcagctcagactcc

SEQ ID NO: 3303 - DNA, 15 bp, Homo sapiens
cagcagctcagactc

SEQ ID NO: 3304 - DNA, 15 bp, Homo sapiens
tcagcagctcagact

SEQ ID NO: 3305 - DNA, 15 bp, Homo sapiens
ctcagcagctcagac

SEQ ID NO: 3306 - DNA, 15 bp, Homo sapiens
tctcagcagctcaga

SEQ ID NO: 3307 - DNA, 15 bp, Homo sapiens
ttctcagcagctcag

SEQ ID NO: 3308 - DNA, 15 bp, Homo sapiens
tttctcagcagctca

SEQ ID NO: 3309 - DNA, 15 bp, Homo sapiens
ttttctcagcagctc

SEQ ID NO: 3310 - DNA, 15 bp, Homo sapiens
gttttctcagcagct

SEQ ID NO: 3311 - DNA, 15 bp, Homo sapiens
tgttttctcagcagc

SEQ ID NO: 3312 - DNA, 15 bp, Homo sapiens
atgttttctcagcag

SEQ ID NO: 3313 - DNA, 15 bp, Homo sapiens
catgttttctcagca

SEQ ID NO: 3314 - DNA, 15 bp, Homo sapiens
acatgttttctcagc

SEQ ID NO: 3315 - DNA, 15 bp, Homo sapiens
aacatgttttctcag

SEQ ID NO: 3316 - DNA, 15 bp, Homo sapiens
aaacatgttttctca

SEQ ID NO: 3317 - DNA, 15 bp, Homo sapiens
aaaacatgttttctc

SEQ ID NO: 3318 - DNA, 15 bp, Homo sapiens
aaaaacatgttttct

SEQ ID NO: 3319 - DNA, 15 bp, Homo sapiens
taaaaacatgttttc

SEQ ID NO: 3320 - DNA, 15 bp, Homo sapiens
ttaaaaacatgtttt

SEQ ID NO: 3321 - DNA, 15 bp, Homo sapiens
attaaaaacatgttt

SEQ ID NO: 3322 - DNA, 15 bp, Homo sapiens
aattaaaaacatgtt

SEQ ID NO: 3323 - DNA, 15 bp, Homo sapiens
taattaaaaacatgt

SEQ ID NO: 3324 - DNA, 15 bp, Homo sapiens
ataattaaaaacatg

SEQ ID NO: 3325 - DNA, 15 bp, Homo sapiens
tataattaaaaacat

SEQ ID NO: 3326 - DNA, 15 bp, Homo sapiens
gtataattaaaaaca

SEQ ID NO: 3327 - DNA, 15 bp, Homo sapiens
agtataattaaaaac

SEQ ID NO: 3328 - DNA, 15 bp, Homo sapiens
cagtataattaaaaa

SEQ ID NO: 3329 - DNA, 15 bp, Homo sapiens
acagtataattaaaa

SEQ ID NO: 3330 - DNA, 15 bp, Homo sapiens
cacagtataattaaa

SEQ ID NO: 3331 - DNA, 15 bp, Homo sapiens
ccacagtataattaa

SEQ ID NO: 3332 - DNA, 15 bp, Homo sapiens
tccacagtataatta

SEQ ID NO: 3333 - DNA, 15 bp, Homo sapiens
ttccacagtataatt

SEQ ID NO: 3334 - DNA, 15 bp, Homo sapiens
attccacagtataat

SEQ ID NO: 3335 - DNA, 15 bp, Homo sapiens
aattccacagtataa

SEQ ID NO: 3336 - DNA, 15 bp, Homo sapiens
aaattccacagtata

SEQ ID NO: 3337 - DNA, 15 bp, Homo sapiens
gaaattccacagtat

SEQ ID NO: 3338 - DNA, 15 bp, Homo sapiens
agaaattccacagta

SEQ ID NO: 3339 - DNA, 15 bp, Homo sapiens
gagaaattccacagt

SEQ ID NO: 3340 - DNA, 15 bp, Homo sapiens
ggagaaattccacag

SEQ ID NO: 3341 - DNA, 15 bp, Homo sapiens
gggagaaattccaca

SEQ ID NO: 3342 - DNA, 15 bp, Homo sapiens
agggagaaattccac

SEQ ID NO: 3343 - DNA, 15 bp, Homo sapiens
cagggagaaattcca

SEQ ID NO: 3344 - DNA, 15 bp, Homo sapiens
ccagggagaaattcc

SEQ ID NO: 3345 - DNA, 15 bp, Homo sapiens
cccagggagaaattc

SEQ ID NO: 3346 - DNA, 15 bp, Homo sapiens
ccccagggagaaatt

SEQ ID NO: 3347 - DNA, 15 bp, Homo sapiens
accccagggagaaat

SEQ ID NO: 3348 - DNA, 15 bp, Homo sapiens
taccccagggagaaa

SEQ ID NO: 3349 - DNA, 15 bp, Homo sapiens
ataccccagggagaa

SEQ ID NO: 3350 - DNA, 15 bp, Homo sapiens
cataccccagggaga

SEQ ID NO: 3351 - DNA, 15 bp, Homo sapiens
gcataccccagggag

SEQ ID NO: 3352 - DNA, 15 bp, Homo sapiens
ggcataccccaggga

SEQ ID NO: 3353 - DNA, 15 bp, Homo sapiens
aggcataccccaggg

SEQ ID NO: 3354 - DNA, 15 bp, Homo sapiens
caggcataccccagg

SEQ ID NO: 3355 - DNA, 15 bp, Homo sapiens
acaggcataccccag

SEQ ID NO: 3356 - DNA, 15 bp, Homo sapiens
tacaggcatacccca

SEQ ID NO: 3357 - DNA, 15 bp, Homo sapiens
gtacaggcatacccc

SEQ ID NO: 3358 - DNA, 15 bp, Homo sapiens
cgtacaggcataccc

SEQ ID NO: 3359 - DNA, 15 bp, Homo sapiens
gcgtacaggcatacc

SEQ ID NO: 3360 - DNA, 15 bp, Homo sapiens
tgcgtacaggcatac

SEQ ID NO: 3361 - DNA, 15 bp, Homo sapiens
ctgcgtacaggcata

SEQ ID NO: 3362 - DNA, 15 bp, Homo sapiens
actgcgtacaggcat

SEQ ID NO: 3363 - DNA, 15 bp, Homo sapiens
aactgcgtacaggca

SEQ ID NO: 3364 - DNA, 15 bp, Homo sapiens
taactgcgtacaggc

SEQ ID NO: 3365 - DNA, 15 bp, Homo sapiens
ttaactgcgtacagg

SEQ ID NO: 3366 - DNA, 15 bp, Homo sapiens
cttaactgcgtacag

SEQ ID NO: 3367 - DNA, 15 bp, Homo sapiens
gcttaactgcgtaca

SEQ ID NO: 3368 - DNA, 15 bp, Homo sapiens
cgcttaactgcgtac

SEQ ID NO: 3369 - DNA, 15 bp, Homo sapiens
acgcttaactgcgta

SEQ ID NO: 3370 - DNA, 15 bp, Homo sapiens
gacgcttaactgcgt

SEQ ID NO: 3371 - DNA, 15 bp, Homo sapiens
tgacgcttaactgcg

SEQ ID NO: 3372 - DNA, 15 bp, Homo sapiens
ttgacgcttaactgc

SEQ ID NO: 3373 - DNA, 15 bp, Homo sapiens
cttgacgcttaactg

SEQ ID NO: 3374 - DNA, 15 bp, Homo sapiens
ccttgacgcttaact

SEQ ID NO: 3375 - DNA, 15 bp, Homo sapiens
tccttgacgcttaac

SEQ ID NO: 3376 - DNA, 15 bp, Homo sapiens
gtccttgacgcttaa

SEQ ID NO: 3377 - DNA, 15 bp, Homo sapiens
tgtccttgacgctta

SEQ ID NO: 3378 - DNA, 15 bp, Homo sapiens
ctgtccttgacgctt

SEQ ID NO: 3379 - DNA, 15 bp, Homo sapiens
cctgtccttgacgct

SEQ ID NO: 3380 - DNA, 15 bp, Homo sapiens
ccctgtccttgacgc

SEQ ID NO: 3381 - DNA, 15 bp, Homo sapiens
tccctgtccttgacg

SEQ ID NO: 3382 - DNA, 15 bp, Homo sapiens
atccctgtccttgac

SEQ ID NO: 3383 - DNA, 15 bp, Homo sapiens
catccctgtccttga

SEQ ID NO: 3384 - DNA, 15 bp, Homo sapiens
gcatccctgtccttg

SEQ ID NO: 3385 - DNA, 15 bp, Homo sapiens
ggcatccctgtcctt

SEQ ID NO: 3386 - DNA, 15 bp, Homo sapiens
cggcatccctgtcct

SEQ ID NO: 3387 - DNA, 15 bp, Homo sapiens
gcggcatccctgtcc

SEQ ID NO: 3388 - DNA, 15 bp, Homo sapiens
agcggcatccctgtc

SEQ ID NO: 3389 - DNA, 15 bp, Homo sapiens
gagcggcatccctgt

SEQ ID NO: 3390 - DNA, 15 bp, Homo sapiens
agagcggcatccctg

SEQ ID NO: 3391 - DNA, 15 bp, Homo sapiens
cagagcggcatccct

SEQ ID NO: 3392 - DNA, 15 bp, Homo sapiens
ccagagcggcatccc

SEQ ID NO: 3393 - DNA, 15 bp, Homo sapiens
cccagagcggcatcc

SEQ ID NO: 3394 - DNA, 15 bp, Homo sapiens
ccccagagcggcatc

SEQ ID NO: 3395 - DNA, 15 bp, Homo sapiens
tccccagagcggcat

SEQ ID NO: 3396 - DNA, 15 bp, Homo sapiens
ctccccagagcggca

SEQ ID NO: 3397 - DNA, 15 bp, Homo sapiens
cctccccagagcggc

SEQ ID NO: 3398 - DNA, 15 bp, Homo sapiens
ccctccccagagcgg

SEQ ID NO: 3399 - DNA, 15 bp, Homo sapiens
cccctccccagagcg

SEQ ID NO: 3400 - DNA, 15 bp, Homo sapiens
tcccctccccagagc

SEQ ID NO: 3401 - DNA, 15 bp, Homo sapiens
ttcccctccccagag

SEQ ID NO: 3402 - DNA, 15 bp, Homo sapiens
cttcccctccccaga

SEQ ID NO: 3403 - DNA, 15 bp, Homo sapiens
gcttcccctccccag

SEQ ID NO: 3404 - DNA, 15 bp, Homo sapiens
agcttcccctcccca

SEQ ID NO: 3405 - DNA, 15 bp, Homo sapiens
cagcttcccctcccc

SEQ ID NO: 3406 - DNA, 15 bp, Homo sapiens
tcagcttcccctccc

SEQ ID NO: 3407 - DNA, 15 bp, Homo sapiens
ctcagcttcccctcc

SEQ ID NO: 3408 - DNA, 15 bp, Homo sapiens
gctcagcttcccctc

SEQ ID NO: 3409 - DNA, 15 bp, Homo sapiens
tgctcagcttcccct

SEQ ID NO: 3410 - DNA, 15 bp, Homo sapiens
atgctcagcttcccc

SEQ ID NO: 3411 - DNA, 15 bp, Homo sapiens
catgctcagcttccc

SEQ ID NO: 3412 - DNA, 15 bp, Homo sapiens
tcatgctcagcttcc

SEQ ID NO: 3413 - DNA, 15 bp, Homo sapiens
atcatgctcagcttc

SEQ ID NO: 3414 - DNA, 15 bp, Homo sapiens
aatcatgctcagctt

SEQ ID NO: 3415 - DNA, 15 bp, Homo sapiens
aaatcatgctcagct

SEQ ID NO: 3416 - DNA, 15 bp, Homo sapiens
aaaatcatgctcagc

SEQ ID NO: 3417 - DNA, 15 bp, Homo sapiens
caaaatcatgctcag

SEQ ID NO: 3418 - DNA, 15 bp, Homo sapiens
ccaaaatcatgctca

SEQ ID NO: 3419 - DNA, 15 bp, Homo sapiens
tccaaaatcatgctc

SEQ ID NO: 3420 - DNA, 15 bp, Homo sapiens
ttccaaaatcatgct

SEQ ID NO: 3421 - DNA, 15 bp, Homo sapiens
cttccaaaatcatgc

SEQ ID NO: 3422 - DNA, 15 bp, Homo sapiens
gcttccaaaatcatg

SEQ ID NO: 3423 - DNA, 15 bp, Homo sapiens
ggcttccaaaatcat

SEQ ID NO: 3424 - DNA, 15 bp, Homo sapiens
cggcttccaaaatca

SEQ ID NO: 3425 - DNA, 15 bp, Homo sapiens
ccggcttccaaaatc

SEQ ID NO: 3426 - DNA, 15 bp, Homo sapiens
gccggcttccaaaat

SEQ ID NO: 3427 - DNA, 15 bp, Homo sapiens
tgccggcttccaaaa

SEQ ID NO: 3428 - DNA, 15 bp, Homo sapiens
ctgccggcttccaaa

SEQ ID NO: 3429 - DNA, 15 bp, Homo sapiens
tctgccggcttccaa

SEQ ID NO: 3430 - DNA, 15 bp, Homo sapiens
ttctgccggcttcca

SEQ ID NO: 3431 - DNA, 15 bp, Homo sapiens
cttctgccggcttcc

SEQ ID NO: 3432 - DNA, 15 bp, Homo sapiens
tcttctgccggcttc

SEQ ID NO: 3433 - DNA, 15 bp, Homo sapiens
ctcttctgccggctt

SEQ ID NO: 3434 - DNA, 15 bp, Homo sapiens
cctcttctgccggct

SEQ ID NO: 3435 - DNA, 15 bp, Homo sapiens
gcctcttctgccggc

SEQ ID NO: 3436 - DNA, 15 bp, Homo sapiens
agcctcttctgccgg

SEQ ID NO: 3437 - DNA, 15 bp, Homo sapiens
tagcctcttctgccg

SEQ ID NO: 3438 - DNA, 15 bp, Homo sapiens
atagcctcttctgcc

SEQ ID NO: 3439 - DNA, 15 bp, Homo sapiens
aatagcctcttctgc

SEQ ID NO: 3440 - DNA, 15 bp, Homo sapiens
caatagcctcttctg

SEQ ID NO: 3441 - DNA, 15 bp, Homo sapiens
acaatagcctcttct

SEQ ID NO: 3442 - DNA, 15 bp, Homo sapiens
cacaatagcctcttc

SEQ ID NO: 3443 - DNA, 15 bp, Homo sapiens
tcacaatagcctctt

SEQ ID NO: 3444 - DNA, 15 bp, Homo sapiens
ttcacaatagcctct

SEQ ID NO: 3445 - DNA, 15 bp, Homo sapiens
tttcacaatagcctc

SEQ ID NO: 3446 - DNA, 15 bp, Homo sapiens
ttttcacaatagcct

SEQ ID NO: 3447 - DNA, 15 bp, Homo sapiens
gttttcacaatagcc

SEQ ID NO: 3448 - DNA, 15 bp, Homo sapiens
ggttttcacaatagc

SEQ ID NO: 3449 - DNA, 15 bp, Homo sapiens
tggttttcacaatag

SEQ ID NO: 3450 - DNA, 15 bp, Homo sapiens
ctggttttcacaata

SEQ ID NO: 3451 - DNA, 15 bp, Homo sapiens
tctggttttcacaat

SEQ ID NO: 3452 - DNA, 15 bp, Homo sapiens
gtctggttttcacaa

SEQ ID NO: 3453 - DNA, 15 bp, Homo sapiens
ggtctggttttcaca

SEQ ID NO: 3454 - DNA, 15 bp, Homo sapiens
aggtctggttttcac

SEQ ID NO: 3455 - DNA, 15 bp, Homo sapiens
caggtctggttttca

SEQ ID NO: 3456 - DNA, 15 bp, Homo sapiens
acaggtctggttttc

SEQ ID NO: 3457 - DNA, 15 bp, Homo sapiens
gacaggtctggtttt

SEQ ID NO: 3458 - DNA, 15 bp, Homo sapiens
tgacaggtctggttt

SEQ ID NO: 3459 - DNA, 15 bp, Homo sapiens
ctgacaggtctggtt

SEQ ID NO: 3460 - DNA, 15 bp, Homo sapiens
cctgacaggtctggt

SEQ ID NO: 3461 - DNA, 15 bp, Homo sapiens
gcctgacaggtctgg

SEQ ID NO: 3462 - DNA, 15 bp, Homo sapiens
agcctgacaggtctg

SEQ ID NO: 3463 - DNA, 15 bp, Homo sapiens
tagcctgacaggtct

SEQ ID NO: 3464 - DNA, 15 bp, Homo sapiens
ctagcctgacaggtc

SEQ ID NO: 3465 - DNA, 15 bp, Homo sapiens
cctagcctgacaggt

SEQ ID NO: 3466 - DNA, 15 bp, Homo sapiens
tcctagcctgacagg

SEQ ID NO: 3467 - DNA, 15 bp, Homo sapiens
ttcctagcctgacag

SEQ ID NO: 3468 - DNA, 15 bp, Homo sapiens
tttcctagcctgaca

SEQ ID NO: 3469 - DNA, 15 bp, Homo sapiens
ttttcctagcctgac

SEQ ID NO: 3470 - DNA, 15 bp, Homo sapiens
cttttcctagcctga

SEQ ID NO: 3471 - DNA, 15 bp, Homo sapiens
tcttttcctagcctg

SEQ ID NO: 3472 - DNA, 15 bp, Homo sapiens
ttcttttcctagcct

SEQ ID NO: 3473 - DNA, 15 bp, Homo sapiens
attcttttcctagcc

SEQ ID NO: 3474 - DNA, 15 bp, Homo sapiens
cattcttttcctagc

SEQ ID NO: 3475 - DNA, 15 bp, Homo sapiens
ccattcttttcctag

SEQ ID NO: 3476 - DNA, 15 bp, Homo sapiens
gccattcttttccta

SEQ ID NO: 3477 - DNA, 15 bp, Homo sapiens
agccattcttttcct

SEQ ID NO: 3478 - DNA, 15 bp, Homo sapiens
cagccattcttttcc

SEQ ID NO: 3479 - DNA, 15 bp, Homo sapiens
ccagccattcttttc

SEQ ID NO: 3480 - DNA, 15 bp, Homo sapiens
accagccattctttt

SEQ ID NO: 3481 - DNA, 15 bp, Homo sapiens
caccagccattcttt

SEQ ID NO: 3482 - DNA, 15 bp, Homo sapiens
ccaccagccattctt

SEQ ID NO: 3483 - DNA, 15 bp, Homo sapiens
accaccagccattct

SEQ ID NO: 3484 - DNA, 15 bp, Homo sapiens
gaccaccagccattc

SEQ ID NO: 3485 - DNA, 15 bp, Homo sapiens
agaccaccagccatt

SEQ ID NO: 3486 - DNA, 15 bp, Homo sapiens
aagaccaccagccat

SEQ ID NO: 3487 - DNA, 15 bp, Homo sapiens
aaagaccaccagcca

SEQ ID NO: 3488 - DNA, 15 bp, Homo sapiens
caaagaccaccagcc

SEQ ID NO: 3489 - DNA, 15 bp, Homo sapiens
tcaaagaccaccagc

SEQ ID NO: 3490 - DNA, 15 bp, Homo sapiens
gtcaaagaccaccag

SEQ ID NO: 3491 - DNA, 15 bp, Homo sapiens
ggtcaaagaccacca

SEQ ID NO: 3492 - DNA, 15 bp, Homo sapiens
tggtcaaagaccacc

SEQ ID NO: 3493 - DNA, 15 bp, Homo sapiens
ctggtcaaagaccac

SEQ ID NO: 3494 - DNA, 15 bp, Homo sapiens
cctggtcaaagacca

SEQ ID NO: 3495 - DNA, 15 bp, Homo sapiens
ccctggtcaaagacc

SEQ ID NO: 3496 - DNA, 15 bp, Homo sapiens
tccctggtcaaagac

SEQ ID NO: 3497 - DNA, 15 bp, Homo sapiens
ctccctggtcaaaga

SEQ ID NO: 3498 - DNA, 15 bp, Homo sapiens
actccctggtcaaag

SEQ ID NO: 3499 - DNA, 15 bp, Homo sapiens
cactccctggtcaaa

SEQ ID NO: 3500 - DNA, 15 bp, Homo sapiens
tcactccctggtcaa

SEQ ID NO: 3501 - DNA, 15 bp, Homo sapiens
gtcactccctggtca

SEQ ID NO: 3502 - DNA, 15 bp, Homo sapiens
cgtcactccctggtc

SEQ ID NO: 3503 - DNA, 15 bp, Homo sapiens
gcgtcactccctggt

SEQ ID NO: 3504 - DNA, 15 bp, Homo sapiens
cgcgtcactccctgg

SEQ ID NO: 3505 - DNA, 15 bp, Homo sapiens
acgcgtcactccctg

SEQ ID NO: 3506 - DNA, 15 bp, Homo sapiens
cacgcgtcactccct

SEQ ID NO: 3507 - DNA, 15 bp, Homo sapiens
tcacgcgtcactccc

SEQ ID NO: 3508 - DNA, 15 bp, Homo sapiens
ttcacgcgtcactcc

SEQ ID NO: 3509 - DNA, 15 bp, Homo sapiens
tttcacgcgtcactc

SEQ ID NO: 3510 - DNA, 15 bp, Homo sapiens
atttcacgcgtcact

SEQ ID NO: 3511 - DNA, 15 bp, Homo sapiens
catttcacgcgtcac

SEQ ID NO: 3512 - DNA, 15 bp, Homo sapiens
gcatttcacgcgtca

SEQ ID NO: 3513 - DNA, 15 bp, Homo sapiens
tgcatttcacgcgtc

SEQ ID NO: 3514 - DNA, 15 bp, Homo sapiens
ctgcatttcacgcgt

SEQ ID NO: 3515 - DNA, 15 bp, Homo sapiens
gctgcatttcacgcg

SEQ ID NO: 3516 - DNA, 15 bp, Homo sapiens
tgctgcatttcacgc

SEQ ID NO: 3517 - DNA, 15 bp, Homo sapiens
ttgctgcatttcacg

SEQ ID NO: 3518 - DNA, 15 bp, Homo sapiens
gttgctgcatttcac

SEQ ID NO: 3519 - DNA, 15 bp, Homo sapiens
ggttgctgcatttca

SEQ ID NO: 3520 - DNA, 15 bp, Homo sapiens
cggttgctgcatttc

SEQ ID NO: 3521 - DNA, 15 bp, Homo sapiens
gcggttgctgcattt

SEQ ID NO: 3522 - DNA, 15 bp, Homo sapiens
ggcggttgctgcatt

SEQ ID NO: 3523 - DNA, 15 bp, Homo sapiens
gggcggttgctgcat

SEQ ID NO: 3524 - DNA, 15 bp, Homo sapiens
ggggcggttgctgca

SEQ ID NO: 3525 - DNA, 15 bp, Homo sapiens
gggggcggttgctgc

SEQ ID NO: 3526 - DNA, 15 bp, Homo sapiens
cgggggcggttgctg

SEQ ID NO: 3527 - DNA, 15 bp, Homo sapiens
gcgggggcggttgct

SEQ ID NO: 3528 - DNA, 15 bp, Homo sapiens
ggcgggggcggttgc

SEQ ID NO: 3529 - DNA, 15 bp, Homo sapiens
gggcgggggcggttg

SEQ ID NO: 3530 - DNA, 15 bp, Homo sapiens
ggggcgggggcggtt

SEQ ID NO: 3531 - DNA, 15 bp, Homo sapiens
gggggcgggggcggt

SEQ ID NO: 3532 - DNA, 15 bp, Homo sapiens
ggggggcgggggcgg

SEQ ID NO: 3533 - DNA, 15 bp, Homo sapiens
cggggggcgggggcg

SEQ ID NO: 3534 - DNA, 15 bp, Homo sapiens
gcggggggcgggggc

SEQ ID NO: 3535 - DNA, 15 bp, Homo sapiens
ggcggggggcggggg

SEQ ID NO: 3536 - DNA, 15 bp, Homo sapiens
tggcggggggcgggg

SEQ ID NO: 3537 - DNA, 15 bp, Homo sapiens
ttggcggggggcggg

SEQ ID NO: 3538 - DNA, 15 bp, Homo sapiens
tttggcggggggcgg

SEQ ID NO: 3539 - DNA, 15 bp, Homo sapiens
ttttggcggggggcg

SEQ ID NO: 3540 - DNA, 15 bp, Homo sapiens
tttttggcggggggc

SEQ ID NO: 3541 - DNA, 15 bp, Homo sapiens
gtttttggcgggggg

SEQ ID NO: 3542 - DNA, 15 bp, Homo sapiens
tgtttttggcggggg

SEQ ID NO: 3543 - DNA, 15 bp, Homo sapiens
ttgtttttggcgggg

SEQ ID NO: 3544 - DNA, 15 bp, Homo sapiens
tttgtttttggcggg

SEQ ID NO: 3545 - DNA, 15 bp, Homo sapiens
gtttgtttttggcgg

SEQ ID NO: 3546 - DNA, 15 bp, Homo sapiens
tgtttgtttttggcg

SEQ ID NO: 3547 - DNA, 15 bp, Homo sapiens
gtgtttgtttttggc

SEQ ID NO: 3548 - DNA, 15 bp, Homo sapiens
tgtgtttgtttttgg

SEQ ID NO: 3549 - DNA, 15 bp, Homo sapiens
gtgtgtttgtttttg

SEQ ID NO: 3550 - DNA, 15 bp, Homo sapiens
agtgtgtttgttttt

SEQ ID NO: 3551 - DNA, 15 bp, Homo sapiens
gagtgtgtttgtttt

SEQ ID NO: 3552 - DNA, 15 bp, Homo sapiens
agagtgtgtttgttt

SEQ ID NO: 3553 - DNA, 15 bp, Homo sapiens
gagagtgtgtttgtt

SEQ ID NO: 3554 - DNA, 15 bp, Homo sapiens
tgagagtgtgtttgt

SEQ ID NO: 3555 - DNA, 15 bp, Homo sapiens
gtgagagtgtgtttg

SEQ ID NO: 3556 - DNA, 15 bp, Homo sapiens
tgtgagagtgtgttt

SEQ ID NO: 3557 - DNA, 15 bp, Homo sapiens
ctgtgagagtgtgtt

SEQ ID NO: 3558 - DNA, 15 bp, Homo sapiens
tctgtgagagtgtgt

SEQ ID NO: 3559 - DNA, 15 bp, Homo sapiens
ctctgtgagagtgtg

SEQ ID NO: 3560 - DNA, 15 bp, Homo sapiens
actctgtgagagtgt

SEQ ID NO: 3561 - DNA, 15 bp, Homo sapiens
aactctgtgagagtg

SEQ ID NO: 3562 - DNA, 15 bp, Homo sapiens
taactctgtgagagt

SEQ ID NO: 3563 - DNA, 15 bp, Homo sapiens
ctaactctgtgagag

SEQ ID NO: 3564 - DNA, 15 bp, Homo sapiens
tctaactctgtgaga

SEQ ID NO: 3565 - DNA, 15 bp, Homo sapiens
ttctaactctgtgag

SEQ ID NO: 3566 - DNA, 15 bp, Homo sapiens
gttctaactctgtga

SEQ ID NO: 3567 - DNA, 15 bp, Homo sapiens
tgttctaactctgtg

SEQ ID NO: 3568 - DNA, 15 bp, Homo sapiens
ttgttctaactctgt

SEQ ID NO: 3569 - DNA, 15 bp, Homo sapiens
gttgttctaactctg

SEQ ID NO: 3570 - DNA, 15 bp, Homo sapiens
tgttgttctaactct

SEQ ID NO: 3571 - DNA, 15 bp, Homo sapiens
ctgttgttctaactc

SEQ ID NO: 3572 - DNA, 15 bp, Homo sapiens
actgttgttctaact

SEQ ID NO: 3573 - DNA, 15 bp, Homo sapiens
cactgttgttctaac

SEQ ID NO: 3574 - DNA, 15 bp, Homo sapiens
tcactgttgttctaa

SEQ ID NO: 3575 - DNA, 15 bp, Homo sapiens
gtcactgttgttcta

SEQ ID NO: 3576 - DNA, 15 bp, Homo sapiens
ggtcactgttgttct

SEQ ID NO: 3577 - DNA, 15 bp, Homo sapiens
aggtcactgttgttc

SEQ ID NO: 3578 - DNA, 15 bp, Homo sapiens
gaggtcactgttgtt

SEQ ID NO: 3579 - DNA, 15 bp, Homo sapiens
agaggtcactgttgt

SEQ ID NO: 3580 - DNA, 15 bp, Homo sapiens
gagaggtcactgttg

SEQ ID NO: 3581 - DNA, 15 bp, Homo sapiens
tgagaggtcactgtt

SEQ ID NO: 3582 - DNA, 15 bp, Homo sapiens
ttgagaggtcactgt

SEQ ID NO: 3583 - DNA, 15 bp, Homo sapiens
gttgagaggtcactg

SEQ ID NO: 3584 - DNA, 15 bp, Homo sapiens
tgttgagaggtcact

SEQ ID NO: 3585 - DNA, 15 bp, Homo sapiens
ttgttgagaggtcac

SEQ ID NO: 3586 - DNA, 15 bp, Homo sapiens
tttgttgagaggtca

SEQ ID NO: 3587 - DNA, 15 bp, Homo sapiens
atttgttgagaggtc

SEQ ID NO: 3588 - DNA, 15 bp, Homo sapiens
tatttgttgagaggt

SEQ ID NO: 3589 - DNA, 15 bp, Homo sapiens
atatttgttgagagg

SEQ ID NO: 3590 - DNA, 15 bp, Homo sapiens
aatatttgttgagag

SEQ ID NO: 3591 - DNA, 15 bp, Homo sapiens
aaatatttgttgaga

SEQ ID NO: 3592 - DNA, 15 bp, Homo sapiens
aaaatatttgttgag

SEQ ID NO: 3593 - DNA, 15 bp, Homo sapiens
aaaaatatttgttga

SEQ ID NO: 3594 - DNA, 15 bp, Homo sapiens
gaaaaatatttgttg

SEQ ID NO: 3595 - DNA, 15 bp, Homo sapiens
tgaaaaatatttgtt

SEQ ID NO: 3596 - DNA, 15 bp, Homo sapiens
ttgaaaaatatttgt

SEQ ID NO: 3597 - DNA, 15 bp, Homo sapiens
tttgaaaaatatttg

SEQ ID NO: 3598 - DNA, 15 bp, Homo sapiens
ctttgaaaaatattt

SEQ ID NO: 3599 - DNA, 15 bp, Homo sapiens
tctttgaaaaatatt

SEQ ID NO: 3600 - DNA, 15 bp, Homo sapiens
atctttgaaaaatat

SEQ ID NO: 3601 - DNA, 15 bp, Homo sapiens
aatctttgaaaaata

SEQ ID NO: 3602 - DNA, 15 bp, Homo sapiens
taatctttgaaaaat

SEQ ID NO: 3603 - DNA, 15 bp, Homo sapiens
gtaatctttgaaaaa

SEQ ID NO: 3604 - DNA, 15 bp, Homo sapiens
ggtaatctttgaaaa

SEQ ID NO: 3605 - DNA, 15 bp, Homo sapiens
tggtaatctttgaaa

SEQ ID NO: 3606 - DNA, 15 bp, Homo sapiens
ttggtaatctttgaa

SEQ ID NO: 3607 - DNA, 15 bp, Homo sapiens
gttggtaatctttga

SEQ ID NO: 3608 - DNA, 15 bp, Homo sapiens
ggttggtaatctttg

SEQ ID NO: 3609 - DNA, 15 bp, Homo sapiens
tggttggtaatcttt

SEQ ID NO: 3610 - DNA, 15 bp, Homo sapiens
ttggttggtaatctt

SEQ ID NO: 3611 - DNA, 15 bp, Homo sapiens
gttggttggtaatct

SEQ ID NO: 3612 - DNA, 15 bp, Homo sapiens
ggttggttggtaatc

SEQ ID NO: 3613 - DNA, 15 bp, Homo sapiens
tggttggttggtaat

SEQ ID NO: 3614 - DNA, 15 bp, Homo sapiens
atggttggttggtaa

SEQ ID NO: 3615 - DNA, 15 bp, Homo sapiens
aatggttggttggta

SEQ ID NO: 3616 - DNA, 15 bp, Homo sapiens
taatggttggttggt

SEQ ID NO: 3617 - DNA, 15 bp, Homo sapiens
gtaatggttggttgg

SEQ ID NO: 3618 - DNA, 15 bp, Homo sapiens
ggtaatggttggttg

SEQ ID NO: 3619 - DNA, 15 bp, Homo sapiens
aggtaatggttggtt

SEQ ID NO: 3620 - DNA, 15 bp, Homo sapiens
taggtaatggttggt

SEQ ID NO: 3621 - DNA, 15 bp, Homo sapiens
ctaggtaatggttgg

SEQ ID NO: 3622 - DNA, 15 bp, Homo sapiens
tctaggtaatggttg

SEQ ID NO: 3623 - DNA, 15 bp, Homo sapiens
ctctaggtaatggtt

SEQ ID NO: 3624 - DNA, 15 bp, Homo sapiens
gctctaggtaatggt

SEQ ID NO: 3625 - DNA, 15 bp, Homo sapiens
tgctctaggtaatgg

SEQ ID NO: 3626 - DNA, 15 bp, Homo sapiens
ctgctctaggtaatg

SEQ ID NO: 3627 - DNA, 15 bp, Homo sapiens
gctgctctaggtaat

SEQ ID NO: 3628 - DNA, 15 bp, Homo sapiens
cgctgctctaggtaa

SEQ ID NO: 3629 - DNA, 15 bp, Homo sapiens
ccgctgctctaggta

SEQ ID NO: 3630 - DNA, 15 bp, Homo sapiens
accgctgctctaggt

SEQ ID NO: 3631 - DNA, 15 bp, Homo sapiens
aaccgctgctctagg

SEQ ID NO: 3632 - DNA, 15 bp, Homo sapiens
gaaccgctgctctag

SEQ ID NO: 3633 - DNA, 15 bp, Homo sapiens
agaaccgctgctcta

SEQ ID NO: 3634 - DNA, 15 bp, Homo sapiens
gagaaccgctgctct

SEQ ID NO: 3635 - DNA, 15 bp, Homo sapiens
tgagaaccgctgctc

SEQ ID NO: 3636 - DNA, 15 bp, Homo sapiens
ttgagaaccgctgct

SEQ ID NO: 3637 - DNA, 15 bp, Homo sapiens
gttgagaaccgctgc

SEQ ID NO: 3638 - DNA, 15 bp, Homo sapiens
ggttgagaaccgctg

SEQ ID NO: 3639 - DNA, 15 bp, Homo sapiens
aggttgagaaccgct

SEQ ID NO: 3640 - DNA, 15 bp, Homo sapiens
aaggttgagaaccgc

SEQ ID NO: 3641 - DNA, 15 bp, Homo sapiens
caaggttgagaaccg

SEQ ID NO: 3642 - DNA, 15 bp, Homo sapiens
ccaaggttgagaacc

SEQ ID NO: 3643 - DNA, 15 bp, Homo sapiens
gccaaggttgagaac

SEQ ID NO: 3644 - DNA, 15 bp, Homo sapiens
agccaaggttgagaa

SEQ ID NO: 3645 - DNA, 15 bp, Homo sapiens
cagccaaggttgaga

SEQ ID NO: 3646 - DNA, 15 bp, Homo sapiens
gcagccaaggttgag

SEQ ID NO: 3647 - DNA, 15 bp, Homo sapiens
tgcagccaaggttga

SEQ ID NO: 3648 - DNA, 15 bp, Homo sapiens
gtgcagccaaggttg

SEQ ID NO: 3649 - DNA, 15 bp, Homo sapiens
cgtgcagccaaggtt

SEQ ID NO: 3650 - DNA, 15 bp, Homo sapiens
ccgtgcagccaaggt

SEQ ID NO: 3651 - DNA, 15 bp, Homo sapiens
accgtgcagccaagg

SEQ ID NO: 3652 - DNA, 15 bp, Homo sapiens
caccgtgcagccaag

SEQ ID NO: 3653 - DNA, 15 bp, Homo sapiens
ccaccgtgcagccaa

SEQ ID NO: 3654 - DNA, 15 bp, Homo sapiens
tccaccgtgcagcca

SEQ ID NO: 3655 - DNA, 15 bp, Homo sapiens
ttccaccgtgcagcc

SEQ ID NO: 3656 - DNA, 15 bp, Homo sapiens
gttccaccgtgcagc

SEQ ID NO: 3657 - DNA, 15 bp, Homo sapiens
agttccaccgtgcag

SEQ ID NO: 3658 - DNA, 15 bp, Homo sapiens
tagttccaccgtgca

SEQ ID NO: 3659 - DNA, 15 bp, Homo sapiens
gtagttccaccgtgc

SEQ ID NO: 3660 - DNA, 15 bp, Homo sapiens
ggtagttccaccgtg

SEQ ID NO: 3661 - DNA, 15 bp, Homo sapiens
aggtagttccaccgt

SEQ ID NO: 3662 - DNA, 15 bp, Homo sapiens
caggtagttccaccg

SEQ ID NO: 3663 - DNA, 15 bp, Homo sapiens
tcaggtagttccacc

SEQ ID NO: 3664 - DNA, 15 bp, Homo sapiens
ctcaggtagttccac

SEQ ID NO: 3665 - DNA, 15 bp, Homo sapiens
tctcaggtagttcca

SEQ ID NO: 3666 - DNA, 15 bp, Homo sapiens
gtctcaggtagttcc

SEQ ID NO: 3667 - DNA, 15 bp, Homo sapiens
cgtctcaggtagttc

SEQ ID NO: 3668 - DNA, 15 bp, Homo sapiens
acgtctcaggtagtt

SEQ ID NO: 3669 - DNA, 15 bp, Homo sapiens
cacgtctcaggtagt

SEQ ID NO: 3670 - DNA, 15 bp, Homo sapiens
acacgtctcaggtag

SEQ ID NO: 3671 - DNA, 15 bp, Homo sapiens
aacacgtctcaggta

SEQ ID NO: 3672 - DNA, 15 bp, Homo sapiens
taacacgtctcaggt

SEQ ID NO: 3673 - DNA, 15 bp, Homo sapiens
ttaacacgtctcagg

SEQ ID NO: 3674 - DNA, 15 bp, Homo sapiens
tttaacacgtctcag

SEQ ID NO: 3675 - DNA, 15 bp, Homo sapiens
ttttaacacgtctca

SEQ ID NO: 3676 - DNA, 15 bp, Homo sapiens
tttttaacacgtctc

SEQ ID NO: 3677 - DNA, 15 bp, Homo sapiens
ctttttaacacgtct

SEQ ID NO: 3678 - DNA, 15 bp, Homo sapiens
tctttttaacacgtc

SEQ ID NO: 3679 - DNA, 15 bp, Homo sapiens
ttctttttaacacgt

SEQ ID NO: 3680 - DNA, 15 bp, Homo sapiens
cttctttttaacacg

SEQ ID NO: 3681 - DNA, 15 bp, Homo sapiens
tcttctttttaacac

SEQ ID NO: 3682 - DNA, 15 bp, Homo sapiens
ttcttctttttaaca

SEQ ID NO: 3683 - DNA, 15 bp, Homo sapiens
gttcttctttttaac

SEQ ID NO: 3684 - DNA, 15 bp, Homo sapiens
ggttcttctttttaa

SEQ ID NO: 3685 - DNA, 15 bp, Homo sapiens
gggttcttcttttta

SEQ ID NO: 3686 - DNA, 15 bp, Homo sapiens
agggttcttcttttt

SEQ ID NO: 3687 - DNA, 15 bp, Homo sapiens
cagggttcttctttt

SEQ ID NO: 3688 - DNA, 15 bp, Homo sapiens
tcagggttcttcttt

SEQ ID NO: 3689 - DNA, 15 bp, Homo sapiens
atcagggttcttctt

SEQ ID NO: 3690 - DNA, 15 bp, Homo sapiens
catcagggttcttct

SEQ ID NO: 3691 - DNA, 15 bp, Homo sapiens
acatcagggttcttc

SEQ ID NO: 3692 - DNA, 15 bp, Homo sapiens
gacatcagggttctt

SEQ ID NO: 3693 - DNA, 15 bp, Homo sapiens
ggacatcagggttct

SEQ ID NO: 3694 - DNA, 15 bp, Homo sapiens
gggacatcagggttc

SEQ ID NO: 3695 - DNA, 15 bp, Homo sapiens
tgggacatcagggtt

SEQ ID NO: 3696 - DNA, 15 bp, Homo sapiens
atgggacatcagggt

SEQ ID NO: 3697 - DNA, 15 bp, Homo sapiens
catgggacatcaggg

SEQ ID NO: 3698 - DNA, 15 bp, Homo sapiens
gcatgggacatcagg

SEQ ID NO: 3699 - DNA, 15 bp, Homo sapiens
ggcatgggacatcag

SEQ ID NO: 3700 - DNA, 15 bp, Homo sapiens
gggcatgggacatca

SEQ ID NO: 3701 - DNA, 15 bp, Homo sapiens
ggggcatgggacatc

SEQ ID NO: 3702 - DNA, 15 bp, Homo sapiens
tggggcatgggacat

SEQ ID NO: 3703 - DNA, 15 bp, Homo sapiens
ttggggcatgggaca

SEQ ID NO: 3704 - DNA, 15 bp, Homo sapiens
cttggggcatgggac

SEQ ID NO: 3705 - DNA, 15 bp, Homo sapiens
tcttggggcatggga

SEQ ID NO: 3706 - DNA, 15 bp, Homo sapiens
atcttggggcatggg

SEQ ID NO: 3707 - DNA, 15 bp, Homo sapiens
aatcttggggcatgg

SEQ ID NO: 3708 - DNA, 15 bp, Homo sapiens
gaatcttggggcatg

SEQ ID NO: 3709 - DNA, 15 bp, Homo sapiens
agaatcttggggcat

SEQ ID NO: 3710 - DNA, 15 bp, Homo sapiens
cagaatcttggggca

SEQ ID NO: 3711 - DNA, 15 bp, Homo sapiens
tcagaatcttggggc

SEQ ID NO: 3712 - DNA, 15 bp, Homo sapiens
atcagaatcttgggg

SEQ ID NO: 3713 - DNA, 15 bp, Homo sapiens
catcagaatcttggg

SEQ ID NO: 3714 - DNA, 15 bp, Homo sapiens
acatcagaatcttgg

SEQ ID NO: 3715 - DNA, 15 bp, Homo sapiens
tacatcagaatcttg

SEQ ID NO: 3716 - DNA, 15 bp, Homo sapiens
ctacatcagaatctt

SEQ ID NO: 3717 - DNA, 15 bp, Homo sapiens
actacatcagaatct

SEQ ID NO: 3718 - DNA, 15 bp, Homo sapiens
aactacatcagaatc

SEQ ID NO: 3719 - DNA, 15 bp, Homo sapiens
caactacatcagaat

SEQ ID NO: 3720 - DNA, 15 bp, Homo sapiens
tcaactacatcagaa

SEQ ID NO: 3721 - DNA, 15 bp, Homo sapiens
atcaactacatcaga

SEQ ID NO: 3722 - DNA, 15 bp, Homo sapiens
gatcaactacatcag

SEQ ID NO: 3723 - DNA, 15 bp, Homo sapiens
agatcaactacatca

SEQ ID NO: 3724 - DNA, 15 bp, Homo sapiens
cagatcaactacatc

SEQ ID NO: 3725 - DNA, 15 bp, Homo sapiens
ccagatcaactacat

SEQ ID NO: 3726 - DNA, 15 bp, Homo sapiens
cccagatcaactaca

SEQ ID NO: 3727 - DNA, 15 bp, Homo sapiens
ccccagatcaactac

SEQ ID NO: 3728 - DNA, 15 bp, Homo sapiens
accccagatcaacta

SEQ ID NO: 3729 - DNA, 15 bp, Homo sapiens
taccccagatcaact

SEQ ID NO: 3730 - DNA, 15 bp, Homo sapiens
ataccccagatcaac

SEQ ID NO: 3731 - DNA, 15 bp, Homo sapiens
cataccccagatcaa

SEQ ID NO: 3732 - DNA, 15 bp, Homo sapiens
tcataccccagatca

SEQ ID NO: 3733 - DNA, 15 bp, Homo sapiens
atcataccccagatc

SEQ ID NO: 3734 - DNA, 15 bp, Homo sapiens
gatcataccccagat

SEQ ID NO: 3735 - DNA, 15 bp, Homo sapiens
agatcataccccaga

SEQ ID NO: 3736 - DNA, 15 bp, Homo sapiens
cagatcataccccag

SEQ ID NO: 3737 - DNA, 15 bp, Homo sapiens
tcagatcatacccca

SEQ ID NO: 3738 - DNA, 15 bp, Homo sapiens
ctcagatcatacccc

SEQ ID NO: 3739 - DNA, 15 bp, Homo sapiens
tctcagatcataccc

SEQ ID NO: 3740 - DNA, 15 bp, Homo sapiens
gtctcagatcatacc

SEQ ID NO: 3741 - DNA, 15 bp, Homo sapiens
ggtctcagatcatac

SEQ ID NO: 3742 - DNA, 15 bp, Homo sapiens
gggtctcagatcata

SEQ ID NO: 3743 - DNA, 15 bp, Homo sapiens
ggggtctcagatcat

SEQ ID NO: 3744 - DNA, 15 bp, Homo sapiens
cggggtctcagatca

SEQ ID NO: 3745 - DNA, 15 bp, Homo sapiens
ccggggtctcagatc

SEQ ID NO: 3746 - DNA, 15 bp, Homo sapiens
gccggggtctcagat

SEQ ID NO: 3747 - DNA, 15 bp, Homo sapiens
tgccggggtctcaga

SEQ ID NO: 3748 - DNA, 15 bp, Homo sapiens
atgccggggtctcag

SEQ ID NO: 3749 - DNA, 15 bp, Homo sapiens
catgccggggtctca

SEQ ID NO: 3750 - DNA, 15 bp, Homo sapiens
acatgccggggtctc

SEQ ID NO: 3751 - DNA, 15 bp, Homo sapiens
aacatgccggggtct

SEQ ID NO: 3752 - DNA, 15 bp, Homo sapiens
aaacatgccggggtc

SEQ ID NO: 3753 - DNA, 15 bp, Homo sapiens
aaaacatgccggggt

SEQ ID NO: 3754 - DNA, 15 bp, Homo sapiens
gaaaacatgccgggg

SEQ ID NO: 3755 - DNA, 15 bp, Homo sapiens
tgaaaacatgccggg

SEQ ID NO: 3756 - DNA, 15 bp, Homo sapiens
ctgaaaacatgccgg

SEQ ID NO: 3757 - DNA, 15 bp, Homo sapiens
gctgaaaacatgccg

SEQ ID NO: 3758 - DNA, 15 bp, Homo sapiens
ggctgaaaacatgcc

SEQ ID NO: 3759 - DNA, 15 bp, Homo sapiens
aggctgaaaacatgc

SEQ ID NO: 3760 - DNA, 15 bp, Homo sapiens
caggctgaaaacatg

SEQ ID NO: 3761 - DNA, 15 bp, Homo sapiens
gcaggctgaaaacat

SEQ ID NO: 3762 - DNA, 15 bp, Homo sapiens
tgcaggctgaaaaca

SEQ ID NO: 3763 - DNA, 15 bp, Homo sapiens
ctgcaggctgaaaac

SEQ ID NO: 3764 - DNA, 15 bp, Homo sapiens
gctgcaggctgaaaa

SEQ ID NO: 3765 - DNA, 15 bp, Homo sapiens
ggctgcaggctgaaa

SEQ ID NO: 3766 - DNA, 15 bp, Homo sapiens
tggctgcaggctgaa

SEQ ID NO: 3767 - DNA, 15 bp, Homo sapiens
gtggctgcaggctga

SEQ ID NO: 3768 - DNA, 15 bp, Homo sapiens
tgtggctgcaggctg

SEQ ID NO: 3769 - DNA, 15 bp, Homo sapiens
atgtggctgcaggct

SEQ ID NO: 3770 - DNA, 15 bp, Homo sapiens
catgtggctgcaggc

SEQ ID NO: 3771 - DNA, 15 bp, Homo sapiens
tcatgtggctgcagg

SEQ ID NO: 3772 - DNA, 15 bp, Homo sapiens
ctcatgtggctgcag

SEQ ID NO: 3773 - DNA, 15 bp, Homo sapiens
tctcatgtggctgca

SEQ ID NO: 3774 - DNA, 15 bp, Homo sapiens
ttctcatgtggctgc

SEQ ID NO: 3775 - DNA, 15 bp, Homo sapiens
cttctcatgtggctg

SEQ ID NO: 3776 - DNA, 15 bp, Homo sapiens
acttctcatgtggct

SEQ ID NO: 3777 - DNA, 15 bp, Homo sapiens
cacttctcatgtggc

SEQ ID NO: 3778 - DNA, 15 bp, Homo sapiens
gcacttctcatgtgg

SEQ ID NO: 3779 - DNA, 15 bp, Homo sapiens
agcacttctcatgtg

SEQ ID NO: 3780 - DNA, 15 bp, Homo sapiens
cagcacttctcatgt

SEQ ID NO: 3781 - DNA, 15 bp, Homo sapiens
tcagcacttctcatg

SEQ ID NO: 3782 - DNA, 15 bp, Homo sapiens
gtcagcacttctcat

SEQ ID NO: 3783 - DNA, 15 bp, Homo sapiens
ggtcagcacttctca

SEQ ID NO: 3784 - DNA, 15 bp, Homo sapiens
aggtcagcacttctc

SEQ ID NO: 3785 - DNA, 15 bp, Homo sapiens
taggtcagcacttct

SEQ ID NO: 3786 - DNA, 15 bp, Homo sapiens
ttaggtcagcacttc

SEQ ID NO: 3787 - DNA, 15 bp, Homo sapiens
attaggtcagcactt

SEQ ID NO: 3788 - DNA, 15 bp, Homo sapiens
gattaggtcagcact

SEQ ID NO: 3789 - DNA, 15 bp, Homo sapiens
tgattaggtcagcac

SEQ ID NO: 3790 - DNA, 15 bp, Homo sapiens
ttgattaggtcagca

SEQ ID NO: 3791 - DNA, 15 bp, Homo sapiens
gttgattaggtcagc

SEQ ID NO: 3792 - DNA, 15 bp, Homo sapiens
tgttgattaggtcag

SEQ ID NO: 3793 - DNA, 15 bp, Homo sapiens
ctgttgattaggtca

SEQ ID NO: 3794 - DNA, 15 bp, Homo sapiens
cctgttgattaggtc

SEQ ID NO: 3795 - DNA, 15 bp, Homo sapiens
ccctgttgattaggt

SEQ ID NO: 3796 - DNA, 15 bp, Homo sapiens
cccctgttgattagg

SEQ ID NO: 3797 - DNA, 15 bp, Homo sapiens
acccctgttgattag

SEQ ID NO: 3798 - DNA, 15 bp, Homo sapiens
cacccctgttgatta

SEQ ID NO: 3799 - DNA, 15 bp, Homo sapiens
tcacccctgttgatt

SEQ ID NO: 3800 - DNA, 15 bp, Homo sapiens
atcacccctgttgat

SEQ ID NO: 3801 - DNA, 15 bp, Homo sapiens
catcacccctgttga

SEQ ID NO: 3802 - DNA, 15 bp, Homo sapiens
tcatcacccctgttg

SEQ ID NO: 3803 - DNA, 15 bp, Homo sapiens
atcatcacccctgtt

SEQ ID NO: 3804 - DNA, 15 bp, Homo sapiens
aatcatcacccctgt

SEQ ID NO: 3805 - DNA, 15 bp, Homo sapiens
aaatcatcacccctg

SEQ ID NO: 3806 - DNA, 15 bp, Homo sapiens
caaatcatcacccct

SEQ ID NO: 3807 - DNA, 15 bp, Homo sapiens
tcaaatcatcacccc

SEQ ID NO: 3808 - DNA, 15 bp, Homo sapiens
ctcaaatcatcaccc

SEQ ID NO: 3809 - DNA, 15 bp, Homo sapiens
cctcaaatcatcacc

SEQ ID NO: 3810 - DNA, 15 bp, Homo sapiens
ccctcaaatcatcac

SEQ ID NO: 3811 - DNA, 15 bp, Homo sapiens
cccctcaaatcatca

SEQ ID NO: 3812 - DNA, 15 bp, Homo sapiens
gcccctcaaatcatc

SEQ ID NO: 3813 - DNA, 15 bp, Homo sapiens
cgcccctcaaatcat

SEQ ID NO: 3814 - DNA, 15 bp, Homo sapiens
ccgcccctcaaatca

SEQ ID NO: 3815 - DNA, 15 bp, Homo sapiens
cccgcccctcaaatc

SEQ ID NO: 3816 - DNA, 15 bp, Homo sapiens
ccccgcccctcaaat

SEQ ID NO: 3817 - DNA, 15 bp, Homo sapiens
tccccgcccctcaaa

SEQ ID NO: 3818 - DNA, 15 bp, Homo sapiens
gtccccgcccctcaa

SEQ ID NO: 3819 - DNA, 15 bp, Homo sapiens
agtccccgcccctca

SEQ ID NO: 3820 - DNA, 15 bp, Homo sapiens
tagtccccgcccctc

SEQ ID NO: 3821 - DNA, 15 bp, Homo sapiens
atagtccccgcccct

SEQ ID NO: 3822 - DNA, 15 bp, Homo sapiens
tatagtccccgcccc

SEQ ID NO: 3823 - DNA, 15 bp, Homo sapiens
ctatagtccccgccc

SEQ ID NO: 3824 - DNA, 15 bp, Homo sapiens
cctatagtccccgcc

SEQ ID NO: 3825 - DNA, 15 bp, Homo sapiens
gcctatagtccccgc

SEQ ID NO: 3826 - DNA, 15 bp, Homo sapiens
tgcctatagtccccg

SEQ ID NO: 3827 - DNA, 15 bp, Homo sapiens
ttgcctatagtcccc

SEQ ID NO: 3828 - DNA, 15 bp, Homo sapiens
tttgcctatagtccc

SEQ ID NO: 3829 - DNA, 15 bp, Homo sapiens
ttttgcctatagtcc

SEQ ID NO: 3830 - DNA, 15 bp, Homo sapiens
tttttgcctatagtc

SEQ ID NO: 3831 - DNA, 15 bp, Homo sapiens
ttttttgcctatagt

SEQ ID NO: 3832 - DNA, 15 bp, Homo sapiens
tttttttgcctatag

SEQ ID NO: 3833 - DNA, 15 bp, Homo sapiens
ttttttttgcctata

SEQ ID NO: 3834 - DNA, 15 bp, Homo sapiens
tttttttttgcctat

SEQ ID NO: 3835 - DNA, 15 bp, Homo sapiens
gtttttttttgccta

SEQ ID NO: 3836 - DNA, 15 bp, Homo sapiens
tgtttttttttgcct

SEQ ID NO: 3837 - DNA, 15 bp, Homo sapiens
ctgtttttttttgcc

SEQ ID NO: 3838 - DNA, 15 bp, Homo sapiens
gctgtttttttttgc

SEQ ID NO: 3839 - DNA, 15 bp, Homo sapiens
ggctgtttttttttg

SEQ ID NO: 3840 - DNA, 15 bp, Homo sapiens
aggctgttttttttt

SEQ ID NO: 3841 - DNA, 15 bp, Homo sapiens
taggctgtttttttt

SEQ ID NO: 3842 - DNA, 15 bp, Homo sapiens
ttaggctgttttttt

SEQ ID NO: 3843 - DNA, 15 bp, Homo sapiens
attaggctgtttttt

SEQ ID NO: 3844 - DNA, 15 bp, Homo sapiens
aattaggctgttttt

SEQ ID NO: 3845 - DNA, 15 bp, Homo sapiens
gaattaggctgtttt

SEQ ID NO: 3846 - DNA, 15 bp, Homo sapiens
tgaattaggctgttt

SEQ ID NO: 3847 - DNA, 15 bp, Homo sapiens
ttgaattaggctgtt

SEQ ID NO: 3848 - DNA, 15 bp, Homo sapiens
cttgaattaggctgt

SEQ ID NO: 3849 - DNA, 15 bp, Homo sapiens
ccttgaattaggctg

SEQ ID NO: 3850 - DNA, 15 bp, Homo sapiens
tccttgaattaggct

SEQ ID NO: 3851 - DNA, 15 bp, Homo sapiens
atccttgaattaggc

SEQ ID NO: 3852 - DNA, 15 bp, Homo sapiens
catccttgaattagg

SEQ ID NO: 3853 - DNA, 15 bp, Homo sapiens
tcatccttgaattag

SEQ ID NO: 3854 - DNA, 15 bp, Homo sapiens
ctcatccttgaatta

SEQ ID NO: 3855 - DNA, 15 bp, Homo sapiens
tctcatccttgaatt

SEQ ID NO: 3856 - DNA, 15 bp, Homo sapiens
ttctcatccttgaat

SEQ ID NO: 3857 - DNA, 15 bp, Homo sapiens
cttctcatccttgaa

SEQ ID NO: 3858 - DNA, 15 bp, Homo sapiens
tcttctcatccttga

SEQ ID NO: 3859 - DNA, 15 bp, Homo sapiens
ctcttctcatccttg

SEQ ID NO: 3860 - DNA, 15 bp, Homo sapiens
cctcttctcatcctt

SEQ ID NO: 3861 - DNA, 15 bp, Homo sapiens
ccctcttctcatcct

SEQ ID NO: 3862 - DNA, 15 bp, Homo sapiens
gccctcttctcatcc

SEQ ID NO: 3863 - DNA, 15 bp, Homo sapiens
tgccctcttctcatc

SEQ ID NO: 3864 - DNA, 15 bp, Homo sapiens
gtgccctcttctcat

SEQ ID NO: 3865 - DNA, 15 bp, Homo sapiens
tgtgccctcttctca

SEQ ID NO: 3866 - DNA, 15 bp, Homo sapiens
ctgtgccctcttctc

SEQ ID NO: 3867 - DNA, 15 bp, Homo sapiens
cctgtgccctcttct

SEQ ID NO: 3868 - DNA, 15 bp, Homo sapiens
acctgtgccctcttc

SEQ ID NO: 3869 - DNA, 15 bp, Homo sapiens
cacctgtgccctctt

SEQ ID NO: 3870 - DNA, 15 bp, Homo sapiens
tcacctgtgccctct

SEQ ID NO: 3871 - DNA, 15 bp, Homo sapiens
ctcacctgtgccctc

SEQ ID NO: 3872 - DNA, 15 bp, Homo sapiens
cctcacctgtgccct

SEQ ID NO: 3873 - DNA, 15 bp, Homo sapiens
acctcacctgtgccc

SEQ ID NO: 3874 - DNA, 15 bp, Homo sapiens
cacctcacctgtgcc

SEQ ID NO: 3875 - DNA, 15 bp, Homo sapiens
ccacctcacctgtgc

SEQ ID NO: 3876 - DNA, 15 bp, Homo sapiens
cccacctcacctgtg

SEQ ID NO: 3877 - DNA, 15 bp, Homo sapiens
tcccacctcacctgt

SEQ ID NO: 3878 - DNA, 15 bp, Homo sapiens
ttcccacctcacctg

SEQ ID NO: 3879 - DNA, 15 bp, Homo sapiens
gttcccacctcacct

SEQ ID NO: 3880 - DNA, 15 bp, Homo sapiens
tgttcccacctcacc

SEQ ID NO: 3881 - DNA, 15 bp, Homo sapiens
ctgttcccacctcac

SEQ ID NO: 3882 - DNA, 15 bp, Homo sapiens
actgttcccacctca

SEQ ID NO: 3883 - DNA, 15 bp, Homo sapiens
gactgttcccacctc

SEQ ID NO: 3884 - DNA, 15 bp, Homo sapiens
ggactgttcccacct

SEQ ID NO: 3885 - DNA, 15 bp, Homo sapiens
aggactgttcccacc

SEQ ID NO: 3886 - DNA, 15 bp, Homo sapiens
taggactgttcccac

SEQ ID NO: 3887 - DNA, 15 bp, Homo sapiens
ctaggactgttccca

SEQ ID NO: 3888 - DNA, 15 bp, Homo sapiens
cctaggactgttccc

SEQ ID NO: 3889 - DNA, 15 bp, Homo sapiens
ccctaggactgttcc

SEQ ID NO: 3890 - DNA, 15 bp, Homo sapiens
gccctaggactgttc

SEQ ID NO: 3891 - DNA, 15 bp, Homo sapiens
ggccctaggactgtt

SEQ ID NO: 3892 - DNA, 15 bp, Homo sapiens
tggccctaggactgt

SEQ ID NO: 3893 - DNA, 15 bp, Homo sapiens
ctggccctaggactg

SEQ ID NO: 3894 - DNA, 15 bp, Homo sapiens
tctggccctaggact

SEQ ID NO: 3895 - DNA, 15 bp, Homo sapiens
gtctggccctaggac

SEQ ID NO: 3896 - DNA, 15 bp, Homo sapiens
tgtctggccctagga

SEQ ID NO: 3897 - DNA, 15 bp, Homo sapiens
ttgtctggccctagg

SEQ ID NO: 3898 - DNA, 15 bp, Homo sapiens
tttgtctggccctag

SEQ ID NO: 3899 - DNA, 15 bp, Homo sapiens
ctttgtctggcccta

SEQ ID NO: 3900 - DNA, 15 bp, Homo sapiens
tctttgtctggccct

SEQ ID NO: 3901 - DNA, 15 bp, Homo sapiens
ttctttgtctggccc

SEQ ID NO: 3902 - DNA, 15 bp, Homo sapiens
cttctttgtctggcc

SEQ ID NO: 3903 - DNA, 15 bp, Homo sapiens
ccttctttgtctggc

SEQ ID NO: 3904 - DNA, 15 bp, Homo sapiens
tccttctttgtctgg

SEQ ID NO: 3905 - DNA, 15 bp, Homo sapiens
ttccttctttgtctg

SEQ ID NO: 3906 - DNA, 15 bp, Homo sapiens
cttccttctttgtct

SEQ ID NO: 3907 - DNA, 15 bp, Homo sapiens
ccttccttctttgtc

SEQ ID NO: 3908 - DNA, 15 bp, Homo sapiens
cccttccttctttgt

SEQ ID NO: 3909 - DNA, 15 bp, Homo sapiens
tcccttccttctttg

SEQ ID NO: 3910 - DNA, 15 bp, Homo sapiens
ctcccttccttcttt

SEQ ID NO: 3911 - DNA, 15 bp, Homo sapiens
tctcccttccttctt

SEQ ID NO: 3912 - DNA, 15 bp, Homo sapiens
ttctcccttccttct

SEQ ID NO: 3913 - DNA, 15 bp, Homo sapiens
tttctcccttccttc

SEQ ID NO: 3914 - DNA, 15 bp, Homo sapiens
ctttctcccttcctt

SEQ ID NO: 3915 - DNA, 15 bp, Homo sapiens
cctttctcccttcct

SEQ ID NO: 3916 - DNA, 15 bp, Homo sapiens
tcctttctcccttcc

SEQ ID NO: 3917 - DNA, 15 bp, Homo sapiens
ctcctttctcccttc

SEQ ID NO: 3918 - DNA, 15 bp, Homo sapiens
cctcctttctccctt

SEQ ID NO: 3919 - DNA, 15 bp, Homo sapiens
acctcctttctccct

SEQ ID NO: 3920 - DNA, 15 bp, Homo sapiens
cacctcctttctccc

SEQ ID NO: 3921 - DNA, 15 bp, Homo sapiens
gcacctcctttctcc

SEQ ID NO: 3922 - DNA, 15 bp, Homo sapiens
agcacctcctttctc

SEQ ID NO: 3923 - DNA, 15 bp, Homo sapiens
cagcacctcctttct

SEQ ID NO: 3924 - DNA, 15 bp, Homo sapiens
tcagcacctcctttc

SEQ ID NO: 3925 - DNA, 15 bp, Homo sapiens
atcagcacctccttt

SEQ ID NO: 3926 - DNA, 15 bp, Homo sapiens
gatcagcacctcctt

SEQ ID NO: 3927 - DNA, 15 bp, Homo sapiens
ggatcagcacctcct

SEQ ID NO: 3928 - DNA, 15 bp, Homo sapiens
gggatcagcacctcc

SEQ ID NO: 3929 - DNA, 15 bp, Homo sapiens
agggatcagcacctc

SEQ ID NO: 3930 - DNA, 15 bp, Homo sapiens
gagggatcagcacct

SEQ ID NO: 3931 - DNA, 15 bp, Homo sapiens
ggagggatcagcacc

SEQ ID NO: 3932 - DNA, 15 bp, Homo sapiens
gggagggatcagcac

SEQ ID NO: 3933 - DNA, 15 bp, Homo sapiens
ggggagggatcagca

SEQ ID NO: 3934 - DNA, 15 bp, Homo sapiens
aggggagggatcagc

SEQ ID NO: 3935 - DNA, 15 bp, Homo sapiens
taggggagggatcag

SEQ ID NO: 3936 - DNA, 15 bp, Homo sapiens
gtaggggagggatca

SEQ ID NO: 3937 - DNA, 15 bp, Homo sapiens
agtaggggagggatc

SEQ ID NO: 3938 - DNA, 15 bp, Homo sapiens
gagtaggggagggat

SEQ ID NO: 3939 - DNA, 15 bp, Homo sapiens
ggagtaggggaggga

SEQ ID NO: 3940 - DNA, 15 bp, Homo sapiens
aggagtaggggaggg

SEQ ID NO: 3941 - DNA, 15 bp, Homo sapiens
caggagtaggggagg

SEQ ID NO: 3942 - DNA, 15 bp, Homo sapiens
tcaggagtaggggag

SEQ ID NO: 3943 - DNA, 15 bp, Homo sapiens
ctcaggagtagggga

SEQ ID NO: 3944 - DNA, 15 bp, Homo sapiens
tctcaggagtagggg

SEQ ID NO: 3945 - DNA, 15 bp, Homo sapiens
ctctcaggagtaggg

SEQ ID NO: 3946 - DNA, 15 bp, Homo sapiens
cctctcaggagtagg

SEQ ID NO: 3947 - DNA, 15 bp, Homo sapiens
tcctctcaggagtag

SEQ ID NO: 3948 - DNA, 15 bp, Homo sapiens
ctcctctcaggagta

SEQ ID NO: 3949 - DNA, 15 bp, Homo sapiens
cctcctctcaggagt

SEQ ID NO: 3950 - DNA, 15 bp, Homo sapiens
gcctcctctcaggag

SEQ ID NO: 3951 - DNA, 15 bp, Homo sapiens
ggcctcctctcagga

SEQ ID NO: 3952 - DNA, 15 bp, Homo sapiens
aggcctcctctcagg

SEQ ID NO: 3953 - DNA, 15 bp, Homo sapiens
aaggcctcctctcag

SEQ ID NO: 3954 - DNA, 15 bp, Homo sapiens
aaaggcctcctctca

SEQ ID NO: 3955 - DNA, 15 bp, Homo sapiens
taaaggcctcctctc

SEQ ID NO: 3956 - DNA, 15 bp, Homo sapiens
ttaaaggcctcctct

SEQ ID NO: 3957 - DNA, 15 bp, Homo sapiens
cttaaaggcctcctc

SEQ ID NO: 3958 - DNA, 15 bp, Homo sapiens
acttaaaggcctcct

SEQ ID NO: 3959 - DNA, 15 bp, Homo sapiens
gacttaaaggcctcc

SEQ ID NO: 3960 - DNA, 15 bp, Homo sapiens
tgacttaaaggcctc

SEQ ID NO: 3961 - DNA, 15 bp, Homo sapiens
gtgacttaaaggcct

SEQ ID NO: 3962 - DNA, 15 bp, Homo sapiens
ggtgacttaaaggcc

SEQ ID NO: 3963 - DNA, 15 bp, Homo sapiens
cggtgacttaaaggc

SEQ ID NO: 3964 - DNA, 15 bp, Homo sapiens
acggtgacttaaagg

SEQ ID NO: 3965 - DNA, 15 bp, Homo sapiens
cacggtgacttaaag

SEQ ID NO: 3966 - DNA, 15 bp, Homo sapiens
gcacggtgacttaaa

SEQ ID NO: 3967 - DNA, 15 bp, Homo sapiens
ggcacggtgacttaa

SEQ ID NO: 3968 - DNA, 15 bp, Homo sapiens
aggcacggtgactta

SEQ ID NO: 3969 - DNA, 15 bp, Homo sapiens
aaggcacggtgactt

SEQ ID NO: 3970 - DNA, 15 bp, Homo sapiens
caaggcacggtgact

SEQ ID NO: 3971 - DNA, 15 bp, Homo sapiens
acaaggcacggtgac

SEQ ID NO: 3972 - DNA, 15 bp, Homo sapiens
cacaaggcacggtga

SEQ ID NO: 3973 - DNA, 15 bp, Homo sapiens
ccacaaggcacggtg

SEQ ID NO: 3974 - DNA, 15 bp, Homo sapiens
tccacaaggcacggt

SEQ ID NO: 3975 - DNA, 15 bp, Homo sapiens
ctccacaaggcacgg

SEQ ID NO: 3976 - DNA, 15 bp, Homo sapiens
tctccacaaggcacg

SEQ ID NO: 3977 - DNA, 15 bp, Homo sapiens
gtctccacaaggcac

SEQ ID NO: 3978 - DNA, 15 bp, Homo sapiens
ggtctccacaaggca

SEQ ID NO: 3979 - DNA, 15 bp, Homo sapiens
tggtctccacaaggc

SEQ ID NO: 3980 - DNA, 15 bp, Homo sapiens
ctggtctccacaagg

SEQ ID NO: 3981 - DNA, 15 bp, Homo sapiens
tctggtctccacaag

SEQ ID NO: 3982 - DNA, 15 bp, Homo sapiens
atctggtctccacaa

SEQ ID NO: 3983 - DNA, 15 bp, Homo sapiens
aatctggtctccaca

SEQ ID NO: 3984 - DNA, 15 bp, Homo sapiens
gaatctggtctccac

SEQ ID NO: 3985 - DNA, 15 bp, Homo sapiens
agaatctggtctcca

SEQ ID NO: 3986 - DNA, 15 bp, Homo sapiens
aagaatctggtctcc

SEQ ID NO: 3987 - DNA, 15 bp, Homo sapiens
gaagaatctggtctc

SEQ ID NO: 3988 - DNA, 15 bp, Homo sapiens
tgaagaatctggtct

SEQ ID NO: 3989 - DNA, 15 bp, Homo sapiens
ttgaagaatctggtc

SEQ ID NO: 3990 - DNA, 15 bp, Homo sapiens
tttgaagaatctggt

SEQ ID NO: 3991 - DNA, 15 bp, Homo sapiens
ttttgaagaatctgg

SEQ ID NO: 3992 - DNA, 15 bp, Homo sapiens
tttttgaagaatctg

SEQ ID NO: 3993 - DNA, 15 bp, Homo sapiens
atttttgaagaatct

SEQ ID NO: 3994 - DNA, 15 bp, Homo sapiens
tatttttgaagaatc

SEQ ID NO: 3995 - DNA, 15 bp, Homo sapiens
gtatttttgaagaat

SEQ ID NO: 3996 - DNA, 15 bp, Homo sapiens
tgtatttttgaagaa

SEQ ID NO: 3997 - DNA, 15 bp, Homo sapiens
ttgtatttttgaaga

SEQ ID NO: 3998 - DNA, 15 bp, Homo sapiens
cttgtatttttgaag

SEQ ID NO: 3999 - DNA, 15 bp, Homo sapiens
tcttgtatttttgaa

SEQ ID NO: 4000 - DNA, 15 bp, Homo sapiens
ttcttgtatttttga

SEQ ID NO: 4001 - DNA, 15 bp, Homo sapiens
attcttgtatttttg

SEQ ID NO: 4002 - DNA, 15 bp, Homo sapiens
cattcttgtattttt

SEQ ID NO: 4003 - DNA, 15 bp, Homo sapiens
tcattcttgtatttt

SEQ ID NO: 4004 - DNA, 15 bp, Homo sapiens
ctcattcttgtattt

SEQ ID NO: 4005 - DNA, 15 bp, Homo sapiens
actcattcttgtatt

SEQ ID NO: 4006 - DNA, 15 bp, Homo sapiens
cactcattcttgtat

SEQ ID NO: 4007 - DNA, 15 bp, Homo sapiens
tcactcattcttgta

SEQ ID NO: 4008 - DNA, 15 bp, Homo sapiens
ctcactcattcttgt

SEQ ID NO: 4009 - DNA, 15 bp, Homo sapiens
actcactcattcttg

SEQ ID NO: 4010 - DNA, 15 bp, Homo sapiens
cactcactcattctt

SEQ ID NO: 4011 - DNA, 15 bp, Homo sapiens
tcactcactcattct

SEQ ID NO: 4012 - DNA, 15 bp, Homo sapiens
ctcactcactcattc

SEQ ID NO: 4013 - DNA, 15 bp, Homo sapiens
cctcactcactcatt

SEQ ID NO: 4014 - DNA, 15 bp, Homo sapiens
ccctcactcactcat

SEQ ID NO: 4015 - DNA, 15 bp, Homo sapiens
tccctcactcactca

SEQ ID NO: 4016 - DNA, 15 bp, Homo sapiens
ctccctcactcactc

SEQ ID NO: 4017 - DNA, 15 bp, Homo sapiens
actccctcactcact

SEQ ID NO: 4018 - DNA, 15 bp, Homo sapiens
cactccctcactcac

SEQ ID NO: 4019 - DNA, 15 bp, Homo sapiens
ccactccctcactca

SEQ ID NO: 4020 - DNA, 15 bp, Homo sapiens
cccactccctcactc

SEQ ID NO: 4021 - DNA, 15 bp, Homo sapiens
acccactccctcact

SEQ ID NO: 4022 - DNA, 15 bp, Homo sapiens
cacccactccctcac

SEQ ID NO: 4023 - DNA, 15 bp, Homo sapiens
ccacccactccctca

SEQ ID NO: 4024 - DNA, 15 bp, Homo sapiens
tccacccactccctc

SEQ ID NO: 4025 - DNA, 15 bp, Homo sapiens
atccacccactccct

SEQ ID NO: 4026 - DNA, 15 bp, Homo sapiens
catccacccactccc

SEQ ID NO: 4027 - DNA, 15 bp, Homo sapiens
gcatccacccactcc

SEQ ID NO: 4028 - DNA, 15 bp, Homo sapiens
ggcatccacccactc

SEQ ID NO: 4029 - DNA, 15 bp, Homo sapiens
tggcatccacccact

SEQ ID NO: 4030 - DNA, 15 bp, Homo sapiens
ctggcatccacccac

SEQ ID NO: 4031 - DNA, 15 bp, Homo sapiens
cctggcatccaccca

SEQ ID NO: 4032 - DNA, 15 bp, Homo sapiens
tcctggcatccaccc

SEQ ID NO: 4033 - DNA, 15 bp, Homo sapiens
ctcctggcatccacc

SEQ ID NO: 4034 - DNA, 15 bp, Homo sapiens
tctcctggcatccac

SEQ ID NO: 4035 - DNA, 15 bp, Homo sapiens
ctctcctggcatcca

SEQ ID NO: 4036 - DNA, 15 bp, Homo sapiens
actctcctggcatcc

SEQ ID NO: 4037 - DNA, 15 bp, Homo sapiens
cactctcctggcatc

SEQ ID NO: 4038 - DNA, 15 bp, Homo sapiens
gcactctcctggcat

SEQ ID NO: 4039 - DNA, 15 bp, Homo sapiens
cgcactctcctggca

SEQ ID NO: 4040 - DNA, 15 bp, Homo sapiens
acgcactctcctggc

SEQ ID NO: 4041 - DNA, 15 bp, Homo sapiens
cacgcactctcctgg

SEQ ID NO: 4042 - DNA, 15 bp, Homo sapiens
tcacgcactctcctg

SEQ ID NO: 4043 - DNA, 15 bp, Homo sapiens
gtcacgcactctcct

SEQ ID NO: 4044 - DNA, 15 bp, Homo sapiens
tgtcacgcactctcc

SEQ ID NO: 4045 - DNA, 15 bp, Homo sapiens
ttgtcacgcactctc

SEQ ID NO: 4046 - DNA, 15 bp, Homo sapiens
cttgtcacgcactct

SEQ ID NO: 4047 - DNA, 15 bp, Homo sapiens
gcttgtcacgcactc

SEQ ID NO: 4048 - DNA, 15 bp, Homo sapiens
ggcttgtcacgcact

SEQ ID NO: 4049 - DNA, 15 bp, Homo sapiens
aggcttgtcacgcac

SEQ ID NO: 4050 - DNA, 15 bp, Homo sapiens
aaggcttgtcacgca

SEQ ID NO: 4051 - DNA, 15 bp, Homo sapiens
caaggcttgtcacgc

SEQ ID NO: 4052 - DNA, 15 bp, Homo sapiens
gcaaggcttgtcacg

SEQ ID NO: 4053 - DNA, 15 bp, Homo sapiens
tgcaaggcttgtcac

SEQ ID NO: 4054 - DNA, 15 bp, Homo sapiens
ttgcaaggcttgtca

SEQ ID NO: 4055 - DNA, 15 bp, Homo sapiens
cttgcaaggcttgtc

SEQ ID NO: 4056 - DNA, 15 bp, Homo sapiens
ccttgcaaggcttgt

SEQ ID NO: 4057 - DNA, 15 bp, Homo sapiens
cccttgcaaggcttg

SEQ ID NO: 4058 - DNA, 15 bp, Homo sapiens
tcccttgcaaggctt

SEQ ID NO: 4059 - DNA, 15 bp, Homo sapiens
ctcccttgcaaggct

SEQ ID NO: 4060 - DNA, 15 bp, Homo sapiens
cctcccttgcaaggc

SEQ ID NO: 4061 - DNA, 15 bp, Homo sapiens
tcctcccttgcaagg

SEQ ID NO: 4062 - DNA, 15 bp, Homo sapiens
atcctcccttgcaag

SEQ ID NO: 4063 - DNA, 15 bp, Homo sapiens
catcctcccttgcaa

SEQ ID NO: 4064 - DNA, 15 bp, Homo sapiens
tcatcctcccttgca

SEQ ID NO: 4065 - DNA, 15 bp, Homo sapiens
gtcatcctcccttgc

SEQ ID NO: 4066 - DNA, 15 bp, Homo sapiens
tgtcatcctcccttg

SEQ ID NO: 4067 - DNA, 15 bp, Homo sapiens
ttgtcatcctccctt

SEQ ID NO: 4068 - DNA, 15 bp, Homo sapiens
attgtcatcctccct

SEQ ID NO: 4069 - DNA, 15 bp, Homo sapiens
cattgtcatcctccc

SEQ ID NO: 4070 - DNA, 15 bp, Homo sapiens
gcattgtcatcctcc

SEQ ID NO: 4071 - DNA, 15 bp, Homo sapiens
tgcattgtcatcctc

SEQ ID NO: 4072 - DNA, 15 bp, Homo sapiens
gtgcattgtcatcct

SEQ ID NO: 4073 - DNA, 15 bp, Homo sapiens
agtgcattgtcatcc

SEQ ID NO: 4074 - DNA, 15 bp, Homo sapiens
tagtgcattgtcatc

SEQ ID NO: 4075 - DNA, 15 bp, Homo sapiens
ctagtgcattgtcat

SEQ ID NO: 4076 - DNA, 15 bp, Homo sapiens
gctagtgcattgtca

SEQ ID NO: 4077 - DNA, 15 bp, Homo sapiens
agctagtgcattgtc

SEQ ID NO: 4078 - DNA, 15 bp, Homo sapiens
aagctagtgcattgt

SEQ ID NO: 4079 - DNA, 15 bp, Homo sapiens
caagctagtgcattg

SEQ ID NO: 4080 - DNA, 15 bp, Homo sapiens
ccaagctagtgcatt

SEQ ID NO: 4081 - DNA, 15 bp, Homo sapiens
accaagctagtgcat

SEQ ID NO: 4082 - DNA, 15 bp, Homo sapiens
aaccaagctagtgca

SEQ ID NO: 4083 - DNA, 15 bp, Homo sapiens
aaaccaagctagtgc

SEQ ID NO: 4084 - DNA, 15 bp, Homo sapiens
caaaccaagctagtg

SEQ ID NO: 4085 - DNA, 15 bp, Homo sapiens
ccaaaccaagctagt

SEQ ID NO: 4086 - DNA, 15 bp, Homo sapiens
tccaaaccaagctag

SEQ ID NO: 4087 - DNA, 15 bp, Homo sapiens
ttccaaaccaagcta

SEQ ID NO: 4088 - DNA, 15 bp, Homo sapiens
tttccaaaccaagct

SEQ ID NO: 4089 - DNA, 15 bp, Homo sapiens
atttccaaaccaagc

SEQ ID NO: 4090 - DNA, 15 bp, Homo sapiens
aatttccaaaccaag

SEQ ID NO: 4091 - DNA, 15 bp, Homo sapiens
aaatttccaaaccaa

SEQ ID NO: 4092 - DNA, 15 bp, Homo sapiens
aaaatttccaaacca

SEQ ID NO: 4093 - DNA, 15 bp, Homo sapiens
taaaatttccaaacc

SEQ ID NO: 4094 - DNA, 15 bp, Homo sapiens
gtaaaatttccaaac

SEQ ID NO: 4095 - DNA, 15 bp, Homo sapiens
ggtaaaatttccaaa

SEQ ID NO: 4096 - DNA, 15 bp, Homo sapiens
gggtaaaatttccaa

SEQ ID NO: 4097 - DNA, 15 bp, Homo sapiens
ggggtaaaatttcca

SEQ ID NO: 4098 - DNA, 15 bp, Homo sapiens
aggggtaaaatttcc

SEQ ID NO: 4099 - DNA, 15 bp, Homo sapiens
caggggtaaaatttc

SEQ ID NO: 4100 - DNA, 15 bp, Homo sapiens
ccaggggtaaaattt

SEQ ID NO: 4101 - DNA, 15 bp, Homo sapiens
tccaggggtaaaatt

SEQ ID NO: 4102 - DNA, 15 bp, Homo sapiens
ttccaggggtaaaat

SEQ ID NO: 4103 - DNA, 15 bp, Homo sapiens
gttccaggggtaaaa

SEQ ID NO: 4104 - DNA, 15 bp, Homo sapiens
tgttccaggggtaaa

SEQ ID NO: 4105 - DNA, 15 bp, Homo sapiens
ctgttccaggggtaa

SEQ ID NO: 4106 - DNA, 15 bp, Homo sapiens
cctgttccaggggta

SEQ ID NO: 4107 - DNA, 15 bp, Homo sapiens
gcctgttccaggggt

SEQ ID NO: 4108 - DNA, 15 bp, Homo sapiens
tgcctgttccagggg

SEQ ID NO: 4109 - DNA, 15 bp, Homo sapiens
ctgcctgttccaggg

SEQ ID NO: 4110 - DNA, 15 bp, Homo sapiens
cctgcctgttccagg

SEQ ID NO: 4111 - DNA, 15 bp, Homo sapiens
gcctgcctgttccag

SEQ ID NO: 4112 - DNA, 15 bp, Homo sapiens
ggcctgcctgttcca

SEQ ID NO: 4113 - DNA, 15 bp, Homo sapiens
tggcctgcctgttcc

SEQ ID NO: 4114 - DNA, 15 bp, Homo sapiens
ttggcctgcctgttc

SEQ ID NO: 4115 - DNA, 15 bp, Homo sapiens
cttggcctgcctgtt

SEQ ID NO: 4116 - DNA, 15 bp, Homo sapiens
gcttggcctgcctgt

SEQ ID NO: 4117 - DNA, 15 bp, Homo sapiens
agcttggcctgcctg

SEQ ID NO: 4118 - DNA, 15 bp, Homo sapiens
cagcttggcctgcct

SEQ ID NO: 4119 - DNA, 15 bp, Homo sapiens
ccagcttggcctgcc

SEQ ID NO: 4120 - DNA, 15 bp, Homo sapiens
gccagcttggcctgc

SEQ ID NO: 4121 - DNA, 15 bp, Homo sapiens
agccagcttggcctg

SEQ ID NO: 4122 - DNA, 15 bp, Homo sapiens
cagccagcttggcct

SEQ ID NO: 4123 - DNA, 15 bp, Homo sapiens
ccagccagcttggcc

SEQ ID NO: 4124 - DNA, 15 bp, Homo sapiens
accagccagcttggc

SEQ ID NO: 4125 - DNA, 15 bp, Homo sapiens
gaccagccagcttgg

SEQ ID NO: 4126 - DNA, 15 bp, Homo sapiens
ggaccagccagcttg

SEQ ID NO: 4127 - DNA, 15 bp, Homo sapiens
gggaccagccagctt

SEQ ID NO: 4128 - DNA, 15 bp, Homo sapiens
ggggaccagccagct

SEQ ID NO: 4129 - DNA, 15 bp, Homo sapiens
aggggaccagccagc

SEQ ID NO: 4130 - DNA, 15 bp, Homo sapiens
gaggggaccagccag

SEQ ID NO: 4131 - DNA, 15 bp, Homo sapiens
ggaggggaccagcca

SEQ ID NO: 4132 - DNA, 15 bp, Homo sapiens
gggaggggaccagcc

SEQ ID NO: 4133 - DNA, 15 bp, Homo sapiens
agggaggggaccagc

SEQ ID NO: 4134 - DNA, 15 bp, Homo sapiens
cagggaggggaccag

SEQ ID NO: 4135 - DNA, 15 bp, Homo sapiens
tcagggaggggacca

SEQ ID NO: 4136 - DNA, 15 bp, Homo sapiens
atcagggaggggacc

SEQ ID NO: 4137 - DNA, 15 bp, Homo sapiens
tatcagggaggggac

SEQ ID NO: 4138 - DNA, 15 bp, Homo sapiens
gtatcagggagggga

SEQ ID NO: 4139 - DNA, 15 bp, Homo sapiens
tgtatcagggagggg

SEQ ID NO: 4140 - DNA, 15 bp, Homo sapiens
gtgtatcagggaggg

SEQ ID NO: 4141 - DNA, 15 bp, Homo sapiens
tgtgtatcagggagg

SEQ ID NO: 4142 - DNA, 15 bp, Homo sapiens
ctgtgtatcagggag

SEQ ID NO: 4143 - DNA, 15 bp, Homo sapiens
gctgtgtatcaggga

SEQ ID NO: 4144 - DNA, 15 bp, Homo sapiens
ggctgtgtatcaggg

SEQ ID NO: 4145 - DNA, 15 bp, Homo sapiens
gggctgtgtatcagg

SEQ ID NO: 4146 - DNA, 15 bp, Homo sapiens
agggctgtgtatcag

SEQ ID NO: 4147 - DNA, 15 bp, Homo sapiens
gagggctgtgtatca

SEQ ID NO: 4148 - DNA, 15 bp, Homo sapiens
ggagggctgtgtatc

SEQ ID NO: 4149 - DNA, 15 bp, Homo sapiens
gggagggctgtgtat

SEQ ID NO: 4150 - DNA, 15 bp, Homo sapiens
agggagggctgtgta

SEQ ID NO: 4151 - DNA, 15 bp, Homo sapiens
gagggagggctgtgt

SEQ ID NO: 4152 - DNA, 15 bp, Homo sapiens
agagggagggctgtg

SEQ ID NO: 4153 - DNA, 15 bp, Homo sapiens
aagagggagggctgt

SEQ ID NO: 4154 - DNA, 15 bp, Homo sapiens
aaagagggagggctg

SEQ ID NO: 4155 - DNA, 15 bp, Homo sapiens
taaagagggagggct

SEQ ID NO: 4156 - DNA, 15 bp, Homo sapiens
ataaagagggagggc

SEQ ID NO: 4157 - DNA, 15 bp, Homo sapiens
tataaagagggaggg

SEQ ID NO: 4158 - DNA, 15 bp, Homo sapiens
atataaagagggagg

SEQ ID NO: 4159 - DNA, 15 bp, Homo sapiens
tatataaagagggag

SEQ ID NO: 4160 - DNA, 15 bp, Homo sapiens
atatataaagaggga

SEQ ID NO: 4161 - DNA, 15 bp, Homo sapiens
catatataaagaggg

SEQ ID NO: 4162 - DNA, 15 bp, Homo sapiens
ccatatataaagagg

SEQ ID NO: 4163 - DNA, 15 bp, Homo sapiens
tccatatataaagag

SEQ ID NO: 4164 - DNA, 15 bp, Homo sapiens
ctccatatataaaga

SEQ ID NO: 4165 - DNA, 15 bp, Homo sapiens
gctccatatataaag

SEQ ID NO: 4166 - DNA, 15 bp, Homo sapiens
tgctccatatataaa

SEQ ID NO: 4167 - DNA, 15 bp, Homo sapiens
ctgctccatatataa

SEQ ID NO: 4168 - DNA, 15 bp, Homo sapiens
cctgctccatatata

SEQ ID NO: 4169 - DNA, 15 bp, Homo sapiens
ccctgctccatatat

SEQ ID NO: 4170 - DNA, 15 bp, Homo sapiens
cccctgctccatata

SEQ ID NO: 4171 - DNA, 15 bp, Homo sapiens
tcccctgctccatat

SEQ ID NO: 4172 - DNA, 15 bp, Homo sapiens
gtcccctgctccata

SEQ ID NO: 4173 - DNA, 15 bp, Homo sapiens
cgtcccctgctccat

SEQ ID NO: 4174 - DNA, 15 bp, Homo sapiens
ccgtcccctgctcca

SEQ ID NO: 4175 - DNA, 15 bp, Homo sapiens
accgtcccctgctcc

SEQ ID NO: 4176 - DNA, 15 bp, Homo sapiens
caccgtcccctgctc

SEQ ID NO: 4177 - DNA, 15 bp, Homo sapiens
acaccgtcccctgct

SEQ ID NO: 4178 - DNA, 15 bp, Homo sapiens
cacaccgtcccctgc

SEQ ID NO: 4179 - DNA, 15 bp, Homo sapiens
acacaccgtcccctg

SEQ ID NO: 4180 - DNA, 15 bp, Homo sapiens
cacacaccgtcccct

SEQ ID NO: 4181 - DNA, 15 bp, Homo sapiens
ccacacaccgtcccc

SEQ ID NO: 4182 - DNA, 15 bp, Homo sapiens
gccacacaccgtccc

SEQ ID NO: 4183 - DNA, 15 bp, Homo sapiens
agccacacaccgtcc

SEQ ID NO: 4184 - DNA, 15 bp, Homo sapiens
cagccacacaccgtc

SEQ ID NO: 4185 - DNA, 15 bp, Homo sapiens
ccagccacacaccgt

SEQ ID NO: 4186 - DNA, 15 bp, Homo sapiens
accagccacacaccg

SEQ ID NO: 4187 - DNA, 15 bp, Homo sapiens
aaccagccacacacc

SEQ ID NO: 4188 - DNA, 15 bp, Homo sapiens
aaaccagccacacac

SEQ ID NO: 4189 - DNA, 15 bp, Homo sapiens
gaaaccagccacaca

SEQ ID NO: 4190 - DNA, 15 bp, Homo sapiens
agaaaccagccacac

SEQ ID NO: 4191 - DNA, 15 bp, Homo sapiens
aagaaaccagccaca

SEQ ID NO: 4192 - DNA, 15 bp, Homo sapiens
taagaaaccagccac

SEQ ID NO: 4193 - DNA, 15 bp, Homo sapiens
ctaagaaaccagcca

SEQ ID NO: 4194 - DNA, 15 bp, Homo sapiens
gctaagaaaccagcc

SEQ ID NO: 4195 - DNA, 15 bp, Homo sapiens
tgctaagaaaccagc

SEQ ID NO: 4196 - DNA, 15 bp, Homo sapiens
ttgctaagaaaccag

SEQ ID NO: 4197 - DNA, 15 bp, Homo sapiens
cttgctaagaaacca

SEQ ID NO: 4198 - DNA, 15 bp, Homo sapiens
gcttgctaagaaacc

SEQ ID NO: 4199 - DNA, 15 bp, Homo sapiens
tgcttgctaagaaac

SEQ ID NO: 4200 - DNA, 15 bp, Homo sapiens
gtgcttgctaagaaa

SEQ ID NO: 4201 - DNA, 15 bp, Homo sapiens
ggtgcttgctaagaa

SEQ ID NO: 4202 - DNA, 15 bp, Homo sapiens
tggtgcttgctaaga

SEQ ID NO: 4203 - DNA, 15 bp, Homo sapiens
atggtgcttgctaag

SEQ ID NO: 4204 - DNA, 15 bp, Homo sapiens
catggtgcttgctaa

SEQ ID NO: 4205 - DNA, 15 bp, Homo sapiens
ccatggtgcttgcta

SEQ ID NO: 4206 - DNA, 15 bp, Homo sapiens
accatggtgcttgct

SEQ ID NO: 4207 - DNA, 15 bp, Homo sapiens
aaccatggtgcttgc

SEQ ID NO: 4208 - DNA, 15 bp, Homo sapiens
gaaccatggtgcttg

SEQ ID NO: 4209 - DNA, 15 bp, Homo sapiens
ggaaccatggtgctt

SEQ ID NO: 4210 - DNA, 15 bp, Homo sapiens
tggaaccatggtgct

SEQ ID NO: 4211 - DNA, 15 bp, Homo sapiens
ttggaaccatggtgc

SEQ ID NO: 4212 - DNA, 15 bp, Homo sapiens
cttggaaccatggtg

SEQ ID NO: 4213 - DNA, 15 bp, Homo sapiens
acttggaaccatggt

SEQ ID NO: 4214 - DNA, 15 bp, Homo sapiens
aacttggaaccatgg

SEQ ID NO: 4215 - DNA, 15 bp, Homo sapiens
caacttggaaccatg

SEQ ID NO: 4216 - DNA, 15 bp, Homo sapiens
ccaacttggaaccat

SEQ ID NO: 4217 - DNA, 15 bp, Homo sapiens
gccaacttggaacca

SEQ ID NO: 4218 - DNA, 15 bp, Homo sapiens
tgccaacttggaacc

SEQ ID NO: 4219 - DNA, 15 bp, Homo sapiens
ttgccaacttggaac

SEQ ID NO: 4220 - DNA, 15 bp, Homo sapiens
gttgccaacttggaa

SEQ ID NO: 4221 - DNA, 15 bp, Homo sapiens
agttgccaacttgga

SEQ ID NO: 4222 - DNA, 15 bp, Homo sapiens
cagttgccaacttgg

SEQ ID NO: 4223 - DNA, 15 bp, Homo sapiens
ccagttgccaacttg

SEQ ID NO: 4224 - DNA, 15 bp, Homo sapiens
cccagttgccaactt

SEQ ID NO: 4225 - DNA, 15 bp, Homo sapiens
ccccagttgccaact

SEQ ID NO: 4226 - DNA, 15 bp, Homo sapiens
tccccagttgccaac

SEQ ID NO: 4227 - DNA, 15 bp, Homo sapiens
ctccccagttgccaa

SEQ ID NO: 4228 - DNA, 15 bp, Homo sapiens
actccccagttgcca

SEQ ID NO: 4229 - DNA, 15 bp, Homo sapiens
aactccccagttgcc

SEQ ID NO: 4230 - DNA, 15 bp, Homo sapiens
gaactccccagttgc

SEQ ID NO: 4231 - DNA, 15 bp, Homo sapiens
agaactccccagttg

SEQ ID NO: 4232 - DNA, 15 bp, Homo sapiens
cagaactccccagtt

SEQ ID NO: 4233 - DNA, 15 bp, Homo sapiens
tcagaactccccagt

SEQ ID NO: 4234 - DNA, 15 bp, Homo sapiens
ttcagaactccccag

SEQ ID NO: 4235 - DNA, 15 bp, Homo sapiens
attcagaactcccca

SEQ ID NO: 4236 - DNA, 15 bp, Homo sapiens
gattcagaactcccc

SEQ ID NO: 4237 - DNA, 15 bp, Homo sapiens
ggattcagaactccc

SEQ ID NO: 4238 - DNA, 15 bp, Homo sapiens
tggattcagaactcc

SEQ ID NO: 4239 - DNA, 15 bp, Homo sapiens
ttggattcagaactc

SEQ ID NO: 4240 - DNA, 15 bp, Homo sapiens
tttggattcagaact

SEQ ID NO: 4241 - DNA, 15 bp, Homo sapiens
ttttggattcagaac

SEQ ID NO: 4242 - DNA, 15 bp, Homo sapiens
tttttggattcagaa

SEQ ID NO: 4243 - DNA, 15 bp, Homo sapiens
ctttttggattcaga

SEQ ID NO: 4244 - DNA, 15 bp, Homo sapiens
cctttttggattcag

SEQ ID NO: 4245 - DNA, 15 bp, Homo sapiens
tcctttttggattca

SEQ ID NO: 4246 - DNA, 15 bp, Homo sapiens
ctcctttttggattc

SEQ ID NO: 4247 - DNA, 15 bp, Homo sapiens
cctcctttttggatt

SEQ ID NO: 4248 - DNA, 15 bp, Homo sapiens
ccctcctttttggat

SEQ ID NO: 4249 - DNA, 15 bp, Homo sapiens
tccctcctttttgga

SEQ ID NO: 4250 - DNA, 15 bp, Homo sapiens
ctccctcctttttgg

SEQ ID NO: 4251 - DNA, 15 bp, Homo sapiens
tctccctcctttttg

SEQ ID NO: 4252 - DNA, 15 bp, Homo sapiens
atctccctccttttt

SEQ ID NO: 4253 - DNA, 15 bp, Homo sapiens
catctccctcctttt

SEQ ID NO: 4254 - DNA, 15 bp, Homo sapiens
tcatctccctccttt

SEQ ID NO: 4255 - DNA, 15 bp, Homo sapiens
ttcatctccctcctt

SEQ ID NO: 4256 - DNA, 15 bp, Homo sapiens
gttcatctccctcct

SEQ ID NO: 4257 - DNA, 15 bp, Homo sapiens
cgttcatctccctcc

SEQ ID NO: 4258 - DNA, 15 bp, Homo sapiens
acgttcatctccctc

SEQ ID NO: 4259 - DNA, 15 bp, Homo sapiens
tacgttcatctccct

SEQ ID NO: 4260 - DNA, 15 bp, Homo sapiens
ttacgttcatctccc

SEQ ID NO: 4261 - DNA, 15 bp, Homo sapiens
cttacgttcatctcc

SEQ ID NO: 4262 - DNA, 15 bp, Homo sapiens
acttacgttcatctc

SEQ ID NO: 4263 - DNA, 15 bp, Homo sapiens
cacttacgttcatct

SEQ ID NO: 4264 - DNA, 15 bp, Homo sapiens
ccacttacgttcatc

SEQ ID NO: 4265 - DNA, 15 bp, Homo sapiens
tccacttacgttcat

SEQ ID NO: 4266 - DNA, 15 bp, Homo sapiens
ctccacttacgttca

SEQ ID NO: 4267 - DNA, 15 bp, Homo sapiens
cctccacttacgttc

SEQ ID NO: 4268 - DNA, 15 bp, Homo sapiens
ccctccacttacgtt

SEQ ID NO: 4269 - DNA, 15 bp, Homo sapiens
gccctccacttacgt

SEQ ID NO: 4270 - DNA, 15 bp, Homo sapiens
tgccctccacttacg

SEQ ID NO: 4271 - DNA, 15 bp, Homo sapiens
ctgccctccacttac

SEQ ID NO: 4272 - DNA, 15 bp, Homo sapiens
cctgccctccactta

SEQ ID NO: 4273 - DNA, 15 bp, Homo sapiens
gcctgccctccactt

SEQ ID NO: 4274 - DNA, 15 bp, Homo sapiens
ggcctgccctccact

SEQ ID NO: 4275 - DNA, 15 bp, Homo sapiens
aggcctgccctccac

SEQ ID NO: 4276 - DNA, 15 bp, Homo sapiens
taggcctgccctcca

SEQ ID NO: 4277 - DNA, 15 bp, Homo sapiens
gtaggcctgccctcc

SEQ ID NO: 4278 - DNA, 15 bp, Homo sapiens
tgtaggcctgccctc

SEQ ID NO: 4279 - DNA, 15 bp, Homo sapiens
ttgtaggcctgccct

SEQ ID NO: 4280 - DNA, 15 bp, Homo sapiens
cttgtaggcctgccc

SEQ ID NO: 4281 - DNA, 15 bp, Homo sapiens
ccttgtaggcctgcc

SEQ ID NO: 4282 - DNA, 15 bp, Homo sapiens
accttgtaggcctgc

SEQ ID NO: 4283 - DNA, 15 bp, Homo sapiens
aaccttgtaggcctg

SEQ ID NO: 4284 - DNA, 15 bp, Homo sapiens
caaccttgtaggcct

SEQ ID NO: 4285 - DNA, 15 bp, Homo sapiens
gcaaccttgtaggcc

SEQ ID NO: 4286 - DNA, 15 bp, Homo sapiens
tgcaaccttgtaggc

SEQ ID NO: 4287 - DNA, 15 bp, Homo sapiens
ctgcaaccttgtagg

SEQ ID NO: 4288 - DNA, 15 bp, Homo sapiens
tctgcaaccttgtag

SEQ ID NO: 4289 - DNA, 15 bp, Homo sapiens
atctgcaaccttgta

SEQ ID NO: 4290 - DNA, 15 bp, Homo sapiens
tatctgcaaccttgt

SEQ ID NO: 4291 - DNA, 15 bp, Homo sapiens
ttatctgcaaccttg

SEQ ID NO: 4292 - DNA, 15 bp, Homo sapiens
cttatctgcaacctt

SEQ ID NO: 4293 - DNA, 15 bp, Homo sapiens
gcttatctgcaacct

SEQ ID NO: 4294 - DNA, 15 bp, Homo sapiens
agcttatctgcaacc

SEQ ID NO: 4295 - DNA, 15 bp, Homo sapiens
aagcttatctgcaac

SEQ ID NO: 4296 - DNA, 15 bp, Homo sapiens
taagcttatctgcaa

SEQ ID NO: 4297 - DNA, 15 bp, Homo sapiens
ttaagcttatctgca

SEQ ID NO: 4298 - DNA, 15 bp, Homo sapiens
attaagcttatctgc

SEQ ID NO: 4299 - DNA, 15 bp, Homo sapiens
aattaagcttatctg

SEQ ID NO: 4300 - DNA, 15 bp, Homo sapiens
gaattaagcttatct

SEQ ID NO: 4301 - DNA, 15 bp, Homo sapiens
agaattaagcttatc

SEQ ID NO: 4302 - DNA, 15 bp, Homo sapiens
cagaattaagcttat

SEQ ID NO: 4303 - DNA, 15 bp, Homo sapiens
acagaattaagctta

SEQ ID NO: 4304 - DNA, 15 bp, Homo sapiens
gacagaattaagctt

SEQ ID NO: 4305 - DNA, 15 bp, Homo sapiens
agacagaattaagct

SEQ ID NO: 4306 - DNA, 15 bp, Homo sapiens
gagacagaattaagc

SEQ ID NO: 4307 - DNA, 15 bp, Homo sapiens
ggagacagaattaag

SEQ ID NO: 4308 - DNA, 15 bp, Homo sapiens
aggagacagaattaa

SEQ ID NO: 4309 - DNA, 15 bp, Homo sapiens
aaggagacagaatta

SEQ ID NO: 4310 - DNA, 15 bp, Homo sapiens
taaggagacagaatt

SEQ ID NO: 4311 - DNA, 15 bp, Homo sapiens
gtaaggagacagaat

SEQ ID NO: 4312 - DNA, 15 bp, Homo sapiens
agtaaggagacagaa

SEQ ID NO: 4313 - DNA, 15 bp, Homo sapiens
gagtaaggagacaga

SEQ ID NO: 4314 - DNA, 15 bp, Homo sapiens
agagtaaggagacag

SEQ ID NO: 4315 - DNA, 15 bp, Homo sapiens
aagagtaaggagaca

SEQ ID NO: 4316 - DNA, 15 bp, Homo sapiens
gaagagtaaggagac

SEQ ID NO: 4317 - DNA, 15 bp, Homo sapiens
agaagagtaaggaga

SEQ ID NO: 4318 - DNA, 15 bp, Homo sapiens
cagaagagtaaggag

SEQ ID NO: 4319 - DNA, 15 bp, Homo sapiens
gcagaagagtaagga

SEQ ID NO: 4320 - DNA, 15 bp, Homo sapiens
ggcagaagagtaagg

SEQ ID NO: 4321 - DNA, 15 bp, Homo sapiens
aggcagaagagtaag

SEQ ID NO: 4322 - DNA, 15 bp, Homo sapiens
aaggcagaagagtaa

SEQ ID NO: 4323 - DNA, 15 bp, Homo sapiens
aaaggcagaagagta

SEQ ID NO: 4324 - DNA, 15 bp, Homo sapiens
caaaggcagaagagt

SEQ ID NO: 4325 - DNA, 15 bp, Homo sapiens
gcaaaggcagaagag

SEQ ID NO: 4326 - DNA, 15 bp, Homo sapiens
tgcaaaggcagaaga

SEQ ID NO: 4327 - DNA, 15 bp, Homo sapiens
ttgcaaaggcagaag

SEQ ID NO: 4328 - DNA, 15 bp, Homo sapiens
gttgcaaaggcagaa

SEQ ID NO: 4329 - DNA, 15 bp, Homo sapiens
tgttgcaaaggcaga

SEQ ID NO: 4330 - DNA, 15 bp, Homo sapiens
ttgttgcaaaggcag

SEQ ID NO: 4331 - DNA, 15 bp, Homo sapiens
gttgttgcaaaggca

SEQ ID NO: 4332 - DNA, 15 bp, Homo sapiens
ggttgttgcaaaggc

SEQ ID NO: 4333 - DNA, 15 bp, Homo sapiens
gggttgttgcaaagg

SEQ ID NO: 4334 - DNA, 15 bp, Homo sapiens
agggttgttgcaaag

SEQ ID NO: 4335 - DNA, 15 bp, Homo sapiens
cagggttgttgcaaa

SEQ ID NO: 4336 - DNA, 15 bp, Homo sapiens
acagggttgttgcaa

SEQ ID NO: 4337 - DNA, 15 bp, Homo sapiens
cacagggttgttgca

SEQ ID NO: 4338 - DNA, 15 bp, Homo sapiens
tcacagggttgttgc

SEQ ID NO: 4339 - DNA, 15 bp, Homo sapiens
atcacagggttgttg

SEQ ID NO: 4340 - DNA, 15 bp, Homo sapiens
gatcacagggttgtt

SEQ ID NO: 4341 - DNA, 15 bp, Homo sapiens
agatcacagggttgt

SEQ ID NO: 4342 - DNA, 15 bp, Homo sapiens
aagatcacagggttg

SEQ ID NO: 4343 - DNA, 15 bp, Homo sapiens
caagatcacagggtt

SEQ ID NO: 4344 - DNA, 15 bp, Homo sapiens
gcaagatcacagggt

SEQ ID NO: 4345 - DNA, 15 bp, Homo sapiens
cgcaagatcacaggg

SEQ ID NO: 4346 - DNA, 15 bp, Homo sapiens
tcgcaagatcacagg

SEQ ID NO: 4347 - DNA, 15 bp, Homo sapiens
gtcgcaagatcacag

SEQ ID NO: 4348 - DNA, 15 bp, Homo sapiens
tgtcgcaagatcaca

SEQ ID NO: 4349 - DNA, 15 bp, Homo sapiens
ttgtcgcaagatcac

SEQ ID NO: 4350 - DNA, 15 bp, Homo sapiens
gttgtcgcaagatca

SEQ ID NO: 4351 - DNA, 15 bp, Homo sapiens
ggttgtcgcaagatc

SEQ ID NO: 4352 - DNA, 15 bp, Homo sapiens
gggttgtcgcaagat

SEQ ID NO: 4353 - DNA, 15 bp, Homo sapiens
agggttgtcgcaaga

SEQ ID NO: 4354 - DNA, 15 bp, Homo sapiens
cagggttgtcgcaag

SEQ ID NO: 4355 - DNA, 15 bp, Homo sapiens
acagggttgtcgcaa

SEQ ID NO: 4356 - DNA, 15 bp, Homo sapiens
tacagggttgtcgca

SEQ ID NO: 4357 - DNA, 15 bp, Homo sapiens
ttacagggttgtcgc

SEQ ID NO: 4358 - DNA, 15 bp, Homo sapiens
cttacagggttgtcg

SEQ ID NO: 4359 - DNA, 15 bp, Homo sapiens
ccttacagggttgtc

SEQ ID NO: 4360 - DNA, 15 bp, Homo sapiens
gccttacagggttgt

SEQ ID NO: 4361 - DNA, 15 bp, Homo sapiens
tgccttacagggttg

SEQ ID NO: 4362 - DNA, 15 bp, Homo sapiens
ttgccttacagggtt

SEQ ID NO: 4363 - DNA, 15 bp, Homo sapiens
attgccttacagggt

SEQ ID NO: 4364 - DNA, 15 bp, Homo sapiens
tattgccttacaggg

SEQ ID NO: 4365 - DNA, 15 bp, Homo sapiens
ttattgccttacagg

SEQ ID NO: 4366 - DNA, 15 bp, Homo sapiens
gttattgccttacag

SEQ ID NO: 4367 - DNA, 15 bp, Homo sapiens
tgttattgccttaca

SEQ ID NO: 4368 - DNA, 15 bp, Homo sapiens
ttgttattgccttac

SEQ ID NO: 4369 - DNA, 15 bp, Homo sapiens
tttgttattgcctta

SEQ ID NO: 4370 - DNA, 15 bp, Homo sapiens
atttgttattgcctt

SEQ ID NO: 4371 - DNA, 15 bp, Homo sapiens
catttgttattgcct

SEQ ID NO: 4372 - DNA, 15 bp, Homo sapiens
ccatttgttattgcc

SEQ ID NO: 4373 - DNA, 15 bp, Homo sapiens
gccatttgttattgc

SEQ ID NO: 4374 - DNA, 15 bp, Homo sapiens
agccatttgttattg

SEQ ID NO: 4375 - DNA, 15 bp, Homo sapiens
gagccatttgttatt

SEQ ID NO: 4376 - DNA, 15 bp, Homo sapiens
tgagccatttgttat

SEQ ID NO: 4377 - DNA, 15 bp, Homo sapiens
atgagccatttgtta

SEQ ID NO: 4378 - DNA, 15 bp, Homo sapiens
catgagccatttgtt

SEQ ID NO: 4379 - DNA, 15 bp, Homo sapiens
acatgagccatttgt

SEQ ID NO: 4380 - DNA, 15 bp, Homo sapiens
aacatgagccatttg

SEQ ID NO: 4381 - DNA, 15 bp, Homo sapiens
aaacatgagccattt

SEQ ID NO: 4382 - DNA, 15 bp, Homo sapiens
taaacatgagccatt

SEQ ID NO: 4383 - DNA, 15 bp, Homo sapiens
ataaacatgagccat

SEQ ID NO: 4384 - DNA, 15 bp, Homo sapiens
aataaacatgagcca

SEQ ID NO: 4385 - DNA, 15 bp, Homo sapiens
caataaacatgagcc

SEQ ID NO: 4386 - DNA, 15 bp, Homo sapiens
tcaataaacatgagc

SEQ ID NO: 4387 - DNA, 15 bp, Homo sapiens
ctcaataaacatgag

SEQ ID NO: 4388 - DNA, 15 bp, Homo sapiens
actcaataaacatga

SEQ ID NO: 4389 - DNA, 15 bp, Homo sapiens
cactcaataaacatg

SEQ ID NO: 4390 - DNA, 15 bp, Homo sapiens
acactcaataaacat

SEQ ID NO: 4391 - DNA, 15 bp, Homo sapiens
aacactcaataaaca

SEQ ID NO: 4392 - DNA, 15 bp, Homo sapiens
taacactcaataaac

SEQ ID NO: 4393 - DNA, 15 bp, Homo sapiens
gtaacactcaataaa

SEQ ID NO: 4394 - DNA, 15 bp, Homo sapiens
ggtaacactcaataa

SEQ ID NO: 4395 - DNA, 15 bp, Homo sapiens
aggtaacactcaata

SEQ ID NO: 4396 - DNA, 15 bp, Homo sapiens
gaggtaacactcaat

SEQ ID NO: 4397 - DNA, 15 bp, Homo sapiens
tgaggtaacactcaa

SEQ ID NO: 4398 - DNA, 15 bp, Homo sapiens
atgaggtaacactca

SEQ ID NO: 4399 - DNA, 15 bp, Homo sapiens
catgaggtaacactc

SEQ ID NO: 4400 - DNA, 15 bp, Homo sapiens
gcatgaggtaacact

SEQ ID NO: 4401 - DNA, 15 bp, Homo sapiens
ggcatgaggtaacac

SEQ ID NO: 4402 - DNA, 15 bp, Homo sapiens
tggcatgaggtaaca

SEQ ID NO: 4403 - DNA, 15 bp, Homo sapiens
atggcatgaggtaac

SEQ ID NO: 4404 - DNA, 15 bp, Homo sapiens
tatggcatgaggtaa

SEQ ID NO: 4405 - DNA, 15 bp, Homo sapiens
atatggcatgaggta

SEQ ID NO: 4406 - DNA, 15 bp, Homo sapiens
aatatggcatgaggt

SEQ ID NO: 4407 - DNA, 15 bp, Homo sapiens
caatatggcatgagg

SEQ ID NO: 4408 - DNA, 15 bp, Homo sapiens
acaatatggcatgag

SEQ ID NO: 4409 - DNA, 15 bp, Homo sapiens
cacaatatggcatga

SEQ ID NO: 4410 - DNA, 15 bp, Homo sapiens
gcacaatatggcatg

SEQ ID NO: 4411 - DNA, 15 bp, Homo sapiens
agcacaatatggcat

SEQ ID NO: 4412 - DNA, 15 bp, Homo sapiens
aagcacaatatggca

SEQ ID NO: 4413 - DNA, 15 bp, Homo sapiens
aaagcacaatatggc

SEQ ID NO: 4414 - DNA, 15 bp, Homo sapiens
gaaagcacaatatgg

SEQ ID NO: 4415 - DNA, 15 bp, Homo sapiens
cgaaagcacaatatg

SEQ ID NO: 4416 - DNA, 15 bp, Homo sapiens
acgaaagcacaatat

SEQ ID NO: 4417 - DNA, 15 bp, Homo sapiens
cacgaaagcacaata

SEQ ID NO: 4418 - DNA, 15 bp, Homo sapiens
acacgaaagcacaat

SEQ ID NO: 4419 - DNA, 15 bp, Homo sapiens
aacacgaaagcacaa

SEQ ID NO: 4420 - DNA, 15 bp, Homo sapiens
aaacacgaaagcaca

SEQ ID NO: 4421 - DNA, 15 bp, Homo sapiens
taaacacgaaagcac

SEQ ID NO: 4422 - DNA, 15 bp, Homo sapiens
ttaaacacgaaagca

SEQ ID NO: 4423 - DNA, 15 bp, Homo sapiens
gttaaacacgaaagc

SEQ ID NO: 4424 - DNA, 15 bp, Homo sapiens
tgttaaacacgaaag

SEQ ID NO: 4425 - DNA, 15 bp, Homo sapiens
gtgttaaacacgaaa

SEQ ID NO: 4426 - DNA, 15 bp, Homo sapiens
tgtgttaaacacgaa

SEQ ID NO: 4427 - DNA, 15 bp, Homo sapiens
ttgtgttaaacacga

SEQ ID NO: 4428 - DNA, 15 bp, Homo sapiens
attgtgttaaacacg

SEQ ID NO: 4429 - DNA, 15 bp, Homo sapiens
aattgtgttaaacac

SEQ ID NO: 4430 - DNA, 15 bp, Homo sapiens
caattgtgttaaaca

SEQ ID NO: 4431 - DNA, 15 bp, Homo sapiens
acaattgtgttaaac

SEQ ID NO: 4432 - DNA, 15 bp, Homo sapiens
gacaattgtgttaaa

SEQ ID NO: 4433 - DNA, 15 bp, Homo sapiens
agacaattgtgttaa

SEQ ID NO: 4434 - DNA, 15 bp, Homo sapiens
gagacaattgtgtta

SEQ ID NO: 4435 - DNA, 15 bp, Homo sapiens
tgagacaattgtgtt

SEQ ID NO: 4436 - DNA, 15 bp, Homo sapiens
atgagacaattgtgt

SEQ ID NO: 4437 - DNA, 15 bp, Homo sapiens
aatgagacaattgtg

SEQ ID NO: 4438 - DNA, 15 bp, Homo sapiens
aaatgagacaattgt

SEQ ID NO: 4439 - DNA, 15 bp, Homo sapiens
gaaatgagacaattg

SEQ ID NO: 4440 - DNA, 15 bp, Homo sapiens
tgaaatgagacaatt

SEQ ID NO: 4441 - DNA, 15 bp, Homo sapiens
gtgaaatgagacaat

SEQ ID NO: 4442 - DNA, 15 bp, Homo sapiens
ggtgaaatgagacaa

SEQ ID NO: 4443 - DNA, 15 bp, Homo sapiens
gggtgaaatgagaca

SEQ ID NO: 4444 - DNA, 15 bp, Homo sapiens
agggtgaaatgagac

SEQ ID NO: 4445 - DNA, 15 bp, Homo sapiens
gagggtgaaatgaga

SEQ ID NO: 4446 - DNA, 15 bp, Homo sapiens
tgagggtgaaatgag

SEQ ID NO: 4447 - DNA, 15 bp, Homo sapiens
gtgagggtgaaatga

SEQ ID NO: 4448 - DNA, 15 bp, Homo sapiens
cgtgagggtgaaatg

SEQ ID NO: 4449 - DNA, 15 bp, Homo sapiens
tcgtgagggtgaaat

SEQ ID NO: 4450 - DNA, 15 bp, Homo sapiens
gtcgtgagggtgaaa

SEQ ID NO: 4451 - DNA, 15 bp, Homo sapiens
agtcgtgagggtgaa

SEQ ID NO: 4452 - DNA, 15 bp, Homo sapiens
cagtcgtgagggtga

SEQ ID NO: 4453 - DNA, 15 bp, Homo sapiens
gcagtcgtgagggtg

SEQ ID NO: 4454 - DNA, 15 bp, Homo sapiens
agcagtcgtgagggt

SEQ ID NO: 4455 - DNA, 15 bp, Homo sapiens
gagcagtcgtgaggg

SEQ ID NO: 4456 - DNA, 15 bp, Homo sapiens
agagcagtcgtgagg

SEQ ID NO: 4457 - DNA, 15 bp, Homo sapiens
cagagcagtcgtgag

SEQ ID NO: 4458 - DNA, 15 bp, Homo sapiens
ccagagcagtcgtga

SEQ ID NO: 4459 - DNA, 15 bp, Homo sapiens
cccagagcagtcgtg

SEQ ID NO: 4460 - DNA, 15 bp, Homo sapiens
tcccagagcagtcgt

SEQ ID NO: 4461 - DNA, 15 bp, Homo sapiens
ctcccagagcagtcg

SEQ ID NO: 4462 - DNA, 15 bp, Homo sapiens
cctcccagagcagtc

SEQ ID NO: 4463 - DNA, 15 bp, Homo sapiens
acctcccagagcagt

SEQ ID NO: 4464 - DNA, 15 bp, Homo sapiens
tacctcccagagcag

SEQ ID NO: 4465 - DNA, 15 bp, Homo sapiens
ctacctcccagagca

SEQ ID NO: 4466 - DNA, 15 bp, Homo sapiens
cctacctcccagagc

SEQ ID NO: 4467 - DNA, 15 bp, Homo sapiens
acctacctcccagag

SEQ ID NO: 4468 - DNA, 15 bp, Homo sapiens
gacctacctcccaga

SEQ ID NO: 4469 - DNA, 15 bp, Homo sapiens
ggacctacctcccag

SEQ ID NO: 4470 - DNA, 15 bp, Homo sapiens
aggacctacctccca

SEQ ID NO: 4471 - DNA, 15 bp, Homo sapiens
caggacctacctccc

SEQ ID NO: 4472 - DNA, 15 bp, Homo sapiens
ccaggacctacctcc

SEQ ID NO: 4473 - DNA, 15 bp, Homo sapiens
accaggacctacctc

SEQ ID NO: 4474 - DNA, 15 bp, Homo sapiens
taccaggacctacct

SEQ ID NO: 4475 - DNA, 15 bp, Homo sapiens
ataccaggacctacc

SEQ ID NO: 4476 - DNA, 15 bp, Homo sapiens
gataccaggacctac

SEQ ID NO: 4477 - DNA, 15 bp, Homo sapiens
tgataccaggaccta

SEQ ID NO: 4478 - DNA, 15 bp, Homo sapiens
gtgataccaggacct

SEQ ID NO: 4479 - DNA, 15 bp, Homo sapiens
tgtgataccaggacc

SEQ ID NO: 4480 - DNA, 15 bp, Homo sapiens
atgtgataccaggac

SEQ ID NO: 4481 - DNA, 15 bp, Homo sapiens
gatgtgataccagga

SEQ ID NO: 4482 - DNA, 15 bp, Homo sapiens
ggatgtgataccagg

SEQ ID NO: 4483 - DNA, 15 bp, Homo sapiens
tggatgtgataccag

SEQ ID NO: 4484 - DNA, 15 bp, Homo sapiens
atggatgtgatacca

SEQ ID NO: 4485 - DNA, 15 bp, Homo sapiens
aatggatgtgatacc

SEQ ID NO: 4486 - DNA, 15 bp, Homo sapiens
aaatggatgtgatac

SEQ ID NO: 4487 - DNA, 15 bp, Homo sapiens
gaaatggatgtgata

SEQ ID NO: 4488 - DNA, 15 bp, Homo sapiens
tgaaatggatgtgat

SEQ ID NO: 4489 - DNA, 15 bp, Homo sapiens
gtgaaatggatgtga

SEQ ID NO: 4490 - DNA, 15 bp, Homo sapiens
tgtgaaatggatgtg

SEQ ID NO: 4491 - DNA, 15 bp, Homo sapiens
ctgtgaaatggatgt

SEQ ID NO: 4492 - DNA, 15 bp, Homo sapiens
tctgtgaaatggatg

SEQ ID NO: 4493 - DNA, 15 bp, Homo sapiens
atctgtgaaatggat

SEQ ID NO: 4494 - DNA, 15 bp, Homo sapiens
catctgtgaaatgga

SEQ ID NO: 4495 - DNA, 15 bp, Homo sapiens
tcatctgtgaaatgg

SEQ ID NO: 4496 - DNA, 15 bp, Homo sapiens
ctcatctgtgaaatg

SEQ ID NO: 4497 - DNA, 15 bp, Homo sapiens
tctcatctgtgaaat

SEQ ID NO: 4498 - DNA, 15 bp, Homo sapiens
gtctcatctgtgaaa

SEQ ID NO: 4499 - DNA, 15 bp, Homo sapiens
ggtctcatctgtgaa

SEQ ID NO: 4500 - DNA, 15 bp, Homo sapiens
tggtctcatctgtga

SEQ ID NO: 4501 - DNA, 15 bp, Homo sapiens
atggtctcatctgtg

SEQ ID NO: 4502 - DNA, 15 bp, Homo sapiens
aatggtctcatctgt

SEQ ID NO: 4503 - DNA, 15 bp, Homo sapiens
aaatggtctcatctg

SEQ ID NO: 4504 - DNA, 15 bp, Homo sapiens
caaatggtctcatct

SEQ ID NO: 4505 - DNA, 15 bp, Homo sapiens
ccaaatggtctcatc

SEQ ID NO: 4506 - DNA, 15 bp, Homo sapiens
gccaaatggtctcat

SEQ ID NO: 4507 - DNA, 15 bp, Homo sapiens
tgccaaatggtctca

SEQ ID NO: 4508 - DNA, 15 bp, Homo sapiens
gtgccaaatggtctc

SEQ ID NO: 4509 - DNA, 15 bp, Homo sapiens
cgtgccaaatggtct

SEQ ID NO: 4510 - DNA, 15 bp, Homo sapiens
ccgtgccaaatggtc

SEQ ID NO: 4511 - DNA, 15 bp, Homo sapiens
tccgtgccaaatggt

SEQ ID NO: 4512 - DNA, 15 bp, Homo sapiens
ttccgtgccaaatgg

SEQ ID NO: 4513 - DNA, 15 bp, Homo sapiens
cttccgtgccaaatg

SEQ ID NO: 4514 - DNA, 15 bp, Homo sapiens
tcttccgtgccaaat

SEQ ID NO: 4515 - DNA, 15 bp, Homo sapiens
ctcttccgtgccaaa

SEQ ID NO: 4516 - DNA, 15 bp, Homo sapiens
actcttccgtgccaa

SEQ ID NO: 4517 - DNA, 15 bp, Homo sapiens
aactcttccgtgcca

SEQ ID NO: 4518 - DNA, 15 bp, Homo sapiens
caactcttccgtgcc

SEQ ID NO: 4519 - DNA, 15 bp, Homo sapiens
tcaactcttccgtgc

SEQ ID NO: 4520 - DNA, 15 bp, Homo sapiens
ctcaactcttccgtg

SEQ ID NO: 4521 - DNA, 15 bp, Homo sapiens
actcaactcttccgt

SEQ ID NO: 4522 - DNA, 15 bp, Homo sapiens
cactcaactcttccg

SEQ ID NO: 4523 - DNA, 15 bp, Homo sapiens
ccactcaactcttcc

SEQ ID NO: 4524 - DNA, 15 bp, Homo sapiens
cccactcaactcttc

SEQ ID NO: 4525 - DNA, 15 bp, Homo sapiens
gcccactcaactctt

SEQ ID NO: 4526 - DNA, 15 bp, Homo sapiens
agcccactcaactct

SEQ ID NO: 4527 - DNA, 15 bp, Homo sapiens
cagcccactcaactc

SEQ ID NO: 4528 - DNA, 15 bp, Homo sapiens
gcagcccactcaact

SEQ ID NO: 4529 - DNA, 15 bp, Homo sapiens
ggcagcccactcaac

SEQ ID NO: 4530 - DNA, 15 bp, Homo sapiens
gggcagcccactcaa

SEQ ID NO: 4531 - DNA, 15 bp, Homo sapiens
tgggcagcccactca

SEQ ID NO: 4532 - DNA, 15 bp, Homo sapiens
ttgggcagcccactc

SEQ ID NO: 4533 - DNA, 15 bp, Homo sapiens
cttgggcagcccact

SEQ ID NO: 4534 - DNA, 15 bp, Homo sapiens
ccttgggcagcccac

SEQ ID NO: 4535 - DNA, 15 bp, Homo sapiens
accttgggcagccca

SEQ ID NO: 4536 - DNA, 15 bp, Homo sapiens
gaccttgggcagccc

SEQ ID NO: 4537 - DNA, 15 bp, Homo sapiens
tgaccttgggcagcc

SEQ ID NO: 4538 - DNA, 15 bp, Homo sapiens
gtgaccttgggcagc

SEQ ID NO: 4539 - DNA, 15 bp, Homo sapiens
tgtgaccttgggcag

SEQ ID NO: 4540 - DNA, 15 bp, Homo sapiens
atgtgaccttgggca

SEQ ID NO: 4541 - DNA, 15 bp, Homo sapiens
tatgtgaccttgggc

SEQ ID NO: 4542 - DNA, 15 bp, Homo sapiens
ctatgtgaccttggg

SEQ ID NO: 4543 - DNA, 15 bp, Homo sapiens
gctatgtgaccttgg

SEQ ID NO: 4544 - DNA, 15 bp, Homo sapiens
agctatgtgaccttg

SEQ ID NO: 4545 - DNA, 15 bp, Homo sapiens
tcttagctatgtgac

SEQ ID NO: 4546 - DNA, 15 bp, Homo sapiens
atcttagctatgtga

SEQ ID NO: 4547 - DNA, 15 bp, Homo sapiens
catcttagctatgtg

SEQ ID NO: 4548 - DNA, 15 bp, Homo sapiens
ccatcttagctatgt

SEQ ID NO: 4549 - DNA, 15 bp, Homo sapiens
tccatcttagctatg

SEQ ID NO: 4550 - DNA, 15 bp, Homo sapiens
ttccatcttagctat

SEQ ID NO: 4551 - DNA, 15 bp, Homo sapiens
gttccatcttagcta

SEQ ID NO: 4552 - DNA, 15 bp, Homo sapiens
tgttccatcttagct

SEQ ID NO: 4553 - DNA, 15 bp, Homo sapiens
ctgttccatcttagc

SEQ ID NO: 4554 - DNA, 15 bp, Homo sapiens
cctgttccatcttag

SEQ ID NO: 4555 - DNA, 15 bp, Homo sapiens
gcctgttccatctta

SEQ ID NO: 4556 - DNA, 15 bp, Homo sapiens
agcctgttccatctt

SEQ ID NO: 4557 - DNA, 15 bp, Homo sapiens
cagcctgttccatct

SEQ ID NO: 4558 - DNA, 15 bp, Homo sapiens
ccagcctgttccatc

SEQ ID NO: 4559 - DNA, 15 bp, Homo sapiens
tccagcctgttccat

SEQ ID NO: 4560 - DNA, 15 bp, Homo sapiens
atccagcctgttcca

SEQ ID NO: 4561 - DNA, 15 bp, Homo sapiens
tatccagcctgttcc

SEQ ID NO: 4562 - DNA, 15 bp, Homo sapiens
ctatccagcctgttc

SEQ ID NO: 4563 - DNA, 15 bp, Homo sapiens
cctatccagcctgtt

SEQ ID NO: 4564 - DNA, 15 bp, Homo sapiens
tcctatccagcctgt

SEQ ID NO: 4565 - DNA, 15 bp, Homo sapiens
ttcctatccagcctg

SEQ ID NO: 4566 - DNA, 15 bp, Homo sapiens
gttcctatccagcct

SEQ ID NO: 4567 - DNA, 15 bp, Homo sapiens
ggttcctatccagcc

SEQ ID NO: 4568 - DNA, 15 bp, Homo sapiens
gggttcctatccagc

SEQ ID NO: 4569 - DNA, 15 bp, Homo sapiens
ggggttcctatccag

SEQ ID NO: 4570 - DNA, 15 bp, Homo sapiens
tggggttcctatcca

SEQ ID NO: 4571 - DNA, 15 bp, Homo sapiens
ctggggttcctatcc

SEQ ID NO: 4572 - DNA, 15 bp, Homo sapiens
actggggttcctatc

SEQ ID NO: 4573 - DNA, 15 bp, Homo sapiens
tactggggttcctat

SEQ ID NO: 4574 - DNA, 15 bp, Homo sapiens
ttactggggttccta

SEQ ID NO: 4575 - DNA, 15 bp, Homo sapiens
gttactggggttcct

SEQ ID NO: 4576 - DNA, 15 bp, Homo sapiens
agttactggggttcc

SEQ ID NO: 4577 - DNA, 15 bp, Homo sapiens
aagttactggggttc

SEQ ID NO: 4578 - DNA, 15 bp, Homo sapiens
caagttactggggtt

SEQ ID NO: 4579 - DNA, 15 bp, Homo sapiens
tcaagttactggggt

SEQ ID NO: 4580 - DNA, 15 bp, Homo sapiens
gtcaagttactgggg

SEQ ID NO: 4581 - DNA, 15 bp, Homo sapiens
ggtcaagttactggg

SEQ ID NO: 4582 - DNA, 15 bp, Homo sapiens
aggtcaagttactgg

SEQ ID NO: 4583 - DNA, 15 bp, Homo sapiens
gaggtcaagttactg

SEQ ID NO: 4584 - DNA, 15 bp, Homo sapiens
tgaggtcaagttact

SEQ ID NO: 4585 - DNA, 15 bp, Homo sapiens
ctgaggtcaagttac

SEQ ID NO: 4586 - DNA, 15 bp, Homo sapiens
tctgaggtcaagtta

SEQ ID NO: 4587 - DNA, 15 bp, Homo sapiens
ctctgaggtcaagtt

SEQ ID NO: 4588 - DNA, 15 bp, Homo sapiens
actctgaggtcaagt

SEQ ID NO: 4589 - DNA, 15 bp, Homo sapiens
tactctgaggtcaag

SEQ ID NO: 4590 - DNA, 15 bp, Homo sapiens
ttactctgaggtcaa

SEQ ID NO: 4591 - DNA, 15 bp, Homo sapiens
gttactctgaggtca

SEQ ID NO: 4592 - DNA, 15 bp, Homo sapiens
ggttactctgaggtc

SEQ ID NO: 4593 - DNA, 15 bp, Homo sapiens
aggttactctgaggt

SEQ ID NO: 4594 - DNA, 15 bp, Homo sapiens
aaggttactctgagg

SEQ ID NO: 4595 - DNA, 15 bp, Homo sapiens
gaaggttactctgag

SEQ ID NO: 4596 - DNA, 15 bp, Homo sapiens
agaaggttactctga

SEQ ID NO: 4597 - DNA, 15 bp, Homo sapiens
gagaaggttactctg

SEQ ID NO: 4598 - DNA, 15 bp, Homo sapiens
agagaaggttactct

SEQ ID NO: 4599 - DNA, 15 bp, Homo sapiens
aagagaaggttactc

SEQ ID NO: 4600 - DNA, 15 bp, Homo sapiens
taagagaaggttact

SEQ ID NO: 4601 - DNA, 15 bp, Homo sapiens
ttaagagaaggttac

SEQ ID NO: 4602 - DNA, 15 bp, Homo sapiens
gttaagagaaggtta

SEQ ID NO: 4603 - DNA, 15 bp, Homo sapiens
ggttaagagaaggtt

SEQ ID NO: 4604 - DNA, 15 bp, Homo sapiens
gggttaagagaaggt

SEQ ID NO: 4605 - DNA, 15 bp, Homo sapiens
agggttaagagaagg

SEQ ID NO: 4606 - DNA, 15 bp, Homo sapiens
cagggttaagagaag

SEQ ID NO: 4607 - DNA, 15 bp, Homo sapiens
tcagggttaagagaa

SEQ ID NO: 4608 - DNA, 15 bp, Homo sapiens
ctcagggttaagaga

SEQ ID NO: 4609 - DNA, 15 bp, Homo sapiens
actcagggttaagag

SEQ ID NO: 4610 - DNA, 15 bp, Homo sapiens
cactcagggttaaga

SEQ ID NO: 4611 - DNA, 15 bp, Homo sapiens
acactcagggttaag

SEQ ID NO: 4612 - DNA, 15 bp, Homo sapiens
tacactcagggttaa

SEQ ID NO: 4613 - DNA, 15 bp, Homo sapiens
gtacactcagggtta

SEQ ID NO: 4614 - DNA, 15 bp, Homo sapiens
tgtacactcagggtt

SEQ ID NO: 4615 - DNA, 15 bp, Homo sapiens
gtgtacactcagggt

SEQ ID NO: 4616 - DNA, 15 bp, Homo sapiens
agtgtacactcaggg

SEQ ID NO: 4617 - DNA, 15 bp, Homo sapiens
cagtgtacactcagg

SEQ ID NO: 4618 - DNA, 15 bp, Homo sapiens
acagtgtacactcag

SEQ ID NO: 4619 - DNA, 15 bp, Homo sapiens
tacagtgtacactca

SEQ ID NO: 4620 - DNA, 15 bp, Homo sapiens
ctacagtgtacactc

SEQ ID NO: 4621 - DNA, 15 bp, Homo sapiens
cctacagtgtacact

SEQ ID NO: 4622 - DNA, 15 bp, Homo sapiens
tcctacagtgtacac

SEQ ID NO: 4623 - DNA, 15 bp, Homo sapiens
ttcctacagtgtaca

SEQ ID NO: 4624 - DNA, 15 bp, Homo sapiens
tttcctacagtgtac

SEQ ID NO: 4625 - DNA, 15 bp, Homo sapiens
ttttcctacagtgta

SEQ ID NO: 4626 - DNA, 15 bp, Homo sapiens
tttttcctacagtgt

SEQ ID NO: 4627 - DNA, 15 bp, Homo sapiens
atttttcctacagtg

SEQ ID NO: 4628 - DNA, 15 bp, Homo sapiens
catttttcctacagt

SEQ ID NO: 4629 - DNA, 15 bp, Homo sapiens
tcatttttcctacag

SEQ ID NO: 4630 - DNA, 15 bp, Homo sapiens
ctcatttttcctaca

SEQ ID NO: 4631 - DNA, 15 bp, Homo sapiens
gctcatttttcctac

SEQ ID NO: 4632 - DNA, 15 bp, Homo sapiens
tgctcatttttccta

SEQ ID NO: 4633 - DNA, 15 bp, Homo sapiens
ctgctcatttttcct

SEQ ID NO: 4634 - DNA, 15 bp, Homo sapiens
actgctcatttttcc

SEQ ID NO: 4635 - DNA, 15 bp, Homo sapiens
gactgctcatttttc

SEQ ID NO: 4636 - DNA, 15 bp, Homo sapiens
ggactgctcattttt

SEQ ID NO: 4637 - DNA, 15 bp, Homo sapiens
gggactgctcatttt

SEQ ID NO: 4638 - DNA, 15 bp, Homo sapiens
tgggactgctcattt

SEQ ID NO: 4639 - DNA, 15 bp, Homo sapiens
atgggactgctcatt

SEQ ID NO: 4640 - DNA, 15 bp, Homo sapiens
aatgggactgctcat

SEQ ID NO: 4641 - DNA, 15 bp, Homo sapiens
aaatgggactgctca

SEQ ID NO: 4642 - DNA, 15 bp, Homo sapiens
gaaatgggactgctc

SEQ ID NO: 4643 - DNA, 15 bp, Homo sapiens
tgaaatgggactgct

SEQ ID NO: 4644 - DNA, 15 bp, Homo sapiens
ctgaaatgggactgc

SEQ ID NO: 4645 - DNA, 15 bp, Homo sapiens
tctgaaatgggactg

SEQ ID NO: 4646 - DNA, 15 bp, Homo sapiens
ctctgaaatgggact

SEQ ID NO: 4647 - DNA, 15 bp, Homo sapiens
tctctgaaatgggac

SEQ ID NO: 4648 - DNA, 15 bp, Homo sapiens
ctctctgaaatggga

SEQ ID NO: 4649 - DNA, 15 bp, Homo sapiens
cctctctgaaatggg

SEQ ID NO: 4650 - DNA, 15 bp, Homo sapiens
tcctctctgaaatgg

SEQ ID NO: 4651 - DNA, 15 bp, Homo sapiens
gtcctctctgaaatg

SEQ ID NO: 4652 - DNA, 15 bp, Homo sapiens
tgtcctctctgaaat

SEQ ID NO: 4653 - DNA, 15 bp, Homo sapiens
ttgtcctctctgaaa

SEQ ID NO: 4654 - DNA, 15 bp, Homo sapiens
tttgtcctctctgaa

SEQ ID NO: 4655 - DNA, 15 bp, Homo sapiens
ttttgtcctctctga

SEQ ID NO: 4656 - DNA, 15 bp, Homo sapiens
gttttgtcctctctg

SEQ ID NO: 4657 - DNA, 15 bp, Homo sapiens
agttttgtcctctct

SEQ ID NO: 4658 - DNA, 15 bp, Homo sapiens
cagttttgtcctctc

SEQ ID NO: 4659 - DNA, 15 bp, Homo sapiens
tcagttttgtcctct

SEQ ID NO: 4660 - DNA, 15 bp, Homo sapiens
ctcagttttgtcctc

SEQ ID NO: 4661 - DNA, 15 bp, Homo sapiens
tctcagttttgtcct

SEQ ID NO: 4662 - DNA, 15 bp, Homo sapiens
gtctcagttttgtcc

SEQ ID NO: 4663 - DNA, 15 bp, Homo sapiens
agtctcagttttgtc

SEQ ID NO: 4664 - DNA, 15 bp, Homo sapiens
gagtctcagttttgt

SEQ ID NO: 4665 - DNA, 15 bp, Homo sapiens
tgagtctcagttttg

SEQ ID NO: 4666 - DNA, 15 bp, Homo sapiens
ctgagtctcagtttt

SEQ ID NO: 4667 - DNA, 15 bp, Homo sapiens
tctgagtctcagttt

SEQ ID NO: 4668 - DNA, 15 bp, Homo sapiens
ctctgagtctcagtt

SEQ ID NO: 4669 - DNA, 15 bp, Homo sapiens
cctctgagtctcagt

SEQ ID NO: 4670 - DNA, 15 bp, Homo sapiens
acctctgagtctcag

SEQ ID NO: 4671 - DNA, 15 bp, Homo sapiens
aacctctgagtctca

SEQ ID NO: 4672 - DNA, 15 bp, Homo sapiens
taacctctgagtctc

SEQ ID NO: 4673 - DNA, 15 bp, Homo sapiens
ttaacctctgagtct

SEQ ID NO: 4674 - DNA, 15 bp, Homo sapiens
cttaacctctgagtc

SEQ ID NO: 4675 - DNA, 15 bp, Homo sapiens
gcttaacctctgagt

SEQ ID NO: 4676 - DNA, 15 bp, Homo sapiens
tgcttaacctctgag

SEQ ID NO: 4677 - DNA, 15 bp, Homo sapiens
ttgcttaacctctga

SEQ ID NO: 4678 - DNA, 15 bp, Homo sapiens
cttgcttaacctctg

SEQ ID NO: 4679 - DNA, 15 bp, Homo sapiens
gcttgcttaacctct

SEQ ID NO: 4680 - DNA, 15 bp, Homo sapiens
ggcttgcttaacctc

SEQ ID NO: 4681 - DNA, 15 bp, Homo sapiens
gggcttgcttaacct

SEQ ID NO: 4682 - DNA, 15 bp, Homo sapiens
ggggcttgcttaacc

SEQ ID NO: 4683 - DNA, 15 bp, Homo sapiens
tggggcttgcttaac

SEQ ID NO: 4684 - DNA, 15 bp, Homo sapiens
ttggggcttgcttaa

SEQ ID NO: 4685 - DNA, 15 bp, Homo sapiens
tttggggcttgctta

SEQ ID NO: 4686 - DNA, 15 bp, Homo sapiens
ctttggggcttgctt

SEQ ID NO: 4687 - DNA, 15 bp, Homo sapiens
actttggggcttgct

SEQ ID NO: 4688 - DNA, 15 bp, Homo sapiens
cactttggggcttgc

SEQ ID NO: 4689 - DNA, 15 bp, Homo sapiens
ccactttggggcttg

SEQ ID NO: 4690 - DNA, 15 bp, Homo sapiens
accactttggggctt

SEQ ID NO: 4691 - DNA, 15 bp, Homo sapiens
aaccactttggggct

SEQ ID NO: 4692 - DNA, 15 bp, Homo sapiens
caaccactttggggc

SEQ ID NO: 4693 - DNA, 15 bp, Homo sapiens
acaaccactttgggg

SEQ ID NO: 4694 - DNA, 15 bp, Homo sapiens
aacaaccactttggg

SEQ ID NO: 4695 - DNA, 15 bp, Homo sapiens
taacaaccactttgg

SEQ ID NO: 4696 - DNA, 15 bp, Homo sapiens
ttaacaaccactttg

SEQ ID NO: 4697 - DNA, 15 bp, Homo sapiens
gttaacaaccacttt

SEQ ID NO: 4698 - DNA, 15 bp, Homo sapiens
ggttaacaaccactt

SEQ ID NO: 4699 - DNA, 15 bp, Homo sapiens
gggttaacaaccact

SEQ ID NO: 4700 - DNA, 15 bp, Homo sapiens
tgggttaacaaccac

SEQ ID NO: 4701 - DNA, 15 bp, Homo sapiens
ctgggttaacaacca

SEQ ID NO: 4702 - DNA, 15 bp, Homo sapiens
tctgggttaacaacc

SEQ ID NO: 4703 - DNA, 15 bp, Homo sapiens
atctgggttaacaac

SEQ ID NO: 4704 - DNA, 15 bp, Homo sapiens
gatctgggttaacaa

SEQ ID NO: 4705 - DNA, 15 bp, Homo sapiens
agatctgggttaaca

SEQ ID NO: 4706 - DNA, 15 bp, Homo sapiens
aagatctgggttaac

SEQ ID NO: 4707 - DNA, 15 bp, Homo sapiens
gaagatctgggttaa

SEQ ID NO: 4708 - DNA, 15 bp, Homo sapiens
ggaagatctgggtta

SEQ ID NO: 4709 - DNA, 15 bp, Homo sapiens
gggaagatctgggtt

SEQ ID NO: 4710 - DNA, 15 bp, Homo sapiens
tgggaagatctgggt

SEQ ID NO: 4711 - DNA, 15 bp, Homo sapiens
gtgggaagatctggg

SEQ ID NO: 4712 - DNA, 15 bp, Homo sapiens
agtgggaagatctgg

SEQ ID NO: 4713 - DNA, 15 bp, Homo sapiens
tagtgggaagatctg

SEQ ID NO: 4714 - DNA, 15 bp, Homo sapiens
ttagtgggaagatct

SEQ ID NO: 4715 - DNA, 15 bp, Homo sapiens
gttagtgggaagatc

SEQ ID NO: 4716 - DNA, 15 bp, Homo sapiens
agttagtgggaagat

SEQ ID NO: 4717 - DNA, 15 bp, Homo sapiens
gagttagtgggaaga

SEQ ID NO: 4718 - DNA, 15 bp, Homo sapiens
ggagttagtgggaag

SEQ ID NO: 4719 - DNA, 15 bp, Homo sapiens
gggagttagtgggaa

SEQ ID NO: 4720 - DNA, 15 bp, Homo sapiens
tgggagttagtggga

SEQ ID NO: 4721 - DNA, 15 bp, Homo sapiens
ttgggagttagtggg

SEQ ID NO: 4722 - DNA, 15 bp, Homo sapiens
tttgggagttagtgg

SEQ ID NO: 4723 - DNA, 15 bp, Homo sapiens
atttgggagttagtg

SEQ ID NO: 4724 - DNA, 15 bp, Homo sapiens
gatttgggagttagt

SEQ ID NO: 4725 - DNA, 15 bp, Homo sapiens
tgatttgggagttag

SEQ ID NO: 4726 - DNA, 15 bp, Homo sapiens
ctgatttgggagtta

SEQ ID NO: 4727 - DNA, 15 bp, Homo sapiens
gctgatttgggagtt

SEQ ID NO: 4728 - DNA, 15 bp, Homo sapiens
tgctgatttgggagt

SEQ ID NO: 4729 - DNA, 15 bp, Homo sapiens
atgctgatttgggag

SEQ ID NO: 4730 - DNA, 15 bp, Homo sapiens
gatgctgatttggga

SEQ ID NO: 4731 - DNA, 15 bp, Homo sapiens
tgatgctgatttggg

SEQ ID NO: 4732 - DNA, 15 bp, Homo sapiens
ctgatgctgatttgg

SEQ ID NO: 4733 - DNA, 15 bp, Homo sapiens
actgatgctgatttg

SEQ ID NO: 4734 - DNA, 15 bp, Homo sapiens
cactgatgctgattt

SEQ ID NO: 4735 - DNA, 15 bp, Homo sapiens
acactgatgctgatt

SEQ ID NO: 4736 - DNA, 15 bp, Homo sapiens
aacactgatgctgat

SEQ ID NO: 4737 - DNA, 15 bp, Homo sapiens
aaacactgatgctga

SEQ ID NO: 4738 - DNA, 15 bp, Homo sapiens
taaacactgatgctg

SEQ ID NO: 4739 - DNA, 15 bp, Homo sapiens
ttaaacactgatgct

SEQ ID NO: 4740 - DNA, 15 bp, Homo sapiens
gttaaacactgatgc

SEQ ID NO: 4741 - DNA, 15 bp, Homo sapiens
cgttaaacactgatg

SEQ ID NO: 4742 - DNA, 15 bp, Homo sapiens
acgttaaacactgat

SEQ ID NO: 4743 - DNA, 15 bp, Homo sapiens
tacgttaaacactga

SEQ ID NO: 4744 - DNA, 15 bp, Homo sapiens
gtacgttaaacactg

SEQ ID NO: 4745 - DNA, 15 bp, Homo sapiens
ggtacgttaaacact

SEQ ID NO: 4746 - DNA, 15 bp, Homo sapiens
tggtacgttaaacac

SEQ ID NO: 4747 - DNA, 15 bp, Homo sapiens
ctggtacgttaaaca

SEQ ID NO: 4748 - DNA, 15 bp, Homo sapiens
tctggtacgttaaac

SEQ ID NO: 4749 - DNA, 15 bp, Homo sapiens
gtctggtacgttaaa

SEQ ID NO: 4750 - DNA, 15 bp, Homo sapiens
ggtctggtacgttaa

SEQ ID NO: 4751 - DNA, 15 bp, Homo sapiens
aggtctggtacgtta

SEQ ID NO: 4752 - DNA, 15 bp, Homo sapiens
gaggtctggtacgtt

SEQ ID NO: 4753 - DNA, 15 bp, Homo sapiens
agaggtctggtacgt

SEQ ID NO: 4754 - DNA, 15 bp, Homo sapiens
gagaggtctggtacg

SEQ ID NO: 4755 - DNA, 15 bp, Homo sapiens
ggagaggtctggtac

SEQ ID NO: 4756 - DNA, 15 bp, Homo sapiens
gggagaggtctggta

SEQ ID NO: 4757 - DNA, 15 bp, Homo sapiens
tgggagaggtctggt

SEQ ID NO: 4758 - DNA, 15 bp, Homo sapiens
ctgggagaggtctgg

SEQ ID NO: 4759 - DNA, 15 bp, Homo sapiens
tctgggagaggtctg

SEQ ID NO: 4760 - DNA, 15 bp, Homo sapiens
atctgggagaggtct

SEQ ID NO: 4761 - DNA, 15 bp, Homo sapiens
tatctgggagaggtc

SEQ ID NO: 4762 - DNA, 15 bp, Homo sapiens
ctatctgggagaggt

SEQ ID NO: 4763 - DNA, 15 bp, Homo sapiens
tctatctgggagagg

SEQ ID NO: 4764 - DNA, 15 bp, Homo sapiens
atctatctgggagag

SEQ ID NO: 4765 - DNA, 15 bp, Homo sapiens
catctatctgggaga

SEQ ID NO: 4766 - DNA, 15 bp, Homo sapiens
acatctatctgggag

SEQ ID NO: 4767 - DNA, 15 bp, Homo sapiens
aacatctatctggga

SEQ ID NO: 4768 - DNA, 15 bp, Homo sapiens
caacatctatctggg

SEQ ID NO: 4769 - DNA, 15 bp, Homo sapiens
gcaacatctatctgg

SEQ ID NO: 4770 - DNA, 15 bp, Homo sapiens
ggcaacatctatctg

SEQ ID NO: 4771 - DNA, 15 bp, Homo sapiens
cggcaacatctatct

SEQ ID NO: 4772 - DNA, 15 bp, Homo sapiens
gcggcaacatctatc

SEQ ID NO: 4773 - DNA, 15 bp, Homo sapiens
tgcggcaacatctat

SEQ ID NO: 4774 - DNA, 15 bp, Homo sapiens
atgcggcaacatcta

SEQ ID NO: 4775 - DNA, 15 bp, Homo sapiens
catgcggcaacatct

SEQ ID NO: 4776 - DNA, 15 bp, Homo sapiens
ccatgcggcaacatc

SEQ ID NO: 4777 - DNA, 15 bp, Homo sapiens
tccatgcggcaacat

SEQ ID NO: 4778 - DNA, 15 bp, Homo sapiens
ttccatgcggcaaca

SEQ ID NO: 4779 - DNA, 15 bp, Homo sapiens
cttccatgcggcaac

SEQ ID NO: 4780 - DNA, 15 bp, Homo sapiens
tcttccatgcggcaa

SEQ ID NO: 4781 - DNA, 15 bp, Homo sapiens
gtcttccatgcggca

SEQ ID NO: 4782 - DNA, 15 bp, Homo sapiens
tgtcttccatgcggc

SEQ ID NO: 4783 - DNA, 15 bp, Homo sapiens
ctgtcttccatgcgg

SEQ ID NO: 4784 - DNA, 15 bp, Homo sapiens
gctgtcttccatgcg

SEQ ID NO: 4785 - DNA, 15 bp, Homo sapiens
ggctgtcttccatgc

SEQ ID NO: 4786 - DNA, 15 bp, Homo sapiens
cggctgtcttccatg

SEQ ID NO: 4787 - DNA, 15 bp, Homo sapiens
tcggctgtcttccat

SEQ ID NO: 4788 - DNA, 15 bp, Homo sapiens
atcggctgtcttcca

SEQ ID NO: 4789 - DNA, 15 bp, Homo sapiens
gatcggctgtcttcc

SEQ ID NO: 4790 - DNA, 15 bp, Homo sapiens
agatcggctgtcttc

SEQ ID NO: 4791 - DNA, 15 bp, Homo sapiens
tagatcggctgtctt

SEQ ID NO: 4792 - DNA, 15 bp, Homo sapiens
gtagatcggctgtct

SEQ ID NO: 4793 - DNA, 15 bp, Homo sapiens
cgtagatcggctgtc

SEQ ID NO: 4794 - DNA, 15 bp, Homo sapiens
acgtagatcggctgt

SEQ ID NO: 4795 - DNA, 15 bp, Homo sapiens
cacgtagatcggctg

SEQ ID NO: 4796 - DNA, 15 bp, Homo sapiens
tcacgtagatcggct

SEQ ID NO: 4797 - DNA, 15 bp, Homo sapiens
atcacgtagatcggc

SEQ ID NO: 4798 - DNA, 15 bp, Homo sapiens
tatcacgtagatcgg

SEQ ID NO: 4799 - DNA, 15 bp, Homo sapiens
ctatcacgtagatcg

SEQ ID NO: 4800 - DNA, 15 bp, Homo sapiens
tctatcacgtagatc

SEQ ID NO: 4801 - DNA, 15 bp, Homo sapiens
ttctatcacgtagat

SEQ ID NO: 4802 - DNA, 15 bp, Homo sapiens
tttctatcacgtaga

SEQ ID NO: 4803 - DNA, 15 bp, Homo sapiens
ctttctatcacgtag

SEQ ID NO: 4804 - DNA, 15 bp, Homo sapiens
gctttctatcacgta

SEQ ID NO: 4805 - DNA, 15 bp, Homo sapiens
ggctttctatcacgt

SEQ ID NO: 4806 - DNA, 15 bp, Homo sapiens
tggctttctatcacg

SEQ ID NO: 4807 - DNA, 15 bp, Homo sapiens
ttggctttctatcac

SEQ ID NO: 4808 - DNA, 15 bp, Homo sapiens
attggctttctatca

SEQ ID NO: 4809 - DNA, 15 bp, Homo sapiens
tattggctttctatc

SEQ ID NO: 4810 - DNA, 15 bp, Homo sapiens
atattggctttctat

SEQ ID NO: 4811 - DNA, 15 bp, Homo sapiens
aatattggctttcta

SEQ ID NO: 4812 - DNA, 15 bp, Homo sapiens
caatattggctttct

SEQ ID NO: 4813 - DNA, 15 bp, Homo sapiens
gcaatattggctttc

SEQ ID NO: 4814 - DNA, 15 bp, Homo sapiens
tgcaatattggcttt

SEQ ID NO: 4815 - DNA, 15 bp, Homo sapiens
ttgcaatattggctt

SEQ ID NO: 4816 - DNA, 15 bp, Homo sapiens
cttgcaatattggct

SEQ ID NO: 4817 - DNA, 15 bp, Homo sapiens
gcttgcaatattggc

SEQ ID NO: 4818 - DNA, 15 bp, Homo sapiens
tgcttgcaatattgg

SEQ ID NO: 4819 - DNA, 15 bp, Homo sapiens
ctgcttgcaatattg

SEQ ID NO: 4820 - DNA, 15 bp, Homo sapiens
actgcttgcaatatt

SEQ ID NO: 4821 - DNA, 15 bp, Homo sapiens
gactgcttgcaatat

SEQ ID NO: 4822 - DNA, 15 bp, Homo sapiens
cgactgcttgcaata

SEQ ID NO: 4823 - DNA, 15 bp, Homo sapiens
acgactgcttgcaat

SEQ ID NO: 4824 - DNA, 15 bp, Homo sapiens
gacgactgcttgcaa

SEQ ID NO: 4825 - DNA, 15 bp, Homo sapiens
agacgactgcttgca

SEQ ID NO: 4826 - DNA, 15 bp, Homo sapiens
tagacgactgcttgc

SEQ ID NO: 4827 - DNA, 15 bp, Homo sapiens
ttagacgactgcttg

SEQ ID NO: 4828 - DNA, 15 bp, Homo sapiens
tttagacgactgctt

SEQ ID NO: 4829 - DNA, 15 bp, Homo sapiens
ctttagacgactgct

SEQ ID NO: 4830 - DNA, 15 bp, Homo sapiens
cctttagacgactgc

SEQ ID NO: 4831 - DNA, 15 bp, Homo sapiens
tcctttagacgactg

SEQ ID NO: 4832 - DNA, 15 bp, Homo sapiens
ctcctttagacgact

SEQ ID NO: 4833 - DNA, 15 bp, Homo sapiens
actcctttagacgac

SEQ ID NO: 4834 - DNA, 15 bp, Homo sapiens
gactcctttagacga

SEQ ID NO: 4835 - DNA, 15 bp, Homo sapiens
tgactcctttagacg

SEQ ID NO: 4836 - DNA, 15 bp, Homo sapiens
ttgactcctttagac

SEQ ID NO: 4837 - DNA, 15 bp, Homo sapiens
tttgactcctttaga

SEQ ID NO: 4838 - DNA, 15 bp, Homo sapiens
atttgactcctttag

SEQ ID NO: 4839 - DNA, 15 bp, Homo sapiens
catttgactccttta

SEQ ID NO: 4840 - DNA, 15 bp, Homo sapiens
acatttgactccttt

SEQ ID NO: 4841 - DNA, 15 bp, Homo sapiens
cacatttgactcctt

SEQ ID NO: 4842 - DNA, 15 bp, Homo sapiens
acacatttgactcct

SEQ ID NO: 4843 - DNA, 15 bp, Homo sapiens
aacacatttgactcc

SEQ ID NO: 4844 - DNA, 15 bp, Homo sapiens
caacacatttgactc

SEQ ID NO: 4845 - DNA, 15 bp, Homo sapiens
ccaacacatttgact

SEQ ID NO: 4846 - DNA, 15 bp, Homo sapiens
tccaacacatttgac

SEQ ID NO: 4847 - DNA, 15 bp, Homo sapiens
atccaacacatttga

SEQ ID NO: 4848 - DNA, 15 bp, Homo sapiens
aatccaacacatttg

SEQ ID NO: 4849 - DNA, 15 bp, Homo sapiens
aaatccaacacattt

SEQ ID NO: 4850 - DNA, 15 bp, Homo sapiens
caaatccaacacatt

SEQ ID NO: 4851 - DNA, 15 bp, Homo sapiens
tcaaatccaacacat

SEQ ID NO: 4852 - DNA, 15 bp, Homo sapiens
ttcaaatccaacaca

SEQ ID NO: 4853 - DNA, 15 bp, Homo sapiens
gttcaaatccaacac

SEQ ID NO: 4854 - DNA, 15 bp, Homo sapiens
agttcaaatccaaca

SEQ ID NO: 4855 - DNA, 15 bp, Homo sapiens
cagttcaaatccaac

SEQ ID NO: 4856 - DNA, 15 bp, Homo sapiens
ccagttcaaatccaa

SEQ ID NO: 4857 - DNA, 15 bp, Homo sapiens
tccagttcaaatcca

SEQ ID NO: 4858 - DNA, 15 bp, Homo sapiens
atccagttcaaatcc

SEQ ID NO: 4859 - DNA, 15 bp, Homo sapiens
catccagttcaaatc

SEQ ID NO: 4860 - DNA, 15 bp, Homo sapiens
acatccagttcaaat

SEQ ID NO: 4861 - DNA, 15 bp, Homo sapiens
gacatccagttcaaa

SEQ ID NO: 4862 - DNA, 15 bp, Homo sapiens
agacatccagttcaa

SEQ ID NO: 4863 - DNA, 15 bp, Homo sapiens
gagacatccagttca

SEQ ID NO: 4864 - DNA, 15 bp, Homo sapiens
tgagacatccagttc

SEQ ID NO: 4865 - DNA, 15 bp, Homo sapiens
atgagacatccagtt

SEQ ID NO: 4866 - DNA, 15 bp, Homo sapiens
aatgagacatccagt

SEQ ID NO: 4867 - DNA, 15 bp, Homo sapiens
aaatgagacatccag

SEQ ID NO: 4868 - DNA, 15 bp, Homo sapiens
gaaatgagacatcca

SEQ ID NO: 4869 - DNA, 15 bp, Homo sapiens
agaaatgagacatcc

SEQ ID NO: 4870 - DNA, 15 bp, Homo sapiens
aagaaatgagacatc

SEQ ID NO: 4871 - DNA, 15 bp, Homo sapiens
aaagaaatgagacat

SEQ ID NO: 4872 - DNA, 15 bp, Homo sapiens
caaagaaatgagaca

SEQ ID NO: 4873 - DNA, 15 bp, Homo sapiens
ccaaagaaatgagac

SEQ ID NO: 4874 - DNA, 15 bp, Homo sapiens
accaaagaaatgaga

SEQ ID NO: 4875 - DNA, 15 bp, Homo sapiens
caccaaagaaatgag

SEQ ID NO: 4876 - DNA, 15 bp, Homo sapiens
tcaccaaagaaatga

SEQ ID NO: 4877 - DNA, 15 bp, Homo sapiens
ttcaccaaagaaatg

SEQ ID NO: 4878 - DNA, 15 bp, Homo sapiens
cttcaccaaagaaat

SEQ ID NO: 4879 - DNA, 15 bp, Homo sapiens
tcttcaccaaagaaa

SEQ ID NO: 4880 - DNA, 15 bp, Homo sapiens
gtcttcaccaaagaa

SEQ ID NO: 4881 - DNA, 15 bp, Homo sapiens
tgtcttcaccaaaga

SEQ ID NO: 4882 - DNA, 15 bp, Homo sapiens
gtgtcttcaccaaag

SEQ ID NO: 4883 - DNA, 15 bp, Homo sapiens
agtgtcttcaccaaa

SEQ ID NO: 4884 - DNA, 15 bp, Homo sapiens
cagtgtcttcaccaa

SEQ ID NO: 4885 - DNA, 15 bp, Homo sapiens
ccagtgtcttcacca

SEQ ID NO: 4886 - DNA, 15 bp, Homo sapiens
tccagtgtcttcacc

SEQ ID NO: 4887 - DNA, 15 bp, Homo sapiens
ttccagtgtcttcac

SEQ ID NO: 4888 - DNA, 15 bp, Homo sapiens
tttccagtgtcttca

SEQ ID NO: 4889 - DNA, 15 bp, Homo sapiens
gtttccagtgtcttc

SEQ ID NO: 4890 - DNA, 15 bp, Homo sapiens
tgtttccagtgtctt

SEQ ID NO: 4891 - DNA, 15 bp, Homo sapiens
ttgtttccagtgtct

SEQ ID NO: 4892 - DNA, 15 bp, Homo sapiens
gttgtttccagtgtc

SEQ ID NO: 4893 - DNA, 15 bp, Homo sapiens
agttgtttccagtgt

SEQ ID NO: 4894 - DNA, 15 bp, Homo sapiens
aagttgtttccagtg

SEQ ID NO: 4895 - DNA, 15 bp, Homo sapiens
gaagttgtttccagt

SEQ ID NO: 4896 - DNA, 15 bp, Homo sapiens
ggaagttgtttccag

SEQ ID NO: 4897 - DNA, 15 bp, Homo sapiens
tggaagttgtttcca

SEQ ID NO: 4898 - DNA, 15 bp, Homo sapiens
ctggaagttgtttcc

SEQ ID NO: 4899 - DNA, 15 bp, Homo sapiens
cctggaagttgtttc

SEQ ID NO: 4900 - DNA, 15 bp, Homo sapiens
acctggaagttgttt

SEQ ID NO: 4901 - DNA, 15 bp, Homo sapiens
aacctggaagttgtt

SEQ ID NO: 4902 - DNA, 15 bp, Homo sapiens
aaacctggaagttgt

SEQ ID NO: 4903 - DNA, 15 bp, Homo sapiens
gaaacctggaagttg

SEQ ID NO: 4904 - DNA, 15 bp, Homo sapiens
tgaaacctggaagtt

SEQ ID NO: 4905 - DNA, 15 bp, Homo sapiens
atgaaacctggaagt

SEQ ID NO: 4906 - DNA, 15 bp, Homo sapiens
gatgaaacctggaag

SEQ ID NO: 4907 - DNA, 15 bp, Homo sapiens
tgatgaaacctggaa

SEQ ID NO: 4908 - DNA, 15 bp, Homo sapiens
ttgatgaaacctgga

SEQ ID NO: 4909 - DNA, 15 bp, Homo sapiens
attgatgaaacctgg

SEQ ID NO: 4910 - DNA, 15 bp, Homo sapiens
aattgatgaaacctg

SEQ ID NO: 4911 - DNA, 15 bp, Homo sapiens
caattgatgaaacct

SEQ ID NO: 4912 - DNA, 15 bp, Homo sapiens
gcaattgatgaaacc

SEQ ID NO: 4913 - DNA, 15 bp, Homo sapiens
agcaattgatgaaac

SEQ ID NO: 4914 - DNA, 15 bp, Homo sapiens
gagcaattgatgaaa

SEQ ID NO: 4915 - DNA, 15 bp, Homo sapiens
ggagcaattgatgaa

SEQ ID NO: 4916 - DNA, 15 bp, Homo sapiens
aggagcaattgatga

SEQ ID NO: 4917 - DNA, 15 bp, Homo sapiens
taggagcaattgatg

SEQ ID NO: 4918 - DNA, 15 bp, Homo sapiens
ataggagcaattgat

SEQ ID NO: 4919 - DNA, 15 bp, Homo sapiens
gataggagcaattga

SEQ ID NO: 4920 - DNA, 15 bp, Homo sapiens
tgataggagcaattg

SEQ ID NO: 4921 - DNA, 15 bp, Homo sapiens
gtgataggagcaatt

SEQ ID NO: 4922 - DNA, 15 bp, Homo sapiens
agtgataggagcaat

SEQ ID NO: 4923 - DNA, 15 bp, Homo sapiens
gagtgataggagcaa

SEQ ID NO: 4924 - DNA, 15 bp, Homo sapiens
tgagtgataggagca

SEQ ID NO: 4925 - DNA, 15 bp, Homo sapiens
ttgagtgataggagc

SEQ ID NO: 4926 - DNA, 15 bp, Homo sapiens
gttgagtgataggag

SEQ ID NO: 4927 - DNA, 15 bp, Homo sapiens
cgttgagtgatagga

SEQ ID NO: 4928 - DNA, 15 bp, Homo sapiens
acgttgagtgatagg

SEQ ID NO: 4929 - DNA, 15 bp, Homo sapiens
aacgttgagtgatag

SEQ ID NO: 4930 - DNA, 15 bp, Homo sapiens
caacgttgagtgata

SEQ ID NO: 4931 - DNA, 15 bp, Homo sapiens
gcaacgttgagtgat

SEQ ID NO: 4932 - DNA, 15 bp, Homo sapiens
agcaacgttgagtga

SEQ ID NO: 4933 - DNA, 15 bp, Homo sapiens
tagcaacgttgagtg

SEQ ID NO: 4934 - DNA, 15 bp, Homo sapiens
atagcaacgttgagt

SEQ ID NO: 4935 - DNA, 15 bp, Homo sapiens
gatagcaacgttgag

SEQ ID NO: 4936 - DNA, 15 bp, Homo sapiens
agatagcaacgttga

SEQ ID NO: 4937 - DNA, 15 bp, Homo sapiens
aagatagcaacgttg

SEQ ID NO: 4938 - DNA, 15 bp, Homo sapiens
taagatagcaacgtt

SEQ ID NO: 4939 - DNA, 15 bp, Homo sapiens
gtaagatagcaacgt

SEQ ID NO: 4940 - DNA, 15 bp, Homo sapiens
agtaagatagcaacg

SEQ ID NO: 4941 - DNA, 15 bp, Homo sapiens
cagtaagatagcaac

SEQ ID NO: 4942 - DNA, 15 bp, Homo sapiens
tcagtaagatagcaa

SEQ ID NO: 4943 - DNA, 15 bp, Homo sapiens
ttcagtaagatagca

SEQ ID NO: 4944 - DNA, 15 bp, Homo sapiens
gttcagtaagatagc

SEQ ID NO: 4945 - DNA, 15 bp, Homo sapiens
agttcagtaagatag

SEQ ID NO: 4946 - DNA, 15 bp, Homo sapiens
aagttcagtaagata

SEQ ID NO: 4947 - DNA, 15 bp, Homo sapiens
caagttcagtaagat

SEQ ID NO: 4948 - DNA, 15 bp, Homo sapiens
acaagttcagtaaga

SEQ ID NO: 4949 - DNA, 15 bp, Homo sapiens
aacaagttcagtaag

SEQ ID NO: 4950 - DNA, 15 bp, Homo sapiens
gaacaagttcagtaa

SEQ ID NO: 4951 - DNA, 15 bp, Homo sapiens
ggaacaagttcagta

SEQ ID NO: 4952 - DNA, 15 bp, Homo sapiens
gggaacaagttcagt

SEQ ID NO: 4953 - DNA, 15 bp, Homo sapiens
ggggaacaagttcag

SEQ ID NO: 4954 - DNA, 15 bp, Homo sapiens
tggggaacaagttca

SEQ ID NO: 4955 - DNA, 15 bp, Homo sapiens
ctggggaacaagttc

SEQ ID NO: 4956 - DNA, 15 bp, Homo sapiens
gctggggaacaagtt

SEQ ID NO: 4957 - DNA, 15 bp, Homo sapiens
ggctggggaacaagt

SEQ ID NO: 4958 - DNA, 15 bp, Homo sapiens
aggctggggaacaag

SEQ ID NO: 4959 - DNA, 15 bp, Homo sapiens
aaggctggggaacaa

SEQ ID NO: 4960 - DNA, 15 bp, Homo sapiens
taaggctggggaaca

SEQ ID NO: 4961 - DNA, 15 bp, Homo sapiens
gtaaggctggggaac

SEQ ID NO: 4962 - DNA, 15 bp, Homo sapiens
ggtaaggctggggaa

SEQ ID NO: 4963 - DNA, 15 bp, Homo sapiens
gggtaaggctgggga

SEQ ID NO: 4964 - DNA, 15 bp, Homo sapiens
tgggtaaggctgggg

SEQ ID NO: 4965 - DNA, 15 bp, Homo sapiens
gtgggtaaggctggg

SEQ ID NO: 4966 - DNA, 15 bp, Homo sapiens
agtgggtaaggctgg

SEQ ID NO: 4967 - DNA, 15 bp, Homo sapiens
cagtgggtaaggctg

SEQ ID NO: 4968 - DNA, 15 bp, Homo sapiens
tcagtgggtaaggct

SEQ ID NO: 4969 - DNA, 15 bp, Homo sapiens
atcagtgggtaaggc

SEQ ID NO: 4970 - DNA, 15 bp, Homo sapiens
catcagtgggtaagg

SEQ ID NO: 4971 - DNA, 15 bp, Homo sapiens
ccatcagtgggtaag

SEQ ID NO: 4972 - DNA, 15 bp, Homo sapiens
tccatcagtgggtaa

SEQ ID NO: 4973 - DNA, 15 bp, Homo sapiens
ttccatcagtgggta

SEQ ID NO: 4974 - DNA, 15 bp, Homo sapiens
attccatcagtgggt

SEQ ID NO: 4975 - DNA, 15 bp, Homo sapiens
cattccatcagtggg

SEQ ID NO: 4976 - DNA, 15 bp, Homo sapiens
tcattccatcagtgg

SEQ ID NO: 4977 - DNA, 15 bp, Homo sapiens
atcattccatcagtg

SEQ ID NO: 4978 - DNA, 15 bp, Homo sapiens
gatcattccatcagt

SEQ ID NO: 4979 - DNA, 15 bp, Homo sapiens
ggatcattccatcag

SEQ ID NO: 4980 - DNA, 15 bp, Homo sapiens
tggatcattccatca

SEQ ID NO: 4981 - DNA, 15 bp, Homo sapiens
ctggatcattccatc

SEQ ID NO: 4982 - DNA, 15 bp, Homo sapiens
tctggatcattccat

SEQ ID NO: 4983 - DNA, 15 bp, Homo sapiens
ttctggatcattcca

SEQ ID NO: 4984 - DNA, 15 bp, Homo sapiens
attctggatcattcc

SEQ ID NO: 4985 - DNA, 15 bp, Homo sapiens
cattctggatcattc

SEQ ID NO: 4986 - DNA, 15 bp, Homo sapiens
ccattctggatcatt

SEQ ID NO: 4987 - DNA, 15 bp, Homo sapiens
tccattctggatcat

SEQ ID NO: 4988 - DNA, 15 bp, Homo sapiens
ttccattctggatca

SEQ ID NO: 4989 - DNA, 15 bp, Homo sapiens
cttccattctggatc

SEQ ID NO: 4990 - DNA, 15 bp, Homo sapiens
tcttccattctggat

SEQ ID NO: 4991 - DNA, 15 bp, Homo sapiens
gtcttccattctgga

SEQ ID NO: 4992 - DNA, 15 bp, Homo sapiens
tgtcttccattctgg

SEQ ID NO: 4993 - DNA, 15 bp, Homo sapiens
ttgtcttccattctg

SEQ ID NO: 4994 - DNA, 15 bp, Homo sapiens
cttgtcttccattct

SEQ ID NO: 4995 - DNA, 15 bp, Homo sapiens
tcttgtcttccattc

SEQ ID NO: 4996 - DNA, 15 bp, Homo sapiens
gtcttgtcttccatt

SEQ ID NO: 4997 - DNA, 15 bp, Homo sapiens
tgtcttgtcttccat

SEQ ID NO: 4998 - DNA, 15 bp, Homo sapiens
gtgtcttgtcttcca

SEQ ID NO: 4999 - DNA, 15 bp, Homo sapiens
ggtgtcttgtcttcc

SEQ ID NO: 5000 - DNA, 15 bp, Homo sapiens
tggtgtcttgtcttc

SEQ ID NO: 5001 - DNA, 15 bp, Homo sapiens
ttggtgtcttgtctt

SEQ ID NO: 5002 - DNA, 15 bp, Homo sapiens
attggtgtcttgtct

SEQ ID NO: 5003 - DNA, 15 bp, Homo sapiens
cattggtgtcttgtc

SEQ ID NO: 5004 - DNA, 15 bp, Homo sapiens
acattggtgtcttgt

SEQ ID NO: 5005 - DNA, 15 bp, Homo sapiens
tacattggtgtcttg

SEQ ID NO: 5006 - DNA, 15 bp, Homo sapiens
gtacattggtgtctt

SEQ ID NO: 5007 - DNA, 15 bp, Homo sapiens
tgtacattggtgtct

SEQ ID NO: 5008 - DNA, 15 bp, Homo sapiens
atgtacattggtgtc

SEQ ID NO: 5009 - DNA, 15 bp, Homo sapiens
catgtacattggtgt

SEQ ID NO: 5010 - DNA, 15 bp, Homo sapiens
tcatgtacattggtg

SEQ ID NO: 5011 - DNA, 15 bp, Homo sapiens
gtcatgtacattggt

SEQ ID NO: 5012 - DNA, 15 bp, Homo sapiens
ggtcatgtacattgg

SEQ ID NO: 5013 - DNA, 15 bp, Homo sapiens
gggtcatgtacattg

SEQ ID NO: 5014 - DNA, 15 bp, Homo sapiens
agggtcatgtacatt

SEQ ID NO: 5015 - DNA, 15 bp, Homo sapiens
cagggtcatgtacat

SEQ ID NO: 5016 - DNA, 15 bp, Homo sapiens
ccagggtcatgtaca

SEQ ID NO: 5017 - DNA, 15 bp, Homo sapiens
cccagggtcatgtac

SEQ ID NO: 5018 - DNA, 15 bp, Homo sapiens
ccccagggtcatgta

SEQ ID NO: 5019 - DNA, 15 bp, Homo sapiens
cccccagggtcatgt

SEQ ID NO: 5020 - DNA, 15 bp, Homo sapiens
tcccccagggtcatg

SEQ ID NO: 5021 - DNA, 15 bp, Homo sapiens
ctcccccagggtcat

SEQ ID NO: 5022 - DNA, 15 bp, Homo sapiens
cctcccccagggtca

SEQ ID NO: 5023 - DNA, 15 bp, Homo sapiens
gcctcccccagggtc

SEQ ID NO: 5024 - DNA, 15 bp, Homo sapiens
agcctcccccagggt

SEQ ID NO: 5025 - DNA, 15 bp, Homo sapiens
cagcctcccccaggg

SEQ ID NO: 5026 - DNA, 15 bp, Homo sapiens
acagcctcccccagg

SEQ ID NO: 5027 - DNA, 15 bp, Homo sapiens
aacagcctcccccag

SEQ ID NO: 5028 - DNA, 15 bp, Homo sapiens
aaacagcctccccca

SEQ ID NO: 5029 - DNA, 15 bp, Homo sapiens
gaaacagcctccccc

SEQ ID NO: 5030 - DNA, 15 bp, Homo sapiens
agaaacagcctcccc

SEQ ID NO: 5031 - DNA, 15 bp, Homo sapiens
aagaaacagcctccc

SEQ ID NO: 5032 - DNA, 15 bp, Homo sapiens
taagaaacagcctcc

SEQ ID NO: 5033 - DNA, 15 bp, Homo sapiens
ttaagaaacagcctc

SEQ ID NO: 5034 - DNA, 15 bp, Homo sapiens
tttaagaaacagcct

SEQ ID NO: 5035 - DNA, 15 bp, Homo sapiens
atttaagaaacagcc

SEQ ID NO: 5036 - DNA, 15 bp, Homo sapiens
gatttaagaaacagc

SEQ ID NO: 5037 - DNA, 15 bp, Homo sapiens
agatttaagaaacag

SEQ ID NO: 5038 - DNA, 15 bp, Homo sapiens
tagatttaagaaaca

SEQ ID NO: 5039 - DNA, 15 bp, Homo sapiens
gtagatttaagaaac

SEQ ID NO: 5040 - DNA, 15 bp, Homo sapiens
tgtagatttaagaaa

SEQ ID NO: 5041 - DNA, 15 bp, Homo sapiens
ctgtagatttaagaa

SEQ ID NO: 5042 - DNA, 15 bp, Homo sapiens
tctgtagatttaaga

SEQ ID NO: 5043 - DNA, 15 bp, Homo sapiens
gtctgtagatttaag

SEQ ID NO: 5044 - DNA, 15 bp, Homo sapiens
agtctgtagatttaa

SEQ ID NO: 5045 - DNA, 15 bp, Homo sapiens
cagtctgtagattta

SEQ ID NO: 5046 - DNA, 15 bp, Homo sapiens
acagtctgtagattt

SEQ ID NO: 5047 - DNA, 15 bp, Homo sapiens
aacagtctgtagatt

SEQ ID NO: 5048 - DNA, 15 bp, Homo sapiens
caacagtctgtagat

SEQ ID NO: 5049 - DNA, 15 bp, Homo sapiens
ccaacagtctgtaga

SEQ ID NO: 5050 - DNA, 15 bp, Homo sapiens
accaacagtctgtag

SEQ ID NO: 5051 - DNA, 15 bp, Homo sapiens
caccaacagtctgta

SEQ ID NO: 5052 - DNA, 15 bp, Homo sapiens
tcaccaacagtctgt

SEQ ID NO: 5053 - DNA, 15 bp, Homo sapiens
gtcaccaacagtctg

SEQ ID NO: 5054 - DNA, 15 bp, Homo sapiens
ggtcaccaacagtct

SEQ ID NO: 5055 - DNA, 15 bp, Homo sapiens
aggtcaccaacagtc

SEQ ID NO: 5056 - DNA, 15 bp, Homo sapiens
caggtcaccaacagt

SEQ ID NO: 5057 - DNA, 15 bp, Homo sapiens
tcaggtcaccaacag

SEQ ID NO: 5058 - DNA, 15 bp, Homo sapiens
ctcaggtcaccaaca

SEQ ID NO: 5059 - DNA, 15 bp, Homo sapiens
gctcaggtcaccaac

SEQ ID NO: 5060 - DNA, 15 bp, Homo sapiens
ggctcaggtcaccaa

SEQ ID NO: 5061 - DNA, 15 bp, Homo sapiens
gggctcaggtcacca

SEQ ID NO: 5062 - DNA, 15 bp, Homo sapiens
ggggctcaggtcacc

SEQ ID NO: 5063 - DNA, 15 bp, Homo sapiens
tggggctcaggtcac

SEQ ID NO: 5064 - DNA, 15 bp, Homo sapiens
atggggctcaggtca

SEQ ID NO: 5065 - DNA, 15 bp, Homo sapiens
catggggctcaggtc

SEQ ID NO: 5066 - DNA, 15 bp, Homo sapiens
acatggggctcaggt

SEQ ID NO: 5067 - DNA, 15 bp, Homo sapiens
gacatggggctcagg

SEQ ID NO: 5068 - DNA, 15 bp, Homo sapiens
tgacatggggctcag

SEQ ID NO: 5069 - DNA, 15 bp, Homo sapiens
gtgacatggggctca

SEQ ID NO: 5070 - DNA, 15 bp, Homo sapiens
ggtgacatggggctc

SEQ ID NO: 5071 - DNA, 15 bp, Homo sapiens
tggtgacatggggct

SEQ ID NO: 5072 - DNA, 15 bp, Homo sapiens
ttggtgacatggggc

SEQ ID NO: 5073 - DNA, 15 bp, Homo sapiens
tttggtgacatgggg

SEQ ID NO: 5074 - DNA, 15 bp, Homo sapiens
ctttggtgacatggg

SEQ ID NO: 5075 - DNA, 15 bp, Homo sapiens
cctttggtgacatgg

SEQ ID NO: 5076 - DNA, 15 bp, Homo sapiens
gcctttggtgacatg

SEQ ID NO: 5077 - DNA, 15 bp, Homo sapiens
agcctttggtgacat

SEQ ID NO: 5078 - DNA, 15 bp, Homo sapiens
aagcctttggtgaca

SEQ ID NO: 5079 - DNA, 15 bp, Homo sapiens
aaagcctttggtgac

SEQ ID NO: 5080 - DNA, 15 bp, Homo sapiens
gaaagcctttggtga

SEQ ID NO: 5081 - DNA, 15 bp, Homo sapiens
ggaaagcctttggtg

SEQ ID NO: 5082 - DNA, 15 bp, Homo sapiens
aggaaagcctttggt

SEQ ID NO: 5083 - DNA, 15 bp, Homo sapiens
caggaaagcctttgg

SEQ ID NO: 5084 - DNA, 15 bp, Homo sapiens
ccaggaaagcctttg

SEQ ID NO: 5085 - DNA, 15 bp, Homo sapiens
tccaggaaagccttt

SEQ ID NO: 5086 - DNA, 15 bp, Homo sapiens
ctccaggaaagcctt

SEQ ID NO: 5087 - DNA, 15 bp, Homo sapiens
tctccaggaaagcct

SEQ ID NO: 5088 - DNA, 15 bp, Homo sapiens
ttctccaggaaagcc

SEQ ID NO: 5089 - DNA, 15 bp, Homo sapiens
cttctccaggaaagc

SEQ ID NO: 5090 - DNA, 15 bp, Homo sapiens
gcttctccaggaaag

SEQ ID NO: 5091 - DNA, 15 bp, Homo sapiens
ggcttctccaggaaa

SEQ ID NO: 5092 - DNA, 15 bp, Homo sapiens
aggcttctccaggaa

SEQ ID NO: 5093 - DNA, 15 bp, Homo sapiens
gaggcttctccagga

SEQ ID NO: 5094 - DNA, 15 bp, Homo sapiens
ggaggcttctccagg

SEQ ID NO: 5095 - DNA, 15 bp, Homo sapiens
aggaggcttctccag

SEQ ID NO: 5096 - DNA, 15 bp, Homo sapiens
taggaggcttctcca

SEQ ID NO: 5097 - DNA, 15 bp, Homo sapiens
ctaggaggcttctcc

SEQ ID NO: 5098 - DNA, 15 bp, Homo sapiens
tctaggaggcttctc

SEQ ID NO: 5099 - DNA, 15 bp, Homo sapiens
gtctaggaggcttct

SEQ ID NO: 5100 - DNA, 15 bp, Homo sapiens
ggtctaggaggcttc

SEQ ID NO: 5101 - DNA, 15 bp, Homo sapiens
tggtctaggaggctt

SEQ ID NO: 5102 - DNA, 15 bp, Homo sapiens
ctggtctaggaggct

SEQ ID NO: 5103 - DNA, 15 bp, Homo sapiens
actggtctaggaggc

SEQ ID NO: 5104 - DNA, 15 bp, Homo sapiens
gactggtctaggagg

SEQ ID NO: 5105 - DNA, 15 bp, Homo sapiens
agactggtctaggag

SEQ ID NO: 5106 - DNA, 15 bp, Homo sapiens
aagactggtctagga

SEQ ID NO: 5107 - DNA, 15 bp, Homo sapiens
caagactggtctagg

SEQ ID NO: 5108 - DNA, 15 bp, Homo sapiens
tcaagactggtctag

SEQ ID NO: 5109 - DNA, 15 bp, Homo sapiens
gtcaagactggtcta

SEQ ID NO: 5110 - DNA, 15 bp, Homo sapiens
tgtcaagactggtct

SEQ ID NO: 5111 - DNA, 15 bp, Homo sapiens
ttgtcaagactggtc

SEQ ID NO: 5112 - DNA, 15 bp, Homo sapiens
tttgtcaagactggt

SEQ ID NO: 5113 - DNA, 15 bp, Homo sapiens
ctttgtcaagactgg

SEQ ID NO: 5114 - DNA, 15 bp, Homo sapiens
cctttgtcaagactg

SEQ ID NO: 5115 - DNA, 15 bp, Homo sapiens
gcctttgtcaagact

SEQ ID NO: 5116 - DNA, 15 bp, Homo sapiens
agcctttgtcaagac

SEQ ID NO: 5117 - DNA, 15 bp, Homo sapiens
gagcctttgtcaaga

SEQ ID NO: 5118 - DNA, 15 bp, Homo sapiens
tgagcctttgtcaag

SEQ ID NO: 5119 - DNA, 15 bp, Homo sapiens
gtgagcctttgtcaa

SEQ ID NO: 5120 - DNA, 15 bp, Homo sapiens
agtgagcctttgtca

SEQ ID NO: 5121 - DNA, 15 bp, Homo sapiens
gagtgagcctttgtc

SEQ ID NO: 5122 - DNA, 15 bp, Homo sapiens
tgagtgagcctttgt

SEQ ID NO: 5123 - DNA, 15 bp, Homo sapiens
atgagtgagcctttg

SEQ ID NO: 5124 - DNA, 15 bp, Homo sapiens
aatgagtgagccttt

SEQ ID NO: 5125 - DNA, 15 bp, Homo sapiens
gaatgagtgagcctt

SEQ ID NO: 5126 - DNA, 15 bp, Homo sapiens
ggaatgagtgagcct

SEQ ID NO: 5127 - DNA, 15 bp, Homo sapiens
cggaatgagtgagcc

SEQ ID NO: 5128 - DNA, 15 bp, Homo sapiens
acggaatgagtgagc

SEQ ID NO: 5129 - DNA, 15 bp, Homo sapiens
cacggaatgagtgag

SEQ ID NO: 5130 - DNA, 15 bp, Homo sapiens
ccacggaatgagtga

SEQ ID NO: 5131 - DNA, 15 bp, Homo sapiens
tccacggaatgagtg

SEQ ID NO: 5132 - DNA, 15 bp, Homo sapiens
atccacggaatgagt

SEQ ID NO: 5133 - DNA, 15 bp, Homo sapiens
tatccacggaatgag

SEQ ID NO: 5134 - DNA, 15 bp, Homo sapiens
atatccacggaatga

SEQ ID NO: 5135 - DNA, 15 bp, Homo sapiens
aatatccacggaatg

SEQ ID NO: 5136 - DNA, 15 bp, Homo sapiens
aaatatccacggaat

SEQ ID NO: 5137 - DNA, 15 bp, Homo sapiens
taaatatccacggaa

SEQ ID NO: 5138 - DNA, 15 bp, Homo sapiens
ataaatatccacgga

SEQ ID NO: 5139 - DNA, 15 bp, Homo sapiens
aataaatatccacgg

SEQ ID NO: 5140 - DNA, 15 bp, Homo sapiens
caataaatatccacg

SEQ ID NO: 5141 - DNA, 15 bp, Homo sapiens
ccaataaatatccac

SEQ ID NO: 5142 - DNA, 15 bp, Homo sapiens
cccaataaatatcca

SEQ ID NO: 5143 - DNA, 15 bp, Homo sapiens
gcccaataaatatcc

SEQ ID NO: 5144 - DNA, 15 bp, Homo sapiens
tgcccaataaatatc

SEQ ID NO: 5145 - DNA, 15 bp, Homo sapiens
gtgcccaataaatat

SEQ ID NO: 5146 - DNA, 15 bp, Homo sapiens
ggtgcccaataaata

SEQ ID NO: 5147 - DNA, 15 bp, Homo sapiens
aggtgcccaataaat

SEQ ID NO: 5148 - DNA, 15 bp, Homo sapiens
taggtgcccaataaa

SEQ ID NO: 5149 - DNA, 15 bp, Homo sapiens
ataggtgcccaataa

SEQ ID NO: 5150 - DNA, 15 bp, Homo sapiens
aataggtgcccaata

SEQ ID NO: 5151 - DNA, 15 bp, Homo sapiens
taataggtgcccaat

SEQ ID NO: 5152 - DNA, 15 bp, Homo sapiens
ataataggtgcccaa

SEQ ID NO: 5153 - DNA, 15 bp, Homo sapiens
cataataggtgccca

SEQ ID NO: 5154 - DNA, 15 bp, Homo sapiens
tcataataggtgccc

SEQ ID NO: 5155 - DNA, 15 bp, Homo sapiens
ctcataataggtgcc

SEQ ID NO: 5156 - DNA, 15 bp, Homo sapiens
actcataataggtgc

SEQ ID NO: 5157 - DNA, 15 bp, Homo sapiens
aactcataataggtg

SEQ ID NO: 5158 - DNA, 15 bp, Homo sapiens
gaactcataataggt

SEQ ID NO: 5159 - DNA, 15 bp, Homo sapiens
agaactcataatagg

SEQ ID NO: 5160 - DNA, 15 bp, Homo sapiens
cagaactcataatag

SEQ ID NO: 5161 - DNA, 15 bp, Homo sapiens
gcagaactcataata

SEQ ID NO: 5162 - DNA, 15 bp, Homo sapiens
ggcagaactcataat

SEQ ID NO: 5163 - DNA, 15 bp, Homo sapiens
gggcagaactcataa

SEQ ID NO: 5164 - DNA, 15 bp, Homo sapiens
ggggcagaactcata

SEQ ID NO: 5165 - DNA, 15 bp, Homo sapiens
tggggcagaactcat

SEQ ID NO: 5166 - DNA, 15 bp, Homo sapiens
atggggcagaactca

SEQ ID NO: 5167 - DNA, 15 bp, Homo sapiens
catggggcagaactc

SEQ ID NO: 5168 - DNA, 15 bp, Homo sapiens
acatggggcagaact

SEQ ID NO: 5169 - DNA, 15 bp, Homo sapiens
cacatggggcagaac

SEQ ID NO: 5170 - DNA, 15 bp, Homo sapiens
ccacatggggcagaa

SEQ ID NO: 5171 - DNA, 15 bp, Homo sapiens
cccacatggggcaga

SEQ ID NO: 5172 - DNA, 15 bp, Homo sapiens
ccccacatggggcag

SEQ ID NO: 5173 - DNA, 15 bp, Homo sapiens
accccacatggggca

SEQ ID NO: 5174 - DNA, 15 bp, Homo sapiens
caccccacatggggc

SEQ ID NO: 5175 - DNA, 15 bp, Homo sapiens
gcaccccacatgggg

SEQ ID NO: 5176 - DNA, 15 bp, Homo sapiens
agcaccccacatggg

SEQ ID NO: 5177 - DNA, 15 bp, Homo sapiens
cagcaccccacatgg

SEQ ID NO: 5178 - DNA, 15 bp, Homo sapiens
ccagcaccccacatg

SEQ ID NO: 5179 - DNA, 15 bp, Homo sapiens
tccagcaccccacat

SEQ ID NO: 5180 - DNA, 15 bp, Homo sapiens
ttccagcaccccaca

SEQ ID NO: 5181 - DNA, 15 bp, Homo sapiens
attccagcaccccac

SEQ ID NO: 5182 - DNA, 15 bp, Homo sapiens
gattccagcacccca

SEQ ID NO: 5183 - DNA, 15 bp, Homo sapiens
tgattccagcacccc

SEQ ID NO: 5184 - DNA, 15 bp, Homo sapiens
gtgattccagcaccc

SEQ ID NO: 5185 - DNA, 15 bp, Homo sapiens
tgtgattccagcacc

SEQ ID NO: 5186 - DNA, 15 bp, Homo sapiens
ctgtgattccagcac

SEQ ID NO: 5187 - DNA, 15 bp, Homo sapiens
actgtgattccagca

SEQ ID NO: 5188 - DNA, 15 bp, Homo sapiens
tactgtgattccagc

SEQ ID NO: 5189 - DNA, 15 bp, Homo sapiens
ctactgtgattccag

SEQ ID NO: 5190 - DNA, 15 bp, Homo sapiens
actactgtgattcca

SEQ ID NO: 5191 - DNA, 15 bp, Homo sapiens
cactactgtgattcc

SEQ ID NO: 5192 - DNA, 15 bp, Homo sapiens
tcactactgtgattc

SEQ ID NO: 5193 - DNA, 15 bp, Homo sapiens
gtcactactgtgatt

SEQ ID NO: 5194 - DNA, 15 bp, Homo sapiens
tgtcactactgtgat

SEQ ID NO: 5195 - DNA, 15 bp, Homo sapiens
ttgtcactactgtga

SEQ ID NO: 5196 - DNA, 15 bp, Homo sapiens
gttgtcactactgtg

SEQ ID NO: 5197 - DNA, 15 bp, Homo sapiens
cgttgtcactactgt

SEQ ID NO: 5198 - DNA, 15 bp, Homo sapiens
tcgttgtcactactg

SEQ ID NO: 5199 - DNA, 15 bp, Homo sapiens
gtcgttgtcactact

SEQ ID NO: 5200 - DNA, 15 bp, Homo sapiens
tgtcgttgtcactac

SEQ ID NO: 5201 - DNA, 15 bp, Homo sapiens
ctgtcgttgtcacta

SEQ ID NO: 5202 - DNA, 15 bp, Homo sapiens
tctgtcgttgtcact

SEQ ID NO: 5203 - DNA, 15 bp, Homo sapiens
atctgtcgttgtcac

SEQ ID NO: 5204 - DNA, 15 bp, Homo sapiens
catctgtcgttgtca

SEQ ID NO: 5205 - DNA, 15 bp, Homo sapiens
tcatctgtcgttgtc

SEQ ID NO: 5206 - DNA, 15 bp, Homo sapiens
ctcatctgtcgttgt

SEQ ID NO: 5207 - DNA, 15 bp, Homo sapiens
cctcatctgtcgttg

SEQ ID NO: 5208 - DNA, 15 bp, Homo sapiens
acctcatctgtcgtt

SEQ ID NO: 5209 - DNA, 15 bp, Homo sapiens
aacctcatctgtcgt

SEQ ID NO: 5210 - DNA, 15 bp, Homo sapiens
gaacctcatctgtcg

SEQ ID NO: 5211 - DNA, 15 bp, Homo sapiens
ggaacctcatctgtc

SEQ ID NO: 5212 - DNA, 15 bp, Homo sapiens
aggaacctcatctgt

SEQ ID NO: 5213 - DNA, 15 bp, Homo sapiens
caggaacctcatctg

SEQ ID NO: 5214 - DNA, 15 bp, Homo sapiens
acaggaacctcatct

SEQ ID NO: 5215 - DNA, 15 bp, Homo sapiens
gacaggaacctcatc

SEQ ID NO: 5216 - DNA, 15 bp, Homo sapiens
ggacaggaacctcat

SEQ ID NO: 5217 - DNA, 15 bp, Homo sapiens
aggacaggaacctca

SEQ ID NO: 5218 - DNA, 15 bp, Homo sapiens
gaggacaggaacctc

SEQ ID NO: 5219 - DNA, 15 bp, Homo sapiens
tgaggacaggaacct

SEQ ID NO: 5220 - DNA, 15 bp, Homo sapiens
ctgaggacaggaacc

SEQ ID NO: 5221 - DNA, 15 bp, Homo sapiens
cctgaggacaggaac

SEQ ID NO: 5222 - DNA, 15 bp, Homo sapiens
tcctgaggacaggaa

SEQ ID NO: 5223 - DNA, 15 bp, Homo sapiens
ttcctgaggacagga

SEQ ID NO: 5224 - DNA, 15 bp, Homo sapiens
cttcctgaggacagg

SEQ ID NO: 5225 - DNA, 15 bp, Homo sapiens
gcttcctgaggacag

SEQ ID NO: 5226 - DNA, 15 bp, Homo sapiens
agcttcctgaggaca

SEQ ID NO: 5227 - DNA, 15 bp, Homo sapiens
aagcttcctgaggac

SEQ ID NO: 5228 - DNA, 15 bp, Homo sapiens
taagcttcctgagga

SEQ ID NO: 5229 - DNA, 15 bp, Homo sapiens
gtaagcttcctgagg

SEQ ID NO: 5230 - DNA, 15 bp, Homo sapiens
agtaagcttcctgag

SEQ ID NO: 5231 - DNA, 15 bp, Homo sapiens
cagtaagcttcctga

SEQ ID NO: 5232 - DNA, 15 bp, Homo sapiens
gcagtaagcttcctg

SEQ ID NO: 5233 - DNA, 15 bp, Homo sapiens
ggcagtaagcttcct

SEQ ID NO: 5234 - DNA, 15 bp, Homo sapiens
gggcagtaagcttcc

SEQ ID NO: 5235 - DNA, 15 bp, Homo sapiens
agggcagtaagcttc

SEQ ID NO: 5236 - DNA, 15 bp, Homo sapiens
aagggcagtaagctt

SEQ ID NO: 5237 - DNA, 15 bp, Homo sapiens
caagggcagtaagct

SEQ ID NO: 5238 - DNA, 15 bp, Homo sapiens
tcaagggcagtaagc

SEQ ID NO: 5239 - DNA, 15 bp, Homo sapiens
ctcaagggcagtaag

SEQ ID NO: 5240 - DNA, 15 bp, Homo sapiens
cctcaagggcagtaa

SEQ ID NO: 5241 - DNA, 15 bp, Homo sapiens
ccctcaagggcagta

SEQ ID NO: 5242 - DNA, 15 bp, Homo sapiens
gccctcaagggcagt

SEQ ID NO: 5243 - DNA, 15 bp, Homo sapiens
agccctcaagggcag

SEQ ID NO: 5244 - DNA, 15 bp, Homo sapiens
aagccctcaagggca

SEQ ID NO: 5245 - DNA, 15 bp, Homo sapiens
gaagccctcaagggc

SEQ ID NO: 5246 - DNA, 15 bp, Homo sapiens
tgaagccctcaaggg

SEQ ID NO: 5247 - DNA, 15 bp, Homo sapiens
gtgaagccctcaagg

SEQ ID NO: 5248 - DNA, 15 bp, Homo sapiens
agtgaagccctcaag

SEQ ID NO: 5249 - DNA, 15 bp, Homo sapiens
aagtgaagccctcaa

SEQ ID NO: 5250 - DNA, 15 bp, Homo sapiens
taagtgaagccctca

SEQ ID NO: 5251 - DNA, 15 bp, Homo sapiens
gtaagtgaagccctc

SEQ ID NO: 5252 - DNA, 15 bp, Homo sapiens
agtaagtgaagccct

SEQ ID NO: 5253 - DNA, 15 bp, Homo sapiens
aagtaagtgaagccc

SEQ ID NO: 5254 - DNA, 15 bp, Homo sapiens
caagtaagtgaagcc

SEQ ID NO: 5255 - DNA, 15 bp, Homo sapiens
ccaagtaagtgaagc

SEQ ID NO: 5256 - DNA, 15 bp, Homo sapiens
tccaagtaagtgaag

SEQ ID NO: 5257 - DNA, 15 bp, Homo sapiens
ctccaagtaagtgaa

SEQ ID NO: 5258 - DNA, 15 bp, Homo sapiens
cctccaagtaagtga

SEQ ID NO: 5259 - DNA, 15 bp, Homo sapiens
tcctccaagtaagtg

SEQ ID NO: 5260 - DNA, 15 bp, Homo sapiens
ctcctccaagtaagt

SEQ ID NO: 5261 - DNA, 15 bp, Homo sapiens
actcctccaagtaag

SEQ ID NO: 5262 - DNA, 15 bp, Homo sapiens
cactcctccaagtaa

SEQ ID NO: 5263 - DNA, 15 bp, Homo sapiens
tcactcctccaagta

SEQ ID NO: 5264 - DNA, 15 bp, Homo sapiens
atcactcctccaagt

SEQ ID NO: 5265 - DNA, 15 bp, Homo sapiens
catcactcctccaag

SEQ ID NO: 5266 - DNA, 15 bp, Homo sapiens
tcatcactcctccaa

SEQ ID NO: 5267 - DNA, 15 bp, Homo sapiens
ttcatcactcctcca

SEQ ID NO: 5268 - DNA, 15 bp, Homo sapiens
gttcatcactcctcc

SEQ ID NO: 5269 - DNA, 15 bp, Homo sapiens
ggttcatcactcctc

SEQ ID NO: 5270 - DNA, 15 bp, Homo sapiens
aggttcatcactcct

SEQ ID NO: 5271 - DNA, 15 bp, Homo sapiens
caggttcatcactcc

SEQ ID NO: 5272 - DNA, 15 bp, Homo sapiens
tcaggttcatcactc

SEQ ID NO: 5273 - DNA, 15 bp, Homo sapiens
ttcaggttcatcact

SEQ ID NO: 5274 - DNA, 15 bp, Homo sapiens
cttcaggttcatcac

SEQ ID NO: 5275 - DNA, 15 bp, Homo sapiens
acttcaggttcatca

SEQ ID NO: 5276 - DNA, 15 bp, Homo sapiens
cacttcaggttcatc

SEQ ID NO: 5277 - DNA, 15 bp, Homo sapiens
gcacttcaggttcat

SEQ ID NO: 5278 - DNA, 15 bp, Homo sapiens
cgcacttcaggttca

SEQ ID NO: 5279 - DNA, 15 bp, Homo sapiens
ccgcacttcaggttc

SEQ ID NO: 5280 - DNA, 15 bp, Homo sapiens
accgcacttcaggtt

SEQ ID NO: 5281 - DNA, 15 bp, Homo sapiens
caccgcacttcaggt

SEQ ID NO: 5282 - DNA, 15 bp, Homo sapiens
acaccgcacttcagg

SEQ ID NO: 5283 - DNA, 15 bp, Homo sapiens
cacaccgcacttcag

SEQ ID NO: 5284 - DNA, 15 bp, Homo sapiens
acacaccgcacttca

SEQ ID NO: 5285 - DNA, 15 bp, Homo sapiens
cacacaccgcacttc

SEQ ID NO: 5286 - DNA, 15 bp, Homo sapiens
acacacaccgcactt

SEQ ID NO: 5287 - DNA, 15 bp, Homo sapiens
aacacacaccgcact

SEQ ID NO: 5288 - DNA, 15 bp, Homo sapiens
taacacacaccgcac

SEQ ID NO: 5289 - DNA, 15 bp, Homo sapiens
ttaacacacaccgca

SEQ ID NO: 5290 - DNA, 15 bp, Homo sapiens
cttaacacacaccgc

SEQ ID NO: 5291 - DNA, 15 bp, Homo sapiens
tcttaacacacaccg

SEQ ID NO: 5292 - DNA, 15 bp, Homo sapiens
ttcttaacacacacc

SEQ ID NO: 5293 - DNA, 15 bp, Homo sapiens
cttcttaacacacac

SEQ ID NO: 5294 - DNA, 15 bp, Homo sapiens
gcttcttaacacaca

SEQ ID NO: 5295 - DNA, 15 bp, Homo sapiens
cgcttcttaacacac

SEQ ID NO: 5296 - DNA, 15 bp, Homo sapiens
ccgcttcttaacaca

SEQ ID NO: 5297 - DNA, 15 bp, Homo sapiens
tccgcttcttaacac

SEQ ID NO: 5298 - DNA, 15 bp, Homo sapiens
ttccgcttcttaaca

SEQ ID NO: 5299 - DNA, 15 bp, Homo sapiens
cttccgcttcttaac

SEQ ID NO: 5300 - DNA, 15 bp, Homo sapiens
acttccgcttcttaa

SEQ ID NO: 5301 - DNA, 15 bp, Homo sapiens
gacttccgcttctta

SEQ ID NO: 5302 - DNA, 15 bp, Homo sapiens
ggacttccgcttctt

SEQ ID NO: 5303 - DNA, 15 bp, Homo sapiens
tggacttccgcttct

SEQ ID NO: 5304 - DNA, 15 bp, Homo sapiens
ctggacttccgcttc

SEQ ID NO: 5305 - DNA, 15 bp, Homo sapiens
cctggacttccgctt

SEQ ID NO: 5306 - DNA, 15 bp, Homo sapiens
ccctggacttccgct

SEQ ID NO: 5307 - DNA, 15 bp, Homo sapiens
gccctggacttccgc

SEQ ID NO: 5308 - DNA, 15 bp, Homo sapiens
ggccctggacttccg

SEQ ID NO: 5309 - DNA, 15 bp, Homo sapiens
tggccctggacttcc

SEQ ID NO: 5310 - DNA, 15 bp, Homo sapiens
ctggccctggacttc

SEQ ID NO: 5311 - DNA, 15 bp, Homo sapiens
cctggccctggactt

SEQ ID NO: 5312 - DNA, 15 bp, Homo sapiens
gcctggccctggact

SEQ ID NO: 5313 - DNA, 15 bp, Homo sapiens
cgcctggccctggac

SEQ ID NO: 5314 - DNA, 15 bp, Homo sapiens
gcgcctggccctgga

SEQ ID NO: 5315 - DNA, 15 bp, Homo sapiens
cgcgcctggccctgg

SEQ ID NO: 5316 - DNA, 15 bp, Homo sapiens
ccgcgcctggccctg

SEQ ID NO: 5317 - DNA, 15 bp, Homo sapiens
accgcgcctggccct

SEQ ID NO: 5318 - DNA, 15 bp, Homo sapiens
caccgcgcctggccc

SEQ ID NO: 5319 - DNA, 15 bp, Homo sapiens
ccaccgcgcctggcc

SEQ ID NO: 5320 - DNA, 15 bp, Homo sapiens
gccaccgcgcctggc

SEQ ID NO: 5321 - DNA, 15 bp, Homo sapiens
agccaccgcgcctgg

SEQ ID NO: 5322 - DNA, 15 bp, Homo sapiens
gagccaccgcgcctg

SEQ ID NO: 5323 - DNA, 15 bp, Homo sapiens
tgagccaccgcgcct

SEQ ID NO: 5324 - DNA, 15 bp, Homo sapiens
gtgagccaccgcgcc

SEQ ID NO: 5325 - DNA, 15 bp, Homo sapiens
cgtgagccaccgcgc

SEQ ID NO: 5326 - DNA, 15 bp, Homo sapiens
gcgtgagccaccgcg

SEQ ID NO: 5327 - DNA, 15 bp, Homo sapiens
ggcgtgagccaccgc

SEQ ID NO: 5328 - DNA, 15 bp, Homo sapiens
aggcgtgagccaccg

SEQ ID NO: 5329 - DNA, 15 bp, Homo sapiens
caggcgtgagccacc

SEQ ID NO: 5330 - DNA, 15 bp, Homo sapiens
acaggcgtgagccac

SEQ ID NO: 5331 - DNA, 15 bp, Homo sapiens
tacaggcgtgagcca

SEQ ID NO: 5332 - DNA, 15 bp, Homo sapiens
ttacaggcgtgagcc

SEQ ID NO: 5333 - DNA, 15 bp, Homo sapiens
attacaggcgtgagc

SEQ ID NO: 5334 - DNA, 15 bp, Homo sapiens
gattacaggcgtgag

SEQ ID NO: 5335 - DNA, 15 bp, Homo sapiens
ggattacaggcgtga

SEQ ID NO: 5336 - DNA, 15 bp, Homo sapiens
gggattacaggcgtg

SEQ ID NO: 5337 - DNA, 15 bp, Homo sapiens
tgggattacaggcgt

SEQ ID NO: 5338 - DNA, 15 bp, Homo sapiens
ctgggattacaggcg

SEQ ID NO: 5339 - DNA, 15 bp, Homo sapiens
gctgggattacaggc

SEQ ID NO: 5340 - DNA, 15 bp, Homo sapiens
tgctgggattacagg

SEQ ID NO: 5341 - DNA, 15 bp, Homo sapiens
gtgctgggattacag

SEQ ID NO: 5342 - DNA, 15 bp, Homo sapiens
agtgctgggattaca

SEQ ID NO: 5343 - DNA, 15 bp, Homo sapiens
aagtgctgggattac

SEQ ID NO: 5344 - DNA, 15 bp, Homo sapiens
aaagtgctgggatta

SEQ ID NO: 5345 - DNA, 15 bp, Homo sapiens
caaagtgctgggatt

SEQ ID NO: 5346 - DNA, 15 bp, Homo sapiens
ccaaagtgctgggat

SEQ ID NO: 5347 - DNA, 15 bp, Homo sapiens
cccaaagtgctggga

SEQ ID NO: 5348 - DNA, 15 bp, Homo sapiens
tcccaaagtgctggg

SEQ ID NO: 5349 - DNA, 15 bp, Homo sapiens
agcctcccaaagtgc

SEQ ID NO: 5350 - DNA, 15 bp, Homo sapiens
cagcctcccaaagtg

SEQ ID NO: 5351 - DNA, 15 bp, Homo sapiens
tcagcctcccaaagt

SEQ ID NO: 5352 - DNA, 15 bp, Homo sapiens
ctcagcctcccaaag

SEQ ID NO: 5353 - DNA, 15 bp, Homo sapiens
cctcagcctcccaaa

SEQ ID NO: 5354 - DNA, 15 bp, Homo sapiens
gcctcagcctcccaa

SEQ ID NO: 5355 - DNA, 15 bp, Homo sapiens
tgcctcagcctccca

SEQ ID NO: 5356 - DNA, 15 bp, Homo sapiens
ctgcctcagcctccc

SEQ ID NO: 5357 - DNA, 15 bp, Homo sapiens
cctgcctcagcctcc

SEQ ID NO: 5358 - DNA, 15 bp, Homo sapiens
gcctgcctcagcctc

SEQ ID NO: 5359 - DNA, 15 bp, Homo sapiens
cgcctgcctcagcct

SEQ ID NO: 5360 - DNA, 15 bp, Homo sapiens
ccgcctgcctcagcc

SEQ ID NO: 5361 - DNA, 15 bp, Homo sapiens
tccgcctgcctcagc

SEQ ID NO: 5362 - DNA, 15 bp, Homo sapiens
atccgcctgcctcag

SEQ ID NO: 5363 - DNA, 15 bp, Homo sapiens
gatccgcctgcctca

SEQ ID NO: 5364 - DNA, 15 bp, Homo sapiens
tgatccgcctgcctc

SEQ ID NO: 5365 - DNA, 15 bp, Homo sapiens
gtgatccgcctgcct

SEQ ID NO: 5366 - DNA, 15 bp, Homo sapiens
ggtgatccgcctgcc

SEQ ID NO: 5367 - DNA, 15 bp, Homo sapiens
tggtgatccgcctgc

SEQ ID NO: 5368 - DNA, 15 bp, Homo sapiens
ctggtgatccgcctg

SEQ ID NO: 5369 - DNA, 15 bp, Homo sapiens
cctggtgatccgcct

SEQ ID NO: 5370 - DNA, 15 bp, Homo sapiens
acctggtgatccgcc

SEQ ID NO: 5371 - DNA, 15 bp, Homo sapiens
gacctggtgatccgc

SEQ ID NO: 5372 - DNA, 15 bp, Homo sapiens
tgacctggtgatccg

SEQ ID NO: 5373 - DNA, 15 bp, Homo sapiens
ctgacctggtgatcc

SEQ ID NO: 5374 - DNA, 15 bp, Homo sapiens
cctgacctggtgatc

SEQ ID NO: 5375 - DNA, 15 bp, Homo sapiens
tcctgacctggtgat

SEQ ID NO: 5376 - DNA, 15 bp, Homo sapiens
ctcctgacctggtga

SEQ ID NO: 5377 - DNA, 15 bp, Homo sapiens
tctcctgacctggtg

SEQ ID NO: 5378 - DNA, 15 bp, Homo sapiens
atctcctgacctggt

SEQ ID NO: 5379 - DNA, 15 bp, Homo sapiens
gatctcctgacctgg

SEQ ID NO: 5380 - DNA, 15 bp, Homo sapiens
cgatctcctgacctg

SEQ ID NO: 5381 - DNA, 15 bp, Homo sapiens
tcgatctcctgacct

SEQ ID NO: 5382 - DNA, 15 bp, Homo sapiens
ctcgatctcctgacc

SEQ ID NO: 5383 - DNA, 15 bp, Homo sapiens
tctcgatctcctgac

SEQ ID NO: 5384 - DNA, 15 bp, Homo sapiens
gtctcgatctcctga

SEQ ID NO: 5385 - DNA, 15 bp, Homo sapiens
ggtctcgatctcctg

SEQ ID NO: 5386 - DNA, 15 bp, Homo sapiens
tggtctcgatctcct

SEQ ID NO: 5387 - DNA, 15 bp, Homo sapiens
atggtctcgatctcc

SEQ ID NO: 5388 - DNA, 15 bp, Homo sapiens
gatggtctcgatctc

SEQ ID NO: 5389 - DNA, 15 bp, Homo sapiens
ggatggtctcgatct

SEQ ID NO: 5390 - DNA, 15 bp, Homo sapiens
aggatggtctcgatc

SEQ ID NO: 5391 - DNA, 15 bp, Homo sapiens
caggatggtctcgat

SEQ ID NO: 5392 - DNA, 15 bp, Homo sapiens
ccaggatggtctcga

SEQ ID NO: 5393 - DNA, 15 bp, Homo sapiens
gccaggatggtctcg

SEQ ID NO: 5394 - DNA, 15 bp, Homo sapiens
agccaggatggtctc

SEQ ID NO: 5395 - DNA, 15 bp, Homo sapiens
tagccaggatggtct

SEQ ID NO: 5396 - DNA, 15 bp, Homo sapiens
ttagccaggatggtc

SEQ ID NO: 5397 - DNA, 15 bp, Homo sapiens
gttagccaggatggt

SEQ ID NO: 5398 - DNA, 15 bp, Homo sapiens
tgttagccaggatgg

SEQ ID NO: 5399 - DNA, 15 bp, Homo sapiens
atgttagccaggatg

SEQ ID NO: 5400 - DNA, 15 bp, Homo sapiens
catgttagccaggat

SEQ ID NO: 5401 - DNA, 15 bp, Homo sapiens
ccatgttagccagga

SEQ ID NO: 5402 - DNA, 15 bp, Homo sapiens
accatgttagccagg

SEQ ID NO: 5403 - DNA, 15 bp, Homo sapiens
caccatgttagccag

SEQ ID NO: 5404 - DNA, 15 bp, Homo sapiens
tcaccatgttagcca

SEQ ID NO: 5405 - DNA, 15 bp, Homo sapiens
ttcaccatgttagcc

SEQ ID NO: 5406 - DNA, 15 bp, Homo sapiens
tttcaccatgttagc

SEQ ID NO: 5407 - DNA, 15 bp, Homo sapiens
gtttcaccatgttag

SEQ ID NO: 5408 - DNA, 15 bp, Homo sapiens
ggtttcaccatgtta

SEQ ID NO: 5409 - DNA, 15 bp, Homo sapiens
gggtttcaccatgtt

SEQ ID NO: 5410 - DNA, 15 bp, Homo sapiens
ggggtttcaccatgt

SEQ ID NO: 5411 - DNA, 15 bp, Homo sapiens
cggggtttcaccatg

SEQ ID NO: 5412 - DNA, 15 bp, Homo sapiens
acggggtttcaccat

SEQ ID NO: 5413 - DNA, 15 bp, Homo sapiens
gacggggtttcacca

SEQ ID NO: 5414 - DNA, 15 bp, Homo sapiens
agacggggtttcacc

SEQ ID NO: 5415 - DNA, 15 bp, Homo sapiens
gagacggggtttcac

SEQ ID NO: 5416 - DNA, 15 bp, Homo sapiens
agagacggggtttca

SEQ ID NO: 5417 - DNA, 15 bp, Homo sapiens
tagagacggggtttc

SEQ ID NO: 5418 - DNA, 15 bp, Homo sapiens
gtagagacggggttt

SEQ ID NO: 5419 - DNA, 15 bp, Homo sapiens
agtagagacggggtt

SEQ ID NO: 5420 - DNA, 15 bp, Homo sapiens
tagtagagacggggt

SEQ ID NO: 5421 - DNA, 15 bp, Homo sapiens
ttagtagagacgggg

SEQ ID NO: 5422 - DNA, 15 bp, Homo sapiens
tttagtagagacggg

SEQ ID NO: 5423 - DNA, 15 bp, Homo sapiens
ttttagtagagacgg

SEQ ID NO: 5424 - DNA, 15 bp, Homo sapiens
tttttagtagagacg

SEQ ID NO: 5425 - DNA, 15 bp, Homo sapiens
atttttagtagagac

SEQ ID NO: 5426 - DNA, 15 bp, Homo sapiens
tatttttagtagaga

SEQ ID NO: 5427 - DNA, 15 bp, Homo sapiens
gtatttttagtagag

SEQ ID NO: 5428 - DNA, 15 bp, Homo sapiens
tgtatttttagtaga

SEQ ID NO: 5429 - DNA, 15 bp, Homo sapiens
ttgtatttttagtag

SEQ ID NO: 5430 - DNA, 15 bp, Homo sapiens
tttgtatttttagta

SEQ ID NO: 5431 - DNA, 15 bp, Homo sapiens
ttttgtatttttagt

SEQ ID NO: 5432 - DNA, 15 bp, Homo sapiens
tttttgtatttttag

SEQ ID NO: 5433 - DNA, 15 bp, Homo sapiens
ttttttgtattttta

SEQ ID NO: 5434 - DNA, 15 bp, Homo sapiens
tttttttgtattttt

SEQ ID NO: 5435 - DNA, 15 bp, Homo sapiens
atttttttgtatttt

SEQ ID NO: 5436 - DNA, 15 bp, Homo sapiens
aatttttttgtattt

SEQ ID NO: 5437 - DNA, 15 bp, Homo sapiens
taatttttttgtatt

SEQ ID NO: 5438 - DNA, 15 bp, Homo sapiens
ctaatttttttgtat

SEQ ID NO: 5439 - DNA, 15 bp, Homo sapiens
gctaatttttttgta

SEQ ID NO: 5440 - DNA, 15 bp, Homo sapiens
ggctaatttttttgt

SEQ ID NO: 5441 - DNA, 15 bp, Homo sapiens
cggctaatttttttg

SEQ ID NO: 5442 - DNA, 15 bp, Homo sapiens
ccggctaattttttt

SEQ ID NO: 5443 - DNA, 15 bp, Homo sapiens
cccggctaatttttt

SEQ ID NO: 5444 - DNA, 15 bp, Homo sapiens
gcccggctaattttt

SEQ ID NO: 5445 - DNA, 15 bp, Homo sapiens
tgcccggctaatttt

SEQ ID NO: 5446 - DNA, 15 bp, Homo sapiens
atgcccggctaattt

SEQ ID NO: 5447 - DNA, 15 bp, Homo sapiens
catgcccggctaatt

SEQ ID NO: 5448 - DNA, 15 bp, Homo sapiens
ccatgcccggctaat

SEQ ID NO: 5449 - DNA, 15 bp, Homo sapiens
accatgcccggctaa

SEQ ID NO: 5450 - DNA, 15 bp, Homo sapiens
caccatgcccggcta

SEQ ID NO: 5451 - DNA, 15 bp, Homo sapiens
ccaccatgcccggct

SEQ ID NO: 5452 - DNA, 15 bp, Homo sapiens
accaccatgcccggc

SEQ ID NO: 5453 - DNA, 15 bp, Homo sapiens
caccaccatgcccgg

SEQ ID NO: 5454 - DNA, 15 bp, Homo sapiens
ccaccaccatgcccg

SEQ ID NO: 5455 - DNA, 15 bp, Homo sapiens
cccaccaccatgccc

SEQ ID NO: 5456 - DNA, 15 bp, Homo sapiens
gcccaccaccatgcc

SEQ ID NO: 5457 - DNA, 15 bp, Homo sapiens
tgcccaccaccatgc

SEQ ID NO: 5458 - DNA, 15 bp, Homo sapiens
gtgcccaccaccatg

SEQ ID NO: 5459 - DNA, 15 bp, Homo sapiens
ggtgcccaccaccat

SEQ ID NO: 5460 - DNA, 15 bp, Homo sapiens
aggtgcccaccacca

SEQ ID NO: 5461 - DNA, 15 bp, Homo sapiens
caggtgcccaccacc

SEQ ID NO: 5462 - DNA, 15 bp, Homo sapiens
gcaggtgcccaccac

SEQ ID NO: 5463 - DNA, 15 bp, Homo sapiens
tgcaggtgcccacca

SEQ ID NO: 5464 - DNA, 15 bp, Homo sapiens
ctgcaggtgcccacc

SEQ ID NO: 5465 - DNA, 15 bp, Homo sapiens
actgcaggtgcccac

SEQ ID NO: 5466 - DNA, 15 bp, Homo sapiens
gactgcaggtgccca

SEQ ID NO: 5467 - DNA, 15 bp, Homo sapiens
ggactgcaggtgccc

SEQ ID NO: 5468 - DNA, 15 bp, Homo sapiens
gggactgcaggtgcc

SEQ ID NO: 5469 - DNA, 15 bp, Homo sapiens
tgggactgcaggtgc

SEQ ID NO: 5470 - DNA, 15 bp, Homo sapiens
ctgggactgcaggtg

SEQ ID NO: 5471 - DNA, 15 bp, Homo sapiens
gctgggactgcaggt

SEQ ID NO: 5472 - DNA, 15 bp, Homo sapiens
agctgggactgcagg

SEQ ID NO: 5473 - DNA, 15 bp, Homo sapiens
tagctgggactgcag

SEQ ID NO: 5474 - DNA, 15 bp, Homo sapiens
gtagctgggactgca

SEQ ID NO: 5475 - DNA, 15 bp, Homo sapiens
agtagctgggactgc

SEQ ID NO: 5476 - DNA, 15 bp, Homo sapiens
gagtagctgggactg

SEQ ID NO: 5477 - DNA, 15 bp, Homo sapiens
tgagtagctgggact

SEQ ID NO: 5478 - DNA, 15 bp, Homo sapiens
ctgagtagctgggac

SEQ ID NO: 5479 - DNA, 15 bp, Homo sapiens
cctgagtagctggga

SEQ ID NO: 5480 - DNA, 15 bp, Homo sapiens
tcctgagtagctggg

SEQ ID NO: 5481 - DNA, 15 bp, Homo sapiens
ctcctgagtagctgg

SEQ ID NO: 5482 - DNA, 15 bp, Homo sapiens
cctcctgagtagctg

SEQ ID NO: 5483 - DNA, 15 bp, Homo sapiens
gcctcctgagtagct

SEQ ID NO: 5484 - DNA, 15 bp, Homo sapiens
agcctcctgagtagc

SEQ ID NO: 5485 - DNA, 15 bp, Homo sapiens
cagcctcctgagtag

SEQ ID NO: 5486 - DNA, 15 bp, Homo sapiens
tcagcctcctgagta

SEQ ID NO: 5487 - DNA, 15 bp, Homo sapiens
ctcagcctcctgagt

SEQ ID NO: 5488 - DNA, 15 bp, Homo sapiens
cctcagcctcctgag

SEQ ID NO: 5489 - DNA, 15 bp, Homo sapiens
gcctcagcctcctga

SEQ ID NO: 5490 - DNA, 15 bp, Homo sapiens
tgcctcagcctcctg

SEQ ID NO: 5491 - DNA, 15 bp, Homo sapiens
ctgcctcagcctcct

SEQ ID NO: 5492 - DNA, 15 bp, Homo sapiens
tcctgcctcagcctc

SEQ ID NO: 5493 - DNA, 15 bp, Homo sapiens
ctctcctgcctcagc

SEQ ID NO: 5494 - DNA, 15 bp, Homo sapiens
actctcctgcctcag

SEQ ID NO: 5495 - DNA, 15 bp, Homo sapiens
cactctcctgcctca

SEQ ID NO: 5496 - DNA, 15 bp, Homo sapiens
ccactctcctgcctc

SEQ ID NO: 5497 - DNA, 15 bp, Homo sapiens
gccactctcctgcct

SEQ ID NO: 5498 - DNA, 15 bp, Homo sapiens
cgccactctcctgcc

SEQ ID NO: 5499 - DNA, 15 bp, Homo sapiens
acgccactctcctgc

SEQ ID NO: 5500 - DNA, 15 bp, Homo sapiens
cacgccactctcctg

SEQ ID NO: 5501 - DNA, 15 bp, Homo sapiens
tcacgccactctcct

SEQ ID NO: 5502 - DNA, 15 bp, Homo sapiens
ttcacgccactctcc

SEQ ID NO: 5503 - DNA, 15 bp, Homo sapiens
gttcacgccactctc

SEQ ID NO: 5504 - DNA, 15 bp, Homo sapiens
ggttcacgccactct

SEQ ID NO: 5505 - DNA, 15 bp, Homo sapiens
aggttcacgccactc

SEQ ID NO: 5506 - DNA, 15 bp, Homo sapiens
caggttcacgccact

SEQ ID NO: 5507 - DNA, 15 bp, Homo sapiens
ccaggttcacgccac

SEQ ID NO: 5508 - DNA, 15 bp, Homo sapiens
cccaggttcacgcca

SEQ ID NO: 5509 - DNA, 15 bp, Homo sapiens
tcccaggttcacgcc

SEQ ID NO: 5510 - DNA, 15 bp, Homo sapiens
ctcccaggttcacgc

SEQ ID NO: 5511 - DNA, 15 bp, Homo sapiens
cctcccaggttcacg

SEQ ID NO: 5512 - DNA, 15 bp, Homo sapiens
gcctcccaggttcac

SEQ ID NO: 5513 - DNA, 15 bp, Homo sapiens
tgcctcccaggttca

SEQ ID NO: 5514 - DNA, 15 bp, Homo sapiens
ctgcctcccaggttc

SEQ ID NO: 5515 - DNA, 15 bp, Homo sapiens
tctgcctcccaggtt

SEQ ID NO: 5516 - DNA, 15 bp, Homo sapiens
ctctgcctcccaggt

SEQ ID NO: 5517 - DNA, 15 bp, Homo sapiens
gctctgcctcccagg

SEQ ID NO: 5518 - DNA, 15 bp, Homo sapiens
agctctgcctcccag

SEQ ID NO: 5519 - DNA, 15 bp, Homo sapiens
aagctctgcctccca

SEQ ID NO: 5520 - DNA, 15 bp, Homo sapiens
caagctctgcctccc

SEQ ID NO: 5521 - DNA, 15 bp, Homo sapiens
gcaagctctgcctcc

SEQ ID NO: 5522 - DNA, 15 bp, Homo sapiens
tgcaagctctgcctc

SEQ ID NO: 5523 - DNA, 15 bp, Homo sapiens
ctgcaagctctgcct

SEQ ID NO: 5524 - DNA, 15 bp, Homo sapiens
actgcaagctctgcc

SEQ ID NO: 5525 - DNA, 15 bp, Homo sapiens
cactgcaagctctgc

SEQ ID NO: 5526 - DNA, 15 bp, Homo sapiens
tcactgcaagctctg

SEQ ID NO: 5527 - DNA, 15 bp, Homo sapiens
ctcactgcaagctct

SEQ ID NO: 5528 - DNA, 15 bp, Homo sapiens
gctcactgcaagctc

SEQ ID NO: 5529 - DNA, 15 bp, Homo sapiens
ggctcactgcaagct

SEQ ID NO: 5530 - DNA, 15 bp, Homo sapiens
tggctcactgcaagc

SEQ ID NO: 5531 - DNA, 15 bp, Homo sapiens
ttggctcactgcaag

SEQ ID NO: 5532 - DNA, 15 bp, Homo sapiens
cttggctcactgcaa

SEQ ID NO: 5533 - DNA, 15 bp, Homo sapiens
tcttggctcactgca

SEQ ID NO: 5534 - DNA, 15 bp, Homo sapiens
atcttggctcactgc

SEQ ID NO: 5535 - DNA, 15 bp, Homo sapiens
gatcttggctcactg

SEQ ID NO: 5536 - DNA, 15 bp, Homo sapiens
cgatcttggctcact

SEQ ID NO: 5537 - DNA, 15 bp, Homo sapiens
acgatcttggctcac

SEQ ID NO: 5538 - DNA, 15 bp, Homo sapiens
cacgatcttggctca

SEQ ID NO: 5539 - DNA, 15 bp, Homo sapiens
gcacgatcttggctc

SEQ ID NO: 5540 - DNA, 15 bp, Homo sapiens
ggcacgatcttggct

SEQ ID NO: 5541 - DNA, 15 bp, Homo sapiens
tggcacgatcttggc

SEQ ID NO: 5542 - DNA, 15 bp, Homo sapiens
gtggcacgatcttgg

SEQ ID NO: 5543 - DNA, 15 bp, Homo sapiens
agtggcacgatcttg

SEQ ID NO: 5544 - DNA, 15 bp, Homo sapiens
cagtggcacgatctt

SEQ ID NO: 5545 - DNA, 15 bp, Homo sapiens
gcagtggcacgatct

SEQ ID NO: 5546 - DNA, 15 bp, Homo sapiens
tgcagtggcacgatc

SEQ ID NO: 5547 - DNA, 15 bp, Homo sapiens
gtgcagtggcacgat

SEQ ID NO: 5548 - DNA, 15 bp, Homo sapiens
agtgcagtggcacga

SEQ ID NO: 5549 - DNA, 15 bp, Homo sapiens
gagtgcagtggcacg

SEQ ID NO: 5550 - DNA, 15 bp, Homo sapiens
ggagtgcagtggcac

SEQ ID NO: 5551 - DNA, 15 bp, Homo sapiens
tggagtgcagtggca

SEQ ID NO: 5552 - DNA, 15 bp, Homo sapiens
ctggagtgcagtggc

SEQ ID NO: 5553 - DNA, 15 bp, Homo sapiens
gctggagtgcagtgg

SEQ ID NO: 5554 - DNA, 15 bp, Homo sapiens
ggctggagtgcagtg

SEQ ID NO: 5555 - DNA, 15 bp, Homo sapiens
aggctggagtgcagt

SEQ ID NO: 5556 - DNA, 15 bp, Homo sapiens
caggctggagtgcag

SEQ ID NO: 5557 - DNA, 15 bp, Homo sapiens
ccaggctggagtgca

SEQ ID NO: 5558 - DNA, 15 bp, Homo sapiens
cccaggctggagtgc

SEQ ID NO: 5559 - DNA, 15 bp, Homo sapiens
ctgttgcccaggctg

SEQ ID NO: 5560 - DNA, 15 bp, Homo sapiens
tctgttgcccaggct

SEQ ID NO: 5561 - DNA, 15 bp, Homo sapiens
ctctgttgcccaggc

SEQ ID NO: 5562 - DNA, 15 bp, Homo sapiens
actctgttgcccagg

SEQ ID NO: 5563 - DNA, 15 bp, Homo sapiens
cactctgttgcccag

SEQ ID NO: 5564 - DNA, 15 bp, Homo sapiens
tcactctgttgccca

SEQ ID NO: 5565 - DNA, 15 bp, Homo sapiens
ctcactctgttgccc

SEQ ID NO: 5566 - DNA, 15 bp, Homo sapiens
tctcactctgttgcc

SEQ ID NO: 5567 - DNA, 15 bp, Homo sapiens
gtctcactctgttgc

SEQ ID NO: 5568 - DNA, 15 bp, Homo sapiens
agtctcactctgttg

SEQ ID NO: 5569 - DNA, 15 bp, Homo sapiens
gagtctcactctgtt

SEQ ID NO: 5570 - DNA, 15 bp, Homo sapiens
ggagtctcactctgt

SEQ ID NO: 5571 - DNA, 15 bp, Homo sapiens
cggagtctcactctg

SEQ ID NO: 5572 - DNA, 15 bp, Homo sapiens
acggagtctcactct

SEQ ID NO: 5573 - DNA, 15 bp, Homo sapiens
gacggagtctcactc

SEQ ID NO: 5574 - DNA, 15 bp, Homo sapiens
agacggagtctcact

SEQ ID NO: 5575 - DNA, 15 bp, Homo sapiens
gagacggagtctcac

SEQ ID NO: 5576 - DNA, 15 bp, Homo sapiens
tgagacggagtctca

SEQ ID NO: 5577 - DNA, 15 bp, Homo sapiens
ttgagacggagtctc

SEQ ID NO: 5578 - DNA, 15 bp, Homo sapiens
tttgagacggagtct

SEQ ID NO: 5579 - DNA, 15 bp, Homo sapiens
ttttgagacggagtc

SEQ ID NO: 5580 - DNA, 15 bp, Homo sapiens
tttttgagacggagt

SEQ ID NO: 5581 - DNA, 15 bp, Homo sapiens
ctttttgagacggag

SEQ ID NO: 5582 - DNA, 15 bp, Homo sapiens
tctttttgagacgga

SEQ ID NO: 5583 - DNA, 15 bp, Homo sapiens
ttctttttgagacgg

SEQ ID NO: 5584 - DNA, 15 bp, Homo sapiens
tttctttttgagacg

SEQ ID NO: 5585 - DNA, 15 bp, Homo sapiens
ttttctttttgagac

SEQ ID NO: 5586 - DNA, 15 bp, Homo sapiens
tttttctttttgaga

SEQ ID NO: 5587 - DNA, 15 bp, Homo sapiens
ttttttctttttgag

SEQ ID NO: 5588 - DNA, 15 bp, Homo sapiens
tttttttctttttga

SEQ ID NO: 5589 - DNA, 15 bp, Homo sapiens
ttttttttctttttg

SEQ ID NO: 5590 - DNA, 15 bp, Homo sapiens
tttttttttcttttt

SEQ ID NO: 5591 - DNA, 15 bp, Homo sapiens
ttttttttttctttt

SEQ ID NO: 5592 - DNA, 15 bp, Homo sapiens
cttttttttttcttt

SEQ ID NO: 5593 - DNA, 15 bp, Homo sapiens
acttttttttttctt

SEQ ID NO: 5594 - DNA, 15 bp, Homo sapiens
cacttttttttttct

SEQ ID NO: 5595 - DNA, 15 bp, Homo sapiens
gcacttttttttttc

SEQ ID NO: 5596 - DNA, 15 bp, Homo sapiens
ggcactttttttttt

SEQ ID NO: 5597 - DNA, 15 bp, Homo sapiens
aggcacttttttttt

SEQ ID NO: 5598 - DNA, 15 bp, Homo sapiens
gaggcactttttttt

SEQ ID NO: 5599 - DNA, 15 bp, Homo sapiens
tgaggcacttttttt

SEQ ID NO: 5600 - DNA, 15 bp, Homo sapiens
gtgaggcactttttt

SEQ ID NO: 5601 - DNA, 15 bp, Homo sapiens
cgtgaggcacttttt

SEQ ID NO: 5602 - DNA, 15 bp, Homo sapiens
ccgtgaggcactttt

SEQ ID NO: 5603 - DNA, 15 bp, Homo sapiens
tccgtgaggcacttt

SEQ ID NO: 5604 - DNA, 15 bp, Homo sapiens
ctccgtgaggcactt

SEQ ID NO: 5605 - DNA, 15 bp, Homo sapiens
tctccgtgaggcact

SEQ ID NO: 5606 - DNA, 15 bp, Homo sapiens
ctctccgtgaggcac

SEQ ID NO: 5607 - DNA, 15 bp, Homo sapiens
actctccgtgaggca

SEQ ID NO: 5608 - DNA, 15 bp, Homo sapiens
gactctccgtgaggc

SEQ ID NO: 5609 - DNA, 15 bp, Homo sapiens
agactctccgtgagg

SEQ ID NO: 5610 - DNA, 15 bp, Homo sapiens
tagactctccgtgag

SEQ ID NO: 5611 - DNA, 15 bp, Homo sapiens
atagactctccgtga

SEQ ID NO: 5612 - DNA, 15 bp, Homo sapiens
aatagactctccgtg

SEQ ID NO: 5613 - DNA, 15 bp, Homo sapiens
gaatagactctccgt

SEQ ID NO: 5614 - DNA, 15 bp, Homo sapiens
agaatagactctccg

SEQ ID NO: 5615 - DNA, 15 bp, Homo sapiens
aagaatagactctcc

SEQ ID NO: 5616 - DNA, 15 bp, Homo sapiens
aaagaatagactctc

SEQ ID NO: 5617 - DNA, 15 bp, Homo sapiens
aaaagaatagactct

SEQ ID NO: 5618 - DNA, 15 bp, Homo sapiens
gaaaagaatagactc

SEQ ID NO: 5619 - DNA, 15 bp, Homo sapiens
agaaaagaatagact

SEQ ID NO: 5620 - DNA, 15 bp, Homo sapiens
aagaaaagaatagac

SEQ ID NO: 5621 - DNA, 15 bp, Homo sapiens
gaagaaaagaataga

SEQ ID NO: 5622 - DNA, 15 bp, Homo sapiens
ggaagaaaagaatag

SEQ ID NO: 5623 - DNA, 15 bp, Homo sapiens
gggaagaaaagaata

SEQ ID NO: 5624 - DNA, 15 bp, Homo sapiens
tgggaagaaaagaat

SEQ ID NO: 5625 - DNA, 15 bp, Homo sapiens
atgggaagaaaagaa

SEQ ID NO: 5626 - DNA, 15 bp, Homo sapiens
tatgggaagaaaaga

SEQ ID NO: 5627 - DNA, 15 bp, Homo sapiens
atatgggaagaaaag

SEQ ID NO: 5628 - DNA, 15 bp, Homo sapiens
aatatgggaagaaaa

SEQ ID NO: 5629 - DNA, 15 bp, Homo sapiens
caatatgggaagaaa

SEQ ID NO: 5630 - DNA, 15 bp, Homo sapiens
acaatatgggaagaa

SEQ ID NO: 5631 - DNA, 15 bp, Homo sapiens
cacaatatgggaaga

SEQ ID NO: 5632 - DNA, 15 bp, Homo sapiens
acacaatatgggaag

SEQ ID NO: 5633 - DNA, 15 bp, Homo sapiens
cacacaatatgggaa

SEQ ID NO: 5634 - DNA, 15 bp, Homo sapiens
acacacaatatggga

SEQ ID NO: 5635 - DNA, 15 bp, Homo sapiens
cacacacaatatggg

SEQ ID NO: 5636 - DNA, 15 bp, Homo sapiens
acacacacaatatgg

SEQ ID NO: 5637 - DNA, 15 bp, Homo sapiens
cacacacacaatatg

SEQ ID NO: 5638 - DNA, 15 bp, Homo sapiens
acacacacacaatat

SEQ ID NO: 5639 - DNA, 15 bp, Homo sapiens
cacacacacacaata

SEQ ID NO: 5640 - DNA, 15 bp, Homo sapiens
acacacacacacaat

SEQ ID NO: 5641 - DNA, 15 bp, Homo sapiens
cacacacacacacaa

SEQ ID NO: 5642 - DNA, 15 bp, Homo sapiens
gcacacacacacaca

SEQ ID NO: 5643 - DNA, 15 bp, Homo sapiens
cgcacacacacacac

SEQ ID NO: 5644 - DNA, 15 bp, Homo sapiens
gcgcacacacacaca

SEQ ID NO: 5645 - DNA, 15 bp, Homo sapiens
cgcgcacacacacac

SEQ ID NO: 5646 - DNA, 15 bp, Homo sapiens
gcgcgcacacacaca

SEQ ID NO: 5647 - DNA, 15 bp, Homo sapiens
agcgcgcacacacac

SEQ ID NO: 5648 - DNA, 15 bp, Homo sapiens
aagcgcgcacacaca

SEQ ID NO: 5649 - DNA, 15 bp, Homo sapiens
gaagcgcgcacacac

SEQ ID NO: 5650 - DNA, 15 bp, Homo sapiens
ggaagcgcgcacaca

SEQ ID NO: 5651 - DNA, 15 bp, Homo sapiens
aggaagcgcgcacac

SEQ ID NO: 5652 - DNA, 15 bp, Homo sapiens
gaggaagcgcgcaca

SEQ ID NO: 5653 - DNA, 15 bp, Homo sapiens
ggaggaagcgcgcac

SEQ ID NO: 5654 - DNA, 15 bp, Homo sapiens
tggaggaagcgcgca

SEQ ID NO: 5655 - DNA, 15 bp, Homo sapiens
ttggaggaagcgcgc

SEQ ID NO: 5656 - DNA, 15 bp, Homo sapiens
gttggaggaagcgcg

SEQ ID NO: 5657 - DNA, 15 bp, Homo sapiens
tgttggaggaagcgc

SEQ ID NO: 5658 - DNA, 15 bp, Homo sapiens
gtgttggaggaagcg

SEQ ID NO: 5659 - DNA, 15 bp, Homo sapiens
tgtgttggaggaagc

SEQ ID NO: 5660 - DNA, 15 bp, Homo sapiens
atgtgttggaggaag

SEQ ID NO: 5661 - DNA, 15 bp, Homo sapiens
gatgtgttggaggaa

SEQ ID NO: 5662 - DNA, 15 bp, Homo sapiens
ggatgtgttggagga

SEQ ID NO: 5663 - DNA, 15 bp, Homo sapiens
aggatgtgttggagg

SEQ ID NO: 5664 - DNA, 15 bp, Homo sapiens
gaggatgtgttggag

SEQ ID NO: 5665 - DNA, 15 bp, Homo sapiens
ggaggatgtgttgga

SEQ ID NO: 5666 - DNA, 15 bp, Homo sapiens
gggaggatgtgttgg

SEQ ID NO: 5667 - DNA, 15 bp, Homo sapiens
agggaggatgtgttg

SEQ ID NO: 5668 - DNA, 15 bp, Homo sapiens
tagggaggatgtgtt

SEQ ID NO: 5669 - DNA, 15 bp, Homo sapiens
atagggaggatgtgt

SEQ ID NO: 5670 - DNA, 15 bp, Homo sapiens
tatagggaggatgtg

SEQ ID NO: 5671 - DNA, 15 bp, Homo sapiens
atatagggaggatgt

SEQ ID NO: 5672 - DNA, 15 bp, Homo sapiens
tatatagggaggatg

SEQ ID NO: 5673 - DNA, 15 bp, Homo sapiens
atatatagggaggat

SEQ ID NO: 5674 - DNA, 15 bp, Homo sapiens
tatatatagggagga

SEQ ID NO: 5675 - DNA, 15 bp, Homo sapiens
atatatatagggagg

SEQ ID NO: 5676 - DNA, 15 bp, Homo sapiens
aatatatatagggag

SEQ ID NO: 5677 - DNA, 15 bp, Homo sapiens
aaatatatataggga

SEQ ID NO: 5678 - DNA, 15 bp, Homo sapiens
aaaatatatataggg

SEQ ID NO: 5679 - DNA, 15 bp, Homo sapiens
caaaatatatatagg

SEQ ID NO: 5680 - DNA, 15 bp, Homo sapiens
tcaaaatatatatag

SEQ ID NO: 5681 - DNA, 15 bp, Homo sapiens
ctcaaaatatatata

SEQ ID NO: 5682 - DNA, 15 bp, Homo sapiens
actcaaaatatatat

SEQ ID NO: 5683 - DNA, 15 bp, Homo sapiens
tactcaaaatatata

SEQ ID NO: 5684 - DNA, 15 bp, Homo sapiens
ttactcaaaatatat

SEQ ID NO: 5685 - DNA, 15 bp, Homo sapiens
tttactcaaaatata

SEQ ID NO: 5686 - DNA, 15 bp, Homo sapiens
ttttactcaaaatat

SEQ ID NO: 5687 - DNA, 15 bp, Homo sapiens
gttttactcaaaata

SEQ ID NO: 5688 - DNA, 15 bp, Homo sapiens
tgttttactcaaaat

SEQ ID NO: 5689 - DNA, 15 bp, Homo sapiens
atgttttactcaaaa

SEQ ID NO: 5690 - DNA, 15 bp, Homo sapiens
gatgttttactcaaa

SEQ ID NO: 5691 - DNA, 15 bp, Homo sapiens
agatgttttactcaa

SEQ ID NO: 5692 - DNA, 15 bp, Homo sapiens
aagatgttttactca

SEQ ID NO: 5693 - DNA, 15 bp, Homo sapiens
caagatgttttactc

SEQ ID NO: 5694 - DNA, 15 bp, Homo sapiens
acaagatgttttact

SEQ ID NO: 5695 - DNA, 15 bp, Homo sapiens
tacaagatgttttac

SEQ ID NO: 5696 - DNA, 15 bp, Homo sapiens
ttacaagatgtttta

SEQ ID NO: 5697 - DNA, 15 bp, Homo sapiens
tttacaagatgtttt

SEQ ID NO: 5698 - DNA, 15 bp, Homo sapiens
ttttacaagatgttt

SEQ ID NO: 5699 - DNA, 15 bp, Homo sapiens
tttttacaagatgtt

SEQ ID NO: 5700 - DNA, 15 bp, Homo sapiens
ctttttacaagatgt

SEQ ID NO: 5701 - DNA, 15 bp, Homo sapiens
actttttacaagatg

SEQ ID NO: 5702 - DNA, 15 bp, Homo sapiens
aactttttacaagat

SEQ ID NO: 5703 - DNA, 15 bp, Homo sapiens
taactttttacaaga

SEQ ID NO: 5704 - DNA, 15 bp, Homo sapiens
gtaactttttacaag

SEQ ID NO: 5705 - DNA, 15 bp, Homo sapiens
tgtaactttttacaa

SEQ ID NO: 5706 - DNA, 15 bp, Homo sapiens
ctgtaactttttaca

SEQ ID NO: 5707 - DNA, 15 bp, Homo sapiens
gctgtaactttttac

SEQ ID NO: 5708 - DNA, 15 bp, Homo sapiens
agctgtaacttttta

SEQ ID NO: 5709 - DNA, 15 bp, Homo sapiens
tagctgtaacttttt

SEQ ID NO: 5710 - DNA, 15 bp, Homo sapiens
gtagctgtaactttt

SEQ ID NO: 5711 - DNA, 15 bp, Homo sapiens
tgtagctgtaacttt

SEQ ID NO: 5712 - DNA, 15 bp, Homo sapiens
atgtagctgtaactt

SEQ ID NO: 5713 - DNA, 15 bp, Homo sapiens
tatgtagctgtaact

SEQ ID NO: 5714 - DNA, 15 bp, Homo sapiens
ttatgtagctgtaac

SEQ ID NO: 5715 - DNA, 15 bp, Homo sapiens
attatgtagctgtaa

SEQ ID NO: 5716 - DNA, 15 bp, Homo sapiens
gattatgtagctgta

SEQ ID NO: 5717 - DNA, 15 bp, Homo sapiens
tgattatgtagctgt

SEQ ID NO: 5718 - DNA, 15 bp, Homo sapiens
gtgattatgtagctg

SEQ ID NO: 5719 - DNA, 15 bp, Homo sapiens
ggtgattatgtagct

SEQ ID NO: 5720 - DNA, 15 bp, Homo sapiens
tggtgattatgtagc

SEQ ID NO: 5721 - DNA, 15 bp, Homo sapiens
gtggtgattatgtag

SEQ ID NO: 5722 - DNA, 15 bp, Homo sapiens
ggtggtgattatgta

SEQ ID NO: 5723 - DNA, 15 bp, Homo sapiens
aggtggtgattatgt

SEQ ID NO: 5724 - DNA, 15 bp, Homo sapiens
caggtggtgattatg

SEQ ID NO: 5725 - DNA, 15 bp, Homo sapiens
acaggtggtgattat

SEQ ID NO: 5726 - DNA, 15 bp, Homo sapiens
gacaggtggtgatta

SEQ ID NO: 5727 - DNA, 15 bp, Homo sapiens
ggacaggtggtgatt

SEQ ID NO: 5728 - DNA, 15 bp, Homo sapiens
gggacaggtggtgat

SEQ ID NO: 5729 - DNA, 15 bp, Homo sapiens
agggacaggtggtga

SEQ ID NO: 5730 - DNA, 15 bp, Homo sapiens
tagggacaggtggtg

SEQ ID NO: 5731 - DNA, 15 bp, Homo sapiens
ttagggacaggtggt

SEQ ID NO: 5732 - DNA, 15 bp, Homo sapiens
tttagggacaggtgg

SEQ ID NO: 5733 - DNA, 15 bp, Homo sapiens
atttagggacaggtg

SEQ ID NO: 5734 - DNA, 15 bp, Homo sapiens
tatttagggacaggt

SEQ ID NO: 5735 - DNA, 15 bp, Homo sapiens
ctatttagggacagg

SEQ ID NO: 5736 - DNA, 15 bp, Homo sapiens
actatttagggacag

SEQ ID NO: 5737 - DNA, 15 bp, Homo sapiens
aactatttagggaca

SEQ ID NO: 5738 - DNA, 15 bp, Homo sapiens
aaactatttagggac

SEQ ID NO: 5739 - DNA, 15 bp, Homo sapiens
aaaactatttaggga

SEQ ID NO: 5740 - DNA, 15 bp, Homo sapiens
aaaaactatttaggg

SEQ ID NO: 5741 - DNA, 15 bp, Homo sapiens
caaaaactatttagg

SEQ ID NO: 5742 - DNA, 15 bp, Homo sapiens
gcaaaaactatttag

SEQ ID NO: 5743 - DNA, 15 bp, Homo sapiens
agcaaaaactattta

SEQ ID NO: 5744 - DNA, 15 bp, Homo sapiens
aagcaaaaactattt

SEQ ID NO: 5745 - DNA, 15 bp, Homo sapiens
aaagcaaaaactatt

SEQ ID NO: 5746 - DNA, 15 bp, Homo sapiens
aaaagcaaaaactat

SEQ ID NO: 5747 - DNA, 15 bp, Homo sapiens
aaaaagcaaaaacta

SEQ ID NO: 5748 - DNA, 15 bp, Homo sapiens
gaaaaagcaaaaact

SEQ ID NO: 5749 - DNA, 15 bp, Homo sapiens
agaaaaagcaaaaac

SEQ ID NO: 5750 - DNA, 15 bp, Homo sapiens
aagaaaaagcaaaaa

SEQ ID NO: 5751 - DNA, 15 bp, Homo sapiens
aaagaaaaagcaaaa

SEQ ID NO: 5752 - DNA, 15 bp, Homo sapiens
gaaagaaaaagcaaa

SEQ ID NO: 5753 - DNA, 15 bp, Homo sapiens
agaaagaaaaagcaa

SEQ ID NO: 5754 - DNA, 15 bp, Homo sapiens
aagaaagaaaaagca

SEQ ID NO: 5755 - DNA, 15 bp, Homo sapiens
gaagaaagaaaaagc

SEQ ID NO: 5756 - DNA, 15 bp, Homo sapiens
tgaagaaagaaaaag

SEQ ID NO: 5757 - DNA, 15 bp, Homo sapiens
ttgaagaaagaaaaa

SEQ ID NO: 5758 - DNA, 15 bp, Homo sapiens
attgaagaaagaaaa

SEQ ID NO: 5759 - DNA, 15 bp, Homo sapiens
cattgaagaaagaaa

SEQ ID NO: 5760 - DNA, 15 bp, Homo sapiens
gcattgaagaaagaa

SEQ ID NO: 5761 - DNA, 15 bp, Homo sapiens
tgcattgaagaaaga

SEQ ID NO: 5762 - DNA, 15 bp, Homo sapiens
gtgcattgaagaaag

SEQ ID NO: 5763 - DNA, 15 bp, Homo sapiens
cgtgcattgaagaaa

SEQ ID NO: 5764 - DNA, 15 bp, Homo sapiens
tcgtgcattgaagaa

SEQ ID NO: 5765 - DNA, 15 bp, Homo sapiens
atcgtgcattgaaga

SEQ ID NO: 5766 - DNA, 15 bp, Homo sapiens
gatcgtgcattgaag

SEQ ID NO: 5767 - DNA, 15 bp, Homo sapiens
tgatcgtgcattgaa

SEQ ID NO: 5768 - DNA, 15 bp, Homo sapiens
atgatcgtgcattga

SEQ ID NO: 5769 - DNA, 15 bp, Homo sapiens
aatgatcgtgcattg

SEQ ID NO: 5770 - DNA, 15 bp, Homo sapiens
aaatgatcgtgcatt

SEQ ID NO: 5771 - DNA, 15 bp, Homo sapiens
aaaatgatcgtgcat

SEQ ID NO: 5772 - DNA, 15 bp, Homo sapiens
gaaaatgatcgtgca

SEQ ID NO: 5773 - DNA, 15 bp, Homo sapiens
ggaaaatgatcgtgc

SEQ ID NO: 5774 - DNA, 15 bp, Homo sapiens
gggaaaatgatcgtg

SEQ ID NO: 5775 - DNA, 15 bp, Homo sapiens
ggggaaaatgatcgt

SEQ ID NO: 5776 - DNA, 15 bp, Homo sapiens
gggggaaaatgatcg

SEQ ID NO: 5777 - DNA, 15 bp, Homo sapiens
tgggggaaaatgatc

SEQ ID NO: 5778 - DNA, 15 bp, Homo sapiens
atgggggaaaatgat

SEQ ID NO: 5779 - DNA, 15 bp, Homo sapiens
gatgggggaaaatga

SEQ ID NO: 5780 - DNA, 15 bp, Homo sapiens
tgatgggggaaaatg

SEQ ID NO: 5781 - DNA, 15 bp, Homo sapiens
ttgatgggggaaaat

SEQ ID NO: 5782 - DNA, 15 bp, Homo sapiens
attgatgggggaaaa

SEQ ID NO: 5783 - DNA, 15 bp, Homo sapiens
aattgatgggggaaa

SEQ ID NO: 5784 - DNA, 15 bp, Homo sapiens
aaattgatgggggaa

SEQ ID NO: 5785 - DNA, 15 bp, Homo sapiens
taaattgatggggga

SEQ ID NO: 5786 - DNA, 15 bp, Homo sapiens
ataaattgatggggg

SEQ ID NO: 5787 - DNA, 15 bp, Homo sapiens
aataaattgatgggg

SEQ ID NO: 5788 - DNA, 15 bp, Homo sapiens
aaataaattgatggg

SEQ ID NO: 5789 - DNA, 15 bp, Homo sapiens
aaaataaattgatgg

SEQ ID NO: 5790 - DNA, 15 bp, Homo sapiens
aaaaataaattgatg

SEQ ID NO: 5791 - DNA, 15 bp, Homo sapiens
aaaaaataaattgat

SEQ ID NO: 5792 - DNA, 15 bp, Homo sapiens
taaaaaataaattga

SEQ ID NO: 5793 - DNA, 15 bp, Homo sapiens
ctaaaaaataaattg

SEQ ID NO: 5794 - DNA, 15 bp, Homo sapiens
actaaaaaataaatt

SEQ ID NO: 5795 - DNA, 15 bp, Homo sapiens
aactaaaaaataaat

SEQ ID NO: 5796 - DNA, 15 bp, Homo sapiens
aaactaaaaaataaa

SEQ ID NO: 5797 - DNA, 15 bp, Homo sapiens
gaaactaaaaaataa

SEQ ID NO: 5798 - DNA, 15 bp, Homo sapiens
agaaactaaaaaata

SEQ ID NO: 5799 - DNA, 15 bp, Homo sapiens
aagaaactaaaaaat

SEQ ID NO: 5800 - DNA, 15 bp, Homo sapiens
taagaaactaaaaaa

SEQ ID NO: 5801 - DNA, 15 bp, Homo sapiens
ataagaaactaaaaa

SEQ ID NO: 5802 - DNA, 15 bp, Homo sapiens
tataagaaactaaaa

SEQ ID NO: 5803 - DNA, 15 bp, Homo sapiens
ttataagaaactaaa

SEQ ID NO: 5804 - DNA, 15 bp, Homo sapiens
attataagaaactaa

SEQ ID NO: 5805 - DNA, 15 bp, Homo sapiens
gattataagaaacta

SEQ ID NO: 5806 - DNA, 15 bp, Homo sapiens
agattataagaaact

SEQ ID NO: 5807 - DNA, 15 bp, Homo sapiens
aagattataagaaac

SEQ ID NO: 5808 - DNA, 15 bp, Homo sapiens
caagattataagaaa

SEQ ID NO: 5809 - DNA, 15 bp, Homo sapiens
acaagattataagaa

SEQ ID NO: 5810 - DNA, 15 bp, Homo sapiens
aacaagattataaga

SEQ ID NO: 5811 - DNA, 15 bp, Homo sapiens
caacaagattataag

SEQ ID NO: 5812 - DNA, 15 bp, Homo sapiens
gcaacaagattataa

SEQ ID NO: 5813 - DNA, 15 bp, Homo sapiens
ggcaacaagattata

SEQ ID NO: 5814 - DNA, 15 bp, Homo sapiens
tggcaacaagattat

SEQ ID NO: 5815 - DNA, 15 bp, Homo sapiens
ctggcaacaagatta

SEQ ID NO: 5816 - DNA, 15 bp, Homo sapiens
actggcaacaagatt

SEQ ID NO: 5817 - DNA, 15 bp, Homo sapiens
tactggcaacaagat

SEQ ID NO: 5818 - DNA, 15 bp, Homo sapiens
ctactggcaacaaga

SEQ ID NO: 5819 - DNA, 15 bp, Homo sapiens
cctactggcaacaag

SEQ ID NO: 5820 - DNA, 15 bp, Homo sapiens
gcctactggcaacaa

SEQ ID NO: 5821 - DNA, 15 bp, Homo sapiens
agcctactggcaaca

SEQ ID NO: 5822 - DNA, 15 bp, Homo sapiens
cagcctactggcaac

SEQ ID NO: 5823 - DNA, 15 bp, Homo sapiens
acagcctactggcaa

SEQ ID NO: 5824 - DNA, 15 bp, Homo sapiens
aacagcctactggca

SEQ ID NO: 5825 - DNA, 15 bp, Homo sapiens
aaacagcctactggc

SEQ ID NO: 5826 - DNA, 15 bp, Homo sapiens
aaaacagcctactgg

SEQ ID NO: 5827 - DNA, 15 bp, Homo sapiens
aaaaacagcctactg

SEQ ID NO: 5828 - DNA, 15 bp, Homo sapiens
aaaaaacagcctact

SEQ ID NO: 5829 - DNA, 15 bp, Homo sapiens
taaaaaacagcctac

SEQ ID NO: 5830 - DNA, 15 bp, Homo sapiens
ttaaaaaacagccta

SEQ ID NO: 5831 - DNA, 15 bp, Homo sapiens
tttaaaaaacagcct

SEQ ID NO: 5832 - DNA, 15 bp, Homo sapiens
ttttaaaaaacagcc

SEQ ID NO: 5833 - DNA, 15 bp, Homo sapiens
tttttaaaaaacagc

SEQ ID NO: 5834 - DNA, 15 bp, Homo sapiens
ctttttaaaaaacag

SEQ ID NO: 5835 - DNA, 15 bp, Homo sapiens
gctttttaaaaaaca

SEQ ID NO: 5836 - DNA, 15 bp, Homo sapiens
tgctttttaaaaaac

SEQ ID NO: 5837 - DNA, 15 bp, Homo sapiens
ctgctttttaaaaaa

SEQ ID NO: 5838 - DNA, 15 bp, Homo sapiens
tctgctttttaaaaa

SEQ ID NO: 5839 - DNA, 15 bp, Homo sapiens
ttctgctttttaaaa

SEQ ID NO: 5840 - DNA, 15 bp, Homo sapiens
gttctgctttttaaa

SEQ ID NO: 5841 - DNA, 15 bp, Homo sapiens
tgttctgctttttaa

SEQ ID NO: 5842 - DNA, 15 bp, Homo sapiens
atgttctgcttttta

SEQ ID NO: 5843 - DNA, 15 bp, Homo sapiens
catgttctgcttttt

SEQ ID NO: 5844 - DNA, 15 bp, Homo sapiens
ccatgttctgctttt

SEQ ID NO: 5845 - DNA, 15 bp, Homo sapiens
accatgttctgcttt

SEQ ID NO: 5846 - DNA, 15 bp, Homo sapiens
aaccatgttctgctt

SEQ ID NO: 5847 - DNA, 15 bp, Homo sapiens
aaaccatgttctgct

SEQ ID NO: 5848 - DNA, 15 bp, Homo sapiens
caaaccatgttctgc

SEQ ID NO: 5849 - DNA, 15 bp, Homo sapiens
acaaaccatgttctg

SEQ ID NO: 5850 - DNA, 15 bp, Homo sapiens
aacaaaccatgttct

SEQ ID NO: 5851 - DNA, 15 bp, Homo sapiens
gaacaaaccatgttc

SEQ ID NO: 5852 - DNA, 15 bp, Homo sapiens
agaacaaaccatgtt

SEQ ID NO: 5853 - DNA, 15 bp, Homo sapiens
aagaacaaaccatgt

SEQ ID NO: 5854 - DNA, 15 bp, Homo sapiens
taagaacaaaccatg

SEQ ID NO: 5855 - DNA, 15 bp, Homo sapiens
gtaagaacaaaccat

SEQ ID NO: 5856 - DNA, 15 bp, Homo sapiens
agtaagaacaaacca

SEQ ID NO: 5857 - DNA, 15 bp, Homo sapiens
tagtaagaacaaacc

SEQ ID NO: 5858 - DNA, 15 bp, Homo sapiens
ctagtaagaacaaac

SEQ ID NO: 5859 - DNA, 15 bp, Homo sapiens
gctagtaagaacaaa

SEQ ID NO: 5860 - DNA, 15 bp, Homo sapiens
tgctagtaagaacaa

SEQ ID NO: 5861 - DNA, 15 bp, Homo sapiens
ctgctagtaagaaca

SEQ ID NO: 5862 - DNA, 15 bp, Homo sapiens
cctgctagtaagaac

SEQ ID NO: 5863 - DNA, 15 bp, Homo sapiens
tcctgctagtaagaa

SEQ ID NO: 5864 - DNA, 15 bp, Homo sapiens
ttcctgctagtaaga

SEQ ID NO: 5865 - DNA, 15 bp, Homo sapiens
tttcctgctagtaag

SEQ ID NO: 5866 - DNA, 15 bp, Homo sapiens
ctttcctgctagtaa

SEQ ID NO: 5867 - DNA, 15 bp, Homo sapiens
cctttcctgctagta

SEQ ID NO: 5868 - DNA, 15 bp, Homo sapiens
tcctttcctgctagt

SEQ ID NO: 5869 - DNA, 15 bp, Homo sapiens
ctcctttcctgctag

SEQ ID NO: 5870 - DNA, 15 bp, Homo sapiens
gctcctttcctgcta

SEQ ID NO: 5871 - DNA, 15 bp, Homo sapiens
tgctcctttcctgct

SEQ ID NO: 5872 - DNA, 15 bp, Homo sapiens
atgctcctttcctgc

SEQ ID NO: 5873 - DNA, 15 bp, Homo sapiens
aatgctcctttcctg

SEQ ID NO: 5874 - DNA, 15 bp, Homo sapiens
aaatgctcctttcct

SEQ ID NO: 5875 - DNA, 15 bp, Homo sapiens
taaatgctcctttcc

SEQ ID NO: 5876 - DNA, 15 bp, Homo sapiens
ataaatgctcctttc

SEQ ID NO: 5877 - DNA, 15 bp, Homo sapiens
aataaatgctccttt

SEQ ID NO: 5878 - DNA, 15 bp, Homo sapiens
caataaatgctcctt

SEQ ID NO: 5879 - DNA, 15 bp, Homo sapiens
tcaataaatgctcct

SEQ ID NO: 5880 - DNA, 15 bp, Homo sapiens
ctcaataaatgctcc

SEQ ID NO: 5881 - DNA, 15 bp, Homo sapiens
gctcaataaatgctc

SEQ ID NO: 5882 - DNA, 15 bp, Homo sapiens
ggctcaataaatgct

SEQ ID NO: 5883 - DNA, 15 bp, Homo sapiens
aggctcaataaatgc

SEQ ID NO: 5884 - DNA, 15 bp, Homo sapiens
gaggctcaataaatg

SEQ ID NO: 5885 - DNA, 15 bp, Homo sapiens
agaggctcaataaat

SEQ ID NO: 5886 - DNA, 15 bp, Homo sapiens
cagaggctcaataaa

SEQ ID NO: 5887 - DNA, 15 bp, Homo sapiens
gcagaggctcaataa

SEQ ID NO: 5888 - DNA, 15 bp, Homo sapiens
agcagaggctcaata

SEQ ID NO: 5889 - DNA, 15 bp, Homo sapiens
tagcagaggctcaat

SEQ ID NO: 5890 - DNA, 15 bp, Homo sapiens
atagcagaggctcaa

SEQ ID NO: 5891 - DNA, 15 bp, Homo sapiens
catagcagaggctca

SEQ ID NO: 5892 - DNA, 15 bp, Homo sapiens
ccatagcagaggctc

SEQ ID NO: 5893 - DNA, 15 bp, Homo sapiens
accatagcagaggct

SEQ ID NO: 5894 - DNA, 15 bp, Homo sapiens
caccatagcagaggc

SEQ ID NO: 5895 - DNA, 15 bp, Homo sapiens
acaccatagcagagg

SEQ ID NO: 5896 - DNA, 15 bp, Homo sapiens
gacaccatagcagag

SEQ ID NO: 5897 - DNA, 15 bp, Homo sapiens
agacaccatagcaga

SEQ ID NO: 5898 - DNA, 15 bp, Homo sapiens
aagacaccatagcag

SEQ ID NO: 5899 - DNA, 15 bp, Homo sapiens
aaagacaccatagca

SEQ ID NO: 5900 - DNA, 15 bp, Homo sapiens
aaaagacaccatagc

SEQ ID NO: 5901 - DNA, 15 bp, Homo sapiens
taaaagacaccatag

SEQ ID NO: 5902 - DNA, 15 bp, Homo sapiens
ataaaagacaccata

SEQ ID NO: 5903 - DNA, 15 bp, Homo sapiens
aataaaagacaccat

SEQ ID NO: 5904 - DNA, 15 bp, Homo sapiens
aaataaaagacacca

SEQ ID NO: 5905 - DNA, 15 bp, Homo sapiens
aaaataaaagacacc

SEQ ID NO: 5906 - DNA, 15 bp, Homo sapiens
caaaataaaagacac

SEQ ID NO: 5907 - DNA, 15 bp, Homo sapiens
gcaaaataaaagaca

SEQ ID NO: 5908 - DNA, 15 bp, Homo sapiens
agcaaaataaaagac

SEQ ID NO: 5909 - DNA, 15 bp, Homo sapiens
cagcaaaataaaaga

SEQ ID NO: 5910 - DNA, 15 bp, Homo sapiens
tcagcaaaataaaag

SEQ ID NO: 5911 - DNA, 15 bp, Homo sapiens
ctcagcaaaataaaa

SEQ ID NO: 5912 - DNA, 15 bp, Homo sapiens
tctcagcaaaataaa

SEQ ID NO: 5913 - DNA, 15 bp, Homo sapiens
ctctcagcaaaataa

SEQ ID NO: 5914 - DNA, 15 bp, Homo sapiens
gctctcagcaaaata

SEQ ID NO: 5915 - DNA, 15 bp, Homo sapiens
ggctctcagcaaaat

SEQ ID NO: 5916 - DNA, 15 bp, Homo sapiens
aggctctcagcaaaa

SEQ ID NO: 5917 - DNA, 15 bp, Homo sapiens
taggctctcagcaaa

SEQ ID NO: 5918 - DNA, 15 bp, Homo sapiens
ataggctctcagcaa

SEQ ID NO: 5919 - DNA, 15 bp, Homo sapiens
aataggctctcagca

SEQ ID NO: 5920 - DNA, 15 bp, Homo sapiens
aaataggctctcagc

SEQ ID NO: 5921 - DNA, 15 bp, Homo sapiens
taaataggctctcag

SEQ ID NO: 5922 - DNA, 15 bp, Homo sapiens
gtaaataggctctca

SEQ ID NO: 5923 - DNA, 15 bp, Homo sapiens
tgtaaataggctctc

SEQ ID NO: 5924 - DNA, 15 bp, Homo sapiens
atgtaaataggctct

SEQ ID NO: 5925 - DNA, 15 bp, Homo sapiens
aatgtaaataggctc

SEQ ID NO: 5926 - DNA, 15 bp, Homo sapiens
aaatgtaaataggct

SEQ ID NO: 5927 - DNA, 15 bp, Homo sapiens
gaaatgtaaataggc

SEQ ID NO: 5928 - DNA, 15 bp, Homo sapiens
agaaatgtaaatagg

SEQ ID NO: 5929 - DNA, 15 bp, Homo sapiens
aagaaatgtaaatag

SEQ ID NO: 5930 - DNA, 15 bp, Homo sapiens
aaagaaatgtaaata

SEQ ID NO: 5931 - DNA, 15 bp, Homo sapiens
caaagaaatgtaaat

SEQ ID NO: 5932 - DNA, 15 bp, Homo sapiens
tcaaagaaatgtaaa

SEQ ID NO: 5933 - DNA, 15 bp, Homo sapiens
ctcaaagaaatgtaa

SEQ ID NO: 5934 - DNA, 15 bp, Homo sapiens
tctcaaagaaatgta

SEQ ID NO: 5935 - DNA, 15 bp, Homo sapiens
ctctcaaagaaatgt

SEQ ID NO: 5936 - DNA, 15 bp, Homo sapiens
cctctcaaagaaatg

SEQ ID NO: 5937 - DNA, 15 bp, Homo sapiens
tcctctcaaagaaat

SEQ ID NO: 5938 - DNA, 15 bp, Homo sapiens
ttcctctcaaagaaa

SEQ ID NO: 5939 - DNA, 15 bp, Homo sapiens
tttcctctcaaagaa

SEQ ID NO: 5940 - DNA, 15 bp, Homo sapiens
ttttcctctcaaaga

SEQ ID NO: 5941 - DNA, 15 bp, Homo sapiens
gttttcctctcaaag

SEQ ID NO: 5942 - DNA, 15 bp, Homo sapiens
tgttttcctctcaaa

SEQ ID NO: 5943 - DNA, 15 bp, Homo sapiens
ttgttttcctctcaa

SEQ ID NO: 5944 - DNA, 15 bp, Homo sapiens
gttgttttcctctca

SEQ ID NO: 5945 - DNA, 15 bp, Homo sapiens
tgttgttttcctctc

SEQ ID NO: 5946 - DNA, 15 bp, Homo sapiens
ttgttgttttcctct

SEQ ID NO: 5947 - DNA, 15 bp, Homo sapiens
tttgttgttttcctc

SEQ ID NO: 5948 - DNA, 15 bp, Homo sapiens
ctttgttgttttcct

SEQ ID NO: 5949 - DNA, 15 bp, Homo sapiens
cctttgttgttttcc

SEQ ID NO: 5950 - DNA, 15 bp, Homo sapiens
ccctttgttgttttc

SEQ ID NO: 5951 - DNA, 15 bp, Homo sapiens
accctttgttgtttt

SEQ ID NO: 5952 - DNA, 15 bp, Homo sapiens
aaccctttgttgttt

SEQ ID NO: 5953 - DNA, 15 bp, Homo sapiens
taaccctttgttgtt

SEQ ID NO: 5954 - DNA, 15 bp, Homo sapiens
gtaaccctttgttgt

SEQ ID NO: 5955 - DNA, 15 bp, Homo sapiens
tgtaaccctttgttg

SEQ ID NO: 5956 - DNA, 15 bp, Homo sapiens
atgtaaccctttgtt

SEQ ID NO: 5957 - DNA, 15 bp, Homo sapiens
catgtaaccctttgt

SEQ ID NO: 5958 - DNA, 15 bp, Homo sapiens
tcatgtaaccctttg

SEQ ID NO: 5959 - DNA, 15 bp, Homo sapiens
ttcatgtaacccttt

SEQ ID NO: 5960 - DNA, 15 bp, Homo sapiens
tttcatgtaaccctt

SEQ ID NO: 5961 - DNA, 15 bp, Homo sapiens
ctttcatgtaaccct

SEQ ID NO: 5962 - DNA, 15 bp, Homo sapiens
tctttcatgtaaccc

SEQ ID NO: 5963 - DNA, 15 bp, Homo sapiens
gtctttcatgtaacc

SEQ ID NO: 5964 - DNA, 15 bp, Homo sapiens
ggtctttcatgtaac

SEQ ID NO: 5965 - DNA, 15 bp, Homo sapiens
tggtctttcatgtaa

SEQ ID NO: 5966 - DNA, 15 bp, Homo sapiens
atggtctttcatgta

SEQ ID NO: 5967 - DNA, 15 bp, Homo sapiens
catggtctttcatgt

SEQ ID NO: 5968 - DNA, 15 bp, Homo sapiens
acatggtctttcatg

SEQ ID NO: 5969 - DNA, 15 bp, Homo sapiens
cacatggtctttcat

SEQ ID NO: 5970 - DNA, 15 bp, Homo sapiens
tcacatggtctttca

SEQ ID NO: 5971 - DNA, 15 bp, Homo sapiens
ttcacatggtctttc

SEQ ID NO: 5972 - DNA, 15 bp, Homo sapiens
attcacatggtcttt

SEQ ID NO: 5973 - DNA, 15 bp, Homo sapiens
tattcacatggtctt

SEQ ID NO: 5974 - DNA, 15 bp, Homo sapiens
ctattcacatggtct

SEQ ID NO: 5975 - DNA, 15 bp, Homo sapiens
gctattcacatggtc

SEQ ID NO: 5976 - DNA, 15 bp, Homo sapiens
ggctattcacatggt

SEQ ID NO: 5977 - DNA, 15 bp, Homo sapiens
gggctattcacatgg

SEQ ID NO: 5978 - DNA, 15 bp, Homo sapiens
ggggctattcacatg

SEQ ID NO: 5979 - DNA, 15 bp, Homo sapiens
aggggctattcacat

SEQ ID NO: 5980 - DNA, 15 bp, Homo sapiens
taggggctattcaca

SEQ ID NO: 5981 - DNA, 15 bp, Homo sapiens
ctaggggctattcac

SEQ ID NO: 5982 - DNA, 15 bp, Homo sapiens
gctaggggctattca

SEQ ID NO: 5983 - DNA, 15 bp, Homo sapiens
agctaggggctattc

SEQ ID NO: 5984 - DNA, 15 bp, Homo sapiens
cagctaggggctatt

SEQ ID NO: 5985 - DNA, 15 bp, Homo sapiens
tcagctaggggctat

SEQ ID NO: 5986 - DNA, 15 bp, Homo sapiens
atcagctaggggcta

SEQ ID NO: 5987 - DNA, 15 bp, Homo sapiens
gatcagctaggggct

SEQ ID NO: 5988 - DNA, 15 bp, Homo sapiens
agatcagctaggggc

SEQ ID NO: 5989 - DNA, 15 bp, Homo sapiens
tagatcagctagggg

SEQ ID NO: 5990 - DNA, 15 bp, Homo sapiens
atagatcagctaggg

SEQ ID NO: 5991 - DNA, 15 bp, Homo sapiens
aatagatcagctagg

SEQ ID NO: 5992 - DNA, 15 bp, Homo sapiens
taatagatcagctag

SEQ ID NO: 5993 - DNA, 15 bp, Homo sapiens
ttaatagatcagcta

SEQ ID NO: 5994 - DNA, 15 bp, Homo sapiens
tttaatagatcagct

SEQ ID NO: 5995 - DNA, 15 bp, Homo sapiens
gtttaatagatcagc

SEQ ID NO: 5996 - DNA, 15 bp, Homo sapiens
agtttaatagatcag

SEQ ID NO: 5997 - DNA, 15 bp, Homo sapiens
aagtttaatagatca

SEQ ID NO: 5998 - DNA, 15 bp, Homo sapiens
caagtttaatagatc

SEQ ID NO: 5999 - DNA, 15 bp, Homo sapiens
gcaagtttaatagat

SEQ ID NO: 6000 - DNA, 15 bp, Homo sapiens
agcaagtttaataga

SEQ ID NO: 6001 - DNA, 15 bp, Homo sapiens
tagcaagtttaatag

SEQ ID NO: 6002 - DNA, 15 bp, Homo sapiens
atagcaagtttaata

SEQ ID NO: 6003 - DNA, 15 bp, Homo sapiens
aatagcaagtttaat

SEQ ID NO: 6004 - DNA, 15 bp, Homo sapiens
gaatagcaagtttaa

SEQ ID NO: 6005 - DNA, 15 bp, Homo sapiens
ggaatagcaagttta

SEQ ID NO: 6006 - DNA, 15 bp, Homo sapiens
gggaatagcaagttt

SEQ ID NO: 6007 - DNA, 15 bp, Homo sapiens
ggggaatagcaagtt

SEQ ID NO: 6008 - DNA, 15 bp, Homo sapiens
cggggaatagcaagt

SEQ ID NO: 6009 - DNA, 15 bp, Homo sapiens
ccggggaatagcaag

SEQ ID NO: 6010 - DNA, 15 bp, Homo sapiens
gccggggaatagcaa

SEQ ID NO: 6011 - DNA, 15 bp, Homo sapiens
ggccggggaatagca

SEQ ID NO: 6012 - DNA, 15 bp, Homo sapiens
tggccggggaatagc

SEQ ID NO: 6013 - DNA, 15 bp, Homo sapiens
ctggccggggaatag

SEQ ID NO: 6014 - DNA, 15 bp, Homo sapiens
gctggccggggaata

SEQ ID NO: 6015 - DNA, 15 bp, Homo sapiens
agctggccggggaat

SEQ ID NO: 6016 - DNA, 15 bp, Homo sapiens
cagctggccggggaa

SEQ ID NO: 6017 - DNA, 15 bp, Homo sapiens
gcagctggccgggga

SEQ ID NO: 6018 - DNA, 15 bp, Homo sapiens
agcagctggccgggg

SEQ ID NO: 6019 - DNA, 15 bp, Homo sapiens
aagcagctggccggg

SEQ ID NO: 6020 - DNA, 15 bp, Homo sapiens
gaagcagctggccgg

SEQ ID NO: 6021 - DNA, 15 bp, Homo sapiens
tgaagcagctggccg

SEQ ID NO: 6022 - DNA, 15 bp, Homo sapiens
ctgaagcagctggcc

SEQ ID NO: 6023 - DNA, 15 bp, Homo sapiens
tctgaagcagctggc

SEQ ID NO: 6024 - DNA, 15 bp, Homo sapiens
atctgaagcagctgg

SEQ ID NO: 6025 - DNA, 15 bp, Homo sapiens
gatctgaagcagctg

SEQ ID NO: 6026 - DNA, 15 bp, Homo sapiens
agatctgaagcagct

SEQ ID NO: 6027 - DNA, 15 bp, Homo sapiens
gagatctgaagcagc

SEQ ID NO: 6028 - DNA, 15 bp, Homo sapiens
ggagatctgaagcag

SEQ ID NO: 6029 - DNA, 15 bp, Homo sapiens
aggagatctgaagca

SEQ ID NO: 6030 - DNA, 15 bp, Homo sapiens
aaggagatctgaagc

SEQ ID NO: 6031 - DNA, 15 bp, Homo sapiens
gaaggagatctgaag

SEQ ID NO: 6032 - DNA, 15 bp, Homo sapiens
tgaaggagatctgaa

SEQ ID NO: 6033 - DNA, 15 bp, Homo sapiens
ctgaaggagatctga

SEQ ID NO: 6034 - DNA, 15 bp, Homo sapiens
tctgaaggagatctg

SEQ ID NO: 6035 - DNA, 15 bp, Homo sapiens
atctgaaggagatct

SEQ ID NO: 6036 - DNA, 15 bp, Homo sapiens
gatctgaaggagatc

SEQ ID NO: 6037 - DNA, 15 bp, Homo sapiens
agatctgaaggagat

SEQ ID NO: 6038 - DNA, 15 bp, Homo sapiens
aagatctgaaggaga

SEQ ID NO: 6039 - DNA, 15 bp, Homo sapiens
taagatctgaaggag

SEQ ID NO: 6040 - DNA, 15 bp, Homo sapiens
ataagatctgaagga

SEQ ID NO: 6041 - DNA, 15 bp, Homo sapiens
cataagatctgaagg

SEQ ID NO: 6042 - DNA, 15 bp, Homo sapiens
acataagatctgaag

SEQ ID NO: 6043 - DNA, 15 bp, Homo sapiens
cacataagatctgaa

SEQ ID NO: 6044 - DNA, 15 bp, Homo sapiens
acacataagatctga

SEQ ID NO: 6045 - DNA, 15 bp, Homo sapiens
aacacataagatctg

SEQ ID NO: 6046 - DNA, 15 bp, Homo sapiens
aaacacataagatct

SEQ ID NO: 6047 - DNA, 15 bp, Homo sapiens
gaaacacataagatc

SEQ ID NO: 6048 - DNA, 15 bp, Homo sapiens
ggaaacacataagat

SEQ ID NO: 6049 - DNA, 15 bp, Homo sapiens
aggaaacacataaga

SEQ ID NO: 6050 - DNA, 15 bp, Homo sapiens
aaggaaacacataag

SEQ ID NO: 6051 - DNA, 15 bp, Homo sapiens
gaaggaaacacataa

SEQ ID NO: 6052 - DNA, 15 bp, Homo sapiens
ggaaggaaacacata

SEQ ID NO: 6053 - DNA, 15 bp, Homo sapiens
aggaaggaaacacat

SEQ ID NO: 6054 - DNA, 15 bp, Homo sapiens
taggaaggaaacaca

SEQ ID NO: 6055 - DNA, 15 bp, Homo sapiens
ttaggaaggaaacac

SEQ ID NO: 6056 - DNA, 15 bp, Homo sapiens
cttaggaaggaaaca

SEQ ID NO: 6057 - DNA, 15 bp, Homo sapiens
ccttaggaaggaaac

SEQ ID NO: 6058 - DNA, 15 bp, Homo sapiens
accttaggaaggaaa

SEQ ID NO: 6059 - DNA, 15 bp, Homo sapiens
gaccttaggaaggaa

SEQ ID NO: 6060 - DNA, 15 bp, Homo sapiens
ggaccttaggaagga

SEQ ID NO: 6061 - DNA, 15 bp, Homo sapiens
gggaccttaggaagg

SEQ ID NO: 6062 - DNA, 15 bp, Homo sapiens
agggaccttaggaag

SEQ ID NO: 6063 - DNA, 15 bp, Homo sapiens
cagggaccttaggaa

SEQ ID NO: 6064 - DNA, 15 bp, Homo sapiens
ccagggaccttagga

SEQ ID NO: 6065 - DNA, 15 bp, Homo sapiens
tccagggaccttagg

SEQ ID NO: 6066 - DNA, 15 bp, Homo sapiens
ctccagggaccttag

SEQ ID NO: 6067 - DNA, 15 bp, Homo sapiens
actccagggacctta

SEQ ID NO: 6068 - DNA, 15 bp, Homo sapiens
tactccagggacctt

SEQ ID NO: 6069 - DNA, 15 bp, Homo sapiens
ttactccagggacct

SEQ ID NO: 6070 - DNA, 15 bp, Homo sapiens
cttactccagggacc

SEQ ID NO: 6071 - DNA, 15 bp, Homo sapiens
ccttactccagggac

SEQ ID NO: 6072 - DNA, 15 bp, Homo sapiens
cccttactccaggga

SEQ ID NO: 6073 - DNA, 15 bp, Homo sapiens
acccttactccaggg

SEQ ID NO: 6074 - DNA, 15 bp, Homo sapiens
aacccttactccagg

SEQ ID NO: 6075 - DNA, 15 bp, Homo sapiens
caacccttactccag

SEQ ID NO: 6076 - DNA, 15 bp, Homo sapiens
gcaacccttactcca

SEQ ID NO: 6077 - DNA, 15 bp, Homo sapiens
tgcaacccttactcc

SEQ ID NO: 6078 - DNA, 15 bp, Homo sapiens
atgcaacccttactc

SEQ ID NO: 6079 - DNA, 15 bp, Homo sapiens
tatgcaacccttact

SEQ ID NO: 6080 - DNA, 15 bp, Homo sapiens
ctatgcaacccttac

SEQ ID NO: 6081 - DNA, 15 bp, Homo sapiens
tctatgcaaccctta

SEQ ID NO: 6082 - DNA, 15 bp, Homo sapiens
gtctatgcaaccctt

SEQ ID NO: 6083 - DNA, 15 bp, Homo sapiens
ggtctatgcaaccct

SEQ ID NO: 6084 - DNA, 15 bp, Homo sapiens
aggtctatgcaaccc

SEQ ID NO: 6085 - DNA, 15 bp, Homo sapiens
taggtctatgcaacc

SEQ ID NO: 6086 - DNA, 15 bp, Homo sapiens
ataggtctatgcaac

SEQ ID NO: 6087 - DNA, 15 bp, Homo sapiens
aataggtctatgcaa

SEQ ID NO: 6088 - DNA, 15 bp, Homo sapiens
gaataggtctatgca

SEQ ID NO: 6089 - DNA, 15 bp, Homo sapiens
agaataggtctatgc

SEQ ID NO: 6090 - DNA, 15 bp, Homo sapiens
tagaataggtctatg

SEQ ID NO: 6091 - DNA, 15 bp, Homo sapiens
gtagaataggtctat

SEQ ID NO: 6092 - DNA, 15 bp, Homo sapiens
agtagaataggtcta

SEQ ID NO: 6093 - DNA, 15 bp, Homo sapiens
gagtagaataggtct

SEQ ID NO: 6094 - DNA, 15 bp, Homo sapiens
agagtagaataggtc

SEQ ID NO: 6095 - DNA, 15 bp, Homo sapiens
gagagtagaataggt

SEQ ID NO: 6096 - DNA, 15 bp, Homo sapiens
ggagagtagaatagg

SEQ ID NO: 6097 - DNA, 15 bp, Homo sapiens
tggagagtagaatag

SEQ ID NO: 6098 - DNA, 15 bp, Homo sapiens
ttggagagtagaata

SEQ ID NO: 6099 - DNA, 15 bp, Homo sapiens
gttggagagtagaat

SEQ ID NO: 6100 - DNA, 15 bp, Homo sapiens
agttggagagtagaa

SEQ ID NO: 6101 - DNA, 15 bp, Homo sapiens
gagttggagagtaga

SEQ ID NO: 6102 - DNA, 15 bp, Homo sapiens
tgagttggagagtag

SEQ ID NO: 6103 - DNA, 15 bp, Homo sapiens
gtgagttggagagta

SEQ ID NO: 6104 - DNA, 15 bp, Homo sapiens
tgtgagttggagagt

SEQ ID NO: 6105 - DNA, 15 bp, Homo sapiens
atgtgagttggagag

SEQ ID NO: 6106 - DNA, 15 bp, Homo sapiens
catgtgagttggaga

SEQ ID NO: 6107 - DNA, 15 bp, Homo sapiens
acatgtgagttggag

SEQ ID NO: 6108 - DNA, 15 bp, Homo sapiens
gacatgtgagttgga

SEQ ID NO: 6109 - DNA, 15 bp, Homo sapiens
ggacatgtgagttgg

SEQ ID NO: 6110 - DNA, 15 bp, Homo sapiens
gggacatgtgagttg

SEQ ID NO: 6111 - DNA, 15 bp, Homo sapiens
agggacatgtgagtt

SEQ ID NO: 6112 - DNA, 15 bp, Homo sapiens
gagggacatgtgagt

SEQ ID NO: 6113 - DNA, 15 bp, Homo sapiens
agagggacatgtgag

SEQ ID NO: 6114 - DNA, 15 bp, Homo sapiens
gagagggacatgtga

SEQ ID NO: 6115 - DNA, 15 bp, Homo sapiens
ggagagggacatgtg

SEQ ID NO: 6116 - DNA, 15 bp, Homo sapiens
gggagagggacatgt

SEQ ID NO: 6117 - DNA, 15 bp, Homo sapiens
agggagagggacatg

SEQ ID NO: 6118 - DNA, 15 bp, Homo sapiens
gagggagagggacat

SEQ ID NO: 6119 - DNA, 15 bp, Homo sapiens
agagggagagggaca

SEQ ID NO: 6120 - DNA, 15 bp, Homo sapiens
aagagggagagggac

SEQ ID NO: 6121 - DNA, 15 bp, Homo sapiens
gaagagggagaggga

SEQ ID NO: 6122 - DNA, 15 bp, Homo sapiens
ggaagagggagaggg

SEQ ID NO: 6123 - DNA, 15 bp, Homo sapiens
aggaagagggagagg

SEQ ID NO: 6124 - DNA, 15 bp, Homo sapiens
gaggaagagggagag

SEQ ID NO: 6125 - DNA, 15 bp, Homo sapiens
agaggaagagggaga

SEQ ID NO: 6126 - DNA, 15 bp, Homo sapiens
gagaggaagagggag

SEQ ID NO: 6127 - DNA, 15 bp, Homo sapiens
ggagaggaagaggga

SEQ ID NO: 6128 - DNA, 15 bp, Homo sapiens
tggagaggaagaggg

SEQ ID NO: 6129 - DNA, 15 bp, Homo sapiens
atggagaggaagagg

SEQ ID NO: 6130 - DNA, 15 bp, Homo sapiens
tatggagaggaagag

SEQ ID NO: 6131 - DNA, 15 bp, Homo sapiens
ttatggagaggaaga

SEQ ID NO: 6132 - DNA, 15 bp, Homo sapiens
attatggagaggaag

SEQ ID NO: 6133 - DNA, 15 bp, Homo sapiens
aattatggagaggaa

SEQ ID NO: 6134 - DNA, 15 bp, Homo sapiens
gaattatggagagga

SEQ ID NO: 6135 - DNA, 15 bp, Homo sapiens
ggaattatggagagg

SEQ ID NO: 6136 - DNA, 15 bp, Homo sapiens
tggaattatggagag

SEQ ID NO: 6137 - DNA, 15 bp, Homo sapiens
gtggaattatggaga

SEQ ID NO: 6138 - DNA, 15 bp, Homo sapiens
tgtggaattatggag

SEQ ID NO: 6139 - DNA, 15 bp, Homo sapiens
atgtggaattatgga

SEQ ID NO: 6140 - DNA, 15 bp, Homo sapiens
gatgtggaattatgg

SEQ ID NO: 6141 - DNA, 15 bp, Homo sapiens
agatgtggaattatg

SEQ ID NO: 6142 - DNA, 15 bp, Homo sapiens
gagatgtggaattat

SEQ ID NO: 6143 - DNA, 15 bp, Homo sapiens
ggagatgtggaatta

SEQ ID NO: 6144 - DNA, 15 bp, Homo sapiens
tggagatgtggaatt

SEQ ID NO: 6145 - DNA, 15 bp, Homo sapiens
ttggagatgtggaat

SEQ ID NO: 6146 - DNA, 15 bp, Homo sapiens
gttggagatgtggaa

SEQ ID NO: 6147 - DNA, 15 bp, Homo sapiens
ggttggagatgtgga

SEQ ID NO: 6148 - DNA, 15 bp, Homo sapiens
gggttggagatgtgg

SEQ ID NO: 6149 - DNA, 15 bp, Homo sapiens
ggggttggagatgtg

SEQ ID NO: 6150 - DNA, 15 bp, Homo sapiens
gggggttggagatgt

SEQ ID NO: 6151 - DNA, 15 bp, Homo sapiens
tgggggttggagatg

SEQ ID NO: 6152 - DNA, 15 bp, Homo sapiens
gtgggggttggagat

SEQ ID NO: 6153 - DNA, 15 bp, Homo sapiens
ggtgggggttggaga

SEQ ID NO: 6154 - DNA, 15 bp, Homo sapiens
gggtgggggttggag

SEQ ID NO: 6155 - DNA, 15 bp, Homo sapiens
ggggtgggggttgga

SEQ ID NO: 6156 - DNA, 15 bp, Homo sapiens
aggggtgggggttgg

SEQ ID NO: 6157 - DNA, 15 bp, Homo sapiens
taggggtgggggttg

SEQ ID NO: 6158 - DNA, 15 bp, Homo sapiens
ataggggtgggggtt

SEQ ID NO: 6159 - DNA, 15 bp, Homo sapiens
cataggggtgggggt

SEQ ID NO: 6160 - DNA, 15 bp, Homo sapiens
acataggggtggggg

SEQ ID NO: 6161 - DNA, 15 bp, Homo sapiens
cacataggggtgggg

SEQ ID NO: 6162 - DNA, 15 bp, Homo sapiens
gcacataggggtggg

SEQ ID NO: 6163 - DNA, 15 bp, Homo sapiens
tgcacataggggtgg

SEQ ID NO: 6164 - DNA, 15 bp, Homo sapiens
ttgcacataggggtg

SEQ ID NO: 6165 - DNA, 15 bp, Homo sapiens
attgcacataggggt

SEQ ID NO: 6166 - DNA, 15 bp, Homo sapiens
cattgcacatagggg

SEQ ID NO: 6167 - DNA, 15 bp, Homo sapiens
gcattgcacataggg

SEQ ID NO: 6168 - DNA, 15 bp, Homo sapiens
ggcattgcacatagg

SEQ ID NO: 6169 - DNA, 15 bp, Homo sapiens
tggcattgcacatag

SEQ ID NO: 6170 - DNA, 15 bp, Homo sapiens
gtggcattgcacata

SEQ ID NO: 6171 - DNA, 15 bp, Homo sapiens
tgtggcattgcacat

SEQ ID NO: 6172 - DNA, 15 bp, Homo sapiens
ctgtggcattgcaca

SEQ ID NO: 6173 - DNA, 15 bp, Homo sapiens
cctgtggcattgcac

SEQ ID NO: 6174 - DNA, 15 bp, Homo sapiens
ccctgtggcattgca

SEQ ID NO: 6175 - DNA, 15 bp, Homo sapiens
accctgtggcattgc

SEQ ID NO: 6176 - DNA, 15 bp, Homo sapiens
caccctgtggcattg

SEQ ID NO: 6177 - DNA, 15 bp, Homo sapiens
acaccctgtggcatt

SEQ ID NO: 6178 - DNA, 15 bp, Homo sapiens
cacaccctgtggcat

SEQ ID NO: 6179 - DNA, 15 bp, Homo sapiens
ccacaccctgtggca

SEQ ID NO: 6180 - DNA, 15 bp, Homo sapiens
tccacaccctgtggc

SEQ ID NO: 6181 - DNA, 15 bp, Homo sapiens
gtccacaccctgtgg

SEQ ID NO: 6182 - DNA, 15 bp, Homo sapiens
agtccacaccctgtg

SEQ ID NO: 6183 - DNA, 15 bp, Homo sapiens
cagtccacaccctgt

SEQ ID NO: 6184 - DNA, 15 bp, Homo sapiens
gcagtccacaccctg

SEQ ID NO: 6185 - DNA, 15 bp, Homo sapiens
ggcagtccacaccct

SEQ ID NO: 6186 - DNA, 15 bp, Homo sapiens
tggcagtccacaccc

SEQ ID NO: 6187 - DNA, 15 bp, Homo sapiens
gtggcagtccacacc

SEQ ID NO: 6188 - DNA, 15 bp, Homo sapiens
tgtggcagtccacac

SEQ ID NO: 6189 - DNA, 15 bp, Homo sapiens
ctgtggcagtccaca

SEQ ID NO: 6190 - DNA, 15 bp, Homo sapiens
gctgtggcagtccac

SEQ ID NO: 6191 - DNA, 15 bp, Homo sapiens
ggctgtggcagtcca

SEQ ID NO: 6192 - DNA, 15 bp, Homo sapiens
tggctgtggcagtcc

SEQ ID NO: 6193 - DNA, 15 bp, Homo sapiens
gtggctgtggcagtc

SEQ ID NO: 6194 - DNA, 15 bp, Homo sapiens
agtggctgtggcagt

SEQ ID NO: 6195 - DNA, 15 bp, Homo sapiens
cagtggctgtggcag

SEQ ID NO: 6196 - DNA, 15 bp, Homo sapiens
ccagtggctgtggca

SEQ ID NO: 6197 - DNA, 15 bp, Homo sapiens
tccagtggctgtggc

SEQ ID NO: 6198 - DNA, 15 bp, Homo sapiens
atccagtggctgtgg

SEQ ID NO: 6199 - DNA, 15 bp, Homo sapiens
gatccagtggctgtg

SEQ ID NO: 6200 - DNA, 15 bp, Homo sapiens
agatccagtggctgt

SEQ ID NO: 6201 - DNA, 15 bp, Homo sapiens
cagatccagtggctg

SEQ ID NO: 6202 - DNA, 15 bp, Homo sapiens
gcagatccagtggct

SEQ ID NO: 6203 - DNA, 15 bp, Homo sapiens
agcagatccagtggc

SEQ ID NO: 6204 - DNA, 15 bp, Homo sapiens
aagcagatccagtgg

SEQ ID NO: 6205 - DNA, 15 bp, Homo sapiens
aaagcagatccagtg

SEQ ID NO: 6206 - DNA, 15 bp, Homo sapiens
aaaagcagatccagt

SEQ ID NO: 6207 - DNA, 15 bp, Homo sapiens
caaaagcagatccag

SEQ ID NO: 6208 - DNA, 15 bp, Homo sapiens
ccaaaagcagatcca

SEQ ID NO: 6209 - DNA, 15 bp, Homo sapiens
tccaaaagcagatcc

SEQ ID NO: 6210 - DNA, 15 bp, Homo sapiens
ttccaaaagcagatc

SEQ ID NO: 6211 - DNA, 15 bp, Homo sapiens
attccaaaagcagat

SEQ ID NO: 6212 - DNA, 15 bp, Homo sapiens
gattccaaaagcaga

SEQ ID NO: 6213 - DNA, 15 bp, Homo sapiens
tgattccaaaagcag

SEQ ID NO: 6214 - DNA, 15 bp, Homo sapiens
ttgattccaaaagca

SEQ ID NO: 6215 - DNA, 15 bp, Homo sapiens
cttgattccaaaagc

SEQ ID NO: 6216 - DNA, 15 bp, Homo sapiens
tcttgattccaaaag

SEQ ID NO: 6217 - DNA, 15 bp, Homo sapiens
ctcttgattccaaaa

SEQ ID NO: 6218 - DNA, 15 bp, Homo sapiens
actcttgattccaaa

SEQ ID NO: 6219 - DNA, 15 bp, Homo sapiens
gactcttgattccaa

SEQ ID NO: 6220 - DNA, 15 bp, Homo sapiens
ggactcttgattcca

SEQ ID NO: 6221 - DNA, 15 bp, Homo sapiens
aggactcttgattcc

SEQ ID NO: 6222 - DNA, 15 bp, Homo sapiens
aaggactcttgattc

SEQ ID NO: 6223 - DNA, 15 bp, Homo sapiens
taaggactcttgatt

SEQ ID NO: 6224 - DNA, 15 bp, Homo sapiens
ttaaggactcttgat

SEQ ID NO: 6225 - DNA, 15 bp, Homo sapiens
cttaaggactcttga

SEQ ID NO: 6226 - DNA, 15 bp, Homo sapiens
gcttaaggactcttg

SEQ ID NO: 6227 - DNA, 15 bp, Homo sapiens
agcttaaggactctt

SEQ ID NO: 6228 - DNA, 15 bp, Homo sapiens
gagcttaaggactct

SEQ ID NO: 6229 - DNA, 15 bp, Homo sapiens
ggagcttaaggactc

SEQ ID NO: 6230 - DNA, 15 bp, Homo sapiens
tggagcttaaggact

SEQ ID NO: 6231 - DNA, 15 bp, Homo sapiens
ttggagcttaaggac

SEQ ID NO: 6232 - DNA, 15 bp, Homo sapiens
tttggagcttaagga

SEQ ID NO: 6233 - DNA, 15 bp, Homo sapiens
atttggagcttaagg

SEQ ID NO: 6234 - DNA, 15 bp, Homo sapiens
catttggagcttaag

SEQ ID NO: 6235 - DNA, 15 bp, Homo sapiens
ccatttggagcttaa

SEQ ID NO: 6236 - DNA, 15 bp, Homo sapiens
tccatttggagctta

SEQ ID NO: 6237 - DNA, 15 bp, Homo sapiens
ttccatttggagctt

SEQ ID NO: 6238 - DNA, 15 bp, Homo sapiens
gttccatttggagct

SEQ ID NO: 6239 - DNA, 15 bp, Homo sapiens
ggttccatttggagc

SEQ ID NO: 6240 - DNA, 15 bp, Homo sapiens
cggttccatttggag

SEQ ID NO: 6241 - DNA, 15 bp, Homo sapiens
tcggttccatttgga

SEQ ID NO: 6242 - DNA, 15 bp, Homo sapiens
ttcggttccatttgg

SEQ ID NO: 6243 - DNA, 15 bp, Homo sapiens
tttcggttccatttg

SEQ ID NO: 6244 - DNA, 15 bp, Homo sapiens
atttcggttccattt

SEQ ID NO: 6245 - DNA, 15 bp, Homo sapiens
aatttcggttccatt

SEQ ID NO: 6246 - DNA, 15 bp, Homo sapiens
aaatttcggttccat

SEQ ID NO: 6247 - DNA, 15 bp, Homo sapiens
taaatttcggttcca

SEQ ID NO: 6248 - DNA, 15 bp, Homo sapiens
ttaaatttcggttcc

SEQ ID NO: 6249 - DNA, 15 bp, Homo sapiens
tttaaatttcggttc

SEQ ID NO: 6250 - DNA, 15 bp, Homo sapiens
atttaaatttcggtt

SEQ ID NO: 6251 - DNA, 15 bp, Homo sapiens
tatttaaatttcggt

SEQ ID NO: 6252 - DNA, 15 bp, Homo sapiens
gtatttaaatttcgg

SEQ ID NO: 6253 - DNA, 15 bp, Homo sapiens
ggtatttaaatttcg

SEQ ID NO: 6254 - DNA, 15 bp, Homo sapiens
tggtatttaaatttc

SEQ ID NO: 6255 - DNA, 15 bp, Homo sapiens
ttggtatttaaattt

SEQ ID NO: 6256 - DNA, 15 bp, Homo sapiens
gttggtatttaaatt

SEQ ID NO: 6257 - DNA, 15 bp, Homo sapiens
agttggtatttaaat

SEQ ID NO: 6258 - DNA, 15 bp, Homo sapiens
aagttggtatttaaa

SEQ ID NO: 6259 - DNA, 15 bp, Homo sapiens
aaagttggtatttaa

SEQ ID NO: 6260 - DNA, 15 bp, Homo sapiens
gaaagttggtattta

SEQ ID NO: 6261 - DNA, 15 bp, Homo sapiens
tgaaagttggtattt

SEQ ID NO: 6262 - DNA, 15 bp, Homo sapiens
ttgaaagttggtatt

SEQ ID NO: 6263 - DNA, 15 bp, Homo sapiens
gttgaaagttggtat

SEQ ID NO: 6264 - DNA, 15 bp, Homo sapiens
ggttgaaagttggta

SEQ ID NO: 6265 - DNA, 15 bp, Homo sapiens
tggttgaaagttggt

SEQ ID NO: 6266 - DNA, 15 bp, Homo sapiens
atggttgaaagttgg

SEQ ID NO: 6267 - DNA, 15 bp, Homo sapiens
tatggttgaaagttg

SEQ ID NO: 6268 - DNA, 15 bp, Homo sapiens
atatggttgaaagtt

SEQ ID NO: 6269 - DNA, 15 bp, Homo sapiens
catatggttgaaagt

SEQ ID NO: 6270 - DNA, 15 bp, Homo sapiens
acatatggttgaaag

SEQ ID NO: 6271 - DNA, 15 bp, Homo sapiens
aacatatggttgaaa

SEQ ID NO: 6272 - DNA, 15 bp, Homo sapiens
taacatatggttgaa

SEQ ID NO: 6273 - DNA, 15 bp, Homo sapiens
ttaacatatggttga

SEQ ID NO: 6274 - DNA, 15 bp, Homo sapiens
gttaacatatggttg

SEQ ID NO: 6275 - DNA, 15 bp, Homo sapiens
tgttaacatatggtt

SEQ ID NO: 6276 - DNA, 15 bp, Homo sapiens
atgttaacatatggt

SEQ ID NO: 6277 - DNA, 15 bp, Homo sapiens
gatgttaacatatgg

SEQ ID NO: 6278 - DNA, 15 bp, Homo sapiens
tgatgttaacatatg

SEQ ID NO: 6279 - DNA, 15 bp, Homo sapiens
ctgatgttaacatat

SEQ ID NO: 6280 - DNA, 15 bp, Homo sapiens
gctgatgttaacata

SEQ ID NO: 6281 - DNA, 15 bp, Homo sapiens
tgctgatgttaacat

SEQ ID NO: 6282 - DNA, 15 bp, Homo sapiens
ctgctgatgttaaca

SEQ ID NO: 6283 - DNA, 15 bp, Homo sapiens
gctgctgatgttaac

SEQ ID NO: 6284 - DNA, 15 bp, Homo sapiens
ggctgctgatgttaa

SEQ ID NO: 6285 - DNA, 15 bp, Homo sapiens
aggctgctgatgtta

SEQ ID NO: 6286 - DNA, 15 bp, Homo sapiens
gaggctgctgatgtt

SEQ ID NO: 6287 - DNA, 15 bp, Homo sapiens
agaggctgctgatgt

SEQ ID NO: 6288 - DNA, 15 bp, Homo sapiens
aagaggctgctgatg

SEQ ID NO: 6289 - DNA, 15 bp, Homo sapiens
gaagaggctgctgat

SEQ ID NO: 6290 - DNA, 15 bp, Homo sapiens
ggaagaggctgctga

SEQ ID NO: 6291 - DNA, 15 bp, Homo sapiens
tggaagaggctgctg

SEQ ID NO: 6292 - DNA, 15 bp, Homo sapiens
ttggaagaggctgct

SEQ ID NO: 6293 - DNA, 15 bp, Homo sapiens
attggaagaggctgc

SEQ ID NO: 6294 - DNA, 15 bp, Homo sapiens
cattggaagaggctg

SEQ ID NO: 6295 - DNA, 15 bp, Homo sapiens
acattggaagaggct

SEQ ID NO: 6296 - DNA, 15 bp, Homo sapiens
tacattggaagaggc

SEQ ID NO: 6297 - DNA, 15 bp, Homo sapiens
ttacattggaagagg

SEQ ID NO: 6298 - DNA, 15 bp, Homo sapiens
tttacattggaagag

SEQ ID NO: 6299 - DNA, 15 bp, Homo sapiens
ttttacattggaaga

SEQ ID NO: 6300 - DNA, 15 bp, Homo sapiens
tttttacattggaag

SEQ ID NO: 6301 - DNA, 15 bp, Homo sapiens
gtttttacattggaa

SEQ ID NO: 6302 - DNA, 15 bp, Homo sapiens
ggtttttacattgga

SEQ ID NO: 6303 - DNA, 15 bp, Homo sapiens
gggtttttacattgg

SEQ ID NO: 6304 - DNA, 15 bp, Homo sapiens
tgggtttttacattg

SEQ ID NO: 6305 - DNA, 15 bp, Homo sapiens
atgggtttttacatt

SEQ ID NO: 6306 - DNA, 15 bp, Homo sapiens
catgggtttttacat

SEQ ID NO: 6307 - DNA, 15 bp, Homo sapiens
ccatgggtttttaca

SEQ ID NO: 6308 - DNA, 15 bp, Homo sapiens
gccatgggtttttac

SEQ ID NO: 6309 - DNA, 15 bp, Homo sapiens
tgccatgggttttta

SEQ ID NO: 6310 - DNA, 15 bp, Homo sapiens
ctgccatgggttttt

SEQ ID NO: 6311 - DNA, 15 bp, Homo sapiens
actgccatgggtttt

SEQ ID NO: 6312 - DNA, 15 bp, Homo sapiens
cactgccatgggttt

SEQ ID NO: 6313 - DNA, 15 bp, Homo sapiens
acactgccatgggtt

SEQ ID NO: 6314 - DNA, 15 bp, Homo sapiens
cacactgccatgggt

SEQ ID NO: 6315 - DNA, 15 bp, Homo sapiens
gcacactgccatggg

SEQ ID NO: 6316 - DNA, 15 bp, Homo sapiens
ggcacactgccatgg

SEQ ID NO: 6317 - DNA, 15 bp, Homo sapiens
gggcacactgccatg

SEQ ID NO: 6318 - DNA, 15 bp, Homo sapiens
agggcacactgccat

SEQ ID NO: 6319 - DNA, 15 bp, Homo sapiens
cagggcacactgcca

SEQ ID NO: 6320 - DNA, 15 bp, Homo sapiens
gcagggcacactgcc

SEQ ID NO: 6321 - DNA, 15 bp, Homo sapiens
agcagggcacactgc

SEQ ID NO: 6322 - DNA, 15 bp, Homo sapiens
aagcagggcacactg

SEQ ID NO: 6323 - DNA, 15 bp, Homo sapiens
aaagcagggcacact

SEQ ID NO: 6324 - DNA, 15 bp, Homo sapiens
caaagcagggcacac

SEQ ID NO: 6325 - DNA, 15 bp, Homo sapiens
acaaagcagggcaca

SEQ ID NO: 6326 - DNA, 15 bp, Homo sapiens
aacaaagcagggcac

SEQ ID NO: 6327 - DNA, 15 bp, Homo sapiens
aaacaaagcagggca

SEQ ID NO: 6328 - DNA, 15 bp, Homo sapiens
gaaacaaagcagggc

SEQ ID NO: 6329 - DNA, 15 bp, Homo sapiens
agaaacaaagcaggg

SEQ ID NO: 6330 - DNA, 15 bp, Homo sapiens
aagaaacaaagcagg

SEQ ID NO: 6331 - DNA, 15 bp, Homo sapiens
aaagaaacaaagcag

SEQ ID NO: 6332 - DNA, 15 bp, Homo sapiens
taaagaaacaaagca

SEQ ID NO: 6333 - DNA, 15 bp, Homo sapiens
ttaaagaaacaaagc

SEQ ID NO: 6334 - DNA, 15 bp, Homo sapiens
cttaaagaaacaaag

SEQ ID NO: 6335 - DNA, 15 bp, Homo sapiens
gcttaaagaaacaaa

SEQ ID NO: 6336 - DNA, 15 bp, Homo sapiens
tgcttaaagaaacaa

SEQ ID NO: 6337 - DNA, 15 bp, Homo sapiens
ttgcttaaagaaaca

SEQ ID NO: 6338 - DNA, 15 bp, Homo sapiens
attgcttaaagaaac

SEQ ID NO: 6339 - DNA, 15 bp, Homo sapiens
tattgcttaaagaaa

SEQ ID NO: 6340 - DNA, 15 bp, Homo sapiens
ctattgcttaaagaa

SEQ ID NO: 6341 - DNA, 15 bp, Homo sapiens
tctattgcttaaaga

SEQ ID NO: 6342 - DNA, 15 bp, Homo sapiens
ttctattgcttaaag

SEQ ID NO: 6343 - DNA, 15 bp, Homo sapiens
tttctattgcttaaa

SEQ ID NO: 6344 - DNA, 15 bp, Homo sapiens
gtttctattgcttaa

SEQ ID NO: 6345 - DNA, 15 bp, Homo sapiens
agtttctattgctta

SEQ ID NO: 6346 - DNA, 15 bp, Homo sapiens
aagtttctattgctt

SEQ ID NO: 6347 - DNA, 15 bp, Homo sapiens
caagtttctattgct

SEQ ID NO: 6348 - DNA, 15 bp, Homo sapiens
tcaagtttctattgc

SEQ ID NO: 6349 - DNA, 15 bp, Homo sapiens
ttcaagtttctattg

SEQ ID NO: 6350 - DNA, 15 bp, Homo sapiens
cttcaagtttctatt

SEQ ID NO: 6351 - DNA, 15 bp, Homo sapiens
ccttcaagtttctat

SEQ ID NO: 6352 - DNA, 15 bp, Homo sapiens
tccttcaagtttcta

SEQ ID NO: 6353 - DNA, 15 bp, Homo sapiens
ttccttcaagtttct

SEQ ID NO: 6354 - DNA, 15 bp, Homo sapiens
cttccttcaagtttc

SEQ ID NO: 6355 - DNA, 15 bp, Homo sapiens
gcttccttcaagttt

SEQ ID NO: 6356 - DNA, 15 bp, Homo sapiens
tgcttccttcaagtt

SEQ ID NO: 6357 - DNA, 15 bp, Homo sapiens
atgcttccttcaagt

SEQ ID NO: 6358 - DNA, 15 bp, Homo sapiens
catgcttccttcaag

SEQ ID NO: 6359 - DNA, 15 bp, Homo sapiens
acatgcttccttcaa

SEQ ID NO: 6360 - DNA, 15 bp, Homo sapiens
aacatgcttccttca

SEQ ID NO: 6361 - DNA, 15 bp, Homo sapiens
caacatgcttccttc

SEQ ID NO: 6362 - DNA, 15 bp, Homo sapiens
ccaacatgcttcctt

SEQ ID NO: 6363 - DNA, 15 bp, Homo sapiens
accaacatgcttcct

SEQ ID NO: 6364 - DNA, 15 bp, Homo sapiens
taccaacatgcttcc

SEQ ID NO: 6365 - DNA, 15 bp, Homo sapiens
ctaccaacatgcttc

SEQ ID NO: 6366 - DNA, 15 bp, Homo sapiens
cctaccaacatgctt

SEQ ID NO: 6367 - DNA, 15 bp, Homo sapiens
gcctaccaacatgct

SEQ ID NO: 6368 - DNA, 15 bp, Homo sapiens
ggcctaccaacatgc

SEQ ID NO: 6369 - DNA, 15 bp, Homo sapiens
tggcctaccaacatg

SEQ ID NO: 6370 - DNA, 15 bp, Homo sapiens
ctggcctaccaacat

SEQ ID NO: 6371 - DNA, 15 bp, Homo sapiens
tctggcctaccaaca

SEQ ID NO: 6372 - DNA, 15 bp, Homo sapiens
atctggcctaccaac

SEQ ID NO: 6373 - DNA, 15 bp, Homo sapiens
aatctggcctaccaa

SEQ ID NO: 6374 - DNA, 15 bp, Homo sapiens
aaatctggcctacca

SEQ ID NO: 6375 - DNA, 15 bp, Homo sapiens
aaaatctggcctacc

SEQ ID NO: 6376 - DNA, 15 bp, Homo sapiens
aaaaatctggcctac

SEQ ID NO: 6377 - DNA, 15 bp, Homo sapiens
caaaaatctggccta

SEQ ID NO: 6378 - DNA, 15 bp, Homo sapiens
acaaaaatctggcct

SEQ ID NO: 6379 - DNA, 15 bp, Homo sapiens
aacaaaaatctggcc

SEQ ID NO: 6380 - DNA, 15 bp, Homo sapiens
caacaaaaatctggc

SEQ ID NO: 6381 - DNA, 15 bp, Homo sapiens
ccaacaaaaatctgg

SEQ ID NO: 6382 - DNA, 15 bp, Homo sapiens
gccaacaaaaatctg

SEQ ID NO: 6383 - DNA, 15 bp, Homo sapiens
agccaacaaaaatct

SEQ ID NO: 6384 - DNA, 15 bp, Homo sapiens
aagccaacaaaaatc

SEQ ID NO: 6385 - DNA, 15 bp, Homo sapiens
aaagccaacaaaaat

SEQ ID NO: 6386 - DNA, 15 bp, Homo sapiens
caaagccaacaaaaa

SEQ ID NO: 6387 - DNA, 15 bp, Homo sapiens
gcaaagccaacaaaa

SEQ ID NO: 6388 - DNA, 15 bp, Homo sapiens
tgcaaagccaacaaa

SEQ ID NO: 6389 - DNA, 15 bp, Homo sapiens
ttgcaaagccaacaa

SEQ ID NO: 6390 - DNA, 15 bp, Homo sapiens
attgcaaagccaaca

SEQ ID NO: 6391 - DNA, 15 bp, Homo sapiens
cattgcaaagccaac

SEQ ID NO: 6392 - DNA, 15 bp, Homo sapiens
ccattgcaaagccaa

SEQ ID NO: 6393 - DNA, 15 bp, Homo sapiens
tccattgcaaagcca

SEQ ID NO: 6394 - DNA, 15 bp, Homo sapiens
atccattgcaaagcc

SEQ ID NO: 6395 - DNA, 15 bp, Homo sapiens
gatccattgcaaagc

SEQ ID NO: 6396 - DNA, 15 bp, Homo sapiens
tgatccattgcaaag

SEQ ID NO: 6397 - DNA, 15 bp, Homo sapiens
gtgatccattgcaaa

SEQ ID NO: 6398 - DNA, 15 bp, Homo sapiens
tgtgatccattgcaa

SEQ ID NO: 6399 - DNA, 15 bp, Homo sapiens
ctgtgatccattgca

SEQ ID NO: 6400 - DNA, 15 bp, Homo sapiens
actgtgatccattgc

SEQ ID NO: 6401 - DNA, 15 bp, Homo sapiens
gactgtgatccattg

SEQ ID NO: 6402 - DNA, 15 bp, Homo sapiens
tgactgtgatccatt

SEQ ID NO: 6403 - DNA, 15 bp, Homo sapiens
atgactgtgatccat

SEQ ID NO: 6404 - DNA, 15 bp, Homo sapiens
aatgactgtgatcca

SEQ ID NO: 6405 - DNA, 15 bp, Homo sapiens
aaatgactgtgatcc

SEQ ID NO: 6406 - DNA, 15 bp, Homo sapiens
taaatgactgtgatc

SEQ ID NO: 6407 - DNA, 15 bp, Homo sapiens
ataaatgactgtgat

SEQ ID NO: 6408 - DNA, 15 bp, Homo sapiens
aataaatgactgtga

SEQ ID NO: 6409 - DNA, 15 bp, Homo sapiens
gaataaatgactgtg

SEQ ID NO: 6410 - DNA, 15 bp, Homo sapiens
tgaataaatgactgt

SEQ ID NO: 6411 - DNA, 15 bp, Homo sapiens
gtgaataaatgactg

SEQ ID NO: 6412 - DNA, 15 bp, Homo sapiens
agtgaataaatgact

SEQ ID NO: 6413 - DNA, 15 bp, Homo sapiens
gagtgaataaatgac

SEQ ID NO: 6414 - DNA, 15 bp, Homo sapiens
tgagtgaataaatga

SEQ ID NO: 6415 - DNA, 15 bp, Homo sapiens
atgagtgaataaatg

SEQ ID NO: 6416 - DNA, 15 bp, Homo sapiens
aatgagtgaataaat

SEQ ID NO: 6417 - DNA, 15 bp, Homo sapiens
gaatgagtgaataaa

SEQ ID NO: 6418 - DNA, 15 bp, Homo sapiens
tgaatgagtgaataa

SEQ ID NO: 6419 - DNA, 15 bp, Homo sapiens
atgaatgagtgaata

SEQ ID NO: 6420 - DNA, 15 bp, Homo sapiens
aatgaatgagtgaat

SEQ ID NO: 6421 - DNA, 15 bp, Homo sapiens
gaatgaatgagtgaa

SEQ ID NO: 6422 - DNA, 15 bp, Homo sapiens
tgaatgaatgagtga

SEQ ID NO: 6423 - DNA, 15 bp, Homo sapiens
gtgaatgaatgagtg

SEQ ID NO: 6424 - DNA, 15 bp, Homo sapiens
agtgaatgaatgagt

SEQ ID NO: 6425 - DNA, 15 bp, Homo sapiens
cagtgaatgaatgag

SEQ ID NO: 6426 - DNA, 15 bp, Homo sapiens
tcagtgaatgaatga

SEQ ID NO: 6427 - DNA, 15 bp, Homo sapiens
atcagtgaatgaatg

SEQ ID NO: 6428 - DNA, 15 bp, Homo sapiens
aatcagtgaatgaat

SEQ ID NO: 6429 - DNA, 15 bp, Homo sapiens
gaatcagtgaatgaa

SEQ ID NO: 6430 - DNA, 15 bp, Homo sapiens
tgaatcagtgaatga

SEQ ID NO: 6431 - DNA, 15 bp, Homo sapiens
atgaatcagtgaatg

SEQ ID NO: 6432 - DNA, 15 bp, Homo sapiens
aatgaatcagtgaat

SEQ ID NO: 6433 - DNA, 15 bp, Homo sapiens
taatgaatcagtgaa

SEQ ID NO: 6434 - DNA, 15 bp, Homo sapiens
ttaatgaatcagtga

SEQ ID NO: 6435 - DNA, 15 bp, Homo sapiens
tttaatgaatcagtg

SEQ ID NO: 6436 - DNA, 15 bp, Homo sapiens
atttaatgaatcagt

SEQ ID NO: 6437 - DNA, 15 bp, Homo sapiens
catttaatgaatcag

SEQ ID NO: 6438 - DNA, 15 bp, Homo sapiens
tcatttaatgaatca

SEQ ID NO: 6439 - DNA, 15 bp, Homo sapiens
gtcatttaatgaatc

SEQ ID NO: 6440 - DNA, 15 bp, Homo sapiens
ggtcatttaatgaat

SEQ ID NO: 6441 - DNA, 15 bp, Homo sapiens
tggtcatttaatgaa

SEQ ID NO: 6442 - DNA, 15 bp, Homo sapiens
gtggtcatttaatga

SEQ ID NO: 6443 - DNA, 15 bp, Homo sapiens
tgtggtcatttaatg

SEQ ID NO: 6444 - DNA, 15 bp, Homo sapiens
atgtggtcatttaat

SEQ ID NO: 6445 - DNA, 15 bp, Homo sapiens
aatgtggtcatttaa

SEQ ID NO: 6446 - DNA, 15 bp, Homo sapiens
aaatgtggtcattta

SEQ ID NO: 6447 - DNA, 15 bp, Homo sapiens
caaatgtggtcattt

SEQ ID NO: 6448 - DNA, 15 bp, Homo sapiens
gcaaatgtggtcatt

SEQ ID NO: 6449 - DNA, 15 bp, Homo sapiens
tgcaaatgtggtcat

SEQ ID NO: 6450 - DNA, 15 bp, Homo sapiens
ttgcaaatgtggtca

SEQ ID NO: 6451 - DNA, 15 bp, Homo sapiens
cttgcaaatgtggtc

SEQ ID NO: 6452 - DNA, 15 bp, Homo sapiens
ccttgcaaatgtggt

SEQ ID NO: 6453 - DNA, 15 bp, Homo sapiens
cccttgcaaatgtgg

SEQ ID NO: 6454 - DNA, 15 bp, Homo sapiens
gcccttgcaaatgtg

SEQ ID NO: 6455 - DNA, 15 bp, Homo sapiens
tgcccttgcaaatgt

SEQ ID NO: 6456 - DNA, 15 bp, Homo sapiens
ttgcccttgcaaatg

SEQ ID NO: 6457 - DNA, 15 bp, Homo sapiens
cttgcccttgcaaat

SEQ ID NO: 6458 - DNA, 15 bp, Homo sapiens
ccttgcccttgcaaa

SEQ ID NO: 6459 - DNA, 15 bp, Homo sapiens
accttgcccttgcaa

SEQ ID NO: 6460 - DNA, 15 bp, Homo sapiens
taccttgcccttgca

SEQ ID NO: 6461 - DNA, 15 bp, Homo sapiens
ttaccttgcccttgc

SEQ ID NO: 6462 - DNA, 15 bp, Homo sapiens
attaccttgcccttg

SEQ ID NO: 6463 - DNA, 15 bp, Homo sapiens
cattaccttgccctt

SEQ ID NO: 6464 - DNA, 15 bp, Homo sapiens
ccattaccttgccct

SEQ ID NO: 6465 - DNA, 15 bp, Homo sapiens
cccattaccttgccc

SEQ ID NO: 6466 - DNA, 15 bp, Homo sapiens
ccccattaccttgcc

SEQ ID NO: 6467 - DNA, 15 bp, Homo sapiens
tccccattaccttgc

SEQ ID NO: 6468 - DNA, 15 bp, Homo sapiens
ctccccattaccttg

SEQ ID NO: 6469 - DNA, 15 bp, Homo sapiens
cctccccattacctt

SEQ ID NO: 6470 - DNA, 15 bp, Homo sapiens
ccctccccattacct

SEQ ID NO: 6471 - DNA, 15 bp, Homo sapiens
gccctccccattacc

SEQ ID NO: 6472 - DNA, 15 bp, Homo sapiens
ggccctccccattac

SEQ ID NO: 6473 - DNA, 15 bp, Homo sapiens
tggccctccccatta

SEQ ID NO: 6474 - DNA, 15 bp, Homo sapiens
ctggccctccccatt

SEQ ID NO: 6475 - DNA, 15 bp, Homo sapiens
tctggccctccccat

SEQ ID NO: 6476 - DNA, 15 bp, Homo sapiens
ttctggccctcccca

SEQ ID NO: 6477 - DNA, 15 bp, Homo sapiens
tttctggccctcccc

SEQ ID NO: 6478 - DNA, 15 bp, Homo sapiens
ctttctggccctccc

SEQ ID NO: 6479 - DNA, 15 bp, Homo sapiens
cctttctggccctcc

SEQ ID NO: 6480 - DNA, 15 bp, Homo sapiens
tcctttctggccctc

SEQ ID NO: 6481 - DNA, 15 bp, Homo sapiens
gtcctttctggccct

SEQ ID NO: 6482 - DNA, 15 bp, Homo sapiens
tgtcctttctggccc

SEQ ID NO: 6483 - DNA, 15 bp, Homo sapiens
gtgtcctttctggcc

SEQ ID NO: 6484 - DNA, 15 bp, Homo sapiens
agtgtcctttctggc

SEQ ID NO: 6485 - DNA, 15 bp, Homo sapiens
cagtgtcctttctgg

SEQ ID NO: 6486 - DNA, 15 bp, Homo sapiens
ccagtgtcctttctg

SEQ ID NO: 6487 - DNA, 15 bp, Homo sapiens
gccagtgtcctttct

SEQ ID NO: 6488 - DNA, 15 bp, Homo sapiens
ggccagtgtcctttc

SEQ ID NO: 6489 - DNA, 15 bp, Homo sapiens
gggccagtgtccttt

SEQ ID NO: 6490 - DNA, 15 bp, Homo sapiens
ggggccagtgtcctt

SEQ ID NO: 6491 - DNA, 15 bp, Homo sapiens
tggggccagtgtcct

SEQ ID NO: 6492 - DNA, 15 bp, Homo sapiens
ctggggccagtgtcc

SEQ ID NO: 6493 - DNA, 15 bp, Homo sapiens
tctggggccagtgtc

SEQ ID NO: 6494 - DNA, 15 bp, Homo sapiens
ttctggggccagtgt

SEQ ID NO: 6495 - DNA, 15 bp, Homo sapiens
tttctggggccagtg

SEQ ID NO: 6496 - DNA, 15 bp, Homo sapiens
gtttctggggccagt

SEQ ID NO: 6497 - DNA, 15 bp, Homo sapiens
tgtttctggggccag

SEQ ID NO: 6498 - DNA, 15 bp, Homo sapiens
ctgtttctggggcca

SEQ ID NO: 6499 - DNA, 15 bp, Homo sapiens
cctgtttctggggcc

SEQ ID NO: 6500 - DNA, 15 bp, Homo sapiens
tcctgtttctggggc

SEQ ID NO: 6501 - DNA, 15 bp, Homo sapiens
ctcctgtttctgggg

SEQ ID NO: 6502 - DNA, 15 bp, Homo sapiens
cctcctgtttctggg

SEQ ID NO: 6503 - DNA, 15 bp, Homo sapiens
gcctcctgtttctgg

SEQ ID NO: 6504 - DNA, 15 bp, Homo sapiens
agcctcctgtttctg

SEQ ID NO: 6505 - DNA, 15 bp, Homo sapiens
cagcctcctgtttct

SEQ ID NO: 6506 - DNA, 15 bp, Homo sapiens
ccagcctcctgtttc

SEQ ID NO: 6507 - DNA, 15 bp, Homo sapiens
tccagcctcctgttt

SEQ ID NO: 6508 - DNA, 15 bp, Homo sapiens
atccagcctcctgtt

SEQ ID NO: 6509 - DNA, 15 bp, Homo sapiens
aatccagcctcctgt

SEQ ID NO: 6510 - DNA, 15 bp, Homo sapiens
aaatccagcctcctg

SEQ ID NO: 6511 - DNA, 15 bp, Homo sapiens
aaaatccagcctcct

SEQ ID NO: 6512 - DNA, 15 bp, Homo sapiens
caaaatccagcctcc

SEQ ID NO: 6513 - DNA, 15 bp, Homo sapiens
ccaaaatccagcctc

SEQ ID NO: 6514 - DNA, 15 bp, Homo sapiens
accaaaatccagcct

SEQ ID NO: 6515 - DNA, 15 bp, Homo sapiens
aaccaaaatccagcc

SEQ ID NO: 6516 - DNA, 15 bp, Homo sapiens
gaaccaaaatccagc

SEQ ID NO: 6517 - DNA, 15 bp, Homo sapiens
agaaccaaaatccag

SEQ ID NO: 6518 - DNA, 15 bp, Homo sapiens
cagaaccaaaatcca

SEQ ID NO: 6519 - DNA, 15 bp, Homo sapiens
tcagaaccaaaatcc

SEQ ID NO: 6520 - DNA, 15 bp, Homo sapiens
atcagaaccaaaatc

SEQ ID NO: 6521 - DNA, 15 bp, Homo sapiens
catcagaaccaaaat

SEQ ID NO: 6522 - DNA, 15 bp, Homo sapiens
gcatcagaaccaaaa

SEQ ID NO: 6523 - DNA, 15 bp, Homo sapiens
agcatcagaaccaaa

SEQ ID NO: 6524 - DNA, 15 bp, Homo sapiens
cagcatcagaaccaa

SEQ ID NO: 6525 - DNA, 15 bp, Homo sapiens
gcagcatcagaacca

SEQ ID NO: 6526 - DNA, 15 bp, Homo sapiens
ggcagcatcagaacc

SEQ ID NO: 6527 - DNA, 15 bp, Homo sapiens
tggcagcatcagaac

SEQ ID NO: 6528 - DNA, 15 bp, Homo sapiens
gtggcagcatcagaa

SEQ ID NO: 6529 - DNA, 15 bp, Homo sapiens
agtggcagcatcaga

SEQ ID NO: 6530 - DNA, 15 bp, Homo sapiens
cagtggcagcatcag

SEQ ID NO: 6531 - DNA, 15 bp, Homo sapiens
gcagtggcagcatca

SEQ ID NO: 6532 - DNA, 15 bp, Homo sapiens
agcagtggcagcatc

SEQ ID NO: 6533 - DNA, 15 bp, Homo sapiens
cagcagtggcagcat

SEQ ID NO: 6534 - DNA, 15 bp, Homo sapiens
tcagcagtggcagca

SEQ ID NO: 6535 - DNA, 15 bp, Homo sapiens
atcagcagtggcagc

SEQ ID NO: 6536 - DNA, 15 bp, Homo sapiens
catcagcagtggcag

SEQ ID NO: 6537 - DNA, 15 bp, Homo sapiens
acatcagcagtggca

SEQ ID NO: 6538 - DNA, 15 bp, Homo sapiens
cacatcagcagtggc

SEQ ID NO: 6539 - DNA, 15 bp, Homo sapiens
tcacatcagcagtgg

SEQ ID NO: 6540 - DNA, 15 bp, Homo sapiens
gtcacatcagcagtg

SEQ ID NO: 6541 - DNA, 15 bp, Homo sapiens
tgtcacatcagcagt

SEQ ID NO: 6542 - DNA, 15 bp, Homo sapiens
gtgtcacatcagcag

SEQ ID NO: 6543 - DNA, 15 bp, Homo sapiens
agtgtcacatcagca

SEQ ID NO: 6544 - DNA, 15 bp, Homo sapiens
cagtgtcacatcagc

SEQ ID NO: 6545 - DNA, 15 bp, Homo sapiens
gcagtgtcacatcag

SEQ ID NO: 6546 - DNA, 15 bp, Homo sapiens
tgcagtgtcacatca

SEQ ID NO: 6547 - DNA, 15 bp, Homo sapiens
gtgcagtgtcacatc

SEQ ID NO: 6548 - DNA, 15 bp, Homo sapiens
tgtgcagtgtcacat

SEQ ID NO: 6549 - DNA, 15 bp, Homo sapiens
ctgtgcagtgtcaca

SEQ ID NO: 6550 - DNA, 15 bp, Homo sapiens
cctgtgcagtgtcac

SEQ ID NO: 6551 - DNA, 15 bp, Homo sapiens
acctgtgcagtgtca

SEQ ID NO: 6552 - DNA, 15 bp, Homo sapiens
gacctgtgcagtgtc

SEQ ID NO: 6553 - DNA, 15 bp, Homo sapiens
tgacctgtgcagtgt

SEQ ID NO: 6554 - DNA, 15 bp, Homo sapiens
gtgacctgtgcagtg

SEQ ID NO: 6555 - DNA, 15 bp, Homo sapiens
ggtgacctgtgcagt

SEQ ID NO: 6556 - DNA, 15 bp, Homo sapiens
aggtgacctgtgcag

SEQ ID NO: 6557 - DNA, 15 bp, Homo sapiens
caggtgacctgtgca

SEQ ID NO: 6558 - DNA, 15 bp, Homo sapiens
gcaggtgacctgtgc

SEQ ID NO: 6559 - DNA, 15 bp, Homo sapiens
ggcaggtgacctgtg

SEQ ID NO: 6560 - DNA, 15 bp, Homo sapiens
aggcaggtgacctgt

SEQ ID NO: 6561 - DNA, 15 bp, Homo sapiens
gaggcaggtgacctg

SEQ ID NO: 6562 - DNA, 15 bp, Homo sapiens
ggaggcaggtgacct

SEQ ID NO: 6563 - DNA, 15 bp, Homo sapiens
aggaggcaggtgacc

SEQ ID NO: 6564 - DNA, 15 bp, Homo sapiens
gaggaggcaggtgac

SEQ ID NO: 6565 - DNA, 15 bp, Homo sapiens
agaggaggcaggtga

SEQ ID NO: 6566 - DNA, 15 bp, Homo sapiens
cagaggaggcaggtg

SEQ ID NO: 6567 - DNA, 15 bp, Homo sapiens
tcagaggaggcaggt

SEQ ID NO: 6568 - DNA, 15 bp, Homo sapiens
ctcagaggaggcagg

SEQ ID NO: 6569 - DNA, 15 bp, Homo sapiens
gctcagaggaggcag

SEQ ID NO: 6570 - DNA, 15 bp, Homo sapiens
ggctcagaggaggca

SEQ ID NO: 6571 - DNA, 15 bp, Homo sapiens
aggctcagaggaggc

SEQ ID NO: 6572 - DNA, 15 bp, Homo sapiens
gaggctcagaggagg

SEQ ID NO: 6573 - DNA, 15 bp, Homo sapiens
agaggctcagaggag

SEQ ID NO: 6574 - DNA, 15 bp, Homo sapiens
aagaggctcagagga

SEQ ID NO: 6575 - DNA, 15 bp, Homo sapiens
aaagaggctcagagg

SEQ ID NO: 6576 - DNA, 15 bp, Homo sapiens
gaaagaggctcagag

SEQ ID NO: 6577 - DNA, 15 bp, Homo sapiens
ggaaagaggctcaga

SEQ ID NO: 6578 - DNA, 15 bp, Homo sapiens
aggaaagaggctcag

SEQ ID NO: 6579 - DNA, 15 bp, Homo sapiens
aaggaaagaggctca

SEQ ID NO: 6580 - DNA, 15 bp, Homo sapiens
taaggaaagaggctc

SEQ ID NO: 6581 - DNA, 15 bp, Homo sapiens
ttaaggaaagaggct

SEQ ID NO: 6582 - DNA, 15 bp, Homo sapiens
gttaaggaaagaggc

SEQ ID NO: 6583 - DNA, 15 bp, Homo sapiens
agttaaggaaagagg

SEQ ID NO: 6584 - DNA, 15 bp, Homo sapiens
cagttaaggaaagag

SEQ ID NO: 6585 - DNA, 15 bp, Homo sapiens
gcagttaaggaaaga

SEQ ID NO: 6586 - DNA, 15 bp, Homo sapiens
tgcagttaaggaaag

SEQ ID NO: 6587 - DNA, 15 bp, Homo sapiens
ctgcagttaaggaaa

SEQ ID NO: 6588 - DNA, 15 bp, Homo sapiens
tctgcagttaaggaa

SEQ ID NO: 6589 - DNA, 15 bp, Homo sapiens
ctctgcagttaagga

SEQ ID NO: 6590 - DNA, 15 bp, Homo sapiens
actctgcagttaagg

SEQ ID NO: 6591 - DNA, 15 bp, Homo sapiens
cactctgcagttaag

SEQ ID NO: 6592 - DNA, 15 bp, Homo sapiens
tcactctgcagttaa

SEQ ID NO: 6593 - DNA, 15 bp, Homo sapiens
ctcactctgcagtta

SEQ ID NO: 6594 - DNA, 15 bp, Homo sapiens
actcactctgcagtt

SEQ ID NO: 6595 - DNA, 15 bp, Homo sapiens
cactcactctgcagt

SEQ ID NO: 6596 - DNA, 15 bp, Homo sapiens
ccactcactctgcag

SEQ ID NO: 6597 - DNA, 15 bp, Homo sapiens
gccactcactctgca

SEQ ID NO: 6598 - DNA, 15 bp, Homo sapiens
agccactcactctgc

SEQ ID NO: 6599 - DNA, 15 bp, Homo sapiens
tagccactcactctg

SEQ ID NO: 6600 - DNA, 15 bp, Homo sapiens
gtagccactcactct

SEQ ID NO: 6601 - DNA, 15 bp, Homo sapiens
tgtagccactcactc

SEQ ID NO: 6602 - DNA, 15 bp, Homo sapiens
ctgtagccactcact

SEQ ID NO: 6603 - DNA, 15 bp, Homo sapiens
tctgtagccactcac

SEQ ID NO: 6604 - DNA, 15 bp, Homo sapiens
ctctgtagccactca

SEQ ID NO: 6605 - DNA, 15 bp, Homo sapiens
tctctgtagccactc

SEQ ID NO: 6606 - DNA, 15 bp, Homo sapiens
ttctctgtagccact

SEQ ID NO: 6607 - DNA, 15 bp, Homo sapiens
tttctctgtagccac

SEQ ID NO: 6608 - DNA, 15 bp, Homo sapiens
atttctctgtagcca

SEQ ID NO: 6609 - DNA, 15 bp, Homo sapiens
gatttctctgtagcc

SEQ ID NO: 6610 - DNA, 15 bp, Homo sapiens
agatttctctgtagc

SEQ ID NO: 6611 - DNA, 15 bp, Homo sapiens
aagatttctctgtag

SEQ ID NO: 6612 - DNA, 15 bp, Homo sapiens
aaagatttctctgta

SEQ ID NO: 6613 - DNA, 15 bp, Homo sapiens
taaagatttctctgt

SEQ ID NO: 6614 - DNA, 15 bp, Homo sapiens
gtaaagatttctctg

SEQ ID NO: 6615 - DNA, 15 bp, Homo sapiens
agtaaagatttctct

SEQ ID NO: 6616 - DNA, 15 bp, Homo sapiens
tagtaaagatttctc

SEQ ID NO: 6617 - DNA, 15 bp, Homo sapiens
gtagtaaagatttct

SEQ ID NO: 6618 - DNA, 15 bp, Homo sapiens
ggtagtaaagatttc

SEQ ID NO: 6619 - DNA, 15 bp, Homo sapiens
aggtagtaaagattt

SEQ ID NO: 6620 - DNA, 15 bp, Homo sapiens
caggtagtaaagatt

SEQ ID NO: 6621 - DNA, 15 bp, Homo sapiens
acaggtagtaaagat

SEQ ID NO: 6622 - DNA, 15 bp, Homo sapiens
aacaggtagtaaaga

SEQ ID NO: 6623 - DNA, 15 bp, Homo sapiens
taacaggtagtaaag

SEQ ID NO: 6624 - DNA, 15 bp, Homo sapiens
ctaacaggtagtaaa

SEQ ID NO: 6625 - DNA, 15 bp, Homo sapiens
tctaacaggtagtaa

SEQ ID NO: 6626 - DNA, 15 bp, Homo sapiens
atctaacaggtagta

SEQ ID NO: 6627 - DNA, 15 bp, Homo sapiens
gatctaacaggtagt

SEQ ID NO: 6628 - DNA, 15 bp, Homo sapiens
tgatctaacaggtag

SEQ ID NO: 6629 - DNA, 15 bp, Homo sapiens
ctgatctaacaggta

SEQ ID NO: 6630 - DNA, 15 bp, Homo sapiens
gctgatctaacaggt

SEQ ID NO: 6631 - DNA, 15 bp, Homo sapiens
tgctgatctaacagg

SEQ ID NO: 6632 - DNA, 15 bp, Homo sapiens
atgctgatctaacag

SEQ ID NO: 6633 - DNA, 15 bp, Homo sapiens
aatgctgatctaaca

SEQ ID NO: 6634 - DNA, 15 bp, Homo sapiens
taatgctgatctaac

SEQ ID NO: 6635 - DNA, 15 bp, Homo sapiens
gtaatgctgatctaa

SEQ ID NO: 6636 - DNA, 15 bp, Homo sapiens
ggtaatgctgatcta

SEQ ID NO: 6637 - DNA, 15 bp, Homo sapiens
aggtaatgctgatct

SEQ ID NO: 6638 - DNA, 15 bp, Homo sapiens
caggtaatgctgatc

SEQ ID NO: 6639 - DNA, 15 bp, Homo sapiens
ccaggtaatgctgat

SEQ ID NO: 6640 - DNA, 15 bp, Homo sapiens
cccaggtaatgctga

SEQ ID NO: 6641 - DNA, 15 bp, Homo sapiens
tcccaggtaatgctg

SEQ ID NO: 6642 - DNA, 15 bp, Homo sapiens
ctcccaggtaatgct

SEQ ID NO: 6643 - DNA, 15 bp, Homo sapiens
gctcccaggtaatgc

SEQ ID NO: 6644 - DNA, 15 bp, Homo sapiens
agctcccaggtaatg

SEQ ID NO: 6645 - DNA, 15 bp, Homo sapiens
aagctcccaggtaat

SEQ ID NO: 6646 - DNA, 15 bp, Homo sapiens
caagctcccaggtaa

SEQ ID NO: 6647 - DNA, 15 bp, Homo sapiens
acaagctcccaggta

SEQ ID NO: 6648 - DNA, 15 bp, Homo sapiens
aacaagctcccaggt

SEQ ID NO: 6649 - DNA, 15 bp, Homo sapiens
taacaagctcccagg

SEQ ID NO: 6650 - DNA, 15 bp, Homo sapiens
ctaacaagctcccag

SEQ ID NO: 6651 - DNA, 15 bp, Homo sapiens
tctaacaagctccca

SEQ ID NO: 6652 - DNA, 15 bp, Homo sapiens
ttctaacaagctccc

SEQ ID NO: 6653 - DNA, 15 bp, Homo sapiens
tttctaacaagctcc

SEQ ID NO: 6654 - DNA, 15 bp, Homo sapiens
atttctaacaagctc

SEQ ID NO: 6655 - DNA, 15 bp, Homo sapiens
catttctaacaagct

SEQ ID NO: 6656 - DNA, 15 bp, Homo sapiens
gcatttctaacaagc

SEQ ID NO: 6657 - DNA, 15 bp, Homo sapiens
tgcatttctaacaag

SEQ ID NO: 6658 - DNA, 15 bp, Homo sapiens
ttgcatttctaacaa

SEQ ID NO: 6659 - DNA, 15 bp, Homo sapiens
cttgcatttctaaca

SEQ ID NO: 6660 - DNA, 15 bp, Homo sapiens
gcttgcatttctaac

SEQ ID NO: 6661 - DNA, 15 bp, Homo sapiens
agcttgcatttctaa

SEQ ID NO: 6662 - DNA, 15 bp, Homo sapiens
gagcttgcatttcta

SEQ ID NO: 6663 - DNA, 15 bp, Homo sapiens
agagcttgcatttct

SEQ ID NO: 6664 - DNA, 15 bp, Homo sapiens
cagagcttgcatttc

SEQ ID NO: 6665 - DNA, 15 bp, Homo sapiens
ccagagcttgcattt

SEQ ID NO: 6666 - DNA, 15 bp, Homo sapiens
accagagcttgcatt

SEQ ID NO: 6667 - DNA, 15 bp, Homo sapiens
caccagagcttgcat

SEQ ID NO: 6668 - DNA, 15 bp, Homo sapiens
ccaccagagcttgca

SEQ ID NO: 6669 - DNA, 15 bp, Homo sapiens
cccaccagagcttgc

SEQ ID NO: 6670 - DNA, 15 bp, Homo sapiens
ccccaccagagcttg

SEQ ID NO: 6671 - DNA, 15 bp, Homo sapiens
gccccaccagagctt

SEQ ID NO: 6672 - DNA, 15 bp, Homo sapiens
ggccccaccagagct

SEQ ID NO: 6673 - DNA, 15 bp, Homo sapiens
tggccccaccagagc

SEQ ID NO: 6674 - DNA, 15 bp, Homo sapiens
atggccccaccagag

SEQ ID NO: 6675 - DNA, 15 bp, Homo sapiens
tatggccccaccaga

SEQ ID NO: 6676 - DNA, 15 bp, Homo sapiens
gtatggccccaccag

SEQ ID NO: 6677 - DNA, 15 bp, Homo sapiens
agtatggccccacca

SEQ ID NO: 6678 - DNA, 15 bp, Homo sapiens
cagtatggccccacc

SEQ ID NO: 6679 - DNA, 15 bp, Homo sapiens
tcagtatggccccac

SEQ ID NO: 6680 - DNA, 15 bp, Homo sapiens
ttcagtatggcccca

SEQ ID NO: 6681 - DNA, 15 bp, Homo sapiens
gttcagtatggcccc

SEQ ID NO: 6682 - DNA, 15 bp, Homo sapiens
ggttcagtatggccc

SEQ ID NO: 6683 - DNA, 15 bp, Homo sapiens
gggttcagtatggcc

SEQ ID NO: 6684 - DNA, 15 bp, Homo sapiens
tgggttcagtatggc

SEQ ID NO: 6685 - DNA, 15 bp, Homo sapiens
ttgggttcagtatgg

SEQ ID NO: 6686 - DNA, 15 bp, Homo sapiens
tttgggttcagtatg

SEQ ID NO: 6687 - DNA, 15 bp, Homo sapiens
atttgggttcagtat

SEQ ID NO: 6688 - DNA, 15 bp, Homo sapiens
gatttgggttcagta

SEQ ID NO: 6689 - DNA, 15 bp, Homo sapiens
agatttgggttcagt

SEQ ID NO: 6690 - DNA, 15 bp, Homo sapiens
cagatttgggttcag

SEQ ID NO: 6691 - DNA, 15 bp, Homo sapiens
gcagatttgggttca

SEQ ID NO: 6692 - DNA, 15 bp, Homo sapiens
tgcagatttgggttc

SEQ ID NO: 6693 - DNA, 15 bp, Homo sapiens
atgcagatttgggtt

SEQ ID NO: 6694 - DNA, 15 bp, Homo sapiens
aatgcagatttgggt

SEQ ID NO: 6695 - DNA, 15 bp, Homo sapiens
gaatgcagatttggg

SEQ ID NO: 6696 - DNA, 15 bp, Homo sapiens
tgaatgcagatttgg

SEQ ID NO: 6697 - DNA, 15 bp, Homo sapiens
atgaatgcagatttg

SEQ ID NO: 6698 - DNA, 15 bp, Homo sapiens
catgaatgcagattt

SEQ ID NO: 6699 - DNA, 15 bp, Homo sapiens
acatgaatgcagatt

SEQ ID NO: 6700 - DNA, 15 bp, Homo sapiens
cacatgaatgcagat

SEQ ID NO: 6701 - DNA, 15 bp, Homo sapiens
gcacatgaatgcaga

SEQ ID NO: 6702 - DNA, 15 bp, Homo sapiens
tgcacatgaatgcag

SEQ ID NO: 6703 - DNA, 15 bp, Homo sapiens
atgcacatgaatgca

SEQ ID NO: 6704 - DNA, 15 bp, Homo sapiens
tatgcacatgaatgc

SEQ ID NO: 6705 - DNA, 15 bp, Homo sapiens
ctatgcacatgaatg

SEQ ID NO: 6706 - DNA, 15 bp, Homo sapiens
actatgcacatgaat

SEQ ID NO: 6707 - DNA, 15 bp, Homo sapiens
cactatgcacatgaa

SEQ ID NO: 6708 - DNA, 15 bp, Homo sapiens
tcactatgcacatga

SEQ ID NO: 6709 - DNA, 15 bp, Homo sapiens
gtcactatgcacatg

SEQ ID NO: 6710 - DNA, 15 bp, Homo sapiens
tgtcactatgcacat

SEQ ID NO: 6711 - DNA, 15 bp, Homo sapiens
ctgtcactatgcaca

SEQ ID NO: 6712 - DNA, 15 bp, Homo sapiens
gctgtcactatgcac

SEQ ID NO: 6713 - DNA, 15 bp, Homo sapiens
agctgtcactatgca

SEQ ID NO: 6714 - DNA, 15 bp, Homo sapiens
tagctgtcactatgc

SEQ ID NO: 6715 - DNA, 15 bp, Homo sapiens
ttagctgtcactatg

SEQ ID NO: 6716 - DNA, 15 bp, Homo sapiens
tttagctgtcactat

SEQ ID NO: 6717 - DNA, 15 bp, Homo sapiens
ttttagctgtcacta

SEQ ID NO: 6718 - DNA, 15 bp, Homo sapiens
attttagctgtcact

SEQ ID NO: 6719 - DNA, 15 bp, Homo sapiens
cattttagctgtcac

SEQ ID NO: 6720 - DNA, 15 bp, Homo sapiens
gcattttagctgtca

SEQ ID NO: 6721 - DNA, 15 bp, Homo sapiens
tgcattttagctgtc

SEQ ID NO: 6722 - DNA, 15 bp, Homo sapiens
gtgcattttagctgt

SEQ ID NO: 6723 - DNA, 15 bp, Homo sapiens
agtgcattttagctg

SEQ ID NO: 6724 - DNA, 15 bp, Homo sapiens
cagtgcattttagct

SEQ ID NO: 6725 - DNA, 15 bp, Homo sapiens
tcagtgcattttagc

SEQ ID NO: 6726 - DNA, 15 bp, Homo sapiens
ttcagtgcattttag

SEQ ID NO: 6727 - DNA, 15 bp, Homo sapiens
cttcagtgcatttta

SEQ ID NO: 6728 - DNA, 15 bp, Homo sapiens
gcttcagtgcatttt

SEQ ID NO: 6729 - DNA, 15 bp, Homo sapiens
tgcttcagtgcattt

SEQ ID NO: 6730 - DNA, 15 bp, Homo sapiens
ctgcttcagtgcatt

SEQ ID NO: 6731 - DNA, 15 bp, Homo sapiens
tctgcttcagtgcat

SEQ ID NO: 6732 - DNA, 15 bp, Homo sapiens
atctgcttcagtgca

SEQ ID NO: 6733 - DNA, 15 bp, Homo sapiens
catctgcttcagtgc

SEQ ID NO: 6734 - DNA, 15 bp, Homo sapiens
tcatctgcttcagtg

SEQ ID NO: 6735 - DNA, 15 bp, Homo sapiens
atcatctgcttcagt

SEQ ID NO: 6736 - DNA, 15 bp, Homo sapiens
gatcatctgcttcag

SEQ ID NO: 6737 - DNA, 15 bp, Homo sapiens
agatcatctgcttca

SEQ ID NO: 6738 - DNA, 15 bp, Homo sapiens
aagatcatctgcttc

SEQ ID NO: 6739 - DNA, 15 bp, Homo sapiens
caagatcatctgctt

SEQ ID NO: 6740 - DNA, 15 bp, Homo sapiens
tcaagatcatctgct

SEQ ID NO: 6741 - DNA, 15 bp, Homo sapiens
atcaagatcatctgc

SEQ ID NO: 6742 - DNA, 15 bp, Homo sapiens
catcaagatcatctg

SEQ ID NO: 6743 - DNA, 15 bp, Homo sapiens
tcatcaagatcatct

SEQ ID NO: 6744 - DNA, 15 bp, Homo sapiens
atcatcaagatcatc

SEQ ID NO: 6745 - DNA, 15 bp, Homo sapiens
gatcatcaagatcat

SEQ ID NO: 6746 - DNA, 15 bp, Homo sapiens
ggatcatcaagatca

SEQ ID NO: 6747 - DNA, 15 bp, Homo sapiens
aggatcatcaagatc

SEQ ID NO: 6748 - DNA, 15 bp, Homo sapiens
aaggatcatcaagat

SEQ ID NO: 6749 - DNA, 15 bp, Homo sapiens
aaaggatcatcaaga

SEQ ID NO: 6750 - DNA, 15 bp, Homo sapiens
taaaggatcatcaag

SEQ ID NO: 6751 - DNA, 15 bp, Homo sapiens
ataaaggatcatcaa

SEQ ID NO: 6752 - DNA, 15 bp, Homo sapiens
cataaaggatcatca

SEQ ID NO: 6753 - DNA, 15 bp, Homo sapiens
tcataaaggatcatc

SEQ ID NO: 6754 - DNA, 15 bp, Homo sapiens
ttcataaaggatcat

SEQ ID NO: 6755 - DNA, 15 bp, Homo sapiens
tttcataaaggatca

SEQ ID NO: 6756 - DNA, 15 bp, Homo sapiens
ctttcataaaggatc

SEQ ID NO: 6757 - DNA, 15 bp, Homo sapiens
actttcataaaggat

SEQ ID NO: 6758 - DNA, 15 bp, Homo sapiens
gactttcataaagga

SEQ ID NO: 6759 - DNA, 15 bp, Homo sapiens
agactttcataaagg

SEQ ID NO: 6760 - DNA, 15 bp, Homo sapiens
gagactttcataaag

SEQ ID NO: 6761 - DNA, 15 bp, Homo sapiens
tgagactttcataaa

SEQ ID NO: 6762 - DNA, 15 bp, Homo sapiens
atgagactttcataa

SEQ ID NO: 6763 - DNA, 15 bp, Homo sapiens
catgagactttcata

SEQ ID NO: 6764 - DNA, 15 bp, Homo sapiens
gcatgagactttcat

SEQ ID NO: 6765 - DNA, 15 bp, Homo sapiens
agcatgagactttca

SEQ ID NO: 6766 - DNA, 15 bp, Homo sapiens
tagcatgagactttc

SEQ ID NO: 6767 - DNA, 15 bp, Homo sapiens
ttagcatgagacttt

SEQ ID NO: 6768 - DNA, 15 bp, Homo sapiens
attagcatgagactt

SEQ ID NO: 6769 - DNA, 15 bp, Homo sapiens
cattagcatgagact

SEQ ID NO: 6770 - DNA, 15 bp, Homo sapiens
gcattagcatgagac

SEQ ID NO: 6771 - DNA, 15 bp, Homo sapiens
tgcattagcatgaga

SEQ ID NO: 6772 - DNA, 15 bp, Homo sapiens
ctgcattagcatgag

SEQ ID NO: 6773 - DNA, 15 bp, Homo sapiens
actgcattagcatga

SEQ ID NO: 6774 - DNA, 15 bp, Homo sapiens
aactgcattagcatg

SEQ ID NO: 6775 - DNA, 15 bp, Homo sapiens
aaactgcattagcat

SEQ ID NO: 6776 - DNA, 15 bp, Homo sapiens
aaaactgcattagca

SEQ ID NO: 6777 - DNA, 15 bp, Homo sapiens
gaaaactgcattagc

SEQ ID NO: 6778 - DNA, 15 bp, Homo sapiens
agaaaactgcattag

SEQ ID NO: 6779 - DNA, 15 bp, Homo sapiens
tagaaaactgcatta

SEQ ID NO: 6780 - DNA, 15 bp, Homo sapiens
ttagaaaactgcatt

SEQ ID NO: 6781 - DNA, 15 bp, Homo sapiens
tttagaaaactgcat

SEQ ID NO: 6782 - DNA, 15 bp, Homo sapiens
ttttagaaaactgca

SEQ ID NO: 6783 - DNA, 15 bp, Homo sapiens
attttagaaaactgc

SEQ ID NO: 6784 - DNA, 15 bp, Homo sapiens
tattttagaaaactg

SEQ ID NO: 6785 - DNA, 15 bp, Homo sapiens
ctattttagaaaact

SEQ ID NO: 6786 - DNA, 15 bp, Homo sapiens
tctattttagaaaac

SEQ ID NO: 6787 - DNA, 15 bp, Homo sapiens
ctctattttagaaaa

SEQ ID NO: 6788 - DNA, 15 bp, Homo sapiens
cctctattttagaaa

SEQ ID NO: 6789 - DNA, 15 bp, Homo sapiens
gcctctattttagaa

SEQ ID NO: 6790 - DNA, 15 bp, Homo sapiens
tgcctctattttaga

SEQ ID NO: 6791 - DNA, 15 bp, Homo sapiens
ctgcctctattttag

SEQ ID NO: 6792 - DNA, 15 bp, Homo sapiens
tctgcctctatttta

SEQ ID NO: 6793 - DNA, 15 bp, Homo sapiens
ctctgcctctatttt

SEQ ID NO: 6794 - DNA, 15 bp, Homo sapiens
actctgcctctattt

SEQ ID NO: 6795 - DNA, 15 bp, Homo sapiens
cactctgcctctatt

SEQ ID NO: 6796 - DNA, 15 bp, Homo sapiens
ccactctgcctctat

SEQ ID NO: 6797 - DNA, 15 bp, Homo sapiens
tccactctgcctcta

SEQ ID NO: 6798 - DNA, 15 bp, Homo sapiens
ttccactctgcctct

SEQ ID NO: 6799 - DNA, 15 bp, Homo sapiens
gttccactctgcctc

SEQ ID NO: 6800 - DNA, 15 bp, Homo sapiens
ggttccactctgcct

SEQ ID NO: 6801 - DNA, 15 bp, Homo sapiens
gggttccactctgcc

SEQ ID NO: 6802 - DNA, 15 bp, Homo sapiens
tgggttccactctgc

SEQ ID NO: 6803 - DNA, 15 bp, Homo sapiens
ctgggttccactctg

SEQ ID NO: 6804 - DNA, 15 bp, Homo sapiens
tctgggttccactct

SEQ ID NO: 6805 - DNA, 15 bp, Homo sapiens
atctgggttccactc

SEQ ID NO: 6806 - DNA, 15 bp, Homo sapiens
catctgggttccact

SEQ ID NO: 6807 - DNA, 15 bp, Homo sapiens
ccatctgggttccac

SEQ ID NO: 6808 - DNA, 15 bp, Homo sapiens
tccatctgggttcca

SEQ ID NO: 6809 - DNA, 15 bp, Homo sapiens
gtccatctgggttcc

SEQ ID NO: 6810 - DNA, 15 bp, Homo sapiens
tgtccatctgggttc

SEQ ID NO: 6811 - DNA, 15 bp, Homo sapiens
gtgtccatctgggtt

SEQ ID NO: 6812 - DNA, 15 bp, Homo sapiens
tgtgtccatctgggt

SEQ ID NO: 6813 - DNA, 15 bp, Homo sapiens
ttgtgtccatctggg

SEQ ID NO: 6814 - DNA, 15 bp, Homo sapiens
tttgtgtccatctgg

SEQ ID NO: 6815 - DNA, 15 bp, Homo sapiens
ttttgtgtccatctg

SEQ ID NO: 6816 - DNA, 15 bp, Homo sapiens
attttgtgtccatct

SEQ ID NO: 6817 - DNA, 15 bp, Homo sapiens
gattttgtgtccatc

SEQ ID NO: 6818 - DNA, 15 bp, Homo sapiens
agattttgtgtccat

SEQ ID NO: 6819 - DNA, 15 bp, Homo sapiens
cagattttgtgtcca

SEQ ID NO: 6820 - DNA, 15 bp, Homo sapiens
ccagattttgtgtcc

SEQ ID NO: 6821 - DNA, 15 bp, Homo sapiens
accagattttgtgtc

SEQ ID NO: 6822 - DNA, 15 bp, Homo sapiens
aaccagattttgtgt

SEQ ID NO: 6823 - DNA, 15 bp, Homo sapiens
caaccagattttgtg

SEQ ID NO: 6824 - DNA, 15 bp, Homo sapiens
tcaaccagattttgt

SEQ ID NO: 6825 - DNA, 15 bp, Homo sapiens
atcaaccagattttg

SEQ ID NO: 6826 - DNA, 15 bp, Homo sapiens
tatcaaccagatttt

SEQ ID NO: 6827 - DNA, 15 bp, Homo sapiens
atatcaaccagattt

SEQ ID NO: 6828 - DNA, 15 bp, Homo sapiens
tatatcaaccagatt

SEQ ID NO: 6829 - DNA, 15 bp, Homo sapiens
ttatatcaaccagat

SEQ ID NO: 6830 - DNA, 15 bp, Homo sapiens
attatatcaaccaga

SEQ ID NO: 6831 - DNA, 15 bp, Homo sapiens
tattatatcaaccag

SEQ ID NO: 6832 - DNA, 15 bp, Homo sapiens
ttattatatcaacca

SEQ ID NO: 6833 - DNA, 15 bp, Homo sapiens
tttattatatcaacc

SEQ ID NO: 6834 - DNA, 15 bp, Homo sapiens
ttttattatatcaac

SEQ ID NO: 6835 - DNA, 15 bp, Homo sapiens
gttttattatatcaa

SEQ ID NO: 6836 - DNA, 15 bp, Homo sapiens
tgttttattatatca

SEQ ID NO: 6837 - DNA, 15 bp, Homo sapiens
ttgttttattatatc

SEQ ID NO: 6838 - DNA, 15 bp, Homo sapiens
cttgttttattatat

SEQ ID NO: 6839 - DNA, 15 bp, Homo sapiens
ccttgttttattata

SEQ ID NO: 6840 - DNA, 15 bp, Homo sapiens
accttgttttattat

SEQ ID NO: 6841 - DNA, 15 bp, Homo sapiens
taccttgttttatta

SEQ ID NO: 6842 - DNA, 15 bp, Homo sapiens
ctaccttgttttatt

SEQ ID NO: 6843 - DNA, 15 bp, Homo sapiens
tctaccttgttttat

SEQ ID NO: 6844 - DNA, 15 bp, Homo sapiens
ctctaccttgtttta

SEQ ID NO: 6845 - DNA, 15 bp, Homo sapiens
cctctaccttgtttt

SEQ ID NO: 6846 - DNA, 15 bp, Homo sapiens
ccctctaccttgttt

SEQ ID NO: 6847 - DNA, 15 bp, Homo sapiens
accctctaccttgtt

SEQ ID NO: 6848 - DNA, 15 bp, Homo sapiens
caccctctaccttgt

SEQ ID NO: 6849 - DNA, 15 bp, Homo sapiens
acaccctctaccttg

SEQ ID NO: 6850 - DNA, 15 bp, Homo sapiens
tacaccctctacctt

SEQ ID NO: 6851 - DNA, 15 bp, Homo sapiens
atacaccctctacct

SEQ ID NO: 6852 - DNA, 15 bp, Homo sapiens
catacaccctctacc

SEQ ID NO: 6853 - DNA, 15 bp, Homo sapiens
ccatacaccctctac

SEQ ID NO: 6854 - DNA, 15 bp, Homo sapiens
accatacaccctcta

SEQ ID NO: 6855 - DNA, 15 bp, Homo sapiens
caccatacaccctct

SEQ ID NO: 6856 - DNA, 15 bp, Homo sapiens
ccaccatacaccctc

SEQ ID NO: 6857 - DNA, 15 bp, Homo sapiens
cccaccatacaccct

SEQ ID NO: 6858 - DNA, 15 bp, Homo sapiens
ccccaccatacaccc

SEQ ID NO: 6859 - DNA, 15 bp, Homo sapiens
tccccaccatacacc

SEQ ID NO: 6860 - DNA, 15 bp, Homo sapiens
ctccccaccatacac

SEQ ID NO: 6861 - DNA, 15 bp, Homo sapiens
cctccccaccataca

SEQ ID NO: 6862 - DNA, 15 bp, Homo sapiens
ccctccccaccatac

SEQ ID NO: 6863 - DNA, 15 bp, Homo sapiens
cccctccccaccata

SEQ ID NO: 6864 - DNA, 15 bp, Homo sapiens
ccccctccccaccat

SEQ ID NO: 6865 - DNA, 15 bp, Homo sapiens
accccctccccacca

SEQ ID NO: 6866 - DNA, 15 bp, Homo sapiens
taccccctccccacc

SEQ ID NO: 6867 - DNA, 15 bp, Homo sapiens
ttaccccctccccac

SEQ ID NO: 6868 - DNA, 15 bp, Homo sapiens
tttaccccctcccca

SEQ ID NO: 6869 - DNA, 15 bp, Homo sapiens
ctttaccccctcccc

SEQ ID NO: 6870 - DNA, 15 bp, Homo sapiens
cctttaccccctccc

SEQ ID NO: 6871 - DNA, 15 bp, Homo sapiens
tcctttaccccctcc

SEQ ID NO: 6872 - DNA, 15 bp, Homo sapiens
ttcctttaccccctc

SEQ ID NO: 6873 - DNA, 15 bp, Homo sapiens
cttcctttaccccct

SEQ ID NO: 6874 - DNA, 15 bp, Homo sapiens
ccttcctttaccccc

SEQ ID NO: 6875 - DNA, 15 bp, Homo sapiens
tccttcctttacccc

SEQ ID NO: 6876 - DNA, 15 bp, Homo sapiens
ttccttcctttaccc

SEQ ID NO: 6877 - DNA, 15 bp, Homo sapiens
tttccttcctttacc

SEQ ID NO: 6878 - DNA, 15 bp, Homo sapiens
gtttccttcctttac

SEQ ID NO: 6879 - DNA, 15 bp, Homo sapiens
agtttccttccttta

SEQ ID NO: 6880 - DNA, 15 bp, Homo sapiens
cagtttccttccttt

SEQ ID NO: 6881 - DNA, 15 bp, Homo sapiens
acagtttccttcctt

SEQ ID NO: 6882 - DNA, 15 bp, Homo sapiens
aacagtttccttcct

SEQ ID NO: 6883 - DNA, 15 bp, Homo sapiens
aaacagtttccttcc

SEQ ID NO: 6884 - DNA, 15 bp, Homo sapiens
taaacagtttccttc

SEQ ID NO: 6885 - DNA, 15 bp, Homo sapiens
ctaaacagtttcctt

SEQ ID NO: 6886 - DNA, 15 bp, Homo sapiens
cctaaacagtttcct

SEQ ID NO: 6887 - DNA, 15 bp, Homo sapiens
acctaaacagtttcc

SEQ ID NO: 6888 - DNA, 15 bp, Homo sapiens
tacctaaacagtttc

SEQ ID NO: 6889 - DNA, 15 bp, Homo sapiens
ttacctaaacagttt

SEQ ID NO: 6890 - DNA, 15 bp, Homo sapiens
tttacctaaacagtt

SEQ ID NO: 6891 - DNA, 15 bp, Homo sapiens
ctttacctaaacagt

SEQ ID NO: 6892 - DNA, 15 bp, Homo sapiens
tctttacctaaacag

SEQ ID NO: 6893 - DNA, 15 bp, Homo sapiens
atctttacctaaaca

SEQ ID NO: 6894 - DNA, 15 bp, Homo sapiens
tatctttacctaaac

SEQ ID NO: 6895 - DNA, 15 bp, Homo sapiens
gtatctttacctaaa

SEQ ID NO: 6896 - DNA, 15 bp, Homo sapiens
ggtatctttacctaa

SEQ ID NO: 6897 - DNA, 15 bp, Homo sapiens
tggtatctttaccta

SEQ ID NO: 6898 - DNA, 15 bp, Homo sapiens
gtggtatctttacct

SEQ ID NO: 6899 - DNA, 15 bp, Homo sapiens
tgtggtatctttacc

SEQ ID NO: 6900 - DNA, 15 bp, Homo sapiens
ttgtggtatctttac

SEQ ID NO: 6901 - DNA, 15 bp, Homo sapiens
gttgtggtatcttta

SEQ ID NO: 6902 - DNA, 15 bp, Homo sapiens
ggttgtggtatcttt

SEQ ID NO: 6903 - DNA, 15 bp, Homo sapiens
tggttgtggtatctt

SEQ ID NO: 6904 - DNA, 15 bp, Homo sapiens
ttggttgtggtatct

SEQ ID NO: 6905 - DNA, 15 bp, Homo sapiens
tttggttgtggtatc

SEQ ID NO: 6906 - DNA, 15 bp, Homo sapiens
ctttggttgtggtat

SEQ ID NO: 6907 - DNA, 15 bp, Homo sapiens
actttggttgtggta

SEQ ID NO: 6908 - DNA, 15 bp, Homo sapiens
gactttggttgtggt

SEQ ID NO: 6909 - DNA, 15 bp, Homo sapiens
ggactttggttgtgg

SEQ ID NO: 6910 - DNA, 15 bp, Homo sapiens
aggactttggttgtg

SEQ ID NO: 6911 - DNA, 15 bp, Homo sapiens
taggactttggttgt

SEQ ID NO: 6912 - DNA, 15 bp, Homo sapiens
gtaggactttggttg

SEQ ID NO: 6913 - DNA, 15 bp, Homo sapiens
agtaggactttggtt

SEQ ID NO: 6914 - DNA, 15 bp, Homo sapiens
cagtaggactttggt

SEQ ID NO: 6915 - DNA, 15 bp, Homo sapiens
gcagtaggactttgg

SEQ ID NO: 6916 - DNA, 15 bp, Homo sapiens
tgcagtaggactttg

SEQ ID NO: 6917 - DNA, 15 bp, Homo sapiens
gtgcagtaggacttt

SEQ ID NO: 6918 - DNA, 15 bp, Homo sapiens
tgtgcagtaggactt

SEQ ID NO: 6919 - DNA, 15 bp, Homo sapiens
gtgtgcagtaggact

SEQ ID NO: 6920 - DNA, 15 bp, Homo sapiens
tgtgtgcagtaggac

SEQ ID NO: 6921 - DNA, 15 bp, Homo sapiens
atgtgtgcagtagga

SEQ ID NO: 6922 - DNA, 15 bp, Homo sapiens
catgtgtgcagtagg

SEQ ID NO: 6923 - DNA, 15 bp, Homo sapiens
ccatgtgtgcagtag

SEQ ID NO: 6924 - DNA, 15 bp, Homo sapiens
cccatgtgtgcagta

SEQ ID NO: 6925 - DNA, 15 bp, Homo sapiens
tcccatgtgtgcagt

SEQ ID NO: 6926 - DNA, 15 bp, Homo sapiens
atcccatgtgtgcag

SEQ ID NO: 6927 - DNA, 15 bp, Homo sapiens
gatcccatgtgtgca

SEQ ID NO: 6928 - DNA, 15 bp, Homo sapiens
agatcccatgtgtgc

SEQ ID NO: 6929 - DNA, 15 bp, Homo sapiens
cagatcccatgtgtg

SEQ ID NO: 6930 - DNA, 15 bp, Homo sapiens
tcagatcccatgtgt

SEQ ID NO: 6931 - DNA, 15 bp, Homo sapiens
ctcagatcccatgtg

SEQ ID NO: 6932 - DNA, 15 bp, Homo sapiens
cctcagatcccatgt

SEQ ID NO: 6933 - DNA, 15 bp, Homo sapiens
tcctcagatcccatg

SEQ ID NO: 6934 - DNA, 15 bp, Homo sapiens
ctcctcagatcccat

SEQ ID NO: 6935 - DNA, 15 bp, Homo sapiens
cctcctcagatccca

SEQ ID NO: 6936 - DNA, 15 bp, Homo sapiens
ccctcctcagatccc

SEQ ID NO: 6937 - DNA, 15 bp, Homo sapiens
gccctcctcagatcc

SEQ ID NO: 6938 - DNA, 15 bp, Homo sapiens
agccctcctcagatc

SEQ ID NO: 6939 - DNA, 15 bp, Homo sapiens
cagccctcctcagat

SEQ ID NO: 6940 - DNA, 15 bp, Homo sapiens
acagccctcctcaga

SEQ ID NO: 6941 - DNA, 15 bp, Homo sapiens
cacagccctcctcag

SEQ ID NO: 6942 - DNA, 15 bp, Homo sapiens
acacagccctcctca

SEQ ID NO: 6943 - DNA, 15 bp, Homo sapiens
gacacagccctcctc

SEQ ID NO: 6944 - DNA, 15 bp, Homo sapiens
agacacagccctcct

SEQ ID NO: 6945 - DNA, 15 bp, Homo sapiens
cagacacagccctcc

SEQ ID NO: 6946 - DNA, 15 bp, Homo sapiens
gcagacacagccctc

SEQ ID NO: 6947 - DNA, 15 bp, Homo sapiens
agcagacacagccct

SEQ ID NO: 6948 - DNA, 15 bp, Homo sapiens
gagcagacacagccc

SEQ ID NO: 6949 - DNA, 15 bp, Homo sapiens
agagcagacacagcc

SEQ ID NO: 6950 - DNA, 15 bp, Homo sapiens
cagagcagacacagc

SEQ ID NO: 6951 - DNA, 15 bp, Homo sapiens
ccagagcagacacag

SEQ ID NO: 6952 - DNA, 15 bp, Homo sapiens
accagagcagacaca

SEQ ID NO: 6953 - DNA, 15 bp, Homo sapiens
aaccagagcagacac

SEQ ID NO: 6954 - DNA, 15 bp, Homo sapiens
taaccagagcagaca

SEQ ID NO: 6955 - DNA, 15 bp, Homo sapiens
gtaaccagagcagac

SEQ ID NO: 6956 - DNA, 15 bp, Homo sapiens
cgtaaccagagcaga

SEQ ID NO: 6957 - DNA, 15 bp, Homo sapiens
acgtaaccagagcag

SEQ ID NO: 6958 - DNA, 15 bp, Homo sapiens
aacgtaaccagagca

SEQ ID NO: 6959 - DNA, 15 bp, Homo sapiens
aaacgtaaccagagc

SEQ ID NO: 6960 - DNA, 15 bp, Homo sapiens
aaaacgtaaccagag

SEQ ID NO: 6961 - DNA, 15 bp, Homo sapiens
gaaaacgtaaccaga

SEQ ID NO: 6962 - DNA, 15 bp, Homo sapiens
agaaaacgtaaccag

SEQ ID NO: 6963 - DNA, 15 bp, Homo sapiens
tagaaaacgtaacca

SEQ ID NO: 6964 - DNA, 15 bp, Homo sapiens
atagaaaacgtaacc

SEQ ID NO: 6965 - DNA, 15 bp, Homo sapiens
tatagaaaacgtaac

SEQ ID NO: 6966 - DNA, 15 bp, Homo sapiens
ttatagaaaacgtaa

SEQ ID NO: 6967 - DNA, 15 bp, Homo sapiens
attatagaaaacgta

SEQ ID NO: 6968 - DNA, 15 bp, Homo sapiens
gattatagaaaacgt

SEQ ID NO: 6969 - DNA, 15 bp, Homo sapiens
agattatagaaaacg

SEQ ID NO: 6970 - DNA, 15 bp, Homo sapiens
gagattatagaaaac

SEQ ID NO: 6971 - DNA, 15 bp, Homo sapiens
agagattatagaaaa

SEQ ID NO: 6972 - DNA, 15 bp, Homo sapiens
aagagattatagaaa

SEQ ID NO: 6973 - DNA, 15 bp, Homo sapiens
taagagattatagaa

SEQ ID NO: 6974 - DNA, 15 bp, Homo sapiens
ctaagagattataga

SEQ ID NO: 6975 - DNA, 15 bp, Homo sapiens
gctaagagattatag

SEQ ID NO: 6976 - DNA, 15 bp, Homo sapiens
tgctaagagattata

SEQ ID NO: 6977 - DNA, 15 bp, Homo sapiens
gtgctaagagattat

SEQ ID NO: 6978 - DNA, 15 bp, Homo sapiens
ggtgctaagagatta

SEQ ID NO: 6979 - DNA, 15 bp, Homo sapiens
tggtgctaagagatt

SEQ ID NO: 6980 - DNA, 15 bp, Homo sapiens
gtggtgctaagagat

SEQ ID NO: 6981 - DNA, 15 bp, Homo sapiens
agtggtgctaagaga

SEQ ID NO: 6982 - DNA, 15 bp, Homo sapiens
cagtggtgctaagag

SEQ ID NO: 6983 - DNA, 15 bp, Homo sapiens
tcagtggtgctaaga

SEQ ID NO: 6984 - DNA, 15 bp, Homo sapiens
ttcagtggtgctaag

SEQ ID NO: 6985 - DNA, 15 bp, Homo sapiens
gttcagtggtgctaa

SEQ ID NO: 6986 - DNA, 15 bp, Homo sapiens
agttcagtggtgcta

SEQ ID NO: 6987 - DNA, 15 bp, Homo sapiens
aagttcagtggtgct

SEQ ID NO: 6988 - DNA, 15 bp, Homo sapiens
aaagttcagtggtgc

SEQ ID NO: 6989 - DNA, 15 bp, Homo sapiens
gaaagttcagtggtg

SEQ ID NO: 6990 - DNA, 15 bp, Homo sapiens
agaaagttcagtggt

SEQ ID NO: 6991 - DNA, 15 bp, Homo sapiens
gagaaagttcagtgg

SEQ ID NO: 6992 - DNA, 15 bp, Homo sapiens
agagaaagttcagtg

SEQ ID NO: 6993 - DNA, 15 bp, Homo sapiens
gagagaaagttcagt

SEQ ID NO: 6994 - DNA, 15 bp, Homo sapiens
agagagaaagttcag

SEQ ID NO: 6995 - DNA, 15 bp, Homo sapiens
aagagagaaagttca

SEQ ID NO: 6996 - DNA, 15 bp, Homo sapiens
aaagagagaaagttc

SEQ ID NO: 6997 - DNA, 15 bp, Homo sapiens
aaaagagagaaagtt

SEQ ID NO: 6998 - DNA, 15 bp, Homo sapiens
aaaaagagagaaagt

SEQ ID NO: 6999 - DNA, 15 bp, Homo sapiens
caaaaagagagaaag

SEQ ID NO: 7000 - DNA, 15 bp, Homo sapiens
acaaaaagagagaaa

SEQ ID NO: 7001 - DNA, 15 bp, Homo sapiens
aacaaaaagagagaa

SEQ ID NO: 7002 - DNA, 15 bp, Homo sapiens
aaacaaaaagagaga

SEQ ID NO: 7003 - DNA, 15 bp, Homo sapiens
aaaacaaaaagagag

SEQ ID NO: 7004 - DNA, 15 bp, Homo sapiens
caaaacaaaaagaga

SEQ ID NO: 7005 - DNA, 15 bp, Homo sapiens
acaaaacaaaaagag

SEQ ID NO: 7006 - DNA, 15 bp, Homo sapiens
aacaaaacaaaaaga

SEQ ID NO: 7007 - DNA, 15 bp, Homo sapiens
aaacaaaacaaaaag

SEQ ID NO: 7008 - DNA, 15 bp, Homo sapiens
aaaacaaaacaaaaa

SEQ ID NO: 7009 - DNA, 15 bp, Homo sapiens
aaaaacaaaacaaaa

SEQ ID NO: 7010 - DNA, 15 bp, Homo sapiens
gaaaaacaaaacaaa

SEQ ID NO: 7011 - DNA, 15 bp, Homo sapiens
ggaaaaacaaaacaa

SEQ ID NO: 7012 - DNA, 15 bp, Homo sapiens
tggaaaaacaaaaca

SEQ ID NO: 7013 - DNA, 15 bp, Homo sapiens
ctggaaaaacaaaac

SEQ ID NO: 7014 - DNA, 15 bp, Homo sapiens
tctggaaaaacaaaa

SEQ ID NO: 7015 - DNA, 15 bp, Homo sapiens
atctggaaaaacaaa

SEQ ID NO: 7016 - DNA, 15 bp, Homo sapiens
aatctggaaaaacaa

SEQ ID NO: 7017 - DNA, 15 bp, Homo sapiens
gaatctggaaaaaca

SEQ ID NO: 7018 - DNA, 15 bp, Homo sapiens
cgaatctggaaaaac

SEQ ID NO: 7019 - DNA, 15 bp, Homo sapiens
gcgaatctggaaaaa

SEQ ID NO: 7020 - DNA, 15 bp, Homo sapiens
agcgaatctggaaaa

SEQ ID NO: 7021 - DNA, 15 bp, Homo sapiens
aagcgaatctggaaa

SEQ ID NO: 7022 - DNA, 15 bp, Homo sapiens
aaagcgaatctggaa

SEQ ID NO: 7023 - DNA, 15 bp, Homo sapiens
caaagcgaatctgga

SEQ ID NO: 7024 - DNA, 15 bp, Homo sapiens
acaaagcgaatctgg

SEQ ID NO: 7025 - DNA, 15 bp, Homo sapiens
cacaaagcgaatctg

SEQ ID NO: 7026 - DNA, 15 bp, Homo sapiens
ccacaaagcgaatct

SEQ ID NO: 7027 - DNA, 15 bp, Homo sapiens
accacaaagcgaatc

SEQ ID NO: 7028 - DNA, 15 bp, Homo sapiens
caccacaaagcgaat

SEQ ID NO: 7029 - DNA, 15 bp, Homo sapiens
ccaccacaaagcgaa

SEQ ID NO: 7030 - DNA, 15 bp, Homo sapiens
tccaccacaaagcga

SEQ ID NO: 7031 - DNA, 15 bp, Homo sapiens
ttccaccacaaagcg

SEQ ID NO: 7032 - DNA, 15 bp, Homo sapiens
gttccaccacaaagc

SEQ ID NO: 7033 - DNA, 15 bp, Homo sapiens
agttccaccacaaag

SEQ ID NO: 7034 - DNA, 15 bp, Homo sapiens
gagttccaccacaaa

SEQ ID NO: 7035 - DNA, 15 bp, Homo sapiens
cgagttccaccacaa

SEQ ID NO: 7036 - DNA, 15 bp, Homo sapiens
acgagttccaccaca

SEQ ID NO: 7037 - DNA, 15 bp, Homo sapiens
cacgagttccaccac

SEQ ID NO: 7038 - DNA, 15 bp, Homo sapiens
acacgagttccacca

SEQ ID NO: 7039 - DNA, 15 bp, Homo sapiens
cacacgagttccacc

SEQ ID NO: 7040 - DNA, 15 bp, Homo sapiens
ccacacgagttccac

SEQ ID NO: 7041 - DNA, 15 bp, Homo sapiens
gccacacgagttcca

SEQ ID NO: 7042 - DNA, 15 bp, Homo sapiens
ggccacacgagttcc

SEQ ID NO: 7043 - DNA, 15 bp, Homo sapiens
aggccacacgagttc

SEQ ID NO: 7044 - DNA, 15 bp, Homo sapiens
aaggccacacgagtt

SEQ ID NO: 7045 - DNA, 15 bp, Homo sapiens
aaaggccacacgagt

SEQ ID NO: 7046 - DNA, 15 bp, Homo sapiens
taaaggccacacgag

SEQ ID NO: 7047 - DNA, 15 bp, Homo sapiens
ataaaggccacacga

SEQ ID NO: 7048 - DNA, 15 bp, Homo sapiens
gataaaggccacacg

SEQ ID NO: 7049 - DNA, 15 bp, Homo sapiens
agataaaggccacac

SEQ ID NO: 7050 - DNA, 15 bp, Homo sapiens
aagataaaggccaca

SEQ ID NO: 7051 - DNA, 15 bp, Homo sapiens
aaagataaaggccac

SEQ ID NO: 7052 - DNA, 15 bp, Homo sapiens
taaagataaaggcca

SEQ ID NO: 7053 - DNA, 15 bp, Homo sapiens
ataaagataaaggcc

SEQ ID NO: 7054 - DNA, 15 bp, Homo sapiens
aataaagataaaggc

SEQ ID NO: 7055 - DNA, 15 bp, Homo sapiens
aaataaagataaagg

SEQ ID NO: 7056 - DNA, 15 bp, Homo sapiens
gaaataaagataaag

SEQ ID NO: 7057 - DNA, 15 bp, Homo sapiens
agaaataaagataaa

SEQ ID NO: 7058 - DNA, 15 bp, Homo sapiens
cagaaataaagataa

SEQ ID NO: 7059 - DNA, 15 bp, Homo sapiens
ccagaaataaagata

SEQ ID NO: 7060 - DNA, 15 bp, Homo sapiens
accagaaataaagat

SEQ ID NO: 7061 - DNA, 15 bp, Homo sapiens
gaccagaaataaaga

SEQ ID NO: 7062 - DNA, 15 bp, Homo sapiens
agaccagaaataaag

SEQ ID NO: 7063 - DNA, 15 bp, Homo sapiens
aagaccagaaataaa

SEQ ID NO: 7064 - DNA, 15 bp, Homo sapiens
caagaccagaaataa

SEQ ID NO: 7065 - DNA, 15 bp, Homo sapiens
tcaagaccagaaata

SEQ ID NO: 7066 - DNA, 15 bp, Homo sapiens
atcaagaccagaaat

SEQ ID NO: 7067 - DNA, 15 bp, Homo sapiens
gatcaagaccagaaa

SEQ ID NO: 7068 - DNA, 15 bp, Homo sapiens
agatcaagaccagaa

SEQ ID NO: 7069 - DNA, 15 bp, Homo sapiens
cagatcaagaccaga

SEQ ID NO: 7070 - DNA, 15 bp, Homo sapiens
ccagatcaagaccag

SEQ ID NO: 7071 - DNA, 15 bp, Homo sapiens
accagatcaagacca

SEQ ID NO: 7072 - DNA, 15 bp, Homo sapiens
aaccagatcaagacc

SEQ ID NO: 7073 - DNA, 15 bp, Homo sapiens
taaccagatcaagac

SEQ ID NO: 7074 - DNA, 15 bp, Homo sapiens
ttaaccagatcaaga

SEQ ID NO: 7075 - DNA, 15 bp, Homo sapiens
cttaaccagatcaag

SEQ ID NO: 7076 - DNA, 15 bp, Homo sapiens
ccttaaccagatcaa

SEQ ID NO: 7077 - DNA, 15 bp, Homo sapiens
tccttaaccagatca

SEQ ID NO: 7078 - DNA, 15 bp, Homo sapiens
ttccttaaccagatc

SEQ ID NO: 7079 - DNA, 15 bp, Homo sapiens
attccttaaccagat

SEQ ID NO: 7080 - DNA, 15 bp, Homo sapiens
cattccttaaccaga

SEQ ID NO: 7081 - DNA, 15 bp, Homo sapiens
gcattccttaaccag

SEQ ID NO: 7082 - DNA, 15 bp, Homo sapiens
ggcattccttaacca

SEQ ID NO: 7083 - DNA, 15 bp, Homo sapiens
tggcattccttaacc

SEQ ID NO: 7084 - DNA, 15 bp, Homo sapiens
ttggcattccttaac

SEQ ID NO: 7085 - DNA, 15 bp, Homo sapiens
gttggcattccttaa

SEQ ID NO: 7086 - DNA, 15 bp, Homo sapiens
ggttggcattcctta

SEQ ID NO: 7087 - DNA, 15 bp, Homo sapiens
gggttggcattcctt

SEQ ID NO: 7088 - DNA, 15 bp, Homo sapiens
tgggttggcattcct

SEQ ID NO: 7089 - DNA, 15 bp, Homo sapiens
gtgggttggcattcc

SEQ ID NO: 7090 - DNA, 15 bp, Homo sapiens
agtgggttggcattc

SEQ ID NO: 7091 - DNA, 15 bp, Homo sapiens
gagtgggttggcatt

SEQ ID NO: 7092 - DNA, 15 bp, Homo sapiens
agagtgggttggcat

SEQ ID NO: 7093 - DNA, 15 bp, Homo sapiens
tagagtgggttggca

SEQ ID NO: 7094 - DNA, 15 bp, Homo sapiens
gtagagtgggttggc

SEQ ID NO: 7095 - DNA, 15 bp, Homo sapiens
tgtagagtgggttgg

SEQ ID NO: 7096 - DNA, 15 bp, Homo sapiens
ctgtagagtgggttg

SEQ ID NO: 7097 - DNA, 15 bp, Homo sapiens
gctgtagagtgggtt

SEQ ID NO: 7098 - DNA, 15 bp, Homo sapiens
ggctgtagagtgggt

SEQ ID NO: 7099 - DNA, 15 bp, Homo sapiens
tggctgtagagtggg

SEQ ID NO: 7100 - DNA, 15 bp, Homo sapiens
atggctgtagagtgg

SEQ ID NO: 7101 - DNA, 15 bp, Homo sapiens
gatggctgtagagtg

SEQ ID NO: 7102 - DNA, 15 bp, Homo sapiens
tgatggctgtagagt

SEQ ID NO: 7103 - DNA, 15 bp, Homo sapiens
atgatggctgtagag

SEQ ID NO: 7104 - DNA, 15 bp, Homo sapiens
catgatggctgtaga

SEQ ID NO: 7105 - DNA, 15 bp, Homo sapiens
tcatgatggctgtag

SEQ ID NO: 7106 - DNA, 15 bp, Homo sapiens
ttcatgatggctgta

SEQ ID NO: 7107 - DNA, 15 bp, Homo sapiens
attcatgatggctgt

SEQ ID NO: 7108 - DNA, 15 bp, Homo sapiens
cattcatgatggctg

SEQ ID NO: 7109 - DNA, 15 bp, Homo sapiens
acattcatgatggct

SEQ ID NO: 7110 - DNA, 15 bp, Homo sapiens
tacattcatgatggc

SEQ ID NO: 7111 - DNA, 15 bp, Homo sapiens
ttacattcatgatgg

SEQ ID NO: 7112 - DNA, 15 bp, Homo sapiens
cttacattcatgatg

SEQ ID NO: 7113 - DNA, 15 bp, Homo sapiens
gcttacattcatgat

SEQ ID NO: 7114 - DNA, 15 bp, Homo sapiens
tgcttacattcatga

SEQ ID NO: 7115 - DNA, 15 bp, Homo sapiens
atgcttacattcatg

SEQ ID NO: 7116 - DNA, 15 bp, Homo sapiens
tatgcttacattcat

SEQ ID NO: 7117 - DNA, 15 bp, Homo sapiens
ctatgcttacattca

SEQ ID NO: 7118 - DNA, 15 bp, Homo sapiens
gctatgcttacattc

SEQ ID NO: 7119 - DNA, 15 bp, Homo sapiens
tgctatgcttacatt

SEQ ID NO: 7120 - DNA, 15 bp, Homo sapiens
ctgctatgcttacat

SEQ ID NO: 7121 - DNA, 15 bp, Homo sapiens
cctgctatgcttaca

SEQ ID NO: 7122 - DNA, 15 bp, Homo sapiens
ccctgctatgcttac

SEQ ID NO: 7123 - DNA, 15 bp, Homo sapiens
accctgctatgctta

SEQ ID NO: 7124 - DNA, 15 bp, Homo sapiens
taccctgctatgctt

SEQ ID NO: 7125 - DNA, 15 bp, Homo sapiens
ctaccctgctatgct

SEQ ID NO: 7126 - DNA, 15 bp, Homo sapiens
gctaccctgctatgc

SEQ ID NO: 7127 - DNA, 15 bp, Homo sapiens
agctaccctgctatg

SEQ ID NO: 7128 - DNA, 15 bp, Homo sapiens
aagctaccctgctat

SEQ ID NO: 7129 - DNA, 15 bp, Homo sapiens
caagctaccctgcta

SEQ ID NO: 7130 - DNA, 15 bp, Homo sapiens
ccaagctaccctgct

SEQ ID NO: 7131 - DNA, 15 bp, Homo sapiens
cccaagctaccctgc

SEQ ID NO: 7132 - DNA, 15 bp, Homo sapiens
gcccaagctaccctg

SEQ ID NO: 7133 - DNA, 15 bp, Homo sapiens
tgcccaagctaccct

SEQ ID NO: 7134 - DNA, 15 bp, Homo sapiens
ttgcccaagctaccc

SEQ ID NO: 7135 - DNA, 15 bp, Homo sapiens
cttgcccaagctacc

SEQ ID NO: 7136 - DNA, 15 bp, Homo sapiens
gcttgcccaagctac

SEQ ID NO: 7137 - DNA, 15 bp, Homo sapiens
ggcttgcccaagcta

SEQ ID NO: 7138 - DNA, 15 bp, Homo sapiens
gggcttgcccaagct

SEQ ID NO: 7139 - DNA, 15 bp, Homo sapiens
agggcttgcccaagc

SEQ ID NO: 7140 - DNA, 15 bp, Homo sapiens
cagggcttgcccaag

SEQ ID NO: 7141 - DNA, 15 bp, Homo sapiens
tcagggcttgcccaa

SEQ ID NO: 7142 - DNA, 15 bp, Homo sapiens
ttcagggcttgccca

SEQ ID NO: 7143 - DNA, 15 bp, Homo sapiens
cttcagggcttgccc

SEQ ID NO: 7144 - DNA, 15 bp, Homo sapiens
tcttcagggcttgcc

SEQ ID NO: 7145 - DNA, 15 bp, Homo sapiens
ctcttcagggcttgc

SEQ ID NO: 7146 - DNA, 15 bp, Homo sapiens
tctcttcagggcttg

SEQ ID NO: 7147 - DNA, 15 bp, Homo sapiens
gtctcttcagggctt

SEQ ID NO: 7148 - DNA, 15 bp, Homo sapiens
agtctcttcagggct

SEQ ID NO: 7149 - DNA, 15 bp, Homo sapiens
aagtctcttcagggc

SEQ ID NO: 7150 - DNA, 15 bp, Homo sapiens
aaagtctcttcaggg

SEQ ID NO: 7151 - DNA, 15 bp, Homo sapiens
caaagtctcttcagg

SEQ ID NO: 7152 - DNA, 15 bp, Homo sapiens
ccaaagtctcttcag

SEQ ID NO: 7153 - DNA, 15 bp, Homo sapiens
accaaagtctcttca

SEQ ID NO: 7154 - DNA, 15 bp, Homo sapiens
gaccaaagtctcttc

SEQ ID NO: 7155 - DNA, 15 bp, Homo sapiens
agaccaaagtctctt

SEQ ID NO: 7156 - DNA, 15 bp, Homo sapiens
cagaccaaagtctct

SEQ ID NO: 7157 - DNA, 15 bp, Homo sapiens
ccagaccaaagtctc

SEQ ID NO: 7158 - DNA, 15 bp, Homo sapiens
cccagaccaaagtct

SEQ ID NO: 7159 - DNA, 15 bp, Homo sapiens
gcccagaccaaagtc

SEQ ID NO: 7160 - DNA, 15 bp, Homo sapiens
ggcccagaccaaagt

SEQ ID NO: 7161 - DNA, 15 bp, Homo sapiens
aggcccagaccaaag

SEQ ID NO: 7162 - DNA, 15 bp, Homo sapiens
aaggcccagaccaaa

SEQ ID NO: 7163 - DNA, 15 bp, Homo sapiens
aaaggcccagaccaa

SEQ ID NO: 7164 - DNA, 15 bp, Homo sapiens
aaaaggcccagacca

SEQ ID NO: 7165 - DNA, 15 bp, Homo sapiens
caaaaggcccagacc

SEQ ID NO: 7166 - DNA, 15 bp, Homo sapiens
acaaaaggcccagac

SEQ ID NO: 7167 - DNA, 15 bp, Homo sapiens
gacaaaaggcccaga

SEQ ID NO: 7168 - DNA, 15 bp, Homo sapiens
agacaaaaggcccag

SEQ ID NO: 7169 - DNA, 15 bp, Homo sapiens
tagacaaaaggccca

SEQ ID NO: 7170 - DNA, 15 bp, Homo sapiens
ctagacaaaaggccc

SEQ ID NO: 7171 - DNA, 15 bp, Homo sapiens
tctagacaaaaggcc

SEQ ID NO: 7172 - DNA, 15 bp, Homo sapiens
ttctagacaaaaggc

SEQ ID NO: 7173 - DNA, 15 bp, Homo sapiens
tttctagacaaaagg

SEQ ID NO: 7174 - DNA, 15 bp, Homo sapiens
ctttctagacaaaag

SEQ ID NO: 7175 - DNA, 15 bp, Homo sapiens
tctttctagacaaaa

SEQ ID NO: 7176 - DNA, 15 bp, Homo sapiens
atctttctagacaaa

SEQ ID NO: 7177 - DNA, 15 bp, Homo sapiens
gatctttctagacaa

SEQ ID NO: 7178 - DNA, 15 bp, Homo sapiens
agatctttctagaca

SEQ ID NO: 7179 - DNA, 15 bp, Homo sapiens
aagatctttctagac

SEQ ID NO: 7180 - DNA, 15 bp, Homo sapiens
caagatctttctaga

SEQ ID NO: 7181 - DNA, 15 bp, Homo sapiens
ccaagatctttctag

SEQ ID NO: 7182 - DNA, 15 bp, Homo sapiens
cccaagatctttcta

SEQ ID NO: 7183 - DNA, 15 bp, Homo sapiens
ccccaagatctttct

SEQ ID NO: 7184 - DNA, 15 bp, Homo sapiens
accccaagatctttc

SEQ ID NO: 7185 - DNA, 15 bp, Homo sapiens
caccccaagatcttt

SEQ ID NO: 7186 - DNA, 15 bp, Homo sapiens
ccaccccaagatctt

SEQ ID NO: 7187 - DNA, 15 bp, Homo sapiens
cccaccccaagatct

SEQ ID NO: 7188 - DNA, 15 bp, Homo sapiens
tcccaccccaagatc

SEQ ID NO: 7189 - DNA, 15 bp, Homo sapiens
ctcccaccccaagat

SEQ ID NO: 7190 - DNA, 15 bp, Homo sapiens
actcccaccccaaga

SEQ ID NO: 7191 - DNA, 15 bp, Homo sapiens
cactcccaccccaag

SEQ ID NO: 7192 - DNA, 15 bp, Homo sapiens
acactcccaccccaa

SEQ ID NO: 7193 - DNA, 15 bp, Homo sapiens
cacactcccacccca

SEQ ID NO: 7194 - DNA, 15 bp, Homo sapiens
ccacactcccacccc

SEQ ID NO: 7195 - DNA, 15 bp, Homo sapiens
cccacactcccaccc

SEQ ID NO: 7196 - DNA, 15 bp, Homo sapiens
ccccacactcccacc

SEQ ID NO: 7197 - DNA, 15 bp, Homo sapiens
tccccacactcccac

SEQ ID NO: 7198 - DNA, 15 bp, Homo sapiens
atccccacactccca

SEQ ID NO: 7199 - DNA, 15 bp, Homo sapiens
gatccccacactccc

SEQ ID NO: 7200 - DNA, 15 bp, Homo sapiens
tgatccccacactcc

SEQ ID NO: 7201 - DNA, 15 bp, Homo sapiens
ctgatccccacactc

SEQ ID NO: 7202 - DNA, 15 bp, Homo sapiens
tctgatccccacact

SEQ ID NO: 7203 - DNA, 15 bp, Homo sapiens
atctgatccccacac

SEQ ID NO: 7204 - DNA, 15 bp, Homo sapiens
gatctgatccccaca

SEQ ID NO: 7205 - DNA, 15 bp, Homo sapiens
agatctgatccccac

SEQ ID NO: 7206 - DNA, 15 bp, Homo sapiens
cagatctgatcccca

SEQ ID NO: 7207 - DNA, 15 bp, Homo sapiens
gcagatctgatcccc

SEQ ID NO: 7208 - DNA, 15 bp, Homo sapiens
agcagatctgatccc

SEQ ID NO: 7209 - DNA, 15 bp, Homo sapiens
aagcagatctgatcc

SEQ ID NO: 7210 - DNA, 15 bp, Homo sapiens
taagcagatctgatc

SEQ ID NO: 7211 - DNA, 15 bp, Homo sapiens
ataagcagatctgat

SEQ ID NO: 7212 - DNA, 15 bp, Homo sapiens
gataagcagatctga

SEQ ID NO: 7213 - DNA, 15 bp, Homo sapiens
tgataagcagatctg

SEQ ID NO: 7214 - DNA, 15 bp, Homo sapiens
atgataagcagatct

SEQ ID NO: 7215 - DNA, 15 bp, Homo sapiens
gatgataagcagatc

SEQ ID NO: 7216 - DNA, 15 bp, Homo sapiens
tgatgataagcagat

SEQ ID NO: 7217 - DNA, 15 bp, Homo sapiens
atgatgataagcaga

SEQ ID NO: 7218 - DNA, 15 bp, Homo sapiens
aatgatgataagcag

SEQ ID NO: 7219 - DNA, 15 bp, Homo sapiens
aaatgatgataagca

SEQ ID NO: 7220 - DNA, 15 bp, Homo sapiens
gaaatgatgataagc

SEQ ID NO: 7221 - DNA, 15 bp, Homo sapiens
tgaaatgatgataag

SEQ ID NO: 7222 - DNA, 15 bp, Homo sapiens
atgaaatgatgataa

SEQ ID NO: 7223 - DNA, 15 bp, Homo sapiens
catgaaatgatgata

SEQ ID NO: 7224 - DNA, 15 bp, Homo sapiens
acatgaaatgatgat

SEQ ID NO: 7225 - DNA, 15 bp, Homo sapiens
gacatgaaatgatga

SEQ ID NO: 7226 - DNA, 15 bp, Homo sapiens
agacatgaaatgatg

SEQ ID NO: 7227 - DNA, 15 bp, Homo sapiens
tagacatgaaatgat

SEQ ID NO: 7228 - DNA, 15 bp, Homo sapiens
atagacatgaaatga

SEQ ID NO: 7229 - DNA, 15 bp, Homo sapiens
catagacatgaaatg

SEQ ID NO: 7230 - DNA, 15 bp, Homo sapiens
tcatagacatgaaat

SEQ ID NO: 7231 - DNA, 15 bp, Homo sapiens
atcatagacatgaaa

SEQ ID NO: 7232 - DNA, 15 bp, Homo sapiens
catcatagacatgaa

SEQ ID NO: 7233 - DNA, 15 bp, Homo sapiens
gcatcatagacatga

SEQ ID NO: 7234 - DNA, 15 bp, Homo sapiens
tgcatcatagacatg

SEQ ID NO: 7235 - DNA, 15 bp, Homo sapiens
atgcatcatagacat

SEQ ID NO: 7236 - DNA, 15 bp, Homo sapiens
catgcatcatagaca

SEQ ID NO: 7237 - DNA, 15 bp, Homo sapiens
acatgcatcatagac

SEQ ID NO: 7238 - DNA, 15 bp, Homo sapiens
tacatgcatcataga

SEQ ID NO: 7239 - DNA, 15 bp, Homo sapiens
ttacatgcatcatag

SEQ ID NO: 7240 - DNA, 15 bp, Homo sapiens
gttacatgcatcata

SEQ ID NO: 7241 - DNA, 15 bp, Homo sapiens
tgttacatgcatcat

SEQ ID NO: 7242 - DNA, 15 bp, Homo sapiens
ctgttacatgcatca

SEQ ID NO: 7243 - DNA, 15 bp, Homo sapiens
tctgttacatgcatc

SEQ ID NO: 7244 - DNA, 15 bp, Homo sapiens
atctgttacatgcat

SEQ ID NO: 7245 - DNA, 15 bp, Homo sapiens
aatctgttacatgca

SEQ ID NO: 7246 - DNA, 15 bp, Homo sapiens
aaatctgttacatgc

SEQ ID NO: 7247 - DNA, 15 bp, Homo sapiens
taaatctgttacatg

SEQ ID NO: 7248 - DNA, 15 bp, Homo sapiens
ataaatctgttacat

SEQ ID NO: 7249 - DNA, 15 bp, Homo sapiens
gataaatctgttaca

SEQ ID NO: 7250 - DNA, 15 bp, Homo sapiens
tgataaatctgttac

SEQ ID NO: 7251 - DNA, 15 bp, Homo sapiens
ttgataaatctgtta

SEQ ID NO: 7252 - DNA, 15 bp, Homo sapiens
attgataaatctgtt

SEQ ID NO: 7253 - DNA, 15 bp, Homo sapiens
cattgataaatctgt

SEQ ID NO: 7254 - DNA, 15 bp, Homo sapiens
acattgataaatctg

SEQ ID NO: 7255 - DNA, 15 bp, Homo sapiens
aacattgataaatct

SEQ ID NO: 7256 - DNA, 15 bp, Homo sapiens
taacattgataaatc

SEQ ID NO: 7257 - DNA, 15 bp, Homo sapiens
gtaacattgataaat

SEQ ID NO: 7258 - DNA, 15 bp, Homo sapiens
tgtaacattgataaa

SEQ ID NO: 7259 - DNA, 15 bp, Homo sapiens
gtgtaacattgataa

SEQ ID NO: 7260 - DNA, 15 bp, Homo sapiens
tgtgtaacattgata

SEQ ID NO: 7261 - DNA, 15 bp, Homo sapiens
ttgtgtaacattgat

SEQ ID NO: 7262 - DNA, 15 bp, Homo sapiens
tttgtgtaacattga

SEQ ID NO: 7263 - DNA, 15 bp, Homo sapiens
atttgtgtaacattg

SEQ ID NO: 7264 - DNA, 15 bp, Homo sapiens
aatttgtgtaacatt

SEQ ID NO: 7265 - DNA, 15 bp, Homo sapiens
taatttgtgtaacat

SEQ ID NO: 7266 - DNA, 15 bp, Homo sapiens
ataatttgtgtaaca

SEQ ID NO: 7267 - DNA, 15 bp, Homo sapiens
tataatttgtgtaac

SEQ ID NO: 7268 - DNA, 15 bp, Homo sapiens
ttataatttgtgtaa

SEQ ID NO: 7269 - DNA, 15 bp, Homo sapiens
attataatttgtgta

SEQ ID NO: 7270 - DNA, 15 bp, Homo sapiens
aattataatttgtgt

SEQ ID NO: 7271 - DNA, 15 bp, Homo sapiens
aaattataatttgtg

SEQ ID NO: 7272 - DNA, 15 bp, Homo sapiens
aaaattataatttgt

SEQ ID NO: 7273 - DNA, 15 bp, Homo sapiens
aaaaattataatttg

SEQ ID NO: 7274 - DNA, 15 bp, Homo sapiens
taaaaattataattt

SEQ ID NO: 7275 - DNA, 15 bp, Homo sapiens
ttaaaaattataatt

SEQ ID NO: 7276 - DNA, 15 bp, Homo sapiens
tttaaaaattataat

SEQ ID NO: 7277 - DNA, 15 bp, Homo sapiens
ttttaaaaattataa

SEQ ID NO: 7278 - DNA, 15 bp, Homo sapiens
tttttaaaaattata

SEQ ID NO: 7279 - DNA, 15 bp, Homo sapiens
ctttttaaaaattat

SEQ ID NO: 7280 - DNA, 15 bp, Homo sapiens
actttttaaaaatta

SEQ ID NO: 7281 - DNA, 15 bp, Homo sapiens
gactttttaaaaatt

SEQ ID NO: 7282 - DNA, 15 bp, Homo sapiens
agactttttaaaaat

SEQ ID NO: 7283 - DNA, 15 bp, Homo sapiens
aagactttttaaaaa

SEQ ID NO: 7284 - DNA, 15 bp, Homo sapiens
aaagactttttaaaa

SEQ ID NO: 7285 - DNA, 15 bp, Homo sapiens
taaagactttttaaa

SEQ ID NO: 7286 - DNA, 15 bp, Homo sapiens
ctaaagactttttaa

SEQ ID NO: 7287 - DNA, 15 bp, Homo sapiens
tctaaagacttttta

SEQ ID NO: 7288 - DNA, 15 bp, Homo sapiens
ctctaaagacttttt

SEQ ID NO: 7289 - DNA, 15 bp, Homo sapiens
tctctaaagactttt

SEQ ID NO: 7290 - DNA, 15 bp, Homo sapiens
gtctctaaagacttt

SEQ ID NO: 7291 - DNA, 15 bp, Homo sapiens
tgtctctaaagactt

SEQ ID NO: 7292 - DNA, 15 bp, Homo sapiens
ctgtctctaaagact

SEQ ID NO: 7293 - DNA, 15 bp, Homo sapiens
cctgtctctaaagac

SEQ ID NO: 7294 - DNA, 15 bp, Homo sapiens
ccctgtctctaaaga

SEQ ID NO: 7295 - DNA, 15 bp, Homo sapiens
accctgtctctaaag

SEQ ID NO: 7296 - DNA, 15 bp, Homo sapiens
gaccctgtctctaaa

SEQ ID NO: 7297 - DNA, 15 bp, Homo sapiens
agaccctgtctctaa

SEQ ID NO: 7298 - DNA, 15 bp, Homo sapiens
gagaccctgtctcta

SEQ ID NO: 7299 - DNA, 15 bp, Homo sapiens
tgagaccctgtctct

SEQ ID NO: 7300 - DNA, 15 bp, Homo sapiens
gtgagaccctgtctc

SEQ ID NO: 7301 - DNA, 15 bp, Homo sapiens
agtgagaccctgtct

SEQ ID NO: 7302 - DNA, 15 bp, Homo sapiens
gagtgagaccctgtc

SEQ ID NO: 7303 - DNA, 15 bp, Homo sapiens
agagtgagaccctgt

SEQ ID NO: 7304 - DNA, 15 bp, Homo sapiens
cagagtgagaccctg

SEQ ID NO: 7305 - DNA, 15 bp, Homo sapiens
acagagtgagaccct

SEQ ID NO: 7306 - DNA, 15 bp, Homo sapiens
aacagagtgagaccc

SEQ ID NO: 7307 - DNA, 15 bp, Homo sapiens
caacagagtgagacc

SEQ ID NO: 7308 - DNA, 15 bp, Homo sapiens
gcaacagagtgagac

SEQ ID NO: 7309 - DNA, 15 bp, Homo sapiens
ggcaacagagtgaga

SEQ ID NO: 7310 - DNA, 15 bp, Homo sapiens
cggcaacagagtgag

SEQ ID NO: 7311 - DNA, 15 bp, Homo sapiens
tcggcaacagagtga

SEQ ID NO: 7312 - DNA, 15 bp, Homo sapiens
ctcggcaacagagtg

SEQ ID NO: 7313 - DNA, 15 bp, Homo sapiens
cctcggcaacagagt

SEQ ID NO: 7314 - DNA, 15 bp, Homo sapiens
gcctcggcaacagag

SEQ ID NO: 7315 - DNA, 15 bp, Homo sapiens
agcctcggcaacaga

SEQ ID NO: 7316 - DNA, 15 bp, Homo sapiens
cagcctcggcaacag

SEQ ID NO: 7317 - DNA, 15 bp, Homo sapiens
ccagcctcggcaaca

SEQ ID NO: 7318 - DNA, 15 bp, Homo sapiens
tccagcctcggcaac

SEQ ID NO: 7319 - DNA, 15 bp, Homo sapiens
ctccagcctcggcaa

SEQ ID NO: 7320 - DNA, 15 bp, Homo sapiens
actccagcctcggca

SEQ ID NO: 7321 - DNA, 15 bp, Homo sapiens
tactccagcctcggc

SEQ ID NO: 7322 - DNA, 15 bp, Homo sapiens
gtactccagcctcgg

SEQ ID NO: 7323 - DNA, 15 bp, Homo sapiens
tgtactccagcctcg

SEQ ID NO: 7324 - DNA, 15 bp, Homo sapiens
ctgtactccagcctc

SEQ ID NO: 7325 - DNA, 15 bp, Homo sapiens
actgtactccagcct

SEQ ID NO: 7326 - DNA, 15 bp, Homo sapiens
cactgtactccagcc

SEQ ID NO: 7327 - DNA, 15 bp, Homo sapiens
acactgtactccagc

SEQ ID NO: 7328 - DNA, 15 bp, Homo sapiens
aacactgtactccag

SEQ ID NO: 7329 - DNA, 15 bp, Homo sapiens
taacactgtactcca

SEQ ID NO: 7330 - DNA, 15 bp, Homo sapiens
ctaacactgtactcc

SEQ ID NO: 7331 - DNA, 15 bp, Homo sapiens
cctaacactgtactc

SEQ ID NO: 7332 - DNA, 15 bp, Homo sapiens
tcctaacactgtact

SEQ ID NO: 7333 - DNA, 15 bp, Homo sapiens
gtcctaacactgtac

SEQ ID NO: 7334 - DNA, 15 bp, Homo sapiens
ggtcctaacactgta

SEQ ID NO: 7335 - DNA, 15 bp, Homo sapiens
tggtcctaacactgt

SEQ ID NO: 7336 - DNA, 15 bp, Homo sapiens
atggtcctaacactg

SEQ ID NO: 7337 - DNA, 15 bp, Homo sapiens
catggtcctaacact

SEQ ID NO: 7338 - DNA, 15 bp, Homo sapiens
ccatggtcctaacac

SEQ ID NO: 7339 - DNA, 15 bp, Homo sapiens
gccatggtcctaaca

SEQ ID NO: 7340 - DNA, 15 bp, Homo sapiens
tgccatggtcctaac

SEQ ID NO: 7341 - DNA, 15 bp, Homo sapiens
gtgccatggtcctaa

SEQ ID NO: 7342 - DNA, 15 bp, Homo sapiens
tgtgccatggtccta

SEQ ID NO: 7343 - DNA, 15 bp, Homo sapiens
gtgtgccatggtcct

SEQ ID NO: 7344 - DNA, 15 bp, Homo sapiens
agtgtgccatggtcc

SEQ ID NO: 7345 - DNA, 15 bp, Homo sapiens
cagtgtgccatggtc

SEQ ID NO: 7346 - DNA, 15 bp, Homo sapiens
gcagtgtgccatggt

SEQ ID NO: 7347 - DNA, 15 bp, Homo sapiens
tgcagtgtgccatgg

SEQ ID NO: 7348 - DNA, 15 bp, Homo sapiens
ctgcagtgtgccatg

SEQ ID NO: 7349 - DNA, 15 bp, Homo sapiens
gctgcagtgtgccat

SEQ ID NO: 7350 - DNA, 15 bp, Homo sapiens
agctgcagtgtgcca

SEQ ID NO: 7351 - DNA, 15 bp, Homo sapiens
aagctgcagtgtgcc

SEQ ID NO: 7352 - DNA, 15 bp, Homo sapiens
gaagctgcagtgtgc

SEQ ID NO: 7353 - DNA, 15 bp, Homo sapiens
agaagctgcagtgtg

SEQ ID NO: 7354 - DNA, 15 bp, Homo sapiens
tagaagctgcagtgt

SEQ ID NO: 7355 - DNA, 15 bp, Homo sapiens
atagaagctgcagtg

SEQ ID NO: 7356 - DNA, 15 bp, Homo sapiens
gatagaagctgcagt

SEQ ID NO: 7357 - DNA, 15 bp, Homo sapiens
agatagaagctgcag

SEQ ID NO: 7358 - DNA, 15 bp, Homo sapiens
gagatagaagctgca

SEQ ID NO: 7359 - DNA, 15 bp, Homo sapiens
agagatagaagctgc

SEQ ID NO: 7360 - DNA, 15 bp, Homo sapiens
aagagatagaagctg

SEQ ID NO: 7361 - DNA, 15 bp, Homo sapiens
caagagatagaagct

SEQ ID NO: 7362 - DNA, 15 bp, Homo sapiens
ccaagagatagaagc

SEQ ID NO: 7363 - DNA, 15 bp, Homo sapiens
cccaagagatagaag

SEQ ID NO: 7364 - DNA, 15 bp, Homo sapiens
gcccaagagatagaa

SEQ ID NO: 7365 - DNA, 15 bp, Homo sapiens
agcccaagagataga

SEQ ID NO: 7366 - DNA, 15 bp, Homo sapiens
gagcccaagagatag

SEQ ID NO: 7367 - DNA, 15 bp, Homo sapiens
tgagcccaagagata

SEQ ID NO: 7368 - DNA, 15 bp, Homo sapiens
ttgagcccaagagat

SEQ ID NO: 7369 - DNA, 15 bp, Homo sapiens
cttgagcccaagaga

SEQ ID NO: 7370 - DNA, 15 bp, Homo sapiens
acttgagcccaagag

SEQ ID NO: 7371 - DNA, 15 bp, Homo sapiens
cacttgagcccaaga

SEQ ID NO: 7372 - DNA, 15 bp, Homo sapiens
tcacttgagcccaag

SEQ ID NO: 7373 - DNA, 15 bp, Homo sapiens
atcacttgagcccaa

SEQ ID NO: 7374 - DNA, 15 bp, Homo sapiens
gatcacttgagccca

SEQ ID NO: 7375 - DNA, 15 bp, Homo sapiens
ggatcacttgagccc

SEQ ID NO: 7376 - DNA, 15 bp, Homo sapiens
aggatcacttgagcc

SEQ ID NO: 7377 - DNA, 15 bp, Homo sapiens
gaggatcacttgagc

SEQ ID NO: 7378 - DNA, 15 bp, Homo sapiens
ggaggatcacttgag

SEQ ID NO: 7379 - DNA, 15 bp, Homo sapiens
aggaggatcacttga

SEQ ID NO: 7380 - DNA, 15 bp, Homo sapiens
caggaggatcacttg

SEQ ID NO: 7381 - DNA, 15 bp, Homo sapiens
gcaggaggatcactt

SEQ ID NO: 7382 - DNA, 15 bp, Homo sapiens
ggcaggaggatcact

SEQ ID NO: 7383 - DNA, 15 bp, Homo sapiens
aggcaggaggatcac

SEQ ID NO: 7384 - DNA, 15 bp, Homo sapiens
caggcaggaggatca

SEQ ID NO: 7385 - DNA, 15 bp, Homo sapiens
ccaggcaggaggatc

SEQ ID NO: 7386 - DNA, 15 bp, Homo sapiens
cccaggcaggaggat

SEQ ID NO: 7387 - DNA, 15 bp, Homo sapiens
gcccaggcaggagga

SEQ ID NO: 7388 - DNA, 15 bp, Homo sapiens
agcccaggcaggagg

SEQ ID NO: 7389 - DNA, 15 bp, Homo sapiens
aagcccaggcaggag

SEQ ID NO: 7390 - DNA, 15 bp, Homo sapiens
gaagcccaggcagga

SEQ ID NO: 7391 - DNA, 15 bp, Homo sapiens
ggaagcccaggcagg

SEQ ID NO: 7392 - DNA, 15 bp, Homo sapiens
tggaagcccaggcag

SEQ ID NO: 7393 - DNA, 15 bp, Homo sapiens
ttggaagcccaggca

SEQ ID NO: 7394 - DNA, 15 bp, Homo sapiens
tttggaagcccaggc

SEQ ID NO: 7395 - DNA, 15 bp, Homo sapiens
ctttggaagcccagg

SEQ ID NO: 7396 - DNA, 15 bp, Homo sapiens
actttggaagcccag

SEQ ID NO: 7397 - DNA, 15 bp, Homo sapiens
cactttggaagccca

SEQ ID NO: 7398 - DNA, 15 bp, Homo sapiens
gcactttggaagccc

SEQ ID NO: 7399 - DNA, 15 bp, Homo sapiens
agcactttggaagcc

SEQ ID NO: 7400 - DNA, 15 bp, Homo sapiens
cagcactttggaagc

SEQ ID NO: 7401 - DNA, 15 bp, Homo sapiens
ccagcactttggaag

SEQ ID NO: 7402 - DNA, 15 bp, Homo sapiens
tccagcactttggaa

SEQ ID NO: 7403 - DNA, 15 bp, Homo sapiens
ttccagcactttgga

SEQ ID NO: 7404 - DNA, 15 bp, Homo sapiens
attccagcactttgg

SEQ ID NO: 7405 - DNA, 15 bp, Homo sapiens
aattccagcactttg

SEQ ID NO: 7406 - DNA, 15 bp, Homo sapiens
taattccagcacttt

SEQ ID NO: 7407 - DNA, 15 bp, Homo sapiens
ataattccagcactt

SEQ ID NO: 7408 - DNA, 15 bp, Homo sapiens
tataattccagcact

SEQ ID NO: 7409 - DNA, 15 bp, Homo sapiens
ctataattccagcac

SEQ ID NO: 7410 - DNA, 15 bp, Homo sapiens
cctataattccagca

SEQ ID NO: 7411 - DNA, 15 bp, Homo sapiens
gcctataattccagc

SEQ ID NO: 7412 - DNA, 15 bp, Homo sapiens
tgcctataattccag

SEQ ID NO: 7413 - DNA, 15 bp, Homo sapiens
atgcctataattcca

SEQ ID NO: 7414 - DNA, 15 bp, Homo sapiens
catgcctataattcc

SEQ ID NO: 7415 - DNA, 15 bp, Homo sapiens
tcatgcctataattc

SEQ ID NO: 7416 - DNA, 15 bp, Homo sapiens
ctcatgcctataatt

SEQ ID NO: 7417 - DNA, 15 bp, Homo sapiens
gctcatgcctataat

SEQ ID NO: 7418 - DNA, 15 bp, Homo sapiens
ggctcatgcctataa

SEQ ID NO: 7419 - DNA, 15 bp, Homo sapiens
tggctcatgcctata

SEQ ID NO: 7420 - DNA, 15 bp, Homo sapiens
gtggctcatgcctat

SEQ ID NO: 7421 - DNA, 15 bp, Homo sapiens
agtggctcatgccta

SEQ ID NO: 7422 - DNA, 15 bp, Homo sapiens
cagtggctcatgcct

SEQ ID NO: 7423 - DNA, 15 bp, Homo sapiens
gcagtggctcatgcc

SEQ ID NO: 7424 - DNA, 15 bp, Homo sapiens
agcagtggctcatgc

SEQ ID NO: 7425 - DNA, 15 bp, Homo sapiens
gagcagtggctcatg

SEQ ID NO: 7426 - DNA, 15 bp, Homo sapiens
ggagcagtggctcat

SEQ ID NO: 7427 - DNA, 15 bp, Homo sapiens
gggagcagtggctca

SEQ ID NO: 7428 - DNA, 15 bp, Homo sapiens
tgggagcagtggctc

SEQ ID NO: 7429 - DNA, 15 bp, Homo sapiens
ctgggagcagtggct

SEQ ID NO: 7430 - DNA, 15 bp, Homo sapiens
gctgggagcagtggc

SEQ ID NO: 7431 - DNA, 15 bp, Homo sapiens
agctgggagcagtgg

SEQ ID NO: 7432 - DNA, 15 bp, Homo sapiens
tagctgggagcagtg

SEQ ID NO: 7433 - DNA, 15 bp, Homo sapiens
ttagctgggagcagt

SEQ ID NO: 7434 - DNA, 15 bp, Homo sapiens
attagctgggagcag

SEQ ID NO: 7435 - DNA, 15 bp, Homo sapiens
aattagctgggagca

SEQ ID NO: 7436 - DNA, 15 bp, Homo sapiens
aaattagctgggagc

SEQ ID NO: 7437 - DNA, 15 bp, Homo sapiens
aaaattagctgggag

SEQ ID NO: 7438 - DNA, 15 bp, Homo sapiens
aaaaattagctggga

SEQ ID NO: 7439 - DNA, 15 bp, Homo sapiens
aaaaaattagctggg

SEQ ID NO: 7440 - DNA, 15 bp, Homo sapiens
aaaaaaattagctgg

SEQ ID NO: 7441 - DNA, 15 bp, Homo sapiens
caaaaaaattagctg

SEQ ID NO: 7442 - DNA, 15 bp, Homo sapiens
acaaaaaaattagct

SEQ ID NO: 7443 - DNA, 15 bp, Homo sapiens
aacaaaaaaattagc

SEQ ID NO: 7444 - DNA, 15 bp, Homo sapiens
aaacaaaaaaattag

SEQ ID NO: 7445 - DNA, 15 bp, Homo sapiens
aaaacaaaaaaatta

SEQ ID NO: 7446 - DNA, 15 bp, Homo sapiens
aaaaacaaaaaaatt

SEQ ID NO: 7447 - DNA, 15 bp, Homo sapiens
aaaaaacaaaaaaat

SEQ ID NO: 7448 - DNA, 15 bp, Homo sapiens
caaaaaacaaaaaaa

SEQ ID NO: 7449 - DNA, 15 bp, Homo sapiens
acaaaaaacaaaaaa

SEQ ID NO: 7450 - DNA, 15 bp, Homo sapiens
cacaaaaaacaaaaa

SEQ ID NO: 7451 - DNA, 15 bp, Homo sapiens
ccacaaaaaacaaaa

SEQ ID NO: 7452 - DNA, 15 bp, Homo sapiens
tccacaaaaaacaaa

SEQ ID NO: 7453 - DNA, 15 bp, Homo sapiens
ctccacaaaaaacaa

SEQ ID NO: 7454 - DNA, 15 bp, Homo sapiens
tctccacaaaaaaca

SEQ ID NO: 7455 - DNA, 15 bp, Homo sapiens
gtctccacaaaaaac

SEQ ID NO: 7456 - DNA, 15 bp, Homo sapiens
tgtctccacaaaaaa

SEQ ID NO: 7457 - DNA, 15 bp, Homo sapiens
ctgtctccacaaaaa

SEQ ID NO: 7458 - DNA, 15 bp, Homo sapiens
tctgtctccacaaaa

SEQ ID NO: 7459 - DNA, 15 bp, Homo sapiens
ctctgtctccacaaa

SEQ ID NO: 7460 - DNA, 15 bp, Homo sapiens
actctgtctccacaa

SEQ ID NO: 7461 - DNA, 15 bp, Homo sapiens
gactctgtctccaca

SEQ ID NO: 7462 - DNA, 15 bp, Homo sapiens
tgactctgtctccac

SEQ ID NO: 7463 - DNA, 15 bp, Homo sapiens
gtgactctgtctcca

SEQ ID NO: 7464 - DNA, 15 bp, Homo sapiens
agtgactctgtctcc

SEQ ID NO: 7465 - DNA, 15 bp, Homo sapiens
tagtgactctgtctc

SEQ ID NO: 7466 - DNA, 15 bp, Homo sapiens
gtagtgactctgtct

SEQ ID NO: 7467 - DNA, 15 bp, Homo sapiens
tgtagtgactctgtc

SEQ ID NO: 7468 - DNA, 15 bp, Homo sapiens
atgtagtgactctgt

SEQ ID NO: 7469 - DNA, 15 bp, Homo sapiens
aatgtagtgactctg

SEQ ID NO: 7470 - DNA, 15 bp, Homo sapiens
caatgtagtgactct

SEQ ID NO: 7471 - DNA, 15 bp, Homo sapiens
gcaatgtagtgactc

SEQ ID NO: 7472 - DNA, 15 bp, Homo sapiens
ggcaatgtagtgact

SEQ ID NO: 7473 - DNA, 15 bp, Homo sapiens
gggcaatgtagtgac

SEQ ID NO: 7474 - DNA, 15 bp, Homo sapiens
cgggcaatgtagtga

SEQ ID NO: 7475 - DNA, 15 bp, Homo sapiens
ccgggcaatgtagtg

SEQ ID NO: 7476 - DNA, 15 bp, Homo sapiens
cccgggcaatgtagt

SEQ ID NO: 7477 - DNA, 15 bp, Homo sapiens
gcccgggcaatgtag

SEQ ID NO: 7478 - DNA, 15 bp, Homo sapiens
agcccgggcaatgta

SEQ ID NO: 7479 - DNA, 15 bp, Homo sapiens
cagcccgggcaatgt

SEQ ID NO: 7480 - DNA, 15 bp, Homo sapiens
ccagcccgggcaatg

SEQ ID NO: 7481 - DNA, 15 bp, Homo sapiens
accagcccgggcaat

SEQ ID NO: 7482 - DNA, 15 bp, Homo sapiens
gaccagcccgggcaa

SEQ ID NO: 7483 - DNA, 15 bp, Homo sapiens
agaccagcccgggca

SEQ ID NO: 7484 - DNA, 15 bp, Homo sapiens
aagaccagcccgggc

SEQ ID NO: 7485 - DNA, 15 bp, Homo sapiens
caagaccagcccggg

SEQ ID NO: 7486 - DNA, 15 bp, Homo sapiens
tcaagaccagcccgg

SEQ ID NO: 7487 - DNA, 15 bp, Homo sapiens
ttcaagaccagcccg

SEQ ID NO: 7488 - DNA, 15 bp, Homo sapiens
gttcaagaccagccc

SEQ ID NO: 7489 - DNA, 15 bp, Homo sapiens
agttcaagaccagcc

SEQ ID NO: 7490 - DNA, 15 bp, Homo sapiens
gagttcaagaccagc

SEQ ID NO: 7491 - DNA, 15 bp, Homo sapiens
ggagttcaagaccag

SEQ ID NO: 7492 - DNA, 15 bp, Homo sapiens
aggagttcaagacca

SEQ ID NO: 7493 - DNA, 15 bp, Homo sapiens
caggagttcaagacc

SEQ ID NO: 7494 - DNA, 15 bp, Homo sapiens
ccaggagttcaagac

SEQ ID NO: 7495 - DNA, 15 bp, Homo sapiens
gccaggagttcaaga

SEQ ID NO: 7496 - DNA, 15 bp, Homo sapiens
ggccaggagttcaag

SEQ ID NO: 7497 - DNA, 15 bp, Homo sapiens
aggccaggagttcaa

SEQ ID NO: 7498 - DNA, 15 bp, Homo sapiens
gaggccaggagttca

SEQ ID NO: 7499 - DNA, 15 bp, Homo sapiens
tgaggccaggagttc

SEQ ID NO: 7500 - DNA, 15 bp, Homo sapiens
ttgaggccaggagtt

SEQ ID NO: 7501 - DNA, 15 bp, Homo sapiens
cttgaggccaggagt

SEQ ID NO: 7502 - DNA, 15 bp, Homo sapiens
acttgaggccaggag

SEQ ID NO: 7503 - DNA, 15 bp, Homo sapiens
cacttgaggccagga

SEQ ID NO: 7504 - DNA, 15 bp, Homo sapiens
tcacttgaggccagg

SEQ ID NO: 7505 - DNA, 15 bp, Homo sapiens
atcacttgaggccag

SEQ ID NO: 7506 - DNA, 15 bp, Homo sapiens
gatcacttgaggcca

SEQ ID NO: 7507 - DNA, 15 bp, Homo sapiens
ggatcacttgaggcc

SEQ ID NO: 7508 - DNA, 15 bp, Homo sapiens
aggatcacttgaggc

SEQ ID NO: 7509 - DNA, 15 bp, Homo sapiens
gaggatcacttgagg

SEQ ID NO: 7510 - DNA, 15 bp, Homo sapiens
gggaggatcacttga

SEQ ID NO: 7511 - DNA, 15 bp, Homo sapiens
tgggaggatcacttg

SEQ ID NO: 7512 - DNA, 15 bp, Homo sapiens
gtgggaggatcactt

SEQ ID NO: 7513 - DNA, 15 bp, Homo sapiens
ggtgggaggatcact

SEQ ID NO: 7514 - DNA, 15 bp, Homo sapiens
aggtgggaggatcac

SEQ ID NO: 7515 - DNA, 15 bp, Homo sapiens
gaggtgggaggatca

SEQ ID NO: 7516 - DNA, 15 bp, Homo sapiens
tgaggtgggaggatc

SEQ ID NO: 7517 - DNA, 15 bp, Homo sapiens
ctgaggtgggaggat

SEQ ID NO: 7518 - DNA, 15 bp, Homo sapiens
gctgaggtgggagga

SEQ ID NO: 7519 - DNA, 15 bp, Homo sapiens
cgctgaggtgggagg

SEQ ID NO: 7520 - DNA, 15 bp, Homo sapiens
acgctgaggtgggag

SEQ ID NO: 7521 - DNA, 15 bp, Homo sapiens
aacgctgaggtggga

SEQ ID NO: 7522 - DNA, 15 bp, Homo sapiens
gaacgctgaggtggg

SEQ ID NO: 7523 - DNA, 15 bp, Homo sapiens
agaacgctgaggtgg

SEQ ID NO: 7524 - DNA, 15 bp, Homo sapiens
tagaacgctgaggtg

SEQ ID NO: 7525 - DNA, 15 bp, Homo sapiens
ttagaacgctgaggt

SEQ ID NO: 7526 - DNA, 15 bp, Homo sapiens
tttagaacgctgagg

SEQ ID NO: 7527 - DNA, 15 bp, Homo sapiens
ctttagaacgctgag

SEQ ID NO: 7528 - DNA, 15 bp, Homo sapiens
gctttagaacgctga

SEQ ID NO: 7529 - DNA, 15 bp, Homo sapiens
tgctttagaacgctg

SEQ ID NO: 7530 - DNA, 15 bp, Homo sapiens
gtgctttagaacgct

SEQ ID NO: 7531 - DNA, 15 bp, Homo sapiens
agtgctttagaacgc

SEQ ID NO: 7532 - DNA, 15 bp, Homo sapiens
cagtgctttagaacg

SEQ ID NO: 7533 - DNA, 15 bp, Homo sapiens
ccagtgctttagaac

SEQ ID NO: 7534 - DNA, 15 bp, Homo sapiens
cccagtgctttagaa

SEQ ID NO: 7535 - DNA, 15 bp, Homo sapiens
tcccagtgctttaga

SEQ ID NO: 7536 - DNA, 15 bp, Homo sapiens
atcccagtgctttag

SEQ ID NO: 7537 - DNA, 15 bp, Homo sapiens
aatcccagtgcttta

SEQ ID NO: 7538 - DNA, 15 bp, Homo sapiens
taatcccagtgcttt

SEQ ID NO: 7539 - DNA, 15 bp, Homo sapiens
gtaatcccagtgctt

SEQ ID NO: 7540 - DNA, 15 bp, Homo sapiens
tgtaatcccagtgct

SEQ ID NO: 7541 - DNA, 15 bp, Homo sapiens
ttgtaatcccagtgc

SEQ ID NO: 7542 - DNA, 15 bp, Homo sapiens
cttgtaatcccagtg

SEQ ID NO: 7543 - DNA, 15 bp, Homo sapiens
gcttgtaatcccagt

SEQ ID NO: 7544 - DNA, 15 bp, Homo sapiens
tgcttgtaatcccag

SEQ ID NO: 7545 - DNA, 15 bp, Homo sapiens
atgcttgtaatccca

SEQ ID NO: 7546 - DNA, 15 bp, Homo sapiens
catgcttgtaatccc

SEQ ID NO: 7547 - DNA, 15 bp, Homo sapiens
tcatgcttgtaatcc

SEQ ID NO: 7548 - DNA, 15 bp, Homo sapiens
ctcatgcttgtaatc

SEQ ID NO: 7549 - DNA, 15 bp, Homo sapiens
gctcatgcttgtaat

SEQ ID NO: 7550 - DNA, 15 bp, Homo sapiens
ggctcatgcttgtaa

SEQ ID NO: 7551 - DNA, 15 bp, Homo sapiens
tggctcatgcttgta

SEQ ID NO: 7552 - DNA, 15 bp, Homo sapiens
gtggctcatgcttgt

SEQ ID NO: 7553 - DNA, 15 bp, Homo sapiens
ggtggctcatgcttg

SEQ ID NO: 7554 - DNA, 15 bp, Homo sapiens
aggtggctcatgctt

SEQ ID NO: 7555 - DNA, 15 bp, Homo sapiens
aaggtggctcatgct

SEQ ID NO: 7556 - DNA, 15 bp, Homo sapiens
caaggtggctcatgc

SEQ ID NO: 7557 - DNA, 15 bp, Homo sapiens
acaaggtggctcatg

SEQ ID NO: 7558 - DNA, 15 bp, Homo sapiens
gacaaggtggctcat

SEQ ID NO: 7559 - DNA, 15 bp, Homo sapiens
ggacaaggtggctca

SEQ ID NO: 7560 - DNA, 15 bp, Homo sapiens
tggacaaggtggctc

SEQ ID NO: 7561 - DNA, 15 bp, Homo sapiens
ctggacaaggtggct

SEQ ID NO: 7562 - DNA, 15 bp, Homo sapiens
gctggacaaggtggc

SEQ ID NO: 7563 - DNA, 15 bp, Homo sapiens
ggctggacaaggtgg

SEQ ID NO: 7564 - DNA, 15 bp, Homo sapiens
gggctggacaaggtg

SEQ ID NO: 7565 - DNA, 15 bp, Homo sapiens
tgggctggacaaggt

SEQ ID NO: 7566 - DNA, 15 bp, Homo sapiens
ttgggctggacaagg

SEQ ID NO: 7567 - DNA, 15 bp, Homo sapiens
tttgggctggacaag

SEQ ID NO: 7568 - DNA, 15 bp, Homo sapiens
atttgggctggacaa

SEQ ID NO: 7569 - DNA, 15 bp, Homo sapiens
aatttgggctggaca

SEQ ID NO: 7570 - DNA, 15 bp, Homo sapiens
aaatttgggctggac

SEQ ID NO: 7571 - DNA, 15 bp, Homo sapiens
aaaatttgggctgga

SEQ ID NO: 7572 - DNA, 15 bp, Homo sapiens
gaaaatttgggctgg

SEQ ID NO: 7573 - DNA, 15 bp, Homo sapiens
tgaaaatttgggctg

SEQ ID NO: 7574 - DNA, 15 bp, Homo sapiens
atgaaaatttgggct

SEQ ID NO: 7575 - DNA, 15 bp, Homo sapiens
catgaaaatttgggc

SEQ ID NO: 7576 - DNA, 15 bp, Homo sapiens
acatgaaaatttggg

SEQ ID NO: 7577 - DNA, 15 bp, Homo sapiens
aacatgaaaatttgg

SEQ ID NO: 7578 - DNA, 15 bp, Homo sapiens
aaacatgaaaatttg

SEQ ID NO: 7579 - DNA, 15 bp, Homo sapiens
aaaacatgaaaattt

SEQ ID NO: 7580 - DNA, 15 bp, Homo sapiens
taaaacatgaaaatt

SEQ ID NO: 7581 - DNA, 15 bp, Homo sapiens
ttaaaacatgaaaat

SEQ ID NO: 7582 - DNA, 15 bp, Homo sapiens
attaaaacatgaaaa

SEQ ID NO: 7583 - DNA, 15 bp, Homo sapiens
gattaaaacatgaaa

SEQ ID NO: 7584 - DNA, 15 bp, Homo sapiens
ggattaaaacatgaa

SEQ ID NO: 7585 - DNA, 15 bp, Homo sapiens
aggattaaaacatga

SEQ ID NO: 7586 - DNA, 15 bp, Homo sapiens
taggattaaaacatg

SEQ ID NO: 7587 - DNA, 15 bp, Homo sapiens
gtaggattaaaacat

SEQ ID NO: 7588 - DNA, 15 bp, Homo sapiens
tgtaggattaaaaca

SEQ ID NO: 7589 - DNA, 15 bp, Homo sapiens
gtgtaggattaaaac

SEQ ID NO: 7590 - DNA, 15 bp, Homo sapiens
tgtgtaggattaaaa

SEQ ID NO: 7591 - DNA, 15 bp, Homo sapiens
atgtgtaggattaaa

SEQ ID NO: 7592 - DNA, 15 bp, Homo sapiens
aatgtgtaggattaa

SEQ ID NO: 7593 - DNA, 15 bp, Homo sapiens
gaatgtgtaggatta

SEQ ID NO: 7594 - DNA, 15 bp, Homo sapiens
agaatgtgtaggatt

SEQ ID NO: 7595 - DNA, 15 bp, Homo sapiens
tagaatgtgtaggat

SEQ ID NO: 7596 - DNA, 15 bp, Homo sapiens
ttagaatgtgtagga

SEQ ID NO: 7597 - DNA, 15 bp, Homo sapiens
cttagaatgtgtagg

SEQ ID NO: 7598 - DNA, 15 bp, Homo sapiens
gcttagaatgtgtag

SEQ ID NO: 7599 - DNA, 15 bp, Homo sapiens
tgcttagaatgtgta

SEQ ID NO: 7600 - DNA, 15 bp, Homo sapiens
ttgcttagaatgtgt

SEQ ID NO: 7601 - DNA, 15 bp, Homo sapiens
tttgcttagaatgtg

SEQ ID NO: 7602 - DNA, 15 bp, Homo sapiens
atttgcttagaatgt

SEQ ID NO: 7603 - DNA, 15 bp, Homo sapiens
tatttgcttagaatg

SEQ ID NO: 7604 - DNA, 15 bp, Homo sapiens
gtatttgcttagaat

SEQ ID NO: 7605 - DNA, 15 bp, Homo sapiens
agtatttgcttagaa

SEQ ID NO: 7606 - DNA, 15 bp, Homo sapiens
aagtatttgcttaga

SEQ ID NO: 7607 - DNA, 15 bp, Homo sapiens
caagtatttgcttag

SEQ ID NO: 7608 - DNA, 15 bp, Homo sapiens
acaagtatttgctta

SEQ ID NO: 7609 - DNA, 15 bp, Homo sapiens
cacaagtatttgctt

SEQ ID NO: 7610 - DNA, 15 bp, Homo sapiens
acacaagtatttgct

SEQ ID NO: 7611 - DNA, 15 bp, Homo sapiens
cacacaagtatttgc

SEQ ID NO: 7612 - DNA, 15 bp, Homo sapiens
acacacaagtatttg

SEQ ID NO: 7613 - DNA, 15 bp, Homo sapiens
tacacacaagtattt

SEQ ID NO: 7614 - DNA, 15 bp, Homo sapiens
ctacacacaagtatt

SEQ ID NO: 7615 - DNA, 15 bp, Homo sapiens
actacacacaagtat

SEQ ID NO: 7616 - DNA, 15 bp, Homo sapiens
aactacacacaagta

SEQ ID NO: 7617 - DNA, 15 bp, Homo sapiens
taactacacacaagt

SEQ ID NO: 7618 - DNA, 15 bp, Homo sapiens
gtaactacacacaag

SEQ ID NO: 7619 - DNA, 15 bp, Homo sapiens
agtaactacacacaa

SEQ ID NO: 7620 - DNA, 15 bp, Homo sapiens
tagtaactacacaca

SEQ ID NO: 7621 - DNA, 15 bp, Homo sapiens
ttagtaactacacac

SEQ ID NO: 7622 - DNA, 15 bp, Homo sapiens
cttagtaactacaca

SEQ ID NO: 7623 - DNA, 15 bp, Homo sapiens
ccttagtaactacac

SEQ ID NO: 7624 - DNA, 15 bp, Homo sapiens
cccttagtaactaca

SEQ ID NO: 7625 - DNA, 15 bp, Homo sapiens
tcccttagtaactac

SEQ ID NO: 7626 - DNA, 15 bp, Homo sapiens
gtcccttagtaacta

SEQ ID NO: 7627 - DNA, 15 bp, Homo sapiens
agtcccttagtaact

SEQ ID NO: 7628 - DNA, 15 bp, Homo sapiens
cagtcccttagtaac

SEQ ID NO: 7629 - DNA, 15 bp, Homo sapiens
acagtcccttagtaa

SEQ ID NO: 7630 - DNA, 15 bp, Homo sapiens
cacagtcccttagta

SEQ ID NO: 7631 - DNA, 15 bp, Homo sapiens
gcacagtcccttagt

SEQ ID NO: 7632 - DNA, 15 bp, Homo sapiens
tgcacagtcccttag

SEQ ID NO: 7633 - DNA, 15 bp, Homo sapiens
gtgcacagtccctta

SEQ ID NO: 7634 - DNA, 15 bp, Homo sapiens
agtgcacagtccctt

SEQ ID NO: 7635 - DNA, 15 bp, Homo sapiens
aagtgcacagtccct

SEQ ID NO: 7636 - DNA, 15 bp, Homo sapiens
taagtgcacagtccc

SEQ ID NO: 7637 - DNA, 15 bp, Homo sapiens
ataagtgcacagtcc

SEQ ID NO: 7638 - DNA, 15 bp, Homo sapiens
aataagtgcacagtc

SEQ ID NO: 7639 - DNA, 15 bp, Homo sapiens
aaataagtgcacagt

SEQ ID NO: 7640 - DNA, 15 bp, Homo sapiens
aaaataagtgcacag

SEQ ID NO: 7641 - DNA, 15 bp, Homo sapiens
aaaaataagtgcaca

SEQ ID NO: 7642 - DNA, 15 bp, Homo sapiens
caaaaataagtgcac

SEQ ID NO: 7643 - DNA, 15 bp, Homo sapiens
acaaaaataagtgca

SEQ ID NO: 7644 - DNA, 15 bp, Homo sapiens
aacaaaaataagtgc

SEQ ID NO: 7645 - DNA, 15 bp, Homo sapiens
aaacaaaaataagtg

SEQ ID NO: 7646 - DNA, 15 bp, Homo sapiens
caaacaaaaataagt

SEQ ID NO: 7647 - DNA, 15 bp, Homo sapiens
gcaaacaaaaataag

SEQ ID NO: 7648 - DNA, 15 bp, Homo sapiens
agcaaacaaaaataa

SEQ ID NO: 7649 - DNA, 15 bp, Homo sapiens
aagcaaacaaaaata

SEQ ID NO: 7650 - DNA, 15 bp, Homo sapiens
aaagcaaacaaaaat

SEQ ID NO: 7651 - DNA, 15 bp, Homo sapiens
caaagcaaacaaaaa

SEQ ID NO: 7652 - DNA, 15 bp, Homo sapiens
acaaagcaaacaaaa

SEQ ID NO: 7653 - DNA, 15 bp, Homo sapiens
aacaaagcaaacaaa

SEQ ID NO: 7654 - DNA, 15 bp, Homo sapiens
caacaaagcaaacaa

SEQ ID NO: 7655 - DNA, 15 bp, Homo sapiens
acaacaaagcaaaca

SEQ ID NO: 7656 - DNA, 15 bp, Homo sapiens
aacaacaaagcaaac

SEQ ID NO: 7657 - DNA, 15 bp, Homo sapiens
caacaacaaagcaaa

SEQ ID NO: 7658 - DNA, 15 bp, Homo sapiens
gcaacaacaaagcaa

SEQ ID NO: 7659 - DNA, 15 bp, Homo sapiens
agcaacaacaaagca

SEQ ID NO: 7660 - DNA, 15 bp, Homo sapiens
tagcaacaacaaagc

SEQ ID NO: 7661 - DNA, 15 bp, Homo sapiens
ctagcaacaacaaag

SEQ ID NO: 7662 - DNA, 15 bp, Homo sapiens
actagcaacaacaaa

SEQ ID NO: 7663 - DNA, 15 bp, Homo sapiens
aactagcaacaacaa

SEQ ID NO: 7664 - DNA, 15 bp, Homo sapiens
aaactagcaacaaca

SEQ ID NO: 7665 - DNA, 15 bp, Homo sapiens
aaaactagcaacaac

SEQ ID NO: 7666 - DNA, 15 bp, Homo sapiens
aaaaactagcaacaa

SEQ ID NO: 7667 - DNA, 15 bp, Homo sapiens
taaaaactagcaaca

SEQ ID NO: 7668 - DNA, 15 bp, Homo sapiens
ataaaaactagcaac

SEQ ID NO: 7669 - DNA, 15 bp, Homo sapiens
aataaaaactagcaa

SEQ ID NO: 7670 - DNA, 15 bp, Homo sapiens
aaataaaaactagca

SEQ ID NO: 7671 - DNA, 15 bp, Homo sapiens
aaaataaaaactagc

SEQ ID NO: 7672 - DNA, 15 bp, Homo sapiens
aaaaataaaaactag

SEQ ID NO: 7673 - DNA, 15 bp, Homo sapiens
aaaaaataaaaacta

SEQ ID NO: 7674 - DNA, 15 bp, Homo sapiens
aaaaaaataaaaact

SEQ ID NO: 7675 - DNA, 15 bp, Homo sapiens
taaaaaaataaaaac

SEQ ID NO: 7676 - DNA, 15 bp, Homo sapiens
ataaaaaaataaaaa

SEQ ID NO: 7677 - DNA, 15 bp, Homo sapiens
tataaaaaaataaaa

SEQ ID NO: 7678 - DNA, 15 bp, Homo sapiens
gtataaaaaaataaa

SEQ ID NO: 7679 - DNA, 15 bp, Homo sapiens
ggtataaaaaaataa

SEQ ID NO: 7680 - DNA, 15 bp, Homo sapiens
aggtataaaaaaata

SEQ ID NO: 7681 - DNA, 15 bp, Homo sapiens
taggtataaaaaaat

SEQ ID NO: 7682 - DNA, 15 bp, Homo sapiens
ttaggtataaaaaaa

SEQ ID NO: 7683 - DNA, 15 bp, Homo sapiens
tttaggtataaaaaa

SEQ ID NO: 7684 - DNA, 15 bp, Homo sapiens
gtttaggtataaaaa

SEQ ID NO: 7685 - DNA, 15 bp, Homo sapiens
agtttaggtataaaa

SEQ ID NO: 7686 - DNA, 15 bp, Homo sapiens
gagtttaggtataaa

SEQ ID NO: 7687 - DNA, 15 bp, Homo sapiens
agagtttaggtataa

SEQ ID NO: 7688 - DNA, 15 bp, Homo sapiens
gagagtttaggtata

SEQ ID NO: 7689 - DNA, 15 bp, Homo sapiens
agagagtttaggtat

SEQ ID NO: 7690 - DNA, 15 bp, Homo sapiens
gagagagtttaggta

SEQ ID NO: 7691 - DNA, 15 bp, Homo sapiens
cgagagagtttaggt

SEQ ID NO: 7692 - DNA, 15 bp, Homo sapiens
acgagagagtttagg

SEQ ID NO: 7693 - DNA, 15 bp, Homo sapiens
aacgagagagtttag

SEQ ID NO: 7694 - DNA, 15 bp, Homo sapiens
aaacgagagagttta

SEQ ID NO: 7695 - DNA, 15 bp, Homo sapiens
aaaacgagagagttt

SEQ ID NO: 7696 - DNA, 15 bp, Homo sapiens
taaaacgagagagtt

SEQ ID NO: 7697 - DNA, 15 bp, Homo sapiens
ttaaaacgagagagt

SEQ ID NO: 7698 - DNA, 15 bp, Homo sapiens
tttaaaacgagagag

SEQ ID NO: 7699 - DNA, 15 bp, Homo sapiens
ctttaaaacgagaga

SEQ ID NO: 7700 - DNA, 15 bp, Homo sapiens
tctttaaaacgagag

SEQ ID NO: 7701 - DNA, 15 bp, Homo sapiens
ctctttaaaacgaga

SEQ ID NO: 7702 - DNA, 15 bp, Homo sapiens
tctctttaaaacgag

SEQ ID NO: 7703 - DNA, 15 bp, Homo sapiens
ttctctttaaaacga

SEQ ID NO: 7704 - DNA, 15 bp, Homo sapiens
gttctctttaaaacg

SEQ ID NO: 7705 - DNA, 15 bp, Homo sapiens
tgttctctttaaaac

SEQ ID NO: 7706 - DNA, 15 bp, Homo sapiens
ctgttctctttaaaa

SEQ ID NO: 7707 - DNA, 15 bp, Homo sapiens
tctgttctctttaaa

SEQ ID NO: 7708 - DNA, 15 bp, Homo sapiens
atctgttctctttaa

SEQ ID NO: 7709 - DNA, 15 bp, Homo sapiens
aatctgttctcttta

SEQ ID NO: 7710 - DNA, 15 bp, Homo sapiens
aaatctgttctcttt

SEQ ID NO: 7711 - DNA, 15 bp, Homo sapiens
caaatctgttctctt

SEQ ID NO: 7712 - DNA, 15 bp, Homo sapiens
acaaatctgttctct

SEQ ID NO: 7713 - DNA, 15 bp, Homo sapiens
tacaaatctgttctc

SEQ ID NO: 7714 - DNA, 15 bp, Homo sapiens
ctacaaatctgttct

SEQ ID NO: 7715 - DNA, 15 bp, Homo sapiens
tctacaaatctgttc

SEQ ID NO: 7716 - DNA, 15 bp, Homo sapiens
atctacaaatctgtt

SEQ ID NO: 7717 - DNA, 15 bp, Homo sapiens
catctacaaatctgt

SEQ ID NO: 7718 - DNA, 15 bp, Homo sapiens
tcatctacaaatctg

SEQ ID NO: 7719 - DNA, 15 bp, Homo sapiens
ctcatctacaaatct

SEQ ID NO: 7720 - DNA, 15 bp, Homo sapiens
actcatctacaaatc

SEQ ID NO: 7721 - DNA, 15 bp, Homo sapiens
aactcatctacaaat

SEQ ID NO: 7722 - DNA, 15 bp, Homo sapiens
gaactcatctacaaa

SEQ ID NO: 7723 - DNA, 15 bp, Homo sapiens
agaactcatctacaa

SEQ ID NO: 7724 - DNA, 15 bp, Homo sapiens
gagaactcatctaca

SEQ ID NO: 7725 - DNA, 15 bp, Homo sapiens
cgagaactcatctac

SEQ ID NO: 7726 - DNA, 15 bp, Homo sapiens
tcgagaactcatcta

SEQ ID NO: 7727 - DNA, 15 bp, Homo sapiens
ttcgagaactcatct

SEQ ID NO: 7728 - DNA, 15 bp, Homo sapiens
tttcgagaactcatc

SEQ ID NO: 7729 - DNA, 15 bp, Homo sapiens
ttttcgagaactcat

SEQ ID NO: 7730 - DNA, 15 bp, Homo sapiens
attttcgagaactca

SEQ ID NO: 7731 - DNA, 15 bp, Homo sapiens
tattttcgagaactc

SEQ ID NO: 7732 - DNA, 15 bp, Homo sapiens
atattttcgagaact

SEQ ID NO: 7733 - DNA, 15 bp, Homo sapiens
aatattttcgagaac

SEQ ID NO: 7734 - DNA, 15 bp, Homo sapiens
aaatattttcgagaa

SEQ ID NO: 7735 - DNA, 15 bp, Homo sapiens
gaaatattttcgaga

SEQ ID NO: 7736 - DNA, 15 bp, Homo sapiens
tgaaatattttcgag

SEQ ID NO: 7737 - DNA, 15 bp, Homo sapiens
ctgaaatattttcga

SEQ ID NO: 7738 - DNA, 15 bp, Homo sapiens
cctgaaatattttcg

SEQ ID NO: 7739 - DNA, 15 bp, Homo sapiens
tcctgaaatattttc

SEQ ID NO: 7740 - DNA, 15 bp, Homo sapiens
ttcctgaaatatttt

SEQ ID NO: 7741 - DNA, 15 bp, Homo sapiens
attcctgaaatattt

SEQ ID NO: 7742 - DNA, 15 bp, Homo sapiens
gattcctgaaatatt

SEQ ID NO: 7743 - DNA, 15 bp, Homo sapiens
tgattcctgaaatat

SEQ ID NO: 7744 - DNA, 15 bp, Homo sapiens
ttgattcctgaaata

SEQ ID NO: 7745 - DNA, 15 bp, Homo sapiens
attgattcctgaaat

SEQ ID NO: 7746 - DNA, 15 bp, Homo sapiens
tattgattcctgaaa

SEQ ID NO: 7747 - DNA, 15 bp, Homo sapiens
atattgattcctgaa

SEQ ID NO: 7748 - DNA, 15 bp, Homo sapiens
tatattgattcctga

SEQ ID NO: 7749 - DNA, 15 bp, Homo sapiens
ctatattgattcctg

SEQ ID NO: 7750 - DNA, 15 bp, Homo sapiens
tctatattgattcct

SEQ ID NO: 7751 - DNA, 15 bp, Homo sapiens
ctctatattgattcc

SEQ ID NO: 7752 - DNA, 15 bp, Homo sapiens
tctctatattgattc

SEQ ID NO: 7753 - DNA, 15 bp, Homo sapiens
ttctctatattgatt

SEQ ID NO: 7754 - DNA, 15 bp, Homo sapiens
attctctatattgat

SEQ ID NO: 7755 - DNA, 15 bp, Homo sapiens
tattctctatattga

SEQ ID NO: 7756 - DNA, 15 bp, Homo sapiens
atattctctatattg

SEQ ID NO: 7757 - DNA, 15 bp, Homo sapiens
catattctctatatt

SEQ ID NO: 7758 - DNA, 15 bp, Homo sapiens
acatattctctatat

SEQ ID NO: 7759 - DNA, 15 bp, Homo sapiens
aacatattctctata

SEQ ID NO: 7760 - DNA, 15 bp, Homo sapiens
taacatattctctat

SEQ ID NO: 7761 - DNA, 15 bp, Homo sapiens
ataacatattctcta

SEQ ID NO: 7762 - DNA, 15 bp, Homo sapiens
tataacatattctct

SEQ ID NO: 7763 - DNA, 15 bp, Homo sapiens
gtataacatattctc

SEQ ID NO: 7764 - DNA, 15 bp, Homo sapiens
tgtataacatattct

SEQ ID NO: 7765 - DNA, 15 bp, Homo sapiens
atgtataacatattc

SEQ ID NO: 7766 - DNA, 15 bp, Homo sapiens
catgtataacatatt

SEQ ID NO: 7767 - DNA, 15 bp, Homo sapiens
ccatgtataacatat

SEQ ID NO: 7768 - DNA, 15 bp, Homo sapiens
accatgtataacata

SEQ ID NO: 7769 - DNA, 15 bp, Homo sapiens
caccatgtataacat

SEQ ID NO: 7770 - DNA, 15 bp, Homo sapiens
gcaccatgtataaca

SEQ ID NO: 7771 - DNA, 15 bp, Homo sapiens
ggcaccatgtataac

SEQ ID NO: 7772 - DNA, 15 bp, Homo sapiens
tggcaccatgtataa

SEQ ID NO: 7773 - DNA, 15 bp, Homo sapiens
ctggcaccatgtata

SEQ ID NO: 7774 - DNA, 15 bp, Homo sapiens
tctggcaccatgtat

SEQ ID NO: 7775 - DNA, 15 bp, Homo sapiens
ctctggcaccatgta

SEQ ID NO: 7776 - DNA, 15 bp, Homo sapiens
tctctggcaccatgt

SEQ ID NO: 7777 - DNA, 15 bp, Homo sapiens
ttctctggcaccatg

SEQ ID NO: 7778 - DNA, 15 bp, Homo sapiens
tttctctggcaccat

SEQ ID NO: 7779 - DNA, 15 bp, Homo sapiens
ttttctctggcacca

SEQ ID NO: 7780 - DNA, 15 bp, Homo sapiens
tttttctctggcacc

SEQ ID NO: 7781 - DNA, 15 bp, Homo sapiens
atttttctctggcac

SEQ ID NO: 7782 - DNA, 15 bp, Homo sapiens
catttttctctggca

SEQ ID NO: 7783 - DNA, 15 bp, Homo sapiens
tcatttttctctggc

SEQ ID NO: 7784 - DNA, 15 bp, Homo sapiens
ctcatttttctctgg

SEQ ID NO: 7785 - DNA, 15 bp, Homo sapiens
cctcatttttctctg

SEQ ID NO: 7786 - DNA, 15 bp, Homo sapiens
tcctcatttttctct

SEQ ID NO: 7787 - DNA, 15 bp, Homo sapiens
gtcctcatttttctc

SEQ ID NO: 7788 - DNA, 15 bp, Homo sapiens
tgtcctcatttttct

SEQ ID NO: 7789 - DNA, 15 bp, Homo sapiens
ttgtcctcatttttc

SEQ ID NO: 7790 - DNA, 15 bp, Homo sapiens
cttgtcctcattttt

SEQ ID NO: 7791 - DNA, 15 bp, Homo sapiens
tcttgtcctcatttt

SEQ ID NO: 7792 - DNA, 15 bp, Homo sapiens
ctcttgtcctcattt

SEQ ID NO: 7793 - DNA, 15 bp, Homo sapiens
tctcttgtcctcatt

SEQ ID NO: 7794 - DNA, 15 bp, Homo sapiens
atctcttgtcctcat

SEQ ID NO: 7795 - DNA, 15 bp, Homo sapiens
catctcttgtcctca

SEQ ID NO: 7796 - DNA, 15 bp, Homo sapiens
gcatctcttgtcctc

SEQ ID NO: 7797 - DNA, 15 bp, Homo sapiens
agcatctcttgtcct

SEQ ID NO: 7798 - DNA, 15 bp, Homo sapiens
tagcatctcttgtcc

SEQ ID NO: 7799 - DNA, 15 bp, Homo sapiens
atagcatctcttgtc

SEQ ID NO: 7800 - DNA, 15 bp, Homo sapiens
tatagcatctcttgt

SEQ ID NO: 7801 - DNA, 15 bp, Homo sapiens
gtatagcatctcttg

SEQ ID NO: 7802 - DNA, 15 bp, Homo sapiens
tgtatagcatctctt

SEQ ID NO: 7803 - DNA, 15 bp, Homo sapiens
ttgtatagcatctct

SEQ ID NO: 7804 - DNA, 15 bp, Homo sapiens
attgtatagcatctc

SEQ ID NO: 7805 - DNA, 15 bp, Homo sapiens
gattgtatagcatct

SEQ ID NO: 7806 - DNA, 15 bp, Homo sapiens
cgattgtatagcatc

SEQ ID NO: 7807 - DNA, 15 bp, Homo sapiens
acgattgtatagcat

SEQ ID NO: 7808 - DNA, 15 bp, Homo sapiens
tacgattgtatagca

SEQ ID NO: 7809 - DNA, 15 bp, Homo sapiens
gtacgattgtatagc

SEQ ID NO: 7810 - DNA, 15 bp, Homo sapiens
agtacgattgtatag

SEQ ID NO: 7811 - DNA, 15 bp, Homo sapiens
cagtacgattgtata

SEQ ID NO: 7812 - DNA, 15 bp, Homo sapiens
tcagtacgattgtat

SEQ ID NO: 7813 - DNA, 15 bp, Homo sapiens
ttcagtacgattgta

SEQ ID NO: 7814 - DNA, 15 bp, Homo sapiens
cttcagtacgattgt

SEQ ID NO: 7815 - DNA, 15 bp, Homo sapiens
tcttcagtacgattg

SEQ ID NO: 7816 - DNA, 15 bp, Homo sapiens
ttcttcagtacgatt

SEQ ID NO: 7817 - DNA, 15 bp, Homo sapiens
tttcttcagtacgat

SEQ ID NO: 7818 - DNA, 15 bp, Homo sapiens
ttttcttcagtacga

SEQ ID NO: 7819 - DNA, 15 bp, Homo sapiens
tttttcttcagtacg

SEQ ID NO: 7820 - DNA, 15 bp, Homo sapiens
atttttcttcagtac

SEQ ID NO: 7821 - DNA, 15 bp, Homo sapiens
aatttttcttcagta

SEQ ID NO: 7822 - DNA, 15 bp, Homo sapiens
aaatttttcttcagt

SEQ ID NO: 7823 - DNA, 15 bp, Homo sapiens
aaaatttttcttcag

SEQ ID NO: 7824 - DNA, 15 bp, Homo sapiens
taaaatttttcttca

SEQ ID NO: 7825 - DNA, 15 bp, Homo sapiens
ataaaatttttcttc

SEQ ID NO: 7826 - DNA, 15 bp, Homo sapiens
aataaaatttttctt

SEQ ID NO: 7827 - DNA, 15 bp, Homo sapiens
aaataaaatttttct

SEQ ID NO: 7828 - DNA, 15 bp, Homo sapiens
gaaataaaatttttc

SEQ ID NO: 7829 - DNA, 15 bp, Homo sapiens
agaaataaaattttt

SEQ ID NO: 7830 - DNA, 15 bp, Homo sapiens
aagaaataaaatttt

SEQ ID NO: 7831 - DNA, 15 bp, Homo sapiens
caagaaataaaattt

SEQ ID NO: 7832 - DNA, 15 bp, Homo sapiens
ccaagaaataaaatt

SEQ ID NO: 7833 - DNA, 15 bp, Homo sapiens
tccaagaaataaaat

SEQ ID NO: 7834 - DNA, 15 bp, Homo sapiens
gtccaagaaataaaa

SEQ ID NO: 7835 - DNA, 15 bp, Homo sapiens
ggtccaagaaataaa

SEQ ID NO: 7836 - DNA, 15 bp, Homo sapiens
gggtccaagaaataa

SEQ ID NO: 7837 - DNA, 15 bp, Homo sapiens
ggggtccaagaaata

SEQ ID NO: 7838 - DNA, 15 bp, Homo sapiens
aggggtccaagaaat

SEQ ID NO: 7839 - DNA, 15 bp, Homo sapiens
caggggtccaagaaa

SEQ ID NO: 7840 - DNA, 15 bp, Homo sapiens
tcaggggtccaagaa

SEQ ID NO: 7841 - DNA, 15 bp, Homo sapiens
ctcaggggtccaaga

SEQ ID NO: 7842 - DNA, 15 bp, Homo sapiens
cctcaggggtccaag

SEQ ID NO: 7843 - DNA, 15 bp, Homo sapiens
acctcaggggtccaa

SEQ ID NO: 7844 - DNA, 15 bp, Homo sapiens
cacctcaggggtcca

SEQ ID NO: 7845 - DNA, 15 bp, Homo sapiens
acacctcaggggtcc

SEQ ID NO: 7846 - DNA, 15 bp, Homo sapiens
gacacctcaggggtc

SEQ ID NO: 7847 - DNA, 15 bp, Homo sapiens
agacacctcaggggt

SEQ ID NO: 7848 - DNA, 15 bp, Homo sapiens
cagacacctcagggg

SEQ ID NO: 7849 - DNA, 15 bp, Homo sapiens
gcagacacctcaggg

SEQ ID NO: 7850 - DNA, 15 bp, Homo sapiens
tgcagacacctcagg

SEQ ID NO: 7851 - DNA, 15 bp, Homo sapiens
ctgcagacacctcag

SEQ ID NO: 7852 - DNA, 15 bp, Homo sapiens
tctgcagacacctca

SEQ ID NO: 7853 - DNA, 15 bp, Homo sapiens
gtctgcagacacctc

SEQ ID NO: 7854 - DNA, 15 bp, Homo sapiens
ggtctgcagacacct

SEQ ID NO: 7855 - DNA, 15 bp, Homo sapiens
aggtctgcagacacc

SEQ ID NO: 7856 - DNA, 15 bp, Homo sapiens
caggtctgcagacac

SEQ ID NO: 7857 - DNA, 15 bp, Homo sapiens
tcaggtctgcagaca

SEQ ID NO: 7858 - DNA, 15 bp, Homo sapiens
ttcaggtctgcagac

SEQ ID NO: 7859 - DNA, 15 bp, Homo sapiens
tttcaggtctgcaga

SEQ ID NO: 7860 - DNA, 15 bp, Homo sapiens
ctttcaggtctgcag

SEQ ID NO: 7861 - DNA, 15 bp, Homo sapiens
cctttcaggtctgca

SEQ ID NO: 7862 - DNA, 15 bp, Homo sapiens
tcctttcaggtctgc

SEQ ID NO: 7863 - DNA, 15 bp, Homo sapiens
ttcctttcaggtctg

SEQ ID NO: 7864 - DNA, 15 bp, Homo sapiens
gttcctttcaggtct

SEQ ID NO: 7865 - DNA, 15 bp, Homo sapiens
ggttcctttcaggtc

SEQ ID NO: 7866 - DNA, 15 bp, Homo sapiens
aggttcctttcaggt

SEQ ID NO: 7867 - DNA, 15 bp, Homo sapiens
taggttcctttcagg

SEQ ID NO: 7868 - DNA, 15 bp, Homo sapiens
ctaggttcctttcag

SEQ ID NO: 7869 - DNA, 15 bp, Homo sapiens
actaggttcctttca

SEQ ID NO: 7870 - DNA, 15 bp, Homo sapiens
cactaggttcctttc

SEQ ID NO: 7871 - DNA, 15 bp, Homo sapiens
tcactaggttccttt

SEQ ID NO: 7872 - DNA, 15 bp, Homo sapiens
ctcactaggttcctt

SEQ ID NO: 7873 - DNA, 15 bp, Homo sapiens
tctcactaggttcct

SEQ ID NO: 7874 - DNA, 15 bp, Homo sapiens
ctctcactaggttcc

SEQ ID NO: 7875 - DNA, 15 bp, Homo sapiens
gctctcactaggttc

SEQ ID NO: 7876 - DNA, 15 bp, Homo sapiens
ggctctcactaggtt

SEQ ID NO: 7877 - DNA, 15 bp, Homo sapiens
aggctctcactaggt

SEQ ID NO: 7878 - DNA, 15 bp, Homo sapiens
gaggctctcactagg

SEQ ID NO: 7879 - DNA, 15 bp, Homo sapiens
agaggctctcactag

SEQ ID NO: 7880 - DNA, 15 bp, Homo sapiens
aagaggctctcacta

SEQ ID NO: 7881 - DNA, 15 bp, Homo sapiens
aaagaggctctcact

SEQ ID NO: 7882 - DNA, 15 bp, Homo sapiens
aaaagaggctctcac

SEQ ID NO: 7883 - DNA, 15 bp, Homo sapiens
taaaagaggctctca

SEQ ID NO: 7884 - DNA, 15 bp, Homo sapiens
gtaaaagaggctctc

SEQ ID NO: 7885 - DNA, 15 bp, Homo sapiens
tgtaaaagaggctct

SEQ ID NO: 7886 - DNA, 15 bp, Homo sapiens
gtgtaaaagaggctc

SEQ ID NO: 7887 - DNA, 15 bp, Homo sapiens
agtgtaaaagaggct

SEQ ID NO: 7888 - DNA, 15 bp, Homo sapiens
gagtgtaaaagaggc

SEQ ID NO: 7889 - DNA, 15 bp, Homo sapiens
agagtgtaaaagagg

SEQ ID NO: 7890 - DNA, 15 bp, Homo sapiens
cagagtgtaaaagag

SEQ ID NO: 7891 - DNA, 15 bp, Homo sapiens
gcagagtgtaaaaga

SEQ ID NO: 7892 - DNA, 15 bp, Homo sapiens
ggcagagtgtaaaag

SEQ ID NO: 7893 - DNA, 15 bp, Homo sapiens
gggcagagtgtaaaa

SEQ ID NO: 7894 - DNA, 15 bp, Homo sapiens
ggggcagagtgtaaa

SEQ ID NO: 7895 - DNA, 15 bp, Homo sapiens
aggggcagagtgtaa

SEQ ID NO: 7896 - DNA, 15 bp, Homo sapiens
caggggcagagtgta

SEQ ID NO: 7897 - DNA, 15 bp, Homo sapiens
acaggggcagagtgt

SEQ ID NO: 7898 - DNA, 15 bp, Homo sapiens
cacaggggcagagtg

SEQ ID NO: 7899 - DNA, 15 bp, Homo sapiens
ccacaggggcagagt

SEQ ID NO: 7900 - DNA, 15 bp, Homo sapiens
cccacaggggcagag

SEQ ID NO: 7901 - DNA, 15 bp, Homo sapiens
tcccacaggggcaga

SEQ ID NO: 7902 - DNA, 15 bp, Homo sapiens
ttcccacaggggcag

SEQ ID NO: 7903 - DNA, 15 bp, Homo sapiens
tttcccacaggggca

SEQ ID NO: 7904 - DNA, 15 bp, Homo sapiens
ctttcccacaggggc

SEQ ID NO: 7905 - DNA, 15 bp, Homo sapiens
gctttcccacagggg

SEQ ID NO: 7906 - DNA, 15 bp, Homo sapiens
ggctttcccacaggg

SEQ ID NO: 7907 - DNA, 15 bp, Homo sapiens
aggctttcccacagg

SEQ ID NO: 7908 - DNA, 15 bp, Homo sapiens
aaggctttcccacag

SEQ ID NO: 7909 - DNA, 15 bp, Homo sapiens
gaaggctttcccaca

SEQ ID NO: 7910 - DNA, 15 bp, Homo sapiens
tgaaggctttcccac

SEQ ID NO: 7911 - DNA, 15 bp, Homo sapiens
gtgaaggctttccca

SEQ ID NO: 7912 - DNA, 15 bp, Homo sapiens
ggtgaaggctttccc

SEQ ID NO: 7913 - DNA, 15 bp, Homo sapiens
aggtgaaggctttcc

SEQ ID NO: 7914 - DNA, 15 bp, Homo sapiens
caggtgaaggctttc

SEQ ID NO: 7915 - DNA, 15 bp, Homo sapiens
ccaggtgaaggcttt

SEQ ID NO: 7916 - DNA, 15 bp, Homo sapiens
accaggtgaaggctt

SEQ ID NO: 7917 - DNA, 15 bp, Homo sapiens
aaccaggtgaaggct

SEQ ID NO: 7918 - DNA, 15 bp, Homo sapiens
aaaccaggtgaaggc

SEQ ID NO: 7919 - DNA, 15 bp, Homo sapiens
gaaaccaggtgaagg

SEQ ID NO: 7920 - DNA, 15 bp, Homo sapiens
ggaaaccaggtgaag

SEQ ID NO: 7921 - DNA, 15 bp, Homo sapiens
cggaaaccaggtgaa

SEQ ID NO: 7922 - DNA, 15 bp, Homo sapiens
ccggaaaccaggtga

SEQ ID NO: 7923 - DNA, 15 bp, Homo sapiens
gccggaaaccaggtg

SEQ ID NO: 7924 - DNA, 15 bp, Homo sapiens
ggccggaaaccaggt

SEQ ID NO: 7925 - DNA, 15 bp, Homo sapiens
gggccggaaaccagg

SEQ ID NO: 7926 - DNA, 15 bp, Homo sapiens
agggccggaaaccag

SEQ ID NO: 7927 - DNA, 15 bp, Homo sapiens
gagggccggaaacca

SEQ ID NO: 7928 - DNA, 15 bp, Homo sapiens
agagggccggaaacc

SEQ ID NO: 7929 - DNA, 15 bp, Homo sapiens
tagagggccggaaac

SEQ ID NO: 7930 - DNA, 15 bp, Homo sapiens
atagagggccggaaa

SEQ ID NO: 7931 - DNA, 15 bp, Homo sapiens
catagagggccggaa

SEQ ID NO: 7932 - DNA, 15 bp, Homo sapiens
acatagagggccgga

SEQ ID NO: 7933 - DNA, 15 bp, Homo sapiens
cacatagagggccgg

SEQ ID NO: 7934 - DNA, 15 bp, Homo sapiens
ccacatagagggccg

SEQ ID NO: 7935 - DNA, 15 bp, Homo sapiens
accacatagagggcc

SEQ ID NO: 7936 - DNA, 15 bp, Homo sapiens
caccacatagagggc

SEQ ID NO: 7937 - DNA, 15 bp, Homo sapiens
tcaccacatagaggg

SEQ ID NO: 7938 - DNA, 15 bp, Homo sapiens
ttcaccacatagagg

SEQ ID NO: 7939 - DNA, 15 bp, Homo sapiens
attcaccacatagag

SEQ ID NO: 7940 - DNA, 15 bp, Homo sapiens
cattcaccacataga

SEQ ID NO: 7941 - DNA, 15 bp, Homo sapiens
acattcaccacatag

SEQ ID NO: 7942 - DNA, 15 bp, Homo sapiens
cacattcaccacata

SEQ ID NO: 7943 - DNA, 15 bp, Homo sapiens
ccacattcaccacat

SEQ ID NO: 7944 - DNA, 15 bp, Homo sapiens
tccacattcaccaca

SEQ ID NO: 7945 - DNA, 15 bp, Homo sapiens
ttccacattcaccac

SEQ ID NO: 7946 - DNA, 15 bp, Homo sapiens
cttccacattcacca

SEQ ID NO: 7947 - DNA, 15 bp, Homo sapiens
gcttccacattcacc

SEQ ID NO: 7948 - DNA, 15 bp, Homo sapiens
ggcttccacattcac

SEQ ID NO: 7949 - DNA, 15 bp, Homo sapiens
aggcttccacattca

SEQ ID NO: 7950 - DNA, 15 bp, Homo sapiens
gaggcttccacattc

SEQ ID NO: 7951 - DNA, 15 bp, Homo sapiens
tgaggcttccacatt

SEQ ID NO: 7952 - DNA, 15 bp, Homo sapiens
ttgaggcttccacat

SEQ ID NO: 7953 - DNA, 15 bp, Homo sapiens
cttgaggcttccaca

SEQ ID NO: 7954 - DNA, 15 bp, Homo sapiens
gcttgaggcttccac

SEQ ID NO: 7955 - DNA, 15 bp, Homo sapiens
cgcttgaggcttcca

SEQ ID NO: 7956 - DNA, 15 bp, Homo sapiens
acgcttgaggcttcc

SEQ ID NO: 7957 - DNA, 15 bp, Homo sapiens
aacgcttgaggcttc

SEQ ID NO: 7958 - DNA, 15 bp, Homo sapiens
taacgcttgaggctt

SEQ ID NO: 7959 - DNA, 15 bp, Homo sapiens
ataacgcttgaggct

SEQ ID NO: 7960 - DNA, 15 bp, Homo sapiens
cataacgcttgaggc

SEQ ID NO: 7961 - DNA, 15 bp, Homo sapiens
gcataacgcttgagg

SEQ ID NO: 7962 - DNA, 15 bp, Homo sapiens
tgcataacgcttgag

SEQ ID NO: 7963 - DNA, 15 bp, Homo sapiens
ttgcataacgcttga

SEQ ID NO: 7964 - DNA, 15 bp, Homo sapiens
tttgcataacgcttg

SEQ ID NO: 7965 - DNA, 15 bp, Homo sapiens
atttgcataacgctt

SEQ ID NO: 7966 - DNA, 15 bp, Homo sapiens
gatttgcataacgct

SEQ ID NO: 7967 - DNA, 15 bp, Homo sapiens
agatttgcataacgc

SEQ ID NO: 7968 - DNA, 15 bp, Homo sapiens
cagatttgcataacg

SEQ ID NO: 7969 - DNA, 15 bp, Homo sapiens
gcagatttgcataac

SEQ ID NO: 7970 - DNA, 15 bp, Homo sapiens
ggcagatttgcataa

SEQ ID NO: 7971 - DNA, 15 bp, Homo sapiens
gggcagatttgcata

SEQ ID NO: 7972 - DNA, 15 bp, Homo sapiens
tgggcagatttgcat

SEQ ID NO: 7973 - DNA, 15 bp, Homo sapiens
ctgggcagatttgca

SEQ ID NO: 7974 - DNA, 15 bp, Homo sapiens
actgggcagatttgc

SEQ ID NO: 7975 - DNA, 15 bp, Homo sapiens
gactgggcagatttg

SEQ ID NO: 7976 - DNA, 15 bp, Homo sapiens
ggactgggcagattt

SEQ ID NO: 7977 - DNA, 15 bp, Homo sapiens
aggactgggcagatt

SEQ ID NO: 7978 - DNA, 15 bp, Homo sapiens
gaggactgggcagat

SEQ ID NO: 7979 - DNA, 15 bp, Homo sapiens
agaggactgggcaga

SEQ ID NO: 7980 - DNA, 15 bp, Homo sapiens
tagaggactgggcag

SEQ ID NO: 7981 - DNA, 15 bp, Homo sapiens
atagaggactgggca

SEQ ID NO: 7982 - DNA, 15 bp, Homo sapiens
aatagaggactgggc

SEQ ID NO: 7983 - DNA, 15 bp, Homo sapiens
gaatagaggactggg

SEQ ID NO: 7984 - DNA, 15 bp, Homo sapiens
agaatagaggactgg

SEQ ID NO: 7985 - DNA, 15 bp, Homo sapiens
aagaatagaggactg

SEQ ID NO: 7986 - DNA, 15 bp, Homo sapiens
caagaatagaggact

SEQ ID NO: 7987 - DNA, 15 bp, Homo sapiens
tcaagaatagaggac

SEQ ID NO: 7988 - DNA, 15 bp, Homo sapiens
atcaagaatagagga

SEQ ID NO: 7989 - DNA, 15 bp, Homo sapiens
gatcaagaatagagg

SEQ ID NO: 7990 - DNA, 15 bp, Homo sapiens
agatcaagaatagag

SEQ ID NO: 7991 - DNA, 15 bp, Homo sapiens
aagatcaagaataga

SEQ ID NO: 7992 - DNA, 15 bp, Homo sapiens
gaagatcaagaatag

SEQ ID NO: 7993 - DNA, 15 bp, Homo sapiens
tgaagatcaagaata

SEQ ID NO: 7994 - DNA, 15 bp, Homo sapiens
gtgaagatcaagaat

SEQ ID NO: 7995 - DNA, 15 bp, Homo sapiens
ggtgaagatcaagaa

SEQ ID NO: 7996 - DNA, 15 bp, Homo sapiens
aggtgaagatcaaga

SEQ ID NO: 7997 - DNA, 15 bp, Homo sapiens
aaggtgaagatcaag

SEQ ID NO: 7998 - DNA, 15 bp, Homo sapiens
gaaggtgaagatcaa

SEQ ID NO: 7999 - DNA, 15 bp, Homo sapiens
agaaggtgaagatca

SEQ ID NO: 8000 - DNA, 15 bp, Homo sapiens
gagaaggtgaagatc

SEQ ID NO: 8001 - DNA, 15 bp, Homo sapiens
cgagaaggtgaagat

SEQ ID NO: 8002 - DNA, 15 bp, Homo sapiens
acgagaaggtgaaga

SEQ ID NO: 8003 - DNA, 15 bp, Homo sapiens
aacgagaaggtgaag

SEQ ID NO: 8004 - DNA, 15 bp, Homo sapiens
gaacgagaaggtgaa

SEQ ID NO: 8005 - DNA, 15 bp, Homo sapiens
tgaacgagaaggtga

SEQ ID NO: 8006 - DNA, 15 bp, Homo sapiens
atgaacgagaaggtg

SEQ ID NO: 8007 - DNA, 15 bp, Homo sapiens
catgaacgagaaggt

SEQ ID NO: 8008 - DNA, 15 bp, Homo sapiens
tcatgaacgagaagg

SEQ ID NO: 8009 - DNA, 15 bp, Homo sapiens
ctcatgaacgagaag

SEQ ID NO: 8010 - DNA, 15 bp, Homo sapiens
actcatgaacgagaa

SEQ ID NO: 8011 - DNA, 15 bp, Homo sapiens
aactcatgaacgaga

SEQ ID NO: 8012 - DNA, 15 bp, Homo sapiens
aaactcatgaacgag

SEQ ID NO: 8013 - DNA, 15 bp, Homo sapiens
gaaactcatgaacga

SEQ ID NO: 8014 - DNA, 15 bp, Homo sapiens
tgaaactcatgaacg

SEQ ID NO: 8015 - DNA, 15 bp, Homo sapiens
ctgaaactcatgaac

SEQ ID NO: 8016 - DNA, 15 bp, Homo sapiens
cctgaaactcatgaa

SEQ ID NO: 8017 - DNA, 15 bp, Homo sapiens
gcctgaaactcatga

SEQ ID NO: 8018 - DNA, 15 bp, Homo sapiens
ggcctgaaactcatg

SEQ ID NO: 8019 - DNA, 15 bp, Homo sapiens
gggcctgaaactcat

SEQ ID NO: 8020 - DNA, 15 bp, Homo sapiens
ggggcctgaaactca

SEQ ID NO: 8021 - DNA, 15 bp, Homo sapiens
tggggcctgaaactc

SEQ ID NO: 8022 - DNA, 15 bp, Homo sapiens
ctggggcctgaaact

SEQ ID NO: 8023 - DNA, 15 bp, Homo sapiens
actggggcctgaaac

SEQ ID NO: 8024 - DNA, 15 bp, Homo sapiens
aactggggcctgaaa

SEQ ID NO: 8025 - DNA, 15 bp, Homo sapiens
gaactggggcctgaa

SEQ ID NO: 8026 - DNA, 15 bp, Homo sapiens
agaactggggcctga

SEQ ID NO: 8027 - DNA, 15 bp, Homo sapiens
cagaactggggcctg

SEQ ID NO: 8028 - DNA, 15 bp, Homo sapiens
tcagaactggggcct

SEQ ID NO: 8029 - DNA, 15 bp, Homo sapiens
ttcagaactggggcc

SEQ ID NO: 8030 - DNA, 15 bp, Homo sapiens
attcagaactggggc

SEQ ID NO: 8031 - DNA, 15 bp, Homo sapiens
gattcagaactgggg

SEQ ID NO: 8032 - DNA, 15 bp, Homo sapiens
tgattcagaactggg

SEQ ID NO: 8033 - DNA, 15 bp, Homo sapiens
ctgattcagaactgg

SEQ ID NO: 8034 - DNA, 15 bp, Homo sapiens
gctgattcagaactg

SEQ ID NO: 8035 - DNA, 15 bp, Homo sapiens
ggctgattcagaact

SEQ ID NO: 8036 - DNA, 15 bp, Homo sapiens
aggctgattcagaac

SEQ ID NO: 8037 - DNA, 15 bp, Homo sapiens
gaggctgattcagaa

SEQ ID NO: 8038 - DNA, 15 bp, Homo sapiens
ggaggctgattcaga

SEQ ID NO: 8039 - DNA, 15 bp, Homo sapiens
aggaggctgattcag

SEQ ID NO: 8040 - DNA, 15 bp, Homo sapiens
caggaggctgattca

SEQ ID NO: 8041 - DNA, 15 bp, Homo sapiens
acaggaggctgattc

SEQ ID NO: 8042 - DNA, 15 bp, Homo sapiens
gacaggaggctgatt

SEQ ID NO: 8043 - DNA, 15 bp, Homo sapiens
ggacaggaggctgat

SEQ ID NO: 8044 - DNA, 15 bp, Homo sapiens
tggacaggaggctga

SEQ ID NO: 8045 - DNA, 15 bp, Homo sapiens
atggacaggaggctg

SEQ ID NO: 8046 - DNA, 15 bp, Homo sapiens
gatggacaggaggct

SEQ ID NO: 8047 - DNA, 15 bp, Homo sapiens
tgatggacaggaggc

SEQ ID NO: 8048 - DNA, 15 bp, Homo sapiens
ctgatggacaggagg

SEQ ID NO: 8049 - DNA, 15 bp, Homo sapiens
tctgatggacaggag

SEQ ID NO: 8050 - DNA, 15 bp, Homo sapiens
gtctgatggacagga

SEQ ID NO: 8051 - DNA, 15 bp, Homo sapiens
agtctgatggacagg

SEQ ID NO: 8052 - DNA, 15 bp, Homo sapiens
gagtctgatggacag

SEQ ID NO: 8053 - DNA, 15 bp, Homo sapiens
agagtctgatggaca

SEQ ID NO: 8054 - DNA, 15 bp, Homo sapiens
aagagtctgatggac

SEQ ID NO: 8055 - DNA, 15 bp, Homo sapiens
gaagagtctgatgga

SEQ ID NO: 8056 - DNA, 15 bp, Homo sapiens
agaagagtctgatgg

SEQ ID NO: 8057 - DNA, 15 bp, Homo sapiens
aagaagagtctgatg

SEQ ID NO: 8058 - DNA, 15 bp, Homo sapiens
aaagaagagtctgat

SEQ ID NO: 8059 - DNA, 15 bp, Homo sapiens
taaagaagagtctga

SEQ ID NO: 8060 - DNA, 15 bp, Homo sapiens
gtaaagaagagtctg

SEQ ID NO: 8061 - DNA, 15 bp, Homo sapiens
ggtaaagaagagtct

SEQ ID NO: 8062 - DNA, 15 bp, Homo sapiens
aggtaaagaagagtc

SEQ ID NO: 8063 - DNA, 15 bp, Homo sapiens
gaggtaaagaagagt

SEQ ID NO: 8064 - DNA, 15 bp, Homo sapiens
agaggtaaagaagag

SEQ ID NO: 8065 - DNA, 15 bp, Homo sapiens
gagaggtaaagaaga

SEQ ID NO: 8066 - DNA, 15 bp, Homo sapiens
ggagaggtaaagaag

SEQ ID NO: 8067 - DNA, 15 bp, Homo sapiens
gggagaggtaaagaa

SEQ ID NO: 8068 - DNA, 15 bp, Homo sapiens
ggggagaggtaaaga

SEQ ID NO: 8069 - DNA, 15 bp, Homo sapiens
cggggagaggtaaag

SEQ ID NO: 8070 - DNA, 15 bp, Homo sapiens
tcggggagaggtaaa

SEQ ID NO: 8071 - DNA, 15 bp, Homo sapiens
ctcggggagaggtaa

SEQ ID NO: 8072 - DNA, 15 bp, Homo sapiens
cctcggggagaggta

SEQ ID NO: 8073 - DNA, 15 bp, Homo sapiens
tcctcggggagaggt

SEQ ID NO: 8074 - DNA, 15 bp, Homo sapiens
ctcctcggggagagg

SEQ ID NO: 8075 - DNA, 15 bp, Homo sapiens
gctcctcggggagag

SEQ ID NO: 8076 - DNA, 15 bp, Homo sapiens
ggctcctcggggaga

SEQ ID NO: 8077 - DNA, 15 bp, Homo sapiens
gggctcctcggggag

SEQ ID NO: 8078 - DNA, 15 bp, Homo sapiens
tgggctcctcgggga

SEQ ID NO: 8079 - DNA, 15 bp, Homo sapiens
atgggctcctcgggg

SEQ ID NO: 8080 - DNA, 15 bp, Homo sapiens
tatgggctcctcggg

SEQ ID NO: 8081 - DNA, 15 bp, Homo sapiens
ttatgggctcctcgg

SEQ ID NO: 8082 - DNA, 15 bp, Homo sapiens
gttatgggctcctcg

SEQ ID NO: 8083 - DNA, 15 bp, Homo sapiens
ggttatgggctcctc

SEQ ID NO: 8084 - DNA, 15 bp, Homo sapiens
aggttatgggctcct

SEQ ID NO: 8085 - DNA, 15 bp, Homo sapiens
caggttatgggctcc

SEQ ID NO: 8086 - DNA, 15 bp, Homo sapiens
gcaggttatgggctc

SEQ ID NO: 8087 - DNA, 15 bp, Homo sapiens
tgcaggttatgggct

SEQ ID NO: 8088 - DNA, 15 bp, Homo sapiens
ctgcaggttatgggc

SEQ ID NO: 8089 - DNA, 15 bp, Homo sapiens
gctgcaggttatggg

SEQ ID NO: 8090 - DNA, 15 bp, Homo sapiens
ggctgcaggttatgg

SEQ ID NO: 8091 - DNA, 15 bp, Homo sapiens
gggctgcaggttatg

SEQ ID NO: 8092 - DNA, 15 bp, Homo sapiens
agggctgcaggttat

SEQ ID NO: 8093 - DNA, 15 bp, Homo sapiens
tagggctgcaggtta

SEQ ID NO: 8094 - DNA, 15 bp, Homo sapiens
gtagggctgcaggtt

SEQ ID NO: 8095 - DNA, 15 bp, Homo sapiens
agtagggctgcaggt

SEQ ID NO: 8096 - DNA, 15 bp, Homo sapiens
cagtagggctgcagg

SEQ ID NO: 8097 - DNA, 15 bp, Homo sapiens
gcagtagggctgcag

SEQ ID NO: 8098 - DNA, 15 bp, Homo sapiens
tgcagtagggctgca

SEQ ID NO: 8099 - DNA, 15 bp, Homo sapiens
atgcagtagggctgc

SEQ ID NO: 8100 - DNA, 15 bp, Homo sapiens
catgcagtagggctg

SEQ ID NO: 8101 - DNA, 15 bp, Homo sapiens
gcatgcagtagggct

SEQ ID NO: 8102 - DNA, 15 bp, Homo sapiens
agcatgcagtagggc

SEQ ID NO: 8103 - DNA, 15 bp, Homo sapiens
aagcatgcagtaggg

SEQ ID NO: 8104 - DNA, 15 bp, Homo sapiens
caagcatgcagtagg

SEQ ID NO: 8105 - DNA, 15 bp, Homo sapiens
ccaagcatgcagtag

SEQ ID NO: 8106 - DNA, 15 bp, Homo sapiens
cccaagcatgcagta

SEQ ID NO: 8107 - DNA, 15 bp, Homo sapiens
ccccaagcatgcagt

SEQ ID NO: 8108 - DNA, 15 bp, Homo sapiens
accccaagcatgcag

SEQ ID NO: 8109 - DNA, 15 bp, Homo sapiens
taccccaagcatgca

SEQ ID NO: 8110 - DNA, 15 bp, Homo sapiens
ctaccccaagcatgc

SEQ ID NO: 8111 - DNA, 15 bp, Homo sapiens
cctaccccaagcatg

SEQ ID NO: 8112 - DNA, 15 bp, Homo sapiens
acctaccccaagcat

SEQ ID NO: 8113 - DNA, 15 bp, Homo sapiens
cacctaccccaagca

SEQ ID NO: 8114 - DNA, 15 bp, Homo sapiens
gcacctaccccaagc

SEQ ID NO: 8115 - DNA, 15 bp, Homo sapiens
agcacctaccccaag

SEQ ID NO: 8116 - DNA, 15 bp, Homo sapiens
gagcacctaccccaa

SEQ ID NO: 8117 - DNA, 15 bp, Homo sapiens
tgagcacctacccca

SEQ ID NO: 8118 - DNA, 15 bp, Homo sapiens
ctgagcacctacccc

SEQ ID NO: 8119 - DNA, 15 bp, Homo sapiens
actgagcacctaccc

SEQ ID NO: 8120 - DNA, 15 bp, Homo sapiens
aactgagcacctacc

SEQ ID NO: 8121 - DNA, 15 bp, Homo sapiens
gaactgagcacctac

SEQ ID NO: 8122 - DNA, 15 bp, Homo sapiens
tgaactgagcaccta

SEQ ID NO: 8123 - DNA, 15 bp, Homo sapiens
gtgaactgagcacct

SEQ ID NO: 8124 - DNA, 15 bp, Homo sapiens
ggtgaactgagcacc

SEQ ID NO: 8125 - DNA, 15 bp, Homo sapiens
cggtgaactgagcac

SEQ ID NO: 8126 - DNA, 15 bp, Homo sapiens
acggtgaactgagca

SEQ ID NO: 8127 - DNA, 15 bp, Homo sapiens
cacggtgaactgagc

SEQ ID NO: 8128 - DNA, 15 bp, Homo sapiens
ccacggtgaactgag

SEQ ID NO: 8129 - DNA, 15 bp, Homo sapiens
accacggtgaactga

SEQ ID NO: 8130 - DNA, 15 bp, Homo sapiens
aaccacggtgaactg

SEQ ID NO: 8131 - DNA, 15 bp, Homo sapiens
caaccacggtgaact

SEQ ID NO: 8132 - DNA, 15 bp, Homo sapiens
tcaaccacggtgaac

SEQ ID NO: 8133 - DNA, 15 bp, Homo sapiens
ttcaaccacggtgaa

SEQ ID NO: 8134 - DNA, 15 bp, Homo sapiens
cttcaaccacggtga

SEQ ID NO: 8135 - DNA, 15 bp, Homo sapiens
ccttcaaccacggtg

SEQ ID NO: 8136 - DNA, 15 bp, Homo sapiens
tccttcaaccacggt

SEQ ID NO: 8137 - DNA, 15 bp, Homo sapiens
ttccttcaaccacgg

SEQ ID NO: 8138 - DNA, 15 bp, Homo sapiens
attccttcaaccacg

SEQ ID NO: 8139 - DNA, 15 bp, Homo sapiens
tattccttcaaccac

SEQ ID NO: 8140 - DNA, 15 bp, Homo sapiens
ctattccttcaacca

SEQ ID NO: 8141 - DNA, 15 bp, Homo sapiens
tctattccttcaacc

SEQ ID NO: 8142 - DNA, 15 bp, Homo sapiens
gtctattccttcaac

SEQ ID NO: 8143 - DNA, 15 bp, Homo sapiens
cgtctattccttcaa

SEQ ID NO: 8144 - DNA, 15 bp, Homo sapiens
tcgtctattccttca

SEQ ID NO: 8145 - DNA, 15 bp, Homo sapiens
ctcgtctattccttc

SEQ ID NO: 8146 - DNA, 15 bp, Homo sapiens
gctcgtctattcctt

SEQ ID NO: 8147 - DNA, 15 bp, Homo sapiens
cgctcgtctattcct

SEQ ID NO: 8148 - DNA, 15 bp, Homo sapiens
acgctcgtctattcc

SEQ ID NO: 8149 - DNA, 15 bp, Homo sapiens
gacgctcgtctattc

SEQ ID NO: 8150 - DNA, 15 bp, Homo sapiens
agacgctcgtctatt

SEQ ID NO: 8151 - DNA, 15 bp, Homo sapiens
cagacgctcgtctat

SEQ ID NO: 8152 - DNA, 15 bp, Homo sapiens
gcagacgctcgtcta

SEQ ID NO: 8153 - DNA, 15 bp, Homo sapiens
agcagacgctcgtct

SEQ ID NO: 8154 - DNA, 15 bp, Homo sapiens
gagcagacgctcgtc

SEQ ID NO: 8155 - DNA, 15 bp, Homo sapiens
tgagcagacgctcgt

SEQ ID NO: 8156 - DNA, 15 bp, Homo sapiens
ttgagcagacgctcg

SEQ ID NO: 8157 - DNA, 15 bp, Homo sapiens
cttgagcagacgctc

SEQ ID NO: 8158 - DNA, 15 bp, Homo sapiens
gcttgagcagacgct

SEQ ID NO: 8159 - DNA, 15 bp, Homo sapiens
tgcttgagcagacgc

SEQ ID NO: 8160 - DNA, 15 bp, Homo sapiens
ctgcttgagcagacg

SEQ ID NO: 8161 - DNA, 15 bp, Homo sapiens
gctgcttgagcagac

SEQ ID NO: 8162 - DNA, 15 bp, Homo sapiens
tgctgcttgagcaga

SEQ ID NO: 8163 - DNA, 15 bp, Homo sapiens
ctgctgcttgagcag

SEQ ID NO: 8164 - DNA, 15 bp, Homo sapiens
gctgctgcttgagca

SEQ ID NO: 8165 - DNA, 15 bp, Homo sapiens
tgctgctgcttgagc

SEQ ID NO: 8166 - DNA, 15 bp, Homo sapiens
ctgctgctgcttgag

SEQ ID NO: 8167 - DNA, 15 bp, Homo sapiens
gctgctgctgcttga

SEQ ID NO: 8168 - DNA, 15 bp, Homo sapiens
tgctgctgctgcttg

SEQ ID NO: 8169 - DNA, 15 bp, Homo sapiens
ttgctgctgctgctt

SEQ ID NO: 8170 - DNA, 15 bp, Homo sapiens
gttgctgctgctgct

SEQ ID NO: 8171 - DNA, 15 bp, Homo sapiens
agttgctgctgctgc

SEQ ID NO: 8172 - DNA, 15 bp, Homo sapiens
cagttgctgctgctg

SEQ ID NO: 8173 - DNA, 15 bp, Homo sapiens
gcagttgctgctgct

SEQ ID NO: 8174 - DNA, 15 bp, Homo sapiens
cgcagttgctgctgc

SEQ ID NO: 8175 - DNA, 15 bp, Homo sapiens
acgcagttgctgctg

SEQ ID NO: 8176 - DNA, 15 bp, Homo sapiens
cacgcagttgctgct

SEQ ID NO: 8177 - DNA, 15 bp, Homo sapiens
ccacgcagttgctgc

SEQ ID NO: 8178 - DNA, 15 bp, Homo sapiens
tccacgcagttgctg

SEQ ID NO: 8179 - DNA, 15 bp, Homo sapiens
ctccacgcagttgct

SEQ ID NO: 8180 - DNA, 15 bp, Homo sapiens
actccacgcagttgc

SEQ ID NO: 8181 - DNA, 15 bp, Homo sapiens
gactccacgcagttg

SEQ ID NO: 8182 - DNA, 15 bp, Homo sapiens
agactccacgcagtt

SEQ ID NO: 8183 - DNA, 15 bp, Homo sapiens
aagactccacgcagt

SEQ ID NO: 8184 - DNA, 15 bp, Homo sapiens
gaagactccacgcag

SEQ ID NO: 8185 - DNA, 15 bp, Homo sapiens
agaagactccacgca

SEQ ID NO: 8186 - DNA, 15 bp, Homo sapiens
aagaagactccacgc

SEQ ID NO: 8187 - DNA, 15 bp, Homo sapiens
caagaagactccacg

SEQ ID NO: 8188 - DNA, 15 bp, Homo sapiens
tcaagaagactccac

SEQ ID NO: 8189 - DNA, 15 bp, Homo sapiens
ttcaagaagactcca

SEQ ID NO: 8190 - DNA, 15 bp, Homo sapiens
gttcaagaagactcc

SEQ ID NO: 8191 - DNA, 15 bp, Homo sapiens
agttcaagaagactc

SEQ ID NO: 8192 - DNA, 15 bp, Homo sapiens
tagttcaagaagact

SEQ ID NO: 8193 - DNA, 15 bp, Homo sapiens
ttagttcaagaagac

SEQ ID NO: 8194 - DNA, 15 bp, Homo sapiens
gttagttcaagaaga

SEQ ID NO: 8195 - DNA, 15 bp, Homo sapiens
tgttagttcaagaag

SEQ ID NO: 8196 - DNA, 15 bp, Homo sapiens
gtgttagttcaagaa

SEQ ID NO: 8197 - DNA, 15 bp, Homo sapiens
agtgttagttcaaga

SEQ ID NO: 8198 - DNA, 15 bp, Homo sapiens
gagtgttagttcaag

SEQ ID NO: 8199 - DNA, 15 bp, Homo sapiens
ggagtgttagttcaa

SEQ ID NO: 8200 - DNA, 15 bp, Homo sapiens
aggagtgttagttca

SEQ ID NO: 8201 - DNA, 15 bp, Homo sapiens
taggagtgttagttc

SEQ ID NO: 8202 - DNA, 15 bp, Homo sapiens
ataggagtgttagtt

SEQ ID NO: 8203 - DNA, 15 bp, Homo sapiens
cataggagtgttagt

SEQ ID NO: 8204 - DNA, 15 bp, Homo sapiens
gcataggagtgttag

SEQ ID NO: 8205 - DNA, 15 bp, Homo sapiens
ggcataggagtgtta

SEQ ID NO: 8206 - DNA, 15 bp, Homo sapiens
gggcataggagtgtt

SEQ ID NO: 8207 - DNA, 15 bp, Homo sapiens
ggggcataggagtgt

SEQ ID NO: 8208 - DNA, 15 bp, Homo sapiens
aggggcataggagtg

SEQ ID NO: 8209 - DNA, 15 bp, Homo sapiens
gaggggcataggagt

SEQ ID NO: 8210 - DNA, 15 bp, Homo sapiens
agaggggcataggag

SEQ ID NO: 8211 - DNA, 15 bp, Homo sapiens
gagaggggcatagga

SEQ ID NO: 8212 - DNA, 15 bp, Homo sapiens
cgagaggggcatagg

SEQ ID NO: 8213 - DNA, 15 bp, Homo sapiens
ccgagaggggcatag

SEQ ID NO: 8214 - DNA, 15 bp, Homo sapiens
gccgagaggggcata

SEQ ID NO: 8215 - DNA, 15 bp, Homo sapiens
tgccgagaggggcat

SEQ ID NO: 8216 - DNA, 15 bp, Homo sapiens
gtgccgagaggggca

SEQ ID NO: 8217 - DNA, 15 bp, Homo sapiens
tgtgccgagaggggc

SEQ ID NO: 8218 - DNA, 15 bp, Homo sapiens
ttgtgccgagagggg

SEQ ID NO: 8219 - DNA, 15 bp, Homo sapiens
tttgtgccgagaggg

SEQ ID NO: 8220 - DNA, 15 bp, Homo sapiens
ttttgtgccgagagg

SEQ ID NO: 8221 - DNA, 15 bp, Homo sapiens
attttgtgccgagag

SEQ ID NO: 8222 - DNA, 15 bp, Homo sapiens
cattttgtgccgaga

SEQ ID NO: 8223 - DNA, 15 bp, Homo sapiens
tcattttgtgccgag

SEQ ID NO: 8224 - DNA, 15 bp, Homo sapiens
gtcattttgtgccga

SEQ ID NO: 8225 - DNA, 15 bp, Homo sapiens
cgtcattttgtgccg

SEQ ID NO: 8226 - DNA, 15 bp, Homo sapiens
acgtcattttgtgcc

SEQ ID NO: 8227 - DNA, 15 bp, Homo sapiens
cacgtcattttgtgc

SEQ ID NO: 8228 - DNA, 15 bp, Homo sapiens
acacgtcattttgtg

SEQ ID NO: 8229 - DNA, 15 bp, Homo sapiens
gacacgtcattttgt

SEQ ID NO: 8230 - DNA, 15 bp, Homo sapiens
ggacacgtcattttg

SEQ ID NO: 8231 - DNA, 15 bp, Homo sapiens
gggacacgtcatttt

SEQ ID NO: 8232 - DNA, 15 bp, Homo sapiens
ggggacacgtcattt

SEQ ID NO: 8233 - DNA, 15 bp, Homo sapiens
gggggacacgtcatt

SEQ ID NO: 8234 - DNA, 15 bp, Homo sapiens
ggggggacacgtcat

SEQ ID NO: 8235 - DNA, 15 bp, Homo sapiens
aggggggacacgtca

SEQ ID NO: 8236 - DNA, 15 bp, Homo sapiens
aaggggggacacgtc

SEQ ID NO: 8237 - DNA, 15 bp, Homo sapiens
caaggggggacacgt

SEQ ID NO: 8238 - DNA, 15 bp, Homo sapiens
gcaaggggggacacg

SEQ ID NO: 8239 - DNA, 15 bp, Homo sapiens
agcaaggggggacac

SEQ ID NO: 8240 - DNA, 15 bp, Homo sapiens
aagcaaggggggaca

SEQ ID NO: 8241 - DNA, 15 bp, Homo sapiens
gaagcaaggggggac

SEQ ID NO: 8242 - DNA, 15 bp, Homo sapiens
ggaagcaagggggga

SEQ ID NO: 8243 - DNA, 15 bp, Homo sapiens
gggaagcaagggggg

SEQ ID NO: 8244 - DNA, 15 bp, Homo sapiens
ggggaagcaaggggg

SEQ ID NO: 8245 - DNA, 15 bp, Homo sapiens
aggggaagcaagggg

SEQ ID NO: 8246 - DNA, 15 bp, Homo sapiens
aaggggaagcaaggg

SEQ ID NO: 8247 - DNA, 15 bp, Homo sapiens
gaaggggaagcaagg

SEQ ID NO: 8248 - DNA, 15 bp, Homo sapiens
tgaaggggaagcaag

SEQ ID NO: 8249 - DNA, 15 bp, Homo sapiens
gtgaaggggaagcaa

SEQ ID NO: 8250 - DNA, 15 bp, Homo sapiens
tgtgaaggggaagca

SEQ ID NO: 8251 - DNA, 15 bp, Homo sapiens
atgtgaaggggaagc

SEQ ID NO: 8252 - DNA, 15 bp, Homo sapiens
aatgtgaaggggaag

SEQ ID NO: 8253 - DNA, 15 bp, Homo sapiens
aaatgtgaaggggaa

SEQ ID NO: 8254 - DNA, 15 bp, Homo sapiens
gaaatgtgaagggga

SEQ ID NO: 8255 - DNA, 15 bp, Homo sapiens
ggaaatgtgaagggg

SEQ ID NO: 8256 - DNA, 15 bp, Homo sapiens
tggaaatgtgaaggg

SEQ ID NO: 8257 - DNA, 15 bp, Homo sapiens
gtggaaatgtgaagg

SEQ ID NO: 8258 - DNA, 15 bp, Homo sapiens
ggtggaaatgtgaag

SEQ ID NO: 8259 - DNA, 15 bp, Homo sapiens
gggtggaaatgtgaa

SEQ ID NO: 8260 - DNA, 15 bp, Homo sapiens
tgggtggaaatgtga

SEQ ID NO: 8261 - DNA, 15 bp, Homo sapiens
atgggtggaaatgtg

SEQ ID NO: 8262 - DNA, 15 bp, Homo sapiens
catgggtggaaatgt

SEQ ID NO: 8263 - DNA, 15 bp, Homo sapiens
gcatgggtggaaatg

SEQ ID NO: 8264 - DNA, 15 bp, Homo sapiens
ggcatgggtggaaat

SEQ ID NO: 8265 - DNA, 15 bp, Homo sapiens
aggcatgggtggaaa

SEQ ID NO: 8266 - DNA, 15 bp, Homo sapiens
taggcatgggtggaa

SEQ ID NO: 8267 - DNA, 15 bp, Homo sapiens
ataggcatgggtgga

SEQ ID NO: 8268 - DNA, 15 bp, Homo sapiens
aataggcatgggtgg

SEQ ID NO: 8269 - DNA, 15 bp, Homo sapiens
taataggcatgggtg

SEQ ID NO: 8270 - DNA, 15 bp, Homo sapiens
gtaataggcatgggt

SEQ ID NO: 8271 - DNA, 15 bp, Homo sapiens
tgtaataggcatggg

SEQ ID NO: 8272 - DNA, 15 bp, Homo sapiens
ttgtaataggcatgg

SEQ ID NO: 8273 - DNA, 15 bp, Homo sapiens
gttgtaataggcatg

SEQ ID NO: 8274 - DNA, 15 bp, Homo sapiens
tgttgtaataggcat

SEQ ID NO: 8275 - DNA, 15 bp, Homo sapiens
atgttgtaataggca

SEQ ID NO: 8276 - DNA, 15 bp, Homo sapiens
gatgttgtaataggc

SEQ ID NO: 8277 - DNA, 15 bp, Homo sapiens
ggatgttgtaatagg

SEQ ID NO: 8278 - DNA, 15 bp, Homo sapiens
cggatgttgtaatag

SEQ ID NO: 8279 - DNA, 15 bp, Homo sapiens
acggatgttgtaata

SEQ ID NO: 8280 - DNA, 15 bp, Homo sapiens
gacggatgttgtaat

SEQ ID NO: 8281 - DNA, 15 bp, Homo sapiens
agacggatgttgtaa

SEQ ID NO: 8282 - DNA, 15 bp, Homo sapiens
cagacggatgttgta

SEQ ID NO: 8283 - DNA, 15 bp, Homo sapiens
acagacggatgttgt

SEQ ID NO: 8284 - DNA, 15 bp, Homo sapiens
gacagacggatgttg

SEQ ID NO: 8285 - DNA, 15 bp, Homo sapiens
agacagacggatgtt

SEQ ID NO: 8286 - DNA, 15 bp, Homo sapiens
gagacagacggatgt

SEQ ID NO: 8287 - DNA, 15 bp, Homo sapiens
ggagacagacggatg

SEQ ID NO: 8288 - DNA, 15 bp, Homo sapiens
gggagacagacggat

SEQ ID NO: 8289 - DNA, 15 bp, Homo sapiens
ggggagacagacgga

SEQ ID NO: 8290 - DNA, 15 bp, Homo sapiens
tggggagacagacgg

SEQ ID NO: 8291 - DNA, 15 bp, Homo sapiens
gtggggagacagacg

SEQ ID NO: 8292 - DNA, 15 bp, Homo sapiens
agtggggagacagac

SEQ ID NO: 8293 - DNA, 15 bp, Homo sapiens
tagtggggagacaga

SEQ ID NO: 8294 - DNA, 15 bp, Homo sapiens
gtagtggggagacag

SEQ ID NO: 8295 - DNA, 15 bp, Homo sapiens
tgtagtggggagaca

SEQ ID NO: 8296 - DNA, 15 bp, Homo sapiens
gtgtagtggggagac

SEQ ID NO: 8297 - DNA, 15 bp, Homo sapiens
ggtgtagtggggaga

SEQ ID NO: 8298 - DNA, 15 bp, Homo sapiens
cggtgtagtggggag

SEQ ID NO: 8299 - DNA, 15 bp, Homo sapiens
ccggtgtagtgggga

SEQ ID NO: 8300 - DNA, 15 bp, Homo sapiens
cccggtgtagtgggg

SEQ ID NO: 8301 - DNA, 15 bp, Homo sapiens
tcccggtgtagtggg

SEQ ID NO: 8302 - DNA, 15 bp, Homo sapiens
ctcccggtgtagtgg

SEQ ID NO: 8303 - DNA, 15 bp, Homo sapiens
gctcccggtgtagtg

SEQ ID NO: 8304 - DNA, 15 bp, Homo sapiens
agctcccggtgtagt

SEQ ID NO: 8305 - DNA, 15 bp, Homo sapiens
aagctcccggtgtag

SEQ ID NO: 8306 - DNA, 15 bp, Homo sapiens
caagctcccggtgta

SEQ ID NO: 8307 - DNA, 15 bp, Homo sapiens
tcaagctcccggtgt

SEQ ID NO: 8308 - DNA, 15 bp, Homo sapiens
ctcaagctcccggtg

SEQ ID NO: 8309 - DNA, 15 bp, Homo sapiens
tctcaagctcccggt

SEQ ID NO: 8310 - DNA, 15 bp, Homo sapiens
ctctcaagctcccgg

SEQ ID NO: 8311 - DNA, 15 bp, Homo sapiens
tctctcaagctcccg

SEQ ID NO: 8312 - DNA, 15 bp, Homo sapiens
ttctctcaagctccc

SEQ ID NO: 8313 - DNA, 15 bp, Homo sapiens
cttctctcaagctcc

SEQ ID NO: 8314 - DNA, 15 bp, Homo sapiens
tcttctctcaagctc

SEQ ID NO: 8315 - DNA, 15 bp, Homo sapiens
ctcttctctcaagct

SEQ ID NO: 8316 - DNA, 15 bp, Homo sapiens
cctcttctctcaagc

SEQ ID NO: 8317 - DNA, 15 bp, Homo sapiens
gcctcttctctcaag

SEQ ID NO: 8318 - DNA, 15 bp, Homo sapiens
ggcctcttctctcaa

SEQ ID NO: 8319 - DNA, 15 bp, Homo sapiens
tggcctcttctctca

SEQ ID NO: 8320 - DNA, 15 bp, Homo sapiens
atggcctcttctctc

SEQ ID NO: 8321 - DNA, 15 bp, Homo sapiens
catggcctcttctct

SEQ ID NO: 8322 - DNA, 15 bp, Homo sapiens
acatggcctcttctc

SEQ ID NO: 8323 - DNA, 15 bp, Homo sapiens
gacatggcctcttct

SEQ ID NO: 8324 - DNA, 15 bp, Homo sapiens
agacatggcctcttc

SEQ ID NO: 8325 - DNA, 15 bp, Homo sapiens
gagacatggcctctt

SEQ ID NO: 8326 - DNA, 15 bp, Homo sapiens
agagacatggcctct

SEQ ID NO: 8327 - DNA, 15 bp, Homo sapiens
tagagacatggcctc

SEQ ID NO: 8328 - DNA, 15 bp, Homo sapiens
ctagagacatggcct

SEQ ID NO: 8329 - DNA, 15 bp, Homo sapiens
gctagagacatggcc

SEQ ID NO: 8330 - DNA, 15 bp, Homo sapiens
tgctagagacatggc

SEQ ID NO: 8331 - DNA, 15 bp, Homo sapiens
gtgctagagacatgg

SEQ ID NO: 8332 - DNA, 15 bp, Homo sapiens
ggtgctagagacatg

SEQ ID NO: 8333 - DNA, 15 bp, Homo sapiens
gggtgctagagacat

SEQ ID NO: 8334 - DNA, 15 bp, Homo sapiens
tgggtgctagagaca

SEQ ID NO: 8335 - DNA, 15 bp, Homo sapiens
ctgggtgctagagac

SEQ ID NO: 8336 - DNA, 15 bp, Homo sapiens
gctgggtgctagaga

SEQ ID NO: 8337 - DNA, 15 bp, Homo sapiens
tgctgggtgctagag

SEQ ID NO: 8338 - DNA, 15 bp, Homo sapiens
gtgctgggtgctaga

SEQ ID NO: 8339 - DNA, 15 bp, Homo sapiens
tgtgctgggtgctag

SEQ ID NO: 8340 - DNA, 15 bp, Homo sapiens
ctgtgctgggtgcta

SEQ ID NO: 8341 - DNA, 15 bp, Homo sapiens
cctgtgctgggtgct

SEQ ID NO: 8342 - DNA, 15 bp, Homo sapiens
ccctgtgctgggtgc

SEQ ID NO: 8343 - DNA, 15 bp, Homo sapiens
tccctgtgctgggtg

SEQ ID NO: 8344 - DNA, 15 bp, Homo sapiens
gtccctgtgctgggt

SEQ ID NO: 8345 - DNA, 15 bp, Homo sapiens
agtccctgtgctggg

SEQ ID NO: 8346 - DNA, 15 bp, Homo sapiens
cagtccctgtgctgg

SEQ ID NO: 8347 - DNA, 15 bp, Homo sapiens
ccagtccctgtgctg

SEQ ID NO: 8348 - DNA, 15 bp, Homo sapiens
gccagtccctgtgct

SEQ ID NO: 8349 - DNA, 15 bp, Homo sapiens
tgccagtccctgtgc

SEQ ID NO: 8350 - DNA, 15 bp, Homo sapiens
gtgccagtccctgtg

SEQ ID NO: 8351 - DNA, 15 bp, Homo sapiens
tgtgccagtccctgt

SEQ ID NO: 8352 - DNA, 15 bp, Homo sapiens
gtgtgccagtccctg

SEQ ID NO: 8353 - DNA, 15 bp, Homo sapiens
tgtgtgccagtccct

SEQ ID NO: 8354 - DNA, 15 bp, Homo sapiens
atgtgtgccagtccc

SEQ ID NO: 8355 - DNA, 15 bp, Homo sapiens
catgtgtgccagtcc

SEQ ID NO: 8356 - DNA, 15 bp, Homo sapiens
tcatgtgtgccagtc

SEQ ID NO: 8357 - DNA, 15 bp, Homo sapiens
ctcatgtgtgccagt

SEQ ID NO: 8358 - DNA, 15 bp, Homo sapiens
tctcatgtgtgccag

SEQ ID NO: 8359 - DNA, 15 bp, Homo sapiens
atctcatgtgtgcca

SEQ ID NO: 8360 - DNA, 15 bp, Homo sapiens
catctcatgtgtgcc

SEQ ID NO: 8361 - DNA, 15 bp, Homo sapiens
gcatctcatgtgtgc

SEQ ID NO: 8362 - DNA, 15 bp, Homo sapiens
agcatctcatgtgtg

SEQ ID NO: 8363 - DNA, 15 bp, Homo sapiens
gagcatctcatgtgt

SEQ ID NO: 8364 - DNA, 15 bp, Homo sapiens
ggagcatctcatgtg

SEQ ID NO: 8365 - DNA, 15 bp, Homo sapiens
aggagcatctcatgt

SEQ ID NO: 8366 - DNA, 15 bp, Homo sapiens
caggagcatctcatg

SEQ ID NO: 8367 - DNA, 15 bp, Homo sapiens
gcaggagcatctcat

SEQ ID NO: 8368 - DNA, 15 bp, Homo sapiens
agcaggagcatctca

SEQ ID NO: 8369 - DNA, 15 bp, Homo sapiens
aagcaggagcatctc

SEQ ID NO: 8370 - DNA, 15 bp, Homo sapiens
gaagcaggagcatct

SEQ ID NO: 8371 - DNA, 15 bp, Homo sapiens
agaagcaggagcatc

SEQ ID NO: 8372 - DNA, 15 bp, Homo sapiens
aagaagcaggagcat

SEQ ID NO: 8373 - DNA, 15 bp, Homo sapiens
taagaagcaggagca

SEQ ID NO: 8374 - DNA, 15 bp, Homo sapiens
ttaagaagcaggagc

SEQ ID NO: 8375 - DNA, 15 bp, Homo sapiens
tttaagaagcaggag

SEQ ID NO: 8376 - DNA, 15 bp, Homo sapiens
atttaagaagcagga

SEQ ID NO: 8377 - DNA, 15 bp, Homo sapiens
catttaagaagcagg

SEQ ID NO: 8378 - DNA, 15 bp, Homo sapiens
gcatttaagaagcag

SEQ ID NO: 8379 - DNA, 15 bp, Homo sapiens
agcatttaagaagca

SEQ ID NO: 8380 - DNA, 15 bp, Homo sapiens
cagcatttaagaagc

SEQ ID NO: 8381 - DNA, 15 bp, Homo sapiens
tcagcatttaagaag

SEQ ID NO: 8382 - DNA, 15 bp, Homo sapiens
ctcagcatttaagaa

SEQ ID NO: 8383 - DNA, 15 bp, Homo sapiens
tctcagcatttaaga

SEQ ID NO: 8384 - DNA, 15 bp, Homo sapiens
ttctcagcatttaag

SEQ ID NO: 8385 - DNA, 15 bp, Homo sapiens
attctcagcatttaa

SEQ ID NO: 8386 - DNA, 15 bp, Homo sapiens
cattctcagcattta

SEQ ID NO: 8387 - DNA, 15 bp, Homo sapiens
tcattctcagcattt

SEQ ID NO: 8388 - DNA, 15 bp, Homo sapiens
ttcattctcagcatt

SEQ ID NO: 8389 - DNA, 15 bp, Homo sapiens
cttcattctcagcat

SEQ ID NO: 8390 - DNA, 15 bp, Homo sapiens
ccttcattctcagca

SEQ ID NO: 8391 - DNA, 15 bp, Homo sapiens
tccttcattctcagc

SEQ ID NO: 8392 - DNA, 15 bp, Homo sapiens
ctccttcattctcag

SEQ ID NO: 8393 - DNA, 15 bp, Homo sapiens
cctccttcattctca

SEQ ID NO: 8394 - DNA, 15 bp, Homo sapiens
tcctccttcattctc

SEQ ID NO: 8395 - DNA, 15 bp, Homo sapiens
gtcctccttcattct

SEQ ID NO: 8396 - DNA, 15 bp, Homo sapiens
tgtcctccttcattc

SEQ ID NO: 8397 - DNA, 15 bp, Homo sapiens
atgtcctccttcatt

SEQ ID NO: 8398 - DNA, 15 bp, Homo sapiens
gatgtcctccttcat

SEQ ID NO: 8399 - DNA, 15 bp, Homo sapiens
tgatgtcctccttca

SEQ ID NO: 8400 - DNA, 15 bp, Homo sapiens
ctgatgtcctccttc

SEQ ID NO: 8401 - DNA, 15 bp, Homo sapiens
tctgatgtcctcctt

SEQ ID NO: 8402 - DNA, 15 bp, Homo sapiens
ctctgatgtcctcct

SEQ ID NO: 8403 - DNA, 15 bp, Homo sapiens
cctctgatgtcctcc

SEQ ID NO: 8404 - DNA, 15 bp, Homo sapiens
ccctctgatgtcctc

SEQ ID NO: 8405 - DNA, 15 bp, Homo sapiens
cccctctgatgtcct

SEQ ID NO: 8406 - DNA, 15 bp, Homo sapiens
gcccctctgatgtcc

SEQ ID NO: 8407 - DNA, 15 bp, Homo sapiens
ggcccctctgatgtc

SEQ ID NO: 8408 - DNA, 15 bp, Homo sapiens
gggcccctctgatgt

SEQ ID NO: 8409 - DNA, 15 bp, Homo sapiens
cgggcccctctgatg

SEQ ID NO: 8410 - DNA, 15 bp, Homo sapiens
ccgggcccctctgat

SEQ ID NO: 8411 - DNA, 15 bp, Homo sapiens
cccgggcccctctga

SEQ ID NO: 8412 - DNA, 15 bp, Homo sapiens
gcccgggcccctctg

SEQ ID NO: 8413 - DNA, 15 bp, Homo sapiens
ggcccgggcccctct

SEQ ID NO: 8414 - DNA, 15 bp, Homo sapiens
gggcccgggcccctc

SEQ ID NO: 8415 - DNA, 15 bp, Homo sapiens
ggggcccgggcccct

SEQ ID NO: 8416 - DNA, 15 bp, Homo sapiens
aggggcccgggcccc

SEQ ID NO: 8417 - DNA, 15 bp, Homo sapiens
aaggggcccgggccc

SEQ ID NO: 8418 - DNA, 15 bp, Homo sapiens
gaaggggcccgggcc

SEQ ID NO: 8419 - DNA, 15 bp, Homo sapiens
ggaaggggcccgggc

SEQ ID NO: 8420 - DNA, 15 bp, Homo sapiens
gggaaggggcccggg

SEQ ID NO: 8421 - DNA, 15 bp, Homo sapiens
tgggaaggggcccgg

SEQ ID NO: 8422 - DNA, 15 bp, Homo sapiens
ttgggaaggggcccg

SEQ ID NO: 8423 - DNA, 15 bp, Homo sapiens
tttgggaaggggccc

SEQ ID NO: 8424 - DNA, 15 bp, Homo sapiens
ttttgggaaggggcc

SEQ ID NO: 8425 - DNA, 15 bp, Homo sapiens
tttttgggaaggggc

SEQ ID NO: 8426 - DNA, 15 bp, Homo sapiens
ctttttgggaagggg

SEQ ID NO: 8427 - DNA, 15 bp, Homo sapiens
cctttttgggaaggg

SEQ ID NO: 8428 - DNA, 15 bp, Homo sapiens
gcctttttgggaagg

SEQ ID NO: 8429 - DNA, 15 bp, Homo sapiens
ggcctttttgggaag

SEQ ID NO: 8430 - DNA, 15 bp, Homo sapiens
tggcctttttgggaa

SEQ ID NO: 8431 - DNA, 15 bp, Homo sapiens
ttggcctttttggga

SEQ ID NO: 8432 - DNA, 15 bp, Homo sapiens
gttggcctttttggg

SEQ ID NO: 8433 - DNA, 15 bp, Homo sapiens
agttggcctttttgg

SEQ ID NO: 8434 - DNA, 15 bp, Homo sapiens
gagttggcctttttg

SEQ ID NO: 8435 - DNA, 15 bp, Homo sapiens
ggagttggccttttt

SEQ ID NO: 8436 - DNA, 15 bp, Homo sapiens
aggagttggcctttt

SEQ ID NO: 8437 - DNA, 15 bp, Homo sapiens
taggagttggccttt

SEQ ID NO: 8438 - DNA, 15 bp, Homo sapiens
ctaggagttggcctt

SEQ ID NO: 8439 - DNA, 15 bp, Homo sapiens
cctaggagttggcct

SEQ ID NO: 8440 - DNA, 15 bp, Homo sapiens
acctaggagttggcc

SEQ ID NO: 8441 - DNA, 15 bp, Homo sapiens
gacctaggagttggc

SEQ ID NO: 8442 - DNA, 15 bp, Homo sapiens
agacctaggagttgg

SEQ ID NO: 8443 - DNA, 15 bp, Homo sapiens
cagacctaggagttg

SEQ ID NO: 8444 - DNA, 15 bp, Homo sapiens
gcagacctaggagtt

SEQ ID NO: 8445 - DNA, 15 bp, Homo sapiens
tgcagacctaggagt

SEQ ID NO: 8446 - DNA, 15 bp, Homo sapiens
atgcagacctaggag

SEQ ID NO: 8447 - DNA, 15 bp, Homo sapiens
gatgcagacctagga

SEQ ID NO: 8448 - DNA, 15 bp, Homo sapiens
ggatgcagacctagg

SEQ ID NO: 8449 - DNA, 15 bp, Homo sapiens
aggatgcagacctag

SEQ ID NO: 8450 - DNA, 15 bp, Homo sapiens
caggatgcagaccta

SEQ ID NO: 8451 - DNA, 15 bp, Homo sapiens
gcaggatgcagacct

SEQ ID NO: 8452 - DNA, 15 bp, Homo sapiens
agcaggatgcagacc

SEQ ID NO: 8453 - DNA, 15 bp, Homo sapiens
aagcaggatgcagac

SEQ ID NO: 8454 - DNA, 15 bp, Homo sapiens
caagcaggatgcaga

SEQ ID NO: 8455 - DNA, 15 bp, Homo sapiens
ccaagcaggatgcag

SEQ ID NO: 8456 - DNA, 15 bp, Homo sapiens
accaagcaggatgca

SEQ ID NO: 8457 - DNA, 15 bp, Homo sapiens
gaccaagcaggatgc

SEQ ID NO: 8458 - DNA, 15 bp, Homo sapiens
agaccaagcaggatg

SEQ ID NO: 8459 - DNA, 15 bp, Homo sapiens
gagaccaagcaggat

SEQ ID NO: 8460 - DNA, 15 bp, Homo sapiens
ggagaccaagcagga

SEQ ID NO: 8461 - DNA, 15 bp, Homo sapiens
tggagaccaagcagg

SEQ ID NO: 8462 - DNA, 15 bp, Homo sapiens
atggagaccaagcag

SEQ ID NO: 8463 - DNA, 15 bp, Homo sapiens
catggagaccaagca

SEQ ID NO: 8464 - DNA, 15 bp, Homo sapiens
tcatggagaccaagc

SEQ ID NO: 8465 - DNA, 15 bp, Homo sapiens
gtcatggagaccaag

SEQ ID NO: 8466 - DNA, 15 bp, Homo sapiens
agtcatggagaccaa

SEQ ID NO: 8467 - DNA, 15 bp, Homo sapiens
tagtcatggagacca

SEQ ID NO: 8468 - DNA, 15 bp, Homo sapiens
ttagtcatggagacc

SEQ ID NO: 8469 - DNA, 15 bp, Homo sapiens
attagtcatggagac

SEQ ID NO: 8470 - DNA, 15 bp, Homo sapiens
gattagtcatggaga

SEQ ID NO: 8471 - DNA, 15 bp, Homo sapiens
ggattagtcatggag

SEQ ID NO: 8472 - DNA, 15 bp, Homo sapiens
gggattagtcatgga

SEQ ID NO: 8473 - DNA, 15 bp, Homo sapiens
cgggattagtcatgg

SEQ ID NO: 8474 - DNA, 15 bp, Homo sapiens
acgggattagtcatg

SEQ ID NO: 8475 - DNA, 15 bp, Homo sapiens
gacgggattagtcat

SEQ ID NO: 8476 - DNA, 15 bp, Homo sapiens
agacgggattagtca

SEQ ID NO: 8477 - DNA, 15 bp, Homo sapiens
aagacgggattagtc

SEQ ID NO: 8478 - DNA, 15 bp, Homo sapiens
caagacgggattagt

SEQ ID NO: 8479 - DNA, 15 bp, Homo sapiens
acaagacgggattag

SEQ ID NO: 8480 - DNA, 15 bp, Homo sapiens
gacaagacgggatta

SEQ ID NO: 8481 - DNA, 15 bp, Homo sapiens
ggacaagacgggatt

SEQ ID NO: 8482 - DNA, 15 bp, Homo sapiens
aggacaagacgggat

SEQ ID NO: 8483 - DNA, 15 bp, Homo sapiens
gaggacaagacggga

SEQ ID NO: 8484 - DNA, 15 bp, Homo sapiens
tgaggacaagacggg

SEQ ID NO: 8485 - DNA, 15 bp, Homo sapiens
atgaggacaagacgg

SEQ ID NO: 8486 - DNA, 15 bp, Homo sapiens
aatgaggacaagacg

SEQ ID NO: 8487 - DNA, 15 bp, Homo sapiens
aaatgaggacaagac

SEQ ID NO: 8488 - DNA, 15 bp, Homo sapiens
aaaatgaggacaaga

SEQ ID NO: 8489 - DNA, 15 bp, Homo sapiens
gaaaatgaggacaag

SEQ ID NO: 8490 - DNA, 15 bp, Homo sapiens
agaaaatgaggacaa

SEQ ID NO: 8491 - DNA, 15 bp, Homo sapiens
cagaaaatgaggaca

SEQ ID NO: 8492 - DNA, 15 bp, Homo sapiens
acagaaaatgaggac

SEQ ID NO: 8493 - DNA, 15 bp, Homo sapiens
aacagaaaatgagga

SEQ ID NO: 8494 - DNA, 15 bp, Homo sapiens
aaacagaaaatgagg

SEQ ID NO: 8495 - DNA, 15 bp, Homo sapiens
aaaacagaaaatgag

SEQ ID NO: 8496 - DNA, 15 bp, Homo sapiens
taaaacagaaaatga

SEQ ID NO: 8497 - DNA, 15 bp, Homo sapiens
ttaaaacagaaaatg

SEQ ID NO: 8498 - DNA, 15 bp, Homo sapiens
tttaaaacagaaaat

SEQ ID NO: 8499 - DNA, 15 bp, Homo sapiens
ctttaaaacagaaaa

SEQ ID NO: 8500 - DNA, 15 bp, Homo sapiens
cctttaaaacagaaa

SEQ ID NO: 8501 - DNA, 15 bp, Homo sapiens
gcctttaaaacagaa

SEQ ID NO: 8502 - DNA, 15 bp, Homo sapiens
ggcctttaaaacaga

SEQ ID NO: 8503 - DNA, 15 bp, Homo sapiens
tggcctttaaaacag

SEQ ID NO: 8504 - DNA, 15 bp, Homo sapiens
atggcctttaaaaca

SEQ ID NO: 8505 - DNA, 15 bp, Homo sapiens
aatggcctttaaaac

SEQ ID NO: 8506 - DNA, 15 bp, Homo sapiens
aaatggcctttaaaa

SEQ ID NO: 8507 - DNA, 15 bp, Homo sapiens
gaaatggcctttaaa

SEQ ID NO: 8508 - DNA, 15 bp, Homo sapiens
ggaaatggcctttaa

SEQ ID NO: 8509 - DNA, 15 bp, Homo sapiens
gggaaatggccttta

SEQ ID NO: 8510 - DNA, 15 bp, Homo sapiens
ggggaaatggccttt

SEQ ID NO: 8511 - DNA, 15 bp, Homo sapiens
tggggaaatggcctt

SEQ ID NO: 8512 - DNA, 15 bp, Homo sapiens
ttggggaaatggcct

SEQ ID NO: 8513 - DNA, 15 bp, Homo sapiens
gttggggaaatggcc

SEQ ID NO: 8514 - DNA, 15 bp, Homo sapiens
tgttggggaaatggc

SEQ ID NO: 8515 - DNA, 15 bp, Homo sapiens
ttgttggggaaatgg

SEQ ID NO: 8516 - DNA, 15 bp, Homo sapiens
cttgttggggaaatg

SEQ ID NO: 8517 - DNA, 15 bp, Homo sapiens
ccttgttggggaaat

SEQ ID NO: 8518 - DNA, 15 bp, Homo sapiens
gccttgttggggaaa

SEQ ID NO: 8519 - DNA, 15 bp, Homo sapiens
cgccttgttggggaa

SEQ ID NO: 8520 - DNA, 15 bp, Homo sapiens
tcgccttgttgggga

SEQ ID NO: 8521 - DNA, 15 bp, Homo sapiens
atcgccttgttgggg

SEQ ID NO: 8522 - DNA, 15 bp, Homo sapiens
catcgccttgttggg

SEQ ID NO: 8523 - DNA, 15 bp, Homo sapiens
gcatcgccttgttgg

SEQ ID NO: 8524 - DNA, 15 bp, Homo sapiens
ggcatcgccttgttg

SEQ ID NO: 8525 - DNA, 15 bp, Homo sapiens
gggcatcgccttgtt

SEQ ID NO: 8526 - DNA, 15 bp, Homo sapiens
agggcatcgccttgt

SEQ ID NO: 8527 - DNA, 15 bp, Homo sapiens
gagggcatcgccttg

SEQ ID NO: 8528 - DNA, 15 bp, Homo sapiens
tgagggcatcgcctt

SEQ ID NO: 8529 - DNA, 15 bp, Homo sapiens
ctgagggcatcgcct

SEQ ID NO: 8530 - DNA, 15 bp, Homo sapiens
gctgagggcatcgcc

SEQ ID NO: 8531 - DNA, 15 bp, Homo sapiens
tgctgagggcatcgc

SEQ ID NO: 8532 - DNA, 15 bp, Homo sapiens
ctgctgagggcatcg

SEQ ID NO: 8533 - DNA, 15 bp, Homo sapiens
cctgctgagggcatc

SEQ ID NO: 8534 - DNA, 15 bp, Homo sapiens
tcctgctgagggcat

SEQ ID NO: 8535 - DNA, 15 bp, Homo sapiens
ttcctgctgagggca

SEQ ID NO: 8536 - DNA, 15 bp, Homo sapiens
attcctgctgagggc

SEQ ID NO: 8537 - DNA, 15 bp, Homo sapiens
cattcctgctgaggg

SEQ ID NO: 8538 - DNA, 15 bp, Homo sapiens
gcattcctgctgagg

SEQ ID NO: 8539 - DNA, 15 bp, Homo sapiens
agcattcctgctgag

SEQ ID NO: 8540 - DNA, 15 bp, Homo sapiens
cagcattcctgctga

SEQ ID NO: 8541 - DNA, 15 bp, Homo sapiens
gcagcattcctgctg

SEQ ID NO: 8542 - DNA, 15 bp, Homo sapiens
ggcagcattcctgct

SEQ ID NO: 8543 - DNA, 15 bp, Homo sapiens
cggcagcattcctgc

SEQ ID NO: 8544 - DNA, 15 bp, Homo sapiens
acggcagcattcctg

SEQ ID NO: 8545 - DNA, 15 bp, Homo sapiens
cacggcagcattcct

SEQ ID NO: 8546 - DNA, 15 bp, Homo sapiens
ccacggcagcattcc

SEQ ID NO: 8547 - DNA, 15 bp, Homo sapiens
gccacggcagcattc

SEQ ID NO: 8548 - DNA, 15 bp, Homo sapiens
agccacggcagcatt

SEQ ID NO: 8549 - DNA, 15 bp, Homo sapiens
gagccacggcagcat

SEQ ID NO: 8550 - DNA, 15 bp, Homo sapiens
ggagccacggcagca

SEQ ID NO: 8551 - DNA, 15 bp, Homo sapiens
tggagccacggcagc

SEQ ID NO: 8552 - DNA, 15 bp, Homo sapiens
ctggagccacggcag

SEQ ID NO: 8553 - DNA, 15 bp, Homo sapiens
cctggagccacggca

SEQ ID NO: 8554 - DNA, 15 bp, Homo sapiens
ccctggagccacggc

SEQ ID NO: 8555 - DNA, 15 bp, Homo sapiens
cccctggagccacgg

SEQ ID NO: 8556 - DNA, 15 bp, Homo sapiens
tcccctggagccacg

SEQ ID NO: 8557 - DNA, 15 bp, Homo sapiens
atcccctggagccac

SEQ ID NO: 8558 - DNA, 15 bp, Homo sapiens
gatcccctggagcca

SEQ ID NO: 8559 - DNA, 15 bp, Homo sapiens
agatcccctggagcc

SEQ ID NO: 8560 - DNA, 15 bp, Homo sapiens
aagatcccctggagc

SEQ ID NO: 8561 - DNA, 15 bp, Homo sapiens
gaagatcccctggag

SEQ ID NO: 8562 - DNA, 15 bp, Homo sapiens
agaagatcccctgga

SEQ ID NO: 8563 - DNA, 15 bp, Homo sapiens
cagaagatcccctgg

SEQ ID NO: 8564 - DNA, 15 bp, Homo sapiens
gcagaagatcccctg

SEQ ID NO: 8565 - DNA, 15 bp, Homo sapiens
tgcagaagatcccct

SEQ ID NO: 8566 - DNA, 15 bp, Homo sapiens
ttgcagaagatcccc

SEQ ID NO: 8567 - DNA, 15 bp, Homo sapiens
attgcagaagatccc

SEQ ID NO: 8568 - DNA, 15 bp, Homo sapiens
cattgcagaagatcc

SEQ ID NO: 8569 - DNA, 15 bp, Homo sapiens
acattgcagaagatc

SEQ ID NO: 8570 - DNA, 15 bp, Homo sapiens
cacattgcagaagat

SEQ ID NO: 8571 - DNA, 15 bp, Homo sapiens
tcacattgcagaaga

SEQ ID NO: 8572 - DNA, 15 bp, Homo sapiens
ttcacattgcagaag

SEQ ID NO: 8573 - DNA, 15 bp, Homo sapiens
gttcacattgcagaa

SEQ ID NO: 8574 - DNA, 15 bp, Homo sapiens
tgttcacattgcaga

SEQ ID NO: 8575 - DNA, 15 bp, Homo sapiens
ttgttcacattgcag

SEQ ID NO: 8576 - DNA, 15 bp, Homo sapiens
attgttcacattgca

SEQ ID NO: 8577 - DNA, 15 bp, Homo sapiens
gattgttcacattgc

SEQ ID NO: 8578 - DNA, 15 bp, Homo sapiens
ggattgttcacattg

SEQ ID NO: 8579 - DNA, 15 bp, Homo sapiens
gggattgttcacatt

SEQ ID NO: 8580 - DNA, 15 bp, Homo sapiens
agggattgttcacat

SEQ ID NO: 8581 - DNA, 15 bp, Homo sapiens
cagggattgttcaca

SEQ ID NO: 8582 - DNA, 15 bp, Homo sapiens
acagggattgttcac

SEQ ID NO: 8583 - DNA, 15 bp, Homo sapiens
aacagggattgttca

SEQ ID NO: 8584 - DNA, 15 bp, Homo sapiens
aaacagggattgttc

SEQ ID NO: 8585 - DNA, 15 bp, Homo sapiens
aaaacagggattgtt

SEQ ID NO: 8586 - DNA, 15 bp, Homo sapiens
gaaaacagggattgt

SEQ ID NO: 8587 - DNA, 15 bp, Homo sapiens
tgaaaacagggattg

SEQ ID NO: 8588 - DNA, 15 bp, Homo sapiens
ttgaaaacagggatt

SEQ ID NO: 8589 - DNA, 15 bp, Homo sapiens
tttgaaaacagggat

SEQ ID NO: 8590 - DNA, 15 bp, Homo sapiens
ctttgaaaacaggga

SEQ ID NO: 8591 - DNA, 15 bp, Homo sapiens
gctttgaaaacaggg

SEQ ID NO: 8592 - DNA, 15 bp, Homo sapiens
ggctttgaaaacagg

SEQ ID NO: 8593 - DNA, 15 bp, Homo sapiens
gggctttgaaaacag

SEQ ID NO: 8594 - DNA, 15 bp, Homo sapiens
ggggctttgaaaaca

SEQ ID NO: 8595 - DNA, 15 bp, Homo sapiens
tggggctttgaaaac

SEQ ID NO: 8596 - DNA, 15 bp, Homo sapiens
gtggggctttgaaaa

SEQ ID NO: 8597 - DNA, 15 bp, Homo sapiens
ggtggggctttgaaa

SEQ ID NO: 8598 - DNA, 15 bp, Homo sapiens
gggtggggctttgaa

SEQ ID NO: 8599 - DNA, 15 bp, Homo sapiens
ggggtggggctttga

SEQ ID NO: 8600 - DNA, 15 bp, Homo sapiens
tggggtggggctttg

SEQ ID NO: 8601 - DNA, 15 bp, Homo sapiens
ctggggtggggcttt

SEQ ID NO: 8602 - DNA, 15 bp, Homo sapiens
cctggggtggggctt

SEQ ID NO: 8603 - DNA, 15 bp, Homo sapiens
tcctggggtggggct

SEQ ID NO: 8604 - DNA, 15 bp, Homo sapiens
ctcctggggtggggc

SEQ ID NO: 8605 - DNA, 15 bp, Homo sapiens
tctcctggggtgggg

SEQ ID NO: 8606 - DNA, 15 bp, Homo sapiens
ttctcctggggtggg

SEQ ID NO: 8607 - DNA, 15 bp, Homo sapiens
attctcctggggtgg

SEQ ID NO: 8608 - DNA, 15 bp, Homo sapiens
gattctcctggggtg

SEQ ID NO: 8609 - DNA, 15 bp, Homo sapiens
agattctcctggggt

SEQ ID NO: 8610 - DNA, 15 bp, Homo sapiens
gagattctcctgggg

SEQ ID NO: 8611 - DNA, 15 bp, Homo sapiens
ggagattctcctggg

SEQ ID NO: 8612 - DNA, 15 bp, Homo sapiens
aggagattctcctgg

SEQ ID NO: 8613 - DNA, 15 bp, Homo sapiens
caggagattctcctg

SEQ ID NO: 8614 - DNA, 15 bp, Homo sapiens
ccaggagattctcct

SEQ ID NO: 8615 - DNA, 15 bp, Homo sapiens
tccaggagattctcc

SEQ ID NO: 8616 - DNA, 15 bp, Homo sapiens
ttccaggagattctc

SEQ ID NO: 8617 - DNA, 15 bp, Homo sapiens
attccaggagattct

SEQ ID NO: 8618 - DNA, 15 bp, Homo sapiens
aattccaggagattc

SEQ ID NO: 8619 - DNA, 15 bp, Homo sapiens
caattccaggagatt

SEQ ID NO: 8620 - DNA, 15 bp, Homo sapiens
acaattccaggagat

SEQ ID NO: 8621 - DNA, 15 bp, Homo sapiens
cacaattccaggaga

SEQ ID NO: 8622 - DNA, 15 bp, Homo sapiens
acacaattccaggag

SEQ ID NO: 8623 - DNA, 15 bp, Homo sapiens
gacacaattccagga

SEQ ID NO: 8624 - DNA, 15 bp, Homo sapiens
tgacacaattccagg

SEQ ID NO: 8625 - DNA, 15 bp, Homo sapiens
ttgacacaattccag

SEQ ID NO: 8626 - DNA, 15 bp, Homo sapiens
tttgacacaattcca

SEQ ID NO: 8627 - DNA, 15 bp, Homo sapiens
gtttgacacaattcc

SEQ ID NO: 8628 - DNA, 15 bp, Homo sapiens
agtttgacacaattc

SEQ ID NO: 8629 - DNA, 15 bp, Homo sapiens
tagtttgacacaatt

SEQ ID NO: 8630 - DNA, 15 bp, Homo sapiens
atagtttgacacaat

SEQ ID NO: 8631 - DNA, 15 bp, Homo sapiens
tatagtttgacacaa

SEQ ID NO: 8632 - DNA, 15 bp, Homo sapiens
ttatagtttgacaca

SEQ ID NO: 8633 - DNA, 15 bp, Homo sapiens
gttatagtttgacac

SEQ ID NO: 8634 - DNA, 15 bp, Homo sapiens
tgttatagtttgaca

SEQ ID NO: 8635 - DNA, 15 bp, Homo sapiens
ttgttatagtttgac

SEQ ID NO: 8636 - DNA, 15 bp, Homo sapiens
gttgttatagtttga

SEQ ID NO: 8637 - DNA, 15 bp, Homo sapiens
agttgttatagtttg

SEQ ID NO: 8638 - DNA, 15 bp, Homo sapiens
gagttgttatagttt

SEQ ID NO: 8639 - DNA, 15 bp, Homo sapiens
ggagttgttatagtt

SEQ ID NO: 8640 - DNA, 15 bp, Homo sapiens
tggagttgttatagt

SEQ ID NO: 8641 - DNA, 15 bp, Homo sapiens
atggagttgttatag

SEQ ID NO: 8642 - DNA, 15 bp, Homo sapiens
catggagttgttata

SEQ ID NO: 8643 - DNA, 15 bp, Homo sapiens
acatggagttgttat

SEQ ID NO: 8644 - DNA, 15 bp, Homo sapiens
tacatggagttgtta

SEQ ID NO: 8645 - DNA, 15 bp, Homo sapiens
ttacatggagttgtt

SEQ ID NO: 8646 - DNA, 15 bp, Homo sapiens
cttacatggagttgt

SEQ ID NO: 8647 - DNA, 15 bp, Homo sapiens
acttacatggagttg

SEQ ID NO: 8648 - DNA, 15 bp, Homo sapiens
cacttacatggagtt

SEQ ID NO: 8649 - DNA, 15 bp, Homo sapiens
acacttacatggagt

SEQ ID NO: 8650 - DNA, 15 bp, Homo sapiens
aacacttacatggag

SEQ ID NO: 8651 - DNA, 15 bp, Homo sapiens
caacacttacatgga

SEQ ID NO: 8652 - DNA, 15 bp, Homo sapiens
tcaacacttacatgg

SEQ ID NO: 8653 - DNA, 15 bp, Homo sapiens
ctcaacacttacatg

SEQ ID NO: 8654 - DNA, 15 bp, Homo sapiens
tctcaacacttacat

SEQ ID NO: 8655 - DNA, 15 bp, Homo sapiens
atctcaacacttaca

SEQ ID NO: 8656 - DNA, 15 bp, Homo sapiens
gatctcaacacttac

SEQ ID NO: 8657 - DNA, 15 bp, Homo sapiens
ggatctcaacactta

SEQ ID NO: 8658 - DNA, 15 bp, Homo sapiens
gggatctcaacactt

SEQ ID NO: 8659 - DNA, 15 bp, Homo sapiens
agggatctcaacact

SEQ ID NO: 8660 - DNA, 15 bp, Homo sapiens
tagggatctcaacac

SEQ ID NO: 8661 - DNA, 15 bp, Homo sapiens
gtagggatctcaaca

SEQ ID NO: 8662 - DNA, 15 bp, Homo sapiens
ggtagggatctcaac

SEQ ID NO: 8663 - DNA, 15 bp, Homo sapiens
tggtagggatctcaa

SEQ ID NO: 8664 - DNA, 15 bp, Homo sapiens
atggtagggatctca

SEQ ID NO: 8665 - DNA, 15 bp, Homo sapiens
catggtagggatctc

SEQ ID NO: 8666 - DNA, 15 bp, Homo sapiens
gcatggtagggatct

SEQ ID NO: 8667 - DNA, 15 bp, Homo sapiens
tgcatggtagggatc

SEQ ID NO: 8668 - DNA, 15 bp, Homo sapiens
ctgcatggtagggat

SEQ ID NO: 8669 - DNA, 15 bp, Homo sapiens
cctgcatggtaggga

SEQ ID NO: 8670 - DNA, 15 bp, Homo sapiens
ccctgcatggtaggg

SEQ ID NO: 8671 - DNA, 15 bp, Homo sapiens
cccctgcatggtagg

SEQ ID NO: 8672 - DNA, 15 bp, Homo sapiens
tcccctgcatggtag

SEQ ID NO: 8673 - DNA, 15 bp, Homo sapiens
ctcccctgcatggta

SEQ ID NO: 8674 - DNA, 15 bp, Homo sapiens
cctcccctgcatggt

SEQ ID NO: 8675 - DNA, 15 bp, Homo sapiens
tcctcccctgcatgg

SEQ ID NO: 8676 - DNA, 15 bp, Homo sapiens
ttcctcccctgcatg

SEQ ID NO: 8677 - DNA, 15 bp, Homo sapiens
cttcctcccctgcat

SEQ ID NO: 8678 - DNA, 15 bp, Homo sapiens
acttcctcccctgca

SEQ ID NO: 8679 - DNA, 15 bp, Homo sapiens
aacttcctcccctgc

SEQ ID NO: 8680 - DNA, 15 bp, Homo sapiens
caacttcctcccctg

SEQ ID NO: 8681 - DNA, 15 bp, Homo sapiens
gcaacttcctcccct

SEQ ID NO: 8682 - DNA, 15 bp, Homo sapiens
tgcaacttcctcccc

SEQ ID NO: 8683 - DNA, 15 bp, Homo sapiens
gtgcaacttcctccc

SEQ ID NO: 8684 - DNA, 15 bp, Homo sapiens
tgtgcaacttcctcc

SEQ ID NO: 8685 - DNA, 15 bp, Homo sapiens
gtgtgcaacttcctc

SEQ ID NO: 8686 - DNA, 15 bp, Homo sapiens
ggtgtgcaacttcct

SEQ ID NO: 8687 - DNA, 15 bp, Homo sapiens
gggtgtgcaacttcc

SEQ ID NO: 8688 - DNA, 15 bp, Homo sapiens
ggggtgtgcaacttc

SEQ ID NO: 8689 - DNA, 15 bp, Homo sapiens
aggggtgtgcaactt

SEQ ID NO: 8690 - DNA, 15 bp, Homo sapiens
aaggggtgtgcaact

SEQ ID NO: 8691 - DNA, 15 bp, Homo sapiens
gaaggggtgtgcaac

SEQ ID NO: 8692 - DNA, 15 bp, Homo sapiens
tgaaggggtgtgcaa

SEQ ID NO: 8693 - DNA, 15 bp, Homo sapiens
gtgaaggggtgtgca

SEQ ID NO: 8694 - DNA, 15 bp, Homo sapiens
cgtgaaggggtgtgc

SEQ ID NO: 8695 - DNA, 15 bp, Homo sapiens
acgtgaaggggtgtg

SEQ ID NO: 8696 - DNA, 15 bp, Homo sapiens
cacgtgaaggggtgt

SEQ ID NO: 8697 - DNA, 15 bp, Homo sapiens
gcacgtgaaggggtg

SEQ ID NO: 8698 - DNA, 15 bp, Homo sapiens
agcacgtgaaggggt

SEQ ID NO: 8699 - DNA, 15 bp, Homo sapiens
cagcacgtgaagggg

SEQ ID NO: 8700 - DNA, 15 bp, Homo sapiens
tcagcacgtgaaggg

SEQ ID NO: 8701 - DNA, 15 bp, Homo sapiens
ttcagcacgtgaagg

SEQ ID NO: 8702 - DNA, 15 bp, Homo sapiens
tttcagcacgtgaag

SEQ ID NO: 8703 - DNA, 15 bp, Homo sapiens
atttcagcacgtgaa

SEQ ID NO: 8704 - DNA, 15 bp, Homo sapiens
catttcagcacgtga

SEQ ID NO: 8705 - DNA, 15 bp, Homo sapiens
gcatttcagcacgtg

SEQ ID NO: 8706 - DNA, 15 bp, Homo sapiens
tgcatttcagcacgt

SEQ ID NO: 8707 - DNA, 15 bp, Homo sapiens
gtgcatttcagcacg

SEQ ID NO: 8708 - DNA, 15 bp, Homo sapiens
tgtgcatttcagcac

SEQ ID NO: 8709 - DNA, 15 bp, Homo sapiens
gtgtgcatttcagca

SEQ ID NO: 8710 - DNA, 15 bp, Homo sapiens
cgtgtgcatttcagc

SEQ ID NO: 8711 - DNA, 15 bp, Homo sapiens
acgtgtgcatttcag

SEQ ID NO: 8712 - DNA, 15 bp, Homo sapiens
cacgtgtgcatttca

SEQ ID NO: 8713 - DNA, 15 bp, Homo sapiens
gcacgtgtgcatttc

SEQ ID NO: 8714 - DNA, 15 bp, Homo sapiens
cgcacgtgtgcattt

SEQ ID NO: 8715 - DNA, 15 bp, Homo sapiens
acgcacgtgtgcatt

SEQ ID NO: 8716 - DNA, 15 bp, Homo sapiens
cacgcacgtgtgcat

SEQ ID NO: 8717 - DNA, 15 bp, Homo sapiens
gcacgcacgtgtgca

SEQ ID NO: 8718 - DNA, 15 bp, Homo sapiens
tgcacgcacgtgtgc

SEQ ID NO: 8719 - DNA, 15 bp, Homo sapiens
gtgcacgcacgtgtg

SEQ ID NO: 8720 - DNA, 15 bp, Homo sapiens
cgtgcacgcacgtgt

SEQ ID NO: 8721 - DNA, 15 bp, Homo sapiens
ccgtgcacgcacgtg

SEQ ID NO: 8722 - DNA, 15 bp, Homo sapiens
tccgtgcacgcacgt

SEQ ID NO: 8723 - DNA, 15 bp, Homo sapiens
ctccgtgcacgcacg

SEQ ID NO: 8724 - DNA, 15 bp, Homo sapiens
gctccgtgcacgcac

SEQ ID NO: 8725 - DNA, 15 bp, Homo sapiens
tgctccgtgcacgca

SEQ ID NO: 8726 - DNA, 15 bp, Homo sapiens
atgctccgtgcacgc

SEQ ID NO: 8727 - DNA, 15 bp, Homo sapiens
catgctccgtgcacg

SEQ ID NO: 8728 - DNA, 15 bp, Homo sapiens
ccatgctccgtgcac

SEQ ID NO: 8729 - DNA, 15 bp, Homo sapiens
tccatgctccgtgca

SEQ ID NO: 8730 - DNA, 15 bp, Homo sapiens
ctccatgctccgtgc

SEQ ID NO: 8731 - DNA, 15 bp, Homo sapiens
gctccatgctccgtg

SEQ ID NO: 8732 - DNA, 15 bp, Homo sapiens
tgctccatgctccgt

SEQ ID NO: 8733 - DNA, 15 bp, Homo sapiens
gtgctccatgctccg

SEQ ID NO: 8734 - DNA, 15 bp, Homo sapiens
agtgctccatgctcc

SEQ ID NO: 8735 - DNA, 15 bp, Homo sapiens
cagtgctccatgctc

SEQ ID NO: 8736 - DNA, 15 bp, Homo sapiens
tcagtgctccatgct

SEQ ID NO: 8737 - DNA, 15 bp, Homo sapiens
ctcagtgctccatgc

SEQ ID NO: 8738 - DNA, 15 bp, Homo sapiens
actcagtgctccatg

SEQ ID NO: 8739 - DNA, 15 bp, Homo sapiens
cactcagtgctccat

SEQ ID NO: 8740 - DNA, 15 bp, Homo sapiens
acactcagtgctcca

SEQ ID NO: 8741 - DNA, 15 bp, Homo sapiens
aacactcagtgctcc

SEQ ID NO: 8742 - DNA, 15 bp, Homo sapiens
gaacactcagtgctc

SEQ ID NO: 8743 - DNA, 15 bp, Homo sapiens
agaacactcagtgct

SEQ ID NO: 8744 - DNA, 15 bp, Homo sapiens
aagaacactcagtgc

SEQ ID NO: 8745 - DNA, 15 bp, Homo sapiens
caagaacactcagtg

SEQ ID NO: 8746 - DNA, 15 bp, Homo sapiens
acaagaacactcagt

SEQ ID NO: 8747 - DNA, 15 bp, Homo sapiens
cacaagaacactcag

SEQ ID NO: 8748 - DNA, 15 bp, Homo sapiens
ccacaagaacactca

SEQ ID NO: 8749 - DNA, 15 bp, Homo sapiens
gccacaagaacactc

SEQ ID NO: 8750 - DNA, 15 bp, Homo sapiens
agccacaagaacact

SEQ ID NO: 8751 - DNA, 15 bp, Homo sapiens
aagccacaagaacac

SEQ ID NO: 8752 - DNA, 15 bp, Homo sapiens
aaagccacaagaaca

SEQ ID NO: 8753 - DNA, 15 bp, Homo sapiens
caaagccacaagaac

SEQ ID NO: 8754 - DNA, 15 bp, Homo sapiens
gcaaagccacaagaa

SEQ ID NO: 8755 - DNA, 15 bp, Homo sapiens
agcaaagccacaaga

SEQ ID NO: 8756 - DNA, 15 bp, Homo sapiens
cagcaaagccacaag

SEQ ID NO: 8757 - DNA, 15 bp, Homo sapiens
tcagcaaagccacaa

SEQ ID NO: 8758 - DNA, 15 bp, Homo sapiens
ctcagcaaagccaca

SEQ ID NO: 8759 - DNA, 15 bp, Homo sapiens
gctcagcaaagccac

SEQ ID NO: 8760 - DNA, 15 bp, Homo sapiens
ggctcagcaaagcca

SEQ ID NO: 8761 - DNA, 15 bp, Homo sapiens
gggctcagcaaagcc

SEQ ID NO: 8762 - DNA, 15 bp, Homo sapiens
ggggctcagcaaagc

SEQ ID NO: 8763 - DNA, 15 bp, Homo sapiens
aggggctcagcaaag

SEQ ID NO: 8764 - DNA, 15 bp, Homo sapiens
taggggctcagcaaa

SEQ ID NO: 8765 - DNA, 15 bp, Homo sapiens
ttaggggctcagcaa

SEQ ID NO: 8766 - DNA, 15 bp, Homo sapiens
gttaggggctcagca

SEQ ID NO: 8767 - DNA, 15 bp, Homo sapiens
ggttaggggctcagc

SEQ ID NO: 8768 - DNA, 15 bp, Homo sapiens
aggttaggggctcag

SEQ ID NO: 8769 - DNA, 15 bp, Homo sapiens
gaggttaggggctca

SEQ ID NO: 8770 - DNA, 15 bp, Homo sapiens
agaggttaggggctc

SEQ ID NO: 8771 - DNA, 15 bp, Homo sapiens
aagaggttaggggct

SEQ ID NO: 8772 - DNA, 15 bp, Homo sapiens
taagaggttaggggc

SEQ ID NO: 8773 - DNA, 15 bp, Homo sapiens
ctaagaggttagggg

SEQ ID NO: 8774 - DNA, 15 bp, Homo sapiens
cctaagaggttaggg

SEQ ID NO: 8775 - DNA, 15 bp, Homo sapiens
tcctaagaggttagg

SEQ ID NO: 8776 - DNA, 15 bp, Homo sapiens
ctcctaagaggttag

SEQ ID NO: 8777 - DNA, 15 bp, Homo sapiens
gctcctaagaggtta

SEQ ID NO: 8778 - DNA, 15 bp, Homo sapiens
tgctcctaagaggtt

SEQ ID NO: 8779 - DNA, 15 bp, Homo sapiens
ctgctcctaagaggt

SEQ ID NO: 8780 - DNA, 15 bp, Homo sapiens
tctgctcctaagagg

SEQ ID NO: 8781 - DNA, 15 bp, Homo sapiens
ctctgctcctaagag

SEQ ID NO: 8782 - DNA, 15 bp, Homo sapiens
gctctgctcctaaga

SEQ ID NO: 8783 - DNA, 15 bp, Homo sapiens
tgctctgctcctaag

SEQ ID NO: 8784 - DNA, 15 bp, Homo sapiens
ctgctctgctcctaa

SEQ ID NO: 8785 - DNA, 15 bp, Homo sapiens
cctgctctgctccta

SEQ ID NO: 8786 - DNA, 15 bp, Homo sapiens
acctgctctgctcct

SEQ ID NO: 8787 - DNA, 15 bp, Homo sapiens
aacctgctctgctcc

SEQ ID NO: 8788 - DNA, 15 bp, Homo sapiens
aaacctgctctgctc

SEQ ID NO: 8789 - DNA, 15 bp, Homo sapiens
gaaacctgctctgct

SEQ ID NO: 8790 - DNA, 15 bp, Homo sapiens
ggaaacctgctctgc

SEQ ID NO: 8791 - DNA, 15 bp, Homo sapiens
aggaaacctgctctg

SEQ ID NO: 8792 - DNA, 15 bp, Homo sapiens
gaggaaacctgctct

SEQ ID NO: 8793 - DNA, 15 bp, Homo sapiens
agaggaaacctgctc

SEQ ID NO: 8794 - DNA, 15 bp, Homo sapiens
gagaggaaacctgct

SEQ ID NO: 8795 - DNA, 15 bp, Homo sapiens
agagaggaaacctgc

SEQ ID NO: 8796 - DNA, 15 bp, Homo sapiens
cagagaggaaacctg

SEQ ID NO: 8797 - DNA, 15 bp, Homo sapiens
ccagagaggaaacct

SEQ ID NO: 8798 - DNA, 15 bp, Homo sapiens
tccagagaggaaacc

SEQ ID NO: 8799 - DNA, 15 bp, Homo sapiens
ttccagagaggaaac

SEQ ID NO: 8800 - DNA, 15 bp, Homo sapiens
gttccagagaggaaa

SEQ ID NO: 8801 - DNA, 15 bp, Homo sapiens
tgttccagagaggaa

SEQ ID NO: 8802 - DNA, 15 bp, Homo sapiens
atgttccagagagga

SEQ ID NO: 8803 - DNA, 15 bp, Homo sapiens
aatgttccagagagg

SEQ ID NO: 8804 - DNA, 15 bp, Homo sapiens
gaatgttccagagag

SEQ ID NO: 8805 - DNA, 15 bp, Homo sapiens
agaatgttccagaga

SEQ ID NO: 8806 - DNA, 15 bp, Homo sapiens
cagaatgttccagag

SEQ ID NO: 8807 - DNA, 15 bp, Homo sapiens
acagaatgttccaga

SEQ ID NO: 8808 - DNA, 15 bp, Homo sapiens
aacagaatgttccag

SEQ ID NO: 8809 - DNA, 15 bp, Homo sapiens
taacagaatgttcca

SEQ ID NO: 8810 - DNA, 15 bp, Homo sapiens
ttaacagaatgttcc

SEQ ID NO: 8811 - DNA, 15 bp, Homo sapiens
gttaacagaatgttc

SEQ ID NO: 8812 - DNA, 15 bp, Homo sapiens
agttaacagaatgtt

SEQ ID NO: 8813 - DNA, 15 bp, Homo sapiens
cagttaacagaatgt

SEQ ID NO: 8814 - DNA, 15 bp, Homo sapiens
acagttaacagaatg

SEQ ID NO: 8815 - DNA, 15 bp, Homo sapiens
gacagttaacagaat

SEQ ID NO: 8816 - DNA, 15 bp, Homo sapiens
tgacagttaacagaa

SEQ ID NO: 8817 - DNA, 15 bp, Homo sapiens
ctgacagttaacaga

SEQ ID NO: 8818 - DNA, 15 bp, Homo sapiens
cctgacagttaacag

SEQ ID NO: 8819 - DNA, 15 bp, Homo sapiens
ccctgacagttaaca

SEQ ID NO: 8820 - DNA, 15 bp, Homo sapiens
gccctgacagttaac

SEQ ID NO: 8821 - DNA, 15 bp, Homo sapiens
tgccctgacagttaa

SEQ ID NO: 8822 - DNA, 15 bp, Homo sapiens
gtgccctgacagtta

SEQ ID NO: 8823 - DNA, 15 bp, Homo sapiens
agtgccctgacagtt

SEQ ID NO: 8824 - DNA, 15 bp, Homo sapiens
aagtgccctgacagt

SEQ ID NO: 8825 - DNA, 15 bp, Homo sapiens
caagtgccctgacag

SEQ ID NO: 8826 - DNA, 15 bp, Homo sapiens
ccaagtgccctgaca

SEQ ID NO: 8827 - DNA, 15 bp, Homo sapiens
cccaagtgccctgac

SEQ ID NO: 8828 - DNA, 15 bp, Homo sapiens
ccccaagtgccctga

SEQ ID NO: 8829 - DNA, 15 bp, Homo sapiens
tccccaagtgccctg

SEQ ID NO: 8830 - DNA, 15 bp, Homo sapiens
ctccccaagtgccct

SEQ ID NO: 8831 - DNA, 15 bp, Homo sapiens
tctccccaagtgccc

SEQ ID NO: 8832 - DNA, 15 bp, Homo sapiens
ttctccccaagtgcc

SEQ ID NO: 8833 - DNA, 15 bp, Homo sapiens
tttctccccaagtgc

SEQ ID NO: 8834 - DNA, 15 bp, Homo sapiens
atttctccccaagtg

SEQ ID NO: 8835 - DNA, 15 bp, Homo sapiens
gatttctccccaagt

SEQ ID NO: 8836 - DNA, 15 bp, Homo sapiens
agatttctccccaag

SEQ ID NO: 8837 - DNA, 15 bp, Homo sapiens
gagatttctccccaa

SEQ ID NO: 8838 - DNA, 15 bp, Homo sapiens
ggagatttctcccca

SEQ ID NO: 8839 - DNA, 15 bp, Homo sapiens
tggagatttctcccc

SEQ ID NO: 8840 - DNA, 15 bp, Homo sapiens
ttggagatttctccc

SEQ ID NO: 8841 - DNA, 15 bp, Homo sapiens
cttggagatttctcc

SEQ ID NO: 8842 - DNA, 15 bp, Homo sapiens
gcttggagatttctc

SEQ ID NO: 8843 - DNA, 15 bp, Homo sapiens
agcttggagatttct

SEQ ID NO: 8844 - DNA, 15 bp, Homo sapiens
tagcttggagatttc

SEQ ID NO: 8845 - DNA, 15 bp, Homo sapiens
ttagcttggagattt

SEQ ID NO: 8846 - DNA, 15 bp, Homo sapiens
cttagcttggagatt

SEQ ID NO: 8847 - DNA, 15 bp, Homo sapiens
ccttagcttggagat

SEQ ID NO: 8848 - DNA, 15 bp, Homo sapiens
gccttagcttggaga

SEQ ID NO: 8849 - DNA, 15 bp, Homo sapiens
ggccttagcttggag

SEQ ID NO: 8850 - DNA, 15 bp, Homo sapiens
tggccttagcttgga

SEQ ID NO: 8851 - DNA, 15 bp, Homo sapiens
gtggccttagcttgg

SEQ ID NO: 8852 - DNA, 15 bp, Homo sapiens
cgtggccttagcttg

SEQ ID NO: 8853 - DNA, 15 bp, Homo sapiens
acgtggccttagctt

SEQ ID NO: 8854 - DNA, 15 bp, Homo sapiens
cacgtggccttagct

SEQ ID NO: 8855 - DNA, 15 bp, Homo sapiens
gcacgtggccttagc

SEQ ID NO: 8856 - DNA, 15 bp, Homo sapiens
tgcacgtggccttag

SEQ ID NO: 8857 - DNA, 15 bp, Homo sapiens
gtgcacgtggcctta

SEQ ID NO: 8858 - DNA, 15 bp, Homo sapiens
tgtgcacgtggcctt

SEQ ID NO: 8859 - DNA, 15 bp, Homo sapiens
ttgtgcacgtggcct

SEQ ID NO: 8860 - DNA, 15 bp, Homo sapiens
tttgtgcacgtggcc

SEQ ID NO: 8861 - DNA, 15 bp, Homo sapiens
ttttgtgcacgtggc

SEQ ID NO: 8862 - DNA, 15 bp, Homo sapiens
attttgtgcacgtgg

SEQ ID NO: 8863 - DNA, 15 bp, Homo sapiens
aattttgtgcacgtg

SEQ ID NO: 8864 - DNA, 15 bp, Homo sapiens
aaattttgtgcacgt

SEQ ID NO: 8865 - DNA, 15 bp, Homo sapiens
gaaattttgtgcacg

SEQ ID NO: 8866 - DNA, 15 bp, Homo sapiens
agaaattttgtgcac

SEQ ID NO: 8867 - DNA, 15 bp, Homo sapiens
aagaaattttgtgca

SEQ ID NO: 8868 - DNA, 15 bp, Homo sapiens
caagaaattttgtgc

SEQ ID NO: 8869 - DNA, 15 bp, Homo sapiens
ccaagaaattttgtg

SEQ ID NO: 8870 - DNA, 15 bp, Homo sapiens
accaagaaattttgt

SEQ ID NO: 8871 - DNA, 15 bp, Homo sapiens
gaccaagaaattttg

SEQ ID NO: 8872 - DNA, 15 bp, Homo sapiens
ggaccaagaaatttt

SEQ ID NO: 8873 - DNA, 15 bp, Homo sapiens
aggaccaagaaattt

SEQ ID NO: 8874 - DNA, 15 bp, Homo sapiens
aaggaccaagaaatt

SEQ ID NO: 8875 - DNA, 15 bp, Homo sapiens
taaggaccaagaaat

SEQ ID NO: 8876 - DNA, 15 bp, Homo sapiens
ataaggaccaagaaa

SEQ ID NO: 8877 - DNA, 15 bp, Homo sapiens
tataaggaccaagaa

SEQ ID NO: 8878 - DNA, 15 bp, Homo sapiens
atataaggaccaaga

SEQ ID NO: 8879 - DNA, 15 bp, Homo sapiens
gatataaggaccaag

SEQ ID NO: 8880 - DNA, 15 bp, Homo sapiens
ggatataaggaccaa

SEQ ID NO: 8881 - DNA, 15 bp, Homo sapiens
gggatataaggacca

SEQ ID NO: 8882 - DNA, 15 bp, Homo sapiens
ggggatataaggacc

SEQ ID NO: 8883 - DNA, 15 bp, Homo sapiens
tggggatataaggac

SEQ ID NO: 8884 - DNA, 15 bp, Homo sapiens
ctggggatataagga

SEQ ID NO: 8885 - DNA, 15 bp, Homo sapiens
tctggggatataagg

SEQ ID NO: 8886 - DNA, 15 bp, Homo sapiens
ttctggggatataag

SEQ ID NO: 8887 - DNA, 15 bp, Homo sapiens
attctggggatataa

SEQ ID NO: 8888 - DNA, 15 bp, Homo sapiens
cattctggggatata

SEQ ID NO: 8889 - DNA, 15 bp, Homo sapiens
acattctggggatat

SEQ ID NO: 8890 - DNA, 15 bp, Homo sapiens
cacattctggggata

SEQ ID NO: 8891 - DNA, 15 bp, Homo sapiens
tcacattctggggat

SEQ ID NO: 8892 - DNA, 15 bp, Homo sapiens
gtcacattctgggga

SEQ ID NO: 8893 - DNA, 15 bp, Homo sapiens
ggtcacattctgggg

SEQ ID NO: 8894 - DNA, 15 bp, Homo sapiens
aggtcacattctggg

SEQ ID NO: 8895 - DNA, 15 bp, Homo sapiens
caggtcacattctgg

SEQ ID NO: 8896 - DNA, 15 bp, Homo sapiens
ccaggtcacattctg

SEQ ID NO: 8897 - DNA, 15 bp, Homo sapiens
tccaggtcacattct

SEQ ID NO: 8898 - DNA, 15 bp, Homo sapiens
ctccaggtcacattc

SEQ ID NO: 8899 - DNA, 15 bp, Homo sapiens
actccaggtcacatt

SEQ ID NO: 8900 - DNA, 15 bp, Homo sapiens
gactccaggtcacat

SEQ ID NO: 8901 - DNA, 15 bp, Homo sapiens
agactccaggtcaca

SEQ ID NO: 8902 - DNA, 15 bp, Homo sapiens
cagactccaggtcac

SEQ ID NO: 8903 - DNA, 15 bp, Homo sapiens
tcagactccaggtca

SEQ ID NO: 8904 - DNA, 15 bp, Homo sapiens
atcagactccaggtc

SEQ ID NO: 8905 - DNA, 15 bp, Homo sapiens
catcagactccaggt

SEQ ID NO: 8906 - DNA, 15 bp, Homo sapiens
ccatcagactccagg

SEQ ID NO: 8907 - DNA, 15 bp, Homo sapiens
gccatcagactccag

SEQ ID NO: 8908 - DNA, 15 bp, Homo sapiens
tgccatcagactcca

SEQ ID NO: 8909 - DNA, 15 bp, Homo sapiens
ctgccatcagactcc

SEQ ID NO: 8910 - DNA, 15 bp, Homo sapiens
gctgccatcagactc

SEQ ID NO: 8911 - DNA, 15 bp, Homo sapiens
ggctgccatcagact

SEQ ID NO: 8912 - DNA, 15 bp, Homo sapiens
gggctgccatcagac

SEQ ID NO: 8913 - DNA, 15 bp, Homo sapiens
cgggctgccatcaga

SEQ ID NO: 8914 - DNA, 15 bp, Homo sapiens
gcgggctgccatcag

SEQ ID NO: 8915 - DNA, 15 bp, Homo sapiens
agcgggctgccatca

SEQ ID NO: 8916 - DNA, 15 bp, Homo sapiens
cagcgggctgccatc

SEQ ID NO: 8917 - DNA, 15 bp, Homo sapiens
gcagcgggctgccat

SEQ ID NO: 8918 - DNA, 15 bp, Homo sapiens
tgcagcgggctgcca

SEQ ID NO: 8919 - DNA, 15 bp, Homo sapiens
ctgcagcgggctgcc

SEQ ID NO: 8920 - DNA, 15 bp, Homo sapiens
tctgcagcgggctgc

SEQ ID NO: 8921 - DNA, 15 bp, Homo sapiens
ctctgcagcgggctg

SEQ ID NO: 8922 - DNA, 15 bp, Homo sapiens
tctctgcagcgggct

SEQ ID NO: 8923 - DNA, 15 bp, Homo sapiens
atctctgcagcgggc

SEQ ID NO: 8924 - DNA, 15 bp, Homo sapiens
catctctgcagcggg

SEQ ID NO: 8925 - DNA, 15 bp, Homo sapiens
acatctctgcagcgg

SEQ ID NO: 8926 - DNA, 15 bp, Homo sapiens
cacatctctgcagcg

SEQ ID NO: 8927 - DNA, 15 bp, Homo sapiens
acacatctctgcagc

SEQ ID NO: 8928 - DNA, 15 bp, Homo sapiens
gacacatctctgcag

SEQ ID NO: 8929 - DNA, 15 bp, Homo sapiens
ggacacatctctgca

SEQ ID NO: 8930 - DNA, 15 bp, Homo sapiens
tggacacatctctgc

SEQ ID NO: 8931 - DNA, 15 bp, Homo sapiens
gtggacacatctctg

SEQ ID NO: 8932 - DNA, 15 bp, Homo sapiens
agtggacacatctct

SEQ ID NO: 8933 - DNA, 15 bp, Homo sapiens
cagtggacacatctc

SEQ ID NO: 8934 - DNA, 15 bp, Homo sapiens
gcagtggacacatct

SEQ ID NO: 8935 - DNA, 15 bp, Homo sapiens
ggcagtggacacatc

SEQ ID NO: 8936 - DNA, 15 bp, Homo sapiens
aggcagtggacacat

SEQ ID NO: 8937 - DNA, 15 bp, Homo sapiens
aaggcagtggacaca

SEQ ID NO: 8938 - DNA, 15 bp, Homo sapiens
gaaggcagtggacac

SEQ ID NO: 8939 - DNA, 15 bp, Homo sapiens
agaaggcagtggaca

SEQ ID NO: 8940 - DNA, 15 bp, Homo sapiens
cagaaggcagtggac

SEQ ID NO: 8941 - DNA, 15 bp, Homo sapiens
ccagaaggcagtgga

SEQ ID NO: 8942 - DNA, 15 bp, Homo sapiens
accagaaggcagtgg

SEQ ID NO: 8943 - DNA, 15 bp, Homo sapiens
gaccagaaggcagtg

SEQ ID NO: 8944 - DNA, 15 bp, Homo sapiens
tgaccagaaggcagt

SEQ ID NO: 8945 - DNA, 15 bp, Homo sapiens
atgaccagaaggcag

SEQ ID NO: 8946 - DNA, 15 bp, Homo sapiens
aatgaccagaaggca

SEQ ID NO: 8947 - DNA, 15 bp, Homo sapiens
caatgaccagaaggc

SEQ ID NO: 8948 - DNA, 15 bp, Homo sapiens
tcaatgaccagaagg

SEQ ID NO: 8949 - DNA, 15 bp, Homo sapiens
gtcaatgaccagaag

SEQ ID NO: 8950 - DNA, 15 bp, Homo sapiens
ggtcaatgaccagaa

SEQ ID NO: 8951 - DNA, 15 bp, Homo sapiens
aggtcaatgaccaga

SEQ ID NO: 8952 - DNA, 15 bp, Homo sapiens
caggtcaatgaccag

SEQ ID NO: 8953 - DNA, 15 bp, Homo sapiens
gcaggtcaatgacca

SEQ ID NO: 8954 - DNA, 15 bp, Homo sapiens
agcaggtcaatgacc

SEQ ID NO: 8955 - DNA, 15 bp, Homo sapiens
aagcaggtcaatgac

SEQ ID NO: 8956 - DNA, 15 bp, Homo sapiens
caagcaggtcaatga

SEQ ID NO: 8957 - DNA, 15 bp, Homo sapiens
ccaagcaggtcaatg

SEQ ID NO: 8958 - DNA, 15 bp, Homo sapiens
cccaagcaggtcaat

SEQ ID NO: 8959 - DNA, 15 bp, Homo sapiens
acccaagcaggtcaa

SEQ ID NO: 8960 - DNA, 15 bp, Homo sapiens
cacccaagcaggtca

SEQ ID NO: 8961 - DNA, 15 bp, Homo sapiens
ccacccaagcaggtc

SEQ ID NO: 8962 - DNA, 15 bp, Homo sapiens
tccacccaagcaggt

SEQ ID NO: 8963 - DNA, 15 bp, Homo sapiens
ctccacccaagcagg

SEQ ID NO: 8964 - DNA, 15 bp, Homo sapiens
actccacccaagcag

SEQ ID NO: 8965 - DNA, 15 bp, Homo sapiens
cactccacccaagca

SEQ ID NO: 8966 - DNA, 15 bp, Homo sapiens
tcactccacccaagc

SEQ ID NO: 8967 - DNA, 15 bp, Homo sapiens
ttcactccacccaag

SEQ ID NO: 8968 - DNA, 15 bp, Homo sapiens
attcactccacccaa

SEQ ID NO: 8969 - DNA, 15 bp, Homo sapiens
gattcactccaccca

SEQ ID NO: 8970 - DNA, 15 bp, Homo sapiens
tgattcactccaccc

SEQ ID NO: 8971 - DNA, 15 bp, Homo sapiens
atgattcactccacc

SEQ ID NO: 8972 - DNA, 15 bp, Homo sapiens
aatgattcactccac

SEQ ID NO: 8973 - DNA, 15 bp, Homo sapiens
caatgattcactcca

SEQ ID NO: 8974 - DNA, 15 bp, Homo sapiens
acaatgattcactcc

SEQ ID NO: 8975 - DNA, 15 bp, Homo sapiens
tacaatgattcactc

SEQ ID NO: 8976 - DNA, 15 bp, Homo sapiens
ctacaatgattcact

SEQ ID NO: 8977 - DNA, 15 bp, Homo sapiens
cctacaatgattcac

SEQ ID NO: 8978 - DNA, 15 bp, Homo sapiens
tcctacaatgattca

SEQ ID NO: 8979 - DNA, 15 bp, Homo sapiens
ctcctacaatgattc

SEQ ID NO: 8980 - DNA, 15 bp, Homo sapiens
tctcctacaatgatt

SEQ ID NO: 8981 - DNA, 15 bp, Homo sapiens
ttctcctacaatgat

SEQ ID NO: 8982 - DNA, 15 bp, Homo sapiens
tttctcctacaatga

SEQ ID NO: 8983 - DNA, 15 bp, Homo sapiens
ttttctcctacaatg

SEQ ID NO: 8984 - DNA, 15 bp, Homo sapiens
tttttctcctacaat

SEQ ID NO: 8985 - DNA, 15 bp, Homo sapiens
gtttttctcctacaa

SEQ ID NO: 8986 - DNA, 15 bp, Homo sapiens
agtttttctcctaca

SEQ ID NO: 8987 - DNA, 15 bp, Homo sapiens
gagtttttctcctac

SEQ ID NO: 8988 - DNA, 15 bp, Homo sapiens
tgagtttttctccta

SEQ ID NO: 8989 - DNA, 15 bp, Homo sapiens
ctgagtttttctcct

SEQ ID NO: 8990 - DNA, 15 bp, Homo sapiens
actgagtttttctcc

SEQ ID NO: 8991 - DNA, 15 bp, Homo sapiens
aactgagtttttctc

SEQ ID NO: 8992 - DNA, 15 bp, Homo sapiens
gaactgagtttttct

SEQ ID NO: 8993 - DNA, 15 bp, Homo sapiens
ggaactgagtttttc

SEQ ID NO: 8994 - DNA, 15 bp, Homo sapiens
gggaactgagttttt

SEQ ID NO: 8995 - DNA, 15 bp, Homo sapiens
agggaactgagtttt

SEQ ID NO: 8996 - DNA, 15 bp, Homo sapiens
gagggaactgagttt

SEQ ID NO: 8997 - DNA, 15 bp, Homo sapiens
tgagggaactgagtt

SEQ ID NO: 8998 - DNA, 15 bp, Homo sapiens
gtgagggaactgagt

SEQ ID NO: 8999 - DNA, 15 bp, Homo sapiens
ggtgagggaactgag

SEQ ID NO: 9000 - DNA, 15 bp, Homo sapiens
gggtgagggaactga

SEQ ID NO: 9001 - DNA, 15 bp, Homo sapiens
agggtgagggaactg

SEQ ID NO: 9002 - DNA, 15 bp, Homo sapiens
cagggtgagggaact

SEQ ID NO: 9003 - DNA, 15 bp, Homo sapiens
tcagggtgagggaac

SEQ ID NO: 9004 - DNA, 15 bp, Homo sapiens
atcagggtgagggaa

SEQ ID NO: 9005 - DNA, 15 bp, Homo sapiens
gatcagggtgaggga

SEQ ID NO: 9006 - DNA, 15 bp, Homo sapiens
tgatcagggtgaggg

SEQ ID NO: 9007 - DNA, 15 bp, Homo sapiens
ttgatcagggtgagg

SEQ ID NO: 9008 - DNA, 15 bp, Homo sapiens
gttgatcagggtgag

SEQ ID NO: 9009 - DNA, 15 bp, Homo sapiens
ggttgatcagggtga

SEQ ID NO: 9010 - DNA, 15 bp, Homo sapiens
aggttgatcagggtg

SEQ ID NO: 9011 - DNA, 15 bp, Homo sapiens
caggttgatcagggt

SEQ ID NO: 9012 - DNA, 15 bp, Homo sapiens
ccaggttgatcaggg

SEQ ID NO: 9013 - DNA, 15 bp, Homo sapiens
tccaggttgatcagg

SEQ ID NO: 9014 - DNA, 15 bp, Homo sapiens
gtccaggttgatcag

SEQ ID NO: 9015 - DNA, 15 bp, Homo sapiens
tgtccaggttgatca

SEQ ID NO: 9016 - DNA, 15 bp, Homo sapiens
ctgtccaggttgatc

SEQ ID NO: 9017 - DNA, 15 bp, Homo sapiens
tctgtccaggttgat

SEQ ID NO: 9018 - DNA, 15 bp, Homo sapiens
atctgtccaggttga

SEQ ID NO: 9019 - DNA, 15 bp, Homo sapiens
gatctgtccaggttg

SEQ ID NO: 9020 - DNA, 15 bp, Homo sapiens
agatctgtccaggtt

SEQ ID NO: 9021 - DNA, 15 bp, Homo sapiens
gagatctgtccaggt

SEQ ID NO: 9022 - DNA, 15 bp, Homo sapiens
agagatctgtccagg

SEQ ID NO: 9023 - DNA, 15 bp, Homo sapiens
gagagatctgtccag

SEQ ID NO: 9024 - DNA, 15 bp, Homo sapiens
agagagatctgtcca

SEQ ID NO: 9025 - DNA, 15 bp, Homo sapiens
aagagagatctgtcc

SEQ ID NO: 9026 - DNA, 15 bp, Homo sapiens
gaagagagatctgtc

SEQ ID NO: 9027 - DNA, 15 bp, Homo sapiens
ggaagagagatctgt

SEQ ID NO: 9028 - DNA, 15 bp, Homo sapiens
aggaagagagatctg

SEQ ID NO: 9029 - DNA, 15 bp, Homo sapiens
aaggaagagagatct

SEQ ID NO: 9030 - DNA, 15 bp, Homo sapiens
aaaggaagagagatc

SEQ ID NO: 9031 - DNA, 15 bp, Homo sapiens
taaaggaagagagat

SEQ ID NO: 9032 - DNA, 15 bp, Homo sapiens
ttaaaggaagagaga

SEQ ID NO: 9033 - DNA, 15 bp, Homo sapiens
tttaaaggaagagag

SEQ ID NO: 9034 - DNA, 15 bp, Homo sapiens
ttttaaaggaagaga

SEQ ID NO: 9035 - DNA, 15 bp, Homo sapiens
cttttaaaggaagag

SEQ ID NO: 9036 - DNA, 15 bp, Homo sapiens
gcttttaaaggaaga

SEQ ID NO: 9037 - DNA, 15 bp, Homo sapiens
agcttttaaaggaag

SEQ ID NO: 9038 - DNA, 15 bp, Homo sapiens
aagcttttaaaggaa

SEQ ID NO: 9039 - DNA, 15 bp, Homo sapiens
aaagcttttaaagga

SEQ ID NO: 9040 - DNA, 15 bp, Homo sapiens
gaaagcttttaaagg

SEQ ID NO: 9041 - DNA, 15 bp, Homo sapiens
agaaagcttttaaag

SEQ ID NO: 9042 - DNA, 15 bp, Homo sapiens
aagaaagcttttaaa

SEQ ID NO: 9043 - DNA, 15 bp, Homo sapiens
caagaaagcttttaa

SEQ ID NO: 9044 - DNA, 15 bp, Homo sapiens
ccaagaaagctttta

SEQ ID NO: 9045 - DNA, 15 bp, Homo sapiens
tccaagaaagctttt

SEQ ID NO: 9046 - DNA, 15 bp, Homo sapiens
gtccaagaaagcttt

SEQ ID NO: 9047 - DNA, 15 bp, Homo sapiens
tgtccaagaaagctt

SEQ ID NO: 9048 - DNA, 15 bp, Homo sapiens
atgtccaagaaagct

SEQ ID NO: 9049 - DNA, 15 bp, Homo sapiens
gatgtccaagaaagc

SEQ ID NO: 9050 - DNA, 15 bp, Homo sapiens
agatgtccaagaaag

SEQ ID NO: 9051 - DNA, 15 bp, Homo sapiens
tagatgtccaagaaa

SEQ ID NO: 9052 - DNA, 15 bp, Homo sapiens
ttagatgtccaagaa

SEQ ID NO: 9053 - DNA, 15 bp, Homo sapiens
cttagatgtccaaga

SEQ ID NO: 9054 - DNA, 15 bp, Homo sapiens
ccttagatgtccaag

SEQ ID NO: 9055 - DNA, 15 bp, Homo sapiens
cccttagatgtccaa

SEQ ID NO: 9056 - DNA, 15 bp, Homo sapiens
gcccttagatgtcca

SEQ ID NO: 9057 - DNA, 15 bp, Homo sapiens
agcccttagatgtcc

SEQ ID NO: 9058 - DNA, 15 bp, Homo sapiens
tagcccttagatgtc

SEQ ID NO: 9059 - DNA, 15 bp, Homo sapiens
ctagcccttagatgt

SEQ ID NO: 9060 - DNA, 15 bp, Homo sapiens
cctagcccttagatg

SEQ ID NO: 9061 - DNA, 15 bp, Homo sapiens
tcctagcccttagat

SEQ ID NO: 9062 - DNA, 15 bp, Homo sapiens
ttcctagcccttaga

SEQ ID NO: 9063 - DNA, 15 bp, Homo sapiens
tttcctagcccttag

SEQ ID NO: 9064 - DNA, 15 bp, Homo sapiens
ttttcctagccctta

SEQ ID NO: 9065 - DNA, 15 bp, Homo sapiens
tttttcctagccctt

SEQ ID NO: 9066 - DNA, 15 bp, Homo sapiens
atttttcctagccct

SEQ ID NO: 9067 - DNA, 15 bp, Homo sapiens
catttttcctagccc

SEQ ID NO: 9068 - DNA, 15 bp, Homo sapiens
acatttttcctagcc

SEQ ID NO: 9069 - DNA, 15 bp, Homo sapiens
gacatttttcctagc

SEQ ID NO: 9070 - DNA, 15 bp, Homo sapiens
tgacatttttcctag

SEQ ID NO: 9071 - DNA, 15 bp, Homo sapiens
ctgacatttttccta

SEQ ID NO: 9072 - DNA, 15 bp, Homo sapiens
cctgacatttttcct

SEQ ID NO: 9073 - DNA, 15 bp, Homo sapiens
ccctgacatttttcc

SEQ ID NO: 9074 - DNA, 15 bp, Homo sapiens
tccctgacatttttc

SEQ ID NO: 9075 - DNA, 15 bp, Homo sapiens
ctccctgacattttt

SEQ ID NO: 9076 - DNA, 15 bp, Homo sapiens
gctccctgacatttt

SEQ ID NO: 9077 - DNA, 15 bp, Homo sapiens
tgctccctgacattt

SEQ ID NO: 9078 - DNA, 15 bp, Homo sapiens
atgctccctgacatt

SEQ ID NO: 9079 - DNA, 15 bp, Homo sapiens
aatgctccctgacat

SEQ ID NO: 9080 - DNA, 15 bp, Homo sapiens
caatgctccctgaca

SEQ ID NO: 9081 - DNA, 15 bp, Homo sapiens
ccaatgctccctgac

SEQ ID NO: 9082 - DNA, 15 bp, Homo sapiens
cccaatgctccctga

SEQ ID NO: 9083 - DNA, 15 bp, Homo sapiens
tcccaatgctccctg

SEQ ID NO: 9084 - DNA, 15 bp, Homo sapiens
ttcccaatgctccct

SEQ ID NO: 9085 - DNA, 15 bp, Homo sapiens
cttcccaatgctccc

SEQ ID NO: 9086 - DNA, 15 bp, Homo sapiens
ccttcccaatgctcc

SEQ ID NO: 9087 - DNA, 15 bp, Homo sapiens
accttcccaatgctc

SEQ ID NO: 9088 - DNA, 15 bp, Homo sapiens
taccttcccaatgct

SEQ ID NO: 9089 - DNA, 15 bp, Homo sapiens
ttaccttcccaatgc

SEQ ID NO: 9090 - DNA, 15 bp, Homo sapiens
tttaccttcccaatg

SEQ ID NO: 9091 - DNA, 15 bp, Homo sapiens
atttaccttcccaat

SEQ ID NO: 9092 - DNA, 15 bp, Homo sapiens
catttaccttcccaa

SEQ ID NO: 9093 - DNA, 15 bp, Homo sapiens
tcatttaccttccca

SEQ ID NO: 9094 - DNA, 15 bp, Homo sapiens
ttcatttaccttccc

SEQ ID NO: 9095 - DNA, 15 bp, Homo sapiens
cttcatttaccttcc

SEQ ID NO: 9096 - DNA, 15 bp, Homo sapiens
acttcatttaccttc

SEQ ID NO: 9097 - DNA, 15 bp, Homo sapiens
gacttcatttacctt

SEQ ID NO: 9098 - DNA, 15 bp, Homo sapiens
tgacttcatttacct

SEQ ID NO: 9099 - DNA, 15 bp, Homo sapiens
ctgacttcatttacc

SEQ ID NO: 9100 - DNA, 15 bp, Homo sapiens
cctgacttcatttac

SEQ ID NO: 9101 - DNA, 15 bp, Homo sapiens
acctgacttcattta

SEQ ID NO: 9102 - DNA, 15 bp, Homo sapiens
aacctgacttcattt

SEQ ID NO: 9103 - DNA, 15 bp, Homo sapiens
aaacctgacttcatt

SEQ ID NO: 9104 - DNA, 15 bp, Homo sapiens
taaacctgacttcat

SEQ ID NO: 9105 - DNA, 15 bp, Homo sapiens
gtaaacctgacttca

SEQ ID NO: 9106 - DNA, 15 bp, Homo sapiens
tgtaaacctgacttc

SEQ ID NO: 9107 - DNA, 15 bp, Homo sapiens
ttgtaaacctgactt

SEQ ID NO: 9108 - DNA, 15 bp, Homo sapiens
tttgtaaacctgact

SEQ ID NO: 9109 - DNA, 15 bp, Homo sapiens
ctttgtaaacctgac

SEQ ID NO: 9110 - DNA, 15 bp, Homo sapiens
actttgtaaacctga

SEQ ID NO: 9111 - DNA, 15 bp, Homo sapiens
gactttgtaaacctg

SEQ ID NO: 9112 - DNA, 15 bp, Homo sapiens
tgactttgtaaacct

SEQ ID NO: 9113 - DNA, 15 bp, Homo sapiens
ttgactttgtaaacc

SEQ ID NO: 9114 - DNA, 15 bp, Homo sapiens
cttgactttgtaaac

SEQ ID NO: 9115 - DNA, 15 bp, Homo sapiens
acttgactttgtaaa

SEQ ID NO: 9116 - DNA, 15 bp, Homo sapiens
aacttgactttgtaa

SEQ ID NO: 9117 - DNA, 15 bp, Homo sapiens
aaacttgactttgta

SEQ ID NO: 9118 - DNA, 15 bp, Homo sapiens
taaacttgactttgt

SEQ ID NO: 9119 - DNA, 15 bp, Homo sapiens
gtaaacttgactttg

SEQ ID NO: 9120 - DNA, 15 bp, Homo sapiens
agtaaacttgacttt

SEQ ID NO: 9121 - DNA, 15 bp, Homo sapiens
aagtaaacttgactt

SEQ ID NO: 9122 - DNA, 15 bp, Homo sapiens
gaagtaaacttgact

SEQ ID NO: 9123 - DNA, 15 bp, Homo sapiens
agaagtaaacttgac

SEQ ID NO: 9124 - DNA, 15 bp, Homo sapiens
aagaagtaaacttga

SEQ ID NO: 9125 - DNA, 15 bp, Homo sapiens
caagaagtaaacttg

SEQ ID NO: 9126 - DNA, 15 bp, Homo sapiens
ccaagaagtaaactt

SEQ ID NO: 9127 - DNA, 15 bp, Homo sapiens
cccaagaagtaaact

SEQ ID NO: 9128 - DNA, 15 bp, Homo sapiens
tcccaagaagtaaac

SEQ ID NO: 9129 - DNA, 15 bp, Homo sapiens
ctcccaagaagtaaa

SEQ ID NO: 9130 - DNA, 15 bp, Homo sapiens
tctcccaagaagtaa

SEQ ID NO: 9131 - DNA, 15 bp, Homo sapiens
ttctcccaagaagta

SEQ ID NO: 9132 - DNA, 15 bp, Homo sapiens
tttctcccaagaagt

SEQ ID NO: 9133 - DNA, 15 bp, Homo sapiens
ttttctcccaagaag

SEQ ID NO: 9134 - DNA, 15 bp, Homo sapiens
tttttctcccaagaa

SEQ ID NO: 9135 - DNA, 15 bp, Homo sapiens
atttttctcccaaga

SEQ ID NO: 9136 - DNA, 15 bp, Homo sapiens
tatttttctcccaag

SEQ ID NO: 9137 - DNA, 15 bp, Homo sapiens
gtatttttctcccaa

SEQ ID NO: 9138 - DNA, 15 bp, Homo sapiens
tgtatttttctccca

SEQ ID NO: 9139 - DNA, 15 bp, Homo sapiens
ttgtatttttctccc

SEQ ID NO: 9140 - DNA, 15 bp, Homo sapiens
attgtatttttctcc

SEQ ID NO: 9141 - DNA, 15 bp, Homo sapiens
aattgtatttttctc

SEQ ID NO: 9142 - DNA, 15 bp, Homo sapiens
aaattgtatttttct

SEQ ID NO: 9143 - DNA, 15 bp, Homo sapiens
gaaattgtatttttc

SEQ ID NO: 9144 - DNA, 15 bp, Homo sapiens
ggaaattgtattttt

SEQ ID NO: 9145 - DNA, 15 bp, Homo sapiens
tggaaattgtatttt

SEQ ID NO: 9146 - DNA, 15 bp, Homo sapiens
ttggaaattgtattt

SEQ ID NO: 9147 - DNA, 15 bp, Homo sapiens
tttggaaattgtatt

SEQ ID NO: 9148 - DNA, 15 bp, Homo sapiens
atttggaaattgtat

SEQ ID NO: 9149 - DNA, 15 bp, Homo sapiens
gatttggaaattgta

SEQ ID NO: 9150 - DNA, 15 bp, Homo sapiens
ggatttggaaattgt

SEQ ID NO: 9151 - DNA, 15 bp, Homo sapiens
aggatttggaaattg

SEQ ID NO: 9152 - DNA, 15 bp, Homo sapiens
gaggatttggaaatt

SEQ ID NO: 9153 - DNA, 15 bp, Homo sapiens
agaggatttggaaat

SEQ ID NO: 9154 - DNA, 15 bp, Homo sapiens
cagaggatttggaaa

SEQ ID NO: 9155 - DNA, 15 bp, Homo sapiens
acagaggatttggaa

SEQ ID NO: 9156 - DNA, 15 bp, Homo sapiens
aacagaggatttgga

SEQ ID NO: 9157 - DNA, 15 bp, Homo sapiens
taacagaggatttgg

SEQ ID NO: 9158 - DNA, 15 bp, Homo sapiens
ataacagaggatttg

SEQ ID NO: 9159 - DNA, 15 bp, Homo sapiens
tataacagaggattt

SEQ ID NO: 9160 - DNA, 15 bp, Homo sapiens
ttataacagaggatt

SEQ ID NO: 9161 - DNA, 15 bp, Homo sapiens
attataacagaggat

SEQ ID NO: 9162 - DNA, 15 bp, Homo sapiens
aattataacagagga

SEQ ID NO: 9163 - DNA, 15 bp, Homo sapiens
caattataacagagg

SEQ ID NO: 9164 - DNA, 15 bp, Homo sapiens
gcaattataacagag

SEQ ID NO: 9165 - DNA, 15 bp, Homo sapiens
ggcaattataacaga

SEQ ID NO: 9166 - DNA, 15 bp, Homo sapiens
tggcaattataacag

SEQ ID NO: 9167 - DNA, 15 bp, Homo sapiens
atggcaattataaca

SEQ ID NO: 9168 - DNA, 15 bp, Homo sapiens
gatggcaattataac

SEQ ID NO: 9169 - DNA, 15 bp, Homo sapiens
cgatggcaattataa

SEQ ID NO: 9170 - DNA, 15 bp, Homo sapiens
ccgatggcaattata

SEQ ID NO: 9171 - DNA, 15 bp, Homo sapiens
gccgatggcaattat

SEQ ID NO: 9172 - DNA, 15 bp, Homo sapiens
ggccgatggcaatta

SEQ ID NO: 9173 - DNA, 15 bp, Homo sapiens
gggccgatggcaatt

SEQ ID NO: 9174 - DNA, 15 bp, Homo sapiens
ggggccgatggcaat

SEQ ID NO: 9175 - DNA, 15 bp, Homo sapiens
gggggccgatggcaa

SEQ ID NO: 9176 - DNA, 15 bp, Homo sapiens
agggggccgatggca

SEQ ID NO: 9177 - DNA, 15 bp, Homo sapiens
cagggggccgatggc

SEQ ID NO: 9178 - DNA, 15 bp, Homo sapiens
ccagggggccgatgg

SEQ ID NO: 9179 - DNA, 15 bp, Homo sapiens
tccagggggccgatg

SEQ ID NO: 9180 - DNA, 15 bp, Homo sapiens
ctccagggggccgat

SEQ ID NO: 9181 - DNA, 15 bp, Homo sapiens
actccagggggccga

SEQ ID NO: 9182 - DNA, 15 bp, Homo sapiens
cactccagggggccg

SEQ ID NO: 9183 - DNA, 15 bp, Homo sapiens
ccactccagggggcc

SEQ ID NO: 9184 - DNA, 15 bp, Homo sapiens
accactccagggggc

SEQ ID NO: 9185 - DNA, 15 bp, Homo sapiens
caccactccaggggg

SEQ ID NO: 9186 - DNA, 15 bp, Homo sapiens
tcaccactccagggg

SEQ ID NO: 9187 - DNA, 15 bp, Homo sapiens
ctcaccactccaggg

SEQ ID NO: 9188 - DNA, 15 bp, Homo sapiens
tctcaccactccagg

SEQ ID NO: 9189 - DNA, 15 bp, Homo sapiens
atctcaccactccag

SEQ ID NO: 9190 - DNA, 15 bp, Homo sapiens
gatctcaccactcca

SEQ ID NO: 9191 - DNA, 15 bp, Homo sapiens
agatctcaccactcc

SEQ ID NO: 9192 - DNA, 15 bp, Homo sapiens
gagatctcaccactc

SEQ ID NO: 9193 - DNA, 15 bp, Homo sapiens
cgagatctcaccact

SEQ ID NO: 9194 - DNA, 15 bp, Homo sapiens
ccgagatctcaccac

SEQ ID NO: 9195 - DNA, 15 bp, Homo sapiens
tccgagatctcacca

SEQ ID NO: 9196 - DNA, 15 bp, Homo sapiens
ttccgagatctcacc

SEQ ID NO: 9197 - DNA, 15 bp, Homo sapiens
attccgagatctcac

SEQ ID NO: 9198 - DNA, 15 bp, Homo sapiens
tattccgagatctca

SEQ ID NO: 9199 - DNA, 15 bp, Homo sapiens
atattccgagatctc

SEQ ID NO: 9200 - DNA, 15 bp, Homo sapiens
catattccgagatct

SEQ ID NO: 9201 - DNA, 15 bp, Homo sapiens
ccatattccgagatc

SEQ ID NO: 9202 - DNA, 15 bp, Homo sapiens
gccatattccgagat

SEQ ID NO: 9203 - DNA, 15 bp, Homo sapiens
agccatattccgaga

SEQ ID NO: 9204 - DNA, 15 bp, Homo sapiens
gagccatattccgag

SEQ ID NO: 9205 - DNA, 15 bp, Homo sapiens
cgagccatattccga

SEQ ID NO: 9206 - DNA, 15 bp, Homo sapiens
ccgagccatattccg

SEQ ID NO: 9207 - DNA, 15 bp, Homo sapiens
cccgagccatattcc

SEQ ID NO: 9208 - DNA, 15 bp, Homo sapiens
acccgagccatattc

SEQ ID NO: 9209 - DNA, 15 bp, Homo sapiens
cacccgagccatatt

SEQ ID NO: 9210 - DNA, 15 bp, Homo sapiens
gcacccgagccatat

SEQ ID NO: 9211 - DNA, 15 bp, Homo sapiens
tgcacccgagccata

SEQ ID NO: 9212 - DNA, 15 bp, Homo sapiens
ctgcacccgagccat

SEQ ID NO: 9213 - DNA, 15 bp, Homo sapiens
actgcacccgagcca

SEQ ID NO: 9214 - DNA, 15 bp, Homo sapiens
cactgcacccgagcc

SEQ ID NO: 9215 - DNA, 15 bp, Homo sapiens
ccactgcacccgagc

SEQ ID NO: 9216 - DNA, 15 bp, Homo sapiens
gccactgcacccgag

SEQ ID NO: 9217 - DNA, 15 bp, Homo sapiens
agccactgcacccga

SEQ ID NO: 9218 - DNA, 15 bp, Homo sapiens
gagccactgcacccg

SEQ ID NO: 9219 - DNA, 15 bp, Homo sapiens
agagccactgcaccc

SEQ ID NO: 9220 - DNA, 15 bp, Homo sapiens
aagagccactgcacc

SEQ ID NO: 9221 - DNA, 15 bp, Homo sapiens
gaagagccactgcac

SEQ ID NO: 9222 - DNA, 15 bp, Homo sapiens
tgaagagccactgca

SEQ ID NO: 9223 - DNA, 15 bp, Homo sapiens
gtgaagagccactgc

SEQ ID NO: 9224 - DNA, 15 bp, Homo sapiens
agtgaagagccactg

SEQ ID NO: 9225 - DNA, 15 bp, Homo sapiens
cagtgaagagccact

SEQ ID NO: 9226 - DNA, 15 bp, Homo sapiens
acagtgaagagccac

SEQ ID NO: 9227 - DNA, 15 bp, Homo sapiens
cacagtgaagagcca

SEQ ID NO: 9228 - DNA, 15 bp, Homo sapiens
ccacagtgaagagcc

SEQ ID NO: 9229 - DNA, 15 bp, Homo sapiens
cccacagtgaagagc

SEQ ID NO: 9230 - DNA, 15 bp, Homo sapiens
gcccacagtgaagag

SEQ ID NO: 9231 - DNA, 15 bp, Homo sapiens
ggcccacagtgaaga

SEQ ID NO: 9232 - DNA, 15 bp, Homo sapiens
aggcccacagtgaag

SEQ ID NO: 9233 - DNA, 15 bp, Homo sapiens
caggcccacagtgaa

SEQ ID NO: 9234 - DNA, 15 bp, Homo sapiens
gcaggcccacagtga

SEQ ID NO: 9235 - DNA, 15 bp, Homo sapiens
tgcaggcccacagtg

SEQ ID NO: 9236 - DNA, 15 bp, Homo sapiens
ctgcaggcccacagt

SEQ ID NO: 9237 - DNA, 15 bp, Homo sapiens
cctgcaggcccacag

SEQ ID NO: 9238 - DNA, 15 bp, Homo sapiens
gcctgcaggcccaca

SEQ ID NO: 9239 - DNA, 15 bp, Homo sapiens
agcctgcaggcccac

SEQ ID NO: 9240 - DNA, 15 bp, Homo sapiens
tagcctgcaggccca

SEQ ID NO: 9241 - DNA, 15 bp, Homo sapiens
atagcctgcaggccc

SEQ ID NO: 9242 - DNA, 15 bp, Homo sapiens
aatagcctgcaggcc

SEQ ID NO: 9243 - DNA, 15 bp, Homo sapiens
gaatagcctgcaggc

SEQ ID NO: 9244 - DNA, 15 bp, Homo sapiens
agaatagcctgcagg

SEQ ID NO: 9245 - DNA, 15 bp, Homo sapiens
cagaatagcctgcag

SEQ ID NO: 9246 - DNA, 15 bp, Homo sapiens
tcagaatagcctgca

SEQ ID NO: 9247 - DNA, 15 bp, Homo sapiens
ttcagaatagcctgc

SEQ ID NO: 9248 - DNA, 15 bp, Homo sapiens
tttcagaatagcctg

SEQ ID NO: 9249 - DNA, 15 bp, Homo sapiens
ttttcagaatagcct

SEQ ID NO: 9250 - DNA, 15 bp, Homo sapiens
cttttcagaatagcc

SEQ ID NO: 9251 - DNA, 15 bp, Homo sapiens
gcttttcagaatagc

SEQ ID NO: 9252 - DNA, 15 bp, Homo sapiens
agcttttcagaatag

SEQ ID NO: 9253 - DNA, 15 bp, Homo sapiens
cagcttttcagaata

SEQ ID NO: 9254 - DNA, 15 bp, Homo sapiens
tcagcttttcagaat

SEQ ID NO: 9255 - DNA, 15 bp, Homo sapiens
atcagcttttcagaa

SEQ ID NO: 9256 - DNA, 15 bp, Homo sapiens
catcagcttttcaga

SEQ ID NO: 9257 - DNA, 15 bp, Homo sapiens
tcatcagcttttcag

SEQ ID NO: 9258 - DNA, 15 bp, Homo sapiens
ttcatcagcttttca

SEQ ID NO: 9259 - DNA, 15 bp, Homo sapiens
tttcatcagcttttc

SEQ ID NO: 9260 - DNA, 15 bp, Homo sapiens
ttttcatcagctttt

SEQ ID NO: 9261 - DNA, 15 bp, Homo sapiens
gttttcatcagcttt

SEQ ID NO: 9262 - DNA, 15 bp, Homo sapiens
ggttttcatcagctt

SEQ ID NO: 9263 - DNA, 15 bp, Homo sapiens
tggttttcatcagct

SEQ ID NO: 9264 - DNA, 15 bp, Homo sapiens
ttggttttcatcagc

SEQ ID NO: 9265 - DNA, 15 bp, Homo sapiens
attggttttcatcag

SEQ ID NO: 9266 - DNA, 15 bp, Homo sapiens
cattggttttcatca

SEQ ID NO: 9267 - DNA, 15 bp, Homo sapiens
tcattggttttcatc

SEQ ID NO: 9268 - DNA, 15 bp, Homo sapiens
gtcattggttttcat

SEQ ID NO: 9269 - DNA, 15 bp, Homo sapiens
ggtcattggttttca

SEQ ID NO: 9270 - DNA, 15 bp, Homo sapiens
gggtcattggttttc

SEQ ID NO: 9271 - DNA, 15 bp, Homo sapiens
ggggtcattggtttt

SEQ ID NO: 9272 - DNA, 15 bp, Homo sapiens
aggggtcattggttt

SEQ ID NO: 9273 - DNA, 15 bp, Homo sapiens
gaggggtcattggtt

SEQ ID NO: 9274 - DNA, 15 bp, Homo sapiens
agaggggtcattggt

SEQ ID NO: 9275 - DNA, 15 bp, Homo sapiens
aagaggggtcattgg

SEQ ID NO: 9276 - DNA, 15 bp, Homo sapiens
gaagaggggtcattg

SEQ ID NO: 9277 - DNA, 15 bp, Homo sapiens
ggaagaggggtcatt

SEQ ID NO: 9278 - DNA, 15 bp, Homo sapiens
tggaagaggggtcat

SEQ ID NO: 9279 - DNA, 15 bp, Homo sapiens
ttggaagaggggtca

SEQ ID NO: 9280 - DNA, 15 bp, Homo sapiens
cttggaagaggggtc

SEQ ID NO: 9281 - DNA, 15 bp, Homo sapiens
tcttggaagaggggt

SEQ ID NO: 9282 - DNA, 15 bp, Homo sapiens
ttcttggaagagggg

SEQ ID NO: 9283 - DNA, 15 bp, Homo sapiens
tttcttggaagaggg

SEQ ID NO: 9284 - DNA, 15 bp, Homo sapiens
ttttcttggaagagg

SEQ ID NO: 9285 - DNA, 15 bp, Homo sapiens
tttttcttggaagag

SEQ ID NO: 9286 - DNA, 15 bp, Homo sapiens
atttttcttggaaga

SEQ ID NO: 9287 - DNA, 15 bp, Homo sapiens
catttttcttggaag

SEQ ID NO: 9288 - DNA, 15 bp, Homo sapiens
ccatttttcttggaa

SEQ ID NO: 9289 - DNA, 15 bp, Homo sapiens
gccatttttcttgga

SEQ ID NO: 9290 - DNA, 15 bp, Homo sapiens
ggccatttttcttgg

SEQ ID NO: 9291 - DNA, 15 bp, Homo sapiens
tggccatttttcttg

SEQ ID NO: 9292 - DNA, 15 bp, Homo sapiens
gtggccatttttctt

SEQ ID NO: 9293 - DNA, 15 bp, Homo sapiens
tgtggccatttttct

SEQ ID NO: 9294 - DNA, 15 bp, Homo sapiens
atgtggccatttttc

SEQ ID NO: 9295 - DNA, 15 bp, Homo sapiens
tatgtggccattttt

SEQ ID NO: 9296 - DNA, 15 bp, Homo sapiens
gtatgtggccatttt

SEQ ID NO: 9297 - DNA, 15 bp, Homo sapiens
ggtatgtggccattt

SEQ ID NO: 9298 - DNA, 15 bp, Homo sapiens
tggtatgtggccatt

SEQ ID NO: 9299 - DNA, 15 bp, Homo sapiens
ttggtatgtggccat

SEQ ID NO: 9300 - DNA, 15 bp, Homo sapiens
tttggtatgtggcca

SEQ ID NO: 9301 - DNA, 15 bp, Homo sapiens
gtttggtatgtggcc

SEQ ID NO: 9302 - DNA, 15 bp, Homo sapiens
tgtttggtatgtggc

SEQ ID NO: 9303 - DNA, 15 bp, Homo sapiens
atgtttggtatgtgg

SEQ ID NO: 9304 - DNA, 15 bp, Homo sapiens
aatgtttggtatgtg

SEQ ID NO: 9305 - DNA, 15 bp, Homo sapiens
taatgtttggtatgt

SEQ ID NO: 9306 - DNA, 15 bp, Homo sapiens
gtaatgtttggtatg

SEQ ID NO: 9307 - DNA, 15 bp, Homo sapiens
tgtaatgtttggtat

SEQ ID NO: 9308 - DNA, 15 bp, Homo sapiens
gtgtaatgtttggta

SEQ ID NO: 9309 - DNA, 15 bp, Homo sapiens
agtgtaatgtttggt

SEQ ID NO: 9310 - DNA, 15 bp, Homo sapiens
cagtgtaatgtttgg

SEQ ID NO: 9311 - DNA, 15 bp, Homo sapiens
acagtgtaatgtttg

SEQ ID NO: 9312 - DNA, 15 bp, Homo sapiens
tacagtgtaatgttt

SEQ ID NO: 9313 - DNA, 15 bp, Homo sapiens
gtacagtgtaatgtt

SEQ ID NO: 9314 - DNA, 15 bp, Homo sapiens
tgtacagtgtaatgt

SEQ ID NO: 9315 - DNA, 15 bp, Homo sapiens
atgtacagtgtaatg

SEQ ID NO: 9316 - DNA, 15 bp, Homo sapiens
gatgtacagtgtaat

SEQ ID NO: 9317 - DNA, 15 bp, Homo sapiens
agatgtacagtgtaa

SEQ ID NO: 9318 - DNA, 15 bp, Homo sapiens
cagatgtacagtgta

SEQ ID NO: 9319 - DNA, 15 bp, Homo sapiens
tcagatgtacagtgt

SEQ ID NO: 9320 - DNA, 15 bp, Homo sapiens
atcagatgtacagtg

SEQ ID NO: 9321 - DNA, 15 bp, Homo sapiens
aatcagatgtacagt

SEQ ID NO: 9322 - DNA, 15 bp, Homo sapiens
aaatcagatgtacag

SEQ ID NO: 9323 - DNA, 15 bp, Homo sapiens
gaaatcagatgtaca

SEQ ID NO: 9324 - DNA, 15 bp, Homo sapiens
tgaaatcagatgtac

SEQ ID NO: 9325 - DNA, 15 bp, Homo sapiens
ctgaaatcagatgta

SEQ ID NO: 9326 - DNA, 15 bp, Homo sapiens
cctgaaatcagatgt

SEQ ID NO: 9327 - DNA, 15 bp, Homo sapiens
ccctgaaatcagatg

SEQ ID NO: 9328 - DNA, 15 bp, Homo sapiens
tccctgaaatcagat

SEQ ID NO: 9329 - DNA, 15 bp, Homo sapiens
ttccctgaaatcaga

SEQ ID NO: 9330 - DNA, 15 bp, Homo sapiens
attccctgaaatcag

SEQ ID NO: 9331 - DNA, 15 bp, Homo sapiens
aattccctgaaatca

SEQ ID NO: 9332 - DNA, 15 bp, Homo sapiens
caattccctgaaatc

SEQ ID NO: 9333 - DNA, 15 bp, Homo sapiens
acaattccctgaaat

SEQ ID NO: 9334 - DNA, 15 bp, Homo sapiens
tacaattccctgaaa

SEQ ID NO: 9335 - DNA, 15 bp, Homo sapiens
ctacaattccctgaa

SEQ ID NO: 9336 - DNA, 15 bp, Homo sapiens
tctacaattccctga

SEQ ID NO: 9337 - DNA, 15 bp, Homo sapiens
atctacaattccctg

SEQ ID NO: 9338 - DNA, 15 bp, Homo sapiens
catctacaattccct

SEQ ID NO: 9339 - DNA, 15 bp, Homo sapiens
gcatctacaattccc

SEQ ID NO: 9340 - DNA, 15 bp, Homo sapiens
ggcatctacaattcc

SEQ ID NO: 9341 - DNA, 15 bp, Homo sapiens
tggcatctacaattc

SEQ ID NO: 9342 - DNA, 15 bp, Homo sapiens
ctggcatctacaatt

SEQ ID NO: 9343 - DNA, 15 bp, Homo sapiens
cctggcatctacaat

SEQ ID NO: 9344 - DNA, 15 bp, Homo sapiens
acctggcatctacaa

SEQ ID NO: 9345 - DNA, 15 bp, Homo sapiens
aacctggcatctaca

SEQ ID NO: 9346 - DNA, 15 bp, Homo sapiens
taacctggcatctac

SEQ ID NO: 9347 - DNA, 15 bp, Homo sapiens
ctaacctggcatcta

SEQ ID NO: 9348 - DNA, 15 bp, Homo sapiens
actaacctggcatct

SEQ ID NO: 9349 - DNA, 15 bp, Homo sapiens
tactaacctggcatc

SEQ ID NO: 9350 - DNA, 15 bp, Homo sapiens
ctactaacctggcat

SEQ ID NO: 9351 - DNA, 15 bp, Homo sapiens
gctactaacctggca

SEQ ID NO: 9352 - DNA, 15 bp, Homo sapiens
ggctactaacctggc

SEQ ID NO: 9353 - DNA, 15 bp, Homo sapiens
aggctactaacctgg

SEQ ID NO: 9354 - DNA, 15 bp, Homo sapiens
gaggctactaacctg

SEQ ID NO: 9355 - DNA, 15 bp, Homo sapiens
tgaggctactaacct

SEQ ID NO: 9356 - DNA, 15 bp, Homo sapiens
ctgaggctactaacc

SEQ ID NO: 9357 - DNA, 15 bp, Homo sapiens
cctgaggctactaac

SEQ ID NO: 9358 - DNA, 15 bp, Homo sapiens
acctgaggctactaa

SEQ ID NO: 9359 - DNA, 15 bp, Homo sapiens
gacctgaggctacta

SEQ ID NO: 9360 - DNA, 15 bp, Homo sapiens
agacctgaggctact

SEQ ID NO: 9361 - DNA, 15 bp, Homo sapiens
tagacctgaggctac

SEQ ID NO: 9362 - DNA, 15 bp, Homo sapiens
ctagacctgaggcta

SEQ ID NO: 9363 - DNA, 15 bp, Homo sapiens
cctagacctgaggct

SEQ ID NO: 9364 - DNA, 15 bp, Homo sapiens
ccctagacctgaggc

SEQ ID NO: 9365 - DNA, 15 bp, Homo sapiens
accctagacctgagg

SEQ ID NO: 9366 - DNA, 15 bp, Homo sapiens
gaccctagacctgag

SEQ ID NO: 9367 - DNA, 15 bp, Homo sapiens
tgaccctagacctga

SEQ ID NO: 9368 - DNA, 15 bp, Homo sapiens
ttgaccctagacctg

SEQ ID NO: 9369 - DNA, 15 bp, Homo sapiens
tttgaccctagacct

SEQ ID NO: 9370 - DNA, 15 bp, Homo sapiens
ttttgaccctagacc

SEQ ID NO: 9371 - DNA, 15 bp, Homo sapiens
attttgaccctagac

SEQ ID NO: 9372 - DNA, 15 bp, Homo sapiens
aattttgaccctaga

SEQ ID NO: 9373 - DNA, 15 bp, Homo sapiens
gaattttgaccctag

SEQ ID NO: 9374 - DNA, 15 bp, Homo sapiens
tgaattttgacccta

SEQ ID NO: 9375 - DNA, 15 bp, Homo sapiens
ttgaattttgaccct

SEQ ID NO: 9376 - DNA, 15 bp, Homo sapiens
cttgaattttgaccc

SEQ ID NO: 9377 - DNA, 15 bp, Homo sapiens
acttgaattttgacc

SEQ ID NO: 9378 - DNA, 15 bp, Homo sapiens
gacttgaattttgac

SEQ ID NO: 9379 - DNA, 15 bp, Homo sapiens
cgacttgaattttga

SEQ ID NO: 9380 - DNA, 15 bp, Homo sapiens
tcgacttgaattttg

SEQ ID NO: 9381 - DNA, 15 bp, Homo sapiens
ttcgacttgaatttt

SEQ ID NO: 9382 - DNA, 15 bp, Homo sapiens
attcgacttgaattt

SEQ ID NO: 9383 - DNA, 15 bp, Homo sapiens
gattcgacttgaatt

SEQ ID NO: 9384 - DNA, 15 bp, Homo sapiens
ggattcgacttgaat

SEQ ID NO: 9385 - DNA, 15 bp, Homo sapiens
gggattcgacttgaa

SEQ ID NO: 9386 - DNA, 15 bp, Homo sapiens
tgggattcgacttga

SEQ ID NO: 9387 - DNA, 15 bp, Homo sapiens
gtgggattcgacttg

SEQ ID NO: 9388 - DNA, 15 bp, Homo sapiens
tgtgggattcgactt

SEQ ID NO: 9389 - DNA, 15 bp, Homo sapiens
ctgtgggattcgact

SEQ ID NO: 9390 - DNA, 15 bp, Homo sapiens
cctgtgggattcgac

SEQ ID NO: 9391 - DNA, 15 bp, Homo sapiens
tcctgtgggattcga

SEQ ID NO: 9392 - DNA, 15 bp, Homo sapiens
ttcctgtgggattcg

SEQ ID NO: 9393 - DNA, 15 bp, Homo sapiens
cttcctgtgggattc

SEQ ID NO: 9394 - DNA, 15 bp, Homo sapiens
tcttcctgtgggatt

SEQ ID NO: 9395 - DNA, 15 bp, Homo sapiens
ctcttcctgtgggat

SEQ ID NO: 9396 - DNA, 15 bp, Homo sapiens
cctcttcctgtggga

SEQ ID NO: 9397 - DNA, 15 bp, Homo sapiens
ccctcttcctgtggg

SEQ ID NO: 9398 - DNA, 15 bp, Homo sapiens
accctcttcctgtgg

SEQ ID NO: 9399 - DNA, 15 bp, Homo sapiens
gaccctcttcctgtg

SEQ ID NO: 9400 - DNA, 15 bp, Homo sapiens
agaccctcttcctgt

SEQ ID NO: 9401 - DNA, 15 bp, Homo sapiens
cagaccctcttcctg

SEQ ID NO: 9402 - DNA, 15 bp, Homo sapiens
gcagaccctcttcct

SEQ ID NO: 9403 - DNA, 15 bp, Homo sapiens
ggcagaccctcttcc

SEQ ID NO: 9404 - DNA, 15 bp, Homo sapiens
aggcagaccctcttc

SEQ ID NO: 9405 - DNA, 15 bp, Homo sapiens
aaggcagaccctctt

SEQ ID NO: 9406 - DNA, 15 bp, Homo sapiens
gaaggcagaccctct

SEQ ID NO: 9407 - DNA, 15 bp, Homo sapiens
cgaaggcagaccctc

SEQ ID NO: 9408 - DNA, 15 bp, Homo sapiens
ccgaaggcagaccct

SEQ ID NO: 9409 - DNA, 15 bp, Homo sapiens
tccgaaggcagaccc

SEQ ID NO: 9410 - DNA, 15 bp, Homo sapiens
ttccgaaggcagacc

SEQ ID NO: 9411 - DNA, 15 bp, Homo sapiens
attccgaaggcagac

SEQ ID NO: 9412 - DNA, 15 bp, Homo sapiens
aattccgaaggcaga

SEQ ID NO: 9413 - DNA, 15 bp, Homo sapiens
gaattccgaaggcag

SEQ ID NO: 9414 - DNA, 15 bp, Homo sapiens
ggaattccgaaggca

SEQ ID NO: 9415 - DNA, 15 bp, Homo sapiens
gggaattccgaaggc

SEQ ID NO: 9416 - DNA, 15 bp, Homo sapiens
agggaattccgaagg

SEQ ID NO: 9417 - DNA, 15 bp, Homo sapiens
aagggaattccgaag

SEQ ID NO: 9418 - DNA, 15 bp, Homo sapiens
aaagggaattccgaa

SEQ ID NO: 9419 - DNA, 15 bp, Homo sapiens
gaaagggaattccga

SEQ ID NO: 9420 - DNA, 15 bp, Homo sapiens
tgaaagggaattccg

SEQ ID NO: 9421 - DNA, 15 bp, Homo sapiens
ctgaaagggaattcc

SEQ ID NO: 9422 - DNA, 15 bp, Homo sapiens
tctgaaagggaattc

SEQ ID NO: 9423 - DNA, 15 bp, Homo sapiens
ctctgaaagggaatt

SEQ ID NO: 9424 - DNA, 15 bp, Homo sapiens
gctctgaaagggaat

SEQ ID NO: 9425 - DNA, 15 bp, Homo sapiens
tgctctgaaagggaa

SEQ ID NO: 9426 - DNA, 15 bp, Homo sapiens
atgctctgaaaggga

SEQ ID NO: 9427 - DNA, 15 bp, Homo sapiens
aatgctctgaaaggg

SEQ ID NO: 9428 - DNA, 15 bp, Homo sapiens
caatgctctgaaagg

SEQ ID NO: 9429 - DNA, 15 bp, Homo sapiens
ccaatgctctgaaag

SEQ ID NO: 9430 - DNA, 15 bp, Homo sapiens
cccaatgctctgaaa

SEQ ID NO: 9431 - DNA, 15 bp, Homo sapiens
tcccaatgctctgaa

SEQ ID NO: 9432 - DNA, 15 bp, Homo sapiens
ctcccaatgctctga

SEQ ID NO: 9433 - DNA, 15 bp, Homo sapiens
tctcccaatgctctg

SEQ ID NO: 9434 - DNA, 15 bp, Homo sapiens
ttctcccaatgctct

SEQ ID NO: 9435 - DNA, 15 bp, Homo sapiens
gttctcccaatgctc

SEQ ID NO: 9436 - DNA, 15 bp, Homo sapiens
tgttctcccaatgct

SEQ ID NO: 9437 - DNA, 15 bp, Homo sapiens
atgttctcccaatgc

SEQ ID NO: 9438 - DNA, 15 bp, Homo sapiens
gatgttctcccaatg

SEQ ID NO: 9439 - DNA, 15 bp, Homo sapiens
tgatgttctcccaat

SEQ ID NO: 9440 - DNA, 15 bp, Homo sapiens
atgatgttctcccaa

SEQ ID NO: 9441 - DNA, 15 bp, Homo sapiens
catgatgttctccca

SEQ ID NO: 9442 - DNA, 15 bp, Homo sapiens
ccatgatgttctccc

SEQ ID NO: 9443 - DNA, 15 bp, Homo sapiens
cccatgatgttctcc

SEQ ID NO: 9444 - DNA, 15 bp, Homo sapiens
tcccatgatgttctc

SEQ ID NO: 9445 - DNA, 15 bp, Homo sapiens
ctcccatgatgttct

SEQ ID NO: 9446 - DNA, 15 bp, Homo sapiens
gctcccatgatgttc

SEQ ID NO: 9447 - DNA, 15 bp, Homo sapiens
tgctcccatgatgtt

SEQ ID NO: 9448 - DNA, 15 bp, Homo sapiens
atgctcccatgatgt

SEQ ID NO: 9449 - DNA, 15 bp, Homo sapiens
tatgctcccatgatg

SEQ ID NO: 9450 - DNA, 15 bp, Homo sapiens
atatgctcccatgat

SEQ ID NO: 9451 - DNA, 15 bp, Homo sapiens
aatatgctcccatga

SEQ ID NO: 9452 - DNA, 15 bp, Homo sapiens
gaatatgctcccatg

SEQ ID NO: 9453 - DNA, 15 bp, Homo sapiens
agaatatgctcccat

SEQ ID NO: 9454 - DNA, 15 bp, Homo sapiens
tagaatatgctccca

SEQ ID NO: 9455 - DNA, 15 bp, Homo sapiens
ctagaatatgctccc

SEQ ID NO: 9456 - DNA, 15 bp, Homo sapiens
tctagaatatgctcc

SEQ ID NO: 9457 - DNA, 15 bp, Homo sapiens
ctctagaatatgctc

SEQ ID NO: 9458 - DNA, 15 bp, Homo sapiens
tctctagaatatgct

SEQ ID NO: 9459 - DNA, 15 bp, Homo sapiens
gtctctagaatatgc

SEQ ID NO: 9460 - DNA, 15 bp, Homo sapiens
tgtctctagaatatg

SEQ ID NO: 9461 - DNA, 15 bp, Homo sapiens
ctgtctctagaatat

SEQ ID NO: 9462 - DNA, 15 bp, Homo sapiens
tctgtctctagaata

SEQ ID NO: 9463 - DNA, 15 bp, Homo sapiens
ctctgtctctagaat

SEQ ID NO: 9464 - DNA, 15 bp, Homo sapiens
cctctgtctctagaa

SEQ ID NO: 9465 - DNA, 15 bp, Homo sapiens
gcctctgtctctaga

SEQ ID NO: 9466 - DNA, 15 bp, Homo sapiens
agcctctgtctctag

SEQ ID NO: 9467 - DNA, 15 bp, Homo sapiens
aagcctctgtctcta

SEQ ID NO: 9468 - DNA, 15 bp, Homo sapiens
taagcctctgtctct

SEQ ID NO: 9469 - DNA, 15 bp, Homo sapiens
ctaagcctctgtctc

SEQ ID NO: 9470 - DNA, 15 bp, Homo sapiens
cctaagcctctgtct

SEQ ID NO: 9471 - DNA, 15 bp, Homo sapiens
ccctaagcctctgtc

SEQ ID NO: 9472 - DNA, 15 bp, Homo sapiens
accctaagcctctgt

SEQ ID NO: 9473 - DNA, 15 bp, Homo sapiens
caccctaagcctctg

SEQ ID NO: 9474 - DNA, 15 bp, Homo sapiens
acaccctaagcctct

SEQ ID NO: 9475 - DNA, 15 bp, Homo sapiens
cacaccctaagcctc

SEQ ID NO: 9476 - DNA, 15 bp, Homo sapiens
ccacaccctaagcct

SEQ ID NO: 9477 - DNA, 15 bp, Homo sapiens
tccacaccctaagcc

SEQ ID NO: 9478 - DNA, 15 bp, Homo sapiens
gtccacaccctaagc

SEQ ID NO: 9479 - DNA, 15 bp, Homo sapiens
tgtccacaccctaag

SEQ ID NO: 9480 - DNA, 15 bp, Homo sapiens
ctgtccacaccctaa

SEQ ID NO: 9481 - DNA, 15 bp, Homo sapiens
cctgtccacacccta

SEQ ID NO: 9482 - DNA, 15 bp, Homo sapiens
ccctgtccacaccct

SEQ ID NO: 9483 - DNA, 15 bp, Homo sapiens
gccctgtccacaccc

SEQ ID NO: 9484 - DNA, 15 bp, Homo sapiens
ggccctgtccacacc

SEQ ID NO: 9485 - DNA, 15 bp, Homo sapiens
tggccctgtccacac

SEQ ID NO: 9486 - DNA, 15 bp, Homo sapiens
atggccctgtccaca

SEQ ID NO: 9487 - DNA, 15 bp, Homo sapiens
gatggccctgtccac

SEQ ID NO: 9488 - DNA, 15 bp, Homo sapiens
ggatggccctgtcca

SEQ ID NO: 9489 - DNA, 15 bp, Homo sapiens
gggatggccctgtcc

SEQ ID NO: 9490 - DNA, 15 bp, Homo sapiens
agggatggccctgtc

SEQ ID NO: 9491 - DNA, 15 bp, Homo sapiens
gagggatggccctgt

SEQ ID NO: 9492 - DNA, 15 bp, Homo sapiens
tgagggatggccctg

SEQ ID NO: 9493 - DNA, 15 bp, Homo sapiens
gtgagggatggccct

SEQ ID NO: 9494 - DNA, 15 bp, Homo sapiens
ggtgagggatggccc

SEQ ID NO: 9495 - DNA, 15 bp, Homo sapiens
gggtgagggatggcc

SEQ ID NO: 9496 - DNA, 15 bp, Homo sapiens
tgggtgagggatggc

SEQ ID NO: 9497 - DNA, 15 bp, Homo sapiens
gtgggtgagggatgg

SEQ ID NO: 9498 - DNA, 15 bp, Homo sapiens
agtgggtgagggatg

SEQ ID NO: 9499 - DNA, 15 bp, Homo sapiens
cagtgggtgagggat

SEQ ID NO: 9500 - DNA, 15 bp, Homo sapiens
acagtgggtgaggga

SEQ ID NO: 9501 - DNA, 15 bp, Homo sapiens
cacagtgggtgaggg

SEQ ID NO: 9502 - DNA, 15 bp, Homo sapiens
gcacagtgggtgagg

SEQ ID NO: 9503 - DNA, 15 bp, Homo sapiens
agcacagtgggtgag

SEQ ID NO: 9504 - DNA, 15 bp, Homo sapiens
cagcacagtgggtga

SEQ ID NO: 9505 - DNA, 15 bp, Homo sapiens
tcagcacagtgggtg

SEQ ID NO: 9506 - DNA, 15 bp, Homo sapiens
gtcagcacagtgggt

SEQ ID NO: 9507 - DNA, 15 bp, Homo sapiens
ggtcagcacagtggg

SEQ ID NO: 9508 - DNA, 15 bp, Homo sapiens
aggtcagcacagtgg

SEQ ID NO: 9509 - DNA, 15 bp, Homo sapiens
aaggtcagcacagtg

SEQ ID NO: 9510 - DNA, 15 bp, Homo sapiens
taaggtcagcacagt

SEQ ID NO: 9511 - DNA, 15 bp, Homo sapiens
ttaaggtcagcacag

SEQ ID NO: 9512 - DNA, 15 bp, Homo sapiens
cttaaggtcagcaca

SEQ ID NO: 9513 - DNA, 15 bp, Homo sapiens
gcttaaggtcagcac

SEQ ID NO: 9514 - DNA, 15 bp, Homo sapiens
tgcttaaggtcagca

SEQ ID NO: 9515 - DNA, 15 bp, Homo sapiens
ctgcttaaggtcagc

SEQ ID NO: 9516 - DNA, 15 bp, Homo sapiens
gctgcttaaggtcag

SEQ ID NO: 9517 - DNA, 15 bp, Homo sapiens
tgctgcttaaggtca

SEQ ID NO: 9518 - DNA, 15 bp, Homo sapiens
gtgctgcttaaggtc

SEQ ID NO: 9519 - DNA, 15 bp, Homo sapiens
ggtgctgcttaaggt

SEQ ID NO: 9520 - DNA, 15 bp, Homo sapiens
aggtgctgcttaagg

SEQ ID NO: 9521 - DNA, 15 bp, Homo sapiens
aaggtgctgcttaag

SEQ ID NO: 9522 - DNA, 15 bp, Homo sapiens
caaggtgctgcttaa

SEQ ID NO: 9523 - DNA, 15 bp, Homo sapiens
acaaggtgctgctta

SEQ ID NO: 9524 - DNA, 15 bp, Homo sapiens
cacaaggtgctgctt

SEQ ID NO: 9525 - DNA, 15 bp, Homo sapiens
gcacaaggtgctgct

SEQ ID NO: 9526 - DNA, 15 bp, Homo sapiens
tgcacaaggtgctgc

SEQ ID NO: 9527 - DNA, 15 bp, Homo sapiens
ctgcacaaggtgctg

SEQ ID NO: 9528 - DNA, 15 bp, Homo sapiens
gctgcacaaggtgct

SEQ ID NO: 9529 - DNA, 15 bp, Homo sapiens
ggctgcacaaggtgc

SEQ ID NO: 9530 - DNA, 15 bp, Homo sapiens
gggctgcacaaggtg

SEQ ID NO: 9531 - DNA, 15 bp, Homo sapiens
tgggctgcacaaggt

SEQ ID NO: 9532 - DNA, 15 bp, Homo sapiens
atgggctgcacaagg

SEQ ID NO: 9533 - DNA, 15 bp, Homo sapiens
tatgggctgcacaag

SEQ ID NO: 9534 - DNA, 15 bp, Homo sapiens
gtatgggctgcacaa

SEQ ID NO: 9535 - DNA, 15 bp, Homo sapiens
ggtatgggctgcaca

SEQ ID NO: 9536 - DNA, 15 bp, Homo sapiens
aggtatgggctgcac

SEQ ID NO: 9537 - DNA, 15 bp, Homo sapiens
caggtatgggctgca

SEQ ID NO: 9538 - DNA, 15 bp, Homo sapiens
tcaggtatgggctgc

SEQ ID NO: 9539 - DNA, 15 bp, Homo sapiens
ttcaggtatgggctg

SEQ ID NO: 9540 - DNA, 15 bp, Homo sapiens
cttcaggtatgggct

SEQ ID NO: 9541 - DNA, 15 bp, Homo sapiens
ccttcaggtatgggc

SEQ ID NO: 9542 - DNA, 15 bp, Homo sapiens
gccttcaggtatggg

SEQ ID NO: 9543 - DNA, 15 bp, Homo sapiens
ggccttcaggtatgg

SEQ ID NO: 9544 - DNA, 15 bp, Homo sapiens
tggccttcaggtatg

SEQ ID NO: 9545 - DNA, 15 bp, Homo sapiens
gtggccttcaggtat

SEQ ID NO: 9546 - DNA, 15 bp, Homo sapiens
ggtggccttcaggta

SEQ ID NO: 9547 - DNA, 15 bp, Homo sapiens
tggtggccttcaggt

SEQ ID NO: 9548 - DNA, 15 bp, Homo sapiens
ctggtggccttcagg

SEQ ID NO: 9549 - DNA, 15 bp, Homo sapiens
gctggtggccttcag

SEQ ID NO: 9550 - DNA, 15 bp, Homo sapiens
tgctggtggccttca

SEQ ID NO: 9551 - DNA, 15 bp, Homo sapiens
ttgctggtggccttc

SEQ ID NO: 9552 - DNA, 15 bp, Homo sapiens
tttgctggtggcctt

SEQ ID NO: 9553 - DNA, 15 bp, Homo sapiens
ctttgctggtggcct

SEQ ID NO: 9554 - DNA, 15 bp, Homo sapiens
cctttgctggtggcc

SEQ ID NO: 9555 - DNA, 15 bp, Homo sapiens
gcctttgctggtggc

SEQ ID NO: 9556 - DNA, 15 bp, Homo sapiens
ggcctttgctggtgg

SEQ ID NO: 9557 - DNA, 15 bp, Homo sapiens
aggcctttgctggtg

SEQ ID NO: 9558 - DNA, 15 bp, Homo sapiens
caggcctttgctggt

SEQ ID NO: 9559 - DNA, 15 bp, Homo sapiens
acaggcctttgctgg

SEQ ID NO: 9560 - DNA, 15 bp, Homo sapiens
aacaggcctttgctg

SEQ ID NO: 9561 - DNA, 15 bp, Homo sapiens
caacaggcctttgct

SEQ ID NO: 9562 - DNA, 15 bp, Homo sapiens
ccaacaggcctttgc

SEQ ID NO: 9563 - DNA, 15 bp, Homo sapiens
cccaacaggcctttg

SEQ ID NO: 9564 - DNA, 15 bp, Homo sapiens
ccccaacaggccttt

SEQ ID NO: 9565 - DNA, 15 bp, Homo sapiens
tccccaacaggcctt

SEQ ID NO: 9566 - DNA, 15 bp, Homo sapiens
ctccccaacaggcct

SEQ ID NO: 9567 - DNA, 15 bp, Homo sapiens
gctccccaacaggcc

SEQ ID NO: 9568 - DNA, 15 bp, Homo sapiens
tgctccccaacaggc

SEQ ID NO: 9569 - DNA, 15 bp, Homo sapiens
ctgctccccaacagg

SEQ ID NO: 9570 - DNA, 15 bp, Homo sapiens
cctgctccccaacag

SEQ ID NO: 9571 - DNA, 15 bp, Homo sapiens
gcctgctccccaaca

SEQ ID NO: 9572 - DNA, 15 bp, Homo sapiens
agcctgctccccaac

SEQ ID NO: 9573 - DNA, 15 bp, Homo sapiens
aagcctgctccccaa

SEQ ID NO: 9574 - DNA, 15 bp, Homo sapiens
aaagcctgctcccca

SEQ ID NO: 9575 - DNA, 15 bp, Homo sapiens
taaagcctgctcccc

SEQ ID NO: 9576 - DNA, 15 bp, Homo sapiens
gtaaagcctgctccc

SEQ ID NO: 9577 - DNA, 15 bp, Homo sapiens
ggtaaagcctgctcc

SEQ ID NO: 9578 - DNA, 15 bp, Homo sapiens
gggtaaagcctgctc

SEQ ID NO: 9579 - DNA, 15 bp, Homo sapiens
cgggtaaagcctgct

SEQ ID NO: 9580 - DNA, 15 bp, Homo sapiens
tcgggtaaagcctgc

SEQ ID NO: 9581 - DNA, 15 bp, Homo sapiens
gtcgggtaaagcctg

SEQ ID NO: 9582 - DNA, 15 bp, Homo sapiens
ggtcgggtaaagcct

SEQ ID NO: 9583 - DNA, 15 bp, Homo sapiens
aggtcgggtaaagcc

SEQ ID NO: 9584 - DNA, 15 bp, Homo sapiens
caggtcgggtaaagc

SEQ ID NO: 9585 - DNA, 15 bp, Homo sapiens
acaggtcgggtaaag

SEQ ID NO: 9586 - DNA, 15 bp, Homo sapiens
tacaggtcgggtaaa

SEQ ID NO: 9587 - DNA, 15 bp, Homo sapiens
atacaggtcgggtaa

SEQ ID NO: 9588 - DNA, 15 bp, Homo sapiens
tatacaggtcgggta

SEQ ID NO: 9589 - DNA, 15 bp, Homo sapiens
ttatacaggtcgggt

SEQ ID NO: 9590 - DNA, 15 bp, Homo sapiens
tttatacaggtcggg

SEQ ID NO: 9591 - DNA, 15 bp, Homo sapiens
gtttatacaggtcgg

SEQ ID NO: 9592 - DNA, 15 bp, Homo sapiens
tgtttatacaggtcg

SEQ ID NO: 9593 - DNA, 15 bp, Homo sapiens
gtgtttatacaggtc

SEQ ID NO: 9594 - DNA, 15 bp, Homo sapiens
ggtgtttatacaggt

SEQ ID NO: 9595 - DNA, 15 bp, Homo sapiens
tggtgtttatacagg

SEQ ID NO: 9596 - DNA, 15 bp, Homo sapiens
ctggtgtttatacag

SEQ ID NO: 9597 - DNA, 15 bp, Homo sapiens
cctggtgtttataca

SEQ ID NO: 9598 - DNA, 15 bp, Homo sapiens
gcctggtgtttatac

SEQ ID NO: 9599 - DNA, 15 bp, Homo sapiens
agcctggtgtttata

SEQ ID NO: 9600 - DNA, 15 bp, Homo sapiens
tagcctggtgtttat

SEQ ID NO: 9601 - DNA, 15 bp, Homo sapiens
ctagcctggtgttta

SEQ ID NO: 9602 - DNA, 15 bp, Homo sapiens
cctagcctggtgttt

SEQ ID NO: 9603 - DNA, 15 bp, Homo sapiens
acctagcctggtgtt

SEQ ID NO: 9604 - DNA, 15 bp, Homo sapiens
cacctagcctggtgt

SEQ ID NO: 9605 - DNA, 15 bp, Homo sapiens
tcacctagcctggtg

SEQ ID NO: 9606 - DNA, 15 bp, Homo sapiens
ttcacctagcctggt

SEQ ID NO: 9607 - DNA, 15 bp, Homo sapiens
tttcacctagcctgg

SEQ ID NO: 9608 - DNA, 15 bp, Homo sapiens
ttttcacctagcctg

SEQ ID NO: 9609 - DNA, 15 bp, Homo sapiens
gttttcacctagcct

SEQ ID NO: 9610 - DNA, 15 bp, Homo sapiens
agttttcacctagcc

SEQ ID NO: 9611 - DNA, 15 bp, Homo sapiens
cagttttcacctagc

SEQ ID NO: 9612 - DNA, 15 bp, Homo sapiens
tcagttttcacctag

SEQ ID NO: 9613 - DNA, 15 bp, Homo sapiens
ctcagttttcaccta

SEQ ID NO: 9614 - DNA, 15 bp, Homo sapiens
tctcagttttcacct

SEQ ID NO: 9615 - DNA, 15 bp, Homo sapiens
atctcagttttcacc

SEQ ID NO: 9616 - DNA, 15 bp, Homo sapiens
tatctcagttttcac

SEQ ID NO: 9617 - DNA, 15 bp, Homo sapiens
gtatctcagttttca

SEQ ID NO: 9618 - DNA, 15 bp, Homo sapiens
ggtatctcagttttc

SEQ ID NO: 9619 - DNA, 15 bp, Homo sapiens
aggtatctcagtttt

SEQ ID NO: 9620 - DNA, 15 bp, Homo sapiens
caggtatctcagttt

SEQ ID NO: 9621 - DNA, 15 bp, Homo sapiens
ccaggtatctcagtt

SEQ ID NO: 9622 - DNA, 15 bp, Homo sapiens
accaggtatctcagt

SEQ ID NO: 9623 - DNA, 15 bp, Homo sapiens
aaccaggtatctcag

SEQ ID NO: 9624 - DNA, 15 bp, Homo sapiens
taaccaggtatctca

SEQ ID NO: 9625 - DNA, 15 bp, Homo sapiens
gtaaccaggtatctc

SEQ ID NO: 9626 - DNA, 15 bp, Homo sapiens
agtaaccaggtatct

SEQ ID NO: 9627 - DNA, 15 bp, Homo sapiens
aagtaaccaggtatc

SEQ ID NO: 9628 - DNA, 15 bp, Homo sapiens
aaagtaaccaggtat

SEQ ID NO: 9629 - DNA, 15 bp, Homo sapiens
taaagtaaccaggta

SEQ ID NO: 9630 - DNA, 15 bp, Homo sapiens
ctaaagtaaccaggt

SEQ ID NO: 9631 - DNA, 15 bp, Homo sapiens
actaaagtaaccagg

SEQ ID NO: 9632 - DNA, 15 bp, Homo sapiens
aactaaagtaaccag

SEQ ID NO: 9633 - DNA, 15 bp, Homo sapiens
aaactaaagtaacca

SEQ ID NO: 9634 - DNA, 15 bp, Homo sapiens
aaaactaaagtaacc

SEQ ID NO: 9635 - DNA, 15 bp, Homo sapiens
aaaaactaaagtaac

SEQ ID NO: 9636 - DNA, 15 bp, Homo sapiens
aaaaaactaaagtaa

SEQ ID NO: 9637 - DNA, 15 bp, Homo sapiens
gaaaaaactaaagta

SEQ ID NO: 9638 - DNA, 15 bp, Homo sapiens
ggaaaaaactaaagt

SEQ ID NO: 9639 - DNA, 15 bp, Homo sapiens
aggaaaaaactaaag

SEQ ID NO: 9640 - DNA, 15 bp, Homo sapiens
aaggaaaaaactaaa

SEQ ID NO: 9641 - DNA, 15 bp, Homo sapiens
caaggaaaaaactaa

SEQ ID NO: 9642 - DNA, 15 bp, Homo sapiens
ccaaggaaaaaacta

SEQ ID NO: 9643 - DNA, 15 bp, Homo sapiens
cccaaggaaaaaact

SEQ ID NO: 9644 - DNA, 15 bp, Homo sapiens
ccccaaggaaaaaac

SEQ ID NO: 9645 - DNA, 15 bp, Homo sapiens
cccccaaggaaaaaa

SEQ ID NO: 9646 - DNA, 15 bp, Homo sapiens
tcccccaaggaaaaa

SEQ ID NO: 9647 - DNA, 15 bp, Homo sapiens
ctcccccaaggaaaa

SEQ ID NO: 9648 - DNA, 15 bp, Homo sapiens
gctcccccaaggaaa

SEQ ID NO: 9649 - DNA, 15 bp, Homo sapiens
agctcccccaaggaa

SEQ ID NO: 9650 - DNA, 15 bp, Homo sapiens
gagctcccccaagga

SEQ ID NO: 9651 - DNA, 15 bp, Homo sapiens
tgagctcccccaagg

SEQ ID NO: 9652 - DNA, 15 bp, Homo sapiens
ctgagctcccccaag

SEQ ID NO: 9653 - DNA, 15 bp, Homo sapiens
actgagctcccccaa

SEQ ID NO: 9654 - DNA, 15 bp, Homo sapiens
tactgagctccccca

SEQ ID NO: 9655 - DNA, 15 bp, Homo sapiens
atactgagctccccc

SEQ ID NO: 9656 - DNA, 15 bp, Homo sapiens
catactgagctcccc

SEQ ID NO: 9657 - DNA, 15 bp, Homo sapiens
tcatactgagctccc

SEQ ID NO: 9658 - DNA, 15 bp, Homo sapiens
atcatactgagctcc

SEQ ID NO: 9659 - DNA, 15 bp, Homo sapiens
aatcatactgagctc

SEQ ID NO: 9660 - DNA, 15 bp, Homo sapiens
gaatcatactgagct

SEQ ID NO: 9661 - DNA, 15 bp, Homo sapiens
agaatcatactgagc

SEQ ID NO: 9662 - DNA, 15 bp, Homo sapiens
aagaatcatactgag

SEQ ID NO: 9663 - DNA, 15 bp, Homo sapiens
gaagaatcatactga

SEQ ID NO: 9664 - DNA, 15 bp, Homo sapiens
ggaagaatcatactg

SEQ ID NO: 9665 - DNA, 15 bp, Homo sapiens
tggaagaatcatact

SEQ ID NO: 9666 - DNA, 15 bp, Homo sapiens
ctggaagaatcatac

SEQ ID NO: 9667 - DNA, 15 bp, Homo sapiens
cctggaagaatcata

SEQ ID NO: 9668 - DNA, 15 bp, Homo sapiens
tcctggaagaatcat

SEQ ID NO: 9669 - DNA, 15 bp, Homo sapiens
ctcctggaagaatca

SEQ ID NO: 9670 - DNA, 15 bp, Homo sapiens
tctcctggaagaatc

SEQ ID NO: 9671 - DNA, 15 bp, Homo sapiens
ttctcctggaagaat

SEQ ID NO: 9672 - DNA, 15 bp, Homo sapiens
cttctcctggaagaa

SEQ ID NO: 9673 - DNA, 15 bp, Homo sapiens
gcttctcctggaaga

SEQ ID NO: 9674 - DNA, 15 bp, Homo sapiens
ggcttctcctggaag

SEQ ID NO: 9675 - DNA, 15 bp, Homo sapiens
aggcttctcctggaa

SEQ ID NO: 9676 - DNA, 15 bp, Homo sapiens
caggcttctcctgga

SEQ ID NO: 9677 - DNA, 15 bp, Homo sapiens
gcaggcttctcctgg

SEQ ID NO: 9678 - DNA, 15 bp, Homo sapiens
agcaggcttctcctg

SEQ ID NO: 9679 - DNA, 15 bp, Homo sapiens
aagcaggcttctcct

SEQ ID NO: 9680 - DNA, 15 bp, Homo sapiens
aaagcaggcttctcc

SEQ ID NO: 9681 - DNA, 15 bp, Homo sapiens
aaaagcaggcttctc

SEQ ID NO: 9682 - DNA, 15 bp, Homo sapiens
taaaagcaggcttct

SEQ ID NO: 9683 - DNA, 15 bp, Homo sapiens
ctaaaagcaggcttc

SEQ ID NO: 9684 - DNA, 15 bp, Homo sapiens
tctaaaagcaggctt

SEQ ID NO: 9685 - DNA, 15 bp, Homo sapiens
gtctaaaagcaggct

SEQ ID NO: 9686 - DNA, 15 bp, Homo sapiens
agtctaaaagcaggc

SEQ ID NO: 9687 - DNA, 15 bp, Homo sapiens
tagtctaaaagcagg

SEQ ID NO: 9688 - DNA, 15 bp, Homo sapiens
ttagtctaaaagcag

SEQ ID NO: 9689 - DNA, 15 bp, Homo sapiens
tttagtctaaaagca

SEQ ID NO: 9690 - DNA, 15 bp, Homo sapiens
ttttagtctaaaagc

SEQ ID NO: 9691 - DNA, 15 bp, Homo sapiens
tttttagtctaaaag

SEQ ID NO: 9692 - DNA, 15 bp, Homo sapiens
ctttttagtctaaaa

SEQ ID NO: 9693 - DNA, 15 bp, Homo sapiens
tctttttagtctaaa

SEQ ID NO: 9694 - DNA, 15 bp, Homo sapiens
ttctttttagtctaa

SEQ ID NO: 9695 - DNA, 15 bp, Homo sapiens
tttctttttagtcta

SEQ ID NO: 9696 - DNA, 15 bp, Homo sapiens
ttttctttttagtct

SEQ ID NO: 9697 - DNA, 15 bp, Homo sapiens
tttttctttttagtc

SEQ ID NO: 9698 - DNA, 15 bp, Homo sapiens
ttttttctttttagt

SEQ ID NO: 9699 - DNA, 15 bp, Homo sapiens
tttttttctttttag

SEQ ID NO: 9700 - DNA, 15 bp, Homo sapiens
ctttttttcttttta

SEQ ID NO: 9701 - DNA, 15 bp, Homo sapiens
actttttttcttttt

SEQ ID NO: 9702 - DNA, 15 bp, Homo sapiens
aactttttttctttt

SEQ ID NO: 9703 - DNA, 15 bp, Homo sapiens
aaactttttttcttt

SEQ ID NO: 9704 - DNA, 15 bp, Homo sapiens
caaactttttttctt

SEQ ID NO: 9705 - DNA, 15 bp, Homo sapiens
tcaaactttttttct

SEQ ID NO: 9706 - DNA, 15 bp, Homo sapiens
atcaaactttttttc

SEQ ID NO: 9707 - DNA, 15 bp, Homo sapiens
tatcaaacttttttt

SEQ ID NO: 9708 - DNA, 15 bp, Homo sapiens
ctatcaaactttttt

SEQ ID NO: 9709 - DNA, 15 bp, Homo sapiens
cctatcaaacttttt

SEQ ID NO: 9710 - DNA, 15 bp, Homo sapiens
acctatcaaactttt

SEQ ID NO: 9711 - DNA, 15 bp, Homo sapiens
gacctatcaaacttt

SEQ ID NO: 9712 - DNA, 15 bp, Homo sapiens
tgacctatcaaactt

SEQ ID NO: 9713 - DNA, 15 bp, Homo sapiens
ttgacctatcaaact

SEQ ID NO: 9714 - DNA, 15 bp, Homo sapiens
gttgacctatcaaac

SEQ ID NO: 9715 - DNA, 15 bp, Homo sapiens
ggttgacctatcaaa

SEQ ID NO: 9716 - DNA, 15 bp, Homo sapiens
aggttgacctatcaa

SEQ ID NO: 9717 - DNA, 15 bp, Homo sapiens
taggttgacctatca

SEQ ID NO: 9718 - DNA, 15 bp, Homo sapiens
ttaggttgacctatc

SEQ ID NO: 9719 - DNA, 15 bp, Homo sapiens
attaggttgacctat

SEQ ID NO: 9720 - DNA, 15 bp, Homo sapiens
cattaggttgaccta

SEQ ID NO: 9721 - DNA, 15 bp, Homo sapiens
tcattaggttgacct

SEQ ID NO: 9722 - DNA, 15 bp, Homo sapiens
atcattaggttgacc

SEQ ID NO: 9723 - DNA, 15 bp, Homo sapiens
aatcattaggttgac

SEQ ID NO: 9724 - DNA, 15 bp, Homo sapiens
caatcattaggttga

SEQ ID NO: 9725 - DNA, 15 bp, Homo sapiens
ccaatcattaggttg

SEQ ID NO: 9726 - DNA, 15 bp, Homo sapiens
tccaatcattaggtt

SEQ ID NO: 9727 - DNA, 15 bp, Homo sapiens
ctccaatcattaggt

SEQ ID NO: 9728 - DNA, 15 bp, Homo sapiens
cctccaatcattagg

SEQ ID NO: 9729 - DNA, 15 bp, Homo sapiens
acctccaatcattag

SEQ ID NO: 9730 - DNA, 15 bp, Homo sapiens
cacctccaatcatta

SEQ ID NO: 9731 - DNA, 15 bp, Homo sapiens
ccacctccaatcatt

SEQ ID NO: 9732 - DNA, 15 bp, Homo sapiens
gccacctccaatcat

SEQ ID NO: 9733 - DNA, 15 bp, Homo sapiens
ggccacctccaatca

SEQ ID NO: 9734 - DNA, 15 bp, Homo sapiens
aggccacctccaatc

SEQ ID NO: 9735 - DNA, 15 bp, Homo sapiens
aaggccacctccaat

SEQ ID NO: 9736 - DNA, 15 bp, Homo sapiens
gaaggccacctccaa

SEQ ID NO: 9737 - DNA, 15 bp, Homo sapiens
ggaaggccacctcca

SEQ ID NO: 9738 - DNA, 15 bp, Homo sapiens
gggaaggccacctcc

SEQ ID NO: 9739 - DNA, 15 bp, Homo sapiens
ggggaaggccacctc

SEQ ID NO: 9740 - DNA, 15 bp, Homo sapiens
tggggaaggccacct

SEQ ID NO: 9741 - DNA, 15 bp, Homo sapiens
gtggggaaggccacc

SEQ ID NO: 9742 - DNA, 15 bp, Homo sapiens
agtggggaaggccac

SEQ ID NO: 9743 - DNA, 15 bp, Homo sapiens
cagtggggaaggcca

SEQ ID NO: 9744 - DNA, 15 bp, Homo sapiens
acagtggggaaggcc

SEQ ID NO: 9745 - DNA, 15 bp, Homo sapiens
cacagtggggaaggc

SEQ ID NO: 9746 - DNA, 15 bp, Homo sapiens
tcacagtggggaagg

SEQ ID NO: 9747 - DNA, 15 bp, Homo sapiens
ttcacagtggggaag

SEQ ID NO: 9748 - DNA, 15 bp, Homo sapiens
gttcacagtggggaa

SEQ ID NO: 9749 - DNA, 15 bp, Homo sapiens
tgttcacagtgggga

SEQ ID NO: 9750 - DNA, 15 bp, Homo sapiens
ttgttcacagtgggg

SEQ ID NO: 9751 - DNA, 15 bp, Homo sapiens
tttgttcacagtggg

SEQ ID NO: 9752 - DNA, 15 bp, Homo sapiens
gtttgttcacagtgg

SEQ ID NO: 9753 - DNA, 15 bp, Homo sapiens
agtttgttcacagtg

SEQ ID NO: 9754 - DNA, 15 bp, Homo sapiens
tagtttgttcacagt

SEQ ID NO: 9755 - DNA, 15 bp, Homo sapiens
atagtttgttcacag

SEQ ID NO: 9756 - DNA, 15 bp, Homo sapiens
catagtttgttcaca

SEQ ID NO: 9757 - DNA, 15 bp, Homo sapiens
ccatagtttgttcac

SEQ ID NO: 9758 - DNA, 15 bp, Homo sapiens
gccatagtttgttca

SEQ ID NO: 9759 - DNA, 15 bp, Homo sapiens
agccatagtttgttc

SEQ ID NO: 9760 - DNA, 15 bp, Homo sapiens
cagccatagtttgtt

SEQ ID NO: 9761 - DNA, 15 bp, Homo sapiens
gcagccatagtttgt

SEQ ID NO: 9762 - DNA, 15 bp, Homo sapiens
tgcagccatagtttg

SEQ ID NO: 9763 - DNA, 15 bp, Homo sapiens
atgcagccatagttt

SEQ ID NO: 9764 - DNA, 15 bp, Homo sapiens
catgcagccatagtt

SEQ ID NO: 9765 - DNA, 15 bp, Homo sapiens
acatgcagccatagt

SEQ ID NO: 9766 - DNA, 15 bp, Homo sapiens
cacatgcagccatag

SEQ ID NO: 9767 - DNA, 15 bp, Homo sapiens
gcacatgcagccata

SEQ ID NO: 9768 - DNA, 15 bp, Homo sapiens
ggcacatgcagccat

SEQ ID NO: 9769 - DNA, 15 bp, Homo sapiens
gggcacatgcagcca

SEQ ID NO: 9770 - DNA, 15 bp, Homo sapiens
agggcacatgcagcc

SEQ ID NO: 9771 - DNA, 15 bp, Homo sapiens
tagggcacatgcagc

SEQ ID NO: 9772 - DNA, 15 bp, Homo sapiens
gtagggcacatgcag

SEQ ID NO: 9773 - DNA, 15 bp, Homo sapiens
tgtagggcacatgca

SEQ ID NO: 9774 - DNA, 15 bp, Homo sapiens
ttgtagggcacatgc

SEQ ID NO: 9775 - DNA, 15 bp, Homo sapiens
attgtagggcacatg

SEQ ID NO: 9776 - DNA, 15 bp, Homo sapiens
cattgtagggcacat

SEQ ID NO: 9777 - DNA, 15 bp, Homo sapiens
ccattgtagggcaca

SEQ ID NO: 9778 - DNA, 15 bp, Homo sapiens
gccattgtagggcac

SEQ ID NO: 9779 - DNA, 15 bp, Homo sapiens
tgccattgtagggca

SEQ ID NO: 9780 - DNA, 15 bp, Homo sapiens
ctgccattgtagggc

SEQ ID NO: 9781 - DNA, 15 bp, Homo sapiens
tctgccattgtaggg

SEQ ID NO: 9782 - DNA, 15 bp, Homo sapiens
ctctgccattgtagg

SEQ ID NO: 9783 - DNA, 15 bp, Homo sapiens
actctgccattgtag

SEQ ID NO: 9784 - DNA, 15 bp, Homo sapiens
aactctgccattgta

SEQ ID NO: 9785 - DNA, 15 bp, Homo sapiens
tgctaaacatcctgc

SEQ ID NO: 9786 - DNA, 15 bp, Homo sapiens
ctgctaaacatcctg

SEQ ID NO: 9787 - DNA, 15 bp, Homo sapiens
gctgctaaacatcct

SEQ ID NO: 9788 - DNA, 15 bp, Homo sapiens
tgctgctaaacatcc

SEQ ID NO: 9789 - DNA, 15 bp, Homo sapiens
atgctgctaaacatc

SEQ ID NO: 9790 - DNA, 15 bp, Homo sapiens
gatgctgctaaacat

SEQ ID NO: 9791 - DNA, 15 bp, Homo sapiens
agatgctgctaaaca

SEQ ID NO: 9792 - DNA, 15 bp, Homo sapiens
gagatgctgctaaac

SEQ ID NO: 9793 - DNA, 15 bp, Homo sapiens
agagatgctgctaaa

SEQ ID NO: 9794 - DNA, 15 bp, Homo sapiens
cagagatgctgctaa

SEQ ID NO: 9795 - DNA, 15 bp, Homo sapiens
ccagagatgctgcta

SEQ ID NO: 9796 - DNA, 15 bp, Homo sapiens
gccagagatgctgct

SEQ ID NO: 9797 - DNA, 15 bp, Homo sapiens
ggccagagatgctgc

SEQ ID NO: 9798 - DNA, 15 bp, Homo sapiens
aggccagagatgctg

SEQ ID NO: 9799 - DNA, 15 bp, Homo sapiens
gaggccagagatgct

SEQ ID NO: 9800 - DNA, 15 bp, Homo sapiens
agaggccagagatgc

SEQ ID NO: 9801 - DNA, 15 bp, Homo sapiens
tagaggccagagatg

SEQ ID NO: 9802 - DNA, 15 bp, Homo sapiens
gtagaggccagagat

SEQ ID NO: 9803 - DNA, 15 bp, Homo sapiens
ggtagaggccagaga

SEQ ID NO: 9804 - DNA, 15 bp, Homo sapiens
gggtagaggccagag

SEQ ID NO: 9805 - DNA, 15 bp, Homo sapiens
tgggtagaggccaga

SEQ ID NO: 9806 - DNA, 15 bp, Homo sapiens
gtgggtagaggccag

SEQ ID NO: 9807 - DNA, 15 bp, Homo sapiens
ggtgggtagaggcca

SEQ ID NO: 9808 - DNA, 15 bp, Homo sapiens
tggtgggtagaggcc

SEQ ID NO: 9809 - DNA, 15 bp, Homo sapiens
ctggtgggtagaggc

SEQ ID NO: 9810 - DNA, 15 bp, Homo sapiens
gctggtgggtagagg

SEQ ID NO: 9811 - DNA, 15 bp, Homo sapiens
tgctggtgggtagag

SEQ ID NO: 9812 - DNA, 15 bp, Homo sapiens
gtgctggtgggtaga

SEQ ID NO: 9813 - DNA, 15 bp, Homo sapiens
ggtgctggtgggtag

SEQ ID NO: 9814 - DNA, 15 bp, Homo sapiens
aggtgctggtgggta

SEQ ID NO: 9815 - DNA, 15 bp, Homo sapiens
gaggtgctggtgggt

SEQ ID NO: 9816 - DNA, 15 bp, Homo sapiens
ggaggtgctggtggg

SEQ ID NO: 9817 - DNA, 15 bp, Homo sapiens
gggaggtgctggtgg

SEQ ID NO: 9818 - DNA, 15 bp, Homo sapiens
ggggaggtgctggtg

SEQ ID NO: 9819 - DNA, 15 bp, Homo sapiens
tggggaggtgctggt

SEQ ID NO: 9820 - DNA, 15 bp, Homo sapiens
ctggggaggtgctgg

SEQ ID NO: 9821 - DNA, 15 bp, Homo sapiens
actggggaggtgctg

SEQ ID NO: 9822 - DNA, 15 bp, Homo sapiens
aactggggaggtgct

SEQ ID NO: 9823 - DNA, 15 bp, Homo sapiens
caactggggaggtgc

SEQ ID NO: 9824 - DNA, 15 bp, Homo sapiens
acaactggggaggtg

SEQ ID NO: 9825 - DNA, 15 bp, Homo sapiens
cacaactggggaggt

SEQ ID NO: 9826 - DNA, 15 bp, Homo sapiens
tcacaactggggagg

SEQ ID NO: 9827 - DNA, 15 bp, Homo sapiens
gtcacaactggggag

SEQ ID NO: 9828 - DNA, 15 bp, Homo sapiens
tgtcacaactgggga

SEQ ID NO: 9829 - DNA, 15 bp, Homo sapiens
gtgtcacaactgggg

SEQ ID NO: 9830 - DNA, 15 bp, Homo sapiens
ggtgtcacaactggg

SEQ ID NO: 9831 - DNA, 15 bp, Homo sapiens
gggtgtcacaactgg

SEQ ID NO: 9832 - DNA, 15 bp, Homo sapiens
tgggtgtcacaactg

SEQ ID NO: 9833 - DNA, 15 bp, Homo sapiens
ctgggtgtcacaact

SEQ ID NO: 9834 - DNA, 15 bp, Homo sapiens
tctgggtgtcacaac

SEQ ID NO: 9835 - DNA, 15 bp, Homo sapiens
ttctgggtgtcacaa

SEQ ID NO: 9836 - DNA, 15 bp, Homo sapiens
tttctgggtgtcaca

SEQ ID NO: 9837 - DNA, 15 bp, Homo sapiens
atttctgggtgtcac

SEQ ID NO: 9838 - DNA, 15 bp, Homo sapiens
catttctgggtgtca

SEQ ID NO: 9839 - DNA, 15 bp, Homo sapiens
acatttctgggtgtc

SEQ ID NO: 9840 - DNA, 15 bp, Homo sapiens
gacatttctgggtgt

SEQ ID NO: 9841 - DNA, 15 bp, Homo sapiens
agacatttctgggtg

SEQ ID NO: 9842 - DNA, 15 bp, Homo sapiens
aagacatttctgggt

SEQ ID NO: 9843 - DNA, 15 bp, Homo sapiens
aaagacatttctggg

SEQ ID NO: 9844 - DNA, 15 bp, Homo sapiens
taaagacatttctgg

SEQ ID NO: 9845 - DNA, 15 bp, Homo sapiens
ctaaagacatttctg

SEQ ID NO: 9846 - DNA, 15 bp, Homo sapiens
tctaaagacatttct

SEQ ID NO: 9847 - DNA, 15 bp, Homo sapiens
atctaaagacatttc

SEQ ID NO: 9848 - DNA, 15 bp, Homo sapiens
gatctaaagacattt

SEQ ID NO: 9849 - DNA, 15 bp, Homo sapiens
agatctaaagacatt

SEQ ID NO: 9850 - DNA, 15 bp, Homo sapiens
aagatctaaagacat

SEQ ID NO: 9851 - DNA, 15 bp, Homo sapiens
caagatctaaagaca

SEQ ID NO: 9852 - DNA, 15 bp, Homo sapiens
gcaagatctaaagac

SEQ ID NO: 9853 - DNA, 15 bp, Homo sapiens
ggcaagatctaaaga

SEQ ID NO: 9854 - DNA, 15 bp, Homo sapiens
tggcaagatctaaag

SEQ ID NO: 9855 - DNA, 15 bp, Homo sapiens
ttggcaagatctaaa

SEQ ID NO: 9856 - DNA, 15 bp, Homo sapiens
tttggcaagatctaa

SEQ ID NO: 9857 - DNA, 15 bp, Homo sapiens
atttggcaagatcta

SEQ ID NO: 9858 - DNA, 15 bp, Homo sapiens
tatttggcaagatct

SEQ ID NO: 9859 - DNA, 15 bp, Homo sapiens
atatttggcaagatc

SEQ ID NO: 9860 - DNA, 15 bp, Homo sapiens
aatatttggcaagat

SEQ ID NO: 9861 - DNA, 15 bp, Homo sapiens
aaatatttggcaaga

SEQ ID NO: 9862 - DNA, 15 bp, Homo sapiens
gaaatatttggcaag

SEQ ID NO: 9863 - DNA, 15 bp, Homo sapiens
ggaaatatttggcaa

SEQ ID NO: 9864 - DNA, 15 bp, Homo sapiens
tggaaatatttggca

SEQ ID NO: 9865 - DNA, 15 bp, Homo sapiens
ctggaaatatttggc

SEQ ID NO: 9866 - DNA, 15 bp, Homo sapiens
cctggaaatatttgg

SEQ ID NO: 9867 - DNA, 15 bp, Homo sapiens
tcctggaaatatttg

SEQ ID NO: 9868 - DNA, 15 bp, Homo sapiens
ctcctggaaatattt

SEQ ID NO: 9869 - DNA, 15 bp, Homo sapiens
cctcctggaaatatt

SEQ ID NO: 9870 - DNA, 15 bp, Homo sapiens
tcctcctggaaatat

SEQ ID NO: 9871 - DNA, 15 bp, Homo sapiens
atcctcctggaaata

SEQ ID NO: 9872 - DNA, 15 bp, Homo sapiens
catcctcctggaaat

SEQ ID NO: 9873 - DNA, 15 bp, Homo sapiens
tcatcctcctggaaa

SEQ ID NO: 9874 - DNA, 15 bp, Homo sapiens
ttcatcctcctggaa

SEQ ID NO: 9875 - DNA, 15 bp, Homo sapiens
tttcatcctcctgga

SEQ ID NO: 9876 - DNA, 15 bp, Homo sapiens
atttcatcctcctgg

SEQ ID NO: 9877 - DNA, 15 bp, Homo sapiens
aatttcatcctcctg

SEQ ID NO: 9878 - DNA, 15 bp, Homo sapiens
gaatttcatcctcct

SEQ ID NO: 9879 - DNA, 15 bp, Homo sapiens
ggaatttcatcctcc

SEQ ID NO: 9880 - DNA, 15 bp, Homo sapiens
gggaatttcatcctc

SEQ ID NO: 9881 - DNA, 15 bp, Homo sapiens
ggggaatttcatcct

SEQ ID NO: 9882 - DNA, 15 bp, Homo sapiens
aggggaatttcatcc

SEQ ID NO: 9883 - DNA, 15 bp, Homo sapiens
caggggaatttcatc

SEQ ID NO: 9884 - DNA, 15 bp, Homo sapiens
acaggggaatttcat

SEQ ID NO: 9885 - DNA, 15 bp, Homo sapiens
aacaggggaatttca

SEQ ID NO: 9886 - DNA, 15 bp, Homo sapiens
aaacaggggaatttc

SEQ ID NO: 9887 - DNA, 15 bp, Homo sapiens
gaaacaggggaattt

SEQ ID NO: 9888 - DNA, 15 bp, Homo sapiens
tgaaacaggggaatt

SEQ ID NO: 9889 - DNA, 15 bp, Homo sapiens
ctgaaacaggggaat

SEQ ID NO: 9890 - DNA, 15 bp, Homo sapiens
actgaaacaggggaa

SEQ ID NO: 9891 - DNA, 15 bp, Homo sapiens
aactgaaacagggga

SEQ ID NO: 9892 - DNA, 15 bp, Homo sapiens
gaactgaaacagggg

SEQ ID NO: 9893 - DNA, 15 bp, Homo sapiens
ggaactgaaacaggg

SEQ ID NO: 9894 - DNA, 15 bp, Homo sapiens
gggaactgaaacagg

SEQ ID NO: 9895 - DNA, 15 bp, Homo sapiens
ggggaactgaaacag

SEQ ID NO: 9896 - DNA, 15 bp, Homo sapiens
tggggaactgaaaca

SEQ ID NO: 9897 - DNA, 15 bp, Homo sapiens
ctggggaactgaaac

SEQ ID NO: 9898 - DNA, 15 bp, Homo sapiens
gctggggaactgaaa

SEQ ID NO: 9899 - DNA, 15 bp, Homo sapiens
ggctggggaactgaa

SEQ ID NO: 9900 - DNA, 15 bp, Homo sapiens
gggctggggaactga

SEQ ID NO: 9901 - DNA, 15 bp, Homo sapiens
ggggctggggaactg

SEQ ID NO: 9902 - DNA, 15 bp, Homo sapiens
tggggctggggaact

SEQ ID NO: 9903 - DNA, 15 bp, Homo sapiens
gtggggctggggaac

SEQ ID NO: 9904 - DNA, 15 bp, Homo sapiens
ggtggggctggggaa

SEQ ID NO: 9905 - DNA, 15 bp, Homo sapiens
aggtggggctgggga

SEQ ID NO: 9906 - DNA, 15 bp, Homo sapiens
gaggtggggctgggg

SEQ ID NO: 9907 - DNA, 15 bp, Homo sapiens
tgaggtggggctggg

SEQ ID NO: 9908 - DNA, 15 bp, Homo sapiens
ttgaggtggggctgg

SEQ ID NO: 9909 - DNA, 15 bp, Homo sapiens
attgaggtggggctg

SEQ ID NO: 9910 - DNA, 15 bp, Homo sapiens
cattgaggtggggct

SEQ ID NO: 9911 - DNA, 15 bp, Homo sapiens
tcattgaggtggggc

SEQ ID NO: 9912 - DNA, 15 bp, Homo sapiens
ctcattgaggtgggg

SEQ ID NO: 9913 - DNA, 15 bp, Homo sapiens
tctcattgaggtggg

SEQ ID NO: 9914 - DNA, 15 bp, Homo sapiens
ttctcattgaggtgg

SEQ ID NO: 9915 - DNA, 15 bp, Homo sapiens
cttctcattgaggtg

SEQ ID NO: 9916 - DNA, 15 bp, Homo sapiens
gcttctcattgaggt

SEQ ID NO: 9917 - DNA, 15 bp, Homo sapiens
tgcttctcattgagg

SEQ ID NO: 9918 - DNA, 15 bp, Homo sapiens
gtgcttctcattgag

SEQ ID NO: 9919 - DNA, 15 bp, Homo sapiens
agtgcttctcattga

SEQ ID NO: 9920 - DNA, 15 bp, Homo sapiens
cagtgcttctcattg

SEQ ID NO: 9921 - DNA, 15 bp, Homo sapiens
acagtgcttctcatt

SEQ ID NO: 9922 - DNA, 15 bp, Homo sapiens
gacagtgcttctcat

SEQ ID NO: 9923 - DNA, 15 bp, Homo sapiens
ggacagtgcttctca

SEQ ID NO: 9924 - DNA, 15 bp, Homo sapiens
aggacagtgcttctc

SEQ ID NO: 9925 - DNA, 15 bp, Homo sapiens
taggacagtgcttct

SEQ ID NO: 9926 - DNA, 15 bp, Homo sapiens
ctaggacagtgcttc

SEQ ID NO: 9927 - DNA, 15 bp, Homo sapiens
tctaggacagtgctt

SEQ ID NO: 9928 - DNA, 15 bp, Homo sapiens
gtctaggacagtgct

SEQ ID NO: 9929 - DNA, 15 bp, Homo sapiens
ggtctaggacagtgc

SEQ ID NO: 9930 - DNA, 15 bp, Homo sapiens
tggtctaggacagtg

SEQ ID NO: 9931 - DNA, 15 bp, Homo sapiens
ttggtctaggacagt

SEQ ID NO: 9932 - DNA, 15 bp, Homo sapiens
gttggtctaggacag

SEQ ID NO: 9933 - DNA, 15 bp, Homo sapiens
ggttggtctaggaca

SEQ ID NO: 9934 - DNA, 15 bp, Homo sapiens
gggttggtctaggac

SEQ ID NO: 9935 - DNA, 15 bp, Homo sapiens
ggggttggtctagga

SEQ ID NO: 9936 - DNA, 15 bp, Homo sapiens
tggggttggtctagg

SEQ ID NO: 9937 - DNA, 15 bp, Homo sapiens
gtggggttggtctag

SEQ ID NO: 9938 - DNA, 15 bp, Homo sapiens
tgtggggttggtcta

SEQ ID NO: 9939 - DNA, 15 bp, Homo sapiens
ttgtggggttggtct

SEQ ID NO: 9940 - DNA, 15 bp, Homo sapiens
tttgtggggttggtc

SEQ ID NO: 9941 - DNA, 15 bp, Homo sapiens
ctttgtggggttggt

SEQ ID NO: 9942 - DNA, 15 bp, Homo sapiens
gctttgtggggttgg

SEQ ID NO: 9943 - DNA, 15 bp, Homo sapiens
tgctttgtggggttg

SEQ ID NO: 9944 - DNA, 15 bp, Homo sapiens
atgctttgtggggtt

SEQ ID NO: 9945 - DNA, 15 bp, Homo sapiens
gatgctttgtggggt

SEQ ID NO: 9946 - DNA, 15 bp, Homo sapiens
agatgctttgtgggg

SEQ ID NO: 9947 - DNA, 15 bp, Homo sapiens
cagatgctttgtggg

SEQ ID NO: 9948 - DNA, 15 bp, Homo sapiens
tcagatgctttgtgg

SEQ ID NO: 9949 - DNA, 15 bp, Homo sapiens
gtcagatgctttgtg

SEQ ID NO: 9950 - DNA, 15 bp, Homo sapiens
tgtcagatgctttgt

SEQ ID NO: 9951 - DNA, 15 bp, Homo sapiens
gtgtcagatgctttg

SEQ ID NO: 9952 - DNA, 15 bp, Homo sapiens
ggtgtcagatgcttt

SEQ ID NO: 9953 - DNA, 15 bp, Homo sapiens
gggtgtcagatgctt

SEQ ID NO: 9954 - DNA, 15 bp, Homo sapiens
ggggtgtcagatgct

SEQ ID NO: 9955 - DNA, 15 bp, Homo sapiens
gggggtgtcagatgc

SEQ ID NO: 9956 - DNA, 15 bp, Homo sapiens
tgggggtgtcagatg

SEQ ID NO: 9957 - DNA, 15 bp, Homo sapiens
atgggggtgtcagat

SEQ ID NO: 9958 - DNA, 15 bp, Homo sapiens
gatgggggtgtcaga

SEQ ID NO: 9959 - DNA, 15 bp, Homo sapiens
ggatgggggtgtcag

SEQ ID NO: 9960 - DNA, 15 bp, Homo sapiens
tggatgggggtgtca

SEQ ID NO: 9961 - DNA, 15 bp, Homo sapiens
ctggatgggggtgtc

SEQ ID NO: 9962 - DNA, 15 bp, Homo sapiens
gctggatgggggtgt

SEQ ID NO: 9963 - DNA, 15 bp, Homo sapiens
ggctggatgggggtg

SEQ ID NO: 9964 - DNA, 15 bp, Homo sapiens
gggctggatgggggt

SEQ ID NO: 9965 - DNA, 15 bp, Homo sapiens
agggctggatggggg

SEQ ID NO: 9966 - DNA, 15 bp, Homo sapiens
cagggctggatgggg

SEQ ID NO: 9967 - DNA, 15 bp, Homo sapiens
ccagggctggatggg

SEQ ID NO: 9968 - DNA, 15 bp, Homo sapiens
gccagggctggatgg

SEQ ID NO: 9969 - DNA, 15 bp, Homo sapiens
agccagggctggatg

SEQ ID NO: 9970 - DNA, 15 bp, Homo sapiens
tagccagggctggat

SEQ ID NO: 9971 - DNA, 15 bp, Homo sapiens
ttagccagggctgga

SEQ ID NO: 9972 - DNA, 15 bp, Homo sapiens
gttagccagggctgg

SEQ ID NO: 9973 - DNA, 15 bp, Homo sapiens
agttagccagggctg

SEQ ID NO: 9974 - DNA, 15 bp, Homo sapiens
aagttagccagggct

SEQ ID NO: 9975 - DNA, 15 bp, Homo sapiens
aaagttagccagggc

SEQ ID NO: 9976 - DNA, 15 bp, Homo sapiens
aaaagttagccaggg

SEQ ID NO: 9977 - DNA, 15 bp, Homo sapiens
aaaaagttagccagg

SEQ ID NO: 9978 - DNA, 15 bp, Homo sapiens
gaaaaagttagccag

SEQ ID NO: 9979 - DNA, 15 bp, Homo sapiens
ggaaaaagttagcca

SEQ ID NO: 9980 - DNA, 15 bp, Homo sapiens
tggaaaaagttagcc

SEQ ID NO: 9981 - DNA, 15 bp, Homo sapiens
gtggaaaaagttagc

SEQ ID NO: 9982 - DNA, 15 bp, Homo sapiens
ggtggaaaaagttag

SEQ ID NO: 9983 - DNA, 15 bp, Homo sapiens
aggtggaaaaagtta

SEQ ID NO: 9984 - DNA, 15 bp, Homo sapiens
aaggtggaaaaagtt

SEQ ID NO: 9985 - DNA, 15 bp, Homo sapiens
gaaggtggaaaaagt

SEQ ID NO: 9986 - DNA, 15 bp, Homo sapiens
agaaggtggaaaaag

SEQ ID NO: 9987 - DNA, 15 bp, Homo sapiens
aagaaggtggaaaaa

SEQ ID NO: 9988 - DNA, 15 bp, Homo sapiens
taagaaggtggaaaa

SEQ ID NO: 9989 - DNA, 15 bp, Homo sapiens
gtaagaaggtggaaa

SEQ ID NO: 9990 - DNA, 15 bp, Homo sapiens
agtaagaaggtggaa

SEQ ID NO: 9991 - DNA, 15 bp, Homo sapiens
tagtaagaaggtgga

SEQ ID NO: 9992 - DNA, 15 bp, Homo sapiens
ttagtaagaaggtgg

SEQ ID NO: 9993 - DNA, 15 bp, Homo sapiens
tttagtaagaaggtg

SEQ ID NO: 9994 - DNA, 15 bp, Homo sapiens
atttagtaagaaggt

SEQ ID NO: 9995 - DNA, 15 bp, Homo sapiens
aatttagtaagaagg

SEQ ID NO: 9996 - DNA, 15 bp, Homo sapiens
caatttagtaagaag

SEQ ID NO: 9997 - DNA, 15 bp, Homo sapiens
ccaatttagtaagaa

SEQ ID NO: 9998 - DNA, 15 bp, Homo sapiens
cccaatttagtaaga

SEQ ID NO: 9999 - DNA, 15 bp, Homo sapiens
gcccaatttagtaag

SEQ ID NO: 10000 - DNA, 15 bp, Homo sapiens
ggcccaatttagtaa

SEQ ID NO: 10001 - DNA, 15 bp, Homo sapiens
gggcccaatttagta

SEQ ID NO: 10002 - DNA, 15 bp, Homo sapiens
tgggcccaatttagt

SEQ ID NO: 10003 - DNA, 15 bp, Homo sapiens
ctgggcccaatttag

SEQ ID NO: 10004 - DNA, 15 bp, Homo sapiens
gctgggcccaattta

SEQ ID NO: 10005 - DNA, 15 bp, Homo sapiens
agctgggcccaattt

SEQ ID NO: 10006 - DNA, 15 bp, Homo sapiens
cagctgggcccaatt

SEQ ID NO: 10007 - DNA, 15 bp, Homo sapiens
gcagctgggcccaat

SEQ ID NO: 10008 - DNA, 15 bp, Homo sapiens
agcagctgggcccaa

SEQ ID NO: 10009 - DNA, 15 bp, Homo sapiens
aagcagctgggccca

SEQ ID NO: 10010 - DNA, 15 bp, Homo sapiens
gaagcagctgggccc

SEQ ID NO: 10011 - DNA, 15 bp, Homo sapiens
tgaagcagctgggcc

SEQ ID NO: 10012 - DNA, 15 bp, Homo sapiens
ctgaagcagctgggc

SEQ ID NO: 10013 - DNA, 15 bp, Homo sapiens
gctgaagcagctggg

SEQ ID NO: 10014 - DNA, 15 bp, Homo sapiens
tgctgaagcagctgg

SEQ ID NO: 10015 - DNA, 15 bp, Homo sapiens
ctgctgaagcagctg

SEQ ID NO: 10016 - DNA, 15 bp, Homo sapiens
actgctgaagcagct

SEQ ID NO: 10017 - DNA, 15 bp, Homo sapiens
gactgctgaagcagc

SEQ ID NO: 10018 - DNA, 15 bp, Homo sapiens
tgactgctgaagcag

SEQ ID NO: 10019 - DNA, 15 bp, Homo sapiens
ttgactgctgaagca

SEQ ID NO: 10020 - DNA, 15 bp, Homo sapiens
attgactgctgaagc

SEQ ID NO: 10021 - DNA, 15 bp, Homo sapiens
cattgactgctgaag

SEQ ID NO: 10022 - DNA, 15 bp, Homo sapiens
acattgactgctgaa

SEQ ID NO: 10023 - DNA, 15 bp, Homo sapiens
cacattgactgctga

SEQ ID NO: 10024 - DNA, 15 bp, Homo sapiens
acacattgactgctg

SEQ ID NO: 10025 - DNA, 15 bp, Homo sapiens
aacacattgactgct

SEQ ID NO: 10026 - DNA, 15 bp, Homo sapiens
caacacattgactgc

SEQ ID NO: 10027 - DNA, 15 bp, Homo sapiens
ccaacacattgactg

SEQ ID NO: 10028 - DNA, 15 bp, Homo sapiens
cccaacacattgact

SEQ ID NO: 10029 - DNA, 15 bp, Homo sapiens
ccccaacacattgac

SEQ ID NO: 10030 - DNA, 15 bp, Homo sapiens
cccccaacacattga

SEQ ID NO: 10031 - DNA, 15 bp, Homo sapiens
gcccccaacacattg

SEQ ID NO: 10032 - DNA, 15 bp, Homo sapiens
tgcccccaacacatt

SEQ ID NO: 10033 - DNA, 15 bp, Homo sapiens
ctgcccccaacacat

SEQ ID NO: 10034 - DNA, 15 bp, Homo sapiens
gctgcccccaacaca

SEQ ID NO: 10035 - DNA, 15 bp, Homo sapiens
ggctgcccccaacac

SEQ ID NO: 10036 - DNA, 15 bp, Homo sapiens
gggctgcccccaaca

SEQ ID NO: 10037 - DNA, 15 bp, Homo sapiens
tgggctgcccccaac

SEQ ID NO: 10038 - DNA, 15 bp, Homo sapiens
gtgggctgcccccaa

SEQ ID NO: 10039 - DNA, 15 bp, Homo sapiens
agtgggctgccccca

SEQ ID NO: 10040 - DNA, 15 bp, Homo sapiens
cagtgggctgccccc

SEQ ID NO: 10041 - DNA, 15 bp, Homo sapiens
ccagtgggctgcccc

SEQ ID NO: 10042 - DNA, 15 bp, Homo sapiens
gccagtgggctgccc

SEQ ID NO: 10043 - DNA, 15 bp, Homo sapiens
tgccagtgggctgcc

SEQ ID NO: 10044 - DNA, 15 bp, Homo sapiens
ttgccagtgggctgc

SEQ ID NO: 10045 - DNA, 15 bp, Homo sapiens
cttgccagtgggctg

SEQ ID NO: 10046 - DNA, 15 bp, Homo sapiens
tcttgccagtgggct

SEQ ID NO: 10047 - DNA, 15 bp, Homo sapiens
ctcttgccagtgggc

SEQ ID NO: 10048 - DNA, 15 bp, Homo sapiens
gctcttgccagtggg

SEQ ID NO: 10049 - DNA, 15 bp, Homo sapiens
ggctcttgccagtgg

SEQ ID NO: 10050 - DNA, 15 bp, Homo sapiens
aggctcttgccagtg

SEQ ID NO: 10051 - DNA, 15 bp, Homo sapiens
gaggctcttgccagt

SEQ ID NO: 10052 - DNA, 15 bp, Homo sapiens
tgaggctcttgccag

SEQ ID NO: 10053 - DNA, 15 bp, Homo sapiens
gtgaggctcttgcca

SEQ ID NO: 10054 - DNA, 15 bp, Homo sapiens
ggtgaggctcttgcc

SEQ ID NO: 10055 - DNA, 15 bp, Homo sapiens
aggtgaggctcttgc

SEQ ID NO: 10056 - DNA, 15 bp, Homo sapiens
gaggtgaggctcttg

SEQ ID NO: 10057 - DNA, 15 bp, Homo sapiens
agaggtgaggctctt

SEQ ID NO: 10058 - DNA, 15 bp, Homo sapiens
tagaggtgaggctct

SEQ ID NO: 10059 - DNA, 15 bp, Homo sapiens
ctagaggtgaggctc

SEQ ID NO: 10060 - DNA, 15 bp, Homo sapiens
cctagaggtgaggct

SEQ ID NO: 10061 - DNA, 15 bp, Homo sapiens
ccctagaggtgaggc

SEQ ID NO: 10062 - DNA, 15 bp, Homo sapiens
cccctagaggtgagg

SEQ ID NO: 10063 - DNA, 15 bp, Homo sapiens
gcccctagaggtgag

SEQ ID NO: 10064 - DNA, 15 bp, Homo sapiens
agcccctagaggtga

SEQ ID NO: 10065 - DNA, 15 bp, Homo sapiens
gagcccctagaggtg

SEQ ID NO: 10066 - DNA, 15 bp, Homo sapiens
ggagcccctagaggt

SEQ ID NO: 10067 - DNA, 15 bp, Homo sapiens
gggagcccctagagg

SEQ ID NO: 10068 - DNA, 15 bp, Homo sapiens
tgggagcccctagag

SEQ ID NO: 10069 - DNA, 15 bp, Homo sapiens
ctgggagcccctaga

SEQ ID NO: 10070 - DNA, 15 bp, Homo sapiens
tctgggagcccctag

SEQ ID NO: 10071 - DNA, 15 bp, Homo sapiens
ctctgggagccccta

SEQ ID NO: 10072 - DNA, 15 bp, Homo sapiens
tctctgggagcccct

SEQ ID NO: 10073 - DNA, 15 bp, Homo sapiens
gtctctgggagcccc

SEQ ID NO: 10074 - DNA, 15 bp, Homo sapiens
ggtctctgggagccc

SEQ ID NO: 10075 - DNA, 15 bp, Homo sapiens
gggtctctgggagcc

SEQ ID NO: 10076 - DNA, 15 bp, Homo sapiens
ggggtctctgggagc

SEQ ID NO: 10077 - DNA, 15 bp, Homo sapiens
tggggtctctgggag

SEQ ID NO: 10078 - DNA, 15 bp, Homo sapiens
ttggggtctctggga

SEQ ID NO: 10079 - DNA, 15 bp, Homo sapiens
cttggggtctctggg

SEQ ID NO: 10080 - DNA, 15 bp, Homo sapiens
tcttggggtctctgg

SEQ ID NO: 10081 - DNA, 15 bp, Homo sapiens
ttcttggggtctctg

SEQ ID NO: 10082 - DNA, 15 bp, Homo sapiens
gttcttggggtctct

SEQ ID NO: 10083 - DNA, 15 bp, Homo sapiens
tgttcttggggtctc

SEQ ID NO: 10084 - DNA, 15 bp, Homo sapiens
ctgttcttggggtct

SEQ ID NO: 10085 - DNA, 15 bp, Homo sapiens
tctgttcttggggtc

SEQ ID NO: 10086 - DNA, 15 bp, Homo sapiens
ttctgttcttggggt

SEQ ID NO: 10087 - DNA, 15 bp, Homo sapiens
gttctgttcttgggg

SEQ ID NO: 10088 - DNA, 15 bp, Homo sapiens
ggttctgttcttggg

SEQ ID NO: 10089 - DNA, 15 bp, Homo sapiens
aggttctgttcttgg

SEQ ID NO: 10090 - DNA, 15 bp, Homo sapiens
aaggttctgttcttg

SEQ ID NO: 10091 - DNA, 15 bp, Homo sapiens
gaaggttctgttctt

SEQ ID NO: 10092 - DNA, 15 bp, Homo sapiens
ggaaggttctgttct

SEQ ID NO: 10093 - DNA, 15 bp, Homo sapiens
aggaaggttctgttc

SEQ ID NO: 10094 - DNA, 15 bp, Homo sapiens
gaggaaggttctgtt

SEQ ID NO: 10095 - DNA, 15 bp, Homo sapiens
agaggaaggttctgt

SEQ ID NO: 10096 - DNA, 15 bp, Homo sapiens
cagaggaaggttctg

SEQ ID NO: 10097 - DNA, 15 bp, Homo sapiens
tcagaggaaggttct

SEQ ID NO: 10098 - DNA, 15 bp, Homo sapiens
ctcagaggaaggttc

SEQ ID NO: 10099 - DNA, 15 bp, Homo sapiens
tctcagaggaaggtt

SEQ ID NO: 10100 - DNA, 15 bp, Homo sapiens
ctctcagaggaaggt

SEQ ID NO: 10101 - DNA, 15 bp, Homo sapiens
actctcagaggaagg

SEQ ID NO: 10102 - DNA, 15 bp, Homo sapiens
aactctcagaggaag

SEQ ID NO: 10103 - DNA, 15 bp, Homo sapiens
caactctcagaggaa

SEQ ID NO: 10104 - DNA, 15 bp, Homo sapiens
tcaactctcagagga

SEQ ID NO: 10105 - DNA, 15 bp, Homo sapiens
ctcaactctcagagg

SEQ ID NO: 10106 - DNA, 15 bp, Homo sapiens
actcaactctcagag

SEQ ID NO: 10107 - DNA, 15 bp, Homo sapiens
aactcaactctcaga

SEQ ID NO: 10108 - DNA, 15 bp, Homo sapiens
taactcaactctcag

SEQ ID NO: 10109 - DNA, 15 bp, Homo sapiens
gtaactcaactctca

SEQ ID NO: 10110 - DNA, 15 bp, Homo sapiens
tgtaactcaactctc

SEQ ID NO: 10111 - DNA, 15 bp, Homo sapiens
ttgtaactcaactct

SEQ ID NO: 10112 - DNA, 15 bp, Homo sapiens
cttgtaactcaactc

SEQ ID NO: 10113 - DNA, 15 bp, Homo sapiens
acttgtaactcaact

SEQ ID NO: 10114 - DNA, 15 bp, Homo sapiens
cacttgtaactcaac

SEQ ID NO: 10115 - DNA, 15 bp, Homo sapiens
acacttgtaactcaa

SEQ ID NO: 10116 - DNA, 15 bp, Homo sapiens
aacacttgtaactca

SEQ ID NO: 10117 - DNA, 15 bp, Homo sapiens
aaacacttgtaactc

SEQ ID NO: 10118 - DNA, 15 bp, Homo sapiens
gaaacacttgtaact

SEQ ID NO: 10119 - DNA, 15 bp, Homo sapiens
ggaaacacttgtaac

SEQ ID NO: 10120 - DNA, 15 bp, Homo sapiens
tggaaacacttgtaa

SEQ ID NO: 10121 - DNA, 15 bp, Homo sapiens
ttggaaacacttgta

SEQ ID NO: 10122 - DNA, 15 bp, Homo sapiens
attggaaacacttgt

SEQ ID NO: 10123 - DNA, 15 bp, Homo sapiens
gattggaaacacttg

SEQ ID NO: 10124 - DNA, 15 bp, Homo sapiens
cgattggaaacactt

SEQ ID NO: 10125 - DNA, 15 bp, Homo sapiens
tcgattggaaacact

SEQ ID NO: 10126 - DNA, 15 bp, Homo sapiens
gtcgattggaaacac

SEQ ID NO: 10127 - DNA, 15 bp, Homo sapiens
agtcgattggaaaca

SEQ ID NO: 10128 - DNA, 15 bp, Homo sapiens
gagtcgattggaaac

SEQ ID NO: 10129 - DNA, 15 bp, Homo sapiens
agagtcgattggaaa

SEQ ID NO: 10130 - DNA, 15 bp, Homo sapiens
cagagtcgattggaa

SEQ ID NO: 10131 - DNA, 15 bp, Homo sapiens
ccagagtcgattgga

SEQ ID NO: 10132 - DNA, 15 bp, Homo sapiens
gccagagtcgattgg

SEQ ID NO: 10133 - DNA, 15 bp, Homo sapiens
agccagagtcgattg

SEQ ID NO: 10134 - DNA, 15 bp, Homo sapiens
cagccagagtcgatt

SEQ ID NO: 10135 - DNA, 15 bp, Homo sapiens
acagccagagtcgat

SEQ ID NO: 10136 - DNA, 15 bp, Homo sapiens
aacagccagagtcga

SEQ ID NO: 10137 - DNA, 15 bp, Homo sapiens
aaacagccagagtcg

SEQ ID NO: 10138 - DNA, 15 bp, Homo sapiens
aaaacagccagagtc

SEQ ID NO: 10139 - DNA, 15 bp, Homo sapiens
gaaaacagccagagt

SEQ ID NO: 10140 - DNA, 15 bp, Homo sapiens
ggaaaacagccagag

SEQ ID NO: 10141 - DNA, 15 bp, Homo sapiens
aggaaaacagccaga

SEQ ID NO: 10142 - DNA, 15 bp, Homo sapiens
aaggaaaacagccag

SEQ ID NO: 10143 - DNA, 15 bp, Homo sapiens
aaaggaaaacagcca

SEQ ID NO: 10144 - DNA, 15 bp, Homo sapiens
aaaaggaaaacagcc

SEQ ID NO: 10145 - DNA, 15 bp, Homo sapiens
aaaaaggaaaacagc

SEQ ID NO: 10146 - DNA, 15 bp, Homo sapiens
aaaaaaggaaaacag

SEQ ID NO: 10147 - DNA, 15 bp, Homo sapiens
aaaaaaaggaaaaca

SEQ ID NO: 10148 - DNA, 15 bp, Homo sapiens
caaaaaaaggaaaac

SEQ ID NO: 10149 - DNA, 15 bp, Homo sapiens
tcaaaaaaaggaaaa

SEQ ID NO: 10150 - DNA, 15 bp, Homo sapiens
gtcaaaaaaaggaaa

SEQ ID NO: 10151 - DNA, 15 bp, Homo sapiens
ggtcaaaaaaaggaa

SEQ ID NO: 10152 - DNA, 15 bp, Homo sapiens
gggtcaaaaaaagga

SEQ ID NO: 10153 - DNA, 15 bp, Homo sapiens
tgggtcaaaaaaagg

SEQ ID NO: 10154 - DNA, 15 bp, Homo sapiens
atgggtcaaaaaaag

SEQ ID NO: 10155 - DNA, 15 bp, Homo sapiens
aatgggtcaaaaaaa

SEQ ID NO: 10156 - DNA, 15 bp, Homo sapiens
aaatgggtcaaaaaa

SEQ ID NO: 10157 - DNA, 15 bp, Homo sapiens
gaaatgggtcaaaaa

SEQ ID NO: 10158 - DNA, 15 bp, Homo sapiens
ggaaatgggtcaaaa

SEQ ID NO: 10159 - DNA, 15 bp, Homo sapiens
gggaaatgggtcaaa

SEQ ID NO: 10160 - DNA, 15 bp, Homo sapiens
ggggaaatgggtcaa

SEQ ID NO: 10161 - DNA, 15 bp, Homo sapiens
aggggaaatgggtca

SEQ ID NO: 10162 - DNA, 15 bp, Homo sapiens
aaggggaaatgggtc

SEQ ID NO: 10163 - DNA, 15 bp, Homo sapiens
gaaggggaaatgggt

SEQ ID NO: 10164 - DNA, 15 bp, Homo sapiens
tgaaggggaaatggg

SEQ ID NO: 10165 - DNA, 15 bp, Homo sapiens
ttgaaggggaaatgg

SEQ ID NO: 10166 - DNA, 15 bp, Homo sapiens
gttgaaggggaaatg

SEQ ID NO: 10167 - DNA, 15 bp, Homo sapiens
tgttgaaggggaaat

SEQ ID NO: 10168 - DNA, 15 bp, Homo sapiens
gtgttgaaggggaaa

SEQ ID NO: 10169 - DNA, 15 bp, Homo sapiens
ggtgttgaaggggaa

SEQ ID NO: 10170 - DNA, 15 bp, Homo sapiens
gggtgttgaagggga

SEQ ID NO: 10171 - DNA, 15 bp, Homo sapiens
agggtgttgaagggg

SEQ ID NO: 10172 - DNA, 15 bp, Homo sapiens
cagggtgttgaaggg

SEQ ID NO: 10173 - DNA, 15 bp, Homo sapiens
acagggtgttgaagg

SEQ ID NO: 10174 - DNA, 15 bp, Homo sapiens
aacagggtgttgaag

SEQ ID NO: 10175 - DNA, 15 bp, Homo sapiens
gaacagggtgttgaa

SEQ ID NO: 10176 - DNA, 15 bp, Homo sapiens
agaacagggtgttga

SEQ ID NO: 10177 - DNA, 15 bp, Homo sapiens
aagaacagggtgttg

SEQ ID NO: 10178 - DNA, 15 bp, Homo sapiens
aaagaacagggtgtt

SEQ ID NO: 10179 - DNA, 15 bp, Homo sapiens
gaaagaacagggtgt

SEQ ID NO: 10180 - DNA, 15 bp, Homo sapiens
agaaagaacagggtg

SEQ ID NO: 10181 - DNA, 15 bp, Homo sapiens
gagaaagaacagggt

SEQ ID NO: 10182 - DNA, 15 bp, Homo sapiens
agagaaagaacaggg

SEQ ID NO: 10183 - DNA, 15 bp, Homo sapiens
aagagaaagaacagg

SEQ ID NO: 10184 - DNA, 15 bp, Homo sapiens
taagagaaagaacag

SEQ ID NO: 10185 - DNA, 15 bp, Homo sapiens
ataagagaaagaaca

SEQ ID NO: 10186 - DNA, 15 bp, Homo sapiens
aataagagaaagaac

SEQ ID NO: 10187 - DNA, 15 bp, Homo sapiens
gaataagagaaagaa

SEQ ID NO: 10188 - DNA, 15 bp, Homo sapiens
tgaataagagaaaga

SEQ ID NO: 10189 - DNA, 15 bp, Homo sapiens
atgaataagagaaag

SEQ ID NO: 10190 - DNA, 15 bp, Homo sapiens
tatgaataagagaaa

SEQ ID NO: 10191 - DNA, 15 bp, Homo sapiens
atatgaataagagaa

SEQ ID NO: 10192 - DNA, 15 bp, Homo sapiens
catatgaataagaga

SEQ ID NO: 10193 - DNA, 15 bp, Homo sapiens
acatatgaataagag

SEQ ID NO: 10194 - DNA, 15 bp, Homo sapiens
tacatatgaataaga

SEQ ID NO: 10195 - DNA, 15 bp, Homo sapiens
ctacatatgaataag

SEQ ID NO: 10196 - DNA, 15 bp, Homo sapiens
cctacatatgaataa

SEQ ID NO: 10197 - DNA, 15 bp, Homo sapiens
tcctacatatgaata

SEQ ID NO: 10198 - DNA, 15 bp, Homo sapiens
ttcctacatatgaat

SEQ ID NO: 10199 - DNA, 15 bp, Homo sapiens
cttcctacatatgaa

SEQ ID NO: 10200 - DNA, 15 bp, Homo sapiens
tcttcctacatatga

SEQ ID NO: 10201 - DNA, 15 bp, Homo sapiens
ctcttcctacatatg

SEQ ID NO: 10202 - DNA, 15 bp, Homo sapiens
cctcttcctacatat

SEQ ID NO: 10203 - DNA, 15 bp, Homo sapiens
tcctcttcctacata

SEQ ID NO: 10204 - DNA, 15 bp, Homo sapiens
ttcctcttcctacat

SEQ ID NO: 10205 - DNA, 15 bp, Homo sapiens
attcctcttcctaca

SEQ ID NO: 10206 - DNA, 15 bp, Homo sapiens
tattcctcttcctac

SEQ ID NO: 10207 - DNA, 15 bp, Homo sapiens
gtattcctcttccta

SEQ ID NO: 10208 - DNA, 15 bp, Homo sapiens
cgtattcctcttcct

SEQ ID NO: 10209 - DNA, 15 bp, Homo sapiens
tcgtattcctcttcc

SEQ ID NO: 10210 - DNA, 15 bp, Homo sapiens
ttcgtattcctcttc

SEQ ID NO: 10211 - DNA, 15 bp, Homo sapiens
attcgtattcctctt

SEQ ID NO: 10212 - DNA, 15 bp, Homo sapiens
tattcgtattcctct

SEQ ID NO: 10213 - DNA, 15 bp, Homo sapiens
ttattcgtattcctc

SEQ ID NO: 10214 - DNA, 15 bp, Homo sapiens
cttattcgtattcct

SEQ ID NO: 10215 - DNA, 15 bp, Homo sapiens
ccttattcgtattcc

SEQ ID NO: 10216 - DNA, 15 bp, Homo sapiens
cccttattcgtattc

SEQ ID NO: 10217 - DNA, 15 bp, Homo sapiens
tcccttattcgtatt

SEQ ID NO: 10218 - DNA, 15 bp, Homo sapiens
atcccttattcgtat

SEQ ID NO: 10219 - DNA, 15 bp, Homo sapiens
tatcccttattcgta

SEQ ID NO: 10220 - DNA, 15 bp, Homo sapiens
atatcccttattcgt

SEQ ID NO: 10221 - DNA, 15 bp, Homo sapiens
gatatcccttattcg

SEQ ID NO: 10222 - DNA, 15 bp, Homo sapiens
agatatcccttattc

SEQ ID NO: 10223 - DNA, 15 bp, Homo sapiens
aagatatcccttatt

SEQ ID NO: 10224 - DNA, 15 bp, Homo sapiens
caagatatcccttat

SEQ ID NO: 10225 - DNA, 15 bp, Homo sapiens
tcaagatatccctta

SEQ ID NO: 10226 - DNA, 15 bp, Homo sapiens
ttcaagatatccctt

SEQ ID NO: 10227 - DNA, 15 bp, Homo sapiens
tttcaagatatccct

SEQ ID NO: 10228 - DNA, 15 bp, Homo sapiens
ctttcaagatatccc

SEQ ID NO: 10229 - DNA, 15 bp, Homo sapiens
tctttcaagatatcc

SEQ ID NO: 10230 - DNA, 15 bp, Homo sapiens
atctttcaagatatc

SEQ ID NO: 10231 - DNA, 15 bp, Homo sapiens
catctttcaagatat

SEQ ID NO: 10232 - DNA, 15 bp, Homo sapiens
tcatctttcaagata

SEQ ID NO: 10233 - DNA, 15 bp, Homo sapiens
ttcatctttcaagat

SEQ ID NO: 10234 - DNA, 15 bp, Homo sapiens
cttcatctttcaaga

SEQ ID NO: 10235 - DNA, 15 bp, Homo sapiens
tcttcatctttcaag

SEQ ID NO: 10236 - DNA, 15 bp, Homo sapiens
ttcttcatctttcaa

SEQ ID NO: 10237 - DNA, 15 bp, Homo sapiens
tttcttcatctttca

SEQ ID NO: 10238 - DNA, 15 bp, Homo sapiens
gtttcttcatctttc

SEQ ID NO: 10239 - DNA, 15 bp, Homo sapiens
tgtttcttcatcttt

SEQ ID NO: 10240 - DNA, 15 bp, Homo sapiens
gtgtttcttcatctt

SEQ ID NO: 10241 - DNA, 15 bp, Homo sapiens
agtgtttcttcatct

SEQ ID NO: 10242 - DNA, 15 bp, Homo sapiens
cagtgtttcttcatc

SEQ ID NO: 10243 - DNA, 15 bp, Homo sapiens
tcagtgtttcttcat

SEQ ID NO: 10244 - DNA, 15 bp, Homo sapiens
gtcagtgtttcttca

SEQ ID NO: 10245 - DNA, 15 bp, Homo sapiens
tgtcagtgtttcttc

SEQ ID NO: 10246 - DNA, 15 bp, Homo sapiens
gtgtcagtgtttctt

SEQ ID NO: 10247 - DNA, 15 bp, Homo sapiens
agtgtcagtgtttct

SEQ ID NO: 10248 - DNA, 15 bp, Homo sapiens
tagtgtcagtgtttc

SEQ ID NO: 10249 - DNA, 15 bp, Homo sapiens
atagtgtcagtgttt

SEQ ID NO: 10250 - DNA, 15 bp, Homo sapiens
aatagtgtcagtgtt

SEQ ID NO: 10251 - DNA, 15 bp, Homo sapiens
aaatagtgtcagtgt

SEQ ID NO: 10252 - DNA, 15 bp, Homo sapiens
gaaatagtgtcagtg

SEQ ID NO: 10253 - DNA, 15 bp, Homo sapiens
agaaatagtgtcagt

SEQ ID NO: 10254 - DNA, 15 bp, Homo sapiens
gagaaatagtgtcag

SEQ ID NO: 10255 - DNA, 15 bp, Homo sapiens
tgagaaatagtgtca

SEQ ID NO: 10256 - DNA, 15 bp, Homo sapiens
atgagaaatagtgtc

SEQ ID NO: 10257 - DNA, 15 bp, Homo sapiens
aatgagaaatagtgt

SEQ ID NO: 10258 - DNA, 15 bp, Homo sapiens
taatgagaaatagtg

SEQ ID NO: 10259 - DNA, 15 bp, Homo sapiens
ttaatgagaaatagt

SEQ ID NO: 10260 - DNA, 15 bp, Homo sapiens
tttaatgagaaatag

SEQ ID NO: 10261 - DNA, 15 bp, Homo sapiens
ttttaatgagaaata

SEQ ID NO: 10262 - DNA, 15 bp, Homo sapiens
tttttaatgagaaat

SEQ ID NO: 10263 - DNA, 15 bp, Homo sapiens
gtttttaatgagaaa

SEQ ID NO: 10264 - DNA, 15 bp, Homo sapiens
tgtttttaatgagaa

SEQ ID NO: 10265 - DNA, 15 bp, Homo sapiens
atgtttttaatgaga

SEQ ID NO: 10266 - DNA, 15 bp, Homo sapiens
gatgtttttaatgag

SEQ ID NO: 10267 - DNA, 15 bp, Homo sapiens
cgatgtttttaatga

SEQ ID NO: 10268 - DNA, 15 bp, Homo sapiens
ccgatgtttttaatg

SEQ ID NO: 10269 - DNA, 15 bp, Homo sapiens
gccgatgtttttaat

SEQ ID NO: 10270 - DNA, 15 bp, Homo sapiens
ggccgatgtttttaa

SEQ ID NO: 10271 - DNA, 15 bp, Homo sapiens
aggccgatgttttta

SEQ ID NO: 10272 - DNA, 15 bp, Homo sapiens
caggccgatgttttt

SEQ ID NO: 10273 - DNA, 15 bp, Homo sapiens
acaggccgatgtttt

SEQ ID NO: 10274 - DNA, 15 bp, Homo sapiens
gacaggccgatgttt

SEQ ID NO: 10275 - DNA, 15 bp, Homo sapiens
agacaggccgatgtt

SEQ ID NO: 10276 - DNA, 15 bp, Homo sapiens
cagacaggccgatgt

SEQ ID NO: 10277 - DNA, 15 bp, Homo sapiens
tcagacaggccgatg

SEQ ID NO: 10278 - DNA, 15 bp, Homo sapiens
gtcagacaggccgat

SEQ ID NO: 10279 - DNA, 15 bp, Homo sapiens
agtcagacaggccga

SEQ ID NO: 10280 - DNA, 15 bp, Homo sapiens
gagtcagacaggccg

SEQ ID NO: 10281 - DNA, 15 bp, Homo sapiens
tgagtcagacaggcc

SEQ ID NO: 10282 - DNA, 15 bp, Homo sapiens
ctgagtcagacaggc

SEQ ID NO: 10283 - DNA, 15 bp, Homo sapiens
actgagtcagacagg

SEQ ID NO: 10284 - DNA, 15 bp, Homo sapiens
cactgagtcagacag

SEQ ID NO: 10285 - DNA, 15 bp, Homo sapiens
ccactgagtcagaca

SEQ ID NO: 10286 - DNA, 15 bp, Homo sapiens
accactgagtcagac

SEQ ID NO: 10287 - DNA, 15 bp, Homo sapiens
gaccactgagtcaga

SEQ ID NO: 10288 - DNA, 15 bp, Homo sapiens
agaccactgagtcag

SEQ ID NO: 10289 - DNA, 15 bp, Homo sapiens
tagaccactgagtca

SEQ ID NO: 10290 - DNA, 15 bp, Homo sapiens
gtagaccactgagtc

SEQ ID NO: 10291 - DNA, 15 bp, Homo sapiens
ggtagaccactgagt

SEQ ID NO: 10292 - DNA, 15 bp, Homo sapiens
aggtagaccactgag

SEQ ID NO: 10293 - DNA, 15 bp, Homo sapiens
aaggtagaccactga

SEQ ID NO: 10294 - DNA, 15 bp, Homo sapiens
gaaggtagaccactg

SEQ ID NO: 10295 - DNA, 15 bp, Homo sapiens
agaaggtagaccact

SEQ ID NO: 10296 - DNA, 15 bp, Homo sapiens
cagaaggtagaccac

SEQ ID NO: 10297 - DNA, 15 bp, Homo sapiens
tcagaaggtagacca

SEQ ID NO: 10298 - DNA, 15 bp, Homo sapiens
atcagaaggtagacc

SEQ ID NO: 10299 - DNA, 15 bp, Homo sapiens
gatcagaaggtagac

SEQ ID NO: 10300 - DNA, 15 bp, Homo sapiens
tgatcagaaggtaga

SEQ ID NO: 10301 - DNA, 15 bp, Homo sapiens
ttgatcagaaggtag

SEQ ID NO: 10302 - DNA, 15 bp, Homo sapiens
gttgatcagaaggta

SEQ ID NO: 10303 - DNA, 15 bp, Homo sapiens
agttgatcagaaggt

SEQ ID NO: 10304 - DNA, 15 bp, Homo sapiens
gagttgatcagaagg

SEQ ID NO: 10305 - DNA, 15 bp, Homo sapiens
agagttgatcagaag

SEQ ID NO: 10306 - DNA, 15 bp, Homo sapiens
gagagttgatcagaa

SEQ ID NO: 10307 - DNA, 15 bp, Homo sapiens
tgagagttgatcaga

SEQ ID NO: 10308 - DNA, 15 bp, Homo sapiens
ttgagagttgatcag

SEQ ID NO: 10309 - DNA, 15 bp, Homo sapiens
cttgagagttgatca

SEQ ID NO: 10310 - DNA, 15 bp, Homo sapiens
acttgagagttgatc

SEQ ID NO: 10311 - DNA, 15 bp, Homo sapiens
gacttgagagttgat

SEQ ID NO: 10312 - DNA, 15 bp, Homo sapiens
ggacttgagagttga

SEQ ID NO: 10313 - DNA, 15 bp, Homo sapiens
cggacttgagagttg

SEQ ID NO: 10314 - DNA, 15 bp, Homo sapiens
acggacttgagagtt

SEQ ID NO: 10315 - DNA, 15 bp, Homo sapiens
gacggacttgagagt

SEQ ID NO: 10316 - DNA, 15 bp, Homo sapiens
ggacggacttgagag

SEQ ID NO: 10317 - DNA, 15 bp, Homo sapiens
tggacggacttgaga

SEQ ID NO: 10318 - DNA, 15 bp, Homo sapiens
ctggacggacttgag

SEQ ID NO: 10319 - DNA, 15 bp, Homo sapiens
tctggacggacttga

SEQ ID NO: 10320 - DNA, 15 bp, Homo sapiens
ctctggacggacttg

SEQ ID NO: 10321 - DNA, 15 bp, Homo sapiens
gctctggacggactt

SEQ ID NO: 10322 - DNA, 15 bp, Homo sapiens
tgctctggacggact

SEQ ID NO: 10323 - DNA, 15 bp, Homo sapiens
ctgctctggacggac

SEQ ID NO: 10324 - DNA, 15 bp, Homo sapiens
cctgctctggacgga

SEQ ID NO: 10325 - DNA, 15 bp, Homo sapiens
acctgctctggacgg

SEQ ID NO: 10326 - DNA, 15 bp, Homo sapiens
tacctgctctggacg

SEQ ID NO: 10327 - DNA, 15 bp, Homo sapiens
ctacctgctctggac

SEQ ID NO: 10328 - DNA, 15 bp, Homo sapiens
cctacctgctctgga

SEQ ID NO: 10329 - DNA, 15 bp, Homo sapiens
ccctacctgctctgg

SEQ ID NO: 10330 - DNA, 15 bp, Homo sapiens
cccctacctgctctg

SEQ ID NO: 10331 - DNA, 15 bp, Homo sapiens
ccccctacctgctct

SEQ ID NO: 10332 - DNA, 15 bp, Homo sapiens
tccccctacctgctc

SEQ ID NO: 10333 - DNA, 15 bp, Homo sapiens
atccccctacctgct

SEQ ID NO: 10334 - DNA, 15 bp, Homo sapiens
catccccctacctgc

SEQ ID NO: 10335 - DNA, 15 bp, Homo sapiens
acatccccctacctg

SEQ ID NO: 10336 - DNA, 15 bp, Homo sapiens
gacatccccctacct

SEQ ID NO: 10337 - DNA, 15 bp, Homo sapiens
tgacatccccctacc

SEQ ID NO: 10338 - DNA, 15 bp, Homo sapiens
gtgacatccccctac

SEQ ID NO: 10339 - DNA, 15 bp, Homo sapiens
agtgacatcccccta

SEQ ID NO: 10340 - DNA, 15 bp, Homo sapiens
cagtgacatccccct

SEQ ID NO: 10341 - DNA, 15 bp, Homo sapiens
ccagtgacatccccc

SEQ ID NO: 10342 - DNA, 15 bp, Homo sapiens
gccagtgacatcccc

SEQ ID NO: 10343 - DNA, 15 bp, Homo sapiens
ggccagtgacatccc

SEQ ID NO: 10344 - DNA, 15 bp, Homo sapiens
tggccagtgacatcc

SEQ ID NO: 10345 - DNA, 15 bp, Homo sapiens
ctggccagtgacatc

SEQ ID NO: 10346 - DNA, 15 bp, Homo sapiens
actggccagtgacat

SEQ ID NO: 10347 - DNA, 15 bp, Homo sapiens
cactggccagtgaca

SEQ ID NO: 10348 - DNA, 15 bp, Homo sapiens
ccactggccagtgac

SEQ ID NO: 10349 - DNA, 15 bp, Homo sapiens
accactggccagtga

SEQ ID NO: 10350 - DNA, 15 bp, Homo sapiens
gaccactggccagtg

SEQ ID NO: 10351 - DNA, 15 bp, Homo sapiens
ggaccactggccagt

SEQ ID NO: 10352 - DNA, 15 bp, Homo sapiens
gggaccactggccag

SEQ ID NO: 10353 - DNA, 15 bp, Homo sapiens
agggaccactggcca

SEQ ID NO: 10354 - DNA, 15 bp, Homo sapiens
cagggaccactggcc

SEQ ID NO: 10355 - DNA, 15 bp, Homo sapiens
ccagggaccactggc

SEQ ID NO: 10356 - DNA, 15 bp, Homo sapiens
tccagggaccactgg

SEQ ID NO: 10357 - DNA, 15 bp, Homo sapiens
ctccagggaccactg

SEQ ID NO: 10358 - DNA, 15 bp, Homo sapiens
cctccagggaccact

SEQ ID NO: 10359 - DNA, 15 bp, Homo sapiens
ccctccagggaccac

SEQ ID NO: 10360 - DNA, 15 bp, Homo sapiens
cccctccagggacca

SEQ ID NO: 10361 - DNA, 15 bp, Homo sapiens
tcccctccagggacc

SEQ ID NO: 10362 - DNA, 15 bp, Homo sapiens
ctcccctccagggac

SEQ ID NO: 10363 - DNA, 15 bp, Homo sapiens
cctcccctccaggga

SEQ ID NO: 10364 - DNA, 15 bp, Homo sapiens
ccctcccctccaggg

SEQ ID NO: 10365 - DNA, 15 bp, Homo sapiens
tccctcccctccagg

SEQ ID NO: 10366 - DNA, 15 bp, Homo sapiens
ttccctcccctccag

SEQ ID NO: 10367 - DNA, 15 bp, Homo sapiens
cttccctcccctcca

SEQ ID NO: 10368 - DNA, 15 bp, Homo sapiens
gcttccctcccctcc

SEQ ID NO: 10369 - DNA, 15 bp, Homo sapiens
tgcttccctcccctc

SEQ ID NO: 10370 - DNA, 15 bp, Homo sapiens
gtgcttccctcccct

SEQ ID NO: 10371 - DNA, 15 bp, Homo sapiens
ggtgcttccctcccc

SEQ ID NO: 10372 - DNA, 15 bp, Homo sapiens
gggtgcttccctccc

SEQ ID NO: 10373 - DNA, 15 bp, Homo sapiens
tgggtgcttccctcc

SEQ ID NO: 10374 - DNA, 15 bp, Homo sapiens
ctgggtgcttccctc

SEQ ID NO: 10375 - DNA, 15 bp, Homo sapiens
gctgggtgcttccct

SEQ ID NO: 10376 - DNA, 15 bp, Homo sapiens
ggctgggtgcttccc

SEQ ID NO: 10377 - DNA, 15 bp, Homo sapiens
aggctgggtgcttcc

SEQ ID NO: 10378 - DNA, 15 bp, Homo sapiens
caggctgggtgcttc

SEQ ID NO: 10379 - DNA, 15 bp, Homo sapiens
tcaggctgggtgctt

SEQ ID NO: 10380 - DNA, 15 bp, Homo sapiens
ctcaggctgggtgct

SEQ ID NO: 10381 - DNA, 15 bp, Homo sapiens
tctcaggctgggtgc

SEQ ID NO: 10382 - DNA, 15 bp, Homo sapiens
ttctcaggctgggtg

SEQ ID NO: 10383 - DNA, 15 bp, Homo sapiens
tttctcaggctgggt

SEQ ID NO: 10384 - DNA, 15 bp, Homo sapiens
ctttctcaggctggg

SEQ ID NO: 10385 - DNA, 15 bp, Homo sapiens
cctttctcaggctgg

SEQ ID NO: 10386 - DNA, 15 bp, Homo sapiens
gcctttctcaggctg

SEQ ID NO: 10387 - DNA, 15 bp, Homo sapiens
tgcctttctcaggct

SEQ ID NO: 10388 - DNA, 15 bp, Homo sapiens
ttgcctttctcaggc

SEQ ID NO: 10389 - DNA, 15 bp, Homo sapiens
cttgcctttctcagg

SEQ ID NO: 10390 - DNA, 15 bp, Homo sapiens
tcttgcctttctcag

SEQ ID NO: 10391 - DNA, 15 bp, Homo sapiens
ttcttgcctttctca

SEQ ID NO: 10392 - DNA, 15 bp, Homo sapiens
tttcttgcctttctc

SEQ ID NO: 10393 - DNA, 15 bp, Homo sapiens
atttcttgcctttct

SEQ ID NO: 10394 - DNA, 15 bp, Homo sapiens
tatttcttgcctttc

SEQ ID NO: 10395 - DNA, 15 bp, Homo sapiens
atatttcttgccttt

SEQ ID NO: 10396 - DNA, 15 bp, Homo sapiens
tatatttcttgcctt

SEQ ID NO: 10397 - DNA, 15 bp, Homo sapiens
atatatttcttgcct

SEQ ID NO: 10398 - DNA, 15 bp, Homo sapiens
aatatatttcttgcc

SEQ ID NO: 10399 - DNA, 15 bp, Homo sapiens
caatatatttcttgc

SEQ ID NO: 10400 - DNA, 15 bp, Homo sapiens
ccaatatatttcttg

SEQ ID NO: 10401 - DNA, 15 bp, Homo sapiens
gccaatatatttctt

SEQ ID NO: 10402 - DNA, 15 bp, Homo sapiens
agccaatatatttct

SEQ ID NO: 10403 - DNA, 15 bp, Homo sapiens
aagccaatatatttc

SEQ ID NO: 10404 - DNA, 15 bp, Homo sapiens
aaagccaatatattt

SEQ ID NO: 10405 - DNA, 15 bp, Homo sapiens
aaaagccaatatatt

SEQ ID NO: 10406 - DNA, 15 bp, Homo sapiens
aaaaagccaatatat

SEQ ID NO: 10407 - DNA, 15 bp, Homo sapiens
aaaaaagccaatata

SEQ ID NO: 10408 - DNA, 15 bp, Homo sapiens
gaaaaaagccaatat

SEQ ID NO: 10409 - DNA, 15 bp, Homo sapiens
agaaaaaagccaata

SEQ ID NO: 10410 - DNA, 15 bp, Homo sapiens
aagaaaaaagccaat

SEQ ID NO: 10411 - DNA, 15 bp, Homo sapiens
gaagaaaaaagccaa

SEQ ID NO: 10412 - DNA, 15 bp, Homo sapiens
agaagaaaaaagcca

SEQ ID NO: 10413 - DNA, 15 bp, Homo sapiens
aagaagaaaaaagcc

SEQ ID NO: 10414 - DNA, 15 bp, Homo sapiens
aaagaagaaaaaagc

SEQ ID NO: 10415 - DNA, 15 bp, Homo sapiens
gaaagaagaaaaaag

SEQ ID NO: 10416 - DNA, 15 bp, Homo sapiens
agaaagaagaaaaaa

SEQ ID NO: 10417 - DNA, 15 bp, Homo sapiens
aagaaagaagaaaaa

SEQ ID NO: 10418 - DNA, 15 bp, Homo sapiens
gaagaaagaagaaaa

SEQ ID NO: 10419 - DNA, 15 bp, Homo sapiens
ggaagaaagaagaaa

SEQ ID NO: 10420 - DNA, 15 bp, Homo sapiens
aggaagaaagaagaa

SEQ ID NO: 10421 - DNA, 15 bp, Homo sapiens
aaggaagaaagaaga

SEQ ID NO: 10422 - DNA, 15 bp, Homo sapiens
caaggaagaaagaag

SEQ ID NO: 10423 - DNA, 15 bp, Homo sapiens
acaaggaagaaagaa

SEQ ID NO: 10424 - DNA, 15 bp, Homo sapiens
cacaaggaagaaaga

SEQ ID NO: 10425 - DNA, 15 bp, Homo sapiens
acacaaggaagaaag

SEQ ID NO: 10426 - DNA, 15 bp, Homo sapiens
aacacaaggaagaaa

SEQ ID NO: 10427 - DNA, 15 bp, Homo sapiens
gaacacaaggaagaa

SEQ ID NO: 10428 - DNA, 15 bp, Homo sapiens
tgaacacaaggaaga

SEQ ID NO: 10429 - DNA, 15 bp, Homo sapiens
gtgaacacaaggaag

SEQ ID NO: 10430 - DNA, 15 bp, Homo sapiens
tgtgaacacaaggaa

SEQ ID NO: 10431 - DNA, 15 bp, Homo sapiens
atgtgaacacaagga

SEQ ID NO: 10432 - DNA, 15 bp, Homo sapiens
aatgtgaacacaagg

SEQ ID NO: 10433 - DNA, 15 bp, Homo sapiens
gaatgtgaacacaag

SEQ ID NO: 10434 - DNA, 15 bp, Homo sapiens
tgaatgtgaacacaa

SEQ ID NO: 10435 - DNA, 15 bp, Homo sapiens
ctgaatgtgaacaca

SEQ ID NO: 10436 - DNA, 15 bp, Homo sapiens
tctgaatgtgaacac

SEQ ID NO: 10437 - DNA, 15 bp, Homo sapiens
ttctgaatgtgaaca

SEQ ID NO: 10438 - DNA, 15 bp, Homo sapiens
attctgaatgtgaac

SEQ ID NO: 10439 - DNA, 15 bp, Homo sapiens
gattctgaatgtgaa

SEQ ID NO: 10440 - DNA, 15 bp, Homo sapiens
ggattctgaatgtga

SEQ ID NO: 10441 - DNA, 15 bp, Homo sapiens
tggattctgaatgtg

SEQ ID NO: 10442 - DNA, 15 bp, Homo sapiens
atggattctgaatgt

SEQ ID NO: 10443 - DNA, 15 bp, Homo sapiens
gatggattctgaatg

SEQ ID NO: 10444 - DNA, 15 bp, Homo sapiens
tgatggattctgaat

SEQ ID NO: 10445 - DNA, 15 bp, Homo sapiens
gtgatggattctgaa

SEQ ID NO: 10446 - DNA, 15 bp, Homo sapiens
agtgatggattctga

SEQ ID NO: 10447 - DNA, 15 bp, Homo sapiens
aagtgatggattctg

SEQ ID NO: 10448 - DNA, 15 bp, Homo sapiens
taagtgatggattct

SEQ ID NO: 10449 - DNA, 15 bp, Homo sapiens
ttaagtgatggattc

SEQ ID NO: 10450 - DNA, 15 bp, Homo sapiens
attaagtgatggatt

SEQ ID NO: 10451 - DNA, 15 bp, Homo sapiens
cattaagtgatggat

SEQ ID NO: 10452 - DNA, 15 bp, Homo sapiens
gcattaagtgatgga

SEQ ID NO: 10453 - DNA, 15 bp, Homo sapiens
ggcattaagtgatgg

SEQ ID NO: 10454 - DNA, 15 bp, Homo sapiens
aggcattaagtgatg

SEQ ID NO: 10455 - DNA, 15 bp, Homo sapiens
aaggcattaagtgat

SEQ ID NO: 10456 - DNA, 15 bp, Homo sapiens
caaggcattaagtga

SEQ ID NO: 10457 - DNA, 15 bp, Homo sapiens
acaaggcattaagtg

SEQ ID NO: 10458 - DNA, 15 bp, Homo sapiens
tacaaggcattaagt

SEQ ID NO: 10459 - DNA, 15 bp, Homo sapiens
atacaaggcattaag

SEQ ID NO: 10460 - DNA, 15 bp, Homo sapiens
aatacaaggcattaa

SEQ ID NO: 10461 - DNA, 15 bp, Homo sapiens
aaatacaaggcatta

SEQ ID NO: 10462 - DNA, 15 bp, Homo sapiens
taaatacaaggcatt

SEQ ID NO: 10463 - DNA, 15 bp, Homo sapiens
ctaaatacaaggcat

SEQ ID NO: 10464 - DNA, 15 bp, Homo sapiens
tctaaatacaaggca

SEQ ID NO: 10465 - DNA, 15 bp, Homo sapiens
ttctaaatacaaggc

SEQ ID NO: 10466 - DNA, 15 bp, Homo sapiens
tttctaaatacaagg

SEQ ID NO: 10467 - DNA, 15 bp, Homo sapiens
ttttctaaatacaag

SEQ ID NO: 10468 - DNA, 15 bp, Homo sapiens
tttttctaaatacaa

SEQ ID NO: 10469 - DNA, 15 bp, Homo sapiens
ttttttctaaataca

SEQ ID NO: 10470 - DNA, 15 bp, Homo sapiens
tttttttctaaatac

SEQ ID NO: 10471 - DNA, 15 bp, Homo sapiens
gtttttttctaaata

SEQ ID NO: 10472 - DNA, 15 bp, Homo sapiens
ggtttttttctaaat

SEQ ID NO: 10473 - DNA, 15 bp, Homo sapiens
cggtttttttctaaa

SEQ ID NO: 10474 - DNA, 15 bp, Homo sapiens
ccggtttttttctaa

SEQ ID NO: 10475 - DNA, 15 bp, Homo sapiens
cccggtttttttcta

SEQ ID NO: 10476 - DNA, 15 bp, Homo sapiens
ccccggtttttttct

SEQ ID NO: 10477 - DNA, 15 bp, Homo sapiens
cccccggtttttttc

SEQ ID NO: 10478 - DNA, 15 bp, Homo sapiens
tcccccggttttttt

SEQ ID NO: 10479 - DNA, 15 bp, Homo sapiens
atcccccggtttttt

SEQ ID NO: 10480 - DNA, 15 bp, Homo sapiens
gatcccccggttttt

SEQ ID NO: 10481 - DNA, 15 bp, Homo sapiens
tgatcccccggtttt

SEQ ID NO: 10482 - DNA, 15 bp, Homo sapiens
gtgatcccccggttt

SEQ ID NO: 10483 - DNA, 15 bp, Homo sapiens
agtgatcccccggtt

SEQ ID NO: 10484 - DNA, 15 bp, Homo sapiens
aagtgatcccccggt

SEQ ID NO: 10485 - DNA, 15 bp, Homo sapiens
caagtgatcccccgg

SEQ ID NO: 10486 - DNA, 15 bp, Homo sapiens
tcaagtgatcccccg

SEQ ID NO: 10487 - DNA, 15 bp, Homo sapiens
ctcaagtgatccccc

SEQ ID NO: 10488 - DNA, 15 bp, Homo sapiens
tctcaagtgatcccc

SEQ ID NO: 10489 - DNA, 15 bp, Homo sapiens
atctcaagtgatccc

SEQ ID NO: 10490 - DNA, 15 bp, Homo sapiens
gatctcaagtgatcc

SEQ ID NO: 10491 - DNA, 15 bp, Homo sapiens
cgatctcaagtgatc

SEQ ID NO: 10492 - DNA, 15 bp, Homo sapiens
acgatctcaagtgat

SEQ ID NO: 10493 - DNA, 15 bp, Homo sapiens
cacgatctcaagtga

SEQ ID NO: 10494 - DNA, 15 bp, Homo sapiens
tcacgatctcaagtg

SEQ ID NO: 10495 - DNA, 15 bp, Homo sapiens
atcacgatctcaagt

SEQ ID NO: 10496 - DNA, 15 bp, Homo sapiens
gatcacgatctcaag

SEQ ID NO: 10497 - DNA, 15 bp, Homo sapiens
tgatcacgatctcaa

SEQ ID NO: 10498 - DNA, 15 bp, Homo sapiens
atgatcacgatctca

SEQ ID NO: 10499 - DNA, 15 bp, Homo sapiens
aatgatcacgatctc

SEQ ID NO: 10500 - DNA, 15 bp, Homo sapiens
aaatgatcacgatct

SEQ ID NO: 10501 - DNA, 15 bp, Homo sapiens
aaaatgatcacgatc

SEQ ID NO: 10502 - DNA, 15 bp, Homo sapiens
gaaaatgatcacgat

SEQ ID NO: 10503 - DNA, 15 bp, Homo sapiens
tgaaaatgatcacga

SEQ ID NO: 10504 - DNA, 15 bp, Homo sapiens
ttgaaaatgatcacg

SEQ ID NO: 10505 - DNA, 15 bp, Homo sapiens
gttgaaaatgatcac

SEQ ID NO: 10506 - DNA, 15 bp, Homo sapiens
tgttgaaaatgatca

SEQ ID NO: 10507 - DNA, 15 bp, Homo sapiens
atgttgaaaatgatc

SEQ ID NO: 10508 - DNA, 15 bp, Homo sapiens
tatgttgaaaatgat

SEQ ID NO: 10509 - DNA, 15 bp, Homo sapiens
ctatgttgaaaatga

SEQ ID NO: 10510 - DNA, 15 bp, Homo sapiens
cctatgttgaaaatg

SEQ ID NO: 10511 - DNA, 15 bp, Homo sapiens
tcctatgttgaaaat

SEQ ID NO: 10512 - DNA, 15 bp, Homo sapiens
atcctatgttgaaaa

SEQ ID NO: 10513 - DNA, 15 bp, Homo sapiens
aatcctatgttgaaa

SEQ ID NO: 10514 - DNA, 15 bp, Homo sapiens
gaatcctatgttgaa

SEQ ID NO: 10515 - DNA, 15 bp, Homo sapiens
cgaatcctatgttga

SEQ ID NO: 10516 - DNA, 15 bp, Homo sapiens
tcgaatcctatgttg

SEQ ID NO: 10517 - DNA, 15 bp, Homo sapiens
ttcgaatcctatgtt

SEQ ID NO: 10518 - DNA, 15 bp, Homo sapiens
cttcgaatcctatgt

SEQ ID NO: 10519 - DNA, 15 bp, Homo sapiens
gcttcgaatcctatg

SEQ ID NO: 10520 - DNA, 15 bp, Homo sapiens
agcttcgaatcctat

SEQ ID NO: 10521 - DNA, 15 bp, Homo sapiens
cagcttcgaatccta

SEQ ID NO: 10522 - DNA, 15 bp, Homo sapiens
acagcttcgaatcct

SEQ ID NO: 10523 - DNA, 15 bp, Homo sapiens
tacagcttcgaatcc

SEQ ID NO: 10524 - DNA, 15 bp, Homo sapiens
gtacagcttcgaatc

SEQ ID NO: 10525 - DNA, 15 bp, Homo sapiens
tgtacagcttcgaat

SEQ ID NO: 10526 - DNA, 15 bp, Homo sapiens
gtgtacagcttcgaa

SEQ ID NO: 10527 - DNA, 15 bp, Homo sapiens
tgtgtacagcttcga

SEQ ID NO: 10528 - DNA, 15 bp, Homo sapiens
atgtgtacagcttcg

SEQ ID NO: 10529 - DNA, 15 bp, Homo sapiens
gatgtgtacagcttc

SEQ ID NO: 10530 - DNA, 15 bp, Homo sapiens
ggatgtgtacagctt

SEQ ID NO: 10531 - DNA, 15 bp, Homo sapiens
aggatgtgtacagct

SEQ ID NO: 10532 - DNA, 15 bp, Homo sapiens
caggatgtgtacagc

SEQ ID NO: 10533 - DNA, 15 bp, Homo sapiens
ccaggatgtgtacag

SEQ ID NO: 10534 - DNA, 15 bp, Homo sapiens
accaggatgtgtaca

SEQ ID NO: 10535 - DNA, 15 bp, Homo sapiens
caccaggatgtgtac

SEQ ID NO: 10536 - DNA, 15 bp, Homo sapiens
tcaccaggatgtgta

SEQ ID NO: 10537 - DNA, 15 bp, Homo sapiens
gtcaccaggatgtgt

SEQ ID NO: 10538 - DNA, 15 bp, Homo sapiens
ggtcaccaggatgtg

SEQ ID NO: 10539 - DNA, 15 bp, Homo sapiens
aggtcaccaggatgt

SEQ ID NO: 10540 - DNA, 15 bp, Homo sapiens
aaggtcaccaggatg

SEQ ID NO: 10541 - DNA, 15 bp, Homo sapiens
taaggtcaccaggat

SEQ ID NO: 10542 - DNA, 15 bp, Homo sapiens
ttaaggtcaccagga

SEQ ID NO: 10543 - DNA, 15 bp, Homo sapiens
tttaaggtcaccagg

SEQ ID NO: 10544 - DNA, 15 bp, Homo sapiens
ttttaaggtcaccag

SEQ ID NO: 10545 - DNA, 15 bp, Homo sapiens
gttttaaggtcacca

SEQ ID NO: 10546 - DNA, 15 bp, Homo sapiens
tgttttaaggtcacc

SEQ ID NO: 10547 - DNA, 15 bp, Homo sapiens
atgttttaaggtcac

SEQ ID NO: 10548 - DNA, 15 bp, Homo sapiens
gatgttttaaggtca

SEQ ID NO: 10549 - DNA, 15 bp, Homo sapiens
agatgttttaaggtc

SEQ ID NO: 10550 - DNA, 15 bp, Homo sapiens
gagatgttttaaggt

SEQ ID NO: 10551 - DNA, 15 bp, Homo sapiens
tgagatgttttaagg

SEQ ID NO: 10552 - DNA, 15 bp, Homo sapiens
ctgagatgttttaag

SEQ ID NO: 10553 - DNA, 15 bp, Homo sapiens
cctgagatgttttaa

SEQ ID NO: 10554 - DNA, 15 bp, Homo sapiens
acctgagatgtttta

SEQ ID NO: 10555 - DNA, 15 bp, Homo sapiens
aacctgagatgtttt

SEQ ID NO: 10556 - DNA, 15 bp, Homo sapiens
aaacctgagatgttt

SEQ ID NO: 10557 - DNA, 15 bp, Homo sapiens
aaaacctgagatgtt

SEQ ID NO: 10558 - DNA, 15 bp, Homo sapiens
aaaaacctgagatgt

SEQ ID NO: 10559 - DNA, 15 bp, Homo sapiens
taaaaacctgagatg

SEQ ID NO: 10560 - DNA, 15 bp, Homo sapiens
ataaaaacctgagat

SEQ ID NO: 10561 - DNA, 15 bp, Homo sapiens
tataaaaacctgaga

SEQ ID NO: 10562 - DNA, 15 bp, Homo sapiens
ttataaaaacctgag

SEQ ID NO: 10563 - DNA, 15 bp, Homo sapiens
gttataaaaacctga

SEQ ID NO: 10564 - DNA, 15 bp, Homo sapiens
agttataaaaacctg

SEQ ID NO: 10565 - DNA, 15 bp, Homo sapiens
cagttataaaaacct

SEQ ID NO: 10566 - DNA, 15 bp, Homo sapiens
ccagttataaaaacc

SEQ ID NO: 10567 - DNA, 15 bp, Homo sapiens
tccagttataaaaac

SEQ ID NO: 10568 - DNA, 15 bp, Homo sapiens
ttccagttataaaaa

SEQ ID NO: 10569 - DNA, 15 bp, Homo sapiens
cttccagttataaaa

SEQ ID NO: 10570 - DNA, 15 bp, Homo sapiens
ccttccagttataaa

SEQ ID NO: 10571 - DNA, 15 bp, Homo sapiens
tccttccagttataa

SEQ ID NO: 10572 - DNA, 15 bp, Homo sapiens
ttccttccagttata

SEQ ID NO: 10573 - DNA, 15 bp, Homo sapiens
gttccttccagttat

SEQ ID NO: 10574 - DNA, 15 bp, Homo sapiens
ggttccttccagtta

SEQ ID NO: 10575 - DNA, 15 bp, Homo sapiens
aggttccttccagtt

SEQ ID NO: 10576 - DNA, 15 bp, Homo sapiens
aaggttccttccagt

SEQ ID NO: 10577 - DNA, 15 bp, Homo sapiens
taaggttccttccag

SEQ ID NO: 10578 - DNA, 15 bp, Homo sapiens
ctaaggttccttcca

SEQ ID NO: 10579 - DNA, 15 bp, Homo sapiens
tctaaggttccttcc

SEQ ID NO: 10580 - DNA, 15 bp, Homo sapiens
ctctaaggttccttc

SEQ ID NO: 10581 - DNA, 15 bp, Homo sapiens
tctctaaggttcctt

SEQ ID NO: 10582 - DNA, 15 bp, Homo sapiens
atctctaaggttcct

SEQ ID NO: 10583 - DNA, 15 bp, Homo sapiens
gatctctaaggttcc

SEQ ID NO: 10584 - DNA, 15 bp, Homo sapiens
tgatctctaaggttc

SEQ ID NO: 10585 - DNA, 15 bp, Homo sapiens
atgatctctaaggtt

SEQ ID NO: 10586 - DNA, 15 bp, Homo sapiens
catgatctctaaggt

SEQ ID NO: 10587 - DNA, 15 bp, Homo sapiens
ccatgatctctaagg

SEQ ID NO: 10588 - DNA, 15 bp, Homo sapiens
cccatgatctctaag

SEQ ID NO: 10589 - DNA, 15 bp, Homo sapiens
ccccatgatctctaa

SEQ ID NO: 10590 - DNA, 15 bp, Homo sapiens
gccccatgatctcta

SEQ ID NO: 10591 - DNA, 15 bp, Homo sapiens
tgccccatgatctct

SEQ ID NO: 10592 - DNA, 15 bp, Homo sapiens
gtgccccatgatctc

SEQ ID NO: 10593 - DNA, 15 bp, Homo sapiens
tgtgccccatgatct

SEQ ID NO: 10594 - DNA, 15 bp, Homo sapiens
ttgtgccccatgatc

SEQ ID NO: 10595 - DNA, 15 bp, Homo sapiens
gttgtgccccatgat

SEQ ID NO: 10596 - DNA, 15 bp, Homo sapiens
ggttgtgccccatga

SEQ ID NO: 10597 - DNA, 15 bp, Homo sapiens
aggttgtgccccatg

SEQ ID NO: 10598 - DNA, 15 bp, Homo sapiens
aaggttgtgccccat

SEQ ID NO: 10599 - DNA, 15 bp, Homo sapiens
gaaggttgtgcccca

SEQ ID NO: 10600 - DNA, 15 bp, Homo sapiens
agaaggttgtgcccc

SEQ ID NO: 10601 - DNA, 15 bp, Homo sapiens
gagaaggttgtgccc

SEQ ID NO: 10602 - DNA, 15 bp, Homo sapiens
agagaaggttgtgcc

SEQ ID NO: 10603 - DNA, 15 bp, Homo sapiens
aagagaaggttgtgc

SEQ ID NO: 10604 - DNA, 15 bp, Homo sapiens
aaagagaaggttgtg

SEQ ID NO: 10605 - DNA, 15 bp, Homo sapiens
taaagagaaggttgt

SEQ ID NO: 10606 - DNA, 15 bp, Homo sapiens
ataaagagaaggttg

SEQ ID NO: 10607 - DNA, 15 bp, Homo sapiens
tataaagagaaggtt

SEQ ID NO: 10608 - DNA, 15 bp, Homo sapiens
ctataaagagaaggt

SEQ ID NO: 10609 - DNA, 15 bp, Homo sapiens
tctataaagagaagg

SEQ ID NO: 10610 - DNA, 15 bp, Homo sapiens
atctataaagagaag

SEQ ID NO: 10611 - DNA, 15 bp, Homo sapiens
catctataaagagaa

SEQ ID NO: 10612 - DNA, 15 bp, Homo sapiens
tcatctataaagaga

SEQ ID NO: 10613 - DNA, 15 bp, Homo sapiens
ctcatctataaagag

SEQ ID NO: 10614 - DNA, 15 bp, Homo sapiens
cctcatctataaaga

SEQ ID NO: 10615 - DNA, 15 bp, Homo sapiens
tcctcatctataaag

SEQ ID NO: 10616 - DNA, 15 bp, Homo sapiens
ttcctcatctataaa

SEQ ID NO: 10617 - DNA, 15 bp, Homo sapiens
tttcctcatctataa

SEQ ID NO: 10618 - DNA, 15 bp, Homo sapiens
gtttcctcatctata

SEQ ID NO: 10619 - DNA, 15 bp, Homo sapiens
tgtttcctcatctat

SEQ ID NO: 10620 - DNA, 15 bp, Homo sapiens
ctgtttcctcatcta

SEQ ID NO: 10621 - DNA, 15 bp, Homo sapiens
tctgtttcctcatct

SEQ ID NO: 10622 - DNA, 15 bp, Homo sapiens
ttctgtttcctcatc

SEQ ID NO: 10623 - DNA, 15 bp, Homo sapiens
tttctgtttcctcat

SEQ ID NO: 10624 - DNA, 15 bp, Homo sapiens
atttctgtttcctca

SEQ ID NO: 10625 - DNA, 15 bp, Homo sapiens
gatttctgtttcctc

SEQ ID NO: 10626 - DNA, 15 bp, Homo sapiens
agatttctgtttcct

SEQ ID NO: 10627 - DNA, 15 bp, Homo sapiens
tagatttctgtttcc

SEQ ID NO: 10628 - DNA, 15 bp, Homo sapiens
atagatttctgtttc

SEQ ID NO: 10629 - DNA, 15 bp, Homo sapiens
aatagatttctgttt

SEQ ID NO: 10630 - DNA, 15 bp, Homo sapiens
gaatagatttctgtt

SEQ ID NO: 10631 - DNA, 15 bp, Homo sapiens
tgaatagatttctgt

SEQ ID NO: 10632 - DNA, 15 bp, Homo sapiens
atgaatagatttctg

SEQ ID NO: 10633 - DNA, 15 bp, Homo sapiens
aatgaatagatttct

SEQ ID NO: 10634 - DNA, 15 bp, Homo sapiens
aaatgaatagatttc

SEQ ID NO: 10635 - DNA, 15 bp, Homo sapiens
taaatgaatagattt

SEQ ID NO: 10636 - DNA, 15 bp, Homo sapiens
ataaatgaatagatt

SEQ ID NO: 10637 - DNA, 15 bp, Homo sapiens
aataaatgaatagat

SEQ ID NO: 10638 - DNA, 15 bp, Homo sapiens
taataaatgaataga

SEQ ID NO: 10639 - DNA, 15 bp, Homo sapiens
gtaataaatgaatag

SEQ ID NO: 10640 - DNA, 15 bp, Homo sapiens
agtaataaatgaata

SEQ ID NO: 10641 - DNA, 15 bp, Homo sapiens
gagtaataaatgaat

SEQ ID NO: 10642 - DNA, 15 bp, Homo sapiens
tgagtaataaatgaa

SEQ ID NO: 10643 - DNA, 15 bp, Homo sapiens
ttgagtaataaatga

SEQ ID NO: 10644 - DNA, 15 bp, Homo sapiens
tttgagtaataaatg

SEQ ID NO: 10645 - DNA, 15 bp, Homo sapiens
atttgagtaataaat

SEQ ID NO: 10646 - DNA, 15 bp, Homo sapiens
tatttgagtaataaa

SEQ ID NO: 10647 - DNA, 15 bp, Homo sapiens
atatttgagtaataa

SEQ ID NO: 10648 - DNA, 15 bp, Homo sapiens
aatatttgagtaata

SEQ ID NO: 10649 - DNA, 15 bp, Homo sapiens
aaatatttgagtaat

SEQ ID NO: 10650 - DNA, 15 bp, Homo sapiens
taaatatttgagtaa

SEQ ID NO: 10651 - DNA, 15 bp, Homo sapiens
ctaaatatttgagta

SEQ ID NO: 10652 - DNA, 15 bp, Homo sapiens
cctaaatatttgagt

SEQ ID NO: 10653 - DNA, 15 bp, Homo sapiens
ccctaaatatttgag

SEQ ID NO: 10654 - DNA, 15 bp, Homo sapiens
tccctaaatatttga

SEQ ID NO: 10655 - DNA, 15 bp, Homo sapiens
gtccctaaatatttg

SEQ ID NO: 10656 - DNA, 15 bp, Homo sapiens
tgtccctaaatattt

SEQ ID NO: 10657 - DNA, 15 bp, Homo sapiens
ctgtccctaaatatt

SEQ ID NO: 10658 - DNA, 15 bp, Homo sapiens
actgtccctaaatat

SEQ ID NO: 10659 - DNA, 15 bp, Homo sapiens
aactgtccctaaata

SEQ ID NO: 10660 - DNA, 15 bp, Homo sapiens
caactgtccctaaat

SEQ ID NO: 10661 - DNA, 15 bp, Homo sapiens
acaactgtccctaaa

SEQ ID NO: 10662 - DNA, 15 bp, Homo sapiens
tacaactgtccctaa

SEQ ID NO: 10663 - DNA, 15 bp, Homo sapiens
ctacaactgtcccta

SEQ ID NO: 10664 - DNA, 15 bp, Homo sapiens
cctacaactgtccct

SEQ ID NO: 10665 - DNA, 15 bp, Homo sapiens
acctacaactgtccc

SEQ ID NO: 10666 - DNA, 15 bp, Homo sapiens
tacctacaactgtcc

SEQ ID NO: 10667 - DNA, 15 bp, Homo sapiens
gtacctacaactgtc

SEQ ID NO: 10668 - DNA, 15 bp, Homo sapiens
agtacctacaactgt

SEQ ID NO: 10669 - DNA, 15 bp, Homo sapiens
tagtacctacaactg

SEQ ID NO: 10670 - DNA, 15 bp, Homo sapiens
ctagtacctacaact

SEQ ID NO: 10671 - DNA, 15 bp, Homo sapiens
tctagtacctacaac

SEQ ID NO: 10672 - DNA, 15 bp, Homo sapiens
ttctagtacctacaa

SEQ ID NO: 10673 - DNA, 15 bp, Homo sapiens
gttctagtacctaca

SEQ ID NO: 10674 - DNA, 15 bp, Homo sapiens
tgttctagtacctac

SEQ ID NO: 10675 - DNA, 15 bp, Homo sapiens
gtgttctagtaccta

SEQ ID NO: 10676 - DNA, 15 bp, Homo sapiens
tgtgttctagtacct

SEQ ID NO: 10677 - DNA, 15 bp, Homo sapiens
ctgtgttctagtacc

SEQ ID NO: 10678 - DNA, 15 bp, Homo sapiens
actgtgttctagtac

SEQ ID NO: 10679 - DNA, 15 bp, Homo sapiens
cactgtgttctagta

SEQ ID NO: 10680 - DNA, 15 bp, Homo sapiens
acactgtgttctagt

SEQ ID NO: 10681 - DNA, 15 bp, Homo sapiens
cacactgtgttctag

SEQ ID NO: 10682 - DNA, 15 bp, Homo sapiens
tcacactgtgttcta

SEQ ID NO: 10683 - DNA, 15 bp, Homo sapiens
ttcacactgtgttct

SEQ ID NO: 10684 - DNA, 15 bp, Homo sapiens
gttcacactgtgttc

SEQ ID NO: 10685 - DNA, 15 bp, Homo sapiens
ggttcacactgtgtt

SEQ ID NO: 10686 - DNA, 15 bp, Homo sapiens
tggttcacactgtgt

SEQ ID NO: 10687 - DNA, 15 bp, Homo sapiens
ctggttcacactgtg

SEQ ID NO: 10688 - DNA, 15 bp, Homo sapiens
tctggttcacactgt

SEQ ID NO: 10689 - DNA, 15 bp, Homo sapiens
gtctggttcacactg

SEQ ID NO: 10690 - DNA, 15 bp, Homo sapiens
tgtctggttcacact

SEQ ID NO: 10691 - DNA, 15 bp, Homo sapiens
ctgtctggttcacac

SEQ ID NO: 10692 - DNA, 15 bp, Homo sapiens
cctgtctggttcaca

SEQ ID NO: 10693 - DNA, 15 bp, Homo sapiens
gcctgtctggttcac

SEQ ID NO: 10694 - DNA, 15 bp, Homo sapiens
tgcctgtctggttca

SEQ ID NO: 10695 - DNA, 15 bp, Homo sapiens
ttgcctgtctggttc

SEQ ID NO: 10696 - DNA, 15 bp, Homo sapiens
tttgcctgtctggtt

SEQ ID NO: 10697 - DNA, 15 bp, Homo sapiens
ttttgcctgtctggt

SEQ ID NO: 10698 - DNA, 15 bp, Homo sapiens
gttttgcctgtctgg

SEQ ID NO: 10699 - DNA, 15 bp, Homo sapiens
ggttttgcctgtctg

SEQ ID NO: 10700 - DNA, 15 bp, Homo sapiens
gggttttgcctgtct

SEQ ID NO: 10701 - DNA, 15 bp, Homo sapiens
ggggttttgcctgtc

SEQ ID NO: 10702 - DNA, 15 bp, Homo sapiens
tggggttttgcctgt

SEQ ID NO: 10703 - DNA, 15 bp, Homo sapiens
ctggggttttgcctg

SEQ ID NO: 10704 - DNA, 15 bp, Homo sapiens
cctggggttttgcct

SEQ ID NO: 10705 - DNA, 15 bp, Homo sapiens
gcctggggttttgcc

SEQ ID NO: 10706 - DNA, 15 bp, Homo sapiens
ggcctggggttttgc

SEQ ID NO: 10707 - DNA, 15 bp, Homo sapiens
tggcctggggttttg

SEQ ID NO: 10708 - DNA, 15 bp, Homo sapiens
ctggcctggggtttt

SEQ ID NO: 10709 - DNA, 15 bp, Homo sapiens
cctggcctggggttt

SEQ ID NO: 10710 - DNA, 15 bp, Homo sapiens
ccctggcctggggtt

SEQ ID NO: 10711 - DNA, 15 bp, Homo sapiens
tccctggcctggggt

SEQ ID NO: 10712 - DNA, 15 bp, Homo sapiens
ctccctggcctgggg

SEQ ID NO: 10713 - DNA, 15 bp, Homo sapiens
gctccctggcctggg

SEQ ID NO: 10714 - DNA, 15 bp, Homo sapiens
agctccctggcctgg

SEQ ID NO: 10715 - DNA, 15 bp, Homo sapiens
aagctccctggcctg

SEQ ID NO: 10716 - DNA, 15 bp, Homo sapiens
gaagctccctggcct

SEQ ID NO: 10717 - DNA, 15 bp, Homo sapiens
ggaagctccctggcc

SEQ ID NO: 10718 - DNA, 15 bp, Homo sapiens
tggaagctccctggc

SEQ ID NO: 10719 - DNA, 15 bp, Homo sapiens
atggaagctccctgg

SEQ ID NO: 10720 - DNA, 15 bp, Homo sapiens
aatggaagctccctg

SEQ ID NO: 10721 - DNA, 15 bp, Homo sapiens
gaatggaagctccct

SEQ ID NO: 10722 - DNA, 15 bp, Homo sapiens
ggaatggaagctccc

SEQ ID NO: 10723 - DNA, 15 bp, Homo sapiens
tggaatggaagctcc

SEQ ID NO: 10724 - DNA, 15 bp, Homo sapiens
ctggaatggaagctc

SEQ ID NO: 10725 - DNA, 15 bp, Homo sapiens
actggaatggaagct

SEQ ID NO: 10726 - DNA, 15 bp, Homo sapiens
cactggaatggaagc

SEQ ID NO: 10727 - DNA, 15 bp, Homo sapiens
ccactggaatggaag

SEQ ID NO: 10728 - DNA, 15 bp, Homo sapiens
cccactggaatggaa

SEQ ID NO: 10729 - DNA, 15 bp, Homo sapiens
ccccactggaatgga

SEQ ID NO: 10730 - DNA, 15 bp, Homo sapiens
gccccactggaatgg

SEQ ID NO: 10731 - DNA, 15 bp, Homo sapiens
ggccccactggaatg

SEQ ID NO: 10732 - DNA, 15 bp, Homo sapiens
tggccccactggaat

SEQ ID NO: 10733 - DNA, 15 bp, Homo sapiens
gtggccccactggaa

SEQ ID NO: 10734 - DNA, 15 bp, Homo sapiens
tgtggccccactgga

SEQ ID NO: 10735 - DNA, 15 bp, Homo sapiens
ctgtggccccactgg

SEQ ID NO: 10736 - DNA, 15 bp, Homo sapiens
cctgtggccccactg

SEQ ID NO: 10737 - DNA, 15 bp, Homo sapiens
gcctgtggccccact

SEQ ID NO: 10738 - DNA, 15 bp, Homo sapiens
cgcctgtggccccac

SEQ ID NO: 10739 - DNA, 15 bp, Homo sapiens
tcgcctgtggcccca

SEQ ID NO: 10740 - DNA, 15 bp, Homo sapiens
atcgcctgtggcccc

SEQ ID NO: 10741 - DNA, 15 bp, Homo sapiens
catcgcctgtggccc

SEQ ID NO: 10742 - DNA, 15 bp, Homo sapiens
gcatcgcctgtggcc

SEQ ID NO: 10743 - DNA, 15 bp, Homo sapiens
agcatcgcctgtggc

SEQ ID NO: 10744 - DNA, 15 bp, Homo sapiens
gagcatcgcctgtgg

SEQ ID NO: 10745 - DNA, 15 bp, Homo sapiens
tgagcatcgcctgtg

SEQ ID NO: 10746 - DNA, 15 bp, Homo sapiens
ctgagcatcgcctgt

SEQ ID NO: 10747 - DNA, 15 bp, Homo sapiens
cctgagcatcgcctg

SEQ ID NO: 10748 - DNA, 15 bp, Homo sapiens
acctgagcatcgcct

SEQ ID NO: 10749 - DNA, 15 bp, Homo sapiens
tacctgagcatcgcc

SEQ ID NO: 10750 - DNA, 15 bp, Homo sapiens
ttacctgagcatcgc

SEQ ID NO: 10751 - DNA, 15 bp, Homo sapiens
cttacctgagcatcg

SEQ ID NO: 10752 - DNA, 15 bp, Homo sapiens
gcttacctgagcatc

SEQ ID NO: 10753 - DNA, 15 bp, Homo sapiens
tgcttacctgagcat

SEQ ID NO: 10754 - DNA, 15 bp, Homo sapiens
ctgcttacctgagca

SEQ ID NO: 10755 - DNA, 15 bp, Homo sapiens
tctgcttacctgagc

SEQ ID NO: 10756 - DNA, 15 bp, Homo sapiens
ctctgcttacctgag

SEQ ID NO: 10757 - DNA, 15 bp, Homo sapiens
tctctgcttacctga

SEQ ID NO: 10758 - DNA, 15 bp, Homo sapiens
gtctctgcttacctg

SEQ ID NO: 10759 - DNA, 15 bp, Homo sapiens
agtctctgcttacct

SEQ ID NO: 10760 - DNA, 15 bp, Homo sapiens
gagtctctgcttacc

SEQ ID NO: 10761 - DNA, 15 bp, Homo sapiens
ggagtctctgcttac

SEQ ID NO: 10762 - DNA, 15 bp, Homo sapiens
cggagtctctgctta

SEQ ID NO: 10763 - DNA, 15 bp, Homo sapiens
gcggagtctctgctt

SEQ ID NO: 10764 - DNA, 15 bp, Homo sapiens
agcggagtctctgct

SEQ ID NO: 10765 - DNA, 15 bp, Homo sapiens
cagcggagtctctgc

SEQ ID NO: 10766 - DNA, 15 bp, Homo sapiens
acagcggagtctctg

SEQ ID NO: 10767 - DNA, 15 bp, Homo sapiens
cacagcggagtctct

SEQ ID NO: 10768 - DNA, 15 bp, Homo sapiens
acacagcggagtctc

SEQ ID NO: 10769 - DNA, 15 bp, Homo sapiens
cacacagcggagtct

SEQ ID NO: 10770 - DNA, 15 bp, Homo sapiens
tcacacagcggagtc

SEQ ID NO: 10771 - DNA, 15 bp, Homo sapiens
gtcacacagcggagt

SEQ ID NO: 10772 - DNA, 15 bp, Homo sapiens
agtcacacagcggag

SEQ ID NO: 10773 - DNA, 15 bp, Homo sapiens
aagtcacacagcgga

SEQ ID NO: 10774 - DNA, 15 bp, Homo sapiens
gaagtcacacagcgg

SEQ ID NO: 10775 - DNA, 15 bp, Homo sapiens
agaagtcacacagcg

SEQ ID NO: 10776 - DNA, 15 bp, Homo sapiens
cagaagtcacacagc

SEQ ID NO: 10777 - DNA, 15 bp, Homo sapiens
ccagaagtcacacag

SEQ ID NO: 10778 - DNA, 15 bp, Homo sapiens
gccagaagtcacaca

SEQ ID NO: 10779 - DNA, 15 bp, Homo sapiens
agccagaagtcacac

SEQ ID NO: 10780 - DNA, 15 bp, Homo sapiens
cagccagaagtcaca

SEQ ID NO: 10781 - DNA, 15 bp, Homo sapiens
acagccagaagtcac

SEQ ID NO: 10782 - DNA, 15 bp, Homo sapiens
cacagccagaagtca

SEQ ID NO: 10783 - DNA, 15 bp, Homo sapiens
tcacagccagaagtc

SEQ ID NO: 10784 - DNA, 15 bp, Homo sapiens
atcacagccagaagt

SEQ ID NO: 10785 - DNA, 15 bp, Homo sapiens
catcacagccagaag

SEQ ID NO: 10786 - DNA, 15 bp, Homo sapiens
ccatcacagccagaa

SEQ ID NO: 10787 - DNA, 15 bp, Homo sapiens
cccatcacagccaga

SEQ ID NO: 10788 - DNA, 15 bp, Homo sapiens
acccatcacagccag

SEQ ID NO: 10789 - DNA, 15 bp, Homo sapiens
cacccatcacagcca

SEQ ID NO: 10790 - DNA, 15 bp, Homo sapiens
gcacccatcacagcc

SEQ ID NO: 10791 - DNA, 15 bp, Homo sapiens
agcacccatcacagc

SEQ ID NO: 10792 - DNA, 15 bp, Homo sapiens
cagcacccatcacag

SEQ ID NO: 10793 - DNA, 15 bp, Homo sapiens
gcagcacccatcaca

SEQ ID NO: 10794 - DNA, 15 bp, Homo sapiens
tgcagcacccatcac

SEQ ID NO: 10795 - DNA, 15 bp, Homo sapiens
ttgcagcacccatca

SEQ ID NO: 10796 - DNA, 15 bp, Homo sapiens
cttgcagcacccatc

SEQ ID NO: 10797 - DNA, 15 bp, Homo sapiens
ccttgcagcacccat

SEQ ID NO: 10798 - DNA, 15 bp, Homo sapiens
tccttgcagcaccca

SEQ ID NO: 10799 - DNA, 15 bp, Homo sapiens
ttccttgcagcaccc

SEQ ID NO: 10800 - DNA, 15 bp, Homo sapiens
tttccttgcagcacc

SEQ ID NO: 10801 - DNA, 15 bp, Homo sapiens
ttttccttgcagcac

SEQ ID NO: 10802 - DNA, 15 bp, Homo sapiens
attttccttgcagca

SEQ ID NO: 10803 - DNA, 15 bp, Homo sapiens
gattttccttgcagc

SEQ ID NO: 10804 - DNA, 15 bp, Homo sapiens
ggattttccttgcag

SEQ ID NO: 10805 - DNA, 15 bp, Homo sapiens
cggattttccttgca

SEQ ID NO: 10806 - DNA, 15 bp, Homo sapiens
ccggattttccttgc

SEQ ID NO: 10807 - DNA, 15 bp, Homo sapiens
accggattttccttg

SEQ ID NO: 10808 - DNA, 15 bp, Homo sapiens
taccggattttcctt

SEQ ID NO: 10809 - DNA, 15 bp, Homo sapiens
ctaccggattttcct

SEQ ID NO: 10810 - DNA, 15 bp, Homo sapiens
tctaccggattttcc

SEQ ID NO: 10811 - DNA, 15 bp, Homo sapiens
ctctaccggattttc

SEQ ID NO: 10812 - DNA, 15 bp, Homo sapiens
actctaccggatttt

SEQ ID NO: 10813 - DNA, 15 bp, Homo sapiens
gactctaccggattt

SEQ ID NO: 10814 - DNA, 15 bp, Homo sapiens
cgactctaccggatt

SEQ ID NO: 10815 - DNA, 15 bp, Homo sapiens
tcgactctaccggat

SEQ ID NO: 10816 - DNA, 15 bp, Homo sapiens
ctcgactctaccgga

SEQ ID NO: 10817 - DNA, 15 bp, Homo sapiens
cctcgactctaccgg

SEQ ID NO: 10818 - DNA, 15 bp, Homo sapiens
ccctcgactctaccg

SEQ ID NO: 10819 - DNA, 15 bp, Homo sapiens
accctcgactctacc

SEQ ID NO: 10820 - DNA, 15 bp, Homo sapiens
aaccctcgactctac

SEQ ID NO: 10821 - DNA, 15 bp, Homo sapiens
taaccctcgactcta

SEQ ID NO: 10822 - DNA, 15 bp, Homo sapiens
ctaaccctcgactct

SEQ ID NO: 10823 - DNA, 15 bp, Homo sapiens
tctaaccctcgactc

SEQ ID NO: 10824 - DNA, 15 bp, Homo sapiens
ctctaaccctcgact

SEQ ID NO: 10825 - DNA, 15 bp, Homo sapiens
tctctaaccctcgac

SEQ ID NO: 10826 - DNA, 15 bp, Homo sapiens
ctctctaaccctcga

SEQ ID NO: 10827 - DNA, 15 bp, Homo sapiens
cctctctaaccctcg

SEQ ID NO: 10828 - DNA, 15 bp, Homo sapiens
ccctctctaaccctc

SEQ ID NO: 10829 - DNA, 15 bp, Homo sapiens
tccctctctaaccct

SEQ ID NO: 10830 - DNA, 15 bp, Homo sapiens
gtccctctctaaccc

SEQ ID NO: 10831 - DNA, 15 bp, Homo sapiens
cgtccctctctaacc

SEQ ID NO: 10832 - DNA, 15 bp, Homo sapiens
ccgtccctctctaac

SEQ ID NO: 10833 - DNA, 15 bp, Homo sapiens
tccgtccctctctaa

SEQ ID NO: 10834 - DNA, 15 bp, Homo sapiens
ctccgtccctctcta

SEQ ID NO: 10835 - DNA, 15 bp, Homo sapiens
cctccgtccctctct

SEQ ID NO: 10836 - DNA, 15 bp, Homo sapiens
ccctccgtccctctc

SEQ ID NO: 10837 - DNA, 15 bp, Homo sapiens
cccctccgtccctct

SEQ ID NO: 10838 - DNA, 15 bp, Homo sapiens
gcccctccgtccctc

SEQ ID NO: 10839 - DNA, 15 bp, Homo sapiens
tgcccctccgtccct

SEQ ID NO: 10840 - DNA, 15 bp, Homo sapiens
ctgcccctccgtccc

SEQ ID NO: 10841 - DNA, 15 bp, Homo sapiens
cctgcccctccgtcc

SEQ ID NO: 10842 - DNA, 15 bp, Homo sapiens
acctgcccctccgtc

SEQ ID NO: 10843 - DNA, 15 bp, Homo sapiens
aacctgcccctccgt

SEQ ID NO: 10844 - DNA, 15 bp, Homo sapiens
aaacctgcccctccg

SEQ ID NO: 10845 - DNA, 15 bp, Homo sapiens
taaacctgcccctcc

SEQ ID NO: 10846 - DNA, 15 bp, Homo sapiens
ttaaacctgcccctc

SEQ ID NO: 10847 - DNA, 15 bp, Homo sapiens
cttaaacctgcccct

SEQ ID NO: 10848 - DNA, 15 bp, Homo sapiens
ccttaaacctgcccc

SEQ ID NO: 10849 - DNA, 15 bp, Homo sapiens
cccttaaacctgccc

SEQ ID NO: 10850 - DNA, 15 bp, Homo sapiens
ccccttaaacctgcc

SEQ ID NO: 10851 - DNA, 15 bp, Homo sapiens
cccccttaaacctgc

SEQ ID NO: 10852 - DNA, 15 bp, Homo sapiens
tcccccttaaacctg

SEQ ID NO: 10853 - DNA, 15 bp, Homo sapiens
atcccccttaaacct

SEQ ID NO: 10854 - DNA, 15 bp, Homo sapiens
catcccccttaaacc

SEQ ID NO: 10855 - DNA, 15 bp, Homo sapiens
gcatcccccttaaac

SEQ ID NO: 10856 - DNA, 15 bp, Homo sapiens
agcatcccccttaaa

SEQ ID NO: 10857 - DNA, 15 bp, Homo sapiens
gagcatcccccttaa

SEQ ID NO: 10858 - DNA, 15 bp, Homo sapiens
tgagcatccccctta

SEQ ID NO: 10859 - DNA, 15 bp, Homo sapiens
ctgagcatccccctt

SEQ ID NO: 10860 - DNA, 15 bp, Homo sapiens
cctgagcatccccct

SEQ ID NO: 10861 - DNA, 15 bp, Homo sapiens
tcctgagcatccccc

SEQ ID NO: 10862 - DNA, 15 bp, Homo sapiens
ttcctgagcatcccc

SEQ ID NO: 10863 - DNA, 15 bp, Homo sapiens
cttcctgagcatccc

SEQ ID NO: 10864 - DNA, 15 bp, Homo sapiens
ccttcctgagcatcc

SEQ ID NO: 10865 - DNA, 15 bp, Homo sapiens
gccttcctgagcatc

SEQ ID NO: 10866 - DNA, 15 bp, Homo sapiens
ggccttcctgagcat

SEQ ID NO: 10867 - DNA, 15 bp, Homo sapiens
aggccttcctgagca

SEQ ID NO: 10868 - DNA, 15 bp, Homo sapiens
aaggccttcctgagc

SEQ ID NO: 10869 - DNA, 15 bp, Homo sapiens
gaaggccttcctgag

SEQ ID NO: 10870 - DNA, 15 bp, Homo sapiens
ggaaggccttcctga

SEQ ID NO: 10871 - DNA, 15 bp, Homo sapiens
aggaaggccttcctg

SEQ ID NO: 10872 - DNA, 15 bp, Homo sapiens
caggaaggccttcct

SEQ ID NO: 10873 - DNA, 15 bp, Homo sapiens
tcaggaaggccttcc

SEQ ID NO: 10874 - DNA, 15 bp, Homo sapiens
ctcaggaaggccttc

SEQ ID NO: 10875 - DNA, 15 bp, Homo sapiens
cctcaggaaggcctt

SEQ ID NO: 10876 - DNA, 15 bp, Homo sapiens
tcctcaggaaggcct

SEQ ID NO: 10877 - DNA, 15 bp, Homo sapiens
ctcctcaggaaggcc

SEQ ID NO: 10878 - DNA, 15 bp, Homo sapiens
cctcctcaggaaggc

SEQ ID NO: 10879 - DNA, 15 bp, Homo sapiens
acctcctcaggaagg

SEQ ID NO: 10880 - DNA, 15 bp, Homo sapiens
cacctcctcaggaag

SEQ ID NO: 10881 - DNA, 15 bp, Homo sapiens
ccacctcctcaggaa

SEQ ID NO: 10882 - DNA, 15 bp, Homo sapiens
accacctcctcagga

SEQ ID NO: 10883 - DNA, 15 bp, Homo sapiens
taccacctcctcagg

SEQ ID NO: 10884 - DNA, 15 bp, Homo sapiens
ataccacctcctcag

SEQ ID NO: 10885 - DNA, 15 bp, Homo sapiens
aataccacctcctca

SEQ ID NO: 10886 - DNA, 15 bp, Homo sapiens
aaataccacctcctc

SEQ ID NO: 10887 - DNA, 15 bp, Homo sapiens
caaataccacctcct

SEQ ID NO: 10888 - DNA, 15 bp, Homo sapiens
tcaaataccacctcc

SEQ ID NO: 10889 - DNA, 15 bp, Homo sapiens
ctcaaataccacctc

SEQ ID NO: 10890 - DNA, 15 bp, Homo sapiens
gctcaaataccacct

SEQ ID NO: 10891 - DNA, 15 bp, Homo sapiens
tgctcaaataccacc

SEQ ID NO: 10892 - DNA, 15 bp, Homo sapiens
ctgctcaaataccac

SEQ ID NO: 10893 - DNA, 15 bp, Homo sapiens
tctgctcaaatacca

SEQ ID NO: 10894 - DNA, 15 bp, Homo sapiens
ctctgctcaaatacc

SEQ ID NO: 10895 - DNA, 15 bp, Homo sapiens
actctgctcaaatac

SEQ ID NO: 10896 - DNA, 15 bp, Homo sapiens
aactctgctcaaata

SEQ ID NO: 10897 - DNA, 15 bp, Homo sapiens
caactctgctcaaat

SEQ ID NO: 10898 - DNA, 15 bp, Homo sapiens
acaactctgctcaaa

SEQ ID NO: 10899 - DNA, 15 bp, Homo sapiens
gacaactctgctcaa

SEQ ID NO: 10900 - DNA, 15 bp, Homo sapiens
agacaactctgctca

SEQ ID NO: 10901 - DNA, 15 bp, Homo sapiens
cagacaactctgctc

SEQ ID NO: 10902 - DNA, 15 bp, Homo sapiens
acagacaactctgct

SEQ ID NO: 10903 - DNA, 15 bp, Homo sapiens
gacagacaactctgc

SEQ ID NO: 10904 - DNA, 15 bp, Homo sapiens
tgacagacaactctg

SEQ ID NO: 10905 - DNA, 15 bp, Homo sapiens
ctgacagacaactct

SEQ ID NO: 10906 - DNA, 15 bp, Homo sapiens
gctgacagacaactc

SEQ ID NO: 10907 - DNA, 15 bp, Homo sapiens
ggctgacagacaact

SEQ ID NO: 10908 - DNA, 15 bp, Homo sapiens
tggctgacagacaac

SEQ ID NO: 10909 - DNA, 15 bp, Homo sapiens
gtggctgacagacaa

SEQ ID NO: 10910 - DNA, 15 bp, Homo sapiens
tgtggctgacagaca

SEQ ID NO: 10911 - DNA, 15 bp, Homo sapiens
gtgtggctgacagac

SEQ ID NO: 10912 - DNA, 15 bp, Homo sapiens
tgtgtggctgacaga

SEQ ID NO: 10913 - DNA, 15 bp, Homo sapiens
ctgtgtggctgacag

SEQ ID NO: 10914 - DNA, 15 bp, Homo sapiens
actgtgtggctgaca

SEQ ID NO: 10915 - DNA, 15 bp, Homo sapiens
tactgtgtggctgac

SEQ ID NO: 10916 - DNA, 15 bp, Homo sapiens
ttactgtgtggctga

SEQ ID NO: 10917 - DNA, 15 bp, Homo sapiens
cttactgtgtggctg

SEQ ID NO: 10918 - DNA, 15 bp, Homo sapiens
acttactgtgtggct

SEQ ID NO: 10919 - DNA, 15 bp, Homo sapiens
cacttactgtgtggc

SEQ ID NO: 10920 - DNA, 15 bp, Homo sapiens
tcacttactgtgtgg

SEQ ID NO: 10921 - DNA, 15 bp, Homo sapiens
ctcacttactgtgtg

SEQ ID NO: 10922 - DNA, 15 bp, Homo sapiens
tctcacttactgtgt

SEQ ID NO: 10923 - DNA, 15 bp, Homo sapiens
ctctcacttactgtg

SEQ ID NO: 10924 - DNA, 15 bp, Homo sapiens
cctctcacttactgt

SEQ ID NO: 10925 - DNA, 15 bp, Homo sapiens
ccctctcacttactg

SEQ ID NO: 10926 - DNA, 15 bp, Homo sapiens
cccctctcacttact

SEQ ID NO: 10927 - DNA, 15 bp, Homo sapiens
tcccctctcacttac

SEQ ID NO: 10928 - DNA, 15 bp, Homo sapiens
ctcccctctcactta

SEQ ID NO: 10929 - DNA, 15 bp, Homo sapiens
actcccctctcactt

SEQ ID NO: 10930 - DNA, 15 bp, Homo sapiens
aactcccctctcact

SEQ ID NO: 10931 - DNA, 15 bp, Homo sapiens
gaactcccctctcac

SEQ ID NO: 10932 - DNA, 15 bp, Homo sapiens
ggaactcccctctca

SEQ ID NO: 10933 - DNA, 15 bp, Homo sapiens
cggaactcccctctc

SEQ ID NO: 10934 - DNA, 15 bp, Homo sapiens
ccggaactcccctct

SEQ ID NO: 10935 - DNA, 15 bp, Homo sapiens
cccggaactcccctc

SEQ ID NO: 10936 - DNA, 15 bp, Homo sapiens
gcccggaactcccct

SEQ ID NO: 10937 - DNA, 15 bp, Homo sapiens
agcccggaactcccc

SEQ ID NO: 10938 - DNA, 15 bp, Homo sapiens
aagcccggaactccc

SEQ ID NO: 10939 - DNA, 15 bp, Homo sapiens
caagcccggaactcc

SEQ ID NO: 10940 - DNA, 15 bp, Homo sapiens
ccaagcccggaactc

SEQ ID NO: 10941 - DNA, 15 bp, Homo sapiens
tccaagcccggaact

SEQ ID NO: 10942 - DNA, 15 bp, Homo sapiens
ttccaagcccggaac

SEQ ID NO: 10943 - DNA, 15 bp, Homo sapiens
cttccaagcccggaa

SEQ ID NO: 10944 - DNA, 15 bp, Homo sapiens
gcttccaagcccgga

SEQ ID NO: 10945 - DNA, 15 bp, Homo sapiens
agcttccaagcccgg

SEQ ID NO: 10946 - DNA, 15 bp, Homo sapiens
cagcttccaagcccg

SEQ ID NO: 10947 - DNA, 15 bp, Homo sapiens
gcagcttccaagccc

SEQ ID NO: 10948 - DNA, 15 bp, Homo sapiens
ggcagcttccaagcc

SEQ ID NO: 10949 - DNA, 15 bp, Homo sapiens
tggcagcttccaagc

SEQ ID NO: 10950 - DNA, 15 bp, Homo sapiens
ctggcagcttccaag

SEQ ID NO: 10951 - DNA, 15 bp, Homo sapiens
gctggcagcttccaa

SEQ ID NO: 10952 - DNA, 15 bp, Homo sapiens
tgctggcagcttcca

SEQ ID NO: 10953 - DNA, 15 bp, Homo sapiens
gtgctggcagcttcc

SEQ ID NO: 10954 - DNA, 15 bp, Homo sapiens
tgtgctggcagcttc

SEQ ID NO: 10955 - DNA, 15 bp, Homo sapiens
ctgtgctggcagctt

SEQ ID NO: 10956 - DNA, 15 bp, Homo sapiens
actgtgctggcagct

SEQ ID NO: 10957 - DNA, 15 bp, Homo sapiens
cactgtgctggcagc

SEQ ID NO: 10958 - DNA, 15 bp, Homo sapiens
gcactgtgctggcag

SEQ ID NO: 10959 - DNA, 15 bp, Homo sapiens
agcactgtgctggca

SEQ ID NO: 10960 - DNA, 15 bp, Homo sapiens
cagcactgtgctggc

SEQ ID NO: 10961 - DNA, 15 bp, Homo sapiens
ccagcactgtgctgg

SEQ ID NO: 10962 - DNA, 15 bp, Homo sapiens
gccagcactgtgctg

SEQ ID NO: 10963 - DNA, 15 bp, Homo sapiens
tgccagcactgtgct

SEQ ID NO: 10964 - DNA, 15 bp, Homo sapiens
ttgccagcactgtgc

SEQ ID NO: 10965 - DNA, 15 bp, Homo sapiens
cttgccagcactgtg

SEQ ID NO: 10966 - DNA, 15 bp, Homo sapiens
acttgccagcactgt

SEQ ID NO: 10967 - DNA, 15 bp, Homo sapiens
cacttgccagcactg

SEQ ID NO: 10968 - DNA, 15 bp, Homo sapiens
gcacttgccagcact

SEQ ID NO: 10969 - DNA, 15 bp, Homo sapiens
agcacttgccagcac

SEQ ID NO: 10970 - DNA, 15 bp, Homo sapiens
cagcacttgccagca

SEQ ID NO: 10971 - DNA, 15 bp, Homo sapiens
ccagcacttgccagc

SEQ ID NO: 10972 - DNA, 15 bp, Homo sapiens
cccagcacttgccag

SEQ ID NO: 10973 - DNA, 15 bp, Homo sapiens
ccccagcacttgcca

SEQ ID NO: 10974 - DNA, 15 bp, Homo sapiens
accccagcacttgcc

SEQ ID NO: 10975 - DNA, 15 bp, Homo sapiens
caccccagcacttgc

SEQ ID NO: 10976 - DNA, 15 bp, Homo sapiens
ccaccccagcacttg

SEQ ID NO: 10977 - DNA, 15 bp, Homo sapiens
gccaccccagcactt

SEQ ID NO: 10978 - DNA, 15 bp, Homo sapiens
cgccaccccagcact

SEQ ID NO: 10979 - DNA, 15 bp, Homo sapiens
acgccaccccagcac

SEQ ID NO: 10980 - DNA, 15 bp, Homo sapiens
gacgccaccccagca

SEQ ID NO: 10981 - DNA, 15 bp, Homo sapiens
ggacgccaccccagc

SEQ ID NO: 10982 - DNA, 15 bp, Homo sapiens
gggacgccaccccag

SEQ ID NO: 10983 - DNA, 15 bp, Homo sapiens
cgggacgccacccca

SEQ ID NO: 10984 - DNA, 15 bp, Homo sapiens
tcgggacgccacccc

SEQ ID NO: 10985 - DNA, 15 bp, Homo sapiens
ctcgggacgccaccc

SEQ ID NO: 10986 - DNA, 15 bp, Homo sapiens
cctcgggacgccacc

SEQ ID NO: 10987 - DNA, 15 bp, Homo sapiens
gcctcgggacgccac

SEQ ID NO: 10988 - DNA, 15 bp, Homo sapiens
agcctcgggacgcca

SEQ ID NO: 10989 - DNA, 15 bp, Homo sapiens
tagcctcgggacgcc

SEQ ID NO: 10990 - DNA, 15 bp, Homo sapiens
gtagcctcgggacgc

SEQ ID NO: 10991 - DNA, 15 bp, Homo sapiens
tgtagcctcgggacg

SEQ ID NO: 10992 - DNA, 15 bp, Homo sapiens
ctgtagcctcgggac

SEQ ID NO: 10993 - DNA, 15 bp, Homo sapiens
tctgtagcctcggga

SEQ ID NO: 10994 - DNA, 15 bp, Homo sapiens
ttctgtagcctcggg

SEQ ID NO: 10995 - DNA, 15 bp, Homo sapiens
gttctgtagcctcgg

SEQ ID NO: 10996 - DNA, 15 bp, Homo sapiens
ggttctgtagcctcg

SEQ ID NO: 10997 - DNA, 15 bp, Homo sapiens
aggttctgtagcctc

SEQ ID NO: 10998 - DNA, 15 bp, Homo sapiens
caggttctgtagcct

SEQ ID NO: 10999 - DNA, 15 bp, Homo sapiens
tcaggttctgtagcc

SEQ ID NO: 11000 - DNA, 15 bp, Homo sapiens
ctcaggttctgtagc

SEQ ID NO: 11001 - DNA, 15 bp, Homo sapiens
tctcaggttctgtag

SEQ ID NO: 11002 - DNA, 15 bp, Homo sapiens
atctcaggttctgta

SEQ ID NO: 11003 - DNA, 15 bp, Homo sapiens
catctcaggttctgt

SEQ ID NO: 11004 - DNA, 15 bp, Homo sapiens
gcatctcaggttctg

SEQ ID NO: 11005 - DNA, 15 bp, Homo sapiens
agcatctcaggttct

SEQ ID NO: 11006 - DNA, 15 bp, Homo sapiens
cagcatctcaggttc

SEQ ID NO: 11007 - DNA, 15 bp, Homo sapiens
gcagcatctcaggtt

SEQ ID NO: 11008 - DNA, 15 bp, Homo sapiens
tgcagcatctcaggt

SEQ ID NO: 11009 - DNA, 15 bp, Homo sapiens
ctgcagcatctcagg

SEQ ID NO: 11010 - DNA, 15 bp, Homo sapiens
tctgcagcatctcag

SEQ ID NO: 11011 - DNA, 15 bp, Homo sapiens
ttctgcagcatctca

SEQ ID NO: 11012 - DNA, 15 bp, Homo sapiens
cttctgcagcatctc

SEQ ID NO: 11013 - DNA, 15 bp, Homo sapiens
tcttctgcagcatct

SEQ ID NO: 11014 - DNA, 15 bp, Homo sapiens
ctcttctgcagcatc

SEQ ID NO: 11015 - DNA, 15 bp, Homo sapiens
gctcttctgcagcat

SEQ ID NO: 11016 - DNA, 15 bp, Homo sapiens
ggctcttctgcagca

SEQ ID NO: 11017 - DNA, 15 bp, Homo sapiens
gggctcttctgcagc

SEQ ID NO: 11018 - DNA, 15 bp, Homo sapiens
tgggctcttctgcag

SEQ ID NO: 11019 - DNA, 15 bp, Homo sapiens
gtgggctcttctgca

SEQ ID NO: 11020 - DNA, 15 bp, Homo sapiens
agtgggctcttctgc

SEQ ID NO: 11021 - DNA, 15 bp, Homo sapiens
aagtgggctcttctg

SEQ ID NO: 11022 - DNA, 15 bp, Homo sapiens
gaagtgggctcttct

SEQ ID NO: 11023 - DNA, 15 bp, Homo sapiens
agaagtgggctcttc

SEQ ID NO: 11024 - DNA, 15 bp, Homo sapiens
cagaagtgggctctt

SEQ ID NO: 11025 - DNA, 15 bp, Homo sapiens
gcagaagtgggctct

SEQ ID NO: 11026 - DNA, 15 bp, Homo sapiens
agcagaagtgggctc

SEQ ID NO: 11027 - DNA, 15 bp, Homo sapiens
aagcagaagtgggct

SEQ ID NO: 11028 - DNA, 15 bp, Homo sapiens
aaagcagaagtgggc

SEQ ID NO: 11029 - DNA, 15 bp, Homo sapiens
gaaagcagaagtggg

SEQ ID NO: 11030 - DNA, 15 bp, Homo sapiens
ggaaagcagaagtgg

SEQ ID NO: 11031 - DNA, 15 bp, Homo sapiens
aggaaagcagaagtg

SEQ ID NO: 11032 - DNA, 15 bp, Homo sapiens
caggaaagcagaagt

SEQ ID NO: 11033 - DNA, 15 bp, Homo sapiens
ccaggaaagcagaag

SEQ ID NO: 11034 - DNA, 15 bp, Homo sapiens
tccaggaaagcagaa

SEQ ID NO: 11035 - DNA, 15 bp, Homo sapiens
gtccaggaaagcaga

SEQ ID NO: 11036 - DNA, 15 bp, Homo sapiens
ggtccaggaaagcag

SEQ ID NO: 11037 - DNA, 15 bp, Homo sapiens
tggtccaggaaagca

SEQ ID NO: 11038 - DNA, 15 bp, Homo sapiens
gtggtccaggaaagc

SEQ ID NO: 11039 - DNA, 15 bp, Homo sapiens
agtggtccaggaaag

SEQ ID NO: 11040 - DNA, 15 bp, Homo sapiens
aagtggtccaggaaa

SEQ ID NO: 11041 - DNA, 15 bp, Homo sapiens
gaagtggtccaggaa

SEQ ID NO: 11042 - DNA, 15 bp, Homo sapiens
ggaagtggtccagga

SEQ ID NO: 11043 - DNA, 15 bp, Homo sapiens
aggaagtggtccagg

SEQ ID NO: 11044 - DNA, 15 bp, Homo sapiens
aaggaagtggtccag

SEQ ID NO: 11045 - DNA, 15 bp, Homo sapiens
gaaggaagtggtcca

SEQ ID NO: 11046 - DNA, 15 bp, Homo sapiens
agaaggaagtggtcc

SEQ ID NO: 11047 - DNA, 15 bp, Homo sapiens
gagaaggaagtggtc

SEQ ID NO: 11048 - DNA, 15 bp, Homo sapiens
tgagaaggaagtggt

SEQ ID NO: 11049 - DNA, 15 bp, Homo sapiens
ctgagaaggaagtgg

SEQ ID NO: 11050 - DNA, 15 bp, Homo sapiens
gctgagaaggaagtg

SEQ ID NO: 11051 - DNA, 15 bp, Homo sapiens
tgctgagaaggaagt

SEQ ID NO: 11052 - DNA, 15 bp, Homo sapiens
gtgctgagaaggaag

SEQ ID NO: 11053 - DNA, 15 bp, Homo sapiens
ggtgctgagaaggaa

SEQ ID NO: 11054 - DNA, 15 bp, Homo sapiens
tggtgctgagaagga

SEQ ID NO: 11055 - DNA, 15 bp, Homo sapiens
ctggtgctgagaagg

SEQ ID NO: 11056 - DNA, 15 bp, Homo sapiens
cctggtgctgagaag

SEQ ID NO: 11057 - DNA, 15 bp, Homo sapiens
gcctggtgctgagaa

SEQ ID NO: 11058 - DNA, 15 bp, Homo sapiens
tgcctggtgctgaga

SEQ ID NO: 11059 - DNA, 15 bp, Homo sapiens
ttgcctggtgctgag

SEQ ID NO: 11060 - DNA, 15 bp, Homo sapiens
tttgcctggtgctga

SEQ ID NO: 11061 - DNA, 15 bp, Homo sapiens
gtttgcctggtgctg

SEQ ID NO: 11062 - DNA, 15 bp, Homo sapiens
agtttgcctggtgct

SEQ ID NO: 11063 - DNA, 15 bp, Homo sapiens
gagtttgcctggtgc

SEQ ID NO: 11064 - DNA, 15 bp, Homo sapiens
ggagtttgcctggtg

SEQ ID NO: 11065 - DNA, 15 bp, Homo sapiens
aggagtttgcctggt

SEQ ID NO: 11066 - DNA, 15 bp, Homo sapiens
aaggagtttgcctgg

SEQ ID NO: 11067 - DNA, 15 bp, Homo sapiens
gaaggagtttgcctg

SEQ ID NO: 11068 - DNA, 15 bp, Homo sapiens
agaaggagtttgcct

SEQ ID NO: 11069 - DNA, 15 bp, Homo sapiens
aagaaggagtttgcc

SEQ ID NO: 11070 - DNA, 15 bp, Homo sapiens
gaagaaggagtttgc

SEQ ID NO: 11071 - DNA, 15 bp, Homo sapiens
agaagaaggagtttg

SEQ ID NO: 11072 - DNA, 15 bp, Homo sapiens
tagaagaaggagttt

SEQ ID NO: 11073 - DNA, 15 bp, Homo sapiens
atagaagaaggagtt

SEQ ID NO: 11074 - DNA, 15 bp, Homo sapiens
gatagaagaaggagt

SEQ ID NO: 11075 - DNA, 15 bp, Homo sapiens
ggatagaagaaggag

SEQ ID NO: 11076 - DNA, 15 bp, Homo sapiens
gggatagaagaagga

SEQ ID NO: 11077 - DNA, 15 bp, Homo sapiens
ggggatagaagaagg

SEQ ID NO: 11078 - DNA, 15 bp, Homo sapiens
aggggatagaagaag

SEQ ID NO: 11079 - DNA, 15 bp, Homo sapiens
caggggatagaagaa

SEQ ID NO: 11080 - DNA, 15 bp, Homo sapiens
ccaggggatagaaga

SEQ ID NO: 11081 - DNA, 15 bp, Homo sapiens
gccaggggatagaag

SEQ ID NO: 11082 - DNA, 15 bp, Homo sapiens
tgccaggggatagaa

SEQ ID NO: 11083 - DNA, 15 bp, Homo sapiens
gtgccaggggataga

SEQ ID NO: 11084 - DNA, 15 bp, Homo sapiens
tgtgccaggggatag

SEQ ID NO: 11085 - DNA, 15 bp, Homo sapiens
atgtgccaggggata

SEQ ID NO: 11086 - DNA, 15 bp, Homo sapiens
aatgtgccaggggat

SEQ ID NO: 11087 - DNA, 15 bp, Homo sapiens
aaatgtgccagggga

SEQ ID NO: 11088 - DNA, 15 bp, Homo sapiens
gaaatgtgccagggg

SEQ ID NO: 11089 - DNA, 15 bp, Homo sapiens
agaaatgtgccaggg

SEQ ID NO: 11090 - DNA, 15 bp, Homo sapiens
cagaaatgtgccagg

SEQ ID NO: 11091 - DNA, 15 bp, Homo sapiens
tcagaaatgtgccag

SEQ ID NO: 11092 - DNA, 15 bp, Homo sapiens
gtcagaaatgtgcca

SEQ ID NO: 11093 - DNA, 15 bp, Homo sapiens
ggtcagaaatgtgcc

SEQ ID NO: 11094 - DNA, 15 bp, Homo sapiens
aggtcagaaatgtgc

SEQ ID NO: 11095 - DNA, 15 bp, Homo sapiens
caggtcagaaatgtg

SEQ ID NO: 11096 - DNA, 15 bp, Homo sapiens
acaggtcagaaatgt

SEQ ID NO: 11097 - DNA, 15 bp, Homo sapiens
cacaggtcagaaatg

SEQ ID NO: 11098 - DNA, 15 bp, Homo sapiens
acacaggtcagaaat

SEQ ID NO: 11099 - DNA, 15 bp, Homo sapiens
tacacaggtcagaaa

SEQ ID NO: 11100 - DNA, 15 bp, Homo sapiens
atacacaggtcagaa

SEQ ID NO: 11101 - DNA, 15 bp, Homo sapiens
tatacacaggtcaga

SEQ ID NO: 11102 - DNA, 15 bp, Homo sapiens
gtatacacaggtcag

SEQ ID NO: 11103 - DNA, 15 bp, Homo sapiens
cgtatacacaggtca

SEQ ID NO: 11104 - DNA, 15 bp, Homo sapiens
gcgtatacacaggtc

SEQ ID NO: 11105 - DNA, 15 bp, Homo sapiens
ggcgtatacacaggt

SEQ ID NO: 11106 - DNA, 15 bp, Homo sapiens
gggcgtatacacagg

SEQ ID NO: 11107 - DNA, 15 bp, Homo sapiens
ggggcgtatacacag

SEQ ID NO: 11108 - DNA, 15 bp, Homo sapiens
gggggcgtatacaca

SEQ ID NO: 11109 - DNA, 15 bp, Homo sapiens
tgggggcgtatacac

SEQ ID NO: 11110 - DNA, 15 bp, Homo sapiens
ttgggggcgtataca

SEQ ID NO: 11111 - DNA, 15 bp, Homo sapiens
attgggggcgtatac

SEQ ID NO: 11112 - DNA, 15 bp, Homo sapiens
aattgggggcgtata

SEQ ID NO: 11113 - DNA, 15 bp, Homo sapiens
aaattgggggcgtat

SEQ ID NO: 11114 - DNA, 15 bp, Homo sapiens
taaattgggggcgta

SEQ ID NO: 11115 - DNA, 15 bp, Homo sapiens
ataaattgggggcgt

SEQ ID NO: 11116 - DNA, 15 bp, Homo sapiens
gataaattgggggcg

SEQ ID NO: 11117 - DNA, 15 bp, Homo sapiens
agataaattgggggc

SEQ ID NO: 11118 - DNA, 15 bp, Homo sapiens
tagataaattggggg

SEQ ID NO: 11119 - DNA, 15 bp, Homo sapiens
ttagataaattgggg

SEQ ID NO: 11120 - DNA, 15 bp, Homo sapiens
gttagataaattggg

SEQ ID NO: 11121 - DNA, 15 bp, Homo sapiens
ggttagataaattgg

SEQ ID NO: 11122 - DNA, 15 bp, Homo sapiens
gggttagataaattg

SEQ ID NO: 11123 - DNA, 15 bp, Homo sapiens
ggggttagataaatt

SEQ ID NO: 11124 - DNA, 15 bp, Homo sapiens
aggggttagataaat

SEQ ID NO: 11125 - DNA, 15 bp, Homo sapiens
aaggggttagataaa

SEQ ID NO: 11126 - DNA, 15 bp, Homo sapiens
aaaggggttagataa

SEQ ID NO: 11127 - DNA, 15 bp, Homo sapiens
taaaggggttagata

SEQ ID NO: 11128 - DNA, 15 bp, Homo sapiens
ttaaaggggttagat

SEQ ID NO: 11129 - DNA, 15 bp, Homo sapiens
tttaaaggggttaga

SEQ ID NO: 11130 - DNA, 15 bp, Homo sapiens
atttaaaggggttag

SEQ ID NO: 11131 - DNA, 15 bp, Homo sapiens
tatttaaaggggtta

SEQ ID NO: 11132 - DNA, 15 bp, Homo sapiens
ttatttaaaggggtt

SEQ ID NO: 11133 - DNA, 15 bp, Homo sapiens
attatttaaaggggt

SEQ ID NO: 11134 - DNA, 15 bp, Homo sapiens
gattatttaaagggg

SEQ ID NO: 11135 - DNA, 15 bp, Homo sapiens
agattatttaaaggg

SEQ ID NO: 11136 - DNA, 15 bp, Homo sapiens
gagattatttaaagg

SEQ ID NO: 11137 - DNA, 15 bp, Homo sapiens
ggagattatttaaag

SEQ ID NO: 11138 - DNA, 15 bp, Homo sapiens
aggagattatttaaa

SEQ ID NO: 11139 - DNA, 15 bp, Homo sapiens
gaggagattatttaa

SEQ ID NO: 11140 - DNA, 15 bp, Homo sapiens
agaggagattattta

SEQ ID NO: 11141 - DNA, 15 bp, Homo sapiens
tagaggagattattt

SEQ ID NO: 11142 - DNA, 15 bp, Homo sapiens
atagaggagattatt

SEQ ID NO: 11143 - DNA, 15 bp, Homo sapiens
aatagaggagattat

SEQ ID NO: 11144 - DNA, 15 bp, Homo sapiens
aaatagaggagatta

SEQ ID NO: 11145 - DNA, 15 bp, Homo sapiens
taaatagaggagatt

SEQ ID NO: 11146 - DNA, 15 bp, Homo sapiens
ataaatagaggagat

SEQ ID NO: 11147 - DNA, 15 bp, Homo sapiens
cataaatagaggaga

SEQ ID NO: 11148 - DNA, 15 bp, Homo sapiens
gcataaatagaggag

SEQ ID NO: 11149 - DNA, 15 bp, Homo sapiens
tgcataaatagagga

SEQ ID NO: 11150 - DNA, 15 bp, Homo sapiens
ctgcataaatagagg

SEQ ID NO: 11151 - DNA, 15 bp, Homo sapiens
tctgcataaatagag

SEQ ID NO: 11152 - DNA, 15 bp, Homo sapiens
ctctgcataaataga

SEQ ID NO: 11153 - DNA, 15 bp, Homo sapiens
gctctgcataaatag

SEQ ID NO: 11154 - DNA, 15 bp, Homo sapiens
tgctctgcataaata

SEQ ID NO: 11155 - DNA, 15 bp, Homo sapiens
atgctctgcataaat

SEQ ID NO: 11156 - DNA, 15 bp, Homo sapiens
aatgctctgcataaa

SEQ ID NO: 11157 - DNA, 15 bp, Homo sapiens
gaatgctctgcataa

SEQ ID NO: 11158 - DNA, 15 bp, Homo sapiens
agaatgctctgcata

SEQ ID NO: 11159 - DNA, 15 bp, Homo sapiens
aagaatgctctgcat

SEQ ID NO: 11160 - DNA, 15 bp, Homo sapiens
taagaatgctctgca

SEQ ID NO: 11161 - DNA, 15 bp, Homo sapiens
gtaagaatgctctgc

SEQ ID NO: 11162 - DNA, 15 bp, Homo sapiens
ggtaagaatgctctg

SEQ ID NO: 11163 - DNA, 15 bp, Homo sapiens
tggtaagaatgctct

SEQ ID NO: 11164 - DNA, 15 bp, Homo sapiens
gtggtaagaatgctc

SEQ ID NO: 11165 - DNA, 15 bp, Homo sapiens
agtggtaagaatgct

SEQ ID NO: 11166 - DNA, 15 bp, Homo sapiens
tagtggtaagaatgc

SEQ ID NO: 11167 - DNA, 15 bp, Homo sapiens
ttagtggtaagaatg

SEQ ID NO: 11168 - DNA, 15 bp, Homo sapiens
gttagtggtaagaat

SEQ ID NO: 11169 - DNA, 15 bp, Homo sapiens
agttagtggtaagaa

SEQ ID NO: 11170 - DNA, 15 bp, Homo sapiens
gagttagtggtaaga

SEQ ID NO: 11171 - DNA, 15 bp, Homo sapiens
tgagttagtggtaag

SEQ ID NO: 11172 - DNA, 15 bp, Homo sapiens
gtgagttagtggtaa

SEQ ID NO: 11173 - DNA, 15 bp, Homo sapiens
cgtgagttagtggta

SEQ ID NO: 11174 - DNA, 15 bp, Homo sapiens
tcgtgagttagtggt

SEQ ID NO: 11175 - DNA, 15 bp, Homo sapiens
gtcgtgagttagtgg

SEQ ID NO: 11176 - DNA, 15 bp, Homo sapiens
agtcgtgagttagtg

SEQ ID NO: 11177 - DNA, 15 bp, Homo sapiens
aagtcgtgagttagt

SEQ ID NO: 11178 - DNA, 15 bp, Homo sapiens
caagtcgtgagttag

SEQ ID NO: 11179 - DNA, 15 bp, Homo sapiens
gcaagtcgtgagtta

SEQ ID NO: 11180 - DNA, 15 bp, Homo sapiens
tgcaagtcgtgagtt

SEQ ID NO: 11181 - DNA, 15 bp, Homo sapiens
gtgcaagtcgtgagt

SEQ ID NO: 11182 - DNA, 15 bp, Homo sapiens
tgtgcaagtcgtgag

SEQ ID NO: 11183 - DNA, 15 bp, Homo sapiens
atgtgcaagtcgtga

SEQ ID NO: 11184 - DNA, 15 bp, Homo sapiens
gatgtgcaagtcgtg

SEQ ID NO: 11185 - DNA, 15 bp, Homo sapiens
ggatgtgcaagtcgt

SEQ ID NO: 11186 - DNA, 15 bp, Homo sapiens
gggatgtgcaagtcg

SEQ ID NO: 11187 - DNA, 15 bp, Homo sapiens
agggatgtgcaagtc

SEQ ID NO: 11188 - DNA, 15 bp, Homo sapiens
aagggatgtgcaagt

SEQ ID NO: 11189 - DNA, 15 bp, Homo sapiens
taagggatgtgcaag

SEQ ID NO: 11190 - DNA, 15 bp, Homo sapiens
ctaagggatgtgcaa

SEQ ID NO: 11191 - DNA, 15 bp, Homo sapiens
gctaagggatgtgca

SEQ ID NO: 11192 - DNA, 15 bp, Homo sapiens
agctaagggatgtgc

SEQ ID NO: 11193 - DNA, 15 bp, Homo sapiens
gagctaagggatgtg

SEQ ID NO: 11194 - DNA, 15 bp, Homo sapiens
ggagctaagggatgt

SEQ ID NO: 11195 - DNA, 15 bp, Homo sapiens
gggagctaagggatg

SEQ ID NO: 11196 - DNA, 15 bp, Homo sapiens
agggagctaagggat

SEQ ID NO: 11197 - DNA, 15 bp, Homo sapiens
aagggagctaaggga

SEQ ID NO: 11198 - DNA, 15 bp, Homo sapiens
taagggagctaaggg

SEQ ID NO: 11199 - DNA, 15 bp, Homo sapiens
gtaagggagctaagg

SEQ ID NO: 11200 - DNA, 15 bp, Homo sapiens
agtaagggagctaag

SEQ ID NO: 11201 - DNA, 15 bp, Homo sapiens
gagtaagggagctaa

SEQ ID NO: 11202 - DNA, 15 bp, Homo sapiens
ggagtaagggagcta

SEQ ID NO: 11203 - DNA, 15 bp, Homo sapiens
aggagtaagggagct

SEQ ID NO: 11204 - DNA, 15 bp, Homo sapiens
gaggagtaagggagc

SEQ ID NO: 11205 - DNA, 15 bp, Homo sapiens
tgaggagtaagggag

SEQ ID NO: 11206 - DNA, 15 bp, Homo sapiens
gtgaggagtaaggga

SEQ ID NO: 11207 - DNA, 15 bp, Homo sapiens
tgtgaggagtaaggg

SEQ ID NO: 11208 - DNA, 15 bp, Homo sapiens
ttgtgaggagtaagg

SEQ ID NO: 11209 - DNA, 15 bp, Homo sapiens
gttgtgaggagtaag

SEQ ID NO: 11210 - DNA, 15 bp, Homo sapiens
tgttgtgaggagtaa

SEQ ID NO: 11211 - DNA, 15 bp, Homo sapiens
ttgttgtgaggagta

SEQ ID NO: 11212 - DNA, 15 bp, Homo sapiens
attgttgtgaggagt

SEQ ID NO: 11213 - DNA, 15 bp, Homo sapiens
gattgttgtgaggag

SEQ ID NO: 11214 - DNA, 15 bp, Homo sapiens
ggattgttgtgagga

SEQ ID NO: 11215 - DNA, 15 bp, Homo sapiens
aggattgttgtgagg

SEQ ID NO: 11216 - DNA, 15 bp, Homo sapiens
caggattgttgtgag

SEQ ID NO: 11217 - DNA, 15 bp, Homo sapiens
tcaggattgttgtga

SEQ ID NO: 11218 - DNA, 15 bp, Homo sapiens
ctcaggattgttgtg

SEQ ID NO: 11219 - DNA, 15 bp, Homo sapiens
tctcaggattgttgt

SEQ ID NO: 11220 - DNA, 15 bp, Homo sapiens
atctcaggattgttg

SEQ ID NO: 11221 - DNA, 15 bp, Homo sapiens
catctcaggattgtt

SEQ ID NO: 11222 - DNA, 15 bp, Homo sapiens
ccatctcaggattgt

SEQ ID NO: 11223 - DNA, 15 bp, Homo sapiens
cccatctcaggattg

SEQ ID NO: 11224 - DNA, 15 bp, Homo sapiens
acccatctcaggatt

SEQ ID NO: 11225 - DNA, 15 bp, Homo sapiens
gacccatctcaggat

SEQ ID NO: 11226 - DNA, 15 bp, Homo sapiens
tgacccatctcagga

SEQ ID NO: 11227 - DNA, 15 bp, Homo sapiens
ctgacccatctcagg

SEQ ID NO: 11228 - DNA, 15 bp, Homo sapiens
tctgacccatctcag

SEQ ID NO: 11229 - DNA, 15 bp, Homo sapiens
ctctgacccatctca

SEQ ID NO: 11230 - DNA, 15 bp, Homo sapiens
tctctgacccatctc

SEQ ID NO: 11231 - DNA, 15 bp, Homo sapiens
ttctctgacccatct

SEQ ID NO: 11232 - DNA, 15 bp, Homo sapiens
cttctctgacccatc

SEQ ID NO: 11233 - DNA, 15 bp, Homo sapiens
ccttctctgacccat

SEQ ID NO: 11234 - DNA, 15 bp, Homo sapiens
tccttctctgaccca

SEQ ID NO: 11235 - DNA, 15 bp, Homo sapiens
ctccttctctgaccc

SEQ ID NO: 11236 - DNA, 15 bp, Homo sapiens
cctccttctctgacc

SEQ ID NO: 11237 - DNA, 15 bp, Homo sapiens
gcctccttctctgac

SEQ ID NO: 11238 - DNA, 15 bp, Homo sapiens
agcctccttctctga

SEQ ID NO: 11239 - DNA, 15 bp, Homo sapiens
aagcctccttctctg

SEQ ID NO: 11240 - DNA, 15 bp, Homo sapiens
caagcctccttctct

SEQ ID NO: 11241 - DNA, 15 bp, Homo sapiens
gcaagcctccttctc

SEQ ID NO: 11242 - DNA, 15 bp, Homo sapiens
cgcaagcctccttct

SEQ ID NO: 11243 - DNA, 15 bp, Homo sapiens
gcgcaagcctccttc

SEQ ID NO: 11244 - DNA, 15 bp, Homo sapiens
cgcgcaagcctcctt

SEQ ID NO: 11245 - DNA, 15 bp, Homo sapiens
acgcgcaagcctcct

SEQ ID NO: 11246 - DNA, 15 bp, Homo sapiens
gacgcgcaagcctcc

SEQ ID NO: 11247 - DNA, 15 bp, Homo sapiens
agacgcgcaagcctc

SEQ ID NO: 11248 - DNA, 15 bp, Homo sapiens
cagacgcgcaagcct

SEQ ID NO: 11249 - DNA, 15 bp, Homo sapiens
ccagacgcgcaagcc

SEQ ID NO: 11250 - DNA, 15 bp, Homo sapiens
accagacgcgcaagc

SEQ ID NO: 11251 - DNA, 15 bp, Homo sapiens
caccagacgcgcaag

SEQ ID NO: 11252 - DNA, 15 bp, Homo sapiens
tcaccagacgcgcaa

SEQ ID NO: 11253 - DNA, 15 bp, Homo sapiens
atcaccagacgcgca

SEQ ID NO: 11254 - DNA, 15 bp, Homo sapiens
catcaccagacgcgc

SEQ ID NO: 11255 - DNA, 15 bp, Homo sapiens
ccatcaccagacgcg

SEQ ID NO: 11256 - DNA, 15 bp, Homo sapiens
cccatcaccagacgc

SEQ ID NO: 11257 - DNA, 15 bp, Homo sapiens
ccccatcaccagacg

SEQ ID NO: 11258 - DNA, 15 bp, Homo sapiens
accccatcaccagac

SEQ ID NO: 11259 - DNA, 15 bp, Homo sapiens
caccccatcaccaga

SEQ ID NO: 11260 - DNA, 15 bp, Homo sapiens
tcaccccatcaccag

SEQ ID NO: 11261 - DNA, 15 bp, Homo sapiens
atcaccccatcacca

SEQ ID NO: 11262 - DNA, 15 bp, Homo sapiens
aatcaccccatcacc

SEQ ID NO: 11263 - DNA, 15 bp, Homo sapiens
aaatcaccccatcac

SEQ ID NO: 11264 - DNA, 15 bp, Homo sapiens
caaatcaccccatca

SEQ ID NO: 11265 - DNA, 15 bp, Homo sapiens
acaaatcaccccatc

SEQ ID NO: 11266 - DNA, 15 bp, Homo sapiens
cacaaatcaccccat

SEQ ID NO: 11267 - DNA, 15 bp, Homo sapiens
gcacaaatcacccca

SEQ ID NO: 11268 - DNA, 15 bp, Homo sapiens
tgcacaaatcacccc

SEQ ID NO: 11269 - DNA, 15 bp, Homo sapiens
gtgcacaaatcaccc

SEQ ID NO: 11270 - DNA, 15 bp, Homo sapiens
tgtgcacaaatcacc

SEQ ID NO: 11271 - DNA, 15 bp, Homo sapiens
ctgtgcacaaatcac

SEQ ID NO: 11272 - DNA, 15 bp, Homo sapiens
actgtgcacaaatca

SEQ ID NO: 11273 - DNA, 15 bp, Homo sapiens
aactgtgcacaaatc

SEQ ID NO: 11274 - DNA, 15 bp, Homo sapiens
taactgtgcacaaat

SEQ ID NO: 11275 - DNA, 15 bp, Homo sapiens
gtaactgtgcacaaa

SEQ ID NO: 11276 - DNA, 15 bp, Homo sapiens
tgtaactgtgcacaa

SEQ ID NO: 11277 - DNA, 15 bp, Homo sapiens
ctgtaactgtgcaca

SEQ ID NO: 11278 - DNA, 15 bp, Homo sapiens
cctgtaactgtgcac

SEQ ID NO: 11279 - DNA, 15 bp, Homo sapiens
ccctgtaactgtgca

SEQ ID NO: 11280 - DNA, 15 bp, Homo sapiens
gccctgtaactgtgc

SEQ ID NO: 11281 - DNA, 15 bp, Homo sapiens
agccctgtaactgtg

SEQ ID NO: 11282 - DNA, 15 bp, Homo sapiens
tagccctgtaactgt

SEQ ID NO: 11283 - DNA, 15 bp, Homo sapiens
ctagccctgtaactg

SEQ ID NO: 11284 - DNA, 15 bp, Homo sapiens
tctagccctgtaact

SEQ ID NO: 11285 - DNA, 15 bp, Homo sapiens
ttctagccctgtaac

SEQ ID NO: 11286 - DNA, 15 bp, Homo sapiens
tttctagccctgtaa

SEQ ID NO: 11287 - DNA, 15 bp, Homo sapiens
atttctagccctgta

SEQ ID NO: 11288 - DNA, 15 bp, Homo sapiens
aatttctagccctgt

SEQ ID NO: 11289 - DNA, 15 bp, Homo sapiens
caatttctagccctg

SEQ ID NO: 11290 - DNA, 15 bp, Homo sapiens
acaatttctagccct

SEQ ID NO: 11291 - DNA, 15 bp, Homo sapiens
gacaatttctagccc

SEQ ID NO: 11292 - DNA, 15 bp, Homo sapiens
tgacaatttctagcc

SEQ ID NO: 11293 - DNA, 15 bp, Homo sapiens
ctgacaatttctagc

SEQ ID NO: 11294 - DNA, 15 bp, Homo sapiens
tctgacaatttctag

SEQ ID NO: 11295 - DNA, 15 bp, Homo sapiens
ctctgacaatttcta

SEQ ID NO: 11296 - DNA, 15 bp, Homo sapiens
gctctgacaatttct

SEQ ID NO: 11297 - DNA, 15 bp, Homo sapiens
ggctctgacaatttc

SEQ ID NO: 11298 - DNA, 15 bp, Homo sapiens
tggctctgacaattt

SEQ ID NO: 11299 - DNA, 15 bp, Homo sapiens
ctggctctgacaatt

SEQ ID NO: 11300 - DNA, 15 bp, Homo sapiens
tctggctctgacaat

SEQ ID NO: 11301 - DNA, 15 bp, Homo sapiens
atctggctctgacaa

SEQ ID NO: 11302 - DNA, 15 bp, Homo sapiens
catctggctctgaca

SEQ ID NO: 11303 - DNA, 15 bp, Homo sapiens
ccatctggctctgac

SEQ ID NO: 11304 - DNA, 15 bp, Homo sapiens
tccatctggctctga

SEQ ID NO: 11305 - DNA, 15 bp, Homo sapiens
ttccatctggctctg

SEQ ID NO: 11306 - DNA, 15 bp, Homo sapiens
attccatctggctct

SEQ ID NO: 11307 - DNA, 15 bp, Homo sapiens
gattccatctggctc

SEQ ID NO: 11308 - DNA, 15 bp, Homo sapiens
ggattccatctggct

SEQ ID NO: 11309 - DNA, 15 bp, Homo sapiens
tggattccatctggc

SEQ ID NO: 11310 - DNA, 15 bp, Homo sapiens
ctggattccatctgg

SEQ ID NO: 11311 - DNA, 15 bp, Homo sapiens
cctggattccatctg

SEQ ID NO: 11312 - DNA, 15 bp, Homo sapiens
acctggattccatct

SEQ ID NO: 11313 - DNA, 15 bp, Homo sapiens
gacctggattccatc

SEQ ID NO: 11314 - DNA, 15 bp, Homo sapiens
ggacctggattccat

SEQ ID NO: 11315 - DNA, 15 bp, Homo sapiens
aggacctggattcca

SEQ ID NO: 11316 - DNA, 15 bp, Homo sapiens
gaggacctggattcc

SEQ ID NO: 11317 - DNA, 15 bp, Homo sapiens
agaggacctggattc

SEQ ID NO: 11318 - DNA, 15 bp, Homo sapiens
gagaggacctggatt

SEQ ID NO: 11319 - DNA, 15 bp, Homo sapiens
tgagaggacctggat

SEQ ID NO: 11320 - DNA, 15 bp, Homo sapiens
ttgagaggacctgga

SEQ ID NO: 11321 - DNA, 15 bp, Homo sapiens
attgagaggacctgg

SEQ ID NO: 11322 - DNA, 15 bp, Homo sapiens
gattgagaggacctg

SEQ ID NO: 11323 - DNA, 15 bp, Homo sapiens
ggattgagaggacct

SEQ ID NO: 11324 - DNA, 15 bp, Homo sapiens
aggattgagaggacc

SEQ ID NO: 11325 - DNA, 15 bp, Homo sapiens
taggattgagaggac

SEQ ID NO: 11326 - DNA, 15 bp, Homo sapiens
ttaggattgagagga

SEQ ID NO: 11327 - DNA, 15 bp, Homo sapiens
attaggattgagagg

SEQ ID NO: 11328 - DNA, 15 bp, Homo sapiens
gattaggattgagag

SEQ ID NO: 11329 - DNA, 15 bp, Homo sapiens
ggattaggattgaga

SEQ ID NO: 11330 - DNA, 15 bp, Homo sapiens
tggattaggattgag

SEQ ID NO: 11331 - DNA, 15 bp, Homo sapiens
ctggattaggattga

SEQ ID NO: 11332 - DNA, 15 bp, Homo sapiens
actggattaggattg

SEQ ID NO: 11333 - DNA, 15 bp, Homo sapiens
cactggattaggatt

SEQ ID NO: 11334 - DNA, 15 bp, Homo sapiens
acactggattaggat

SEQ ID NO: 11335 - DNA, 15 bp, Homo sapiens
aacactggattagga

SEQ ID NO: 11336 - DNA, 15 bp, Homo sapiens
aaacactggattagg

SEQ ID NO: 11337 - DNA, 15 bp, Homo sapiens
gaaacactggattag

SEQ ID NO: 11338 - DNA, 15 bp, Homo sapiens
agaaacactggatta

SEQ ID NO: 11339 - DNA, 15 bp, Homo sapiens
aagaaacactggatt

SEQ ID NO: 11340 - DNA, 15 bp, Homo sapiens
taagaaacactggat

SEQ ID NO: 11341 - DNA, 15 bp, Homo sapiens
gtaagaaacactgga

SEQ ID NO: 11342 - DNA, 15 bp, Homo sapiens
agtaagaaacactgg

SEQ ID NO: 11343 - DNA, 15 bp, Homo sapiens
aagtaagaaacactg

SEQ ID NO: 11344 - DNA, 15 bp, Homo sapiens
gaagtaagaaacact

SEQ ID NO: 11345 - DNA, 15 bp, Homo sapiens
tgaagtaagaaacac

SEQ ID NO: 11346 - DNA, 15 bp, Homo sapiens
ctgaagtaagaaaca

SEQ ID NO: 11347 - DNA, 15 bp, Homo sapiens
actgaagtaagaaac

SEQ ID NO: 11348 - DNA, 15 bp, Homo sapiens
gactgaagtaagaaa

SEQ ID NO: 11349 - DNA, 15 bp, Homo sapiens
ggactgaagtaagaa

SEQ ID NO: 11350 - DNA, 15 bp, Homo sapiens
aggactgaagtaaga

SEQ ID NO: 11351 - DNA, 15 bp, Homo sapiens
caggactgaagtaag

SEQ ID NO: 11352 - DNA, 15 bp, Homo sapiens
acaggactgaagtaa

SEQ ID NO: 11353 - DNA, 15 bp, Homo sapiens
cacaggactgaagta

SEQ ID NO: 11354 - DNA, 15 bp, Homo sapiens
ccacaggactgaagt

SEQ ID NO: 11355 - DNA, 15 bp, Homo sapiens
gccacaggactgaag

SEQ ID NO: 11356 - DNA, 15 bp, Homo sapiens
agccacaggactgaa

SEQ ID NO: 11357 - DNA, 15 bp, Homo sapiens
gagccacaggactga

SEQ ID NO: 11358 - DNA, 15 bp, Homo sapiens
agagccacaggactg

SEQ ID NO: 11359 - DNA, 15 bp, Homo sapiens
gagagccacaggact

SEQ ID NO: 11360 - DNA, 15 bp, Homo sapiens
tgagagccacaggac

SEQ ID NO: 11361 - DNA, 15 bp, Homo sapiens
ttgagagccacagga

SEQ ID NO: 11362 - DNA, 15 bp, Homo sapiens
tttgagagccacagg

SEQ ID NO: 11363 - DNA, 15 bp, Homo sapiens
ctttgagagccacag

SEQ ID NO: 11364 - DNA, 15 bp, Homo sapiens
gctttgagagccaca

SEQ ID NO: 11365 - DNA, 15 bp, Homo sapiens
ggctttgagagccac

SEQ ID NO: 11366 - DNA, 15 bp, Homo sapiens
gggctttgagagcca

SEQ ID NO: 11367 - DNA, 15 bp, Homo sapiens
tgggctttgagagcc

SEQ ID NO: 11368 - DNA, 15 bp, Homo sapiens
ctgggctttgagagc

SEQ ID NO: 11369 - DNA, 15 bp, Homo sapiens
tctgggctttgagag

SEQ ID NO: 11370 - DNA, 15 bp, Homo sapiens
ctctgggctttgaga

SEQ ID NO: 11371 - DNA, 15 bp, Homo sapiens
tctctgggctttgag

SEQ ID NO: 11372 - DNA, 15 bp, Homo sapiens
gtctctgggctttga

SEQ ID NO: 11373 - DNA, 15 bp, Homo sapiens
ggtctctgggctttg

SEQ ID NO: 11374 - DNA, 15 bp, Homo sapiens
tggtctctgggcttt

SEQ ID NO: 11375 - DNA, 15 bp, Homo sapiens
ctggtctctgggctt

SEQ ID NO: 11376 - DNA, 15 bp, Homo sapiens
gctggtctctgggct

SEQ ID NO: 11377 - DNA, 15 bp, Homo sapiens
tgctggtctctgggc

SEQ ID NO: 11378 - DNA, 15 bp, Homo sapiens
ctgctggtctctggg

SEQ ID NO: 11379 - DNA, 15 bp, Homo sapiens
gctgctggtctctgg

SEQ ID NO: 11380 - DNA, 15 bp, Homo sapiens
tgctgctggtctctg

SEQ ID NO: 11381 - DNA, 15 bp, Homo sapiens
atgctgctggtctct

SEQ ID NO: 11382 - DNA, 15 bp, Homo sapiens
gatgctgctggtctc

SEQ ID NO: 11383 - DNA, 15 bp, Homo sapiens
tgatgctgctggtct

SEQ ID NO: 11384 - DNA, 15 bp, Homo sapiens
ctgatgctgctggtc

SEQ ID NO: 11385 - DNA, 15 bp, Homo sapiens
gctgatgctgctggt

SEQ ID NO: 11386 - DNA, 15 bp, Homo sapiens
cgctgatgctgctgg

SEQ ID NO: 11387 - DNA, 15 bp, Homo sapiens
tcgctgatgctgctg

SEQ ID NO: 11388 - DNA, 15 bp, Homo sapiens
atcgctgatgctgct

SEQ ID NO: 11389 - DNA, 15 bp, Homo sapiens
catcgctgatgctgc

SEQ ID NO: 11390 - DNA, 15 bp, Homo sapiens
gcatcgctgatgctg

SEQ ID NO: 11391 - DNA, 15 bp, Homo sapiens
ggcatcgctgatgct

SEQ ID NO: 11392 - DNA, 15 bp, Homo sapiens
aggcatcgctgatgc

SEQ ID NO: 11393 - DNA, 15 bp, Homo sapiens
caggcatcgctgatg

SEQ ID NO: 11394 - DNA, 15 bp, Homo sapiens
ccaggcatcgctgat

SEQ ID NO: 11395 - DNA, 15 bp, Homo sapiens
cccaggcatcgctga

SEQ ID NO: 11396 - DNA, 15 bp, Homo sapiens
tcccaggcatcgctg

SEQ ID NO: 11397 - DNA, 15 bp, Homo sapiens
ctcccaggcatcgct

SEQ ID NO: 11398 - DNA, 15 bp, Homo sapiens
gctcccaggcatcgc

SEQ ID NO: 11399 - DNA, 15 bp, Homo sapiens
agctcccaggcatcg

SEQ ID NO: 11400 - DNA, 15 bp, Homo sapiens
aagctcccaggcatc

SEQ ID NO: 11401 - DNA, 15 bp, Homo sapiens
caagctcccaggcat

SEQ ID NO: 11402 - DNA, 15 bp, Homo sapiens
acaagctcccaggca

SEQ ID NO: 11403 - DNA, 15 bp, Homo sapiens
aacaagctcccaggc

SEQ ID NO: 11404 - DNA, 15 bp, Homo sapiens
cctaacaagctccca

SEQ ID NO: 11405 - DNA, 15 bp, Homo sapiens
tcctaacaagctccc

SEQ ID NO: 11406 - DNA, 15 bp, Homo sapiens
ttcctaacaagctcc

SEQ ID NO: 11407 - DNA, 15 bp, Homo sapiens
attcctaacaagctc

SEQ ID NO: 11408 - DNA, 15 bp, Homo sapiens
cattcctaacaagct

SEQ ID NO: 11409 - DNA, 15 bp, Homo sapiens
gcattcctaacaagc

SEQ ID NO: 11410 - DNA, 15 bp, Homo sapiens
tgcattcctaacaag

SEQ ID NO: 11411 - DNA, 15 bp, Homo sapiens
ttgcattcctaacaa

SEQ ID NO: 11412 - DNA, 15 bp, Homo sapiens
tttgcattcctaaca

SEQ ID NO: 11413 - DNA, 15 bp, Homo sapiens
atttgcattcctaac

SEQ ID NO: 11414 - DNA, 15 bp, Homo sapiens
aatttgcattcctaa

SEQ ID NO: 11415 - DNA, 15 bp, Homo sapiens
taatttgcattccta

SEQ ID NO: 11416 - DNA, 15 bp, Homo sapiens
ataatttgcattcct

SEQ ID NO: 11417 - DNA, 15 bp, Homo sapiens
gataatttgcattcc

SEQ ID NO: 11418 - DNA, 15 bp, Homo sapiens
tgataatttgcattc

SEQ ID NO: 11419 - DNA, 15 bp, Homo sapiens
ctgataatttgcatt

SEQ ID NO: 11420 - DNA, 15 bp, Homo sapiens
cctgataatttgcat

SEQ ID NO: 11421 - DNA, 15 bp, Homo sapiens
ccctgataatttgca

SEQ ID NO: 11422 - DNA, 15 bp, Homo sapiens
gccctgataatttgc

SEQ ID NO: 11423 - DNA, 15 bp, Homo sapiens
ggccctgataatttg

SEQ ID NO: 11424 - DNA, 15 bp, Homo sapiens
gggccctgataattt

SEQ ID NO: 11425 - DNA, 15 bp, Homo sapiens
tgggccctgataatt

SEQ ID NO: 11426 - DNA, 15 bp, Homo sapiens
gtgggccctgataat

SEQ ID NO: 11427 - DNA, 15 bp, Homo sapiens
agtgggccctgataa

SEQ ID NO: 11428 - DNA, 15 bp, Homo sapiens
gagtgggccctgata

SEQ ID NO: 11429 - DNA, 15 bp, Homo sapiens
ggagtgggccctgat

SEQ ID NO: 11430 - DNA, 15 bp, Homo sapiens
tggagtgggccctga

SEQ ID NO: 11431 - DNA, 15 bp, Homo sapiens
ctggagtgggccctg

SEQ ID NO: 11432 - DNA, 15 bp, Homo sapiens
cctggagtgggccct

SEQ ID NO: 11433 - DNA, 15 bp, Homo sapiens
acctggagtgggccc

SEQ ID NO: 11434 - DNA, 15 bp, Homo sapiens
cacctggagtgggcc

SEQ ID NO: 11435 - DNA, 15 bp, Homo sapiens
tcacctggagtgggc

SEQ ID NO: 11436 - DNA, 15 bp, Homo sapiens
ttcacctggagtggg

SEQ ID NO: 11437 - DNA, 15 bp, Homo sapiens
gttcacctggagtgg

SEQ ID NO: 11438 - DNA, 15 bp, Homo sapiens
agttcacctggagtg

SEQ ID NO: 11439 - DNA, 15 bp, Homo sapiens
cagttcacctggagt

SEQ ID NO: 11440 - DNA, 15 bp, Homo sapiens
ccagttcacctggag

SEQ ID NO: 11441 - DNA, 15 bp, Homo sapiens
cccagttcacctgga

SEQ ID NO: 11442 - DNA, 15 bp, Homo sapiens
acccagttcacctgg

SEQ ID NO: 11443 - DNA, 15 bp, Homo sapiens
gacccagttcacctg

SEQ ID NO: 11444 - DNA, 15 bp, Homo sapiens
ggacccagttcacct

SEQ ID NO: 11445 - DNA, 15 bp, Homo sapiens
tggacccagttcacc

SEQ ID NO: 11446 - DNA, 15 bp, Homo sapiens
ttggacccagttcac

SEQ ID NO: 11447 - DNA, 15 bp, Homo sapiens
tttggacccagttca

SEQ ID NO: 11448 - DNA, 15 bp, Homo sapiens
ctttggacccagttc

SEQ ID NO: 11449 - DNA, 15 bp, Homo sapiens
gctttggacccagtt

SEQ ID NO: 11450 - DNA, 15 bp, Homo sapiens
ggctttggacccagt

SEQ ID NO: 11451 - DNA, 15 bp, Homo sapiens
gggctttggacccag

SEQ ID NO: 11452 - DNA, 15 bp, Homo sapiens
agggctttggaccca

SEQ ID NO: 11453 - DNA, 15 bp, Homo sapiens
cagggctttggaccc

SEQ ID NO: 11454 - DNA, 15 bp, Homo sapiens
ccagggctttggacc

SEQ ID NO: 11455 - DNA, 15 bp, Homo sapiens
cccagggctttggac

SEQ ID NO: 11456 - DNA, 15 bp, Homo sapiens
tcccagggctttgga

SEQ ID NO: 11457 - DNA, 15 bp, Homo sapiens
atcccagggctttgg

SEQ ID NO: 11458 - DNA, 15 bp, Homo sapiens
tatcccagggctttg

SEQ ID NO: 11459 - DNA, 15 bp, Homo sapiens
ttatcccagggcttt

SEQ ID NO: 11460 - DNA, 15 bp, Homo sapiens
cttatcccagggctt

SEQ ID NO: 11461 - DNA, 15 bp, Homo sapiens
ccttatcccagggct

SEQ ID NO: 11462 - DNA, 15 bp, Homo sapiens
gccttatcccagggc

SEQ ID NO: 11463 - DNA, 15 bp, Homo sapiens
ggccttatcccaggg

SEQ ID NO: 11464 - DNA, 15 bp, Homo sapiens
aggccttatcccagg

SEQ ID NO: 11465 - DNA, 15 bp, Homo sapiens
taggccttatcccag

SEQ ID NO: 11466 - DNA, 15 bp, Homo sapiens
ctaggccttatccca

SEQ ID NO: 11467 - DNA, 15 bp, Homo sapiens
gctaggccttatccc

SEQ ID NO: 11468 - DNA, 15 bp, Homo sapiens
tgctaggccttatcc

SEQ ID NO: 11469 - DNA, 15 bp, Homo sapiens
ttgctaggccttatc

SEQ ID NO: 11470 - DNA, 15 bp, Homo sapiens
attgctaggccttat

SEQ ID NO: 11471 - DNA, 15 bp, Homo sapiens
gattgctaggcctta

SEQ ID NO: 11472 - DNA, 15 bp, Homo sapiens
agattgctaggcctt

SEQ ID NO: 11473 - DNA, 15 bp, Homo sapiens
cagattgctaggcct

SEQ ID NO: 11474 - DNA, 15 bp, Homo sapiens
acagattgctaggcc

SEQ ID NO: 11475 - DNA, 15 bp, Homo sapiens
cacagattgctaggc

SEQ ID NO: 11476 - DNA, 15 bp, Homo sapiens
gcacagattgctagg

SEQ ID NO: 11477 - DNA, 15 bp, Homo sapiens
agcacagattgctag

SEQ ID NO: 11478 - DNA, 15 bp, Homo sapiens
aagcacagattgcta

SEQ ID NO: 11479 - DNA, 15 bp, Homo sapiens
gaagcacagattgct

SEQ ID NO: 11480 - DNA, 15 bp, Homo sapiens
tgaagcacagattgc

SEQ ID NO: 11481 - DNA, 15 bp, Homo sapiens
gtgaagcacagattg

SEQ ID NO: 11482 - DNA, 15 bp, Homo sapiens
tgtgaagcacagatt

SEQ ID NO: 11483 - DNA, 15 bp, Homo sapiens
ttgtgaagcacagat

SEQ ID NO: 11484 - DNA, 15 bp, Homo sapiens
cttgtgaagcacaga

SEQ ID NO: 11485 - DNA, 15 bp, Homo sapiens
gcttgtgaagcacag

SEQ ID NO: 11486 - DNA, 15 bp, Homo sapiens
ggcttgtgaagcaca

SEQ ID NO: 11487 - DNA, 15 bp, Homo sapiens
gggcttgtgaagcac

SEQ ID NO: 11488 - DNA, 15 bp, Homo sapiens
agggcttgtgaagca

SEQ ID NO: 11489 - DNA, 15 bp, Homo sapiens
gagggcttgtgaagc

SEQ ID NO: 11490 - DNA, 15 bp, Homo sapiens
ggagggcttgtgaag

SEQ ID NO: 11491 - DNA, 15 bp, Homo sapiens
tggagggcttgtgaa

SEQ ID NO: 11492 - DNA, 15 bp, Homo sapiens
ctggagggcttgtga

SEQ ID NO: 11493 - DNA, 15 bp, Homo sapiens
cctggagggcttgtg

SEQ ID NO: 11494 - DNA, 15 bp, Homo sapiens
acctggagggcttgt

SEQ ID NO: 11495 - DNA, 15 bp, Homo sapiens
cacctggagggcttg

SEQ ID NO: 11496 - DNA, 15 bp, Homo sapiens
tcacctggagggctt

SEQ ID NO: 11497 - DNA, 15 bp, Homo sapiens
atcacctggagggct

SEQ ID NO: 11498 - DNA, 15 bp, Homo sapiens
aatcacctggagggc

SEQ ID NO: 11499 - DNA, 15 bp, Homo sapiens
gaatcacctggaggg

SEQ ID NO: 11500 - DNA, 15 bp, Homo sapiens
ggaatcacctggagg

SEQ ID NO: 11501 - DNA, 15 bp, Homo sapiens
cggaatcacctggag

SEQ ID NO: 11502 - DNA, 15 bp, Homo sapiens
gcggaatcacctgga

SEQ ID NO: 11503 - DNA, 15 bp, Homo sapiens
tgcggaatcacctgg

SEQ ID NO: 11504 - DNA, 15 bp, Homo sapiens
ctgcggaatcacctg

SEQ ID NO: 11505 - DNA, 15 bp, Homo sapiens
cctgcggaatcacct

SEQ ID NO: 11506 - DNA, 15 bp, Homo sapiens
gcctgcggaatcacc

SEQ ID NO: 11507 - DNA, 15 bp, Homo sapiens
agcctgcggaatcac

SEQ ID NO: 11508 - DNA, 15 bp, Homo sapiens
gagcctgcggaatca

SEQ ID NO: 11509 - DNA, 15 bp, Homo sapiens
tgagcctgcggaatc

SEQ ID NO: 11510 - DNA, 15 bp, Homo sapiens
ctgagcctgcggaat

SEQ ID NO: 11511 - DNA, 15 bp, Homo sapiens
cctgagcctgcggaa

SEQ ID NO: 11512 - DNA, 15 bp, Homo sapiens
acctgagcctgcgga

SEQ ID NO: 11513 - DNA, 15 bp, Homo sapiens
cacctgagcctgcgg

SEQ ID NO: 11514 - DNA, 15 bp, Homo sapiens
acacctgagcctgcg

SEQ ID NO: 11515 - DNA, 15 bp, Homo sapiens
cacacctgagcctgc

SEQ ID NO: 11516 - DNA, 15 bp, Homo sapiens
tcacacctgagcctg

SEQ ID NO: 11517 - DNA, 15 bp, Homo sapiens
ctcacacctgagcct

SEQ ID NO: 11518 - DNA, 15 bp, Homo sapiens
tctcacacctgagcc

SEQ ID NO: 11519 - DNA, 15 bp, Homo sapiens
ctctcacacctgagc

SEQ ID NO: 11520 - DNA, 15 bp, Homo sapiens
gctctcacacctgag

SEQ ID NO: 11521 - DNA, 15 bp, Homo sapiens
agctctcacacctga

SEQ ID NO: 11522 - DNA, 15 bp, Homo sapiens
cagctctcacacctg

SEQ ID NO: 11523 - DNA, 15 bp, Homo sapiens
gcagctctcacacct

SEQ ID NO: 11524 - DNA, 15 bp, Homo sapiens
tgcagctctcacacc

SEQ ID NO: 11525 - DNA, 15 bp, Homo sapiens
ctgcagctctcacac

SEQ ID NO: 11526 - DNA, 15 bp, Homo sapiens
gctgcagctctcaca

SEQ ID NO: 11527 - DNA, 15 bp, Homo sapiens
agctgcagctctcac

SEQ ID NO: 11528 - DNA, 15 bp, Homo sapiens
cagctgcagctctca

SEQ ID NO: 11529 - DNA, 15 bp, Homo sapiens
acagctgcagctctc

SEQ ID NO: 11530 - DNA, 15 bp, Homo sapiens
gacagctgcagctct

SEQ ID NO: 11531 - DNA, 15 bp, Homo sapiens
ggacagctgcagctc

SEQ ID NO: 11532 - DNA, 15 bp, Homo sapiens
aggacagctgcagct

SEQ ID NO: 11533 - DNA, 15 bp, Homo sapiens
gaggacagctgcagc

SEQ ID NO: 11534 - DNA, 15 bp, Homo sapiens
agaggacagctgcag

SEQ ID NO: 11535 - DNA, 15 bp, Homo sapiens
cagaggacagctgca

SEQ ID NO: 11536 - DNA, 15 bp, Homo sapiens
ccagaggacagctgc

SEQ ID NO: 11537 - DNA, 15 bp, Homo sapiens
cccagaggacagctg

SEQ ID NO: 11538 - DNA, 15 bp, Homo sapiens
gcccagaggacagct

SEQ ID NO: 11539 - DNA, 15 bp, Homo sapiens
ggcccagaggacagc

SEQ ID NO: 11540 - DNA, 15 bp, Homo sapiens
aggcccagaggacag

SEQ ID NO: 11541 - DNA, 15 bp, Homo sapiens
aaggcccagaggaca

SEQ ID NO: 11542 - DNA, 15 bp, Homo sapiens
gaaggcccagaggac

SEQ ID NO: 11543 - DNA, 15 bp, Homo sapiens
agaaggcccagagga

SEQ ID NO: 11544 - DNA, 15 bp, Homo sapiens
cagaaggcccagagg

SEQ ID NO: 11545 - DNA, 15 bp, Homo sapiens
ccagaaggcccagag

SEQ ID NO: 11546 - DNA, 15 bp, Homo sapiens
cccagaaggcccaga

SEQ ID NO: 11547 - DNA, 15 bp, Homo sapiens
gcccagaaggcccag

SEQ ID NO: 11548 - DNA, 15 bp, Homo sapiens
agcccagaaggccca

SEQ ID NO: 11549 - DNA, 15 bp, Homo sapiens
gagcccagaaggccc

SEQ ID NO: 11550 - DNA, 15 bp, Homo sapiens
ggagcccagaaggcc

SEQ ID NO: 11551 - DNA, 15 bp, Homo sapiens
gggagcccagaaggc

SEQ ID NO: 11552 - DNA, 15 bp, Homo sapiens
ggggagcccagaagg

SEQ ID NO: 11553 - DNA, 15 bp, Homo sapiens
cggggagcccagaag

SEQ ID NO: 11554 - DNA, 15 bp, Homo sapiens
gcggggagcccagaa

SEQ ID NO: 11555 - DNA, 15 bp, Homo sapiens
ggcggggagcccaga

SEQ ID NO: 11556 - DNA, 15 bp, Homo sapiens
gggcggggagcccag

SEQ ID NO: 11557 - DNA, 15 bp, Homo sapiens
tgggcggggagccca

SEQ ID NO: 11558 - DNA, 15 bp, Homo sapiens
ctgggcggggagccc

SEQ ID NO: 11559 - DNA, 15 bp, Homo sapiens
gctgggcggggagcc

SEQ ID NO: 11560 - DNA, 15 bp, Homo sapiens
agctgggcggggagc

SEQ ID NO: 11561 - DNA, 15 bp, Homo sapiens
aagctgggcggggag

SEQ ID NO: 11562 - DNA, 15 bp, Homo sapiens
gaagctgggcgggga

SEQ ID NO: 11563 - DNA, 15 bp, Homo sapiens
agaagctgggcgggg

SEQ ID NO: 11564 - DNA, 15 bp, Homo sapiens
aagaagctgggcggg

SEQ ID NO: 11565 - DNA, 15 bp, Homo sapiens
gaagaagctgggcgg

SEQ ID NO: 11566 - DNA, 15 bp, Homo sapiens
tgaagaagctgggcg

SEQ ID NO: 11567 - DNA, 15 bp, Homo sapiens
ctgaagaagctgggc

SEQ ID NO: 11568 - DNA, 15 bp, Homo sapiens
actgaagaagctggg

SEQ ID NO: 11569 - DNA, 15 bp, Homo sapiens
cactgaagaagctgg

SEQ ID NO: 11570 - DNA, 15 bp, Homo sapiens
acactgaagaagctg

SEQ ID NO: 11571 - DNA, 15 bp, Homo sapiens
cacactgaagaagct

SEQ ID NO: 11572 - DNA, 15 bp, Homo sapiens
tcacactgaagaagc

SEQ ID NO: 11573 - DNA, 15 bp, Homo sapiens
atcacactgaagaag

SEQ ID NO: 11574 - DNA, 15 bp, Homo sapiens
catcacactgaagaa

SEQ ID NO: 11575 - DNA, 15 bp, Homo sapiens
tcatcacactgaaga

SEQ ID NO: 11576 - DNA, 15 bp, Homo sapiens
ttcatcacactgaag

SEQ ID NO: 11577 - DNA, 15 bp, Homo sapiens
gttcatcacactgaa

SEQ ID NO: 11578 - DNA, 15 bp, Homo sapiens
tgttcatcacactga

SEQ ID NO: 11579 - DNA, 15 bp, Homo sapiens
gtgttcatcacactg

SEQ ID NO: 11580 - DNA, 15 bp, Homo sapiens
tgtgttcatcacact

SEQ ID NO: 11581 - DNA, 15 bp, Homo sapiens
ctgtgttcatcacac

SEQ ID NO: 11582 - DNA, 15 bp, Homo sapiens
gctgtgttcatcaca

SEQ ID NO: 11583 - DNA, 15 bp, Homo sapiens
cgctgtgttcatcac

SEQ ID NO: 11584 - DNA, 15 bp, Homo sapiens
tcgctgtgttcatca

SEQ ID NO: 11585 - DNA, 15 bp, Homo sapiens
ctcgctgtgttcatc

SEQ ID NO: 11586 - DNA, 15 bp, Homo sapiens
tctcgctgtgttcat

SEQ ID NO: 11587 - DNA, 15 bp, Homo sapiens
ttctcgctgtgttca

SEQ ID NO: 11588 - DNA, 15 bp, Homo sapiens
attctcgctgtgttc

SEQ ID NO: 11589 - DNA, 15 bp, Homo sapiens
cattctcgctgtgtt

SEQ ID NO: 11590 - DNA, 15 bp, Homo sapiens
gcattctcgctgtgt

SEQ ID NO: 11591 - DNA, 15 bp, Homo sapiens
agcattctcgctgtg

SEQ ID NO: 11592 - DNA, 15 bp, Homo sapiens
tagcattctcgctgt

SEQ ID NO: 11593 - DNA, 15 bp, Homo sapiens
ctagcattctcgctg

SEQ ID NO: 11594 - DNA, 15 bp, Homo sapiens
tctagcattctcgct

SEQ ID NO: 11595 - DNA, 15 bp, Homo sapiens
atctagcattctcgc

SEQ ID NO: 11596 - DNA, 15 bp, Homo sapiens
gatctagcattctcg

SEQ ID NO: 11597 - DNA, 15 bp, Homo sapiens
agatctagcattctc

SEQ ID NO: 11598 - DNA, 15 bp, Homo sapiens
cagatctagcattct

SEQ ID NO: 11599 - DNA, 15 bp, Homo sapiens
gcagatctagcattc

SEQ ID NO: 11600 - DNA, 15 bp, Homo sapiens
tgcagatctagcatt

SEQ ID NO: 11601 - DNA, 15 bp, Homo sapiens
ctgcagatctagcat

SEQ ID NO: 11602 - DNA, 15 bp, Homo sapiens
gctgcagatctagca

SEQ ID NO: 11603 - DNA, 15 bp, Homo sapiens
tgctgcagatctagc

SEQ ID NO: 11604 - DNA, 15 bp, Homo sapiens
ctgctgcagatctag

SEQ ID NO: 11605 - DNA, 15 bp, Homo sapiens
gctgctgcagatcta

SEQ ID NO: 11606 - DNA, 15 bp, Homo sapiens
agctgctgcagatct

SEQ ID NO: 11607 - DNA, 15 bp, Homo sapiens
cagctgctgcagatc

SEQ ID NO: 11608 - DNA, 15 bp, Homo sapiens
tcagctgctgcagat

SEQ ID NO: 11609 - DNA, 15 bp, Homo sapiens
atcagctgctgcaga

SEQ ID NO: 11610 - DNA, 15 bp, Homo sapiens
tatcagctgctgcag

SEQ ID NO: 11611 - DNA, 15 bp, Homo sapiens
atatcagctgctgca

SEQ ID NO: 11612 - DNA, 15 bp, Homo sapiens
gatatcagctgctgc

SEQ ID NO: 11613 - DNA, 15 bp, Homo sapiens
ggatatcagctgctg

SEQ ID NO: 11614 - DNA, 15 bp, Homo sapiens
gggatatcagctgct

SEQ ID NO: 11615 - DNA, 15 bp, Homo sapiens
tgggatatcagctgc

SEQ ID NO: 11616 - DNA, 15 bp, Homo sapiens
ctgggatatcagctg

SEQ ID NO: 11617 - DNA, 15 bp, Homo sapiens
tctgggatatcagct

SEQ ID NO: 11618 - DNA, 15 bp, Homo sapiens
gtctgggatatcagc

SEQ ID NO: 11619 - DNA, 15 bp, Homo sapiens
tgtctgggatatcag

SEQ ID NO: 11620 - DNA, 15 bp, Homo sapiens
gtgtctgggatatca

SEQ ID NO: 11621 - DNA, 15 bp, Homo sapiens
ggtgtctgggatatc

SEQ ID NO: 11622 - DNA, 15 bp, Homo sapiens
gggtgtctgggatat

SEQ ID NO: 11623 - DNA, 15 bp, Homo sapiens
agggtgtctgggata

SEQ ID NO: 11624 - DNA, 15 bp, Homo sapiens
gagggtgtctgggat

SEQ ID NO: 11625 - DNA, 15 bp, Homo sapiens
ggagggtgtctggga

SEQ ID NO: 11626 - DNA, 15 bp, Homo sapiens
gggagggtgtctggg

SEQ ID NO: 11627 - DNA, 15 bp, Homo sapiens
cgggagggtgtctgg

SEQ ID NO: 11628 - DNA, 15 bp, Homo sapiens
tcgggagggtgtctg

SEQ ID NO: 11629 - DNA, 15 bp, Homo sapiens
gtcgggagggtgtct

SEQ ID NO: 11630 - DNA, 15 bp, Homo sapiens
agtcgggagggtgtc

SEQ ID NO: 11631 - DNA, 15 bp, Homo sapiens
gagtcgggagggtgt

SEQ ID NO: 11632 - DNA, 15 bp, Homo sapiens
ggagtcgggagggtg

SEQ ID NO: 11633 - DNA, 15 bp, Homo sapiens
gggagtcgggagggt

SEQ ID NO: 11634 - DNA, 15 bp, Homo sapiens
agggagtcgggaggg

SEQ ID NO: 11635 - DNA, 15 bp, Homo sapiens
gagggagtcgggagg

SEQ ID NO: 11636 - DNA, 15 bp, Homo sapiens
ggagggagtcgggag

SEQ ID NO: 11637 - DNA, 15 bp, Homo sapiens
aggagggagtcggga

SEQ ID NO: 11638 - DNA, 15 bp, Homo sapiens
caggagggagtcggg

SEQ ID NO: 11639 - DNA, 15 bp, Homo sapiens
ccaggagggagtcgg

SEQ ID NO: 11640 - DNA, 15 bp, Homo sapiens
gccaggagggagtcg

SEQ ID NO: 11641 - DNA, 15 bp, Homo sapiens
agccaggagggagtc

SEQ ID NO: 11642 - DNA, 15 bp, Homo sapiens
cagccaggagggagt

SEQ ID NO: 11643 - DNA, 15 bp, Homo sapiens
ccagccaggagggag

SEQ ID NO: 11644 - DNA, 15 bp, Homo sapiens
cccagccaggaggga

SEQ ID NO: 11645 - DNA, 15 bp, Homo sapiens
acccagccaggaggg

SEQ ID NO: 11646 - DNA, 15 bp, Homo sapiens
gacccagccaggagg

SEQ ID NO: 11647 - DNA, 15 bp, Homo sapiens
agacccagccaggag

SEQ ID NO: 11648 - DNA, 15 bp, Homo sapiens
cagacccagccagga

SEQ ID NO: 11649 - DNA, 15 bp, Homo sapiens
tcagacccagccagg

SEQ ID NO: 11650 - DNA, 15 bp, Homo sapiens
atcagacccagccag

SEQ ID NO: 11651 - DNA, 15 bp, Homo sapiens
gatcagacccagcca

SEQ ID NO: 11652 - DNA, 15 bp, Homo sapiens
ggatcagacccagcc

SEQ ID NO: 11653 - DNA, 15 bp, Homo sapiens
aggatcagacccagc

SEQ ID NO: 11654 - DNA, 15 bp, Homo sapiens
gaggatcagacccag

SEQ ID NO: 11655 - DNA, 15 bp, Homo sapiens
ggaggatcagaccca

SEQ ID NO: 11656 - DNA, 15 bp, Homo sapiens
aggaggatcagaccc

SEQ ID NO: 11657 - DNA, 15 bp, Homo sapiens
gaggaggatcagacc

SEQ ID NO: 11658 - DNA, 15 bp, Homo sapiens
ggaggaggatcagac

SEQ ID NO: 11659 - DNA, 15 bp, Homo sapiens
tggaggaggatcaga

SEQ ID NO: 11660 - DNA, 15 bp, Homo sapiens
ctggaggaggatcag

SEQ ID NO: 11661 - DNA, 15 bp, Homo sapiens
tctggaggaggatca

SEQ ID NO: 11662 - DNA, 15 bp, Homo sapiens
gtctggaggaggatc

SEQ ID NO: 11663 - DNA, 15 bp, Homo sapiens
agtctggaggaggat

SEQ ID NO: 11664 - DNA, 15 bp, Homo sapiens
gagtctggaggagga

SEQ ID NO: 11665 - DNA, 15 bp, Homo sapiens
ggagtctggaggagg

SEQ ID NO: 11666 - DNA, 15 bp, Homo sapiens
tggagtctggaggag

SEQ ID NO: 11667 - DNA, 15 bp, Homo sapiens
ctggagtctggagga

SEQ ID NO: 11668 - DNA, 15 bp, Homo sapiens
cctggagtctggagg

SEQ ID NO: 11669 - DNA, 15 bp, Homo sapiens
tcctggagtctggag

SEQ ID NO: 11670 - DNA, 15 bp, Homo sapiens
ctcctggagtctgga

SEQ ID NO: 11671 - DNA, 15 bp, Homo sapiens
tctcctggagtctgg

SEQ ID NO: 11672 - DNA, 15 bp, Homo sapiens
ctctcctggagtctg

SEQ ID NO: 11673 - DNA, 15 bp, Homo sapiens
tctctcctggagtct

SEQ ID NO: 11674 - DNA, 15 bp, Homo sapiens
ttctctcctggagtc

SEQ ID NO: 11675 - DNA, 15 bp, Homo sapiens
gttctctcctggagt

SEQ ID NO: 11676 - DNA, 15 bp, Homo sapiens
cgttctctcctggag

SEQ ID NO: 11677 - DNA, 15 bp, Homo sapiens
tcgttctctcctgga

SEQ ID NO: 11678 - DNA, 15 bp, Homo sapiens
ctcgttctctcctgg

SEQ ID NO: 11679 - DNA, 15 bp, Homo sapiens
tctcgttctctcctg

SEQ ID NO: 11680 - DNA, 15 bp, Homo sapiens
gtctcgttctctcct

SEQ ID NO: 11681 - DNA, 15 bp, Homo sapiens
tgtctcgttctctcc

SEQ ID NO: 11682 - DNA, 15 bp, Homo sapiens
atgtctcgttctctc

SEQ ID NO: 11683 - DNA, 15 bp, Homo sapiens
tatgtctcgttctct

SEQ ID NO: 11684 - DNA, 15 bp, Homo sapiens
ttatgtctcgttctc

SEQ ID NO: 11685 - DNA, 15 bp, Homo sapiens
tttatgtctcgttct

SEQ ID NO: 11686 - DNA, 15 bp, Homo sapiens
gtttatgtctcgttc

SEQ ID NO: 11687 - DNA, 15 bp, Homo sapiens
tgtttatgtctcgtt

SEQ ID NO: 11688 - DNA, 15 bp, Homo sapiens
ctgtttatgtctcgt

SEQ ID NO: 11689 - DNA, 15 bp, Homo sapiens
tctgtttatgtctcg

SEQ ID NO: 11690 - DNA, 15 bp, Homo sapiens
ttctgtttatgtctc

SEQ ID NO: 11691 - DNA, 15 bp, Homo sapiens
gttctgtttatgtct

SEQ ID NO: 11692 - DNA, 15 bp, Homo sapiens
agttctgtttatgtc

SEQ ID NO: 11693 - DNA, 15 bp, Homo sapiens
aagttctgtttatgt

SEQ ID NO: 11694 - DNA, 15 bp, Homo sapiens
gaagttctgtttatg

SEQ ID NO: 11695 - DNA, 15 bp, Homo sapiens
tgaagttctgtttat

SEQ ID NO: 11696 - DNA, 15 bp, Homo sapiens
ctgaagttctgttta

SEQ ID NO: 11697 - DNA, 15 bp, Homo sapiens
tctgaagttctgttt

SEQ ID NO: 11698 - DNA, 15 bp, Homo sapiens
ctctgaagttctgtt

SEQ ID NO: 11699 - DNA, 15 bp, Homo sapiens
gctctgaagttctgt

SEQ ID NO: 11700 - DNA, 15 bp, Homo sapiens
ggctctgaagttctg

SEQ ID NO: 11701 - DNA, 15 bp, Homo sapiens
aggctctgaagttct

SEQ ID NO: 11702 - DNA, 15 bp, Homo sapiens
caggctctgaagttc

SEQ ID NO: 11703 - DNA, 15 bp, Homo sapiens
acaggctctgaagtt

SEQ ID NO: 11704 - DNA, 15 bp, Homo sapiens
cacaggctctgaagt

SEQ ID NO: 11705 - DNA, 15 bp, Homo sapiens
acacaggctctgaag

SEQ ID NO: 11706 - DNA, 15 bp, Homo sapiens
aacacaggctctgaa

SEQ ID NO: 11707 - DNA, 15 bp, Homo sapiens
taacacaggctctga

SEQ ID NO: 11708 - DNA, 15 bp, Homo sapiens
ttaacacaggctctg

SEQ ID NO: 11709 - DNA, 15 bp, Homo sapiens
gttaacacaggctct

SEQ ID NO: 11710 - DNA, 15 bp, Homo sapiens
ggttaacacaggctc

SEQ ID NO: 11711 - DNA, 15 bp, Homo sapiens
gggttaacacaggct

SEQ ID NO: 11712 - DNA, 15 bp, Homo sapiens
agggttaacacaggc

SEQ ID NO: 11713 - DNA, 15 bp, Homo sapiens
cagggttaacacagg

SEQ ID NO: 11714 - DNA, 15 bp, Homo sapiens
tcagggttaacacag

SEQ ID NO: 11715 - DNA, 15 bp, Homo sapiens
ctcagggttaacaca

SEQ ID NO: 11716 - DNA, 15 bp, Homo sapiens
tctcagggttaacac

SEQ ID NO: 11717 - DNA, 15 bp, Homo sapiens
atctcagggttaaca

SEQ ID NO: 11718 - DNA, 15 bp, Homo sapiens
gatctcagggttaac

SEQ ID NO: 11719 - DNA, 15 bp, Homo sapiens
tgatctcagggttaa

SEQ ID NO: 11720 - DNA, 15 bp, Homo sapiens
ttgatctcagggtta

SEQ ID NO: 11721 - DNA, 15 bp, Homo sapiens
cttgatctcagggtt

SEQ ID NO: 11722 - DNA, 15 bp, Homo sapiens
ccttgatctcagggt

SEQ ID NO: 11723 - DNA, 15 bp, Homo sapiens
accttgatctcaggg

SEQ ID NO: 11724 - DNA, 15 bp, Homo sapiens
gaccttgatctcagg

SEQ ID NO: 11725 - DNA, 15 bp, Homo sapiens
agaccttgatctcag

SEQ ID NO: 11726 - DNA, 15 bp, Homo sapiens
cagaccttgatctca

SEQ ID NO: 11727 - DNA, 15 bp, Homo sapiens
gcagaccttgatctc

SEQ ID NO: 11728 - DNA, 15 bp, Homo sapiens
tgcagaccttgatct

SEQ ID NO: 11729 - DNA, 15 bp, Homo sapiens
gtgcagaccttgatc

SEQ ID NO: 11730 - DNA, 15 bp, Homo sapiens
tgtgcagaccttgat

SEQ ID NO: 11731 - DNA, 15 bp, Homo sapiens
ctgtgcagaccttga

SEQ ID NO: 11732 - DNA, 15 bp, Homo sapiens
cctgtgcagaccttg

SEQ ID NO: 11733 - DNA, 15 bp, Homo sapiens
ccctgtgcagacctt

SEQ ID NO: 11734 - DNA, 15 bp, Homo sapiens
accctgtgcagacct

SEQ ID NO: 11735 - DNA, 15 bp, Homo sapiens
caccctgtgcagacc

SEQ ID NO: 11736 - DNA, 15 bp, Homo sapiens
gcaccctgtgcagac

SEQ ID NO: 11737 - DNA, 15 bp, Homo sapiens
agcaccctgtgcaga

SEQ ID NO: 11738 - DNA, 15 bp, Homo sapiens
cagcaccctgtgcag

SEQ ID NO: 11739 - DNA, 15 bp, Homo sapiens
acagcaccctgtgca

SEQ ID NO: 11740 - DNA, 15 bp, Homo sapiens
gacagcaccctgtgc

SEQ ID NO: 11741 - DNA, 15 bp, Homo sapiens
agacagcaccctgtg

SEQ ID NO: 11742 - DNA, 15 bp, Homo sapiens
cagacagcaccctgt

SEQ ID NO: 11743 - DNA, 15 bp, Homo sapiens
tcagacagcaccctg

SEQ ID NO: 11744 - DNA, 15 bp, Homo sapiens
ctcagacagcaccct

SEQ ID NO: 11745 - DNA, 15 bp, Homo sapiens
actcagacagcaccc

SEQ ID NO: 11746 - DNA, 15 bp, Homo sapiens
gactcagacagcacc

SEQ ID NO: 11747 - DNA, 15 bp, Homo sapiens
ggactcagacagcac

SEQ ID NO: 11748 - DNA, 15 bp, Homo sapiens
tggactcagacagca

SEQ ID NO: 11749 - DNA, 15 bp, Homo sapiens
ctggactcagacagc

SEQ ID NO: 11750 - DNA, 15 bp, Homo sapiens
tctggactcagacag

SEQ ID NO: 11751 - DNA, 15 bp, Homo sapiens
ctctggactcagaca

SEQ ID NO: 11752 - DNA, 15 bp, Homo sapiens
cctctggactcagac

SEQ ID NO: 11753 - DNA, 15 bp, Homo sapiens
tcctctggactcaga

SEQ ID NO: 11754 - DNA, 15 bp, Homo sapiens
ctcctctggactcag

SEQ ID NO: 11755 - DNA, 15 bp, Homo sapiens
actcctctggactca

SEQ ID NO: 11756 - DNA, 15 bp, Homo sapiens
cactcctctggactc

SEQ ID NO: 11757 - DNA, 15 bp, Homo sapiens
tcactcctctggact

SEQ ID NO: 11758 - DNA, 15 bp, Homo sapiens
ctcactcctctggac

SEQ ID NO: 11759 - DNA, 15 bp, Homo sapiens
cctcactcctctgga

SEQ ID NO: 11760 - DNA, 15 bp, Homo sapiens
ccctcactcctctgg

SEQ ID NO: 11761 - DNA, 15 bp, Homo sapiens
tccctcactcctctg

SEQ ID NO: 11762 - DNA, 15 bp, Homo sapiens
gtccctcactcctct

SEQ ID NO: 11763 - DNA, 15 bp, Homo sapiens
ggtccctcactcctc

SEQ ID NO: 11764 - DNA, 15 bp, Homo sapiens
gggtccctcactcct

SEQ ID NO: 11765 - DNA, 15 bp, Homo sapiens
ggggtccctcactcc

SEQ ID NO: 11766 - DNA, 15 bp, Homo sapiens
tggggtccctcactc

SEQ ID NO: 11767 - DNA, 15 bp, Homo sapiens
gtggggtccctcact

SEQ ID NO: 11768 - DNA, 15 bp, Homo sapiens
ggtggggtccctcac

SEQ ID NO: 11769 - DNA, 15 bp, Homo sapiens
gggtggggtccctca

SEQ ID NO: 11770 - DNA, 15 bp, Homo sapiens
ggggtggggtccctc

SEQ ID NO: 11771 - DNA, 15 bp, Homo sapiens
tggggtggggtccct

SEQ ID NO: 11772 - DNA, 15 bp, Homo sapiens
gtggggtggggtccc

SEQ ID NO: 11773 - DNA, 15 bp, Homo sapiens
ggtggggtggggtcc

SEQ ID NO: 11774 - DNA, 15 bp, Homo sapiens
aggtggggtggggtc

SEQ ID NO: 11775 - DNA, 15 bp, Homo sapiens
caggtggggtggggt

SEQ ID NO: 11776 - DNA, 15 bp, Homo sapiens
ccaggtggggtgggg

SEQ ID NO: 11777 - DNA, 15 bp, Homo sapiens
accaggtggggtggg

SEQ ID NO: 11778 - DNA, 15 bp, Homo sapiens
gaccaggtggggtgg

SEQ ID NO: 11779 - DNA, 15 bp, Homo sapiens
tgaccaggtggggtg

SEQ ID NO: 11780 - DNA, 15 bp, Homo sapiens
ctgaccaggtggggt

SEQ ID NO: 11781 - DNA, 15 bp, Homo sapiens
gctgaccaggtgggg

SEQ ID NO: 11782 - DNA, 15 bp, Homo sapiens
tgctgaccaggtggg

SEQ ID NO: 11783 - DNA, 15 bp, Homo sapiens
gtgctgaccaggtgg

SEQ ID NO: 11784 - DNA, 15 bp, Homo sapiens
ggtgctgaccaggtg

SEQ ID NO: 11785 - DNA, 15 bp, Homo sapiens
tggtgctgaccaggt

SEQ ID NO: 11786 - DNA, 15 bp, Homo sapiens
ctggtgctgaccagg

SEQ ID NO: 11787 - DNA, 15 bp, Homo sapiens
gctggtgctgaccag

SEQ ID NO: 11788 - DNA, 15 bp, Homo sapiens
agctggtgctgacca

SEQ ID NO: 11789 - DNA, 15 bp, Homo sapiens
gagctggtgctgacc

SEQ ID NO: 11790 - DNA, 15 bp, Homo sapiens
ggagctggtgctgac

SEQ ID NO: 11791 - DNA, 15 bp, Homo sapiens
aggagctggtgctga

SEQ ID NO: 11792 - DNA, 15 bp, Homo sapiens
caggagctggtgctg

SEQ ID NO: 11793 - DNA, 15 bp, Homo sapiens
ccaggagctggtgct

SEQ ID NO: 11794 - DNA, 15 bp, Homo sapiens
tccaggagctggtgc

SEQ ID NO: 11795 - DNA, 15 bp, Homo sapiens
ttccaggagctggtg

SEQ ID NO: 11796 - DNA, 15 bp, Homo sapiens
cttccaggagctggt

SEQ ID NO: 11797 - DNA, 15 bp, Homo sapiens
gcttccaggagctgg

SEQ ID NO: 11798 - DNA, 15 bp, Homo sapiens
tgcttccaggagctg

SEQ ID NO: 11799 - DNA, 15 bp, Homo sapiens
ctgcttccaggagct

SEQ ID NO: 11800 - DNA, 15 bp, Homo sapiens
cctgcttccaggagc

SEQ ID NO: 11801 - DNA, 15 bp, Homo sapiens
acctgcttccaggag

SEQ ID NO: 11802 - DNA, 15 bp, Homo sapiens
aacctgcttccagga

SEQ ID NO: 11803 - DNA, 15 bp, Homo sapiens
gaacctgcttccagg

SEQ ID NO: 11804 - DNA, 15 bp, Homo sapiens
agaacctgcttccag

SEQ ID NO: 11805 - DNA, 15 bp, Homo sapiens
gagaacctgcttcca

SEQ ID NO: 11806 - DNA, 15 bp, Homo sapiens
tgagaacctgcttcc

SEQ ID NO: 11807 - DNA, 15 bp, Homo sapiens
gtgagaacctgcttc

SEQ ID NO: 11808 - DNA, 15 bp, Homo sapiens
tgtgagaacctgctt

SEQ ID NO: 11809 - DNA, 15 bp, Homo sapiens
gtgtgagaacctgct

SEQ ID NO: 11810 - DNA, 15 bp, Homo sapiens
agtgtgagaacctgc

SEQ ID NO: 11811 - DNA, 15 bp, Homo sapiens
cagtgtgagaacctg

SEQ ID NO: 11812 - DNA, 15 bp, Homo sapiens
ccagtgtgagaacct

SEQ ID NO: 11813 - DNA, 15 bp, Homo sapiens
accagtgtgagaacc

SEQ ID NO: 11814 - DNA, 15 bp, Homo sapiens
aaccagtgtgagaac

SEQ ID NO: 11815 - DNA, 15 bp, Homo sapiens
gaaccagtgtgagaa

SEQ ID NO: 11816 - DNA, 15 bp, Homo sapiens
ggaaccagtgtgaga

SEQ ID NO: 11817 - DNA, 15 bp, Homo sapiens
gggaaccagtgtgag

SEQ ID NO: 11818 - DNA, 15 bp, Homo sapiens
agggaaccagtgtga

SEQ ID NO: 11819 - DNA, 15 bp, Homo sapiens
cagggaaccagtgtg

SEQ ID NO: 11820 - DNA, 15 bp, Homo sapiens
gcagggaaccagtgt

SEQ ID NO: 11821 - DNA, 15 bp, Homo sapiens
tgcagggaaccagtg

SEQ ID NO: 11822 - DNA, 15 bp, Homo sapiens
gtgcagggaaccagt

SEQ ID NO: 11823 - DNA, 15 bp, Homo sapiens
tgtgcagggaaccag

SEQ ID NO: 11824 - DNA, 15 bp, Homo sapiens
ttgtgcagggaacca

SEQ ID NO: 11825 - DNA, 15 bp, Homo sapiens
attgtgcagggaacc

SEQ ID NO: 11826 - DNA, 15 bp, Homo sapiens
cattgtgcagggaac

SEQ ID NO: 11827 - DNA, 15 bp, Homo sapiens
tcattgtgcagggaa

SEQ ID NO: 11828 - DNA, 15 bp, Homo sapiens
ttcattgtgcaggga

SEQ ID NO: 11829 - DNA, 15 bp, Homo sapiens
cttcattgtgcaggg

SEQ ID NO: 11830 - DNA, 15 bp, Homo sapiens
ccttcattgtgcagg

SEQ ID NO: 11831 - DNA, 15 bp, Homo sapiens
tccttcattgtgcag

SEQ ID NO: 11832 - DNA, 15 bp, Homo sapiens
ctccttcattgtgca

SEQ ID NO: 11833 - DNA, 15 bp, Homo sapiens
gctccttcattgtgc

SEQ ID NO: 11834 - DNA, 15 bp, Homo sapiens
agctccttcattgtg

SEQ ID NO: 11835 - DNA, 15 bp, Homo sapiens
gagctccttcattgt

SEQ ID NO: 11836 - DNA, 15 bp, Homo sapiens
tgagctccttcattg

SEQ ID NO: 11837 - DNA, 15 bp, Homo sapiens
atgagctccttcatt

SEQ ID NO: 11838 - DNA, 15 bp, Homo sapiens
tatgagctccttcat

SEQ ID NO: 11839 - DNA, 15 bp, Homo sapiens
gtatgagctccttca

SEQ ID NO: 11840 - DNA, 15 bp, Homo sapiens
ggtatgagctccttc

SEQ ID NO: 11841 - DNA, 15 bp, Homo sapiens
aggtatgagctcctt

SEQ ID NO: 11842 - DNA, 15 bp, Homo sapiens
caggtatgagctcct

SEQ ID NO: 11843 - DNA, 15 bp, Homo sapiens
gcaggtatgagctcc

SEQ ID NO: 11844 - DNA, 15 bp, Homo sapiens
agcaggtatgagctc

SEQ ID NO: 11845 - DNA, 15 bp, Homo sapiens
aagcaggtatgagct

SEQ ID NO: 11846 - DNA, 15 bp, Homo sapiens
aaagcaggtatgagc

SEQ ID NO: 11847 - DNA, 15 bp, Homo sapiens
aaaagcaggtatgag

SEQ ID NO: 11848 - DNA, 15 bp, Homo sapiens
gaaaagcaggtatga

SEQ ID NO: 11849 - DNA, 15 bp, Homo sapiens
agaaaagcaggtatg

SEQ ID NO: 11850 - DNA, 15 bp, Homo sapiens
cagaaaagcaggtat

SEQ ID NO: 11851 - DNA, 15 bp, Homo sapiens
ccagaaaagcaggta

SEQ ID NO: 11852 - DNA, 15 bp, Homo sapiens
gccagaaaagcaggt

SEQ ID NO: 11853 - DNA, 15 bp, Homo sapiens
agccagaaaagcagg

SEQ ID NO: 11854 - DNA, 15 bp, Homo sapiens
aagccagaaaagcag

SEQ ID NO: 11855 - DNA, 15 bp, Homo sapiens
gaagccagaaaagca

SEQ ID NO: 11856 - DNA, 15 bp, Homo sapiens
agaagccagaaaagc

SEQ ID NO: 11857 - DNA, 15 bp, Homo sapiens
gagaagccagaaaag

SEQ ID NO: 11858 - DNA, 15 bp, Homo sapiens
tgagaagccagaaaa

SEQ ID NO: 11859 - DNA, 15 bp, Homo sapiens
ctgagaagccagaaa

SEQ ID NO: 11860 - DNA, 15 bp, Homo sapiens
tctgagaagccagaa

SEQ ID NO: 11861 - DNA, 15 bp, Homo sapiens
gtctgagaagccaga

SEQ ID NO: 11862 - DNA, 15 bp, Homo sapiens
ggtctgagaagccag

SEQ ID NO: 11863 - DNA, 15 bp, Homo sapiens
gggtctgagaagcca

SEQ ID NO: 11864 - DNA, 15 bp, Homo sapiens
agggtctgagaagcc

SEQ ID NO: 11865 - DNA, 15 bp, Homo sapiens
cagggtctgagaagc

SEQ ID NO: 11866 - DNA, 15 bp, Homo sapiens
tcagggtctgagaag

SEQ ID NO: 11867 - DNA, 15 bp, Homo sapiens
ctcagggtctgagaa

SEQ ID NO: 11868 - DNA, 15 bp, Homo sapiens
cctcagggtctgaga

SEQ ID NO: 11869 - DNA, 15 bp, Homo sapiens
acctcagggtctgag

SEQ ID NO: 11870 - DNA, 15 bp, Homo sapiens
aacctcagggtctga

SEQ ID NO: 11871 - DNA, 15 bp, Homo sapiens
aaacctcagggtctg

SEQ ID NO: 11872 - DNA, 15 bp, Homo sapiens
aaaacctcagggtct

SEQ ID NO: 11873 - DNA, 15 bp, Homo sapiens
gaaaacctcagggtc

SEQ ID NO: 11874 - DNA, 15 bp, Homo sapiens
tgaaaacctcagggt

SEQ ID NO: 11875 - DNA, 15 bp, Homo sapiens
gtgaaaacctcaggg

SEQ ID NO: 11876 - DNA, 15 bp, Homo sapiens
ggtgaaaacctcagg

SEQ ID NO: 11877 - DNA, 15 bp, Homo sapiens
cggtgaaaacctcag

SEQ ID NO: 11878 - DNA, 15 bp, Homo sapiens
tcggtgaaaacctca

SEQ ID NO: 11879 - DNA, 15 bp, Homo sapiens
ttcggtgaaaacctc

SEQ ID NO: 11880 - DNA, 15 bp, Homo sapiens
tttcggtgaaaacct

SEQ ID NO: 11881 - DNA, 15 bp, Homo sapiens
gtttcggtgaaaacc

SEQ ID NO: 11882 - DNA, 15 bp, Homo sapiens
agtttcggtgaaaac

SEQ ID NO: 11883 - DNA, 15 bp, Homo sapiens
tagtttcggtgaaaa

SEQ ID NO: 11884 - DNA, 15 bp, Homo sapiens
ctagtttcggtgaaa

SEQ ID NO: 11885 - DNA, 15 bp, Homo sapiens
tctagtttcggtgaa

SEQ ID NO: 11886 - DNA, 15 bp, Homo sapiens
gtctagtttcggtga

SEQ ID NO: 11887 - DNA, 15 bp, Homo sapiens
tgtctagtttcggtg

SEQ ID NO: 11888 - DNA, 15 bp, Homo sapiens
ttgtctagtttcggt

SEQ ID NO: 11889 - DNA, 15 bp, Homo sapiens
cttgtctagtttcgg

SEQ ID NO: 11890 - DNA, 15 bp, Homo sapiens
ccttgtctagtttcg

SEQ ID NO: 11891 - DNA, 15 bp, Homo sapiens
cccttgtctagtttc

SEQ ID NO: 11892 - DNA, 15 bp, Homo sapiens
ccccttgtctagttt

SEQ ID NO: 11893 - DNA, 15 bp, Homo sapiens
tccccttgtctagtt

SEQ ID NO: 11894 - DNA, 15 bp, Homo sapiens
ttccccttgtctagt

SEQ ID NO: 11895 - DNA, 15 bp, Homo sapiens
gttccccttgtctag

SEQ ID NO: 11896 - DNA, 15 bp, Homo sapiens
ggttccccttgtcta

SEQ ID NO: 11897 - DNA, 15 bp, Homo sapiens
aggttccccttgtct

SEQ ID NO: 11898 - DNA, 15 bp, Homo sapiens
taggttccccttgtc

SEQ ID NO: 11899 - DNA, 15 bp, Homo sapiens
ctaggttccccttgt

SEQ ID NO: 11900 - DNA, 15 bp, Homo sapiens
cctaggttccccttg

SEQ ID NO: 11901 - DNA, 15 bp, Homo sapiens
ccctaggttcccctt

SEQ ID NO: 11902 - DNA, 15 bp, Homo sapiens
accctaggttcccct

SEQ ID NO: 11903 - DNA, 15 bp, Homo sapiens
gaccctaggttcccc

SEQ ID NO: 11904 - DNA, 15 bp, Homo sapiens
tgaccctaggttccc

SEQ ID NO: 11905 - DNA, 15 bp, Homo sapiens
ctgaccctaggttcc

SEQ ID NO: 11906 - DNA, 15 bp, Homo sapiens
gctgaccctaggttc

SEQ ID NO: 11907 - DNA, 15 bp, Homo sapiens
ggctgaccctaggtt

SEQ ID NO: 11908 - DNA, 15 bp, Homo sapiens
aggctgaccctaggt

SEQ ID NO: 11909 - DNA, 15 bp, Homo sapiens
caggctgaccctagg

SEQ ID NO: 11910 - DNA, 15 bp, Homo sapiens
ccaggctgaccctag

SEQ ID NO: 11911 - DNA, 15 bp, Homo sapiens
tccaggctgacccta

SEQ ID NO: 11912 - DNA, 15 bp, Homo sapiens
ctccaggctgaccct

SEQ ID NO: 11913 - DNA, 15 bp, Homo sapiens
cctccaggctgaccc

SEQ ID NO: 11914 - DNA, 15 bp, Homo sapiens
gcctccaggctgacc

SEQ ID NO: 11915 - DNA, 15 bp, Homo sapiens
tgcctccaggctgac

SEQ ID NO: 11916 - DNA, 15 bp, Homo sapiens
ctgcctccaggctga

SEQ ID NO: 11917 - DNA, 15 bp, Homo sapiens
cctgcctccaggctg

SEQ ID NO: 11918 - DNA, 15 bp, Homo sapiens
ccctgcctccaggct

SEQ ID NO: 11919 - DNA, 15 bp, Homo sapiens
accctgcctccaggc

SEQ ID NO: 11920 - DNA, 15 bp, Homo sapiens
caccctgcctccagg

SEQ ID NO: 11921 - DNA, 15 bp, Homo sapiens
tcaccctgcctccag

SEQ ID NO: 11922 - DNA, 15 bp, Homo sapiens
ctcaccctgcctcca

SEQ ID NO: 11923 - DNA, 15 bp, Homo sapiens
gctcaccctgcctcc

SEQ ID NO: 11924 - DNA, 15 bp, Homo sapiens
agctcaccctgcctc

SEQ ID NO: 11925 - DNA, 15 bp, Homo sapiens
aagctcaccctgcct

SEQ ID NO: 11926 - DNA, 15 bp, Homo sapiens
caagctcaccctgcc

SEQ ID NO: 11927 - DNA, 15 bp, Homo sapiens
ccaagctcaccctgc

SEQ ID NO: 11928 - DNA, 15 bp, Homo sapiens
gccaagctcaccctg

SEQ ID NO: 11929 - DNA, 15 bp, Homo sapiens
cgccaagctcaccct

SEQ ID NO: 11930 - DNA, 15 bp, Homo sapiens
gcgccaagctcaccc

SEQ ID NO: 11931 - DNA, 15 bp, Homo sapiens
ggcgccaagctcacc

SEQ ID NO: 11932 - DNA, 15 bp, Homo sapiens
aggcgccaagctcac

SEQ ID NO: 11933 - DNA, 15 bp, Homo sapiens
caggcgccaagctca

SEQ ID NO: 11934 - DNA, 15 bp, Homo sapiens
gcaggcgccaagctc

SEQ ID NO: 11935 - DNA, 15 bp, Homo sapiens
tgcaggcgccaagct

SEQ ID NO: 11936 - DNA, 15 bp, Homo sapiens
ctgcaggcgccaagc

SEQ ID NO: 11937 - DNA, 15 bp, Homo sapiens
actgcaggcgccaag

SEQ ID NO: 11938 - DNA, 15 bp, Homo sapiens
cactgcaggcgccaa

SEQ ID NO: 11939 - DNA, 15 bp, Homo sapiens
gcactgcaggcgcca

SEQ ID NO: 11940 - DNA, 15 bp, Homo sapiens
ggcactgcaggcgcc

SEQ ID NO: 11941 - DNA, 15 bp, Homo sapiens
gggcactgcaggcgc

SEQ ID NO: 11942 - DNA, 15 bp, Homo sapiens
tgggcactgcaggcg

SEQ ID NO: 11943 - DNA, 15 bp, Homo sapiens
ctgggcactgcaggc

SEQ ID NO: 11944 - DNA, 15 bp, Homo sapiens
cctgggcactgcagg

SEQ ID NO: 11945 - DNA, 15 bp, Homo sapiens
gcctgggcactgcag

SEQ ID NO: 11946 - DNA, 15 bp, Homo sapiens
ggcctgggcactgca

SEQ ID NO: 11947 - DNA, 15 bp, Homo sapiens
gggcctgggcactgc

SEQ ID NO: 11948 - DNA, 15 bp, Homo sapiens
agggcctgggcactg

SEQ ID NO: 11949 - DNA, 15 bp, Homo sapiens
cagggcctgggcact

SEQ ID NO: 11950 - DNA, 15 bp, Homo sapiens
ccagggcctgggcac

SEQ ID NO: 11951 - DNA, 15 bp, Homo sapiens
cccagggcctgggca

SEQ ID NO: 11952 - DNA, 15 bp, Homo sapiens
acccagggcctgggc

SEQ ID NO: 11953 - DNA, 15 bp, Homo sapiens
cacccagggcctggg

SEQ ID NO: 11954 - DNA, 15 bp, Homo sapiens
ccacccagggcctgg

SEQ ID NO: 11955 - DNA, 15 bp, Homo sapiens
accacccagggcctg

SEQ ID NO: 11956 - DNA, 15 bp, Homo sapiens
caccacccagggcct

SEQ ID NO: 11957 - DNA, 15 bp, Homo sapiens
gcaccacccagggcc

SEQ ID NO: 11958 - DNA, 15 bp, Homo sapiens
cgcaccacccagggc

SEQ ID NO: 11959 - DNA, 15 bp, Homo sapiens
ccgcaccacccaggg

SEQ ID NO: 11960 - DNA, 15 bp, Homo sapiens
gccgcaccacccagg

SEQ ID NO: 11961 - DNA, 15 bp, Homo sapiens
agccgcaccacccag

SEQ ID NO: 11962 - DNA, 15 bp, Homo sapiens
gagccgcaccaccca

SEQ ID NO: 11963 - DNA, 15 bp, Homo sapiens
ggagccgcaccaccc

SEQ ID NO: 11964 - DNA, 15 bp, Homo sapiens
cggagccgcaccacc

SEQ ID NO: 11965 - DNA, 15 bp, Homo sapiens
ccggagccgcaccac

SEQ ID NO: 11966 - DNA, 15 bp, Homo sapiens
gccggagccgcacca

SEQ ID NO: 11967 - DNA, 15 bp, Homo sapiens
ggccggagccgcacc

SEQ ID NO: 11968 - DNA, 15 bp, Homo sapiens
tggccggagccgcac

SEQ ID NO: 11969 - DNA, 15 bp, Homo sapiens
ctggccggagccgca

SEQ ID NO: 11970 - DNA, 15 bp, Homo sapiens
cctggccggagccgc

SEQ ID NO: 11971 - DNA, 15 bp, Homo sapiens
gcctggccggagccg

SEQ ID NO: 11972 - DNA, 15 bp, Homo sapiens
ggcctggccggagcc

SEQ ID NO: 11973 - DNA, 15 bp, Homo sapiens
gggcctggccggagc

SEQ ID NO: 11974 - DNA, 15 bp, Homo sapiens
agggcctggccggag

SEQ ID NO: 11975 - DNA, 15 bp, Homo sapiens
cagggcctggccgga

SEQ ID NO: 11976 - DNA, 15 bp, Homo sapiens
acagggcctggccgg

SEQ ID NO: 11977 - DNA, 15 bp, Homo sapiens
aacagggcctggccg

SEQ ID NO: 11978 - DNA, 15 bp, Homo sapiens
aaacagggcctggcc

SEQ ID NO: 11979 - DNA, 15 bp, Homo sapiens
taaacagggcctggc

SEQ ID NO: 11980 - DNA, 15 bp, Homo sapiens
ctaaacagggcctgg

SEQ ID NO: 11981 - DNA, 15 bp, Homo sapiens
gctaaacagggcctg

SEQ ID NO: 11982 - DNA, 15 bp, Homo sapiens
agctaaacagggcct

SEQ ID NO: 11983 - DNA, 15 bp, Homo sapiens
aagctaaacagggcc

SEQ ID NO: 11984 - DNA, 15 bp, Homo sapiens
gaagctaaacagggc

SEQ ID NO: 11985 - DNA, 15 bp, Homo sapiens
ggaagctaaacaggg

SEQ ID NO: 11986 - DNA, 15 bp, Homo sapiens
aggaagctaaacagg

SEQ ID NO: 11987 - DNA, 15 bp, Homo sapiens
gaggaagctaaacag

SEQ ID NO: 11988 - DNA, 15 bp, Homo sapiens
agaggaagctaaaca

SEQ ID NO: 11989 - DNA, 15 bp, Homo sapiens
gagaggaagctaaac

SEQ ID NO: 11990 - DNA, 15 bp, Homo sapiens
ggagaggaagctaaa

SEQ ID NO: 11991 - DNA, 15 bp, Homo sapiens
gggagaggaagctaa

SEQ ID NO: 11992 - DNA, 15 bp, Homo sapiens
tgggagaggaagcta

SEQ ID NO: 11993 - DNA, 15 bp, Homo sapiens
gtgggagaggaagct

SEQ ID NO: 11994 - DNA, 15 bp, Homo sapiens
ggtgggagaggaagc

SEQ ID NO: 11995 - DNA, 15 bp, Homo sapiens
gggtgggagaggaag

SEQ ID NO: 11996 - DNA, 15 bp, Homo sapiens
ggggtgggagaggaa

SEQ ID NO: 11997 - DNA, 15 bp, Homo sapiens
gggggtgggagagga

SEQ ID NO: 11998 - DNA, 15 bp, Homo sapiens
tgggggtgggagagg

SEQ ID NO: 11999 - DNA, 15 bp, Homo sapiens
gtgggggtgggagag

SEQ ID NO: 12000 - DNA, 15 bp, Homo sapiens
tgtgggggtgggaga

SEQ ID NO: 12001 - DNA, 15 bp, Homo sapiens
ctgtgggggtgggag

SEQ ID NO: 12002 - DNA, 15 bp, Homo sapiens
tctgtgggggtggga

SEQ ID NO: 12003 - DNA, 15 bp, Homo sapiens
ctctgtgggggtggg

SEQ ID NO: 12004 - DNA, 15 bp, Homo sapiens
cctctgtgggggtgg

SEQ ID NO: 12005 - DNA, 15 bp, Homo sapiens
ccctctgtgggggtg

SEQ ID NO: 12006 - DNA, 15 bp, Homo sapiens
cccctctgtgggggt

SEQ ID NO: 12007 - DNA, 15 bp, Homo sapiens
ccccctctgtggggg

SEQ ID NO: 12008 - DNA, 15 bp, Homo sapiens
accccctctgtgggg

SEQ ID NO: 12009 - DNA, 15 bp, Homo sapiens
caccccctctgtggg

SEQ ID NO: 12010 - DNA, 15 bp, Homo sapiens
gcaccccctctgtgg

SEQ ID NO: 12011 - DNA, 15 bp, Homo sapiens
agcaccccctctgtg

SEQ ID NO: 12012 - DNA, 15 bp, Homo sapiens
cagcaccccctctgt

SEQ ID NO: 12013 - DNA, 15 bp, Homo sapiens
acagcaccccctctg

SEQ ID NO: 12014 - DNA, 15 bp, Homo sapiens
gacagcaccccctct

SEQ ID NO: 12015 - DNA, 15 bp, Homo sapiens
cgacagcaccccctc

SEQ ID NO: 12016 - DNA, 15 bp, Homo sapiens
ccgacagcaccccct

SEQ ID NO: 12017 - DNA, 15 bp, Homo sapiens
gccgacagcaccccc

SEQ ID NO: 12018 - DNA, 15 bp, Homo sapiens
tgccgacagcacccc

SEQ ID NO: 12019 - DNA, 15 bp, Homo sapiens
gtgccgacagcaccc

SEQ ID NO: 12020 - DNA, 15 bp, Homo sapiens
ggtgccgacagcacc

SEQ ID NO: 12021 - DNA, 15 bp, Homo sapiens
cggtgccgacagcac

SEQ ID NO: 12022 - DNA, 15 bp, Homo sapiens
tcggtgccgacagca

SEQ ID NO: 12023 - DNA, 15 bp, Homo sapiens
atcggtgccgacagc

SEQ ID NO: 12024 - DNA, 15 bp, Homo sapiens
aatcggtgccgacag

SEQ ID NO: 12025 - DNA, 15 bp, Homo sapiens
caatcggtgccgaca

SEQ ID NO: 12026 - DNA, 15 bp, Homo sapiens
gcaatcggtgccgac

SEQ ID NO: 12027 - DNA, 15 bp, Homo sapiens
agcaatcggtgccga

SEQ ID NO: 12028 - DNA, 15 bp, Homo sapiens
gagcaatcggtgccg

SEQ ID NO: 12029 - DNA, 15 bp, Homo sapiens
tgagcaatcggtgcc

SEQ ID NO: 12030 - DNA, 15 bp, Homo sapiens
atgagcaatcggtgc

SEQ ID NO: 12031 - DNA, 15 bp, Homo sapiens
aatgagcaatcggtg

SEQ ID NO: 12032 - DNA, 15 bp, Homo sapiens
aaatgagcaatcggt

SEQ ID NO: 12033 - DNA, 15 bp, Homo sapiens
aaaatgagcaatcgg

SEQ ID NO: 12034 - DNA, 15 bp, Homo sapiens
gaaaatgagcaatcg

SEQ ID NO: 12035 - DNA, 15 bp, Homo sapiens
ggaaaatgagcaatc

SEQ ID NO: 12036 - DNA, 15 bp, Homo sapiens
gggaaaatgagcaat

SEQ ID NO: 12037 - DNA, 15 bp, Homo sapiens
ggggaaaatgagcaa

SEQ ID NO: 12038 - DNA, 15 bp, Homo sapiens
aggggaaaatgagca

SEQ ID NO: 12039 - DNA, 15 bp, Homo sapiens
aaggggaaaatgagc

SEQ ID NO: 12040 - DNA, 15 bp, Homo sapiens
aaaggggaaaatgag

SEQ ID NO: 12041 - DNA, 15 bp, Homo sapiens
caaaggggaaaatga

SEQ ID NO: 12042 - DNA, 15 bp, Homo sapiens
gcaaaggggaaaatg

SEQ ID NO: 12043 - DNA, 15 bp, Homo sapiens
agcaaaggggaaaat

SEQ ID NO: 12044 - DNA, 15 bp, Homo sapiens
aagcaaaggggaaaa

SEQ ID NO: 12045 - DNA, 15 bp, Homo sapiens
aaagcaaaggggaaa

SEQ ID NO: 12046 - DNA, 15 bp, Homo sapiens
gaaagcaaaggggaa

SEQ ID NO: 12047 - DNA, 15 bp, Homo sapiens
agaaagcaaagggga

SEQ ID NO: 12048 - DNA, 15 bp, Homo sapiens
gagaaagcaaagggg

SEQ ID NO: 12049 - DNA, 15 bp, Homo sapiens
agagaaagcaaaggg

SEQ ID NO: 12050 - DNA, 15 bp, Homo sapiens
aagagaaagcaaagg

SEQ ID NO: 12051 - DNA, 15 bp, Homo sapiens
gaagagaaagcaaag

SEQ ID NO: 12052 - DNA, 15 bp, Homo sapiens
tgaagagaaagcaaa

SEQ ID NO: 12053 - DNA, 15 bp, Homo sapiens
ctgaagagaaagcaa

SEQ ID NO: 12054 - DNA, 15 bp, Homo sapiens
gctgaagagaaagca

SEQ ID NO: 12055 - DNA, 15 bp, Homo sapiens
agctgaagagaaagc

SEQ ID NO: 12056 - DNA, 15 bp, Homo sapiens
gagctgaagagaaag

SEQ ID NO: 12057 - DNA, 15 bp, Homo sapiens
cgagctgaagagaaa

SEQ ID NO: 12058 - DNA, 15 bp, Homo sapiens
acgagctgaagagaa

SEQ ID NO: 12059 - DNA, 15 bp, Homo sapiens
tacgagctgaagaga

SEQ ID NO: 12060 - DNA, 15 bp, Homo sapiens
ttacgagctgaagag

SEQ ID NO: 12061 - DNA, 15 bp, Homo sapiens
tttacgagctgaaga

SEQ ID NO: 12062 - DNA, 15 bp, Homo sapiens
ttttacgagctgaag

SEQ ID NO: 12063 - DNA, 15 bp, Homo sapiens
gttttacgagctgaa

SEQ ID NO: 12064 - DNA, 15 bp, Homo sapiens
agttttacgagctga

SEQ ID NO: 12065 - DNA, 15 bp, Homo sapiens
gagttttacgagctg

SEQ ID NO: 12066 - DNA, 15 bp, Homo sapiens
tgagttttacgagct

SEQ ID NO: 12067 - DNA, 15 bp, Homo sapiens
ttgagttttacgagc

SEQ ID NO: 12068 - DNA, 15 bp, Homo sapiens
cttgagttttacgag

SEQ ID NO: 12069 - DNA, 15 bp, Homo sapiens
acttgagttttacga

SEQ ID NO: 12070 - DNA, 15 bp, Homo sapiens
gacttgagttttacg

SEQ ID NO: 12071 - DNA, 15 bp, Homo sapiens
ggacttgagttttac

SEQ ID NO: 12072 - DNA, 15 bp, Homo sapiens
aggacttgagtttta

SEQ ID NO: 12073 - DNA, 15 bp, Homo sapiens
caggacttgagtttt

SEQ ID NO: 12074 - DNA, 15 bp, Homo sapiens
tcaggacttgagttt

SEQ ID NO: 12075 - DNA, 15 bp, Homo sapiens
gtcaggacttgagtt

SEQ ID NO: 12076 - DNA, 15 bp, Homo sapiens
tgtcaggacttgagt

SEQ ID NO: 12077 - DNA, 15 bp, Homo sapiens
ttgtcaggacttgag

SEQ ID NO: 12078 - DNA, 15 bp, Homo sapiens
attgtcaggacttga

SEQ ID NO: 12079 - DNA, 15 bp, Homo sapiens
cattgtcaggacttg

SEQ ID NO: 12080 - DNA, 15 bp, Homo sapiens
gcattgtcaggactt

SEQ ID NO: 12081 - DNA, 15 bp, Homo sapiens
ggcattgtcaggact

SEQ ID NO: 12082 - DNA, 15 bp, Homo sapiens
aggcattgtcaggac

SEQ ID NO: 12083 - DNA, 15 bp, Homo sapiens
aaggcattgtcagga

SEQ ID NO: 12084 - DNA, 15 bp, Homo sapiens
caaggcattgtcagg

SEQ ID NO: 12085 - DNA, 15 bp, Homo sapiens
tcaaggcattgtcag

SEQ ID NO: 12086 - DNA, 15 bp, Homo sapiens
atcaaggcattgtca

SEQ ID NO: 12087 - DNA, 15 bp, Homo sapiens
catcaaggcattgtc

SEQ ID NO: 12088 - DNA, 15 bp, Homo sapiens
tcatcaaggcattgt

SEQ ID NO: 12089 - DNA, 15 bp, Homo sapiens
gtcatcaaggcattg

SEQ ID NO: 12090 - DNA, 15 bp, Homo sapiens
agtcatcaaggcatt

SEQ ID NO: 12091 - DNA, 15 bp, Homo sapiens
aagtcatcaaggcat

SEQ ID NO: 12092 - DNA, 15 bp, Homo sapiens
gaagtcatcaaggca

SEQ ID NO: 12093 - DNA, 15 bp, Homo sapiens
ggaagtcatcaaggc

SEQ ID NO: 12094 - DNA, 15 bp, Homo sapiens
tggaagtcatcaagg

SEQ ID NO: 12095 - DNA, 15 bp, Homo sapiens
ctggaagtcatcaag

SEQ ID NO: 12096 - DNA, 15 bp, Homo sapiens
actggaagtcatcaa

SEQ ID NO: 12097 - DNA, 15 bp, Homo sapiens
aactggaagtcatca

SEQ ID NO: 12098 - DNA, 15 bp, Homo sapiens
caactggaagtcatc

SEQ ID NO: 12099 - DNA, 15 bp, Homo sapiens
ccaactggaagtcat

SEQ ID NO: 12100 - DNA, 15 bp, Homo sapiens
accaactggaagtca

SEQ ID NO: 12101 - DNA, 15 bp, Homo sapiens
taccaactggaagtc

SEQ ID NO: 12102 - DNA, 15 bp, Homo sapiens
ttaccaactggaagt

SEQ ID NO: 12103 - DNA, 15 bp, Homo sapiens
attaccaactggaag

SEQ ID NO: 12104 - DNA, 15 bp, Homo sapiens
tattaccaactggaa

SEQ ID NO: 12105 - DNA, 15 bp, Homo sapiens
ttattaccaactgga

SEQ ID NO: 12106 - DNA, 15 bp, Homo sapiens
tttattaccaactgg

SEQ ID NO: 12107 - DNA, 15 bp, Homo sapiens
ttttattaccaactg

SEQ ID NO: 12108 - DNA, 15 bp, Homo sapiens
cttttattaccaact

SEQ ID NO: 12109 - DNA, 15 bp, Homo sapiens
ccttttattaccaac

SEQ ID NO: 12110 - DNA, 15 bp, Homo sapiens
cccttttattaccaa

SEQ ID NO: 12111 - DNA, 15 bp, Homo sapiens
tcccttttattacca

SEQ ID NO: 12112 - DNA, 15 bp, Homo sapiens
ctcccttttattacc

SEQ ID NO: 12113 - DNA, 15 bp, Homo sapiens
tctcccttttattac

SEQ ID NO: 12114 - DNA, 15 bp, Homo sapiens
atctcccttttatta

SEQ ID NO: 12115 - DNA, 15 bp, Homo sapiens
catctcccttttatt

SEQ ID NO: 12116 - DNA, 15 bp, Homo sapiens
tcatctcccttttat

SEQ ID NO: 12117 - DNA, 15 bp, Homo sapiens
ttcatctccctttta

SEQ ID NO: 12118 - DNA, 15 bp, Homo sapiens
cttcatctccctttt

SEQ ID NO: 12119 - DNA, 15 bp, Homo sapiens
tcttcatctcccttt

SEQ ID NO: 12120 - DNA, 15 bp, Homo sapiens
atcttcatctccctt

SEQ ID NO: 12121 - DNA, 15 bp, Homo sapiens
tatcttcatctccct

SEQ ID NO: 12122 - DNA, 15 bp, Homo sapiens
ttatcttcatctccc

SEQ ID NO: 12123 - DNA, 15 bp, Homo sapiens
cttatcttcatctcc

SEQ ID NO: 12124 - DNA, 15 bp, Homo sapiens
ccttatcttcatctc

SEQ ID NO: 12125 - DNA, 15 bp, Homo sapiens
tccttatcttcatct

SEQ ID NO: 12126 - DNA, 15 bp, Homo sapiens
gtccttatcttcatc

SEQ ID NO: 12127 - DNA, 15 bp, Homo sapiens
tgtccttatcttcat

SEQ ID NO: 12128 - DNA, 15 bp, Homo sapiens
ctgtccttatcttca

SEQ ID NO: 12129 - DNA, 15 bp, Homo sapiens
cctgtccttatcttc

SEQ ID NO: 12130 - DNA, 15 bp, Homo sapiens
tcctgtccttatctt

SEQ ID NO: 12131 - DNA, 15 bp, Homo sapiens
ttcctgtccttatct

SEQ ID NO: 12132 - DNA, 15 bp, Homo sapiens
attcctgtccttatc

SEQ ID NO: 12133 - DNA, 15 bp, Homo sapiens
aattcctgtccttat

SEQ ID NO: 12134 - DNA, 15 bp, Homo sapiens
aaattcctgtcctta

SEQ ID NO: 12135 - DNA, 15 bp, Homo sapiens
gaaattcctgtcctt

SEQ ID NO: 12136 - DNA, 15 bp, Homo sapiens
cgaaattcctgtcct

SEQ ID NO: 12137 - DNA, 15 bp, Homo sapiens
ccgaaattcctgtcc

SEQ ID NO: 12138 - DNA, 15 bp, Homo sapiens
cccgaaattcctgtc

SEQ ID NO: 12139 - DNA, 15 bp, Homo sapiens
ccccgaaattcctgt

SEQ ID NO: 12140 - DNA, 15 bp, Homo sapiens
tccccgaaattcctg

SEQ ID NO: 12141 - DNA, 15 bp, Homo sapiens
ttccccgaaattcct

SEQ ID NO: 12142 - DNA, 15 bp, Homo sapiens
tttccccgaaattcc

SEQ ID NO: 12143 - DNA, 15 bp, Homo sapiens
atttccccgaaattc

SEQ ID NO: 12144 - DNA, 15 bp, Homo sapiens
aatttccccgaaatt

SEQ ID NO: 12145 - DNA, 15 bp, Homo sapiens
aaatttccccgaaat

SEQ ID NO: 12146 - DNA, 15 bp, Homo sapiens
gaaatttccccgaaa

SEQ ID NO: 12147 - DNA, 15 bp, Homo sapiens
agaaatttccccgaa

SEQ ID NO: 12148 - DNA, 15 bp, Homo sapiens
aagaaatttccccga

SEQ ID NO: 12149 - DNA, 15 bp, Homo sapiens
aaagaaatttccccg

SEQ ID NO: 12150 - DNA, 15 bp, Homo sapiens
gaaagaaatttcccc

SEQ ID NO: 12151 - DNA, 15 bp, Homo sapiens
ggaaagaaatttccc

SEQ ID NO: 12152 - DNA, 15 bp, Homo sapiens
tggaaagaaatttcc

SEQ ID NO: 12153 - DNA, 15 bp, Homo sapiens
ctggaaagaaatttc

SEQ ID NO: 12154 - DNA, 15 bp, Homo sapiens
actggaaagaaattt

SEQ ID NO: 12155 - DNA, 15 bp, Homo sapiens
aactggaaagaaatt

SEQ ID NO: 12156 - DNA, 15 bp, Homo sapiens
gaactggaaagaaat

SEQ ID NO: 12157 - DNA, 15 bp, Homo sapiens
ggaactggaaagaaa

SEQ ID NO: 12158 - DNA, 15 bp, Homo sapiens
aggaactggaaagaa

SEQ ID NO: 12159 - DNA, 15 bp, Homo sapiens
aaggaactggaaaga

SEQ ID NO: 12160 - DNA, 15 bp, Homo sapiens
taaggaactggaaag

SEQ ID NO: 12161 - DNA, 15 bp, Homo sapiens
gtaaggaactggaaa

SEQ ID NO: 12162 - DNA, 15 bp, Homo sapiens
agtaaggaactggaa

SEQ ID NO: 12163 - DNA, 15 bp, Homo sapiens
tagtaaggaactgga

SEQ ID NO: 12164 - DNA, 15 bp, Homo sapiens
ttagtaaggaactgg

SEQ ID NO: 12165 - DNA, 15 bp, Homo sapiens
attagtaaggaactg

SEQ ID NO: 12166 - DNA, 15 bp, Homo sapiens
cattagtaaggaact

SEQ ID NO: 12167 - DNA, 15 bp, Homo sapiens
acattagtaaggaac

SEQ ID NO: 12168 - DNA, 15 bp, Homo sapiens
cacattagtaaggaa

SEQ ID NO: 12169 - DNA, 15 bp, Homo sapiens
tcacattagtaagga

SEQ ID NO: 12170 - DNA, 15 bp, Homo sapiens
gtcacattagtaagg

SEQ ID NO: 12171 - DNA, 15 bp, Homo sapiens
tgtcacattagtaag

SEQ ID NO: 12172 - DNA, 15 bp, Homo sapiens
atgtcacattagtaa

SEQ ID NO: 12173 - DNA, 15 bp, Homo sapiens
aatgtcacattagta

SEQ ID NO: 12174 - DNA, 15 bp, Homo sapiens
aaatgtcacattagt

SEQ ID NO: 12175 - DNA, 15 bp, Homo sapiens
taaatgtcacattag

SEQ ID NO: 12176 - DNA, 15 bp, Homo sapiens
ctaaatgtcacatta

SEQ ID NO: 12177 - DNA, 15 bp, Homo sapiens
tctaaatgtcacatt

SEQ ID NO: 12178 - DNA, 15 bp, Homo sapiens
atctaaatgtcacat

SEQ ID NO: 12179 - DNA, 15 bp, Homo sapiens
gatctaaatgtcaca

SEQ ID NO: 12180 - DNA, 15 bp, Homo sapiens
agatctaaatgtcac

SEQ ID NO: 12181 - DNA, 15 bp, Homo sapiens
gagatctaaatgtca

SEQ ID NO: 12182 - DNA, 15 bp, Homo sapiens
agagatctaaatgtc

SEQ ID NO: 12183 - DNA, 15 bp, Homo sapiens
tagagatctaaatgt

SEQ ID NO: 12184 - DNA, 15 bp, Homo sapiens
ctagagatctaaatg

SEQ ID NO: 12185 - DNA, 15 bp, Homo sapiens
actagagatctaaat

SEQ ID NO: 12186 - DNA, 15 bp, Homo sapiens
tactagagatctaaa

SEQ ID NO: 12187 - DNA, 15 bp, Homo sapiens
gtactagagatctaa

SEQ ID NO: 12188 - DNA, 15 bp, Homo sapiens
agtactagagatcta

SEQ ID NO: 12189 - DNA, 15 bp, Homo sapiens
cagtactagagatct

SEQ ID NO: 12190 - DNA, 15 bp, Homo sapiens
acagtactagagatc

SEQ ID NO: 12191 - DNA, 15 bp, Homo sapiens
cacagtactagagat

SEQ ID NO: 12192 - DNA, 15 bp, Homo sapiens
gcacagtactagaga

SEQ ID NO: 12193 - DNA, 15 bp, Homo sapiens
agcacagtactagag

SEQ ID NO: 12194 - DNA, 15 bp, Homo sapiens
aagcacagtactaga

SEQ ID NO: 12195 - DNA, 15 bp, Homo sapiens
gaagcacagtactag

SEQ ID NO: 12196 - DNA, 15 bp, Homo sapiens
agaagcacagtacta

SEQ ID NO: 12197 - DNA, 15 bp, Homo sapiens
cagaagcacagtact

SEQ ID NO: 12198 - DNA, 15 bp, Homo sapiens
ccagaagcacagtac

SEQ ID NO: 12199 - DNA, 15 bp, Homo sapiens
gccagaagcacagta

SEQ ID NO: 12200 - DNA, 15 bp, Homo sapiens
tgccagaagcacagt

SEQ ID NO: 12201 - DNA, 15 bp, Homo sapiens
atgccagaagcacag

SEQ ID NO: 12202 - DNA, 15 bp, Homo sapiens
gatgccagaagcaca

SEQ ID NO: 12203 - DNA, 15 bp, Homo sapiens
tgatgccagaagcac

SEQ ID NO: 12204 - DNA, 15 bp, Homo sapiens
ctgatgccagaagca

SEQ ID NO: 12205 - DNA, 15 bp, Homo sapiens
actgatgccagaagc

SEQ ID NO: 12206 - DNA, 15 bp, Homo sapiens
cactgatgccagaag

SEQ ID NO: 12207 - DNA, 15 bp, Homo sapiens
gcactgatgccagaa

SEQ ID NO: 12208 - DNA, 15 bp, Homo sapiens
ggcactgatgccaga

SEQ ID NO: 12209 - DNA, 15 bp, Homo sapiens
tggcactgatgccag

SEQ ID NO: 12210 - DNA, 15 bp, Homo sapiens
ttggcactgatgcca

SEQ ID NO: 12211 - DNA, 15 bp, Homo sapiens
cttggcactgatgcc

SEQ ID NO: 12212 - DNA, 15 bp, Homo sapiens
ccttggcactgatgc

SEQ ID NO: 12213 - DNA, 15 bp, Homo sapiens
gccttggcactgatg

SEQ ID NO: 12214 - DNA, 15 bp, Homo sapiens
ggccttggcactgat

SEQ ID NO: 12215 - DNA, 15 bp, Homo sapiens
aggccttggcactga

SEQ ID NO: 12216 - DNA, 15 bp, Homo sapiens
aaggccttggcactg

SEQ ID NO: 12217 - DNA, 15 bp, Homo sapiens
aaaggccttggcact

SEQ ID NO: 12218 - DNA, 15 bp, Homo sapiens
gaaaggccttggcac

SEQ ID NO: 12219 - DNA, 15 bp, Homo sapiens
tgaaaggccttggca

SEQ ID NO: 12220 - DNA, 15 bp, Homo sapiens
atgaaaggccttggc

SEQ ID NO: 12221 - DNA, 15 bp, Homo sapiens
catgaaaggccttgg

SEQ ID NO: 12222 - DNA, 15 bp, Homo sapiens
acatgaaaggccttg

SEQ ID NO: 12223 - DNA, 15 bp, Homo sapiens
aacatgaaaggcctt

SEQ ID NO: 12224 - DNA, 15 bp, Homo sapiens
caacatgaaaggcct

SEQ ID NO: 12225 - DNA, 15 bp, Homo sapiens
ccaacatgaaaggcc

SEQ ID NO: 12226 - DNA, 15 bp, Homo sapiens
tccaacatgaaaggc

SEQ ID NO: 12227 - DNA, 15 bp, Homo sapiens
ctccaacatgaaagg

SEQ ID NO: 12228 - DNA, 15 bp, Homo sapiens
tctccaacatgaaag

SEQ ID NO: 12229 - DNA, 15 bp, Homo sapiens
ttctccaacatgaaa

SEQ ID NO: 12230 - DNA, 15 bp, Homo sapiens
attctccaacatgaa

SEQ ID NO: 12231 - DNA, 15 bp, Homo sapiens
cattctccaacatga

SEQ ID NO: 12232 - DNA, 15 bp, Homo sapiens
ccattctccaacatg

SEQ ID NO: 12233 - DNA, 15 bp, Homo sapiens
tccattctccaacat

SEQ ID NO: 12234 - DNA, 15 bp, Homo sapiens
ctccattctccaaca

SEQ ID NO: 12235 - DNA, 15 bp, Homo sapiens
cctccattctccaac

SEQ ID NO: 12236 - DNA, 15 bp, Homo sapiens
gcctccattctccaa

SEQ ID NO: 12237 - DNA, 15 bp, Homo sapiens
ggcctccattctcca

SEQ ID NO: 12238 - DNA, 15 bp, Homo sapiens
cggcctccattctcc

SEQ ID NO: 12239 - DNA, 15 bp, Homo sapiens
ccggcctccattctc

SEQ ID NO: 12240 - DNA, 15 bp, Homo sapiens
cccggcctccattct

SEQ ID NO: 12241 - DNA, 15 bp, Homo sapiens
ccccggcctccattc

SEQ ID NO: 12242 - DNA, 15 bp, Homo sapiens
accccggcctccatt

SEQ ID NO: 12243 - DNA, 15 bp, Homo sapiens
gaccccggcctccat

SEQ ID NO: 12244 - DNA, 15 bp, Homo sapiens
tgaccccggcctcca

SEQ ID NO: 12245 - DNA, 15 bp, Homo sapiens
gtgaccccggcctcc

SEQ ID NO: 12246 - DNA, 15 bp, Homo sapiens
ggtgaccccggcctc

SEQ ID NO: 12247 - DNA, 15 bp, Homo sapiens
tggtgaccccggcct

SEQ ID NO: 12248 - DNA, 15 bp, Homo sapiens
ctggtgaccccggcc

SEQ ID NO: 12249 - DNA, 15 bp, Homo sapiens
cctggtgaccccggc

SEQ ID NO: 12250 - DNA, 15 bp, Homo sapiens
acctggtgaccccgg

SEQ ID NO: 12251 - DNA, 15 bp, Homo sapiens
aacctggtgaccccg

SEQ ID NO: 12252 - DNA, 15 bp, Homo sapiens
caacctggtgacccc

SEQ ID NO: 12253 - DNA, 15 bp, Homo sapiens
acaacctggtgaccc

SEQ ID NO: 12254 - DNA, 15 bp, Homo sapiens
cacaacctggtgacc

SEQ ID NO: 12255 - DNA, 15 bp, Homo sapiens
gcacaacctggtgac

SEQ ID NO: 12256 - DNA, 15 bp, Homo sapiens
ggcacaacctggtga

SEQ ID NO: 12257 - DNA, 15 bp, Homo sapiens
aggcacaacctggtg

SEQ ID NO: 12258 - DNA, 15 bp, Homo sapiens
aaggcacaacctggt

SEQ ID NO: 12259 - DNA, 15 bp, Homo sapiens
aaaggcacaacctgg

SEQ ID NO: 12260 - DNA, 15 bp, Homo sapiens
taaaggcacaacctg

SEQ ID NO: 12261 - DNA, 15 bp, Homo sapiens
ataaaggcacaacct

SEQ ID NO: 12262 - DNA, 15 bp, Homo sapiens
aataaaggcacaacc

SEQ ID NO: 12263 - DNA, 15 bp, Homo sapiens
aaataaaggcacaac

SEQ ID NO: 12264 - DNA, 15 bp, Homo sapiens
gaaataaaggcacaa

SEQ ID NO: 12265 - DNA, 15 bp, Homo sapiens
tgaaataaaggcaca

SEQ ID NO: 12266 - DNA, 15 bp, Homo sapiens
atgaaataaaggcac

SEQ ID NO: 12267 - DNA, 15 bp, Homo sapiens
catgaaataaaggca

SEQ ID NO: 12268 - DNA, 15 bp, Homo sapiens
acatgaaataaaggc

SEQ ID NO: 12269 - DNA, 15 bp, Homo sapiens
aacatgaaataaagg

SEQ ID NO: 12270 - DNA, 15 bp, Homo sapiens
caacatgaaataaag

SEQ ID NO: 12271 - DNA, 15 bp, Homo sapiens
gcaacatgaaataaa

SEQ ID NO: 12272 - DNA, 15 bp, Homo sapiens
agcaacatgaaataa

SEQ ID NO: 12273 - DNA, 15 bp, Homo sapiens
cagcaacatgaaata

SEQ ID NO: 12274 - DNA, 15 bp, Homo sapiens
ccagcaacatgaaat

SEQ ID NO: 12275 - DNA, 15 bp, Homo sapiens
gccagcaacatgaaa

SEQ ID NO: 12276 - DNA, 15 bp, Homo sapiens
agccagcaacatgaa

SEQ ID NO: 12277 - DNA, 15 bp, Homo sapiens
gagccagcaacatga

SEQ ID NO: 12278 - DNA, 15 bp, Homo sapiens
agagccagcaacatg

SEQ ID NO: 12279 - DNA, 15 bp, Homo sapiens
cagagccagcaacat

SEQ ID NO: 12280 - DNA, 15 bp, Homo sapiens
tcagagccagcaaca

SEQ ID NO: 12281 - DNA, 15 bp, Homo sapiens
atcagagccagcaac

SEQ ID NO: 12282 - DNA, 15 bp, Homo sapiens
catcagagccagcaa

SEQ ID NO: 12283 - DNA, 15 bp, Homo sapiens
tcatcagagccagca

SEQ ID NO: 12284 - DNA, 15 bp, Homo sapiens
ctcatcagagccagc

SEQ ID NO: 12285 - DNA, 15 bp, Homo sapiens
gctcatcagagccag

SEQ ID NO: 12286 - DNA, 15 bp, Homo sapiens
agctcatcagagcca

SEQ ID NO: 12287 - DNA, 15 bp, Homo sapiens
cagctcatcagagcc

SEQ ID NO: 12288 - DNA, 15 bp, Homo sapiens
tcagctcatcagagc

SEQ ID NO: 12289 - DNA, 15 bp, Homo sapiens
atcagctcatcagag

SEQ ID NO: 12290 - DNA, 15 bp, Homo sapiens
catcagctcatcaga

SEQ ID NO: 12291 - DNA, 15 bp, Homo sapiens
gcatcagctcatcag

SEQ ID NO: 12292 - DNA, 15 bp, Homo sapiens
agcatcagctcatca

SEQ ID NO: 12293 - DNA, 15 bp, Homo sapiens
gagcatcagctcatc

SEQ ID NO: 12294 - DNA, 15 bp, Homo sapiens
agagcatcagctcat

SEQ ID NO: 12295 - DNA, 15 bp, Homo sapiens
cagagcatcagctca

SEQ ID NO: 12296 - DNA, 15 bp, Homo sapiens
gcagagcatcagctc

SEQ ID NO: 12297 - DNA, 15 bp, Homo sapiens
agcagagcatcagct

SEQ ID NO: 12298 - DNA, 15 bp, Homo sapiens
cagcagagcatcagc

SEQ ID NO: 12299 - DNA, 15 bp, Homo sapiens
tcagcagagcatcag

SEQ ID NO: 12300 - DNA, 15 bp, Homo sapiens
atcagcagagcatca

SEQ ID NO: 12301 - DNA, 15 bp, Homo sapiens
aatcagcagagcatc

SEQ ID NO: 12302 - DNA, 15 bp, Homo sapiens
taatcagcagagcat

SEQ ID NO: 12303 - DNA, 15 bp, Homo sapiens
ctaatcagcagagca

SEQ ID NO: 12304 - DNA, 15 bp, Homo sapiens
gctaatcagcagagc

SEQ ID NO: 12305 - DNA, 15 bp, Homo sapiens
tgctaatcagcagag

SEQ ID NO: 12306 - DNA, 15 bp, Homo sapiens
ttgctaatcagcaga

SEQ ID NO: 12307 - DNA, 15 bp, Homo sapiens
tttgctaatcagcag

SEQ ID NO: 12308 - DNA, 15 bp, Homo sapiens
gtttgctaatcagca

SEQ ID NO: 12309 - DNA, 15 bp, Homo sapiens
cgtttgctaatcagc

SEQ ID NO: 12310 - DNA, 15 bp, Homo sapiens
gcgtttgctaatcag

SEQ ID NO: 12311 - DNA, 15 bp, Homo sapiens
agcgtttgctaatca

SEQ ID NO: 12312 - DNA, 15 bp, Homo sapiens
cagcgtttgctaatc

SEQ ID NO: 12313 - DNA, 15 bp, Homo sapiens
tcagcgtttgctaat

SEQ ID NO: 12314 - DNA, 15 bp, Homo sapiens
ctcagcgtttgctaa

SEQ ID NO: 12315 - DNA, 15 bp, Homo sapiens
gctcagcgtttgcta

SEQ ID NO: 12316 - DNA, 15 bp, Homo sapiens
ggctcagcgtttgct

SEQ ID NO: 12317 - DNA, 15 bp, Homo sapiens
tggctcagcgtttgc

SEQ ID NO: 12318 - DNA, 15 bp, Homo sapiens
atggctcagcgtttg

SEQ ID NO: 12319 - DNA, 15 bp, Homo sapiens
gatggctcagcgttt

SEQ ID NO: 12320 - DNA, 15 bp, Homo sapiens
agatggctcagcgtt

SEQ ID NO: 12321 - DNA, 15 bp, Homo sapiens
cagatggctcagcgt

SEQ ID NO: 12322 - DNA, 15 bp, Homo sapiens
gcagatggctcagcg

SEQ ID NO: 12323 - DNA, 15 bp, Homo sapiens
cgcagatggctcagc

SEQ ID NO: 12324 - DNA, 15 bp, Homo sapiens
gcgcagatggctcag

SEQ ID NO: 12325 - DNA, 15 bp, Homo sapiens
agcgcagatggctca

SEQ ID NO: 12326 - DNA, 15 bp, Homo sapiens
aagcgcagatggctc

SEQ ID NO: 12327 - DNA, 15 bp, Homo sapiens
gaagcgcagatggct

SEQ ID NO: 12328 - DNA, 15 bp, Homo sapiens
cgaagcgcagatggc

SEQ ID NO: 12329 - DNA, 15 bp, Homo sapiens
gcgaagcgcagatgg

SEQ ID NO: 12330 - DNA, 15 bp, Homo sapiens
tgcgaagcgcagatg

SEQ ID NO: 12331 - DNA, 15 bp, Homo sapiens
ctgcgaagcgcagat

SEQ ID NO: 12332 - DNA, 15 bp, Homo sapiens
tctgcgaagcgcaga

SEQ ID NO: 12333 - DNA, 15 bp, Homo sapiens
ctctgcgaagcgcag

SEQ ID NO: 12334 - DNA, 15 bp, Homo sapiens
cctctgcgaagcgca

SEQ ID NO: 12335 - DNA, 15 bp, Homo sapiens
gcctctgcgaagcgc

SEQ ID NO: 12336 - DNA, 15 bp, Homo sapiens
tgcctctgcgaagcg

SEQ ID NO: 12337 - DNA, 15 bp, Homo sapiens
gtgcctctgcgaagc

SEQ ID NO: 12338 - DNA, 15 bp, Homo sapiens
cgtgcctctgcgaag

SEQ ID NO: 12339 - DNA, 15 bp, Homo sapiens
acgtgcctctgcgaa

SEQ ID NO: 12340 - DNA, 15 bp, Homo sapiens
aacgtgcctctgcga

SEQ ID NO: 12341 - DNA, 15 bp, Homo sapiens
gaacgtgcctctgcg

SEQ ID NO: 12342 - DNA, 15 bp, Homo sapiens
ggaacgtgcctctgc

SEQ ID NO: 12343 - DNA, 15 bp, Homo sapiens
tggaacgtgcctctg

SEQ ID NO: 12344 - DNA, 15 bp, Homo sapiens
ctggaacgtgcctct

SEQ ID NO: 12345 - DNA, 15 bp, Homo sapiens
gctggaacgtgcctc

SEQ ID NO: 12346 - DNA, 15 bp, Homo sapiens
ggctggaacgtgcct

SEQ ID NO: 12347 - DNA, 15 bp, Homo sapiens
tggctggaacgtgcc

SEQ ID NO: 12348 - DNA, 15 bp, Homo sapiens
ttggctggaacgtgc

SEQ ID NO: 12349 - DNA, 15 bp, Homo sapiens
gttggctggaacgtg

SEQ ID NO: 12350 - DNA, 15 bp, Homo sapiens
ggttggctggaacgt

SEQ ID NO: 12351 - DNA, 15 bp, Homo sapiens
gggttggctggaacg

SEQ ID NO: 12352 - DNA, 15 bp, Homo sapiens
cgggttggctggaac

SEQ ID NO: 12353 - DNA, 15 bp, Homo sapiens
ccgggttggctggaa

SEQ ID NO: 12354 - DNA, 15 bp, Homo sapiens
gccgggttggctgga

SEQ ID NO: 12355 - DNA, 15 bp, Homo sapiens
ggccgggttggctgg

SEQ ID NO: 12356 - DNA, 15 bp, Homo sapiens
gggccgggttggctg

SEQ ID NO: 12357 - DNA, 15 bp, Homo sapiens
agggccgggttggct

SEQ ID NO: 12358 - DNA, 15 bp, Homo sapiens
gagggccgggttggc

SEQ ID NO: 12359 - DNA, 15 bp, Homo sapiens
ggagggccgggttgg

SEQ ID NO: 12360 - DNA, 15 bp, Homo sapiens
gggagggccgggttg

SEQ ID NO: 12361 - DNA, 15 bp, Homo sapiens
agggagggccgggtt

SEQ ID NO: 12362 - DNA, 15 bp, Homo sapiens
cagggagggccgggt

SEQ ID NO: 12363 - DNA, 15 bp, Homo sapiens
gcagggagggccggg

SEQ ID NO: 12364 - DNA, 15 bp, Homo sapiens
ggcagggagggccgg

SEQ ID NO: 12365 - DNA, 15 bp, Homo sapiens
gggcagggagggccg

SEQ ID NO: 12366 - DNA, 15 bp, Homo sapiens
tgggcagggagggcc

SEQ ID NO: 12367 - DNA, 15 bp, Homo sapiens
gtgggcagggagggc

SEQ ID NO: 12368 - DNA, 15 bp, Homo sapiens
agtgggcagggaggg

SEQ ID NO: 12369 - DNA, 15 bp, Homo sapiens
aagtgggcagggagg

SEQ ID NO: 12370 - DNA, 15 bp, Homo sapiens
gaagtgggcagggag

SEQ ID NO: 12371 - DNA, 15 bp, Homo sapiens
ggaagtgggcaggga

SEQ ID NO: 12372 - DNA, 15 bp, Homo sapiens
gggaagtgggcaggg

SEQ ID NO: 12373 - DNA, 15 bp, Homo sapiens
tgggaagtgggcagg

SEQ ID NO: 12374 - DNA, 15 bp, Homo sapiens
ctgggaagtgggcag

SEQ ID NO: 12375 - DNA, 15 bp, Homo sapiens
cctgggaagtgggca

SEQ ID NO: 12376 - DNA, 15 bp, Homo sapiens
tcctgggaagtgggc

SEQ ID NO: 12377 - DNA, 15 bp, Homo sapiens
atcctgggaagtggg

SEQ ID NO: 12378 - DNA, 15 bp, Homo sapiens
catcctgggaagtgg

SEQ ID NO: 12379 - DNA, 15 bp, Homo sapiens
gcatcctgggaagtg

SEQ ID NO: 12380 - DNA, 15 bp, Homo sapiens
agcatcctgggaagt

SEQ ID NO: 12381 - DNA, 15 bp, Homo sapiens
aagcatcctgggaag

SEQ ID NO: 12382 - DNA, 15 bp, Homo sapiens
aaagcatcctgggaa

SEQ ID NO: 12383 - DNA, 15 bp, Homo sapiens
caaagcatcctggga

SEQ ID NO: 12384 - DNA, 15 bp, Homo sapiens
gcaaagcatcctggg

SEQ ID NO: 12385 - DNA, 15 bp, Homo sapiens
ggcaaagcatcctgg

SEQ ID NO: 12386 - DNA, 15 bp, Homo sapiens
aggcaaagcatcctg

SEQ ID NO: 12387 - DNA, 15 bp, Homo sapiens
aaggcaaagcatcct

SEQ ID NO: 12388 - DNA, 15 bp, Homo sapiens
caaggcaaagcatcc

SEQ ID NO: 12389 - DNA, 15 bp, Homo sapiens
acaaggcaaagcatc

SEQ ID NO: 12390 - DNA, 15 bp, Homo sapiens
cacaaggcaaagcat

SEQ ID NO: 12391 - DNA, 15 bp, Homo sapiens
ccacaaggcaaagca

SEQ ID NO: 12392 - DNA, 15 bp, Homo sapiens
cccacaaggcaaagc

SEQ ID NO: 12393 - DNA, 15 bp, Homo sapiens
gcccacaaggcaaag

SEQ ID NO: 12394 - DNA, 15 bp, Homo sapiens
agcccacaaggcaaa

SEQ ID NO: 12395 - DNA, 15 bp, Homo sapiens
gagcccacaaggcaa

SEQ ID NO: 12396 - DNA, 15 bp, Homo sapiens
tgagcccacaaggca

SEQ ID NO: 12397 - DNA, 15 bp, Homo sapiens
gtgagcccacaaggc

SEQ ID NO: 12398 - DNA, 15 bp, Homo sapiens
ggtgagcccacaagg

SEQ ID NO: 12399 - DNA, 15 bp, Homo sapiens
aggtgagcccacaag

SEQ ID NO: 12400 - DNA, 15 bp, Homo sapiens
caggtgagcccacaa

SEQ ID NO: 12401 - DNA, 15 bp, Homo sapiens
acaggtgagcccaca

SEQ ID NO: 12402 - DNA, 15 bp, Homo sapiens
gacaggtgagcccac

SEQ ID NO: 12403 - DNA, 15 bp, Homo sapiens
agacaggtgagccca

SEQ ID NO: 12404 - DNA, 15 bp, Homo sapiens
aagacaggtgagccc

SEQ ID NO: 12405 - DNA, 15 bp, Homo sapiens
gaagacaggtgagcc

SEQ ID NO: 12406 - DNA, 15 bp, Homo sapiens
agaagacaggtgagc

SEQ ID NO: 12407 - DNA, 15 bp, Homo sapiens
tagaagacaggtgag

SEQ ID NO: 12408 - DNA, 15 bp, Homo sapiens
ctagaagacaggtga

SEQ ID NO: 12409 - DNA, 15 bp, Homo sapiens
gctagaagacaggtg

SEQ ID NO: 12410 - DNA, 15 bp, Homo sapiens
agctagaagacaggt

SEQ ID NO: 12411 - DNA, 15 bp, Homo sapiens
gagctagaagacagg

SEQ ID NO: 12412 - DNA, 15 bp, Homo sapiens
ggagctagaagacag

SEQ ID NO: 12413 - DNA, 15 bp, Homo sapiens
aggagctagaagaca

SEQ ID NO: 12414 - DNA, 15 bp, Homo sapiens
caggagctagaagac

SEQ ID NO: 12415 - DNA, 15 bp, Homo sapiens
tcaggagctagaaga

SEQ ID NO: 12416 - DNA, 15 bp, Homo sapiens
atcaggagctagaag

SEQ ID NO: 12417 - DNA, 15 bp, Homo sapiens
gatcaggagctagaa

SEQ ID NO: 12418 - DNA, 15 bp, Homo sapiens
agatcaggagctaga

SEQ ID NO: 12419 - DNA, 15 bp, Homo sapiens
cagatcaggagctag

SEQ ID NO: 12420 - DNA, 15 bp, Homo sapiens
acagatcaggagcta

SEQ ID NO: 12421 - DNA, 15 bp, Homo sapiens
tacagatcaggagct

SEQ ID NO: 12422 - DNA, 15 bp, Homo sapiens
atacagatcaggagc

SEQ ID NO: 12423 - DNA, 15 bp, Homo sapiens
gatacagatcaggag

SEQ ID NO: 12424 - DNA, 15 bp, Homo sapiens
agatacagatcagga

SEQ ID NO: 12425 - DNA, 15 bp, Homo sapiens
gagatacagatcagg

SEQ ID NO: 12426 - DNA, 15 bp, Homo sapiens
ggagatacagatcag

SEQ ID NO: 12427 - DNA, 15 bp, Homo sapiens
tggagatacagatca

SEQ ID NO: 12428 - DNA, 15 bp, Homo sapiens
gtggagatacagatc

SEQ ID NO: 12429 - DNA, 15 bp, Homo sapiens
ggtggagatacagat

SEQ ID NO: 12430 - DNA, 15 bp, Homo sapiens
aggtggagatacaga

SEQ ID NO: 12431 - DNA, 15 bp, Homo sapiens
gaggtggagatacag

SEQ ID NO: 12432 - DNA, 15 bp, Homo sapiens
ggaggtggagataca

SEQ ID NO: 12433 - DNA, 15 bp, Homo sapiens
tggaggtggagatac

SEQ ID NO: 12434 - DNA, 15 bp, Homo sapiens
atggaggtggagata

SEQ ID NO: 12435 - DNA, 15 bp, Homo sapiens
gatggaggtggagat

SEQ ID NO: 12436 - DNA, 15 bp, Homo sapiens
ggatggaggtggaga

SEQ ID NO: 12437 - DNA, 15 bp, Homo sapiens
tggatggaggtggag

SEQ ID NO: 12438 - DNA, 15 bp, Homo sapiens
ctggatggaggtgga

SEQ ID NO: 12439 - DNA, 15 bp, Homo sapiens
actggatggaggtgg

SEQ ID NO: 12440 - DNA, 15 bp, Homo sapiens
aactggatggaggtg

SEQ ID NO: 12441 - DNA, 15 bp, Homo sapiens
gaactggatggaggt

SEQ ID NO: 12442 - DNA, 15 bp, Homo sapiens
ggaactggatggagg

SEQ ID NO: 12443 - DNA, 15 bp, Homo sapiens
cggaactggatggag

SEQ ID NO: 12444 - DNA, 15 bp, Homo sapiens
ccggaactggatgga

SEQ ID NO: 12445 - DNA, 15 bp, Homo sapiens
cccggaactggatgg

SEQ ID NO: 12446 - DNA, 15 bp, Homo sapiens
ccccggaactggatg

SEQ ID NO: 12447 - DNA, 15 bp, Homo sapiens
gccccggaactggat

SEQ ID NO: 12448 - DNA, 15 bp, Homo sapiens
agccccggaactgga

SEQ ID NO: 12449 - DNA, 15 bp, Homo sapiens
gagccccggaactgg

SEQ ID NO: 12450 - DNA, 15 bp, Homo sapiens
ggagccccggaactg

SEQ ID NO: 12451 - DNA, 15 bp, Homo sapiens
aggagccccggaact

SEQ ID NO: 12452 - DNA, 15 bp, Homo sapiens
aaggagccccggaac

SEQ ID NO: 12453 - DNA, 15 bp, Homo sapiens
taaggagccccggaa

SEQ ID NO: 12454 - DNA, 15 bp, Homo sapiens
ataaggagccccgga

SEQ ID NO: 12455 - DNA, 15 bp, Homo sapiens
gataaggagccccgg

SEQ ID NO: 12456 - DNA, 15 bp, Homo sapiens
tgataaggagccccg

SEQ ID NO: 12457 - DNA, 15 bp, Homo sapiens
ctgataaggagcccc

SEQ ID NO: 12458 - DNA, 15 bp, Homo sapiens
gctgataaggagccc

SEQ ID NO: 12459 - DNA, 15 bp, Homo sapiens
tgctgataaggagcc

SEQ ID NO: 12460 - DNA, 15 bp, Homo sapiens
gtgctgataaggagc

SEQ ID NO: 12461 - DNA, 15 bp, Homo sapiens
agtgctgataaggag

SEQ ID NO: 12462 - DNA, 15 bp, Homo sapiens
cagtgctgataagga

SEQ ID NO: 12463 - DNA, 15 bp, Homo sapiens
acagtgctgataagg

SEQ ID NO: 12464 - DNA, 15 bp, Homo sapiens
aacagtgctgataag

SEQ ID NO: 12465 - DNA, 15 bp, Homo sapiens
gaacagtgctgataa

SEQ ID NO: 12466 - DNA, 15 bp, Homo sapiens
ggaacagtgctgata

SEQ ID NO: 12467 - DNA, 15 bp, Homo sapiens
gggaacagtgctgat

SEQ ID NO: 12468 - DNA, 15 bp, Homo sapiens
tgggaacagtgctga

SEQ ID NO: 12469 - DNA, 15 bp, Homo sapiens
ctgggaacagtgctg

SEQ ID NO: 12470 - DNA, 15 bp, Homo sapiens
tctgggaacagtgct

SEQ ID NO: 12471 - DNA, 15 bp, Homo sapiens
ttctgggaacagtgc

SEQ ID NO: 12472 - DNA, 15 bp, Homo sapiens
gttctgggaacagtg

SEQ ID NO: 12473 - DNA, 15 bp, Homo sapiens
agttctgggaacagt

SEQ ID NO: 12474 - DNA, 15 bp, Homo sapiens
cagttctgggaacag

SEQ ID NO: 12475 - DNA, 15 bp, Homo sapiens
acagttctgggaaca

SEQ ID NO: 12476 - DNA, 15 bp, Homo sapiens
gacagttctgggaac

SEQ ID NO: 12477 - DNA, 15 bp, Homo sapiens
ggacagttctgggaa

SEQ ID NO: 12478 - DNA, 15 bp, Homo sapiens
tggacagttctggga

SEQ ID NO: 12479 - DNA, 15 bp, Homo sapiens
atggacagttctggg

SEQ ID NO: 12480 - DNA, 15 bp, Homo sapiens
gatggacagttctgg

SEQ ID NO: 12481 - DNA, 15 bp, Homo sapiens
tgatggacagttctg

SEQ ID NO: 12482 - DNA, 15 bp, Homo sapiens
gtgatggacagttct

SEQ ID NO: 12483 - DNA, 15 bp, Homo sapiens
cgtgatggacagttc

SEQ ID NO: 12484 - DNA, 15 bp, Homo sapiens
tcgtgatggacagtt

SEQ ID NO: 12485 - DNA, 15 bp, Homo sapiens
atcgtgatggacagt

SEQ ID NO: 12486 - DNA, 15 bp, Homo sapiens
catcgtgatggacag

SEQ ID NO: 12487 - DNA, 15 bp, Homo sapiens
ccatcgtgatggaca

SEQ ID NO: 12488 - DNA, 15 bp, Homo sapiens
gccatcgtgatggac

SEQ ID NO: 12489 - DNA, 15 bp, Homo sapiens
tgccatcgtgatgga

SEQ ID NO: 12490 - DNA, 15 bp, Homo sapiens
ttgccatcgtgatgg

SEQ ID NO: 12491 - DNA, 15 bp, Homo sapiens
gttgccatcgtgatg

SEQ ID NO: 12492 - DNA, 15 bp, Homo sapiens
cgttgccatcgtgat

SEQ ID NO: 12493 - DNA, 15 bp, Homo sapiens
acgttgccatcgtga

SEQ ID NO: 12494 - DNA, 15 bp, Homo sapiens
aacgttgccatcgtg

SEQ ID NO: 12495 - DNA, 15 bp, Homo sapiens
gaacgttgccatcgt

SEQ ID NO: 12496 - DNA, 15 bp, Homo sapiens
agaacgttgccatcg

SEQ ID NO: 12497 - DNA, 15 bp, Homo sapiens
gagaacgttgccatc

SEQ ID NO: 12498 - DNA, 15 bp, Homo sapiens
agagaacgttgccat

SEQ ID NO: 12499 - DNA, 15 bp, Homo sapiens
gagagaacgttgcca

SEQ ID NO: 12500 - DNA, 15 bp, Homo sapiens
agagagaacgttgcc

SEQ ID NO: 12501 - DNA, 15 bp, Homo sapiens
cagagagaacgttgc

SEQ ID NO: 12502 - DNA, 15 bp, Homo sapiens
ccagagagaacgttg

SEQ ID NO: 12503 - DNA, 15 bp, Homo sapiens
cccagagagaacgtt

SEQ ID NO: 12504 - DNA, 15 bp, Homo sapiens
gcccagagagaacgt

SEQ ID NO: 12505 - DNA, 15 bp, Homo sapiens
cgcccagagagaacg

SEQ ID NO: 12506 - DNA, 15 bp, Homo sapiens
gcgcccagagagaac

SEQ ID NO: 12507 - DNA, 15 bp, Homo sapiens
agcgcccagagagaa

SEQ ID NO: 12508 - DNA, 15 bp, Homo sapiens
cagcgcccagagaga

SEQ ID NO: 12509 - DNA, 15 bp, Homo sapiens
acagcgcccagagag

SEQ ID NO: 12510 - DNA, 15 bp, Homo sapiens
gacagcgcccagaga

SEQ ID NO: 12511 - DNA, 15 bp, Homo sapiens
ggacagcgcccagag

SEQ ID NO: 12512 - DNA, 15 bp, Homo sapiens
tggacagcgcccaga

SEQ ID NO: 12513 - DNA, 15 bp, Homo sapiens
ttggacagcgcccag

SEQ ID NO: 12514 - DNA, 15 bp, Homo sapiens
gttggacagcgccca

SEQ ID NO: 12515 - DNA, 15 bp, Homo sapiens
tgttggacagcgccc

SEQ ID NO: 12516 - DNA, 15 bp, Homo sapiens
atgttggacagcgcc

SEQ ID NO: 12517 - DNA, 15 bp, Homo sapiens
catgttggacagcgc

SEQ ID NO: 12518 - DNA, 15 bp, Homo sapiens
ccatgttggacagcg

SEQ ID NO: 12519 - DNA, 15 bp, Homo sapiens
cccatgttggacagc

SEQ ID NO: 12520 - DNA, 15 bp, Homo sapiens
tcccatgttggacag

SEQ ID NO: 12521 - DNA, 15 bp, Homo sapiens
ctcccatgttggaca

SEQ ID NO: 12522 - DNA, 15 bp, Homo sapiens
gctcccatgttggac

SEQ ID NO: 12523 - DNA, 15 bp, Homo sapiens
agctcccatgttgga

SEQ ID NO: 12524 - DNA, 15 bp, Homo sapiens
gagctcccatgttgg

SEQ ID NO: 12525 - DNA, 15 bp, Homo sapiens
cgagctcccatgttg

SEQ ID NO: 12526 - DNA, 15 bp, Homo sapiens
gcgagctcccatgtt

SEQ ID NO: 12527 - DNA, 15 bp, Homo sapiens
ggcgagctcccatgt

SEQ ID NO: 12528 - DNA, 15 bp, Homo sapiens
aggcgagctcccatg

SEQ ID NO: 12529 - DNA, 15 bp, Homo sapiens
gaggcgagctcccat

SEQ ID NO: 12530 - DNA, 15 bp, Homo sapiens
agaggcgagctccca

SEQ ID NO: 12531 - DNA, 15 bp, Homo sapiens
cagaggcgagctccc

SEQ ID NO: 12532 - DNA, 15 bp, Homo sapiens
acagaggcgagctcc

SEQ ID NO: 12533 - DNA, 15 bp, Homo sapiens
cacagaggcgagctc

SEQ ID NO: 12534 - DNA, 15 bp, Homo sapiens
acacagaggcgagct

SEQ ID NO: 12535 - DNA, 15 bp, Homo sapiens
aacacagaggcgagc

SEQ ID NO: 12536 - DNA, 15 bp, Homo sapiens
caacacagaggcgag

SEQ ID NO: 12537 - DNA, 15 bp, Homo sapiens
acaacacagaggcga

SEQ ID NO: 12538 - DNA, 15 bp, Homo sapiens
gacaacacagaggcg

SEQ ID NO: 12539 - DNA, 15 bp, Homo sapiens
tgacaacacagaggc

SEQ ID NO: 12540 - DNA, 15 bp, Homo sapiens
gtgacaacacagagg

SEQ ID NO: 12541 - DNA, 15 bp, Homo sapiens
agtgacaacacagag

SEQ ID NO: 12542 - DNA, 15 bp, Homo sapiens
gagtgacaacacaga

SEQ ID NO: 12543 - DNA, 15 bp, Homo sapiens
tgagtgacaacacag

SEQ ID NO: 12544 - DNA, 15 bp, Homo sapiens
atgagtgacaacaca

SEQ ID NO: 12545 - DNA, 15 bp, Homo sapiens
catgagtgacaacac

SEQ ID NO: 12546 - DNA, 15 bp, Homo sapiens
gcatgagtgacaaca

SEQ ID NO: 12547 - DNA, 15 bp, Homo sapiens
agcatgagtgacaac

SEQ ID NO: 12548 - DNA, 15 bp, Homo sapiens
gagcatgagtgacaa

SEQ ID NO: 12549 - DNA, 15 bp, Homo sapiens
tgagcatgagtgaca

SEQ ID NO: 12550 - DNA, 15 bp, Homo sapiens
atgagcatgagtgac

SEQ ID NO: 12551 - DNA, 15 bp, Homo sapiens
aatgagcatgagtga

SEQ ID NO: 12552 - DNA, 15 bp, Homo sapiens
caatgagcatgagtg

SEQ ID NO: 12553 - DNA, 15 bp, Homo sapiens
tcaatgagcatgagt

SEQ ID NO: 12554 - DNA, 15 bp, Homo sapiens
ttcaatgagcatgag

SEQ ID NO: 12555 - DNA, 15 bp, Homo sapiens
gttcaatgagcatga

SEQ ID NO: 12556 - DNA, 15 bp, Homo sapiens
tgttcaatgagcatg

SEQ ID NO: 12557 - DNA, 15 bp, Homo sapiens
atgttcaatgagcat

SEQ ID NO: 12558 - DNA, 15 bp, Homo sapiens
catgttcaatgagca

SEQ ID NO: 12559 - DNA, 15 bp, Homo sapiens
ccatgttcaatgagc

SEQ ID NO: 12560 - DNA, 15 bp, Homo sapiens
tccatgttcaatgag

SEQ ID NO: 12561 - DNA, 15 bp, Homo sapiens
atccatgttcaatga

SEQ ID NO: 12562 - DNA, 15 bp, Homo sapiens
aatccatgttcaatg

SEQ ID NO: 12563 - DNA, 15 bp, Homo sapiens
aaatccatgttcaat

SEQ ID NO: 12564 - DNA, 15 bp, Homo sapiens
caaatccatgttcaa

SEQ ID NO: 12565 - DNA, 15 bp, Homo sapiens
acaaatccatgttca

SEQ ID NO: 12566 - DNA, 15 bp, Homo sapiens
cacaaatccatgttc

SEQ ID NO: 12567 - DNA, 15 bp, Homo sapiens
acacaaatccatgtt

SEQ ID NO: 12568 - DNA, 15 bp, Homo sapiens
gacacaaatccatgt

SEQ ID NO: 12569 - DNA, 15 bp, Homo sapiens
ggacacaaatccatg

SEQ ID NO: 12570 - DNA, 15 bp, Homo sapiens
aggacacaaatccat

SEQ ID NO: 12571 - DNA, 15 bp, Homo sapiens
aaggacacaaatcca

SEQ ID NO: 12572 - DNA, 15 bp, Homo sapiens
aaaggacacaaatcc

SEQ ID NO: 12573 - DNA, 15 bp, Homo sapiens
taaaggacacaaatc

SEQ ID NO: 12574 - DNA, 15 bp, Homo sapiens
gtaaaggacacaaat

SEQ ID NO: 12575 - DNA, 15 bp, Homo sapiens
ggtaaaggacacaaa

SEQ ID NO: 12576 - DNA, 15 bp, Homo sapiens
tggtaaaggacacaa

SEQ ID NO: 12577 - DNA, 15 bp, Homo sapiens
atggtaaaggacaca

SEQ ID NO: 12578 - DNA, 15 bp, Homo sapiens
gatggtaaaggacac

SEQ ID NO: 12579 - DNA, 15 bp, Homo sapiens
tgatggtaaaggaca

SEQ ID NO: 12580 - DNA, 15 bp, Homo sapiens
ctgatggtaaaggac

SEQ ID NO: 12581 - DNA, 15 bp, Homo sapiens
cctgatggtaaagga

SEQ ID NO: 12582 - DNA, 15 bp, Homo sapiens
tcctgatggtaaagg

SEQ ID NO: 12583 - DNA, 15 bp, Homo sapiens
gtcctgatggtaaag

SEQ ID NO: 12584 - DNA, 15 bp, Homo sapiens
agtcctgatggtaaa

SEQ ID NO: 12585 - DNA, 15 bp, Homo sapiens
cagtcctgatggtaa

SEQ ID NO: 12586 - DNA, 15 bp, Homo sapiens
ccagtcctgatggta

SEQ ID NO: 12587 - DNA, 15 bp, Homo sapiens
tccagtcctgatggt

SEQ ID NO: 12588 - DNA, 15 bp, Homo sapiens
atccagtcctgatgg

SEQ ID NO: 12589 - DNA, 15 bp, Homo sapiens
tatccagtcctgatg

SEQ ID NO: 12590 - DNA, 15 bp, Homo sapiens
gtatccagtcctgat

SEQ ID NO: 12591 - DNA, 15 bp, Homo sapiens
ggtatccagtcctga

SEQ ID NO: 12592 - DNA, 15 bp, Homo sapiens
gggtatccagtcctg

SEQ ID NO: 12593 - DNA, 15 bp, Homo sapiens
ggggtatccagtcct

SEQ ID NO: 12594 - DNA, 15 bp, Homo sapiens
aggggtatccagtcc

SEQ ID NO: 12595 - DNA, 15 bp, Homo sapiens
gaggggtatccagtc

SEQ ID NO: 12596 - DNA, 15 bp, Homo sapiens
ggaggggtatccagt

SEQ ID NO: 12597 - DNA, 15 bp, Homo sapiens
aggaggggtatccag

SEQ ID NO: 12598 - DNA, 15 bp, Homo sapiens
caggaggggtatcca

SEQ ID NO: 12599 - DNA, 15 bp, Homo sapiens
ccaggaggggtatcc

SEQ ID NO: 12600 - DNA, 15 bp, Homo sapiens
accaggaggggtatc

SEQ ID NO: 12601 - DNA, 15 bp, Homo sapiens
gaccaggaggggtat

SEQ ID NO: 12602 - DNA, 15 bp, Homo sapiens
ggaccaggaggggta

SEQ ID NO: 12603 - DNA, 15 bp, Homo sapiens
aggaccaggaggggt

SEQ ID NO: 12604 - DNA, 15 bp, Homo sapiens
aaggaccaggagggg

SEQ ID NO: 12605 - DNA, 15 bp, Homo sapiens
aaaggaccaggaggg

SEQ ID NO: 12606 - DNA, 15 bp, Homo sapiens
gaaaggaccaggagg

SEQ ID NO: 12607 - DNA, 15 bp, Homo sapiens
agaaaggaccaggag

SEQ ID NO: 12608 - DNA, 15 bp, Homo sapiens
cagaaaggaccagga

SEQ ID NO: 12609 - DNA, 15 bp, Homo sapiens
gcagaaaggaccagg

SEQ ID NO: 12610 - DNA, 15 bp, Homo sapiens
ggcagaaaggaccag

SEQ ID NO: 12611 - DNA, 15 bp, Homo sapiens
aggcagaaaggacca

SEQ ID NO: 12612 - DNA, 15 bp, Homo sapiens
caggcagaaaggacc

SEQ ID NO: 12613 - DNA, 15 bp, Homo sapiens
ccaggcagaaaggac

SEQ ID NO: 12614 - DNA, 15 bp, Homo sapiens
cccaggcagaaagga

SEQ ID NO: 12615 - DNA, 15 bp, Homo sapiens
ccccaggcagaaagg

SEQ ID NO: 12616 - DNA, 15 bp, Homo sapiens
accccaggcagaaag

SEQ ID NO: 12617 - DNA, 15 bp, Homo sapiens
gaccccaggcagaaa

SEQ ID NO: 12618 - DNA, 15 bp, Homo sapiens
agaccccaggcagaa

SEQ ID NO: 12619 - DNA, 15 bp, Homo sapiens
aagaccccaggcaga

SEQ ID NO: 12620 - DNA, 15 bp, Homo sapiens
taagaccccaggcag

SEQ ID NO: 12621 - DNA, 15 bp, Homo sapiens
ctaagaccccaggca

SEQ ID NO: 12622 - DNA, 15 bp, Homo sapiens
gctaagaccccaggc

SEQ ID NO: 12623 - DNA, 15 bp, Homo sapiens
tgctaagaccccagg

SEQ ID NO: 12624 - DNA, 15 bp, Homo sapiens
gtgctaagaccccag

SEQ ID NO: 12625 - DNA, 15 bp, Homo sapiens
tgtgctaagacccca

SEQ ID NO: 12626 - DNA, 15 bp, Homo sapiens
ctgtgctaagacccc

SEQ ID NO: 12627 - DNA, 15 bp, Homo sapiens
gctgtgctaagaccc

SEQ ID NO: 12628 - DNA, 15 bp, Homo sapiens
agctgtgctaagacc

SEQ ID NO: 12629 - DNA, 15 bp, Homo sapiens
gagctgtgctaagac

SEQ ID NO: 12630 - DNA, 15 bp, Homo sapiens
tgagctgtgctaaga

SEQ ID NO: 12631 - DNA, 15 bp, Homo sapiens
ctgagctgtgctaag

SEQ ID NO: 12632 - DNA, 15 bp, Homo sapiens
tctgagctgtgctaa

SEQ ID NO: 12633 - DNA, 15 bp, Homo sapiens
ttctgagctgtgcta

SEQ ID NO: 12634 - DNA, 15 bp, Homo sapiens
cttctgagctgtgct

SEQ ID NO: 12635 - DNA, 15 bp, Homo sapiens
ccttctgagctgtgc

SEQ ID NO: 12636 - DNA, 15 bp, Homo sapiens
tccttctgagctgtg

SEQ ID NO: 12637 - DNA, 15 bp, Homo sapiens
ttccttctgagctgt

SEQ ID NO: 12638 - DNA, 15 bp, Homo sapiens
gttccttctgagctg

SEQ ID NO: 12639 - DNA, 15 bp, Homo sapiens
ggttccttctgagct

SEQ ID NO: 12640 - DNA, 15 bp, Homo sapiens
aggttccttctgagc

SEQ ID NO: 12641 - DNA, 15 bp, Homo sapiens
gaggttccttctgag

SEQ ID NO: 12642 - DNA, 15 bp, Homo sapiens
tgaggttccttctga

SEQ ID NO: 12643 - DNA, 15 bp, Homo sapiens
gtgaggttccttctg

SEQ ID NO: 12644 - DNA, 15 bp, Homo sapiens
ggtgaggttccttct

SEQ ID NO: 12645 - DNA, 15 bp, Homo sapiens
tggtgaggttccttc

SEQ ID NO: 12646 - DNA, 15 bp, Homo sapiens
atggtgaggttcctt

SEQ ID NO: 12647 - DNA, 15 bp, Homo sapiens
aatggtgaggttcct

SEQ ID NO: 12648 - DNA, 15 bp, Homo sapiens
gaatggtgaggttcc

SEQ ID NO: 12649 - DNA, 15 bp, Homo sapiens
ggaatggtgaggttc

SEQ ID NO: 12650 - DNA, 15 bp, Homo sapiens
gggaatggtgaggtt

SEQ ID NO: 12651 - DNA, 15 bp, Homo sapiens
agggaatggtgaggt

SEQ ID NO: 12652 - DNA, 15 bp, Homo sapiens
gagggaatggtgagg

SEQ ID NO: 12653 - DNA, 15 bp, Homo sapiens
agagggaatggtgag

SEQ ID NO: 12654 - DNA, 15 bp, Homo sapiens
gagagggaatggtga

SEQ ID NO: 12655 - DNA, 15 bp, Homo sapiens
agagagggaatggtg

SEQ ID NO: 12656 - DNA, 15 bp, Homo sapiens
gagagagggaatggt

SEQ ID NO: 12657 - DNA, 15 bp, Homo sapiens
ggagagagggaatgg

SEQ ID NO: 12658 - DNA, 15 bp, Homo sapiens
tggagagagggaatg

SEQ ID NO: 12659 - DNA, 15 bp, Homo sapiens
atggagagagggaat

SEQ ID NO: 12660 - DNA, 15 bp, Homo sapiens
gatggagagagggaa

SEQ ID NO: 12661 - DNA, 15 bp, Homo sapiens
agatggagagaggga

SEQ ID NO: 12662 - DNA, 15 bp, Homo sapiens
tagatggagagaggg

SEQ ID NO: 12663 - DNA, 15 bp, Homo sapiens
ctagatggagagagg

SEQ ID NO: 12664 - DNA, 15 bp, Homo sapiens
cctagatggagagag

SEQ ID NO: 12665 - DNA, 15 bp, Homo sapiens
ccctagatggagaga

SEQ ID NO: 12666 - DNA, 15 bp, Homo sapiens
tccctagatggagag

SEQ ID NO: 12667 - DNA, 15 bp, Homo sapiens
ttccctagatggaga

SEQ ID NO: 12668 - DNA, 15 bp, Homo sapiens
attccctagatggag

SEQ ID NO: 12669 - DNA, 15 bp, Homo sapiens
aattccctagatgga

SEQ ID NO: 12670 - DNA, 15 bp, Homo sapiens
taattccctagatgg

SEQ ID NO: 12671 - DNA, 15 bp, Homo sapiens
ctaattccctagatg

SEQ ID NO: 12672 - DNA, 15 bp, Homo sapiens
tctaattccctagat

SEQ ID NO: 12673 - DNA, 15 bp, Homo sapiens
ttctaattccctaga

SEQ ID NO: 12674 - DNA, 15 bp, Homo sapiens
cttctaattccctag

SEQ ID NO: 12675 - DNA, 15 bp, Homo sapiens
tcttctaattcccta

SEQ ID NO: 12676 - DNA, 15 bp, Homo sapiens
atcttctaattccct

SEQ ID NO: 12677 - DNA, 15 bp, Homo sapiens
catcttctaattccc

SEQ ID NO: 12678 - DNA, 15 bp, Homo sapiens
tcatcttctaattcc

SEQ ID NO: 12679 - DNA, 15 bp, Homo sapiens
gtcatcttctaattc

SEQ ID NO: 12680 - DNA, 15 bp, Homo sapiens
tgtcatcttctaatt

SEQ ID NO: 12681 - DNA, 15 bp, Homo sapiens
ctgtcatcttctaat

SEQ ID NO: 12682 - DNA, 15 bp, Homo sapiens
cctgtcatcttctaa

SEQ ID NO: 12683 - DNA, 15 bp, Homo sapiens
ccctgtcatcttcta

SEQ ID NO: 12684 - DNA, 15 bp, Homo sapiens
cccctgtcatcttct

SEQ ID NO: 12685 - DNA, 15 bp, Homo sapiens
gcccctgtcatcttc

SEQ ID NO: 12686 - DNA, 15 bp, Homo sapiens
tgcccctgtcatctt

SEQ ID NO: 12687 - DNA, 15 bp, Homo sapiens
gtgcccctgtcatct

SEQ ID NO: 12688 - DNA, 15 bp, Homo sapiens
tgtgcccctgtcatc

SEQ ID NO: 12689 - DNA, 15 bp, Homo sapiens
ctgtgcccctgtcat

SEQ ID NO: 12690 - DNA, 15 bp, Homo sapiens
actgtgcccctgtca

SEQ ID NO: 12691 - DNA, 15 bp, Homo sapiens
aactgtgcccctgtc

SEQ ID NO: 12692 - DNA, 15 bp, Homo sapiens
gaactgtgcccctgt

SEQ ID NO: 12693 - DNA, 15 bp, Homo sapiens
agaactgtgcccctg

SEQ ID NO: 12694 - DNA, 15 bp, Homo sapiens
gagaactgtgcccct

SEQ ID NO: 12695 - DNA, 15 bp, Homo sapiens
agagaactgtgcccc

SEQ ID NO: 12696 - DNA, 15 bp, Homo sapiens
cagagaactgtgccc

SEQ ID NO: 12697 - DNA, 15 bp, Homo sapiens
ccagagaactgtgcc

SEQ ID NO: 12698 - DNA, 15 bp, Homo sapiens
gccagagaactgtgc

SEQ ID NO: 12699 - DNA, 15 bp, Homo sapiens
agccagagaactgtg

SEQ ID NO: 12700 - DNA, 15 bp, Homo sapiens
gagccagagaactgt

SEQ ID NO: 12701 - DNA, 15 bp, Homo sapiens
tgagccagagaactg

SEQ ID NO: 12702 - DNA, 15 bp, Homo sapiens
gtgagccagagaact

SEQ ID NO: 12703 - DNA, 15 bp, Homo sapiens
ggtgagccagagaac

SEQ ID NO: 12704 - DNA, 15 bp, Homo sapiens
gggtgagccagagaa

SEQ ID NO: 12705 - DNA, 15 bp, Homo sapiens
ggggtgagccagaga

SEQ ID NO: 12706 - DNA, 15 bp, Homo sapiens
gggggtgagccagag

SEQ ID NO: 12707 - DNA, 15 bp, Homo sapiens
tgggggtgagccaga

SEQ ID NO: 12708 - DNA, 15 bp, Homo sapiens
ctgggggtgagccag

SEQ ID NO: 12709 - DNA, 15 bp, Homo sapiens
gctgggggtgagcca

SEQ ID NO: 12710 - DNA, 15 bp, Homo sapiens
ggctgggggtgagcc

SEQ ID NO: 12711 - DNA, 15 bp, Homo sapiens
gggctgggggtgagc

SEQ ID NO: 12712 - DNA, 15 bp, Homo sapiens
tgggctgggggtgag

SEQ ID NO: 12713 - DNA, 15 bp, Homo sapiens
ctgggctgggggtga

SEQ ID NO: 12714 - DNA, 15 bp, Homo sapiens
actgggctgggggtg

SEQ ID NO: 12715 - DNA, 15 bp, Homo sapiens
tactgggctgggggt

SEQ ID NO: 12716 - DNA, 15 bp, Homo sapiens
ttactgggctggggg

SEQ ID NO: 12717 - DNA, 15 bp, Homo sapiens
tttactgggctgggg

SEQ ID NO: 12718 - DNA, 15 bp, Homo sapiens
gtttactgggctggg

SEQ ID NO: 12719 - DNA, 15 bp, Homo sapiens
agtttactgggctgg

SEQ ID NO: 12720 - DNA, 15 bp, Homo sapiens
gagtttactgggctg

SEQ ID NO: 12721 - DNA, 15 bp, Homo sapiens
ggagtttactgggct

SEQ ID NO: 12722 - DNA, 15 bp, Homo sapiens
aggagtttactgggc

SEQ ID NO: 12723 - DNA, 15 bp, Homo sapiens
caggagtttactggg

SEQ ID NO: 12724 - DNA, 15 bp, Homo sapiens
ccaggagtttactgg

SEQ ID NO: 12725 - DNA, 15 bp, Homo sapiens
tccaggagtttactg

SEQ ID NO: 12726 - DNA, 15 bp, Homo sapiens
gtccaggagtttact

SEQ ID NO: 12727 - DNA, 15 bp, Homo sapiens
tgtccaggagtttac

SEQ ID NO: 12728 - DNA, 15 bp, Homo sapiens
atgtccaggagttta

SEQ ID NO: 12729 - DNA, 15 bp, Homo sapiens
catgtccaggagttt

SEQ ID NO: 12730 - DNA, 15 bp, Homo sapiens
gcatgtccaggagtt

SEQ ID NO: 12731 - DNA, 15 bp, Homo sapiens
agcatgtccaggagt

SEQ ID NO: 12732 - DNA, 15 bp, Homo sapiens
aagcatgtccaggag

SEQ ID NO: 12733 - DNA, 15 bp, Homo sapiens
gaagcatgtccagga

SEQ ID NO: 12734 - DNA, 15 bp, Homo sapiens
tgaagcatgtccagg

SEQ ID NO: 12735 - DNA, 15 bp, Homo sapiens
ttgaagcatgtccag

SEQ ID NO: 12736 - DNA, 15 bp, Homo sapiens
cttgaagcatgtcca

SEQ ID NO: 12737 - DNA, 15 bp, Homo sapiens
ccttgaagcatgtcc

SEQ ID NO: 12738 - DNA, 15 bp, Homo sapiens
gccttgaagcatgtc

SEQ ID NO: 12739 - DNA, 15 bp, Homo sapiens
ggccttgaagcatgt

SEQ ID NO: 12740 - DNA, 15 bp, Homo sapiens
gggccttgaagcatg

SEQ ID NO: 12741 - DNA, 15 bp, Homo sapiens
tgggccttgaagcat

SEQ ID NO: 12742 - DNA, 15 bp, Homo sapiens
ctgggccttgaagca

SEQ ID NO: 12743 - DNA, 15 bp, Homo sapiens
gctgggccttgaagc

SEQ ID NO: 12744 - DNA, 15 bp, Homo sapiens
agctgggccttgaag

SEQ ID NO: 12745 - DNA, 15 bp, Homo sapiens
gagctgggccttgaa

SEQ ID NO: 12746 - DNA, 15 bp, Homo sapiens
tgagctgggccttga

SEQ ID NO: 12747 - DNA, 15 bp, Homo sapiens
ctgagctgggccttg

SEQ ID NO: 12748 - DNA, 15 bp, Homo sapiens
tctgagctgggcctt

SEQ ID NO: 12749 - DNA, 15 bp, Homo sapiens
atctgagctgggcct

SEQ ID NO: 12750 - DNA, 15 bp, Homo sapiens
catctgagctgggcc

SEQ ID NO: 12751 - DNA, 15 bp, Homo sapiens
acatctgagctgggc

SEQ ID NO: 12752 - DNA, 15 bp, Homo sapiens
aacatctgagctggg

SEQ ID NO: 12753 - DNA, 15 bp, Homo sapiens
caacatctgagctgg

SEQ ID NO: 12754 - DNA, 15 bp, Homo sapiens
gcaacatctgagctg

SEQ ID NO: 12755 - DNA, 15 bp, Homo sapiens
ggcaacatctgagct

SEQ ID NO: 12756 - DNA, 15 bp, Homo sapiens
aggcaacatctgagc

SEQ ID NO: 12757 - DNA, 15 bp, Homo sapiens
gaggcaacatctgag

SEQ ID NO: 12758 - DNA, 15 bp, Homo sapiens
ggaggcaacatctga

SEQ ID NO: 12759 - DNA, 15 bp, Homo sapiens
aggaggcaacatctg

SEQ ID NO: 12760 - DNA, 15 bp, Homo sapiens
gaggaggcaacatct

SEQ ID NO: 12761 - DNA, 15 bp, Homo sapiens
tgaggaggcaacatc

SEQ ID NO: 12762 - DNA, 15 bp, Homo sapiens
ctgaggaggcaacat

SEQ ID NO: 12763 - DNA, 15 bp, Homo sapiens
actgaggaggcaaca

SEQ ID NO: 12764 - DNA, 15 bp, Homo sapiens
cactgaggaggcaac

SEQ ID NO: 12765 - DNA, 15 bp, Homo sapiens
tcactgaggaggcaa

SEQ ID NO: 12766 - DNA, 15 bp, Homo sapiens
ttcactgaggaggca

SEQ ID NO: 12767 - DNA, 15 bp, Homo sapiens
tttcactgaggaggc

SEQ ID NO: 12768 - DNA, 15 bp, Homo sapiens
atttcactgaggagg

SEQ ID NO: 12769 - DNA, 15 bp, Homo sapiens
tatttcactgaggag

SEQ ID NO: 12770 - DNA, 15 bp, Homo sapiens
ttatttcactgagga

SEQ ID NO: 12771 - DNA, 15 bp, Homo sapiens
attatttcactgagg

SEQ ID NO: 12772 - DNA, 15 bp, Homo sapiens
aattatttcactgag

SEQ ID NO: 12773 - DNA, 15 bp, Homo sapiens
aaattatttcactga

SEQ ID NO: 12774 - DNA, 15 bp, Homo sapiens
taaattatttcactg

SEQ ID NO: 12775 - DNA, 15 bp, Homo sapiens
ataaattatttcact

SEQ ID NO: 12776 - DNA, 15 bp, Homo sapiens
tataaattatttcac

SEQ ID NO: 12777 - DNA, 15 bp, Homo sapiens
ttataaattatttca

SEQ ID NO: 12778 - DNA, 15 bp, Homo sapiens
tttataaattatttc

SEQ ID NO: 12779 - DNA, 15 bp, Homo sapiens
gtttataaattattt

SEQ ID NO: 12780 - DNA, 15 bp, Homo sapiens
ggtttataaattatt

SEQ ID NO: 12781 - DNA, 15 bp, Homo sapiens
gggtttataaattat

SEQ ID NO: 12782 - DNA, 15 bp, Homo sapiens
tgggtttataaatta

SEQ ID NO: 12783 - DNA, 15 bp, Homo sapiens
gtgggtttataaatt

SEQ ID NO: 12784 - DNA, 15 bp, Homo sapiens
ggtgggtttataaat

SEQ ID NO: 12785 - DNA, 15 bp, Homo sapiens
gggtgggtttataaa

SEQ ID NO: 12786 - DNA, 15 bp, Homo sapiens
agggtgggtttataa

SEQ ID NO: 12787 - DNA, 15 bp, Homo sapiens
aagggtgggtttata

SEQ ID NO: 12788 - DNA, 15 bp, Homo sapiens
gaagggtgggtttat

SEQ ID NO: 12789 - DNA, 15 bp, Homo sapiens
agaagggtgggttta

SEQ ID NO: 12790 - DNA, 15 bp, Homo sapiens
aagaagggtgggttt

SEQ ID NO: 12791 - DNA, 15 bp, Homo sapiens
aaagaagggtgggtt

SEQ ID NO: 12792 - DNA, 15 bp, Homo sapiens
caaagaagggtgggt

SEQ ID NO: 12793 - DNA, 15 bp, Homo sapiens
acaaagaagggtggg

SEQ ID NO: 12794 - DNA, 15 bp, Homo sapiens
gacaaagaagggtgg

SEQ ID NO: 12795 - DNA, 15 bp, Homo sapiens
ggacaaagaagggtg

SEQ ID NO: 12796 - DNA, 15 bp, Homo sapiens
aggacaaagaagggt

SEQ ID NO: 12797 - DNA, 15 bp, Homo sapiens
caggacaaagaaggg

SEQ ID NO: 12798 - DNA, 15 bp, Homo sapiens
gcaggacaaagaagg

SEQ ID NO: 12799 - DNA, 15 bp, Homo sapiens
ggcaggacaaagaag

SEQ ID NO: 12800 - DNA, 15 bp, Homo sapiens
aggcaggacaaagaa

SEQ ID NO: 12801 - DNA, 15 bp, Homo sapiens
aaggcaggacaaaga

SEQ ID NO: 12802 - DNA, 15 bp, Homo sapiens
gaaggcaggacaaag

SEQ ID NO: 12803 - DNA, 15 bp, Homo sapiens
agaaggcaggacaaa

SEQ ID NO: 12804 - DNA, 15 bp, Homo sapiens
gagaaggcaggacaa

SEQ ID NO: 12805 - DNA, 15 bp, Homo sapiens
ggagaaggcaggaca

SEQ ID NO: 12806 - DNA, 15 bp, Homo sapiens
gggagaaggcaggac

SEQ ID NO: 12807 - DNA, 15 bp, Homo sapiens
agggagaaggcagga

SEQ ID NO: 12808 - DNA, 15 bp, Homo sapiens
gagggagaaggcagg

SEQ ID NO: 12809 - DNA, 15 bp, Homo sapiens
agagggagaaggcag

SEQ ID NO: 12810 - DNA, 15 bp, Homo sapiens
aagagggagaaggca

SEQ ID NO: 12811 - DNA, 15 bp, Homo sapiens
gaagagggagaaggc

SEQ ID NO: 12812 - DNA, 15 bp, Homo sapiens
ggaagagggagaagg

SEQ ID NO: 12813 - DNA, 15 bp, Homo sapiens
gggaagagggagaag

SEQ ID NO: 12814 - DNA, 15 bp, Homo sapiens
agggaagagggagaa

SEQ ID NO: 12815 - DNA, 15 bp, Homo sapiens
tagggaagagggaga

SEQ ID NO: 12816 - DNA, 15 bp, Homo sapiens
gtagggaagagggag

SEQ ID NO: 12817 - DNA, 15 bp, Homo sapiens
agtagggaagaggga

SEQ ID NO: 12818 - DNA, 15 bp, Homo sapiens
gagtagggaagaggg

SEQ ID NO: 12819 - DNA, 15 bp, Homo sapiens
tgagtagggaagagg

SEQ ID NO: 12820 - DNA, 15 bp, Homo sapiens
gtgagtagggaagag

SEQ ID NO: 12821 - DNA, 15 bp, Homo sapiens
agtgagtagggaaga

SEQ ID NO: 12822 - DNA, 15 bp, Homo sapiens
cagtgagtagggaag

SEQ ID NO: 12823 - DNA, 15 bp, Homo sapiens
ccagtgagtagggaa

SEQ ID NO: 12824 - DNA, 15 bp, Homo sapiens
tccagtgagtaggga

SEQ ID NO: 12825 - DNA, 15 bp, Homo sapiens
ctccagtgagtaggg

SEQ ID NO: 12826 - DNA, 15 bp, Homo sapiens
tctccagtgagtagg

SEQ ID NO: 12827 - DNA, 15 bp, Homo sapiens
ctctccagtgagtag

SEQ ID NO: 12828 - DNA, 15 bp, Homo sapiens
actctccagtgagta

SEQ ID NO: 12829 - DNA, 15 bp, Homo sapiens
aactctccagtgagt

SEQ ID NO: 12830 - DNA, 15 bp, Homo sapiens
taactctccagtgag

SEQ ID NO: 12831 - DNA, 15 bp, Homo sapiens
ttaactctccagtga

SEQ ID NO: 12832 - DNA, 15 bp, Homo sapiens
gttaactctccagtg

SEQ ID NO: 12833 - DNA, 15 bp, Homo sapiens
tgttaactctccagt

SEQ ID NO: 12834 - DNA, 15 bp, Homo sapiens
ctgttaactctccag

SEQ ID NO: 12835 - DNA, 15 bp, Homo sapiens
cctgttaactctcca

SEQ ID NO: 12836 - DNA, 15 bp, Homo sapiens
acctgttaactctcc

SEQ ID NO: 12837 - DNA, 15 bp, Homo sapiens
cacctgttaactctc

SEQ ID NO: 12838 - DNA, 15 bp, Homo sapiens
tcacctgttaactct

SEQ ID NO: 12839 - DNA, 15 bp, Homo sapiens
atcacctgttaactc

SEQ ID NO: 12840 - DNA, 15 bp, Homo sapiens
catcacctgttaact

SEQ ID NO: 12841 - DNA, 15 bp, Homo sapiens
ccatcacctgttaac

SEQ ID NO: 12842 - DNA, 15 bp, Homo sapiens
accatcacctgttaa

SEQ ID NO: 12843 - DNA, 15 bp, Homo sapiens
aaccatcacctgtta

SEQ ID NO: 12844 - DNA, 15 bp, Homo sapiens
taaccatcacctgtt

SEQ ID NO: 12845 - DNA, 15 bp, Homo sapiens
ttaaccatcacctgt

SEQ ID NO: 12846 - DNA, 15 bp, Homo sapiens
cttaaccatcacctg

SEQ ID NO: 12847 - DNA, 15 bp, Homo sapiens
gcttaaccatcacct

SEQ ID NO: 12848 - DNA, 15 bp, Homo sapiens
agcttaaccatcacc

SEQ ID NO: 12849 - DNA, 15 bp, Homo sapiens
gagcttaaccatcac

SEQ ID NO: 12850 - DNA, 15 bp, Homo sapiens
agagcttaaccatca

SEQ ID NO: 12851 - DNA, 15 bp, Homo sapiens
cagagcttaaccatc

SEQ ID NO: 12852 - DNA, 15 bp, Homo sapiens
ccagagcttaaccat

SEQ ID NO: 12853 - DNA, 15 bp, Homo sapiens
cccagagcttaacca

SEQ ID NO: 12854 - DNA, 15 bp, Homo sapiens
acccagagcttaacc

SEQ ID NO: 12855 - DNA, 15 bp, Homo sapiens
aacccagagcttaac

SEQ ID NO: 12856 - DNA, 15 bp, Homo sapiens
gaacccagagcttaa

SEQ ID NO: 12857 - DNA, 15 bp, Homo sapiens
tgaacccagagctta

SEQ ID NO: 12858 - DNA, 15 bp, Homo sapiens
ttgaacccagagctt

SEQ ID NO: 12859 - DNA, 15 bp, Homo sapiens
tttgaacccagagct

SEQ ID NO: 12860 - DNA, 15 bp, Homo sapiens
atttgaacccagagc

SEQ ID NO: 12861 - DNA, 15 bp, Homo sapiens
gatttgaacccagag

SEQ ID NO: 12862 - DNA, 15 bp, Homo sapiens
agatttgaacccaga

SEQ ID NO: 12863 - DNA, 15 bp, Homo sapiens
gagatttgaacccag

SEQ ID NO: 12864 - DNA, 15 bp, Homo sapiens
tgagatttgaaccca

SEQ ID NO: 12865 - DNA, 15 bp, Homo sapiens
gtgagatttgaaccc

SEQ ID NO: 12866 - DNA, 15 bp, Homo sapiens
tgtgagatttgaacc

SEQ ID NO: 12867 - DNA, 15 bp, Homo sapiens
ttgtgagatttgaac

SEQ ID NO: 12868 - DNA, 15 bp, Homo sapiens
cttgtgagatttgaa

SEQ ID NO: 12869 - DNA, 15 bp, Homo sapiens
ccttgtgagatttga

SEQ ID NO: 12870 - DNA, 15 bp, Homo sapiens
gccttgtgagatttg

SEQ ID NO: 12871 - DNA, 15 bp, Homo sapiens
ggccttgtgagattt

SEQ ID NO: 12872 - DNA, 15 bp, Homo sapiens
tggccttgtgagatt

SEQ ID NO: 12873 - DNA, 15 bp, Homo sapiens
gtggccttgtgagat

SEQ ID NO: 12874 - DNA, 15 bp, Homo sapiens
tgtggccttgtgaga

SEQ ID NO: 12875 - DNA, 15 bp, Homo sapiens
gtgtggccttgtgag

SEQ ID NO: 12876 - DNA, 15 bp, Homo sapiens
tgtgtggccttgtga

SEQ ID NO: 12877 - DNA, 15 bp, Homo sapiens
gtgtgtggccttgtg

SEQ ID NO: 12878 - DNA, 15 bp, Homo sapiens
agtgtgtggccttgt

SEQ ID NO: 12879 - DNA, 15 bp, Homo sapiens
aagtgtgtggccttg

SEQ ID NO: 12880 - DNA, 15 bp, Homo sapiens
taagtgtgtggcctt

SEQ ID NO: 12881 - DNA, 15 bp, Homo sapiens
ctaagtgtgtggcct

SEQ ID NO: 12882 - DNA, 15 bp, Homo sapiens
gctaagtgtgtggcc

SEQ ID NO: 12883 - DNA, 15 bp, Homo sapiens
agctaagtgtgtggc

SEQ ID NO: 12884 - DNA, 15 bp, Homo sapiens
tagctaagtgtgtgg

SEQ ID NO: 12885 - DNA, 15 bp, Homo sapiens
atagctaagtgtgtg

SEQ ID NO: 12886 - DNA, 15 bp, Homo sapiens
catagctaagtgtgt

SEQ ID NO: 12887 - DNA, 15 bp, Homo sapiens
acatagctaagtgtg

SEQ ID NO: 12888 - DNA, 15 bp, Homo sapiens
cacatagctaagtgt

SEQ ID NO: 12889 - DNA, 15 bp, Homo sapiens
tcacatagctaagtg

SEQ ID NO: 12890 - DNA, 15 bp, Homo sapiens
gtcacatagctaagt

SEQ ID NO: 12891 - DNA, 15 bp, Homo sapiens
agtcacatagctaag

SEQ ID NO: 12892 - DNA, 15 bp, Homo sapiens
aagtcacatagctaa

SEQ ID NO: 12893 - DNA, 15 bp, Homo sapiens
gaagtcacatagcta

SEQ ID NO: 12894 - DNA, 15 bp, Homo sapiens
tgaagtcacatagct

SEQ ID NO: 12895 - DNA, 15 bp, Homo sapiens
ctgaagtcacatagc

SEQ ID NO: 12896 - DNA, 15 bp, Homo sapiens
cctgaagtcacatag

SEQ ID NO: 12897 - DNA, 15 bp, Homo sapiens
gcctgaagtcacata

SEQ ID NO: 12898 - DNA, 15 bp, Homo sapiens
tgcctgaagtcacat

SEQ ID NO: 12899 - DNA, 15 bp, Homo sapiens
ttgcctgaagtcaca

SEQ ID NO: 12900 - DNA, 15 bp, Homo sapiens
cttgcctgaagtcac

SEQ ID NO: 12901 - DNA, 15 bp, Homo sapiens
acttgcctgaagtca

SEQ ID NO: 12902 - DNA, 15 bp, Homo sapiens
aacttgcctgaagtc

SEQ ID NO: 12903 - DNA, 15 bp, Homo sapiens
taacttgcctgaagt

SEQ ID NO: 12904 - DNA, 15 bp, Homo sapiens
ttaacttgcctgaag

SEQ ID NO: 12905 - DNA, 15 bp, Homo sapiens
attaacttgcctgaa

SEQ ID NO: 12906 - DNA, 15 bp, Homo sapiens
aattaacttgcctga

SEQ ID NO: 12907 - DNA, 15 bp, Homo sapiens
taattaacttgcctg

SEQ ID NO: 12908 - DNA, 15 bp, Homo sapiens
ttaattaacttgcct

SEQ ID NO: 12909 - DNA, 15 bp, Homo sapiens
gttaattaacttgcc

SEQ ID NO: 12910 - DNA, 15 bp, Homo sapiens
ggttaattaacttgc

SEQ ID NO: 12911 - DNA, 15 bp, Homo sapiens
tggttaattaacttg

SEQ ID NO: 12912 - DNA, 15 bp, Homo sapiens
gtggttaattaactt

SEQ ID NO: 12913 - DNA, 15 bp, Homo sapiens
agtggttaattaact

SEQ ID NO: 12914 - DNA, 15 bp, Homo sapiens
gagtggttaattaac

SEQ ID NO: 12915 - DNA, 15 bp, Homo sapiens
agagtggttaattaa

SEQ ID NO: 12916 - DNA, 15 bp, Homo sapiens
cagagtggttaatta

SEQ ID NO: 12917 - DNA, 15 bp, Homo sapiens
acagagtggttaatt

SEQ ID NO: 12918 - DNA, 15 bp, Homo sapiens
cacagagtggttaat

SEQ ID NO: 12919 - DNA, 15 bp, Homo sapiens
gcacagagtggttaa

SEQ ID NO: 12920 - DNA, 15 bp, Homo sapiens
ggcacagagtggtta

SEQ ID NO: 12921 - DNA, 15 bp, Homo sapiens
aggcacagagtggtt

SEQ ID NO: 12922 - DNA, 15 bp, Homo sapiens
gaggcacagagtggt

SEQ ID NO: 12923 - DNA, 15 bp, Homo sapiens
agaggcacagagtgg

SEQ ID NO: 12924 - DNA, 15 bp, Homo sapiens
gagaggcacagagtg

SEQ ID NO: 12925 - DNA, 15 bp, Homo sapiens
cgagaggcacagagt

SEQ ID NO: 12926 - DNA, 15 bp, Homo sapiens
acgagaggcacagag

SEQ ID NO: 12927 - DNA, 15 bp, Homo sapiens
aacgagaggcacaga

SEQ ID NO: 12928 - DNA, 15 bp, Homo sapiens
aaacgagaggcacag

SEQ ID NO: 12929 - DNA, 15 bp, Homo sapiens
gaaacgagaggcaca

SEQ ID NO: 12930 - DNA, 15 bp, Homo sapiens
ggaaacgagaggcac

SEQ ID NO: 12931 - DNA, 15 bp, Homo sapiens
aggaaacgagaggca

SEQ ID NO: 12932 - DNA, 15 bp, Homo sapiens
gaggaaacgagaggc

SEQ ID NO: 12933 - DNA, 15 bp, Homo sapiens
tgaggaaacgagagg

SEQ ID NO: 12934 - DNA, 15 bp, Homo sapiens
atgaggaaacgagag

SEQ ID NO: 12935 - DNA, 15 bp, Homo sapiens
aatgaggaaacgaga

SEQ ID NO: 12936 - DNA, 15 bp, Homo sapiens
aaatgaggaaacgag

SEQ ID NO: 12937 - DNA, 15 bp, Homo sapiens
caaatgaggaaacga

SEQ ID NO: 12938 - DNA, 15 bp, Homo sapiens
acaaatgaggaaacg

SEQ ID NO: 12939 - DNA, 15 bp, Homo sapiens
tacaaatgaggaaac

SEQ ID NO: 12940 - DNA, 15 bp, Homo sapiens
ttacaaatgaggaaa

SEQ ID NO: 12941 - DNA, 15 bp, Homo sapiens
tttacaaatgaggaa

SEQ ID NO: 12942 - DNA, 15 bp, Homo sapiens
ttttacaaatgagga

SEQ ID NO: 12943 - DNA, 15 bp, Homo sapiens
attttacaaatgagg

SEQ ID NO: 12944 - DNA, 15 bp, Homo sapiens
cattttacaaatgag

SEQ ID NO: 12945 - DNA, 15 bp, Homo sapiens
ccattttacaaatga

SEQ ID NO: 12946 - DNA, 15 bp, Homo sapiens
tccattttacaaatg

SEQ ID NO: 12947 - DNA, 15 bp, Homo sapiens
ttccattttacaaat

SEQ ID NO: 12948 - DNA, 15 bp, Homo sapiens
tttccattttacaaa

SEQ ID NO: 12949 - DNA, 15 bp, Homo sapiens
atttccattttacaa

SEQ ID NO: 12950 - DNA, 15 bp, Homo sapiens
tatttccattttaca

SEQ ID NO: 12951 - DNA, 15 bp, Homo sapiens
ctatttccattttac

SEQ ID NO: 12952 - DNA, 15 bp, Homo sapiens
actatttccatttta

SEQ ID NO: 12953 - DNA, 15 bp, Homo sapiens
tactatttccatttt

SEQ ID NO: 12954 - DNA, 15 bp, Homo sapiens
ttactatttccattt

SEQ ID NO: 12955 - DNA, 15 bp, Homo sapiens
tttactatttccatt

SEQ ID NO: 12956 - DNA, 15 bp, Homo sapiens
ttttactatttccat

SEQ ID NO: 12957 - DNA, 15 bp, Homo sapiens
cttttactatttcca

SEQ ID NO: 12958 - DNA, 15 bp, Homo sapiens
acttttactatttcc

SEQ ID NO: 12959 - DNA, 15 bp, Homo sapiens
cacttttactatttc

SEQ ID NO: 12960 - DNA, 15 bp, Homo sapiens
gcacttttactattt

SEQ ID NO: 12961 - DNA, 15 bp, Homo sapiens
ggcacttttactatt

SEQ ID NO: 12962 - DNA, 15 bp, Homo sapiens
aggcacttttactat

SEQ ID NO: 12963 - DNA, 15 bp, Homo sapiens
taggcacttttacta

SEQ ID NO: 12964 - DNA, 15 bp, Homo sapiens
gtaggcacttttact

SEQ ID NO: 12965 - DNA, 15 bp, Homo sapiens
ggtaggcacttttac

SEQ ID NO: 12966 - DNA, 15 bp, Homo sapiens
tggtaggcactttta

SEQ ID NO: 12967 - DNA, 15 bp, Homo sapiens
ctggtaggcactttt

SEQ ID NO: 12968 - DNA, 15 bp, Homo sapiens
gctggtaggcacttt

SEQ ID NO: 12969 - DNA, 15 bp, Homo sapiens
tgctggtaggcactt

SEQ ID NO: 12970 - DNA, 15 bp, Homo sapiens
atgctggtaggcact

SEQ ID NO: 12971 - DNA, 15 bp, Homo sapiens
catgctggtaggcac

SEQ ID NO: 12972 - DNA, 15 bp, Homo sapiens
ccatgctggtaggca

SEQ ID NO: 12973 - DNA, 15 bp, Homo sapiens
gccatgctggtaggc

SEQ ID NO: 12974 - DNA, 15 bp, Homo sapiens
tgccatgctggtagg

SEQ ID NO: 12975 - DNA, 15 bp, Homo sapiens
ctgccatgctggtag

SEQ ID NO: 12976 - DNA, 15 bp, Homo sapiens
actgccatgctggta

SEQ ID NO: 12977 - DNA, 15 bp, Homo sapiens
aactgccatgctggt

SEQ ID NO: 12978 - DNA, 15 bp, Homo sapiens
caactgccatgctgg

SEQ ID NO: 12979 - DNA, 15 bp, Homo sapiens
tcaactgccatgctg

SEQ ID NO: 12980 - DNA, 15 bp, Homo sapiens
ttcaactgccatgct

SEQ ID NO: 12981 - DNA, 15 bp, Homo sapiens
cttcaactgccatgc

SEQ ID NO: 12982 - DNA, 15 bp, Homo sapiens
acttcaactgccatg

SEQ ID NO: 12983 - DNA, 15 bp, Homo sapiens
aacttcaactgccat

SEQ ID NO: 12984 - DNA, 15 bp, Homo sapiens
taacttcaactgcca

SEQ ID NO: 12985 - DNA, 15 bp, Homo sapiens
ttaacttcaactgcc

SEQ ID NO: 12986 - DNA, 15 bp, Homo sapiens
tttaacttcaactgc

SEQ ID NO: 12987 - DNA, 15 bp, Homo sapiens
ttttaacttcaactg

SEQ ID NO: 12988 - DNA, 15 bp, Homo sapiens
cttttaacttcaact

SEQ ID NO: 12989 - DNA, 15 bp, Homo sapiens
tcttttaacttcaac

SEQ ID NO: 12990 - DNA, 15 bp, Homo sapiens
ttcttttaacttcaa

SEQ ID NO: 12991 - DNA, 15 bp, Homo sapiens
tttcttttaacttca

SEQ ID NO: 12992 - DNA, 15 bp, Homo sapiens
atttcttttaacttc

SEQ ID NO: 12993 - DNA, 15 bp, Homo sapiens
tatttcttttaactt

SEQ ID NO: 12994 - DNA, 15 bp, Homo sapiens
ttatttcttttaact

SEQ ID NO: 12995 - DNA, 15 bp, Homo sapiens
attatttcttttaac

SEQ ID NO: 12996 - DNA, 15 bp, Homo sapiens
tattatttcttttaa

SEQ ID NO: 12997 - DNA, 15 bp, Homo sapiens
atattatttctttta

SEQ ID NO: 12998 - DNA, 15 bp, Homo sapiens
tatattatttctttt

SEQ ID NO: 12999 - DNA, 15 bp, Homo sapiens
atatattatttcttt

SEQ ID NO: 13000 - DNA, 15 bp, Homo sapiens
catatattatttctt

SEQ ID NO: 13001 - DNA, 15 bp, Homo sapiens
acatatattatttct

SEQ ID NO: 13002 - DNA, 15 bp, Homo sapiens
cacatatattatttc

SEQ ID NO: 13003 - DNA, 15 bp, Homo sapiens
tcacatatattattt

SEQ ID NO: 13004 - DNA, 15 bp, Homo sapiens
ttcacatatattatt

SEQ ID NO: 13005 - DNA, 15 bp, Homo sapiens
gttcacatatattat

SEQ ID NO: 13006 - DNA, 15 bp, Homo sapiens
tgttcacatatatta

SEQ ID NO: 13007 - DNA, 15 bp, Homo sapiens
gtgttcacatatatt

SEQ ID NO: 13008 - DNA, 15 bp, Homo sapiens
agtgttcacatatat

SEQ ID NO: 13009 - DNA, 15 bp, Homo sapiens
aagtgttcacatata

SEQ ID NO: 13010 - DNA, 15 bp, Homo sapiens
caagtgttcacatat

SEQ ID NO: 13011 - DNA, 15 bp, Homo sapiens
ccaagtgttcacata

SEQ ID NO: 13012 - DNA, 15 bp, Homo sapiens
tccaagtgttcacat

SEQ ID NO: 13013 - DNA, 15 bp, Homo sapiens
ttccaagtgttcaca

SEQ ID NO: 13014 - DNA, 15 bp, Homo sapiens
cttccaagtgttcac

SEQ ID NO: 13015 - DNA, 15 bp, Homo sapiens
ccttccaagtgttca

SEQ ID NO: 13016 - DNA, 15 bp, Homo sapiens
cccttccaagtgttc

SEQ ID NO: 13017 - DNA, 15 bp, Homo sapiens
gcccttccaagtgtt

SEQ ID NO: 13018 - DNA, 15 bp, Homo sapiens
cgcccttccaagtgt

SEQ ID NO: 13019 - DNA, 15 bp, Homo sapiens
gcgcccttccaagtg

SEQ ID NO: 13020 - DNA, 15 bp, Homo sapiens
ggcgcccttccaagt

SEQ ID NO: 13021 - DNA, 15 bp, Homo sapiens
aggcgcccttccaag

SEQ ID NO: 13022 - DNA, 15 bp, Homo sapiens
caggcgcccttccaa

SEQ ID NO: 13023 - DNA, 15 bp, Homo sapiens
tcaggcgcccttcca

SEQ ID NO: 13024 - DNA, 15 bp, Homo sapiens
gtcaggcgcccttcc

SEQ ID NO: 13025 - DNA, 15 bp, Homo sapiens
tgtcaggcgcccttc

SEQ ID NO: 13026 - DNA, 15 bp, Homo sapiens
gtgtcaggcgccctt

SEQ ID NO: 13027 - DNA, 15 bp, Homo sapiens
tgtgtcaggcgccct

SEQ ID NO: 13028 - DNA, 15 bp, Homo sapiens
atgtgtcaggcgccc

SEQ ID NO: 13029 - DNA, 15 bp, Homo sapiens
tatgtgtcaggcgcc

SEQ ID NO: 13030 - DNA, 15 bp, Homo sapiens
ctatgtgtcaggcgc

SEQ ID NO: 13031 - DNA, 15 bp, Homo sapiens
actatgtgtcaggcg

SEQ ID NO: 13032 - DNA, 15 bp, Homo sapiens
tactatgtgtcaggc

SEQ ID NO: 13033 - DNA, 15 bp, Homo sapiens
ttactatgtgtcagg

SEQ ID NO: 13034 - DNA, 15 bp, Homo sapiens
tttactatgtgtcag

SEQ ID NO: 13035 - DNA, 15 bp, Homo sapiens
gtttactatgtgtca

SEQ ID NO: 13036 - DNA, 15 bp, Homo sapiens
agtttactatgtgtc

SEQ ID NO: 13037 - DNA, 15 bp, Homo sapiens
gagtttactatgtgt

SEQ ID NO: 13038 - DNA, 15 bp, Homo sapiens
agagtttactatgtg

SEQ ID NO: 13039 - DNA, 15 bp, Homo sapiens
gagagtttactatgt

SEQ ID NO: 13040 - DNA, 15 bp, Homo sapiens
tgagagtttactatg

SEQ ID NO: 13041 - DNA, 15 bp, Homo sapiens
ctgagagtttactat

SEQ ID NO: 13042 - DNA, 15 bp, Homo sapiens
actgagagtttacta

SEQ ID NO: 13043 - DNA, 15 bp, Homo sapiens
tactgagagtttact

SEQ ID NO: 13044 - DNA, 15 bp, Homo sapiens
ttactgagagtttac

SEQ ID NO: 13045 - DNA, 15 bp, Homo sapiens
tttactgagagttta

SEQ ID NO: 13046 - DNA, 15 bp, Homo sapiens
atttactgagagttt

SEQ ID NO: 13047 - DNA, 15 bp, Homo sapiens
tatttactgagagtt

SEQ ID NO: 13048 - DNA, 15 bp, Homo sapiens
gtatttactgagagt

SEQ ID NO: 13049 - DNA, 15 bp, Homo sapiens
agtatttactgagag

SEQ ID NO: 13050 - DNA, 15 bp, Homo sapiens
tagtatttactgaga

SEQ ID NO: 13051 - DNA, 15 bp, Homo sapiens
ctagtatttactgag

SEQ ID NO: 13052 - DNA, 15 bp, Homo sapiens
gctagtatttactga

SEQ ID NO: 13053 - DNA, 15 bp, Homo sapiens
agctagtatttactg

SEQ ID NO: 13054 - DNA, 15 bp, Homo sapiens
cagctagtatttact

SEQ ID NO: 13055 - DNA, 15 bp, Homo sapiens
gcagctagtatttac

SEQ ID NO: 13056 - DNA, 15 bp, Homo sapiens
agcagctagtattta

SEQ ID NO: 13057 - DNA, 15 bp, Homo sapiens
aagcagctagtattt

SEQ ID NO: 13058 - DNA, 15 bp, Homo sapiens
aaagcagctagtatt

SEQ ID NO: 13059 - DNA, 15 bp, Homo sapiens
aaaagcagctagtat

SEQ ID NO: 13060 - DNA, 15 bp, Homo sapiens
taaaagcagctagta

SEQ ID NO: 13061 - DNA, 15 bp, Homo sapiens
ctaaaagcagctagt

SEQ ID NO: 13062 - DNA, 15 bp, Homo sapiens
actaaaagcagctag

SEQ ID NO: 13063 - DNA, 15 bp, Homo sapiens
cactaaaagcagcta

SEQ ID NO: 13064 - DNA, 15 bp, Homo sapiens
ccactaaaagcagct

SEQ ID NO: 13065 - DNA, 15 bp, Homo sapiens
gccactaaaagcagc

SEQ ID NO: 13066 - DNA, 15 bp, Homo sapiens
agccactaaaagcag

SEQ ID NO: 13067 - DNA, 15 bp, Homo sapiens
tagccactaaaagca

SEQ ID NO: 13068 - DNA, 15 bp, Homo sapiens
atagccactaaaagc

SEQ ID NO: 13069 - DNA, 15 bp, Homo sapiens
aatagccactaaaag

SEQ ID NO: 13070 - DNA, 15 bp, Homo sapiens
gaatagccactaaaa

SEQ ID NO: 13071 - DNA, 15 bp, Homo sapiens
agaatagccactaaa

SEQ ID NO: 13072 - DNA, 15 bp, Homo sapiens
aagaatagccactaa

SEQ ID NO: 13073 - DNA, 15 bp, Homo sapiens
taagaatagccacta

SEQ ID NO: 13074 - DNA, 15 bp, Homo sapiens
ttaagaatagccact

SEQ ID NO: 13075 - DNA, 15 bp, Homo sapiens
gttaagaatagccac

SEQ ID NO: 13076 - DNA, 15 bp, Homo sapiens
tgttaagaatagcca

SEQ ID NO: 13077 - DNA, 15 bp, Homo sapiens
gtgttaagaatagcc

SEQ ID NO: 13078 - DNA, 15 bp, Homo sapiens
tgtgttaagaatagc

SEQ ID NO: 13079 - DNA, 15 bp, Homo sapiens
gtgtgttaagaatag

SEQ ID NO: 13080 - DNA, 15 bp, Homo sapiens
ggtgtgttaagaata

SEQ ID NO: 13081 - DNA, 15 bp, Homo sapiens
gggtgtgttaagaat

SEQ ID NO: 13082 - DNA, 15 bp, Homo sapiens
agggtgtgttaagaa

SEQ ID NO: 13083 - DNA, 15 bp, Homo sapiens
gagggtgtgttaaga

SEQ ID NO: 13084 - DNA, 15 bp, Homo sapiens
agagggtgtgttaag

SEQ ID NO: 13085 - DNA, 15 bp, Homo sapiens
aagagggtgtgttaa

SEQ ID NO: 13086 - DNA, 15 bp, Homo sapiens
gaagagggtgtgtta

SEQ ID NO: 13087 - DNA, 15 bp, Homo sapiens
tgaagagggtgtgtt

SEQ ID NO: 13088 - DNA, 15 bp, Homo sapiens
ctgaagagggtgtgt

SEQ ID NO: 13089 - DNA, 15 bp, Homo sapiens
actgaagagggtgtg

SEQ ID NO: 13090 - DNA, 15 bp, Homo sapiens
cactgaagagggtgt

SEQ ID NO: 13091 - DNA, 15 bp, Homo sapiens
gcactgaagagggtg

SEQ ID NO: 13092 - DNA, 15 bp, Homo sapiens
agcactgaagagggt

SEQ ID NO: 13093 - DNA, 15 bp, Homo sapiens
gagcactgaagaggg

SEQ ID NO: 13094 - DNA, 15 bp, Homo sapiens
agagcactgaagagg

SEQ ID NO: 13095 - DNA, 15 bp, Homo sapiens
cagagcactgaagag

SEQ ID NO: 13096 - DNA, 15 bp, Homo sapiens
ccagagcactgaaga

SEQ ID NO: 13097 - DNA, 15 bp, Homo sapiens
accagagcactgaag

SEQ ID NO: 13098 - DNA, 15 bp, Homo sapiens
aaccagagcactgaa

SEQ ID NO: 13099 - DNA, 15 bp, Homo sapiens
aaaccagagcactga

SEQ ID NO: 13100 - DNA, 15 bp, Homo sapiens
gaaaccagagcactg

SEQ ID NO: 13101 - DNA, 15 bp, Homo sapiens
tgaaaccagagcact

SEQ ID NO: 13102 - DNA, 15 bp, Homo sapiens
gtgaaaccagagcac

SEQ ID NO: 13103 - DNA, 15 bp, Homo sapiens
agtgaaaccagagca

SEQ ID NO: 13104 - DNA, 15 bp, Homo sapiens
tagtgaaaccagagc

SEQ ID NO: 13105 - DNA, 15 bp, Homo sapiens
atagtgaaaccagag

SEQ ID NO: 13106 - DNA, 15 bp, Homo sapiens
catagtgaaaccaga

SEQ ID NO: 13107 - DNA, 15 bp, Homo sapiens
acatagtgaaaccag

SEQ ID NO: 13108 - DNA, 15 bp, Homo sapiens
aacatagtgaaacca

SEQ ID NO: 13109 - DNA, 15 bp, Homo sapiens
aaacatagtgaaacc

SEQ ID NO: 13110 - DNA, 15 bp, Homo sapiens
aaaacatagtgaaac

SEQ ID NO: 13111 - DNA, 15 bp, Homo sapiens
taaaacatagtgaaa

SEQ ID NO: 13112 - DNA, 15 bp, Homo sapiens
ataaaacatagtgaa

SEQ ID NO: 13113 - DNA, 15 bp, Homo sapiens
cataaaacatagtga

SEQ ID NO: 13114 - DNA, 15 bp, Homo sapiens
ccataaaacatagtg

SEQ ID NO: 13115 - DNA, 15 bp, Homo sapiens
cccataaaacatagt

SEQ ID NO: 13116 - DNA, 15 bp, Homo sapiens
acccataaaacatag

SEQ ID NO: 13117 - DNA, 15 bp, Homo sapiens
gacccataaaacata

SEQ ID NO: 13118 - DNA, 15 bp, Homo sapiens
ggacccataaaacat

SEQ ID NO: 13119 - DNA, 15 bp, Homo sapiens
gggacccataaaaca

SEQ ID NO: 13120 - DNA, 15 bp, Homo sapiens
agggacccataaaac

SEQ ID NO: 13121 - DNA, 15 bp, Homo sapiens
cagggacccataaaa

SEQ ID NO: 13122 - DNA, 15 bp, Homo sapiens
tcagggacccataaa

SEQ ID NO: 13123 - DNA, 15 bp, Homo sapiens
ctcagggacccataa

SEQ ID NO: 13124 - DNA, 15 bp, Homo sapiens
tctcagggacccata

SEQ ID NO: 13125 - DNA, 15 bp, Homo sapiens
atctcagggacccat

SEQ ID NO: 13126 - DNA, 15 bp, Homo sapiens
gatctcagggaccca

SEQ ID NO: 13127 - DNA, 15 bp, Homo sapiens
cgatctcagggaccc

SEQ ID NO: 13128 - DNA, 15 bp, Homo sapiens
tcgatctcagggacc

SEQ ID NO: 13129 - DNA, 15 bp, Homo sapiens
ttcgatctcagggac

SEQ ID NO: 13130 - DNA, 15 bp, Homo sapiens
tttcgatctcaggga

SEQ ID NO: 13131 - DNA, 15 bp, Homo sapiens
ctttcgatctcaggg

SEQ ID NO: 13132 - DNA, 15 bp, Homo sapiens
actttcgatctcagg

SEQ ID NO: 13133 - DNA, 15 bp, Homo sapiens
cactttcgatctcag

SEQ ID NO: 13134 - DNA, 15 bp, Homo sapiens
acactttcgatctca

SEQ ID NO: 13135 - DNA, 15 bp, Homo sapiens
gacactttcgatctc

SEQ ID NO: 13136 - DNA, 15 bp, Homo sapiens
ggacactttcgatct

SEQ ID NO: 13137 - DNA, 15 bp, Homo sapiens
tggacactttcgatc

SEQ ID NO: 13138 - DNA, 15 bp, Homo sapiens
gtggacactttcgat

SEQ ID NO: 13139 - DNA, 15 bp, Homo sapiens
tgtggacactttcga

SEQ ID NO: 13140 - DNA, 15 bp, Homo sapiens
gtgtggacactttcg

SEQ ID NO: 13141 - DNA, 15 bp, Homo sapiens
ggtgtggacactttc

SEQ ID NO: 13142 - DNA, 15 bp, Homo sapiens
cggtgtggacacttt

SEQ ID NO: 13143 - DNA, 15 bp, Homo sapiens
tcggtgtggacactt

SEQ ID NO: 13144 - DNA, 15 bp, Homo sapiens
gtcggtgtggacact

SEQ ID NO: 13145 - DNA, 15 bp, Homo sapiens
agtcggtgtggacac

SEQ ID NO: 13146 - DNA, 15 bp, Homo sapiens
gagtcggtgtggaca

SEQ ID NO: 13147 - DNA, 15 bp, Homo sapiens
tgagtcggtgtggac

SEQ ID NO: 13148 - DNA, 15 bp, Homo sapiens
atgagtcggtgtgga

SEQ ID NO: 13149 - DNA, 15 bp, Homo sapiens
catgagtcggtgtgg

SEQ ID NO: 13150 - DNA, 15 bp, Homo sapiens
ccatgagtcggtgtg

SEQ ID NO: 13151 - DNA, 15 bp, Homo sapiens
accatgagtcggtgt

SEQ ID NO: 13152 - DNA, 15 bp, Homo sapiens
gaccatgagtcggtg

SEQ ID NO: 13153 - DNA, 15 bp, Homo sapiens
tgaccatgagtcggt

SEQ ID NO: 13154 - DNA, 15 bp, Homo sapiens
ctgaccatgagtcgg

SEQ ID NO: 13155 - DNA, 15 bp, Homo sapiens
gctgaccatgagtcg

SEQ ID NO: 13156 - DNA, 15 bp, Homo sapiens
agctgaccatgagtc

SEQ ID NO: 13157 - DNA, 15 bp, Homo sapiens
cagctgaccatgagt

SEQ ID NO: 13158 - DNA, 15 bp, Homo sapiens
acagctgaccatgag

SEQ ID NO: 13159 - DNA, 15 bp, Homo sapiens
tacagctgaccatga

SEQ ID NO: 13160 - DNA, 15 bp, Homo sapiens
ttacagctgaccatg

SEQ ID NO: 13161 - DNA, 15 bp, Homo sapiens
gttacagctgaccat

SEQ ID NO: 13162 - DNA, 15 bp, Homo sapiens
ggttacagctgacca

SEQ ID NO: 13163 - DNA, 15 bp, Homo sapiens
aggttacagctgacc

SEQ ID NO: 13164 - DNA, 15 bp, Homo sapiens
caggttacagctgac

SEQ ID NO: 13165 - DNA, 15 bp, Homo sapiens
acaggttacagctga

SEQ ID NO: 13166 - DNA, 15 bp, Homo sapiens
cacaggttacagctg

SEQ ID NO: 13167 - DNA, 15 bp, Homo sapiens
gcacaggttacagct

SEQ ID NO: 13168 - DNA, 15 bp, Homo sapiens
ggcacaggttacagc

SEQ ID NO: 13169 - DNA, 15 bp, Homo sapiens
aggcacaggttacag

SEQ ID NO: 13170 - DNA, 15 bp, Homo sapiens
gaggcacaggttaca

SEQ ID NO: 13171 - DNA, 15 bp, Homo sapiens
cgaggcacaggttac

SEQ ID NO: 13172 - DNA, 15 bp, Homo sapiens
acgaggcacaggtta

SEQ ID NO: 13173 - DNA, 15 bp, Homo sapiens
cacgaggcacaggtt

SEQ ID NO: 13174 - DNA, 15 bp, Homo sapiens
acacgaggcacaggt

SEQ ID NO: 13175 - DNA, 15 bp, Homo sapiens
cacacgaggcacagg

SEQ ID NO: 13176 - DNA, 15 bp, Homo sapiens
ccacacgaggcacag

SEQ ID NO: 13177 - DNA, 15 bp, Homo sapiens
cccacacgaggcaca

SEQ ID NO: 13178 - DNA, 15 bp, Homo sapiens
ccccacacgaggcac

SEQ ID NO: 13179 - DNA, 15 bp, Homo sapiens
tccccacacgaggca

SEQ ID NO: 13180 - DNA, 15 bp, Homo sapiens
gtccccacacgaggc

SEQ ID NO: 13181 - DNA, 15 bp, Homo sapiens
ggtccccacacgagg

SEQ ID NO: 13182 - DNA, 15 bp, Homo sapiens
tggtccccacacgag

SEQ ID NO: 13183 - DNA, 15 bp, Homo sapiens
ctggtccccacacga

SEQ ID NO: 13184 - DNA, 15 bp, Homo sapiens
cctggtccccacacg

SEQ ID NO: 13185 - DNA, 15 bp, Homo sapiens
gcctggtccccacac

SEQ ID NO: 13186 - DNA, 15 bp, Homo sapiens
agcctggtccccaca

SEQ ID NO: 13187 - DNA, 15 bp, Homo sapiens
cagcctggtccccac

SEQ ID NO: 13188 - DNA, 15 bp, Homo sapiens
gcagcctggtcccca

SEQ ID NO: 13189 - DNA, 15 bp, Homo sapiens
ggcagcctggtcccc

SEQ ID NO: 13190 - DNA, 15 bp, Homo sapiens
tggcagcctggtccc

SEQ ID NO: 13191 - DNA, 15 bp, Homo sapiens
atggcagcctggtcc

SEQ ID NO: 13192 - DNA, 15 bp, Homo sapiens
catggcagcctggtc

SEQ ID NO: 13193 - DNA, 15 bp, Homo sapiens
acatggcagcctggt

SEQ ID NO: 13194 - DNA, 15 bp, Homo sapiens
cacatggcagcctgg

SEQ ID NO: 13195 - DNA, 15 bp, Homo sapiens
acacatggcagcctg

SEQ ID NO: 13196 - DNA, 15 bp, Homo sapiens
tacacatggcagcct

SEQ ID NO: 13197 - DNA, 15 bp, Homo sapiens
ctacacatggcagcc

SEQ ID NO: 13198 - DNA, 15 bp, Homo sapiens
actacacatggcagc

SEQ ID NO: 13199 - DNA, 15 bp, Homo sapiens
gactacacatggcag

SEQ ID NO: 13200 - DNA, 15 bp, Homo sapiens
agactacacatggca

SEQ ID NO: 13201 - DNA, 15 bp, Homo sapiens
cagactacacatggc

SEQ ID NO: 13202 - DNA, 15 bp, Homo sapiens
ccagactacacatgg

SEQ ID NO: 13203 - DNA, 15 bp, Homo sapiens
tccagactacacatg

SEQ ID NO: 13204 - DNA, 15 bp, Homo sapiens
gtccagactacacat

SEQ ID NO: 13205 - DNA, 15 bp, Homo sapiens
tgtccagactacaca

SEQ ID NO: 13206 - DNA, 15 bp, Homo sapiens
ctgtccagactacac

SEQ ID NO: 13207 - DNA, 15 bp, Homo sapiens
actgtccagactaca

SEQ ID NO: 13208 - DNA, 15 bp, Homo sapiens
cactgtccagactac

SEQ ID NO: 13209 - DNA, 15 bp, Homo sapiens
acactgtccagacta

SEQ ID NO: 13210 - DNA, 15 bp, Homo sapiens
tacactgtccagact

SEQ ID NO: 13211 - DNA, 15 bp, Homo sapiens
ctacactgtccagac

SEQ ID NO: 13212 - DNA, 15 bp, Homo sapiens
cctacactgtccaga

SEQ ID NO: 13213 - DNA, 15 bp, Homo sapiens
tcctacactgtccag

SEQ ID NO: 13214 - DNA, 15 bp, Homo sapiens
ctcctacactgtcca

SEQ ID NO: 13215 - DNA, 15 bp, Homo sapiens
cctcctacactgtcc

SEQ ID NO: 13216 - DNA, 15 bp, Homo sapiens
acctcctacactgtc

SEQ ID NO: 13217 - DNA, 15 bp, Homo sapiens
cacctcctacactgt

SEQ ID NO: 13218 - DNA, 15 bp, Homo sapiens
ccacctcctacactg

SEQ ID NO: 13219 - DNA, 15 bp, Homo sapiens
gccacctcctacact

SEQ ID NO: 13220 - DNA, 15 bp, Homo sapiens
tgccacctcctacac

SEQ ID NO: 13221 - DNA, 15 bp, Homo sapiens
ctgccacctcctaca

SEQ ID NO: 13222 - DNA, 15 bp, Homo sapiens
tctgccacctcctac

SEQ ID NO: 13223 - DNA, 15 bp, Homo sapiens
ctctgccacctccta

SEQ ID NO: 13224 - DNA, 15 bp, Homo sapiens
gctctgccacctcct

SEQ ID NO: 13225 - DNA, 15 bp, Homo sapiens
agctctgccacctcc

SEQ ID NO: 13226 - DNA, 15 bp, Homo sapiens
gagctctgccacctc

SEQ ID NO: 13227 - DNA, 15 bp, Homo sapiens
tgagctctgccacct

SEQ ID NO: 13228 - DNA, 15 bp, Homo sapiens
ctgagctctgccacc

SEQ ID NO: 13229 - DNA, 15 bp, Homo sapiens
cctgagctctgccac

SEQ ID NO: 13230 - DNA, 15 bp, Homo sapiens
gcctgagctctgcca

SEQ ID NO: 13231 - DNA, 15 bp, Homo sapiens
ggcctgagctctgcc

SEQ ID NO: 13232 - DNA, 15 bp, Homo sapiens
aggcctgagctctgc

SEQ ID NO: 13233 - DNA, 15 bp, Homo sapiens
caggcctgagctctg

SEQ ID NO: 13234 - DNA, 15 bp, Homo sapiens
acaggcctgagctct

SEQ ID NO: 13235 - DNA, 15 bp, Homo sapiens
aacaggcctgagctc

SEQ ID NO: 13236 - DNA, 15 bp, Homo sapiens
gaacaggcctgagct

SEQ ID NO: 13237 - DNA, 15 bp, Homo sapiens
agaacaggcctgagc

SEQ ID NO: 13238 - DNA, 15 bp, Homo sapiens
cagaacaggcctgag

SEQ ID NO: 13239 - DNA, 15 bp, Homo sapiens
gcagaacaggcctga

SEQ ID NO: 13240 - DNA, 15 bp, Homo sapiens
ggcagaacaggcctg

SEQ ID NO: 13241 - DNA, 15 bp, Homo sapiens
gggcagaacaggcct

SEQ ID NO: 13242 - DNA, 15 bp, Homo sapiens
agggcagaacaggcc

SEQ ID NO: 13243 - DNA, 15 bp, Homo sapiens
gagggcagaacaggc

SEQ ID NO: 13244 - DNA, 15 bp, Homo sapiens
ggagggcagaacagg

SEQ ID NO: 13245 - DNA, 15 bp, Homo sapiens
tggagggcagaacag

SEQ ID NO: 13246 - DNA, 15 bp, Homo sapiens
ctggagggcagaaca

SEQ ID NO: 13247 - DNA, 15 bp, Homo sapiens
gctggagggcagaac

SEQ ID NO: 13248 - DNA, 15 bp, Homo sapiens
ggctggagggcagaa

SEQ ID NO: 13249 - DNA, 15 bp, Homo sapiens
gggctggagggcaga

SEQ ID NO: 13250 - DNA, 15 bp, Homo sapiens
tgggctggagggcag

SEQ ID NO: 13251 - DNA, 15 bp, Homo sapiens
ctgggctggagggca

SEQ ID NO: 13252 - DNA, 15 bp, Homo sapiens
tctgggctggagggc

SEQ ID NO: 13253 - DNA, 15 bp, Homo sapiens
ctctgggctggaggg

SEQ ID NO: 13254 - DNA, 15 bp, Homo sapiens
tctctgggctggagg

SEQ ID NO: 13255 - DNA, 15 bp, Homo sapiens
ctctctgggctggag

SEQ ID NO: 13256 - DNA, 15 bp, Homo sapiens
gctctctgggctgga

SEQ ID NO: 13257 - DNA, 15 bp, Homo sapiens
ggctctctgggctgg

SEQ ID NO: 13258 - DNA, 15 bp, Homo sapiens
tggctctctgggctg

SEQ ID NO: 13259 - DNA, 15 bp, Homo sapiens
gtggctctctgggct

SEQ ID NO: 13260 - DNA, 15 bp, Homo sapiens
cgtggctctctgggc

SEQ ID NO: 13261 - DNA, 15 bp, Homo sapiens
acgtggctctctggg

SEQ ID NO: 13262 - DNA, 15 bp, Homo sapiens
gacgtggctctctgg

SEQ ID NO: 13263 - DNA, 15 bp, Homo sapiens
cgacgtggctctctg

SEQ ID NO: 13264 - DNA, 15 bp, Homo sapiens
acgacgtggctctct

SEQ ID NO: 13265 - DNA, 15 bp, Homo sapiens
aacgacgtggctctc

SEQ ID NO: 13266 - DNA, 15 bp, Homo sapiens
taacgacgtggctct

SEQ ID NO: 13267 - DNA, 15 bp, Homo sapiens
ctaacgacgtggctc

SEQ ID NO: 13268 - DNA, 15 bp, Homo sapiens
tctaacgacgtggct

SEQ ID NO: 13269 - DNA, 15 bp, Homo sapiens
atctaacgacgtggc

SEQ ID NO: 13270 - DNA, 15 bp, Homo sapiens
catctaacgacgtgg

SEQ ID NO: 13271 - DNA, 15 bp, Homo sapiens
acatctaacgacgtg

SEQ ID NO: 13272 - DNA, 15 bp, Homo sapiens
gacatctaacgacgt

SEQ ID NO: 13273 - DNA, 15 bp, Homo sapiens
tgacatctaacgacg

SEQ ID NO: 13274 - DNA, 15 bp, Homo sapiens
atgacatctaacgac

SEQ ID NO: 13275 - DNA, 15 bp, Homo sapiens
catgacatctaacga

SEQ ID NO: 13276 - DNA, 15 bp, Homo sapiens
ccatgacatctaacg

SEQ ID NO: 13277 - DNA, 15 bp, Homo sapiens
cccatgacatctaac

SEQ ID NO: 13278 - DNA, 15 bp, Homo sapiens
tcccatgacatctaa

SEQ ID NO: 13279 - DNA, 15 bp, Homo sapiens
ctcccatgacatcta

SEQ ID NO: 13280 - DNA, 15 bp, Homo sapiens
tctcccatgacatct

SEQ ID NO: 13281 - DNA, 15 bp, Homo sapiens
gtctcccatgacatc

SEQ ID NO: 13282 - DNA, 15 bp, Homo sapiens
agtctcccatgacat

SEQ ID NO: 13283 - DNA, 15 bp, Homo sapiens
cagtctcccatgaca

SEQ ID NO: 13284 - DNA, 15 bp, Homo sapiens
acagtctcccatgac

SEQ ID NO: 13285 - DNA, 15 bp, Homo sapiens
cacagtctcccatga

SEQ ID NO: 13286 - DNA, 15 bp, Homo sapiens
ccacagtctcccatg

SEQ ID NO: 13287 - DNA, 15 bp, Homo sapiens
accacagtctcccat

SEQ ID NO: 13288 - DNA, 15 bp, Homo sapiens
caccacagtctccca

SEQ ID NO: 13289 - DNA, 15 bp, Homo sapiens
gcaccacagtctccc

SEQ ID NO: 13290 - DNA, 15 bp, Homo sapiens
ggcaccacagtctcc

SEQ ID NO: 13291 - DNA, 15 bp, Homo sapiens
gggcaccacagtctc

SEQ ID NO: 13292 - DNA, 15 bp, Homo sapiens
ggggcaccacagtct

SEQ ID NO: 13293 - DNA, 15 bp, Homo sapiens
cggggcaccacagtc

SEQ ID NO: 13294 - DNA, 15 bp, Homo sapiens
ccggggcaccacagt

SEQ ID NO: 13295 - DNA, 15 bp, Homo sapiens
cccggggcaccacag

SEQ ID NO: 13296 - DNA, 15 bp, Homo sapiens
tcccggggcaccaca

SEQ ID NO: 13297 - DNA, 15 bp, Homo sapiens
ttcccggggcaccac

SEQ ID NO: 13298 - DNA, 15 bp, Homo sapiens
attcccggggcacca

SEQ ID NO: 13299 - DNA, 15 bp, Homo sapiens
gattcccggggcacc

SEQ ID NO: 13300 - DNA, 15 bp, Homo sapiens
agattcccggggcac

SEQ ID NO: 13301 - DNA, 15 bp, Homo sapiens
gagattcccggggca

SEQ ID NO: 13302 - DNA, 15 bp, Homo sapiens
tgagattcccggggc

SEQ ID NO: 13303 - DNA, 15 bp, Homo sapiens
gtgagattcccgggg

SEQ ID NO: 13304 - DNA, 15 bp, Homo sapiens
cgtgagattcccggg

SEQ ID NO: 13305 - DNA, 15 bp, Homo sapiens
tcgtgagattcccgg

SEQ ID NO: 13306 - DNA, 15 bp, Homo sapiens
ttcgtgagattcccg

SEQ ID NO: 13307 - DNA, 15 bp, Homo sapiens
attcgtgagattccc

SEQ ID NO: 13308 - DNA, 15 bp, Homo sapiens
aattcgtgagattcc

SEQ ID NO: 13309 - DNA, 15 bp, Homo sapiens
aaattcgtgagattc

SEQ ID NO: 13310 - DNA, 15 bp, Homo sapiens
caaattcgtgagatt

SEQ ID NO: 13311 - DNA, 15 bp, Homo sapiens
gcaaattcgtgagat

SEQ ID NO: 13312 - DNA, 15 bp, Homo sapiens
ggcaaattcgtgaga

SEQ ID NO: 13313 - DNA, 15 bp, Homo sapiens
gggcaaattcgtgag

SEQ ID NO: 13314 - DNA, 15 bp, Homo sapiens
tgggcaaattcgtga

SEQ ID NO: 13315 - DNA, 15 bp, Homo sapiens
gtgggcaaattcgtg

SEQ ID NO: 13316 - DNA, 15 bp, Homo sapiens
cgtgggcaaattcgt

SEQ ID NO: 13317 - DNA, 15 bp, Homo sapiens
ccgtgggcaaattcg

SEQ ID NO: 13318 - DNA, 15 bp, Homo sapiens
accgtgggcaaattc

SEQ ID NO: 13319 - DNA, 15 bp, Homo sapiens
taccgtgggcaaatt

SEQ ID NO: 13320 - DNA, 15 bp, Homo sapiens
gtaccgtgggcaaat

SEQ ID NO: 13321 - DNA, 15 bp, Homo sapiens
agtaccgtgggcaaa

SEQ ID NO: 13322 - DNA, 15 bp, Homo sapiens
gagtaccgtgggcaa

SEQ ID NO: 13323 - DNA, 15 bp, Homo sapiens
tgagtaccgtgggca

SEQ ID NO: 13324 - DNA, 15 bp, Homo sapiens
ctgagtaccgtgggc

SEQ ID NO: 13325 - DNA, 15 bp, Homo sapiens
actgagtaccgtggg

SEQ ID NO: 13326 - DNA, 15 bp, Homo sapiens
cactgagtaccgtgg

SEQ ID NO: 13327 - DNA, 15 bp, Homo sapiens
acactgagtaccgtg

SEQ ID NO: 13328 - DNA, 15 bp, Homo sapiens
gacactgagtaccgt

SEQ ID NO: 13329 - DNA, 15 bp, Homo sapiens
agacactgagtaccg

SEQ ID NO: 13330 - DNA, 15 bp, Homo sapiens
cagacactgagtacc

SEQ ID NO: 13331 - DNA, 15 bp, Homo sapiens
acagacactgagtac

SEQ ID NO: 13332 - DNA, 15 bp, Homo sapiens
gacagacactgagta

SEQ ID NO: 13333 - DNA, 15 bp, Homo sapiens
ggacagacactgagt

SEQ ID NO: 13334 - DNA, 15 bp, Homo sapiens
tggacagacactgag

SEQ ID NO: 13335 - DNA, 15 bp, Homo sapiens
ttggacagacactga

SEQ ID NO: 13336 - DNA, 15 bp, Homo sapiens
attggacagacactg

SEQ ID NO: 13337 - DNA, 15 bp, Homo sapiens
cattggacagacact

SEQ ID NO: 13338 - DNA, 15 bp, Homo sapiens
gcattggacagacac

SEQ ID NO: 13339 - DNA, 15 bp, Homo sapiens
agcattggacagaca

SEQ ID NO: 13340 - DNA, 15 bp, Homo sapiens
tagcattggacagac

SEQ ID NO: 13341 - DNA, 15 bp, Homo sapiens
atagcattggacaga

SEQ ID NO: 13342 - DNA, 15 bp, Homo sapiens
catagcattggacag

SEQ ID NO: 13343 - DNA, 15 bp, Homo sapiens
ccatagcattggaca

SEQ ID NO: 13344 - DNA, 15 bp, Homo sapiens
cccatagcattggac

SEQ ID NO: 13345 - DNA, 15 bp, Homo sapiens
tcccatagcattgga

SEQ ID NO: 13346 - DNA, 15 bp, Homo sapiens
ctcccatagcattgg

SEQ ID NO: 13347 - DNA, 15 bp, Homo sapiens
actcccatagcattg

SEQ ID NO: 13348 - DNA, 15 bp, Homo sapiens
gactcccatagcatt

SEQ ID NO: 13349 - DNA, 15 bp, Homo sapiens
ggactcccatagcat

SEQ ID NO: 13350 - DNA, 15 bp, Homo sapiens
tggactcccatagca

SEQ ID NO: 13351 - DNA, 15 bp, Homo sapiens
ctggactcccatagc

SEQ ID NO: 13352 - DNA, 15 bp, Homo sapiens
cctggactcccatag

SEQ ID NO: 13353 - DNA, 15 bp, Homo sapiens
tcctggactcccata

SEQ ID NO: 13354 - DNA, 15 bp, Homo sapiens
gtcctggactcccat

SEQ ID NO: 13355 - DNA, 15 bp, Homo sapiens
agtcctggactccca

SEQ ID NO: 13356 - DNA, 15 bp, Homo sapiens
gagtcctggactccc

SEQ ID NO: 13357 - DNA, 15 bp, Homo sapiens
agagtcctggactcc

SEQ ID NO: 13358 - DNA, 15 bp, Homo sapiens
tagagtcctggactc

SEQ ID NO: 13359 - DNA, 15 bp, Homo sapiens
ctagagtcctggact

SEQ ID NO: 13360 - DNA, 15 bp, Homo sapiens
cctagagtcctggac

SEQ ID NO: 13361 - DNA, 15 bp, Homo sapiens
tcctagagtcctgga

SEQ ID NO: 13362 - DNA, 15 bp, Homo sapiens
ctcctagagtcctgg

SEQ ID NO: 13363 - DNA, 15 bp, Homo sapiens
gctcctagagtcctg

SEQ ID NO: 13364 - DNA, 15 bp, Homo sapiens
ggctcctagagtcct

SEQ ID NO: 13365 - DNA, 15 bp, Homo sapiens
tggctcctagagtcc

SEQ ID NO: 13366 - DNA, 15 bp, Homo sapiens
ctggctcctagagtc

SEQ ID NO: 13367 - DNA, 15 bp, Homo sapiens
actggctcctagagt

SEQ ID NO: 13368 - DNA, 15 bp, Homo sapiens
aactggctcctagag

SEQ ID NO: 13369 - DNA, 15 bp, Homo sapiens
taactggctcctaga

SEQ ID NO: 13370 - DNA, 15 bp, Homo sapiens
ttaactggctcctag

SEQ ID NO: 13371 - DNA, 15 bp, Homo sapiens
cttaactggctccta

SEQ ID NO: 13372 - DNA, 15 bp, Homo sapiens
ccttaactggctcct

SEQ ID NO: 13373 - DNA, 15 bp, Homo sapiens
accttaactggctcc

SEQ ID NO: 13374 - DNA, 15 bp, Homo sapiens
caccttaactggctc

SEQ ID NO: 13375 - DNA, 15 bp, Homo sapiens
gcaccttaactggct

SEQ ID NO: 13376 - DNA, 15 bp, Homo sapiens
agcaccttaactggc

SEQ ID NO: 13377 - DNA, 15 bp, Homo sapiens
cagcaccttaactgg

SEQ ID NO: 13378 - DNA, 15 bp, Homo sapiens
ccagcaccttaactg

SEQ ID NO: 13379 - DNA, 15 bp, Homo sapiens
cccagcaccttaact

SEQ ID NO: 13380 - DNA, 15 bp, Homo sapiens
acccagcaccttaac

SEQ ID NO: 13381 - DNA, 15 bp, Homo sapiens
cacccagcaccttaa

SEQ ID NO: 13382 - DNA, 15 bp, Homo sapiens
ccacccagcacctta

SEQ ID NO: 13383 - DNA, 15 bp, Homo sapiens
gccacccagcacctt

SEQ ID NO: 13384 - DNA, 15 bp, Homo sapiens
ggccacccagcacct

SEQ ID NO: 13385 - DNA, 15 bp, Homo sapiens
tggccacccagcacc

SEQ ID NO: 13386 - DNA, 15 bp, Homo sapiens
gtggccacccagcac

SEQ ID NO: 13387 - DNA, 15 bp, Homo sapiens
tgtggccacccagca

SEQ ID NO: 13388 - DNA, 15 bp, Homo sapiens
ctgtggccacccagc

SEQ ID NO: 13389 - DNA, 15 bp, Homo sapiens
cctgtggccacccag

SEQ ID NO: 13390 - DNA, 15 bp, Homo sapiens
acctgtggccaccca

SEQ ID NO: 13391 - DNA, 15 bp, Homo sapiens
gacctgtggccaccc

SEQ ID NO: 13392 - DNA, 15 bp, Homo sapiens
ggacctgtggccacc

SEQ ID NO: 13393 - DNA, 15 bp, Homo sapiens
gggacctgtggccac

SEQ ID NO: 13394 - DNA, 15 bp, Homo sapiens
agggacctgtggcca

SEQ ID NO: 13395 - DNA, 15 bp, Homo sapiens
cagggacctgtggcc

SEQ ID NO: 13396 - DNA, 15 bp, Homo sapiens
ccagggacctgtggc

SEQ ID NO: 13397 - DNA, 15 bp, Homo sapiens
gccagggacctgtgg

SEQ ID NO: 13398 - DNA, 15 bp, Homo sapiens
ggccagggacctgtg

SEQ ID NO: 13399 - DNA, 15 bp, Homo sapiens
tggccagggacctgt

SEQ ID NO: 13400 - DNA, 15 bp, Homo sapiens
ttggccagggacctg

SEQ ID NO: 13401 - DNA, 15 bp, Homo sapiens
cttggccagggacct

SEQ ID NO: 13402 - DNA, 15 bp, Homo sapiens
ccttggccagggacc

SEQ ID NO: 13403 - DNA, 15 bp, Homo sapiens
accttggccagggac

SEQ ID NO: 13404 - DNA, 15 bp, Homo sapiens
gaccttggccaggga

SEQ ID NO: 13405 - DNA, 15 bp, Homo sapiens
ggaccttggccaggg

SEQ ID NO: 13406 - DNA, 15 bp, Homo sapiens
tggaccttggccagg

SEQ ID NO: 13407 - DNA, 15 bp, Homo sapiens
ctggaccttggccag

SEQ ID NO: 13408 - DNA, 15 bp, Homo sapiens
cctggaccttggcca

SEQ ID NO: 13409 - DNA, 15 bp, Homo sapiens
gcctggaccttggcc

SEQ ID NO: 13410 - DNA, 15 bp, Homo sapiens
ggcctggaccttggc

SEQ ID NO: 13411 - DNA, 15 bp, Homo sapiens
aggcctggaccttgg

SEQ ID NO: 13412 - DNA, 15 bp, Homo sapiens
gaggcctggaccttg

SEQ ID NO: 13413 - DNA, 15 bp, Homo sapiens
agaggcctggacctt

SEQ ID NO: 13414 - DNA, 15 bp, Homo sapiens
gagaggcctggacct

SEQ ID NO: 13415 - DNA, 15 bp, Homo sapiens
ggagaggcctggacc

SEQ ID NO: 13416 - DNA, 15 bp, Homo sapiens
gggagaggcctggac

SEQ ID NO: 13417 - DNA, 15 bp, Homo sapiens
ggggagaggcctgga

SEQ ID NO: 13418 - DNA, 15 bp, Homo sapiens
aggggagaggcctgg

SEQ ID NO: 13419 - DNA, 15 bp, Homo sapiens
caggggagaggcctg

SEQ ID NO: 13420 - DNA, 15 bp, Homo sapiens
gcaggggagaggcct

SEQ ID NO: 13421 - DNA, 15 bp, Homo sapiens
ggcaggggagaggcc

SEQ ID NO: 13422 - DNA, 15 bp, Homo sapiens
tggcaggggagaggc

SEQ ID NO: 13423 - DNA, 15 bp, Homo sapiens
gtggcaggggagagg

SEQ ID NO: 13424 - DNA, 15 bp, Homo sapiens
ggtggcaggggagag

SEQ ID NO: 13425 - DNA, 15 bp, Homo sapiens
aggtggcaggggaga

SEQ ID NO: 13426 - DNA, 15 bp, Homo sapiens
caggtggcaggggag

SEQ ID NO: 13427 - DNA, 15 bp, Homo sapiens
tcaggtggcagggga

SEQ ID NO: 13428 - DNA, 15 bp, Homo sapiens
atcaggtggcagggg

SEQ ID NO: 13429 - DNA, 15 bp, Homo sapiens
gatcaggtggcaggg

SEQ ID NO: 13430 - DNA, 15 bp, Homo sapiens
ggatcaggtggcagg

SEQ ID NO: 13431 - DNA, 15 bp, Homo sapiens
aggatcaggtggcag

SEQ ID NO: 13432 - DNA, 15 bp, Homo sapiens
gaggatcaggtggca

SEQ ID NO: 13433 - DNA, 15 bp, Homo sapiens
cgaggatcaggtggc

SEQ ID NO: 13434 - DNA, 15 bp, Homo sapiens
tcgaggatcaggtgg

SEQ ID NO: 13435 - DNA, 15 bp, Homo sapiens
ctcgaggatcaggtg

SEQ ID NO: 13436 - DNA, 15 bp, Homo sapiens
tctcgaggatcaggt

SEQ ID NO: 13437 - DNA, 15 bp, Homo sapiens
ctctcgaggatcagg

SEQ ID NO: 13438 - DNA, 15 bp, Homo sapiens
cctctcgaggatcag

SEQ ID NO: 13439 - DNA, 15 bp, Homo sapiens
gcctctcgaggatca

SEQ ID NO: 13440 - DNA, 15 bp, Homo sapiens
ggcctctcgaggatc

SEQ ID NO: 13441 - DNA, 15 bp, Homo sapiens
tggcctctcgaggat

SEQ ID NO: 13442 - DNA, 15 bp, Homo sapiens
atggcctctcgagga

SEQ ID NO: 13443 - DNA, 15 bp, Homo sapiens
gatggcctctcgagg

SEQ ID NO: 13444 - DNA, 15 bp, Homo sapiens
tgatggcctctcgag

SEQ ID NO: 13445 - DNA, 15 bp, Homo sapiens
gtgatggcctctcga

SEQ ID NO: 13446 - DNA, 15 bp, Homo sapiens
cgtgatggcctctcg

SEQ ID NO: 13447 - DNA, 15 bp, Homo sapiens
cagtgctaatgacag

SEQ ID NO: 13448 - DNA, 15 bp, Homo sapiens
acagtgctaatgaca

SEQ ID NO: 13449 - DNA, 15 bp, Homo sapiens
tacagtgctaatgac

SEQ ID NO: 13450 - DNA, 15 bp, Homo sapiens
ctacagtgctaatga

SEQ ID NO: 13451 - DNA, 15 bp, Homo sapiens
gctacagtgctaatg

SEQ ID NO: 13452 - DNA, 15 bp, Homo sapiens
tgctacagtgctaat

SEQ ID NO: 13453 - DNA, 15 bp, Homo sapiens
ttgctacagtgctaa

SEQ ID NO: 13454 - DNA, 15 bp, Homo sapiens
tttgctacagtgcta

SEQ ID NO: 13455 - DNA, 15 bp, Homo sapiens
ttttgctacagtgct

SEQ ID NO: 13456 - DNA, 15 bp, Homo sapiens
tttttgctacagtgc

SEQ ID NO: 13457 - DNA, 15 bp, Homo sapiens
atttttgctacagtg

SEQ ID NO: 13458 - DNA, 15 bp, Homo sapiens
aatttttgctacagt

SEQ ID NO: 13459 - DNA, 15 bp, Homo sapiens
gaatttttgctacag

SEQ ID NO: 13460 - DNA, 15 bp, Homo sapiens
tgaatttttgctaca

SEQ ID NO: 13461 - DNA, 15 bp, Homo sapiens
gtgaatttttgctac

SEQ ID NO: 13462 - DNA, 15 bp, Homo sapiens
cgtgaatttttgcta

SEQ ID NO: 13463 - DNA, 15 bp, Homo sapiens
acgtgaatttttgct

SEQ ID NO: 13464 - DNA, 15 bp, Homo sapiens
aacgtgaatttttgc

SEQ ID NO: 13465 - DNA, 15 bp, Homo sapiens
aaacgtgaatttttg

SEQ ID NO: 13466 - DNA, 15 bp, Homo sapiens
aaaacgtgaattttt

SEQ ID NO: 13467 - DNA, 15 bp, Homo sapiens
taaaacgtgaatttt

SEQ ID NO: 13468 - DNA, 15 bp, Homo sapiens
ataaaacgtgaattt

SEQ ID NO: 13469 - DNA, 15 bp, Homo sapiens
aataaaacgtgaatt

SEQ ID NO: 13470 - DNA, 15 bp, Homo sapiens
taataaaacgtgaat

SEQ ID NO: 13471 - DNA, 15 bp, Homo sapiens
ttaataaaacgtgaa

SEQ ID NO: 13472 - DNA, 15 bp, Homo sapiens
attaataaaacgtga

SEQ ID NO: 13473 - DNA, 15 bp, Homo sapiens
aattaataaaacgtg

SEQ ID NO: 13474 - DNA, 15 bp, Homo sapiens
aaattaataaaacgt

SEQ ID NO: 13475 - DNA, 15 bp, Homo sapiens
gaaattaataaaacg

SEQ ID NO: 13476 - DNA, 15 bp, Homo sapiens
agaaattaataaaac

SEQ ID NO: 13477 - DNA, 15 bp, Homo sapiens
gagaaattaataaaa

SEQ ID NO: 13478 - DNA, 15 bp, Homo sapiens
ggagaaattaataaa

SEQ ID NO: 13479 - DNA, 15 bp, Homo sapiens
aggagaaattaataa

SEQ ID NO: 13480 - DNA, 15 bp, Homo sapiens
taggagaaattaata

SEQ ID NO: 13481 - DNA, 15 bp, Homo sapiens
ctaggagaaattaat

SEQ ID NO: 13482 - DNA, 15 bp, Homo sapiens
actaggagaaattaa

SEQ ID NO: 13483 - DNA, 15 bp, Homo sapiens
aactaggagaaatta

SEQ ID NO: 13484 - DNA, 15 bp, Homo sapiens
aaactaggagaaatt

SEQ ID NO: 13485 - DNA, 15 bp, Homo sapiens
taaactaggagaaat

SEQ ID NO: 13486 - DNA, 15 bp, Homo sapiens
ataaactaggagaaa

SEQ ID NO: 13487 - DNA, 15 bp, Homo sapiens
gataaactaggagaa

SEQ ID NO: 13488 - DNA, 15 bp, Homo sapiens
tgataaactaggaga

SEQ ID NO: 13489 - DNA, 15 bp, Homo sapiens
atgataaactaggag

SEQ ID NO: 13490 - DNA, 15 bp, Homo sapiens
catgataaactagga

SEQ ID NO: 13491 - DNA, 15 bp, Homo sapiens
acatgataaactagg

SEQ ID NO: 13492 - DNA, 15 bp, Homo sapiens
cacatgataaactag

SEQ ID NO: 13493 - DNA, 15 bp, Homo sapiens
tcacatgataaacta

SEQ ID NO: 13494 - DNA, 15 bp, Homo sapiens
atcacatgataaact

SEQ ID NO: 13495 - DNA, 15 bp, Homo sapiens
aatcacatgataaac

SEQ ID NO: 13496 - DNA, 15 bp, Homo sapiens
gaatcacatgataaa

SEQ ID NO: 13497 - DNA, 15 bp, Homo sapiens
agaatcacatgataa

SEQ ID NO: 13498 - DNA, 15 bp, Homo sapiens
tagaatcacatgata

SEQ ID NO: 13499 - DNA, 15 bp, Homo sapiens
ctagaatcacatgat

SEQ ID NO: 13500 - DNA, 15 bp, Homo sapiens
cctagaatcacatga

SEQ ID NO: 13501 - DNA, 15 bp, Homo sapiens
ccctagaatcacatg

SEQ ID NO: 13502 - DNA, 15 bp, Homo sapiens
accctagaatcacat

SEQ ID NO: 13503 - DNA, 15 bp, Homo sapiens
taccctagaatcaca

SEQ ID NO: 13504 - DNA, 15 bp, Homo sapiens
ctaccctagaatcac

SEQ ID NO: 13505 - DNA, 15 bp, Homo sapiens
cctaccctagaatca

SEQ ID NO: 13506 - DNA, 15 bp, Homo sapiens
tcctaccctagaatc

SEQ ID NO: 13507 - DNA, 15 bp, Homo sapiens
atcctaccctagaat

SEQ ID NO: 13508 - DNA, 15 bp, Homo sapiens
catcctaccctagaa

SEQ ID NO: 13509 - DNA, 15 bp, Homo sapiens
gcatcctaccctaga

SEQ ID NO: 13510 - DNA, 15 bp, Homo sapiens
tgcatcctaccctag

SEQ ID NO: 13511 - DNA, 15 bp, Homo sapiens
ctgcatcctacccta

SEQ ID NO: 13512 - DNA, 15 bp, Homo sapiens
tctgcatcctaccct

SEQ ID NO: 13513 - DNA, 15 bp, Homo sapiens
ctctgcatcctaccc

SEQ ID NO: 13514 - DNA, 15 bp, Homo sapiens
actctgcatcctacc

SEQ ID NO: 13515 - DNA, 15 bp, Homo sapiens
aactctgcatcctac

SEQ ID NO: 13516 - DNA, 15 bp, Homo sapiens
taactctgcatccta

SEQ ID NO: 13517 - DNA, 15 bp, Homo sapiens
ataactctgcatcct

SEQ ID NO: 13518 - DNA, 15 bp, Homo sapiens
tataactctgcatcc

SEQ ID NO: 13519 - DNA, 15 bp, Homo sapiens
atataactctgcatc

SEQ ID NO: 13520 - DNA, 15 bp, Homo sapiens
aatataactctgcat

SEQ ID NO: 13521 - DNA, 15 bp, Homo sapiens
gaatataactctgca

SEQ ID NO: 13522 - DNA, 15 bp, Homo sapiens
tgaatataactctgc

SEQ ID NO: 13523 - DNA, 15 bp, Homo sapiens
ttgaatataactctg

SEQ ID NO: 13524 - DNA, 15 bp, Homo sapiens
tttgaatataactct

SEQ ID NO: 13525 - DNA, 15 bp, Homo sapiens
ttttgaatataactc

SEQ ID NO: 13526 - DNA, 15 bp, Homo sapiens
attttgaatataact

SEQ ID NO: 13527 - DNA, 15 bp, Homo sapiens
tattttgaatataac

SEQ ID NO: 13528 - DNA, 15 bp, Homo sapiens
gtattttgaatataa

SEQ ID NO: 13529 - DNA, 15 bp, Homo sapiens
tgtattttgaatata

SEQ ID NO: 13530 - DNA, 15 bp, Homo sapiens
gtgtattttgaatat

SEQ ID NO: 13531 - DNA, 15 bp, Homo sapiens
tgtgtattttgaata

SEQ ID NO: 13532 - DNA, 15 bp, Homo sapiens
ttgtgtattttgaat

SEQ ID NO: 13533 - DNA, 15 bp, Homo sapiens
tttgtgtattttgaa

SEQ ID NO: 13534 - DNA, 15 bp, Homo sapiens
atttgtgtattttga

SEQ ID NO: 13535 - DNA, 15 bp, Homo sapiens
gatttgtgtattttg

SEQ ID NO: 13536 - DNA, 15 bp, Homo sapiens
tgatttgtgtatttt

SEQ ID NO: 13537 - DNA, 15 bp, Homo sapiens
ttgatttgtgtattt

SEQ ID NO: 13538 - DNA, 15 bp, Homo sapiens
gttgatttgtgtatt

SEQ ID NO: 13539 - DNA, 15 bp, Homo sapiens
agttgatttgtgtat

SEQ ID NO: 13540 - DNA, 15 bp, Homo sapiens
gagttgatttgtgta

SEQ ID NO: 13541 - DNA, 15 bp, Homo sapiens
tgagttgatttgtgt

SEQ ID NO: 13542 - DNA, 15 bp, Homo sapiens
ttgagttgatttgtg

SEQ ID NO: 13543 - DNA, 15 bp, Homo sapiens
gttgagttgatttgt

SEQ ID NO: 13544 - DNA, 15 bp, Homo sapiens
agttgagttgatttg

SEQ ID NO: 13545 - DNA, 15 bp, Homo sapiens
gagttgagttgattt

SEQ ID NO: 13546 - DNA, 15 bp, Homo sapiens
tgagttgagttgatt

SEQ ID NO: 13547 - DNA, 15 bp, Homo sapiens
ctgagttgagttgat

SEQ ID NO: 13548 - DNA, 15 bp, Homo sapiens
actgagttgagttga

SEQ ID NO: 13549 - DNA, 15 bp, Homo sapiens
tactgagttgagttg

SEQ ID NO: 13550 - DNA, 15 bp, Homo sapiens
ttactgagttgagtt

SEQ ID NO: 13551 - DNA, 15 bp, Homo sapiens
tttactgagttgagt

SEQ ID NO: 13552 - DNA, 15 bp, Homo sapiens
gtttactgagttgag

SEQ ID NO: 13553 - DNA, 15 bp, Homo sapiens
tgtttactgagttga

SEQ ID NO: 13554 - DNA, 15 bp, Homo sapiens
atgtttactgagttg

SEQ ID NO: 13555 - DNA, 15 bp, Homo sapiens
tatgtttactgagtt

SEQ ID NO: 13556 - DNA, 15 bp, Homo sapiens
atatgtttactgagt

SEQ ID NO: 13557 - DNA, 15 bp, Homo sapiens
tatatgtttactgag

SEQ ID NO: 13558 - DNA, 15 bp, Homo sapiens
atatatgtttactga

SEQ ID NO: 13559 - DNA, 15 bp, Homo sapiens
gatatatgtttactg

SEQ ID NO: 13560 - DNA, 15 bp, Homo sapiens
cgatatatgtttact

SEQ ID NO: 13561 - DNA, 15 bp, Homo sapiens
tcgatatatgtttac

SEQ ID NO: 13562 - DNA, 15 bp, Homo sapiens
ctcgatatatgttta

SEQ ID NO: 13563 - DNA, 15 bp, Homo sapiens
cctcgatatatgttt

SEQ ID NO: 13564 - DNA, 15 bp, Homo sapiens
gcctcgatatatgtt

SEQ ID NO: 13565 - DNA, 15 bp, Homo sapiens
ggcctcgatatatgt

SEQ ID NO: 13566 - DNA, 15 bp, Homo sapiens
gggcctcgatatatg

SEQ ID NO: 13567 - DNA, 15 bp, Homo sapiens
agggcctcgatatat

SEQ ID NO: 13568 - DNA, 15 bp, Homo sapiens
tagggcctcgatata

SEQ ID NO: 13569 - DNA, 15 bp, Homo sapiens
atagggcctcgatat

SEQ ID NO: 13570 - DNA, 15 bp, Homo sapiens
gatagggcctcgata

SEQ ID NO: 13571 - DNA, 15 bp, Homo sapiens
tgatagggcctcgat

SEQ ID NO: 13572 - DNA, 15 bp, Homo sapiens
atgatagggcctcga

SEQ ID NO: 13573 - DNA, 15 bp, Homo sapiens
catgatagggcctcg

SEQ ID NO: 13574 - DNA, 15 bp, Homo sapiens
tcatgatagggcctc

SEQ ID NO: 13575 - DNA, 15 bp, Homo sapiens
gtcatgatagggcct

SEQ ID NO: 13576 - DNA, 15 bp, Homo sapiens
tgtcatgatagggcc

SEQ ID NO: 13577 - DNA, 15 bp, Homo sapiens
ttgtcatgatagggc

SEQ ID NO: 13578 - DNA, 15 bp, Homo sapiens
tttgtcatgataggg

SEQ ID NO: 13579 - DNA, 15 bp, Homo sapiens
ttttgtcatgatagg

SEQ ID NO: 13580 - DNA, 15 bp, Homo sapiens
attttgtcatgatag

SEQ ID NO: 13581 - DNA, 15 bp, Homo sapiens
cattttgtcatgata

SEQ ID NO: 13582 - DNA, 15 bp, Homo sapiens
gcattttgtcatgat

SEQ ID NO: 13583 - DNA, 15 bp, Homo sapiens
agcattttgtcatga

SEQ ID NO: 13584 - DNA, 15 bp, Homo sapiens
tagcattttgtcatg

SEQ ID NO: 13585 - DNA, 15 bp, Homo sapiens
atagcattttgtcat

SEQ ID NO: 13586 - DNA, 15 bp, Homo sapiens
aatagcattttgtca

SEQ ID NO: 13587 - DNA, 15 bp, Homo sapiens
gaatagcattttgtc

SEQ ID NO: 13588 - DNA, 15 bp, Homo sapiens
agaatagcattttgt

SEQ ID NO: 13589 - DNA, 15 bp, Homo sapiens
tagaatagcattttg

SEQ ID NO: 13590 - DNA, 15 bp, Homo sapiens
ctagaatagcatttt

SEQ ID NO: 13591 - DNA, 15 bp, Homo sapiens
tctagaatagcattt

SEQ ID NO: 13592 - DNA, 15 bp, Homo sapiens
ctctagaatagcatt

SEQ ID NO: 13593 - DNA, 15 bp, Homo sapiens
tctctagaatagcat

SEQ ID NO: 13594 - DNA, 15 bp, Homo sapiens
gtctctagaatagca

SEQ ID NO: 13595 - DNA, 15 bp, Homo sapiens
ggtctctagaatagc

SEQ ID NO: 13596 - DNA, 15 bp, Homo sapiens
tggtctctagaatag

SEQ ID NO: 13597 - DNA, 15 bp, Homo sapiens
gtggtctctagaata

SEQ ID NO: 13598 - DNA, 15 bp, Homo sapiens
cgtggtctctagaat

SEQ ID NO: 13599 - DNA, 15 bp, Homo sapiens
ccgtggtctctagaa

SEQ ID NO: 13600 - DNA, 15 bp, Homo sapiens
gccgtggtctctaga

SEQ ID NO: 13601 - DNA, 15 bp, Homo sapiens
cgccgtggtctctag

SEQ ID NO: 13602 - DNA, 15 bp, Homo sapiens
tcgccgtggtctcta

SEQ ID NO: 13603 - DNA, 15 bp, Homo sapiens
ttcgccgtggtctct

SEQ ID NO: 13604 - DNA, 15 bp, Homo sapiens
gttcgccgtggtctc

SEQ ID NO: 13605 - DNA, 15 bp, Homo sapiens
tgttcgccgtggtct

SEQ ID NO: 13606 - DNA, 15 bp, Homo sapiens
ttgttcgccgtggtc

SEQ ID NO: 13607 - DNA, 15 bp, Homo sapiens
cttgttcgccgtggt

SEQ ID NO: 13608 - DNA, 15 bp, Homo sapiens
gcttgttcgccgtgg

SEQ ID NO: 13609 - DNA, 15 bp, Homo sapiens
ggcttgttcgccgtg

SEQ ID NO: 13610 - DNA, 15 bp, Homo sapiens
tggcttgttcgccgt

SEQ ID NO: 13611 - DNA, 15 bp, Homo sapiens
gtggcttgttcgccg

SEQ ID NO: 13612 - DNA, 15 bp, Homo sapiens
cgtggcttgttcgcc

SEQ ID NO: 13613 - DNA, 15 bp, Homo sapiens
ccgtggcttgttcgc

SEQ ID NO: 13614 - DNA, 15 bp, Homo sapiens
gccgtggcttgttcg

SEQ ID NO: 13615 - DNA, 15 bp, Homo sapiens
ggccgtggcttgttc

SEQ ID NO: 13616 - DNA, 15 bp, Homo sapiens
gggccgtggcttgtt

SEQ ID NO: 13617 - DNA, 15 bp, Homo sapiens
ggggccgtggcttgt

SEQ ID NO: 13618 - DNA, 15 bp, Homo sapiens
tggggccgtggcttg

SEQ ID NO: 13619 - DNA, 15 bp, Homo sapiens
ctggggccgtggctt

SEQ ID NO: 13620 - DNA, 15 bp, Homo sapiens
gctggggccgtggct

SEQ ID NO: 13621 - DNA, 15 bp, Homo sapiens
ggctggggccgtggc

SEQ ID NO: 13622 - DNA, 15 bp, Homo sapiens
aggctggggccgtgg

SEQ ID NO: 13623 - DNA, 15 bp, Homo sapiens
gaggctggggccgtg

SEQ ID NO: 13624 - DNA, 15 bp, Homo sapiens
tgaggctggggccgt

SEQ ID NO: 13625 - DNA, 15 bp, Homo sapiens
ttgaggctggggccg

SEQ ID NO: 13626 - DNA, 15 bp, Homo sapiens
tttgaggctggggcc

SEQ ID NO: 13627 - DNA, 15 bp, Homo sapiens
ctttgaggctggggc

SEQ ID NO: 13628 - DNA, 15 bp, Homo sapiens
tctttgaggctgggg

SEQ ID NO: 13629 - DNA, 15 bp, Homo sapiens
ttctttgaggctggg

SEQ ID NO: 13630 - DNA, 15 bp, Homo sapiens
attctttgaggctgg

SEQ ID NO: 13631 - DNA, 15 bp, Homo sapiens
cattctttgaggctg

SEQ ID NO: 13632 - DNA, 15 bp, Homo sapiens
acattctttgaggct

SEQ ID NO: 13633 - DNA, 15 bp, Homo sapiens
tacattctttgaggc

SEQ ID NO: 13634 - DNA, 15 bp, Homo sapiens
gtacattctttgagg

SEQ ID NO: 13635 - DNA, 15 bp, Homo sapiens
agtacattctttgag

SEQ ID NO: 13636 - DNA, 15 bp, Homo sapiens
tagtacattctttga

SEQ ID NO: 13637 - DNA, 15 bp, Homo sapiens
atagtacattctttg

SEQ ID NO: 13638 - DNA, 15 bp, Homo sapiens
gatagtacattcttt

SEQ ID NO: 13639 - DNA, 15 bp, Homo sapiens
agatagtacattctt

SEQ ID NO: 13640 - DNA, 15 bp, Homo sapiens
aagatagtacattct

SEQ ID NO: 13641 - DNA, 15 bp, Homo sapiens
aaagatagtacattc

SEQ ID NO: 13642 - DNA, 15 bp, Homo sapiens
caaagatagtacatt

SEQ ID NO: 13643 - DNA, 15 bp, Homo sapiens
ccaaagatagtacat

SEQ ID NO: 13644 - DNA, 15 bp, Homo sapiens
tccaaagatagtaca

SEQ ID NO: 13645 - DNA, 15 bp, Homo sapiens
ttccaaagatagtac

SEQ ID NO: 13646 - DNA, 15 bp, Homo sapiens
gttccaaagatagta

SEQ ID NO: 13647 - DNA, 15 bp, Homo sapiens
agttccaaagatagt

SEQ ID NO: 13648 - DNA, 15 bp, Homo sapiens
cagttccaaagatag

SEQ ID NO: 13649 - DNA, 15 bp, Homo sapiens
acagttccaaagata

SEQ ID NO: 13650 - DNA, 15 bp, Homo sapiens
cacagttccaaagat

SEQ ID NO: 13651 - DNA, 15 bp, Homo sapiens
gcacagttccaaaga

SEQ ID NO: 13652 - DNA, 15 bp, Homo sapiens
agcacagttccaaag

SEQ ID NO: 13653 - DNA, 15 bp, Homo sapiens
cagcacagttccaaa

SEQ ID NO: 13654 - DNA, 15 bp, Homo sapiens
ccagcacagttccaa

SEQ ID NO: 13655 - DNA, 15 bp, Homo sapiens
gccagcacagttcca

SEQ ID NO: 13656 - DNA, 15 bp, Homo sapiens
ggccagcacagttcc

SEQ ID NO: 13657 - DNA, 15 bp, Homo sapiens
tggccagcacagttc

SEQ ID NO: 13658 - DNA, 15 bp, Homo sapiens
ttggccagcacagtt

SEQ ID NO: 13659 - DNA, 15 bp, Homo sapiens
attggccagcacagt

SEQ ID NO: 13660 - DNA, 15 bp, Homo sapiens
tattggccagcacag

SEQ ID NO: 13661 - DNA, 15 bp, Homo sapiens
gtattggccagcaca

SEQ ID NO: 13662 - DNA, 15 bp, Homo sapiens
tgtattggccagcac

SEQ ID NO: 13663 - DNA, 15 bp, Homo sapiens
ctgtattggccagca

SEQ ID NO: 13664 - DNA, 15 bp, Homo sapiens
actgtattggccagc

SEQ ID NO: 13665 - DNA, 15 bp, Homo sapiens
tactgtattggccag

SEQ ID NO: 13666 - DNA, 15 bp, Homo sapiens
ttactgtattggcca

SEQ ID NO: 13667 - DNA, 15 bp, Homo sapiens
gttactgtattggcc

SEQ ID NO: 13668 - DNA, 15 bp, Homo sapiens
ggttactgtattggc

SEQ ID NO: 13669 - DNA, 15 bp, Homo sapiens
tggttactgtattgg

SEQ ID NO: 13670 - DNA, 15 bp, Homo sapiens
ctggttactgtattg

SEQ ID NO: 13671 - DNA, 15 bp, Homo sapiens
gctggttactgtatt

SEQ ID NO: 13672 - DNA, 15 bp, Homo sapiens
tgctggttactgtat

SEQ ID NO: 13673 - DNA, 15 bp, Homo sapiens
ctgctggttactgta

SEQ ID NO: 13674 - DNA, 15 bp, Homo sapiens
gctgctggttactgt

SEQ ID NO: 13675 - DNA, 15 bp, Homo sapiens
ggctgctggttactg

SEQ ID NO: 13676 - DNA, 15 bp, Homo sapiens
tggctgctggttact

SEQ ID NO: 13677 - DNA, 15 bp, Homo sapiens
gtggctgctggttac

SEQ ID NO: 13678 - DNA, 15 bp, Homo sapiens
cgtggctgctggtta

SEQ ID NO: 13679 - DNA, 15 bp, Homo sapiens
gcgtggctgctggtt

SEQ ID NO: 13680 - DNA, 15 bp, Homo sapiens
tgcgtggctgctggt

SEQ ID NO: 13681 - DNA, 15 bp, Homo sapiens
ctgcgtggctgctgg

SEQ ID NO: 13682 - DNA, 15 bp, Homo sapiens
cctgcgtggctgctg

SEQ ID NO: 13683 - DNA, 15 bp, Homo sapiens
ccctgcgtggctgct

SEQ ID NO: 13684 - DNA, 15 bp, Homo sapiens
gccctgcgtggctgc

SEQ ID NO: 13685 - DNA, 15 bp, Homo sapiens
agccctgcgtggctg

SEQ ID NO: 13686 - DNA, 15 bp, Homo sapiens
tagccctgcgtggct

SEQ ID NO: 13687 - DNA, 15 bp, Homo sapiens
atagccctgcgtggc

SEQ ID NO: 13688 - DNA, 15 bp, Homo sapiens
aatagccctgcgtgg

SEQ ID NO: 13689 - DNA, 15 bp, Homo sapiens
aaatagccctgcgtg

SEQ ID NO: 13690 - DNA, 15 bp, Homo sapiens
taaatagccctgcgt

SEQ ID NO: 13691 - DNA, 15 bp, Homo sapiens
ttaaatagccctgcg

SEQ ID NO: 13692 - DNA, 15 bp, Homo sapiens
tttaaatagccctgc

SEQ ID NO: 13693 - DNA, 15 bp, Homo sapiens
atttaaatagccctg

SEQ ID NO: 13694 - DNA, 15 bp, Homo sapiens
aatttaaatagccct

SEQ ID NO: 13695 - DNA, 15 bp, Homo sapiens
aaatttaaatagccc

SEQ ID NO: 13696 - DNA, 15 bp, Homo sapiens
taaatttaaatagcc

SEQ ID NO: 13697 - DNA, 15 bp, Homo sapiens
ttaaatttaaatagc

SEQ ID NO: 13698 - DNA, 15 bp, Homo sapiens
tttaaatttaaatag

SEQ ID NO: 13699 - DNA, 15 bp, Homo sapiens
atttaaatttaaata

SEQ ID NO: 13700 - DNA, 15 bp, Homo sapiens
aatttaaatttaaat

SEQ ID NO: 13701 - DNA, 15 bp, Homo sapiens
taatttaaatttaaa

SEQ ID NO: 13702 - DNA, 15 bp, Homo sapiens
ttaatttaaatttaa

SEQ ID NO: 13703 - DNA, 15 bp, Homo sapiens
attaatttaaattta

SEQ ID NO: 13704 - DNA, 15 bp, Homo sapiens
aattaatttaaattt

SEQ ID NO: 13705 - DNA, 15 bp, Homo sapiens
taattaatttaaatt

SEQ ID NO: 13706 - DNA, 15 bp, Homo sapiens
ttaattaatttaaat

SEQ ID NO: 13707 - DNA, 15 bp, Homo sapiens
tttaattaatttaaa

SEQ ID NO: 13708 - DNA, 15 bp, Homo sapiens
ttttaattaatttaa

SEQ ID NO: 13709 - DNA, 15 bp, Homo sapiens
cttttaattaattta

SEQ ID NO: 13710 - DNA, 15 bp, Homo sapiens
acttttaattaattt

SEQ ID NO: 13711 - DNA, 15 bp, Homo sapiens
tacttttaattaatt

SEQ ID NO: 13712 - DNA, 15 bp, Homo sapiens
ttacttttaattaat

SEQ ID NO: 13713 - DNA, 15 bp, Homo sapiens
tttacttttaattaa

SEQ ID NO: 13714 - DNA, 15 bp, Homo sapiens
ttttacttttaatta

SEQ ID NO: 13715 - DNA, 15 bp, Homo sapiens
tttttacttttaatt

SEQ ID NO: 13716 - DNA, 15 bp, Homo sapiens
gtttttacttttaat

SEQ ID NO: 13717 - DNA, 15 bp, Homo sapiens
tgtttttacttttaa

SEQ ID NO: 13718 - DNA, 15 bp, Homo sapiens
gtgtttttactttta

SEQ ID NO: 13719 - DNA, 15 bp, Homo sapiens
tgtgtttttactttt

SEQ ID NO: 13720 - DNA, 15 bp, Homo sapiens
ttgtgtttttacttt

SEQ ID NO: 13721 - DNA, 15 bp, Homo sapiens
attgtgtttttactt

SEQ ID NO: 13722 - DNA, 15 bp, Homo sapiens
cattgtgtttttact

SEQ ID NO: 13723 - DNA, 15 bp, Homo sapiens
gcattgtgtttttac

SEQ ID NO: 13724 - DNA, 15 bp, Homo sapiens
ggcattgtgttttta

SEQ ID NO: 13725 - DNA, 15 bp, Homo sapiens
aggcattgtgttttt

SEQ ID NO: 13726 - DNA, 15 bp, Homo sapiens
gaggcattgtgtttt

SEQ ID NO: 13727 - DNA, 15 bp, Homo sapiens
tgaggcattgtgttt

SEQ ID NO: 13728 - DNA, 15 bp, Homo sapiens
ctgaggcattgtgtt

SEQ ID NO: 13729 - DNA, 15 bp, Homo sapiens
tctgaggcattgtgt

SEQ ID NO: 13730 - DNA, 15 bp, Homo sapiens
atctgaggcattgtg

SEQ ID NO: 13731 - DNA, 15 bp, Homo sapiens
catctgaggcattgt

SEQ ID NO: 13732 - DNA, 15 bp, Homo sapiens
gcatctgaggcattg

SEQ ID NO: 13733 - DNA, 15 bp, Homo sapiens
tgcatctgaggcatt

SEQ ID NO: 13734 - DNA, 15 bp, Homo sapiens
atgcatctgaggcat

SEQ ID NO: 13735 - DNA, 15 bp, Homo sapiens
aatgcatctgaggca

SEQ ID NO: 13736 - DNA, 15 bp, Homo sapiens
taatgcatctgaggc

SEQ ID NO: 13737 - DNA, 15 bp, Homo sapiens
ctaatgcatctgagg

SEQ ID NO: 13738 - DNA, 15 bp, Homo sapiens
gctaatgcatctgag

SEQ ID NO: 13739 - DNA, 15 bp, Homo sapiens
ggctaatgcatctga

SEQ ID NO: 13740 - DNA, 15 bp, Homo sapiens
tggctaatgcatctg

SEQ ID NO: 13741 - DNA, 15 bp, Homo sapiens
gtggctaatgcatct

SEQ ID NO: 13742 - DNA, 15 bp, Homo sapiens
tgtggctaatgcatc

SEQ ID NO: 13743 - DNA, 15 bp, Homo sapiens
atgtggctaatgcat

SEQ ID NO: 13744 - DNA, 15 bp, Homo sapiens
aatgtggctaatgca

SEQ ID NO: 13745 - DNA, 15 bp, Homo sapiens
aaatgtggctaatgc

SEQ ID NO: 13746 - DNA, 15 bp, Homo sapiens
aaaatgtggctaatg

SEQ ID NO: 13747 - DNA, 15 bp, Homo sapiens
taaaatgtggctaat

SEQ ID NO: 13748 - DNA, 15 bp, Homo sapiens
ttaaaatgtggctaa

SEQ ID NO: 13749 - DNA, 15 bp, Homo sapiens
cttaaaatgtggcta

SEQ ID NO: 13750 - DNA, 15 bp, Homo sapiens
acttaaaatgtggct

SEQ ID NO: 13751 - DNA, 15 bp, Homo sapiens
cacttaaaatgtggc

SEQ ID NO: 13752 - DNA, 15 bp, Homo sapiens
acacttaaaatgtgg

SEQ ID NO: 13753 - DNA, 15 bp, Homo sapiens
aacacttaaaatgtg

SEQ ID NO: 13754 - DNA, 15 bp, Homo sapiens
gaacacttaaaatgt

SEQ ID NO: 13755 - DNA, 15 bp, Homo sapiens
tgaacacttaaaatg

SEQ ID NO: 13756 - DNA, 15 bp, Homo sapiens
ttgaacacttaaaat

SEQ ID NO: 13757 - DNA, 15 bp, Homo sapiens
attgaacacttaaaa

SEQ ID NO: 13758 - DNA, 15 bp, Homo sapiens
tattgaacacttaaa

SEQ ID NO: 13759 - DNA, 15 bp, Homo sapiens
ctattgaacacttaa

SEQ ID NO: 13760 - DNA, 15 bp, Homo sapiens
tctattgaacactta

SEQ ID NO: 13761 - DNA, 15 bp, Homo sapiens
atctattgaacactt

SEQ ID NO: 13762 - DNA, 15 bp, Homo sapiens
tatctattgaacact

SEQ ID NO: 13763 - DNA, 15 bp, Homo sapiens
atatctattgaacac

SEQ ID NO: 13764 - DNA, 15 bp, Homo sapiens
aatatctattgaaca

SEQ ID NO: 13765 - DNA, 15 bp, Homo sapiens
aaatatctattgaac

SEQ ID NO: 13766 - DNA, 15 bp, Homo sapiens
caaatatctattgaa

SEQ ID NO: 13767 - DNA, 15 bp, Homo sapiens
acaaatatctattga

SEQ ID NO: 13768 - DNA, 15 bp, Homo sapiens
cacaaatatctattg

SEQ ID NO: 13769 - DNA, 15 bp, Homo sapiens
ccacaaatatctatt

SEQ ID NO: 13770 - DNA, 15 bp, Homo sapiens
gccacaaatatctat

SEQ ID NO: 13771 - DNA, 15 bp, Homo sapiens
agccacaaatatcta

SEQ ID NO: 13772 - DNA, 15 bp, Homo sapiens
gagccacaaatatct

SEQ ID NO: 13773 - DNA, 15 bp, Homo sapiens
ggagccacaaatatc

SEQ ID NO: 13774 - DNA, 15 bp, Homo sapiens
aggagccacaaatat

SEQ ID NO: 13775 - DNA, 15 bp, Homo sapiens
caggagccacaaata

SEQ ID NO: 13776 - DNA, 15 bp, Homo sapiens
gcaggagccacaaat

SEQ ID NO: 13777 - DNA, 15 bp, Homo sapiens
ggcaggagccacaaa

SEQ ID NO: 13778 - DNA, 15 bp, Homo sapiens
aggcaggagccacaa

SEQ ID NO: 13779 - DNA, 15 bp, Homo sapiens
caggcaggagccaca

SEQ ID NO: 13780 - DNA, 15 bp, Homo sapiens
gcaggcaggagccac

SEQ ID NO: 13781 - DNA, 15 bp, Homo sapiens
ggcaggcaggagcca

SEQ ID NO: 13782 - DNA, 15 bp, Homo sapiens
tggcaggcaggagcc

SEQ ID NO: 13783 - DNA, 15 bp, Homo sapiens
atggcaggcaggagc

SEQ ID NO: 13784 - DNA, 15 bp, Homo sapiens
tatggcaggcaggag

SEQ ID NO: 13785 - DNA, 15 bp, Homo sapiens
atatggcaggcagga

SEQ ID NO: 13786 - DNA, 15 bp, Homo sapiens
aatatggcaggcagg

SEQ ID NO: 13787 - DNA, 15 bp, Homo sapiens
caatatggcaggcag

SEQ ID NO: 13788 - DNA, 15 bp, Homo sapiens
ccaatatggcaggca

SEQ ID NO: 13789 - DNA, 15 bp, Homo sapiens
tccaatatggcaggc

SEQ ID NO: 13790 - DNA, 15 bp, Homo sapiens
gtccaatatggcagg

SEQ ID NO: 13791 - DNA, 15 bp, Homo sapiens
tgtccaatatggcag

SEQ ID NO: 13792 - DNA, 15 bp, Homo sapiens
ctgtccaatatggca

SEQ ID NO: 13793 - DNA, 15 bp, Homo sapiens
cctgtccaatatggc

SEQ ID NO: 13794 - DNA, 15 bp, Homo sapiens
ccctgtccaatatgg

SEQ ID NO: 13795 - DNA, 15 bp, Homo sapiens
gccctgtccaatatg

SEQ ID NO: 13796 - DNA, 15 bp, Homo sapiens
tgccctgtccaatat

SEQ ID NO: 13797 - DNA, 15 bp, Homo sapiens
ctgccctgtccaata

SEQ ID NO: 13798 - DNA, 15 bp, Homo sapiens
tctgccctgtccaat

SEQ ID NO: 13799 - DNA, 15 bp, Homo sapiens
atctgccctgtccaa

SEQ ID NO: 13800 - DNA, 15 bp, Homo sapiens
tatctgccctgtcca

SEQ ID NO: 13801 - DNA, 15 bp, Homo sapiens
atatctgccctgtcc

SEQ ID NO: 13802 - DNA, 15 bp, Homo sapiens
tatatctgccctgtc

SEQ ID NO: 13803 - DNA, 15 bp, Homo sapiens
ctatatctgccctgt

SEQ ID NO: 13804 - DNA, 15 bp, Homo sapiens
tctatatctgccctg

SEQ ID NO: 13805 - DNA, 15 bp, Homo sapiens
ttctatatctgccct

SEQ ID NO: 13806 - DNA, 15 bp, Homo sapiens
gttctatatctgccc

SEQ ID NO: 13807 - DNA, 15 bp, Homo sapiens
tgttctatatctgcc

SEQ ID NO: 13808 - DNA, 15 bp, Homo sapiens
ttgttctatatctgc

SEQ ID NO: 13809 - DNA, 15 bp, Homo sapiens
attgttctatatctg

SEQ ID NO: 13810 - DNA, 15 bp, Homo sapiens
aattgttctatatct

SEQ ID NO: 13811 - DNA, 15 bp, Homo sapiens
gaattgttctatatc

SEQ ID NO: 13812 - DNA, 15 bp, Homo sapiens
ggaattgttctatat

SEQ ID NO: 13813 - DNA, 15 bp, Homo sapiens
tggaattgttctata

SEQ ID NO: 13814 - DNA, 15 bp, Homo sapiens
atggaattgttctat

SEQ ID NO: 13815 - DNA, 15 bp, Homo sapiens
gatggaattgttcta

SEQ ID NO: 13816 - DNA, 15 bp, Homo sapiens
tgatggaattgttct

SEQ ID NO: 13817 - DNA, 15 bp, Homo sapiens
gtgatggaattgttc

SEQ ID NO: 13818 - DNA, 15 bp, Homo sapiens
agtgatggaattgtt

SEQ ID NO: 13819 - DNA, 15 bp, Homo sapiens
cagtgatggaattgt

SEQ ID NO: 13820 - DNA, 15 bp, Homo sapiens
gcagtgatggaattg

SEQ ID NO: 13821 - DNA, 15 bp, Homo sapiens
tgcagtgatggaatt

SEQ ID NO: 13822 - DNA, 15 bp, Homo sapiens
ctgcagtgatggaat

SEQ ID NO: 13823 - DNA, 15 bp, Homo sapiens
tctgcagtgatggaa

SEQ ID NO: 13824 - DNA, 15 bp, Homo sapiens
ttctgcagtgatgga

SEQ ID NO: 13825 - DNA, 15 bp, Homo sapiens
tttctgcagtgatgg

SEQ ID NO: 13826 - DNA, 15 bp, Homo sapiens
ctttctgcagtgatg

SEQ ID NO: 13827 - DNA, 15 bp, Homo sapiens
actttctgcagtgat

SEQ ID NO: 13828 - DNA, 15 bp, Homo sapiens
aactttctgcagtga

SEQ ID NO: 13829 - DNA, 15 bp, Homo sapiens
gaactttctgcagtg

SEQ ID NO: 13830 - DNA, 15 bp, Homo sapiens
agaactttctgcagt

SEQ ID NO: 13831 - DNA, 15 bp, Homo sapiens
tagaactttctgcag

SEQ ID NO: 13832 - DNA, 15 bp, Homo sapiens
gtagaactttctgca

SEQ ID NO: 13833 - DNA, 15 bp, Homo sapiens
agtagaactttctgc

SEQ ID NO: 13834 - DNA, 15 bp, Homo sapiens
cagtagaactttctg

SEQ ID NO: 13835 - DNA, 15 bp, Homo sapiens
tcagtagaactttct

SEQ ID NO: 13836 - DNA, 15 bp, Homo sapiens
ttcagtagaactttc

SEQ ID NO: 13837 - DNA, 15 bp, Homo sapiens
gttcagtagaacttt

SEQ ID NO: 13838 - DNA, 15 bp, Homo sapiens
tgttcagtagaactt

SEQ ID NO: 13839 - DNA, 15 bp, Homo sapiens
ttgttcagtagaact

SEQ ID NO: 13840 - DNA, 15 bp, Homo sapiens
attgttcagtagaac

SEQ ID NO: 13841 - DNA, 15 bp, Homo sapiens
cattgttcagtagaa

SEQ ID NO: 13842 - DNA, 15 bp, Homo sapiens
gcattgttcagtaga

SEQ ID NO: 13843 - DNA, 15 bp, Homo sapiens
agcattgttcagtag

SEQ ID NO: 13844 - DNA, 15 bp, Homo sapiens
cagcattgttcagta

SEQ ID NO: 13845 - DNA, 15 bp, Homo sapiens
gcagcattgttcagt

SEQ ID NO: 13846 - DNA, 15 bp, Homo sapiens
agcagcattgttcag

SEQ ID NO: 13847 - DNA, 15 bp, Homo sapiens
gagcagcattgttca

SEQ ID NO: 13848 - DNA, 15 bp, Homo sapiens
agagcagcattgttc

SEQ ID NO: 13849 - DNA, 15 bp, Homo sapiens
cagagcagcattgtt

SEQ ID NO: 13850 - DNA, 15 bp, Homo sapiens
ccagagcagcattgt

SEQ ID NO: 13851 - DNA, 15 bp, Homo sapiens
tccagagcagcattg

SEQ ID NO: 13852 - DNA, 15 bp, Homo sapiens
ctccagagcagcatt

SEQ ID NO: 13853 - DNA, 15 bp, Homo sapiens
gctccagagcagcat

SEQ ID NO: 13854 - DNA, 15 bp, Homo sapiens
tgctccagagcagca

SEQ ID NO: 13855 - DNA, 15 bp, Homo sapiens
ctgctccagagcagc

SEQ ID NO: 13856 - DNA, 15 bp, Homo sapiens
tctgctccagagcag

SEQ ID NO: 13857 - DNA, 15 bp, Homo sapiens
ttctgctccagagca

SEQ ID NO: 13858 - DNA, 15 bp, Homo sapiens
cttctgctccagagc

SEQ ID NO: 13859 - DNA, 15 bp, Homo sapiens
tcttctgctccagag

SEQ ID NO: 13860 - DNA, 15 bp, Homo sapiens
atcttctgctccaga

SEQ ID NO: 13861 - DNA, 15 bp, Homo sapiens
gatcttctgctccag

SEQ ID NO: 13862 - DNA, 15 bp, Homo sapiens
agatcttctgctcca

SEQ ID NO: 13863 - DNA, 15 bp, Homo sapiens
aagatcttctgctcc

SEQ ID NO: 13864 - DNA, 15 bp, Homo sapiens
gaagatcttctgctc

SEQ ID NO: 13865 - DNA, 15 bp, Homo sapiens
agaagatcttctgct

SEQ ID NO: 13866 - DNA, 15 bp, Homo sapiens
aagaagatcttctgc

SEQ ID NO: 13867 - DNA, 15 bp, Homo sapiens
caagaagatcttctg

SEQ ID NO: 13868 - DNA, 15 bp, Homo sapiens
acaagaagatcttct

SEQ ID NO: 13869 - DNA, 15 bp, Homo sapiens
aacaagaagatcttc

SEQ ID NO: 13870 - DNA, 15 bp, Homo sapiens
gaacaagaagatctt

SEQ ID NO: 13871 - DNA, 15 bp, Homo sapiens
tgaacaagaagatct

SEQ ID NO: 13872 - DNA, 15 bp, Homo sapiens
ctgaacaagaagatc

SEQ ID NO: 13873 - DNA, 15 bp, Homo sapiens
cctgaacaagaagat

SEQ ID NO: 13874 - DNA, 15 bp, Homo sapiens
ccctgaacaagaaga

SEQ ID NO: 13875 - DNA, 15 bp, Homo sapiens
tccctgaacaagaag

SEQ ID NO: 13876 - DNA, 15 bp, Homo sapiens
atccctgaacaagaa

SEQ ID NO: 13877 - DNA, 15 bp, Homo sapiens
catccctgaacaaga

SEQ ID NO: 13878 - DNA, 15 bp, Homo sapiens
acatccctgaacaag

SEQ ID NO: 13879 - DNA, 15 bp, Homo sapiens
aacatccctgaacaa

SEQ ID NO: 13880 - DNA, 15 bp, Homo sapiens
taacatccctgaaca

SEQ ID NO: 13881 - DNA, 15 bp, Homo sapiens
gtaacatccctgaac

SEQ ID NO: 13882 - DNA, 15 bp, Homo sapiens
tgtaacatccctgaa

SEQ ID NO: 13883 - DNA, 15 bp, Homo sapiens
gtgtaacatccctga

SEQ ID NO: 13884 - DNA, 15 bp, Homo sapiens
ggtgtaacatccctg

SEQ ID NO: 13885 - DNA, 15 bp, Homo sapiens
gggtgtaacatccct

SEQ ID NO: 13886 - DNA, 15 bp, Homo sapiens
ggggtgtaacatccc

SEQ ID NO: 13887 - DNA, 15 bp, Homo sapiens
gggggtgtaacatcc

SEQ ID NO: 13888 - DNA, 15 bp, Homo sapiens
cgggggtgtaacatc

SEQ ID NO: 13889 - DNA, 15 bp, Homo sapiens
gcgggggtgtaacat

SEQ ID NO: 13890 - DNA, 15 bp, Homo sapiens
agcgggggtgtaaca

SEQ ID NO: 13891 - DNA, 15 bp, Homo sapiens
aagcgggggtgtaac

SEQ ID NO: 13892 - DNA, 15 bp, Homo sapiens
caagcgggggtgtaa

SEQ ID NO: 13893 - DNA, 15 bp, Homo sapiens
acaagcgggggtgta

SEQ ID NO: 13894 - DNA, 15 bp, Homo sapiens
cacaagcgggggtgt

SEQ ID NO: 13895 - DNA, 15 bp, Homo sapiens
ccacaagcgggggtg

SEQ ID NO: 13896 - DNA, 15 bp, Homo sapiens
gccacaagcgggggt

SEQ ID NO: 13897 - DNA, 15 bp, Homo sapiens
agccacaagcggggg

SEQ ID NO: 13898 - DNA, 15 bp, Homo sapiens
tagccacaagcgggg

SEQ ID NO: 13899 - DNA, 15 bp, Homo sapiens
ctagccacaagcggg

SEQ ID NO: 13900 - DNA, 15 bp, Homo sapiens
tctagccacaagcgg

SEQ ID NO: 13901 - DNA, 15 bp, Homo sapiens
ctctagccacaagcg

SEQ ID NO: 13902 - DNA, 15 bp, Homo sapiens
actctagccacaagc

SEQ ID NO: 13903 - DNA, 15 bp, Homo sapiens
cactctagccacaag

SEQ ID NO: 13904 - DNA, 15 bp, Homo sapiens
acactctagccacaa

SEQ ID NO: 13905 - DNA, 15 bp, Homo sapiens
cacactctagccaca

SEQ ID NO: 13906 - DNA, 15 bp, Homo sapiens
ccacactctagccac

SEQ ID NO: 13907 - DNA, 15 bp, Homo sapiens
gccacactctagcca

SEQ ID NO: 13908 - DNA, 15 bp, Homo sapiens
agccacactctagcc

SEQ ID NO: 13909 - DNA, 15 bp, Homo sapiens
aagccacactctagc

SEQ ID NO: 13910 - DNA, 15 bp, Homo sapiens
taagccacactctag

SEQ ID NO: 13911 - DNA, 15 bp, Homo sapiens
ataagccacactcta

SEQ ID NO: 13912 - DNA, 15 bp, Homo sapiens
gataagccacactct

SEQ ID NO: 13913 - DNA, 15 bp, Homo sapiens
ggataagccacactc

SEQ ID NO: 13914 - DNA, 15 bp, Homo sapiens
aggataagccacact

SEQ ID NO: 13915 - DNA, 15 bp, Homo sapiens
gaggataagccacac

SEQ ID NO: 13916 - DNA, 15 bp, Homo sapiens
tgaggataagccaca

SEQ ID NO: 13917 - DNA, 15 bp, Homo sapiens
ctgaggataagccac

SEQ ID NO: 13918 - DNA, 15 bp, Homo sapiens
tctgaggataagcca

SEQ ID NO: 13919 - DNA, 15 bp, Homo sapiens
ctctgaggataagcc

SEQ ID NO: 13920 - DNA, 15 bp, Homo sapiens
gctctgaggataagc

SEQ ID NO: 13921 - DNA, 15 bp, Homo sapiens
tgctctgaggataag

SEQ ID NO: 13922 - DNA, 15 bp, Homo sapiens
ttgctctgaggataa

SEQ ID NO: 13923 - DNA, 15 bp, Homo sapiens
cttgctctgaggata

SEQ ID NO: 13924 - DNA, 15 bp, Homo sapiens
ccttgctctgaggat

SEQ ID NO: 13925 - DNA, 15 bp, Homo sapiens
tccttgctctgagga

SEQ ID NO: 13926 - DNA, 15 bp, Homo sapiens
atccttgctctgagg

SEQ ID NO: 13927 - DNA, 15 bp, Homo sapiens
tatccttgctctgag

SEQ ID NO: 13928 - DNA, 15 bp, Homo sapiens
ctatccttgctctga

SEQ ID NO: 13929 - DNA, 15 bp, Homo sapiens
cctatccttgctctg

SEQ ID NO: 13930 - DNA, 15 bp, Homo sapiens
ccctatccttgctct

SEQ ID NO: 13931 - DNA, 15 bp, Homo sapiens
cccctatccttgctc

SEQ ID NO: 13932 - DNA, 15 bp, Homo sapiens
tcccctatccttgct

SEQ ID NO: 13933 - DNA, 15 bp, Homo sapiens
ttcccctatccttgc

SEQ ID NO: 13934 - DNA, 15 bp, Homo sapiens
gttcccctatccttg

SEQ ID NO: 13935 - DNA, 15 bp, Homo sapiens
ggttcccctatcctt

SEQ ID NO: 13936 - DNA, 15 bp, Homo sapiens
tggttcccctatcct

SEQ ID NO: 13937 - DNA, 15 bp, Homo sapiens
atggttcccctatcc

SEQ ID NO: 13938 - DNA, 15 bp, Homo sapiens
catggttcccctatc

SEQ ID NO: 13939 - DNA, 15 bp, Homo sapiens
ccatggttcccctat

SEQ ID NO: 13940 - DNA, 15 bp, Homo sapiens
gccatggttccccta

SEQ ID NO: 13941 - DNA, 15 bp, Homo sapiens
tgccatggttcccct

SEQ ID NO: 13942 - DNA, 15 bp, Homo sapiens
gtgccatggttcccc

SEQ ID NO: 13943 - DNA, 15 bp, Homo sapiens
agtgccatggttccc

SEQ ID NO: 13944 - DNA, 15 bp, Homo sapiens
gagtgccatggttcc

SEQ ID NO: 13945 - DNA, 15 bp, Homo sapiens
agagtgccatggttc

SEQ ID NO: 13946 - DNA, 15 bp, Homo sapiens
cagagtgccatggtt

SEQ ID NO: 13947 - DNA, 15 bp, Homo sapiens
gcagagtgccatggt

SEQ ID NO: 13948 - DNA, 15 bp, Homo sapiens
tgcagagtgccatgg

SEQ ID NO: 13949 - DNA, 15 bp, Homo sapiens
ctgcagagtgccatg

SEQ ID NO: 13950 - DNA, 15 bp, Homo sapiens
cctgcagagtgccat

SEQ ID NO: 13951 - DNA, 15 bp, Homo sapiens
gcctgcagagtgcca

SEQ ID NO: 13952 - DNA, 15 bp, Homo sapiens
agcctgcagagtgcc

SEQ ID NO: 13953 - DNA, 15 bp, Homo sapiens
gagcctgcagagtgc

SEQ ID NO: 13954 - DNA, 15 bp, Homo sapiens
tgagcctgcagagtg

SEQ ID NO: 13955 - DNA, 15 bp, Homo sapiens
ctgagcctgcagagt

SEQ ID NO: 13956 - DNA, 15 bp, Homo sapiens
gctgagcctgcagag

SEQ ID NO: 13957 - DNA, 15 bp, Homo sapiens
tgctgagcctgcaga

SEQ ID NO: 13958 - DNA, 15 bp, Homo sapiens
gtgctgagcctgcag

SEQ ID NO: 13959 - DNA, 15 bp, Homo sapiens
agtgctgagcctgca

SEQ ID NO: 13960 - DNA, 15 bp, Homo sapiens
cagtgctgagcctgc

SEQ ID NO: 13961 - DNA, 15 bp, Homo sapiens
tcagtgctgagcctg

SEQ ID NO: 13962 - DNA, 15 bp, Homo sapiens
ttcagtgctgagcct

SEQ ID NO: 13963 - DNA, 15 bp, Homo sapiens
cttcagtgctgagcc

SEQ ID NO: 13964 - DNA, 15 bp, Homo sapiens
tcttcagtgctgagc

SEQ ID NO: 13965 - DNA, 15 bp, Homo sapiens
gtcttcagtgctgag

SEQ ID NO: 13966 - DNA, 15 bp, Homo sapiens
tgtcttcagtgctga

SEQ ID NO: 13967 - DNA, 15 bp, Homo sapiens
gtgtcttcagtgctg

SEQ ID NO: 13968 - DNA, 15 bp, Homo sapiens
cgtgtcttcagtgct

SEQ ID NO: 13969 - DNA, 15 bp, Homo sapiens
ccgtgtcttcagtgc

SEQ ID NO: 13970 - DNA, 15 bp, Homo sapiens
tccgtgtcttcagtg

SEQ ID NO: 13971 - DNA, 15 bp, Homo sapiens
atccgtgtcttcagt

SEQ ID NO: 13972 - DNA, 15 bp, Homo sapiens
catccgtgtcttcag

SEQ ID NO: 13973 - DNA, 15 bp, Homo sapiens
gcatccgtgtcttca

SEQ ID NO: 13974 - DNA, 15 bp, Homo sapiens
tgcatccgtgtcttc

SEQ ID NO: 13975 - DNA, 15 bp, Homo sapiens
ctgcatccgtgtctt

SEQ ID NO: 13976 - DNA, 15 bp, Homo sapiens
cctgcatccgtgtct

SEQ ID NO: 13977 - DNA, 15 bp, Homo sapiens
gcctgcatccgtgtc

SEQ ID NO: 13978 - DNA, 15 bp, Homo sapiens
agcctgcatccgtgt

SEQ ID NO: 13979 - DNA, 15 bp, Homo sapiens
gagcctgcatccgtg

SEQ ID NO: 13980 - DNA, 15 bp, Homo sapiens
agagcctgcatccgt

SEQ ID NO: 13981 - DNA, 15 bp, Homo sapiens
cagagcctgcatccg

SEQ ID NO: 13982 - DNA, 15 bp, Homo sapiens
gcagagcctgcatcc

SEQ ID NO: 13983 - DNA, 15 bp, Homo sapiens
agcagagcctgcatc

SEQ ID NO: 13984 - DNA, 15 bp, Homo sapiens
aagcagagcctgcat

SEQ ID NO: 13985 - DNA, 15 bp, Homo sapiens
gaagcagagcctgca

SEQ ID NO: 13986 - DNA, 15 bp, Homo sapiens
agaagcagagcctgc

SEQ ID NO: 13987 - DNA, 15 bp, Homo sapiens
cagaagcagagcctg

SEQ ID NO: 13988 - DNA, 15 bp, Homo sapiens
tcagaagcagagcct

SEQ ID NO: 13989 - DNA, 15 bp, Homo sapiens
gtcagaagcagagcc

SEQ ID NO: 13990 - DNA, 15 bp, Homo sapiens
ggtcagaagcagagc

SEQ ID NO: 13991 - DNA, 15 bp, Homo sapiens
aggtcagaagcagag

SEQ ID NO: 13992 - DNA, 15 bp, Homo sapiens
taggtcagaagcaga

SEQ ID NO: 13993 - DNA, 15 bp, Homo sapiens
ctaggtcagaagcag

SEQ ID NO: 13994 - DNA, 15 bp, Homo sapiens
tctaggtcagaagca

SEQ ID NO: 13995 - DNA, 15 bp, Homo sapiens
atctaggtcagaagc

SEQ ID NO: 13996 - DNA, 15 bp, Homo sapiens
aatctaggtcagaag

SEQ ID NO: 13997 - DNA, 15 bp, Homo sapiens
caatctaggtcagaa

SEQ ID NO: 13998 - DNA, 15 bp, Homo sapiens
tcaatctaggtcaga

SEQ ID NO: 13999 - DNA, 15 bp, Homo sapiens
gtcaatctaggtcag

SEQ ID NO: 14000 - DNA, 15 bp, Homo sapiens
ggtcaatctaggtca

SEQ ID NO: 14001 - DNA, 15 bp, Homo sapiens
aggtcaatctaggtc

SEQ ID NO: 14002 - DNA, 15 bp, Homo sapiens
aaggtcaatctaggt

SEQ ID NO: 14003 - DNA, 15 bp, Homo sapiens
caaggtcaatctagg

SEQ ID NO: 14004 - DNA, 15 bp, Homo sapiens
ccaaggtcaatctag

SEQ ID NO: 14005 - DNA, 15 bp, Homo sapiens
cccaaggtcaatcta

SEQ ID NO: 14006 - DNA, 15 bp, Homo sapiens
gcccaaggtcaatct

SEQ ID NO: 14007 - DNA, 15 bp, Homo sapiens
tgcccaaggtcaatc

SEQ ID NO: 14008 - DNA, 15 bp, Homo sapiens
ttgcccaaggtcaat

SEQ ID NO: 14009 - DNA, 15 bp, Homo sapiens
cttgcccaaggtcaa

SEQ ID NO: 14010 - DNA, 15 bp, Homo sapiens
ccttgcccaaggtca

SEQ ID NO: 14011 - DNA, 15 bp, Homo sapiens
gccttgcccaaggtc

SEQ ID NO: 14012 - DNA, 15 bp, Homo sapiens
ggccttgcccaaggt

SEQ ID NO: 14013 - DNA, 15 bp, Homo sapiens
gggccttgcccaagg

SEQ ID NO: 14014 - DNA, 15 bp, Homo sapiens
agggccttgcccaag

SEQ ID NO: 14015 - DNA, 15 bp, Homo sapiens
aagggccttgcccaa

SEQ ID NO: 14016 - DNA, 15 bp, Homo sapiens
aaagggccttgccca

SEQ ID NO: 14017 - DNA, 15 bp, Homo sapiens
caaagggccttgccc

SEQ ID NO: 14018 - DNA, 15 bp, Homo sapiens
gcaaagggccttgcc

SEQ ID NO: 14019 - DNA, 15 bp, Homo sapiens
agcaaagggccttgc

SEQ ID NO: 14020 - DNA, 15 bp, Homo sapiens
gagcaaagggccttg

SEQ ID NO: 14021 - DNA, 15 bp, Homo sapiens
ggagcaaagggcctt

SEQ ID NO: 14022 - DNA, 15 bp, Homo sapiens
aggagcaaagggcct

SEQ ID NO: 14023 - DNA, 15 bp, Homo sapiens
gaggagcaaagggcc

SEQ ID NO: 14024 - DNA, 15 bp, Homo sapiens
agaggagcaaagggc

SEQ ID NO: 14025 - DNA, 15 bp, Homo sapiens
cagaggagcaaaggg

SEQ ID NO: 14026 - DNA, 15 bp, Homo sapiens
tcagaggagcaaagg

SEQ ID NO: 14027 - DNA, 15 bp, Homo sapiens
atcagaggagcaaag

SEQ ID NO: 14028 - DNA, 15 bp, Homo sapiens
gatcagaggagcaaa

SEQ ID NO: 14029 - DNA, 15 bp, Homo sapiens
ggatcagaggagcaa

SEQ ID NO: 14030 - DNA, 15 bp, Homo sapiens
gggatcagaggagca

SEQ ID NO: 14031 - DNA, 15 bp, Homo sapiens
tgggatcagaggagc

SEQ ID NO: 14032 - DNA, 15 bp, Homo sapiens
ttgggatcagaggag

SEQ ID NO: 14033 - DNA, 15 bp, Homo sapiens
attgggatcagagga

SEQ ID NO: 14034 - DNA, 15 bp, Homo sapiens
aattgggatcagagg

SEQ ID NO: 14035 - DNA, 15 bp, Homo sapiens
aaattgggatcagag

SEQ ID NO: 14036 - DNA, 15 bp, Homo sapiens
gaaattgggatcaga

SEQ ID NO: 14037 - DNA, 15 bp, Homo sapiens
agaaattgggatcag

SEQ ID NO: 14038 - DNA, 15 bp, Homo sapiens
aagaaattgggatca

SEQ ID NO: 14039 - DNA, 15 bp, Homo sapiens
gaagaaattgggatc

SEQ ID NO: 14040 - DNA, 15 bp, Homo sapiens
tgaagaaattgggat

SEQ ID NO: 14041 - DNA, 15 bp, Homo sapiens
gtgaagaaattggga

SEQ ID NO: 14042 - DNA, 15 bp, Homo sapiens
ggtgaagaaattggg

SEQ ID NO: 14043 - DNA, 15 bp, Homo sapiens
tggtgaagaaattgg

SEQ ID NO: 14044 - DNA, 15 bp, Homo sapiens
ctggtgaagaaattg

SEQ ID NO: 14045 - DNA, 15 bp, Homo sapiens
gctggtgaagaaatt

SEQ ID NO: 14046 - DNA, 15 bp, Homo sapiens
ggctggtgaagaaat

SEQ ID NO: 14047 - DNA, 15 bp, Homo sapiens
tggctggtgaagaaa

SEQ ID NO: 14048 - DNA, 15 bp, Homo sapiens
ttggctggtgaagaa

SEQ ID NO: 14049 - DNA, 15 bp, Homo sapiens
cttggctggtgaaga

SEQ ID NO: 14050 - DNA, 15 bp, Homo sapiens
acttggctggtgaag

SEQ ID NO: 14051 - DNA, 15 bp, Homo sapiens
tacttggctggtgaa

SEQ ID NO: 14052 - DNA, 15 bp, Homo sapiens
ttacttggctggtga

SEQ ID NO: 14053 - DNA, 15 bp, Homo sapiens
cttacttggctggtg

SEQ ID NO: 14054 - DNA, 15 bp, Homo sapiens
tcttacttggctggt

SEQ ID NO: 14055 - DNA, 15 bp, Homo sapiens
ttcttacttggctgg

SEQ ID NO: 14056 - DNA, 15 bp, Homo sapiens
gttcttacttggctg

SEQ ID NO: 14057 - DNA, 15 bp, Homo sapiens
tgttcttacttggct

SEQ ID NO: 14058 - DNA, 15 bp, Homo sapiens
atgttcttacttggc

SEQ ID NO: 14059 - DNA, 15 bp, Homo sapiens
gatgttcttacttgg

SEQ ID NO: 14060 - DNA, 15 bp, Homo sapiens
tgatgttcttacttg

SEQ ID NO: 14061 - DNA, 15 bp, Homo sapiens
ctgatgttcttactt

SEQ ID NO: 14062 - DNA, 15 bp, Homo sapiens
tctgatgttcttact

SEQ ID NO: 14063 - DNA, 15 bp, Homo sapiens
gtctgatgttcttac

SEQ ID NO: 14064 - DNA, 15 bp, Homo sapiens
ggtctgatgttctta

SEQ ID NO: 14065 - DNA, 15 bp, Homo sapiens
tggtctgatgttctt

SEQ ID NO: 14066 - DNA, 15 bp, Homo sapiens
gtggtctgatgttct

SEQ ID NO: 14067 - DNA, 15 bp, Homo sapiens
tgtggtctgatgttc

SEQ ID NO: 14068 - DNA, 15 bp, Homo sapiens
ttgtggtctgatgtt

SEQ ID NO: 14069 - DNA, 15 bp, Homo sapiens
cttgtggtctgatgt

SEQ ID NO: 14070 - DNA, 15 bp, Homo sapiens
gcttgtggtctgatg

SEQ ID NO: 14071 - DNA, 15 bp, Homo sapiens
ggcttgtggtctgat

SEQ ID NO: 14072 - DNA, 15 bp, Homo sapiens
gggcttgtggtctga

SEQ ID NO: 14073 - DNA, 15 bp, Homo sapiens
agggcttgtggtctg

SEQ ID NO: 14074 - DNA, 15 bp, Homo sapiens
gagggcttgtggtct

SEQ ID NO: 14075 - DNA, 15 bp, Homo sapiens
agagggcttgtggtc

SEQ ID NO: 14076 - DNA, 15 bp, Homo sapiens
tagagggcttgtggt

SEQ ID NO: 14077 - DNA, 15 bp, Homo sapiens
ctagagggcttgtgg

SEQ ID NO: 14078 - DNA, 15 bp, Homo sapiens
cctagagggcttgtg

SEQ ID NO: 14079 - DNA, 15 bp, Homo sapiens
ccctagagggcttgt

SEQ ID NO: 14080 - DNA, 15 bp, Homo sapiens
gccctagagggcttg

SEQ ID NO: 14081 - DNA, 15 bp, Homo sapiens
agccctagagggctt

SEQ ID NO: 14082 - DNA, 15 bp, Homo sapiens
gagccctagagggct

SEQ ID NO: 14083 - DNA, 15 bp, Homo sapiens
agagccctagagggc

SEQ ID NO: 14084 - DNA, 15 bp, Homo sapiens
cagagccctagaggg

SEQ ID NO: 14085 - DNA, 15 bp, Homo sapiens
acagagccctagagg

SEQ ID NO: 14086 - DNA, 15 bp, Homo sapiens
gacagagccctagag

SEQ ID NO: 14087 - DNA, 15 bp, Homo sapiens
ggacagagccctaga

SEQ ID NO: 14088 - DNA, 15 bp, Homo sapiens
tggacagagccctag

SEQ ID NO: 14089 - DNA, 15 bp, Homo sapiens
ttggacagagcccta

SEQ ID NO: 14090 - DNA, 15 bp, Homo sapiens
tttggacagagccct

SEQ ID NO: 14091 - DNA, 15 bp, Homo sapiens
atttggacagagccc

SEQ ID NO: 14092 - DNA, 15 bp, Homo sapiens
catttggacagagcc

SEQ ID NO: 14093 - DNA, 15 bp, Homo sapiens
gcatttggacagagc

SEQ ID NO: 14094 - DNA, 15 bp, Homo sapiens
ggcatttggacagag

SEQ ID NO: 14095 - DNA, 15 bp, Homo sapiens
gggcatttggacaga

SEQ ID NO: 14096 - DNA, 15 bp, Homo sapiens
ggggcatttggacag

SEQ ID NO: 14097 - DNA, 15 bp, Homo sapiens
tggggcatttggaca

SEQ ID NO: 14098 - DNA, 15 bp, Homo sapiens
atggggcatttggac

SEQ ID NO: 14099 - DNA, 15 bp, Homo sapiens
catggggcatttgga

SEQ ID NO: 14100 - DNA, 15 bp, Homo sapiens
tcatggggcatttgg

SEQ ID NO: 14101 - DNA, 15 bp, Homo sapiens
gtcatggggcatttg

SEQ ID NO: 14102 - DNA, 15 bp, Homo sapiens
agtcatggggcattt

SEQ ID NO: 14103 - DNA, 15 bp, Homo sapiens
cagtcatggggcatt

SEQ ID NO: 14104 - DNA, 15 bp, Homo sapiens
tcagtcatggggcat

SEQ ID NO: 14105 - DNA, 15 bp, Homo sapiens
ctcagtcatggggca

SEQ ID NO: 14106 - DNA, 15 bp, Homo sapiens
actcagtcatggggc

SEQ ID NO: 14107 - DNA, 15 bp, Homo sapiens
cactcagtcatgggg

SEQ ID NO: 14108 - DNA, 15 bp, Homo sapiens
tcactcagtcatggg

SEQ ID NO: 14109 - DNA, 15 bp, Homo sapiens
ttcactcagtcatgg

SEQ ID NO: 14110 - DNA, 15 bp, Homo sapiens
gttcactcagtcatg

SEQ ID NO: 14111 - DNA, 15 bp, Homo sapiens
agttcactcagtcat

SEQ ID NO: 14112 - DNA, 15 bp, Homo sapiens
cagttcactcagtca

SEQ ID NO: 14113 - DNA, 15 bp, Homo sapiens
ccagttcactcagtc

SEQ ID NO: 14114 - DNA, 15 bp, Homo sapiens
accagttcactcagt

SEQ ID NO: 14115 - DNA, 15 bp, Homo sapiens
taccagttcactcag

SEQ ID NO: 14116 - DNA, 15 bp, Homo sapiens
ctaccagttcactca

SEQ ID NO: 14117 - DNA, 15 bp, Homo sapiens
tctaccagttcactc

SEQ ID NO: 14118 - DNA, 15 bp, Homo sapiens
ttctaccagttcact

SEQ ID NO: 14119 - DNA, 15 bp, Homo sapiens
gttctaccagttcac

SEQ ID NO: 14120 - DNA, 15 bp, Homo sapiens
tgttctaccagttca

SEQ ID NO: 14121 - DNA, 15 bp, Homo sapiens
atgttctaccagttc

SEQ ID NO: 14122 - DNA, 15 bp, Homo sapiens
aatgttctaccagtt

SEQ ID NO: 14123 - DNA, 15 bp, Homo sapiens
gaatgttctaccagt

SEQ ID NO: 14124 - DNA, 15 bp, Homo sapiens
agaatgttctaccag

SEQ ID NO: 14125 - DNA, 15 bp, Homo sapiens
tagaatgttctacca

SEQ ID NO: 14126 - DNA, 15 bp, Homo sapiens
atagaatgttctacc

SEQ ID NO: 14127 - DNA, 15 bp, Homo sapiens
catagaatgttctac

SEQ ID NO: 14128 - DNA, 15 bp, Homo sapiens
acatagaatgttcta

SEQ ID NO: 14129 - DNA, 15 bp, Homo sapiens
cacatagaatgttct

SEQ ID NO: 14130 - DNA, 15 bp, Homo sapiens
acacatagaatgttc

SEQ ID NO: 14131 - DNA, 15 bp, Homo sapiens
cacacatagaatgtt

SEQ ID NO: 14132 - DNA, 15 bp, Homo sapiens
acacacatagaatgt

SEQ ID NO: 14133 - DNA, 15 bp, Homo sapiens
cacacacatagaatg

SEQ ID NO: 14134 - DNA, 15 bp, Homo sapiens
acacacacatagaat

SEQ ID NO: 14135 - DNA, 15 bp, Homo sapiens
gacacacacatagaa

SEQ ID NO: 14136 - DNA, 15 bp, Homo sapiens
tgacacacacataga

SEQ ID NO: 14137 - DNA, 15 bp, Homo sapiens
gtgacacacacatag

SEQ ID NO: 14138 - DNA, 15 bp, Homo sapiens
tgtgacacacacata

SEQ ID NO: 14139 - DNA, 15 bp, Homo sapiens
ttgtgacacacacat

SEQ ID NO: 14140 - DNA, 15 bp, Homo sapiens
gttgtgacacacaca

SEQ ID NO: 14141 - DNA, 15 bp, Homo sapiens
tgttgtgacacacac

SEQ ID NO: 14142 - DNA, 15 bp, Homo sapiens
atgttgtgacacaca

SEQ ID NO: 14143 - DNA, 15 bp, Homo sapiens
catgttgtgacacac

SEQ ID NO: 14144 - DNA, 15 bp, Homo sapiens
tcatgttgtgacaca

SEQ ID NO: 14145 - DNA, 15 bp, Homo sapiens
ttcatgttgtgacac

SEQ ID NO: 14146 - DNA, 15 bp, Homo sapiens
cttcatgttgtgaca

SEQ ID NO: 14147 - DNA, 15 bp, Homo sapiens
tcttcatgttgtgac

SEQ ID NO: 14148 - DNA, 15 bp, Homo sapiens
ctcttcatgttgtga

SEQ ID NO: 14149 - DNA, 15 bp, Homo sapiens
gctcttcatgttgtg

SEQ ID NO: 14150 - DNA, 15 bp, Homo sapiens
tgctcttcatgttgt

SEQ ID NO: 14151 - DNA, 15 bp, Homo sapiens
ttgctcttcatgttg

SEQ ID NO: 14152 - DNA, 15 bp, Homo sapiens
tttgctcttcatgtt

SEQ ID NO: 14153 - DNA, 15 bp, Homo sapiens
ctttgctcttcatgt

SEQ ID NO: 14154 - DNA, 15 bp, Homo sapiens
tctttgctcttcatg

SEQ ID NO: 14155 - DNA, 15 bp, Homo sapiens
gtctttgctcttcat

SEQ ID NO: 14156 - DNA, 15 bp, Homo sapiens
agtctttgctcttca

SEQ ID NO: 14157 - DNA, 15 bp, Homo sapiens
aagtctttgctcttc

SEQ ID NO: 14158 - DNA, 15 bp, Homo sapiens
aaagtctttgctctt

SEQ ID NO: 14159 - DNA, 15 bp, Homo sapiens
gaaagtctttgctct

SEQ ID NO: 14160 - DNA, 15 bp, Homo sapiens
tgaaagtctttgctc

SEQ ID NO: 14161 - DNA, 15 bp, Homo sapiens
atgaaagtctttgct

SEQ ID NO: 14162 - DNA, 15 bp, Homo sapiens
gatgaaagtctttgc

SEQ ID NO: 14163 - DNA, 15 bp, Homo sapiens
agatgaaagtctttg

SEQ ID NO: 14164 - DNA, 15 bp, Homo sapiens
gagatgaaagtcttt

SEQ ID NO: 14165 - DNA, 15 bp, Homo sapiens
ggagatgaaagtctt

SEQ ID NO: 14166 - DNA, 15 bp, Homo sapiens
gggagatgaaagtct

SEQ ID NO: 14167 - DNA, 15 bp, Homo sapiens
ggggagatgaaagtc

SEQ ID NO: 14168 - DNA, 15 bp, Homo sapiens
tggggagatgaaagt

SEQ ID NO: 14169 - DNA, 15 bp, Homo sapiens
ttggggagatgaaag

SEQ ID NO: 14170 - DNA, 15 bp, Homo sapiens
tttggggagatgaaa

SEQ ID NO: 14171 - DNA, 15 bp, Homo sapiens
atttggggagatgaa

SEQ ID NO: 14172 - DNA, 15 bp, Homo sapiens
tatttggggagatga

SEQ ID NO: 14173 - DNA, 15 bp, Homo sapiens
ttatttggggagatg

SEQ ID NO: 14174 - DNA, 15 bp, Homo sapiens
attatttggggagat

SEQ ID NO: 14175 - DNA, 15 bp, Homo sapiens
aattatttggggaga

SEQ ID NO: 14176 - DNA, 15 bp, Homo sapiens
aaattatttggggag

SEQ ID NO: 14177 - DNA, 15 bp, Homo sapiens
aaaattatttgggga

SEQ ID NO: 14178 - DNA, 15 bp, Homo sapiens
caaaattatttgggg

SEQ ID NO: 14179 - DNA, 15 bp, Homo sapiens
acaaaattatttggg

SEQ ID NO: 14180 - DNA, 15 bp, Homo sapiens
aacaaaattatttgg

SEQ ID NO: 14181 - DNA, 15 bp, Homo sapiens
aaacaaaattatttg

SEQ ID NO: 14182 - DNA, 15 bp, Homo sapiens
aaaacaaaattattt

SEQ ID NO: 14183 - DNA, 15 bp, Homo sapiens
aaaaacaaaattatt

SEQ ID NO: 14184 - DNA, 15 bp, Homo sapiens
gaaaaacaaaattat

SEQ ID NO: 14185 - DNA, 15 bp, Homo sapiens
cgaaaaacaaaatta

SEQ ID NO: 14186 - DNA, 15 bp, Homo sapiens
acgaaaaacaaaatt

SEQ ID NO: 14187 - DNA, 15 bp, Homo sapiens
aacgaaaaacaaaat

SEQ ID NO: 14188 - DNA, 15 bp, Homo sapiens
aaacgaaaaacaaaa

SEQ ID NO: 14189 - DNA, 15 bp, Homo sapiens
aaaacgaaaaacaaa

SEQ ID NO: 14190 - DNA, 15 bp, Homo sapiens
taaaacgaaaaacaa

SEQ ID NO: 14191 - DNA, 15 bp, Homo sapiens
ctaaaacgaaaaaca

SEQ ID NO: 14192 - DNA, 15 bp, Homo sapiens
cctaaaacgaaaaac

SEQ ID NO: 14193 - DNA, 15 bp, Homo sapiens
tcctaaaacgaaaaa

SEQ ID NO: 14194 - DNA, 15 bp, Homo sapiens
ttcctaaaacgaaaa

SEQ ID NO: 14195 - DNA, 15 bp, Homo sapiens
attcctaaaacgaaa

SEQ ID NO: 14196 - DNA, 15 bp, Homo sapiens
aattcctaaaacgaa

SEQ ID NO: 14197 - DNA, 15 bp, Homo sapiens
taattcctaaaacga

SEQ ID NO: 14198 - DNA, 15 bp, Homo sapiens
ttaattcctaaaacg

SEQ ID NO: 14199 - DNA, 15 bp, Homo sapiens
tttaattcctaaaac

SEQ ID NO: 14200 - DNA, 15 bp, Homo sapiens
atttaattcctaaaa

SEQ ID NO: 14201 - DNA, 15 bp, Homo sapiens
aatttaattcctaaa

SEQ ID NO: 14202 - DNA, 15 bp, Homo sapiens
aaatttaattcctaa

SEQ ID NO: 14203 - DNA, 15 bp, Homo sapiens
gaaatttaattccta

SEQ ID NO: 14204 - DNA, 15 bp, Homo sapiens
tgaaatttaattcct

SEQ ID NO: 14205 - DNA, 15 bp, Homo sapiens
ctgaaatttaattcc

SEQ ID NO: 14206 - DNA, 15 bp, Homo sapiens
tctgaaatttaattc

SEQ ID NO: 14207 - DNA, 15 bp, Homo sapiens
atctgaaatttaatt

SEQ ID NO: 14208 - DNA, 15 bp, Homo sapiens
aatctgaaatttaat

SEQ ID NO: 14209 - DNA, 15 bp, Homo sapiens
gaatctgaaatttaa

SEQ ID NO: 14210 - DNA, 15 bp, Homo sapiens
tgaatctgaaattta

SEQ ID NO: 14211 - DNA, 15 bp, Homo sapiens
gtgaatctgaaattt

SEQ ID NO: 14212 - DNA, 15 bp, Homo sapiens
agtgaatctgaaatt

SEQ ID NO: 14213 - DNA, 15 bp, Homo sapiens
gagtgaatctgaaat

SEQ ID NO: 14214 - DNA, 15 bp, Homo sapiens
agagtgaatctgaaa

SEQ ID NO: 14215 - DNA, 15 bp, Homo sapiens
tagagtgaatctgaa

SEQ ID NO: 14216 - DNA, 15 bp, Homo sapiens
ttagagtgaatctga

SEQ ID NO: 14217 - DNA, 15 bp, Homo sapiens
attagagtgaatctg

SEQ ID NO: 14218 - DNA, 15 bp, Homo sapiens
aattagagtgaatct

SEQ ID NO: 14219 - DNA, 15 bp, Homo sapiens
caattagagtgaatc

SEQ ID NO: 14220 - DNA, 15 bp, Homo sapiens
gcaattagagtgaat

SEQ ID NO: 14221 - DNA, 15 bp, Homo sapiens
ggcaattagagtgaa

SEQ ID NO: 14222 - DNA, 15 bp, Homo sapiens
tggcaattagagtga

SEQ ID NO: 14223 - DNA, 15 bp, Homo sapiens
ttggcaattagagtg

SEQ ID NO: 14224 - DNA, 15 bp, Homo sapiens
attggcaattagagt

SEQ ID NO: 14225 - DNA, 15 bp, Homo sapiens
tattggcaattagag

SEQ ID NO: 14226 - DNA, 15 bp, Homo sapiens
gtattggcaattaga

SEQ ID NO: 14227 - DNA, 15 bp, Homo sapiens
agtattggcaattag

SEQ ID NO: 14228 - DNA, 15 bp, Homo sapiens
tagtattggcaatta

SEQ ID NO: 14229 - DNA, 15 bp, Homo sapiens
ttagtattggcaatt

SEQ ID NO: 14230 - DNA, 15 bp, Homo sapiens
tttagtattggcaat

SEQ ID NO: 14231 - DNA, 15 bp, Homo sapiens
ttttagtattggcaa

SEQ ID NO: 14232 - DNA, 15 bp, Homo sapiens
attttagtattggca

SEQ ID NO: 14233 - DNA, 15 bp, Homo sapiens
aattttagtattggc

SEQ ID NO: 14234 - DNA, 15 bp, Homo sapiens
gaattttagtattgg

SEQ ID NO: 14235 - DNA, 15 bp, Homo sapiens
agaattttagtattg

SEQ ID NO: 14236 - DNA, 15 bp, Homo sapiens
gagaattttagtatt

SEQ ID NO: 14237 - DNA, 15 bp, Homo sapiens
agagaattttagtat

SEQ ID NO: 14238 - DNA, 15 bp, Homo sapiens
tagagaattttagta

SEQ ID NO: 14239 - DNA, 15 bp, Homo sapiens
atagagaattttagt

SEQ ID NO: 14240 - DNA, 15 bp, Homo sapiens
tatagagaattttag

SEQ ID NO: 14241 - DNA, 15 bp, Homo sapiens
atatagagaatttta

SEQ ID NO: 14242 - DNA, 15 bp, Homo sapiens
catatagagaatttt

SEQ ID NO: 14243 - DNA, 15 bp, Homo sapiens
gcatatagagaattt

SEQ ID NO: 14244 - DNA, 15 bp, Homo sapiens
tgcatatagagaatt

SEQ ID NO: 14245 - DNA, 15 bp, Homo sapiens
ctgcatatagagaat

SEQ ID NO: 14246 - DNA, 15 bp, Homo sapiens
actgcatatagagaa

SEQ ID NO: 14247 - DNA, 15 bp, Homo sapiens
aactgcatatagaga

SEQ ID NO: 14248 - DNA, 15 bp, Homo sapiens
gaactgcatatagag

SEQ ID NO: 14249 - DNA, 15 bp, Homo sapiens
agaactgcatataga

SEQ ID NO: 14250 - DNA, 15 bp, Homo sapiens
tagaactgcatatag

SEQ ID NO: 14251 - DNA, 15 bp, Homo sapiens
ttagaactgcatata

SEQ ID NO: 14252 - DNA, 15 bp, Homo sapiens
tttagaactgcatat

SEQ ID NO: 14253 - DNA, 15 bp, Homo sapiens
gtttagaactgcata

SEQ ID NO: 14254 - DNA, 15 bp, Homo sapiens
agtttagaactgcat

SEQ ID NO: 14255 - DNA, 15 bp, Homo sapiens
aagtttagaactgca

SEQ ID NO: 14256 - DNA, 15 bp, Homo sapiens
caagtttagaactgc

SEQ ID NO: 14257 - DNA, 15 bp, Homo sapiens
tcaagtttagaactg

SEQ ID NO: 14258 - DNA, 15 bp, Homo sapiens
gtcaagtttagaact

SEQ ID NO: 14259 - DNA, 15 bp, Homo sapiens
tgtcaagtttagaac

SEQ ID NO: 14260 - DNA, 15 bp, Homo sapiens
ttgtcaagtttagaa

SEQ ID NO: 14261 - DNA, 15 bp, Homo sapiens
tttgtcaagtttaga

SEQ ID NO: 14262 - DNA, 15 bp, Homo sapiens
gtttgtcaagtttag

SEQ ID NO: 14263 - DNA, 15 bp, Homo sapiens
ggtttgtcaagttta

SEQ ID NO: 14264 - DNA, 15 bp, Homo sapiens
tggtttgtcaagttt

SEQ ID NO: 14265 - DNA, 15 bp, Homo sapiens
ttggtttgtcaagtt

SEQ ID NO: 14266 - DNA, 15 bp, Homo sapiens
attggtttgtcaagt

SEQ ID NO: 14267 - DNA, 15 bp, Homo sapiens
tattggtttgtcaag

SEQ ID NO: 14268 - DNA, 15 bp, Homo sapiens
ttattggtttgtcaa

SEQ ID NO: 14269 - DNA, 15 bp, Homo sapiens
tttattggtttgtca

SEQ ID NO: 14270 - DNA, 15 bp, Homo sapiens
ttttattggtttgtc

SEQ ID NO: 14271 - DNA, 15 bp, Homo sapiens
tttttattggtttgt

SEQ ID NO: 14272 - DNA, 15 bp, Homo sapiens
ttttttattggtttg

SEQ ID NO: 14273 - DNA, 15 bp, Homo sapiens
tttttttattggttt

SEQ ID NO: 14274 - DNA, 15 bp, Homo sapiens
ctttttttattggtt

SEQ ID NO: 14275 - DNA, 15 bp, Homo sapiens
tctttttttattggt

SEQ ID NO: 14276 - DNA, 15 bp, Homo sapiens
atctttttttattgg

SEQ ID NO: 14277 - DNA, 15 bp, Homo sapiens
aatctttttttattg

SEQ ID NO: 14278 - DNA, 15 bp, Homo sapiens
taatctttttttatt

SEQ ID NO: 14279 - DNA, 15 bp, Homo sapiens
ataatctttttttat

SEQ ID NO: 14280 - DNA, 15 bp, Homo sapiens
aataatcttttttta

SEQ ID NO: 14281 - DNA, 15 bp, Homo sapiens
aaataatcttttttt

SEQ ID NO: 14282 - DNA, 15 bp, Homo sapiens
caaataatctttttt

SEQ ID NO: 14283 - DNA, 15 bp, Homo sapiens
tcaaataatcttttt

SEQ ID NO: 14284 - DNA, 15 bp, Homo sapiens
gtcaaataatctttt

SEQ ID NO: 14285 - DNA, 15 bp, Homo sapiens
agtcaaataatcttt

SEQ ID NO: 14286 - DNA, 15 bp, Homo sapiens
tagtcaaataatctt

SEQ ID NO: 14287 - DNA, 15 bp, Homo sapiens
gtagtcaaataatct

SEQ ID NO: 14288 - DNA, 15 bp, Homo sapiens
agtagtcaaataatc

SEQ ID NO: 14289 - DNA, 15 bp, Homo sapiens
aagtagtcaaataat

SEQ ID NO: 14290 - DNA, 15 bp, Homo sapiens
taagtagtcaaataa

SEQ ID NO: 14291 - DNA, 15 bp, Homo sapiens
ataagtagtcaaata

SEQ ID NO: 14292 - DNA, 15 bp, Homo sapiens
gataagtagtcaaat

SEQ ID NO: 14293 - DNA, 15 bp, Homo sapiens
agataagtagtcaaa

SEQ ID NO: 14294 - DNA, 15 bp, Homo sapiens
aagataagtagtcaa

SEQ ID NO: 14295 - DNA, 15 bp, Homo sapiens
aaagataagtagtca

SEQ ID NO: 14296 - DNA, 15 bp, Homo sapiens
caaagataagtagtc

SEQ ID NO: 14297 - DNA, 15 bp, Homo sapiens
acaaagataagtagt

SEQ ID NO: 14298 - DNA, 15 bp, Homo sapiens
tacaaagataagtag

SEQ ID NO: 14299 - DNA, 15 bp, Homo sapiens
gtacaaagataagta

SEQ ID NO: 14300 - DNA, 15 bp, Homo sapiens
tgtacaaagataagt

SEQ ID NO: 14301 - DNA, 15 bp, Homo sapiens
ttgtacaaagataag

SEQ ID NO: 14302 - DNA, 15 bp, Homo sapiens
gttgtacaaagataa

SEQ ID NO: 14303 - DNA, 15 bp, Homo sapiens
tgttgtacaaagata

SEQ ID NO: 14304 - DNA, 15 bp, Homo sapiens
atgttgtacaaagat

SEQ ID NO: 14305 - DNA, 15 bp, Homo sapiens
aatgttgtacaaaga

SEQ ID NO: 14306 - DNA, 15 bp, Homo sapiens
caatgttgtacaaag

SEQ ID NO: 14307 - DNA, 15 bp, Homo sapiens
tcaatgttgtacaaa

SEQ ID NO: 14308 - DNA, 15 bp, Homo sapiens
ctcaatgttgtacaa

SEQ ID NO: 14309 - DNA, 15 bp, Homo sapiens
cctcaatgttgtaca

SEQ ID NO: 14310 - DNA, 15 bp, Homo sapiens
acctcaatgttgtac

SEQ ID NO: 14311 - DNA, 15 bp, Homo sapiens
gacctcaatgttgta

SEQ ID NO: 14312 - DNA, 15 bp, Homo sapiens
agacctcaatgttgt

SEQ ID NO: 14313 - DNA, 15 bp, Homo sapiens
gagacctcaatgttg

SEQ ID NO: 14314 - DNA, 15 bp, Homo sapiens
ggagacctcaatgtt

SEQ ID NO: 14315 - DNA, 15 bp, Homo sapiens
gggagacctcaatgt

SEQ ID NO: 14316 - DNA, 15 bp, Homo sapiens
agggagacctcaatg

SEQ ID NO: 14317 - DNA, 15 bp, Homo sapiens
tagggagacctcaat

SEQ ID NO: 14318 - DNA, 15 bp, Homo sapiens
ttagggagacctcaa

SEQ ID NO: 14319 - DNA, 15 bp, Homo sapiens
tttagggagacctca

SEQ ID NO: 14320 - DNA, 15 bp, Homo sapiens
ctttagggagacctc

SEQ ID NO: 14321 - DNA, 15 bp, Homo sapiens
gctttagggagacct

SEQ ID NO: 14322 - DNA, 15 bp, Homo sapiens
tgctttagggagacc

SEQ ID NO: 14323 - DNA, 15 bp, Homo sapiens
ttgctttagggagac

SEQ ID NO: 14324 - DNA, 15 bp, Homo sapiens
tttgctttagggaga

SEQ ID NO: 14325 - DNA, 15 bp, Homo sapiens
atttgctttagggag

SEQ ID NO: 14326 - DNA, 15 bp, Homo sapiens
aatttgctttaggga

SEQ ID NO: 14327 - DNA, 15 bp, Homo sapiens
aaatttgctttaggg

SEQ ID NO: 14328 - DNA, 15 bp, Homo sapiens
taaatttgctttagg

SEQ ID NO: 14329 - DNA, 15 bp, Homo sapiens
ttaaatttgctttag

SEQ ID NO: 14330 - DNA, 15 bp, Homo sapiens
tttaaatttgcttta

SEQ ID NO: 14331 - DNA, 15 bp, Homo sapiens
atttaaatttgcttt

SEQ ID NO: 14332 - DNA, 15 bp, Homo sapiens
catttaaatttgctt

SEQ ID NO: 14333 - DNA, 15 bp, Homo sapiens
gcatttaaatttgct

SEQ ID NO: 14334 - DNA, 15 bp, Homo sapiens
tgcatttaaatttgc

SEQ ID NO: 14335 - DNA, 15 bp, Homo sapiens
atgcatttaaatttg

SEQ ID NO: 14336 - DNA, 15 bp, Homo sapiens
tatgcatttaaattt

SEQ ID NO: 14337 - DNA, 15 bp, Homo sapiens
atatgcatttaaatt

SEQ ID NO: 14338 - DNA, 15 bp, Homo sapiens
aatatgcatttaaat

SEQ ID NO: 14339 - DNA, 15 bp, Homo sapiens
aaatatgcatttaaa

SEQ ID NO: 14340 - DNA, 15 bp, Homo sapiens
aaaatatgcatttaa

SEQ ID NO: 14341 - DNA, 15 bp, Homo sapiens
taaaatatgcattta

SEQ ID NO: 14342 - DNA, 15 bp, Homo sapiens
ttaaaatatgcattt

SEQ ID NO: 14343 - DNA, 15 bp, Homo sapiens
tttaaaatatgcatt

SEQ ID NO: 14344 - DNA, 15 bp, Homo sapiens
ttttaaaatatgcat

SEQ ID NO: 14345 - DNA, 15 bp, Homo sapiens
tttttaaaatatgca

SEQ ID NO: 14346 - DNA, 15 bp, Homo sapiens
atttttaaaatatgc

SEQ ID NO: 14347 - DNA, 15 bp, Homo sapiens
catttttaaaatatg

SEQ ID NO: 14348 - DNA, 15 bp, Homo sapiens
acatttttaaaatat

SEQ ID NO: 14349 - DNA, 15 bp, Homo sapiens
tacatttttaaaata

SEQ ID NO: 14350 - DNA, 15 bp, Homo sapiens
atacatttttaaaat

SEQ ID NO: 14351 - DNA, 15 bp, Homo sapiens
aatacatttttaaaa

SEQ ID NO: 14352 - DNA, 15 bp, Homo sapiens
gaatacatttttaaa

SEQ ID NO: 14353 - DNA, 15 bp, Homo sapiens
agaatacatttttaa

SEQ ID NO: 14354 - DNA, 15 bp, Homo sapiens
tagaatacattttta

SEQ ID NO: 14355 - DNA, 15 bp, Homo sapiens
ctagaatacattttt

SEQ ID NO: 14356 - DNA, 15 bp, Homo sapiens
gctagaatacatttt

SEQ ID NO: 14357 - DNA, 15 bp, Homo sapiens
tgctagaatacattt

SEQ ID NO: 14358 - DNA, 15 bp, Homo sapiens
ctgctagaatacatt

SEQ ID NO: 14359 - DNA, 15 bp, Homo sapiens
actgctagaatacat

SEQ ID NO: 14360 - DNA, 15 bp, Homo sapiens
aactgctagaataca

SEQ ID NO: 14361 - DNA, 15 bp, Homo sapiens
gaactgctagaatac

SEQ ID NO: 14362 - DNA, 15 bp, Homo sapiens
tgaactgctagaata

SEQ ID NO: 14363 - DNA, 15 bp, Homo sapiens
ctgaactgctagaat

SEQ ID NO: 14364 - DNA, 15 bp, Homo sapiens
actgaactgctagaa

SEQ ID NO: 14365 - DNA, 15 bp, Homo sapiens
aactgaactgctaga

SEQ ID NO: 14366 - DNA, 15 bp, Homo sapiens
gaactgaactgctag

SEQ ID NO: 14367 - DNA, 15 bp, Homo sapiens
tgaactgaactgcta

SEQ ID NO: 14368 - DNA, 15 bp, Homo sapiens
ctgaactgaactgct

SEQ ID NO: 14369 - DNA, 15 bp, Homo sapiens
tctgaactgaactgc

SEQ ID NO: 14370 - DNA, 15 bp, Homo sapiens
ttctgaactgaactg

SEQ ID NO: 14371 - DNA, 15 bp, Homo sapiens
cttctgaactgaact

SEQ ID NO: 14372 - DNA, 15 bp, Homo sapiens
gcttctgaactgaac

SEQ ID NO: 14373 - DNA, 15 bp, Homo sapiens
ggcttctgaactgaa

SEQ ID NO: 14374 - DNA, 15 bp, Homo sapiens
gggcttctgaactga

SEQ ID NO: 14375 - DNA, 15 bp, Homo sapiens
ggggcttctgaactg

SEQ ID NO: 14376 - DNA, 15 bp, Homo sapiens
gggggcttctgaact

SEQ ID NO: 14377 - DNA, 15 bp, Homo sapiens
agggggcttctgaac

SEQ ID NO: 14378 - DNA, 15 bp, Homo sapiens
cagggggcttctgaa

SEQ ID NO: 14379 - DNA, 15 bp, Homo sapiens
ccagggggcttctga

SEQ ID NO: 14380 - DNA, 15 bp, Homo sapiens
gccagggggcttctg

SEQ ID NO: 14381 - DNA, 15 bp, Homo sapiens
ggccagggggcttct

SEQ ID NO: 14382 - DNA, 15 bp, Homo sapiens
gggccagggggcttc

SEQ ID NO: 14383 - DNA, 15 bp, Homo sapiens
tgggccagggggctt

SEQ ID NO: 14384 - DNA, 15 bp, Homo sapiens
ttgggccagggggct

SEQ ID NO: 14385 - DNA, 15 bp, Homo sapiens
cttgggccagggggc

SEQ ID NO: 14386 - DNA, 15 bp, Homo sapiens
gcttgggccaggggg

SEQ ID NO: 14387 - DNA, 15 bp, Homo sapiens
tgcttgggccagggg

SEQ ID NO: 14388 - DNA, 15 bp, Homo sapiens
atgcttgggccaggg

SEQ ID NO: 14389 - DNA, 15 bp, Homo sapiens
gatgcttgggccagg

SEQ ID NO: 14390 - DNA, 15 bp, Homo sapiens
tgatgcttgggccag

SEQ ID NO: 14391 - DNA, 15 bp, Homo sapiens
gtgatgcttgggcca

SEQ ID NO: 14392 - DNA, 15 bp, Homo sapiens
tgtgatgcttgggcc

SEQ ID NO: 14393 - DNA, 15 bp, Homo sapiens
gtgtgatgcttgggc

SEQ ID NO: 14394 - DNA, 15 bp, Homo sapiens
agtgtgatgcttggg

SEQ ID NO: 14395 - DNA, 15 bp, Homo sapiens
cagtgtgatgcttgg

SEQ ID NO: 14396 - DNA, 15 bp, Homo sapiens
acagtgtgatgcttg

SEQ ID NO: 14397 - DNA, 15 bp, Homo sapiens
gacagtgtgatgctt

SEQ ID NO: 14398 - DNA, 15 bp, Homo sapiens
tgacagtgtgatgct

SEQ ID NO: 14399 - DNA, 15 bp, Homo sapiens
ttgacagtgtgatgc

SEQ ID NO: 14400 - DNA, 15 bp, Homo sapiens
attgacagtgtgatg

SEQ ID NO: 14401 - DNA, 15 bp, Homo sapiens
gattgacagtgtgat

SEQ ID NO: 14402 - DNA, 15 bp, Homo sapiens
ggattgacagtgtga

SEQ ID NO: 14403 - DNA, 15 bp, Homo sapiens
aggattgacagtgtg

SEQ ID NO: 14404 - DNA, 15 bp, Homo sapiens
aaggattgacagtgt

SEQ ID NO: 14405 - DNA, 15 bp, Homo sapiens
aaaggattgacagtg

SEQ ID NO: 14406 - DNA, 15 bp, Homo sapiens
caaaggattgacagt

SEQ ID NO: 14407 - DNA, 15 bp, Homo sapiens
acaaaggattgacag

SEQ ID NO: 14408 - DNA, 15 bp, Homo sapiens
gacaaaggattgaca

SEQ ID NO: 14409 - DNA, 15 bp, Homo sapiens
ggacaaaggattgac

SEQ ID NO: 14410 - DNA, 15 bp, Homo sapiens
aggacaaaggattga

SEQ ID NO: 14411 - DNA, 15 bp, Homo sapiens
gaggacaaaggattg

SEQ ID NO: 14412 - DNA, 15 bp, Homo sapiens
tgaggacaaaggatt

SEQ ID NO: 14413 - DNA, 15 bp, Homo sapiens
ttgaggacaaaggat

SEQ ID NO: 14414 - DNA, 15 bp, Homo sapiens
cttgaggacaaagga

SEQ ID NO: 14415 - DNA, 15 bp, Homo sapiens
gcttgaggacaaagg

SEQ ID NO: 14416 - DNA, 15 bp, Homo sapiens
tgcttgaggacaaag

SEQ ID NO: 14417 - DNA, 15 bp, Homo sapiens
ctgcttgaggacaaa

SEQ ID NO: 14418 - DNA, 15 bp, Homo sapiens
gctgcttgaggacaa

SEQ ID NO: 14419 - DNA, 15 bp, Homo sapiens
tgctgcttgaggaca

SEQ ID NO: 14420 - DNA, 15 bp, Homo sapiens
atgctgcttgaggac

SEQ ID NO: 14421 - DNA, 15 bp, Homo sapiens
catgctgcttgagga

SEQ ID NO: 14422 - DNA, 15 bp, Homo sapiens
ccatgctgcttgagg

SEQ ID NO: 14423 - DNA, 15 bp, Homo sapiens
accatgctgcttgag

SEQ ID NO: 14424 - DNA, 15 bp, Homo sapiens
aaccatgctgcttga

SEQ ID NO: 14425 - DNA, 15 bp, Homo sapiens
caaccatgctgcttg

SEQ ID NO: 14426 - DNA, 15 bp, Homo sapiens
ccaaccatgctgctt

SEQ ID NO: 14427 - DNA, 15 bp, Homo sapiens
cccaaccatgctgct

SEQ ID NO: 14428 - DNA, 15 bp, Homo sapiens
acccaaccatgctgc

SEQ ID NO: 14429 - DNA, 15 bp, Homo sapiens
cacccaaccatgctg

SEQ ID NO: 14430 - DNA, 15 bp, Homo sapiens
ccacccaaccatgct

SEQ ID NO: 14431 - DNA, 15 bp, Homo sapiens
cccacccaaccatgc

SEQ ID NO: 14432 - DNA, 15 bp, Homo sapiens
acccacccaaccatg

SEQ ID NO: 14433 - DNA, 15 bp, Homo sapiens
aacccacccaaccat

SEQ ID NO: 14434 - DNA, 15 bp, Homo sapiens
taacccacccaacca

SEQ ID NO: 14435 - DNA, 15 bp, Homo sapiens
ttaacccacccaacc

SEQ ID NO: 14436 - DNA, 15 bp, Homo sapiens
cttaacccacccaac

SEQ ID NO: 14437 - DNA, 15 bp, Homo sapiens
acttaacccacccaa

SEQ ID NO: 14438 - DNA, 15 bp, Homo sapiens
tacttaacccaccca

SEQ ID NO: 14439 - DNA, 15 bp, Homo sapiens
gtacttaacccaccc

SEQ ID NO: 14440 - DNA, 15 bp, Homo sapiens
agtacttaacccacc

SEQ ID NO: 14441 - DNA, 15 bp, Homo sapiens
cagtacttaacccac

SEQ ID NO: 14442 - DNA, 15 bp, Homo sapiens
tcagtacttaaccca

SEQ ID NO: 14443 - DNA, 15 bp, Homo sapiens
gtcagtacttaaccc

SEQ ID NO: 14444 - DNA, 15 bp, Homo sapiens
tgtcagtacttaacc

SEQ ID NO: 14445 - DNA, 15 bp, Homo sapiens
ttgtcagtacttaac

SEQ ID NO: 14446 - DNA, 15 bp, Homo sapiens
tttgtcagtacttaa

SEQ ID NO: 14447 - DNA, 15 bp, Homo sapiens
gtttgtcagtactta

SEQ ID NO: 14448 - DNA, 15 bp, Homo sapiens
tgtttgtcagtactt

SEQ ID NO: 14449 - DNA, 15 bp, Homo sapiens
gtgtttgtcagtact

SEQ ID NO: 14450 - DNA, 15 bp, Homo sapiens
agtgtttgtcagtac

SEQ ID NO: 14451 - DNA, 15 bp, Homo sapiens
cagtgtttgtcagta

SEQ ID NO: 14452 - DNA, 15 bp, Homo sapiens
ccagtgtttgtcagt

SEQ ID NO: 14453 - DNA, 15 bp, Homo sapiens
cccagtgtttgtcag

SEQ ID NO: 14454 - DNA, 15 bp, Homo sapiens
acccagtgtttgtca

SEQ ID NO: 14455 - DNA, 15 bp, Homo sapiens
cacccagtgtttgtc

SEQ ID NO: 14456 - DNA, 15 bp, Homo sapiens
acacccagtgtttgt

SEQ ID NO: 14457 - DNA, 15 bp, Homo sapiens
gacacccagtgtttg

SEQ ID NO: 14458 - DNA, 15 bp, Homo sapiens
tgacacccagtgttt

SEQ ID NO: 14459 - DNA, 15 bp, Homo sapiens
ctgacacccagtgtt

SEQ ID NO: 14460 - DNA, 15 bp, Homo sapiens
cctgacacccagtgt

SEQ ID NO: 14461 - DNA, 15 bp, Homo sapiens
gcctgacacccagtg

SEQ ID NO: 14462 - DNA, 15 bp, Homo sapiens
ggcctgacacccagt

SEQ ID NO: 14463 - DNA, 15 bp, Homo sapiens
gggcctgacacccag

SEQ ID NO: 14464 - DNA, 15 bp, Homo sapiens
tgggcctgacaccca

SEQ ID NO: 14465 - DNA, 15 bp, Homo sapiens
atgggcctgacaccc

SEQ ID NO: 14466 - DNA, 15 bp, Homo sapiens
catgggcctgacacc

SEQ ID NO: 14467 - DNA, 15 bp, Homo sapiens
ccatgggcctgacac

SEQ ID NO: 14468 - DNA, 15 bp, Homo sapiens
accatgggcctgaca

SEQ ID NO: 14469 - DNA, 15 bp, Homo sapiens
gaccatgggcctgac

SEQ ID NO: 14470 - DNA, 15 bp, Homo sapiens
tgaccatgggcctga

SEQ ID NO: 14471 - DNA, 15 bp, Homo sapiens
ctgaccatgggcctg

SEQ ID NO: 14472 - DNA, 15 bp, Homo sapiens
cctgaccatgggcct

SEQ ID NO: 14473 - DNA, 15 bp, Homo sapiens
ccctgaccatgggcc

SEQ ID NO: 14474 - DNA, 15 bp, Homo sapiens
tccctgaccatgggc

SEQ ID NO: 14475 - DNA, 15 bp, Homo sapiens
gtccctgaccatggg

SEQ ID NO: 14476 - DNA, 15 bp, Homo sapiens
agtccctgaccatgg

SEQ ID NO: 14477 - DNA, 15 bp, Homo sapiens
cagtccctgaccatg

SEQ ID NO: 14478 - DNA, 15 bp, Homo sapiens
acagtccctgaccat

SEQ ID NO: 14479 - DNA, 15 bp, Homo sapiens
cacagtccctgacca

SEQ ID NO: 14480 - DNA, 15 bp, Homo sapiens
gcacagtccctgacc

SEQ ID NO: 14481 - DNA, 15 bp, Homo sapiens
agcacagtccctgac

SEQ ID NO: 14482 - DNA, 15 bp, Homo sapiens
tagcacagtccctga

SEQ ID NO: 14483 - DNA, 15 bp, Homo sapiens
ttagcacagtccctg

SEQ ID NO: 14484 - DNA, 15 bp, Homo sapiens
gttagcacagtccct

SEQ ID NO: 14485 - DNA, 15 bp, Homo sapiens
tgttagcacagtccc

SEQ ID NO: 14486 - DNA, 15 bp, Homo sapiens
ctgttagcacagtcc

SEQ ID NO: 14487 - DNA, 15 bp, Homo sapiens
actgttagcacagtc

SEQ ID NO: 14488 - DNA, 15 bp, Homo sapiens
gactgttagcacagt

SEQ ID NO: 14489 - DNA, 15 bp, Homo sapiens
agactgttagcacag

SEQ ID NO: 14490 - DNA, 15 bp, Homo sapiens
tagactgttagcaca

SEQ ID NO: 14491 - DNA, 15 bp, Homo sapiens
gtagactgttagcac

SEQ ID NO: 14492 - DNA, 15 bp, Homo sapiens
tgtagactgttagca

SEQ ID NO: 14493 - DNA, 15 bp, Homo sapiens
atgtagactgttagc

SEQ ID NO: 14494 - DNA, 15 bp, Homo sapiens
tatgtagactgttag

SEQ ID NO: 14495 - DNA, 15 bp, Homo sapiens
atatgtagactgtta

SEQ ID NO: 14496 - DNA, 15 bp, Homo sapiens
aatatgtagactgtt

SEQ ID NO: 14497 - DNA, 15 bp, Homo sapiens
taatatgtagactgt

SEQ ID NO: 14498 - DNA, 15 bp, Homo sapiens
ctaatatgtagactg

SEQ ID NO: 14499 - DNA, 15 bp, Homo sapiens
tctaatatgtagact

SEQ ID NO: 14500 - DNA, 15 bp, Homo sapiens
atctaatatgtagac

SEQ ID NO: 14501 - DNA, 15 bp, Homo sapiens
catctaatatgtaga

SEQ ID NO: 14502 - DNA, 15 bp, Homo sapiens
gcatctaatatgtag

SEQ ID NO: 14503 - DNA, 15 bp, Homo sapiens
ggcatctaatatgta

SEQ ID NO: 14504 - DNA, 15 bp, Homo sapiens
tggcatctaatatgt

SEQ ID NO: 14505 - DNA, 15 bp, Homo sapiens
gtggcatctaatatg

SEQ ID NO: 14506 - DNA, 15 bp, Homo sapiens
ggtggcatctaatat

SEQ ID NO: 14507 - DNA, 15 bp, Homo sapiens
aggtggcatctaata

SEQ ID NO: 14508 - DNA, 15 bp, Homo sapiens
taggtggcatctaat

SEQ ID NO: 14509 - DNA, 15 bp, Homo sapiens
gtaggtggcatctaa

SEQ ID NO: 14510 - DNA, 15 bp, Homo sapiens
ggtaggtggcatcta

SEQ ID NO: 14511 - DNA, 15 bp, Homo sapiens
gggtaggtggcatct

SEQ ID NO: 14512 - DNA, 15 bp, Homo sapiens
ggggtaggtggcatc

SEQ ID NO: 14513 - DNA, 15 bp, Homo sapiens
gggggtaggtggcat

SEQ ID NO: 14514 - DNA, 15 bp, Homo sapiens
tgggggtaggtggca

SEQ ID NO: 14515 - DNA, 15 bp, Homo sapiens
gtgggggtaggtggc

SEQ ID NO: 14516 - DNA, 15 bp, Homo sapiens
ggtgggggtaggtgg

SEQ ID NO: 14517 - DNA, 15 bp, Homo sapiens
gggtgggggtaggtg

SEQ ID NO: 14518 - DNA, 15 bp, Homo sapiens
agggtgggggtaggt

SEQ ID NO: 14519 - DNA, 15 bp, Homo sapiens
gagggtgggggtagg

SEQ ID NO: 14520 - DNA, 15 bp, Homo sapiens
tgagggtgggggtag

SEQ ID NO: 14521 - DNA, 15 bp, Homo sapiens
ttgagggtgggggta

SEQ ID NO: 14522 - DNA, 15 bp, Homo sapiens
gttgagggtgggggt

SEQ ID NO: 14523 - DNA, 15 bp, Homo sapiens
tgttgagggtggggg

SEQ ID NO: 14524 - DNA, 15 bp, Homo sapiens
ctgttgagggtgggg

SEQ ID NO: 14525 - DNA, 15 bp, Homo sapiens
tctgttgagggtggg

SEQ ID NO: 14526 - DNA, 15 bp, Homo sapiens
gtctgttgagggtgg

SEQ ID NO: 14527 - DNA, 15 bp, Homo sapiens
ggtctgttgagggtg

SEQ ID NO: 14528 - DNA, 15 bp, Homo sapiens
gggtctgttgagggt

SEQ ID NO: 14529 - DNA, 15 bp, Homo sapiens
tgggtctgttgaggg

SEQ ID NO: 14530 - DNA, 15 bp, Homo sapiens
ttgggtctgttgagg

SEQ ID NO: 14531 - DNA, 15 bp, Homo sapiens
tttgggtctgttgag

SEQ ID NO: 14532 - DNA, 15 bp, Homo sapiens
gtttgggtctgttga

SEQ ID NO: 14533 - DNA, 15 bp, Homo sapiens
agtttgggtctgttg

SEQ ID NO: 14534 - DNA, 15 bp, Homo sapiens
tagtttgggtctgtt

SEQ ID NO: 14535 - DNA, 15 bp, Homo sapiens
atagtttgggtctgt

SEQ ID NO: 14536 - DNA, 15 bp, Homo sapiens
aatagtttgggtctg

SEQ ID NO: 14537 - DNA, 15 bp, Homo sapiens
aaatagtttgggtct

SEQ ID NO: 14538 - DNA, 15 bp, Homo sapiens
taaatagtttgggtc

SEQ ID NO: 14539 - DNA, 15 bp, Homo sapiens
ataaatagtttgggt

SEQ ID NO: 14540 - DNA, 15 bp, Homo sapiens
gataaatagtttggg

SEQ ID NO: 14541 - DNA, 15 bp, Homo sapiens
ggataaatagtttgg

SEQ ID NO: 14542 - DNA, 15 bp, Homo sapiens
tggataaatagtttg

SEQ ID NO: 14543 - DNA, 15 bp, Homo sapiens
ttggataaatagttt

SEQ ID NO: 14544 - DNA, 15 bp, Homo sapiens
attggataaatagtt

SEQ ID NO: 14545 - DNA, 15 bp, Homo sapiens
tattggataaatagt

SEQ ID NO: 14546 - DNA, 15 bp, Homo sapiens
ctattggataaatag

SEQ ID NO: 14547 - DNA, 15 bp, Homo sapiens
gctattggataaata

SEQ ID NO: 14548 - DNA, 15 bp, Homo sapiens
tgctattggataaat

SEQ ID NO: 14549 - DNA, 15 bp, Homo sapiens
ttgctattggataaa

SEQ ID NO: 14550 - DNA, 15 bp, Homo sapiens
tttgctattggataa

SEQ ID NO: 14551 - DNA, 15 bp, Homo sapiens
gtttgctattggata

SEQ ID NO: 14552 - DNA, 15 bp, Homo sapiens
ggtttgctattggat

SEQ ID NO: 14553 - DNA, 15 bp, Homo sapiens
aggtttgctattgga

SEQ ID NO: 14554 - DNA, 15 bp, Homo sapiens
aaggtttgctattgg

SEQ ID NO: 14555 - DNA, 15 bp, Homo sapiens
caaggtttgctattg

SEQ ID NO: 14556 - DNA, 15 bp, Homo sapiens
gcaaggtttgctatt

SEQ ID NO: 14557 - DNA, 15 bp, Homo sapiens
tgcaaggtttgctat

SEQ ID NO: 14558 - DNA, 15 bp, Homo sapiens
atgcaaggtttgcta

SEQ ID NO: 14559 - DNA, 15 bp, Homo sapiens
aatgcaaggtttgct

SEQ ID NO: 14560 - DNA, 15 bp, Homo sapiens
taatgcaaggtttgc

SEQ ID NO: 14561 - DNA, 15 bp, Homo sapiens
ataatgcaaggtttg

SEQ ID NO: 14562 - DNA, 15 bp, Homo sapiens
aataatgcaaggttt

SEQ ID NO: 14563 - DNA, 15 bp, Homo sapiens
aaataatgcaaggtt

SEQ ID NO: 14564 - DNA, 15 bp, Homo sapiens
gaaataatgcaaggt

SEQ ID NO: 14565 - DNA, 15 bp, Homo sapiens
agaaataatgcaagg

SEQ ID NO: 14566 - DNA, 15 bp, Homo sapiens
cagaaataatgcaag

SEQ ID NO: 14567 - DNA, 15 bp, Homo sapiens
acagaaataatgcaa

SEQ ID NO: 14568 - DNA, 15 bp, Homo sapiens
gacagaaataatgca

SEQ ID NO: 14569 - DNA, 15 bp, Homo sapiens
ggacagaaataatgc

SEQ ID NO: 14570 - DNA, 15 bp, Homo sapiens
tggacagaaataatg

SEQ ID NO: 14571 - DNA, 15 bp, Homo sapiens
ctggacagaaataat

SEQ ID NO: 14572 - DNA, 15 bp, Homo sapiens
tctggacagaaataa

SEQ ID NO: 14573 - DNA, 15 bp, Homo sapiens
ttctggacagaaata

SEQ ID NO: 14574 - DNA, 15 bp, Homo sapiens
cttctggacagaaat

SEQ ID NO: 14575 - DNA, 15 bp, Homo sapiens
tcttctggacagaaa

SEQ ID NO: 14576 - DNA, 15 bp, Homo sapiens
ttcttctggacagaa

SEQ ID NO: 14577 - DNA, 15 bp, Homo sapiens
tttcttctggacaga

SEQ ID NO: 14578 - DNA, 15 bp, Homo sapiens
gtttcttctggacag

SEQ ID NO: 14579 - DNA, 15 bp, Homo sapiens
tgtttcttctggaca

SEQ ID NO: 14580 - DNA, 15 bp, Homo sapiens
ttgtttcttctggac

SEQ ID NO: 14581 - DNA, 15 bp, Homo sapiens
tttgtttcttctgga

SEQ ID NO: 14582 - DNA, 15 bp, Homo sapiens
gtttgtttcttctgg

SEQ ID NO: 14583 - DNA, 15 bp, Homo sapiens
tgtttgtttcttctg

SEQ ID NO: 14584 - DNA, 15 bp, Homo sapiens
atgtttgtttcttct

SEQ ID NO: 14585 - DNA, 15 bp, Homo sapiens
aatgtttgtttcttc

SEQ ID NO: 14586 - DNA, 15 bp, Homo sapiens
aaatgtttgtttctt

SEQ ID NO: 14587 - DNA, 15 bp, Homo sapiens
taaatgtttgtttct

SEQ ID NO: 14588 - DNA, 15 bp, Homo sapiens
ataaatgtttgtttc

SEQ ID NO: 14589 - DNA, 15 bp, Homo sapiens
aataaatgtttgttt

SEQ ID NO: 14590 - DNA, 15 bp, Homo sapiens
caataaatgtttgtt

SEQ ID NO: 14591 - DNA, 15 bp, Homo sapiens
tcaataaatgtttgt

SEQ ID NO: 14592 - DNA, 15 bp, Homo sapiens
gtcaataaatgtttg

SEQ ID NO: 14593 - DNA, 15 bp, Homo sapiens
tgtcaataaatgttt

SEQ ID NO: 14594 - DNA, 15 bp, Homo sapiens
ttgtcaataaatgtt

SEQ ID NO: 14595 - DNA, 15 bp, Homo sapiens
gttgtcaataaatgt

SEQ ID NO: 14596 - DNA, 15 bp, Homo sapiens
agttgtcaataaatg

SEQ ID NO: 14597 - DNA, 15 bp, Homo sapiens
aagttgtcaataaat

SEQ ID NO: 14598 - DNA, 15 bp, Homo sapiens
aaagttgtcaataaa

SEQ ID NO: 14599 - DNA, 15 bp, Homo sapiens
aaaagttgtcaataa

SEQ ID NO: 14600 - DNA, 15 bp, Homo sapiens
caaaagttgtcaata

SEQ ID NO: 14601 - DNA, 15 bp, Homo sapiens
ccaaaagttgtcaat

SEQ ID NO: 14602 - DNA, 15 bp, Homo sapiens
accaaaagttgtcaa

SEQ ID NO: 14603 - DNA, 15 bp, Homo sapiens
caccaaaagttgtca

SEQ ID NO: 14604 - DNA, 15 bp, Homo sapiens
acaccaaaagttgtc

SEQ ID NO: 14605 - DNA, 15 bp, Homo sapiens
cacaccaaaagttgt

SEQ ID NO: 14606 - DNA, 15 bp, Homo sapiens
acacaccaaaagttg

SEQ ID NO: 14607 - DNA, 15 bp, Homo sapiens
cacacaccaaaagtt

SEQ ID NO: 14608 - DNA, 15 bp, Homo sapiens
tcacacaccaaaagt

SEQ ID NO: 14609 - DNA, 15 bp, Homo sapiens
gtcacacaccaaaag

SEQ ID NO: 14610 - DNA, 15 bp, Homo sapiens
ggtcacacaccaaaa

SEQ ID NO: 14611 - DNA, 15 bp, Homo sapiens
aggtcacacaccaaa

SEQ ID NO: 14612 - DNA, 15 bp, Homo sapiens
caggtcacacaccaa

SEQ ID NO: 14613 - DNA, 15 bp, Homo sapiens
acaggtcacacacca

SEQ ID NO: 14614 - DNA, 15 bp, Homo sapiens
aacaggtcacacacc

SEQ ID NO: 14615 - DNA, 15 bp, Homo sapiens
aaacaggtcacacac

SEQ ID NO: 14616 - DNA, 15 bp, Homo sapiens
taaacaggtcacaca

SEQ ID NO: 14617 - DNA, 15 bp, Homo sapiens
ttaaacaggtcacac

SEQ ID NO: 14618 - DNA, 15 bp, Homo sapiens
cttaaacaggtcaca

SEQ ID NO: 14619 - DNA, 15 bp, Homo sapiens
acttaaacaggtcac

SEQ ID NO: 14620 - DNA, 15 bp, Homo sapiens
gacttaaacaggtca

SEQ ID NO: 14621 - DNA, 15 bp, Homo sapiens
ggacttaaacaggtc

SEQ ID NO: 14622 - DNA, 15 bp, Homo sapiens
aggacttaaacaggt

SEQ ID NO: 14623 - DNA, 15 bp, Homo sapiens
taggacttaaacagg

SEQ ID NO: 14624 - DNA, 15 bp, Homo sapiens
gtaggacttaaacag

SEQ ID NO: 14625 - DNA, 15 bp, Homo sapiens
tgtaggacttaaaca

SEQ ID NO: 14626 - DNA, 15 bp, Homo sapiens
atgtaggacttaaac

SEQ ID NO: 14627 - DNA, 15 bp, Homo sapiens
gatgtaggacttaaa

SEQ ID NO: 14628 - DNA, 15 bp, Homo sapiens
agatgtaggacttaa

SEQ ID NO: 14629 - DNA, 15 bp, Homo sapiens
gagatgtaggactta

SEQ ID NO: 14630 - DNA, 15 bp, Homo sapiens
tgagatgtaggactt

SEQ ID NO: 14631 - DNA, 15 bp, Homo sapiens
atgagatgtaggact

SEQ ID NO: 14632 - DNA, 15 bp, Homo sapiens
aatgagatgtaggac

SEQ ID NO: 14633 - DNA, 15 bp, Homo sapiens
aaatgagatgtagga

SEQ ID NO: 14634 - DNA, 15 bp, Homo sapiens
taaatgagatgtagg

SEQ ID NO: 14635 - DNA, 15 bp, Homo sapiens
ttaaatgagatgtag

SEQ ID NO: 14636 - DNA, 15 bp, Homo sapiens
cttaaatgagatgta

SEQ ID NO: 14637 - DNA, 15 bp, Homo sapiens
ccttaaatgagatgt

SEQ ID NO: 14638 - DNA, 15 bp, Homo sapiens
tccttaaatgagatg

SEQ ID NO: 14639 - DNA, 15 bp, Homo sapiens
gtccttaaatgagat

SEQ ID NO: 14640 - DNA, 15 bp, Homo sapiens
agtccttaaatgaga

SEQ ID NO: 14641 - DNA, 15 bp, Homo sapiens
cagtccttaaatgag

SEQ ID NO: 14642 - DNA, 15 bp, Homo sapiens
ccagtccttaaatga

SEQ ID NO: 14643 - DNA, 15 bp, Homo sapiens
accagtccttaaatg

SEQ ID NO: 14644 - DNA, 15 bp, Homo sapiens
gaccagtccttaaat

SEQ ID NO: 14645 - DNA, 15 bp, Homo sapiens
tgaccagtccttaaa

SEQ ID NO: 14646 - DNA, 15 bp, Homo sapiens
ttgaccagtccttaa

SEQ ID NO: 14647 - DNA, 15 bp, Homo sapiens
attgaccagtcctta

SEQ ID NO: 14648 - DNA, 15 bp, Homo sapiens
cattgaccagtcctt

SEQ ID NO: 14649 - DNA, 15 bp, Homo sapiens
acattgaccagtcct

SEQ ID NO: 14650 - DNA, 15 bp, Homo sapiens
aacattgaccagtcc

SEQ ID NO: 14651 - DNA, 15 bp, Homo sapiens
taacattgaccagtc

SEQ ID NO: 14652 - DNA, 15 bp, Homo sapiens
ctaacattgaccagt

SEQ ID NO: 14653 - DNA, 15 bp, Homo sapiens
cctaacattgaccag

SEQ ID NO: 14654 - DNA, 15 bp, Homo sapiens
gcctaacattgacca

SEQ ID NO: 14655 - DNA, 15 bp, Homo sapiens
agcctaacattgacc

SEQ ID NO: 14656 - DNA, 15 bp, Homo sapiens
tagcctaacattgac

SEQ ID NO: 14657 - DNA, 15 bp, Homo sapiens
ctagcctaacattga

SEQ ID NO: 14658 - DNA, 15 bp, Homo sapiens
cctagcctaacattg

SEQ ID NO: 14659 - DNA, 15 bp, Homo sapiens
gcctagcctaacatt

SEQ ID NO: 14660 - DNA, 15 bp, Homo sapiens
tgcctagcctaacat

SEQ ID NO: 14661 - DNA, 15 bp, Homo sapiens
ttgcctagcctaaca

SEQ ID NO: 14662 - DNA, 15 bp, Homo sapiens
attgcctagcctaac

SEQ ID NO: 14663 - DNA, 15 bp, Homo sapiens
cattgcctagcctaa

SEQ ID NO: 14664 - DNA, 15 bp, Homo sapiens
gcattgcctagccta

SEQ ID NO: 14665 - DNA, 15 bp, Homo sapiens
ggcattgcctagcct

SEQ ID NO: 14666 - DNA, 15 bp, Homo sapiens
aggcattgcctagcc

SEQ ID NO: 14667 - DNA, 15 bp, Homo sapiens
caggcattgcctagc

SEQ ID NO: 14668 - DNA, 15 bp, Homo sapiens
acaggcattgcctag

SEQ ID NO: 14669 - DNA, 15 bp, Homo sapiens
aacaggcattgccta

SEQ ID NO: 14670 - DNA, 15 bp, Homo sapiens
aaacaggcattgcct

SEQ ID NO: 14671 - DNA, 15 bp, Homo sapiens
caaacaggcattgcc

SEQ ID NO: 14672 - DNA, 15 bp, Homo sapiens
acaaacaggcattgc

SEQ ID NO: 14673 - DNA, 15 bp, Homo sapiens
cacaaacaggcattg

SEQ ID NO: 14674 - DNA, 15 bp, Homo sapiens
tcacaaacaggcatt

SEQ ID NO: 14675 - DNA, 15 bp, Homo sapiens
ctcacaaacaggcat

SEQ ID NO: 14676 - DNA, 15 bp, Homo sapiens
tctcacaaacaggca

SEQ ID NO: 14677 - DNA, 15 bp, Homo sapiens
ctctcacaaacaggc

SEQ ID NO: 14678 - DNA, 15 bp, Homo sapiens
tctctcacaaacagg

SEQ ID NO: 14679 - DNA, 15 bp, Homo sapiens
ttctctcacaaacag

SEQ ID NO: 14680 - DNA, 15 bp, Homo sapiens
attctctcacaaaca

SEQ ID NO: 14681 - DNA, 15 bp, Homo sapiens
gattctctcacaaac

SEQ ID NO: 14682 - DNA, 15 bp, Homo sapiens
tgattctctcacaaa

SEQ ID NO: 14683 - DNA, 15 bp, Homo sapiens
gtgattctctcacaa

SEQ ID NO: 14684 - DNA, 15 bp, Homo sapiens
agtgattctctcaca

SEQ ID NO: 14685 - DNA, 15 bp, Homo sapiens
cagtgattctctcac

SEQ ID NO: 14686 - DNA, 15 bp, Homo sapiens
gcagtgattctctca

SEQ ID NO: 14687 - DNA, 15 bp, Homo sapiens
ggcagtgattctctc

SEQ ID NO: 14688 - DNA, 15 bp, Homo sapiens
aggcagtgattctct

SEQ ID NO: 14689 - DNA, 15 bp, Homo sapiens
taggcagtgattctc

SEQ ID NO: 14690 - DNA, 15 bp, Homo sapiens
ttaggcagtgattct

SEQ ID NO: 14691 - DNA, 15 bp, Homo sapiens
tttaggcagtgattc

SEQ ID NO: 14692 - DNA, 15 bp, Homo sapiens
ctttaggcagtgatt

SEQ ID NO: 14693 - DNA, 15 bp, Homo sapiens
tctttaggcagtgat

SEQ ID NO: 14694 - DNA, 15 bp, Homo sapiens
ttctttaggcagtga

SEQ ID NO: 14695 - DNA, 15 bp, Homo sapiens
tttctttaggcagtg

SEQ ID NO: 14696 - DNA, 15 bp, Homo sapiens
ttttctttaggcagt

SEQ ID NO: 14697 - DNA, 15 bp, Homo sapiens
attttctttaggcag

SEQ ID NO: 14698 - DNA, 15 bp, Homo sapiens
aattttctttaggca

SEQ ID NO: 14699 - DNA, 15 bp, Homo sapiens
gaattttctttaggc

SEQ ID NO: 14700 - DNA, 15 bp, Homo sapiens
agaattttctttagg

SEQ ID NO: 14701 - DNA, 15 bp, Homo sapiens
gagaattttctttag

SEQ ID NO: 14702 - DNA, 15 bp, Homo sapiens
ggagaattttcttta

SEQ ID NO: 14703 - DNA, 15 bp, Homo sapiens
tggagaattttcttt

SEQ ID NO: 14704 - DNA, 15 bp, Homo sapiens
atggagaattttctt

SEQ ID NO: 14705 - DNA, 15 bp, Homo sapiens
aatggagaattttct

SEQ ID NO: 14706 - DNA, 15 bp, Homo sapiens
aaatggagaattttc

SEQ ID NO: 14707 - DNA, 15 bp, Homo sapiens
gaaatggagaatttt

SEQ ID NO: 14708 - DNA, 15 bp, Homo sapiens
ggaaatggagaattt

SEQ ID NO: 14709 - DNA, 15 bp, Homo sapiens
gggaaatggagaatt

SEQ ID NO: 14710 - DNA, 15 bp, Homo sapiens
agggaaatggagaat

SEQ ID NO: 14711 - DNA, 15 bp, Homo sapiens
aagggaaatggagaa

SEQ ID NO: 14712 - DNA, 15 bp, Homo sapiens
taagggaaatggaga

SEQ ID NO: 14713 - DNA, 15 bp, Homo sapiens
ctaagggaaatggag

SEQ ID NO: 14714 - DNA, 15 bp, Homo sapiens
gctaagggaaatgga

SEQ ID NO: 14715 - DNA, 15 bp, Homo sapiens
agctaagggaaatgg

SEQ ID NO: 14716 - DNA, 15 bp, Homo sapiens
gagctaagggaaatg

SEQ ID NO: 14717 - DNA, 15 bp, Homo sapiens
agagctaagggaaat

SEQ ID NO: 14718 - DNA, 15 bp, Homo sapiens
tagagctaagggaaa

SEQ ID NO: 14719 - DNA, 15 bp, Homo sapiens
atagagctaagggaa

SEQ ID NO: 14720 - DNA, 15 bp, Homo sapiens
catagagctaaggga

SEQ ID NO: 14721 - DNA, 15 bp, Homo sapiens
ccatagagctaaggg

SEQ ID NO: 14722 - DNA, 15 bp, Homo sapiens
accatagagctaagg

SEQ ID NO: 14723 - DNA, 15 bp, Homo sapiens
caccatagagctaag

SEQ ID NO: 14724 - DNA, 15 bp, Homo sapiens
ccaccatagagctaa

SEQ ID NO: 14725 - DNA, 15 bp, Homo sapiens
cccaccatagagcta

SEQ ID NO: 14726 - DNA, 15 bp, Homo sapiens
acccaccatagagct

SEQ ID NO: 14727 - DNA, 15 bp, Homo sapiens
cacccaccatagagc

SEQ ID NO: 14728 - DNA, 15 bp, Homo sapiens
tcacccaccatagag

SEQ ID NO: 14729 - DNA, 15 bp, Homo sapiens
gtcacccaccataga

SEQ ID NO: 14730 - DNA, 15 bp, Homo sapiens
agtcacccaccatag

SEQ ID NO: 14731 - DNA, 15 bp, Homo sapiens
tagtcacccaccata

SEQ ID NO: 14732 - DNA, 15 bp, Homo sapiens
gtagtcacccaccat

SEQ ID NO: 14733 - DNA, 15 bp, Homo sapiens
tgtagtcacccacca

SEQ ID NO: 14734 - DNA, 15 bp, Homo sapiens
gtgtagtcacccacc

SEQ ID NO: 14735 - DNA, 15 bp, Homo sapiens
tgtgtagtcacccac

SEQ ID NO: 14736 - DNA, 15 bp, Homo sapiens
atgtgtagtcaccca

SEQ ID NO: 14737 - DNA, 15 bp, Homo sapiens
tatgtgtagtcaccc

SEQ ID NO: 14738 - DNA, 15 bp, Homo sapiens
gtatgtgtagtcacc

SEQ ID NO: 14739 - DNA, 15 bp, Homo sapiens
agtatgtgtagtcac

SEQ ID NO: 14740 - DNA, 15 bp, Homo sapiens
cagtatgtgtagtca

SEQ ID NO: 14741 - DNA, 15 bp, Homo sapiens
ccagtatgtgtagtc

SEQ ID NO: 14742 - DNA, 15 bp, Homo sapiens
accagtatgtgtagt

SEQ ID NO: 14743 - DNA, 15 bp, Homo sapiens
taccagtatgtgtag

SEQ ID NO: 14744 - DNA, 15 bp, Homo sapiens
ataccagtatgtgta

SEQ ID NO: 14745 - DNA, 15 bp, Homo sapiens
aataccagtatgtgt

SEQ ID NO: 14746 - DNA, 15 bp, Homo sapiens
aaataccagtatgtg

SEQ ID NO: 14747 - DNA, 15 bp, Homo sapiens
gaaataccagtatgt

SEQ ID NO: 14748 - DNA, 15 bp, Homo sapiens
agaaataccagtatg

SEQ ID NO: 14749 - DNA, 15 bp, Homo sapiens
aagaaataccagtat

SEQ ID NO: 14750 - DNA, 15 bp, Homo sapiens
taagaaataccagta

SEQ ID NO: 14751 - DNA, 15 bp, Homo sapiens
ttaagaaataccagt

SEQ ID NO: 14752 - DNA, 15 bp, Homo sapiens
tttaagaaataccag

SEQ ID NO: 14753 - DNA, 15 bp, Homo sapiens
ctttaagaaatacca

SEQ ID NO: 14754 - DNA, 15 bp, Homo sapiens
tctttaagaaatacc

SEQ ID NO: 14755 - DNA, 15 bp, Homo sapiens
ttctttaagaaatac

SEQ ID NO: 14756 - DNA, 15 bp, Homo sapiens
tttctttaagaaata

SEQ ID NO: 14757 - DNA, 15 bp, Homo sapiens
atttctttaagaaat

SEQ ID NO: 14758 - DNA, 15 bp, Homo sapiens
tatttctttaagaaa

SEQ ID NO: 14759 - DNA, 15 bp, Homo sapiens
gtatttctttaagaa

SEQ ID NO: 14760 - DNA, 15 bp, Homo sapiens
ggtatttctttaaga

SEQ ID NO: 14761 - DNA, 15 bp, Homo sapiens
tggtatttctttaag

SEQ ID NO: 14762 - DNA, 15 bp, Homo sapiens
ttggtatttctttaa

SEQ ID NO: 14763 - DNA, 15 bp, Homo sapiens
attggtatttcttta

SEQ ID NO: 14764 - DNA, 15 bp, Homo sapiens
aattggtatttcttt

SEQ ID NO: 14765 - DNA, 15 bp, Homo sapiens
gaattggtatttctt

SEQ ID NO: 14766 - DNA, 15 bp, Homo sapiens
ggaattggtatttct

SEQ ID NO: 14767 - DNA, 15 bp, Homo sapiens
tggaattggtatttc

SEQ ID NO: 14768 - DNA, 15 bp, Homo sapiens
atggaattggtattt

SEQ ID NO: 14769 - DNA, 15 bp, Homo sapiens
aatggaattggtatt

SEQ ID NO: 14770 - DNA, 15 bp, Homo sapiens
aaatggaattggtat

SEQ ID NO: 14771 - DNA, 15 bp, Homo sapiens
gaaatggaattggta

SEQ ID NO: 14772 - DNA, 15 bp, Homo sapiens
ggaaatggaattggt

SEQ ID NO: 14773 - DNA, 15 bp, Homo sapiens
aggaaatggaattgg

SEQ ID NO: 14774 - DNA, 15 bp, Homo sapiens
aaggaaatggaattg

SEQ ID NO: 14775 - DNA, 15 bp, Homo sapiens
aaaggaaatggaatt

SEQ ID NO: 14776 - DNA, 15 bp, Homo sapiens
aaaaggaaatggaat

SEQ ID NO: 14777 - DNA, 15 bp, Homo sapiens
taaaaggaaatggaa

SEQ ID NO: 14778 - DNA, 15 bp, Homo sapiens
ttaaaaggaaatgga

SEQ ID NO: 14779 - DNA, 15 bp, Homo sapiens
gttaaaaggaaatgg

SEQ ID NO: 14780 - DNA, 15 bp, Homo sapiens
tgttaaaaggaaatg

SEQ ID NO: 14781 - DNA, 15 bp, Homo sapiens
atgttaaaaggaaat

SEQ ID NO: 14782 - DNA, 15 bp, Homo sapiens
tatgttaaaaggaaa

SEQ ID NO: 14783 - DNA, 15 bp, Homo sapiens
ttatgttaaaaggaa

SEQ ID NO: 14784 - DNA, 15 bp, Homo sapiens
attatgttaaaagga

SEQ ID NO: 14785 - DNA, 15 bp, Homo sapiens
aattatgttaaaagg

SEQ ID NO: 14786 - DNA, 15 bp, Homo sapiens
taattatgttaaaag

SEQ ID NO: 14787 - DNA, 15 bp, Homo sapiens
ataattatgttaaaa

SEQ ID NO: 14788 - DNA, 15 bp, Homo sapiens
aataattatgttaaa

SEQ ID NO: 14789 - DNA, 15 bp, Homo sapiens
taataattatgttaa

SEQ ID NO: 14790 - DNA, 15 bp, Homo sapiens
ttaataattatgtta

SEQ ID NO: 14791 - DNA, 15 bp, Homo sapiens
attaataattatgtt

SEQ ID NO: 14792 - DNA, 15 bp, Homo sapiens
tattaataattatgt

SEQ ID NO: 14793 - DNA, 15 bp, Homo sapiens
atattaataattatg

SEQ ID NO: 14794 - DNA, 15 bp, Homo sapiens
gatattaataattat

SEQ ID NO: 14795 - DNA, 15 bp, Homo sapiens
agatattaataatta

SEQ ID NO: 14796 - DNA, 15 bp, Homo sapiens
gagatattaataatt

SEQ ID NO: 14797 - DNA, 15 bp, Homo sapiens
tgagatattaataat

SEQ ID NO: 14798 - DNA, 15 bp, Homo sapiens
atgagatattaataa

SEQ ID NO: 14799 - DNA, 15 bp, Homo sapiens
aatgagatattaata

SEQ ID NO: 14800 - DNA, 15 bp, Homo sapiens
taatgagatattaat

SEQ ID NO: 14801 - DNA, 15 bp, Homo sapiens
ctaatgagatattaa

SEQ ID NO: 14802 - DNA, 15 bp, Homo sapiens
gctaatgagatatta

SEQ ID NO: 14803 - DNA, 15 bp, Homo sapiens
tgctaatgagatatt

SEQ ID NO: 14804 - DNA, 15 bp, Homo sapiens
atgctaatgagatat

SEQ ID NO: 14805 - DNA, 15 bp, Homo sapiens
catgctaatgagata

SEQ ID NO: 14806 - DNA, 15 bp, Homo sapiens
ccatgctaatgagat

SEQ ID NO: 14807 - DNA, 15 bp, Homo sapiens
accatgctaatgaga

SEQ ID NO: 14808 - DNA, 15 bp, Homo sapiens
caccatgctaatgag

SEQ ID NO: 14809 - DNA, 15 bp, Homo sapiens
acaccatgctaatga

SEQ ID NO: 14810 - DNA, 15 bp, Homo sapiens
gacaccatgctaatg

SEQ ID NO: 14811 - DNA, 15 bp, Homo sapiens
tgacaccatgctaat

SEQ ID NO: 14812 - DNA, 15 bp, Homo sapiens
gtgacaccatgctaa

SEQ ID NO: 14813 - DNA, 15 bp, Homo sapiens
agtgacaccatgcta

SEQ ID NO: 14814 - DNA, 15 bp, Homo sapiens
cagtgacaccatgct

SEQ ID NO: 14815 - DNA, 15 bp, Homo sapiens
tcagtgacaccatgc

SEQ ID NO: 14816 - DNA, 15 bp, Homo sapiens
ttcagtgacaccatg

SEQ ID NO: 14817 - DNA, 15 bp, Homo sapiens
cttcagtgacaccat

SEQ ID NO: 14818 - DNA, 15 bp, Homo sapiens
gcttcagtgacacca

SEQ ID NO: 14819 - DNA, 15 bp, Homo sapiens
ggcttcagtgacacc

SEQ ID NO: 14820 - DNA, 15 bp, Homo sapiens
aggcttcagtgacac

SEQ ID NO: 14821 - DNA, 15 bp, Homo sapiens
caggcttcagtgaca

SEQ ID NO: 14822 - DNA, 15 bp, Homo sapiens
ccaggcttcagtgac

SEQ ID NO: 14823 - DNA, 15 bp, Homo sapiens
cccaggcttcagtga

SEQ ID NO: 14824 - DNA, 15 bp, Homo sapiens
gcccaggcttcagtg

SEQ ID NO: 14825 - DNA, 15 bp, Homo sapiens
ggcccaggcttcagt

SEQ ID NO: 14826 - DNA, 15 bp, Homo sapiens
gggcccaggcttcag

SEQ ID NO: 14827 - DNA, 15 bp, Homo sapiens
tgggcccaggcttca

SEQ ID NO: 14828 - DNA, 15 bp, Homo sapiens
ttgggcccaggcttc

SEQ ID NO: 14829 - DNA, 15 bp, Homo sapiens
tttgggcccaggctt

SEQ ID NO: 14830 - DNA, 15 bp, Homo sapiens
ctttgggcccaggct

SEQ ID NO: 14831 - DNA, 15 bp, Homo sapiens
tctttgggcccaggc

SEQ ID NO: 14832 - DNA, 15 bp, Homo sapiens
ttctttgggcccagg

SEQ ID NO: 14833 - DNA, 15 bp, Homo sapiens
tttctttgggcccag

SEQ ID NO: 14834 - DNA, 15 bp, Homo sapiens
atttctttgggccca

SEQ ID NO: 14835 - DNA, 15 bp, Homo sapiens
tatttctttgggccc

SEQ ID NO: 14836 - DNA, 15 bp, Homo sapiens
gtatttctttgggcc

SEQ ID NO: 14837 - DNA, 15 bp, Homo sapiens
ggtatttctttgggc

SEQ ID NO: 14838 - DNA, 15 bp, Homo sapiens
tggtatttctttggg

SEQ ID NO: 14839 - DNA, 15 bp, Homo sapiens
ttggtatttctttgg

SEQ ID NO: 14840 - DNA, 15 bp, Homo sapiens
attggtatttctttg

SEQ ID NO: 14841 - DNA, 15 bp, Homo sapiens
tatggaattggtatt

SEQ ID NO: 14842 - DNA, 15 bp, Homo sapiens
atatggaattggtat

SEQ ID NO: 14843 - DNA, 15 bp, Homo sapiens
gatatggaattggta

SEQ ID NO: 14844 - DNA, 15 bp, Homo sapiens
tgatatggaattggt

SEQ ID NO: 14845 - DNA, 15 bp, Homo sapiens
atgatatggaattgg

SEQ ID NO: 14846 - DNA, 15 bp, Homo sapiens
aatgatatggaattg

SEQ ID NO: 14847 - DNA, 15 bp, Homo sapiens
aaatgatatggaatt

SEQ ID NO: 14848 - DNA, 15 bp, Homo sapiens
aaaatgatatggaat

SEQ ID NO: 14849 - DNA, 15 bp, Homo sapiens
taaaatgatatggaa

SEQ ID NO: 14850 - DNA, 15 bp, Homo sapiens
ttaaaatgatatgga

SEQ ID NO: 14851 - DNA, 15 bp, Homo sapiens
cttaaaatgatatgg

SEQ ID NO: 14852 - DNA, 15 bp, Homo sapiens
tcttaaaatgatatg

SEQ ID NO: 14853 - DNA, 15 bp, Homo sapiens
atcttaaaatgatat

SEQ ID NO: 14854 - DNA, 15 bp, Homo sapiens
gatcttaaaatgata

SEQ ID NO: 14855 - DNA, 15 bp, Homo sapiens
tgatcttaaaatgat

SEQ ID NO: 14856 - DNA, 15 bp, Homo sapiens
atgatcttaaaatga

SEQ ID NO: 14857 - DNA, 15 bp, Homo sapiens
aatgatcttaaaatg

SEQ ID NO: 14858 - DNA, 15 bp, Homo sapiens
taatgatcttaaaat

SEQ ID NO: 14859 - DNA, 15 bp, Homo sapiens
ataatgatcttaaaa

SEQ ID NO: 14860 - DNA, 15 bp, Homo sapiens
aataatgatcttaaa

SEQ ID NO: 14861 - DNA, 15 bp, Homo sapiens
taataatgatcttaa

SEQ ID NO: 14862 - DNA, 15 bp, Homo sapiens
ttaataatgatctta

SEQ ID NO: 14863 - DNA, 15 bp, Homo sapiens
attaataatgatctt

SEQ ID NO: 14864 - DNA, 15 bp, Homo sapiens
tattaataatgatct

SEQ ID NO: 14865 - DNA, 15 bp, Homo sapiens
atattaataatgatc

SEQ ID NO: 14866 - DNA, 15 bp, Homo sapiens
gatattaataatgat

SEQ ID NO: 14867 - DNA, 15 bp, Homo sapiens
agatattaataatga

SEQ ID NO: 14868 - DNA, 15 bp, Homo sapiens
gagatattaataatg

SEQ ID NO: 14869 - DNA, 15 bp, Homo sapiens
gatgagatattaata

SEQ ID NO: 14870 - DNA, 15 bp, Homo sapiens
tgatgagatattaat

SEQ ID NO: 14871 - DNA, 15 bp, Homo sapiens
ctgatgagatattaa

SEQ ID NO: 14872 - DNA, 15 bp, Homo sapiens
gctgatgagatatta

SEQ ID NO: 14873 - DNA, 15 bp, Homo sapiens
cgctgatgagatatt

SEQ ID NO: 14874 - DNA, 15 bp, Homo sapiens
acgctgatgagatat

SEQ ID NO: 14875 - DNA, 15 bp, Homo sapiens
cacgctgatgagata

SEQ ID NO: 14876 - DNA, 15 bp, Homo sapiens
ccacgctgatgagat

SEQ ID NO: 14877 - DNA, 15 bp, Homo sapiens
accacgctgatgaga

SEQ ID NO: 14878 - DNA, 15 bp, Homo sapiens
caccacgctgatgag

SEQ ID NO: 14879 - DNA, 15 bp, Homo sapiens
acaccacgctgatga

SEQ ID NO: 14880 - DNA, 15 bp, Homo sapiens
gacaccacgctgatg

SEQ ID NO: 14881 - DNA, 15 bp, Homo sapiens
tgacaccacgctgat

SEQ ID NO: 14882 - DNA, 15 bp, Homo sapiens
gtgacaccacgctga

SEQ ID NO: 14883 - DNA, 15 bp, Homo sapiens
agtgacaccacgctg

SEQ ID NO: 14884 - DNA, 15 bp, Homo sapiens
aagtgacaccacgct

SEQ ID NO: 14885 - DNA, 15 bp, Homo sapiens
taagtgacaccacgc

SEQ ID NO: 14886 - DNA, 15 bp, Homo sapiens
ttaagtgacaccacg

SEQ ID NO: 14887 - DNA, 15 bp, Homo sapiens
cttaagtgacaccac

SEQ ID NO: 14888 - DNA, 15 bp, Homo sapiens
gcttaagtgacacca

SEQ ID NO: 14889 - DNA, 15 bp, Homo sapiens
ggcttaagtgacacc

SEQ ID NO: 14890 - DNA, 15 bp, Homo sapiens
aggcttaagtgacac

SEQ ID NO: 14891 - DNA, 15 bp, Homo sapiens
caggcttaagtgaca

SEQ ID NO: 14892 - DNA, 15 bp, Homo sapiens
ccaggcttaagtgac

SEQ ID NO: 14893 - DNA, 15 bp, Homo sapiens
cccaggcttaagtga

SEQ ID NO: 14894 - DNA, 15 bp, Homo sapiens
gcccaggcttaagtg

SEQ ID NO: 14895 - DNA, 15 bp, Homo sapiens
ggcccaggcttaagt

SEQ ID NO: 14896 - DNA, 15 bp, Homo sapiens
gggcccaggcttaag

SEQ ID NO: 14897 - DNA, 15 bp, Homo sapiens
agggcccaggcttaa

SEQ ID NO: 14898 - DNA, 15 bp, Homo sapiens
aagggcccaggctta

SEQ ID NO: 14899 - DNA, 15 bp, Homo sapiens
aaagggcccaggctt

SEQ ID NO: 14900 - DNA, 15 bp, Homo sapiens
taaagggcccaggct

SEQ ID NO: 14901 - DNA, 15 bp, Homo sapiens
ctaaagggcccaggc

SEQ ID NO: 14902 - DNA, 15 bp, Homo sapiens
tctaaagggcccagg

SEQ ID NO: 14903 - DNA, 15 bp, Homo sapiens
ttctaaagggcccag

SEQ ID NO: 14904 - DNA, 15 bp, Homo sapiens
attctaaagggccca

SEQ ID NO: 14905 - DNA, 15 bp, Homo sapiens
aattctaaagggccc

SEQ ID NO: 14906 - DNA, 15 bp, Homo sapiens
aaattctaaagggcc

SEQ ID NO: 14907 - DNA, 15 bp, Homo sapiens
aaaattctaaagggc

SEQ ID NO: 14908 - DNA, 15 bp, Homo sapiens
aaaaattctaaaggg

SEQ ID NO: 14909 - DNA, 15 bp, Homo sapiens
gaaaaattctaaagg

SEQ ID NO: 14910 - DNA, 15 bp, Homo sapiens
tgaaaaattctaaag

SEQ ID NO: 14911 - DNA, 15 bp, Homo sapiens
atgaaaaattctaaa

SEQ ID NO: 14912 - DNA, 15 bp, Homo sapiens
catgaaaaattctaa

SEQ ID NO: 14913 - DNA, 15 bp, Homo sapiens
acatgaaaaattcta

SEQ ID NO: 14914 - DNA, 15 bp, Homo sapiens
tacatgaaaaattct

SEQ ID NO: 14915 - DNA, 15 bp, Homo sapiens
gtacatgaaaaattc

SEQ ID NO: 14916 - DNA, 15 bp, Homo sapiens
ggtacatgaaaaatt

SEQ ID NO: 14917 - DNA, 15 bp, Homo sapiens
aggtacatgaaaaat

SEQ ID NO: 14918 - DNA, 15 bp, Homo sapiens
caggtacatgaaaaa

SEQ ID NO: 14919 - DNA, 15 bp, Homo sapiens
acaggtacatgaaaa

SEQ ID NO: 14920 - DNA, 15 bp, Homo sapiens
cacaggtacatgaaa

SEQ ID NO: 14921 - DNA, 15 bp, Homo sapiens
acacaggtacatgaa

SEQ ID NO: 14922 - DNA, 15 bp, Homo sapiens
aacacaggtacatga

SEQ ID NO: 14923 - DNA, 15 bp, Homo sapiens
gaacacaggtacatg

SEQ ID NO: 14924 - DNA, 15 bp, Homo sapiens
ggaacacaggtacat

SEQ ID NO: 14925 - DNA, 15 bp, Homo sapiens
aggaacacaggtaca

SEQ ID NO: 14926 - DNA, 15 bp, Homo sapiens
gaggaacacaggtac

SEQ ID NO: 14927 - DNA, 15 bp, Homo sapiens
agaggaacacaggta

SEQ ID NO: 14928 - DNA, 15 bp, Homo sapiens
cagaggaacacaggt

SEQ ID NO: 14929 - DNA, 15 bp, Homo sapiens
gcagaggaacacagg

SEQ ID NO: 14930 - DNA, 15 bp, Homo sapiens
ggcagaggaacacag

SEQ ID NO: 14931 - DNA, 15 bp, Homo sapiens
gggcagaggaacaca

SEQ ID NO: 14932 - DNA, 15 bp, Homo sapiens
tgggcagaggaacac

SEQ ID NO: 14933 - DNA, 15 bp, Homo sapiens
atgggcagaggaaca

SEQ ID NO: 14934 - DNA, 15 bp, Homo sapiens
tatgggcagaggaac

SEQ ID NO: 14935 - DNA, 15 bp, Homo sapiens
atatgggcagaggaa

SEQ ID NO: 14936 - DNA, 15 bp, Homo sapiens
gatatgggcagagga

SEQ ID NO: 14937 - DNA, 15 bp, Homo sapiens
tgatatgggcagagg

SEQ ID NO: 14938 - DNA, 15 bp, Homo sapiens
ctgatatgggcagag

SEQ ID NO: 14939 - DNA, 15 bp, Homo sapiens
gctgatatgggcaga

SEQ ID NO: 14940 - DNA, 15 bp, Homo sapiens
agctgatatgggcag

SEQ ID NO: 14941 - DNA, 15 bp, Homo sapiens
cagctgatatgggca

SEQ ID NO: 14942 - DNA, 15 bp, Homo sapiens
ccagctgatatgggc

SEQ ID NO: 14943 - DNA, 15 bp, Homo sapiens
tccagctgatatggg

SEQ ID NO: 14944 - DNA, 15 bp, Homo sapiens
ttccagctgatatgg

SEQ ID NO: 14945 - DNA, 15 bp, Homo sapiens
gttccagctgatatg

SEQ ID NO: 14946 - DNA, 15 bp, Homo sapiens
tgttccagctgatat

SEQ ID NO: 14947 - DNA, 15 bp, Homo sapiens
gtgttccagctgata

SEQ ID NO: 14948 - DNA, 15 bp, Homo sapiens
agtgttccagctgat

SEQ ID NO: 14949 - DNA, 15 bp, Homo sapiens
tagtgttccagctga

SEQ ID NO: 14950 - DNA, 15 bp, Homo sapiens
ttagtgttccagctg

SEQ ID NO: 14951 - DNA, 15 bp, Homo sapiens
attagtgttccagct

SEQ ID NO: 14952 - DNA, 15 bp, Homo sapiens
tattagtgttccagc

SEQ ID NO: 14953 - DNA, 15 bp, Homo sapiens
ctattagtgttccag

SEQ ID NO: 14954 - DNA, 15 bp, Homo sapiens
actattagtgttcca

SEQ ID NO: 14955 - DNA, 15 bp, Homo sapiens
aactattagtgttcc

SEQ ID NO: 14956 - DNA, 15 bp, Homo sapiens
aaactattagtgttc

SEQ ID NO: 14957 - DNA, 15 bp, Homo sapiens
aaaactattagtgtt

SEQ ID NO: 14958 - DNA, 15 bp, Homo sapiens
gaaaactattagtgt

SEQ ID NO: 14959 - DNA, 15 bp, Homo sapiens
agaaaactattagtg

SEQ ID NO: 14960 - DNA, 15 bp, Homo sapiens
aagaaaactattagt

SEQ ID NO: 14961 - DNA, 15 bp, Homo sapiens
gaagaaaactattag

SEQ ID NO: 14962 - DNA, 15 bp, Homo sapiens
ggaagaaaactatta

SEQ ID NO: 14963 - DNA, 15 bp, Homo sapiens
aggaagaaaactatt

SEQ ID NO: 14964 - DNA, 15 bp, Homo sapiens
aaggaagaaaactat

SEQ ID NO: 14965 - DNA, 15 bp, Homo sapiens
aaaggaagaaaacta

SEQ ID NO: 14966 - DNA, 15 bp, Homo sapiens
aaaaggaagaaaact

SEQ ID NO: 14967 - DNA, 15 bp, Homo sapiens
aaaaaggaagaaaac

SEQ ID NO: 14968 - DNA, 15 bp, Homo sapiens
taaaaaggaagaaaa

SEQ ID NO: 14969 - DNA, 15 bp, Homo sapiens
ataaaaaggaagaaa

SEQ ID NO: 14970 - DNA, 15 bp, Homo sapiens
gataaaaaggaagaa

SEQ ID NO: 14971 - DNA, 15 bp, Homo sapiens
agataaaaaggaaga

SEQ ID NO: 14972 - DNA, 15 bp, Homo sapiens
tagataaaaaggaag

SEQ ID NO: 14973 - DNA, 15 bp, Homo sapiens
ctagataaaaaggaa

SEQ ID NO: 14974 - DNA, 15 bp, Homo sapiens
tctagataaaaagga

SEQ ID NO: 14975 - DNA, 15 bp, Homo sapiens
ttctagataaaaagg

SEQ ID NO: 14976 - DNA, 15 bp, Homo sapiens
cttctagataaaaag

SEQ ID NO: 14977 - DNA, 15 bp, Homo sapiens
tcttctagataaaaa

SEQ ID NO: 14978 - DNA, 15 bp, Homo sapiens
gtcttctagataaaa

SEQ ID NO: 14979 - DNA, 15 bp, Homo sapiens
agtcttctagataaa

SEQ ID NO: 14980 - DNA, 15 bp, Homo sapiens
cagtcttctagataa

SEQ ID NO: 14981 - DNA, 15 bp, Homo sapiens
tcagtcttctagata

SEQ ID NO: 14982 - DNA, 15 bp, Homo sapiens
ctcagtcttctagat

SEQ ID NO: 14983 - DNA, 15 bp, Homo sapiens
tctcagtcttctaga

SEQ ID NO: 14984 - DNA, 15 bp, Homo sapiens
ttctcagtcttctag

SEQ ID NO: 14985 - DNA, 15 bp, Homo sapiens
gttctcagtcttcta

SEQ ID NO: 14986 - DNA, 15 bp, Homo sapiens
tgttctcagtcttct

SEQ ID NO: 14987 - DNA, 15 bp, Homo sapiens
atgttctcagtcttc

SEQ ID NO: 14988 - DNA, 15 bp, Homo sapiens
aatgttctcagtctt

SEQ ID NO: 14989 - DNA, 15 bp, Homo sapiens
taatgttctcagtct

SEQ ID NO: 14990 - DNA, 15 bp, Homo sapiens
gtaatgttctcagtc

SEQ ID NO: 14991 - DNA, 15 bp, Homo sapiens
tgtaatgttctcagt

SEQ ID NO: 14992 - DNA, 15 bp, Homo sapiens
atgtaatgttctcag

SEQ ID NO: 14993 - DNA, 15 bp, Homo sapiens
catgtaatgttctca

SEQ ID NO: 14994 - DNA, 15 bp, Homo sapiens
ccatgtaatgttctc

SEQ ID NO: 14995 - DNA, 15 bp, Homo sapiens
cccatgtaatgttct

SEQ ID NO: 14996 - DNA, 15 bp, Homo sapiens
tcccatgtaatgttc

SEQ ID NO: 14997 - DNA, 15 bp, Homo sapiens
gtcccatgtaatgtt

SEQ ID NO: 14998 - DNA, 15 bp, Homo sapiens
ggtcccatgtaatgt

SEQ ID NO: 14999 - DNA, 15 bp, Homo sapiens
aggtcccatgtaatg

SEQ ID NO: 15000 - DNA, 15 bp, Homo sapiens
caggtcccatgtaat

SEQ ID NO: 15001 - DNA, 15 bp, Homo sapiens
gcaggtcccatgtaa

SEQ ID NO: 15002 - DNA, 15 bp, Homo sapiens
ggcaggtcccatgta

SEQ ID NO: 15003 - DNA, 15 bp, Homo sapiens
gggcaggtcccatgt

SEQ ID NO: 15004 - DNA, 15 bp, Homo sapiens
ggggcaggtcccatg

SEQ ID NO: 15005 - DNA, 15 bp, Homo sapiens
gggggcaggtcccat

SEQ ID NO: 15006 - DNA, 15 bp, Homo sapiens
tgggggcaggtccca

SEQ ID NO: 15007 - DNA, 15 bp, Homo sapiens
ctgggggcaggtccc

SEQ ID NO: 15008 - DNA, 15 bp, Homo sapiens
cctgggggcaggtcc

SEQ ID NO: 15009 - DNA, 15 bp, Homo sapiens
ccctgggggcaggtc

SEQ ID NO: 15010 - DNA, 15 bp, Homo sapiens
gccctgggggcaggt

SEQ ID NO: 15011 - DNA, 15 bp, Homo sapiens
tgccctgggggcagg

SEQ ID NO: 15012 - DNA, 15 bp, Homo sapiens
atgccctgggggcag

SEQ ID NO: 15013 - DNA, 15 bp, Homo sapiens
catgccctgggggca

SEQ ID NO: 15014 - DNA, 15 bp, Homo sapiens
ccatgccctgggggc

SEQ ID NO: 15015 - DNA, 15 bp, Homo sapiens
tccatgccctggggg

SEQ ID NO: 15016 - DNA, 15 bp, Homo sapiens
ctccatgccctgggg

SEQ ID NO: 15017 - DNA, 15 bp, Homo sapiens
cctccatgccctggg

SEQ ID NO: 15018 - DNA, 15 bp, Homo sapiens
gcctccatgccctgg

SEQ ID NO: 15019 - DNA, 15 bp, Homo sapiens
agcctccatgccctg

SEQ ID NO: 15020 - DNA, 15 bp, Homo sapiens
cagcctccatgccct

SEQ ID NO: 15021 - DNA, 15 bp, Homo sapiens
tcagcctccatgccc

SEQ ID NO: 15022 - DNA, 15 bp, Homo sapiens
ctcagcctccatgcc

SEQ ID NO: 15023 - DNA, 15 bp, Homo sapiens
cctcagcctccatgc

SEQ ID NO: 15024 - DNA, 15 bp, Homo sapiens
acctcagcctccatg

SEQ ID NO: 15025 - DNA, 15 bp, Homo sapiens
cacctcagcctccat

SEQ ID NO: 15026 - DNA, 15 bp, Homo sapiens
ccacctcagcctcca

SEQ ID NO: 15027 - DNA, 15 bp, Homo sapiens
cccacctcagcctcc

SEQ ID NO: 15028 - DNA, 15 bp, Homo sapiens
tcccacctcagcctc

SEQ ID NO: 15029 - DNA, 15 bp, Homo sapiens
gtcccacctcagcct

SEQ ID NO: 15030 - DNA, 15 bp, Homo sapiens
tgtcccacctcagcc

SEQ ID NO: 15031 - DNA, 15 bp, Homo sapiens
ctgtcccacctcagc

SEQ ID NO: 15032 - DNA, 15 bp, Homo sapiens
actgtcccacctcag

SEQ ID NO: 15033 - DNA, 15 bp, Homo sapiens
aactgtcccacctca

SEQ ID NO: 15034 - DNA, 15 bp, Homo sapiens
aaactgtcccacctc

SEQ ID NO: 15035 - DNA, 15 bp, Homo sapiens
taaactgtcccacct

SEQ ID NO: 15036 - DNA, 15 bp, Homo sapiens
ctaaactgtcccacc

SEQ ID NO: 15037 - DNA, 15 bp, Homo sapiens
actaaactgtcccac

SEQ ID NO: 15038 - DNA, 15 bp, Homo sapiens
aactaaactgtccca

SEQ ID NO: 15039 - DNA, 15 bp, Homo sapiens
gaactaaactgtccc

SEQ ID NO: 15040 - DNA, 15 bp, Homo sapiens
tgaactaaactgtcc

SEQ ID NO: 15041 - DNA, 15 bp, Homo sapiens
ctgaactaaactgtc

SEQ ID NO: 15042 - DNA, 15 bp, Homo sapiens
cctgaactaaactgt

SEQ ID NO: 15043 - DNA, 15 bp, Homo sapiens
tcctgaactaaactg

SEQ ID NO: 15044 - DNA, 15 bp, Homo sapiens
ctcctgaactaaact

SEQ ID NO: 15045 - DNA, 15 bp, Homo sapiens
cctcctgaactaaac

SEQ ID NO: 15046 - DNA, 15 bp, Homo sapiens
gcctcctgaactaaa

SEQ ID NO: 15047 - DNA, 15 bp, Homo sapiens
ggcctcctgaactaa

SEQ ID NO: 15048 - DNA, 15 bp, Homo sapiens
gggcctcctgaacta

SEQ ID NO: 15049 - DNA, 15 bp, Homo sapiens
tgggcctcctgaact

SEQ ID NO: 15050 - DNA, 15 bp, Homo sapiens
ttgggcctcctgaac

SEQ ID NO: 15051 - DNA, 15 bp, Homo sapiens
cttgggcctcctgaa

SEQ ID NO: 15052 - DNA, 15 bp, Homo sapiens
tcttgggcctcctga

SEQ ID NO: 15053 - DNA, 15 bp, Homo sapiens
ttcttgggcctcctg

SEQ ID NO: 15054 - DNA, 15 bp, Homo sapiens
cttcttgggcctcct

SEQ ID NO: 15055 - DNA, 15 bp, Homo sapiens
acttcttgggcctcc

SEQ ID NO: 15056 - DNA, 15 bp, Homo sapiens
cacttcttgggcctc

SEQ ID NO: 15057 - DNA, 15 bp, Homo sapiens
acacttcttgggcct

SEQ ID NO: 15058 - DNA, 15 bp, Homo sapiens
aacacttcttgggcc

SEQ ID NO: 15059 - DNA, 15 bp, Homo sapiens
caacacttcttgggc

SEQ ID NO: 15060 - DNA, 15 bp, Homo sapiens
ccaacacttcttggg

SEQ ID NO: 15061 - DNA, 15 bp, Homo sapiens
cccaacacttcttgg

SEQ ID NO: 15062 - DNA, 15 bp, Homo sapiens
acccaacacttcttg

SEQ ID NO: 15063 - DNA, 15 bp, Homo sapiens
cacccaacacttctt

SEQ ID NO: 15064 - DNA, 15 bp, Homo sapiens
acacccaacacttct

SEQ ID NO: 15065 - DNA, 15 bp, Homo sapiens
cacacccaacacttc

SEQ ID NO: 15066 - DNA, 15 bp, Homo sapiens
gcacacccaacactt

SEQ ID NO: 15067 - DNA, 15 bp, Homo sapiens
tgcacacccaacact

SEQ ID NO: 15068 - DNA, 15 bp, Homo sapiens
ctgcacacccaacac

SEQ ID NO: 15069 - DNA, 15 bp, Homo sapiens
gctgcacacccaaca

SEQ ID NO: 15070 - DNA, 15 bp, Homo sapiens
ggctgcacacccaac

SEQ ID NO: 15071 - DNA, 15 bp, Homo sapiens
gggctgcacacccaa

SEQ ID NO: 15072 - DNA, 15 bp, Homo sapiens
ggggctgcacaccca

SEQ ID NO: 15073 - DNA, 15 bp, Homo sapiens
aggggctgcacaccc

SEQ ID NO: 15074 - DNA, 15 bp, Homo sapiens
aaggggctgcacacc

SEQ ID NO: 15075 - DNA, 15 bp, Homo sapiens
caaggggctgcacac

SEQ ID NO: 15076 - DNA, 15 bp, Homo sapiens
acaaggggctgcaca

SEQ ID NO: 15077 - DNA, 15 bp, Homo sapiens
aacaaggggctgcac

SEQ ID NO: 15078 - DNA, 15 bp, Homo sapiens
gaacaaggggctgca

SEQ ID NO: 15079 - DNA, 15 bp, Homo sapiens
tgaacaaggggctgc

SEQ ID NO: 15080 - DNA, 15 bp, Homo sapiens
ttgaacaaggggctg

SEQ ID NO: 15081 - DNA, 15 bp, Homo sapiens
tttgaacaaggggct

SEQ ID NO: 15082 - DNA, 15 bp, Homo sapiens
gtttgaacaaggggc

SEQ ID NO: 15083 - DNA, 15 bp, Homo sapiens
tgtttgaacaagggg

SEQ ID NO: 15084 - DNA, 15 bp, Homo sapiens
gtgtttgaacaaggg

SEQ ID NO: 15085 - DNA, 15 bp, Homo sapiens
tgtgtttgaacaagg

SEQ ID NO: 15086 - DNA, 15 bp, Homo sapiens
ctgtgtttgaacaag

SEQ ID NO: 15087 - DNA, 15 bp, Homo sapiens
gctgtgtttgaacaa

SEQ ID NO: 15088 - DNA, 15 bp, Homo sapiens
ggctgtgtttgaaca

SEQ ID NO: 15089 - DNA, 15 bp, Homo sapiens
aggctgtgtttgaac

SEQ ID NO: 15090 - DNA, 15 bp, Homo sapiens
gaggctgtgtttgaa

SEQ ID NO: 15091 - DNA, 15 bp, Homo sapiens
agaggctgtgtttga

SEQ ID NO: 15092 - DNA, 15 bp, Homo sapiens
cagaggctgtgtttg

SEQ ID NO: 15093 - DNA, 15 bp, Homo sapiens
tcagaggctgtgttt

SEQ ID NO: 15094 - DNA, 15 bp, Homo sapiens
ttcagaggctgtgtt

SEQ ID NO: 15095 - DNA, 15 bp, Homo sapiens
attcagaggctgtgt

SEQ ID NO: 15096 - DNA, 15 bp, Homo sapiens
gattcagaggctgtg

SEQ ID NO: 15097 - DNA, 15 bp, Homo sapiens
cgattcagaggctgt

SEQ ID NO: 15098 - DNA, 15 bp, Homo sapiens
gcgattcagaggctg

SEQ ID NO: 15099 - DNA, 15 bp, Homo sapiens
ggcgattcagaggct

SEQ ID NO: 15100 - DNA, 15 bp, Homo sapiens
tggcgattcagaggc

SEQ ID NO: 15101 - DNA, 15 bp, Homo sapiens
ctggcgattcagagg

SEQ ID NO: 15102 - DNA, 15 bp, Homo sapiens
tctggcgattcagag

SEQ ID NO: 15103 - DNA, 15 bp, Homo sapiens
ctctggcgattcaga

SEQ ID NO: 15104 - DNA, 15 bp, Homo sapiens
cctctggcgattcag

SEQ ID NO: 15105 - DNA, 15 bp, Homo sapiens
gcctctggcgattca

SEQ ID NO: 15106 - DNA, 15 bp, Homo sapiens
agcctctggcgattc

SEQ ID NO: 15107 - DNA, 15 bp, Homo sapiens
aagcctctggcgatt

SEQ ID NO: 15108 - DNA, 15 bp, Homo sapiens
gaagcctctggcgat

SEQ ID NO: 15109 - DNA, 15 bp, Homo sapiens
ggaagcctctggcga

SEQ ID NO: 15110 - DNA, 15 bp, Homo sapiens
cggaagcctctggcg

SEQ ID NO: 15111 - DNA, 15 bp, Homo sapiens
ccggaagcctctggc

SEQ ID NO: 15112 - DNA, 15 bp, Homo sapiens
accggaagcctctgg

SEQ ID NO: 15113 - DNA, 15 bp, Homo sapiens
caccggaagcctctg

SEQ ID NO: 15114 - DNA, 15 bp, Homo sapiens
gcaccggaagcctct

SEQ ID NO: 15115 - DNA, 15 bp, Homo sapiens
tgcaccggaagcctc

SEQ ID NO: 15116 - DNA, 15 bp, Homo sapiens
atgcaccggaagcct

SEQ ID NO: 15117 - DNA, 15 bp, Homo sapiens
tatgcaccggaagcc

SEQ ID NO: 15118 - DNA, 15 bp, Homo sapiens
gtatgcaccggaagc

SEQ ID NO: 15119 - DNA, 15 bp, Homo sapiens
agtatgcaccggaag

SEQ ID NO: 15120 - DNA, 15 bp, Homo sapiens
gagtatgcaccggaa

SEQ ID NO: 15121 - DNA, 15 bp, Homo sapiens
agagtatgcaccgga

SEQ ID NO: 15122 - DNA, 15 bp, Homo sapiens
cagagtatgcaccgg

SEQ ID NO: 15123 - DNA, 15 bp, Homo sapiens
tcagagtatgcaccg

SEQ ID NO: 15124 - DNA, 15 bp, Homo sapiens
ctcagagtatgcacc

SEQ ID NO: 15125 - DNA, 15 bp, Homo sapiens
cctcagagtatgcac

SEQ ID NO: 15126 - DNA, 15 bp, Homo sapiens
gcctcagagtatgca

SEQ ID NO: 15127 - DNA, 15 bp, Homo sapiens
cgcctcagagtatgc

SEQ ID NO: 15128 - DNA, 15 bp, Homo sapiens
gcgcctcagagtatg

SEQ ID NO: 15129 - DNA, 15 bp, Homo sapiens
tgcgcctcagagtat

SEQ ID NO: 15130 - DNA, 15 bp, Homo sapiens
ctgcgcctcagagta

SEQ ID NO: 15131 - DNA, 15 bp, Homo sapiens
cctgcgcctcagagt

SEQ ID NO: 15132 - DNA, 15 bp, Homo sapiens
acctgcgcctcagag

SEQ ID NO: 15133 - DNA, 15 bp, Homo sapiens
cacctgcgcctcaga

SEQ ID NO: 15134 - DNA, 15 bp, Homo sapiens
ccacctgcgcctcag

SEQ ID NO: 15135 - DNA, 15 bp, Homo sapiens
cccacctgcgcctca

SEQ ID NO: 15136 - DNA, 15 bp, Homo sapiens
tcccacctgcgcctc

SEQ ID NO: 15137 - DNA, 15 bp, Homo sapiens
gtcccacctgcgcct

SEQ ID NO: 15138 - DNA, 15 bp, Homo sapiens
agtcccacctgcgcc

SEQ ID NO: 15139 - DNA, 15 bp, Homo sapiens
gagtcccacctgcgc

SEQ ID NO: 15140 - DNA, 15 bp, Homo sapiens
cgagtcccacctgcg

SEQ ID NO: 15141 - DNA, 15 bp, Homo sapiens
ccgagtcccacctgc

SEQ ID NO: 15142 - DNA, 15 bp, Homo sapiens
cccgagtcccacctg

SEQ ID NO: 15143 - DNA, 15 bp, Homo sapiens
tcccgagtcccacct

SEQ ID NO: 15144 - DNA, 15 bp, Homo sapiens
ctcccgagtcccacc

SEQ ID NO: 15145 - DNA, 15 bp, Homo sapiens
actcccgagtcccac

SEQ ID NO: 15146 - DNA, 15 bp, Homo sapiens
cactcccgagtccca

SEQ ID NO: 15147 - DNA, 15 bp, Homo sapiens
tcactcccgagtccc

SEQ ID NO: 15148 - DNA, 15 bp, Homo sapiens
ctcactcccgagtcc

SEQ ID NO: 15149 - DNA, 15 bp, Homo sapiens
tctcactcccgagtc

SEQ ID NO: 15150 - DNA, 15 bp, Homo sapiens
ctctcactcccgagt

SEQ ID NO: 15151 - DNA, 15 bp, Homo sapiens
cctctcactcccgag

SEQ ID NO: 15152 - DNA, 15 bp, Homo sapiens
acctctcactcccga

SEQ ID NO: 15153 - DNA, 15 bp, Homo sapiens
aacctctcactcccg

SEQ ID NO: 15154 - DNA, 15 bp, Homo sapiens
aaacctctcactccc

SEQ ID NO: 15155 - DNA, 15 bp, Homo sapiens
gaaacctctcactcc

SEQ ID NO: 15156 - DNA, 15 bp, Homo sapiens
cgaaacctctcactc

SEQ ID NO: 15157 - DNA, 15 bp, Homo sapiens
ccgaaacctctcact

SEQ ID NO: 15158 - DNA, 15 bp, Homo sapiens
gccgaaacctctcac

SEQ ID NO: 15159 - DNA, 15 bp, Homo sapiens
cgccgaaacctctca

SEQ ID NO: 15160 - DNA, 15 bp, Homo sapiens
tcgccgaaacctctc

SEQ ID NO: 15161 - DNA, 15 bp, Homo sapiens
ttcgccgaaacctct

SEQ ID NO: 15162 - DNA, 15 bp, Homo sapiens
attcgccgaaacctc

SEQ ID NO: 15163 - DNA, 15 bp, Homo sapiens
cattcgccgaaacct

SEQ ID NO: 15164 - DNA, 15 bp, Homo sapiens
tcattcgccgaaacc

SEQ ID NO: 15165 - DNA, 15 bp, Homo sapiens
ttcattcgccgaaac

SEQ ID NO: 15166 - DNA, 15 bp, Homo sapiens
attcattcgccgaaa

SEQ ID NO: 15167 - DNA, 15 bp, Homo sapiens
aattcattcgccgaa

SEQ ID NO: 15168 - DNA, 15 bp, Homo sapiens
caattcattcgccga

SEQ ID NO: 15169 - DNA, 15 bp, Homo sapiens
ccaattcattcgccg

SEQ ID NO: 15170 - DNA, 15 bp, Homo sapiens
cccaattcattcgcc

SEQ ID NO: 15171 - DNA, 15 bp, Homo sapiens
tcccaattcattcgc

SEQ ID NO: 15172 - DNA, 15 bp, Homo sapiens
atcccaattcattcg

SEQ ID NO: 15173 - DNA, 15 bp, Homo sapiens
aatcccaattcattc

SEQ ID NO: 15174 - DNA, 15 bp, Homo sapiens
caatcccaattcatt

SEQ ID NO: 15175 - DNA, 15 bp, Homo sapiens
gcaatcccaattcat

SEQ ID NO: 15176 - DNA, 15 bp, Homo sapiens
ggcaatcccaattca

SEQ ID NO: 15177 - DNA, 15 bp, Homo sapiens
aggcaatcccaattc

SEQ ID NO: 15178 - DNA, 15 bp, Homo sapiens
taggcaatcccaatt

SEQ ID NO: 15179 - DNA, 15 bp, Homo sapiens
gtaggcaatcccaat

SEQ ID NO: 15180 - DNA, 15 bp, Homo sapiens
agtaggcaatcccaa

SEQ ID NO: 15181 - DNA, 15 bp, Homo sapiens
aagtaggcaatccca

SEQ ID NO: 15182 - DNA, 15 bp, Homo sapiens
gaagtaggcaatccc

SEQ ID NO: 15183 - DNA, 15 bp, Homo sapiens
agaagtaggcaatcc

SEQ ID NO: 15184 - DNA, 15 bp, Homo sapiens
aagaagtaggcaatc

SEQ ID NO: 15185 - DNA, 15 bp, Homo sapiens
gaagaagtaggcaat

SEQ ID NO: 15186 - DNA, 15 bp, Homo sapiens
ggaagaagtaggcaa

SEQ ID NO: 15187 - DNA, 15 bp, Homo sapiens
gggaagaagtaggca

SEQ ID NO: 15188 - DNA, 15 bp, Homo sapiens
tgggaagaagtaggc

SEQ ID NO: 15189 - DNA, 15 bp, Homo sapiens
ctgggaagaagtagg

SEQ ID NO: 15190 - DNA, 15 bp, Homo sapiens
actgggaagaagtag

SEQ ID NO: 15191 - DNA, 15 bp, Homo sapiens
cactgggaagaagta

SEQ ID NO: 15192 - DNA, 15 bp, Homo sapiens
gcactgggaagaagt

SEQ ID NO: 15193 - DNA, 15 bp, Homo sapiens
tgcactgggaagaag

SEQ ID NO: 15194 - DNA, 15 bp, Homo sapiens
ctgcactgggaagaa

SEQ ID NO: 15195 - DNA, 15 bp, Homo sapiens
actgcactgggaaga

SEQ ID NO: 15196 - DNA, 15 bp, Homo sapiens
cactgcactgggaag

SEQ ID NO: 15197 - DNA, 15 bp, Homo sapiens
ccactgcactgggaa

SEQ ID NO: 15198 - DNA, 15 bp, Homo sapiens
tccactgcactggga

SEQ ID NO: 15199 - DNA, 15 bp, Homo sapiens
ctccactgcactggg

SEQ ID NO: 15200 - DNA, 15 bp, Homo sapiens
gctccactgcactgg

SEQ ID NO: 15201 - DNA, 15 bp, Homo sapiens
agctccactgcactg

SEQ ID NO: 15202 - DNA, 15 bp, Homo sapiens
aagctccactgcact

SEQ ID NO: 15203 - DNA, 15 bp, Homo sapiens
caagctccactgcac

SEQ ID NO: 15204 - DNA, 15 bp, Homo sapiens
ccaagctccactgca

SEQ ID NO: 15205 - DNA, 15 bp, Homo sapiens
accaagctccactgc

SEQ ID NO: 15206 - DNA, 15 bp, Homo sapiens
aaccaagctccactg

SEQ ID NO: 15207 - DNA, 15 bp, Homo sapiens
gaaccaagctccact

SEQ ID NO: 15208 - DNA, 15 bp, Homo sapiens
agaaccaagctccac

SEQ ID NO: 15209 - DNA, 15 bp, Homo sapiens
cagaaccaagctcca

SEQ ID NO: 15210 - DNA, 15 bp, Homo sapiens
acagaaccaagctcc

SEQ ID NO: 15211 - DNA, 15 bp, Homo sapiens
cacagaaccaagctc

SEQ ID NO: 15212 - DNA, 15 bp, Homo sapiens
ccacagaaccaagct

SEQ ID NO: 15213 - DNA, 15 bp, Homo sapiens
accacagaaccaagc

SEQ ID NO: 15214 - DNA, 15 bp, Homo sapiens
gaccacagaaccaag

SEQ ID NO: 15215 - DNA, 15 bp, Homo sapiens
tgaccacagaaccaa

SEQ ID NO: 15216 - DNA, 15 bp, Homo sapiens
ctgaccacagaacca

SEQ ID NO: 15217 - DNA, 15 bp, Homo sapiens
cctgaccacagaacc

SEQ ID NO: 15218 - DNA, 15 bp, Homo sapiens
acctgaccacagaac

SEQ ID NO: 15219 - DNA, 15 bp, Homo sapiens
gacctgaccacagaa

SEQ ID NO: 15220 - DNA, 15 bp, Homo sapiens
ggacctgaccacaga

SEQ ID NO: 15221 - DNA, 15 bp, Homo sapiens
aggacctgaccacag

SEQ ID NO: 15222 - DNA, 15 bp, Homo sapiens
aaggacctgaccaca

SEQ ID NO: 15223 - DNA, 15 bp, Homo sapiens
taaggacctgaccac

SEQ ID NO: 15224 - DNA, 15 bp, Homo sapiens
gtaaggacctgacca

SEQ ID NO: 15225 - DNA, 15 bp, Homo sapiens
cgtaaggacctgacc

SEQ ID NO: 15226 - DNA, 15 bp, Homo sapiens
gcgtaaggacctgac

SEQ ID NO: 15227 - DNA, 15 bp, Homo sapiens
ggcgtaaggacctga

SEQ ID NO: 15228 - DNA, 15 bp, Homo sapiens
gggcgtaaggacctg

SEQ ID NO: 15229 - DNA, 15 bp, Homo sapiens
agggcgtaaggacct

SEQ ID NO: 15230 - DNA, 15 bp, Homo sapiens
cagggcgtaaggacc

SEQ ID NO: 15231 - DNA, 15 bp, Homo sapiens
acagggcgtaaggac

SEQ ID NO: 15232 - DNA, 15 bp, Homo sapiens
gacagggcgtaagga

SEQ ID NO: 15233 - DNA, 15 bp, Homo sapiens
agacagggcgtaagg

SEQ ID NO: 15234 - DNA, 15 bp, Homo sapiens
cagacagggcgtaag

SEQ ID NO: 15235 - DNA, 15 bp, Homo sapiens
gcagacagggcgtaa

SEQ ID NO: 15236 - DNA, 15 bp, Homo sapiens
ggcagacagggcgta

SEQ ID NO: 15237 - DNA, 15 bp, Homo sapiens
aggcagacagggcgt

SEQ ID NO: 15238 - DNA, 15 bp, Homo sapiens
aaggcagacagggcg

SEQ ID NO: 15239 - DNA, 15 bp, Homo sapiens
aaaggcagacagggc

SEQ ID NO: 15240 - DNA, 15 bp, Homo sapiens
gaaaggcagacaggg

SEQ ID NO: 15241 - DNA, 15 bp, Homo sapiens
agaaaggcagacagg

SEQ ID NO: 15242 - DNA, 15 bp, Homo sapiens
gagaaaggcagacag

SEQ ID NO: 15243 - DNA, 15 bp, Homo sapiens
cgagaaaggcagaca

SEQ ID NO: 15244 - DNA, 15 bp, Homo sapiens
acgagaaaggcagac

SEQ ID NO: 15245 - DNA, 15 bp, Homo sapiens
aacgagaaaggcaga

SEQ ID NO: 15246 - DNA, 15 bp, Homo sapiens
aaacgagaaaggcag

SEQ ID NO: 15247 - DNA, 15 bp, Homo sapiens
gaaacgagaaaggca

SEQ ID NO: 15248 - DNA, 15 bp, Homo sapiens
agaaacgagaaaggc

SEQ ID NO: 15249 - DNA, 15 bp, Homo sapiens
aagaaacgagaaagg

SEQ ID NO: 15250 - DNA, 15 bp, Homo sapiens
aaagaaacgagaaag

SEQ ID NO: 15251 - DNA, 15 bp, Homo sapiens
taaagaaacgagaaa

SEQ ID NO: 15252 - DNA, 15 bp, Homo sapiens
ataaagaaacgagaa

SEQ ID NO: 15253 - DNA, 15 bp, Homo sapiens
aataaagaaacgaga

SEQ ID NO: 15254 - DNA, 15 bp, Homo sapiens
aaataaagaaacgag

SEQ ID NO: 15255 - DNA, 15 bp, Homo sapiens
gaaataaagaaacga

SEQ ID NO: 15256 - DNA, 15 bp, Homo sapiens
agaaataaagaaacg

SEQ ID NO: 15257 - DNA, 15 bp, Homo sapiens
gagaaataaagaaac

SEQ ID NO: 15258 - DNA, 15 bp, Homo sapiens
cgagaaataaagaaa

SEQ ID NO: 15259 - DNA, 15 bp, Homo sapiens
ccgagaaataaagaa

SEQ ID NO: 15260 - DNA, 15 bp, Homo sapiens
cccgagaaataaaga

SEQ ID NO: 15261 - DNA, 15 bp, Homo sapiens
acccgagaaataaag

SEQ ID NO: 15262 - DNA, 15 bp, Homo sapiens
tacccgagaaataaa

SEQ ID NO: 15263 - DNA, 15 bp, Homo sapiens
ctacccgagaaataa

SEQ ID NO: 15264 - DNA, 15 bp, Homo sapiens
actacccgagaaata

SEQ ID NO: 15265 - DNA, 15 bp, Homo sapiens
tactacccgagaaat

SEQ ID NO: 15266 - DNA, 15 bp, Homo sapiens
ctactacccgagaaa

SEQ ID NO: 15267 - DNA, 15 bp, Homo sapiens
actactacccgagaa

SEQ ID NO: 15268 - DNA, 15 bp, Homo sapiens
aactactacccgaga

SEQ ID NO: 15269 - DNA, 15 bp, Homo sapiens
caactactacccgag

SEQ ID NO: 15270 - DNA, 15 bp, Homo sapiens
acaactactacccga

SEQ ID NO: 15271 - DNA, 15 bp, Homo sapiens
cacaactactacccg

SEQ ID NO: 15272 - DNA, 15 bp, Homo sapiens
ccacaactactaccc

SEQ ID NO: 15273 - DNA, 15 bp, Homo sapiens
tccacaactactacc

SEQ ID NO: 15274 - DNA, 15 bp, Homo sapiens
ttccacaactactac

SEQ ID NO: 15275 - DNA, 15 bp, Homo sapiens
attccacaactacta

SEQ ID NO: 15276 - DNA, 15 bp, Homo sapiens
gattccacaactact

SEQ ID NO: 15277 - DNA, 15 bp, Homo sapiens
tgattccacaactac

SEQ ID NO: 15278 - DNA, 15 bp, Homo sapiens
ttgattccacaacta

SEQ ID NO: 15279 - DNA, 15 bp, Homo sapiens
tttgattccacaact

SEQ ID NO: 15280 - DNA, 15 bp, Homo sapiens
atttgattccacaac

SEQ ID NO: 15281 - DNA, 15 bp, Homo sapiens
catttgattccacaa

SEQ ID NO: 15282 - DNA, 15 bp, Homo sapiens
tcatttgattccaca

SEQ ID NO: 15283 - DNA, 15 bp, Homo sapiens
gtcatttgattccac

SEQ ID NO: 15284 - DNA, 15 bp, Homo sapiens
ggtcatttgattcca

SEQ ID NO: 15285 - DNA, 15 bp, Homo sapiens
aggtcatttgattcc

SEQ ID NO: 15286 - DNA, 15 bp, Homo sapiens
caggtcatttgattc

SEQ ID NO: 15287 - DNA, 15 bp, Homo sapiens
ccaggtcatttgatt

SEQ ID NO: 15288 - DNA, 15 bp, Homo sapiens
cccaggtcatttgat

SEQ ID NO: 15289 - DNA, 15 bp, Homo sapiens
ccccaggtcatttga

SEQ ID NO: 15290 - DNA, 15 bp, Homo sapiens
accccaggtcatttg

SEQ ID NO: 15291 - DNA, 15 bp, Homo sapiens
aaccccaggtcattt

SEQ ID NO: 15292 - DNA, 15 bp, Homo sapiens
aaaccccaggtcatt

SEQ ID NO: 15293 - DNA, 15 bp, Homo sapiens
caaaccccaggtcat

SEQ ID NO: 15294 - DNA, 15 bp, Homo sapiens
tcaaaccccaggtca

SEQ ID NO: 15295 - DNA, 15 bp, Homo sapiens
atcaaaccccaggtc

SEQ ID NO: 15296 - DNA, 15 bp, Homo sapiens
tatcaaaccccaggt

SEQ ID NO: 15297 - DNA, 15 bp, Homo sapiens
gtatcaaaccccagg

SEQ ID NO: 15298 - DNA, 15 bp, Homo sapiens
ggtatcaaaccccag

SEQ ID NO: 15299 - DNA, 15 bp, Homo sapiens
aggtatcaaacccca

SEQ ID NO: 15300 - DNA, 15 bp, Homo sapiens
taggtatcaaacccc

SEQ ID NO: 15301 - DNA, 15 bp, Homo sapiens
gtaggtatcaaaccc

SEQ ID NO: 15302 - DNA, 15 bp, Homo sapiens
agtaggtatcaaacc

SEQ ID NO: 15303 - DNA, 15 bp, Homo sapiens
gagtaggtatcaaac

SEQ ID NO: 15304 - DNA, 15 bp, Homo sapiens
agagtaggtatcaaa

SEQ ID NO: 15305 - DNA, 15 bp, Homo sapiens
tagagtaggtatcaa

SEQ ID NO: 15306 - DNA, 15 bp, Homo sapiens
gtagagtaggtatca

SEQ ID NO: 15307 - DNA, 15 bp, Homo sapiens
ggtagagtaggtatc

SEQ ID NO: 15308 - DNA, 15 bp, Homo sapiens
tggtagagtaggtat

SEQ ID NO: 15309 - DNA, 15 bp, Homo sapiens
gtggtagagtaggta

SEQ ID NO: 15310 - DNA, 15 bp, Homo sapiens
cgtggtagagtaggt

SEQ ID NO: 15311 - DNA, 15 bp, Homo sapiens
gcgtggtagagtagg

SEQ ID NO: 15312 - DNA, 15 bp, Homo sapiens
ggcgtggtagagtag

SEQ ID NO: 15313 - DNA, 15 bp, Homo sapiens
aggcgtggtagagta

SEQ ID NO: 15314 - DNA, 15 bp, Homo sapiens
gaggcgtggtagagt

SEQ ID NO: 15315 - DNA, 15 bp, Homo sapiens
agaggcgtggtagag

SEQ ID NO: 15316 - DNA, 15 bp, Homo sapiens
cagaggcgtggtaga

SEQ ID NO: 15317 - DNA, 15 bp, Homo sapiens
ccagaggcgtggtag

SEQ ID NO: 15318 - DNA, 15 bp, Homo sapiens
cccagaggcgtggta

SEQ ID NO: 15319 - DNA, 15 bp, Homo sapiens
ccccagaggcgtggt

SEQ ID NO: 15320 - DNA, 15 bp, Homo sapiens
cccccagaggcgtgg

SEQ ID NO: 15321 - DNA, 15 bp, Homo sapiens
tcccccagaggcgtg

SEQ ID NO: 15322 - DNA, 15 bp, Homo sapiens
ctcccccagaggcgt

SEQ ID NO: 15323 - DNA, 15 bp, Homo sapiens
actcccccagaggcg

SEQ ID NO: 15324 - DNA, 15 bp, Homo sapiens
gactcccccagaggc

SEQ ID NO: 15325 - DNA, 15 bp, Homo sapiens
tgactcccccagagg

SEQ ID NO: 15326 - DNA, 15 bp, Homo sapiens
gtgactcccccagag

SEQ ID NO: 15327 - DNA, 15 bp, Homo sapiens
agtgactcccccaga

SEQ ID NO: 15328 - DNA, 15 bp, Homo sapiens
gagtgactcccccag

SEQ ID NO: 15329 - DNA, 15 bp, Homo sapiens
tgagtgactccccca

SEQ ID NO: 15330 - DNA, 15 bp, Homo sapiens
ctgagtgactccccc

SEQ ID NO: 15331 - DNA, 15 bp, Homo sapiens
tctgagtgactcccc

SEQ ID NO: 15332 - DNA, 15 bp, Homo sapiens
gtctgagtgactccc

SEQ ID NO: 15333 - DNA, 15 bp, Homo sapiens
agtctgagtgactcc

SEQ ID NO: 15334 - DNA, 15 bp, Homo sapiens
gagtctgagtgactc

SEQ ID NO: 15335 - DNA, 15 bp, Homo sapiens
cgagtctgagtgact

SEQ ID NO: 15336 - DNA, 15 bp, Homo sapiens
acgagtctgagtgac

SEQ ID NO: 15337 - DNA, 15 bp, Homo sapiens
aacgagtctgagtga

SEQ ID NO: 15338 - DNA, 15 bp, Homo sapiens
caacgagtctgagtg

SEQ ID NO: 15339 - DNA, 15 bp, Homo sapiens
tcaacgagtctgagt

SEQ ID NO: 15340 - DNA, 15 bp, Homo sapiens
ttcaacgagtctgag

SEQ ID NO: 15341 - DNA, 15 bp, Homo sapiens
gttcaacgagtctga

SEQ ID NO: 15342 - DNA, 15 bp, Homo sapiens
ggttcaacgagtctg

SEQ ID NO: 15343 - DNA, 15 bp, Homo sapiens
aggttcaacgagtct

SEQ ID NO: 15344 - DNA, 15 bp, Homo sapiens
taggttcaacgagtc

SEQ ID NO: 15345 - DNA, 15 bp, Homo sapiens
ttaggttcaacgagt

SEQ ID NO: 15346 - DNA, 15 bp, Homo sapiens
cttaggttcaacgag

SEQ ID NO: 15347 - DNA, 15 bp, Homo sapiens
acttaggttcaacga

SEQ ID NO: 15348 - DNA, 15 bp, Homo sapiens
aacttaggttcaacg

SEQ ID NO: 15349 - DNA, 15 bp, Homo sapiens
gaacttaggttcaac

SEQ ID NO: 15350 - DNA, 15 bp, Homo sapiens
ggaacttaggttcaa

SEQ ID NO: 15351 - DNA, 15 bp, Homo sapiens
cggaacttaggttca

SEQ ID NO: 15352 - DNA, 15 bp, Homo sapiens
ccggaacttaggttc

SEQ ID NO: 15353 - DNA, 15 bp, Homo sapiens
cccggaacttaggtt

SEQ ID NO: 15354 - DNA, 15 bp, Homo sapiens
ccccggaacttaggt

SEQ ID NO: 15355 - DNA, 15 bp, Homo sapiens
gccccggaacttagg

SEQ ID NO: 15356 - DNA, 15 bp, Homo sapiens
agccccggaacttag

SEQ ID NO: 15357 - DNA, 15 bp, Homo sapiens
cagccccggaactta

SEQ ID NO: 15358 - DNA, 15 bp, Homo sapiens
gcagccccggaactt

SEQ ID NO: 15359 - DNA, 15 bp, Homo sapiens
ggcagccccggaact

SEQ ID NO: 15360 - DNA, 15 bp, Homo sapiens
tggcagccccggaac

SEQ ID NO: 15361 - DNA, 15 bp, Homo sapiens
ttggcagccccggaa

SEQ ID NO: 15362 - DNA, 15 bp, Homo sapiens
cttggcagccccgga

SEQ ID NO: 15363 - DNA, 15 bp, Homo sapiens
acttggcagccccgg

SEQ ID NO: 15364 - DNA, 15 bp, Homo sapiens
cacttggcagccccg

SEQ ID NO: 15365 - DNA, 15 bp, Homo sapiens
tcacttggcagcccc

SEQ ID NO: 15366 - DNA, 15 bp, Homo sapiens
ctcacttggcagccc

SEQ ID NO: 15367 - DNA, 15 bp, Homo sapiens
cctcacttggcagcc

SEQ ID NO: 15368 - DNA, 15 bp, Homo sapiens
tcctcacttggcagc

SEQ ID NO: 15369 - DNA, 15 bp, Homo sapiens
atcctcacttggcag

SEQ ID NO: 15370 - DNA, 15 bp, Homo sapiens
tatcctcacttggca

SEQ ID NO: 15371 - DNA, 15 bp, Homo sapiens
ttatcctcacttggc

SEQ ID NO: 15372 - DNA, 15 bp, Homo sapiens
cttatcctcacttgg

SEQ ID NO: 15373 - DNA, 15 bp, Homo sapiens
acttatcctcacttg

SEQ ID NO: 15374 - DNA, 15 bp, Homo sapiens
tacttatcctcactt

SEQ ID NO: 15375 - DNA, 15 bp, Homo sapiens
ctacttatcctcact

SEQ ID NO: 15376 - DNA, 15 bp, Homo sapiens
actacttatcctcac

SEQ ID NO: 15377 - DNA, 15 bp, Homo sapiens
tactacttatcctca

SEQ ID NO: 15378 - DNA, 15 bp, Homo sapiens
ttactacttatcctc

SEQ ID NO: 15379 - DNA, 15 bp, Homo sapiens
attactacttatcct

SEQ ID NO: 15380 - DNA, 15 bp, Homo sapiens
aattactacttatcc

SEQ ID NO: 15381 - DNA, 15 bp, Homo sapiens
caattactacttatc

SEQ ID NO: 15382 - DNA, 15 bp, Homo sapiens
gcaattactacttat

SEQ ID NO: 15383 - DNA, 15 bp, Homo sapiens
agcaattactactta

SEQ ID NO: 15384 - DNA, 15 bp, Homo sapiens
cagcaattactactt

SEQ ID NO: 15385 - DNA, 15 bp, Homo sapiens
tcagcaattactact

SEQ ID NO: 15386 - DNA, 15 bp, Homo sapiens
atcagcaattactac

SEQ ID NO: 15387 - DNA, 15 bp, Homo sapiens
gatcagcaattacta

SEQ ID NO: 15388 - DNA, 15 bp, Homo sapiens
ggatcagcaattact

SEQ ID NO: 15389 - DNA, 15 bp, Homo sapiens
tggatcagcaattac

SEQ ID NO: 15390 - DNA, 15 bp, Homo sapiens
gtggatcagcaatta

SEQ ID NO: 15391 - DNA, 15 bp, Homo sapiens
ggtggatcagcaatt

SEQ ID NO: 15392 - DNA, 15 bp, Homo sapiens
aggtggatcagcaat

SEQ ID NO: 15393 - DNA, 15 bp, Homo sapiens
taggtggatcagcaa

SEQ ID NO: 15394 - DNA, 15 bp, Homo sapiens
gtaggtggatcagca

SEQ ID NO: 15395 - DNA, 15 bp, Homo sapiens
agtaggtggatcagc

SEQ ID NO: 15396 - DNA, 15 bp, Homo sapiens
aagtaggtggatcag

SEQ ID NO: 15397 - DNA, 15 bp, Homo sapiens
caagtaggtggatca

SEQ ID NO: 15398 - DNA, 15 bp, Homo sapiens
tcaagtaggtggatc

SEQ ID NO: 15399 - DNA, 15 bp, Homo sapiens
gtcaagtaggtggat

SEQ ID NO: 15400 - DNA, 15 bp, Homo sapiens
tgtcaagtaggtgga

SEQ ID NO: 15401 - DNA, 15 bp, Homo sapiens
ttgtcaagtaggtgg

SEQ ID NO: 15402 - DNA, 15 bp, Homo sapiens
cttgtcaagtaggtg

SEQ ID NO: 15403 - DNA, 15 bp, Homo sapiens
tcttgtcaagtaggt

SEQ ID NO: 15404 - DNA, 15 bp, Homo sapiens
atcttgtcaagtagg

SEQ ID NO: 15405 - DNA, 15 bp, Homo sapiens
tatcttgtcaagtag

SEQ ID NO: 15406 - DNA, 15 bp, Homo sapiens
ctatcttgtcaagta

SEQ ID NO: 15407 - DNA, 15 bp, Homo sapiens
actatcttgtcaagt

SEQ ID NO: 15408 - DNA, 15 bp, Homo sapiens
tactatcttgtcaag

SEQ ID NO: 15409 - DNA, 15 bp, Homo sapiens
ctactatcttgtcaa

SEQ ID NO: 15410 - DNA, 15 bp, Homo sapiens
actactatcttgtca

SEQ ID NO: 15411 - DNA, 15 bp, Homo sapiens
cactactatcttgtc

SEQ ID NO: 15412 - DNA, 15 bp, Homo sapiens
tcactactatcttgt

SEQ ID NO: 15413 - DNA, 15 bp, Homo sapiens
ctcactactatcttg

SEQ ID NO: 15414 - DNA, 15 bp, Homo sapiens
cctcactactatctt

SEQ ID NO: 15415 - DNA, 15 bp, Homo sapiens
ccctcactactatct

SEQ ID NO: 15416 - DNA, 15 bp, Homo sapiens
gccctcactactatc

SEQ ID NO: 15417 - DNA, 15 bp, Homo sapiens
ggccctcactactat

SEQ ID NO: 15418 - DNA, 15 bp, Homo sapiens
gggccctcactacta

SEQ ID NO: 15419 - DNA, 15 bp, Homo sapiens
agggccctcactact

SEQ ID NO: 15420 - DNA, 15 bp, Homo sapiens
cagggccctcactac

SEQ ID NO: 15421 - DNA, 15 bp, Homo sapiens
tcagggccctcacta

SEQ ID NO: 15422 - DNA, 15 bp, Homo sapiens
ctcagggccctcact

SEQ ID NO: 15423 - DNA, 15 bp, Homo sapiens
gctcagggccctcac

SEQ ID NO: 15424 - DNA, 15 bp, Homo sapiens
cgctcagggccctca

SEQ ID NO: 15425 - DNA, 15 bp, Homo sapiens
gcgctcagggccctc

SEQ ID NO: 15426 - DNA, 15 bp, Homo sapiens
ggcgctcagggccct

SEQ ID NO: 15427 - DNA, 15 bp, Homo sapiens
tggcgctcagggccc

SEQ ID NO: 15428 - DNA, 15 bp, Homo sapiens
ctggcgctcagggcc

SEQ ID NO: 15429 - DNA, 15 bp, Homo sapiens
cctggcgctcagggc

SEQ ID NO: 15430 - DNA, 15 bp, Homo sapiens
gcctggcgctcaggg

SEQ ID NO: 15431 - DNA, 15 bp, Homo sapiens
agcctggcgctcagg

SEQ ID NO: 15432 - DNA, 15 bp, Homo sapiens
cagcctggcgctcag

SEQ ID NO: 15433 - DNA, 15 bp, Homo sapiens
acagcctggcgctca

SEQ ID NO: 15434 - DNA, 15 bp, Homo sapiens
cacagcctggcgctc

SEQ ID NO: 15435 - DNA, 15 bp, Homo sapiens
ccacagcctggcgct

SEQ ID NO: 15436 - DNA, 15 bp, Homo sapiens
tccacagcctggcgc

SEQ ID NO: 15437 - DNA, 15 bp, Homo sapiens
atccacagcctggcg

SEQ ID NO: 15438 - DNA, 15 bp, Homo sapiens
gatccacagcctggc

SEQ ID NO: 15439 - DNA, 15 bp, Homo sapiens
ggatccacagcctgg

SEQ ID NO: 15440 - DNA, 15 bp, Homo sapiens
tggatccacagcctg

SEQ ID NO: 15441 - DNA, 15 bp, Homo sapiens
ctggatccacagcct

SEQ ID NO: 15442 - DNA, 15 bp, Homo sapiens
gctggatccacagcc

SEQ ID NO: 15443 - DNA, 15 bp, Homo sapiens
ggctggatccacagc

SEQ ID NO: 15444 - DNA, 15 bp, Homo sapiens
aggctggatccacag

SEQ ID NO: 15445 - DNA, 15 bp, Homo sapiens
aaggctggatccaca

SEQ ID NO: 15446 - DNA, 15 bp, Homo sapiens
aaaggctggatccac

SEQ ID NO: 15447 - DNA, 15 bp, Homo sapiens
gaaaggctggatcca

SEQ ID NO: 15448 - DNA, 15 bp, Homo sapiens
ggaaaggctggatcc

SEQ ID NO: 15449 - DNA, 15 bp, Homo sapiens
gggaaaggctggatc

SEQ ID NO: 15450 - DNA, 15 bp, Homo sapiens
tgggaaaggctggat

SEQ ID NO: 15451 - DNA, 15 bp, Homo sapiens
gtgggaaaggctgga

SEQ ID NO: 15452 - DNA, 15 bp, Homo sapiens
cgtgggaaaggctgg

SEQ ID NO: 15453 - DNA, 15 bp, Homo sapiens
ccgtgggaaaggctg

SEQ ID NO: 15454 - DNA, 15 bp, Homo sapiens
accgtgggaaaggct

SEQ ID NO: 15455 - DNA, 15 bp, Homo sapiens
aaccgtgggaaaggc

SEQ ID NO: 15456 - DNA, 15 bp, Homo sapiens
gaaccgtgggaaagg

SEQ ID NO: 15457 - DNA, 15 bp, Homo sapiens
ggaaccgtgggaaag

SEQ ID NO: 15458 - DNA, 15 bp, Homo sapiens
aggaaccgtgggaaa

SEQ ID NO: 15459 - DNA, 15 bp, Homo sapiens
caggaaccgtgggaa

SEQ ID NO: 15460 - DNA, 15 bp, Homo sapiens
ccaggaaccgtggga

SEQ ID NO: 15461 - DNA, 15 bp, Homo sapiens
accaggaaccgtggg

SEQ ID NO: 15462 - DNA, 15 bp, Homo sapiens
caccaggaaccgtgg

SEQ ID NO: 15463 - DNA, 15 bp, Homo sapiens
acaccaggaaccgtg

SEQ ID NO: 15464 - DNA, 15 bp, Homo sapiens
cacaccaggaaccgt

SEQ ID NO: 15465 - DNA, 15 bp, Homo sapiens
ccacaccaggaaccg

SEQ ID NO: 15466 - DNA, 15 bp, Homo sapiens
gccacaccaggaacc

SEQ ID NO: 15467 - DNA, 15 bp, Homo sapiens
tgccacaccaggaac

SEQ ID NO: 15468 - DNA, 15 bp, Homo sapiens
ctgccacaccaggaa

SEQ ID NO: 15469 - DNA, 15 bp, Homo sapiens
cctgccacaccagga

SEQ ID NO: 15470 - DNA, 15 bp, Homo sapiens
tcctgccacaccagg

SEQ ID NO: 15471 - DNA, 15 bp, Homo sapiens
ttcctgccacaccag

SEQ ID NO: 15472 - DNA, 15 bp, Homo sapiens
cttcctgccacacca

SEQ ID NO: 15473 - DNA, 15 bp, Homo sapiens
tcttcctgccacacc

SEQ ID NO: 15474 - DNA, 15 bp, Homo sapiens
ttcttcctgccacac

SEQ ID NO: 15475 - DNA, 15 bp, Homo sapiens
gttcttcctgccaca

SEQ ID NO: 15476 - DNA, 15 bp, Homo sapiens
agttcttcctgccac

SEQ ID NO: 15477 - DNA, 15 bp, Homo sapiens
gagttcttcctgcca

SEQ ID NO: 15478 - DNA, 15 bp, Homo sapiens
agagttcttcctgcc

SEQ ID NO: 15479 - DNA, 15 bp, Homo sapiens
tagagttcttcctgc

SEQ ID NO: 15480 - DNA, 15 bp, Homo sapiens
ctagagttcttcctg

SEQ ID NO: 15481 - DNA, 15 bp, Homo sapiens
cctagagttcttcct

SEQ ID NO: 15482 - DNA, 15 bp, Homo sapiens
gcctagagttcttcc

SEQ ID NO: 15483 - DNA, 15 bp, Homo sapiens
ggcctagagttcttc

SEQ ID NO: 15484 - DNA, 15 bp, Homo sapiens
aggcctagagttctt

SEQ ID NO: 15485 - DNA, 15 bp, Homo sapiens
caggcctagagttct

SEQ ID NO: 15486 - DNA, 15 bp, Homo sapiens
tcaggcctagagttc

SEQ ID NO: 15487 - DNA, 15 bp, Homo sapiens
ttcaggcctagagtt

SEQ ID NO: 15488 - DNA, 15 bp, Homo sapiens
cttcaggcctagagt

SEQ ID NO: 15489 - DNA, 15 bp, Homo sapiens
ccttcaggcctagag

SEQ ID NO: 15490 - DNA, 15 bp, Homo sapiens
accttcaggcctaga

SEQ ID NO: 15491 - DNA, 15 bp, Homo sapiens
caccttcaggcctag

SEQ ID NO: 15492 - DNA, 15 bp, Homo sapiens
tcaccttcaggccta

SEQ ID NO: 15493 - DNA, 15 bp, Homo sapiens
ttcaccttcaggcct

SEQ ID NO: 15494 - DNA, 15 bp, Homo sapiens
tttcaccttcaggcc

SEQ ID NO: 15495 - DNA, 15 bp, Homo sapiens
atttcaccttcaggc

SEQ ID NO: 15496 - DNA, 15 bp, Homo sapiens
aatttcaccttcagg

SEQ ID NO: 15497 - DNA, 15 bp, Homo sapiens
caatttcaccttcag

SEQ ID NO: 15498 - DNA, 15 bp, Homo sapiens
ccaatttcaccttca

SEQ ID NO: 15499 - DNA, 15 bp, Homo sapiens
cccaatttcaccttc

SEQ ID NO: 15500 - DNA, 15 bp, Homo sapiens
ccccaatttcacctt

SEQ ID NO: 15501 - DNA, 15 bp, Homo sapiens
tccccaatttcacct

SEQ ID NO: 15502 - DNA, 15 bp, Homo sapiens
ctccccaatttcacc

SEQ ID NO: 15503 - DNA, 15 bp, Homo sapiens
cctccccaatttcac

SEQ ID NO: 15504 - DNA, 15 bp, Homo sapiens
ccctccccaatttca

SEQ ID NO: 15505 - DNA, 15 bp, Homo sapiens
tccctccccaatttc

SEQ ID NO: 15506 - DNA, 15 bp, Homo sapiens
ctccctccccaattt

SEQ ID NO: 15507 - DNA, 15 bp, Homo sapiens
actccctccccaatt

SEQ ID NO: 15508 - DNA, 15 bp, Homo sapiens
gactccctccccaat

SEQ ID NO: 15509 - DNA, 15 bp, Homo sapiens
ggactccctccccaa

SEQ ID NO: 15510 - DNA, 15 bp, Homo sapiens
gggactccctcccca

SEQ ID NO: 15511 - DNA, 15 bp, Homo sapiens
tgggactccctcccc

SEQ ID NO: 15512 - DNA, 15 bp, Homo sapiens
ctgggactccctccc

SEQ ID NO: 15513 - DNA, 15 bp, Homo sapiens
gctgggactccctcc

SEQ ID NO: 15514 - DNA, 15 bp, Homo sapiens
agctgggactccctc

SEQ ID NO: 15515 - DNA, 15 bp, Homo sapiens
gagctgggactccct

SEQ ID NO: 15516 - DNA, 15 bp, Homo sapiens
agagctgggactccc

SEQ ID NO: 15517 - DNA, 15 bp, Homo sapiens
cagagctgggactcc

SEQ ID NO: 15518 - DNA, 15 bp, Homo sapiens
gcagagctgggactc

SEQ ID NO: 15519 - DNA, 15 bp, Homo sapiens
ggcagagctgggact

SEQ ID NO: 15520 - DNA, 15 bp, Homo sapiens
tggcagagctgggac

SEQ ID NO: 15521 - DNA, 15 bp, Homo sapiens
gtggcagagctggga

SEQ ID NO: 15522 - DNA, 15 bp, Homo sapiens
agtggcagagctggg

SEQ ID NO: 15523 - DNA, 15 bp, Homo sapiens
cagtggcagagctgg

SEQ ID NO: 15524 - DNA, 15 bp, Homo sapiens
acagtggcagagctg

SEQ ID NO: 15525 - DNA, 15 bp, Homo sapiens
gacagtggcagagct

SEQ ID NO: 15526 - DNA, 15 bp, Homo sapiens
agacagtggcagagc

SEQ ID NO: 15527 - DNA, 15 bp, Homo sapiens
gagacagtggcagag

SEQ ID NO: 15528 - DNA, 15 bp, Homo sapiens
acattaaaaagacaa

SEQ ID NO: 15529 - DNA, 15 bp, Homo sapiens
aacattaaaaagaca

SEQ ID NO: 15530 - DNA, 15 bp, Homo sapiens
caacattaaaaagac

SEQ ID NO: 15531 - DNA, 15 bp, Homo sapiens
gcaacattaaaaaga

SEQ ID NO: 15532 - DNA, 15 bp, Homo sapiens
agcaacattaaaaag

SEQ ID NO: 15533 - DNA, 15 bp, Homo sapiens
gagcaacattaaaaa

SEQ ID NO: 15534 - DNA, 15 bp, Homo sapiens
ggagcaacattaaaa

SEQ ID NO: 15535 - DNA, 15 bp, Homo sapiens
tggagcaacattaaa

SEQ ID NO: 15536 - DNA, 15 bp, Homo sapiens
atggagcaacattaa

SEQ ID NO: 15537 - DNA, 15 bp, Homo sapiens
catggagcaacatta

SEQ ID NO: 15538 - DNA, 15 bp, Homo sapiens
tcatggagcaacatt

SEQ ID NO: 15539 - DNA, 15 bp, Homo sapiens
atcatggagcaacat

SEQ ID NO: 15540 - DNA, 15 bp, Homo sapiens
gatcatggagcaaca

SEQ ID NO: 15541 - DNA, 15 bp, Homo sapiens
ggatcatggagcaac

SEQ ID NO: 15542 - DNA, 15 bp, Homo sapiens
tggatcatggagcaa

SEQ ID NO: 15543 - DNA, 15 bp, Homo sapiens
ctggatcatggagca

SEQ ID NO: 15544 - DNA, 15 bp, Homo sapiens
actggatcatggagc

SEQ ID NO: 15545 - DNA, 15 bp, Homo sapiens
cactggatcatggag

SEQ ID NO: 15546 - DNA, 15 bp, Homo sapiens
tcactggatcatgga

SEQ ID NO: 15547 - DNA, 15 bp, Homo sapiens
atcactggatcatgg

SEQ ID NO: 15548 - DNA, 15 bp, Homo sapiens
gatcactggatcatg

SEQ ID NO: 15549 - DNA, 15 bp, Homo sapiens
agatcactggatcat

SEQ ID NO: 15550 - DNA, 15 bp, Homo sapiens
cagatcactggatca

SEQ ID NO: 15551 - DNA, 15 bp, Homo sapiens
acagatcactggatc

SEQ ID NO: 15552 - DNA, 15 bp, Homo sapiens
cacagatcactggat

SEQ ID NO: 15553 - DNA, 15 bp, Homo sapiens
ccacagatcactgga

SEQ ID NO: 15554 - DNA, 15 bp, Homo sapiens
gccacagatcactgg

SEQ ID NO: 15555 - DNA, 15 bp, Homo sapiens
ggccacagatcactg

SEQ ID NO: 15556 - DNA, 15 bp, Homo sapiens
aggccacagatcact

SEQ ID NO: 15557 - DNA, 15 bp, Homo sapiens
aaggccacagatcac

SEQ ID NO: 15558 - DNA, 15 bp, Homo sapiens
caaggccacagatca

SEQ ID NO: 15559 - DNA, 15 bp, Homo sapiens
ccaaggccacagatc

SEQ ID NO: 15560 - DNA, 15 bp, Homo sapiens
accaaggccacagat

SEQ ID NO: 15561 - DNA, 15 bp, Homo sapiens
aaccaaggccacaga

SEQ ID NO: 15562 - DNA, 15 bp, Homo sapiens
taaccaaggccacag

SEQ ID NO: 15563 - DNA, 15 bp, Homo sapiens
ataaccaaggccaca

SEQ ID NO: 15564 - DNA, 15 bp, Homo sapiens
cataaccaaggccac

SEQ ID NO: 15565 - DNA, 15 bp, Homo sapiens
gcataaccaaggcca

SEQ ID NO: 15566 - DNA, 15 bp, Homo sapiens
agcataaccaaggcc

SEQ ID NO: 15567 - DNA, 15 bp, Homo sapiens
gagcataaccaaggc

SEQ ID NO: 15568 - DNA, 15 bp, Homo sapiens
agagcataaccaagg

SEQ ID NO: 15569 - DNA, 15 bp, Homo sapiens
cagagcataaccaag

SEQ ID NO: 15570 - DNA, 15 bp, Homo sapiens
acagagcataaccaa

SEQ ID NO: 15571 - DNA, 15 bp, Homo sapiens
cacagagcataacca

SEQ ID NO: 15572 - DNA, 15 bp, Homo sapiens
gcacagagcataacc

SEQ ID NO: 15573 - DNA, 15 bp, Homo sapiens
agcacagagcataac

SEQ ID NO: 15574 - DNA, 15 bp, Homo sapiens
tagcacagagcataa

SEQ ID NO: 15575 - DNA, 15 bp, Homo sapiens
ctagcacagagcata

SEQ ID NO: 15576 - DNA, 15 bp, Homo sapiens
tctagcacagagcat

SEQ ID NO: 15577 - DNA, 15 bp, Homo sapiens
ctctagcacagagca

SEQ ID NO: 15578 - DNA, 15 bp, Homo sapiens
actctagcacagagc

SEQ ID NO: 15579 - DNA, 15 bp, Homo sapiens
gactctagcacagag

SEQ ID NO: 15580 - DNA, 15 bp, Homo sapiens
ggactctagcacaga

SEQ ID NO: 15581 - DNA, 15 bp, Homo sapiens
aggactctagcacag

SEQ ID NO: 15582 - DNA, 15 bp, Homo sapiens
taggactctagcaca

SEQ ID NO: 15583 - DNA, 15 bp, Homo sapiens
ttaggactctagcac

SEQ ID NO: 15584 - DNA, 15 bp, Homo sapiens
gttaggactctagca

SEQ ID NO: 15585 - DNA, 15 bp, Homo sapiens
tgttaggactctagc

SEQ ID NO: 15586 - DNA, 15 bp, Homo sapiens
ttgttaggactctag

SEQ ID NO: 15587 - DNA, 15 bp, Homo sapiens
cttgttaggactcta

SEQ ID NO: 15588 - DNA, 15 bp, Homo sapiens
tcttgttaggactct

SEQ ID NO: 15589 - DNA, 15 bp, Homo sapiens
gtcttgttaggactc

SEQ ID NO: 15590 - DNA, 15 bp, Homo sapiens
tgtcttgttaggact

SEQ ID NO: 15591 - DNA, 15 bp, Homo sapiens
ttgtcttgttaggac

SEQ ID NO: 15592 - DNA, 15 bp, Homo sapiens
tttgtcttgttagga

SEQ ID NO: 15593 - DNA, 15 bp, Homo sapiens
atttgtcttgttagg

SEQ ID NO: 15594 - DNA, 15 bp, Homo sapiens
catttgtcttgttag

SEQ ID NO: 15595 - DNA, 15 bp, Homo sapiens
gcatttgtcttgtta

SEQ ID NO: 15596 - DNA, 15 bp, Homo sapiens
agcatttgtcttgtt

SEQ ID NO: 15597 - DNA, 15 bp, Homo sapiens
tagcatttgtcttgt

SEQ ID NO: 15598 - DNA, 15 bp, Homo sapiens
ttagcatttgtcttg

SEQ ID NO: 15599 - DNA, 15 bp, Homo sapiens
cttagcatttgtctt

SEQ ID NO: 15600 - DNA, 15 bp, Homo sapiens
ccttagcatttgtct

SEQ ID NO: 15601 - DNA, 15 bp, Homo sapiens
accttagcatttgtc

SEQ ID NO: 15602 - DNA, 15 bp, Homo sapiens
taccttagcatttgt

SEQ ID NO: 15603 - DNA, 15 bp, Homo sapiens
ctaccttagcatttg

SEQ ID NO: 15604 - DNA, 15 bp, Homo sapiens
tctaccttagcattt

SEQ ID NO: 15605 - DNA, 15 bp, Homo sapiens
ctctaccttagcatt

SEQ ID NO: 15606 - DNA, 15 bp, Homo sapiens
cctctaccttagcat

SEQ ID NO: 15607 - DNA, 15 bp, Homo sapiens
acctctaccttagca

SEQ ID NO: 15608 - DNA, 15 bp, Homo sapiens
gacctctaccttagc

SEQ ID NO: 15609 - DNA, 15 bp, Homo sapiens
tgacctctaccttag

SEQ ID NO: 15610 - DNA, 15 bp, Homo sapiens
atgacctctacctta

SEQ ID NO: 15611 - DNA, 15 bp, Homo sapiens
aatgacctctacctt

SEQ ID NO: 15612 - DNA, 15 bp, Homo sapiens
gaatgacctctacct

SEQ ID NO: 15613 - DNA, 15 bp, Homo sapiens
agaatgacctctacc

SEQ ID NO: 15614 - DNA, 15 bp, Homo sapiens
cagaatgacctctac

SEQ ID NO: 15615 - DNA, 15 bp, Homo sapiens
gcagaatgacctcta

SEQ ID NO: 15616 - DNA, 15 bp, Homo sapiens
agcagaatgacctct

SEQ ID NO: 15617 - DNA, 15 bp, Homo sapiens
gagcagaatgacctc

SEQ ID NO: 15618 - DNA, 15 bp, Homo sapiens
tgagcagaatgacct

SEQ ID NO: 15619 - DNA, 15 bp, Homo sapiens
ttgagcagaatgacc

SEQ ID NO: 15620 - DNA, 15 bp, Homo sapiens
tttgagcagaatgac

SEQ ID NO: 15621 - DNA, 15 bp, Homo sapiens
gtttgagcagaatga

SEQ ID NO: 15622 - DNA, 15 bp, Homo sapiens
tgtttgagcagaatg

SEQ ID NO: 15623 - DNA, 15 bp, Homo sapiens
ttgtttgagcagaat

SEQ ID NO: 15624 - DNA, 15 bp, Homo sapiens
gttgtttgagcagaa

SEQ ID NO: 15625 - DNA, 15 bp, Homo sapiens
ggttgtttgagcaga

SEQ ID NO: 15626 - DNA, 15 bp, Homo sapiens
aggttgtttgagcag

SEQ ID NO: 15627 - DNA, 15 bp, Homo sapiens
caggttgtttgagca

SEQ ID NO: 15628 - DNA, 15 bp, Homo sapiens
tcaggttgtttgagc

SEQ ID NO: 15629 - DNA, 15 bp, Homo sapiens
gtcaggttgtttgag

SEQ ID NO: 15630 - DNA, 15 bp, Homo sapiens
ggtcaggttgtttga

SEQ ID NO: 15631 - DNA, 15 bp, Homo sapiens
gggtcaggttgtttg

SEQ ID NO: 15632 - DNA, 15 bp, Homo sapiens
ggggtcaggttgttt

SEQ ID NO: 15633 - DNA, 15 bp, Homo sapiens
tggggtcaggttgtt

SEQ ID NO: 15634 - DNA, 15 bp, Homo sapiens
gtggggtcaggttgt

SEQ ID NO: 15635 - DNA, 15 bp, Homo sapiens
ggtggggtcaggttg

SEQ ID NO: 15636 - DNA, 15 bp, Homo sapiens
aggtggggtcaggtt

SEQ ID NO: 15637 - DNA, 15 bp, Homo sapiens
caggtggggtcaggt

SEQ ID NO: 15638 - DNA, 15 bp, Homo sapiens
ccaggtggggtcagg

SEQ ID NO: 15639 - DNA, 15 bp, Homo sapiens
tccaggtggggtcag

SEQ ID NO: 15640 - DNA, 15 bp, Homo sapiens
atccaggtggggtca

SEQ ID NO: 15641 - DNA, 15 bp, Homo sapiens
catccaggtggggtc

SEQ ID NO: 15642 - DNA, 15 bp, Homo sapiens
acatccaggtggggt

SEQ ID NO: 15643 - DNA, 15 bp, Homo sapiens
cacatccaggtgggg

SEQ ID NO: 15644 - DNA, 15 bp, Homo sapiens
ccacatccaggtggg

SEQ ID NO: 15645 - DNA, 15 bp, Homo sapiens
cccacatccaggtgg

SEQ ID NO: 15646 - DNA, 15 bp, Homo sapiens
gcccacatccaggtg

SEQ ID NO: 15647 - DNA, 15 bp, Homo sapiens
agcccacatccaggt

SEQ ID NO: 15648 - DNA, 15 bp, Homo sapiens
aagcccacatccagg

SEQ ID NO: 15649 - DNA, 15 bp, Homo sapiens
taagcccacatccag

SEQ ID NO: 15650 - DNA, 15 bp, Homo sapiens
gtaagcccacatcca

SEQ ID NO: 15651 - DNA, 15 bp, Homo sapiens
tgtaagcccacatcc

SEQ ID NO: 15652 - DNA, 15 bp, Homo sapiens
atgtaagcccacatc

SEQ ID NO: 15653 - DNA, 15 bp, Homo sapiens
aatgtaagcccacat

SEQ ID NO: 15654 - DNA, 15 bp, Homo sapiens
aaatgtaagcccaca

SEQ ID NO: 15655 - DNA, 15 bp, Homo sapiens
caaatgtaagcccac

SEQ ID NO: 15656 - DNA, 15 bp, Homo sapiens
gcaaatgtaagccca

SEQ ID NO: 15657 - DNA, 15 bp, Homo sapiens
tgcaaatgtaagccc

SEQ ID NO: 15658 - DNA, 15 bp, Homo sapiens
ttgcaaatgtaagcc

SEQ ID NO: 15659 - DNA, 15 bp, Homo sapiens
tttgcaaatgtaagc

SEQ ID NO: 15660 - DNA, 15 bp, Homo sapiens
ctttgcaaatgtaag

SEQ ID NO: 15661 - DNA, 15 bp, Homo sapiens
cctttgcaaatgtaa

SEQ ID NO: 15662 - DNA, 15 bp, Homo sapiens
ccctttgcaaatgta

SEQ ID NO: 15663 - DNA, 15 bp, Homo sapiens
gccctttgcaaatgt

SEQ ID NO: 15664 - DNA, 15 bp, Homo sapiens
tgccctttgcaaatg

SEQ ID NO: 15665 - DNA, 15 bp, Homo sapiens
gtgccctttgcaaat

SEQ ID NO: 15666 - DNA, 15 bp, Homo sapiens
ggtgccctttgcaaa

SEQ ID NO: 15667 - DNA, 15 bp, Homo sapiens
tggtgccctttgcaa

SEQ ID NO: 15668 - DNA, 15 bp, Homo sapiens
ttggtgccctttgca

SEQ ID NO: 15669 - DNA, 15 bp, Homo sapiens
tttggtgccctttgc

SEQ ID NO: 15670 - DNA, 15 bp, Homo sapiens
ctttggtgccctttg

SEQ ID NO: 15671 - DNA, 15 bp, Homo sapiens
actttggtgcccttt

SEQ ID NO: 15672 - DNA, 15 bp, Homo sapiens
aactttggtgccctt

SEQ ID NO: 15673 - DNA, 15 bp, Homo sapiens
gaactttggtgccct

SEQ ID NO: 15674 - DNA, 15 bp, Homo sapiens
agaactttggtgccc

SEQ ID NO: 15675 - DNA, 15 bp, Homo sapiens
tagaactttggtgcc

SEQ ID NO: 15676 - DNA, 15 bp, Homo sapiens
ttagaactttggtgc

SEQ ID NO: 15677 - DNA, 15 bp, Homo sapiens
cttagaactttggtg

SEQ ID NO: 15678 - DNA, 15 bp, Homo sapiens
tcttagaactttggt

SEQ ID NO: 15679 - DNA, 15 bp, Homo sapiens
ctcttagaactttgg

SEQ ID NO: 15680 - DNA, 15 bp, Homo sapiens
tctcttagaactttg

SEQ ID NO: 15681 - DNA, 15 bp, Homo sapiens
atctcttagaacttt

SEQ ID NO: 15682 - DNA, 15 bp, Homo sapiens
catctcttagaactt

SEQ ID NO: 15683 - DNA, 15 bp, Homo sapiens
tcatctcttagaact

SEQ ID NO: 15684 - DNA, 15 bp, Homo sapiens
ctcatctcttagaac

SEQ ID NO: 15685 - DNA, 15 bp, Homo sapiens
cctcatctcttagaa

SEQ ID NO: 15686 - DNA, 15 bp, Homo sapiens
ccctcatctcttaga

SEQ ID NO: 15687 - DNA, 15 bp, Homo sapiens
cccctcatctcttag

SEQ ID NO: 15688 - DNA, 15 bp, Homo sapiens
tcccctcatctctta

SEQ ID NO: 15689 - DNA, 15 bp, Homo sapiens
ctcccctcatctctt

SEQ ID NO: 15690 - DNA, 15 bp, Homo sapiens
cctcccctcatctct

SEQ ID NO: 15691 - DNA, 15 bp, Homo sapiens
tcctcccctcatctc

SEQ ID NO: 15692 - DNA, 15 bp, Homo sapiens
ctcctcccctcatct

SEQ ID NO: 15693 - DNA, 15 bp, Homo sapiens
gctcctcccctcatc

SEQ ID NO: 15694 - DNA, 15 bp, Homo sapiens
agctcctcccctcat

SEQ ID NO: 15695 - DNA, 15 bp, Homo sapiens
cagctcctcccctca

SEQ ID NO: 15696 - DNA, 15 bp, Homo sapiens
tcagctcctcccctc

SEQ ID NO: 15697 - DNA, 15 bp, Homo sapiens
ctcagctcctcccct

SEQ ID NO: 15698 - DNA, 15 bp, Homo sapiens
gctcagctcctcccc

SEQ ID NO: 15699 - DNA, 15 bp, Homo sapiens
ggctcagctcctccc

SEQ ID NO: 15700 - DNA, 15 bp, Homo sapiens
gggctcagctcctcc

SEQ ID NO: 15701 - DNA, 15 bp, Homo sapiens
ggggctcagctcctc

SEQ ID NO: 15702 - DNA, 15 bp, Homo sapiens
aggggctcagctcct

SEQ ID NO: 15703 - DNA, 15 bp, Homo sapiens
aaggggctcagctcc

SEQ ID NO: 15704 - DNA, 15 bp, Homo sapiens
caaggggctcagctc

SEQ ID NO: 15705 - DNA, 15 bp, Homo sapiens
acaaggggctcagct

SEQ ID NO: 15706 - DNA, 15 bp, Homo sapiens
gacaaggggctcagc

SEQ ID NO: 15707 - DNA, 15 bp, Homo sapiens
ggacaaggggctcag

SEQ ID NO: 15708 - DNA, 15 bp, Homo sapiens
aggacaaggggctca

SEQ ID NO: 15709 - DNA, 15 bp, Homo sapiens
aaggacaaggggctc

SEQ ID NO: 15710 - DNA, 15 bp, Homo sapiens
taaggacaaggggct

SEQ ID NO: 15711 - DNA, 15 bp, Homo sapiens
ataaggacaaggggc

SEQ ID NO: 15712 - DNA, 15 bp, Homo sapiens
gataaggacaagggg

SEQ ID NO: 15713 - DNA, 15 bp, Homo sapiens
agataaggacaaggg

SEQ ID NO: 15714 - DNA, 15 bp, Homo sapiens
tagataaggacaagg

SEQ ID NO: 15715 - DNA, 15 bp, Homo sapiens
ctagataaggacaag

SEQ ID NO: 15716 - DNA, 15 bp, Homo sapiens
cctagataaggacaa

SEQ ID NO: 15717 - DNA, 15 bp, Homo sapiens
acctagataaggaca

SEQ ID NO: 15718 - DNA, 15 bp, Homo sapiens
aacctagataaggac

SEQ ID NO: 15719 - DNA, 15 bp, Homo sapiens
aaacctagataagga

SEQ ID NO: 15720 - DNA, 15 bp, Homo sapiens
gaaacctagataagg

SEQ ID NO: 15721 - DNA, 15 bp, Homo sapiens
ggaaacctagataag

SEQ ID NO: 15722 - DNA, 15 bp, Homo sapiens
gggaaacctagataa

SEQ ID NO: 15723 - DNA, 15 bp, Homo sapiens
agggaaacctagata

SEQ ID NO: 15724 - DNA, 15 bp, Homo sapiens
aagggaaacctagat

SEQ ID NO: 15725 - DNA, 15 bp, Homo sapiens
caagggaaacctaga

SEQ ID NO: 15726 - DNA, 15 bp, Homo sapiens
acaagggaaacctag

SEQ ID NO: 15727 - DNA, 15 bp, Homo sapiens
aacaagggaaaccta

SEQ ID NO: 15728 - DNA, 15 bp, Homo sapiens
gaacaagggaaacct

SEQ ID NO: 15729 - DNA, 15 bp, Homo sapiens
agaacaagggaaacc

SEQ ID NO: 15730 - DNA, 15 bp, Homo sapiens
aagaacaagggaaac

SEQ ID NO: 15731 - DNA, 15 bp, Homo sapiens
aaagaacaagggaaa

SEQ ID NO: 15732 - DNA, 15 bp, Homo sapiens
gaaagaacaagggaa

SEQ ID NO: 15733 - DNA, 15 bp, Homo sapiens
ggaaagaacaaggga

SEQ ID NO: 15734 - DNA, 15 bp, Homo sapiens
gggaaagaacaaggg

SEQ ID NO: 15735 - DNA, 15 bp, Homo sapiens
tgggaaagaacaagg

SEQ ID NO: 15736 - DNA, 15 bp, Homo sapiens
atgggaaagaacaag

SEQ ID NO: 15737 - DNA, 15 bp, Homo sapiens
gatgggaaagaacaa

SEQ ID NO: 15738 - DNA, 15 bp, Homo sapiens
ggatgggaaagaaca

SEQ ID NO: 15739 - DNA, 15 bp, Homo sapiens
gggatgggaaagaac

SEQ ID NO: 15740 - DNA, 15 bp, Homo sapiens
agggatgggaaagaa

SEQ ID NO: 15741 - DNA, 15 bp, Homo sapiens
gagggatgggaaaga

SEQ ID NO: 15742 - DNA, 15 bp, Homo sapiens
tgagggatgggaaag

SEQ ID NO: 15743 - DNA, 15 bp, Homo sapiens
ctgagggatgggaaa

SEQ ID NO: 15744 - DNA, 15 bp, Homo sapiens
actgagggatgggaa

SEQ ID NO: 15745 - DNA, 15 bp, Homo sapiens
gactgagggatggga

SEQ ID NO: 15746 - DNA, 15 bp, Homo sapiens
agactgagggatggg

SEQ ID NO: 15747 - DNA, 15 bp, Homo sapiens
cagactgagggatgg

SEQ ID NO: 15748 - DNA, 15 bp, Homo sapiens
gcagactgagggatg

SEQ ID NO: 15749 - DNA, 15 bp, Homo sapiens
agcagactgagggat

SEQ ID NO: 15750 - DNA, 15 bp, Homo sapiens
aagcagactgaggga

SEQ ID NO: 15751 - DNA, 15 bp, Homo sapiens
gaagcagactgaggg

SEQ ID NO: 15752 - DNA, 15 bp, Homo sapiens
agaagcagactgagg

SEQ ID NO: 15753 - DNA, 15 bp, Homo sapiens
aagaagcagactgag

SEQ ID NO: 15754 - DNA, 15 bp, Homo sapiens
aaagaagcagactga

SEQ ID NO: 15755 - DNA, 15 bp, Homo sapiens
aaaagaagcagactg

SEQ ID NO: 15756 - DNA, 15 bp, Homo sapiens
gaaaagaagcagact

SEQ ID NO: 15757 - DNA, 15 bp, Homo sapiens
ggaaaagaagcagac

SEQ ID NO: 15758 - DNA, 15 bp, Homo sapiens
gggaaaagaagcaga

SEQ ID NO: 15759 - DNA, 15 bp, Homo sapiens
tgggaaaagaagcag

SEQ ID NO: 15760 - DNA, 15 bp, Homo sapiens
ctgggaaaagaagca

SEQ ID NO: 15761 - DNA, 15 bp, Homo sapiens
actgggaaaagaagc

SEQ ID NO: 15762 - DNA, 15 bp, Homo sapiens
tactgggaaaagaag

SEQ ID NO: 15763 - DNA, 15 bp, Homo sapiens
gtactgggaaaagaa

SEQ ID NO: 15764 - DNA, 15 bp, Homo sapiens
ggtactgggaaaaga

SEQ ID NO: 15765 - DNA, 15 bp, Homo sapiens
tggtactgggaaaag

SEQ ID NO: 15766 - DNA, 15 bp, Homo sapiens
ttggtactgggaaaa

SEQ ID NO: 15767 - DNA, 15 bp, Homo sapiens
gttggtactgggaaa

SEQ ID NO: 15768 - DNA, 15 bp, Homo sapiens
tgttggtactgggaa

SEQ ID NO: 15769 - DNA, 15 bp, Homo sapiens
atgttggtactggga

SEQ ID NO: 15770 - DNA, 15 bp, Homo sapiens
catgttggtactggg

SEQ ID NO: 15771 - DNA, 15 bp, Homo sapiens
acatgttggtactgg

SEQ ID NO: 15772 - DNA, 15 bp, Homo sapiens
aacatgttggtactg

SEQ ID NO: 15773 - DNA, 15 bp, Homo sapiens
aaacatgttggtact

SEQ ID NO: 15774 - DNA, 15 bp, Homo sapiens
caaacatgttggtac

SEQ ID NO: 15775 - DNA, 15 bp, Homo sapiens
acaaacatgttggta

SEQ ID NO: 15776 - DNA, 15 bp, Homo sapiens
cacaaacatgttggt

SEQ ID NO: 15777 - DNA, 15 bp, Homo sapiens
acacaaacatgttgg

SEQ ID NO: 15778 - DNA, 15 bp, Homo sapiens
gacacaaacatgttg

SEQ ID NO: 15779 - DNA, 15 bp, Homo sapiens
ggacacaaacatgtt

SEQ ID NO: 15780 - DNA, 15 bp, Homo sapiens
aggacacaaacatgt

SEQ ID NO: 15781 - DNA, 15 bp, Homo sapiens
gaggacacaaacatg

SEQ ID NO: 15782 - DNA, 15 bp, Homo sapiens
tgaggacacaaacat

SEQ ID NO: 15783 - DNA, 15 bp, Homo sapiens
ctgaggacacaaaca

SEQ ID NO: 15784 - DNA, 15 bp, Homo sapiens
tctgaggacacaaac

SEQ ID NO: 15785 - DNA, 15 bp, Homo sapiens
ttctgaggacacaaa

SEQ ID NO: 15786 - DNA, 15 bp, Homo sapiens
attctgaggacacaa

SEQ ID NO: 15787 - DNA, 15 bp, Homo sapiens
aattctgaggacaca

SEQ ID NO: 15788 - DNA, 15 bp, Homo sapiens
taattctgaggacac

SEQ ID NO: 15789 - DNA, 15 bp, Homo sapiens
ttaattctgaggaca

SEQ ID NO: 15790 - DNA, 15 bp, Homo sapiens
tttaattctgaggac

SEQ ID NO: 15791 - DNA, 15 bp, Homo sapiens
ctttaattctgagga

SEQ ID NO: 15792 - DNA, 15 bp, Homo sapiens
cctttaattctgagg

SEQ ID NO: 15793 - DNA, 15 bp, Homo sapiens
tcctttaattctgag

SEQ ID NO: 15794 - DNA, 15 bp, Homo sapiens
ctcctttaattctga

SEQ ID NO: 15795 - DNA, 15 bp, Homo sapiens
actcctttaattctg

SEQ ID NO: 15796 - DNA, 15 bp, Homo sapiens
tactcctttaattct

SEQ ID NO: 15797 - DNA, 15 bp, Homo sapiens
ttactcctttaattc

SEQ ID NO: 15798 - DNA, 15 bp, Homo sapiens
tttactcctttaatt

SEQ ID NO: 15799 - DNA, 15 bp, Homo sapiens
ttttactcctttaat

SEQ ID NO: 15800 - DNA, 15 bp, Homo sapiens
tttttactcctttaa

SEQ ID NO: 15801 - DNA, 15 bp, Homo sapiens
atttttactccttta

SEQ ID NO: 15802 - DNA, 15 bp, Homo sapiens
catttttactccttt

SEQ ID NO: 15803 - DNA, 15 bp, Homo sapiens
acatttttactcctt

SEQ ID NO: 15804 - DNA, 15 bp, Homo sapiens
cacatttttactcct

SEQ ID NO: 15805 - DNA, 15 bp, Homo sapiens
acacatttttactcc

SEQ ID NO: 15806 - DNA, 15 bp, Homo sapiens
tacacatttttactc

SEQ ID NO: 15807 - DNA, 15 bp, Homo sapiens
ttacacatttttact

SEQ ID NO: 15808 - DNA, 15 bp, Homo sapiens
tttacacatttttac

SEQ ID NO: 15809 - DNA, 15 bp, Homo sapiens
gtttacacattttta

SEQ ID NO: 15810 - DNA, 15 bp, Homo sapiens
tgtttacacattttt

SEQ ID NO: 15811 - DNA, 15 bp, Homo sapiens
atgtttacacatttt

SEQ ID NO: 15812 - DNA, 15 bp, Homo sapiens
gatgtttacacattt

SEQ ID NO: 15813 - DNA, 15 bp, Homo sapiens
agatgtttacacatt

SEQ ID NO: 15814 - DNA, 15 bp, Homo sapiens
cagatgtttacacat

SEQ ID NO: 15815 - DNA, 15 bp, Homo sapiens
tcagatgtttacaca

SEQ ID NO: 15816 - DNA, 15 bp, Homo sapiens
gtcagatgtttacac

SEQ ID NO: 15817 - DNA, 15 bp, Homo sapiens
agtcagatgtttaca

SEQ ID NO: 15818 - DNA, 15 bp, Homo sapiens
tagtcagatgtttac

SEQ ID NO: 15819 - DNA, 15 bp, Homo sapiens
ctagtcagatgttta

SEQ ID NO: 15820 - DNA, 15 bp, Homo sapiens
gctagtcagatgttt

SEQ ID NO: 15821 - DNA, 15 bp, Homo sapiens
tgctagtcagatgtt

SEQ ID NO: 15822 - DNA, 15 bp, Homo sapiens
ttgctagtcagatgt

SEQ ID NO: 15823 - DNA, 15 bp, Homo sapiens
gttgctagtcagatg

SEQ ID NO: 15824 - DNA, 15 bp, Homo sapiens
tgttgctagtcagat

SEQ ID NO: 15825 - DNA, 15 bp, Homo sapiens
ctgttgctagtcaga

SEQ ID NO: 15826 - DNA, 15 bp, Homo sapiens
gctgttgctagtcag

SEQ ID NO: 15827 - DNA, 15 bp, Homo sapiens
ggctgttgctagtca

SEQ ID NO: 15828 - DNA, 15 bp, Homo sapiens
tggctgttgctagtc

SEQ ID NO: 15829 - DNA, 15 bp, Homo sapiens
atggctgttgctagt

SEQ ID NO: 15830 - DNA, 15 bp, Homo sapiens
catggctgttgctag

SEQ ID NO: 15831 - DNA, 15 bp, Homo sapiens
tcatggctgttgcta

SEQ ID NO: 15832 - DNA, 15 bp, Homo sapiens
ctcatggctgttgct

SEQ ID NO: 15833 - DNA, 15 bp, Homo sapiens
tctcatggctgttgc

SEQ ID NO: 15834 - DNA, 15 bp, Homo sapiens
atctcatggctgttg

SEQ ID NO: 15835 - DNA, 15 bp, Homo sapiens
aatctcatggctgtt

SEQ ID NO: 15836 - DNA, 15 bp, Homo sapiens
aaatctcatggctgt

SEQ ID NO: 15837 - DNA, 15 bp, Homo sapiens
aaaatctcatggctg

SEQ ID NO: 15838 - DNA, 15 bp, Homo sapiens
caaaatctcatggct

SEQ ID NO: 15839 - DNA, 15 bp, Homo sapiens
gcaaaatctcatggc

SEQ ID NO: 15840 - DNA, 15 bp, Homo sapiens
ggcaaaatctcatgg

SEQ ID NO: 15841 - DNA, 15 bp, Homo sapiens
aggcaaaatctcatg

SEQ ID NO: 15842 - DNA, 15 bp, Homo sapiens
caggcaaaatctcat

SEQ ID NO: 15843 - DNA, 15 bp, Homo sapiens
ccaggcaaaatctca

SEQ ID NO: 15844 - DNA, 15 bp, Homo sapiens
gccaggcaaaatctc

SEQ ID NO: 15845 - DNA, 15 bp, Homo sapiens
agccaggcaaaatct

SEQ ID NO: 15846 - DNA, 15 bp, Homo sapiens
aagccaggcaaaatc

SEQ ID NO: 15847 - DNA, 15 bp, Homo sapiens
caagccaggcaaaat

SEQ ID NO: 15848 - DNA, 15 bp, Homo sapiens
acaagccaggcaaaa

SEQ ID NO: 15849 - DNA, 15 bp, Homo sapiens
aacaagccaggcaaa

SEQ ID NO: 15850 - DNA, 15 bp, Homo sapiens
caacaagccaggcaa

SEQ ID NO: 15851 - DNA, 15 bp, Homo sapiens
tcaacaagccaggca

SEQ ID NO: 15852 - DNA, 15 bp, Homo sapiens
atcaacaagccaggc

SEQ ID NO: 15853 - DNA, 15 bp, Homo sapiens
tatcaacaagccagg

SEQ ID NO: 15854 - DNA, 15 bp, Homo sapiens
ttatcaacaagccag

SEQ ID NO: 15855 - DNA, 15 bp, Homo sapiens
cttatcaacaagcca

SEQ ID NO: 15856 - DNA, 15 bp, Homo sapiens
gcttatcaacaagcc

SEQ ID NO: 15857 - DNA, 15 bp, Homo sapiens
tgcttatcaacaagc

SEQ ID NO: 15858 - DNA, 15 bp, Homo sapiens
ctgcttatcaacaag

SEQ ID NO: 15859 - DNA, 15 bp, Homo sapiens
gctgcttatcaacaa

SEQ ID NO: 15860 - DNA, 15 bp, Homo sapiens
tgctgcttatcaaca

SEQ ID NO: 15861 - DNA, 15 bp, Homo sapiens
atgctgcttatcaac

SEQ ID NO: 15862 - DNA, 15 bp, Homo sapiens
aatgctgcttatcaa

SEQ ID NO: 15863 - DNA, 15 bp, Homo sapiens
caatgctgcttatca

SEQ ID NO: 15864 - DNA, 15 bp, Homo sapiens
tcaatgctgcttatc

SEQ ID NO: 15865 - DNA, 15 bp, Homo sapiens
ctcaatgctgcttat

SEQ ID NO: 15866 - DNA, 15 bp, Homo sapiens
tctcaatgctgctta

SEQ ID NO: 15867 - DNA, 15 bp, Homo sapiens
atctcaatgctgctt

SEQ ID NO: 15868 - DNA, 15 bp, Homo sapiens
gatctcaatgctgct

SEQ ID NO: 15869 - DNA, 15 bp, Homo sapiens
agatctcaatgctgc

SEQ ID NO: 15870 - DNA, 15 bp, Homo sapiens
cagatctcaatgctg

SEQ ID NO: 15871 - DNA, 15 bp, Homo sapiens
gcagatctcaatgct

SEQ ID NO: 15872 - DNA, 15 bp, Homo sapiens
ggcagatctcaatgc

SEQ ID NO: 15873 - DNA, 15 bp, Homo sapiens
gggcagatctcaatg

SEQ ID NO: 15874 - DNA, 15 bp, Homo sapiens
agggcagatctcaat

SEQ ID NO: 15875 - DNA, 15 bp, Homo sapiens
gagggcagatctcaa

SEQ ID NO: 15876 - DNA, 15 bp, Homo sapiens
ggagggcagatctca

SEQ ID NO: 15877 - DNA, 15 bp, Homo sapiens
aggagggcagatctc

SEQ ID NO: 15878 - DNA, 15 bp, Homo sapiens
taggagggcagatct

SEQ ID NO: 15879 - DNA, 15 bp, Homo sapiens
ttaggagggcagatc

SEQ ID NO: 15880 - DNA, 15 bp, Homo sapiens
cttaggagggcagat

SEQ ID NO: 15881 - DNA, 15 bp, Homo sapiens
tcttaggagggcaga

SEQ ID NO: 15882 - DNA, 15 bp, Homo sapiens
ttcttaggagggcag

SEQ ID NO: 15883 - DNA, 15 bp, Homo sapiens
attcttaggagggca

SEQ ID NO: 15884 - DNA, 15 bp, Homo sapiens
cattcttaggagggc

SEQ ID NO: 15885 - DNA, 15 bp, Homo sapiens
ccattcttaggaggg

SEQ ID NO: 15886 - DNA, 15 bp, Homo sapiens
cccattcttaggagg

SEQ ID NO: 15887 - DNA, 15 bp, Homo sapiens
gcccattcttaggag

SEQ ID NO: 15888 - DNA, 15 bp, Homo sapiens
ggcccattcttagga

SEQ ID NO: 15889 - DNA, 15 bp, Homo sapiens
tggcccattcttagg

SEQ ID NO: 15890 - DNA, 15 bp, Homo sapiens
atggcccattcttag

SEQ ID NO: 15891 - DNA, 15 bp, Homo sapiens
aatggcccattctta

SEQ ID NO: 15892 - DNA, 15 bp, Homo sapiens
taatggcccattctt

SEQ ID NO: 15893 - DNA, 15 bp, Homo sapiens
ctaatggcccattct

SEQ ID NO: 15894 - DNA, 15 bp, Homo sapiens
cctaatggcccattc

SEQ ID NO: 15895 - DNA, 15 bp, Homo sapiens
acctaatggcccatt

SEQ ID NO: 15896 - DNA, 15 bp, Homo sapiens
gacctaatggcccat

SEQ ID NO: 15897 - DNA, 15 bp, Homo sapiens
agacctaatggccca

SEQ ID NO: 15898 - DNA, 15 bp, Homo sapiens
aagacctaatggccc

SEQ ID NO: 15899 - DNA, 15 bp, Homo sapiens
gaagacctaatggcc

SEQ ID NO: 15900 - DNA, 15 bp, Homo sapiens
tgaagacctaatggc

SEQ ID NO: 15901 - DNA, 15 bp, Homo sapiens
ttgaagacctaatgg

SEQ ID NO: 15902 - DNA, 15 bp, Homo sapiens
tttgaagacctaatg

SEQ ID NO: 15903 - DNA, 15 bp, Homo sapiens
ctttgaagacctaat

SEQ ID NO: 15904 - DNA, 15 bp, Homo sapiens
gctttgaagacctaa

SEQ ID NO: 15905 - DNA, 15 bp, Homo sapiens
agctttgaagaccta

SEQ ID NO: 15906 - DNA, 15 bp, Homo sapiens
aagctttgaagacct

SEQ ID NO: 15907 - DNA, 15 bp, Homo sapiens
aaagctttgaagacc

SEQ ID NO: 15908 - DNA, 15 bp, Homo sapiens
aaaagctttgaagac

SEQ ID NO: 15909 - DNA, 15 bp, Homo sapiens
taaaagctttgaaga

SEQ ID NO: 15910 - DNA, 15 bp, Homo sapiens
gtaaaagctttgaag

SEQ ID NO: 15911 - DNA, 15 bp, Homo sapiens
cgtaaaagctttgaa

SEQ ID NO: 15912 - DNA, 15 bp, Homo sapiens
tcgtaaaagctttga

SEQ ID NO: 15913 - DNA, 15 bp, Homo sapiens
atcgtaaaagctttg

SEQ ID NO: 15914 - DNA, 15 bp, Homo sapiens
catcgtaaaagcttt

SEQ ID NO: 15915 - DNA, 15 bp, Homo sapiens
acatcgtaaaagctt

SEQ ID NO: 15916 - DNA, 15 bp, Homo sapiens
cacatcgtaaaagct

SEQ ID NO: 15917 - DNA, 15 bp, Homo sapiens
tcacatcgtaaaagc

SEQ ID NO: 15918 - DNA, 15 bp, Homo sapiens
ctcacatcgtaaaag

SEQ ID NO: 15919 - DNA, 15 bp, Homo sapiens
cctcacatcgtaaaa

SEQ ID NO: 15920 - DNA, 15 bp, Homo sapiens
acctcacatcgtaaa

SEQ ID NO: 15921 - DNA, 15 bp, Homo sapiens
tacctcacatcgtaa

SEQ ID NO: 15922 - DNA, 15 bp, Homo sapiens
ttacctcacatcgta

SEQ ID NO: 15923 - DNA, 15 bp, Homo sapiens
tttacctcacatcgt

SEQ ID NO: 15924 - DNA, 15 bp, Homo sapiens
ctttacctcacatcg

SEQ ID NO: 15925 - DNA, 15 bp, Homo sapiens
tctttacctcacatc

SEQ ID NO: 15926 - DNA, 15 bp, Homo sapiens
ttctttacctcacat

SEQ ID NO: 15927 - DNA, 15 bp, Homo sapiens
attctttacctcaca

SEQ ID NO: 15928 - DNA, 15 bp, Homo sapiens
cattctttacctcac

SEQ ID NO: 15929 - DNA, 15 bp, Homo sapiens
acattctttacctca

SEQ ID NO: 15930 - DNA, 15 bp, Homo sapiens
aacattctttacctc

SEQ ID NO: 15931 - DNA, 15 bp, Homo sapiens
gaacattctttacct

SEQ ID NO: 15932 - DNA, 15 bp, Homo sapiens
tgaacattctttacc

SEQ ID NO: 15933 - DNA, 15 bp, Homo sapiens
gtgaacattctttac

SEQ ID NO: 15934 - DNA, 15 bp, Homo sapiens
ggtgaacattcttta

SEQ ID NO: 15935 - DNA, 15 bp, Homo sapiens
tggtgaacattcttt

SEQ ID NO: 15936 - DNA, 15 bp, Homo sapiens
ctggtgaacattctt

SEQ ID NO: 15937 - DNA, 15 bp, Homo sapiens
cctggtgaacattct

SEQ ID NO: 15938 - DNA, 15 bp, Homo sapiens
tcctggtgaacattc

SEQ ID NO: 15939 - DNA, 15 bp, Homo sapiens
ctcctggtgaacatt

SEQ ID NO: 15940 - DNA, 15 bp, Homo sapiens
actcctggtgaacat

SEQ ID NO: 15941 - DNA, 15 bp, Homo sapiens
aactcctggtgaaca

SEQ ID NO: 15942 - DNA, 15 bp, Homo sapiens
aaactcctggtgaac

SEQ ID NO: 15943 - DNA, 15 bp, Homo sapiens
gaaactcctggtgaa

SEQ ID NO: 15944 - DNA, 15 bp, Homo sapiens
tgaaactcctggtga

SEQ ID NO: 15945 - DNA, 15 bp, Homo sapiens
atgaaactcctggtg

SEQ ID NO: 15946 - DNA, 15 bp, Homo sapiens
catgaaactcctggt

SEQ ID NO: 15947 - DNA, 15 bp, Homo sapiens
gcatgaaactcctgg

SEQ ID NO: 15948 - DNA, 15 bp, Homo sapiens
tgcatgaaactcctg

SEQ ID NO: 15949 - DNA, 15 bp, Homo sapiens
gtgcatgaaactcct

SEQ ID NO: 15950 - DNA, 15 bp, Homo sapiens
tgtgcatgaaactcc

SEQ ID NO: 15951 - DNA, 15 bp, Homo sapiens
ttgtgcatgaaactc

SEQ ID NO: 15952 - DNA, 15 bp, Homo sapiens
tttgtgcatgaaact

SEQ ID NO: 15953 - DNA, 15 bp, Homo sapiens
ttttgtgcatgaaac

SEQ ID NO: 15954 - DNA, 15 bp, Homo sapiens
cttttgtgcatgaaa

SEQ ID NO: 15955 - DNA, 15 bp, Homo sapiens
ccttttgtgcatgaa

SEQ ID NO: 15956 - DNA, 15 bp, Homo sapiens
cccttttgtgcatga

SEQ ID NO: 15957 - DNA, 15 bp, Homo sapiens
acccttttgtgcatg

SEQ ID NO: 15958 - DNA, 15 bp, Homo sapiens
aacccttttgtgcat

SEQ ID NO: 15959 - DNA, 15 bp, Homo sapiens
aaacccttttgtgca

SEQ ID NO: 15960 - DNA, 15 bp, Homo sapiens
gaaacccttttgtgc

SEQ ID NO: 15961 - DNA, 15 bp, Homo sapiens
agaaacccttttgtg

SEQ ID NO: 15962 - DNA, 15 bp, Homo sapiens
gagaaacccttttgt

SEQ ID NO: 15963 - DNA, 15 bp, Homo sapiens
agagaaacccttttg

SEQ ID NO: 15964 - DNA, 15 bp, Homo sapiens
aagagaaaccctttt

SEQ ID NO: 15965 - DNA, 15 bp, Homo sapiens
aaagagaaacccttt

SEQ ID NO: 15966 - DNA, 15 bp, Homo sapiens
caaagagaaaccctt

SEQ ID NO: 15967 - DNA, 15 bp, Homo sapiens
acaaagagaaaccct

SEQ ID NO: 15968 - DNA, 15 bp, Homo sapiens
cacaaagagaaaccc

SEQ ID NO: 15969 - DNA, 15 bp, Homo sapiens
ccacaaagagaaacc

SEQ ID NO: 15970 - DNA, 15 bp, Homo sapiens
cccacaaagagaaac

SEQ ID NO: 15971 - DNA, 15 bp, Homo sapiens
tcccacaaagagaaa

SEQ ID NO: 15972 - DNA, 15 bp, Homo sapiens
ttcccacaaagagaa

SEQ ID NO: 15973 - DNA, 15 bp, Homo sapiens
gttcccacaaagaga

SEQ ID NO: 15974 - DNA, 15 bp, Homo sapiens
agttcccacaaagag

SEQ ID NO: 15975 - DNA, 15 bp, Homo sapiens
tagttcccacaaaga

SEQ ID NO: 15976 - DNA, 15 bp, Homo sapiens
ctagttcccacaaag

SEQ ID NO: 15977 - DNA, 15 bp, Homo sapiens
tctagttcccacaaa

SEQ ID NO: 15978 - DNA, 15 bp, Homo sapiens
ttctagttcccacaa

SEQ ID NO: 15979 - DNA, 15 bp, Homo sapiens
gttctagttcccaca

SEQ ID NO: 15980 - DNA, 15 bp, Homo sapiens
tgttctagttcccac

SEQ ID NO: 15981 - DNA, 15 bp, Homo sapiens
atgttctagttccca

SEQ ID NO: 15982 - DNA, 15 bp, Homo sapiens
aatgttctagttccc

SEQ ID NO: 15983 - DNA, 15 bp, Homo sapiens
caatgttctagttcc

SEQ ID NO: 15984 - DNA, 15 bp, Homo sapiens
acaatgttctagttc

SEQ ID NO: 15985 - DNA, 15 bp, Homo sapiens
aacaatgttctagtt

SEQ ID NO: 15986 - DNA, 15 bp, Homo sapiens
gaacaatgttctagt

SEQ ID NO: 15987 - DNA, 15 bp, Homo sapiens
ggaacaatgttctag

SEQ ID NO: 15988 - DNA, 15 bp, Homo sapiens
tggaacaatgttcta

SEQ ID NO: 15989 - DNA, 15 bp, Homo sapiens
ctggaacaatgttct

SEQ ID NO: 15990 - DNA, 15 bp, Homo sapiens
actggaacaatgttc

SEQ ID NO: 15991 - DNA, 15 bp, Homo sapiens
cactggaacaatgtt

SEQ ID NO: 15992 - DNA, 15 bp, Homo sapiens
tcactggaacaatgt

SEQ ID NO: 15993 - DNA, 15 bp, Homo sapiens
atcactggaacaatg

SEQ ID NO: 15994 - DNA, 15 bp, Homo sapiens
catcactggaacaat

SEQ ID NO: 15995 - DNA, 15 bp, Homo sapiens
tcatcactggaacaa

SEQ ID NO: 15996 - DNA, 15 bp, Homo sapiens
gtcatcactggaaca

SEQ ID NO: 15997 - DNA, 15 bp, Homo sapiens
cgtcatcactggaac

SEQ ID NO: 15998 - DNA, 15 bp, Homo sapiens
ccgtcatcactggaa

SEQ ID NO: 15999 - DNA, 15 bp, Homo sapiens
tccgtcatcactgga

SEQ ID NO: 16000 - DNA, 15 bp, Homo sapiens
ttccgtcatcactgg

SEQ ID NO: 16001 - DNA, 15 bp, Homo sapiens
tttccgtcatcactg

SEQ ID NO: 16002 - DNA, 15 bp, Homo sapiens
gtttccgtcatcact

SEQ ID NO: 16003 - DNA, 15 bp, Homo sapiens
tgtttccgtcatcac

SEQ ID NO: 16004 - DNA, 15 bp, Homo sapiens
ctgtttccgtcatca

SEQ ID NO: 16005 - DNA, 15 bp, Homo sapiens
cctgtttccgtcatc

SEQ ID NO: 16006 - DNA, 15 bp, Homo sapiens
ccctgtttccgtcat

SEQ ID NO: 16007 - DNA, 15 bp, Homo sapiens
gccctgtttccgtca

SEQ ID NO: 16008 - DNA, 15 bp, Homo sapiens
agccctgtttccgtc

SEQ ID NO: 16009 - DNA, 15 bp, Homo sapiens
aagccctgtttccgt

SEQ ID NO: 16010 - DNA, 15 bp, Homo sapiens
aaagccctgtttccg

SEQ ID NO: 16011 - DNA, 15 bp, Homo sapiens
gaaagccctgtttcc

SEQ ID NO: 16012 - DNA, 15 bp, Homo sapiens
ggaaagccctgtttc

SEQ ID NO: 16013 - DNA, 15 bp, Homo sapiens
tggaaagccctgttt

SEQ ID NO: 16014 - DNA, 15 bp, Homo sapiens
atggaaagccctgtt

SEQ ID NO: 16015 - DNA, 15 bp, Homo sapiens
tatggaaagccctgt

SEQ ID NO: 16016 - DNA, 15 bp, Homo sapiens
gtatggaaagccctg

SEQ ID NO: 16017 - DNA, 15 bp, Homo sapiens
ggtatggaaagccct

SEQ ID NO: 16018 - DNA, 15 bp, Homo sapiens
tggtatggaaagccc

SEQ ID NO: 16019 - DNA, 15 bp, Homo sapiens
ttggtatggaaagcc

SEQ ID NO: 16020 - DNA, 15 bp, Homo sapiens
tttggtatggaaagc

SEQ ID NO: 16021 - DNA, 15 bp, Homo sapiens
ttttggtatggaaag

SEQ ID NO: 16022 - DNA, 15 bp, Homo sapiens
gttttggtatggaaa

SEQ ID NO: 16023 - DNA, 15 bp, Homo sapiens
tgttttggtatggaa

SEQ ID NO: 16024 - DNA, 15 bp, Homo sapiens
ctgttttggtatgga

SEQ ID NO: 16025 - DNA, 15 bp, Homo sapiens
cctgttttggtatgg

SEQ ID NO: 16026 - DNA, 15 bp, Homo sapiens
ccctgttttggtatg

SEQ ID NO: 16027 - DNA, 15 bp, Homo sapiens
accctgttttggtat

SEQ ID NO: 16028 - DNA, 15 bp, Homo sapiens
aaccctgttttggta

SEQ ID NO: 16029 - DNA, 15 bp, Homo sapiens
aaaccctgttttggt

SEQ ID NO: 16030 - DNA, 15 bp, Homo sapiens
aaaaccctgttttgg

SEQ ID NO: 16031 - DNA, 15 bp, Homo sapiens
gaaaaccctgttttg

SEQ ID NO: 16032 - DNA, 15 bp, Homo sapiens
ggaaaaccctgtttt

SEQ ID NO: 16033 - DNA, 15 bp, Homo sapiens
aggaaaaccctgttt

SEQ ID NO: 16034 - DNA, 15 bp, Homo sapiens
aaggaaaaccctgtt

SEQ ID NO: 16035 - DNA, 15 bp, Homo sapiens
aaaggaaaaccctgt

SEQ ID NO: 16036 - DNA, 15 bp, Homo sapiens
caaaggaaaaccctg

SEQ ID NO: 16037 - DNA, 15 bp, Homo sapiens
tcaaaggaaaaccct

SEQ ID NO: 16038 - DNA, 15 bp, Homo sapiens
ttcaaaggaaaaccc

SEQ ID NO: 16039 - DNA, 15 bp, Homo sapiens
attcaaaggaaaacc

SEQ ID NO: 16040 - DNA, 15 bp, Homo sapiens
cattcaaaggaaaac

SEQ ID NO: 16041 - DNA, 15 bp, Homo sapiens
tcattcaaaggaaaa

SEQ ID NO: 16042 - DNA, 15 bp, Homo sapiens
gtcattcaaaggaaa

SEQ ID NO: 16043 - DNA, 15 bp, Homo sapiens
agtcattcaaaggaa

SEQ ID NO: 16044 - DNA, 15 bp, Homo sapiens
gagtcattcaaagga

SEQ ID NO: 16045 - DNA, 15 bp, Homo sapiens
agagtcattcaaagg

SEQ ID NO: 16046 - DNA, 15 bp, Homo sapiens
gagagtcattcaaag

SEQ ID NO: 16047 - DNA, 15 bp, Homo sapiens
ggagagtcattcaaa

SEQ ID NO: 16048 - DNA, 15 bp, Homo sapiens
gggagagtcattcaa

SEQ ID NO: 16049 - DNA, 15 bp, Homo sapiens
tgggagagtcattca

SEQ ID NO: 16050 - DNA, 15 bp, Homo sapiens
gtgggagagtcattc

SEQ ID NO: 16051 - DNA, 15 bp, Homo sapiens
ggtgggagagtcatt

SEQ ID NO: 16052 - DNA, 15 bp, Homo sapiens
aggtgggagagtcat

SEQ ID NO: 16053 - DNA, 15 bp, Homo sapiens
aaggtgggagagtca

SEQ ID NO: 16054 - DNA, 15 bp, Homo sapiens
aaaggtgggagagtc

SEQ ID NO: 16055 - DNA, 15 bp, Homo sapiens
gaaaggtgggagagt

SEQ ID NO: 16056 - DNA, 15 bp, Homo sapiens
ggaaaggtgggagag

SEQ ID NO: 16057 - DNA, 15 bp, Homo sapiens
gggaaaggtgggaga

SEQ ID NO: 16058 - DNA, 15 bp, Homo sapiens
agggaaaggtgggag

SEQ ID NO: 16059 - DNA, 15 bp, Homo sapiens
aagggaaaggtggga

SEQ ID NO: 16060 - DNA, 15 bp, Homo sapiens
caagggaaaggtggg

SEQ ID NO: 16061 - DNA, 15 bp, Homo sapiens
acaagggaaaggtgg

SEQ ID NO: 16062 - DNA, 15 bp, Homo sapiens
gacaagggaaaggtg

SEQ ID NO: 16063 - DNA, 15 bp, Homo sapiens
agacaagggaaaggt

SEQ ID NO: 16064 - DNA, 15 bp, Homo sapiens
gagacaagggaaagg

SEQ ID NO: 16065 - DNA, 15 bp, Homo sapiens
agagacaagggaaag

SEQ ID NO: 16066 - DNA, 15 bp, Homo sapiens
aagagacaagggaaa

SEQ ID NO: 16067 - DNA, 15 bp, Homo sapiens
gaagagacaagggaa

SEQ ID NO: 16068 - DNA, 15 bp, Homo sapiens
ggaagagacaaggga

SEQ ID NO: 16069 - DNA, 15 bp, Homo sapiens
aggaagagacaaggg

SEQ ID NO: 16070 - DNA, 15 bp, Homo sapiens
gaggaagagacaagg

SEQ ID NO: 16071 - DNA, 15 bp, Homo sapiens
ggaggaagagacaag

SEQ ID NO: 16072 - DNA, 15 bp, Homo sapiens
gggaggaagagacaa

SEQ ID NO: 16073 - DNA, 15 bp, Homo sapiens
ggggaggaagagaca

SEQ ID NO: 16074 - DNA, 15 bp, Homo sapiens
tggggaggaagagac

SEQ ID NO: 16075 - DNA, 15 bp, Homo sapiens
gtggggaggaagaga

SEQ ID NO: 16076 - DNA, 15 bp, Homo sapiens
ggtggggaggaagag

SEQ ID NO: 16077 - DNA, 15 bp, Homo sapiens
aggtggggaggaaga

SEQ ID NO: 16078 - DNA, 15 bp, Homo sapiens
gaggtggggaggaag

SEQ ID NO: 16079 - DNA, 15 bp, Homo sapiens
tgaggtggggaggaa

SEQ ID NO: 16080 - DNA, 15 bp, Homo sapiens
ttgaggtggggagga

SEQ ID NO: 16081 - DNA, 15 bp, Homo sapiens
gttgaggtggggagg

SEQ ID NO: 16082 - DNA, 15 bp, Homo sapiens
tgttgaggtggggag

SEQ ID NO: 16083 - DNA, 15 bp, Homo sapiens
ttgttgaggtgggga

SEQ ID NO: 16084 - DNA, 15 bp, Homo sapiens
gttgttgaggtgggg

SEQ ID NO: 16085 - DNA, 15 bp, Homo sapiens
tgttgttgaggtggg

SEQ ID NO: 16086 - DNA, 15 bp, Homo sapiens
gtgttgttgaggtgg

SEQ ID NO: 16087 - DNA, 15 bp, Homo sapiens
tgtgttgttgaggtg

SEQ ID NO: 16088 - DNA, 15 bp, Homo sapiens
ctgtgttgttgaggt

SEQ ID NO: 16089 - DNA, 15 bp, Homo sapiens
cctgtgttgttgagg

SEQ ID NO: 16090 - DNA, 15 bp, Homo sapiens
tcctgtgttgttgag

SEQ ID NO: 16091 - DNA, 15 bp, Homo sapiens
ttcctgtgttgttga

SEQ ID NO: 16092 - DNA, 15 bp, Homo sapiens
tttcctgtgttgttg

SEQ ID NO: 16093 - DNA, 15 bp, Homo sapiens
ctttcctgtgttgtt

SEQ ID NO: 16094 - DNA, 15 bp, Homo sapiens
tctttcctgtgttgt

SEQ ID NO: 16095 - DNA, 15 bp, Homo sapiens
ttctttcctgtgttg

SEQ ID NO: 16096 - DNA, 15 bp, Homo sapiens
cttctttcctgtgtt

SEQ ID NO: 16097 - DNA, 15 bp, Homo sapiens
gcttctttcctgtgt

SEQ ID NO: 16098 - DNA, 15 bp, Homo sapiens
agcttctttcctgtg

SEQ ID NO: 16099 - DNA, 15 bp, Homo sapiens
cagcttctttcctgt

SEQ ID NO: 16100 - DNA, 15 bp, Homo sapiens
ccagcttctttcctg

SEQ ID NO: 16101 - DNA, 15 bp, Homo sapiens
tccagcttctttcct

SEQ ID NO: 16102 - DNA, 15 bp, Homo sapiens
ttccagcttctttcc

SEQ ID NO: 16103 - DNA, 15 bp, Homo sapiens
cttccagcttctttc

SEQ ID NO: 16104 - DNA, 15 bp, Homo sapiens
gcttccagcttcttt

SEQ ID NO: 16105 - DNA, 15 bp, Homo sapiens
tgcttccagcttctt

SEQ ID NO: 16106 - DNA, 15 bp, Homo sapiens
ctgcttccagcttct

SEQ ID NO: 16107 - DNA, 15 bp, Homo sapiens
cctgcttccagcttc

SEQ ID NO: 16108 - DNA, 15 bp, Homo sapiens
ccctgcttccagctt

SEQ ID NO: 16109 - DNA, 15 bp, Homo sapiens
tccctgcttccagct

SEQ ID NO: 16110 - DNA, 15 bp, Homo sapiens
gtccctgcttccagc

SEQ ID NO: 16111 - DNA, 15 bp, Homo sapiens
tgtccctgcttccag

SEQ ID NO: 16112 - DNA, 15 bp, Homo sapiens
ttgtccctgcttcca

SEQ ID NO: 16113 - DNA, 15 bp, Homo sapiens
attgtccctgcttcc

SEQ ID NO: 16114 - DNA, 15 bp, Homo sapiens
cattgtccctgcttc

SEQ ID NO: 16115 - DNA, 15 bp, Homo sapiens
ccattgtccctgctt

SEQ ID NO: 16116 - DNA, 15 bp, Homo sapiens
cccattgtccctgct

SEQ ID NO: 16117 - DNA, 15 bp, Homo sapiens
tcccattgtccctgc

SEQ ID NO: 16118 - DNA, 15 bp, Homo sapiens
ttcccattgtccctg

SEQ ID NO: 16119 - DNA, 15 bp, Homo sapiens
cttcccattgtccct

SEQ ID NO: 16120 - DNA, 15 bp, Homo sapiens
ccttcccattgtccc

SEQ ID NO: 16121 - DNA, 15 bp, Homo sapiens
accttcccattgtcc

SEQ ID NO: 16122 - DNA, 15 bp, Homo sapiens
gaccttcccattgtc

SEQ ID NO: 16123 - DNA, 15 bp, Homo sapiens
ggaccttcccattgt

SEQ ID NO: 16124 - DNA, 15 bp, Homo sapiens
gggaccttcccattg

SEQ ID NO: 16125 - DNA, 15 bp, Homo sapiens
agggaccttcccatt

SEQ ID NO: 16126 - DNA, 15 bp, Homo sapiens
aagggaccttcccat

SEQ ID NO: 16127 - DNA, 15 bp, Homo sapiens
aaagggaccttccca

SEQ ID NO: 16128 - DNA, 15 bp, Homo sapiens
caaagggaccttccc

SEQ ID NO: 16129 - DNA, 15 bp, Homo sapiens
acaaagggaccttcc

SEQ ID NO: 16130 - DNA, 15 bp, Homo sapiens
aacaaagggaccttc

SEQ ID NO: 16131 - DNA, 15 bp, Homo sapiens
taacaaagggacctt

SEQ ID NO: 16132 - DNA, 15 bp, Homo sapiens
gtaacaaagggacct

SEQ ID NO: 16133 - DNA, 15 bp, Homo sapiens
agtaacaaagggacc

SEQ ID NO: 16134 - DNA, 15 bp, Homo sapiens
gagtaacaaagggac

SEQ ID NO: 16135 - DNA, 15 bp, Homo sapiens
cgagtaacaaaggga

SEQ ID NO: 16136 - DNA, 15 bp, Homo sapiens
tcgagtaacaaaggg

SEQ ID NO: 16137 - DNA, 15 bp, Homo sapiens
ctcgagtaacaaagg

SEQ ID NO: 16138 - DNA, 15 bp, Homo sapiens
gctcgagtaacaaag

SEQ ID NO: 16139 - DNA, 15 bp, Homo sapiens
agctcgagtaacaaa

SEQ ID NO: 16140 - DNA, 15 bp, Homo sapiens
tagctcgagtaacaa

SEQ ID NO: 16141 - DNA, 15 bp, Homo sapiens
atagctcgagtaaca

SEQ ID NO: 16142 - DNA, 15 bp, Homo sapiens
aatagctcgagtaac

SEQ ID NO: 16143 - DNA, 15 bp, Homo sapiens
taatagctcgagtaa

SEQ ID NO: 16144 - DNA, 15 bp, Homo sapiens
ctaatagctcgagta

SEQ ID NO: 16145 - DNA, 15 bp, Homo sapiens
tctaatagctcgagt

SEQ ID NO: 16146 - DNA, 15 bp, Homo sapiens
ttctaatagctcgag

SEQ ID NO: 16147 - DNA, 15 bp, Homo sapiens
tttctaatagctcga

SEQ ID NO: 16148 - DNA, 15 bp, Homo sapiens
gtttctaatagctcg

SEQ ID NO: 16149 - DNA, 15 bp, Homo sapiens
tgtttctaatagctc

SEQ ID NO: 16150 - DNA, 15 bp, Homo sapiens
ttgtttctaatagct

SEQ ID NO: 16151 - DNA, 15 bp, Homo sapiens
tttgtttctaatagc

SEQ ID NO: 16152 - DNA, 15 bp, Homo sapiens
ttttgtttctaatag

SEQ ID NO: 16153 - DNA, 15 bp, Homo sapiens
tttttgtttctaata

SEQ ID NO: 16154 - DNA, 15 bp, Homo sapiens
ctttttgtttctaat

SEQ ID NO: 16155 - DNA, 15 bp, Homo sapiens
tctttttgtttctaa

SEQ ID NO: 16156 - DNA, 15 bp, Homo sapiens
ttctttttgtttcta

SEQ ID NO: 16157 - DNA, 15 bp, Homo sapiens
tttctttttgtttct

SEQ ID NO: 16158 - DNA, 15 bp, Homo sapiens
ttttctttttgtttc

SEQ ID NO: 16159 - DNA, 15 bp, Homo sapiens
cttttctttttgttt

SEQ ID NO: 16160 - DNA, 15 bp, Homo sapiens
acttttctttttgtt

SEQ ID NO: 16161 - DNA, 15 bp, Homo sapiens
cacttttctttttgt

SEQ ID NO: 16162 - DNA, 15 bp, Homo sapiens
ccacttttctttttg

SEQ ID NO: 16163 - DNA, 15 bp, Homo sapiens
gccacttttcttttt

SEQ ID NO: 16164 - DNA, 15 bp, Homo sapiens
ggccacttttctttt

SEQ ID NO: 16165 - DNA, 15 bp, Homo sapiens
tggccacttttcttt

SEQ ID NO: 16166 - DNA, 15 bp, Homo sapiens
atggccacttttctt

SEQ ID NO: 16167 - DNA, 15 bp, Homo sapiens
gatggccacttttct

SEQ ID NO: 16168 - DNA, 15 bp, Homo sapiens
agatggccacttttc

SEQ ID NO: 16169 - DNA, 15 bp, Homo sapiens
cagatggccactttt

SEQ ID NO: 16170 - DNA, 15 bp, Homo sapiens
tcagatggccacttt

SEQ ID NO: 16171 - DNA, 15 bp, Homo sapiens
ctcagatggccactt

SEQ ID NO: 16172 - DNA, 15 bp, Homo sapiens
cctcagatggccact

SEQ ID NO: 16173 - DNA, 15 bp, Homo sapiens
tcctcagatggccac

SEQ ID NO: 16174 - DNA, 15 bp, Homo sapiens
ttcctcagatggcca

SEQ ID NO: 16175 - DNA, 15 bp, Homo sapiens
cttcctcagatggcc

SEQ ID NO: 16176 - DNA, 15 bp, Homo sapiens
gcttcctcagatggc

SEQ ID NO: 16177 - DNA, 15 bp, Homo sapiens
ggcttcctcagatgg

SEQ ID NO: 16178 - DNA, 15 bp, Homo sapiens
tggcttcctcagatg

SEQ ID NO: 16179 - DNA, 15 bp, Homo sapiens
gtggcttcctcagat

SEQ ID NO: 16180 - DNA, 15 bp, Homo sapiens
tgtggcttcctcaga

SEQ ID NO: 16181 - DNA, 15 bp, Homo sapiens
ctgtggcttcctcag

SEQ ID NO: 16182 - DNA, 15 bp, Homo sapiens
gctgtggcttcctca

SEQ ID NO: 16183 - DNA, 15 bp, Homo sapiens
agctgtggcttcctc

SEQ ID NO: 16184 - DNA, 15 bp, Homo sapiens
cagctgtggcttcct

SEQ ID NO: 16185 - DNA, 15 bp, Homo sapiens
ccagctgtggcttcc

SEQ ID NO: 16186 - DNA, 15 bp, Homo sapiens
accagctgtggcttc

SEQ ID NO: 16187 - DNA, 15 bp, Homo sapiens
caccagctgtggctt

SEQ ID NO: 16188 - DNA, 15 bp, Homo sapiens
tcaccagctgtggct

SEQ ID NO: 16189 - DNA, 15 bp, Homo sapiens
ttcaccagctgtggc

SEQ ID NO: 16190 - DNA, 15 bp, Homo sapiens
tttcaccagctgtgg

SEQ ID NO: 16191 - DNA, 15 bp, Homo sapiens
gtttcaccagctgtg

SEQ ID NO: 16192 - DNA, 15 bp, Homo sapiens
agtttcaccagctgt

SEQ ID NO: 16193 - DNA, 15 bp, Homo sapiens
cagtttcaccagctg

SEQ ID NO: 16194 - DNA, 15 bp, Homo sapiens
acagtttcaccagct

SEQ ID NO: 16195 - DNA, 15 bp, Homo sapiens
tacagtttcaccagc

SEQ ID NO: 16196 - DNA, 15 bp, Homo sapiens
ctacagtttcaccag

SEQ ID NO: 16197 - DNA, 15 bp, Homo sapiens
cctacagtttcacca

SEQ ID NO: 16198 - DNA, 15 bp, Homo sapiens
ccctacagtttcacc

SEQ ID NO: 16199 - DNA, 15 bp, Homo sapiens
accctacagtttcac

SEQ ID NO: 16200 - DNA, 15 bp, Homo sapiens
gaccctacagtttca

SEQ ID NO: 16201 - DNA, 15 bp, Homo sapiens
tgaccctacagtttc

SEQ ID NO: 16202 - DNA, 15 bp, Homo sapiens
gtgaccctacagttt

SEQ ID NO: 16203 - DNA, 15 bp, Homo sapiens
tgtgaccctacagtt

SEQ ID NO: 16204 - DNA, 15 bp, Homo sapiens
ctgtgaccctacagt

SEQ ID NO: 16205 - DNA, 15 bp, Homo sapiens
tctgtgaccctacag

SEQ ID NO: 16206 - DNA, 15 bp, Homo sapiens
ctctgtgaccctaca

SEQ ID NO: 16207 - DNA, 15 bp, Homo sapiens
actctgtgaccctac

SEQ ID NO: 16208 - DNA, 15 bp, Homo sapiens
cactctgtgacccta

SEQ ID NO: 16209 - DNA, 15 bp, Homo sapiens
tcactctgtgaccct

SEQ ID NO: 16210 - DNA, 15 bp, Homo sapiens
ttcactctgtgaccc

SEQ ID NO: 16211 - DNA, 15 bp, Homo sapiens
attcactctgtgacc

SEQ ID NO: 16212 - DNA, 15 bp, Homo sapiens
aattcactctgtgac

SEQ ID NO: 16213 - DNA, 15 bp, Homo sapiens
taattcactctgtga

SEQ ID NO: 16214 - DNA, 15 bp, Homo sapiens
gtaattcactctgtg

SEQ ID NO: 16215 - DNA, 15 bp, Homo sapiens
tgtaattcactctgt

SEQ ID NO: 16216 - DNA, 15 bp, Homo sapiens
gtgtaattcactctg

SEQ ID NO: 16217 - DNA, 15 bp, Homo sapiens
ggtgtaattcactct

SEQ ID NO: 16218 - DNA, 15 bp, Homo sapiens
aggtgtaattcactc

SEQ ID NO: 16219 - DNA, 15 bp, Homo sapiens
gaggtgtaattcact

SEQ ID NO: 16220 - DNA, 15 bp, Homo sapiens
agaggtgtaattcac

SEQ ID NO: 16221 - DNA, 15 bp, Homo sapiens
cagaggtgtaattca

SEQ ID NO: 16222 - DNA, 15 bp, Homo sapiens
ccagaggtgtaattc

SEQ ID NO: 16223 - DNA, 15 bp, Homo sapiens
gccagaggtgtaatt

SEQ ID NO: 16224 - DNA, 15 bp, Homo sapiens
agccagaggtgtaat

SEQ ID NO: 16225 - DNA, 15 bp, Homo sapiens
aagccagaggtgtaa

SEQ ID NO: 16226 - DNA, 15 bp, Homo sapiens
taagccagaggtgta

SEQ ID NO: 16227 - DNA, 15 bp, Homo sapiens
ttaagccagaggtgt

SEQ ID NO: 16228 - DNA, 15 bp, Homo sapiens
cttaagccagaggtg

SEQ ID NO: 16229 - DNA, 15 bp, Homo sapiens
acttaagccagaggt

SEQ ID NO: 16230 - DNA, 15 bp, Homo sapiens
gacttaagccagagg

SEQ ID NO: 16231 - DNA, 15 bp, Homo sapiens
tgacttaagccagag

SEQ ID NO: 16232 - DNA, 15 bp, Homo sapiens
ctgacttaagccaga

SEQ ID NO: 16233 - DNA, 15 bp, Homo sapiens
actgacttaagccag

SEQ ID NO: 16234 - DNA, 15 bp, Homo sapiens
cactgacttaagcca

SEQ ID NO: 16235 - DNA, 15 bp, Homo sapiens
tcactgacttaagcc

SEQ ID NO: 16236 - DNA, 15 bp, Homo sapiens
ttcactgacttaagc

SEQ ID NO: 16237 - DNA, 15 bp, Homo sapiens
tttcactgacttaag

SEQ ID NO: 16238 - DNA, 15 bp, Homo sapiens
ttttcactgacttaa

SEQ ID NO: 16239 - DNA, 15 bp, Homo sapiens
cttttcactgactta

SEQ ID NO: 16240 - DNA, 15 bp, Homo sapiens
acttttcactgactt

SEQ ID NO: 16241 - DNA, 15 bp, Homo sapiens
gacttttcactgact

SEQ ID NO: 16242 - DNA, 15 bp, Homo sapiens
ggacttttcactgac

SEQ ID NO: 16243 - DNA, 15 bp, Homo sapiens
aggacttttcactga

SEQ ID NO: 16244 - DNA, 15 bp, Homo sapiens
taggacttttcactg

SEQ ID NO: 16245 - DNA, 15 bp, Homo sapiens
ctaggacttttcact

SEQ ID NO: 16246 - DNA, 15 bp, Homo sapiens
tctaggacttttcac

SEQ ID NO: 16247 - DNA, 15 bp, Homo sapiens
ttctaggacttttca

SEQ ID NO: 16248 - DNA, 15 bp, Homo sapiens
cttctaggacttttc

SEQ ID NO: 16249 - DNA, 15 bp, Homo sapiens
acttctaggactttt

SEQ ID NO: 16250 - DNA, 15 bp, Homo sapiens
aacttctaggacttt

SEQ ID NO: 16251 - DNA, 15 bp, Homo sapiens
aaacttctaggactt

SEQ ID NO: 16252 - DNA, 15 bp, Homo sapiens
caaacttctaggact

SEQ ID NO: 16253 - DNA, 15 bp, Homo sapiens
acaaacttctaggac

SEQ ID NO: 16254 - DNA, 15 bp, Homo sapiens
cacaaacttctagga

SEQ ID NO: 16255 - DNA, 15 bp, Homo sapiens
ccacaaacttctagg

SEQ ID NO: 16256 - DNA, 15 bp, Homo sapiens
accacaaacttctag

SEQ ID NO: 16257 - DNA, 15 bp, Homo sapiens
gaccacaaacttcta

SEQ ID NO: 16258 - DNA, 15 bp, Homo sapiens
ggaccacaaacttct

SEQ ID NO: 16259 - DNA, 15 bp, Homo sapiens
aggaccacaaacttc

SEQ ID NO: 16260 - DNA, 15 bp, Homo sapiens
taggaccacaaactt

SEQ ID NO: 16261 - DNA, 15 bp, Homo sapiens
ctaggaccacaaact

SEQ ID NO: 16262 - DNA, 15 bp, Homo sapiens
tctaggaccacaaac

SEQ ID NO: 16263 - DNA, 15 bp, Homo sapiens
ttctaggaccacaaa

SEQ ID NO: 16264 - DNA, 15 bp, Homo sapiens
cttctaggaccacaa

SEQ ID NO: 16265 - DNA, 15 bp, Homo sapiens
acttctaggaccaca

SEQ ID NO: 16266 - DNA, 15 bp, Homo sapiens
gacttctaggaccac

SEQ ID NO: 16267 - DNA, 15 bp, Homo sapiens
ggacttctaggacca

SEQ ID NO: 16268 - DNA, 15 bp, Homo sapiens
aggacttctaggacc

SEQ ID NO: 16269 - DNA, 15 bp, Homo sapiens
taggacttctaggac

SEQ ID NO: 16270 - DNA, 15 bp, Homo sapiens
ttaggacttctagga

SEQ ID NO: 16271 - DNA, 15 bp, Homo sapiens
tttaggacttctagg

SEQ ID NO: 16272 - DNA, 15 bp, Homo sapiens
ttttaggacttctag

SEQ ID NO: 16273 - DNA, 15 bp, Homo sapiens
cttttaggacttcta

SEQ ID NO: 16274 - DNA, 15 bp, Homo sapiens
acttttaggacttct

SEQ ID NO: 16275 - DNA, 15 bp, Homo sapiens
aacttttaggacttc

SEQ ID NO: 16276 - DNA, 15 bp, Homo sapiens
aaacttttaggactt

SEQ ID NO: 16277 - DNA, 15 bp, Homo sapiens
taaacttttaggact

SEQ ID NO: 16278 - DNA, 15 bp, Homo sapiens
ataaacttttaggac

SEQ ID NO: 16279 - DNA, 15 bp, Homo sapiens
cataaacttttagga

SEQ ID NO: 16280 - DNA, 15 bp, Homo sapiens
ccataaacttttagg

SEQ ID NO: 16281 - DNA, 15 bp, Homo sapiens
cccataaacttttag

SEQ ID NO: 16282 - DNA, 15 bp, Homo sapiens
tcccataaactttta

SEQ ID NO: 16283 - DNA, 15 bp, Homo sapiens
gtcccataaactttt

SEQ ID NO: 16284 - DNA, 15 bp, Homo sapiens
agtcccataaacttt

SEQ ID NO: 16285 - DNA, 15 bp, Homo sapiens
aagtcccataaactt

SEQ ID NO: 16286 - DNA, 15 bp, Homo sapiens
aaagtcccataaact

SEQ ID NO: 16287 - DNA, 15 bp, Homo sapiens
caaagtcccataaac

SEQ ID NO: 16288 - DNA, 15 bp, Homo sapiens
acaaagtcccataaa

SEQ ID NO: 16289 - DNA, 15 bp, Homo sapiens
aacaaagtcccataa

SEQ ID NO: 16290 - DNA, 15 bp, Homo sapiens
aaacaaagtcccata

SEQ ID NO: 16291 - DNA, 15 bp, Homo sapiens
aaaacaaagtcccat

SEQ ID NO: 16292 - DNA, 15 bp, Homo sapiens
caaaacaaagtccca

SEQ ID NO: 16293 - DNA, 15 bp, Homo sapiens
tcaaaacaaagtccc

SEQ ID NO: 16294 - DNA, 15 bp, Homo sapiens
ctcaaaacaaagtcc

SEQ ID NO: 16295 - DNA, 15 bp, Homo sapiens
gctcaaaacaaagtc

SEQ ID NO: 16296 - DNA, 15 bp, Homo sapiens
tgctcaaaacaaagt

SEQ ID NO: 16297 - DNA, 15 bp, Homo sapiens
ttgctcaaaacaaag

SEQ ID NO: 16298 - DNA, 15 bp, Homo sapiens
cttgctcaaaacaaa

SEQ ID NO: 16299 - DNA, 15 bp, Homo sapiens
ccttgctcaaaacaa

SEQ ID NO: 16300 - DNA, 15 bp, Homo sapiens
tccttgctcaaaaca

SEQ ID NO: 16301 - DNA, 15 bp, Homo sapiens
atccttgctcaaaac

SEQ ID NO: 16302 - DNA, 15 bp, Homo sapiens
tatccttgctcaaaa

SEQ ID NO: 16303 - DNA, 15 bp, Homo sapiens
ttatccttgctcaaa

SEQ ID NO: 16304 - DNA, 15 bp, Homo sapiens
cttatccttgctcaa

SEQ ID NO: 16305 - DNA, 15 bp, Homo sapiens
tcttatccttgctca

SEQ ID NO: 16306 - DNA, 15 bp, Homo sapiens
ttcttatccttgctc

SEQ ID NO: 16307 - DNA, 15 bp, Homo sapiens
tttcttatccttgct

SEQ ID NO: 16308 - DNA, 15 bp, Homo sapiens
atttcttatccttgc

SEQ ID NO: 16309 - DNA, 15 bp, Homo sapiens
aatttcttatccttg

SEQ ID NO: 16310 - DNA, 15 bp, Homo sapiens
caatttcttatcctt

SEQ ID NO: 16311 - DNA, 15 bp, Homo sapiens
tcaatttcttatcct

SEQ ID NO: 16312 - DNA, 15 bp, Homo sapiens
atcaatttcttatcc

SEQ ID NO: 16313 - DNA, 15 bp, Homo sapiens
aatcaatttcttatc

SEQ ID NO: 16314 - DNA, 15 bp, Homo sapiens
aaatcaatttcttat

SEQ ID NO: 16315 - DNA, 15 bp, Homo sapiens
gaaatcaatttctta

SEQ ID NO: 16316 - DNA, 15 bp, Homo sapiens
tgaaatcaatttctt

SEQ ID NO: 16317 - DNA, 15 bp, Homo sapiens
ctgaaatcaatttct

SEQ ID NO: 16318 - DNA, 15 bp, Homo sapiens
cctgaaatcaatttc

SEQ ID NO: 16319 - DNA, 15 bp, Homo sapiens
gcctgaaatcaattt

SEQ ID NO: 16320 - DNA, 15 bp, Homo sapiens
agcctgaaatcaatt

SEQ ID NO: 16321 - DNA, 15 bp, Homo sapiens
cagcctgaaatcaat

SEQ ID NO: 16322 - DNA, 15 bp, Homo sapiens
ccagcctgaaatcaa

SEQ ID NO: 16323 - DNA, 15 bp, Homo sapiens
cccagcctgaaatca

SEQ ID NO: 16324 - DNA, 15 bp, Homo sapiens
gcccagcctgaaatc

SEQ ID NO: 16325 - DNA, 15 bp, Homo sapiens
cgcccagcctgaaat

SEQ ID NO: 16326 - DNA, 15 bp, Homo sapiens
acgcccagcctgaaa

SEQ ID NO: 16327 - DNA, 15 bp, Homo sapiens
cacgcccagcctgaa

SEQ ID NO: 16328 - DNA, 15 bp, Homo sapiens
ccacgcccagcctga

SEQ ID NO: 16329 - DNA, 15 bp, Homo sapiens
accacgcccagcctg

SEQ ID NO: 16330 - DNA, 15 bp, Homo sapiens
caccacgcccagcct

SEQ ID NO: 16331 - DNA, 15 bp, Homo sapiens
ccaccacgcccagcc

SEQ ID NO: 16332 - DNA, 15 bp, Homo sapiens
gccaccacgcccagc

SEQ ID NO: 16333 - DNA, 15 bp, Homo sapiens
agccaccacgcccag

SEQ ID NO: 16334 - DNA, 15 bp, Homo sapiens
gagccaccacgccca

SEQ ID NO: 16335 - DNA, 15 bp, Homo sapiens
tgagccaccacgccc

SEQ ID NO: 16336 - DNA, 15 bp, Homo sapiens
gtgagccaccacgcc

SEQ ID NO: 16337 - DNA, 15 bp, Homo sapiens
cgtgagccaccacgc

SEQ ID NO: 16338 - DNA, 15 bp, Homo sapiens
gcgtgagccaccacg

SEQ ID NO: 16339 - DNA, 15 bp, Homo sapiens
ggcgtgagccaccac

SEQ ID NO: 16340 - DNA, 15 bp, Homo sapiens
aggcgtgagccacca

SEQ ID NO: 16341 - DNA, 15 bp, Homo sapiens
gttacaggcgtgagc

SEQ ID NO: 16342 - DNA, 15 bp, Homo sapiens
ggttacaggcgtgag

SEQ ID NO: 16343 - DNA, 15 bp, Homo sapiens
gggttacaggcgtga

SEQ ID NO: 16344 - DNA, 15 bp, Homo sapiens
agggttacaggcgtg

SEQ ID NO: 16345 - DNA, 15 bp, Homo sapiens
tagggttacaggcgt

SEQ ID NO: 16346 - DNA, 15 bp, Homo sapiens
ttagggttacaggcg

SEQ ID NO: 16347 - DNA, 15 bp, Homo sapiens
attagggttacaggc

SEQ ID NO: 16348 - DNA, 15 bp, Homo sapiens
tattagggttacagg

SEQ ID NO: 16349 - DNA, 15 bp, Homo sapiens
gtattagggttacag

SEQ ID NO: 16350 - DNA, 15 bp, Homo sapiens
agtattagggttaca

SEQ ID NO: 16351 - DNA, 15 bp, Homo sapiens
aagtattagggttac

SEQ ID NO: 16352 - DNA, 15 bp, Homo sapiens
aaagtattagggtta

SEQ ID NO: 16353 - DNA, 15 bp, Homo sapiens
caaagtattagggtt

SEQ ID NO: 16354 - DNA, 15 bp, Homo sapiens
ccaaagtattagggt

SEQ ID NO: 16355 - DNA, 15 bp, Homo sapiens
cccaaagtattaggg

SEQ ID NO: 16356 - DNA, 15 bp, Homo sapiens
tcccaaagtattagg

SEQ ID NO: 16357 - DNA, 15 bp, Homo sapiens
ctcccaaagtattag

SEQ ID NO: 16358 - DNA, 15 bp, Homo sapiens
tctcccaaagtatta

SEQ ID NO: 16359 - DNA, 15 bp, Homo sapiens
gtctcccaaagtatt

SEQ ID NO: 16360 - DNA, 15 bp, Homo sapiens
tgtctcccaaagtat

SEQ ID NO: 16361 - DNA, 15 bp, Homo sapiens
ctgtctcccaaagta

SEQ ID NO: 16362 - DNA, 15 bp, Homo sapiens
tctgtctcccaaagt

SEQ ID NO: 16363 - DNA, 15 bp, Homo sapiens
ctctgtctcccaaag

SEQ ID NO: 16364 - DNA, 15 bp, Homo sapiens
cctctgtctcccaaa

SEQ ID NO: 16365 - DNA, 15 bp, Homo sapiens
gcctctgtctcccaa

SEQ ID NO: 16366 - DNA, 15 bp, Homo sapiens
tgcctctgtctccca

SEQ ID NO: 16367 - DNA, 15 bp, Homo sapiens
ctgcctctgtctccc

SEQ ID NO: 16368 - DNA, 15 bp, Homo sapiens
cctgcctctgtctcc

SEQ ID NO: 16369 - DNA, 15 bp, Homo sapiens
acctgcctctgtctc

SEQ ID NO: 16370 - DNA, 15 bp, Homo sapiens
cacctgcctctgtct

SEQ ID NO: 16371 - DNA, 15 bp, Homo sapiens
ccacctgcctctgtc

SEQ ID NO: 16372 - DNA, 15 bp, Homo sapiens
tccacctgcctctgt

SEQ ID NO: 16373 - DNA, 15 bp, Homo sapiens
atccacctgcctctg

SEQ ID NO: 16374 - DNA, 15 bp, Homo sapiens
gatccacctgcctct

SEQ ID NO: 16375 - DNA, 15 bp, Homo sapiens
tgatccacctgcctc

SEQ ID NO: 16376 - DNA, 15 bp, Homo sapiens
gtgatccacctgcct

SEQ ID NO: 16377 - DNA, 15 bp, Homo sapiens
agtgatccacctgcc

SEQ ID NO: 16378 - DNA, 15 bp, Homo sapiens
aagtgatccacctgc

SEQ ID NO: 16379 - DNA, 15 bp, Homo sapiens
gaagtgatccacctg

SEQ ID NO: 16380 - DNA, 15 bp, Homo sapiens
tgaagtgatccacct

SEQ ID NO: 16381 - DNA, 15 bp, Homo sapiens
ctgaagtgatccacc

SEQ ID NO: 16382 - DNA, 15 bp, Homo sapiens
cctgaagtgatccac

SEQ ID NO: 16383 - DNA, 15 bp, Homo sapiens
acctgaagtgatcca

SEQ ID NO: 16384 - DNA, 15 bp, Homo sapiens
gacctgaagtgatcc

SEQ ID NO: 16385 - DNA, 15 bp, Homo sapiens
tgacctgaagtgatc

SEQ ID NO: 16386 - DNA, 15 bp, Homo sapiens
ctgacctgaagtgat

SEQ ID NO: 16387 - DNA, 15 bp, Homo sapiens
cctgacctgaagtga

SEQ ID NO: 16388 - DNA, 15 bp, Homo sapiens
tcctgacctgaagtg

SEQ ID NO: 16389 - DNA, 15 bp, Homo sapiens
ctcctgacctgaagt

SEQ ID NO: 16390 - DNA, 15 bp, Homo sapiens
actcctgacctgaag

SEQ ID NO: 16391 - DNA, 15 bp, Homo sapiens
aactcctgacctgaa

SEQ ID NO: 16392 - DNA, 15 bp, Homo sapiens
gaactcctgacctga

SEQ ID NO: 16393 - DNA, 15 bp, Homo sapiens
ggaactcctgacctg

SEQ ID NO: 16394 - DNA, 15 bp, Homo sapiens
tggaactcctgacct

SEQ ID NO: 16395 - DNA, 15 bp, Homo sapiens
ctggaactcctgacc

SEQ ID NO: 16396 - DNA, 15 bp, Homo sapiens
tctggaactcctgac

SEQ ID NO: 16397 - DNA, 15 bp, Homo sapiens
ctctggaactcctga

SEQ ID NO: 16398 - DNA, 15 bp, Homo sapiens
gctctggaactcctg

SEQ ID NO: 16399 - DNA, 15 bp, Homo sapiens
tgctctggaactcct

SEQ ID NO: 16400 - DNA, 15 bp, Homo sapiens
ctgctctggaactcc

SEQ ID NO: 16401 - DNA, 15 bp, Homo sapiens
actgctctggaactc

SEQ ID NO: 16402 - DNA, 15 bp, Homo sapiens
gactgctctggaact

SEQ ID NO: 16403 - DNA, 15 bp, Homo sapiens
agactgctctggaac

SEQ ID NO: 16404 - DNA, 15 bp, Homo sapiens
cagactgctctggaa

SEQ ID NO: 16405 - DNA, 15 bp, Homo sapiens
ccagactgctctgga

SEQ ID NO: 16406 - DNA, 15 bp, Homo sapiens
gccagactgctctgg

SEQ ID NO: 16407 - DNA, 15 bp, Homo sapiens
ggccagactgctctg

SEQ ID NO: 16408 - DNA, 15 bp, Homo sapiens
tggccagactgctct

SEQ ID NO: 16409 - DNA, 15 bp, Homo sapiens
ttggccagactgctc

SEQ ID NO: 16410 - DNA, 15 bp, Homo sapiens
gttggccagactgct

SEQ ID NO: 16411 - DNA, 15 bp, Homo sapiens
tgttggccagactgc

SEQ ID NO: 16412 - DNA, 15 bp, Homo sapiens
atgttggccagactg

SEQ ID NO: 16413 - DNA, 15 bp, Homo sapiens
catgttggccagact

SEQ ID NO: 16414 - DNA, 15 bp, Homo sapiens
ccatgttggccagac

SEQ ID NO: 16415 - DNA, 15 bp, Homo sapiens
gccatgttggccaga

SEQ ID NO: 16416 - DNA, 15 bp, Homo sapiens
cgccatgttggccag

SEQ ID NO: 16417 - DNA, 15 bp, Homo sapiens
tcgccatgttggcca

SEQ ID NO: 16418 - DNA, 15 bp, Homo sapiens
ttcgccatgttggcc

SEQ ID NO: 16419 - DNA, 15 bp, Homo sapiens
tttcgccatgttggc

SEQ ID NO: 16420 - DNA, 15 bp, Homo sapiens
gtttcgccatgttgg

SEQ ID NO: 16421 - DNA, 15 bp, Homo sapiens
ggtttcgccatgttg

SEQ ID NO: 16422 - DNA, 15 bp, Homo sapiens
gggtttcgccatgtt

SEQ ID NO: 16423 - DNA, 15 bp, Homo sapiens
agggtttcgccatgt

SEQ ID NO: 16424 - DNA, 15 bp, Homo sapiens
cagggtttcgccatg

SEQ ID NO: 16425 - DNA, 15 bp, Homo sapiens
gcagggtttcgccat

SEQ ID NO: 16426 - DNA, 15 bp, Homo sapiens
ggcagggtttcgcca

SEQ ID NO: 16427 - DNA, 15 bp, Homo sapiens
aggcagggtttcgcc

SEQ ID NO: 16428 - DNA, 15 bp, Homo sapiens
gaggcagggtttcgc

SEQ ID NO: 16429 - DNA, 15 bp, Homo sapiens
agaggcagggtttcg

SEQ ID NO: 16430 - DNA, 15 bp, Homo sapiens
gagaggcagggtttc

SEQ ID NO: 16431 - DNA, 15 bp, Homo sapiens
ggagaggcagggttt

SEQ ID NO: 16432 - DNA, 15 bp, Homo sapiens
aggagaggcagggtt

SEQ ID NO: 16433 - DNA, 15 bp, Homo sapiens
taggagaggcagggt

SEQ ID NO: 16434 - DNA, 15 bp, Homo sapiens
ttaggagaggcaggg

SEQ ID NO: 16435 - DNA, 15 bp, Homo sapiens
tttaggagaggcagg

SEQ ID NO: 16436 - DNA, 15 bp, Homo sapiens
ttttaggagaggcag

SEQ ID NO: 16437 - DNA, 15 bp, Homo sapiens
tttttaggagaggca

SEQ ID NO: 16438 - DNA, 15 bp, Homo sapiens
atttttaggagaggc

SEQ ID NO: 16439 - DNA, 15 bp, Homo sapiens
tatttttaggagagg

SEQ ID NO: 16440 - DNA, 15 bp, Homo sapiens
gtatttttaggagag

SEQ ID NO: 16441 - DNA, 15 bp, Homo sapiens
tgtatttttaggaga

SEQ ID NO: 16442 - DNA, 15 bp, Homo sapiens
ttgtatttttaggag

SEQ ID NO: 16443 - DNA, 15 bp, Homo sapiens
tttgtatttttagga

SEQ ID NO: 16444 - DNA, 15 bp, Homo sapiens
ttttgtatttttagg

SEQ ID NO: 16445 - DNA, 15 bp, Homo sapiens
atttttgtattttta

SEQ ID NO: 16446 - DNA, 15 bp, Homo sapiens
gcacctggctaattt

SEQ ID NO: 16447 - DNA, 15 bp, Homo sapiens
cgcacctggctaatt

SEQ ID NO: 16448 - DNA, 15 bp, Homo sapiens
ccgcacctggctaat

SEQ ID NO: 16449 - DNA, 15 bp, Homo sapiens
accgcacctggctaa

SEQ ID NO: 16450 - DNA, 15 bp, Homo sapiens
caccgcacctggcta

SEQ ID NO: 16451 - DNA, 15 bp, Homo sapiens
ccaccgcacctggct

SEQ ID NO: 16452 - DNA, 15 bp, Homo sapiens
gccaccgcacctggc

SEQ ID NO: 16453 - DNA, 15 bp, Homo sapiens
tgccaccgcacctgg

SEQ ID NO: 16454 - DNA, 15 bp, Homo sapiens
gtgccaccgcacctg

SEQ ID NO: 16455 - DNA, 15 bp, Homo sapiens
tgtgccaccgcacct

SEQ ID NO: 16456 - DNA, 15 bp, Homo sapiens
atgtgccaccgcacc

SEQ ID NO: 16457 - DNA, 15 bp, Homo sapiens
catgtgccaccgcac

SEQ ID NO: 16458 - DNA, 15 bp, Homo sapiens
gcatgtgccaccgca

SEQ ID NO: 16459 - DNA, 15 bp, Homo sapiens
ggcatgtgccaccgc

SEQ ID NO: 16460 - DNA, 15 bp, Homo sapiens
aggcatgtgccaccg

SEQ ID NO: 16461 - DNA, 15 bp, Homo sapiens
caggcatgtgccacc

SEQ ID NO: 16462 - DNA, 15 bp, Homo sapiens
acaggcatgtgccac

SEQ ID NO: 16463 - DNA, 15 bp, Homo sapiens
tacaggcatgtgcca

SEQ ID NO: 16464 - DNA, 15 bp, Homo sapiens
ctacaggcatgtgcc

SEQ ID NO: 16465 - DNA, 15 bp, Homo sapiens
actacaggcatgtgc

SEQ ID NO: 16466 - DNA, 15 bp, Homo sapiens
gactacaggcatgtg

SEQ ID NO: 16467 - DNA, 15 bp, Homo sapiens
ggactacaggcatgt

SEQ ID NO: 16468 - DNA, 15 bp, Homo sapiens
gggactacaggcatg

SEQ ID NO: 16469 - DNA, 15 bp, Homo sapiens
cgggactacaggcat

SEQ ID NO: 16470 - DNA, 15 bp, Homo sapiens
ccgggactacaggca

SEQ ID NO: 16471 - DNA, 15 bp, Homo sapiens
gccgggactacaggc

SEQ ID NO: 16472 - DNA, 15 bp, Homo sapiens
agccgggactacagg

SEQ ID NO: 16473 - DNA, 15 bp, Homo sapiens
tagccgggactacag

SEQ ID NO: 16474 - DNA, 15 bp, Homo sapiens
gtagccgggactaca

SEQ ID NO: 16475 - DNA, 15 bp, Homo sapiens
agtagccgggactac

SEQ ID NO: 16476 - DNA, 15 bp, Homo sapiens
gagtagccgggacta

SEQ ID NO: 16477 - DNA, 15 bp, Homo sapiens
tgagtagccgggact

SEQ ID NO: 16478 - DNA, 15 bp, Homo sapiens
ctgagtagccgggac

SEQ ID NO: 16479 - DNA, 15 bp, Homo sapiens
cctgagtagccggga

SEQ ID NO: 16480 - DNA, 15 bp, Homo sapiens
tcctgagtagccggg

SEQ ID NO: 16481 - DNA, 15 bp, Homo sapiens
ctcctgagtagccgg

SEQ ID NO: 16482 - DNA, 15 bp, Homo sapiens
tctcctgagtagccg

SEQ ID NO: 16483 - DNA, 15 bp, Homo sapiens
gtctcctgagtagcc

SEQ ID NO: 16484 - DNA, 15 bp, Homo sapiens
agtctcctgagtagc

SEQ ID NO: 16485 - DNA, 15 bp, Homo sapiens
cagtctcctgagtag

SEQ ID NO: 16486 - DNA, 15 bp, Homo sapiens
tcagtctcctgagta

SEQ ID NO: 16487 - DNA, 15 bp, Homo sapiens
ctcagtctcctgagt

SEQ ID NO: 16488 - DNA, 15 bp, Homo sapiens
gctcagtctcctgag

SEQ ID NO: 16489 - DNA, 15 bp, Homo sapiens
tgctcagtctcctga

SEQ ID NO: 16490 - DNA, 15 bp, Homo sapiens
ttgctcagtctcctg

SEQ ID NO: 16491 - DNA, 15 bp, Homo sapiens
cttgctcagtctcct

SEQ ID NO: 16492 - DNA, 15 bp, Homo sapiens
ccttgctcagtctcc

SEQ ID NO: 16493 - DNA, 15 bp, Homo sapiens
tccttgctcagtctc

SEQ ID NO: 16494 - DNA, 15 bp, Homo sapiens
ctccttgctcagtct

SEQ ID NO: 16495 - DNA, 15 bp, Homo sapiens
tctccttgctcagtc

SEQ ID NO: 16496 - DNA, 15 bp, Homo sapiens
ttctccttgctcagt

SEQ ID NO: 16497 - DNA, 15 bp, Homo sapiens
attctccttgctcag

SEQ ID NO: 16498 - DNA, 15 bp, Homo sapiens
gattctccttgctca

SEQ ID NO: 16499 - DNA, 15 bp, Homo sapiens
ggattctccttgctc

SEQ ID NO: 16500 - DNA, 15 bp, Homo sapiens
gggattctccttgct

SEQ ID NO: 16501 - DNA, 15 bp, Homo sapiens
agggattctccttgc

SEQ ID NO: 16502 - DNA, 15 bp, Homo sapiens
aagggattctccttg

SEQ ID NO: 16503 - DNA, 15 bp, Homo sapiens
caagggattctcctt

SEQ ID NO: 16504 - DNA, 15 bp, Homo sapiens
tcaagggattctcct

SEQ ID NO: 16505 - DNA, 15 bp, Homo sapiens
ttcaagggattctcc

SEQ ID NO: 16506 - DNA, 15 bp, Homo sapiens
gttcaagggattctc

SEQ ID NO: 16507 - DNA, 15 bp, Homo sapiens
ggttcaagggattct

SEQ ID NO: 16508 - DNA, 15 bp, Homo sapiens
gggttcaagggattc

SEQ ID NO: 16509 - DNA, 15 bp, Homo sapiens
tgggttcaagggatt

SEQ ID NO: 16510 - DNA, 15 bp, Homo sapiens
ctgggttcaagggat

SEQ ID NO: 16511 - DNA, 15 bp, Homo sapiens
cctgggttcaaggga

SEQ ID NO: 16512 - DNA, 15 bp, Homo sapiens
tcctgggttcaaggg

SEQ ID NO: 16513 - DNA, 15 bp, Homo sapiens
ctcctgggttcaagg

SEQ ID NO: 16514 - DNA, 15 bp, Homo sapiens
cctcctgggttcaag

SEQ ID NO: 16515 - DNA, 15 bp, Homo sapiens
acctcctgggttcaa

SEQ ID NO: 16516 - DNA, 15 bp, Homo sapiens
cacctcctgggttca

SEQ ID NO: 16517 - DNA, 15 bp, Homo sapiens
ccacctcctgggttc

SEQ ID NO: 16518 - DNA, 15 bp, Homo sapiens
tccacctcctgggtt

SEQ ID NO: 16519 - DNA, 15 bp, Homo sapiens
ctccacctcctgggt

SEQ ID NO: 16520 - DNA, 15 bp, Homo sapiens
cctccacctcctggg

SEQ ID NO: 16521 - DNA, 15 bp, Homo sapiens
acctccacctcctgg

SEQ ID NO: 16522 - DNA, 15 bp, Homo sapiens
gacctccacctcctg

SEQ ID NO: 16523 - DNA, 15 bp, Homo sapiens
agacctccacctcct

SEQ ID NO: 16524 - DNA, 15 bp, Homo sapiens
gagacctccacctcc

SEQ ID NO: 16525 - DNA, 15 bp, Homo sapiens
tgagacctccacctc

SEQ ID NO: 16526 - DNA, 15 bp, Homo sapiens
ctgagacctccacct

SEQ ID NO: 16527 - DNA, 15 bp, Homo sapiens
actgagacctccacc

SEQ ID NO: 16528 - DNA, 15 bp, Homo sapiens
cactgagacctccac

SEQ ID NO: 16529 - DNA, 15 bp, Homo sapiens
tcactgagacctcca

SEQ ID NO: 16530 - DNA, 15 bp, Homo sapiens
ctcactgagacctcc

SEQ ID NO: 16531 - DNA, 15 bp, Homo sapiens
gctcactgagacctc

SEQ ID NO: 16532 - DNA, 15 bp, Homo sapiens
agctcactgagacct

SEQ ID NO: 16533 - DNA, 15 bp, Homo sapiens
cagctcactgagacc

SEQ ID NO: 16534 - DNA, 15 bp, Homo sapiens
tcagctcactgagac

SEQ ID NO: 16535 - DNA, 15 bp, Homo sapiens
atcagctcactgaga

SEQ ID NO: 16536 - DNA, 15 bp, Homo sapiens
tatcagctcactgag

SEQ ID NO: 16537 - DNA, 15 bp, Homo sapiens
atatcagctcactga

SEQ ID NO: 16538 - DNA, 15 bp, Homo sapiens
gatatcagctcactg

SEQ ID NO: 16539 - DNA, 15 bp, Homo sapiens
tgatatcagctcact

SEQ ID NO: 16540 - DNA, 15 bp, Homo sapiens
atgatatcagctcac

SEQ ID NO: 16541 - DNA, 15 bp, Homo sapiens
tatgatatcagctca

SEQ ID NO: 16542 - DNA, 15 bp, Homo sapiens
atatgatatcagctc

SEQ ID NO: 16543 - DNA, 15 bp, Homo sapiens
gatatgatatcagct

SEQ ID NO: 16544 - DNA, 15 bp, Homo sapiens
tgatatgatatcagc

SEQ ID NO: 16545 - DNA, 15 bp, Homo sapiens
gtgatatgatatcag

SEQ ID NO: 16546 - DNA, 15 bp, Homo sapiens
agtgatatgatatca

SEQ ID NO: 16547 - DNA, 15 bp, Homo sapiens
cagtgatatgatatc

SEQ ID NO: 16548 - DNA, 15 bp, Homo sapiens
gcagtgatatgatat

SEQ ID NO: 16549 - DNA, 15 bp, Homo sapiens
tgcagtgatatgata

SEQ ID NO: 16550 - DNA, 15 bp, Homo sapiens
gtgcagtgatatgat

SEQ ID NO: 16551 - DNA, 15 bp, Homo sapiens
agtgcagtgatatga

SEQ ID NO: 16552 - DNA, 15 bp, Homo sapiens
gagtgcagtgatatg

SEQ ID NO: 16553 - DNA, 15 bp, Homo sapiens
agagtgcagtgatat

SEQ ID NO: 16554 - DNA, 15 bp, Homo sapiens
tagagtgcagtgata

SEQ ID NO: 16555 - DNA, 15 bp, Homo sapiens
ctagagtgcagtgat

SEQ ID NO: 16556 - DNA, 15 bp, Homo sapiens
gctagagtgcagtga

SEQ ID NO: 16557 - DNA, 15 bp, Homo sapiens
ggctagagtgcagtg

SEQ ID NO: 16558 - DNA, 15 bp, Homo sapiens
aggctagagtgcagt

SEQ ID NO: 16559 - DNA, 15 bp, Homo sapiens
caggctagagtgcag

SEQ ID NO: 16560 - DNA, 15 bp, Homo sapiens
ccaggctagagtgca

SEQ ID NO: 16561 - DNA, 15 bp, Homo sapiens
cccaggctagagtgc

SEQ ID NO: 16562 - DNA, 15 bp, Homo sapiens
gcccaggctagagtg

SEQ ID NO: 16563 - DNA, 15 bp, Homo sapiens
tgcccaggctagagt

SEQ ID NO: 16564 - DNA, 15 bp, Homo sapiens
ttgcccaggctagag

SEQ ID NO: 16565 - DNA, 15 bp, Homo sapiens
gttgcccaggctaga

SEQ ID NO: 16566 - DNA, 15 bp, Homo sapiens
tgttgcccaggctag

SEQ ID NO: 16567 - DNA, 15 bp, Homo sapiens
ctgttgcccaggcta

SEQ ID NO: 16568 - DNA, 15 bp, Homo sapiens
gctctgttgcccagg

SEQ ID NO: 16569 - DNA, 15 bp, Homo sapiens
tgctctgttgcccag

SEQ ID NO: 16570 - DNA, 15 bp, Homo sapiens
ttgctctgttgccca

SEQ ID NO: 16571 - DNA, 15 bp, Homo sapiens
cttgctctgttgccc

SEQ ID NO: 16572 - DNA, 15 bp, Homo sapiens
tcttgctctgttgcc

SEQ ID NO: 16573 - DNA, 15 bp, Homo sapiens
gtcttgctctgttgc

SEQ ID NO: 16574 - DNA, 15 bp, Homo sapiens
agtcttgctctgttg

SEQ ID NO: 16575 - DNA, 15 bp, Homo sapiens
gagtcttgctctgtt

SEQ ID NO: 16576 - DNA, 15 bp, Homo sapiens
agagtcttgctctgt

SEQ ID NO: 16577 - DNA, 15 bp, Homo sapiens
cagagtcttgctctg

SEQ ID NO: 16578 - DNA, 15 bp, Homo sapiens
acagagtcttgctct

SEQ ID NO: 16579 - DNA, 15 bp, Homo sapiens
gacagagtcttgctc

SEQ ID NO: 16580 - DNA, 15 bp, Homo sapiens
agacagagtcttgct

SEQ ID NO: 16581 - DNA, 15 bp, Homo sapiens
tagacagagtcttgc

SEQ ID NO: 16582 - DNA, 15 bp, Homo sapiens
ttagacagagtcttg

SEQ ID NO: 16583 - DNA, 15 bp, Homo sapiens
tttagacagagtctt

SEQ ID NO: 16584 - DNA, 15 bp, Homo sapiens
ttttagacagagtct

SEQ ID NO: 16585 - DNA, 15 bp, Homo sapiens
tttttagacagagtc

SEQ ID NO: 16586 - DNA, 15 bp, Homo sapiens
ttttttagacagagt

SEQ ID NO: 16587 - DNA, 15 bp, Homo sapiens
tttttttagacagag

SEQ ID NO: 16588 - DNA, 15 bp, Homo sapiens
atttttttagacaga

SEQ ID NO: 16589 - DNA, 15 bp, Homo sapiens
tatttttttagacag

SEQ ID NO: 16590 - DNA, 15 bp, Homo sapiens
ttatttttttagaca

SEQ ID NO: 16591 - DNA, 15 bp, Homo sapiens
tttatttttttagac

SEQ ID NO: 16592 - DNA, 15 bp, Homo sapiens
atttatttttttaga

SEQ ID NO: 16593 - DNA, 15 bp, Homo sapiens
tatttatttttttag

SEQ ID NO: 16594 - DNA, 15 bp, Homo sapiens
ttatttattttttta

SEQ ID NO: 16595 - DNA, 15 bp, Homo sapiens
tttatttattttttt

SEQ ID NO: 16596 - DNA, 15 bp, Homo sapiens
atttatttatttttt

SEQ ID NO: 16597 - DNA, 15 bp, Homo sapiens
ttttatttatttatt

SEQ ID NO: 16598 - DNA, 15 bp, Homo sapiens
tttttatttatttat

SEQ ID NO: 16599 - DNA, 15 bp, Homo sapiens
ttttttatttattta

SEQ ID NO: 16600 - DNA, 15 bp, Homo sapiens
cttttttatttattt

SEQ ID NO: 16601 - DNA, 15 bp, Homo sapiens
tcttttttatttatt

SEQ ID NO: 16602 - DNA, 15 bp, Homo sapiens
ttcttttttatttat

SEQ ID NO: 16603 - DNA, 15 bp, Homo sapiens
tttcttttttattta

SEQ ID NO: 16604 - DNA, 15 bp, Homo sapiens
atttcttttttattt

SEQ ID NO: 16605 - DNA, 15 bp, Homo sapiens
aatttcttttttatt

SEQ ID NO: 16606 - DNA, 15 bp, Homo sapiens
caatttcttttttat

SEQ ID NO: 16607 - DNA, 15 bp, Homo sapiens
tcaatttctttttta

SEQ ID NO: 16608 - DNA, 15 bp, Homo sapiens
atcaatttctttttt

SEQ ID NO: 16609 - DNA, 15 bp, Homo sapiens
aatcaatttcttttt

SEQ ID NO: 16610 - DNA, 15 bp, Homo sapiens
aaatcaatttctttt

SEQ ID NO: 16611 - DNA, 15 bp, Homo sapiens
gaaatcaatttcttt

SEQ ID NO: 16612 - DNA, 15 bp, Homo sapiens
atgaaatcaatttct

SEQ ID NO: 16613 - DNA, 15 bp, Homo sapiens
aatgaaatcaatttc

SEQ ID NO: 16614 - DNA, 15 bp, Homo sapiens
gaatgaaatcaattt

SEQ ID NO: 16615 - DNA, 15 bp, Homo sapiens
agaatgaaatcaatt

SEQ ID NO: 16616 - DNA, 15 bp, Homo sapiens
aagaatgaaatcaat

SEQ ID NO: 16617 - DNA, 15 bp, Homo sapiens
gaagaatgaaatcaa

SEQ ID NO: 16618 - DNA, 15 bp, Homo sapiens
agaagaatgaaatca

SEQ ID NO: 16619 - DNA, 15 bp, Homo sapiens
cagaagaatgaaatc

SEQ ID NO: 16620 - DNA, 15 bp, Homo sapiens
tcagaagaatgaaat

SEQ ID NO: 16621 - DNA, 15 bp, Homo sapiens
ctcagaagaatgaaa

SEQ ID NO: 16622 - DNA, 15 bp, Homo sapiens
tctcagaagaatgaa

SEQ ID NO: 16623 - DNA, 15 bp, Homo sapiens
ttctcagaagaatga

SEQ ID NO: 16624 - DNA, 15 bp, Homo sapiens
gttctcagaagaatg

SEQ ID NO: 16625 - DNA, 15 bp, Homo sapiens
agttctcagaagaat

SEQ ID NO: 16626 - DNA, 15 bp, Homo sapiens
cagttctcagaagaa

SEQ ID NO: 16627 - DNA, 15 bp, Homo sapiens
gcagttctcagaaga

SEQ ID NO: 16628 - DNA, 15 bp, Homo sapiens
tgcagttctcagaag

SEQ ID NO: 16629 - DNA, 15 bp, Homo sapiens
ttgcagttctcagaa

SEQ ID NO: 16630 - DNA, 15 bp, Homo sapiens
gttgcagttctcaga

SEQ ID NO: 16631 - DNA, 15 bp, Homo sapiens
tgttgcagttctcag

SEQ ID NO: 16632 - DNA, 15 bp, Homo sapiens
ttgttgcagttctca

SEQ ID NO: 16633 - DNA, 15 bp, Homo sapiens
gttgttgcagttctc

SEQ ID NO: 16634 - DNA, 15 bp, Homo sapiens
agttgttgcagttct

SEQ ID NO: 16635 - DNA, 15 bp, Homo sapiens
tagttgttgcagttc

SEQ ID NO: 16636 - DNA, 15 bp, Homo sapiens
gtagttgttgcagtt

SEQ ID NO: 16637 - DNA, 15 bp, Homo sapiens
ggtagttgttgcagt

SEQ ID NO: 16638 - DNA, 15 bp, Homo sapiens
aggtagttgttgcag

SEQ ID NO: 16639 - DNA, 15 bp, Homo sapiens
aaggtagttgttgca

SEQ ID NO: 16640 - DNA, 15 bp, Homo sapiens
taaggtagttgttgc

SEQ ID NO: 16641 - DNA, 15 bp, Homo sapiens
ttaaggtagttgttg

SEQ ID NO: 16642 - DNA, 15 bp, Homo sapiens
tttaaggtagttgtt

SEQ ID NO: 16643 - DNA, 15 bp, Homo sapiens
ctttaaggtagttgt

SEQ ID NO: 16644 - DNA, 15 bp, Homo sapiens
actttaaggtagttg

SEQ ID NO: 16645 - DNA, 15 bp, Homo sapiens
cactttaaggtagtt

SEQ ID NO: 16646 - DNA, 15 bp, Homo sapiens
tcactttaaggtagt

SEQ ID NO: 16647 - DNA, 15 bp, Homo sapiens
atcactttaaggtag

SEQ ID NO: 16648 - DNA, 15 bp, Homo sapiens
aatcactttaaggta

SEQ ID NO: 16649 - DNA, 15 bp, Homo sapiens
gaatcactttaaggt

SEQ ID NO: 16650 - DNA, 15 bp, Homo sapiens
ggaatcactttaagg

SEQ ID NO: 16651 - DNA, 15 bp, Homo sapiens
tggaatcactttaag

SEQ ID NO: 16652 - DNA, 15 bp, Homo sapiens
atggaatcactttaa

SEQ ID NO: 16653 - DNA, 15 bp, Homo sapiens
gatggaatcacttta

SEQ ID NO: 16654 - DNA, 15 bp, Homo sapiens
ggatggaatcacttt

SEQ ID NO: 16655 - DNA, 15 bp, Homo sapiens
tggatggaatcactt

SEQ ID NO: 16656 - DNA, 15 bp, Homo sapiens
ttggatggaatcact

SEQ ID NO: 16657 - DNA, 15 bp, Homo sapiens
tttggatggaatcac

SEQ ID NO: 16658 - DNA, 15 bp, Homo sapiens
ttttggatggaatca

SEQ ID NO: 16659 - DNA, 15 bp, Homo sapiens
gttttggatggaatc

SEQ ID NO: 16660 - DNA, 15 bp, Homo sapiens
ggttttggatggaat

SEQ ID NO: 16661 - DNA, 15 bp, Homo sapiens
gggttttggatggaa

SEQ ID NO: 16662 - DNA, 15 bp, Homo sapiens
tgggttttggatgga

SEQ ID NO: 16663 - DNA, 15 bp, Homo sapiens
gtgggttttggatgg

SEQ ID NO: 16664 - DNA, 15 bp, Homo sapiens
tgtgggttttggatg

SEQ ID NO: 16665 - DNA, 15 bp, Homo sapiens
atgtgggttttggat

SEQ ID NO: 16666 - DNA, 15 bp, Homo sapiens
catgtgggttttgga

SEQ ID NO: 16667 - DNA, 15 bp, Homo sapiens
acatgtgggttttgg

SEQ ID NO: 16668 - DNA, 15 bp, Homo sapiens
aacatgtgggttttg

SEQ ID NO: 16669 - DNA, 15 bp, Homo sapiens
gaacatgtgggtttt

SEQ ID NO: 16670 - DNA, 15 bp, Homo sapiens
tgaacatgtgggttt

SEQ ID NO: 16671 - DNA, 15 bp, Homo sapiens
ctgaacatgtgggtt

SEQ ID NO: 16672 - DNA, 15 bp, Homo sapiens
gctgaacatgtgggt

SEQ ID NO: 16673 - DNA, 15 bp, Homo sapiens
ggctgaacatgtggg

SEQ ID NO: 16674 - DNA, 15 bp, Homo sapiens
tggctgaacatgtgg

SEQ ID NO: 16675 - DNA, 15 bp, Homo sapiens
atggctgaacatgtg

SEQ ID NO: 16676 - DNA, 15 bp, Homo sapiens
catggctgaacatgt

SEQ ID NO: 16677 - DNA, 15 bp, Homo sapiens
ccatggctgaacatg

SEQ ID NO: 16678 - DNA, 15 bp, Homo sapiens
tccatggctgaacat

SEQ ID NO: 16679 - DNA, 15 bp, Homo sapiens
gtccatggctgaaca

SEQ ID NO: 16680 - DNA, 15 bp, Homo sapiens
agtccatggctgaac

SEQ ID NO: 16681 - DNA, 15 bp, Homo sapiens
aagtccatggctgaa

SEQ ID NO: 16682 - DNA, 15 bp, Homo sapiens
caagtccatggctga

SEQ ID NO: 16683 - DNA, 15 bp, Homo sapiens
gcaagtccatggctg

SEQ ID NO: 16684 - DNA, 15 bp, Homo sapiens
agcaagtccatggct

SEQ ID NO: 16685 - DNA, 15 bp, Homo sapiens
aagcaagtccatggc

SEQ ID NO: 16686 - DNA, 15 bp, Homo sapiens
aaagcaagtccatgg

SEQ ID NO: 16687 - DNA, 15 bp, Homo sapiens
aaaagcaagtccatg

SEQ ID NO: 16688 - DNA, 15 bp, Homo sapiens
taaaagcaagtccat

SEQ ID NO: 16689 - DNA, 15 bp, Homo sapiens
ataaaagcaagtcca

SEQ ID NO: 16690 - DNA, 15 bp, Homo sapiens
cataaaagcaagtcc

SEQ ID NO: 16691 - DNA, 15 bp, Homo sapiens
ccataaaagcaagtc

SEQ ID NO: 16692 - DNA, 15 bp, Homo sapiens
tccataaaagcaagt

SEQ ID NO: 16693 - DNA, 15 bp, Homo sapiens
ctccataaaagcaag

SEQ ID NO: 16694 - DNA, 15 bp, Homo sapiens
gctccataaaagcaa

SEQ ID NO: 16695 - DNA, 15 bp, Homo sapiens
agctccataaaagca

SEQ ID NO: 16696 - DNA, 15 bp, Homo sapiens
cagctccataaaagc

SEQ ID NO: 16697 - DNA, 15 bp, Homo sapiens
gcagctccataaaag

SEQ ID NO: 16698 - DNA, 15 bp, Homo sapiens
cgcagctccataaaa

SEQ ID NO: 16699 - DNA, 15 bp, Homo sapiens
acgcagctccataaa

SEQ ID NO: 16700 - DNA, 15 bp, Homo sapiens
cacgcagctccataa

SEQ ID NO: 16701 - DNA, 15 bp, Homo sapiens
acacgcagctccata

SEQ ID NO: 16702 - DNA, 15 bp, Homo sapiens
cacacgcagctccat

SEQ ID NO: 16703 - DNA, 15 bp, Homo sapiens
ccacacgcagctcca

SEQ ID NO: 16704 - DNA, 15 bp, Homo sapiens
cccacacgcagctcc

SEQ ID NO: 16705 - DNA, 15 bp, Homo sapiens
acccacacgcagctc

SEQ ID NO: 16706 - DNA, 15 bp, Homo sapiens
cacccacacgcagct

SEQ ID NO: 16707 - DNA, 15 bp, Homo sapiens
tcacccacacgcagc

SEQ ID NO: 16708 - DNA, 15 bp, Homo sapiens
gtcacccacacgcag

SEQ ID NO: 16709 - DNA, 15 bp, Homo sapiens
tgtcacccacacgca

SEQ ID NO: 16710 - DNA, 15 bp, Homo sapiens
gtgtcacccacacgc

SEQ ID NO: 16711 - DNA, 15 bp, Homo sapiens
tgtgtcacccacacg

SEQ ID NO: 16712 - DNA, 15 bp, Homo sapiens
gtgtgtcacccacac

SEQ ID NO: 16713 - DNA, 15 bp, Homo sapiens
tgtgtgtcacccaca

SEQ ID NO: 16714 - DNA, 15 bp, Homo sapiens
ttgtgtgtcacccac

SEQ ID NO: 16715 - DNA, 15 bp, Homo sapiens
tttgtgtgtcaccca

SEQ ID NO: 16716 - DNA, 15 bp, Homo sapiens
ttttgtgtgtcaccc

SEQ ID NO: 16717 - DNA, 15 bp, Homo sapiens
attttgtgtgtcacc

SEQ ID NO: 16718 - DNA, 15 bp, Homo sapiens
gattttgtgtgtcac

SEQ ID NO: 16719 - DNA, 15 bp, Homo sapiens
tgattttgtgtgtca

SEQ ID NO: 16720 - DNA, 15 bp, Homo sapiens
ctgattttgtgtgtc

SEQ ID NO: 16721 - DNA, 15 bp, Homo sapiens
cctgattttgtgtgt

SEQ ID NO: 16722 - DNA, 15 bp, Homo sapiens
tcctgattttgtgtg

SEQ ID NO: 16723 - DNA, 15 bp, Homo sapiens
ctcctgattttgtgt

SEQ ID NO: 16724 - DNA, 15 bp, Homo sapiens
gctcctgattttgtg

SEQ ID NO: 16725 - DNA, 15 bp, Homo sapiens
agctcctgattttgt

SEQ ID NO: 16726 - DNA, 15 bp, Homo sapiens
gagctcctgattttg

SEQ ID NO: 16727 - DNA, 15 bp, Homo sapiens
agagctcctgatttt

SEQ ID NO: 16728 - DNA, 15 bp, Homo sapiens
cagagctcctgattt

SEQ ID NO: 16729 - DNA, 15 bp, Homo sapiens
tcagagctcctgatt

SEQ ID NO: 16730 - DNA, 15 bp, Homo sapiens
ctcagagctcctgat

SEQ ID NO: 16731 - DNA, 15 bp, Homo sapiens
actcagagctcctga

SEQ ID NO: 16732 - DNA, 15 bp, Homo sapiens
gactcagagctcctg

SEQ ID NO: 16733 - DNA, 15 bp, Homo sapiens
ggactcagagctcct

SEQ ID NO: 16734 - DNA, 15 bp, Homo sapiens
aggactcagagctcc

SEQ ID NO: 16735 - DNA, 15 bp, Homo sapiens
taggactcagagctc

SEQ ID NO: 16736 - DNA, 15 bp, Homo sapiens
ttaggactcagagct

SEQ ID NO: 16737 - DNA, 15 bp, Homo sapiens
attaggactcagagc

SEQ ID NO: 16738 - DNA, 15 bp, Homo sapiens
aattaggactcagag

SEQ ID NO: 16739 - DNA, 15 bp, Homo sapiens
aaattaggactcaga

SEQ ID NO: 16740 - DNA, 15 bp, Homo sapiens
taaattaggactcag

SEQ ID NO: 16741 - DNA, 15 bp, Homo sapiens
ctaaattaggactca

SEQ ID NO: 16742 - DNA, 15 bp, Homo sapiens
tctaaattaggactc

SEQ ID NO: 16743 - DNA, 15 bp, Homo sapiens
gtctaaattaggact

SEQ ID NO: 16744 - DNA, 15 bp, Homo sapiens
agtctaaattaggac

SEQ ID NO: 16745 - DNA, 15 bp, Homo sapiens
aagtctaaattagga

SEQ ID NO: 16746 - DNA, 15 bp, Homo sapiens
aaagtctaaattagg

SEQ ID NO: 16747 - DNA, 15 bp, Homo sapiens
aaaagtctaaattag

SEQ ID NO: 16748 - DNA, 15 bp, Homo sapiens
taaaagtctaaatta

SEQ ID NO: 16749 - DNA, 15 bp, Homo sapiens
ataaaagtctaaatt

SEQ ID NO: 16750 - DNA, 15 bp, Homo sapiens
aataaaagtctaaat

SEQ ID NO: 16751 - DNA, 15 bp, Homo sapiens
aaataaaagtctaaa

SEQ ID NO: 16752 - DNA, 15 bp, Homo sapiens
taaataaaagtctaa

SEQ ID NO: 16753 - DNA, 15 bp, Homo sapiens
ctaaataaaagtcta

SEQ ID NO: 16754 - DNA, 15 bp, Homo sapiens
tctaaataaaagtct

SEQ ID NO: 16755 - DNA, 15 bp, Homo sapiens
atctaaataaaagtc

SEQ ID NO: 16756 - DNA, 15 bp, Homo sapiens
aatctaaataaaagt

SEQ ID NO: 16757 - DNA, 15 bp, Homo sapiens
aaatctaaataaaag

SEQ ID NO: 16758 - DNA, 15 bp, Homo sapiens
gaaatctaaataaaa

SEQ ID NO: 16759 - DNA, 15 bp, Homo sapiens
ggaaatctaaataaa

SEQ ID NO: 16760 - DNA, 15 bp, Homo sapiens
aggaaatctaaataa

SEQ ID NO: 16761 - DNA, 15 bp, Homo sapiens
gaggaaatctaaata

SEQ ID NO: 16762 - DNA, 15 bp, Homo sapiens
tgaggaaatctaaat

SEQ ID NO: 16763 - DNA, 15 bp, Homo sapiens
ttgaggaaatctaaa

SEQ ID NO: 16764 - DNA, 15 bp, Homo sapiens
tttgaggaaatctaa

SEQ ID NO: 16765 - DNA, 15 bp, Homo sapiens
atttgaggaaatcta

SEQ ID NO: 16766 - DNA, 15 bp, Homo sapiens
aatttgaggaaatct

SEQ ID NO: 16767 - DNA, 15 bp, Homo sapiens
aaatttgaggaaatc

SEQ ID NO: 16768 - DNA, 15 bp, Homo sapiens
caaatttgaggaaat

SEQ ID NO: 16769 - DNA, 15 bp, Homo sapiens
ccaaatttgaggaaa

SEQ ID NO: 16770 - DNA, 15 bp, Homo sapiens
cccaaatttgaggaa

SEQ ID NO: 16771 - DNA, 15 bp, Homo sapiens
acccaaatttgagga

SEQ ID NO: 16772 - DNA, 15 bp, Homo sapiens
aacccaaatttgagg

SEQ ID NO: 16773 - DNA, 15 bp, Homo sapiens
gaacccaaatttgag

SEQ ID NO: 16774 - DNA, 15 bp, Homo sapiens
ggaacccaaatttga

SEQ ID NO: 16775 - DNA, 15 bp, Homo sapiens
tggaacccaaatttg

SEQ ID NO: 16776 - DNA, 15 bp, Homo sapiens
ctggaacccaaattt

SEQ ID NO: 16777 - DNA, 15 bp, Homo sapiens
actggaacccaaatt

SEQ ID NO: 16778 - DNA, 15 bp, Homo sapiens
aactggaacccaaat

SEQ ID NO: 16779 - DNA, 15 bp, Homo sapiens
taactggaacccaaa

SEQ ID NO: 16780 - DNA, 15 bp, Homo sapiens
ttaactggaacccaa

SEQ ID NO: 16781 - DNA, 15 bp, Homo sapiens
cttaactggaaccca

SEQ ID NO: 16782 - DNA, 15 bp, Homo sapiens
gcttaactggaaccc

SEQ ID NO: 16783 - DNA, 15 bp, Homo sapiens
cgcttaactggaacc

SEQ ID NO: 16784 - DNA, 15 bp, Homo sapiens
acgcttaactggaac

SEQ ID NO: 16785 - DNA, 15 bp, Homo sapiens
cacgcttaactggaa

SEQ ID NO: 16786 - DNA, 15 bp, Homo sapiens
ccacgcttaactgga

SEQ ID NO: 16787 - DNA, 15 bp, Homo sapiens
cccacgcttaactgg

SEQ ID NO: 16788 - DNA, 15 bp, Homo sapiens
acccacgcttaactg

SEQ ID NO: 16789 - DNA, 15 bp, Homo sapiens
gacccacgcttaact

SEQ ID NO: 16790 - DNA, 15 bp, Homo sapiens
agacccacgcttaac

SEQ ID NO: 16791 - DNA, 15 bp, Homo sapiens
gagacccacgcttaa

SEQ ID NO: 16792 - DNA, 15 bp, Homo sapiens
agagacccacgctta

SEQ ID NO: 16793 - DNA, 15 bp, Homo sapiens
aagagacccacgctt

SEQ ID NO: 16794 - DNA, 15 bp, Homo sapiens
gaagagacccacgct

SEQ ID NO: 16795 - DNA, 15 bp, Homo sapiens
agaagagacccacgc

SEQ ID NO: 16796 - DNA, 15 bp, Homo sapiens
cagaagagacccacg

SEQ ID NO: 16797 - DNA, 15 bp, Homo sapiens
acagaagagacccac

SEQ ID NO: 16798 - DNA, 15 bp, Homo sapiens
cacagaagagaccca

SEQ ID NO: 16799 - DNA, 15 bp, Homo sapiens
gcacagaagagaccc

SEQ ID NO: 16800 - DNA, 15 bp, Homo sapiens
ggcacagaagagacc

SEQ ID NO: 16801 - DNA, 15 bp, Homo sapiens
gggcacagaagagac

SEQ ID NO: 16802 - DNA, 15 bp, Homo sapiens
ggggcacagaagaga

SEQ ID NO: 16803 - DNA, 15 bp, Homo sapiens
cggggcacagaagag

SEQ ID NO: 16804 - DNA, 15 bp, Homo sapiens
gcggggcacagaaga

SEQ ID NO: 16805 - DNA, 15 bp, Homo sapiens
agcggggcacagaag

SEQ ID NO: 16806 - DNA, 15 bp, Homo sapiens
gagcggggcacagaa

SEQ ID NO: 16807 - DNA, 15 bp, Homo sapiens
ggagcggggcacaga

SEQ ID NO: 16808 - DNA, 15 bp, Homo sapiens
gggagcggggcacag

SEQ ID NO: 16809 - DNA, 15 bp, Homo sapiens
ggggagcggggcaca

SEQ ID NO: 16810 - DNA, 15 bp, Homo sapiens
aggggagcggggcac

SEQ ID NO: 16811 - DNA, 15 bp, Homo sapiens
aaggggagcggggca

SEQ ID NO: 16812 - DNA, 15 bp, Homo sapiens
aaaggggagcggggc

SEQ ID NO: 16813 - DNA, 15 bp, Homo sapiens
caaaggggagcgggg

SEQ ID NO: 16814 - DNA, 15 bp, Homo sapiens
gcaaaggggagcggg

SEQ ID NO: 16815 - DNA, 15 bp, Homo sapiens
ggcaaaggggagcgg

SEQ ID NO: 16816 - DNA, 15 bp, Homo sapiens
tggcaaaggggagcg

SEQ ID NO: 16817 - DNA, 15 bp, Homo sapiens
atggcaaaggggagc

SEQ ID NO: 16818 - DNA, 15 bp, Homo sapiens
aatggcaaaggggag

SEQ ID NO: 16819 - DNA, 15 bp, Homo sapiens
aaatggcaaagggga

SEQ ID NO: 16820 - DNA, 15 bp, Homo sapiens
caaatggcaaagggg

SEQ ID NO: 16821 - DNA, 15 bp, Homo sapiens
acaaatggcaaaggg

SEQ ID NO: 16822 - DNA, 15 bp, Homo sapiens
aacaaatggcaaagg

SEQ ID NO: 16823 - DNA, 15 bp, Homo sapiens
aaacaaatggcaaag

SEQ ID NO: 16824 - DNA, 15 bp, Homo sapiens
aaaacaaatggcaaa

SEQ ID NO: 16825 - DNA, 15 bp, Homo sapiens
taaaacaaatggcaa

SEQ ID NO: 16826 - DNA, 15 bp, Homo sapiens
ataaaacaaatggca

SEQ ID NO: 16827 - DNA, 15 bp, Homo sapiens
gataaaacaaatggc

SEQ ID NO: 16828 - DNA, 15 bp, Homo sapiens
agataaaacaaatgg

SEQ ID NO: 16829 - DNA, 15 bp, Homo sapiens
cagataaaacaaatg

SEQ ID NO: 16830 - DNA, 15 bp, Homo sapiens
acagataaaacaaat

SEQ ID NO: 16831 - DNA, 15 bp, Homo sapiens
aacagataaaacaaa

SEQ ID NO: 16832 - DNA, 15 bp, Homo sapiens
gaacagataaaacaa

SEQ ID NO: 16833 - DNA, 15 bp, Homo sapiens
agaacagataaaaca

SEQ ID NO: 16834 - DNA, 15 bp, Homo sapiens
aagaacagataaaac

SEQ ID NO: 16835 - DNA, 15 bp, Homo sapiens
gaagaacagataaaa

SEQ ID NO: 16836 - DNA, 15 bp, Homo sapiens
tgaagaacagataaa

SEQ ID NO: 16837 - DNA, 15 bp, Homo sapiens
ctgaagaacagataa

SEQ ID NO: 16838 - DNA, 15 bp, Homo sapiens
actgaagaacagata

SEQ ID NO: 16839 - DNA, 15 bp, Homo sapiens
gactgaagaacagat

SEQ ID NO: 16840 - DNA, 15 bp, Homo sapiens
agactgaagaacaga

SEQ ID NO: 16841 - DNA, 15 bp, Homo sapiens
cagactgaagaacag

SEQ ID NO: 16842 - DNA, 15 bp, Homo sapiens
acagactgaagaaca

SEQ ID NO: 16843 - DNA, 15 bp, Homo sapiens
aacagactgaagaac

SEQ ID NO: 16844 - DNA, 15 bp, Homo sapiens
gaacagactgaagaa

SEQ ID NO: 16845 - DNA, 15 bp, Homo sapiens
agaacagactgaaga

SEQ ID NO: 16846 - DNA, 15 bp, Homo sapiens
cagaacagactgaag

SEQ ID NO: 16847 - DNA, 15 bp, Homo sapiens
acagaacagactgaa

SEQ ID NO: 16848 - DNA, 15 bp, Homo sapiens
gacagaacagactga

SEQ ID NO: 16849 - DNA, 15 bp, Homo sapiens
tgacagaacagactg

SEQ ID NO: 16850 - DNA, 15 bp, Homo sapiens
ctgacagaacagact

SEQ ID NO: 16851 - DNA, 15 bp, Homo sapiens
ctctcggcctcaagt

SEQ ID NO: 16852 - DNA, 15 bp, Homo sapiens
gctctcggcctcaag

SEQ ID NO: 16853 - DNA, 15 bp, Homo sapiens
ggctctcggcctcaa

SEQ ID NO: 16854 - DNA, 15 bp, Homo sapiens
gggctctcggcctca

SEQ ID NO: 16855 - DNA, 15 bp, Homo sapiens
agggctctcggcctc

SEQ ID NO: 16856 - DNA, 15 bp, Homo sapiens
aagggctctcggcct

SEQ ID NO: 16857 - DNA, 15 bp, Homo sapiens
caagggctctcggcc

SEQ ID NO: 16858 - DNA, 15 bp, Homo sapiens
ccaagggctctcggc

SEQ ID NO: 16859 - DNA, 15 bp, Homo sapiens
tccaagggctctcgg

SEQ ID NO: 16860 - DNA, 15 bp, Homo sapiens
atccaagggctctcg

SEQ ID NO: 16861 - DNA, 15 bp, Homo sapiens
catccaagggctctc

SEQ ID NO: 16862 - DNA, 15 bp, Homo sapiens
gcatccaagggctct

SEQ ID NO: 16863 - DNA, 15 bp, Homo sapiens
ggcatccaagggctc

SEQ ID NO: 16864 - DNA, 15 bp, Homo sapiens
aggcatccaagggct

SEQ ID NO: 16865 - DNA, 15 bp, Homo sapiens
caggcatccaagggc

SEQ ID NO: 16866 - DNA, 15 bp, Homo sapiens
ccaggcatccaaggg

SEQ ID NO: 16867 - DNA, 15 bp, Homo sapiens
accaggcatccaagg

SEQ ID NO: 16868 - DNA, 15 bp, Homo sapiens
caccaggcatccaag

SEQ ID NO: 16869 - DNA, 15 bp, Homo sapiens
tcaccaggcatccaa

SEQ ID NO: 16870 - DNA, 15 bp, Homo sapiens
gtcaccaggcatcca

SEQ ID NO: 16871 - DNA, 15 bp, Homo sapiens
tgtcaccaggcatcc

SEQ ID NO: 16872 - DNA, 15 bp, Homo sapiens
ctgtcaccaggcatc

SEQ ID NO: 16873 - DNA, 15 bp, Homo sapiens
actgtcaccaggcat

SEQ ID NO: 16874 - DNA, 15 bp, Homo sapiens
cactgtcaccaggca

SEQ ID NO: 16875 - DNA, 15 bp, Homo sapiens
ccactgtcaccaggc

SEQ ID NO: 16876 - DNA, 15 bp, Homo sapiens
accactgtcaccagg

SEQ ID NO: 16877 - DNA, 15 bp, Homo sapiens
aaccactgtcaccag

SEQ ID NO: 16878 - DNA, 15 bp, Homo sapiens
aaaccactgtcacca

SEQ ID NO: 16879 - DNA, 15 bp, Homo sapiens
gaaaccactgtcacc

SEQ ID NO: 16880 - DNA, 15 bp, Homo sapiens
ggaaaccactgtcac

SEQ ID NO: 16881 - DNA, 15 bp, Homo sapiens
aggaaaccactgtca

SEQ ID NO: 16882 - DNA, 15 bp, Homo sapiens
gaggaaaccactgtc

SEQ ID NO: 16883 - DNA, 15 bp, Homo sapiens
ggaggaaaccactgt

SEQ ID NO: 16884 - DNA, 15 bp, Homo sapiens
aggaggaaaccactg

SEQ ID NO: 16885 - DNA, 15 bp, Homo sapiens
caggaggaaaccact

SEQ ID NO: 16886 - DNA, 15 bp, Homo sapiens
gcaggaggaaaccac

SEQ ID NO: 16887 - DNA, 15 bp, Homo sapiens
ggcaggaggaaacca

SEQ ID NO: 16888 - DNA, 15 bp, Homo sapiens
gggcaggaggaaacc

SEQ ID NO: 16889 - DNA, 15 bp, Homo sapiens
ggggcaggaggaaac

SEQ ID NO: 16890 - DNA, 15 bp, Homo sapiens
aggggcaggaggaaa

SEQ ID NO: 16891 - DNA, 15 bp, Homo sapiens
caggggcaggaggaa

SEQ ID NO: 16892 - DNA, 15 bp, Homo sapiens
gcaggggcaggagga

SEQ ID NO: 16893 - DNA, 15 bp, Homo sapiens
ggcaggggcaggagg

SEQ ID NO: 16894 - DNA, 15 bp, Homo sapiens
aggcaggggcaggag

SEQ ID NO: 16895 - DNA, 15 bp, Homo sapiens
aaggcaggggcagga

SEQ ID NO: 16896 - DNA, 15 bp, Homo sapiens
gaaggcaggggcagg

SEQ ID NO: 16897 - DNA, 15 bp, Homo sapiens
ggaaggcaggggcag

SEQ ID NO: 16898 - DNA, 15 bp, Homo sapiens
aggaaggcaggggca

SEQ ID NO: 16899 - DNA, 15 bp, Homo sapiens
gaggaaggcaggggc

SEQ ID NO: 16900 - DNA, 15 bp, Homo sapiens
agaggaaggcagggg

SEQ ID NO: 16901 - DNA, 15 bp, Homo sapiens
gagaggaaggcaggg

SEQ ID NO: 16902 - DNA, 15 bp, Homo sapiens
agagaggaaggcagg

SEQ ID NO: 16903 - DNA, 15 bp, Homo sapiens
cagagaggaaggcag

SEQ ID NO: 16904 - DNA, 15 bp, Homo sapiens
ccagagaggaaggca

SEQ ID NO: 16905 - DNA, 15 bp, Homo sapiens
gccagagaggaaggc

SEQ ID NO: 16906 - DNA, 15 bp, Homo sapiens
tgccagagaggaagg

SEQ ID NO: 16907 - DNA, 15 bp, Homo sapiens
ctgccagagaggaag

SEQ ID NO: 16908 - DNA, 15 bp, Homo sapiens
tctgccagagaggaa

SEQ ID NO: 16909 - DNA, 15 bp, Homo sapiens
gtctgccagagagga

SEQ ID NO: 16910 - DNA, 15 bp, Homo sapiens
agtctgccagagagg

SEQ ID NO: 16911 - DNA, 15 bp, Homo sapiens
cagtctgccagagag

SEQ ID NO: 16912 - DNA, 15 bp, Homo sapiens
tcagtctgccagaga

SEQ ID NO: 16913 - DNA, 15 bp, Homo sapiens
gtcagtctgccagag

SEQ ID NO: 16914 - DNA, 15 bp, Homo sapiens
agtcagtctgccaga

SEQ ID NO: 16915 - DNA, 15 bp, Homo sapiens
cagtcagtctgccag

SEQ ID NO: 16916 - DNA, 15 bp, Homo sapiens
ccagtcagtctgcca

SEQ ID NO: 16917 - DNA, 15 bp, Homo sapiens
gccagtcagtctgcc

SEQ ID NO: 16918 - DNA, 15 bp, Homo sapiens
ggccagtcagtctgc

SEQ ID NO: 16919 - DNA, 15 bp, Homo sapiens
gggccagtcagtctg

SEQ ID NO: 16920 - DNA, 15 bp, Homo sapiens
agggccagtcagtct

SEQ ID NO: 16921 - DNA, 15 bp, Homo sapiens
aagggccagtcagtc

SEQ ID NO: 16922 - DNA, 15 bp, Homo sapiens
gaagggccagtcagt

SEQ ID NO: 16923 - DNA, 15 bp, Homo sapiens
agaagggccagtcag

SEQ ID NO: 16924 - DNA, 15 bp, Homo sapiens
cagaagggccagtca

SEQ ID NO: 16925 - DNA, 15 bp, Homo sapiens
gcagaagggccagtc

SEQ ID NO: 16926 - DNA, 15 bp, Homo sapiens
agcagaagggccagt

SEQ ID NO: 16927 - DNA, 15 bp, Homo sapiens
gagcagaagggccag

SEQ ID NO: 16928 - DNA, 15 bp, Homo sapiens
ggagcagaagggcca

SEQ ID NO: 16929 - DNA, 15 bp, Homo sapiens
aggagcagaagggcc

SEQ ID NO: 16930 - DNA, 15 bp, Homo sapiens
gaggagcagaagggc

SEQ ID NO: 16931 - DNA, 15 bp, Homo sapiens
agaggagcagaaggg

SEQ ID NO: 16932 - DNA, 15 bp, Homo sapiens
aagaggagcagaagg

SEQ ID NO: 16933 - DNA, 15 bp, Homo sapiens
gaagaggagcagaag

SEQ ID NO: 16934 - DNA, 15 bp, Homo sapiens
ggaagaggagcagaa

SEQ ID NO: 16935 - DNA, 15 bp, Homo sapiens
gggaagaggagcaga

SEQ ID NO: 16936 - DNA, 15 bp, Homo sapiens
ggggaagaggagcag

SEQ ID NO: 16937 - DNA, 15 bp, Homo sapiens
aggggaagaggagca

SEQ ID NO: 16938 - DNA, 15 bp, Homo sapiens
aaggggaagaggagc

SEQ ID NO: 16939 - DNA, 15 bp, Homo sapiens
gaaggggaagaggag

SEQ ID NO: 16940 - DNA, 15 bp, Homo sapiens
ggaaggggaagagga

SEQ ID NO: 16941 - DNA, 15 bp, Homo sapiens
tggaaggggaagagg

SEQ ID NO: 16942 - DNA, 15 bp, Homo sapiens
ctggaaggggaagag

SEQ ID NO: 16943 - DNA, 15 bp, Homo sapiens
cctggaaggggaaga

SEQ ID NO: 16944 - DNA, 15 bp, Homo sapiens
tcctggaaggggaag

SEQ ID NO: 16945 - DNA, 15 bp, Homo sapiens
atcctggaaggggaa

SEQ ID NO: 16946 - DNA, 15 bp, Homo sapiens
catcctggaagggga

SEQ ID NO: 16947 - DNA, 15 bp, Homo sapiens
acatcctggaagggg

SEQ ID NO: 16948 - DNA, 15 bp, Homo sapiens
gacatcctggaaggg

SEQ ID NO: 16949 - DNA, 15 bp, Homo sapiens
ggacatcctggaagg

SEQ ID NO: 16950 - DNA, 15 bp, Homo sapiens
aggacatcctggaag

SEQ ID NO: 16951 - DNA, 15 bp, Homo sapiens
caggacatcctggaa

SEQ ID NO: 16952 - DNA, 15 bp, Homo sapiens
tcaggacatcctgga

SEQ ID NO: 16953 - DNA, 15 bp, Homo sapiens
atcaggacatcctgg

SEQ ID NO: 16954 - DNA, 15 bp, Homo sapiens
tatcaggacatcctg

SEQ ID NO: 16955 - DNA, 15 bp, Homo sapiens
atatcaggacatcct

SEQ ID NO: 16956 - DNA, 15 bp, Homo sapiens
gatatcaggacatcc

SEQ ID NO: 16957 - DNA, 15 bp, Homo sapiens
agatatcaggacatc

SEQ ID NO: 16958 - DNA, 15 bp, Homo sapiens
aagatatcaggacat

SEQ ID NO: 16959 - DNA, 15 bp, Homo sapiens
aaagatatcaggaca

SEQ ID NO: 16960 - DNA, 15 bp, Homo sapiens
aaaagatatcaggac

SEQ ID NO: 16961 - DNA, 15 bp, Homo sapiens
aaaaagatatcagga

SEQ ID NO: 16962 - DNA, 15 bp, Homo sapiens
taaaaagatatcagg

SEQ ID NO: 16963 - DNA, 15 bp, Homo sapiens
ttaaaaagatatcag

SEQ ID NO: 16964 - DNA, 15 bp, Homo sapiens
tttaaaaagatatca

SEQ ID NO: 16965 - DNA, 15 bp, Homo sapiens
gtttaaaaagatatc

SEQ ID NO: 16966 - DNA, 15 bp, Homo sapiens
ggtttaaaaagatat

SEQ ID NO: 16967 - DNA, 15 bp, Homo sapiens
tggtttaaaaagata

SEQ ID NO: 16968 - DNA, 15 bp, Homo sapiens
ttggtttaaaaagat

SEQ ID NO: 16969 - DNA, 15 bp, Homo sapiens
tttggtttaaaaaga

SEQ ID NO: 16970 - DNA, 15 bp, Homo sapiens
atttggtttaaaaag

SEQ ID NO: 16971 - DNA, 15 bp, Homo sapiens
catttggtttaaaaa

SEQ ID NO: 16972 - DNA, 15 bp, Homo sapiens
gcatttggtttaaaa

SEQ ID NO: 16973 - DNA, 15 bp, Homo sapiens
ggcatttggtttaaa

SEQ ID NO: 16974 - DNA, 15 bp, Homo sapiens
tggcatttggtttaa

SEQ ID NO: 16975 - DNA, 15 bp, Homo sapiens
ttggcatttggttta

SEQ ID NO: 16976 - DNA, 15 bp, Homo sapiens
cttggcatttggttt

SEQ ID NO: 16977 - DNA, 15 bp, Homo sapiens
acttggcatttggtt

SEQ ID NO: 16978 - DNA, 15 bp, Homo sapiens
aacttggcatttggt

SEQ ID NO: 16979 - DNA, 15 bp, Homo sapiens
aaacttggcatttgg

SEQ ID NO: 16980 - DNA, 15 bp, Homo sapiens
caaacttggcatttg

SEQ ID NO: 16981 - DNA, 15 bp, Homo sapiens
gcaaacttggcattt

SEQ ID NO: 16982 - DNA, 15 bp, Homo sapiens
ggcaaacttggcatt

SEQ ID NO: 16983 - DNA, 15 bp, Homo sapiens
tggcaaacttggcat

SEQ ID NO: 16984 - DNA, 15 bp, Homo sapiens
ttggcaaacttggca

SEQ ID NO: 16985 - DNA, 15 bp, Homo sapiens
tttggcaaacttggc

SEQ ID NO: 16986 - DNA, 15 bp, Homo sapiens
ttttggcaaacttgg

SEQ ID NO: 16987 - DNA, 15 bp, Homo sapiens
tttttggcaaacttg

SEQ ID NO: 16988 - DNA, 15 bp, Homo sapiens
ctttttggcaaactt

SEQ ID NO: 16989 - DNA, 15 bp, Homo sapiens
actttttggcaaact

SEQ ID NO: 16990 - DNA, 15 bp, Homo sapiens
cactttttggcaaac

SEQ ID NO: 16991 - DNA, 15 bp, Homo sapiens
acactttttggcaaa

SEQ ID NO: 16992 - DNA, 15 bp, Homo sapiens
gacactttttggcaa

SEQ ID NO: 16993 - DNA, 15 bp, Homo sapiens
agacactttttggca

SEQ ID NO: 16994 - DNA, 15 bp, Homo sapiens
cagacactttttggc

SEQ ID NO: 16995 - DNA, 15 bp, Homo sapiens
acagacactttttgg

SEQ ID NO: 16996 - DNA, 15 bp, Homo sapiens
aacagacactttttg

SEQ ID NO: 16997 - DNA, 15 bp, Homo sapiens
aaacagacacttttt

SEQ ID NO: 16998 - DNA, 15 bp, Homo sapiens
caaacagacactttt

SEQ ID NO: 16999 - DNA, 15 bp, Homo sapiens
acaaacagacacttt

SEQ ID NO: 17000 - DNA, 15 bp, Homo sapiens
cacaaacagacactt

SEQ ID NO: 17001 - DNA, 15 bp, Homo sapiens
acacaaacagacact

SEQ ID NO: 17002 - DNA, 15 bp, Homo sapiens
cacacaaacagacac

SEQ ID NO: 17003 - DNA, 15 bp, Homo sapiens
acacacaaacagaca

SEQ ID NO: 17004 - DNA, 15 bp, Homo sapiens
cacacacaaacagac

SEQ ID NO: 17005 - DNA, 15 bp, Homo sapiens
acacacacaaacaga

SEQ ID NO: 17006 - DNA, 15 bp, Homo sapiens
cacacacacaaacag

SEQ ID NO: 17007 - DNA, 15 bp, Homo sapiens
acacacacacaaaca

SEQ ID NO: 17008 - DNA, 15 bp, Homo sapiens
cacacacacacaaac

SEQ ID NO: 17009 - DNA, 15 bp, Homo sapiens
acacacacacacaaa

SEQ ID NO: 17010 - DNA, 15 bp, Homo sapiens
aacacacacacacac

SEQ ID NO: 17011 - DNA, 15 bp, Homo sapiens
gaacacacacacaca

SEQ ID NO: 17012 - DNA, 15 bp, Homo sapiens
tgaacacacacacac

SEQ ID NO: 17013 - DNA, 15 bp, Homo sapiens
ttgaacacacacaca

SEQ ID NO: 17014 - DNA, 15 bp, Homo sapiens
attgaacacacacac

SEQ ID NO: 17015 - DNA, 15 bp, Homo sapiens
cattgaacacacaca

SEQ ID NO: 17016 - DNA, 15 bp, Homo sapiens
gcattgaacacacac

SEQ ID NO: 17017 - DNA, 15 bp, Homo sapiens
cgcattgaacacaca

SEQ ID NO: 17018 - DNA, 15 bp, Homo sapiens
acgcattgaacacac

SEQ ID NO: 17019 - DNA, 15 bp, Homo sapiens
cacgcattgaacaca

SEQ ID NO: 17020 - DNA, 15 bp, Homo sapiens
acacgcattgaacac

SEQ ID NO: 17021 - DNA, 15 bp, Homo sapiens
cacacgcattgaaca

SEQ ID NO: 17022 - DNA, 15 bp, Homo sapiens
acacacgcattgaac

SEQ ID NO: 17023 - DNA, 15 bp, Homo sapiens
aacacacgcattgaa

SEQ ID NO: 17024 - DNA, 15 bp, Homo sapiens
aaacacacgcattga

SEQ ID NO: 17025 - DNA, 15 bp, Homo sapiens
taaacacacgcattg

SEQ ID NO: 17026 - DNA, 15 bp, Homo sapiens
ataaacacacgcatt

SEQ ID NO: 17027 - DNA, 15 bp, Homo sapiens
tataaacacacgcat

SEQ ID NO: 17028 - DNA, 15 bp, Homo sapiens
gtataaacacacgca

SEQ ID NO: 17029 - DNA, 15 bp, Homo sapiens
ggtataaacacacgc

SEQ ID NO: 17030 - DNA, 15 bp, Homo sapiens
tggtataaacacacg

SEQ ID NO: 17031 - DNA, 15 bp, Homo sapiens
gtggtataaacacac

SEQ ID NO: 17032 - DNA, 15 bp, Homo sapiens
tgtggtataaacaca

SEQ ID NO: 17033 - DNA, 15 bp, Homo sapiens
gtgtggtataaacac

SEQ ID NO: 17034 - DNA, 15 bp, Homo sapiens
agtgtggtataaaca

SEQ ID NO: 17035 - DNA, 15 bp, Homo sapiens
aagtgtggtataaac

SEQ ID NO: 17036 - DNA, 15 bp, Homo sapiens
gaagtgtggtataaa

SEQ ID NO: 17037 - DNA, 15 bp, Homo sapiens
tgaagtgtggtataa

SEQ ID NO: 17038 - DNA, 15 bp, Homo sapiens
gtgaagtgtggtata

SEQ ID NO: 17039 - DNA, 15 bp, Homo sapiens
tgtgaagtgtggtat

SEQ ID NO: 17040 - DNA, 15 bp, Homo sapiens
ttgtgaagtgtggta

SEQ ID NO: 17041 - DNA, 15 bp, Homo sapiens
attgtgaagtgtggt

SEQ ID NO: 17042 - DNA, 15 bp, Homo sapiens
aattgtgaagtgtgg

SEQ ID NO: 17043 - DNA, 15 bp, Homo sapiens
aaattgtgaagtgtg

SEQ ID NO: 17044 - DNA, 15 bp, Homo sapiens
caaattgtgaagtgt

SEQ ID NO: 17045 - DNA, 15 bp, Homo sapiens
acaaattgtgaagtg

SEQ ID NO: 17046 - DNA, 15 bp, Homo sapiens
gacaaattgtgaagt

SEQ ID NO: 17047 - DNA, 15 bp, Homo sapiens
ggacaaattgtgaag

SEQ ID NO: 17048 - DNA, 15 bp, Homo sapiens
tggacaaattgtgaa

SEQ ID NO: 17049 - DNA, 15 bp, Homo sapiens
ctggacaaattgtga

SEQ ID NO: 17050 - DNA, 15 bp, Homo sapiens
cctggacaaattgtg

SEQ ID NO: 17051 - DNA, 15 bp, Homo sapiens
gcctggacaaattgt

SEQ ID NO: 17052 - DNA, 15 bp, Homo sapiens
agcctggacaaattg

SEQ ID NO: 17053 - DNA, 15 bp, Homo sapiens
aagcctggacaaatt

SEQ ID NO: 17054 - DNA, 15 bp, Homo sapiens
caagcctggacaaat

SEQ ID NO: 17055 - DNA, 15 bp, Homo sapiens
acaagcctggacaaa

SEQ ID NO: 17056 - DNA, 15 bp, Homo sapiens
tacaagcctggacaa

SEQ ID NO: 17057 - DNA, 15 bp, Homo sapiens
atacaagcctggaca

SEQ ID NO: 17058 - DNA, 15 bp, Homo sapiens
aatacaagcctggac

SEQ ID NO: 17059 - DNA, 15 bp, Homo sapiens
taatacaagcctgga

SEQ ID NO: 17060 - DNA, 15 bp, Homo sapiens
ttaatacaagcctgg

SEQ ID NO: 17061 - DNA, 15 bp, Homo sapiens
attaatacaagcctg

SEQ ID NO: 17062 - DNA, 15 bp, Homo sapiens
tattaatacaagcct

SEQ ID NO: 17063 - DNA, 15 bp, Homo sapiens
gtattaatacaagcc

SEQ ID NO: 17064 - DNA, 15 bp, Homo sapiens
ggtattaatacaagc

SEQ ID NO: 17065 - DNA, 15 bp, Homo sapiens
tggtattaatacaag

SEQ ID NO: 17066 - DNA, 15 bp, Homo sapiens
atggtattaatacaa

SEQ ID NO: 17067 - DNA, 15 bp, Homo sapiens
gatggtattaataca

SEQ ID NO: 17068 - DNA, 15 bp, Homo sapiens
tgatggtattaatac

SEQ ID NO: 17069 - DNA, 15 bp, Homo sapiens
gtgatggtattaata

SEQ ID NO: 17070 - DNA, 15 bp, Homo sapiens
ggtgatggtattaat

SEQ ID NO: 17071 - DNA, 15 bp, Homo sapiens
tggtgatggtattaa

SEQ ID NO: 17072 - DNA, 15 bp, Homo sapiens
ctggtgatggtatta

SEQ ID NO: 17073 - DNA, 15 bp, Homo sapiens
cctggtgatggtatt

SEQ ID NO: 17074 - DNA, 15 bp, Homo sapiens
gcctggtgatggtat

SEQ ID NO: 17075 - DNA, 15 bp, Homo sapiens
agcctggtgatggta

SEQ ID NO: 17076 - DNA, 15 bp, Homo sapiens
gagcctggtgatggt

SEQ ID NO: 17077 - DNA, 15 bp, Homo sapiens
tgagcctggtgatgg

SEQ ID NO: 17078 - DNA, 15 bp, Homo sapiens
ttgagcctggtgatg

SEQ ID NO: 17079 - DNA, 15 bp, Homo sapiens
gttgagcctggtgat

SEQ ID NO: 17080 - DNA, 15 bp, Homo sapiens
ggttgagcctggtga

SEQ ID NO: 17081 - DNA, 15 bp, Homo sapiens
gggttgagcctggtg

SEQ ID NO: 17082 - DNA, 15 bp, Homo sapiens
agggttgagcctggt

SEQ ID NO: 17083 - DNA, 15 bp, Homo sapiens
cagggttgagcctgg

SEQ ID NO: 17084 - DNA, 15 bp, Homo sapiens
ccagggttgagcctg

SEQ ID NO: 17085 - DNA, 15 bp, Homo sapiens
accagggttgagcct

SEQ ID NO: 17086 - DNA, 15 bp, Homo sapiens
caccagggttgagcc

SEQ ID NO: 17087 - DNA, 15 bp, Homo sapiens
acaccagggttgagc

SEQ ID NO: 17088 - DNA, 15 bp, Homo sapiens
aacaccagggttgag

SEQ ID NO: 17089 - DNA, 15 bp, Homo sapiens
taacaccagggttga

SEQ ID NO: 17090 - DNA, 15 bp, Homo sapiens
ttaacaccagggttg

SEQ ID NO: 17091 - DNA, 15 bp, Homo sapiens
attaacaccagggtt

SEQ ID NO: 17092 - DNA, 15 bp, Homo sapiens
aattaacaccagggt

SEQ ID NO: 17093 - DNA, 15 bp, Homo sapiens
gaattaacaccaggg

SEQ ID NO: 17094 - DNA, 15 bp, Homo sapiens
ggaattaacaccagg

SEQ ID NO: 17095 - DNA, 15 bp, Homo sapiens
tggaattaacaccag

SEQ ID NO: 17096 - DNA, 15 bp, Homo sapiens
ttggaattaacacca

SEQ ID NO: 17097 - DNA, 15 bp, Homo sapiens
cttggaattaacacc

SEQ ID NO: 17098 - DNA, 15 bp, Homo sapiens
tcttggaattaacac

SEQ ID NO: 17099 - DNA, 15 bp, Homo sapiens
atcttggaattaaca

SEQ ID NO: 17100 - DNA, 15 bp, Homo sapiens
tatcttggaattaac

SEQ ID NO: 17101 - DNA, 15 bp, Homo sapiens
gtatcttggaattaa

SEQ ID NO: 17102 - DNA, 15 bp, Homo sapiens
agtatcttggaatta

SEQ ID NO: 17103 - DNA, 15 bp, Homo sapiens
aagtatcttggaatt

SEQ ID NO: 17104 - DNA, 15 bp, Homo sapiens
taagtatcttggaat

SEQ ID NO: 17105 - DNA, 15 bp, Homo sapiens
ttaagtatcttggaa

SEQ ID NO: 17106 - DNA, 15 bp, Homo sapiens
tttaagtatcttgga

SEQ ID NO: 17107 - DNA, 15 bp, Homo sapiens
atttaagtatcttgg

SEQ ID NO: 17108 - DNA, 15 bp, Homo sapiens
catttaagtatcttg

SEQ ID NO: 17109 - DNA, 15 bp, Homo sapiens
gcatttaagtatctt

SEQ ID NO: 17110 - DNA, 15 bp, Homo sapiens
ggcatttaagtatct

SEQ ID NO: 17111 - DNA, 15 bp, Homo sapiens
gggcatttaagtatc

SEQ ID NO: 17112 - DNA, 15 bp, Homo sapiens
tgggcatttaagtat

SEQ ID NO: 17113 - DNA, 15 bp, Homo sapiens
atgggcatttaagta

SEQ ID NO: 17114 - DNA, 15 bp, Homo sapiens
gatgggcatttaagt

SEQ ID NO: 17115 - DNA, 15 bp, Homo sapiens
agatgggcatttaag

SEQ ID NO: 17116 - DNA, 15 bp, Homo sapiens
tagatgggcatttaa

SEQ ID NO: 17117 - DNA, 15 bp, Homo sapiens
ctagatgggcattta

SEQ ID NO: 17118 - DNA, 15 bp, Homo sapiens
cctagatgggcattt

SEQ ID NO: 17119 - DNA, 15 bp, Homo sapiens
acctagatgggcatt

SEQ ID NO: 17120 - DNA, 15 bp, Homo sapiens
cacctagatgggcat

SEQ ID NO: 17121 - DNA, 15 bp, Homo sapiens
tcacctagatgggca

SEQ ID NO: 17122 - DNA, 15 bp, Homo sapiens
ttcacctagatgggc

SEQ ID NO: 17123 - DNA, 15 bp, Homo sapiens
attcacctagatggg

SEQ ID NO: 17124 - DNA, 15 bp, Homo sapiens
aattcacctagatgg

SEQ ID NO: 17125 - DNA, 15 bp, Homo sapiens
aaattcacctagatg

SEQ ID NO: 17126 - DNA, 15 bp, Homo sapiens
gaaattcacctagat

SEQ ID NO: 17127 - DNA, 15 bp, Homo sapiens
agaaattcacctaga

SEQ ID NO: 17128 - DNA, 15 bp, Homo sapiens
gagaaattcacctag

SEQ ID NO: 17129 - DNA, 15 bp, Homo sapiens
tgagaaattcaccta

SEQ ID NO: 17130 - DNA, 15 bp, Homo sapiens
ctgagaaattcacct

SEQ ID NO: 17131 - DNA, 15 bp, Homo sapiens
cctgagaaattcacc

SEQ ID NO: 17132 - DNA, 15 bp, Homo sapiens
acctgagaaattcac

SEQ ID NO: 17133 - DNA, 15 bp, Homo sapiens
tacctgagaaattca

SEQ ID NO: 17134 - DNA, 15 bp, Homo sapiens
ttacctgagaaattc

SEQ ID NO: 17135 - DNA, 15 bp, Homo sapiens
tttacctgagaaatt

SEQ ID NO: 17136 - DNA, 15 bp, Homo sapiens
gtttacctgagaaat

SEQ ID NO: 17137 - DNA, 15 bp, Homo sapiens
ggtttacctgagaaa

SEQ ID NO: 17138 - DNA, 15 bp, Homo sapiens
tggtttacctgagaa

SEQ ID NO: 17139 - DNA, 15 bp, Homo sapiens
atggtttacctgaga

SEQ ID NO: 17140 - DNA, 15 bp, Homo sapiens
tatggtttacctgag

SEQ ID NO: 17141 - DNA, 15 bp, Homo sapiens
atatggtttacctga

SEQ ID NO: 17142 - DNA, 15 bp, Homo sapiens
tatatggtttacctg

SEQ ID NO: 17143 - DNA, 15 bp, Homo sapiens
atatatggtttacct

SEQ ID NO: 17144 - DNA, 15 bp, Homo sapiens
aatatatggtttacc

SEQ ID NO: 17145 - DNA, 15 bp, Homo sapiens
gaatatatggtttac

SEQ ID NO: 17146 - DNA, 15 bp, Homo sapiens
tgaatatatggttta

SEQ ID NO: 17147 - DNA, 15 bp, Homo sapiens
ttgaatatatggttt

SEQ ID NO: 17148 - DNA, 15 bp, Homo sapiens
cttgaatatatggtt

SEQ ID NO: 17149 - DNA, 15 bp, Homo sapiens
gcttgaatatatggt

SEQ ID NO: 17150 - DNA, 15 bp, Homo sapiens
agcttgaatatatgg

SEQ ID NO: 17151 - DNA, 15 bp, Homo sapiens
cagcttgaatatatg

SEQ ID NO: 17152 - DNA, 15 bp, Homo sapiens
acagcttgaatatat

SEQ ID NO: 17153 - DNA, 15 bp, Homo sapiens
tacagcttgaatata

SEQ ID NO: 17154 - DNA, 15 bp, Homo sapiens
ctacagcttgaatat

SEQ ID NO: 17155 - DNA, 15 bp, Homo sapiens
actacagcttgaata

SEQ ID NO: 17156 - DNA, 15 bp, Homo sapiens
aactacagcttgaat

SEQ ID NO: 17157 - DNA, 15 bp, Homo sapiens
aaactacagcttgaa

SEQ ID NO: 17158 - DNA, 15 bp, Homo sapiens
taaactacagcttga

SEQ ID NO: 17159 - DNA, 15 bp, Homo sapiens
ttaaactacagcttg

SEQ ID NO: 17160 - DNA, 15 bp, Homo sapiens
cttaaactacagctt

SEQ ID NO: 17161 - DNA, 15 bp, Homo sapiens
gcttaaactacagct

SEQ ID NO: 17162 - DNA, 15 bp, Homo sapiens
agcttaaactacagc

SEQ ID NO: 17163 - DNA, 15 bp, Homo sapiens
cagcttaaactacag

SEQ ID NO: 17164 - DNA, 15 bp, Homo sapiens
ccagcttaaactaca

SEQ ID NO: 17165 - DNA, 15 bp, Homo sapiens
gccagcttaaactac

SEQ ID NO: 17166 - DNA, 15 bp, Homo sapiens
agccagcttaaacta

SEQ ID NO: 17167 - DNA, 15 bp, Homo sapiens
cagccagcttaaact

SEQ ID NO: 17168 - DNA, 15 bp, Homo sapiens
gcagccagcttaaac

SEQ ID NO: 17169 - DNA, 15 bp, Homo sapiens
ggcagccagcttaaa

SEQ ID NO: 17170 - DNA, 15 bp, Homo sapiens
gggcagccagcttaa

SEQ ID NO: 17171 - DNA, 15 bp, Homo sapiens
cgggcagccagctta

SEQ ID NO: 17172 - DNA, 15 bp, Homo sapiens
acgggcagccagctt

SEQ ID NO: 17173 - DNA, 15 bp, Homo sapiens
gacgggcagccagct

SEQ ID NO: 17174 - DNA, 15 bp, Homo sapiens
tgacgggcagccagc

SEQ ID NO: 17175 - DNA, 15 bp, Homo sapiens
atgacgggcagccag

SEQ ID NO: 17176 - DNA, 15 bp, Homo sapiens
tatgacgggcagcca

SEQ ID NO: 17177 - DNA, 15 bp, Homo sapiens
ctatgacgggcagcc

SEQ ID NO: 17178 - DNA, 15 bp, Homo sapiens
gctatgacgggcagc

SEQ ID NO: 17179 - DNA, 15 bp, Homo sapiens
tgctatgacgggcag

SEQ ID NO: 17180 - DNA, 15 bp, Homo sapiens
gtgctatgacgggca

SEQ ID NO: 17181 - DNA, 15 bp, Homo sapiens
agtgctatgacgggc

SEQ ID NO: 17182 - DNA, 15 bp, Homo sapiens
aagtgctatgacggg

SEQ ID NO: 17183 - DNA, 15 bp, Homo sapiens
aaagtgctatgacgg

SEQ ID NO: 17184 - DNA, 15 bp, Homo sapiens
caaagtgctatgacg

SEQ ID NO: 17185 - DNA, 15 bp, Homo sapiens
tcaaagtgctatgac

SEQ ID NO: 17186 - DNA, 15 bp, Homo sapiens
ttcaaagtgctatga

SEQ ID NO: 17187 - DNA, 15 bp, Homo sapiens
attcaaagtgctatg

SEQ ID NO: 17188 - DNA, 15 bp, Homo sapiens
tattcaaagtgctat

SEQ ID NO: 17189 - DNA, 15 bp, Homo sapiens
ctattcaaagtgcta

SEQ ID NO: 17190 - DNA, 15 bp, Homo sapiens
tctattcaaagtgct

SEQ ID NO: 17191 - DNA, 15 bp, Homo sapiens
gtctattcaaagtgc

SEQ ID NO: 17192 - DNA, 15 bp, Homo sapiens
agtctattcaaagtg

SEQ ID NO: 17193 - DNA, 15 bp, Homo sapiens
aagtctattcaaagt

SEQ ID NO: 17194 - DNA, 15 bp, Homo sapiens
aaagtctattcaaag

SEQ ID NO: 17195 - DNA, 15 bp, Homo sapiens
caaagtctattcaaa

SEQ ID NO: 17196 - DNA, 15 bp, Homo sapiens
acaaagtctattcaa

SEQ ID NO: 17197 - DNA, 15 bp, Homo sapiens
aacaaagtctattca

SEQ ID NO: 17198 - DNA, 15 bp, Homo sapiens
aaacaaagtctattc

SEQ ID NO: 17199 - DNA, 15 bp, Homo sapiens
aaaacaaagtctatt

SEQ ID NO: 17200 - DNA, 15 bp, Homo sapiens
aaaaacaaagtctat

SEQ ID NO: 17201 - DNA, 15 bp, Homo sapiens
caaaaacaaagtcta

SEQ ID NO: 17202 - DNA, 15 bp, Homo sapiens
acaaaaacaaagtct

SEQ ID NO: 17203 - DNA, 15 bp, Homo sapiens
aacaaaaacaaagtc

SEQ ID NO: 17204 - DNA, 15 bp, Homo sapiens
aaacaaaaacaaagt

SEQ ID NO: 17205 - DNA, 15 bp, Homo sapiens
aaaacaaaaacaaag

SEQ ID NO: 17206 - DNA, 15 bp, Homo sapiens
aaaaacaaaaacaaa

SEQ ID NO: 17207 - DNA, 15 bp, Homo sapiens
caaaaacaaaaacaa

SEQ ID NO: 17208 - DNA, 15 bp, Homo sapiens
acaaaaacaaaaaca

SEQ ID NO: 17209 - DNA, 15 bp, Homo sapiens
aacaaaaacaaaaac

SEQ ID NO: 17210 - DNA, 15 bp, Homo sapiens
aaacaaaaacaaaaa

SEQ ID NO: 17211 - DNA, 15 bp, Homo sapiens
aaaacaaaaacaaaa

SEQ ID NO: 17212 - DNA, 15 bp, Homo sapiens
aaaaaacaaaaacaa

SEQ ID NO: 17213 - DNA, 15 bp, Homo sapiens
caaaaaacaaaaaca

SEQ ID NO: 17214 - DNA, 15 bp, Homo sapiens
tcaaaaaacaaaaac

SEQ ID NO: 17215 - DNA, 15 bp, Homo sapiens
ctcaaaaaacaaaaa

SEQ ID NO: 17216 - DNA, 15 bp, Homo sapiens
tctcaaaaaacaaaa

SEQ ID NO: 17217 - DNA, 15 bp, Homo sapiens
gtctcaaaaaacaaa

SEQ ID NO: 17218 - DNA, 15 bp, Homo sapiens
tgtctcaaaaaacaa

SEQ ID NO: 17219 - DNA, 15 bp, Homo sapiens
ctgtctcaaaaaaca

SEQ ID NO: 17220 - DNA, 15 bp, Homo sapiens
tctgtctcaaaaaac

SEQ ID NO: 17221 - DNA, 15 bp, Homo sapiens
ctctgtctcaaaaaa

SEQ ID NO: 17222 - DNA, 15 bp, Homo sapiens
actctgtctcaaaaa

SEQ ID NO: 17223 - DNA, 15 bp, Homo sapiens
gacagagtgagactc

SEQ ID NO: 17224 - DNA, 15 bp, Homo sapiens
cgacagagtgagact

SEQ ID NO: 17225 - DNA, 15 bp, Homo sapiens
ccgacagagtgagac

SEQ ID NO: 17226 - DNA, 15 bp, Homo sapiens
gccgacagagtgaga

SEQ ID NO: 17227 - DNA, 15 bp, Homo sapiens
ggccgacagagtgag

SEQ ID NO: 17228 - DNA, 15 bp, Homo sapiens
tggccgacagagtga

SEQ ID NO: 17229 - DNA, 15 bp, Homo sapiens
ctggccgacagagtg

SEQ ID NO: 17230 - DNA, 15 bp, Homo sapiens
cctggccgacagagt

SEQ ID NO: 17231 - DNA, 15 bp, Homo sapiens
gcctggccgacagag

SEQ ID NO: 17232 - DNA, 15 bp, Homo sapiens
agcctggccgacaga

SEQ ID NO: 17233 - DNA, 15 bp, Homo sapiens
cagcctggccgacag

SEQ ID NO: 17234 - DNA, 15 bp, Homo sapiens
ccagcctggccgaca

SEQ ID NO: 17235 - DNA, 15 bp, Homo sapiens
tccagcctggccgac

SEQ ID NO: 17236 - DNA, 15 bp, Homo sapiens
ctccagcctggccga

SEQ ID NO: 17237 - DNA, 15 bp, Homo sapiens
actccagcctggccg

SEQ ID NO: 17238 - DNA, 15 bp, Homo sapiens
agtgccactgcactc

SEQ ID NO: 17239 - DNA, 15 bp, Homo sapiens
tagtgccactgcact

SEQ ID NO: 17240 - DNA, 15 bp, Homo sapiens
atagtgccactgcac

SEQ ID NO: 17241 - DNA, 15 bp, Homo sapiens
gatagtgccactgca

SEQ ID NO: 17242 - DNA, 15 bp, Homo sapiens
agatagtgccactgc

SEQ ID NO: 17243 - DNA, 15 bp, Homo sapiens
gagatagtgccactg

SEQ ID NO: 17244 - DNA, 15 bp, Homo sapiens
cgagatagtgccact

SEQ ID NO: 17245 - DNA, 15 bp, Homo sapiens
ccgagatagtgccac

SEQ ID NO: 17246 - DNA, 15 bp, Homo sapiens
gccgagatagtgcca

SEQ ID NO: 17247 - DNA, 15 bp, Homo sapiens
agccgagatagtgcc

SEQ ID NO: 17248 - DNA, 15 bp, Homo sapiens
gagccgagatagtgc

SEQ ID NO: 17249 - DNA, 15 bp, Homo sapiens
tgagccgagatagtg

SEQ ID NO: 17250 - DNA, 15 bp, Homo sapiens
gtgagccgagatagt

SEQ ID NO: 17251 - DNA, 15 bp, Homo sapiens
agtgagccgagatag

SEQ ID NO: 17252 - DNA, 15 bp, Homo sapiens
cagtgagccgagata

SEQ ID NO: 17253 - DNA, 15 bp, Homo sapiens
gcagtgagccgagat

SEQ ID NO: 17254 - DNA, 15 bp, Homo sapiens
tgcagtgagccgaga

SEQ ID NO: 17255 - DNA, 15 bp, Homo sapiens
ttgcagtgagccgag

SEQ ID NO: 17256 - DNA, 15 bp, Homo sapiens
gttgcagtgagccga

SEQ ID NO: 17257 - DNA, 15 bp, Homo sapiens
ggttgcagtgagccg

SEQ ID NO: 17258 - DNA, 15 bp, Homo sapiens
aggttgcagtgagcc

SEQ ID NO: 17259 - DNA, 15 bp, Homo sapiens
gaggttgcagtgagc

SEQ ID NO: 17260 - DNA, 15 bp, Homo sapiens
ggaggttgcagtgag

SEQ ID NO: 17261 - DNA, 15 bp, Homo sapiens
cggaggttgcagtga

SEQ ID NO: 17262 - DNA, 15 bp, Homo sapiens
gcggaggttgcagtg

SEQ ID NO: 17263 - DNA, 15 bp, Homo sapiens
ggcggaggttgcagt

SEQ ID NO: 17264 - DNA, 15 bp, Homo sapiens
aggcggaggttgcag

SEQ ID NO: 17265 - DNA, 15 bp, Homo sapiens
gaggcggaggttgca

SEQ ID NO: 17266 - DNA, 15 bp, Homo sapiens
ggaggcggaggttgc

SEQ ID NO: 17267 - DNA, 15 bp, Homo sapiens
gggaggcggaggttg

SEQ ID NO: 17268 - DNA, 15 bp, Homo sapiens
cgggaggcggaggtt

SEQ ID NO: 17269 - DNA, 15 bp, Homo sapiens
ccgggaggcggaggt

SEQ ID NO: 17270 - DNA, 15 bp, Homo sapiens
cccgggaggcggagg

SEQ ID NO: 17271 - DNA, 15 bp, Homo sapiens
ttgaacccgggaggc

SEQ ID NO: 17272 - DNA, 15 bp, Homo sapiens
cttgaacccgggagg

SEQ ID NO: 17273 - DNA, 15 bp, Homo sapiens
gcttgaacccgggag

SEQ ID NO: 17274 - DNA, 15 bp, Homo sapiens
cgcttgaacccggga

SEQ ID NO: 17275 - DNA, 15 bp, Homo sapiens
tcgcttgaacccggg

SEQ ID NO: 17276 - DNA, 15 bp, Homo sapiens
atcgcttgaacccgg

SEQ ID NO: 17277 - DNA, 15 bp, Homo sapiens
aatcgcttgaacccg

SEQ ID NO: 17278 - DNA, 15 bp, Homo sapiens
gaatcgcttgaaccc

SEQ ID NO: 17279 - DNA, 15 bp, Homo sapiens
agaatcgcttgaacc

SEQ ID NO: 17280 - DNA, 15 bp, Homo sapiens
gagaatcgcttgaac

SEQ ID NO: 17281 - DNA, 15 bp, Homo sapiens
ggagaatcgcttgaa

SEQ ID NO: 17282 - DNA, 15 bp, Homo sapiens
aggagaatcgcttga

SEQ ID NO: 17283 - DNA, 15 bp, Homo sapiens
caggagaatcgcttg

SEQ ID NO: 17284 - DNA, 15 bp, Homo sapiens
gcaggagaatcgctt

SEQ ID NO: 17285 - DNA, 15 bp, Homo sapiens
ggcaggagaatcgct

SEQ ID NO: 17286 - DNA, 15 bp, Homo sapiens
aggcaggagaatcgc

SEQ ID NO: 17287 - DNA, 15 bp, Homo sapiens
gaggcaggagaatcg

SEQ ID NO: 17288 - DNA, 15 bp, Homo sapiens
tgaggcaggagaatc

SEQ ID NO: 17289 - DNA, 15 bp, Homo sapiens
taggaggctgaggca

SEQ ID NO: 17290 - DNA, 15 bp, Homo sapiens
ttaggaggctgaggc

SEQ ID NO: 17291 - DNA, 15 bp, Homo sapiens
cttaggaggctgagg

SEQ ID NO: 17292 - DNA, 15 bp, Homo sapiens
acttaggaggctgag

SEQ ID NO: 17293 - DNA, 15 bp, Homo sapiens
tacttaggaggctga

SEQ ID NO: 17294 - DNA, 15 bp, Homo sapiens
ctacttaggaggctg

SEQ ID NO: 17295 - DNA, 15 bp, Homo sapiens
gctacttaggaggct

SEQ ID NO: 17296 - DNA, 15 bp, Homo sapiens
agctacttaggaggc

SEQ ID NO: 17297 - DNA, 15 bp, Homo sapiens
cagctacttaggagg

SEQ ID NO: 17298 - DNA, 15 bp, Homo sapiens
ccagctacttaggag

SEQ ID NO: 17299 - DNA, 15 bp, Homo sapiens
cccagctacttagga

SEQ ID NO: 17300 - DNA, 15 bp, Homo sapiens
tcccagctacttagg

SEQ ID NO: 17301 - DNA, 15 bp, Homo sapiens
atcccagctacttag

SEQ ID NO: 17302 - DNA, 15 bp, Homo sapiens
aatcccagctactta

SEQ ID NO: 17303 - DNA, 15 bp, Homo sapiens
taatcccagctactt

SEQ ID NO: 17304 - DNA, 15 bp, Homo sapiens
tcacctgtaatccca

SEQ ID NO: 17305 - DNA, 15 bp, Homo sapiens
ctcacctgtaatccc

SEQ ID NO: 17306 - DNA, 15 bp, Homo sapiens
gctcacctgtaatcc

SEQ ID NO: 17307 - DNA, 15 bp, Homo sapiens
cgctcacctgtaatc

SEQ ID NO: 17308 - DNA, 15 bp, Homo sapiens
gcgctcacctgtaat

SEQ ID NO: 17309 - DNA, 15 bp, Homo sapiens
ggcgctcacctgtaa

SEQ ID NO: 17310 - DNA, 15 bp, Homo sapiens
tggcgctcacctgta

SEQ ID NO: 17311 - DNA, 15 bp, Homo sapiens
gtggcgctcacctgt

SEQ ID NO: 17312 - DNA, 15 bp, Homo sapiens
ggtggcgctcacctg

SEQ ID NO: 17313 - DNA, 15 bp, Homo sapiens
gggtggcgctcacct

SEQ ID NO: 17314 - DNA, 15 bp, Homo sapiens
ggggtggcgctcacc

SEQ ID NO: 17315 - DNA, 15 bp, Homo sapiens
tggggtggcgctcac

SEQ ID NO: 17316 - DNA, 15 bp, Homo sapiens
gtggggtggcgctca

SEQ ID NO: 17317 - DNA, 15 bp, Homo sapiens
ggtggggtggcgctc

SEQ ID NO: 17318 - DNA, 15 bp, Homo sapiens
gggtggggtggcgct

SEQ ID NO: 17319 - DNA, 15 bp, Homo sapiens
cgggtggggtggcgc

SEQ ID NO: 17320 - DNA, 15 bp, Homo sapiens
ccgggtggggtggcg

SEQ ID NO: 17321 - DNA, 15 bp, Homo sapiens
gccgggtggggtggc

SEQ ID NO: 17322 - DNA, 15 bp, Homo sapiens
agccgggtggggtgg

SEQ ID NO: 17323 - DNA, 15 bp, Homo sapiens
tagccgggtggggtg

SEQ ID NO: 17324 - DNA, 15 bp, Homo sapiens
ttagccgggtggggt

SEQ ID NO: 17325 - DNA, 15 bp, Homo sapiens
attagccgggtgggg

SEQ ID NO: 17326 - DNA, 15 bp, Homo sapiens
aattagccgggtggg

SEQ ID NO: 17327 - DNA, 15 bp, Homo sapiens
aaattagccgggtgg

SEQ ID NO: 17328 - DNA, 15 bp, Homo sapiens
aaaattagccgggtg

SEQ ID NO: 17329 - DNA, 15 bp, Homo sapiens
aaaaattagccgggt

SEQ ID NO: 17330 - DNA, 15 bp, Homo sapiens
caaaaattagccggg

SEQ ID NO: 17331 - DNA, 15 bp, Homo sapiens
acaaaaattagccgg

SEQ ID NO: 17332 - DNA, 15 bp, Homo sapiens
tacaaaaattagccg

SEQ ID NO: 17333 - DNA, 15 bp, Homo sapiens
atctactaaaaatac

SEQ ID NO: 17334 - DNA, 15 bp, Homo sapiens
tatctactaaaaata

SEQ ID NO: 17335 - DNA, 15 bp, Homo sapiens
gtatctactaaaaat

SEQ ID NO: 17336 - DNA, 15 bp, Homo sapiens
cgtatctactaaaaa

SEQ ID NO: 17337 - DNA, 15 bp, Homo sapiens
ccgtatctactaaaa

SEQ ID NO: 17338 - DNA, 15 bp, Homo sapiens
cccgtatctactaaa

SEQ ID NO: 17339 - DNA, 15 bp, Homo sapiens
ccccgtatctactaa

SEQ ID NO: 17340 - DNA, 15 bp, Homo sapiens
accccgtatctacta

SEQ ID NO: 17341 - DNA, 15 bp, Homo sapiens
aaccccgtatctact

SEQ ID NO: 17342 - DNA, 15 bp, Homo sapiens
aaaccccgtatctac

SEQ ID NO: 17343 - DNA, 15 bp, Homo sapiens
gaaaccccgtatcta

SEQ ID NO: 17344 - DNA, 15 bp, Homo sapiens
tgaaaccccgtatct

SEQ ID NO: 17345 - DNA, 15 bp, Homo sapiens
gtgaaaccccgtatc

SEQ ID NO: 17346 - DNA, 15 bp, Homo sapiens
ggtgaaaccccgtat

SEQ ID NO: 17347 - DNA, 15 bp, Homo sapiens
tggtgaaaccccgta

SEQ ID NO: 17348 - DNA, 15 bp, Homo sapiens
caacatggtgaaacc

SEQ ID NO: 17349 - DNA, 15 bp, Homo sapiens
ccaacatggtgaaac

SEQ ID NO: 17350 - DNA, 15 bp, Homo sapiens
accaacatggtgaaa

SEQ ID NO: 17351 - DNA, 15 bp, Homo sapiens
gaccaacatggtgaa

SEQ ID NO: 17352 - DNA, 15 bp, Homo sapiens
tgaccaacatggtga

SEQ ID NO: 17353 - DNA, 15 bp, Homo sapiens
ctgaccaacatggtg

SEQ ID NO: 17354 - DNA, 15 bp, Homo sapiens
tctgaccaacatggt

SEQ ID NO: 17355 - DNA, 15 bp, Homo sapiens
gtctgaccaacatgg

SEQ ID NO: 17356 - DNA, 15 bp, Homo sapiens
agtctgaccaacatg

SEQ ID NO: 17357 - DNA, 15 bp, Homo sapiens
cagtctgaccaacat

SEQ ID NO: 17358 - DNA, 15 bp, Homo sapiens
ccagtctgaccaaca

SEQ ID NO: 17359 - DNA, 15 bp, Homo sapiens
accagtctgaccaac

SEQ ID NO: 17360 - DNA, 15 bp, Homo sapiens
gaccagtctgaccaa

SEQ ID NO: 17361 - DNA, 15 bp, Homo sapiens
agaccagtctgacca

SEQ ID NO: 17362 - DNA, 15 bp, Homo sapiens
gagaccagtctgacc

SEQ ID NO: 17363 - DNA, 15 bp, Homo sapiens
cgagaccagtctgac

SEQ ID NO: 17364 - DNA, 15 bp, Homo sapiens
tcgagaccagtctga

SEQ ID NO: 17365 - DNA, 15 bp, Homo sapiens
ttcgagaccagtctg

SEQ ID NO: 17366 - DNA, 15 bp, Homo sapiens
gttcgagaccagtct

SEQ ID NO: 17367 - DNA, 15 bp, Homo sapiens
agttcgagaccagtc

SEQ ID NO: 17368 - DNA, 15 bp, Homo sapiens
gagttcgagaccagt

SEQ ID NO: 17369 - DNA, 15 bp, Homo sapiens
ggagttcgagaccag

SEQ ID NO: 17370 - DNA, 15 bp, Homo sapiens
aggagttcgagacca

SEQ ID NO: 17371 - DNA, 15 bp, Homo sapiens
caggagttcgagacc

SEQ ID NO: 17372 - DNA, 15 bp, Homo sapiens
tcaggagttcgagac

SEQ ID NO: 17373 - DNA, 15 bp, Homo sapiens
gtcaggagttcgaga

SEQ ID NO: 17374 - DNA, 15 bp, Homo sapiens
ggtcaggagttcgag

SEQ ID NO: 17375 - DNA, 15 bp, Homo sapiens
aggtcaggagttcga

SEQ ID NO: 17376 - DNA, 15 bp, Homo sapiens
gaggtcaggagttcg

SEQ ID NO: 17377 - DNA, 15 bp, Homo sapiens
tgaggtcaggagttc

SEQ ID NO: 17378 - DNA, 15 bp, Homo sapiens
atgaggtcaggagtt

SEQ ID NO: 17379 - DNA, 15 bp, Homo sapiens
catgaggtcaggagt

SEQ ID NO: 17380 - DNA, 15 bp, Homo sapiens
tatcatgaggtcagg

SEQ ID NO: 17381 - DNA, 15 bp, Homo sapiens
gtatcatgaggtcag

SEQ ID NO: 17382 - DNA, 15 bp, Homo sapiens
cgtatcatgaggtca

SEQ ID NO: 17383 - DNA, 15 bp, Homo sapiens
gcgtatcatgaggtc

SEQ ID NO: 17384 - DNA, 15 bp, Homo sapiens
ggcgtatcatgaggt

SEQ ID NO: 17385 - DNA, 15 bp, Homo sapiens
aggcgtatcatgagg

SEQ ID NO: 17386 - DNA, 15 bp, Homo sapiens
taggcgtatcatgag

SEQ ID NO: 17387 - DNA, 15 bp, Homo sapiens
gtaggcgtatcatga

SEQ ID NO: 17388 - DNA, 15 bp, Homo sapiens
tgtaggcgtatcatg

SEQ ID NO: 17389 - DNA, 15 bp, Homo sapiens
atgtaggcgtatcat

SEQ ID NO: 17390 - DNA, 15 bp, Homo sapiens
aatgtaggcgtatca

SEQ ID NO: 17391 - DNA, 15 bp, Homo sapiens
caatgtaggcgtatc

SEQ ID NO: 17392 - DNA, 15 bp, Homo sapiens
ccaatgtaggcgtat

SEQ ID NO: 17393 - DNA, 15 bp, Homo sapiens
gccaatgtaggcgta

SEQ ID NO: 17394 - DNA, 15 bp, Homo sapiens
ggccaatgtaggcgt

SEQ ID NO: 17395 - DNA, 15 bp, Homo sapiens
aggccaatgtaggcg

SEQ ID NO: 17396 - DNA, 15 bp, Homo sapiens
gaggccaatgtaggc

SEQ ID NO: 17397 - DNA, 15 bp, Homo sapiens
ggaggccaatgtagg

SEQ ID NO: 17398 - DNA, 15 bp, Homo sapiens
gggaggccaatgtag

SEQ ID NO: 17399 - DNA, 15 bp, Homo sapiens
tgggaggccaatgta

SEQ ID NO: 17400 - DNA, 15 bp, Homo sapiens
ttgggaggccaatgt

SEQ ID NO: 17401 - DNA, 15 bp, Homo sapiens
tttgggaggccaatg

SEQ ID NO: 17402 - DNA, 15 bp, Homo sapiens
ctttgggaggccaat

SEQ ID NO: 17403 - DNA, 15 bp, Homo sapiens
actttgggaggccaa

SEQ ID NO: 17404 - DNA, 15 bp, Homo sapiens
cactttgggaggcca

SEQ ID NO: 17405 - DNA, 15 bp, Homo sapiens
cgcctgtaatcccag

SEQ ID NO: 17406 - DNA, 15 bp, Homo sapiens
acgcctgtaatccca

SEQ ID NO: 17407 - DNA, 15 bp, Homo sapiens
cacgcctgtaatccc

SEQ ID NO: 17408 - DNA, 15 bp, Homo sapiens
tcacgcctgtaatcc

SEQ ID NO: 17409 - DNA, 15 bp, Homo sapiens
ctcacgcctgtaatc

SEQ ID NO: 17410 - DNA, 15 bp, Homo sapiens
gctcacgcctgtaat

SEQ ID NO: 17411 - DNA, 15 bp, Homo sapiens
ggctcacgcctgtaa

SEQ ID NO: 17412 - DNA, 15 bp, Homo sapiens
tggctcacgcctgta

SEQ ID NO: 17413 - DNA, 15 bp, Homo sapiens
gtggctcacgcctgt

SEQ ID NO: 17414 - DNA, 15 bp, Homo sapiens
ggtggctcacgcctg

SEQ ID NO: 17415 - DNA, 15 bp, Homo sapiens
tggtggctcacgcct

SEQ ID NO: 17416 - DNA, 15 bp, Homo sapiens
gtggtggctcacgcc

SEQ ID NO: 17417 - DNA, 15 bp, Homo sapiens
tgtggtggctcacgc

SEQ ID NO: 17418 - DNA, 15 bp, Homo sapiens
atgtggtggctcacg

SEQ ID NO: 17419 - DNA, 15 bp, Homo sapiens
gatgtggtggctcac

SEQ ID NO: 17420 - DNA, 15 bp, Homo sapiens
ggatgtggtggctca

SEQ ID NO: 17421 - DNA, 15 bp, Homo sapiens
cggatgtggtggctc

SEQ ID NO: 17422 - DNA, 15 bp, Homo sapiens
ccggatgtggtggct

SEQ ID NO: 17423 - DNA, 15 bp, Homo sapiens
gccggatgtggtggc

SEQ ID NO: 17424 - DNA, 15 bp, Homo sapiens
ggccggatgtggtgg

SEQ ID NO: 17425 - DNA, 15 bp, Homo sapiens
gggccggatgtggtg

SEQ ID NO: 17426 - DNA, 15 bp, Homo sapiens
ggggccggatgtggt

SEQ ID NO: 17427 - DNA, 15 bp, Homo sapiens
aggggccggatgtgg

SEQ ID NO: 17428 - DNA, 15 bp, Homo sapiens
caggggccggatgtg

SEQ ID NO: 17429 - DNA, 15 bp, Homo sapiens
tcaggggccggatgt

SEQ ID NO: 17430 - DNA, 15 bp, Homo sapiens
ttcaggggccggatg

SEQ ID NO: 17431 - DNA, 15 bp, Homo sapiens
attcaggggccggat

SEQ ID NO: 17432 - DNA, 15 bp, Homo sapiens
tattcaggggccgga

SEQ ID NO: 17433 - DNA, 15 bp, Homo sapiens
ctattcaggggccgg

SEQ ID NO: 17434 - DNA, 15 bp, Homo sapiens
tctattcaggggccg

SEQ ID NO: 17435 - DNA, 15 bp, Homo sapiens
gtctattcaggggcc

SEQ ID NO: 17436 - DNA, 15 bp, Homo sapiens
agtctattcaggggc

SEQ ID NO: 17437 - DNA, 15 bp, Homo sapiens
aagtctattcagggg

SEQ ID NO: 17438 - DNA, 15 bp, Homo sapiens
aaagtctattcaggg

SEQ ID NO: 17439 - DNA, 15 bp, Homo sapiens
aaaagtctattcagg

SEQ ID NO: 17440 - DNA, 15 bp, Homo sapiens
taaaagtctattcag

SEQ ID NO: 17441 - DNA, 15 bp, Homo sapiens
gtaaaagtctattca

SEQ ID NO: 17442 - DNA, 15 bp, Homo sapiens
agtaaaagtctattc

SEQ ID NO: 17443 - DNA, 15 bp, Homo sapiens
gagtaaaagtctatt

SEQ ID NO: 17444 - DNA, 15 bp, Homo sapiens
tgagtaaaagtctat

SEQ ID NO: 17445 - DNA, 15 bp, Homo sapiens
ttgagtaaaagtcta

SEQ ID NO: 17446 - DNA, 15 bp, Homo sapiens
cttgagtaaaagtct

SEQ ID NO: 17447 - DNA, 15 bp, Homo sapiens
ccttgagtaaaagtc

SEQ ID NO: 17448 - DNA, 15 bp, Homo sapiens
accttgagtaaaagt

SEQ ID NO: 17449 - DNA, 15 bp, Homo sapiens
aaccttgagtaaaag

SEQ ID NO: 17450 - DNA, 15 bp, Homo sapiens
gaaccttgagtaaaa

SEQ ID NO: 17451 - DNA, 15 bp, Homo sapiens
tgaaccttgagtaaa

SEQ ID NO: 17452 - DNA, 15 bp, Homo sapiens
gtgaaccttgagtaa

SEQ ID NO: 17453 - DNA, 15 bp, Homo sapiens
ggtgaaccttgagta

SEQ ID NO: 17454 - DNA, 15 bp, Homo sapiens
tggtgaaccttgagt

SEQ ID NO: 17455 - DNA, 15 bp, Homo sapiens
atggtgaaccttgag

SEQ ID NO: 17456 - DNA, 15 bp, Homo sapiens
catggtgaaccttga

SEQ ID NO: 17457 - DNA, 15 bp, Homo sapiens
tcatggtgaaccttg

SEQ ID NO: 17458 - DNA, 15 bp, Homo sapiens
gtcatggtgaacctt

SEQ ID NO: 17459 - DNA, 15 bp, Homo sapiens
agtcatggtgaacct

SEQ ID NO: 17460 - DNA, 15 bp, Homo sapiens
aagtcatggtgaacc

SEQ ID NO: 17461 - DNA, 15 bp, Homo sapiens
aaagtcatggtgaac

SEQ ID NO: 17462 - DNA, 15 bp, Homo sapiens
gaaagtcatggtgaa

SEQ ID NO: 17463 - DNA, 15 bp, Homo sapiens
tgaaagtcatggtga

SEQ ID NO: 17464 - DNA, 15 bp, Homo sapiens
gtgaaagtcatggtg

SEQ ID NO: 17465 - DNA, 15 bp, Homo sapiens
tgtgaaagtcatggt

SEQ ID NO: 17466 - DNA, 15 bp, Homo sapiens
atgtgaaagtcatgg

SEQ ID NO: 17467 - DNA, 15 bp, Homo sapiens
catgtgaaagtcatg

SEQ ID NO: 17468 - DNA, 15 bp, Homo sapiens
acatgtgaaagtcat

SEQ ID NO: 17469 - DNA, 15 bp, Homo sapiens
aacatgtgaaagtca

SEQ ID NO: 17470 - DNA, 15 bp, Homo sapiens
aaacatgtgaaagtc

SEQ ID NO: 17471 - DNA, 15 bp, Homo sapiens
aaaacatgtgaaagt

SEQ ID NO: 17472 - DNA, 15 bp, Homo sapiens
caaaacatgtgaaag

SEQ ID NO: 17473 - DNA, 15 bp, Homo sapiens
acaaaacatgtgaaa

SEQ ID NO: 17474 - DNA, 15 bp, Homo sapiens
tacaaaacatgtgaa

SEQ ID NO: 17475 - DNA, 15 bp, Homo sapiens
atacaaaacatgtga

SEQ ID NO: 17476 - DNA, 15 bp, Homo sapiens
aatacaaaacatgtg

SEQ ID NO: 17477 - DNA, 15 bp, Homo sapiens
caatacaaaacatgt

SEQ ID NO: 17478 - DNA, 15 bp, Homo sapiens
ccaatacaaaacatg

SEQ ID NO: 17479 - DNA, 15 bp, Homo sapiens
tccaatacaaaacat

SEQ ID NO: 17480 - DNA, 15 bp, Homo sapiens
ctccaatacaaaaca

SEQ ID NO: 17481 - DNA, 15 bp, Homo sapiens
actccaatacaaaac

SEQ ID NO: 17482 - DNA, 15 bp, Homo sapiens
tactccaatacaaaa

SEQ ID NO: 17483 - DNA, 15 bp, Homo sapiens
ttactccaatacaaa

SEQ ID NO: 17484 - DNA, 15 bp, Homo sapiens
tttactccaatacaa

SEQ ID NO: 17485 - DNA, 15 bp, Homo sapiens
ttttactccaataca

SEQ ID NO: 17486 - DNA, 15 bp, Homo sapiens
attttactccaatac

SEQ ID NO: 17487 - DNA, 15 bp, Homo sapiens
cattttactccaata

SEQ ID NO: 17488 - DNA, 15 bp, Homo sapiens
acattttactccaat

SEQ ID NO: 17489 - DNA, 15 bp, Homo sapiens
cacattttactccaa

SEQ ID NO: 17490 - DNA, 15 bp, Homo sapiens
gcacattttactcca

SEQ ID NO: 17491 - DNA, 15 bp, Homo sapiens
ggcacattttactcc

SEQ ID NO: 17492 - DNA, 15 bp, Homo sapiens
tggcacattttactc

SEQ ID NO: 17493 - DNA, 15 bp, Homo sapiens
ctggcacattttact

SEQ ID NO: 17494 - DNA, 15 bp, Homo sapiens
actggcacattttac

SEQ ID NO: 17495 - DNA, 15 bp, Homo sapiens
cactggcacatttta

SEQ ID NO: 17496 - DNA, 15 bp, Homo sapiens
ccactggcacatttt

SEQ ID NO: 17497 - DNA, 15 bp, Homo sapiens
accactggcacattt

SEQ ID NO: 17498 - DNA, 15 bp, Homo sapiens
caccactggcacatt

SEQ ID NO: 17499 - DNA, 15 bp, Homo sapiens
ccaccactggcacat

SEQ ID NO: 17500 - DNA, 15 bp, Homo sapiens
cccaccactggcaca

SEQ ID NO: 17501 - DNA, 15 bp, Homo sapiens
gcccaccactggcac

SEQ ID NO: 17502 - DNA, 15 bp, Homo sapiens
agcccaccactggca

SEQ ID NO: 17503 - DNA, 15 bp, Homo sapiens
tagcccaccactggc

SEQ ID NO: 17504 - DNA, 15 bp, Homo sapiens
ttagcccaccactgg

SEQ ID NO: 17505 - DNA, 15 bp, Homo sapiens
tttagcccaccactg

SEQ ID NO: 17506 - DNA, 15 bp, Homo sapiens
ctttagcccaccact

SEQ ID NO: 17507 - DNA, 15 bp, Homo sapiens
tctttagcccaccac

SEQ ID NO: 17508 - DNA, 15 bp, Homo sapiens
ttctttagcccacca

SEQ ID NO: 17509 - DNA, 15 bp, Homo sapiens
tttctttagcccacc

SEQ ID NO: 17510 - DNA, 15 bp, Homo sapiens
ttttctttagcccac

SEQ ID NO: 17511 - DNA, 15 bp, Homo sapiens
attttctttagccca

SEQ ID NO: 17512 - DNA, 15 bp, Homo sapiens
aattttctttagccc

SEQ ID NO: 17513 - DNA, 15 bp, Homo sapiens
taattttctttagcc

SEQ ID NO: 17514 - DNA, 15 bp, Homo sapiens
ttaattttctttagc

SEQ ID NO: 17515 - DNA, 15 bp, Homo sapiens
gttaattttctttag

SEQ ID NO: 17516 - DNA, 15 bp, Homo sapiens
agttaattttcttta

SEQ ID NO: 17517 - DNA, 15 bp, Homo sapiens
gagttaattttcttt

SEQ ID NO: 17518 - DNA, 15 bp, Homo sapiens
tgagttaattttctt

SEQ ID NO: 17519 - DNA, 15 bp, Homo sapiens
atgagttaattttct

SEQ ID NO: 17520 - DNA, 15 bp, Homo sapiens
aatgagttaattttc

SEQ ID NO: 17521 - DNA, 15 bp, Homo sapiens
aaatgagttaatttt

SEQ ID NO: 17522 - DNA, 15 bp, Homo sapiens
gaaatgagttaattt

SEQ ID NO: 17523 - DNA, 15 bp, Homo sapiens
tgaaatgagttaatt

SEQ ID NO: 17524 - DNA, 15 bp, Homo sapiens
ttgaaatgagttaat

SEQ ID NO: 17525 - DNA, 15 bp, Homo sapiens
tttgaaatgagttaa

SEQ ID NO: 17526 - DNA, 15 bp, Homo sapiens
atttgaaatgagtta

SEQ ID NO: 17527 - DNA, 15 bp, Homo sapiens
aatttgaaatgagtt

SEQ ID NO: 17528 - DNA, 15 bp, Homo sapiens
gaatttgaaatgagt

SEQ ID NO: 17529 - DNA, 15 bp, Homo sapiens
tgaatttgaaatgag

SEQ ID NO: 17530 - DNA, 15 bp, Homo sapiens
ttgaatttgaaatga

SEQ ID NO: 17531 - DNA, 15 bp, Homo sapiens
tttgaatttgaaatg

SEQ ID NO: 17532 - DNA, 15 bp, Homo sapiens
gtttgaatttgaaat

SEQ ID NO: 17533 - DNA, 15 bp, Homo sapiens
ggtttgaatttgaaa

SEQ ID NO: 17534 - DNA, 15 bp, Homo sapiens
aggtttgaatttgaa

SEQ ID NO: 17535 - DNA, 15 bp, Homo sapiens
caggtttgaatttga

SEQ ID NO: 17536 - DNA, 15 bp, Homo sapiens
ccaggtttgaatttg

SEQ ID NO: 17537 - DNA, 15 bp, Homo sapiens
accaggtttgaattt

SEQ ID NO: 17538 - DNA, 15 bp, Homo sapiens
aaccaggtttgaatt

SEQ ID NO: 17539 - DNA, 15 bp, Homo sapiens
aaaccaggtttgaat

SEQ ID NO: 17540 - DNA, 15 bp, Homo sapiens
aaaaccaggtttgaa

SEQ ID NO: 17541 - DNA, 15 bp, Homo sapiens
gaaaaccaggtttga

SEQ ID NO: 17542 - DNA, 15 bp, Homo sapiens
agaaaaccaggtttg

SEQ ID NO: 17543 - DNA, 15 bp, Homo sapiens
aagaaaaccaggttt

SEQ ID NO: 17544 - DNA, 15 bp, Homo sapiens
taagaaaaccaggtt

SEQ ID NO: 17545 - DNA, 15 bp, Homo sapiens
ttaagaaaaccaggt

SEQ ID NO: 17546 - DNA, 15 bp, Homo sapiens
attaagaaaaccagg

SEQ ID NO: 17547 - DNA, 15 bp, Homo sapiens
aattaagaaaaccag

SEQ ID NO: 17548 - DNA, 15 bp, Homo sapiens
aaattaagaaaacca

SEQ ID NO: 17549 - DNA, 15 bp, Homo sapiens
aaaattaagaaaacc

SEQ ID NO: 17550 - DNA, 15 bp, Homo sapiens
aaaaattaagaaaac

SEQ ID NO: 17551 - DNA, 15 bp, Homo sapiens
aaaaaattaagaaaa

SEQ ID NO: 17552 - DNA, 15 bp, Homo sapiens
aaaaaaattaagaaa

SEQ ID NO: 17553 - DNA, 15 bp, Homo sapiens
taaaaaaattaagaa

SEQ ID NO: 17554 - DNA, 15 bp, Homo sapiens
ttaaaaaaattaaga

SEQ ID NO: 17555 - DNA, 15 bp, Homo sapiens
tttaaaaaaattaag

SEQ ID NO: 17556 - DNA, 15 bp, Homo sapiens
ttttaaaaaaattaa

SEQ ID NO: 17557 - DNA, 15 bp, Homo sapiens
attttaaaaaaatta

SEQ ID NO: 17558 - DNA, 15 bp, Homo sapiens
gattttaaaaaaatt

SEQ ID NO: 17559 - DNA, 15 bp, Homo sapiens
tgattttaaaaaaat

SEQ ID NO: 17560 - DNA, 15 bp, Homo sapiens
gtgattttaaaaaaa

SEQ ID NO: 17561 - DNA, 15 bp, Homo sapiens
tgtgattttaaaaaa

SEQ ID NO: 17562 - DNA, 15 bp, Homo sapiens
ctgtgattttaaaaa

SEQ ID NO: 17563 - DNA, 15 bp, Homo sapiens
actgtgattttaaaa

SEQ ID NO: 17564 - DNA, 15 bp, Homo sapiens
aactgtgattttaaa

SEQ ID NO: 17565 - DNA, 15 bp, Homo sapiens
aaactgtgattttaa

SEQ ID NO: 17566 - DNA, 15 bp, Homo sapiens
gaaactgtgatttta

SEQ ID NO: 17567 - DNA, 15 bp, Homo sapiens
agaaactgtgatttt

SEQ ID NO: 17568 - DNA, 15 bp, Homo sapiens
cagaaactgtgattt

SEQ ID NO: 17569 - DNA, 15 bp, Homo sapiens
tcagaaactgtgatt

SEQ ID NO: 17570 - DNA, 15 bp, Homo sapiens
ttcagaaactgtgat

SEQ ID NO: 17571 - DNA, 15 bp, Homo sapiens
tttcagaaactgtga

SEQ ID NO: 17572 - DNA, 15 bp, Homo sapiens
gtttcagaaactgtg

SEQ ID NO: 17573 - DNA, 15 bp, Homo sapiens
agtttcagaaactgt

SEQ ID NO: 17574 - DNA, 15 bp, Homo sapiens
cagtttcagaaactg

SEQ ID NO: 17575 - DNA, 15 bp, Homo sapiens
acagtttcagaaact

SEQ ID NO: 17576 - DNA, 15 bp, Homo sapiens
cacagtttcagaaac

SEQ ID NO: 17577 - DNA, 15 bp, Homo sapiens
ccacagtttcagaaa

SEQ ID NO: 17578 - DNA, 15 bp, Homo sapiens
cccacagtttcagaa

SEQ ID NO: 17579 - DNA, 15 bp, Homo sapiens
gcccacagtttcaga

SEQ ID NO: 17580 - DNA, 15 bp, Homo sapiens
agcccacagtttcag

SEQ ID NO: 17581 - DNA, 15 bp, Homo sapiens
gagcccacagtttca

SEQ ID NO: 17582 - DNA, 15 bp, Homo sapiens
ggagcccacagtttc

SEQ ID NO: 17583 - DNA, 15 bp, Homo sapiens
aggagcccacagttt

SEQ ID NO: 17584 - DNA, 15 bp, Homo sapiens
gaggagcccacagtt

SEQ ID NO: 17585 - DNA, 15 bp, Homo sapiens
tgaggagcccacagt

SEQ ID NO: 17586 - DNA, 15 bp, Homo sapiens
atgaggagcccacag

SEQ ID NO: 17587 - DNA, 15 bp, Homo sapiens
catgaggagcccaca

SEQ ID NO: 17588 - DNA, 15 bp, Homo sapiens
ccatgaggagcccac

SEQ ID NO: 17589 - DNA, 15 bp, Homo sapiens
gccatgaggagccca

SEQ ID NO: 17590 - DNA, 15 bp, Homo sapiens
tgccatgaggagccc

SEQ ID NO: 17591 - DNA, 15 bp, Homo sapiens
gtgccatgaggagcc

SEQ ID NO: 17592 - DNA, 15 bp, Homo sapiens
tgtgccatgaggagc

SEQ ID NO: 17593 - DNA, 15 bp, Homo sapiens
atgtgccatgaggag

SEQ ID NO: 17594 - DNA, 15 bp, Homo sapiens
aatgtgccatgagga

SEQ ID NO: 17595 - DNA, 15 bp, Homo sapiens
caatgtgccatgagg

SEQ ID NO: 17596 - DNA, 15 bp, Homo sapiens
tcaatgtgccatgag

SEQ ID NO: 17597 - DNA, 15 bp, Homo sapiens
ctcaatgtgccatga

SEQ ID NO: 17598 - DNA, 15 bp, Homo sapiens
tctcaatgtgccatg

SEQ ID NO: 17599 - DNA, 15 bp, Homo sapiens
ctctcaatgtgccat

SEQ ID NO: 17600 - DNA, 15 bp, Homo sapiens
cctctcaatgtgcca

SEQ ID NO: 17601 - DNA, 15 bp, Homo sapiens
tcctctcaatgtgcc

SEQ ID NO: 17602 - DNA, 15 bp, Homo sapiens
ctcctctcaatgtgc

SEQ ID NO: 17603 - DNA, 15 bp, Homo sapiens
cctcctctcaatgtg

SEQ ID NO: 17604 - DNA, 15 bp, Homo sapiens
tcctcctctcaatgt

SEQ ID NO: 17605 - DNA, 15 bp, Homo sapiens
ctcctcctctcaatg

SEQ ID NO: 17606 - DNA, 15 bp, Homo sapiens
cctcctcctctcaat

SEQ ID NO: 17607 - DNA, 15 bp, Homo sapiens
acctcctcctctcaa

SEQ ID NO: 17608 - DNA, 15 bp, Homo sapiens
cacctcctcctctca

SEQ ID NO: 17609 - DNA, 15 bp, Homo sapiens
tcacctcctcctctc

SEQ ID NO: 17610 - DNA, 15 bp, Homo sapiens
ttcacctcctcctct

SEQ ID NO: 17611 - DNA, 15 bp, Homo sapiens
tttcacctcctcctc

SEQ ID NO: 17612 - DNA, 15 bp, Homo sapiens
gtttcacctcctcct

SEQ ID NO: 17613 - DNA, 15 bp, Homo sapiens
agtttcacctcctcc

SEQ ID NO: 17614 - DNA, 15 bp, Homo sapiens
gagtttcacctcctc

SEQ ID NO: 17615 - DNA, 15 bp, Homo sapiens
agagtttcacctcct

SEQ ID NO: 17616 - DNA, 15 bp, Homo sapiens
gagagtttcacctcc

SEQ ID NO: 17617 - DNA, 15 bp, Homo sapiens
ggagagtttcacctc

SEQ ID NO: 17618 - DNA, 15 bp, Homo sapiens
tggagagtttcacct

SEQ ID NO: 17619 - DNA, 15 bp, Homo sapiens
ttggagagtttcacc

SEQ ID NO: 17620 - DNA, 15 bp, Homo sapiens
cttggagagtttcac

SEQ ID NO: 17621 - DNA, 15 bp, Homo sapiens
acttggagagtttca

SEQ ID NO: 17622 - DNA, 15 bp, Homo sapiens
gacttggagagtttc

SEQ ID NO: 17623 - DNA, 15 bp, Homo sapiens
agacttggagagttt

SEQ ID NO: 17624 - DNA, 15 bp, Homo sapiens
cagacttggagagtt

SEQ ID NO: 17625 - DNA, 15 bp, Homo sapiens
tcagacttggagagt

SEQ ID NO: 17626 - DNA, 15 bp, Homo sapiens
ttcagacttggagag

SEQ ID NO: 17627 - DNA, 15 bp, Homo sapiens
cttcagacttggaga

SEQ ID NO: 17628 - DNA, 15 bp, Homo sapiens
gcttcagacttggag

SEQ ID NO: 17629 - DNA, 15 bp, Homo sapiens
agcttcagacttgga

SEQ ID NO: 17630 - DNA, 15 bp, Homo sapiens
gagcttcagacttgg

SEQ ID NO: 17631 - DNA, 15 bp, Homo sapiens
ggagcttcagacttg

SEQ ID NO: 17632 - DNA, 15 bp, Homo sapiens
aggagcttcagactt

SEQ ID NO: 17633 - DNA, 15 bp, Homo sapiens
caggagcttcagact

SEQ ID NO: 17634 - DNA, 15 bp, Homo sapiens
acaggagcttcagac

SEQ ID NO: 17635 - DNA, 15 bp, Homo sapiens
aacaggagcttcaga

SEQ ID NO: 17636 - DNA, 15 bp, Homo sapiens
taacaggagcttcag

SEQ ID NO: 17637 - DNA, 15 bp, Homo sapiens
ataacaggagcttca

SEQ ID NO: 17638 - DNA, 15 bp, Homo sapiens
tataacaggagcttc

SEQ ID NO: 17639 - DNA, 15 bp, Homo sapiens
ttataacaggagctt

SEQ ID NO: 17640 - DNA, 15 bp, Homo sapiens
tttataacaggagct

SEQ ID NO: 17641 - DNA, 15 bp, Homo sapiens
atttataacaggagc

SEQ ID NO: 17642 - DNA, 15 bp, Homo sapiens
gatttataacaggag

SEQ ID NO: 17643 - DNA, 15 bp, Homo sapiens
agatttataacagga

SEQ ID NO: 17644 - DNA, 15 bp, Homo sapiens
aagatttataacagg

SEQ ID NO: 17645 - DNA, 15 bp, Homo sapiens
gaagatttataacag

SEQ ID NO: 17646 - DNA, 15 bp, Homo sapiens
ggaagatttataaca

SEQ ID NO: 17647 - DNA, 15 bp, Homo sapiens
aggaagatttataac

SEQ ID NO: 17648 - DNA, 15 bp, Homo sapiens
gaggaagatttataa

SEQ ID NO: 17649 - DNA, 15 bp, Homo sapiens
agaggaagatttata

SEQ ID NO: 17650 - DNA, 15 bp, Homo sapiens
cagaggaagatttat

SEQ ID NO: 17651 - DNA, 15 bp, Homo sapiens
ccagaggaagattta

SEQ ID NO: 17652 - DNA, 15 bp, Homo sapiens
gccagaggaagattt

SEQ ID NO: 17653 - DNA, 15 bp, Homo sapiens
tgccagaggaagatt

SEQ ID NO: 17654 - DNA, 15 bp, Homo sapiens
ttgccagaggaagat

SEQ ID NO: 17655 - DNA, 15 bp, Homo sapiens
tttgccagaggaaga

SEQ ID NO: 17656 - DNA, 15 bp, Homo sapiens
ctttgccagaggaag

SEQ ID NO: 17657 - DNA, 15 bp, Homo sapiens
tctttgccagaggaa

SEQ ID NO: 17658 - DNA, 15 bp, Homo sapiens
atctttgccagagga

SEQ ID NO: 17659 - DNA, 15 bp, Homo sapiens
aatctttgccagagg

SEQ ID NO: 17660 - DNA, 15 bp, Homo sapiens
caatctttgccagag

SEQ ID NO: 17661 - DNA, 15 bp, Homo sapiens
acaatctttgccaga

SEQ ID NO: 17662 - DNA, 15 bp, Homo sapiens
cacaatctttgccag

SEQ ID NO: 17663 - DNA, 15 bp, Homo sapiens
acacaatctttgcca

SEQ ID NO: 17664 - DNA, 15 bp, Homo sapiens
cacacaatctttgcc

SEQ ID NO: 17665 - DNA, 15 bp, Homo sapiens
tcacacaatctttgc

SEQ ID NO: 17666 - DNA, 15 bp, Homo sapiens
atcacacaatctttg

SEQ ID NO: 17667 - DNA, 15 bp, Homo sapiens
gatcacacaatcttt

SEQ ID NO: 17668 - DNA, 15 bp, Homo sapiens
tgatcacacaatctt

SEQ ID NO: 17669 - DNA, 15 bp, Homo sapiens
ctgatcacacaatct

SEQ ID NO: 17670 - DNA, 15 bp, Homo sapiens
cctgatcacacaatc

SEQ ID NO: 17671 - DNA, 15 bp, Homo sapiens
gcctgatcacacaat

SEQ ID NO: 17672 - DNA, 15 bp, Homo sapiens
agcctgatcacacaa

SEQ ID NO: 17673 - DNA, 15 bp, Homo sapiens
aagcctgatcacaca

SEQ ID NO: 17674 - DNA, 15 bp, Homo sapiens
caagcctgatcacac

SEQ ID NO: 17675 - DNA, 15 bp, Homo sapiens
tcaagcctgatcaca

SEQ ID NO: 17676 - DNA, 15 bp, Homo sapiens
ctcaagcctgatcac

SEQ ID NO: 17677 - DNA, 15 bp, Homo sapiens
actcaagcctgatca

SEQ ID NO: 17678 - DNA, 15 bp, Homo sapiens
tactcaagcctgatc

SEQ ID NO: 17679 - DNA, 15 bp, Homo sapiens
gtactcaagcctgat

SEQ ID NO: 17680 - DNA, 15 bp, Homo sapiens
ggtactcaagcctga

SEQ ID NO: 17681 - DNA, 15 bp, Homo sapiens
aggtactcaagcctg

SEQ ID NO: 17682 - DNA, 15 bp, Homo sapiens
gaggtactcaagcct

SEQ ID NO: 17683 - DNA, 15 bp, Homo sapiens
tgaggtactcaagcc

SEQ ID NO: 17684 - DNA, 15 bp, Homo sapiens
gtgaggtactcaagc

SEQ ID NO: 17685 - DNA, 15 bp, Homo sapiens
tgtgaggtactcaag

SEQ ID NO: 17686 - DNA, 15 bp, Homo sapiens
ctgtgaggtactcaa

SEQ ID NO: 17687 - DNA, 15 bp, Homo sapiens
actgtgaggtactca

SEQ ID NO: 17688 - DNA, 15 bp, Homo sapiens
gactgtgaggtactc

SEQ ID NO: 17689 - DNA, 15 bp, Homo sapiens
ggactgtgaggtact

SEQ ID NO: 17690 - DNA, 15 bp, Homo sapiens
aggactgtgaggtac

SEQ ID NO: 17691 - DNA, 15 bp, Homo sapiens
taggactgtgaggta

SEQ ID NO: 17692 - DNA, 15 bp, Homo sapiens
ctaggactgtgaggt

SEQ ID NO: 17693 - DNA, 15 bp, Homo sapiens
tctaggactgtgagg

SEQ ID NO: 17694 - DNA, 15 bp, Homo sapiens
ctctaggactgtgag

SEQ ID NO: 17695 - DNA, 15 bp, Homo sapiens
gctctaggactgtga

SEQ ID NO: 17696 - DNA, 15 bp, Homo sapiens
tgctctaggactgtg

SEQ ID NO: 17697 - DNA, 15 bp, Homo sapiens
ctgctctaggactgt

SEQ ID NO: 17698 - DNA, 15 bp, Homo sapiens
cctgctctaggactg

SEQ ID NO: 17699 - DNA, 15 bp, Homo sapiens
acctgctctaggact

SEQ ID NO: 17700 - DNA, 15 bp, Homo sapiens
gacctgctctaggac

SEQ ID NO: 17701 - DNA, 15 bp, Homo sapiens
tgacctgctctagga

SEQ ID NO: 17702 - DNA, 15 bp, Homo sapiens
ttgacctgctctagg

SEQ ID NO: 17703 - DNA, 15 bp, Homo sapiens
tttgacctgctctag

SEQ ID NO: 17704 - DNA, 15 bp, Homo sapiens
ctttgacctgctcta

SEQ ID NO: 17705 - DNA, 15 bp, Homo sapiens
cctttgacctgctct

SEQ ID NO: 17706 - DNA, 15 bp, Homo sapiens
gcctttgacctgctc

SEQ ID NO: 17707 - DNA, 15 bp, Homo sapiens
agcctttgacctgct

SEQ ID NO: 17708 - DNA, 15 bp, Homo sapiens
cagcctttgacctgc

SEQ ID NO: 17709 - DNA, 15 bp, Homo sapiens
ccagcctttgacctg

SEQ ID NO: 17710 - DNA, 15 bp, Homo sapiens
gccagcctttgacct

SEQ ID NO: 17711 - DNA, 15 bp, Homo sapiens
agccagcctttgacc

SEQ ID NO: 17712 - DNA, 15 bp, Homo sapiens
tagccagcctttgac

SEQ ID NO: 17713 - DNA, 15 bp, Homo sapiens
ctagccagcctttga

SEQ ID NO: 17714 - DNA, 15 bp, Homo sapiens
cctagccagcctttg

SEQ ID NO: 17715 - DNA, 15 bp, Homo sapiens
tcctagccagccttt

SEQ ID NO: 17716 - DNA, 15 bp, Homo sapiens
ttcctagccagcctt

SEQ ID NO: 17717 - DNA, 15 bp, Homo sapiens
tttcctagccagcct

SEQ ID NO: 17718 - DNA, 15 bp, Homo sapiens
gtttcctagccagcc

SEQ ID NO: 17719 - DNA, 15 bp, Homo sapiens
agtttcctagccagc

SEQ ID NO: 17720 - DNA, 15 bp, Homo sapiens
gagtttcctagccag

SEQ ID NO: 17721 - DNA, 15 bp, Homo sapiens
tgagtttcctagcca

SEQ ID NO: 17722 - DNA, 15 bp, Homo sapiens
atgagtttcctagcc

SEQ ID NO: 17723 - DNA, 15 bp, Homo sapiens
aatgagtttcctagc

SEQ ID NO: 17724 - DNA, 15 bp, Homo sapiens
aaatgagtttcctag

SEQ ID NO: 17725 - DNA, 15 bp, Homo sapiens
caaatgagtttccta

SEQ ID NO: 17726 - DNA, 15 bp, Homo sapiens
gcaaatgagtttcct

SEQ ID NO: 17727 - DNA, 15 bp, Homo sapiens
agcaaatgagtttcc

SEQ ID NO: 17728 - DNA, 15 bp, Homo sapiens
gagcaaatgagtttc

SEQ ID NO: 17729 - DNA, 15 bp, Homo sapiens
ggagcaaatgagttt

SEQ ID NO: 17730 - DNA, 15 bp, Homo sapiens
gggagcaaatgagtt

SEQ ID NO: 17731 - DNA, 15 bp, Homo sapiens
agggagcaaatgagt

SEQ ID NO: 17732 - DNA, 15 bp, Homo sapiens
cagggagcaaatgag

SEQ ID NO: 17733 - DNA, 15 bp, Homo sapiens
acagggagcaaatga

SEQ ID NO: 17734 - DNA, 15 bp, Homo sapiens
tacagggagcaaatg

SEQ ID NO: 17735 - DNA, 15 bp, Homo sapiens
gtacagggagcaaat

SEQ ID NO: 17736 - DNA, 15 bp, Homo sapiens
ggtacagggagcaaa

SEQ ID NO: 17737 - DNA, 15 bp, Homo sapiens
aggtacagggagcaa

SEQ ID NO: 17738 - DNA, 15 bp, Homo sapiens
gaggtacagggagca

SEQ ID NO: 17739 - DNA, 15 bp, Homo sapiens
agaggtacagggagc

SEQ ID NO: 17740 - DNA, 15 bp, Homo sapiens
gagaggtacagggag

SEQ ID NO: 17741 - DNA, 15 bp, Homo sapiens
ggagaggtacaggga

SEQ ID NO: 17742 - DNA, 15 bp, Homo sapiens
gggagaggtacaggg

SEQ ID NO: 17743 - DNA, 15 bp, Homo sapiens
ggggagaggtacagg

SEQ ID NO: 17744 - DNA, 15 bp, Homo sapiens
aggggagaggtacag

SEQ ID NO: 17745 - DNA, 15 bp, Homo sapiens
gaggggagaggtaca

SEQ ID NO: 17746 - DNA, 15 bp, Homo sapiens
ggaggggagaggtac

SEQ ID NO: 17747 - DNA, 15 bp, Homo sapiens
aggaggggagaggta

SEQ ID NO: 17748 - DNA, 15 bp, Homo sapiens
aaggaggggagaggt

SEQ ID NO: 17749 - DNA, 15 bp, Homo sapiens
aaaggaggggagagg

SEQ ID NO: 17750 - DNA, 15 bp, Homo sapiens
gaaaggaggggagag

SEQ ID NO: 17751 - DNA, 15 bp, Homo sapiens
ggaaaggaggggaga

SEQ ID NO: 17752 - DNA, 15 bp, Homo sapiens
aggaaaggaggggag

SEQ ID NO: 17753 - DNA, 15 bp, Homo sapiens
caggaaaggagggga

SEQ ID NO: 17754 - DNA, 15 bp, Homo sapiens
gcaggaaaggagggg

SEQ ID NO: 17755 - DNA, 15 bp, Homo sapiens
ggcaggaaaggaggg

SEQ ID NO: 17756 - DNA, 15 bp, Homo sapiens
aggcaggaaaggagg

SEQ ID NO: 17757 - DNA, 15 bp, Homo sapiens
aaggcaggaaaggag

SEQ ID NO: 17758 - DNA, 15 bp, Homo sapiens
aaaggcaggaaagga

SEQ ID NO: 17759 - DNA, 15 bp, Homo sapiens
caaaggcaggaaagg

SEQ ID NO: 17760 - DNA, 15 bp, Homo sapiens
gcaaaggcaggaaag

SEQ ID NO: 17761 - DNA, 15 bp, Homo sapiens
agcaaaggcaggaaa

SEQ ID NO: 17762 - DNA, 15 bp, Homo sapiens
gagcaaaggcaggaa

SEQ ID NO: 17763 - DNA, 15 bp, Homo sapiens
cgagcaaaggcagga

SEQ ID NO: 17764 - DNA, 15 bp, Homo sapiens
acgagcaaaggcagg

SEQ ID NO: 17765 - DNA, 15 bp, Homo sapiens
aacgagcaaaggcag

SEQ ID NO: 17766 - DNA, 15 bp, Homo sapiens
gaacgagcaaaggca

SEQ ID NO: 17767 - DNA, 15 bp, Homo sapiens
agaacgagcaaaggc

SEQ ID NO: 17768 - DNA, 15 bp, Homo sapiens
gagaacgagcaaagg

SEQ ID NO: 17769 - DNA, 15 bp, Homo sapiens
tgagaacgagcaaag

SEQ ID NO: 17770 - DNA, 15 bp, Homo sapiens
ctgagaacgagcaaa

SEQ ID NO: 17771 - DNA, 15 bp, Homo sapiens
gctgagaacgagcaa

SEQ ID NO: 17772 - DNA, 15 bp, Homo sapiens
agctgagaacgagca

SEQ ID NO: 17773 - DNA, 15 bp, Homo sapiens
gagctgagaacgagc

SEQ ID NO: 17774 - DNA, 15 bp, Homo sapiens
ggagctgagaacgag

SEQ ID NO: 17775 - DNA, 15 bp, Homo sapiens
gggagctgagaacga

SEQ ID NO: 17776 - DNA, 15 bp, Homo sapiens
cgggagctgagaacg

SEQ ID NO: 17777 - DNA, 15 bp, Homo sapiens
ccgggagctgagaac

SEQ ID NO: 17778 - DNA, 15 bp, Homo sapiens
accgggagctgagaa

SEQ ID NO: 17779 - DNA, 15 bp, Homo sapiens
caccgggagctgaga

SEQ ID NO: 17780 - DNA, 15 bp, Homo sapiens
ccaccgggagctgag

SEQ ID NO: 17781 - DNA, 15 bp, Homo sapiens
accaccgggagctga

SEQ ID NO: 17782 - DNA, 15 bp, Homo sapiens
taccaccgggagctg

SEQ ID NO: 17783 - DNA, 15 bp, Homo sapiens
ctaccaccgggagct

SEQ ID NO: 17784 - DNA, 15 bp, Homo sapiens
tctaccaccgggagc

SEQ ID NO: 17785 - DNA, 15 bp, Homo sapiens
ctctaccaccgggag

SEQ ID NO: 17786 - DNA, 15 bp, Homo sapiens
actctaccaccggga

SEQ ID NO: 17787 - DNA, 15 bp, Homo sapiens
tactctaccaccggg

SEQ ID NO: 17788 - DNA, 15 bp, Homo sapiens
ttactctaccaccgg

SEQ ID NO: 17789 - DNA, 15 bp, Homo sapiens
gttactctaccaccg

SEQ ID NO: 17790 - DNA, 15 bp, Homo sapiens
tgttactctaccacc

SEQ ID NO: 17791 - DNA, 15 bp, Homo sapiens
gtgttactctaccac

SEQ ID NO: 17792 - DNA, 15 bp, Homo sapiens
agtgttactctacca

SEQ ID NO: 17793 - DNA, 15 bp, Homo sapiens
cagtgttactctacc

SEQ ID NO: 17794 - DNA, 15 bp, Homo sapiens
ccagtgttactctac

SEQ ID NO: 17795 - DNA, 15 bp, Homo sapiens
gccagtgttactcta

SEQ ID NO: 17796 - DNA, 15 bp, Homo sapiens
agccagtgttactct

SEQ ID NO: 17797 - DNA, 15 bp, Homo sapiens
aagccagtgttactc

SEQ ID NO: 17798 - DNA, 15 bp, Homo sapiens
gaagccagtgttact

SEQ ID NO: 17799 - DNA, 15 bp, Homo sapiens
agaagccagtgttac

SEQ ID NO: 17800 - DNA, 15 bp, Homo sapiens
cagaagccagtgtta

SEQ ID NO: 17801 - DNA, 15 bp, Homo sapiens
tcagaagccagtgtt

SEQ ID NO: 17802 - DNA, 15 bp, Homo sapiens
atcagaagccagtgt

SEQ ID NO: 17803 - DNA, 15 bp, Homo sapiens
aatcagaagccagtg

SEQ ID NO: 17804 - DNA, 15 bp, Homo sapiens
caatcagaagccagt

SEQ ID NO: 17805 - DNA, 15 bp, Homo sapiens
ccaatcagaagccag

SEQ ID NO: 17806 - DNA, 15 bp, Homo sapiens
accaatcagaagcca

SEQ ID NO: 17807 - DNA, 15 bp, Homo sapiens
caccaatcagaagcc

SEQ ID NO: 17808 - DNA, 15 bp, Homo sapiens
gcaccaatcagaagc

SEQ ID NO: 17809 - DNA, 15 bp, Homo sapiens
tgcaccaatcagaag

SEQ ID NO: 17810 - DNA, 15 bp, Homo sapiens
ctgcaccaatcagaa

SEQ ID NO: 17811 - DNA, 15 bp, Homo sapiens
cctgcaccaatcaga

SEQ ID NO: 17812 - DNA, 15 bp, Homo sapiens
ccctgcaccaatcag

SEQ ID NO: 17813 - DNA, 15 bp, Homo sapiens
accctgcaccaatca

SEQ ID NO: 17814 - DNA, 15 bp, Homo sapiens
caccctgcaccaatc

SEQ ID NO: 17815 - DNA, 15 bp, Homo sapiens
acaccctgcaccaat

SEQ ID NO: 17816 - DNA, 15 bp, Homo sapiens
aacaccctgcaccaa

SEQ ID NO: 17817 - DNA, 15 bp, Homo sapiens
gaacaccctgcacca

SEQ ID NO: 17818 - DNA, 15 bp, Homo sapiens
tgaacaccctgcacc

SEQ ID NO: 17819 - DNA, 15 bp, Homo sapiens
ttgaacaccctgcac

SEQ ID NO: 17820 - DNA, 15 bp, Homo sapiens
gttgaacaccctgca

SEQ ID NO: 17821 - DNA, 15 bp, Homo sapiens
ggttgaacaccctgc

SEQ ID NO: 17822 - DNA, 15 bp, Homo sapiens
tggttgaacaccctg

SEQ ID NO: 17823 - DNA, 15 bp, Homo sapiens
ctggttgaacaccct

SEQ ID NO: 17824 - DNA, 15 bp, Homo sapiens
tctggttgaacaccc

SEQ ID NO: 17825 - DNA, 15 bp, Homo sapiens
ctctggttgaacacc

SEQ ID NO: 17826 - DNA, 15 bp, Homo sapiens
tctctggttgaacac

SEQ ID NO: 17827 - DNA, 15 bp, Homo sapiens
ttctctggttgaaca

SEQ ID NO: 17828 - DNA, 15 bp, Homo sapiens
cttctctggttgaac

SEQ ID NO: 17829 - DNA, 15 bp, Homo sapiens
tcttctctggttgaa

SEQ ID NO: 17830 - DNA, 15 bp, Homo sapiens
ttcttctctggttga

SEQ ID NO: 17831 - DNA, 15 bp, Homo sapiens
tttcttctctggttg

SEQ ID NO: 17832 - DNA, 15 bp, Homo sapiens
ctttcttctctggtt

SEQ ID NO: 17833 - DNA, 15 bp, Homo sapiens
tctttcttctctggt

SEQ ID NO: 17834 - DNA, 15 bp, Homo sapiens
ctctttcttctctgg

SEQ ID NO: 17835 - DNA, 15 bp, Homo sapiens
gctctttcttctctg

SEQ ID NO: 17836 - DNA, 15 bp, Homo sapiens
ggctctttcttctct

SEQ ID NO: 17837 - DNA, 15 bp, Homo sapiens
gggctctttcttctc

SEQ ID NO: 17838 - DNA, 15 bp, Homo sapiens
agggctctttcttct

SEQ ID NO: 17839 - DNA, 15 bp, Homo sapiens
cagggctctttcttc

SEQ ID NO: 17840 - DNA, 15 bp, Homo sapiens
ccagggctctttctt

SEQ ID NO: 17841 - DNA, 15 bp, Homo sapiens
tccagggctctttct

SEQ ID NO: 17842 - DNA, 15 bp, Homo sapiens
ttccagggctctttc

SEQ ID NO: 17843 - DNA, 15 bp, Homo sapiens
tttccagggctcttt

SEQ ID NO: 17844 - DNA, 15 bp, Homo sapiens
ttttccagggctctt

SEQ ID NO: 17845 - DNA, 15 bp, Homo sapiens
cttttccagggctct

SEQ ID NO: 17846 - DNA, 15 bp, Homo sapiens
tcttttccagggctc

SEQ ID NO: 17847 - DNA, 15 bp, Homo sapiens
gtcttttccagggct

SEQ ID NO: 17848 - DNA, 15 bp, Homo sapiens
ggtcttttccagggc

SEQ ID NO: 17849 - DNA, 15 bp, Homo sapiens
cggtcttttccaggg

SEQ ID NO: 17850 - DNA, 15 bp, Homo sapiens
tcggtcttttccagg

SEQ ID NO: 17851 - DNA, 15 bp, Homo sapiens
ctcggtcttttccag

SEQ ID NO: 17852 - DNA, 15 bp, Homo sapiens
gctcggtcttttcca

SEQ ID NO: 17853 - DNA, 15 bp, Homo sapiens
ggctcggtcttttcc

SEQ ID NO: 17854 - DNA, 15 bp, Homo sapiens
gggctcggtcttttc

SEQ ID NO: 17855 - DNA, 15 bp, Homo sapiens
ggggctcggtctttt

SEQ ID NO: 17856 - DNA, 15 bp, Homo sapiens
aggggctcggtcttt

SEQ ID NO: 17857 - DNA, 15 bp, Homo sapiens
taggggctcggtctt

SEQ ID NO: 17858 - DNA, 15 bp, Homo sapiens
ttaggggctcggtct

SEQ ID NO: 17859 - DNA, 15 bp, Homo sapiens
gttaggggctcggtc

SEQ ID NO: 17860 - DNA, 15 bp, Homo sapiens
tgttaggggctcggt

SEQ ID NO: 17861 - DNA, 15 bp, Homo sapiens
ctgttaggggctcgg

SEQ ID NO: 17862 - DNA, 15 bp, Homo sapiens
tctgttaggggctcg

SEQ ID NO: 17863 - DNA, 15 bp, Homo sapiens
ctctgttaggggctc

SEQ ID NO: 17864 - DNA, 15 bp, Homo sapiens
cctctgttaggggct

SEQ ID NO: 17865 - DNA, 15 bp, Homo sapiens
tcctctgttaggggc

SEQ ID NO: 17866 - DNA, 15 bp, Homo sapiens
ttcctctgttagggg

SEQ ID NO: 17867 - DNA, 15 bp, Homo sapiens
tttcctctgttaggg

SEQ ID NO: 17868 - DNA, 15 bp, Homo sapiens
gtttcctctgttagg

SEQ ID NO: 17869 - DNA, 15 bp, Homo sapiens
cgtttcctctgttag

SEQ ID NO: 17870 - DNA, 15 bp, Homo sapiens
ccgtttcctctgtta

SEQ ID NO: 17871 - DNA, 15 bp, Homo sapiens
tccgtttcctctgtt

SEQ ID NO: 17872 - DNA, 15 bp, Homo sapiens
ctccgtttcctctgt

SEQ ID NO: 17873 - DNA, 15 bp, Homo sapiens
cctccgtttcctctg

SEQ ID NO: 17874 - DNA, 15 bp, Homo sapiens
tcctccgtttcctct

SEQ ID NO: 17875 - DNA, 15 bp, Homo sapiens
atcctccgtttcctc

SEQ ID NO: 17876 - DNA, 15 bp, Homo sapiens
gatcctccgtttcct

SEQ ID NO: 17877 - DNA, 15 bp, Homo sapiens
ggatcctccgtttcc

SEQ ID NO: 17878 - DNA, 15 bp, Homo sapiens
tggatcctccgtttc

SEQ ID NO: 17879 - DNA, 15 bp, Homo sapiens
ctggatcctccgttt

SEQ ID NO: 17880 - DNA, 15 bp, Homo sapiens
tctggatcctccgtt

SEQ ID NO: 17881 - DNA, 15 bp, Homo sapiens
ctctggatcctccgt

SEQ ID NO: 17882 - DNA, 15 bp, Homo sapiens
gctctggatcctccg

SEQ ID NO: 17883 - DNA, 15 bp, Homo sapiens
tgctctggatcctcc

SEQ ID NO: 17884 - DNA, 15 bp, Homo sapiens
gtgctctggatcctc

SEQ ID NO: 17885 - DNA, 15 bp, Homo sapiens
ggtgctctggatcct

SEQ ID NO: 17886 - DNA, 15 bp, Homo sapiens
gggtgctctggatcc

SEQ ID NO: 17887 - DNA, 15 bp, Homo sapiens
tgggtgctctggatc

SEQ ID NO: 17888 - DNA, 15 bp, Homo sapiens
ctgggtgctctggat

SEQ ID NO: 17889 - DNA, 15 bp, Homo sapiens
tctgggtgctctgga

SEQ ID NO: 17890 - DNA, 15 bp, Homo sapiens
ttctgggtgctctgg

SEQ ID NO: 17891 - DNA, 15 bp, Homo sapiens
cttctgggtgctctg

SEQ ID NO: 17892 - DNA, 15 bp, Homo sapiens
ccttctgggtgctct

SEQ ID NO: 17893 - DNA, 15 bp, Homo sapiens
tccttctgggtgctc

SEQ ID NO: 17894 - DNA, 15 bp, Homo sapiens
ttccttctgggtgct

SEQ ID NO: 17895 - DNA, 15 bp, Homo sapiens
attccttctgggtgc

SEQ ID NO: 17896 - DNA, 15 bp, Homo sapiens
tattccttctgggtg

SEQ ID NO: 17897 - DNA, 15 bp, Homo sapiens
gtattccttctgggt

SEQ ID NO: 17898 - DNA, 15 bp, Homo sapiens
tgtattccttctggg

SEQ ID NO: 17899 - DNA, 15 bp, Homo sapiens
gtgtattccttctgg

SEQ ID NO: 17900 - DNA, 15 bp, Homo sapiens
cgtgtattccttctg

SEQ ID NO: 17901 - DNA, 15 bp, Homo sapiens
ccgtgtattccttct

SEQ ID NO: 17902 - DNA, 15 bp, Homo sapiens
accgtgtattccttc

SEQ ID NO: 17903 - DNA, 15 bp, Homo sapiens
taccgtgtattcctt

SEQ ID NO: 17904 - DNA, 15 bp, Homo sapiens
ttaccgtgtattcct

SEQ ID NO: 17905 - DNA, 15 bp, Homo sapiens
tttaccgtgtattcc

SEQ ID NO: 17906 - DNA, 15 bp, Homo sapiens
ttttaccgtgtattc

SEQ ID NO: 17907 - DNA, 15 bp, Homo sapiens
gttttaccgtgtatt

SEQ ID NO: 17908 - DNA, 15 bp, Homo sapiens
ggttttaccgtgtat

SEQ ID NO: 17909 - DNA, 15 bp, Homo sapiens
gggttttaccgtgta

SEQ ID NO: 17910 - DNA, 15 bp, Homo sapiens
ggggttttaccgtgt

SEQ ID NO: 17911 - DNA, 15 bp, Homo sapiens
cggggttttaccgtg

SEQ ID NO: 17912 - DNA, 15 bp, Homo sapiens
tcggggttttaccgt

SEQ ID NO: 17913 - DNA, 15 bp, Homo sapiens
atcggggttttaccg

SEQ ID NO: 17914 - DNA, 15 bp, Homo sapiens
tatcggggttttacc

SEQ ID NO: 17915 - DNA, 15 bp, Homo sapiens
ttatcggggttttac

SEQ ID NO: 17916 - DNA, 15 bp, Homo sapiens
tttatcggggtttta

SEQ ID NO: 17917 - DNA, 15 bp, Homo sapiens
ctttatcggggtttt

SEQ ID NO: 17918 - DNA, 15 bp, Homo sapiens
tctttatcggggttt

SEQ ID NO: 17919 - DNA, 15 bp, Homo sapiens
ttctttatcggggtt

SEQ ID NO: 17920 - DNA, 15 bp, Homo sapiens
attctttatcggggt

SEQ ID NO: 17921 - DNA, 15 bp, Homo sapiens
tattctttatcgggg

SEQ ID NO: 17922 - DNA, 15 bp, Homo sapiens
gtattctttatcggg

SEQ ID NO: 17923 - DNA, 15 bp, Homo sapiens
tgtattctttatcgg

SEQ ID NO: 17924 - DNA, 15 bp, Homo sapiens
gtgtattctttatcg

SEQ ID NO: 17925 - DNA, 15 bp, Homo sapiens
tgtgtattctttatc

SEQ ID NO: 17926 - DNA, 15 bp, Homo sapiens
ctgtgtattctttat

SEQ ID NO: 17927 - DNA, 15 bp, Homo sapiens
gctgtgtattcttta

SEQ ID NO: 17928 - DNA, 15 bp, Homo sapiens
tgctgtgtattcttt

SEQ ID NO: 17929 - DNA, 15 bp, Homo sapiens
ctgctgtgtattctt

SEQ ID NO: 17930 - DNA, 15 bp, Homo sapiens
tctgctgtgtattct

SEQ ID NO: 17931 - DNA, 15 bp, Homo sapiens
ctctgctgtgtattc

SEQ ID NO: 17932 - DNA, 15 bp, Homo sapiens
cctctgctgtgtatt

SEQ ID NO: 17933 - DNA, 15 bp, Homo sapiens
gcctctgctgtgtat

SEQ ID NO: 17934 - DNA, 15 bp, Homo sapiens
cgcctctgctgtgta

SEQ ID NO: 17935 - DNA, 15 bp, Homo sapiens
tcgcctctgctgtgt

SEQ ID NO: 17936 - DNA, 15 bp, Homo sapiens
ctcgcctctgctgtg

SEQ ID NO: 17937 - DNA, 15 bp, Homo sapiens
cctcgcctctgctgt

SEQ ID NO: 17938 - DNA, 15 bp, Homo sapiens
tcctcgcctctgctg

SEQ ID NO: 17939 - DNA, 15 bp, Homo sapiens
ttcctcgcctctgct

SEQ ID NO: 17940 - DNA, 15 bp, Homo sapiens
tttcctcgcctctgc

SEQ ID NO: 17941 - DNA, 15 bp, Homo sapiens
ttttcctcgcctctg

SEQ ID NO: 17942 - DNA, 15 bp, Homo sapiens
cttttcctcgcctct

SEQ ID NO: 17943 - DNA, 15 bp, Homo sapiens
ccttttcctcgcctc

SEQ ID NO: 17944 - DNA, 15 bp, Homo sapiens
gccttttcctcgcct

SEQ ID NO: 17945 - DNA, 15 bp, Homo sapiens
agccttttcctcgcc

SEQ ID NO: 17946 - DNA, 15 bp, Homo sapiens
gagccttttcctcgc

SEQ ID NO: 17947 - DNA, 15 bp, Homo sapiens
agagccttttcctcg

SEQ ID NO: 17948 - DNA, 15 bp, Homo sapiens
tagagccttttcctc

SEQ ID NO: 17949 - DNA, 15 bp, Homo sapiens
ttagagccttttcct

SEQ ID NO: 17950 - DNA, 15 bp, Homo sapiens
cttagagccttttcc

SEQ ID NO: 17951 - DNA, 15 bp, Homo sapiens
gcttagagccttttc

SEQ ID NO: 17952 - DNA, 15 bp, Homo sapiens
tgcttagagcctttt

SEQ ID NO: 17953 - DNA, 15 bp, Homo sapiens
gtgcttagagccttt

SEQ ID NO: 17954 - DNA, 15 bp, Homo sapiens
agtgcttagagcctt

SEQ ID NO: 17955 - DNA, 15 bp, Homo sapiens
cagtgcttagagcct

SEQ ID NO: 17956 - DNA, 15 bp, Homo sapiens
gcagtgcttagagcc

SEQ ID NO: 17957 - DNA, 15 bp, Homo sapiens
tgcagtgcttagagc

SEQ ID NO: 17958 - DNA, 15 bp, Homo sapiens
ctgcagtgcttagag

SEQ ID NO: 17959 - DNA, 15 bp, Homo sapiens
tctgcagtgcttaga

SEQ ID NO: 17960 - DNA, 15 bp, Homo sapiens
ctctgcagtgcttag

SEQ ID NO: 17961 - DNA, 15 bp, Homo sapiens
cctctgcagtgctta

SEQ ID NO: 17962 - DNA, 15 bp, Homo sapiens
ccctctgcagtgctt

SEQ ID NO: 17963 - DNA, 15 bp, Homo sapiens
gccctctgcagtgct

SEQ ID NO: 17964 - DNA, 15 bp, Homo sapiens
ggccctctgcagtgc

SEQ ID NO: 17965 - DNA, 15 bp, Homo sapiens
tggccctctgcagtg

SEQ ID NO: 17966 - DNA, 15 bp, Homo sapiens
ctggccctctgcagt

SEQ ID NO: 17967 - DNA, 15 bp, Homo sapiens
tctggccctctgcag

SEQ ID NO: 17968 - DNA, 15 bp, Homo sapiens
ctctggccctctgca

SEQ ID NO: 17969 - DNA, 15 bp, Homo sapiens
gctctggccctctgc

SEQ ID NO: 17970 - DNA, 15 bp, Homo sapiens
tgctctggccctctg

SEQ ID NO: 17971 - DNA, 15 bp, Homo sapiens
ttgctctggccctct

SEQ ID NO: 17972 - DNA, 15 bp, Homo sapiens
tttgctctggccctc

SEQ ID NO: 17973 - DNA, 15 bp, Homo sapiens
ttttgctctggccct

SEQ ID NO: 17974 - DNA, 15 bp, Homo sapiens
gttttgctctggccc

SEQ ID NO: 17975 - DNA, 15 bp, Homo sapiens
tgttttgctctggcc

SEQ ID NO: 17976 - DNA, 15 bp, Homo sapiens
atgttttgctctggc

SEQ ID NO: 17977 - DNA, 15 bp, Homo sapiens
gatgttttgctctgg

SEQ ID NO: 17978 - DNA, 15 bp, Homo sapiens
agatgttttgctctg

SEQ ID NO: 17979 - DNA, 15 bp, Homo sapiens
gagatgttttgctct

SEQ ID NO: 17980 - DNA, 15 bp, Homo sapiens
tgagatgttttgctc

SEQ ID NO: 17981 - DNA, 15 bp, Homo sapiens
atgagatgttttgct

SEQ ID NO: 17982 - DNA, 15 bp, Homo sapiens
catgagatgttttgc

SEQ ID NO: 17983 - DNA, 15 bp, Homo sapiens
ccatgagatgttttg

SEQ ID NO: 17984 - DNA, 15 bp, Homo sapiens
gccatgagatgtttt

SEQ ID NO: 17985 - DNA, 15 bp, Homo sapiens
tgccatgagatgttt

SEQ ID NO: 17986 - DNA, 15 bp, Homo sapiens
ttgccatgagatgtt

SEQ ID NO: 17987 - DNA, 15 bp, Homo sapiens
cttgccatgagatgt

SEQ ID NO: 17988 - DNA, 15 bp, Homo sapiens
ccttgccatgagatg

SEQ ID NO: 17989 - DNA, 15 bp, Homo sapiens
cccttgccatgagat

SEQ ID NO: 17990 - DNA, 15 bp, Homo sapiens
acccttgccatgaga

SEQ ID NO: 17991 - DNA, 15 bp, Homo sapiens
cacccttgccatgag

SEQ ID NO: 17992 - DNA, 15 bp, Homo sapiens
ccacccttgccatga

SEQ ID NO: 17993 - DNA, 15 bp, Homo sapiens
tccacccttgccatg

SEQ ID NO: 17994 - DNA, 15 bp, Homo sapiens
ttccacccttgccat

SEQ ID NO: 17995 - DNA, 15 bp, Homo sapiens
tttccacccttgcca

SEQ ID NO: 17996 - DNA, 15 bp, Homo sapiens
ctttccacccttgcc

SEQ ID NO: 17997 - DNA, 15 bp, Homo sapiens
tctttccacccttgc

SEQ ID NO: 17998 - DNA, 15 bp, Homo sapiens
ttctttccacccttg

SEQ ID NO: 17999 - DNA, 15 bp, Homo sapiens
cttctttccaccctt

SEQ ID NO: 18000 - DNA, 15 bp, Homo sapiens
gcttctttccaccct

SEQ ID NO: 18001 - DNA, 15 bp, Homo sapiens
ggcttctttccaccc

SEQ ID NO: 18002 - DNA, 15 bp, Homo sapiens
aggcttctttccacc

SEQ ID NO: 18003 - DNA, 15 bp, Homo sapiens
taggcttctttccac

SEQ ID NO: 18004 - DNA, 15 bp, Homo sapiens
ctaggcttctttcca

SEQ ID NO: 18005 - DNA, 15 bp, Homo sapiens
cctaggcttctttcc

SEQ ID NO: 18006 - DNA, 15 bp, Homo sapiens
tcctaggcttctttc

SEQ ID NO: 18007 - DNA, 15 bp, Homo sapiens
ttcctaggcttcttt

SEQ ID NO: 18008 - DNA, 15 bp, Homo sapiens
tttcctaggcttctt

SEQ ID NO: 18009 - DNA, 15 bp, Homo sapiens
gtttcctaggcttct

SEQ ID NO: 18010 - DNA, 15 bp, Homo sapiens
agtttcctaggcttc

SEQ ID NO: 18011 - DNA, 15 bp, Homo sapiens
cagtttcctaggctt

SEQ ID NO: 18012 - DNA, 15 bp, Homo sapiens
tcagtttcctaggct

SEQ ID NO: 18013 - DNA, 15 bp, Homo sapiens
gtcagtttcctaggc

SEQ ID NO: 18014 - DNA, 15 bp, Homo sapiens
agtcagtttcctagg

SEQ ID NO: 18015 - DNA, 15 bp, Homo sapiens
gagtcagtttcctag

SEQ ID NO: 18016 - DNA, 15 bp, Homo sapiens
agagtcagtttccta

SEQ ID NO: 18017 - DNA, 15 bp, Homo sapiens
gagagtcagtttcct

SEQ ID NO: 18018 - DNA, 15 bp, Homo sapiens
agagagtcagtttcc

SEQ ID NO: 18019 - DNA, 15 bp, Homo sapiens
gagagagtcagtttc

SEQ ID NO: 18020 - DNA, 15 bp, Homo sapiens
agagagagtcagttt

SEQ ID NO: 18021 - DNA, 15 bp, Homo sapiens
cagagagagtcagtt

SEQ ID NO: 18022 - DNA, 15 bp, Homo sapiens
acagagagagtcagt

SEQ ID NO: 18023 - DNA, 15 bp, Homo sapiens
cacagagagagtcag

SEQ ID NO: 18024 - DNA, 15 bp, Homo sapiens
ccacagagagagtca

SEQ ID NO: 18025 - DNA, 15 bp, Homo sapiens
tccacagagagagtc

SEQ ID NO: 18026 - DNA, 15 bp, Homo sapiens
gtccacagagagagt

SEQ ID NO: 18027 - DNA, 15 bp, Homo sapiens
tgtccacagagagag

SEQ ID NO: 18028 - DNA, 15 bp, Homo sapiens
ttgtccacagagaga

SEQ ID NO: 18029 - DNA, 15 bp, Homo sapiens
cttgtccacagagag

SEQ ID NO: 18030 - DNA, 15 bp, Homo sapiens
acttgtccacagaga

SEQ ID NO: 18031 - DNA, 15 bp, Homo sapiens
cacttgtccacagag

SEQ ID NO: 18032 - DNA, 15 bp, Homo sapiens
acacttgtccacaga

SEQ ID NO: 18033 - DNA, 15 bp, Homo sapiens
aacacttgtccacag

SEQ ID NO: 18034 - DNA, 15 bp, Homo sapiens
taacacttgtccaca

SEQ ID NO: 18035 - DNA, 15 bp, Homo sapiens
ttaacacttgtccac

SEQ ID NO: 18036 - DNA, 15 bp, Homo sapiens
tttaacacttgtcca

SEQ ID NO: 18037 - DNA, 15 bp, Homo sapiens
gtttaacacttgtcc

SEQ ID NO: 18038 - DNA, 15 bp, Homo sapiens
ggtttaacacttgtc

SEQ ID NO: 18039 - DNA, 15 bp, Homo sapiens
tggtttaacacttgt

SEQ ID NO: 18040 - DNA, 15 bp, Homo sapiens
ctggtttaacacttg

SEQ ID NO: 18041 - DNA, 15 bp, Homo sapiens
tctggtttaacactt

SEQ ID NO: 18042 - DNA, 15 bp, Homo sapiens
atctggtttaacact

SEQ ID NO: 18043 - DNA, 15 bp, Homo sapiens
gatctggtttaacac

SEQ ID NO: 18044 - DNA, 15 bp, Homo sapiens
ggatctggtttaaca

SEQ ID NO: 18045 - DNA, 15 bp, Homo sapiens
gggatctggtttaac

SEQ ID NO: 18046 - DNA, 15 bp, Homo sapiens
agggatctggtttaa

SEQ ID NO: 18047 - DNA, 15 bp, Homo sapiens
aagggatctggttta

SEQ ID NO: 18048 - DNA, 15 bp, Homo sapiens
gaagggatctggttt

SEQ ID NO: 18049 - DNA, 15 bp, Homo sapiens
agaagggatctggtt

SEQ ID NO: 18050 - DNA, 15 bp, Homo sapiens
gagaagggatctggt

SEQ ID NO: 18051 - DNA, 15 bp, Homo sapiens
tgagaagggatctgg

SEQ ID NO: 18052 - DNA, 15 bp, Homo sapiens
ctgagaagggatctg

SEQ ID NO: 18053 - DNA, 15 bp, Homo sapiens
tctgagaagggatct

SEQ ID NO: 18054 - DNA, 15 bp, Homo sapiens
ctctgagaagggatc

SEQ ID NO: 18055 - DNA, 15 bp, Homo sapiens
cctctgagaagggat

SEQ ID NO: 18056 - DNA, 15 bp, Homo sapiens
acctctgagaaggga

SEQ ID NO: 18057 - DNA, 15 bp, Homo sapiens
gacctctgagaaggg

SEQ ID NO: 18058 - DNA, 15 bp, Homo sapiens
ggacctctgagaagg

SEQ ID NO: 18059 - DNA, 15 bp, Homo sapiens
tggacctctgagaag

SEQ ID NO: 18060 - DNA, 15 bp, Homo sapiens
atggacctctgagaa

SEQ ID NO: 18061 - DNA, 15 bp, Homo sapiens
gatggacctctgaga

SEQ ID NO: 18062 - DNA, 15 bp, Homo sapiens
agatggacctctgag

SEQ ID NO: 18063 - DNA, 15 bp, Homo sapiens
cagatggacctctga

SEQ ID NO: 18064 - DNA, 15 bp, Homo sapiens
gcagatggacctctg

SEQ ID NO: 18065 - DNA, 15 bp, Homo sapiens
tgcagatggacctct

SEQ ID NO: 18066 - DNA, 15 bp, Homo sapiens
atgcagatggacctc

SEQ ID NO: 18067 - DNA, 15 bp, Homo sapiens
catgcagatggacct

SEQ ID NO: 18068 - DNA, 15 bp, Homo sapiens
acatgcagatggacc

SEQ ID NO: 18069 - DNA, 15 bp, Homo sapiens
cacatgcagatggac

SEQ ID NO: 18070 - DNA, 15 bp, Homo sapiens
acacatgcagatgga

SEQ ID NO: 18071 - DNA, 15 bp, Homo sapiens
cacacatgcagatgg

SEQ ID NO: 18072 - DNA, 15 bp, Homo sapiens
acacacatgcagatg

SEQ ID NO: 18073 - DNA, 15 bp, Homo sapiens
cacacacatgcagat

SEQ ID NO: 18074 - DNA, 15 bp, Homo sapiens
ccacacacatgcaga

SEQ ID NO: 18075 - DNA, 15 bp, Homo sapiens
tccacacacatgcag

SEQ ID NO: 18076 - DNA, 15 bp, Homo sapiens
ttccacacacatgca

SEQ ID NO: 18077 - DNA, 15 bp, Homo sapiens
attccacacacatgc

SEQ ID NO: 18078 - DNA, 15 bp, Homo sapiens
cattccacacacatg

SEQ ID NO: 18079 - DNA, 15 bp, Homo sapiens
tcattccacacacat

SEQ ID NO: 18080 - DNA, 15 bp, Homo sapiens
ttcattccacacaca

SEQ ID NO: 18081 - DNA, 15 bp, Homo sapiens
attcattccacacac

SEQ ID NO: 18082 - DNA, 15 bp, Homo sapiens
cattcattccacaca

SEQ ID NO: 18083 - DNA, 15 bp, Homo sapiens
ccattcattccacac

SEQ ID NO: 18084 - DNA, 15 bp, Homo sapiens
accattcattccaca

SEQ ID NO: 18085 - DNA, 15 bp, Homo sapiens
aaccattcattccac

SEQ ID NO: 18086 - DNA, 15 bp, Homo sapiens
gaaccattcattcca

SEQ ID NO: 18087 - DNA, 15 bp, Homo sapiens
tgaaccattcattcc

SEQ ID NO: 18088 - DNA, 15 bp, Homo sapiens
ctgaaccattcattc

SEQ ID NO: 18089 - DNA, 15 bp, Homo sapiens
gctgaaccattcatt

SEQ ID NO: 18090 - DNA, 15 bp, Homo sapiens
ggctgaaccattcat

SEQ ID NO: 18091 - DNA, 15 bp, Homo sapiens
gggctgaaccattca

SEQ ID NO: 18092 - DNA, 15 bp, Homo sapiens
tgggctgaaccattc

SEQ ID NO: 18093 - DNA, 15 bp, Homo sapiens
ctgggctgaaccatt

SEQ ID NO: 18094 - DNA, 15 bp, Homo sapiens
tctgggctgaaccat

SEQ ID NO: 18095 - DNA, 15 bp, Homo sapiens
gtctgggctgaacca

SEQ ID NO: 18096 - DNA, 15 bp, Homo sapiens
tgtctgggctgaacc

SEQ ID NO: 18097 - DNA, 15 bp, Homo sapiens
atgtctgggctgaac

SEQ ID NO: 18098 - DNA, 15 bp, Homo sapiens
aatgtctgggctgaa

SEQ ID NO: 18099 - DNA, 15 bp, Homo sapiens
taatgtctgggctga

SEQ ID NO: 18100 - DNA, 15 bp, Homo sapiens
ctaatgtctgggctg

SEQ ID NO: 18101 - DNA, 15 bp, Homo sapiens
gctaatgtctgggct

SEQ ID NO: 18102 - DNA, 15 bp, Homo sapiens
cgctaatgtctgggc

SEQ ID NO: 18103 - DNA, 15 bp, Homo sapiens
gcgctaatgtctggg

SEQ ID NO: 18104 - DNA, 15 bp, Homo sapiens
tgcgctaatgtctgg

SEQ ID NO: 18105 - DNA, 15 bp, Homo sapiens
atgcgctaatgtctg

SEQ ID NO: 18106 - DNA, 15 bp, Homo sapiens
tatgcgctaatgtct

SEQ ID NO: 18107 - DNA, 15 bp, Homo sapiens
atatgcgctaatgtc

SEQ ID NO: 18108 - DNA, 15 bp, Homo sapiens
aatatgcgctaatgt

SEQ ID NO: 18109 - DNA, 15 bp, Homo sapiens
aaatatgcgctaatg

SEQ ID NO: 18110 - DNA, 15 bp, Homo sapiens
gaaatatgcgctaat

SEQ ID NO: 18111 - DNA, 15 bp, Homo sapiens
ggaaatatgcgctaa

SEQ ID NO: 18112 - DNA, 15 bp, Homo sapiens
aggaaatatgcgcta

SEQ ID NO: 18113 - DNA, 15 bp, Homo sapiens
caggaaatatgcgct

SEQ ID NO: 18114 - DNA, 15 bp, Homo sapiens
ccaggaaatatgcgc

SEQ ID NO: 18115 - DNA, 15 bp, Homo sapiens
tccaggaaatatgcg

SEQ ID NO: 18116 - DNA, 15 bp, Homo sapiens
ctccaggaaatatgc

SEQ ID NO: 18117 - DNA, 15 bp, Homo sapiens
tctccaggaaatatg

SEQ ID NO: 18118 - DNA, 15 bp, Homo sapiens
ttctccaggaaatat

SEQ ID NO: 18119 - DNA, 15 bp, Homo sapiens
tttctccaggaaata

SEQ ID NO: 18120 - DNA, 15 bp, Homo sapiens
ctttctccaggaaat

SEQ ID NO: 18121 - DNA, 15 bp, Homo sapiens
gctttctccaggaaa

SEQ ID NO: 18122 - DNA, 15 bp, Homo sapiens
tgctttctccaggaa

SEQ ID NO: 18123 - DNA, 15 bp, Homo sapiens
ttgctttctccagga

SEQ ID NO: 18124 - DNA, 15 bp, Homo sapiens
tttgctttctccagg

SEQ ID NO: 18125 - DNA, 15 bp, Homo sapiens
atttgctttctccag

SEQ ID NO: 18126 - DNA, 15 bp, Homo sapiens
tatttgctttctcca

SEQ ID NO: 18127 - DNA, 15 bp, Homo sapiens
gtatttgctttctcc

SEQ ID NO: 18128 - DNA, 15 bp, Homo sapiens
ggtatttgctttctc

SEQ ID NO: 18129 - DNA, 15 bp, Homo sapiens
tggtatttgctttct

SEQ ID NO: 18130 - DNA, 15 bp, Homo sapiens
ttggtatttgctttc

SEQ ID NO: 18131 - DNA, 15 bp, Homo sapiens
gttggtatttgcttt

SEQ ID NO: 18132 - DNA, 15 bp, Homo sapiens
agttggtatttgctt

SEQ ID NO: 18133 - DNA, 15 bp, Homo sapiens
tagttggtatttgct

SEQ ID NO: 18134 - DNA, 15 bp, Homo sapiens
atagttggtatttgc

SEQ ID NO: 18135 - DNA, 15 bp, Homo sapiens
catagttggtatttg

SEQ ID NO: 18136 - DNA, 15 bp, Homo sapiens
acatagttggtattt

SEQ ID NO: 18137 - DNA, 15 bp, Homo sapiens
tacatagttggtatt

SEQ ID NO: 18138 - DNA, 15 bp, Homo sapiens
ctacatagttggtat

SEQ ID NO: 18139 - DNA, 15 bp, Homo sapiens
actacatagttggta

SEQ ID NO: 18140 - DNA, 15 bp, Homo sapiens
cactacatagttggt

SEQ ID NO: 18141 - DNA, 15 bp, Homo sapiens
acactacatagttgg

SEQ ID NO: 18142 - DNA, 15 bp, Homo sapiens
cacactacatagttg

SEQ ID NO: 18143 - DNA, 15 bp, Homo sapiens
gcacactacatagtt

SEQ ID NO: 18144 - DNA, 15 bp, Homo sapiens
ggcacactacatagt

SEQ ID NO: 18145 - DNA, 15 bp, Homo sapiens
aggcacactacatag

SEQ ID NO: 18146 - DNA, 15 bp, Homo sapiens
caggcacactacata

SEQ ID NO: 18147 - DNA, 15 bp, Homo sapiens
acaggcacactacat

SEQ ID NO: 18148 - DNA, 15 bp, Homo sapiens
cacaggcacactaca

SEQ ID NO: 18149 - DNA, 15 bp, Homo sapiens
gcacaggcacactac

SEQ ID NO: 18150 - DNA, 15 bp, Homo sapiens
ggcacaggcacacta

SEQ ID NO: 18151 - DNA, 15 bp, Homo sapiens
gggcacaggcacact

SEQ ID NO: 18152 - DNA, 15 bp, Homo sapiens
agggcacaggcacac

SEQ ID NO: 18153 - DNA, 15 bp, Homo sapiens
aagggcacaggcaca

SEQ ID NO: 18154 - DNA, 15 bp, Homo sapiens
caagggcacaggcac

SEQ ID NO: 18155 - DNA, 15 bp, Homo sapiens
acaagggcacaggca

SEQ ID NO: 18156 - DNA, 15 bp, Homo sapiens
aacaagggcacaggc

SEQ ID NO: 18157 - DNA, 15 bp, Homo sapiens
taacaagggcacagg

SEQ ID NO: 18158 - DNA, 15 bp, Homo sapiens
ctaacaagggcacag

SEQ ID NO: 18159 - DNA, 15 bp, Homo sapiens
cctaacaagggcaca

SEQ ID NO: 18160 - DNA, 15 bp, Homo sapiens
gcctaacaagggcac

SEQ ID NO: 18161 - DNA, 15 bp, Homo sapiens
tgcctaacaagggca

SEQ ID NO: 18162 - DNA, 15 bp, Homo sapiens
ttgcctaacaagggc

SEQ ID NO: 18163 - DNA, 15 bp, Homo sapiens
tttgcctaacaaggg

SEQ ID NO: 18164 - DNA, 15 bp, Homo sapiens
atttgcctaacaagg

SEQ ID NO: 18165 - DNA, 15 bp, Homo sapiens
gatttgcctaacaag

SEQ ID NO: 18166 - DNA, 15 bp, Homo sapiens
ggatttgcctaacaa

SEQ ID NO: 18167 - DNA, 15 bp, Homo sapiens
gggatttgcctaaca

SEQ ID NO: 18168 - DNA, 15 bp, Homo sapiens
tgggatttgcctaac

SEQ ID NO: 18169 - DNA, 15 bp, Homo sapiens
ttgggatttgcctaa

SEQ ID NO: 18170 - DNA, 15 bp, Homo sapiens
cttgggatttgccta

SEQ ID NO: 18171 - DNA, 15 bp, Homo sapiens
acttgggatttgcct

SEQ ID NO: 18172 - DNA, 15 bp, Homo sapiens
cacttgggatttgcc

SEQ ID NO: 18173 - DNA, 15 bp, Homo sapiens
tcacttgggatttgc

SEQ ID NO: 18174 - DNA, 15 bp, Homo sapiens
ctcacttgggatttg

SEQ ID NO: 18175 - DNA, 15 bp, Homo sapiens
actcacttgggattt

SEQ ID NO: 18176 - DNA, 15 bp, Homo sapiens
aactcacttgggatt

SEQ ID NO: 18177 - DNA, 15 bp, Homo sapiens
caactcacttgggat

SEQ ID NO: 18178 - DNA, 15 bp, Homo sapiens
gcaactcacttggga

SEQ ID NO: 18179 - DNA, 15 bp, Homo sapiens
tgcaactcacttggg

SEQ ID NO: 18180 - DNA, 15 bp, Homo sapiens
gtgcaactcacttgg

SEQ ID NO: 18181 - DNA, 15 bp, Homo sapiens
tgtgcaactcacttg

SEQ ID NO: 18182 - DNA, 15 bp, Homo sapiens
ttgtgcaactcactt

SEQ ID NO: 18183 - DNA, 15 bp, Homo sapiens
tttgtgcaactcact

SEQ ID NO: 18184 - DNA, 15 bp, Homo sapiens
atttgtgcaactcac

SEQ ID NO: 18185 - DNA, 15 bp, Homo sapiens
catttgtgcaactca

SEQ ID NO: 18186 - DNA, 15 bp, Homo sapiens
acatttgtgcaactc

SEQ ID NO: 18187 - DNA, 15 bp, Homo sapiens
cacatttgtgcaact

SEQ ID NO: 18188 - DNA, 15 bp, Homo sapiens
gcacatttgtgcaac

SEQ ID NO: 18189 - DNA, 15 bp, Homo sapiens
agcacatttgtgcaa

SEQ ID NO: 18190 - DNA, 15 bp, Homo sapiens
cagcacatttgtgca

SEQ ID NO: 18191 - DNA, 15 bp, Homo sapiens
tcagcacatttgtgc

SEQ ID NO: 18192 - DNA, 15 bp, Homo sapiens
gtcagcacatttgtg

SEQ ID NO: 18193 - DNA, 15 bp, Homo sapiens
agtcagcacatttgt

SEQ ID NO: 18194 - DNA, 15 bp, Homo sapiens
aagtcagcacatttg

SEQ ID NO: 18195 - DNA, 15 bp, Homo sapiens
gaagtcagcacattt

SEQ ID NO: 18196 - DNA, 15 bp, Homo sapiens
ggaagtcagcacatt

SEQ ID NO: 18197 - DNA, 15 bp, Homo sapiens
cggaagtcagcacat

SEQ ID NO: 18198 - DNA, 15 bp, Homo sapiens
tcggaagtcagcaca

SEQ ID NO: 18199 - DNA, 15 bp, Homo sapiens
ctcggaagtcagcac

SEQ ID NO: 18200 - DNA, 15 bp, Homo sapiens
cctcggaagtcagca

SEQ ID NO: 18201 - DNA, 15 bp, Homo sapiens
tcctcggaagtcagc

SEQ ID NO: 18202 - DNA, 15 bp, Homo sapiens
atcctcggaagtcag

SEQ ID NO: 18203 - DNA, 15 bp, Homo sapiens
aatcctcggaagtca

SEQ ID NO: 18204 - DNA, 15 bp, Homo sapiens
aaatcctcggaagtc

SEQ ID NO: 18205 - DNA, 15 bp, Homo sapiens
taaatcctcggaagt

SEQ ID NO: 18206 - DNA, 15 bp, Homo sapiens
ctaaatcctcggaag

SEQ ID NO: 18207 - DNA, 15 bp, Homo sapiens
gctaaatcctcggaa

SEQ ID NO: 18208 - DNA, 15 bp, Homo sapiens
tgctaaatcctcgga

SEQ ID NO: 18209 - DNA, 15 bp, Homo sapiens
ttgctaaatcctcgg

SEQ ID NO: 18210 - DNA, 15 bp, Homo sapiens
cttgctaaatcctcg

SEQ ID NO: 18211 - DNA, 15 bp, Homo sapiens
tcttgctaaatcctc

SEQ ID NO: 18212 - DNA, 15 bp, Homo sapiens
ttcttgctaaatcct

SEQ ID NO: 18213 - DNA, 15 bp, Homo sapiens
gttcttgctaaatcc

SEQ ID NO: 18214 - DNA, 15 bp, Homo sapiens
tgttcttgctaaatc

SEQ ID NO: 18215 - DNA, 15 bp, Homo sapiens
ttgttcttgctaaat

SEQ ID NO: 18216 - DNA, 15 bp, Homo sapiens
attgttcttgctaaa

SEQ ID NO: 18217 - DNA, 15 bp, Homo sapiens
tattgttcttgctaa

SEQ ID NO: 18218 - DNA, 15 bp, Homo sapiens
ttattgttcttgcta

SEQ ID NO: 18219 - DNA, 15 bp, Homo sapiens
gttattgttcttgct

SEQ ID NO: 18220 - DNA, 15 bp, Homo sapiens
agttattgttcttgc

SEQ ID NO: 18221 - DNA, 15 bp, Homo sapiens
aagttattgttcttg

SEQ ID NO: 18222 - DNA, 15 bp, Homo sapiens
aaagttattgttctt

SEQ ID NO: 18223 - DNA, 15 bp, Homo sapiens
caaagttattgttct

SEQ ID NO: 18224 - DNA, 15 bp, Homo sapiens
ccaaagttattgttc

SEQ ID NO: 18225 - DNA, 15 bp, Homo sapiens
accaaagttattgtt

SEQ ID NO: 18226 - DNA, 15 bp, Homo sapiens
gaccaaagttattgt

SEQ ID NO: 18227 - DNA, 15 bp, Homo sapiens
tgaccaaagttattg

SEQ ID NO: 18228 - DNA, 15 bp, Homo sapiens
gtgaccaaagttatt

SEQ ID NO: 18229 - DNA, 15 bp, Homo sapiens
agtgaccaaagttat

SEQ ID NO: 18230 - DNA, 15 bp, Homo sapiens
cagtgaccaaagtta

SEQ ID NO: 18231 - DNA, 15 bp, Homo sapiens
ccagtgaccaaagtt

SEQ ID NO: 18232 - DNA, 15 bp, Homo sapiens
cccagtgaccaaagt

SEQ ID NO: 18233 - DNA, 15 bp, Homo sapiens
tcccagtgaccaaag

SEQ ID NO: 18234 - DNA, 15 bp, Homo sapiens
gtcccagtgaccaaa

SEQ ID NO: 18235 - DNA, 15 bp, Homo sapiens
agtcccagtgaccaa

SEQ ID NO: 18236 - DNA, 15 bp, Homo sapiens
aagtcccagtgacca

SEQ ID NO: 18237 - DNA, 15 bp, Homo sapiens
taagtcccagtgacc

SEQ ID NO: 18238 - DNA, 15 bp, Homo sapiens
ttaagtcccagtgac

SEQ ID NO: 18239 - DNA, 15 bp, Homo sapiens
tttaagtcccagtga

SEQ ID NO: 18240 - DNA, 15 bp, Homo sapiens
ctttaagtcccagtg

SEQ ID NO: 18241 - DNA, 15 bp, Homo sapiens
gctttaagtcccagt

SEQ ID NO: 18242 - DNA, 15 bp, Homo sapiens
cgctttaagtcccag

SEQ ID NO: 18243 - DNA, 15 bp, Homo sapiens
ccgctttaagtccca

SEQ ID NO: 18244 - DNA, 15 bp, Homo sapiens
tccgctttaagtccc

SEQ ID NO: 18245 - DNA, 15 bp, Homo sapiens
atccgctttaagtcc

SEQ ID NO: 18246 - DNA, 15 bp, Homo sapiens
tatccgctttaagtc

SEQ ID NO: 18247 - DNA, 15 bp, Homo sapiens
atatccgctttaagt

SEQ ID NO: 18248 - DNA, 15 bp, Homo sapiens
catatccgctttaag

SEQ ID NO: 18249 - DNA, 15 bp, Homo sapiens
tcatatccgctttaa

SEQ ID NO: 18250 - DNA, 15 bp, Homo sapiens
ctcatatccgcttta

SEQ ID NO: 18251 - DNA, 15 bp, Homo sapiens
gctcatatccgcttt

SEQ ID NO: 18252 - DNA, 15 bp, Homo sapiens
agctcatatccgctt

SEQ ID NO: 18253 - DNA, 15 bp, Homo sapiens
tagctcatatccgct

SEQ ID NO: 18254 - DNA, 15 bp, Homo sapiens
atagctcatatccgc

SEQ ID NO: 18255 - DNA, 15 bp, Homo sapiens
tatagctcatatccg

SEQ ID NO: 18256 - DNA, 15 bp, Homo sapiens
ttatagctcatatcc

SEQ ID NO: 18257 - DNA, 15 bp, Homo sapiens
cttatagctcatatc

SEQ ID NO: 18258 - DNA, 15 bp, Homo sapiens
ccttatagctcatat

SEQ ID NO: 18259 - DNA, 15 bp, Homo sapiens
tccttatagctcata

SEQ ID NO: 18260 - DNA, 15 bp, Homo sapiens
ttccttatagctcat

SEQ ID NO: 18261 - DNA, 15 bp, Homo sapiens
tttccttatagctca

SEQ ID NO: 18262 - DNA, 15 bp, Homo sapiens
ctttccttatagctc

SEQ ID NO: 18263 - DNA, 15 bp, Homo sapiens
tctttccttatagct

SEQ ID NO: 18264 - DNA, 15 bp, Homo sapiens
gtctttccttatagc

SEQ ID NO: 18265 - DNA, 15 bp, Homo sapiens
tgtctttccttatag

SEQ ID NO: 18266 - DNA, 15 bp, Homo sapiens
ttgtctttccttata

SEQ ID NO: 18267 - DNA, 15 bp, Homo sapiens
tttgtctttccttat

SEQ ID NO: 18268 - DNA, 15 bp, Homo sapiens
ttttgtctttcctta

SEQ ID NO: 18269 - DNA, 15 bp, Homo sapiens
tttttgtctttcctt

SEQ ID NO: 18270 - DNA, 15 bp, Homo sapiens
atttttgtctttcct

SEQ ID NO: 18271 - DNA, 15 bp, Homo sapiens
tatttttgtctttcc

SEQ ID NO: 18272 - DNA, 15 bp, Homo sapiens
ttatttttgtctttc

SEQ ID NO: 18273 - DNA, 15 bp, Homo sapiens
tttatttttgtcttt

SEQ ID NO: 18274 - DNA, 15 bp, Homo sapiens
atttatttttgtctt

SEQ ID NO: 18275 - DNA, 15 bp, Homo sapiens
catttatttttgtct

SEQ ID NO: 18276 - DNA, 15 bp, Homo sapiens
gcatttatttttgtc

SEQ ID NO: 18277 - DNA, 15 bp, Homo sapiens
agcatttatttttgt

SEQ ID NO: 18278 - DNA, 15 bp, Homo sapiens
aagcatttatttttg

SEQ ID NO: 18279 - DNA, 15 bp, Homo sapiens
gaagcatttattttt

SEQ ID NO: 18280 - DNA, 15 bp, Homo sapiens
agaagcatttatttt

SEQ ID NO: 18281 - DNA, 15 bp, Homo sapiens
cagaagcatttattt

SEQ ID NO: 18282 - DNA, 15 bp, Homo sapiens
acagaagcatttatt

SEQ ID NO: 18283 - DNA, 15 bp, Homo sapiens
cacagaagcatttat

SEQ ID NO: 18284 - DNA, 15 bp, Homo sapiens
acacagaagcattta

SEQ ID NO: 18285 - DNA, 15 bp, Homo sapiens
gacacagaagcattt

SEQ ID NO: 18286 - DNA, 15 bp, Homo sapiens
ggacacagaagcatt

SEQ ID NO: 18287 - DNA, 15 bp, Homo sapiens
tggacacagaagcat

SEQ ID NO: 18288 - DNA, 15 bp, Homo sapiens
ctggacacagaagca

SEQ ID NO: 18289 - DNA, 15 bp, Homo sapiens
cctggacacagaagc

SEQ ID NO: 18290 - DNA, 15 bp, Homo sapiens
ccctggacacagaag

SEQ ID NO: 18291 - DNA, 15 bp, Homo sapiens
cccctggacacagaa

SEQ ID NO: 18292 - DNA, 15 bp, Homo sapiens
ccccctggacacaga

SEQ ID NO: 18293 - DNA, 15 bp, Homo sapiens
tccccctggacacag

SEQ ID NO: 18294 - DNA, 15 bp, Homo sapiens
ttccccctggacaca

SEQ ID NO: 18295 - DNA, 15 bp, Homo sapiens
tttccccctggacac

SEQ ID NO: 18296 - DNA, 15 bp, Homo sapiens
ctttccccctggaca

SEQ ID NO: 18297 - DNA, 15 bp, Homo sapiens
tctttccccctggac

SEQ ID NO: 18298 - DNA, 15 bp, Homo sapiens
ctctttccccctgga

SEQ ID NO: 18299 - DNA, 15 bp, Homo sapiens
tctctttccccctgg

SEQ ID NO: 18300 - DNA, 15 bp, Homo sapiens
gtctctttccccctg

SEQ ID NO: 18301 - DNA, 15 bp, Homo sapiens
agtctctttccccct

SEQ ID NO: 18302 - DNA, 15 bp, Homo sapiens
gagtctctttccccc

SEQ ID NO: 18303 - DNA, 15 bp, Homo sapiens
ggagtctctttcccc

SEQ ID NO: 18304 - DNA, 15 bp, Homo sapiens
tggagtctctttccc

SEQ ID NO: 18305 - DNA, 15 bp, Homo sapiens
ctggagtctctttcc

SEQ ID NO: 18306 - DNA, 15 bp, Homo sapiens
cctggagtctctttc

SEQ ID NO: 18307 - DNA, 15 bp, Homo sapiens
ccctggagtctcttt

SEQ ID NO: 18308 - DNA, 15 bp, Homo sapiens
cccctggagtctctt

SEQ ID NO: 18309 - DNA, 15 bp, Homo sapiens
tcccctggagtctct

SEQ ID NO: 18310 - DNA, 15 bp, Homo sapiens
ctcccctggagtctc

SEQ ID NO: 18311 - DNA, 15 bp, Homo sapiens
gctcccctggagtct

SEQ ID NO: 18312 - DNA, 15 bp, Homo sapiens
agctcccctggagtc

SEQ ID NO: 18313 - DNA, 15 bp, Homo sapiens
cagctcccctggagt

SEQ ID NO: 18314 - DNA, 15 bp, Homo sapiens
tcagctcccctggag

SEQ ID NO: 18315 - DNA, 15 bp, Homo sapiens
gtcagctcccctgga

SEQ ID NO: 18316 - DNA, 15 bp, Homo sapiens
agtcagctcccctgg

SEQ ID NO: 18317 - DNA, 15 bp, Homo sapiens
tagtcagctcccctg

SEQ ID NO: 18318 - DNA, 15 bp, Homo sapiens
gtagtcagctcccct

SEQ ID NO: 18319 - DNA, 15 bp, Homo sapiens
tgtagtcagctcccc

SEQ ID NO: 18320 - DNA, 15 bp, Homo sapiens
gtgtagtcagctccc

SEQ ID NO: 18321 - DNA, 15 bp, Homo sapiens
agtgtagtcagctcc

SEQ ID NO: 18322 - DNA, 15 bp, Homo sapiens
aagtgtagtcagctc

SEQ ID NO: 18323 - DNA, 15 bp, Homo sapiens
gaagtgtagtcagct

SEQ ID NO: 18324 - DNA, 15 bp, Homo sapiens
tgaagtgtagtcagc

SEQ ID NO: 18325 - DNA, 15 bp, Homo sapiens
gtgaagtgtagtcag

SEQ ID NO: 18326 - DNA, 15 bp, Homo sapiens
agtgaagtgtagtca

SEQ ID NO: 18327 - DNA, 15 bp, Homo sapiens
aagtgaagtgtagtc

SEQ ID NO: 18328 - DNA, 15 bp, Homo sapiens
taagtgaagtgtagt

SEQ ID NO: 18329 - DNA, 15 bp, Homo sapiens
gtaagtgaagtgtag

SEQ ID NO: 18330 - DNA, 15 bp, Homo sapiens
cgtaagtgaagtgta

SEQ ID NO: 18331 - DNA, 15 bp, Homo sapiens
ccgtaagtgaagtgt

SEQ ID NO: 18332 - DNA, 15 bp, Homo sapiens
gccgtaagtgaagtg

SEQ ID NO: 18333 - DNA, 15 bp, Homo sapiens
agccgtaagtgaagt

SEQ ID NO: 18334 - DNA, 15 bp, Homo sapiens
aagccgtaagtgaag

SEQ ID NO: 18335 - DNA, 15 bp, Homo sapiens
taagccgtaagtgaa

SEQ ID NO: 18336 - DNA, 15 bp, Homo sapiens
gtaagccgtaagtga

SEQ ID NO: 18337 - DNA, 15 bp, Homo sapiens
tgtaagccgtaagtg

SEQ ID NO: 18338 - DNA, 15 bp, Homo sapiens
ttgtaagccgtaagt

SEQ ID NO: 18339 - DNA, 15 bp, Homo sapiens
tttgtaagccgtaag

SEQ ID NO: 18340 - DNA, 15 bp, Homo sapiens
atttgtaagccgtaa

SEQ ID NO: 18341 - DNA, 15 bp, Homo sapiens
gatttgtaagccgta

SEQ ID NO: 18342 - DNA, 15 bp, Homo sapiens
agatttgtaagccgt

SEQ ID NO: 18343 - DNA, 15 bp, Homo sapiens
tagatttgtaagccg

SEQ ID NO: 18344 - DNA, 15 bp, Homo sapiens
ctagatttgtaagcc

SEQ ID NO: 18345 - DNA, 15 bp, Homo sapiens
tctagatttgtaagc

SEQ ID NO: 18346 - DNA, 15 bp, Homo sapiens
ttctagatttgtaag

SEQ ID NO: 18347 - DNA, 15 bp, Homo sapiens
cttctagatttgtaa

SEQ ID NO: 18348 - DNA, 15 bp, Homo sapiens
ccttctagatttgta

SEQ ID NO: 18349 - DNA, 15 bp, Homo sapiens
gccttctagatttgt

SEQ ID NO: 18350 - DNA, 15 bp, Homo sapiens
ggccttctagatttg

SEQ ID NO: 18351 - DNA, 15 bp, Homo sapiens
tggccttctagattt

SEQ ID NO: 18352 - DNA, 15 bp, Homo sapiens
atggccttctagatt

SEQ ID NO: 18353 - DNA, 15 bp, Homo sapiens
aatggccttctagat

SEQ ID NO: 18354 - DNA, 15 bp, Homo sapiens
gaatggccttctaga

SEQ ID NO: 18355 - DNA, 15 bp, Homo sapiens
tgaatggccttctag

SEQ ID NO: 18356 - DNA, 15 bp, Homo sapiens
atgaatggccttcta

SEQ ID NO: 18357 - DNA, 15 bp, Homo sapiens
aatgaatggccttct

SEQ ID NO: 18358 - DNA, 15 bp, Homo sapiens
caatgaatggccttc

SEQ ID NO: 18359 - DNA, 15 bp, Homo sapiens
tcaatgaatggcctt

SEQ ID NO: 18360 - DNA, 15 bp, Homo sapiens
ttcaatgaatggcct

SEQ ID NO: 18361 - DNA, 15 bp, Homo sapiens
tttcaatgaatggcc

SEQ ID NO: 18362 - DNA, 15 bp, Homo sapiens
gtttcaatgaatggc

SEQ ID NO: 18363 - DNA, 15 bp, Homo sapiens
ggtttcaatgaatgg

SEQ ID NO: 18364 - DNA, 15 bp, Homo sapiens
tggtttcaatgaatg

SEQ ID NO: 18365 - DNA, 15 bp, Homo sapiens
atggtttcaatgaat

SEQ ID NO: 18366 - DNA, 15 bp, Homo sapiens
gatggtttcaatgaa

SEQ ID NO: 18367 - DNA, 15 bp, Homo sapiens
tgatggtttcaatga

SEQ ID NO: 18368 - DNA, 15 bp, Homo sapiens
ctgatggtttcaatg

SEQ ID NO: 18369 - DNA, 15 bp, Homo sapiens
tctgatggtttcaat

SEQ ID NO: 18370 - DNA, 15 bp, Homo sapiens
ttctgatggtttcaa

SEQ ID NO: 18371 - DNA, 15 bp, Homo sapiens
cttctgatggtttca

SEQ ID NO: 18372 - DNA, 15 bp, Homo sapiens
gcttctgatggtttc

SEQ ID NO: 18373 - DNA, 15 bp, Homo sapiens
ggcttctgatggttt

SEQ ID NO: 18374 - DNA, 15 bp, Homo sapiens
aggcttctgatggtt

SEQ ID NO: 18375 - DNA, 15 bp, Homo sapiens
aaggcttctgatggt

SEQ ID NO: 18376 - DNA, 15 bp, Homo sapiens
aaaggcttctgatgg

SEQ ID NO: 18377 - DNA, 15 bp, Homo sapiens
gaaaggcttctgatg

SEQ ID NO: 18378 - DNA, 15 bp, Homo sapiens
ggaaaggcttctgat

SEQ ID NO: 18379 - DNA, 15 bp, Homo sapiens
aggaaaggcttctga

SEQ ID NO: 18380 - DNA, 15 bp, Homo sapiens
caggaaaggcttctg

SEQ ID NO: 18381 - DNA, 15 bp, Homo sapiens
tcaggaaaggcttct

SEQ ID NO: 18382 - DNA, 15 bp, Homo sapiens
gtcaggaaaggcttc

SEQ ID NO: 18383 - DNA, 15 bp, Homo sapiens
tgtcaggaaaggctt

SEQ ID NO: 18384 - DNA, 15 bp, Homo sapiens
ctgtcaggaaaggct

SEQ ID NO: 18385 - DNA, 15 bp, Homo sapiens
actgtcaggaaaggc

SEQ ID NO: 18386 - DNA, 15 bp, Homo sapiens
cactgtcaggaaagg

SEQ ID NO: 18387 - DNA, 15 bp, Homo sapiens
ccactgtcaggaaag

SEQ ID NO: 18388 - DNA, 15 bp, Homo sapiens
tccactgtcaggaaa

SEQ ID NO: 18389 - DNA, 15 bp, Homo sapiens
ttccactgtcaggaa

SEQ ID NO: 18390 - DNA, 15 bp, Homo sapiens
cttccactgtcagga

SEQ ID NO: 18391 - DNA, 15 bp, Homo sapiens
acttccactgtcagg

SEQ ID NO: 18392 - DNA, 15 bp, Homo sapiens
aacttccactgtcag

SEQ ID NO: 18393 - DNA, 15 bp, Homo sapiens
taacttccactgtca

SEQ ID NO: 18394 - DNA, 15 bp, Homo sapiens
gtaacttccactgtc

SEQ ID NO: 18395 - DNA, 15 bp, Homo sapiens
ggtaacttccactgt

SEQ ID NO: 18396 - DNA, 15 bp, Homo sapiens
aggtaacttccactg

SEQ ID NO: 18397 - DNA, 15 bp, Homo sapiens
taggtaacttccact

SEQ ID NO: 18398 - DNA, 15 bp, Homo sapiens
ttaggtaacttccac

SEQ ID NO: 18399 - DNA, 15 bp, Homo sapiens
attaggtaacttcca

SEQ ID NO: 18400 - DNA, 15 bp, Homo sapiens
tattaggtaacttcc

SEQ ID NO: 18401 - DNA, 15 bp, Homo sapiens
ttattaggtaacttc

SEQ ID NO: 18402 - DNA, 15 bp, Homo sapiens
attattaggtaactt

SEQ ID NO: 18403 - DNA, 15 bp, Homo sapiens
gattattaggtaact

SEQ ID NO: 18404 - DNA, 15 bp, Homo sapiens
ggattattaggtaac

SEQ ID NO: 18405 - DNA, 15 bp, Homo sapiens
gggattattaggtaa

SEQ ID NO: 18406 - DNA, 15 bp, Homo sapiens
agggattattaggta

SEQ ID NO: 18407 - DNA, 15 bp, Homo sapiens
tagggattattaggt

SEQ ID NO: 18408 - DNA, 15 bp, Homo sapiens
ttagggattattagg

SEQ ID NO: 18409 - DNA, 15 bp, Homo sapiens
tttagggattattag

SEQ ID NO: 18410 - DNA, 15 bp, Homo sapiens
gtttagggattatta

SEQ ID NO: 18411 - DNA, 15 bp, Homo sapiens
agtttagggattatt

SEQ ID NO: 18412 - DNA, 15 bp, Homo sapiens
cagtttagggattat

SEQ ID NO: 18413 - DNA, 15 bp, Homo sapiens
tcagtttagggatta

SEQ ID NO: 18414 - DNA, 15 bp, Homo sapiens
gtcagtttagggatt

SEQ ID NO: 18415 - DNA, 15 bp, Homo sapiens
cgtcagtttagggat

SEQ ID NO: 18416 - DNA, 15 bp, Homo sapiens
tcgtcagtttaggga

SEQ ID NO: 18417 - DNA, 15 bp, Homo sapiens
gtcgtcagtttaggg

SEQ ID NO: 18418 - DNA, 15 bp, Homo sapiens
ggtcgtcagtttagg

SEQ ID NO: 18419 - DNA, 15 bp, Homo sapiens
gggtcgtcagtttag

SEQ ID NO: 18420 - DNA, 15 bp, Homo sapiens
tgggtcgtcagttta

SEQ ID NO: 18421 - DNA, 15 bp, Homo sapiens
ctgggtcgtcagttt

SEQ ID NO: 18422 - DNA, 15 bp, Homo sapiens
tctgggtcgtcagtt

SEQ ID NO: 18423 - DNA, 15 bp, Homo sapiens
atctgggtcgtcagt

SEQ ID NO: 18424 - DNA, 15 bp, Homo sapiens
aatctgggtcgtcag

SEQ ID NO: 18425 - DNA, 15 bp, Homo sapiens
aaatctgggtcgtca

SEQ ID NO: 18426 - DNA, 15 bp, Homo sapiens
taaatctgggtcgtc

SEQ ID NO: 18427 - DNA, 15 bp, Homo sapiens
gtaaatctgggtcgt

SEQ ID NO: 18428 - DNA, 15 bp, Homo sapiens
tgtaaatctgggtcg

SEQ ID NO: 18429 - DNA, 15 bp, Homo sapiens
ttgtaaatctgggtc

SEQ ID NO: 18430 - DNA, 15 bp, Homo sapiens
cttgtaaatctgggt

SEQ ID NO: 18431 - DNA, 15 bp, Homo sapiens
acttgtaaatctggg

SEQ ID NO: 18432 - DNA, 15 bp, Homo sapiens
aacttgtaaatctgg

SEQ ID NO: 18433 - DNA, 15 bp, Homo sapiens
aaacttgtaaatctg

SEQ ID NO: 18434 - DNA, 15 bp, Homo sapiens
aaaacttgtaaatct

SEQ ID NO: 18435 - DNA, 15 bp, Homo sapiens
caaaacttgtaaatc

SEQ ID NO: 18436 - DNA, 15 bp, Homo sapiens
acaaaacttgtaaat

SEQ ID NO: 18437 - DNA, 15 bp, Homo sapiens
aacaaaacttgtaaa

SEQ ID NO: 18438 - DNA, 15 bp, Homo sapiens
aaacaaaacttgtaa

SEQ ID NO: 18439 - DNA, 15 bp, Homo sapiens
aaaacaaaacttgta

SEQ ID NO: 18440 - DNA, 15 bp, Homo sapiens
gaaaacaaaacttgt

SEQ ID NO: 18441 - DNA, 15 bp, Homo sapiens
ggaaaacaaaacttg

SEQ ID NO: 18442 - DNA, 15 bp, Homo sapiens
aggaaaacaaaactt

SEQ ID NO: 18443 - DNA, 15 bp, Homo sapiens
caggaaaacaaaact

SEQ ID NO: 18444 - DNA, 15 bp, Homo sapiens
ccaggaaaacaaaac

SEQ ID NO: 18445 - DNA, 15 bp, Homo sapiens
gccaggaaaacaaaa

SEQ ID NO: 18446 - DNA, 15 bp, Homo sapiens
agccaggaaaacaaa

SEQ ID NO: 18447 - DNA, 15 bp, Homo sapiens
aagccaggaaaacaa

SEQ ID NO: 18448 - DNA, 15 bp, Homo sapiens
aaagccaggaaaaca

SEQ ID NO: 18449 - DNA, 15 bp, Homo sapiens
aaaagccaggaaaac

SEQ ID NO: 18450 - DNA, 15 bp, Homo sapiens
caaaagccaggaaaa

SEQ ID NO: 18451 - DNA, 15 bp, Homo sapiens
gcaaaagccaggaaa

SEQ ID NO: 18452 - DNA, 15 bp, Homo sapiens
agcaaaagccaggaa

SEQ ID NO: 18453 - DNA, 15 bp, Homo sapiens
cagcaaaagccagga

SEQ ID NO: 18454 - DNA, 15 bp, Homo sapiens
gcagcaaaagccagg

SEQ ID NO: 18455 - DNA, 15 bp, Homo sapiens
ggcagcaaaagccag

SEQ ID NO: 18456 - DNA, 15 bp, Homo sapiens
gggcagcaaaagcca

SEQ ID NO: 18457 - DNA, 15 bp, Homo sapiens
agggcagcaaaagcc

SEQ ID NO: 18458 - DNA, 15 bp, Homo sapiens
gagggcagcaaaagc

SEQ ID NO: 18459 - DNA, 15 bp, Homo sapiens
tgagggcagcaaaag

SEQ ID NO: 18460 - DNA, 15 bp, Homo sapiens
atgagggcagcaaaa

SEQ ID NO: 18461 - DNA, 15 bp, Homo sapiens
gatgagggcagcaaa

SEQ ID NO: 18462 - DNA, 15 bp, Homo sapiens
agatgagggcagcaa

SEQ ID NO: 18463 - DNA, 15 bp, Homo sapiens
aagatgagggcagca

SEQ ID NO: 18464 - DNA, 15 bp, Homo sapiens
gaagatgagggcagc

SEQ ID NO: 18465 - DNA, 15 bp, Homo sapiens
agaagatgagggcag

SEQ ID NO: 18466 - DNA, 15 bp, Homo sapiens
gagaagatgagggca

SEQ ID NO: 18467 - DNA, 15 bp, Homo sapiens
agagaagatgagggc

SEQ ID NO: 18468 - DNA, 15 bp, Homo sapiens
gagagaagatgaggg

SEQ ID NO: 18469 - DNA, 15 bp, Homo sapiens
agagagaagatgagg

SEQ ID NO: 18470 - DNA, 15 bp, Homo sapiens
aagagagaagatgag

SEQ ID NO: 18471 - DNA, 15 bp, Homo sapiens
taagagagaagatga

SEQ ID NO: 18472 - DNA, 15 bp, Homo sapiens
ttaagagagaagatg

SEQ ID NO: 18473 - DNA, 15 bp, Homo sapiens
tttaagagagaagat

SEQ ID NO: 18474 - DNA, 15 bp, Homo sapiens
gtttaagagagaaga

SEQ ID NO: 18475 - DNA, 15 bp, Homo sapiens
agtttaagagagaag

SEQ ID NO: 18476 - DNA, 15 bp, Homo sapiens
tagtttaagagagaa

SEQ ID NO: 18477 - DNA, 15 bp, Homo sapiens
ctagtttaagagaga

SEQ ID NO: 18478 - DNA, 15 bp, Homo sapiens
actagtttaagagag

SEQ ID NO: 18479 - DNA, 15 bp, Homo sapiens
aactagtttaagaga

SEQ ID NO: 18480 - DNA, 15 bp, Homo sapiens
gaactagtttaagag

SEQ ID NO: 18481 - DNA, 15 bp, Homo sapiens
agaactagtttaaga

SEQ ID NO: 18482 - DNA, 15 bp, Homo sapiens
cagaactagtttaag

SEQ ID NO: 18483 - DNA, 15 bp, Homo sapiens
acagaactagtttaa

SEQ ID NO: 18484 - DNA, 15 bp, Homo sapiens
tacagaactagttta

SEQ ID NO: 18485 - DNA, 15 bp, Homo sapiens
atacagaactagttt

SEQ ID NO: 18486 - DNA, 15 bp, Homo sapiens
aatacagaactagtt

SEQ ID NO: 18487 - DNA, 15 bp, Homo sapiens
aaatacagaactagt

SEQ ID NO: 18488 - DNA, 15 bp, Homo sapiens
gaaatacagaactag

SEQ ID NO: 18489 - DNA, 15 bp, Homo sapiens
agaaatacagaacta

SEQ ID NO: 18490 - DNA, 15 bp, Homo sapiens
gagaaatacagaact

SEQ ID NO: 18491 - DNA, 15 bp, Homo sapiens
ggagaaatacagaac

SEQ ID NO: 18492 - DNA, 15 bp, Homo sapiens
gggagaaatacagaa

SEQ ID NO: 18493 - DNA, 15 bp, Homo sapiens
tgggagaaatacaga

SEQ ID NO: 18494 - DNA, 15 bp, Homo sapiens
ttgggagaaatacag

SEQ ID NO: 18495 - DNA, 15 bp, Homo sapiens
cttgggagaaataca

SEQ ID NO: 18496 - DNA, 15 bp, Homo sapiens
ccttgggagaaatac

SEQ ID NO: 18497 - DNA, 15 bp, Homo sapiens
gccttgggagaaata

SEQ ID NO: 18498 - DNA, 15 bp, Homo sapiens
agccttgggagaaat

SEQ ID NO: 18499 - DNA, 15 bp, Homo sapiens
aagccttgggagaaa

SEQ ID NO: 18500 - DNA, 15 bp, Homo sapiens
aaagccttgggagaa

SEQ ID NO: 18501 - DNA, 15 bp, Homo sapiens
aaaagccttgggaga

SEQ ID NO: 18502 - DNA, 15 bp, Homo sapiens
gaaaagccttgggag

SEQ ID NO: 18503 - DNA, 15 bp, Homo sapiens
tgaaaagccttggga

SEQ ID NO: 18504 - DNA, 15 bp, Homo sapiens
atgaaaagccttggg

SEQ ID NO: 18505 - DNA, 15 bp, Homo sapiens
aatgaaaagccttgg

SEQ ID NO: 18506 - DNA, 15 bp, Homo sapiens
gaatgaaaagccttg

SEQ ID NO: 18507 - DNA, 15 bp, Homo sapiens
ggaatgaaaagcctt

SEQ ID NO: 18508 - DNA, 15 bp, Homo sapiens
gggaatgaaaagcct

SEQ ID NO: 18509 - DNA, 15 bp, Homo sapiens
agggaatgaaaagcc

SEQ ID NO: 18510 - DNA, 15 bp, Homo sapiens
tagggaatgaaaagc

SEQ ID NO: 18511 - DNA, 15 bp, Homo sapiens
ttagggaatgaaaag

SEQ ID NO: 18512 - DNA, 15 bp, Homo sapiens
cttagggaatgaaaa

SEQ ID NO: 18513 - DNA, 15 bp, Homo sapiens
gcttagggaatgaaa

SEQ ID NO: 18514 - DNA, 15 bp, Homo sapiens
tgcttagggaatgaa

SEQ ID NO: 18515 - DNA, 15 bp, Homo sapiens
atgcttagggaatga

SEQ ID NO: 18516 - DNA, 15 bp, Homo sapiens
tatgcttagggaatg

SEQ ID NO: 18517 - DNA, 15 bp, Homo sapiens
gtatgcttagggaat

SEQ ID NO: 18518 - DNA, 15 bp, Homo sapiens
cgtatgcttagggaa

SEQ ID NO: 18519 - DNA, 15 bp, Homo sapiens
gcgtatgcttaggga

SEQ ID NO: 18520 - DNA, 15 bp, Homo sapiens
tgcgtatgcttaggg

SEQ ID NO: 18521 - DNA, 15 bp, Homo sapiens
atgcgtatgcttagg

SEQ ID NO: 18522 - DNA, 15 bp, Homo sapiens
aatgcgtatgcttag

SEQ ID NO: 18523 - DNA, 15 bp, Homo sapiens
aaatgcgtatgctta

SEQ ID NO: 18524 - DNA, 15 bp, Homo sapiens
gaaatgcgtatgctt

SEQ ID NO: 18525 - DNA, 15 bp, Homo sapiens
agaaatgcgtatgct

SEQ ID NO: 18526 - DNA, 15 bp, Homo sapiens
gagaaatgcgtatgc

SEQ ID NO: 18527 - DNA, 15 bp, Homo sapiens
agagaaatgcgtatg

SEQ ID NO: 18528 - DNA, 15 bp, Homo sapiens
cagagaaatgcgtat

SEQ ID NO: 18529 - DNA, 15 bp, Homo sapiens
acagagaaatgcgta

SEQ ID NO: 18530 - DNA, 15 bp, Homo sapiens
cacagagaaatgcgt

SEQ ID NO: 18531 - DNA, 15 bp, Homo sapiens
ccacagagaaatgcg

SEQ ID NO: 18532 - DNA, 15 bp, Homo sapiens
gccacagagaaatgc

SEQ ID NO: 18533 - DNA, 15 bp, Homo sapiens
ggccacagagaaatg

SEQ ID NO: 18534 - DNA, 15 bp, Homo sapiens
tggccacagagaaat

SEQ ID NO: 18535 - DNA, 15 bp, Homo sapiens
ttggccacagagaaa

SEQ ID NO: 18536 - DNA, 15 bp, Homo sapiens
tttggccacagagaa

SEQ ID NO: 18537 - DNA, 15 bp, Homo sapiens
ttttggccacagaga

SEQ ID NO: 18538 - DNA, 15 bp, Homo sapiens
attttggccacagag

SEQ ID NO: 18539 - DNA, 15 bp, Homo sapiens
cattttggccacaga

SEQ ID NO: 18540 - DNA, 15 bp, Homo sapiens
gcattttggccacag

SEQ ID NO: 18541 - DNA, 15 bp, Homo sapiens
agcattttggccaca

SEQ ID NO: 18542 - DNA, 15 bp, Homo sapiens
gagcattttggccac

SEQ ID NO: 18543 - DNA, 15 bp, Homo sapiens
agagcattttggcca

SEQ ID NO: 18544 - DNA, 15 bp, Homo sapiens
cagagcattttggcc

SEQ ID NO: 18545 - DNA, 15 bp, Homo sapiens
ccagagcattttggc

SEQ ID NO: 18546 - DNA, 15 bp, Homo sapiens
cccagagcattttgg

SEQ ID NO: 18547 - DNA, 15 bp, Homo sapiens
acccagagcattttg

SEQ ID NO: 18548 - DNA, 15 bp, Homo sapiens
aacccagagcatttt

SEQ ID NO: 18549 - DNA, 15 bp, Homo sapiens
aaacccagagcattt

SEQ ID NO: 18550 - DNA, 15 bp, Homo sapiens
taaacccagagcatt

SEQ ID NO: 18551 - DNA, 15 bp, Homo sapiens
ctaaacccagagcat

SEQ ID NO: 18552 - DNA, 15 bp, Homo sapiens
tctaaacccagagca

SEQ ID NO: 18553 - DNA, 15 bp, Homo sapiens
gtctaaacccagagc

SEQ ID NO: 18554 - DNA, 15 bp, Homo sapiens
tgtctaaacccagag

SEQ ID NO: 18555 - DNA, 15 bp, Homo sapiens
ctgtctaaacccaga

SEQ ID NO: 18556 - DNA, 15 bp, Homo sapiens
cctgtctaaacccag

SEQ ID NO: 18557 - DNA, 15 bp, Homo sapiens
gcctgtctaaaccca

SEQ ID NO: 18558 - DNA, 15 bp, Homo sapiens
tgcctgtctaaaccc

SEQ ID NO: 18559 - DNA, 15 bp, Homo sapiens
ctgcctgtctaaacc

SEQ ID NO: 18560 - DNA, 15 bp, Homo sapiens
gctgcctgtctaaac

SEQ ID NO: 18561 - DNA, 15 bp, Homo sapiens
tgctgcctgtctaaa

SEQ ID NO: 18562 - DNA, 15 bp, Homo sapiens
gtgctgcctgtctaa

SEQ ID NO: 18563 - DNA, 15 bp, Homo sapiens
tgtgctgcctgtcta

SEQ ID NO: 18564 - DNA, 15 bp, Homo sapiens
ctgtgctgcctgtct

SEQ ID NO: 18565 - DNA, 15 bp, Homo sapiens
gctgtgctgcctgtc

SEQ ID NO: 18566 - DNA, 15 bp, Homo sapiens
ggctgtgctgcctgt

SEQ ID NO: 18567 - DNA, 15 bp, Homo sapiens
gggctgtgctgcctg

SEQ ID NO: 18568 - DNA, 15 bp, Homo sapiens
ggggctgtgctgcct

SEQ ID NO: 18569 - DNA, 15 bp, Homo sapiens
aggggctgtgctgcc

SEQ ID NO: 18570 - DNA, 15 bp, Homo sapiens
caggggctgtgctgc

SEQ ID NO: 18571 - DNA, 15 bp, Homo sapiens
ccaggggctgtgctg

SEQ ID NO: 18572 - DNA, 15 bp, Homo sapiens
cccaggggctgtgct

SEQ ID NO: 18573 - DNA, 15 bp, Homo sapiens
gcccaggggctgtgc

SEQ ID NO: 18574 - DNA, 15 bp, Homo sapiens
agcccaggggctgtg

SEQ ID NO: 18575 - DNA, 15 bp, Homo sapiens
gagcccaggggctgt

SEQ ID NO: 18576 - DNA, 15 bp, Homo sapiens
agagcccaggggctg

SEQ ID NO: 18577 - DNA, 15 bp, Homo sapiens
cagagcccaggggct

SEQ ID NO: 18578 - DNA, 15 bp, Homo sapiens
gcagagcccaggggc

SEQ ID NO: 18579 - DNA, 15 bp, Homo sapiens
ggcagagcccagggg

SEQ ID NO: 18580 - DNA, 15 bp, Homo sapiens
aggcagagcccaggg

SEQ ID NO: 18581 - DNA, 15 bp, Homo sapiens
caggcagagcccagg

SEQ ID NO: 18582 - DNA, 15 bp, Homo sapiens
tcaggcagagcccag

SEQ ID NO: 18583 - DNA, 15 bp, Homo sapiens
gtcaggcagagccca

SEQ ID NO: 18584 - DNA, 15 bp, Homo sapiens
tgtcaggcagagccc

SEQ ID NO: 18585 - DNA, 15 bp, Homo sapiens
ctgtcaggcagagcc

SEQ ID NO: 18586 - DNA, 15 bp, Homo sapiens
cctgtcaggcagagc

SEQ ID NO: 18587 - DNA, 15 bp, Homo sapiens
ccctgtcaggcagag

SEQ ID NO: 18588 - DNA, 15 bp, Homo sapiens
gccctgtcaggcaga

SEQ ID NO: 18589 - DNA, 15 bp, Homo sapiens
tgccctgtcaggcag

SEQ ID NO: 18590 - DNA, 15 bp, Homo sapiens
ctgccctgtcaggca

SEQ ID NO: 18591 - DNA, 15 bp, Homo sapiens
cctgccctgtcaggc

SEQ ID NO: 18592 - DNA, 15 bp, Homo sapiens
tcctgccctgtcagg

SEQ ID NO: 18593 - DNA, 15 bp, Homo sapiens
ctcctgccctgtcag

SEQ ID NO: 18594 - DNA, 15 bp, Homo sapiens
tctcctgccctgtca

SEQ ID NO: 18595 - DNA, 15 bp, Homo sapiens
ctctcctgccctgtc

SEQ ID NO: 18596 - DNA, 15 bp, Homo sapiens
cctctcctgccctgt

SEQ ID NO: 18597 - DNA, 15 bp, Homo sapiens
ccctctcctgccctg

SEQ ID NO: 18598 - DNA, 15 bp, Homo sapiens
accctctcctgccct

SEQ ID NO: 18599 - DNA, 15 bp, Homo sapiens
gaccctctcctgccc

SEQ ID NO: 18600 - DNA, 15 bp, Homo sapiens
agaccctctcctgcc

SEQ ID NO: 18601 - DNA, 15 bp, Homo sapiens
cagaccctctcctgc

SEQ ID NO: 18602 - DNA, 15 bp, Homo sapiens
ccagaccctctcctg

SEQ ID NO: 18603 - DNA, 15 bp, Homo sapiens
gccagaccctctcct

SEQ ID NO: 18604 - DNA, 15 bp, Homo sapiens
ggccagaccctctcc

SEQ ID NO: 18605 - DNA, 15 bp, Homo sapiens
aggccagaccctctc

SEQ ID NO: 18606 - DNA, 15 bp, Homo sapiens
aaggccagaccctct

SEQ ID NO: 18607 - DNA, 15 bp, Homo sapiens
aaaggccagaccctc

SEQ ID NO: 18608 - DNA, 15 bp, Homo sapiens
taaaggccagaccct

SEQ ID NO: 18609 - DNA, 15 bp, Homo sapiens
ataaaggccagaccc

SEQ ID NO: 18610 - DNA, 15 bp, Homo sapiens
gataaaggccagacc

SEQ ID NO: 18611 - DNA, 15 bp, Homo sapiens
ggataaaggccagac

SEQ ID NO: 18612 - DNA, 15 bp, Homo sapiens
gggataaaggccaga

SEQ ID NO: 18613 - DNA, 15 bp, Homo sapiens
agggataaaggccag

SEQ ID NO: 18614 - DNA, 15 bp, Homo sapiens
gagggataaaggcca

SEQ ID NO: 18615 - DNA, 15 bp, Homo sapiens
ggagggataaaggcc

SEQ ID NO: 18616 - DNA, 15 bp, Homo sapiens
tggagggataaaggc

SEQ ID NO: 18617 - DNA, 15 bp, Homo sapiens
ctggagggataaagg

SEQ ID NO: 18618 - DNA, 15 bp, Homo sapiens
gctggagggataaag

SEQ ID NO: 18619 - DNA, 15 bp, Homo sapiens
ggctggagggataaa

SEQ ID NO: 18620 - DNA, 15 bp, Homo sapiens
gggctggagggataa

SEQ ID NO: 18621 - DNA, 15 bp, Homo sapiens
tgggctggagggata

SEQ ID NO: 18622 - DNA, 15 bp, Homo sapiens
gtgggctggagggat

SEQ ID NO: 18623 - DNA, 15 bp, Homo sapiens
ggtgggctggaggga

SEQ ID NO: 18624 - DNA, 15 bp, Homo sapiens
gggtgggctggaggg

SEQ ID NO: 18625 - DNA, 15 bp, Homo sapiens
ggggtgggctggagg

SEQ ID NO: 18626 - DNA, 15 bp, Homo sapiens
tggggtgggctggag

SEQ ID NO: 18627 - DNA, 15 bp, Homo sapiens
ctggggtgggctgga

SEQ ID NO: 18628 - DNA, 15 bp, Homo sapiens
cctggggtgggctgg

SEQ ID NO: 18629 - DNA, 15 bp, Homo sapiens
ccctggggtgggctg

SEQ ID NO: 18630 - DNA, 15 bp, Homo sapiens
cccctggggtgggct

SEQ ID NO: 18631 - DNA, 15 bp, Homo sapiens
gcccctggggtgggc

SEQ ID NO: 18632 - DNA, 15 bp, Homo sapiens
ggcccctggggtggg

SEQ ID NO: 18633 - DNA, 15 bp, Homo sapiens
tggcccctggggtgg

SEQ ID NO: 18634 - DNA, 15 bp, Homo sapiens
atggcccctggggtg

SEQ ID NO: 18635 - DNA, 15 bp, Homo sapiens
aatggcccctggggt

SEQ ID NO: 18636 - DNA, 15 bp, Homo sapiens
aaatggcccctgggg

SEQ ID NO: 18637 - DNA, 15 bp, Homo sapiens
gaaatggcccctggg

SEQ ID NO: 18638 - DNA, 15 bp, Homo sapiens
tgaaatggcccctgg

SEQ ID NO: 18639 - DNA, 15 bp, Homo sapiens
atgaaatggcccctg

SEQ ID NO: 18640 - DNA, 15 bp, Homo sapiens
tatgaaatggcccct

SEQ ID NO: 18641 - DNA, 15 bp, Homo sapiens
ttatgaaatggcccc

SEQ ID NO: 18642 - DNA, 15 bp, Homo sapiens
tttatgaaatggccc

SEQ ID NO: 18643 - DNA, 15 bp, Homo sapiens
ttttatgaaatggcc

SEQ ID NO: 18644 - DNA, 15 bp, Homo sapiens
gttttatgaaatggc

SEQ ID NO: 18645 - DNA, 15 bp, Homo sapiens
agttttatgaaatgg

SEQ ID NO: 18646 - DNA, 15 bp, Homo sapiens
tagttttatgaaatg

SEQ ID NO: 18647 - DNA, 15 bp, Homo sapiens
ttagttttatgaaat

SEQ ID NO: 18648 - DNA, 15 bp, Homo sapiens
tttagttttatgaaa

SEQ ID NO: 18649 - DNA, 15 bp, Homo sapiens
ctttagttttatgaa

SEQ ID NO: 18650 - DNA, 15 bp, Homo sapiens
gctttagttttatga

SEQ ID NO: 18651 - DNA, 15 bp, Homo sapiens
ggctttagttttatg

SEQ ID NO: 18652 - DNA, 15 bp, Homo sapiens
tggctttagttttat

SEQ ID NO: 18653 - DNA, 15 bp, Homo sapiens
ctggctttagtttta

SEQ ID NO: 18654 - DNA, 15 bp, Homo sapiens
tctggctttagtttt

SEQ ID NO: 18655 - DNA, 15 bp, Homo sapiens
ctctggctttagttt

SEQ ID NO: 18656 - DNA, 15 bp, Homo sapiens
tctctggctttagtt

SEQ ID NO: 18657 - DNA, 15 bp, Homo sapiens
gtctctggctttagt

SEQ ID NO: 18658 - DNA, 15 bp, Homo sapiens
ggtctctggctttag

SEQ ID NO: 18659 - DNA, 15 bp, Homo sapiens
aggtctctggcttta

SEQ ID NO: 18660 - DNA, 15 bp, Homo sapiens
caggtctctggcttt

SEQ ID NO: 18661 - DNA, 15 bp, Homo sapiens
gcaggtctctggctt

SEQ ID NO: 18662 - DNA, 15 bp, Homo sapiens
tgcaggtctctggct

SEQ ID NO: 18663 - DNA, 15 bp, Homo sapiens
ctgcaggtctctggc

SEQ ID NO: 18664 - DNA, 15 bp, Homo sapiens
gctgcaggtctctgg

SEQ ID NO: 18665 - DNA, 15 bp, Homo sapiens
ggctgcaggtctctg

SEQ ID NO: 18666 - DNA, 15 bp, Homo sapiens
gggctgcaggtctct

SEQ ID NO: 18667 - DNA, 15 bp, Homo sapiens
ggggctgcaggtctc

SEQ ID NO: 18668 - DNA, 15 bp, Homo sapiens
aggggctgcaggtct

SEQ ID NO: 18669 - DNA, 15 bp, Homo sapiens
gaggggctgcaggtc

SEQ ID NO: 18670 - DNA, 15 bp, Homo sapiens
ggaggggctgcaggt

SEQ ID NO: 18671 - DNA, 15 bp, Homo sapiens
gggaggggctgcagg

SEQ ID NO: 18672 - DNA, 15 bp, Homo sapiens
tgggaggggctgcag

SEQ ID NO: 18673 - DNA, 15 bp, Homo sapiens
ctgggaggggctgca

SEQ ID NO: 18674 - DNA, 15 bp, Homo sapiens
tctgggaggggctgc

SEQ ID NO: 18675 - DNA, 15 bp, Homo sapiens
ctctgggaggggctg

SEQ ID NO: 18676 - DNA, 15 bp, Homo sapiens
actctgggaggggct

SEQ ID NO: 18677 - DNA, 15 bp, Homo sapiens
aactctgggaggggc

SEQ ID NO: 18678 - DNA, 15 bp, Homo sapiens
taactctgggagggg

SEQ ID NO: 18679 - DNA, 15 bp, Homo sapiens
ctaactctgggaggg

SEQ ID NO: 18680 - DNA, 15 bp, Homo sapiens
tctaactctgggagg

SEQ ID NO: 18681 - DNA, 15 bp, Homo sapiens
gtctaactctgggag

SEQ ID NO: 18682 - DNA, 15 bp, Homo sapiens
agtctaactctggga

SEQ ID NO: 18683 - DNA, 15 bp, Homo sapiens
cagtctaactctggg

SEQ ID NO: 18684 - DNA, 15 bp, Homo sapiens
gcagtctaactctgg

SEQ ID NO: 18685 - DNA, 15 bp, Homo sapiens
tgcagtctaactctg

SEQ ID NO: 18686 - DNA, 15 bp, Homo sapiens
ctgcagtctaactct

SEQ ID NO: 18687 - DNA, 15 bp, Homo sapiens
actgcagtctaactc

SEQ ID NO: 18688 - DNA, 15 bp, Homo sapiens
tactgcagtctaact

SEQ ID NO: 18689 - DNA, 15 bp, Homo sapiens
gtactgcagtctaac

SEQ ID NO: 18690 - DNA, 15 bp, Homo sapiens
tgtactgcagtctaa

SEQ ID NO: 18691 - DNA, 15 bp, Homo sapiens
gtgtactgcagtcta

SEQ ID NO: 18692 - DNA, 15 bp, Homo sapiens
ggtgtactgcagtct

SEQ ID NO: 18693 - DNA, 15 bp, Homo sapiens
tggtgtactgcagtc

SEQ ID NO: 18694 - DNA, 15 bp, Homo sapiens
atggtgtactgcagt

SEQ ID NO: 18695 - DNA, 15 bp, Homo sapiens
catggtgtactgcag

SEQ ID NO: 18696 - DNA, 15 bp, Homo sapiens
gcatggtgtactgca

SEQ ID NO: 18697 - DNA, 15 bp, Homo sapiens
ggcatggtgtactgc

SEQ ID NO: 18698 - DNA, 15 bp, Homo sapiens
aggcatggtgtactg

SEQ ID NO: 18699 - DNA, 15 bp, Homo sapiens
gaggcatggtgtact

SEQ ID NO: 18700 - DNA, 15 bp, Homo sapiens
agaggcatggtgtac

SEQ ID NO: 18701 - DNA, 15 bp, Homo sapiens
cagaggcatggtgta

SEQ ID NO: 18702 - DNA, 15 bp, Homo sapiens
ccagaggcatggtgt

SEQ ID NO: 18703 - DNA, 15 bp, Homo sapiens
gccagaggcatggtg

SEQ ID NO: 18704 - DNA, 15 bp, Homo sapiens
tgccagaggcatggt

SEQ ID NO: 18705 - DNA, 15 bp, Homo sapiens
ttgccagaggcatgg

SEQ ID NO: 18706 - DNA, 15 bp, Homo sapiens
cttgccagaggcatg

SEQ ID NO: 18707 - DNA, 15 bp, Homo sapiens
tcttgccagaggcat

SEQ ID NO: 18708 - DNA, 15 bp, Homo sapiens
atcttgccagaggca

SEQ ID NO: 18709 - DNA, 15 bp, Homo sapiens
gatcttgccagaggc

SEQ ID NO: 18710 - DNA, 15 bp, Homo sapiens
ggatcttgccagagg

SEQ ID NO: 18711 - DNA, 15 bp, Homo sapiens
aggatcttgccagag

SEQ ID NO: 18712 - DNA, 15 bp, Homo sapiens
gaggatcttgccaga

SEQ ID NO: 18713 - DNA, 15 bp, Homo sapiens
ggaggatcttgccag

SEQ ID NO: 18714 - DNA, 15 bp, Homo sapiens
aggaggatcttgcca

SEQ ID NO: 18715 - DNA, 15 bp, Homo sapiens
gaggaggatcttgcc

SEQ ID NO: 18716 - DNA, 15 bp, Homo sapiens
ggaggaggatcttgc

SEQ ID NO: 18717 - DNA, 15 bp, Homo sapiens
gggaggaggatcttg

SEQ ID NO: 18718 - DNA, 15 bp, Homo sapiens
tgggaggaggatctt

SEQ ID NO: 18719 - DNA, 15 bp, Homo sapiens
gtgggaggaggatct

SEQ ID NO: 18720 - DNA, 15 bp, Homo sapiens
tgtgggaggaggatc

SEQ ID NO: 18721 - DNA, 15 bp, Homo sapiens
ctgtgggaggaggat

SEQ ID NO: 18722 - DNA, 15 bp, Homo sapiens
actgtgggaggagga

SEQ ID NO: 18723 - DNA, 15 bp, Homo sapiens
cactgtgggaggagg

SEQ ID NO: 18724 - DNA, 15 bp, Homo sapiens
ccactgtgggaggag

SEQ ID NO: 18725 - DNA, 15 bp, Homo sapiens
tccactgtgggagga

SEQ ID NO: 18726 - DNA, 15 bp, Homo sapiens
ttccactgtgggagg

SEQ ID NO: 18727 - DNA, 15 bp, Homo sapiens
tttccactgtgggag

SEQ ID NO: 18728 - DNA, 15 bp, Homo sapiens
ctttccactgtggga

SEQ ID NO: 18729 - DNA, 15 bp, Homo sapiens
actttccactgtggg

SEQ ID NO: 18730 - DNA, 15 bp, Homo sapiens
gactttccactgtgg

SEQ ID NO: 18731 - DNA, 15 bp, Homo sapiens
agactttccactgtg

SEQ ID NO: 18732 - DNA, 15 bp, Homo sapiens
tagactttccactgt

SEQ ID NO: 18733 - DNA, 15 bp, Homo sapiens
ttagactttccactg

SEQ ID NO: 18734 - DNA, 15 bp, Homo sapiens
cttagactttccact

SEQ ID NO: 18735 - DNA, 15 bp, Homo sapiens
gcttagactttccac

SEQ ID NO: 18736 - DNA, 15 bp, Homo sapiens
ggcttagactttcca

SEQ ID NO: 18737 - DNA, 15 bp, Homo sapiens
tggcttagactttcc

SEQ ID NO: 18738 - DNA, 15 bp, Homo sapiens
ttggcttagactttc

SEQ ID NO: 18739 - DNA, 15 bp, Homo sapiens
tttggcttagacttt

SEQ ID NO: 18740 - DNA, 15 bp, Homo sapiens
atttggcttagactt

SEQ ID NO: 18741 - DNA, 15 bp, Homo sapiens
gatttggcttagact

SEQ ID NO: 18742 - DNA, 15 bp, Homo sapiens
tgatttggcttagac

SEQ ID NO: 18743 - DNA, 15 bp, Homo sapiens
ctgatttggcttaga

SEQ ID NO: 18744 - DNA, 15 bp, Homo sapiens
cctgatttggcttag

SEQ ID NO: 18745 - DNA, 15 bp, Homo sapiens
tcctgatttggctta

SEQ ID NO: 18746 - DNA, 15 bp, Homo sapiens
ctcctgatttggctt

SEQ ID NO: 18747 - DNA, 15 bp, Homo sapiens
cctcctgatttggct

SEQ ID NO: 18748 - DNA, 15 bp, Homo sapiens
gcctcctgatttggc

SEQ ID NO: 18749 - DNA, 15 bp, Homo sapiens
agcctcctgatttgg

SEQ ID NO: 18750 - DNA, 15 bp, Homo sapiens
cagcctcctgatttg

SEQ ID NO: 18751 - DNA, 15 bp, Homo sapiens
ccagcctcctgattt

SEQ ID NO: 18752 - DNA, 15 bp, Homo sapiens
cccagcctcctgatt

SEQ ID NO: 18753 - DNA, 15 bp, Homo sapiens
ccccagcctcctgat

SEQ ID NO: 18754 - DNA, 15 bp, Homo sapiens
tccccagcctcctga

SEQ ID NO: 18755 - DNA, 15 bp, Homo sapiens
gtccccagcctcctg

SEQ ID NO: 18756 - DNA, 15 bp, Homo sapiens
agtccccagcctcct

SEQ ID NO: 18757 - DNA, 15 bp, Homo sapiens
cagtccccagcctcc

SEQ ID NO: 18758 - DNA, 15 bp, Homo sapiens
ccagtccccagcctc

SEQ ID NO: 18759 - DNA, 15 bp, Homo sapiens
accagtccccagcct

SEQ ID NO: 18760 - DNA, 15 bp, Homo sapiens
aaccagtccccagcc

SEQ ID NO: 18761 - DNA, 15 bp, Homo sapiens
gaaccagtccccagc

SEQ ID NO: 18762 - DNA, 15 bp, Homo sapiens
ggaaccagtccccag

SEQ ID NO: 18763 - DNA, 15 bp, Homo sapiens
tggaaccagtcccca

SEQ ID NO: 18764 - DNA, 15 bp, Homo sapiens
gtggaaccagtcccc

SEQ ID NO: 18765 - DNA, 15 bp, Homo sapiens
ggtggaaccagtccc

SEQ ID NO: 18766 - DNA, 15 bp, Homo sapiens
aggtggaaccagtcc

SEQ ID NO: 18767 - DNA, 15 bp, Homo sapiens
gaggtggaaccagtc

SEQ ID NO: 18768 - DNA, 15 bp, Homo sapiens
tgaggtggaaccagt

SEQ ID NO: 18769 - DNA, 15 bp, Homo sapiens
ctgaggtggaaccag

SEQ ID NO: 18770 - DNA, 15 bp, Homo sapiens
actgaggtggaacca

SEQ ID NO: 18771 - DNA, 15 bp, Homo sapiens
aactgaggtggaacc

SEQ ID NO: 18772 - DNA, 15 bp, Homo sapiens
caactgaggtggaac

SEQ ID NO: 18773 - DNA, 15 bp, Homo sapiens
gcaactgaggtggaa

SEQ ID NO: 18774 - DNA, 15 bp, Homo sapiens
tgcaactgaggtgga

SEQ ID NO: 18775 - DNA, 15 bp, Homo sapiens
ctgcaactgaggtgg

SEQ ID NO: 18776 - DNA, 15 bp, Homo sapiens
cctgcaactgaggtg

SEQ ID NO: 18777 - DNA, 15 bp, Homo sapiens
gcctgcaactgaggt

SEQ ID NO: 18778 - DNA, 15 bp, Homo sapiens
tgcctgcaactgagg

SEQ ID NO: 18779 - DNA, 15 bp, Homo sapiens
ttgcctgcaactgag

SEQ ID NO: 18780 - DNA, 15 bp, Homo sapiens
cttgcctgcaactga

SEQ ID NO: 18781 - DNA, 15 bp, Homo sapiens
ccttgcctgcaactg

SEQ ID NO: 18782 - DNA, 15 bp, Homo sapiens
gccttgcctgcaact

SEQ ID NO: 18783 - DNA, 15 bp, Homo sapiens
ggccttgcctgcaac

SEQ ID NO: 18784 - DNA, 15 bp, Homo sapiens
tggccttgcctgcaa

SEQ ID NO: 18785 - DNA, 15 bp, Homo sapiens
ctggccttgcctgca

SEQ ID NO: 18786 - DNA, 15 bp, Homo sapiens
cctggccttgcctgc

SEQ ID NO: 18787 - DNA, 15 bp, Homo sapiens
tcctggccttgcctg

SEQ ID NO: 18788 - DNA, 15 bp, Homo sapiens
ctcctggccttgcct

SEQ ID NO: 18789 - DNA, 15 bp, Homo sapiens
cctcctggccttgcc

SEQ ID NO: 18790 - DNA, 15 bp, Homo sapiens
gcctcctggccttgc

SEQ ID NO: 18791 - DNA, 15 bp, Homo sapiens
tgcctcctggccttg

SEQ ID NO: 18792 - DNA, 15 bp, Homo sapiens
gtgcctcctggcctt

SEQ ID NO: 18793 - DNA, 15 bp, Homo sapiens
cgtgcctcctggcct

SEQ ID NO: 18794 - DNA, 15 bp, Homo sapiens
ccgtgcctcctggcc

SEQ ID NO: 18795 - DNA, 15 bp, Homo sapiens
tccgtgcctcctggc

SEQ ID NO: 18796 - DNA, 15 bp, Homo sapiens
atccgtgcctcctgg

SEQ ID NO: 18797 - DNA, 15 bp, Homo sapiens
tatccgtgcctcctg

SEQ ID NO: 18798 - DNA, 15 bp, Homo sapiens
ctatccgtgcctcct

SEQ ID NO: 18799 - DNA, 15 bp, Homo sapiens
tctatccgtgcctcc

SEQ ID NO: 18800 - DNA, 15 bp, Homo sapiens
ttctatccgtgcctc

SEQ ID NO: 18801 - DNA, 15 bp, Homo sapiens
cttctatccgtgcct

SEQ ID NO: 18802 - DNA, 15 bp, Homo sapiens
tcttctatccgtgcc

SEQ ID NO: 18803 - DNA, 15 bp, Homo sapiens
ttcttctatccgtgc

SEQ ID NO: 18804 - DNA, 15 bp, Homo sapiens
tttcttctatccgtg

SEQ ID NO: 18805 - DNA, 15 bp, Homo sapiens
gtttcttctatccgt

SEQ ID NO: 18806 - DNA, 15 bp, Homo sapiens
tgtttcttctatccg

SEQ ID NO: 18807 - DNA, 15 bp, Homo sapiens
ctgtttcttctatcc

SEQ ID NO: 18808 - DNA, 15 bp, Homo sapiens
actgtttcttctatc

SEQ ID NO: 18809 - DNA, 15 bp, Homo sapiens
cactgtttcttctat

SEQ ID NO: 18810 - DNA, 15 bp, Homo sapiens
ccactgtttcttcta

SEQ ID NO: 18811 - DNA, 15 bp, Homo sapiens
tccactgtttcttct

SEQ ID NO: 18812 - DNA, 15 bp, Homo sapiens
gtccactgtttcttc

SEQ ID NO: 18813 - DNA, 15 bp, Homo sapiens
agtccactgtttctt

SEQ ID NO: 18814 - DNA, 15 bp, Homo sapiens
aagtccactgtttct

SEQ ID NO: 18815 - DNA, 15 bp, Homo sapiens
aaagtccactgtttc

SEQ ID NO: 18816 - DNA, 15 bp, Homo sapiens
aaaagtccactgttt

SEQ ID NO: 18817 - DNA, 15 bp, Homo sapiens
aaaaagtccactgtt

SEQ ID NO: 18818 - DNA, 15 bp, Homo sapiens
gaaaaagtccactgt

SEQ ID NO: 18819 - DNA, 15 bp, Homo sapiens
ggaaaaagtccactg

SEQ ID NO: 18820 - DNA, 15 bp, Homo sapiens
gggaaaaagtccact

SEQ ID NO: 18821 - DNA, 15 bp, Homo sapiens
ggggaaaaagtccac

SEQ ID NO: 18822 - DNA, 15 bp, Homo sapiens
gggggaaaaagtcca

SEQ ID NO: 18823 - DNA, 15 bp, Homo sapiens
agggggaaaaagtcc

SEQ ID NO: 18824 - DNA, 15 bp, Homo sapiens
tagggggaaaaagtc

SEQ ID NO: 18825 - DNA, 15 bp, Homo sapiens
ctagggggaaaaagt

SEQ ID NO: 18826 - DNA, 15 bp, Homo sapiens
cctagggggaaaaag

SEQ ID NO: 18827 - DNA, 15 bp, Homo sapiens
ccctagggggaaaaa

SEQ ID NO: 18828 - DNA, 15 bp, Homo sapiens
tccctagggggaaaa

SEQ ID NO: 18829 - DNA, 15 bp, Homo sapiens
ttccctagggggaaa

SEQ ID NO: 18830 - DNA, 15 bp, Homo sapiens
tttccctagggggaa

SEQ ID NO: 18831 - DNA, 15 bp, Homo sapiens
ctttccctaggggga

SEQ ID NO: 18832 - DNA, 15 bp, Homo sapiens
tctttccctaggggg

SEQ ID NO: 18833 - DNA, 15 bp, Homo sapiens
ttctttccctagggg

SEQ ID NO: 18834 - DNA, 15 bp, Homo sapiens
tttctttccctaggg

SEQ ID NO: 18835 - DNA, 15 bp, Homo sapiens
atttctttccctagg

SEQ ID NO: 18836 - DNA, 15 bp, Homo sapiens
catttctttccctag

SEQ ID NO: 18837 - DNA, 15 bp, Homo sapiens
gcatttctttcccta

SEQ ID NO: 18838 - DNA, 15 bp, Homo sapiens
agcatttctttccct

SEQ ID NO: 18839 - DNA, 15 bp, Homo sapiens
aagcatttctttccc

SEQ ID NO: 18840 - DNA, 15 bp, Homo sapiens
taagcatttctttcc

SEQ ID NO: 18841 - DNA, 15 bp, Homo sapiens
ctaagcatttctttc

SEQ ID NO: 18842 - DNA, 15 bp, Homo sapiens
tctaagcatttcttt

SEQ ID NO: 18843 - DNA, 15 bp, Homo sapiens
ctctaagcatttctt

SEQ ID NO: 18844 - DNA, 15 bp, Homo sapiens
gctctaagcatttct

SEQ ID NO: 18845 - DNA, 15 bp, Homo sapiens
agctctaagcatttc

SEQ ID NO: 18846 - DNA, 15 bp, Homo sapiens
tagctctaagcattt

SEQ ID NO: 18847 - DNA, 15 bp, Homo sapiens
gtagctctaagcatt

SEQ ID NO: 18848 - DNA, 15 bp, Homo sapiens
tgtagctctaagcat

SEQ ID NO: 18849 - DNA, 15 bp, Homo sapiens
ctgtagctctaagca

SEQ ID NO: 18850 - DNA, 15 bp, Homo sapiens
actgtagctctaagc

SEQ ID NO: 18851 - DNA, 15 bp, Homo sapiens
tactgtagctctaag

SEQ ID NO: 18852 - DNA, 15 bp, Homo sapiens
atactgtagctctaa

SEQ ID NO: 18853 - DNA, 15 bp, Homo sapiens
aatactgtagctcta

SEQ ID NO: 18854 - DNA, 15 bp, Homo sapiens
taatactgtagctct

SEQ ID NO: 18855 - DNA, 15 bp, Homo sapiens
ttaatactgtagctc

SEQ ID NO: 18856 - DNA, 15 bp, Homo sapiens
cttaatactgtagct

SEQ ID NO: 18857 - DNA, 15 bp, Homo sapiens
tcttaatactgtagc

SEQ ID NO: 18858 - DNA, 15 bp, Homo sapiens
atcttaatactgtag

SEQ ID NO: 18859 - DNA, 15 bp, Homo sapiens
catcttaatactgta

SEQ ID NO: 18860 - DNA, 15 bp, Homo sapiens
tcatcttaatactgt

SEQ ID NO: 18861 - DNA, 15 bp, Homo sapiens
gtcatcttaatactg

SEQ ID NO: 18862 - DNA, 15 bp, Homo sapiens
tgtcatcttaatact

SEQ ID NO: 18863 - DNA, 15 bp, Homo sapiens
ttgtcatcttaatac

SEQ ID NO: 18864 - DNA, 15 bp, Homo sapiens
tttgtcatcttaata

SEQ ID NO: 18865 - DNA, 15 bp, Homo sapiens
atttgtcatcttaat

SEQ ID NO: 18866 - DNA, 15 bp, Homo sapiens
aatttgtcatcttaa

SEQ ID NO: 18867 - DNA, 15 bp, Homo sapiens
taatttgtcatctta

SEQ ID NO: 18868 - DNA, 15 bp, Homo sapiens
ttaatttgtcatctt

SEQ ID NO: 18869 - DNA, 15 bp, Homo sapiens
cttaatttgtcatct

SEQ ID NO: 18870 - DNA, 15 bp, Homo sapiens
gcttaatttgtcatc

SEQ ID NO: 18871 - DNA, 15 bp, Homo sapiens
agcttaatttgtcat

SEQ ID NO: 18872 - DNA, 15 bp, Homo sapiens
cagcttaatttgtca

SEQ ID NO: 18873 - DNA, 15 bp, Homo sapiens
acagcttaatttgtc

SEQ ID NO: 18874 - DNA, 15 bp, Homo sapiens
cacagcttaatttgt

SEQ ID NO: 18875 - DNA, 15 bp, Homo sapiens
gcacagcttaatttg

SEQ ID NO: 18876 - DNA, 15 bp, Homo sapiens
ggcacagcttaattt

SEQ ID NO: 18877 - DNA, 15 bp, Homo sapiens
tggcacagcttaatt

SEQ ID NO: 18878 - DNA, 15 bp, Homo sapiens
atggcacagcttaat

SEQ ID NO: 18879 - DNA, 15 bp, Homo sapiens
tatggcacagcttaa

SEQ ID NO: 18880 - DNA, 15 bp, Homo sapiens
atatggcacagctta

SEQ ID NO: 18881 - DNA, 15 bp, Homo sapiens
tatatggcacagctt

SEQ ID NO: 18882 - DNA, 15 bp, Homo sapiens
ctatatggcacagct

SEQ ID NO: 18883 - DNA, 15 bp, Homo sapiens
cctatatggcacagc

SEQ ID NO: 18884 - DNA, 15 bp, Homo sapiens
ccctatatggcacag

SEQ ID NO: 18885 - DNA, 15 bp, Homo sapiens
accctatatggcaca

SEQ ID NO: 18886 - DNA, 15 bp, Homo sapiens
caccctatatggcac

SEQ ID NO: 18887 - DNA, 15 bp, Homo sapiens
tcaccctatatggca

SEQ ID NO: 18888 - DNA, 15 bp, Homo sapiens
ttcaccctatatggc

SEQ ID NO: 18889 - DNA, 15 bp, Homo sapiens
tttcaccctatatgg

SEQ ID NO: 18890 - DNA, 15 bp, Homo sapiens
atttcaccctatatg

SEQ ID NO: 18891 - DNA, 15 bp, Homo sapiens
catttcaccctatat

SEQ ID NO: 18892 - DNA, 15 bp, Homo sapiens
tcatttcaccctata

SEQ ID NO: 18893 - DNA, 15 bp, Homo sapiens
ttcatttcaccctat

SEQ ID NO: 18894 - DNA, 15 bp, Homo sapiens
cttcatttcacccta

SEQ ID NO: 18895 - DNA, 15 bp, Homo sapiens
gcttcatttcaccct

SEQ ID NO: 18896 - DNA, 15 bp, Homo sapiens
tgcttcatttcaccc

SEQ ID NO: 18897 - DNA, 15 bp, Homo sapiens
ctgcttcatttcacc

SEQ ID NO: 18898 - DNA, 15 bp, Homo sapiens
cctgcttcatttcac

SEQ ID NO: 18899 - DNA, 15 bp, Homo sapiens
ccctgcttcatttca

SEQ ID NO: 18900 - DNA, 15 bp, Homo sapiens
tccctgcttcatttc

SEQ ID NO: 18901 - DNA, 15 bp, Homo sapiens
atccctgcttcattt

SEQ ID NO: 18902 - DNA, 15 bp, Homo sapiens
tatccctgcttcatt

SEQ ID NO: 18903 - DNA, 15 bp, Homo sapiens
ctatccctgcttcat

SEQ ID NO: 18904 - DNA, 15 bp, Homo sapiens
tctatccctgcttca

SEQ ID NO: 18905 - DNA, 15 bp, Homo sapiens
atctatccctgcttc

SEQ ID NO: 18906 - DNA, 15 bp, Homo sapiens
catctatccctgctt

SEQ ID NO: 18907 - DNA, 15 bp, Homo sapiens
ccatctatccctgct

SEQ ID NO: 18908 - DNA, 15 bp, Homo sapiens
cccatctatccctgc

SEQ ID NO: 18909 - DNA, 15 bp, Homo sapiens
tcccatctatccctg

SEQ ID NO: 18910 - DNA, 15 bp, Homo sapiens
ctcccatctatccct

SEQ ID NO: 18911 - DNA, 15 bp, Homo sapiens
cctcccatctatccc

SEQ ID NO: 18912 - DNA, 15 bp, Homo sapiens
acctcccatctatcc

SEQ ID NO: 18913 - DNA, 15 bp, Homo sapiens
gacctcccatctatc

SEQ ID NO: 18914 - DNA, 15 bp, Homo sapiens
tgacctcccatctat

SEQ ID NO: 18915 - DNA, 15 bp, Homo sapiens
ctgacctcccatcta

SEQ ID NO: 18916 - DNA, 15 bp, Homo sapiens
cctgacctcccatct

SEQ ID NO: 18917 - DNA, 15 bp, Homo sapiens
ccctgacctcccatc

SEQ ID NO: 18918 - DNA, 15 bp, Homo sapiens
tccctgacctcccat

SEQ ID NO: 18919 - DNA, 15 bp, Homo sapiens
ctccctgacctccca

SEQ ID NO: 18920 - DNA, 15 bp, Homo sapiens
tctccctgacctccc

SEQ ID NO: 18921 - DNA, 15 bp, Homo sapiens
ttctccctgacctcc

SEQ ID NO: 18922 - DNA, 15 bp, Homo sapiens
cttctccctgacctc

SEQ ID NO: 18923 - DNA, 15 bp, Homo sapiens
acttctccctgacct

SEQ ID NO: 18924 - DNA, 15 bp, Homo sapiens
cacttctccctgacc

SEQ ID NO: 18925 - DNA, 15 bp, Homo sapiens
tcacttctccctgac

SEQ ID NO: 18926 - DNA, 15 bp, Homo sapiens
ctcacttctccctga

SEQ ID NO: 18927 - DNA, 15 bp, Homo sapiens
tctcacttctccctg

SEQ ID NO: 18928 - DNA, 15 bp, Homo sapiens
ctctcacttctccct

SEQ ID NO: 18929 - DNA, 15 bp, Homo sapiens
gctctcacttctccc

SEQ ID NO: 18930 - DNA, 15 bp, Homo sapiens
tgctctcacttctcc

SEQ ID NO: 18931 - DNA, 15 bp, Homo sapiens
gtgctctcacttctc

SEQ ID NO: 18932 - DNA, 15 bp, Homo sapiens
agtgctctcacttct

SEQ ID NO: 18933 - DNA, 15 bp, Homo sapiens
gagtgctctcacttc

SEQ ID NO: 18934 - DNA, 15 bp, Homo sapiens
cgagtgctctcactt

SEQ ID NO: 18935 - DNA, 15 bp, Homo sapiens
ccgagtgctctcact

SEQ ID NO: 18936 - DNA, 15 bp, Homo sapiens
accgagtgctctcac

SEQ ID NO: 18937 - DNA, 15 bp, Homo sapiens
caccgagtgctctca

SEQ ID NO: 18938 - DNA, 15 bp, Homo sapiens
tcaccgagtgctctc

SEQ ID NO: 18939 - DNA, 15 bp, Homo sapiens
ctcaccgagtgctct

SEQ ID NO: 18940 - DNA, 15 bp, Homo sapiens
cctcaccgagtgctc

SEQ ID NO: 18941 - DNA, 15 bp, Homo sapiens
ccctcaccgagtgct

SEQ ID NO: 18942 - DNA, 15 bp, Homo sapiens
accctcaccgagtgc

SEQ ID NO: 18943 - DNA, 15 bp, Homo sapiens
gaccctcaccgagtg

SEQ ID NO: 18944 - DNA, 15 bp, Homo sapiens
agaccctcaccgagt

SEQ ID NO: 18945 - DNA, 15 bp, Homo sapiens
cagaccctcaccgag

SEQ ID NO: 18946 - DNA, 15 bp, Homo sapiens
gcagaccctcaccga

SEQ ID NO: 18947 - DNA, 15 bp, Homo sapiens
tgcagaccctcaccg

SEQ ID NO: 18948 - DNA, 15 bp, Homo sapiens
gtgcagaccctcacc

SEQ ID NO: 18949 - DNA, 15 bp, Homo sapiens
agtgcagaccctcac

SEQ ID NO: 18950 - DNA, 15 bp, Homo sapiens
cagtgcagaccctca

SEQ ID NO: 18951 - DNA, 15 bp, Homo sapiens
ccagtgcagaccctc

SEQ ID NO: 18952 - DNA, 15 bp, Homo sapiens
tccagtgcagaccct

SEQ ID NO: 18953 - DNA, 15 bp, Homo sapiens
ctccagtgcagaccc

SEQ ID NO: 18954 - DNA, 15 bp, Homo sapiens
cctccagtgcagacc

SEQ ID NO: 18955 - DNA, 15 bp, Homo sapiens
ccctccagtgcagac

SEQ ID NO: 18956 - DNA, 15 bp, Homo sapiens
cccctccagtgcaga

SEQ ID NO: 18957 - DNA, 15 bp, Homo sapiens
ccccctccagtgcag

SEQ ID NO: 18958 - DNA, 15 bp, Homo sapiens
gccccctccagtgca

SEQ ID NO: 18959 - DNA, 15 bp, Homo sapiens
tgccccctccagtgc

SEQ ID NO: 18960 - DNA, 15 bp, Homo sapiens
atgccccctccagtg

SEQ ID NO: 18961 - DNA, 15 bp, Homo sapiens
catgccccctccagt

SEQ ID NO: 18962 - DNA, 15 bp, Homo sapiens
ccatgccccctccag

SEQ ID NO: 18963 - DNA, 15 bp, Homo sapiens
cccatgccccctcca

SEQ ID NO: 18964 - DNA, 15 bp, Homo sapiens
tcccatgccccctcc

SEQ ID NO: 18965 - DNA, 15 bp, Homo sapiens
ctcccatgccccctc

SEQ ID NO: 18966 - DNA, 15 bp, Homo sapiens
cctcccatgccccct

SEQ ID NO: 18967 - DNA, 15 bp, Homo sapiens
tcctcccatgccccc

SEQ ID NO: 18968 - DNA, 15 bp, Homo sapiens
ttcctcccatgcccc

SEQ ID NO: 18969 - DNA, 15 bp, Homo sapiens
cttcctcccatgccc

SEQ ID NO: 18970 - DNA, 15 bp, Homo sapiens
tcttcctcccatgcc

SEQ ID NO: 18971 - DNA, 15 bp, Homo sapiens
ttcttcctcccatgc

SEQ ID NO: 18972 - DNA, 15 bp, Homo sapiens
cttcttcctcccatg

SEQ ID NO: 18973 - DNA, 15 bp, Homo sapiens
ccttcttcctcccat

SEQ ID NO: 18974 - DNA, 15 bp, Homo sapiens
tccttcttcctccca

SEQ ID NO: 18975 - DNA, 15 bp, Homo sapiens
ctccttcttcctccc

SEQ ID NO: 18976 - DNA, 15 bp, Homo sapiens
cctccttcttcctcc

SEQ ID NO: 18977 - DNA, 15 bp, Homo sapiens
ccctccttcttcctc

SEQ ID NO: 18978 - DNA, 15 bp, Homo sapiens
cccctccttcttcct

SEQ ID NO: 18979 - DNA, 15 bp, Homo sapiens
tcccctccttcttcc

SEQ ID NO: 18980 - DNA, 15 bp, Homo sapiens
ctcccctccttcttc

SEQ ID NO: 18981 - DNA, 15 bp, Homo sapiens
actcccctccttctt

SEQ ID NO: 18982 - DNA, 15 bp, Homo sapiens
cactcccctccttct

SEQ ID NO: 18983 - DNA, 15 bp, Homo sapiens
ccactcccctccttc

SEQ ID NO: 18984 - DNA, 15 bp, Homo sapiens
cccactcccctcctt

SEQ ID NO: 18985 - DNA, 15 bp, Homo sapiens
ccccactcccctcct

SEQ ID NO: 18986 - DNA, 15 bp, Homo sapiens
accccactcccctcc

SEQ ID NO: 18987 - DNA, 15 bp, Homo sapiens
aaccccactcccctc

SEQ ID NO: 18988 - DNA, 15 bp, Homo sapiens
aaaccccactcccct

SEQ ID NO: 18989 - DNA, 15 bp, Homo sapiens
caaaccccactcccc

SEQ ID NO: 18990 - DNA, 15 bp, Homo sapiens
tcaaaccccactccc

SEQ ID NO: 18991 - DNA, 15 bp, Homo sapiens
ctcaaaccccactcc

SEQ ID NO: 18992 - DNA, 15 bp, Homo sapiens
cctcaaaccccactc

SEQ ID NO: 18993 - DNA, 15 bp, Homo sapiens
ccctcaaaccccact

SEQ ID NO: 18994 - DNA, 15 bp, Homo sapiens
tccctcaaaccccac

SEQ ID NO: 18995 - DNA, 15 bp, Homo sapiens
atccctcaaacccca

SEQ ID NO: 18996 - DNA, 15 bp, Homo sapiens
catccctcaaacccc

SEQ ID NO: 18997 - DNA, 15 bp, Homo sapiens
ccatccctcaaaccc

SEQ ID NO: 18998 - DNA, 15 bp, Homo sapiens
accatccctcaaacc

SEQ ID NO: 18999 - DNA, 15 bp, Homo sapiens
caccatccctcaaac

SEQ ID NO: 19000 - DNA, 15 bp, Homo sapiens
tcaccatccctcaaa

SEQ ID NO: 19001 - DNA, 15 bp, Homo sapiens
atcaccatccctcaa
